United States Patent Application Publication US 2015/0232836 A1 - sequence listing, part 34

SEQ ID NO: 1309943 - DNA, 15 bp, Homo sapiens
tctaattacatttca

SEQ ID NO: 1309944 - DNA, 15 bp, Homo sapiens
atctaattacatttc

SEQ ID NO: 1309945 - DNA, 15 bp, Homo sapiens
catctaattacattt

SEQ ID NO: 1309946 - DNA, 15 bp, Homo sapiens
tcatctaattacatt

SEQ ID NO: 1309947 - DNA, 15 bp, Homo sapiens
atcatctaattacat

SEQ ID NO: 1309948 - DNA, 15 bp, Homo sapiens
aatcatctaattaca

SEQ ID NO: 1309949 - DNA, 15 bp, Homo sapiens
caatcatctaattac

SEQ ID NO: 1309950 - DNA, 15 bp, Homo sapiens
gcaatcatctaatta

SEQ ID NO: 1309951 - DNA, 15 bp, Homo sapiens
agcaatcatctaatt

SEQ ID NO: 1309952 - DNA, 15 bp, Homo sapiens
aagcaatcatctaat

SEQ ID NO: 1309953 - DNA, 15 bp, Homo sapiens
taagcaatcatctaa

SEQ ID NO: 1309954 - DNA, 15 bp, Homo sapiens
ttaagcaatcatcta

SEQ ID NO: 1309955 - DNA, 15 bp, Homo sapiens
tttaagcaatcatct

SEQ ID NO: 1309956 - DNA, 15 bp, Homo sapiens
ctttaagcaatcatc

SEQ ID NO: 1309957 - DNA, 15 bp, Homo sapiens
tctttaagcaatcat

SEQ ID NO: 1309958 - DNA, 15 bp, Homo sapiens
atctttaagcaatca

SEQ ID NO: 1309959 - DNA, 15 bp, Homo sapiens
gatctttaagcaatc

SEQ ID NO: 1309960 - DNA, 15 bp, Homo sapiens
agatctttaagcaat

SEQ ID NO: 1309961 - DNA, 15 bp, Homo sapiens
tagatctttaagcaa

SEQ ID NO: 1309962 - DNA, 15 bp, Homo sapiens
ctagatctttaagca

SEQ ID NO: 1309963 - DNA, 15 bp, Homo sapiens
cctagatctttaagc

SEQ ID NO: 1309964 - DNA, 15 bp, Homo sapiens
tcctagatctttaag

SEQ ID NO: 1309965 - DNA, 15 bp, Homo sapiens
ttcctagatctttaa

SEQ ID NO: 1309966 - DNA, 15 bp, Homo sapiens
attcctagatcttta

SEQ ID NO: 1309967 - DNA, 15 bp, Homo sapiens
tattcctagatcttt

SEQ ID NO: 1309968 - DNA, 15 bp, Homo sapiens
atattcctagatctt

SEQ ID NO: 1309969 - DNA, 15 bp, Homo sapiens
tatattcctagatct

SEQ ID NO: 1309970 - DNA, 15 bp, Homo sapiens
ttatattcctagatc

SEQ ID NO: 1309971 - DNA, 15 bp, Homo sapiens
cttatattcctagat

SEQ ID NO: 1309972 - DNA, 15 bp, Homo sapiens
gcttatattcctaga

SEQ ID NO: 1309973 - DNA, 15 bp, Homo sapiens
agcttatattcctag

SEQ ID NO: 1309974 - DNA, 15 bp, Homo sapiens
gagcttatattccta

SEQ ID NO: 1309975 - DNA, 15 bp, Homo sapiens
tgagcttatattcct

SEQ ID NO: 1309976 - DNA, 15 bp, Homo sapiens
ttgagcttatattcc

SEQ ID NO: 1309977 - DNA, 15 bp, Homo sapiens
attgagcttatattc

SEQ ID NO: 1309978 - DNA, 15 bp, Homo sapiens
cattgagcttatatt

SEQ ID NO: 1309979 - DNA, 15 bp, Homo sapiens
acattgagcttatat

SEQ ID NO: 1309980 - DNA, 15 bp, Homo sapiens
tacattgagcttata

SEQ ID NO: 1309981 - DNA, 15 bp, Homo sapiens
ttacattgagcttat

SEQ ID NO: 1309982 - DNA, 15 bp, Homo sapiens
attacattgagctta

SEQ ID NO: 1309983 - DNA, 15 bp, Homo sapiens
tattacattgagctt

SEQ ID NO: 1309984 - DNA, 15 bp, Homo sapiens
ttattacattgagct

SEQ ID NO: 1309985 - DNA, 15 bp, Homo sapiens
tttattacattgagc

SEQ ID NO: 1309986 - DNA, 15 bp, Homo sapiens
ttttattacattgag

SEQ ID NO: 1309987 - DNA, 15 bp, Homo sapiens
attttattacattga

SEQ ID NO: 1309988 - DNA, 15 bp, Homo sapiens
tattttattacattg

SEQ ID NO: 1309989 - DNA, 15 bp, Homo sapiens
ttattttattacatt

SEQ ID NO: 1309990 - DNA, 15 bp, Homo sapiens
gttattttattacat

SEQ ID NO: 1309991 - DNA, 15 bp, Homo sapiens
agttattttattaca

SEQ ID NO: 1309992 - DNA, 15 bp, Homo sapiens
aagttattttattac

SEQ ID NO: 1309993 - DNA, 15 bp, Homo sapiens
aaagttattttatta

SEQ ID NO: 1309994 - DNA, 15 bp, Homo sapiens
gaaagttattttatt

SEQ ID NO: 1309995 - DNA, 15 bp, Homo sapiens
agaaagttattttat

SEQ ID NO: 1309996 - DNA, 15 bp, Homo sapiens
aagaaagttatttta

SEQ ID NO: 1309997 - DNA, 15 bp, Homo sapiens
gaagaaagttatttt

SEQ ID NO: 1309998 - DNA, 15 bp, Homo sapiens
tgaagaaagttattt

SEQ ID NO: 1309999 - DNA, 15 bp, Homo sapiens
atgaagaaagttatt

SEQ ID NO: 1310000 - DNA, 15 bp, Homo sapiens
gatgaagaaagttat

SEQ ID NO: 1310001 - DNA, 15 bp, Homo sapiens
tgatgaagaaagtta

SEQ ID NO: 1310002 - DNA, 15 bp, Homo sapiens
atgatgaagaaagtt

SEQ ID NO: 1310003 - DNA, 15 bp, Homo sapiens
aatgatgaagaaagt

SEQ ID NO: 1310004 - DNA, 15 bp, Homo sapiens
caatgatgaagaaag

SEQ ID NO: 1310005 - DNA, 15 bp, Homo sapiens
acaatgatgaagaaa

SEQ ID NO: 1310006 - DNA, 15 bp, Homo sapiens
aacaatgatgaagaa

SEQ ID NO: 1310007 - DNA, 15 bp, Homo sapiens
taacaatgatgaaga

SEQ ID NO: 1310008 - DNA, 15 bp, Homo sapiens
ttaacaatgatgaag

SEQ ID NO: 1310009 - DNA, 15 bp, Homo sapiens
cttaacaatgatgaa

SEQ ID NO: 1310010 - DNA, 15 bp, Homo sapiens
ccttaacaatgatga

SEQ ID NO: 1310011 - DNA, 15 bp, Homo sapiens
tccttaacaatgatg

SEQ ID NO: 1310012 - DNA, 15 bp, Homo sapiens
atccttaacaatgat

SEQ ID NO: 1310013 - DNA, 15 bp, Homo sapiens
aatccttaacaatga

SEQ ID NO: 1310014 - DNA, 15 bp, Homo sapiens
taatccttaacaatg

SEQ ID NO: 1310015 - DNA, 15 bp, Homo sapiens
ttaatccttaacaat

SEQ ID NO: 1310016 - DNA, 15 bp, Homo sapiens
attaatccttaacaa

SEQ ID NO: 1310017 - DNA, 15 bp, Homo sapiens
tattaatccttaaca

SEQ ID NO: 1310018 - DNA, 15 bp, Homo sapiens
ttattaatccttaac

SEQ ID NO: 1310019 - DNA, 15 bp, Homo sapiens
cttattaatccttaa

SEQ ID NO: 1310020 - DNA, 15 bp, Homo sapiens
ccttattaatcctta

SEQ ID NO: 1310021 - DNA, 15 bp, Homo sapiens
gccttattaatcctt

SEQ ID NO: 1310022 - DNA, 15 bp, Homo sapiens
tgccttattaatcct

SEQ ID NO: 1310023 - DNA, 15 bp, Homo sapiens
atgccttattaatcc

SEQ ID NO: 1310024 - DNA, 15 bp, Homo sapiens
aatgccttattaatc

SEQ ID NO: 1310025 - DNA, 15 bp, Homo sapiens
taatgccttattaat

SEQ ID NO: 1310026 - DNA, 15 bp, Homo sapiens
ttaatgccttattaa

SEQ ID NO: 1310027 - DNA, 15 bp, Homo sapiens
tttaatgccttatta

SEQ ID NO: 1310028 - DNA, 15 bp, Homo sapiens
atttaatgccttatt

SEQ ID NO: 1310029 - DNA, 15 bp, Homo sapiens
catttaatgccttat

SEQ ID NO: 1310030 - DNA, 15 bp, Homo sapiens
ccatttaatgcctta

SEQ ID NO: 1310031 - DNA, 15 bp, Homo sapiens
cccatttaatgcctt

SEQ ID NO: 1310032 - DNA, 15 bp, Homo sapiens
acccatttaatgcct

SEQ ID NO: 1310033 - DNA, 15 bp, Homo sapiens
aacccatttaatgcc

SEQ ID NO: 1310034 - DNA, 15 bp, Homo sapiens
aaacccatttaatgc

SEQ ID NO: 1310035 - DNA, 15 bp, Homo sapiens
aaaacccatttaatg

SEQ ID NO: 1310036 - DNA, 15 bp, Homo sapiens
gaaaacccatttaat

SEQ ID NO: 1310037 - DNA, 15 bp, Homo sapiens
tgaaaacccatttaa

SEQ ID NO: 1310038 - DNA, 15 bp, Homo sapiens
atgaaaacccattta

SEQ ID NO: 1310039 - DNA, 15 bp, Homo sapiens
catgaaaacccattt

SEQ ID NO: 1310040 - DNA, 15 bp, Homo sapiens
acatgaaaacccatt

SEQ ID NO: 1310041 - DNA, 15 bp, Homo sapiens
cacatgaaaacccat

SEQ ID NO: 1310042 - DNA, 15 bp, Homo sapiens
ccacatgaaaaccca

SEQ ID NO: 1310043 - DNA, 15 bp, Homo sapiens
cccacatgaaaaccc

SEQ ID NO: 1310044 - DNA, 15 bp, Homo sapiens
acccacatgaaaacc

SEQ ID NO: 1310045 - DNA, 15 bp, Homo sapiens
gacccacatgaaaac

SEQ ID NO: 1310046 - DNA, 15 bp, Homo sapiens
ggacccacatgaaaa

SEQ ID NO: 1310047 - DNA, 15 bp, Homo sapiens
aggacccacatgaaa

SEQ ID NO: 1310048 - DNA, 15 bp, Homo sapiens
gaggacccacatgaa

SEQ ID NO: 1310049 - DNA, 15 bp, Homo sapiens
tgaggacccacatga

SEQ ID NO: 1310050 - DNA, 15 bp, Homo sapiens
atgaggacccacatg

SEQ ID NO: 1310051 - DNA, 15 bp, Homo sapiens
tatgaggacccacat

SEQ ID NO: 1310052 - DNA, 15 bp, Homo sapiens
atatgaggacccaca

SEQ ID NO: 1310053 - DNA, 15 bp, Homo sapiens
catatgaggacccac

SEQ ID NO: 1310054 - DNA, 15 bp, Homo sapiens
acatatgaggaccca

SEQ ID NO: 1310055 - DNA, 15 bp, Homo sapiens
aacatatgaggaccc

SEQ ID NO: 1310056 - DNA, 15 bp, Homo sapiens
taacatatgaggacc

SEQ ID NO: 1310057 - DNA, 15 bp, Homo sapiens
ttaacatatgaggac

SEQ ID NO: 1310058 - DNA, 15 bp, Homo sapiens
tttaacatatgagga

SEQ ID NO: 1310059 - DNA, 15 bp, Homo sapiens
ttttaacatatgagg

SEQ ID NO: 1310060 - DNA, 15 bp, Homo sapiens
tttttaacatatgag

SEQ ID NO: 1310061 - DNA, 15 bp, Homo sapiens
ctttttaacatatga

SEQ ID NO: 1310062 - DNA, 15 bp, Homo sapiens
cctttttaacatatg

SEQ ID NO: 1310063 - DNA, 15 bp, Homo sapiens
acacaggaaagataa

SEQ ID NO: 1310064 - DNA, 15 bp, Homo sapiens
aacacaggaaagata

SEQ ID NO: 1310065 - DNA, 15 bp, Homo sapiens
aaacacaggaaagat

SEQ ID NO: 1310066 - DNA, 15 bp, Homo sapiens
gaaacacaggaaaga

SEQ ID NO: 1310067 - DNA, 15 bp, Homo sapiens
agaaacacaggaaag

SEQ ID NO: 1310068 - DNA, 15 bp, Homo sapiens
aagaaacacaggaaa

SEQ ID NO: 1310069 - DNA, 15 bp, Homo sapiens
aaagaaacacaggaa

SEQ ID NO: 1310070 - DNA, 15 bp, Homo sapiens
aaaagaaacacagga

SEQ ID NO: 1310071 - DNA, 15 bp, Homo sapiens
aaaaagaaacacagg

SEQ ID NO: 1310072 - DNA, 15 bp, Homo sapiens
taaaaagaaacacag

SEQ ID NO: 1310073 - DNA, 15 bp, Homo sapiens
ataaaaagaaacaca

SEQ ID NO: 1310074 - DNA, 15 bp, Homo sapiens
tataaaaagaaacac

SEQ ID NO: 1310075 - DNA, 15 bp, Homo sapiens
ttataaaaagaaaca

SEQ ID NO: 1310076 - DNA, 15 bp, Homo sapiens
tttataaaaagaaac

SEQ ID NO: 1310077 - DNA, 15 bp, Homo sapiens
ttttataaaaagaaa

SEQ ID NO: 1310078 - DNA, 15 bp, Homo sapiens
tttttataaaaagaa

SEQ ID NO: 1310079 - DNA, 15 bp, Homo sapiens
atttttataaaaaga

SEQ ID NO: 1310080 - DNA, 15 bp, Homo sapiens
tatttttataaaaag

SEQ ID NO: 1310081 - DNA, 15 bp, Homo sapiens
ttatttttataaaaa

SEQ ID NO: 1310082 - DNA, 15 bp, Homo sapiens
cttatttttataaaa

SEQ ID NO: 1310083 - DNA, 15 bp, Homo sapiens
gcttatttttataaa

SEQ ID NO: 1310084 - DNA, 15 bp, Homo sapiens
tgcttatttttataa

SEQ ID NO: 1310085 - DNA, 15 bp, Homo sapiens
ctgcttatttttata

SEQ ID NO: 1310086 - DNA, 15 bp, Homo sapiens
cctgcttatttttat

SEQ ID NO: 1310087 - DNA, 15 bp, Homo sapiens
acctgcttattttta

SEQ ID NO: 1310088 - DNA, 15 bp, Homo sapiens
tacctgcttattttt

SEQ ID NO: 1310089 - DNA, 15 bp, Homo sapiens
atacctgcttatttt

SEQ ID NO: 1310090 - DNA, 15 bp, Homo sapiens
catacctgcttattt

SEQ ID NO: 1310091 - DNA, 15 bp, Homo sapiens
gcatacctgcttatt

SEQ ID NO: 1310092 - DNA, 15 bp, Homo sapiens
tgcatacctgcttat

SEQ ID NO: 1310093 - DNA, 15 bp, Homo sapiens
gtgcatacctgctta

SEQ ID NO: 1310094 - DNA, 15 bp, Homo sapiens
cgtgcatacctgctt

SEQ ID NO: 1310095 - DNA, 15 bp, Homo sapiens
acgtgcatacctgct

SEQ ID NO: 1310096 - DNA, 15 bp, Homo sapiens
aacgtgcatacctgc

SEQ ID NO: 1310097 - DNA, 15 bp, Homo sapiens
aaacgtgcatacctg

SEQ ID NO: 1310098 - DNA, 15 bp, Homo sapiens
aaaacgtgcatacct

SEQ ID NO: 1310099 - DNA, 15 bp, Homo sapiens
taaaacgtgcatacc

SEQ ID NO: 1310100 - DNA, 15 bp, Homo sapiens
ataaaacgtgcatac

SEQ ID NO: 1310101 - DNA, 15 bp, Homo sapiens
aataaaacgtgcata

SEQ ID NO: 1310102 - DNA, 15 bp, Homo sapiens
aaataaaacgtgcat

SEQ ID NO: 1310103 - DNA, 15 bp, Homo sapiens
aaaataaaacgtgca

SEQ ID NO: 1310104 - DNA, 15 bp, Homo sapiens
caaaataaaacgtgc

SEQ ID NO: 1310105 - DNA, 15 bp, Homo sapiens
gcaaaataaaacgtg

SEQ ID NO: 1310106 - DNA, 15 bp, Homo sapiens
ggcaaaataaaacgt

SEQ ID NO: 1310107 - DNA, 15 bp, Homo sapiens
aggcaaaataaaacg

SEQ ID NO: 1310108 - DNA, 15 bp, Homo sapiens
aaggcaaaataaaac

SEQ ID NO: 1310109 - DNA, 15 bp, Homo sapiens
aaaggcaaaataaaa

SEQ ID NO: 1310110 - DNA, 15 bp, Homo sapiens
aaaaggcaaaataaa

SEQ ID NO: 1310111 - DNA, 15 bp, Homo sapiens
aaaaaggcaaaataa

SEQ ID NO: 1310112 - DNA, 15 bp, Homo sapiens
gaaaaaggcaaaata

SEQ ID NO: 1310113 - DNA, 15 bp, Homo sapiens
agaaaaaggcaaaat

SEQ ID NO: 1310114 - DNA, 15 bp, Homo sapiens
aagaaaaaggcaaaa

SEQ ID NO: 1310115 - DNA, 15 bp, Homo sapiens
taagaaaaaggcaaa

SEQ ID NO: 1310116 - DNA, 15 bp, Homo sapiens
ataagaaaaaggcaa

SEQ ID NO: 1310117 - DNA, 15 bp, Homo sapiens
tataagaaaaaggca

SEQ ID NO: 1310118 - DNA, 15 bp, Homo sapiens
gtataagaaaaaggc

SEQ ID NO: 1310119 - DNA, 15 bp, Homo sapiens
tgtataagaaaaagg

SEQ ID NO: 1310120 - DNA, 15 bp, Homo sapiens
ttgtataagaaaaag

SEQ ID NO: 1310121 - DNA, 15 bp, Homo sapiens
tttgtataagaaaaa

SEQ ID NO: 1310122 - DNA, 15 bp, Homo sapiens
ttttgtataagaaaa

SEQ ID NO: 1310123 - DNA, 15 bp, Homo sapiens
cttttgtataagaaa

SEQ ID NO: 1310124 - DNA, 15 bp, Homo sapiens
ccttttgtataagaa

SEQ ID NO: 1310125 - DNA, 15 bp, Homo sapiens
accttttgtataaga

SEQ ID NO: 1310126 - DNA, 15 bp, Homo sapiens
caccttttgtataag

SEQ ID NO: 1310127 - DNA, 15 bp, Homo sapiens
ccaccttttgtataa

SEQ ID NO: 1310128 - DNA, 15 bp, Homo sapiens
gccaccttttgtata

SEQ ID NO: 1310129 - DNA, 15 bp, Homo sapiens
tgccaccttttgtat

SEQ ID NO: 1310130 - DNA, 15 bp, Homo sapiens
atgccaccttttgta

SEQ ID NO: 1310131 - DNA, 15 bp, Homo sapiens
tatgccaccttttgt

SEQ ID NO: 1310132 - DNA, 15 bp, Homo sapiens
gtatgccaccttttg

SEQ ID NO: 1310133 - DNA, 15 bp, Homo sapiens
agtatgccacctttt

SEQ ID NO: 1310134 - DNA, 15 bp, Homo sapiens
tagtatgccaccttt

SEQ ID NO: 1310135 - DNA, 15 bp, Homo sapiens
atagtatgccacctt

SEQ ID NO: 1310136 - DNA, 15 bp, Homo sapiens
catagtatgccacct

SEQ ID NO: 1310137 - DNA, 15 bp, Homo sapiens
acatagtatgccacc

SEQ ID NO: 1310138 - DNA, 15 bp, Homo sapiens
cacatagtatgccac

SEQ ID NO: 1310139 - DNA, 15 bp, Homo sapiens
acacatagtatgcca

SEQ ID NO: 1310140 - DNA, 15 bp, Homo sapiens
cacacatagtatgcc

SEQ ID NO: 1310141 - DNA, 15 bp, Homo sapiens
gcacacatagtatgc

SEQ ID NO: 1310142 - DNA, 15 bp, Homo sapiens
agcacacatagtatg

SEQ ID NO: 1310143 - DNA, 15 bp, Homo sapiens
gagcacacatagtat

SEQ ID NO: 1310144 - DNA, 15 bp, Homo sapiens
agagcacacatagta

SEQ ID NO: 1310145 - DNA, 15 bp, Homo sapiens
aagagcacacatagt

SEQ ID NO: 1310146 - DNA, 15 bp, Homo sapiens
aaagagcacacatag

SEQ ID NO: 1310147 - DNA, 15 bp, Homo sapiens
aaaagagcacacata

SEQ ID NO: 1310148 - DNA, 15 bp, Homo sapiens
taaaagagcacacat

SEQ ID NO: 1310149 - DNA, 15 bp, Homo sapiens
ataaaagagcacaca

SEQ ID NO: 1310150 - DNA, 15 bp, Homo sapiens
cataaaagagcacac

SEQ ID NO: 1310151 - DNA, 15 bp, Homo sapiens
gcataaaagagcaca

SEQ ID NO: 1310152 - DNA, 15 bp, Homo sapiens
agcataaaagagcac

SEQ ID NO: 1310153 - DNA, 15 bp, Homo sapiens
aagcataaaagagca

SEQ ID NO: 1310154 - DNA, 15 bp, Homo sapiens
aaagcataaaagagc

SEQ ID NO: 1310155 - DNA, 15 bp, Homo sapiens
aaaagcataaaagag

SEQ ID NO: 1310156 - DNA, 15 bp, Homo sapiens
aaaaagcataaaaga

SEQ ID NO: 1310157 - DNA, 15 bp, Homo sapiens
aaaaaagcataaaag

SEQ ID NO: 1310158 - DNA, 15 bp, Homo sapiens
aaaaaaagcataaaa

SEQ ID NO: 1310159 - DNA, 15 bp, Homo sapiens
gaaaaaaagcataaa

SEQ ID NO: 1310160 - DNA, 15 bp, Homo sapiens
tgaaaaaaagcataa

SEQ ID NO: 1310161 - DNA, 15 bp, Homo sapiens
atgaaaaaaagcata

SEQ ID NO: 1310162 - DNA, 15 bp, Homo sapiens
aatgaaaaaaagcat

SEQ ID NO: 1310163 - DNA, 15 bp, Homo sapiens
aaatgaaaaaaagca

SEQ ID NO: 1310164 - DNA, 15 bp, Homo sapiens
taaatgaaaaaaagc

SEQ ID NO: 1310165 - DNA, 15 bp, Homo sapiens
ttaaatgaaaaaaag

SEQ ID NO: 1310166 - DNA, 15 bp, Homo sapiens
gttaaatgaaaaaaa

SEQ ID NO: 1310167 - DNA, 15 bp, Homo sapiens
tgttaaatgaaaaaa

SEQ ID NO: 1310168 - DNA, 15 bp, Homo sapiens
gtgttaaatgaaaaa

SEQ ID NO: 1310169 - DNA, 15 bp, Homo sapiens
agtgttaaatgaaaa

SEQ ID NO: 1310170 - DNA, 15 bp, Homo sapiens
tagtgttaaatgaaa

SEQ ID NO: 1310171 - DNA, 15 bp, Homo sapiens
gtagtgttaaatgaa

SEQ ID NO: 1310172 - DNA, 15 bp, Homo sapiens
ggtagtgttaaatga

SEQ ID NO: 1310173 - DNA, 15 bp, Homo sapiens
aggtagtgttaaatg

SEQ ID NO: 1310174 - DNA, 15 bp, Homo sapiens
aaggtagtgttaaat

SEQ ID NO: 1310175 - DNA, 15 bp, Homo sapiens
gaaggtagtgttaaa

SEQ ID NO: 1310176 - DNA, 15 bp, Homo sapiens
agaaggtagtgttaa

SEQ ID NO: 1310177 - DNA, 15 bp, Homo sapiens
aagaaggtagtgtta

SEQ ID NO: 1310178 - DNA, 15 bp, Homo sapiens
caagaaggtagtgtt

SEQ ID NO: 1310179 - DNA, 15 bp, Homo sapiens
tcaagaaggtagtgt

SEQ ID NO: 1310180 - DNA, 15 bp, Homo sapiens
ttcaagaaggtagtg

SEQ ID NO: 1310181 - DNA, 15 bp, Homo sapiens
cttcaagaaggtagt

SEQ ID NO: 1310182 - DNA, 15 bp, Homo sapiens
acttcaagaaggtag

SEQ ID NO: 1310183 - DNA, 15 bp, Homo sapiens
gacttcaagaaggta

SEQ ID NO: 1310184 - DNA, 15 bp, Homo sapiens
tgacttcaagaaggt

SEQ ID NO: 1310185 - DNA, 15 bp, Homo sapiens
atgacttcaagaagg

SEQ ID NO: 1310186 - DNA, 15 bp, Homo sapiens
aatgacttcaagaag

SEQ ID NO: 1310187 - DNA, 15 bp, Homo sapiens
gaatgacttcaagaa

SEQ ID NO: 1310188 - DNA, 15 bp, Homo sapiens
ggaatgacttcaaga

SEQ ID NO: 1310189 - DNA, 15 bp, Homo sapiens
tggaatgacttcaag

SEQ ID NO: 1310190 - DNA, 15 bp, Homo sapiens
atggaatgacttcaa

SEQ ID NO: 1310191 - DNA, 15 bp, Homo sapiens
tatggaatgacttca

SEQ ID NO: 1310192 - DNA, 15 bp, Homo sapiens
atatggaatgacttc

SEQ ID NO: 1310193 - DNA, 15 bp, Homo sapiens
gatatggaatgactt

SEQ ID NO: 1310194 - DNA, 15 bp, Homo sapiens
tgatatggaatgact

SEQ ID NO: 1310195 - DNA, 15 bp, Homo sapiens
ttgatatggaatgac

SEQ ID NO: 1310196 - DNA, 15 bp, Homo sapiens
attgatatggaatga

SEQ ID NO: 1310197 - DNA, 15 bp, Homo sapiens
aattgatatggaatg

SEQ ID NO: 1310198 - DNA, 15 bp, Homo sapiens
aaattgatatggaat

SEQ ID NO: 1310199 - DNA, 15 bp, Homo sapiens
taaattgatatggaa

SEQ ID NO: 1310200 - DNA, 15 bp, Homo sapiens
ataaattgatatgga

SEQ ID NO: 1310201 - DNA, 15 bp, Homo sapiens
tataaattgatatgg

SEQ ID NO: 1310202 - DNA, 15 bp, Homo sapiens
ctataaattgatatg

SEQ ID NO: 1310203 - DNA, 15 bp, Homo sapiens
tctataaattgatat

SEQ ID NO: 1310204 - DNA, 15 bp, Homo sapiens
ctctataaattgata

SEQ ID NO: 1310205 - DNA, 15 bp, Homo sapiens
tctctataaattgat

SEQ ID NO: 1310206 - DNA, 15 bp, Homo sapiens
atctctataaattga

SEQ ID NO: 1310207 - DNA, 15 bp, Homo sapiens
tatctctataaattg

SEQ ID NO: 1310208 - DNA, 15 bp, Homo sapiens
atatctctataaatt

SEQ ID NO: 1310209 - DNA, 15 bp, Homo sapiens
aatatctctataaat

SEQ ID NO: 1310210 - DNA, 15 bp, Homo sapiens
aaatatctctataaa

SEQ ID NO: 1310211 - DNA, 15 bp, Homo sapiens
gaaatatctctataa

SEQ ID NO: 1310212 - DNA, 15 bp, Homo sapiens
agaaatatctctata

SEQ ID NO: 1310213 - DNA, 15 bp, Homo sapiens
gagaaatatctctat

SEQ ID NO: 1310214 - DNA, 15 bp, Homo sapiens
tgagaaatatctcta

SEQ ID NO: 1310215 - DNA, 15 bp, Homo sapiens
atgagaaatatctct

SEQ ID NO: 1310216 - DNA, 15 bp, Homo sapiens
aatgagaaatatctc

SEQ ID NO: 1310217 - DNA, 15 bp, Homo sapiens
taatgagaaatatct

SEQ ID NO: 1310218 - DNA, 15 bp, Homo sapiens
ataatgagaaatatc

SEQ ID NO: 1310219 - DNA, 15 bp, Homo sapiens
aataatgagaaatat

SEQ ID NO: 1310220 - DNA, 15 bp, Homo sapiens
taataatgagaaata

SEQ ID NO: 1310221 - DNA, 15 bp, Homo sapiens
gtaataatgagaaat

SEQ ID NO: 1310222 - DNA, 15 bp, Homo sapiens
tgtaataatgagaaa

SEQ ID NO: 1310223 - DNA, 15 bp, Homo sapiens
ctgtaataatgagaa

SEQ ID NO: 1310224 - DNA, 15 bp, Homo sapiens
gctgtaataatgaga

SEQ ID NO: 1310225 - DNA, 15 bp, Homo sapiens
agctgtaataatgag

SEQ ID NO: 1310226 - DNA, 15 bp, Homo sapiens
cagctgtaataatga

SEQ ID NO: 1310227 - DNA, 15 bp, Homo sapiens
gcagctgtaataatg

SEQ ID NO: 1310228 - DNA, 15 bp, Homo sapiens
tgcagctgtaataat

SEQ ID NO: 1310229 - DNA, 15 bp, Homo sapiens
atgcagctgtaataa

SEQ ID NO: 1310230 - DNA, 15 bp, Homo sapiens
tatgcagctgtaata

SEQ ID NO: 1310231 - DNA, 15 bp, Homo sapiens
ctatgcagctgtaat

SEQ ID NO: 1310232 - DNA, 15 bp, Homo sapiens
actatgcagctgtaa

SEQ ID NO: 1310233 - DNA, 15 bp, Homo sapiens
tactatgcagctgta

SEQ ID NO: 1310234 - DNA, 15 bp, Homo sapiens
gtactatgcagctgt

SEQ ID NO: 1310235 - DNA, 15 bp, Homo sapiens
agtactatgcagctg

SEQ ID NO: 1310236 - DNA, 15 bp, Homo sapiens
cagtactatgcagct

SEQ ID NO: 1310237 - DNA, 15 bp, Homo sapiens
acagtactatgcagc

SEQ ID NO: 1310238 - DNA, 15 bp, Homo sapiens
tacagtactatgcag

SEQ ID NO: 1310239 - DNA, 15 bp, Homo sapiens
atacagtactatgca

SEQ ID NO: 1310240 - DNA, 15 bp, Homo sapiens
aatacagtactatgc

SEQ ID NO: 1310241 - DNA, 15 bp, Homo sapiens
aaatacagtactatg

SEQ ID NO: 1310242 - DNA, 15 bp, Homo sapiens
aaaatacagtactat

SEQ ID NO: 1310243 - DNA, 15 bp, Homo sapiens
caaaatacagtacta

SEQ ID NO: 1310244 - DNA, 15 bp, Homo sapiens
acaaaatacagtact

SEQ ID NO: 1310245 - DNA, 15 bp, Homo sapiens
tacaaaatacagtac

SEQ ID NO: 1310246 - DNA, 15 bp, Homo sapiens
atacaaaatacagta

SEQ ID NO: 1310247 - DNA, 15 bp, Homo sapiens
tatacaaaatacagt

SEQ ID NO: 1310248 - DNA, 15 bp, Homo sapiens
atatacaaaatacag

SEQ ID NO: 1310249 - DNA, 15 bp, Homo sapiens
tatatacaaaataca

SEQ ID NO: 1310250 - DNA, 15 bp, Homo sapiens
atatatacaaaatac

SEQ ID NO: 1310251 - DNA, 15 bp, Homo sapiens
tatatatacaaaata

SEQ ID NO: 1310252 - DNA, 15 bp, Homo sapiens
gtatatatacaaaat

SEQ ID NO: 1310253 - DNA, 15 bp, Homo sapiens
agtatatatacaaaa

SEQ ID NO: 1310254 - DNA, 15 bp, Homo sapiens
tagtatatatacaaa

SEQ ID NO: 1310255 - DNA, 15 bp, Homo sapiens
gtagtatatatacaa

SEQ ID NO: 1310256 - DNA, 15 bp, Homo sapiens
tgtagtatatataca

SEQ ID NO: 1310257 - DNA, 15 bp, Homo sapiens
ctgtagtatatatac

SEQ ID NO: 1310258 - DNA, 15 bp, Homo sapiens
actgtagtatatata

SEQ ID NO: 1310259 - DNA, 15 bp, Homo sapiens
gactgtagtatatat

SEQ ID NO: 1310260 - DNA, 15 bp, Homo sapiens
agactgtagtatata

SEQ ID NO: 1310261 - DNA, 15 bp, Homo sapiens
cagactgtagtatat

SEQ ID NO: 1310262 - DNA, 15 bp, Homo sapiens
acagactgtagtata

SEQ ID NO: 1310263 - DNA, 15 bp, Homo sapiens
aacagactgtagtat

SEQ ID NO: 1310264 - DNA, 15 bp, Homo sapiens
gaacagactgtagta

SEQ ID NO: 1310265 - DNA, 15 bp, Homo sapiens
tgaacagactgtagt

SEQ ID NO: 1310266 - DNA, 15 bp, Homo sapiens
ttgaacagactgtag

SEQ ID NO: 1310267 - DNA, 15 bp, Homo sapiens
gttgaacagactgta

SEQ ID NO: 1310268 - DNA, 15 bp, Homo sapiens
agttgaacagactgt

SEQ ID NO: 1310269 - DNA, 15 bp, Homo sapiens
tagttgaacagactg

SEQ ID NO: 1310270 - DNA, 15 bp, Homo sapiens
ctagttgaacagact

SEQ ID NO: 1310271 - DNA, 15 bp, Homo sapiens
actagttgaacagac

SEQ ID NO: 1310272 - DNA, 15 bp, Homo sapiens
aactagttgaacaga

SEQ ID NO: 1310273 - DNA, 15 bp, Homo sapiens
aaactagttgaacag

SEQ ID NO: 1310274 - DNA, 15 bp, Homo sapiens
aaaactagttgaaca

SEQ ID NO: 1310275 - DNA, 15 bp, Homo sapiens
gaaaactagttgaac

SEQ ID NO: 1310276 - DNA, 15 bp, Homo sapiens
agaaaactagttgaa

SEQ ID NO: 1310277 - DNA, 15 bp, Homo sapiens
tagaaaactagttga

SEQ ID NO: 1310278 - DNA, 15 bp, Homo sapiens
atagaaaactagttg

SEQ ID NO: 1310279 - DNA, 15 bp, Homo sapiens
catagaaaactagtt

SEQ ID NO: 1310280 - DNA, 15 bp, Homo sapiens
tcatagaaaactagt

SEQ ID NO: 1310281 - DNA, 15 bp, Homo sapiens
atcatagaaaactag

SEQ ID NO: 1310282 - DNA, 15 bp, Homo sapiens
aatcatagaaaacta

SEQ ID NO: 1310283 - DNA, 15 bp, Homo sapiens
caatcatagaaaact

SEQ ID NO: 1310284 - DNA, 15 bp, Homo sapiens
ccaatcatagaaaac

SEQ ID NO: 1310285 - DNA, 15 bp, Homo sapiens
tccaatcatagaaaa

SEQ ID NO: 1310286 - DNA, 15 bp, Homo sapiens
gtccaatcatagaaa

SEQ ID NO: 1310287 - DNA, 15 bp, Homo sapiens
tgtccaatcatagaa

SEQ ID NO: 1310288 - DNA, 15 bp, Homo sapiens
atgtccaatcataga

SEQ ID NO: 1310289 - DNA, 15 bp, Homo sapiens
gatgtccaatcatag

SEQ ID NO: 1310290 - DNA, 15 bp, Homo sapiens
agatgtccaatcata

SEQ ID NO: 1310291 - DNA, 15 bp, Homo sapiens
tagatgtccaatcat

SEQ ID NO: 1310292 - DNA, 15 bp, Homo sapiens
ctagatgtccaatca

SEQ ID NO: 1310293 - DNA, 15 bp, Homo sapiens
cctagatgtccaatc

SEQ ID NO: 1310294 - DNA, 15 bp, Homo sapiens
acctagatgtccaat

SEQ ID NO: 1310295 - DNA, 15 bp, Homo sapiens
cacctagatgtccaa

SEQ ID NO: 1310296 - DNA, 15 bp, Homo sapiens
ccacctagatgtcca

SEQ ID NO: 1310297 - DNA, 15 bp, Homo sapiens
accacctagatgtcc

SEQ ID NO: 1310298 - DNA, 15 bp, Homo sapiens
aaccacctagatgtc

SEQ ID NO: 1310299 - DNA, 15 bp, Homo sapiens
aaaccacctagatgt

SEQ ID NO: 1310300 - DNA, 15 bp, Homo sapiens
gaaaccacctagatg

SEQ ID NO: 1310301 - DNA, 15 bp, Homo sapiens
ggaaaccacctagat

SEQ ID NO: 1310302 - DNA, 15 bp, Homo sapiens
tggaaaccacctaga

SEQ ID NO: 1310303 - DNA, 15 bp, Homo sapiens
ctggaaaccacctag

SEQ ID NO: 1310304 - DNA, 15 bp, Homo sapiens
actggaaaccaccta

SEQ ID NO: 1310305 - DNA, 15 bp, Homo sapiens
tactggaaaccacct

SEQ ID NO: 1310306 - DNA, 15 bp, Homo sapiens
atactggaaaccacc

SEQ ID NO: 1310307 - DNA, 15 bp, Homo sapiens
aatactggaaaccac

SEQ ID NO: 1310308 - DNA, 15 bp, Homo sapiens
aaatactggaaacca

SEQ ID NO: 1310309 - DNA, 15 bp, Homo sapiens
aaaatactggaaacc

SEQ ID NO: 1310310 - DNA, 15 bp, Homo sapiens
caaaatactggaaac

SEQ ID NO: 1310311 - DNA, 15 bp, Homo sapiens
gcaaaatactggaaa

SEQ ID NO: 1310312 - DNA, 15 bp, Homo sapiens
tgcaaaatactggaa

SEQ ID NO: 1310313 - DNA, 15 bp, Homo sapiens
ttgcaaaatactgga

SEQ ID NO: 1310314 - DNA, 15 bp, Homo sapiens
attgcaaaatactgg

SEQ ID NO: 1310315 - DNA, 15 bp, Homo sapiens
aattgcaaaatactg

SEQ ID NO: 1310316 - DNA, 15 bp, Homo sapiens
aaattgcaaaatact

SEQ ID NO: 1310317 - DNA, 15 bp, Homo sapiens
gaaattgcaaaatac

SEQ ID NO: 1310318 - DNA, 15 bp, Homo sapiens
tgaaattgcaaaata

SEQ ID NO: 1310319 - DNA, 15 bp, Homo sapiens
ttgaaattgcaaaat

SEQ ID NO: 1310320 - DNA, 15 bp, Homo sapiens
gttgaaattgcaaaa

SEQ ID NO: 1310321 - DNA, 15 bp, Homo sapiens
agttgaaattgcaaa

SEQ ID NO: 1310322 - DNA, 15 bp, Homo sapiens
tagttgaaattgcaa

SEQ ID NO: 1310323 - DNA, 15 bp, Homo sapiens
atagttgaaattgca

SEQ ID NO: 1310324 - DNA, 15 bp, Homo sapiens
aatagttgaaattgc

SEQ ID NO: 1310325 - DNA, 15 bp, Homo sapiens
taatagttgaaattg

SEQ ID NO: 1310326 - DNA, 15 bp, Homo sapiens
gtaatagttgaaatt

SEQ ID NO: 1310327 - DNA, 15 bp, Homo sapiens
ggtaatagttgaaat

SEQ ID NO: 1310328 - DNA, 15 bp, Homo sapiens
tggtaatagttgaaa

SEQ ID NO: 1310329 - DNA, 15 bp, Homo sapiens
gtggtaatagttgaa

SEQ ID NO: 1310330 - DNA, 15 bp, Homo sapiens
tgtggtaatagttga

SEQ ID NO: 1310331 - DNA, 15 bp, Homo sapiens
ttgtggtaatagttg

SEQ ID NO: 1310332 - DNA, 15 bp, Homo sapiens
attgtggtaatagtt

SEQ ID NO: 1310333 - DNA, 15 bp, Homo sapiens
tattgtggtaatagt

SEQ ID NO: 1310334 - DNA, 15 bp, Homo sapiens
ttattgtggtaatag

SEQ ID NO: 1310335 - DNA, 15 bp, Homo sapiens
tttattgtggtaata

SEQ ID NO: 1310336 - DNA, 15 bp, Homo sapiens
atttattgtggtaat

SEQ ID NO: 1310337 - DNA, 15 bp, Homo sapiens
tatttattgtggtaa

SEQ ID NO: 1310338 - DNA, 15 bp, Homo sapiens
ttatttattgtggta

SEQ ID NO: 1310339 - DNA, 15 bp, Homo sapiens
gttatttattgtggt

SEQ ID NO: 1310340 - DNA, 15 bp, Homo sapiens
agttatttattgtgg

SEQ ID NO: 1310341 - DNA, 15 bp, Homo sapiens
gagttatttattgtg

SEQ ID NO: 1310342 - DNA, 15 bp, Homo sapiens
agagttatttattgt

SEQ ID NO: 1310343 - DNA, 15 bp, Homo sapiens
cagagttatttattg

SEQ ID NO: 1310344 - DNA, 15 bp, Homo sapiens
acagagttatttatt

SEQ ID NO: 1310345 - DNA, 15 bp, Homo sapiens
cacagagttatttat

SEQ ID NO: 1310346 - DNA, 15 bp, Homo sapiens
acacagagttattta

SEQ ID NO: 1310347 - DNA, 15 bp, Homo sapiens
cacacagagttattt

SEQ ID NO: 1310348 - DNA, 15 bp, Homo sapiens
acacacagagttatt

SEQ ID NO: 1310349 - DNA, 15 bp, Homo sapiens
cacacacagagttat

SEQ ID NO: 1310350 - DNA, 15 bp, Homo sapiens
acacacacagagtta

SEQ ID NO: 1310351 - DNA, 15 bp, Homo sapiens
cacacacacagagtt

SEQ ID NO: 1310352 - DNA, 15 bp, Homo sapiens
acacacacacagagt

SEQ ID NO: 1310353 - DNA, 15 bp, Homo sapiens
catacatacatacat

SEQ ID NO: 1310354 - DNA, 15 bp, Homo sapiens
cacatacatacatac

SEQ ID NO: 1310355 - DNA, 15 bp, Homo sapiens
acacatacatacata

SEQ ID NO: 1310356 - DNA, 15 bp, Homo sapiens
cacacatacatacat

SEQ ID NO: 1310357 - DNA, 15 bp, Homo sapiens
acacacatacataca

SEQ ID NO: 1310358 - DNA, 15 bp, Homo sapiens
cacacacatacatac

SEQ ID NO: 1310359 - DNA, 15 bp, Homo sapiens
acacacacatacata

SEQ ID NO: 1310360 - DNA, 15 bp, Homo sapiens
aacacacacatacat

SEQ ID NO: 1310361 - DNA, 15 bp, Homo sapiens
taacacacacataca

SEQ ID NO: 1310362 - DNA, 15 bp, Homo sapiens
ataacacacacatac

SEQ ID NO: 1310363 - DNA, 15 bp, Homo sapiens
cataacacacacata

SEQ ID NO: 1310364 - DNA, 15 bp, Homo sapiens
acataacacacacat

SEQ ID NO: 1310365 - DNA, 15 bp, Homo sapiens
tacataacacacaca

SEQ ID NO: 1310366 - DNA, 15 bp, Homo sapiens
ttacataacacacac

SEQ ID NO: 1310367 - DNA, 15 bp, Homo sapiens
attacataacacaca

SEQ ID NO: 1310368 - DNA, 15 bp, Homo sapiens
aattacataacacac

SEQ ID NO: 1310369 - DNA, 15 bp, Homo sapiens
caattacataacaca

SEQ ID NO: 1310370 - DNA, 15 bp, Homo sapiens
tcaattacataacac

SEQ ID NO: 1310371 - DNA, 15 bp, Homo sapiens
ttcaattacataaca

SEQ ID NO: 1310372 - DNA, 15 bp, Homo sapiens
tttcaattacataac

SEQ ID NO: 1310373 - DNA, 15 bp, Homo sapiens
atttcaattacataa

SEQ ID NO: 1310374 - DNA, 15 bp, Homo sapiens
aatttcaattacata

SEQ ID NO: 1310375 - DNA, 15 bp, Homo sapiens
caatttcaattacat

SEQ ID NO: 1310376 - DNA, 15 bp, Homo sapiens
acaatttcaattaca

SEQ ID NO: 1310377 - DNA, 15 bp, Homo sapiens
cacaatttcaattac

SEQ ID NO: 1310378 - DNA, 15 bp, Homo sapiens
acacaatttcaatta

SEQ ID NO: 1310379 - DNA, 15 bp, Homo sapiens
gacacaatttcaatt

SEQ ID NO: 1310380 - DNA, 15 bp, Homo sapiens
agacacaatttcaat

SEQ ID NO: 1310381 - DNA, 15 bp, Homo sapiens
aagacacaatttcaa

SEQ ID NO: 1310382 - DNA, 15 bp, Homo sapiens
caagacacaatttca

SEQ ID NO: 1310383 - DNA, 15 bp, Homo sapiens
tcaagacacaatttc

SEQ ID NO: 1310384 - DNA, 15 bp, Homo sapiens
ctcaagacacaattt

SEQ ID NO: 1310385 - DNA, 15 bp, Homo sapiens
cctcaagacacaatt

SEQ ID NO: 1310386 - DNA, 15 bp, Homo sapiens
tcctcaagacacaat

SEQ ID NO: 1310387 - DNA, 15 bp, Homo sapiens
atcctcaagacacaa

SEQ ID NO: 1310388 - DNA, 15 bp, Homo sapiens
gatcctcaagacaca

SEQ ID NO: 1310389 - DNA, 15 bp, Homo sapiens
tgatcctcaagacac

SEQ ID NO: 1310390 - DNA, 15 bp, Homo sapiens
ttgatcctcaagaca

SEQ ID NO: 1310391 - DNA, 15 bp, Homo sapiens
attgatcctcaagac

SEQ ID NO: 1310392 - DNA, 15 bp, Homo sapiens
tattgatcctcaaga

SEQ ID NO: 1310393 - DNA, 15 bp, Homo sapiens
gtattgatcctcaag

SEQ ID NO: 1310394 - DNA, 15 bp, Homo sapiens
ggtattgatcctcaa

SEQ ID NO: 1310395 - DNA, 15 bp, Homo sapiens
aggtattgatcctca

SEQ ID NO: 1310396 - DNA, 15 bp, Homo sapiens
taggtattgatcctc

SEQ ID NO: 1310397 - DNA, 15 bp, Homo sapiens
ctaggtattgatcct

SEQ ID NO: 1310398 - DNA, 15 bp, Homo sapiens
tctaggtattgatcc

SEQ ID NO: 1310399 - DNA, 15 bp, Homo sapiens
ttctaggtattgatc

SEQ ID NO: 1310400 - DNA, 15 bp, Homo sapiens
cttctaggtattgat

SEQ ID NO: 1310401 - DNA, 15 bp, Homo sapiens
acttctaggtattga

SEQ ID NO: 1310402 - DNA, 15 bp, Homo sapiens
tacttctaggtattg

SEQ ID NO: 1310403 - DNA, 15 bp, Homo sapiens
ttacttctaggtatt

SEQ ID NO: 1310404 - DNA, 15 bp, Homo sapiens
cttacttctaggtat

SEQ ID NO: 1310405 - DNA, 15 bp, Homo sapiens
tcttacttctaggta

SEQ ID NO: 1310406 - DNA, 15 bp, Homo sapiens
ttcttacttctaggt

SEQ ID NO: 1310407 - DNA, 15 bp, Homo sapiens
attcttacttctagg

SEQ ID NO: 1310408 - DNA, 15 bp, Homo sapiens
cattcttacttctag

SEQ ID NO: 1310409 - DNA, 15 bp, Homo sapiens
gcattcttacttcta

SEQ ID NO: 1310410 - DNA, 15 bp, Homo sapiens
agcattcttacttct

SEQ ID NO: 1310411 - DNA, 15 bp, Homo sapiens
cagcattcttacttc

SEQ ID NO: 1310412 - DNA, 15 bp, Homo sapiens
ccagcattcttactt

SEQ ID NO: 1310413 - DNA, 15 bp, Homo sapiens
cccagcattcttact

SEQ ID NO: 1310414 - DNA, 15 bp, Homo sapiens
acccagcattcttac

SEQ ID NO: 1310415 - DNA, 15 bp, Homo sapiens
gacccagcattctta

SEQ ID NO: 1310416 - DNA, 15 bp, Homo sapiens
tgacccagcattctt

SEQ ID NO: 1310417 - DNA, 15 bp, Homo sapiens
ttgacccagcattct

SEQ ID NO: 1310418 - DNA, 15 bp, Homo sapiens
tttgacccagcattc

SEQ ID NO: 1310419 - DNA, 15 bp, Homo sapiens
ctttgacccagcatt

SEQ ID NO: 1310420 - DNA, 15 bp, Homo sapiens
cctttgacccagcat

SEQ ID NO: 1310421 - DNA, 15 bp, Homo sapiens
ccctttgacccagca

SEQ ID NO: 1310422 - DNA, 15 bp, Homo sapiens
accctttgacccagc

SEQ ID NO: 1310423 - DNA, 15 bp, Homo sapiens
aaccctttgacccag

SEQ ID NO: 1310424 - DNA, 15 bp, Homo sapiens
taaccctttgaccca

SEQ ID NO: 1310425 - DNA, 15 bp, Homo sapiens
ttaaccctttgaccc

SEQ ID NO: 1310426 - DNA, 15 bp, Homo sapiens
attaaccctttgacc

SEQ ID NO: 1310427 - DNA, 15 bp, Homo sapiens
cattaaccctttgac

SEQ ID NO: 1310428 - DNA, 15 bp, Homo sapiens
acattaaccctttga

SEQ ID NO: 1310429 - DNA, 15 bp, Homo sapiens
cacattaaccctttg

SEQ ID NO: 1310430 - DNA, 15 bp, Homo sapiens
acacattaacccttt

SEQ ID NO: 1310431 - DNA, 15 bp, Homo sapiens
cacacattaaccctt

SEQ ID NO: 1310432 - DNA, 15 bp, Homo sapiens
acacacattaaccct

SEQ ID NO: 1310433 - DNA, 15 bp, Homo sapiens
cacacacattaaccc

SEQ ID NO: 1310434 - DNA, 15 bp, Homo sapiens
acacacacattaacc

SEQ ID NO: 1310435 - DNA, 15 bp, Homo sapiens
tacacacacacatta

SEQ ID NO: 1310436 - DNA, 15 bp, Homo sapiens
atacacacacacatt

SEQ ID NO: 1310437 - DNA, 15 bp, Homo sapiens
catacacacacacat

SEQ ID NO: 1310438 - DNA, 15 bp, Homo sapiens
aacacacacatacac

SEQ ID NO: 1310439 - DNA, 15 bp, Homo sapiens
ctaacacacacatac

SEQ ID NO: 1310440 - DNA, 15 bp, Homo sapiens
tctaacacacacata

SEQ ID NO: 1310441 - DNA, 15 bp, Homo sapiens
atctaacacacacat

SEQ ID NO: 1310442 - DNA, 15 bp, Homo sapiens
tatctaacacacaca

SEQ ID NO: 1310443 - DNA, 15 bp, Homo sapiens
atatctaacacacac

SEQ ID NO: 1310444 - DNA, 15 bp, Homo sapiens
aatatctaacacaca

SEQ ID NO: 1310445 - DNA, 15 bp, Homo sapiens
caatatctaacacac

SEQ ID NO: 1310446 - DNA, 15 bp, Homo sapiens
gcaatatctaacaca

SEQ ID NO: 1310447 - DNA, 15 bp, Homo sapiens
ggcaatatctaacac

SEQ ID NO: 1310448 - DNA, 15 bp, Homo sapiens
tggcaatatctaaca

SEQ ID NO: 1310449 - DNA, 15 bp, Homo sapiens
ttggcaatatctaac

SEQ ID NO: 1310450 - DNA, 15 bp, Homo sapiens
tttggcaatatctaa

SEQ ID NO: 1310451 - DNA, 15 bp, Homo sapiens
atttggcaatatcta

SEQ ID NO: 1310452 - DNA, 15 bp, Homo sapiens
gatttggcaatatct

SEQ ID NO: 1310453 - DNA, 15 bp, Homo sapiens
ggatttggcaatatc

SEQ ID NO: 1310454 - DNA, 15 bp, Homo sapiens
gggatttggcaatat

SEQ ID NO: 1310455 - DNA, 15 bp, Homo sapiens
tgggatttggcaata

SEQ ID NO: 1310456 - DNA, 15 bp, Homo sapiens
atgggatttggcaat

SEQ ID NO: 1310457 - DNA, 15 bp, Homo sapiens
gatgggatttggcaa

SEQ ID NO: 1310458 - DNA, 15 bp, Homo sapiens
ggatgggatttggca

SEQ ID NO: 1310459 - DNA, 15 bp, Homo sapiens
tggatgggatttggc

SEQ ID NO: 1310460 - DNA, 15 bp, Homo sapiens
atggatgggatttgg

SEQ ID NO: 1310461 - DNA, 15 bp, Homo sapiens
tatggatgggatttg

SEQ ID NO: 1310462 - DNA, 15 bp, Homo sapiens
ttatggatgggattt

SEQ ID NO: 1310463 - DNA, 15 bp, Homo sapiens
cttatggatgggatt

SEQ ID NO: 1310464 - DNA, 15 bp, Homo sapiens
ccttatggatgggat

SEQ ID NO: 1310465 - DNA, 15 bp, Homo sapiens
accttatggatggga

SEQ ID NO: 1310466 - DNA, 15 bp, Homo sapiens
aaccttatggatggg

SEQ ID NO: 1310467 - DNA, 15 bp, Homo sapiens
aaaccttatggatgg

SEQ ID NO: 1310468 - DNA, 15 bp, Homo sapiens
caaaccttatggatg

SEQ ID NO: 1310469 - DNA, 15 bp, Homo sapiens
acaaaccttatggat

SEQ ID NO: 1310470 - DNA, 15 bp, Homo sapiens
tacaaaccttatgga

SEQ ID NO: 1310471 - DNA, 15 bp, Homo sapiens
gtacaaaccttatgg

SEQ ID NO: 1310472 - DNA, 15 bp, Homo sapiens
agtacaaaccttatg

SEQ ID NO: 1310473 - DNA, 15 bp, Homo sapiens
tagtacaaaccttat

SEQ ID NO: 1310474 - DNA, 15 bp, Homo sapiens
atagtacaaacctta

SEQ ID NO: 1310475 - DNA, 15 bp, Homo sapiens
aatagtacaaacctt

SEQ ID NO: 1310476 - DNA, 15 bp, Homo sapiens
aaatagtacaaacct

SEQ ID NO: 1310477 - DNA, 15 bp, Homo sapiens
aaaatagtacaaacc

SEQ ID NO: 1310478 - DNA, 15 bp, Homo sapiens
aaaaatagtacaaac

SEQ ID NO: 1310479 - DNA, 15 bp, Homo sapiens
gaaaaatagtacaaa

SEQ ID NO: 1310480 - DNA, 15 bp, Homo sapiens
tgaaaaatagtacaa

SEQ ID NO: 1310481 - DNA, 15 bp, Homo sapiens
atgaaaaatagtaca

SEQ ID NO: 1310482 - DNA, 15 bp, Homo sapiens
aatgaaaaatagtac

SEQ ID NO: 1310483 - DNA, 15 bp, Homo sapiens
gaatgaaaaatagta

SEQ ID NO: 1310484 - DNA, 15 bp, Homo sapiens
ggaatgaaaaatagt

SEQ ID NO: 1310485 - DNA, 15 bp, Homo sapiens
gggaatgaaaaatag

SEQ ID NO: 1310486 - DNA, 15 bp, Homo sapiens
tgggaatgaaaaata

SEQ ID NO: 1310487 - DNA, 15 bp, Homo sapiens
gtgggaatgaaaaat

SEQ ID NO: 1310488 - DNA, 15 bp, Homo sapiens
ggtgggaatgaaaaa

SEQ ID NO: 1310489 - DNA, 15 bp, Homo sapiens
tggtgggaatgaaaa

SEQ ID NO: 1310490 - DNA, 15 bp, Homo sapiens
ctggtgggaatgaaa

SEQ ID NO: 1310491 - DNA, 15 bp, Homo sapiens
tctggtgggaatgaa

SEQ ID NO: 1310492 - DNA, 15 bp, Homo sapiens
ttctggtgggaatga

SEQ ID NO: 1310493 - DNA, 15 bp, Homo sapiens
tttctggtgggaatg

SEQ ID NO: 1310494 - DNA, 15 bp, Homo sapiens
atttctggtgggaat

SEQ ID NO: 1310495 - DNA, 15 bp, Homo sapiens
catttctggtgggaa

SEQ ID NO: 1310496 - DNA, 15 bp, Homo sapiens
acatttctggtggga

SEQ ID NO: 1310497 - DNA, 15 bp, Homo sapiens
tacatttctggtggg

SEQ ID NO: 1310498 - DNA, 15 bp, Homo sapiens
atacatttctggtgg

SEQ ID NO: 1310499 - DNA, 15 bp, Homo sapiens
catacatttctggtg

SEQ ID NO: 1310500 - DNA, 15 bp, Homo sapiens
tcatacatttctggt

SEQ ID NO: 1310501 - DNA, 15 bp, Homo sapiens
ttcatacatttctgg

SEQ ID NO: 1310502 - DNA, 15 bp, Homo sapiens
cttcatacatttctg

SEQ ID NO: 1310503 - DNA, 15 bp, Homo sapiens
ccttcatacatttct

SEQ ID NO: 1310504 - DNA, 15 bp, Homo sapiens
accttcatacatttc

SEQ ID NO: 1310505 - DNA, 15 bp, Homo sapiens
taccttcatacattt

SEQ ID NO: 1310506 - DNA, 15 bp, Homo sapiens
ctaccttcatacatt

SEQ ID NO: 1310507 - DNA, 15 bp, Homo sapiens
gctaccttcatacat

SEQ ID NO: 1310508 - DNA, 15 bp, Homo sapiens
tgctaccttcataca

SEQ ID NO: 1310509 - DNA, 15 bp, Homo sapiens
ttgctaccttcatac

SEQ ID NO: 1310510 - DNA, 15 bp, Homo sapiens
attgctaccttcata

SEQ ID NO: 1310511 - DNA, 15 bp, Homo sapiens
aattgctaccttcat

SEQ ID NO: 1310512 - DNA, 15 bp, Homo sapiens
aaattgctaccttca

SEQ ID NO: 1310513 - DNA, 15 bp, Homo sapiens
gaaattgctaccttc

SEQ ID NO: 1310514 - DNA, 15 bp, Homo sapiens
agaaattgctacctt

SEQ ID NO: 1310515 - DNA, 15 bp, Homo sapiens
gagaaattgctacct

SEQ ID NO: 1310516 - DNA, 15 bp, Homo sapiens
ggagaaattgctacc

SEQ ID NO: 1310517 - DNA, 15 bp, Homo sapiens
tggagaaattgctac

SEQ ID NO: 1310518 - DNA, 15 bp, Homo sapiens
atggagaaattgcta

SEQ ID NO: 1310519 - DNA, 15 bp, Homo sapiens
catggagaaattgct

SEQ ID NO: 1310520 - DNA, 15 bp, Homo sapiens
tcatggagaaattgc

SEQ ID NO: 1310521 - DNA, 15 bp, Homo sapiens
gtcatggagaaattg

SEQ ID NO: 1310522 - DNA, 15 bp, Homo sapiens
cgtcatggagaaatt

SEQ ID NO: 1310523 - DNA, 15 bp, Homo sapiens
ccgtcatggagaaat

SEQ ID NO: 1310524 - DNA, 15 bp, Homo sapiens
gccgtcatggagaaa

SEQ ID NO: 1310525 - DNA, 15 bp, Homo sapiens
ggccgtcatggagaa

SEQ ID NO: 1310526 - DNA, 15 bp, Homo sapiens
tggccgtcatggaga

SEQ ID NO: 1310527 - DNA, 15 bp, Homo sapiens
gtggccgtcatggag

SEQ ID NO: 1310528 - DNA, 15 bp, Homo sapiens
agtggccgtcatgga

SEQ ID NO: 1310529 - DNA, 15 bp, Homo sapiens
cagtggccgtcatgg

SEQ ID NO: 1310530 - DNA, 15 bp, Homo sapiens
acagtggccgtcatg

SEQ ID NO: 1310531 - DNA, 15 bp, Homo sapiens
gacagtggccgtcat

SEQ ID NO: 1310532 - DNA, 15 bp, Homo sapiens
ggacagtggccgtca

SEQ ID NO: 1310533 - DNA, 15 bp, Homo sapiens
tggacagtggccgtc

SEQ ID NO: 1310534 - DNA, 15 bp, Homo sapiens
ttggacagtggccgt

SEQ ID NO: 1310535 - DNA, 15 bp, Homo sapiens
tttggacagtggccg

SEQ ID NO: 1310536 - DNA, 15 bp, Homo sapiens
atttggacagtggcc

SEQ ID NO: 1310537 - DNA, 15 bp, Homo sapiens
aatttggacagtggc

SEQ ID NO: 1310538 - DNA, 15 bp, Homo sapiens
aaatttggacagtgg

SEQ ID NO: 1310539 - DNA, 15 bp, Homo sapiens
aaaatttggacagtg

SEQ ID NO: 1310540 - DNA, 15 bp, Homo sapiens
caaaatttggacagt

SEQ ID NO: 1310541 - DNA, 15 bp, Homo sapiens
gcaaaatttggacag

SEQ ID NO: 1310542 - DNA, 15 bp, Homo sapiens
ggcaaaatttggaca

SEQ ID NO: 1310543 - DNA, 15 bp, Homo sapiens
tggcaaaatttggac

SEQ ID NO: 1310544 - DNA, 15 bp, Homo sapiens
ttggcaaaatttgga

SEQ ID NO: 1310545 - DNA, 15 bp, Homo sapiens
cttggcaaaatttgg

SEQ ID NO: 1310546 - DNA, 15 bp, Homo sapiens
acttggcaaaatttg

SEQ ID NO: 1310547 - DNA, 15 bp, Homo sapiens
tacttggcaaaattt

SEQ ID NO: 1310548 - DNA, 15 bp, Homo sapiens
ttacttggcaaaatt

SEQ ID NO: 1310549 - DNA, 15 bp, Homo sapiens
attacttggcaaaat

SEQ ID NO: 1310550 - DNA, 15 bp, Homo sapiens
cattacttggcaaaa

SEQ ID NO: 1310551 - DNA, 15 bp, Homo sapiens
tcattacttggcaaa

SEQ ID NO: 1310552 - DNA, 15 bp, Homo sapiens
gtcattacttggcaa

SEQ ID NO: 1310553 - DNA, 15 bp, Homo sapiens
tgtcattacttggca

SEQ ID NO: 1310554 - DNA, 15 bp, Homo sapiens
atgtcattacttggc

SEQ ID NO: 1310555 - DNA, 15 bp, Homo sapiens
aatgtcattacttgg

SEQ ID NO: 1310556 - DNA, 15 bp, Homo sapiens
taatgtcattacttg

SEQ ID NO: 1310557 - DNA, 15 bp, Homo sapiens
ttaatgtcattactt

SEQ ID NO: 1310558 - DNA, 15 bp, Homo sapiens
tttaatgtcattact

SEQ ID NO: 1310559 - DNA, 15 bp, Homo sapiens
ttttaatgtcattac

SEQ ID NO: 1310560 - DNA, 15 bp, Homo sapiens
attttaatgtcatta

SEQ ID NO: 1310561 - DNA, 15 bp, Homo sapiens
tattttaatgtcatt

SEQ ID NO: 1310562 - DNA, 15 bp, Homo sapiens
atattttaatgtcat

SEQ ID NO: 1310563 - DNA, 15 bp, Homo sapiens
aatattttaatgtca

SEQ ID NO: 1310564 - DNA, 15 bp, Homo sapiens
gaatattttaatgtc

SEQ ID NO: 1310565 - DNA, 15 bp, Homo sapiens
agaatattttaatgt

SEQ ID NO: 1310566 - DNA, 15 bp, Homo sapiens
aagaatattttaatg

SEQ ID NO: 1310567 - DNA, 15 bp, Homo sapiens
gaagaatattttaat

SEQ ID NO: 1310568 - DNA, 15 bp, Homo sapiens
agaagaatattttaa

SEQ ID NO: 1310569 - DNA, 15 bp, Homo sapiens
gagaagaatatttta

SEQ ID NO: 1310570 - DNA, 15 bp, Homo sapiens
tgagaagaatatttt

SEQ ID NO: 1310571 - DNA, 15 bp, Homo sapiens
atgagaagaatattt

SEQ ID NO: 1310572 - DNA, 15 bp, Homo sapiens
gatgagaagaatatt

SEQ ID NO: 1310573 - DNA, 15 bp, Homo sapiens
agatgagaagaatat

SEQ ID NO: 1310574 - DNA, 15 bp, Homo sapiens
tagatgagaagaata

SEQ ID NO: 1310575 - DNA, 15 bp, Homo sapiens
atagatgagaagaat

SEQ ID NO: 1310576 - DNA, 15 bp, Homo sapiens
aatagatgagaagaa

SEQ ID NO: 1310577 - DNA, 15 bp, Homo sapiens
taatagatgagaaga

SEQ ID NO: 1310578 - DNA, 15 bp, Homo sapiens
ataatagatgagaag

SEQ ID NO: 1310579 - DNA, 15 bp, Homo sapiens
gataatagatgagaa

SEQ ID NO: 1310580 - DNA, 15 bp, Homo sapiens
tgataatagatgaga

SEQ ID NO: 1310581 - DNA, 15 bp, Homo sapiens
gtgataatagatgag

SEQ ID NO: 1310582 - DNA, 15 bp, Homo sapiens
ggtgataatagatga

SEQ ID NO: 1310583 - DNA, 15 bp, Homo sapiens
tggtgataatagatg

SEQ ID NO: 1310584 - DNA, 15 bp, Homo sapiens
atggtgataatagat

SEQ ID NO: 1310585 - DNA, 15 bp, Homo sapiens
gatggtgataataga

SEQ ID NO: 1310586 - DNA, 15 bp, Homo sapiens
tgatggtgataatag

SEQ ID NO: 1310587 - DNA, 15 bp, Homo sapiens
atgatggtgataata

SEQ ID NO: 1310588 - DNA, 15 bp, Homo sapiens
aatgatggtgataat

SEQ ID NO: 1310589 - DNA, 15 bp, Homo sapiens
aaatgatggtgataa

SEQ ID NO: 1310590 - DNA, 15 bp, Homo sapiens
taaatgatggtgata

SEQ ID NO: 1310591 - DNA, 15 bp, Homo sapiens
ttaaatgatggtgat

SEQ ID NO: 1310592 - DNA, 15 bp, Homo sapiens
tttaaatgatggtga

SEQ ID NO: 1310593 - DNA, 15 bp, Homo sapiens
ttttaaatgatggtg

SEQ ID NO: 1310594 - DNA, 15 bp, Homo sapiens
tttttaaatgatggt

SEQ ID NO: 1310595 - DNA, 15 bp, Homo sapiens
ttttttaaatgatgg

SEQ ID NO: 1310596 - DNA, 15 bp, Homo sapiens
cttttttaaatgatg

SEQ ID NO: 1310597 - DNA, 15 bp, Homo sapiens
tcttttttaaatgat

SEQ ID NO: 1310598 - DNA, 15 bp, Homo sapiens
ttcttttttaaatga

SEQ ID NO: 1310599 - DNA, 15 bp, Homo sapiens
attcttttttaaatg

SEQ ID NO: 1310600 - DNA, 15 bp, Homo sapiens
aattcttttttaaat

SEQ ID NO: 1310601 - DNA, 15 bp, Homo sapiens
aaattcttttttaaa

SEQ ID NO: 1310602 - DNA, 15 bp, Homo sapiens
gaaattcttttttaa

SEQ ID NO: 1310603 - DNA, 15 bp, Homo sapiens
agaaattctttttta

SEQ ID NO: 1310604 - DNA, 15 bp, Homo sapiens
gagaaattctttttt

SEQ ID NO: 1310605 - DNA, 15 bp, Homo sapiens
ggagaaattcttttt

SEQ ID NO: 1310606 - DNA, 15 bp, Homo sapiens
gggagaaattctttt

SEQ ID NO: 1310607 - DNA, 15 bp, Homo sapiens
tgggagaaattcttt

SEQ ID NO: 1310608 - DNA, 15 bp, Homo sapiens
atgggagaaattctt

SEQ ID NO: 1310609 - DNA, 15 bp, Homo sapiens
aatgggagaaattct

SEQ ID NO: 1310610 - DNA, 15 bp, Homo sapiens
aaatgggagaaattc

SEQ ID NO: 1310611 - DNA, 15 bp, Homo sapiens
aaaatgggagaaatt

SEQ ID NO: 1310612 - DNA, 15 bp, Homo sapiens
taaaatgggagaaat

SEQ ID NO: 1310613 - DNA, 15 bp, Homo sapiens
ttaaaatgggagaaa

SEQ ID NO: 1310614 - DNA, 15 bp, Homo sapiens
attaaaatgggagaa

SEQ ID NO: 1310615 - DNA, 15 bp, Homo sapiens
tattaaaatgggaga

SEQ ID NO: 1310616 - DNA, 15 bp, Homo sapiens
ttattaaaatgggag

SEQ ID NO: 1310617 - DNA, 15 bp, Homo sapiens
tttattaaaatggga

SEQ ID NO: 1310618 - DNA, 15 bp, Homo sapiens
ctttattaaaatggg

SEQ ID NO: 1310619 - DNA, 15 bp, Homo sapiens
cctttattaaaatgg

SEQ ID NO: 1310620 - DNA, 15 bp, Homo sapiens
tcctttattaaaatg

SEQ ID NO: 1310621 - DNA, 15 bp, Homo sapiens
ttcctttattaaaat

SEQ ID NO: 1310622 - DNA, 15 bp, Homo sapiens
tttcctttattaaaa

SEQ ID NO: 1310623 - DNA, 15 bp, Homo sapiens
ttttcctttattaaa

SEQ ID NO: 1310624 - DNA, 15 bp, Homo sapiens
tttttcctttattaa

SEQ ID NO: 1310625 - DNA, 15 bp, Homo sapiens
ctttttcctttatta

SEQ ID NO: 1310626 - DNA, 15 bp, Homo sapiens
cctttttcctttatt

SEQ ID NO: 1310627 - DNA, 15 bp, Homo sapiens
tcctttttcctttat

SEQ ID NO: 1310628 - DNA, 15 bp, Homo sapiens
gtcctttttccttta

SEQ ID NO: 1310629 - DNA, 15 bp, Homo sapiens
tgtcctttttccttt

SEQ ID NO: 1310630 - DNA, 15 bp, Homo sapiens
ttgtcctttttcctt

SEQ ID NO: 1310631 - DNA, 15 bp, Homo sapiens
tttgtcctttttcct

SEQ ID NO: 1310632 - DNA, 15 bp, Homo sapiens
atttgtcctttttcc

SEQ ID NO: 1310633 - DNA, 15 bp, Homo sapiens
gatttgtcctttttc

SEQ ID NO: 1310634 - DNA, 15 bp, Homo sapiens
tgatttgtccttttt

SEQ ID NO: 1310635 - DNA, 15 bp, Homo sapiens
ctgatttgtcctttt

SEQ ID NO: 1310636 - DNA, 15 bp, Homo sapiens
tctgatttgtccttt

SEQ ID NO: 1310637 - DNA, 15 bp, Homo sapiens
ttctgatttgtcctt

SEQ ID NO: 1310638 - DNA, 15 bp, Homo sapiens
tttctgatttgtcct

SEQ ID NO: 1310639 - DNA, 15 bp, Homo sapiens
ttttctgatttgtcc

SEQ ID NO: 1310640 - DNA, 15 bp, Homo sapiens
tttttctgatttgtc

SEQ ID NO: 1310641 - DNA, 15 bp, Homo sapiens
ttttttctgatttgt

SEQ ID NO: 1310642 - DNA, 15 bp, Homo sapiens
tttttttctgatttg

SEQ ID NO: 1310643 - DNA, 15 bp, Homo sapiens
ctttttttctgattt

SEQ ID NO: 1310644 - DNA, 15 bp, Homo sapiens
cctttttttctgatt

SEQ ID NO: 1310645 - DNA, 15 bp, Homo sapiens
tcctttttttctgat

SEQ ID NO: 1310646 - DNA, 15 bp, Homo sapiens
atcctttttttctga

SEQ ID NO: 1310647 - DNA, 15 bp, Homo sapiens
cttatcctttttttc

SEQ ID NO: 1310648 - DNA, 15 bp, Homo sapiens
tcttatccttttttt

SEQ ID NO: 1310649 - DNA, 15 bp, Homo sapiens
ttcttatcctttttt

SEQ ID NO: 1310650 - DNA, 15 bp, Homo sapiens
cttcttatccttttt

SEQ ID NO: 1310651 - DNA, 15 bp, Homo sapiens
tcttcttatcctttt

SEQ ID NO: 1310652 - DNA, 15 bp, Homo sapiens
ctcttcttatccttt

SEQ ID NO: 1310653 - DNA, 15 bp, Homo sapiens
gctcttcttatcctt

SEQ ID NO: 1310654 - DNA, 15 bp, Homo sapiens
ggctcttcttatcct

SEQ ID NO: 1310655 - DNA, 15 bp, Homo sapiens
gggctcttcttatcc

SEQ ID NO: 1310656 - DNA, 15 bp, Homo sapiens
agggctcttcttatc

SEQ ID NO: 1310657 - DNA, 15 bp, Homo sapiens
aagggctcttcttat

SEQ ID NO: 1310658 - DNA, 15 bp, Homo sapiens
aaagggctcttctta

SEQ ID NO: 1310659 - DNA, 15 bp, Homo sapiens
taaagggctcttctt

SEQ ID NO: 1310660 - DNA, 15 bp, Homo sapiens
ttaaagggctcttct

SEQ ID NO: 1310661 - DNA, 15 bp, Homo sapiens
tttaaagggctcttc

SEQ ID NO: 1310662 - DNA, 15 bp, Homo sapiens
atttaaagggctctt

SEQ ID NO: 1310663 - DNA, 15 bp, Homo sapiens
aatttaaagggctct

SEQ ID NO: 1310664 - DNA, 15 bp, Homo sapiens
caatttaaagggctc

SEQ ID NO: 1310665 - DNA, 15 bp, Homo sapiens
acaatttaaagggct

SEQ ID NO: 1310666 - DNA, 15 bp, Homo sapiens
tacaatttaaagggc

SEQ ID NO: 1310667 - DNA, 15 bp, Homo sapiens
atacaatttaaaggg

SEQ ID NO: 1310668 - DNA, 15 bp, Homo sapiens
tatacaatttaaagg

SEQ ID NO: 1310669 - DNA, 15 bp, Homo sapiens
ttatacaatttaaag

SEQ ID NO: 1310670 - DNA, 15 bp, Homo sapiens
tttatacaatttaaa

SEQ ID NO: 1310671 - DNA, 15 bp, Homo sapiens
atttatacaatttaa

SEQ ID NO: 1310672 - DNA, 15 bp, Homo sapiens
tatttatacaattta

SEQ ID NO: 1310673 - DNA, 15 bp, Homo sapiens
atatttatacaattt

SEQ ID NO: 1310674 - DNA, 15 bp, Homo sapiens
tatatttatacaatt

SEQ ID NO: 1310675 - DNA, 15 bp, Homo sapiens
ctatatttatacaat

SEQ ID NO: 1310676 - DNA, 15 bp, Homo sapiens
actatatttatacaa

SEQ ID NO: 1310677 - DNA, 15 bp, Homo sapiens
aactatatttataca

SEQ ID NO: 1310678 - DNA, 15 bp, Homo sapiens
gaactatatttatac

SEQ ID NO: 1310679 - DNA, 15 bp, Homo sapiens
agaactatatttata

SEQ ID NO: 1310680 - DNA, 15 bp, Homo sapiens
aagaactatatttat

SEQ ID NO: 1310681 - DNA, 15 bp, Homo sapiens
caagaactatattta

SEQ ID NO: 1310682 - DNA, 15 bp, Homo sapiens
acaagaactatattt

SEQ ID NO: 1310683 - DNA, 15 bp, Homo sapiens
aacaagaactatatt

SEQ ID NO: 1310684 - DNA, 15 bp, Homo sapiens
caacaagaactatat

SEQ ID NO: 1310685 - DNA, 15 bp, Homo sapiens
acaacaagaactata

SEQ ID NO: 1310686 - DNA, 15 bp, Homo sapiens
cacaacaagaactat

SEQ ID NO: 1310687 - DNA, 15 bp, Homo sapiens
tcacaacaagaacta

SEQ ID NO: 1310688 - DNA, 15 bp, Homo sapiens
atcacaacaagaact

SEQ ID NO: 1310689 - DNA, 15 bp, Homo sapiens
aatcacaacaagaac

SEQ ID NO: 1310690 - DNA, 15 bp, Homo sapiens
taatcacaacaagaa

SEQ ID NO: 1310691 - DNA, 15 bp, Homo sapiens
ataatcacaacaaga

SEQ ID NO: 1310692 - DNA, 15 bp, Homo sapiens
aataatcacaacaag

SEQ ID NO: 1310693 - DNA, 15 bp, Homo sapiens
aaataatcacaacaa

SEQ ID NO: 1310694 - DNA, 15 bp, Homo sapiens
aaaataatcacaaca

SEQ ID NO: 1310695 - DNA, 15 bp, Homo sapiens
aaaaataatcacaac

SEQ ID NO: 1310696 - DNA, 15 bp, Homo sapiens
gaaaaataatcacaa

SEQ ID NO: 1310697 - DNA, 15 bp, Homo sapiens
agaaaaataatcaca

SEQ ID NO: 1310698 - DNA, 15 bp, Homo sapiens
aagaaaaataatcac

SEQ ID NO: 1310699 - DNA, 15 bp, Homo sapiens
aaagaaaaataatca

SEQ ID NO: 1310700 - DNA, 15 bp, Homo sapiens
aaaagaaaaataatc

SEQ ID NO: 1310701 - DNA, 15 bp, Homo sapiens
gaaaagaaaaataat

SEQ ID NO: 1310702 - DNA, 15 bp, Homo sapiens
agaaaagaaaaataa

SEQ ID NO: 1310703 - DNA, 15 bp, Homo sapiens
aagaaaagaaaaata

SEQ ID NO: 1310704 - DNA, 15 bp, Homo sapiens
caagaaaagaaaaat

SEQ ID NO: 1310705 - DNA, 15 bp, Homo sapiens
gcaagaaaagaaaaa

SEQ ID NO: 1310706 - DNA, 15 bp, Homo sapiens
agcaagaaaagaaaa

SEQ ID NO: 1310707 - DNA, 15 bp, Homo sapiens
cagcaagaaaagaaa

SEQ ID NO: 1310708 - DNA, 15 bp, Homo sapiens
tcagcaagaaaagaa

SEQ ID NO: 1310709 - DNA, 15 bp, Homo sapiens
ttcagcaagaaaaga

SEQ ID NO: 1310710 - DNA, 15 bp, Homo sapiens
cttcagcaagaaaag

SEQ ID NO: 1310711 - DNA, 15 bp, Homo sapiens
tcttcagcaagaaaa

SEQ ID NO: 1310712 - DNA, 15 bp, Homo sapiens
gtcttcagcaagaaa

SEQ ID NO: 1310713 - DNA, 15 bp, Homo sapiens
tgtcttcagcaagaa

SEQ ID NO: 1310714 - DNA, 15 bp, Homo sapiens
ttgtcttcagcaaga

SEQ ID NO: 1310715 - DNA, 15 bp, Homo sapiens
tttgtcttcagcaag

SEQ ID NO: 1310716 - DNA, 15 bp, Homo sapiens
atttgtcttcagcaa

SEQ ID NO: 1310717 - DNA, 15 bp, Homo sapiens
catttgtcttcagca

SEQ ID NO: 1310718 - DNA, 15 bp, Homo sapiens
gcatttgtcttcagc

SEQ ID NO: 1310719 - DNA, 15 bp, Homo sapiens
tgcatttgtcttcag

SEQ ID NO: 1310720 - DNA, 15 bp, Homo sapiens
atgcatttgtcttca

SEQ ID NO: 1310721 - DNA, 15 bp, Homo sapiens
gatgcatttgtcttc

SEQ ID NO: 1310722 - DNA, 15 bp, Homo sapiens
agatgcatttgtctt

SEQ ID NO: 1310723 - DNA, 15 bp, Homo sapiens
gagatgcatttgtct

SEQ ID NO: 1310724 - DNA, 15 bp, Homo sapiens
agagatgcatttgtc

SEQ ID NO: 1310725 - DNA, 15 bp, Homo sapiens
tagagatgcatttgt

SEQ ID NO: 1310726 - DNA, 15 bp, Homo sapiens
gtagagatgcatttg

SEQ ID NO: 1310727 - DNA, 15 bp, Homo sapiens
ggtagagatgcattt

SEQ ID NO: 1310728 - DNA, 15 bp, Homo sapiens
gggtagagatgcatt

SEQ ID NO: 1310729 - DNA, 15 bp, Homo sapiens
agggtagagatgcat

SEQ ID NO: 1310730 - DNA, 15 bp, Homo sapiens
cagggtagagatgca

SEQ ID NO: 1310731 - DNA, 15 bp, Homo sapiens
acagggtagagatgc

SEQ ID NO: 1310732 - DNA, 15 bp, Homo sapiens
tacagggtagagatg

SEQ ID NO: 1310733 - DNA, 15 bp, Homo sapiens
atacagggtagagat

SEQ ID NO: 1310734 - DNA, 15 bp, Homo sapiens
gatacagggtagaga

SEQ ID NO: 1310735 - DNA, 15 bp, Homo sapiens
tgatacagggtagag

SEQ ID NO: 1310736 - DNA, 15 bp, Homo sapiens
ctgatacagggtaga

SEQ ID NO: 1310737 - DNA, 15 bp, Homo sapiens
tctgatacagggtag

SEQ ID NO: 1310738 - DNA, 15 bp, Homo sapiens
gtctgatacagggta

SEQ ID NO: 1310739 - DNA, 15 bp, Homo sapiens
cgtctgatacagggt

SEQ ID NO: 1310740 - DNA, 15 bp, Homo sapiens
tcgtctgatacaggg

SEQ ID NO: 1310741 - DNA, 15 bp, Homo sapiens
ttcgtctgatacagg

SEQ ID NO: 1310742 - DNA, 15 bp, Homo sapiens
attcgtctgatacag

SEQ ID NO: 1310743 - DNA, 15 bp, Homo sapiens
gattcgtctgataca

SEQ ID NO: 1310744 - DNA, 15 bp, Homo sapiens
agattcgtctgatac

SEQ ID NO: 1310745 - DNA, 15 bp, Homo sapiens
aagattcgtctgata

SEQ ID NO: 1310746 - DNA, 15 bp, Homo sapiens
aaagattcgtctgat

SEQ ID NO: 1310747 - DNA, 15 bp, Homo sapiens
taaagattcgtctga

SEQ ID NO: 1310748 - DNA, 15 bp, Homo sapiens
ataaagattcgtctg

SEQ ID NO: 1310749 - DNA, 15 bp, Homo sapiens
aataaagattcgtct

SEQ ID NO: 1310750 - DNA, 15 bp, Homo sapiens
aaataaagattcgtc

SEQ ID NO: 1310751 - DNA, 15 bp, Homo sapiens
caaataaagattcgt

SEQ ID NO: 1310752 - DNA, 15 bp, Homo sapiens
tcaaataaagattcg

SEQ ID NO: 1310753 - DNA, 15 bp, Homo sapiens
atcaaataaagattc

SEQ ID NO: 1310754 - DNA, 15 bp, Homo sapiens
gatcaaataaagatt

SEQ ID NO: 1310755 - DNA, 15 bp, Homo sapiens
tgatcaaataaagat

SEQ ID NO: 1310756 - DNA, 15 bp, Homo sapiens
atgatcaaataaaga

SEQ ID NO: 1310757 - DNA, 15 bp, Homo sapiens
catgatcaaataaag

SEQ ID NO: 1310758 - DNA, 15 bp, Homo sapiens
acatgatcaaataaa

SEQ ID NO: 1310759 - DNA, 15 bp, Homo sapiens
gacatgatcaaataa

SEQ ID NO: 1310760 - DNA, 15 bp, Homo sapiens
agacatgatcaaata

SEQ ID NO: 1310761 - DNA, 15 bp, Homo sapiens
gagacatgatcaaat

SEQ ID NO: 1310762 - DNA, 15 bp, Homo sapiens
ggagacatgatcaaa

SEQ ID NO: 1310763 - DNA, 15 bp, Homo sapiens
gggagacatgatcaa

SEQ ID NO: 1310764 - DNA, 15 bp, Homo sapiens
ggggagacatgatca

SEQ ID NO: 1310765 - DNA, 15 bp, Homo sapiens
aggggagacatgatc

SEQ ID NO: 1310766 - DNA, 15 bp, Homo sapiens
taggggagacatgat

SEQ ID NO: 1310767 - DNA, 15 bp, Homo sapiens
gtaggggagacatga

SEQ ID NO: 1310768 - DNA, 15 bp, Homo sapiens
ggtaggggagacatg

SEQ ID NO: 1310769 - DNA, 15 bp, Homo sapiens
aggtaggggagacat

SEQ ID NO: 1310770 - DNA, 15 bp, Homo sapiens
aaggtaggggagaca

SEQ ID NO: 1310771 - DNA, 15 bp, Homo sapiens
caaggtaggggagac

SEQ ID NO: 1310772 - DNA, 15 bp, Homo sapiens
tcaaggtaggggaga

SEQ ID NO: 1310773 - DNA, 15 bp, Homo sapiens
ttcaaggtaggggag

SEQ ID NO: 1310774 - DNA, 15 bp, Homo sapiens
tttcaaggtagggga

SEQ ID NO: 1310775 - DNA, 15 bp, Homo sapiens
atttcaaggtagggg

SEQ ID NO: 1310776 - DNA, 15 bp, Homo sapiens
aatttcaaggtaggg

SEQ ID NO: 1310777 - DNA, 15 bp, Homo sapiens
gaatttcaaggtagg

SEQ ID NO: 1310778 - DNA, 15 bp, Homo sapiens
agaatttcaaggtag

SEQ ID NO: 1310779 - DNA, 15 bp, Homo sapiens
aagaatttcaaggta

SEQ ID NO: 1310780 - DNA, 15 bp, Homo sapiens
caagaatttcaaggt

SEQ ID NO: 1310781 - DNA, 15 bp, Homo sapiens
tcaagaatttcaagg

SEQ ID NO: 1310782 - DNA, 15 bp, Homo sapiens
ctcaagaatttcaag

SEQ ID NO: 1310783 - DNA, 15 bp, Homo sapiens
cctcaagaatttcaa

SEQ ID NO: 1310784 - DNA, 15 bp, Homo sapiens
tcctcaagaatttca

SEQ ID NO: 1310785 - DNA, 15 bp, Homo sapiens
gtcctcaagaatttc

SEQ ID NO: 1310786 - DNA, 15 bp, Homo sapiens
agtcctcaagaattt

SEQ ID NO: 1310787 - DNA, 15 bp, Homo sapiens
aagtcctcaagaatt

SEQ ID NO: 1310788 - DNA, 15 bp, Homo sapiens
aaagtcctcaagaat

SEQ ID NO: 1310789 - DNA, 15 bp, Homo sapiens
gaaagtcctcaagaa

SEQ ID NO: 1310790 - DNA, 15 bp, Homo sapiens
ggaaagtcctcaaga

SEQ ID NO: 1310791 - DNA, 15 bp, Homo sapiens
tggaaagtcctcaag

SEQ ID NO: 1310792 - DNA, 15 bp, Homo sapiens
gtggaaagtcctcaa

SEQ ID NO: 1310793 - DNA, 15 bp, Homo sapiens
tgtggaaagtcctca

SEQ ID NO: 1310794 - DNA, 15 bp, Homo sapiens
ctgtggaaagtcctc

SEQ ID NO: 1310795 - DNA, 15 bp, Homo sapiens
gctgtggaaagtcct

SEQ ID NO: 1310796 - DNA, 15 bp, Homo sapiens
agctgtggaaagtcc

SEQ ID NO: 1310797 - DNA, 15 bp, Homo sapiens
aagctgtggaaagtc

SEQ ID NO: 1310798 - DNA, 15 bp, Homo sapiens
gaagctgtggaaagt

SEQ ID NO: 1310799 - DNA, 15 bp, Homo sapiens
agaagctgtggaaag

SEQ ID NO: 1310800 - DNA, 15 bp, Homo sapiens
gagaagctgtggaaa

SEQ ID NO: 1310801 - DNA, 15 bp, Homo sapiens
tgagaagctgtggaa

SEQ ID NO: 1310802 - DNA, 15 bp, Homo sapiens
ctgagaagctgtgga

SEQ ID NO: 1310803 - DNA, 15 bp, Homo sapiens
gctgagaagctgtgg

SEQ ID NO: 1310804 - DNA, 15 bp, Homo sapiens
tgctgagaagctgtg

SEQ ID NO: 1310805 - DNA, 15 bp, Homo sapiens
gtgctgagaagctgt

SEQ ID NO: 1310806 - DNA, 15 bp, Homo sapiens
agtgctgagaagctg

SEQ ID NO: 1310807 - DNA, 15 bp, Homo sapiens
aagtgctgagaagct

SEQ ID NO: 1310808 - DNA, 15 bp, Homo sapiens
taagtgctgagaagc

SEQ ID NO: 1310809 - DNA, 15 bp, Homo sapiens
ttaagtgctgagaag

SEQ ID NO: 1310810 - DNA, 15 bp, Homo sapiens
gttaagtgctgagaa

SEQ ID NO: 1310811 - DNA, 15 bp, Homo sapiens
cgttaagtgctgaga

SEQ ID NO: 1310812 - DNA, 15 bp, Homo sapiens
acgttaagtgctgag

SEQ ID NO: 1310813 - DNA, 15 bp, Homo sapiens
cacgttaagtgctga

SEQ ID NO: 1310814 - DNA, 15 bp, Homo sapiens
ccacgttaagtgctg

SEQ ID NO: 1310815 - DNA, 15 bp, Homo sapiens
accacgttaagtgct

SEQ ID NO: 1310816 - DNA, 15 bp, Homo sapiens
gaccacgttaagtgc

SEQ ID NO: 1310817 - DNA, 15 bp, Homo sapiens
agaccacgttaagtg

SEQ ID NO: 1310818 - DNA, 15 bp, Homo sapiens
aagaccacgttaagt

SEQ ID NO: 1310819 - DNA, 15 bp, Homo sapiens
taagaccacgttaag

SEQ ID NO: 1310820 - DNA, 15 bp, Homo sapiens
ttaagaccacgttaa

SEQ ID NO: 1310821 - DNA, 15 bp, Homo sapiens
gttaagaccacgtta

SEQ ID NO: 1310822 - DNA, 15 bp, Homo sapiens
tgttaagaccacgtt

SEQ ID NO: 1310823 - DNA, 15 bp, Homo sapiens
atgttaagaccacgt

SEQ ID NO: 1310824 - DNA, 15 bp, Homo sapiens
catgttaagaccacg

SEQ ID NO: 1310825 - DNA, 15 bp, Homo sapiens
ccatgttaagaccac

SEQ ID NO: 1310826 - DNA, 15 bp, Homo sapiens
gccatgttaagacca

SEQ ID NO: 1310827 - DNA, 15 bp, Homo sapiens
tgccatgttaagacc

SEQ ID NO: 1310828 - DNA, 15 bp, Homo sapiens
atgccatgttaagac

SEQ ID NO: 1310829 - DNA, 15 bp, Homo sapiens
tatgccatgttaaga

SEQ ID NO: 1310830 - DNA, 15 bp, Homo sapiens
atatgccatgttaag

SEQ ID NO: 1310831 - DNA, 15 bp, Homo sapiens
tatatgccatgttaa

SEQ ID NO: 1310832 - DNA, 15 bp, Homo sapiens
ttatatgccatgtta

SEQ ID NO: 1310833 - DNA, 15 bp, Homo sapiens
cttatatgccatgtt

SEQ ID NO: 1310834 - DNA, 15 bp, Homo sapiens
acttatatgccatgt

SEQ ID NO: 1310835 - DNA, 15 bp, Homo sapiens
tacttatatgccatg

SEQ ID NO: 1310836 - DNA, 15 bp, Homo sapiens
gtacttatatgccat

SEQ ID NO: 1310837 - DNA, 15 bp, Homo sapiens
cgtacttatatgcca

SEQ ID NO: 1310838 - DNA, 15 bp, Homo sapiens
acgtacttatatgcc

SEQ ID NO: 1310839 - DNA, 15 bp, Homo sapiens
cacgtacttatatgc

SEQ ID NO: 1310840 - DNA, 15 bp, Homo sapiens
acacgtacttatatg

SEQ ID NO: 1310841 - DNA, 15 bp, Homo sapiens
tacacgtacttatat

SEQ ID NO: 1310842 - DNA, 15 bp, Homo sapiens
ttacacgtacttata

SEQ ID NO: 1310843 - DNA, 15 bp, Homo sapiens
cttacacgtacttat

SEQ ID NO: 1310844 - DNA, 15 bp, Homo sapiens
tcttacacgtactta

SEQ ID NO: 1310845 - DNA, 15 bp, Homo sapiens
atcttacacgtactt

SEQ ID NO: 1310846 - DNA, 15 bp, Homo sapiens
catcttacacgtact

SEQ ID NO: 1310847 - DNA, 15 bp, Homo sapiens
acatcttacacgtac

SEQ ID NO: 1310848 - DNA, 15 bp, Homo sapiens
aacatcttacacgta

SEQ ID NO: 1310849 - DNA, 15 bp, Homo sapiens
taacatcttacacgt

SEQ ID NO: 1310850 - DNA, 15 bp, Homo sapiens
ctaacatcttacacg

SEQ ID NO: 1310851 - DNA, 15 bp, Homo sapiens
gctaacatcttacac

SEQ ID NO: 1310852 - DNA, 15 bp, Homo sapiens
ggctaacatcttaca

SEQ ID NO: 1310853 - DNA, 15 bp, Homo sapiens
gggctaacatcttac

SEQ ID NO: 1310854 - DNA, 15 bp, Homo sapiens
agggctaacatctta

SEQ ID NO: 1310855 - DNA, 15 bp, Homo sapiens
tagggctaacatctt

SEQ ID NO: 1310856 - DNA, 15 bp, Homo sapiens
atagggctaacatct

SEQ ID NO: 1310857 - DNA, 15 bp, Homo sapiens
aatagggctaacatc

SEQ ID NO: 1310858 - DNA, 15 bp, Homo sapiens
aaatagggctaacat

SEQ ID NO: 1310859 - DNA, 15 bp, Homo sapiens
gaaatagggctaaca

SEQ ID NO: 1310860 - DNA, 15 bp, Homo sapiens
agaaatagggctaac

SEQ ID NO: 1310861 - DNA, 15 bp, Homo sapiens
gagaaatagggctaa

SEQ ID NO: 1310862 - DNA, 15 bp, Homo sapiens
ggagaaatagggcta

SEQ ID NO: 1310863 - DNA, 15 bp, Homo sapiens
tggagaaatagggct

SEQ ID NO: 1310864 - DNA, 15 bp, Homo sapiens
ctggagaaatagggc

SEQ ID NO: 1310865 - DNA, 15 bp, Homo sapiens
gctggagaaataggg

SEQ ID NO: 1310866 - DNA, 15 bp, Homo sapiens
ggctggagaaatagg

SEQ ID NO: 1310867 - DNA, 15 bp, Homo sapiens
tggctggagaaatag

SEQ ID NO: 1310868 - DNA, 15 bp, Homo sapiens
gtggctggagaaata

SEQ ID NO: 1310869 - DNA, 15 bp, Homo sapiens
agtggctggagaaat

SEQ ID NO: 1310870 - DNA, 15 bp, Homo sapiens
aagtggctggagaaa

SEQ ID NO: 1310871 - DNA, 15 bp, Homo sapiens
aaagtggctggagaa

SEQ ID NO: 1310872 - DNA, 15 bp, Homo sapiens
caaagtggctggaga

SEQ ID NO: 1310873 - DNA, 15 bp, Homo sapiens
tcaaagtggctggag

SEQ ID NO: 1310874 - DNA, 15 bp, Homo sapiens
ttcaaagtggctgga

SEQ ID NO: 1310875 - DNA, 15 bp, Homo sapiens
attcaaagtggctgg

SEQ ID NO: 1310876 - DNA, 15 bp, Homo sapiens
cattcaaagtggctg

SEQ ID NO: 1310877 - DNA, 15 bp, Homo sapiens
acattcaaagtggct

SEQ ID NO: 1310878 - DNA, 15 bp, Homo sapiens
aacattcaaagtggc

SEQ ID NO: 1310879 - DNA, 15 bp, Homo sapiens
aaacattcaaagtgg

SEQ ID NO: 1310880 - DNA, 15 bp, Homo sapiens
aaaacattcaaagtg

SEQ ID NO: 1310881 - DNA, 15 bp, Homo sapiens
taaaacattcaaagt

SEQ ID NO: 1310882 - DNA, 15 bp, Homo sapiens
ttaaaacattcaaag

SEQ ID NO: 1310883 - DNA, 15 bp, Homo sapiens
attaaaacattcaaa

SEQ ID NO: 1310884 - DNA, 15 bp, Homo sapiens
aattaaaacattcaa

SEQ ID NO: 1310885 - DNA, 15 bp, Homo sapiens
gaattaaaacattca

SEQ ID NO: 1310886 - DNA, 15 bp, Homo sapiens
agaattaaaacattc

SEQ ID NO: 1310887 - DNA, 15 bp, Homo sapiens
aagaattaaaacatt

SEQ ID NO: 1310888 - DNA, 15 bp, Homo sapiens
aaagaattaaaacat

SEQ ID NO: 1310889 - DNA, 15 bp, Homo sapiens
gaaagaattaaaaca

SEQ ID NO: 1310890 - DNA, 15 bp, Homo sapiens
tgaaagaattaaaac

SEQ ID NO: 1310891 - DNA, 15 bp, Homo sapiens
ctgaaagaattaaaa

SEQ ID NO: 1310892 - DNA, 15 bp, Homo sapiens
actgaaagaattaaa

SEQ ID NO: 1310893 - DNA, 15 bp, Homo sapiens
tactgaaagaattaa

SEQ ID NO: 1310894 - DNA, 15 bp, Homo sapiens
atactgaaagaatta

SEQ ID NO: 1310895 - DNA, 15 bp, Homo sapiens
gatactgaaagaatt

SEQ ID NO: 1310896 - DNA, 15 bp, Homo sapiens
ggatactgaaagaat

SEQ ID NO: 1310897 - DNA, 15 bp, Homo sapiens
tggatactgaaagaa

SEQ ID NO: 1310898 - DNA, 15 bp, Homo sapiens
ttggatactgaaaga

SEQ ID NO: 1310899 - DNA, 15 bp, Homo sapiens
tttggatactgaaag

SEQ ID NO: 1310900 - DNA, 15 bp, Homo sapiens
atttggatactgaaa

SEQ ID NO: 1310901 - DNA, 15 bp, Homo sapiens
aatttggatactgaa

SEQ ID NO: 1310902 - DNA, 15 bp, Homo sapiens
gaatttggatactga

SEQ ID NO: 1310903 - DNA, 15 bp, Homo sapiens
agaatttggatactg

SEQ ID NO: 1310904 - DNA, 15 bp, Homo sapiens
gagaatttggatact

SEQ ID NO: 1310905 - DNA, 15 bp, Homo sapiens
agagaatttggatac

SEQ ID NO: 1310906 - DNA, 15 bp, Homo sapiens
gagagaatttggata

SEQ ID NO: 1310907 - DNA, 15 bp, Homo sapiens
ggagagaatttggat

SEQ ID NO: 1310908 - DNA, 15 bp, Homo sapiens
gggagagaatttgga

SEQ ID NO: 1310909 - DNA, 15 bp, Homo sapiens
tgggagagaatttgg

SEQ ID NO: 1310910 - DNA, 15 bp, Homo sapiens
gtgggagagaatttg

SEQ ID NO: 1310911 - DNA, 15 bp, Homo sapiens
tgtgggagagaattt

SEQ ID NO: 1310912 - DNA, 15 bp, Homo sapiens
ctgtgggagagaatt

SEQ ID NO: 1310913 - DNA, 15 bp, Homo sapiens
cctgtgggagagaat

SEQ ID NO: 1310914 - DNA, 15 bp, Homo sapiens
ccctgtgggagagaa

SEQ ID NO: 1310915 - DNA, 15 bp, Homo sapiens
gccctgtgggagaga

SEQ ID NO: 1310916 - DNA, 15 bp, Homo sapiens
ggccctgtgggagag

SEQ ID NO: 1310917 - DNA, 15 bp, Homo sapiens
aggccctgtgggaga

SEQ ID NO: 1310918 - DNA, 15 bp, Homo sapiens
aaggccctgtgggag

SEQ ID NO: 1310919 - DNA, 15 bp, Homo sapiens
aaaggccctgtggga

SEQ ID NO: 1310920 - DNA, 15 bp, Homo sapiens
caaaggccctgtggg

SEQ ID NO: 1310921 - DNA, 15 bp, Homo sapiens
gcaaaggccctgtgg

SEQ ID NO: 1310922 - DNA, 15 bp, Homo sapiens
ggcaaaggccctgtg

SEQ ID NO: 1310923 - DNA, 15 bp, Homo sapiens
aggcaaaggccctgt

SEQ ID NO: 1310924 - DNA, 15 bp, Homo sapiens
caggcaaaggccctg

SEQ ID NO: 1310925 - DNA, 15 bp, Homo sapiens
acaggcaaaggccct

SEQ ID NO: 1310926 - DNA, 15 bp, Homo sapiens
cacaggcaaaggccc

SEQ ID NO: 1310927 - DNA, 15 bp, Homo sapiens
ccacaggcaaaggcc

SEQ ID NO: 1310928 - DNA, 15 bp, Homo sapiens
accacaggcaaaggc

SEQ ID NO: 1310929 - DNA, 15 bp, Homo sapiens
caccacaggcaaagg

SEQ ID NO: 1310930 - DNA, 15 bp, Homo sapiens
gcaccacaggcaaag

SEQ ID NO: 1310931 - DNA, 15 bp, Homo sapiens
agcaccacaggcaaa

SEQ ID NO: 1310932 - DNA, 15 bp, Homo sapiens
aagcaccacaggcaa

SEQ ID NO: 1310933 - DNA, 15 bp, Homo sapiens
caagcaccacaggca

SEQ ID NO: 1310934 - DNA, 15 bp, Homo sapiens
gcaagcaccacaggc

SEQ ID NO: 1310935 - DNA, 15 bp, Homo sapiens
ggcaagcaccacagg

SEQ ID NO: 1310936 - DNA, 15 bp, Homo sapiens
aggcaagcaccacag

SEQ ID NO: 1310937 - DNA, 15 bp, Homo sapiens
aaggcaagcaccaca

SEQ ID NO: 1310938 - DNA, 15 bp, Homo sapiens
caaggcaagcaccac

SEQ ID NO: 1310939 - DNA, 15 bp, Homo sapiens
gcaaggcaagcacca

SEQ ID NO: 1310940 - DNA, 15 bp, Homo sapiens
ggcaaggcaagcacc

SEQ ID NO: 1310941 - DNA, 15 bp, Homo sapiens
tggcaaggcaagcac

SEQ ID NO: 1310942 - DNA, 15 bp, Homo sapiens
gtggcaaggcaagca

SEQ ID NO: 1310943 - DNA, 15 bp, Homo sapiens
ggtggcaaggcaagc

SEQ ID NO: 1310944 - DNA, 15 bp, Homo sapiens
tggtggcaaggcaag

SEQ ID NO: 1310945 - DNA, 15 bp, Homo sapiens
atggtggcaaggcaa

SEQ ID NO: 1310946 - DNA, 15 bp, Homo sapiens
aatggtggcaaggca

SEQ ID NO: 1310947 - DNA, 15 bp, Homo sapiens
taatggtggcaaggc

SEQ ID NO: 1310948 - DNA, 15 bp, Homo sapiens
ttaatggtggcaagg

SEQ ID NO: 1310949 - DNA, 15 bp, Homo sapiens
cttaatggtggcaag

SEQ ID NO: 1310950 - DNA, 15 bp, Homo sapiens
acttaatggtggcaa

SEQ ID NO: 1310951 - DNA, 15 bp, Homo sapiens
tacttaatggtggca

SEQ ID NO: 1310952 - DNA, 15 bp, Homo sapiens
ttacttaatggtggc

SEQ ID NO: 1310953 - DNA, 15 bp, Homo sapiens
gttacttaatggtgg

SEQ ID NO: 1310954 - DNA, 15 bp, Homo sapiens
agttacttaatggtg

SEQ ID NO: 1310955 - DNA, 15 bp, Homo sapiens
tagttacttaatggt

SEQ ID NO: 1310956 - DNA, 15 bp, Homo sapiens
ctagttacttaatgg

SEQ ID NO: 1310957 - DNA, 15 bp, Homo sapiens
tctagttacttaatg

SEQ ID NO: 1310958 - DNA, 15 bp, Homo sapiens
gtctagttacttaat

SEQ ID NO: 1310959 - DNA, 15 bp, Homo sapiens
tgtctagttacttaa

SEQ ID NO: 1310960 - DNA, 15 bp, Homo sapiens
ttgtctagttactta

SEQ ID NO: 1310961 - DNA, 15 bp, Homo sapiens
cttgtctagttactt

SEQ ID NO: 1310962 - DNA, 15 bp, Homo sapiens
acttgtctagttact

SEQ ID NO: 1310963 - DNA, 15 bp, Homo sapiens
tacttgtctagttac

SEQ ID NO: 1310964 - DNA, 15 bp, Homo sapiens
ttacttgtctagtta

SEQ ID NO: 1310965 - DNA, 15 bp, Homo sapiens
tttacttgtctagtt

SEQ ID NO: 1310966 - DNA, 15 bp, Homo sapiens
ttttacttgtctagt

SEQ ID NO: 1310967 - DNA, 15 bp, Homo sapiens
tttttacttgtctag

SEQ ID NO: 1310968 - DNA, 15 bp, Homo sapiens
gtttttacttgtcta

SEQ ID NO: 1310969 - DNA, 15 bp, Homo sapiens
tgtttttacttgtct

SEQ ID NO: 1310970 - DNA, 15 bp, Homo sapiens
ttgtttttacttgtc

SEQ ID NO: 1310971 - DNA, 15 bp, Homo sapiens
tttgtttttacttgt

SEQ ID NO: 1310972 - DNA, 15 bp, Homo sapiens
ctttgtttttacttg

SEQ ID NO: 1310973 - DNA, 15 bp, Homo sapiens
tctttgtttttactt

SEQ ID NO: 1310974 - DNA, 15 bp, Homo sapiens
ttctttgtttttact

SEQ ID NO: 1310975 - DNA, 15 bp, Homo sapiens
attctttgtttttac

SEQ ID NO: 1310976 - DNA, 15 bp, Homo sapiens
gattctttgttttta

SEQ ID NO: 1310977 - DNA, 15 bp, Homo sapiens
agattctttgttttt

SEQ ID NO: 1310978 - DNA, 15 bp, Homo sapiens
cagattctttgtttt

SEQ ID NO: 1310979 - DNA, 15 bp, Homo sapiens
ccagattctttgttt

SEQ ID NO: 1310980 - DNA, 15 bp, Homo sapiens
cccagattctttgtt

SEQ ID NO: 1310981 - DNA, 15 bp, Homo sapiens
acccagattctttgt

SEQ ID NO: 1310982 - DNA, 15 bp, Homo sapiens
aacccagattctttg

SEQ ID NO: 1310983 - DNA, 15 bp, Homo sapiens
gaacccagattcttt

SEQ ID NO: 1310984 - DNA, 15 bp, Homo sapiens
tgaacccagattctt

SEQ ID NO: 1310985 - DNA, 15 bp, Homo sapiens
ctgaacccagattct

SEQ ID NO: 1310986 - DNA, 15 bp, Homo sapiens
gctgaacccagattc

SEQ ID NO: 1310987 - DNA, 15 bp, Homo sapiens
ggctgaacccagatt

SEQ ID NO: 1310988 - DNA, 15 bp, Homo sapiens
tggctgaacccagat

SEQ ID NO: 1310989 - DNA, 15 bp, Homo sapiens
ctggctgaacccaga

SEQ ID NO: 1310990 - DNA, 15 bp, Homo sapiens
cctggctgaacccag

SEQ ID NO: 1310991 - DNA, 15 bp, Homo sapiens
acctggctgaaccca

SEQ ID NO: 1310992 - DNA, 15 bp, Homo sapiens
cacctggctgaaccc

SEQ ID NO: 1310993 - DNA, 15 bp, Homo sapiens
gcacctggctgaacc

SEQ ID NO: 1310994 - DNA, 15 bp, Homo sapiens
tgcacctggctgaac

SEQ ID NO: 1310995 - DNA, 15 bp, Homo sapiens
ctgcacctggctgaa

SEQ ID NO: 1310996 - DNA, 15 bp, Homo sapiens
actgcacctggctga

SEQ ID NO: 1310997 - DNA, 15 bp, Homo sapiens
cactgcacctggctg

SEQ ID NO: 1310998 - DNA, 15 bp, Homo sapiens
ggccactgcacctgg

SEQ ID NO: 1310999 - DNA, 15 bp, Homo sapiens
aggccactgcacctg

SEQ ID NO: 1311000 - DNA, 15 bp, Homo sapiens
caggccactgcacct

SEQ ID NO: 1311001 - DNA, 15 bp, Homo sapiens
gcaggccactgcacc

SEQ ID NO: 1311002 - DNA, 15 bp, Homo sapiens
tgcaggccactgcac

SEQ ID NO: 1311003 - DNA, 15 bp, Homo sapiens
gtgcaggccactgca

SEQ ID NO: 1311004 - DNA, 15 bp, Homo sapiens
ggtgcaggccactgc

SEQ ID NO: 1311005 - DNA, 15 bp, Homo sapiens
aggtgcaggccactg

SEQ ID NO: 1311006 - DNA, 15 bp, Homo sapiens
caggtgcaggccact

SEQ ID NO: 1311007 - DNA, 15 bp, Homo sapiens
acaggtgcaggccac

SEQ ID NO: 1311008 - DNA, 15 bp, Homo sapiens
tacaggtgcaggcca

SEQ ID NO: 1311009 - DNA, 15 bp, Homo sapiens
ctacaggtgcaggcc

SEQ ID NO: 1311010 - DNA, 15 bp, Homo sapiens
actacaggtgcaggc

SEQ ID NO: 1311011 - DNA, 15 bp, Homo sapiens
gactacaggtgcagg

SEQ ID NO: 1311012 - DNA, 15 bp, Homo sapiens
ggactacaggtgcag

SEQ ID NO: 1311013 - DNA, 15 bp, Homo sapiens
tcaagcagctgggac

SEQ ID NO: 1311014 - DNA, 15 bp, Homo sapiens
ctcaagcagctggga

SEQ ID NO: 1311015 - DNA, 15 bp, Homo sapiens
tctcaagcagctggg

SEQ ID NO: 1311016 - DNA, 15 bp, Homo sapiens
ctctcaagcagctgg

SEQ ID NO: 1311017 - DNA, 15 bp, Homo sapiens
cctctcaagcagctg

SEQ ID NO: 1311018 - DNA, 15 bp, Homo sapiens
gcctctcaagcagct

SEQ ID NO: 1311019 - DNA, 15 bp, Homo sapiens
agcctctcaagcagc

SEQ ID NO: 1311020 - DNA, 15 bp, Homo sapiens
cagcctctcaagcag

SEQ ID NO: 1311021 - DNA, 15 bp, Homo sapiens
tcagcctctcaagca

SEQ ID NO: 1311022 - DNA, 15 bp, Homo sapiens
ctcagcctctcaagc

SEQ ID NO: 1311023 - DNA, 15 bp, Homo sapiens
ttcccacctcagcct

SEQ ID NO: 1311024 - DNA, 15 bp, Homo sapiens
cttcccacctcagcc

SEQ ID NO: 1311025 - DNA, 15 bp, Homo sapiens
tcttcccacctcagc

SEQ ID NO: 1311026 - DNA, 15 bp, Homo sapiens
atcttcccacctcag

SEQ ID NO: 1311027 - DNA, 15 bp, Homo sapiens
aatcttcccacctca

SEQ ID NO: 1311028 - DNA, 15 bp, Homo sapiens
caatcttcccacctc

SEQ ID NO: 1311029 - DNA, 15 bp, Homo sapiens
gcaatcttcccacct

SEQ ID NO: 1311030 - DNA, 15 bp, Homo sapiens
agcaatcttcccacc

SEQ ID NO: 1311031 - DNA, 15 bp, Homo sapiens
aagcaatcttcccac

SEQ ID NO: 1311032 - DNA, 15 bp, Homo sapiens
acctgggctcaagca

SEQ ID NO: 1311033 - DNA, 15 bp, Homo sapiens
tacctgggctcaagc

SEQ ID NO: 1311034 - DNA, 15 bp, Homo sapiens
atacctgggctcaag

SEQ ID NO: 1311035 - DNA, 15 bp, Homo sapiens
aatacctgggctcaa

SEQ ID NO: 1311036 - DNA, 15 bp, Homo sapiens
gaatacctgggctca

SEQ ID NO: 1311037 - DNA, 15 bp, Homo sapiens
tgaatacctgggctc

SEQ ID NO: 1311038 - DNA, 15 bp, Homo sapiens
ttgaatacctgggct

SEQ ID NO: 1311039 - DNA, 15 bp, Homo sapiens
cttgaatacctgggc

SEQ ID NO: 1311040 - DNA, 15 bp, Homo sapiens
acttgaatacctggg

SEQ ID NO: 1311041 - DNA, 15 bp, Homo sapiens
gacttgaatacctgg

SEQ ID NO: 1311042 - DNA, 15 bp, Homo sapiens
ggacttgaatacctg

SEQ ID NO: 1311043 - DNA, 15 bp, Homo sapiens
tggacttgaatacct

SEQ ID NO: 1311044 - DNA, 15 bp, Homo sapiens
ctggacttgaatacc

SEQ ID NO: 1311045 - DNA, 15 bp, Homo sapiens
gctggacttgaatac

SEQ ID NO: 1311046 - DNA, 15 bp, Homo sapiens
ggctggacttgaata

SEQ ID NO: 1311047 - DNA, 15 bp, Homo sapiens
aggctggacttgaat

SEQ ID NO: 1311048 - DNA, 15 bp, Homo sapiens
caggctggacttgaa

SEQ ID NO: 1311049 - DNA, 15 bp, Homo sapiens
ccaggctggacttga

SEQ ID NO: 1311050 - DNA, 15 bp, Homo sapiens
cccaggctggacttg

SEQ ID NO: 1311051 - DNA, 15 bp, Homo sapiens
gcccaggctggactt

SEQ ID NO: 1311052 - DNA, 15 bp, Homo sapiens
tgcccaggctggact

SEQ ID NO: 1311053 - DNA, 15 bp, Homo sapiens
ttgcccaggctggac

SEQ ID NO: 1311054 - DNA, 15 bp, Homo sapiens
gctatattgcccagg

SEQ ID NO: 1311055 - DNA, 15 bp, Homo sapiens
tgctatattgcccag

SEQ ID NO: 1311056 - DNA, 15 bp, Homo sapiens
ttgctatattgccca

SEQ ID NO: 1311057 - DNA, 15 bp, Homo sapiens
cttgctatattgccc

SEQ ID NO: 1311058 - DNA, 15 bp, Homo sapiens
tcttgctatattgcc

SEQ ID NO: 1311059 - DNA, 15 bp, Homo sapiens
gtcttgctatattgc

SEQ ID NO: 1311060 - DNA, 15 bp, Homo sapiens
ggtcttgctatattg

SEQ ID NO: 1311061 - DNA, 15 bp, Homo sapiens
aggtcttgctatatt

SEQ ID NO: 1311062 - DNA, 15 bp, Homo sapiens
gaggtcttgctatat

SEQ ID NO: 1311063 - DNA, 15 bp, Homo sapiens
tgaggtcttgctata

SEQ ID NO: 1311064 - DNA, 15 bp, Homo sapiens
atgaggtcttgctat

SEQ ID NO: 1311065 - DNA, 15 bp, Homo sapiens
gatgaggtcttgcta

SEQ ID NO: 1311066 - DNA, 15 bp, Homo sapiens
agatgaggtcttgct

SEQ ID NO: 1311067 - DNA, 15 bp, Homo sapiens
aagatgaggtcttgc

SEQ ID NO: 1311068 - DNA, 15 bp, Homo sapiens
aaagatgaggtcttg

SEQ ID NO: 1311069 - DNA, 15 bp, Homo sapiens
gaaagatgaggtctt

SEQ ID NO: 1311070 - DNA, 15 bp, Homo sapiens
agaaagatgaggtct

SEQ ID NO: 1311071 - DNA, 15 bp, Homo sapiens
tagaaagatgaggtc

SEQ ID NO: 1311072 - DNA, 15 bp, Homo sapiens
atagaaagatgaggt

SEQ ID NO: 1311073 - DNA, 15 bp, Homo sapiens
aatagaaagatgagg

SEQ ID NO: 1311074 - DNA, 15 bp, Homo sapiens
taatagaaagatgag

SEQ ID NO: 1311075 - DNA, 15 bp, Homo sapiens
ttaatagaaagatga

SEQ ID NO: 1311076 - DNA, 15 bp, Homo sapiens
tttaatagaaagatg

SEQ ID NO: 1311077 - DNA, 15 bp, Homo sapiens
ttttaatagaaagat

SEQ ID NO: 1311078 - DNA, 15 bp, Homo sapiens
gttttaatagaaaga

SEQ ID NO: 1311079 - DNA, 15 bp, Homo sapiens
tgttttaatagaaag

SEQ ID NO: 1311080 - DNA, 15 bp, Homo sapiens
ttgttttaatagaaa

SEQ ID NO: 1311081 - DNA, 15 bp, Homo sapiens
tttgttttaatagaa

SEQ ID NO: 1311082 - DNA, 15 bp, Homo sapiens
gtttgttttaataga

SEQ ID NO: 1311083 - DNA, 15 bp, Homo sapiens
tgtttgttttaatag

SEQ ID NO: 1311084 - DNA, 15 bp, Homo sapiens
ttgtttgttttaata

SEQ ID NO: 1311085 - DNA, 15 bp, Homo sapiens
tttgtttgttttaat

SEQ ID NO: 1311086 - DNA, 15 bp, Homo sapiens
gtttgtttgttttaa

SEQ ID NO: 1311087 - DNA, 15 bp, Homo sapiens
ctgtttgtttgtttg

SEQ ID NO: 1311088 - DNA, 15 bp, Homo sapiens
cctgtttgtttgttt

SEQ ID NO: 1311089 - DNA, 15 bp, Homo sapiens
ccctgtttgtttgtt

SEQ ID NO: 1311090 - DNA, 15 bp, Homo sapiens
accctgtttgtttgt

SEQ ID NO: 1311091 - DNA, 15 bp, Homo sapiens
aaccctgtttgtttg

SEQ ID NO: 1311092 - DNA, 15 bp, Homo sapiens
gaaccctgtttgttt

SEQ ID NO: 1311093 - DNA, 15 bp, Homo sapiens
agaaccctgtttgtt

SEQ ID NO: 1311094 - DNA, 15 bp, Homo sapiens
aagaaccctgtttgt

SEQ ID NO: 1311095 - DNA, 15 bp, Homo sapiens
taagaaccctgtttg

SEQ ID NO: 1311096 - DNA, 15 bp, Homo sapiens
gtaagaaccctgttt

SEQ ID NO: 1311097 - DNA, 15 bp, Homo sapiens
ggtaagaaccctgtt

SEQ ID NO: 1311098 - DNA, 15 bp, Homo sapiens
gggtaagaaccctgt

SEQ ID NO: 1311099 - DNA, 15 bp, Homo sapiens
agggtaagaaccctg

SEQ ID NO: 1311100 - DNA, 15 bp, Homo sapiens
cagggtaagaaccct

SEQ ID NO: 1311101 - DNA, 15 bp, Homo sapiens
ccagggtaagaaccc

SEQ ID NO: 1311102 - DNA, 15 bp, Homo sapiens
gccagggtaagaacc

SEQ ID NO: 1311103 - DNA, 15 bp, Homo sapiens
cgccagggtaagaac

SEQ ID NO: 1311104 - DNA, 15 bp, Homo sapiens
gcgccagggtaagaa

SEQ ID NO: 1311105 - DNA, 15 bp, Homo sapiens
agcgccagggtaaga

SEQ ID NO: 1311106 - DNA, 15 bp, Homo sapiens
tagcgccagggtaag

SEQ ID NO: 1311107 - DNA, 15 bp, Homo sapiens
gtagcgccagggtaa

SEQ ID NO: 1311108 - DNA, 15 bp, Homo sapiens
tgtagcgccagggta

SEQ ID NO: 1311109 - DNA, 15 bp, Homo sapiens
atgtagcgccagggt

SEQ ID NO: 1311110 - DNA, 15 bp, Homo sapiens
aatgtagcgccaggg

SEQ ID NO: 1311111 - DNA, 15 bp, Homo sapiens
taatgtagcgccagg

SEQ ID NO: 1311112 - DNA, 15 bp, Homo sapiens
ttaatgtagcgccag

SEQ ID NO: 1311113 - DNA, 15 bp, Homo sapiens
attaatgtagcgcca

SEQ ID NO: 1311114 - DNA, 15 bp, Homo sapiens
aattaatgtagcgcc

SEQ ID NO: 1311115 - DNA, 15 bp, Homo sapiens
aaattaatgtagcgc

SEQ ID NO: 1311116 - DNA, 15 bp, Homo sapiens
caaattaatgtagcg

SEQ ID NO: 1311117 - DNA, 15 bp, Homo sapiens
acaaattaatgtagc

SEQ ID NO: 1311118 - DNA, 15 bp, Homo sapiens
aacaaattaatgtag

SEQ ID NO: 1311119 - DNA, 15 bp, Homo sapiens
taacaaattaatgta

SEQ ID NO: 1311120 - DNA, 15 bp, Homo sapiens
ataacaaattaatgt

SEQ ID NO: 1311121 - DNA, 15 bp, Homo sapiens
cataacaaattaatg

SEQ ID NO: 1311122 - DNA, 15 bp, Homo sapiens
acataacaaattaat

SEQ ID NO: 1311123 - DNA, 15 bp, Homo sapiens
cacataacaaattaa

SEQ ID NO: 1311124 - DNA, 15 bp, Homo sapiens
tcacataacaaatta

SEQ ID NO: 1311125 - DNA, 15 bp, Homo sapiens
gtcacataacaaatt

SEQ ID NO: 1311126 - DNA, 15 bp, Homo sapiens
tgtcacataacaaat

SEQ ID NO: 1311127 - DNA, 15 bp, Homo sapiens
atgtcacataacaaa

SEQ ID NO: 1311128 - DNA, 15 bp, Homo sapiens
aatgtcacataacaa

SEQ ID NO: 1311129 - DNA, 15 bp, Homo sapiens
caatgtcacataaca

SEQ ID NO: 1311130 - DNA, 15 bp, Homo sapiens
acaatgtcacataac

SEQ ID NO: 1311131 - DNA, 15 bp, Homo sapiens
cacaatgtcacataa

SEQ ID NO: 1311132 - DNA, 15 bp, Homo sapiens
acacaatgtcacata

SEQ ID NO: 1311133 - DNA, 15 bp, Homo sapiens
gacacaatgtcacat

SEQ ID NO: 1311134 - DNA, 15 bp, Homo sapiens
agacacaatgtcaca

SEQ ID NO: 1311135 - DNA, 15 bp, Homo sapiens
cagacacaatgtcac

SEQ ID NO: 1311136 - DNA, 15 bp, Homo sapiens
acagacacaatgtca

SEQ ID NO: 1311137 - DNA, 15 bp, Homo sapiens
aacagacacaatgtc

SEQ ID NO: 1311138 - DNA, 15 bp, Homo sapiens
caacagacacaatgt

SEQ ID NO: 1311139 - DNA, 15 bp, Homo sapiens
acaacagacacaatg

SEQ ID NO: 1311140 - DNA, 15 bp, Homo sapiens
aacaacagacacaat

SEQ ID NO: 1311141 - DNA, 15 bp, Homo sapiens
aaacaacagacacaa

SEQ ID NO: 1311142 - DNA, 15 bp, Homo sapiens
taaacaacagacaca

SEQ ID NO: 1311143 - DNA, 15 bp, Homo sapiens
ctaaacaacagacac

SEQ ID NO: 1311144 - DNA, 15 bp, Homo sapiens
actaaacaacagaca

SEQ ID NO: 1311145 - DNA, 15 bp, Homo sapiens
gactaaacaacagac

SEQ ID NO: 1311146 - DNA, 15 bp, Homo sapiens
agactaaacaacaga

SEQ ID NO: 1311147 - DNA, 15 bp, Homo sapiens
aagactaaacaacag

SEQ ID NO: 1311148 - DNA, 15 bp, Homo sapiens
taagactaaacaaca

SEQ ID NO: 1311149 - DNA, 15 bp, Homo sapiens
gtaagactaaacaac

SEQ ID NO: 1311150 - DNA, 15 bp, Homo sapiens
tgtaagactaaacaa

SEQ ID NO: 1311151 - DNA, 15 bp, Homo sapiens
ctgtaagactaaaca

SEQ ID NO: 1311152 - DNA, 15 bp, Homo sapiens
actgtaagactaaac

SEQ ID NO: 1311153 - DNA, 15 bp, Homo sapiens
aactgtaagactaaa

SEQ ID NO: 1311154 - DNA, 15 bp, Homo sapiens
gaactgtaagactaa

SEQ ID NO: 1311155 - DNA, 15 bp, Homo sapiens
ggaactgtaagacta

SEQ ID NO: 1311156 - DNA, 15 bp, Homo sapiens
aggaactgtaagact

SEQ ID NO: 1311157 - DNA, 15 bp, Homo sapiens
gaggaactgtaagac

SEQ ID NO: 1311158 - DNA, 15 bp, Homo sapiens
tgaggaactgtaaga

SEQ ID NO: 1311159 - DNA, 15 bp, Homo sapiens
ctgaggaactgtaag

SEQ ID NO: 1311160 - DNA, 15 bp, Homo sapiens
actgaggaactgtaa

SEQ ID NO: 1311161 - DNA, 15 bp, Homo sapiens
aactgaggaactgta

SEQ ID NO: 1311162 - DNA, 15 bp, Homo sapiens
aaactgaggaactgt

SEQ ID NO: 1311163 - DNA, 15 bp, Homo sapiens
gaaactgaggaactg

SEQ ID NO: 1311164 - DNA, 15 bp, Homo sapiens
ggaaactgaggaact

SEQ ID NO: 1311165 - DNA, 15 bp, Homo sapiens
gggaaactgaggaac

SEQ ID NO: 1311166 - DNA, 15 bp, Homo sapiens
ggggaaactgaggaa

SEQ ID NO: 1311167 - DNA, 15 bp, Homo sapiens
tggggaaactgagga

SEQ ID NO: 1311168 - DNA, 15 bp, Homo sapiens
ctggggaaactgagg

SEQ ID NO: 1311169 - DNA, 15 bp, Homo sapiens
gctggggaaactgag

SEQ ID NO: 1311170 - DNA, 15 bp, Homo sapiens
ggctggggaaactga

SEQ ID NO: 1311171 - DNA, 15 bp, Homo sapiens
aggctggggaaactg

SEQ ID NO: 1311172 - DNA, 15 bp, Homo sapiens
taggctggggaaact

SEQ ID NO: 1311173 - DNA, 15 bp, Homo sapiens
ttaggctggggaaac

SEQ ID NO: 1311174 - DNA, 15 bp, Homo sapiens
cttaggctggggaaa

SEQ ID NO: 1311175 - DNA, 15 bp, Homo sapiens
ccttaggctggggaa

SEQ ID NO: 1311176 - DNA, 15 bp, Homo sapiens
accttaggctgggga

SEQ ID NO: 1311177 - DNA, 15 bp, Homo sapiens
caccttaggctgggg

SEQ ID NO: 1311178 - DNA, 15 bp, Homo sapiens
acaccttaggctggg

SEQ ID NO: 1311179 - DNA, 15 bp, Homo sapiens
tacaccttaggctgg

SEQ ID NO: 1311180 - DNA, 15 bp, Homo sapiens
ctacaccttaggctg

SEQ ID NO: 1311181 - DNA, 15 bp, Homo sapiens
actacaccttaggct

SEQ ID NO: 1311182 - DNA, 15 bp, Homo sapiens
aactacaccttaggc

SEQ ID NO: 1311183 - DNA, 15 bp, Homo sapiens
taactacaccttagg

SEQ ID NO: 1311184 - DNA, 15 bp, Homo sapiens
gtaactacaccttag

SEQ ID NO: 1311185 - DNA, 15 bp, Homo sapiens
tgtaactacacctta

SEQ ID NO: 1311186 - DNA, 15 bp, Homo sapiens
atgtaactacacctt

SEQ ID NO: 1311187 - DNA, 15 bp, Homo sapiens
gatgtaactacacct

SEQ ID NO: 1311188 - DNA, 15 bp, Homo sapiens
tgatgtaactacacc

SEQ ID NO: 1311189 - DNA, 15 bp, Homo sapiens
ctgatgtaactacac

SEQ ID NO: 1311190 - DNA, 15 bp, Homo sapiens
tctgatgtaactaca

SEQ ID NO: 1311191 - DNA, 15 bp, Homo sapiens
atctgatgtaactac

SEQ ID NO: 1311192 - DNA, 15 bp, Homo sapiens
catctgatgtaacta

SEQ ID NO: 1311193 - DNA, 15 bp, Homo sapiens
tcatctgatgtaact

SEQ ID NO: 1311194 - DNA, 15 bp, Homo sapiens
gtcatctgatgtaac

SEQ ID NO: 1311195 - DNA, 15 bp, Homo sapiens
ggtcatctgatgtaa

SEQ ID NO: 1311196 - DNA, 15 bp, Homo sapiens
tggtcatctgatgta

SEQ ID NO: 1311197 - DNA, 15 bp, Homo sapiens
atggtcatctgatgt

SEQ ID NO: 1311198 - DNA, 15 bp, Homo sapiens
gatggtcatctgatg

SEQ ID NO: 1311199 - DNA, 15 bp, Homo sapiens
tgatggtcatctgat

SEQ ID NO: 1311200 - DNA, 15 bp, Homo sapiens
ctgatggtcatctga

SEQ ID NO: 1311201 - DNA, 15 bp, Homo sapiens
cctgatggtcatctg

SEQ ID NO: 1311202 - DNA, 15 bp, Homo sapiens
gcctgatggtcatct

SEQ ID NO: 1311203 - DNA, 15 bp, Homo sapiens
ggcctgatggtcatc

SEQ ID NO: 1311204 - DNA, 15 bp, Homo sapiens
gggcctgatggtcat

SEQ ID NO: 1311205 - DNA, 15 bp, Homo sapiens
agggcctgatggtca

SEQ ID NO: 1311206 - DNA, 15 bp, Homo sapiens
aagggcctgatggtc

SEQ ID NO: 1311207 - DNA, 15 bp, Homo sapiens
aaagggcctgatggt

SEQ ID NO: 1311208 - DNA, 15 bp, Homo sapiens
gaaagggcctgatgg

SEQ ID NO: 1311209 - DNA, 15 bp, Homo sapiens
agaaagggcctgatg

SEQ ID NO: 1311210 - DNA, 15 bp, Homo sapiens
cagaaagggcctgat

SEQ ID NO: 1311211 - DNA, 15 bp, Homo sapiens
acagaaagggcctga

SEQ ID NO: 1311212 - DNA, 15 bp, Homo sapiens
aacagaaagggcctg

SEQ ID NO: 1311213 - DNA, 15 bp, Homo sapiens
gaacagaaagggcct

SEQ ID NO: 1311214 - DNA, 15 bp, Homo sapiens
agaacagaaagggcc

SEQ ID NO: 1311215 - DNA, 15 bp, Homo sapiens
tagaacagaaagggc

SEQ ID NO: 1311216 - DNA, 15 bp, Homo sapiens
ttagaacagaaaggg

SEQ ID NO: 1311217 - DNA, 15 bp, Homo sapiens
cttagaacagaaagg

SEQ ID NO: 1311218 - DNA, 15 bp, Homo sapiens
acttagaacagaaag

SEQ ID NO: 1311219 - DNA, 15 bp, Homo sapiens
aacttagaacagaaa

SEQ ID NO: 1311220 - DNA, 15 bp, Homo sapiens
caacttagaacagaa

SEQ ID NO: 1311221 - DNA, 15 bp, Homo sapiens
acaacttagaacaga

SEQ ID NO: 1311222 - DNA, 15 bp, Homo sapiens
cacaacttagaacag

SEQ ID NO: 1311223 - DNA, 15 bp, Homo sapiens
tcacaacttagaaca

SEQ ID NO: 1311224 - DNA, 15 bp, Homo sapiens
ttcacaacttagaac

SEQ ID NO: 1311225 - DNA, 15 bp, Homo sapiens
attcacaacttagaa

SEQ ID NO: 1311226 - DNA, 15 bp, Homo sapiens
cattcacaacttaga

SEQ ID NO: 1311227 - DNA, 15 bp, Homo sapiens
acattcacaacttag

SEQ ID NO: 1311228 - DNA, 15 bp, Homo sapiens
aacattcacaactta

SEQ ID NO: 1311229 - DNA, 15 bp, Homo sapiens
gaacattcacaactt

SEQ ID NO: 1311230 - DNA, 15 bp, Homo sapiens
ggaacattcacaact

SEQ ID NO: 1311231 - DNA, 15 bp, Homo sapiens
tggaacattcacaac

SEQ ID NO: 1311232 - DNA, 15 bp, Homo sapiens
ctggaacattcacaa

SEQ ID NO: 1311233 - DNA, 15 bp, Homo sapiens
tctggaacattcaca

SEQ ID NO: 1311234 - DNA, 15 bp, Homo sapiens
ttctggaacattcac

SEQ ID NO: 1311235 - DNA, 15 bp, Homo sapiens
cttctggaacattca

SEQ ID NO: 1311236 - DNA, 15 bp, Homo sapiens
gcttctggaacattc

SEQ ID NO: 1311237 - DNA, 15 bp, Homo sapiens
ggcttctggaacatt

SEQ ID NO: 1311238 - DNA, 15 bp, Homo sapiens
tggcttctggaacat

SEQ ID NO: 1311239 - DNA, 15 bp, Homo sapiens
atggcttctggaaca

SEQ ID NO: 1311240 - DNA, 15 bp, Homo sapiens
aatggcttctggaac

SEQ ID NO: 1311241 - DNA, 15 bp, Homo sapiens
aaatggcttctggaa

SEQ ID NO: 1311242 - DNA, 15 bp, Homo sapiens
aaaatggcttctgga

SEQ ID NO: 1311243 - DNA, 15 bp, Homo sapiens
caaaatggcttctgg

SEQ ID NO: 1311244 - DNA, 15 bp, Homo sapiens
tcaaaatggcttctg

SEQ ID NO: 1311245 - DNA, 15 bp, Homo sapiens
atcaaaatggcttct

SEQ ID NO: 1311246 - DNA, 15 bp, Homo sapiens
tatcaaaatggcttc

SEQ ID NO: 1311247 - DNA, 15 bp, Homo sapiens
ctatcaaaatggctt

SEQ ID NO: 1311248 - DNA, 15 bp, Homo sapiens
cctatcaaaatggct

SEQ ID NO: 1311249 - DNA, 15 bp, Homo sapiens
tcctatcaaaatggc

SEQ ID NO: 1311250 - DNA, 15 bp, Homo sapiens
gtcctatcaaaatgg

SEQ ID NO: 1311251 - DNA, 15 bp, Homo sapiens
cgtcctatcaaaatg

SEQ ID NO: 1311252 - DNA, 15 bp, Homo sapiens
tcgtcctatcaaaat

SEQ ID NO: 1311253 - DNA, 15 bp, Homo sapiens
atcgtcctatcaaaa

SEQ ID NO: 1311254 - DNA, 15 bp, Homo sapiens
tatcgtcctatcaaa

SEQ ID NO: 1311255 - DNA, 15 bp, Homo sapiens
ttatcgtcctatcaa

SEQ ID NO: 1311256 - DNA, 15 bp, Homo sapiens
attatcgtcctatca

SEQ ID NO: 1311257 - DNA, 15 bp, Homo sapiens
cattatcgtcctatc

SEQ ID NO: 1311258 - DNA, 15 bp, Homo sapiens
ccattatcgtcctat

SEQ ID NO: 1311259 - DNA, 15 bp, Homo sapiens
tccattatcgtccta

SEQ ID NO: 1311260 - DNA, 15 bp, Homo sapiens
ttccattatcgtcct

SEQ ID NO: 1311261 - DNA, 15 bp, Homo sapiens
gttccattatcgtcc

SEQ ID NO: 1311262 - DNA, 15 bp, Homo sapiens
ggttccattatcgtc

SEQ ID NO: 1311263 - DNA, 15 bp, Homo sapiens
aggttccattatcgt

SEQ ID NO: 1311264 - DNA, 15 bp, Homo sapiens
taggttccattatcg

SEQ ID NO: 1311265 - DNA, 15 bp, Homo sapiens
ctaggttccattatc

SEQ ID NO: 1311266 - DNA, 15 bp, Homo sapiens
gctaggttccattat

SEQ ID NO: 1311267 - DNA, 15 bp, Homo sapiens
tgctaggttccatta

SEQ ID NO: 1311268 - DNA, 15 bp, Homo sapiens
gtgctaggttccatt

SEQ ID NO: 1311269 - DNA, 15 bp, Homo sapiens
tgtgctaggttccat

SEQ ID NO: 1311270 - DNA, 15 bp, Homo sapiens
atgtgctaggttcca

SEQ ID NO: 1311271 - DNA, 15 bp, Homo sapiens
aatgtgctaggttcc

SEQ ID NO: 1311272 - DNA, 15 bp, Homo sapiens
aaatgtgctaggttc

SEQ ID NO: 1311273 - DNA, 15 bp, Homo sapiens
taaatgtgctaggtt

SEQ ID NO: 1311274 - DNA, 15 bp, Homo sapiens
gtaaatgtgctaggt

SEQ ID NO: 1311275 - DNA, 15 bp, Homo sapiens
ggtaaatgtgctagg

SEQ ID NO: 1311276 - DNA, 15 bp, Homo sapiens
gggtaaatgtgctag

SEQ ID NO: 1311277 - DNA, 15 bp, Homo sapiens
ggggtaaatgtgcta

SEQ ID NO: 1311278 - DNA, 15 bp, Homo sapiens
tggggtaaatgtgct

SEQ ID NO: 1311279 - DNA, 15 bp, Homo sapiens
atggggtaaatgtgc

SEQ ID NO: 1311280 - DNA, 15 bp, Homo sapiens
catggggtaaatgtg

SEQ ID NO: 1311281 - DNA, 15 bp, Homo sapiens
ccatggggtaaatgt

SEQ ID NO: 1311282 - DNA, 15 bp, Homo sapiens
gccatggggtaaatg

SEQ ID NO: 1311283 - DNA, 15 bp, Homo sapiens
agccatggggtaaat

SEQ ID NO: 1311284 - DNA, 15 bp, Homo sapiens
tagccatggggtaaa

SEQ ID NO: 1311285 - DNA, 15 bp, Homo sapiens
atagccatggggtaa

SEQ ID NO: 1311286 - DNA, 15 bp, Homo sapiens
aatagccatggggta

SEQ ID NO: 1311287 - DNA, 15 bp, Homo sapiens
taatagccatggggt

SEQ ID NO: 1311288 - DNA, 15 bp, Homo sapiens
ttaatagccatgggg

SEQ ID NO: 1311289 - DNA, 15 bp, Homo sapiens
gttaatagccatggg

SEQ ID NO: 1311290 - DNA, 15 bp, Homo sapiens
agttaatagccatgg

SEQ ID NO: 1311291 - DNA, 15 bp, Homo sapiens
cagttaatagccatg

SEQ ID NO: 1311292 - DNA, 15 bp, Homo sapiens
acagttaatagccat

SEQ ID NO: 1311293 - DNA, 15 bp, Homo sapiens
tacagttaatagcca

SEQ ID NO: 1311294 - DNA, 15 bp, Homo sapiens
ttacagttaatagcc

SEQ ID NO: 1311295 - DNA, 15 bp, Homo sapiens
gttacagttaatagc

SEQ ID NO: 1311296 - DNA, 15 bp, Homo sapiens
cgttacagttaatag

SEQ ID NO: 1311297 - DNA, 15 bp, Homo sapiens
gcgttacagttaata

SEQ ID NO: 1311298 - DNA, 15 bp, Homo sapiens
agcgttacagttaat

SEQ ID NO: 1311299 - DNA, 15 bp, Homo sapiens
cagcgttacagttaa

SEQ ID NO: 1311300 - DNA, 15 bp, Homo sapiens
gcagcgttacagtta

SEQ ID NO: 1311301 - DNA, 15 bp, Homo sapiens
agcagcgttacagtt

SEQ ID NO: 1311302 - DNA, 15 bp, Homo sapiens
cagcagcgttacagt

SEQ ID NO: 1311303 - DNA, 15 bp, Homo sapiens
acagcagcgttacag

SEQ ID NO: 1311304 - DNA, 15 bp, Homo sapiens
tacagcagcgttaca

SEQ ID NO: 1311305 - DNA, 15 bp, Homo sapiens
ttacagcagcgttac

SEQ ID NO: 1311306 - DNA, 15 bp, Homo sapiens
cttacagcagcgtta

SEQ ID NO: 1311307 - DNA, 15 bp, Homo sapiens
acttacagcagcgtt

SEQ ID NO: 1311308 - DNA, 15 bp, Homo sapiens
tacttacagcagcgt

SEQ ID NO: 1311309 - DNA, 15 bp, Homo sapiens
atacttacagcagcg

SEQ ID NO: 1311310 - DNA, 15 bp, Homo sapiens
tatacttacagcagc

SEQ ID NO: 1311311 - DNA, 15 bp, Homo sapiens
gtatacttacagcag

SEQ ID NO: 1311312 - DNA, 15 bp, Homo sapiens
tgtatacttacagca

SEQ ID NO: 1311313 - DNA, 15 bp, Homo sapiens
ttgtatacttacagc

SEQ ID NO: 1311314 - DNA, 15 bp, Homo sapiens
gttgtatacttacag

SEQ ID NO: 1311315 - DNA, 15 bp, Homo sapiens
tgttgtatacttaca

SEQ ID NO: 1311316 - DNA, 15 bp, Homo sapiens
gtgttgtatacttac

SEQ ID NO: 1311317 - DNA, 15 bp, Homo sapiens
tgtgttgtatactta

SEQ ID NO: 1311318 - DNA, 15 bp, Homo sapiens
atgtgttgtatactt

SEQ ID NO: 1311319 - DNA, 15 bp, Homo sapiens
tatgtgttgtatact

SEQ ID NO: 1311320 - DNA, 15 bp, Homo sapiens
ttatgtgttgtatac

SEQ ID NO: 1311321 - DNA, 15 bp, Homo sapiens
attatgtgttgtata

SEQ ID NO: 1311322 - DNA, 15 bp, Homo sapiens
aattatgtgttgtat

SEQ ID NO: 1311323 - DNA, 15 bp, Homo sapiens
caattatgtgttgta

SEQ ID NO: 1311324 - DNA, 15 bp, Homo sapiens
acaattatgtgttgt

SEQ ID NO: 1311325 - DNA, 15 bp, Homo sapiens
aacaattatgtgttg

SEQ ID NO: 1311326 - DNA, 15 bp, Homo sapiens
aaacaattatgtgtt

SEQ ID NO: 1311327 - DNA, 15 bp, Homo sapiens
gaaacaattatgtgt

SEQ ID NO: 1311328 - DNA, 15 bp, Homo sapiens
agaaacaattatgtg

SEQ ID NO: 1311329 - DNA, 15 bp, Homo sapiens
aagaaacaattatgt

SEQ ID NO: 1311330 - DNA, 15 bp, Homo sapiens
taagaaacaattatg

SEQ ID NO: 1311331 - DNA, 15 bp, Homo sapiens
gtaagaaacaattat

SEQ ID NO: 1311332 - DNA, 15 bp, Homo sapiens
tgtaagaaacaatta

SEQ ID NO: 1311333 - DNA, 15 bp, Homo sapiens
ttgtaagaaacaatt

SEQ ID NO: 1311334 - DNA, 15 bp, Homo sapiens
attgtaagaaacaat

SEQ ID NO: 1311335 - DNA, 15 bp, Homo sapiens
aattgtaagaaacaa

SEQ ID NO: 1311336 - DNA, 15 bp, Homo sapiens
taattgtaagaaaca

SEQ ID NO: 1311337 - DNA, 15 bp, Homo sapiens
ataattgtaagaaac

SEQ ID NO: 1311338 - DNA, 15 bp, Homo sapiens
aataattgtaagaaa

SEQ ID NO: 1311339 - DNA, 15 bp, Homo sapiens
aaataattgtaagaa

SEQ ID NO: 1311340 - DNA, 15 bp, Homo sapiens
taaataattgtaaga

SEQ ID NO: 1311341 - DNA, 15 bp, Homo sapiens
ataaataattgtaag

SEQ ID NO: 1311342 - DNA, 15 bp, Homo sapiens
aataaataattgtaa

SEQ ID NO: 1311343 - DNA, 15 bp, Homo sapiens
aaataaataattgta

SEQ ID NO: 1311344 - DNA, 15 bp, Homo sapiens
aaaataaataattgt

SEQ ID NO: 1311345 - DNA, 15 bp, Homo sapiens
aaaaataaataattg

SEQ ID NO: 1311346 - DNA, 15 bp, Homo sapiens
taaaaataaataatt

SEQ ID NO: 1311347 - DNA, 15 bp, Homo sapiens
ttaaaaataaataat

SEQ ID NO: 1311348 - DNA, 15 bp, Homo sapiens
tttaaaaataaataa

SEQ ID NO: 1311349 - DNA, 15 bp, Homo sapiens
ttttaaaaataaata

SEQ ID NO: 1311350 - DNA, 15 bp, Homo sapiens
tttttaaaaataaat

SEQ ID NO: 1311351 - DNA, 15 bp, Homo sapiens
atttttaaaaataaa

SEQ ID NO: 1311352 - DNA, 15 bp, Homo sapiens
gatttttaaaaataa

SEQ ID NO: 1311353 - DNA, 15 bp, Homo sapiens
gtgatttttaaaaat

SEQ ID NO: 1311354 - DNA, 15 bp, Homo sapiens
agtgatttttaaaaa

SEQ ID NO: 1311355 - DNA, 15 bp, Homo sapiens
aagtgatttttaaaa

SEQ ID NO: 1311356 - DNA, 15 bp, Homo sapiens
caagtgatttttaaa

SEQ ID NO: 1311357 - DNA, 15 bp, Homo sapiens
tcaagtgatttttaa

SEQ ID NO: 1311358 - DNA, 15 bp, Homo sapiens
ttcaagtgattttta

SEQ ID NO: 1311359 - DNA, 15 bp, Homo sapiens
tttcaagtgattttt

SEQ ID NO: 1311360 - DNA, 15 bp, Homo sapiens
atttcaagtgatttt

SEQ ID NO: 1311361 - DNA, 15 bp, Homo sapiens
gatttcaagtgattt

SEQ ID NO: 1311362 - DNA, 15 bp, Homo sapiens
agatttcaagtgatt

SEQ ID NO: 1311363 - DNA, 15 bp, Homo sapiens
tagatttcaagtgat

SEQ ID NO: 1311364 - DNA, 15 bp, Homo sapiens
atagatttcaagtga

SEQ ID NO: 1311365 - DNA, 15 bp, Homo sapiens
aatagatttcaagtg

SEQ ID NO: 1311366 - DNA, 15 bp, Homo sapiens
taatagatttcaagt

SEQ ID NO: 1311367 - DNA, 15 bp, Homo sapiens
ataatagatttcaag

SEQ ID NO: 1311368 - DNA, 15 bp, Homo sapiens
cataatagatttcaa

SEQ ID NO: 1311369 - DNA, 15 bp, Homo sapiens
tcataatagatttca

SEQ ID NO: 1311370 - DNA, 15 bp, Homo sapiens
ctcataatagatttc

SEQ ID NO: 1311371 - DNA, 15 bp, Homo sapiens
actcataatagattt

SEQ ID NO: 1311372 - DNA, 15 bp, Homo sapiens
tactcataatagatt

SEQ ID NO: 1311373 - DNA, 15 bp, Homo sapiens
ttactcataatagat

SEQ ID NO: 1311374 - DNA, 15 bp, Homo sapiens
tttactcataataga

SEQ ID NO: 1311375 - DNA, 15 bp, Homo sapiens
gtttactcataatag

SEQ ID NO: 1311376 - DNA, 15 bp, Homo sapiens
ggtttactcataata

SEQ ID NO: 1311377 - DNA, 15 bp, Homo sapiens
tggtttactcataat

SEQ ID NO: 1311378 - DNA, 15 bp, Homo sapiens
ttggtttactcataa

SEQ ID NO: 1311379 - DNA, 15 bp, Homo sapiens
cttggtttactcata

SEQ ID NO: 1311380 - DNA, 15 bp, Homo sapiens
acttggtttactcat

SEQ ID NO: 1311381 - DNA, 15 bp, Homo sapiens
aacttggtttactca

SEQ ID NO: 1311382 - DNA, 15 bp, Homo sapiens
aaacttggtttactc

SEQ ID NO: 1311383 - DNA, 15 bp, Homo sapiens
aaaacttggtttact

SEQ ID NO: 1311384 - DNA, 15 bp, Homo sapiens
caaaacttggtttac

SEQ ID NO: 1311385 - DNA, 15 bp, Homo sapiens
tcaaaacttggttta

SEQ ID NO: 1311386 - DNA, 15 bp, Homo sapiens
ctcaaaacttggttt

SEQ ID NO: 1311387 - DNA, 15 bp, Homo sapiens
tctcaaaacttggtt

SEQ ID NO: 1311388 - DNA, 15 bp, Homo sapiens
ttctcaaaacttggt

SEQ ID NO: 1311389 - DNA, 15 bp, Homo sapiens
tttctcaaaacttgg

SEQ ID NO: 1311390 - DNA, 15 bp, Homo sapiens
ttttctcaaaacttg

SEQ ID NO: 1311391 - DNA, 15 bp, Homo sapiens
gttttctcaaaactt

SEQ ID NO: 1311392 - DNA, 15 bp, Homo sapiens
agttttctcaaaact

SEQ ID NO: 1311393 - DNA, 15 bp, Homo sapiens
cagttttctcaaaac

SEQ ID NO: 1311394 - DNA, 15 bp, Homo sapiens
tcagttttctcaaaa

SEQ ID NO: 1311395 - DNA, 15 bp, Homo sapiens
atcagttttctcaaa

SEQ ID NO: 1311396 - DNA, 15 bp, Homo sapiens
aatcagttttctcaa

SEQ ID NO: 1311397 - DNA, 15 bp, Homo sapiens
taatcagttttctca

SEQ ID NO: 1311398 - DNA, 15 bp, Homo sapiens
ataatcagttttctc

SEQ ID NO: 1311399 - DNA, 15 bp, Homo sapiens
aataatcagttttct

SEQ ID NO: 1311400 - DNA, 15 bp, Homo sapiens
taataatcagttttc

SEQ ID NO: 1311401 - DNA, 15 bp, Homo sapiens
ttaataatcagtttt

SEQ ID NO: 1311402 - DNA, 15 bp, Homo sapiens
tttaataatcagttt

SEQ ID NO: 1311403 - DNA, 15 bp, Homo sapiens
atttaataatcagtt

SEQ ID NO: 1311404 - DNA, 15 bp, Homo sapiens
aatttaataatcagt

SEQ ID NO: 1311405 - DNA, 15 bp, Homo sapiens
aaatttaataatcag

SEQ ID NO: 1311406 - DNA, 15 bp, Homo sapiens
aaaatttaataatca

SEQ ID NO: 1311407 - DNA, 15 bp, Homo sapiens
aaaaatttaataatc

SEQ ID NO: 1311408 - DNA, 15 bp, Homo sapiens
caaaaatttaataat

SEQ ID NO: 1311409 - DNA, 15 bp, Homo sapiens
tcaaaaatttaataa

SEQ ID NO: 1311410 - DNA, 15 bp, Homo sapiens
ttcaaaaatttaata

SEQ ID NO: 1311411 - DNA, 15 bp, Homo sapiens
attcaaaaatttaat

SEQ ID NO: 1311412 - DNA, 15 bp, Homo sapiens
aattcaaaaatttaa

SEQ ID NO: 1311413 - DNA, 15 bp, Homo sapiens
taattcaaaaattta

SEQ ID NO: 1311414 - DNA, 15 bp, Homo sapiens
ataattcaaaaattt

SEQ ID NO: 1311415 - DNA, 15 bp, Homo sapiens
tataattcaaaaatt

SEQ ID NO: 1311416 - DNA, 15 bp, Homo sapiens
gtataattcaaaaat

SEQ ID NO: 1311417 - DNA, 15 bp, Homo sapiens
ggtataattcaaaaa

SEQ ID NO: 1311418 - DNA, 15 bp, Homo sapiens
gggtataattcaaaa

SEQ ID NO: 1311419 - DNA, 15 bp, Homo sapiens
ggggtataattcaaa

SEQ ID NO: 1311420 - DNA, 15 bp, Homo sapiens
aggggtataattcaa

SEQ ID NO: 1311421 - DNA, 15 bp, Homo sapiens
aaggggtataattca

SEQ ID NO: 1311422 - DNA, 15 bp, Homo sapiens
gaaggggtataattc

SEQ ID NO: 1311423 - DNA, 15 bp, Homo sapiens
agaaggggtataatt

SEQ ID NO: 1311424 - DNA, 15 bp, Homo sapiens
cagaaggggtataat

SEQ ID NO: 1311425 - DNA, 15 bp, Homo sapiens
ccagaaggggtataa

SEQ ID NO: 1311426 - DNA, 15 bp, Homo sapiens
cccagaaggggtata

SEQ ID NO: 1311427 - DNA, 15 bp, Homo sapiens
ccccagaaggggtat

SEQ ID NO: 1311428 - DNA, 15 bp, Homo sapiens
gccccagaaggggta

SEQ ID NO: 1311429 - DNA, 15 bp, Homo sapiens
agccccagaaggggt

SEQ ID NO: 1311430 - DNA, 15 bp, Homo sapiens
gagccccagaagggg

SEQ ID NO: 1311431 - DNA, 15 bp, Homo sapiens
agagccccagaaggg

SEQ ID NO: 1311432 - DNA, 15 bp, Homo sapiens
tagagccccagaagg

SEQ ID NO: 1311433 - DNA, 15 bp, Homo sapiens
atagagccccagaag

SEQ ID NO: 1311434 - DNA, 15 bp, Homo sapiens
gatagagccccagaa

SEQ ID NO: 1311435 - DNA, 15 bp, Homo sapiens
agatagagccccaga

SEQ ID NO: 1311436 - DNA, 15 bp, Homo sapiens
aagatagagccccag

SEQ ID NO: 1311437 - DNA, 15 bp, Homo sapiens
aaagatagagcccca

SEQ ID NO: 1311438 - DNA, 15 bp, Homo sapiens
aaaagatagagcccc

SEQ ID NO: 1311439 - DNA, 15 bp, Homo sapiens
caaaagatagagccc

SEQ ID NO: 1311440 - DNA, 15 bp, Homo sapiens
tcaaaagatagagcc

SEQ ID NO: 1311441 - DNA, 15 bp, Homo sapiens
ttcaaaagatagagc

SEQ ID NO: 1311442 - DNA, 15 bp, Homo sapiens
attcaaaagatagag

SEQ ID NO: 1311443 - DNA, 15 bp, Homo sapiens
aattcaaaagataga

SEQ ID NO: 1311444 - DNA, 15 bp, Homo sapiens
gaattcaaaagatag

SEQ ID NO: 1311445 - DNA, 15 bp, Homo sapiens
agaattcaaaagata

SEQ ID NO: 1311446 - DNA, 15 bp, Homo sapiens
cagaattcaaaagat

SEQ ID NO: 1311447 - DNA, 15 bp, Homo sapiens
acagaattcaaaaga

SEQ ID NO: 1311448 - DNA, 15 bp, Homo sapiens
aacagaattcaaaag

SEQ ID NO: 1311449 - DNA, 15 bp, Homo sapiens
aaacagaattcaaaa

SEQ ID NO: 1311450 - DNA, 15 bp, Homo sapiens
aaaacagaattcaaa

SEQ ID NO: 1311451 - DNA, 15 bp, Homo sapiens
aaaaacagaattcaa

SEQ ID NO: 1311452 - DNA, 15 bp, Homo sapiens
taaaaacagaattca

SEQ ID NO: 1311453 - DNA, 15 bp, Homo sapiens
ttaaaaacagaattc

SEQ ID NO: 1311454 - DNA, 15 bp, Homo sapiens
gttaaaaacagaatt

SEQ ID NO: 1311455 - DNA, 15 bp, Homo sapiens
tgttaaaaacagaat

SEQ ID NO: 1311456 - DNA, 15 bp, Homo sapiens
gtgttaaaaacagaa

SEQ ID NO: 1311457 - DNA, 15 bp, Homo sapiens
agtgttaaaaacaga

SEQ ID NO: 1311458 - DNA, 15 bp, Homo sapiens
cagtgttaaaaacag

SEQ ID NO: 1311459 - DNA, 15 bp, Homo sapiens
gcagtgttaaaaaca

SEQ ID NO: 1311460 - DNA, 15 bp, Homo sapiens
agcagtgttaaaaac

SEQ ID NO: 1311461 - DNA, 15 bp, Homo sapiens
aagcagtgttaaaaa

SEQ ID NO: 1311462 - DNA, 15 bp, Homo sapiens
aaagcagtgttaaaa

SEQ ID NO: 1311463 - DNA, 15 bp, Homo sapiens
aaaagcagtgttaaa

SEQ ID NO: 1311464 - DNA, 15 bp, Homo sapiens
gaaaagcagtgttaa

SEQ ID NO: 1311465 - DNA, 15 bp, Homo sapiens
ggaaaagcagtgtta

SEQ ID NO: 1311466 - DNA, 15 bp, Homo sapiens
tggaaaagcagtgtt

SEQ ID NO: 1311467 - DNA, 15 bp, Homo sapiens
ttggaaaagcagtgt

SEQ ID NO: 1311468 - DNA, 15 bp, Homo sapiens
attggaaaagcagtg

SEQ ID NO: 1311469 - DNA, 15 bp, Homo sapiens
cattggaaaagcagt

SEQ ID NO: 1311470 - DNA, 15 bp, Homo sapiens
tcattggaaaagcag

SEQ ID NO: 1311471 - DNA, 15 bp, Homo sapiens
ttcattggaaaagca

SEQ ID NO: 1311472 - DNA, 15 bp, Homo sapiens
tttcattggaaaagc

SEQ ID NO: 1311473 - DNA, 15 bp, Homo sapiens
ctttcattggaaaag

SEQ ID NO: 1311474 - DNA, 15 bp, Homo sapiens
tctttcattggaaaa

SEQ ID NO: 1311475 - DNA, 15 bp, Homo sapiens
ctctttcattggaaa

SEQ ID NO: 1311476 - DNA, 15 bp, Homo sapiens
cctctttcattggaa

SEQ ID NO: 1311477 - DNA, 15 bp, Homo sapiens
acctctttcattgga

SEQ ID NO: 1311478 - DNA, 15 bp, Homo sapiens
tacctctttcattgg

SEQ ID NO: 1311479 - DNA, 15 bp, Homo sapiens
ttacctctttcattg

SEQ ID NO: 1311480 - DNA, 15 bp, Homo sapiens
attacctctttcatt

SEQ ID NO: 1311481 - DNA, 15 bp, Homo sapiens
aattacctctttcat

SEQ ID NO: 1311482 - DNA, 15 bp, Homo sapiens
aaattacctctttca

SEQ ID NO: 1311483 - DNA, 15 bp, Homo sapiens
aaaattacctctttc

SEQ ID NO: 1311484 - DNA, 15 bp, Homo sapiens
gaaaattacctcttt

SEQ ID NO: 1311485 - DNA, 15 bp, Homo sapiens
agaaaattacctctt

SEQ ID NO: 1311486 - DNA, 15 bp, Homo sapiens
tagaaaattacctct

SEQ ID NO: 1311487 - DNA, 15 bp, Homo sapiens
gtagaaaattacctc

SEQ ID NO: 1311488 - DNA, 15 bp, Homo sapiens
ggtagaaaattacct

SEQ ID NO: 1311489 - DNA, 15 bp, Homo sapiens
gggtagaaaattacc

SEQ ID NO: 1311490 - DNA, 15 bp, Homo sapiens
agggtagaaaattac

SEQ ID NO: 1311491 - DNA, 15 bp, Homo sapiens
aagggtagaaaatta

SEQ ID NO: 1311492 - DNA, 15 bp, Homo sapiens
aaagggtagaaaatt

SEQ ID NO: 1311493 - DNA, 15 bp, Homo sapiens
aaaagggtagaaaat

SEQ ID NO: 1311494 - DNA, 15 bp, Homo sapiens
taaaagggtagaaaa

SEQ ID NO: 1311495 - DNA, 15 bp, Homo sapiens
ttaaaagggtagaaa

SEQ ID NO: 1311496 - DNA, 15 bp, Homo sapiens
cttaaaagggtagaa

SEQ ID NO: 1311497 - DNA, 15 bp, Homo sapiens
tcttaaaagggtaga

SEQ ID NO: 1311498 - DNA, 15 bp, Homo sapiens
ctcttaaaagggtag

SEQ ID NO: 1311499 - DNA, 15 bp, Homo sapiens
cctcttaaaagggta

SEQ ID NO: 1311500 - DNA, 15 bp, Homo sapiens
acctcttaaaagggt

SEQ ID NO: 1311501 - DNA, 15 bp, Homo sapiens
aacctcttaaaaggg

SEQ ID NO: 1311502 - DNA, 15 bp, Homo sapiens
taacctcttaaaagg

SEQ ID NO: 1311503 - DNA, 15 bp, Homo sapiens
ataacctcttaaaag

SEQ ID NO: 1311504 - DNA, 15 bp, Homo sapiens
aataacctcttaaaa

SEQ ID NO: 1311505 - DNA, 15 bp, Homo sapiens
caataacctcttaaa

SEQ ID NO: 1311506 - DNA, 15 bp, Homo sapiens
acaataacctcttaa

SEQ ID NO: 1311507 - DNA, 15 bp, Homo sapiens
tacaataacctctta

SEQ ID NO: 1311508 - DNA, 15 bp, Homo sapiens
ctacaataacctctt

SEQ ID NO: 1311509 - DNA, 15 bp, Homo sapiens
actacaataacctct

SEQ ID NO: 1311510 - DNA, 15 bp, Homo sapiens
tactacaataacctc

SEQ ID NO: 1311511 - DNA, 15 bp, Homo sapiens
ttactacaataacct

SEQ ID NO: 1311512 - DNA, 15 bp, Homo sapiens
tttactacaataacc

SEQ ID NO: 1311513 - DNA, 15 bp, Homo sapiens
atttactacaataac

SEQ ID NO: 1311514 - DNA, 15 bp, Homo sapiens
gatttactacaataa

SEQ ID NO: 1311515 - DNA, 15 bp, Homo sapiens
agatttactacaata

SEQ ID NO: 1311516 - DNA, 15 bp, Homo sapiens
aagatttactacaat

SEQ ID NO: 1311517 - DNA, 15 bp, Homo sapiens
aaagatttactacaa

SEQ ID NO: 1311518 - DNA, 15 bp, Homo sapiens
aaaagatttactaca

SEQ ID NO: 1311519 - DNA, 15 bp, Homo sapiens
caaaagatttactac

SEQ ID NO: 1311520 - DNA, 15 bp, Homo sapiens
ccaaaagatttacta

SEQ ID NO: 1311521 - DNA, 15 bp, Homo sapiens
cccaaaagatttact

SEQ ID NO: 1311522 - DNA, 15 bp, Homo sapiens
tcccaaaagatttac

SEQ ID NO: 1311523 - DNA, 15 bp, Homo sapiens
ctcccaaaagattta

SEQ ID NO: 1311524 - DNA, 15 bp, Homo sapiens
gctcccaaaagattt

SEQ ID NO: 1311525 - DNA, 15 bp, Homo sapiens
tgctcccaaaagatt

SEQ ID NO: 1311526 - DNA, 15 bp, Homo sapiens
ctgctcccaaaagat

SEQ ID NO: 1311527 - DNA, 15 bp, Homo sapiens
cctgctcccaaaaga

SEQ ID NO: 1311528 - DNA, 15 bp, Homo sapiens
tcctgctcccaaaag

SEQ ID NO: 1311529 - DNA, 15 bp, Homo sapiens
ttcctgctcccaaaa

SEQ ID NO: 1311530 - DNA, 15 bp, Homo sapiens
cttcctgctcccaaa

SEQ ID NO: 1311531 - DNA, 15 bp, Homo sapiens
tcttcctgctcccaa

SEQ ID NO: 1311532 - DNA, 15 bp, Homo sapiens
gtcttcctgctccca

SEQ ID NO: 1311533 - DNA, 15 bp, Homo sapiens
tgtcttcctgctccc

SEQ ID NO: 1311534 - DNA, 15 bp, Homo sapiens
ctgtcttcctgctcc

SEQ ID NO: 1311535 - DNA, 15 bp, Homo sapiens
cctgtcttcctgctc

SEQ ID NO: 1311536 - DNA, 15 bp, Homo sapiens
tcctgtcttcctgct

SEQ ID NO: 1311537 - DNA, 15 bp, Homo sapiens
ttcctgtcttcctgc

SEQ ID NO: 1311538 - DNA, 15 bp, Homo sapiens
cttcctgtcttcctg

SEQ ID NO: 1311539 - DNA, 15 bp, Homo sapiens
ccttcctgtcttcct

SEQ ID NO: 1311540 - DNA, 15 bp, Homo sapiens
accttcctgtcttcc

SEQ ID NO: 1311541 - DNA, 15 bp, Homo sapiens
taccttcctgtcttc

SEQ ID NO: 1311542 - DNA, 15 bp, Homo sapiens
ctaccttcctgtctt

SEQ ID NO: 1311543 - DNA, 15 bp, Homo sapiens
cctaccttcctgtct

SEQ ID NO: 1311544 - DNA, 15 bp, Homo sapiens
tcctaccttcctgtc

SEQ ID NO: 1311545 - DNA, 15 bp, Homo sapiens
ctcctaccttcctgt

SEQ ID NO: 1311546 - DNA, 15 bp, Homo sapiens
tctcctaccttcctg

SEQ ID NO: 1311547 - DNA, 15 bp, Homo sapiens
ctctcctaccttcct

SEQ ID NO: 1311548 - DNA, 15 bp, Homo sapiens
cctctcctaccttcc

SEQ ID NO: 1311549 - DNA, 15 bp, Homo sapiens
gcctctcctaccttc

SEQ ID NO: 1311550 - DNA, 15 bp, Homo sapiens
agcctctcctacctt

SEQ ID NO: 1311551 - DNA, 15 bp, Homo sapiens
aagcctctcctacct

SEQ ID NO: 1311552 - DNA, 15 bp, Homo sapiens
taagcctctcctacc

SEQ ID NO: 1311553 - DNA, 15 bp, Homo sapiens
ttaagcctctcctac

SEQ ID NO: 1311554 - DNA, 15 bp, Homo sapiens
gttaagcctctccta

SEQ ID NO: 1311555 - DNA, 15 bp, Homo sapiens
tgttaagcctctcct

SEQ ID NO: 1311556 - DNA, 15 bp, Homo sapiens
gtgttaagcctctcc

SEQ ID NO: 1311557 - DNA, 15 bp, Homo sapiens
agtgttaagcctctc

SEQ ID NO: 1311558 - DNA, 15 bp, Homo sapiens
tagtgttaagcctct

SEQ ID NO: 1311559 - DNA, 15 bp, Homo sapiens
atagtgttaagcctc

SEQ ID NO: 1311560 - DNA, 15 bp, Homo sapiens
gatagtgttaagcct

SEQ ID NO: 1311561 - DNA, 15 bp, Homo sapiens
tgatagtgttaagcc

SEQ ID NO: 1311562 - DNA, 15 bp, Homo sapiens
atgatagtgttaagc

SEQ ID NO: 1311563 - DNA, 15 bp, Homo sapiens
aatgatagtgttaag

SEQ ID NO: 1311564 - DNA, 15 bp, Homo sapiens
aaatgatagtgttaa

SEQ ID NO: 1311565 - DNA, 15 bp, Homo sapiens
aaaatgatagtgtta

SEQ ID NO: 1311566 - DNA, 15 bp, Homo sapiens
taaaatgatagtgtt

SEQ ID NO: 1311567 - DNA, 15 bp, Homo sapiens
ttaaaatgatagtgt

SEQ ID NO: 1311568 - DNA, 15 bp, Homo sapiens
cttaaaatgatagtg

SEQ ID NO: 1311569 - DNA, 15 bp, Homo sapiens
ccttaaaatgatagt

SEQ ID NO: 1311570 - DNA, 15 bp, Homo sapiens
accttaaaatgatag

SEQ ID NO: 1311571 - DNA, 15 bp, Homo sapiens
taccttaaaatgata

SEQ ID NO: 1311572 - DNA, 15 bp, Homo sapiens
ttaccttaaaatgat

SEQ ID NO: 1311573 - DNA, 15 bp, Homo sapiens
attaccttaaaatga

SEQ ID NO: 1311574 - DNA, 15 bp, Homo sapiens
tattaccttaaaatg

SEQ ID NO: 1311575 - DNA, 15 bp, Homo sapiens
ttattaccttaaaat

SEQ ID NO: 1311576 - DNA, 15 bp, Homo sapiens
tttattaccttaaaa

SEQ ID NO: 1311577 - DNA, 15 bp, Homo sapiens
ttttattaccttaaa

SEQ ID NO: 1311578 - DNA, 15 bp, Homo sapiens
tttttattaccttaa

SEQ ID NO: 1311579 - DNA, 15 bp, Homo sapiens
ttttttattacctta

SEQ ID NO: 1311580 - DNA, 15 bp, Homo sapiens
cttttttattacctt

SEQ ID NO: 1311581 - DNA, 15 bp, Homo sapiens
tcttttttattacct

SEQ ID NO: 1311582 - DNA, 15 bp, Homo sapiens
ctcttttttattacc

SEQ ID NO: 1311583 - DNA, 15 bp, Homo sapiens
tctcttttttattac

SEQ ID NO: 1311584 - DNA, 15 bp, Homo sapiens
ctctcttttttatta

SEQ ID NO: 1311585 - DNA, 15 bp, Homo sapiens
tctctcttttttatt

SEQ ID NO: 1311586 - DNA, 15 bp, Homo sapiens
ctctctcttttttat

SEQ ID NO: 1311587 - DNA, 15 bp, Homo sapiens
tctctctctttttta

SEQ ID NO: 1311588 - DNA, 15 bp, Homo sapiens
ttctctctctttttt

SEQ ID NO: 1311589 - DNA, 15 bp, Homo sapiens
cttctctctcttttt

SEQ ID NO: 1311590 - DNA, 15 bp, Homo sapiens
acttctctctctttt

SEQ ID NO: 1311591 - DNA, 15 bp, Homo sapiens
aacttctctctcttt

SEQ ID NO: 1311592 - DNA, 15 bp, Homo sapiens
aaacttctctctctt

SEQ ID NO: 1311593 - DNA, 15 bp, Homo sapiens
caaacttctctctct

SEQ ID NO: 1311594 - DNA, 15 bp, Homo sapiens
gcaaacttctctctc

SEQ ID NO: 1311595 - DNA, 15 bp, Homo sapiens
ggcaaacttctctct

SEQ ID NO: 1311596 - DNA, 15 bp, Homo sapiens
aggcaaacttctctc

SEQ ID NO: 1311597 - DNA, 15 bp, Homo sapiens
caggcaaacttctct

SEQ ID NO: 1311598 - DNA, 15 bp, Homo sapiens
ccaggcaaacttctc

SEQ ID NO: 1311599 - DNA, 15 bp, Homo sapiens
accaggcaaacttct

SEQ ID NO: 1311600 - DNA, 15 bp, Homo sapiens
caccaggcaaacttc

SEQ ID NO: 1311601 - DNA, 15 bp, Homo sapiens
acaccaggcaaactt

SEQ ID NO: 1311602 - DNA, 15 bp, Homo sapiens
aacaccaggcaaact

SEQ ID NO: 1311603 - DNA, 15 bp, Homo sapiens
taacaccaggcaaac

SEQ ID NO: 1311604 - DNA, 15 bp, Homo sapiens
ttaacaccaggcaaa

SEQ ID NO: 1311605 - DNA, 15 bp, Homo sapiens
attaacaccaggcaa

SEQ ID NO: 1311606 - DNA, 15 bp, Homo sapiens
gattaacaccaggca

SEQ ID NO: 1311607 - DNA, 15 bp, Homo sapiens
agattaacaccaggc

SEQ ID NO: 1311608 - DNA, 15 bp, Homo sapiens
gagattaacaccagg

SEQ ID NO: 1311609 - DNA, 15 bp, Homo sapiens
ggagattaacaccag

SEQ ID NO: 1311610 - DNA, 15 bp, Homo sapiens
aggagattaacacca

SEQ ID NO: 1311611 - DNA, 15 bp, Homo sapiens
caggagattaacacc

SEQ ID NO: 1311612 - DNA, 15 bp, Homo sapiens
acaggagattaacac

SEQ ID NO: 1311613 - DNA, 15 bp, Homo sapiens
aacaggagattaaca

SEQ ID NO: 1311614 - DNA, 15 bp, Homo sapiens
gaacaggagattaac

SEQ ID NO: 1311615 - DNA, 15 bp, Homo sapiens
tgaacaggagattaa

SEQ ID NO: 1311616 - DNA, 15 bp, Homo sapiens
atgaacaggagatta

SEQ ID NO: 1311617 - DNA, 15 bp, Homo sapiens
aatgaacaggagatt

SEQ ID NO: 1311618 - DNA, 15 bp, Homo sapiens
aaatgaacaggagat

SEQ ID NO: 1311619 - DNA, 15 bp, Homo sapiens
taaatgaacaggaga

SEQ ID NO: 1311620 - DNA, 15 bp, Homo sapiens
ataaatgaacaggag

SEQ ID NO: 1311621 - DNA, 15 bp, Homo sapiens
aataaatgaacagga

SEQ ID NO: 1311622 - DNA, 15 bp, Homo sapiens
taataaatgaacagg

SEQ ID NO: 1311623 - DNA, 15 bp, Homo sapiens
ataataaatgaacag

SEQ ID NO: 1311624 - DNA, 15 bp, Homo sapiens
gataataaatgaaca

SEQ ID NO: 1311625 - DNA, 15 bp, Homo sapiens
agataataaatgaac

SEQ ID NO: 1311626 - DNA, 15 bp, Homo sapiens
cagataataaatgaa

SEQ ID NO: 1311627 - DNA, 15 bp, Homo sapiens
tcagataataaatga

SEQ ID NO: 1311628 - DNA, 15 bp, Homo sapiens
atcagataataaatg

SEQ ID NO: 1311629 - DNA, 15 bp, Homo sapiens
gatcagataataaat

SEQ ID NO: 1311630 - DNA, 15 bp, Homo sapiens
agatcagataataaa

SEQ ID NO: 1311631 - DNA, 15 bp, Homo sapiens
cagatcagataataa

SEQ ID NO: 1311632 - DNA, 15 bp, Homo sapiens
acagatcagataata

SEQ ID NO: 1311633 - DNA, 15 bp, Homo sapiens
aacagatcagataat

SEQ ID NO: 1311634 - DNA, 15 bp, Homo sapiens
caacagatcagataa

SEQ ID NO: 1311635 - DNA, 15 bp, Homo sapiens
gcaacagatcagata

SEQ ID NO: 1311636 - DNA, 15 bp, Homo sapiens
ggcaacagatcagat

SEQ ID NO: 1311637 - DNA, 15 bp, Homo sapiens
aggcaacagatcaga

SEQ ID NO: 1311638 - DNA, 15 bp, Homo sapiens
aaggcaacagatcag

SEQ ID NO: 1311639 - DNA, 15 bp, Homo sapiens
caaggcaacagatca

SEQ ID NO: 1311640 - DNA, 15 bp, Homo sapiens
acaaggcaacagatc

SEQ ID NO: 1311641 - DNA, 15 bp, Homo sapiens
aacaaggcaacagat

SEQ ID NO: 1311642 - DNA, 15 bp, Homo sapiens
aaacaaggcaacaga

SEQ ID NO: 1311643 - DNA, 15 bp, Homo sapiens
taaacaaggcaacag

SEQ ID NO: 1311644 - DNA, 15 bp, Homo sapiens
ttaaacaaggcaaca

SEQ ID NO: 1311645 - DNA, 15 bp, Homo sapiens
attaaacaaggcaac

SEQ ID NO: 1311646 - DNA, 15 bp, Homo sapiens
aattaaacaaggcaa

SEQ ID NO: 1311647 - DNA, 15 bp, Homo sapiens
caattaaacaaggca

SEQ ID NO: 1311648 - DNA, 15 bp, Homo sapiens
tcaattaaacaaggc

SEQ ID NO: 1311649 - DNA, 15 bp, Homo sapiens
gtcaattaaacaagg

SEQ ID NO: 1311650 - DNA, 15 bp, Homo sapiens
tgtcaattaaacaag

SEQ ID NO: 1311651 - DNA, 15 bp, Homo sapiens
atgtcaattaaacaa

SEQ ID NO: 1311652 - DNA, 15 bp, Homo sapiens
aatgtcaattaaaca

SEQ ID NO: 1311653 - DNA, 15 bp, Homo sapiens
gaatgtcaattaaac

SEQ ID NO: 1311654 - DNA, 15 bp, Homo sapiens
agaatgtcaattaaa

SEQ ID NO: 1311655 - DNA, 15 bp, Homo sapiens
aagaatgtcaattaa

SEQ ID NO: 1311656 - DNA, 15 bp, Homo sapiens
aaagaatgtcaatta

SEQ ID NO: 1311657 - DNA, 15 bp, Homo sapiens
caaagaatgtcaatt

SEQ ID NO: 1311658 - DNA, 15 bp, Homo sapiens
acaaagaatgtcaat

SEQ ID NO: 1311659 - DNA, 15 bp, Homo sapiens
tacaaagaatgtcaa

SEQ ID NO: 1311660 - DNA, 15 bp, Homo sapiens
gtacaaagaatgtca

SEQ ID NO: 1311661 - DNA, 15 bp, Homo sapiens
agtacaaagaatgtc

SEQ ID NO: 1311662 - DNA, 15 bp, Homo sapiens
aagtacaaagaatgt

SEQ ID NO: 1311663 - DNA, 15 bp, Homo sapiens
aaagtacaaagaatg

SEQ ID NO: 1311664 - DNA, 15 bp, Homo sapiens
aaaagtacaaagaat

SEQ ID NO: 1311665 - DNA, 15 bp, Homo sapiens
taaaagtacaaagaa

SEQ ID NO: 1311666 - DNA, 15 bp, Homo sapiens
ataaaagtacaaaga

SEQ ID NO: 1311667 - DNA, 15 bp, Homo sapiens
tataaaagtacaaag

SEQ ID NO: 1311668 - DNA, 15 bp, Homo sapiens
ttataaaagtacaaa

SEQ ID NO: 1311669 - DNA, 15 bp, Homo sapiens
tttataaaagtacaa

SEQ ID NO: 1311670 - DNA, 15 bp, Homo sapiens
ttttataaaagtaca

SEQ ID NO: 1311671 - DNA, 15 bp, Homo sapiens
gttttataaaagtac

SEQ ID NO: 1311672 - DNA, 15 bp, Homo sapiens
agttttataaaagta

SEQ ID NO: 1311673 - DNA, 15 bp, Homo sapiens
cagttttataaaagt

SEQ ID NO: 1311674 - DNA, 15 bp, Homo sapiens
acagttttataaaag

SEQ ID NO: 1311675 - DNA, 15 bp, Homo sapiens
gacagttttataaaa

SEQ ID NO: 1311676 - DNA, 15 bp, Homo sapiens
agacagttttataaa

SEQ ID NO: 1311677 - DNA, 15 bp, Homo sapiens
cagacagttttataa

SEQ ID NO: 1311678 - DNA, 15 bp, Homo sapiens
tcagacagttttata

SEQ ID NO: 1311679 - DNA, 15 bp, Homo sapiens
gtcagacagttttat

SEQ ID NO: 1311680 - DNA, 15 bp, Homo sapiens
tgtcagacagtttta

SEQ ID NO: 1311681 - DNA, 15 bp, Homo sapiens
atgtcagacagtttt

SEQ ID NO: 1311682 - DNA, 15 bp, Homo sapiens
gatgtcagacagttt

SEQ ID NO: 1311683 - DNA, 15 bp, Homo sapiens
tgatgtcagacagtt

SEQ ID NO: 1311684 - DNA, 15 bp, Homo sapiens
ttgatgtcagacagt

SEQ ID NO: 1311685 - DNA, 15 bp, Homo sapiens
cttgatgtcagacag

SEQ ID NO: 1311686 - DNA, 15 bp, Homo sapiens
acttgatgtcagaca

SEQ ID NO: 1311687 - DNA, 15 bp, Homo sapiens
tacttgatgtcagac

SEQ ID NO: 1311688 - DNA, 15 bp, Homo sapiens
ttacttgatgtcaga

SEQ ID NO: 1311689 - DNA, 15 bp, Homo sapiens
tttacttgatgtcag

SEQ ID NO: 1311690 - DNA, 15 bp, Homo sapiens
ttttacttgatgtca

SEQ ID NO: 1311691 - DNA, 15 bp, Homo sapiens
tttttacttgatgtc

SEQ ID NO: 1311692 - DNA, 15 bp, Homo sapiens
atttttacttgatgt

SEQ ID NO: 1311693 - DNA, 15 bp, Homo sapiens
catttttacttgatg

SEQ ID NO: 1311694 - DNA, 15 bp, Homo sapiens
tcatttttacttgat

SEQ ID NO: 1311695 - DNA, 15 bp, Homo sapiens
atcatttttacttga

SEQ ID NO: 1311696 - DNA, 15 bp, Homo sapiens
tatcatttttacttg

SEQ ID NO: 1311697 - DNA, 15 bp, Homo sapiens
ttatcatttttactt

SEQ ID NO: 1311698 - DNA, 15 bp, Homo sapiens
tttatcatttttact

SEQ ID NO: 1311699 - DNA, 15 bp, Homo sapiens
ctttatcatttttac

SEQ ID NO: 1311700 - DNA, 15 bp, Homo sapiens
tctttatcattttta

SEQ ID NO: 1311701 - DNA, 15 bp, Homo sapiens
ctctttatcattttt

SEQ ID NO: 1311702 - DNA, 15 bp, Homo sapiens
tctctttatcatttt

SEQ ID NO: 1311703 - DNA, 15 bp, Homo sapiens
ttctctttatcattt

SEQ ID NO: 1311704 - DNA, 15 bp, Homo sapiens
tttctctttatcatt

SEQ ID NO: 1311705 - DNA, 15 bp, Homo sapiens
ttttctctttatcat

SEQ ID NO: 1311706 - DNA, 15 bp, Homo sapiens
attttctctttatca

SEQ ID NO: 1311707 - DNA, 15 bp, Homo sapiens
tattttctctttatc

SEQ ID NO: 1311708 - DNA, 15 bp, Homo sapiens
ctattttctctttat

SEQ ID NO: 1311709 - DNA, 15 bp, Homo sapiens
tctattttctcttta

SEQ ID NO: 1311710 - DNA, 15 bp, Homo sapiens
ttctattttctcttt

SEQ ID NO: 1311711 - DNA, 15 bp, Homo sapiens
tttctattttctctt

SEQ ID NO: 1311712 - DNA, 15 bp, Homo sapiens
atttctattttctct

SEQ ID NO: 1311713 - DNA, 15 bp, Homo sapiens
aatttctattttctc

SEQ ID NO: 1311714 - DNA, 15 bp, Homo sapiens
aaatttctattttct

SEQ ID NO: 1311715 - DNA, 15 bp, Homo sapiens
caaatttctattttc

SEQ ID NO: 1311716 - DNA, 15 bp, Homo sapiens
tcaaatttctatttt

SEQ ID NO: 1311717 - DNA, 15 bp, Homo sapiens
ctcaaatttctattt

SEQ ID NO: 1311718 - DNA, 15 bp, Homo sapiens
tctcaaatttctatt

SEQ ID NO: 1311719 - DNA, 15 bp, Homo sapiens
ttctcaaatttctat

SEQ ID NO: 1311720 - DNA, 15 bp, Homo sapiens
attctcaaatttcta

SEQ ID NO: 1311721 - DNA, 15 bp, Homo sapiens
aattctcaaatttct

SEQ ID NO: 1311722 - DNA, 15 bp, Homo sapiens
taattctcaaatttc

SEQ ID NO: 1311723 - DNA, 15 bp, Homo sapiens
ctaattctcaaattt

SEQ ID NO: 1311724 - DNA, 15 bp, Homo sapiens
tctaattctcaaatt

SEQ ID NO: 1311725 - DNA, 15 bp, Homo sapiens
ctctaattctcaaat

SEQ ID NO: 1311726 - DNA, 15 bp, Homo sapiens
tctctaattctcaaa

SEQ ID NO: 1311727 - DNA, 15 bp, Homo sapiens
atctctaattctcaa

SEQ ID NO: 1311728 - DNA, 15 bp, Homo sapiens
aatctctaattctca

SEQ ID NO: 1311729 - DNA, 15 bp, Homo sapiens
aaatctctaattctc

SEQ ID NO: 1311730 - DNA, 15 bp, Homo sapiens
aaaatctctaattct

SEQ ID NO: 1311731 - DNA, 15 bp, Homo sapiens
taaaatctctaattc

SEQ ID NO: 1311732 - DNA, 15 bp, Homo sapiens
ctaaaatctctaatt

SEQ ID NO: 1311733 - DNA, 15 bp, Homo sapiens
cctaaaatctctaat

SEQ ID NO: 1311734 - DNA, 15 bp, Homo sapiens
tcctaaaatctctaa

SEQ ID NO: 1311735 - DNA, 15 bp, Homo sapiens
ctcctaaaatctcta

SEQ ID NO: 1311736 - DNA, 15 bp, Homo sapiens
actcctaaaatctct

SEQ ID NO: 1311737 - DNA, 15 bp, Homo sapiens
aactcctaaaatctc

SEQ ID NO: 1311738 - DNA, 15 bp, Homo sapiens
taactcctaaaatct

SEQ ID NO: 1311739 - DNA, 15 bp, Homo sapiens
ataactcctaaaatc

SEQ ID NO: 1311740 - DNA, 15 bp, Homo sapiens
acataactcctaaaa

SEQ ID NO: 1311741 - DNA, 15 bp, Homo sapiens
tacataactcctaaa

SEQ ID NO: 1311742 - DNA, 15 bp, Homo sapiens
gtacataactcctaa

SEQ ID NO: 1311743 - DNA, 15 bp, Homo sapiens
tgtacataactccta

SEQ ID NO: 1311744 - DNA, 15 bp, Homo sapiens
atgtacataactcct

SEQ ID NO: 1311745 - DNA, 15 bp, Homo sapiens
catgtacataactcc

SEQ ID NO: 1311746 - DNA, 15 bp, Homo sapiens
gcatgtacataactc

SEQ ID NO: 1311747 - DNA, 15 bp, Homo sapiens
agcatgtacataact

SEQ ID NO: 1311748 - DNA, 15 bp, Homo sapiens
cagcatgtacataac

SEQ ID NO: 1311749 - DNA, 15 bp, Homo sapiens
tcagcatgtacataa

SEQ ID NO: 1311750 - DNA, 15 bp, Homo sapiens
atcagcatgtacata

SEQ ID NO: 1311751 - DNA, 15 bp, Homo sapiens
gatcagcatgtacat

SEQ ID NO: 1311752 - DNA, 15 bp, Homo sapiens
agatcagcatgtaca

SEQ ID NO: 1311753 - DNA, 15 bp, Homo sapiens
gagatcagcatgtac

SEQ ID NO: 1311754 - DNA, 15 bp, Homo sapiens
agagatcagcatgta

SEQ ID NO: 1311755 - DNA, 15 bp, Homo sapiens
cagagatcagcatgt

SEQ ID NO: 1311756 - DNA, 15 bp, Homo sapiens
ccagagatcagcatg

SEQ ID NO: 1311757 - DNA, 15 bp, Homo sapiens
tccagagatcagcat

SEQ ID NO: 1311758 - DNA, 15 bp, Homo sapiens
ttccagagatcagca

SEQ ID NO: 1311759 - DNA, 15 bp, Homo sapiens
tttccagagatcagc

SEQ ID NO: 1311760 - DNA, 15 bp, Homo sapiens
ttttccagagatcag

SEQ ID NO: 1311761 - DNA, 15 bp, Homo sapiens
attttccagagatca

SEQ ID NO: 1311762 - DNA, 15 bp, Homo sapiens
tattttccagagatc

SEQ ID NO: 1311763 - DNA, 15 bp, Homo sapiens
atattttccagagat

SEQ ID NO: 1311764 - DNA, 15 bp, Homo sapiens
aatattttccagaga

SEQ ID NO: 1311765 - DNA, 15 bp, Homo sapiens
caatattttccagag

SEQ ID NO: 1311766 - DNA, 15 bp, Homo sapiens
gcaatattttccaga

SEQ ID NO: 1311767 - DNA, 15 bp, Homo sapiens
agcaatattttccag

SEQ ID NO: 1311768 - DNA, 15 bp, Homo sapiens
tagcaatattttcca

SEQ ID NO: 1311769 - DNA, 15 bp, Homo sapiens
ttagcaatattttcc

SEQ ID NO: 1311770 - DNA, 15 bp, Homo sapiens
tttagcaatattttc

SEQ ID NO: 1311771 - DNA, 15 bp, Homo sapiens
atttagcaatatttt

SEQ ID NO: 1311772 - DNA, 15 bp, Homo sapiens
tatttagcaatattt

SEQ ID NO: 1311773 - DNA, 15 bp, Homo sapiens
ttatttagcaatatt

SEQ ID NO: 1311774 - DNA, 15 bp, Homo sapiens
cttatttagcaatat

SEQ ID NO: 1311775 - DNA, 15 bp, Homo sapiens
acttatttagcaata

SEQ ID NO: 1311776 - DNA, 15 bp, Homo sapiens
tacttatttagcaat

SEQ ID NO: 1311777 - DNA, 15 bp, Homo sapiens
ttacttatttagcaa

SEQ ID NO: 1311778 - DNA, 15 bp, Homo sapiens
attacttatttagca

SEQ ID NO: 1311779 - DNA, 15 bp, Homo sapiens
cattacttatttagc

SEQ ID NO: 1311780 - DNA, 15 bp, Homo sapiens
gcattacttatttag

SEQ ID NO: 1311781 - DNA, 15 bp, Homo sapiens
agcattacttattta

SEQ ID NO: 1311782 - DNA, 15 bp, Homo sapiens
cagcattacttattt

SEQ ID NO: 1311783 - DNA, 15 bp, Homo sapiens
acagcattacttatt

SEQ ID NO: 1311784 - DNA, 15 bp, Homo sapiens
aacagcattacttat

SEQ ID NO: 1311785 - DNA, 15 bp, Homo sapiens
caacagcattactta

SEQ ID NO: 1311786 - DNA, 15 bp, Homo sapiens
tcaacagcattactt

SEQ ID NO: 1311787 - DNA, 15 bp, Homo sapiens
atcaacagcattact

SEQ ID NO: 1311788 - DNA, 15 bp, Homo sapiens
gatcaacagcattac

SEQ ID NO: 1311789 - DNA, 15 bp, Homo sapiens
tgatcaacagcatta

SEQ ID NO: 1311790 - DNA, 15 bp, Homo sapiens
atgatcaacagcatt

SEQ ID NO: 1311791 - DNA, 15 bp, Homo sapiens
aatgatcaacagcat

SEQ ID NO: 1311792 - DNA, 15 bp, Homo sapiens
taatgatcaacagca

SEQ ID NO: 1311793 - DNA, 15 bp, Homo sapiens
ttaatgatcaacagc

SEQ ID NO: 1311794 - DNA, 15 bp, Homo sapiens
cttaatgatcaacag

SEQ ID NO: 1311795 - DNA, 15 bp, Homo sapiens
acttaatgatcaaca

SEQ ID NO: 1311796 - DNA, 15 bp, Homo sapiens
tacttaatgatcaac

SEQ ID NO: 1311797 - DNA, 15 bp, Homo sapiens
gtacttaatgatcaa

SEQ ID NO: 1311798 - DNA, 15 bp, Homo sapiens
agtacttaatgatca

SEQ ID NO: 1311799 - DNA, 15 bp, Homo sapiens
gagtacttaatgatc

SEQ ID NO: 1311800 - DNA, 15 bp, Homo sapiens
agagtacttaatgat

SEQ ID NO: 1311801 - DNA, 15 bp, Homo sapiens
cagagtacttaatga

SEQ ID NO: 1311802 - DNA, 15 bp, Homo sapiens
ccagagtacttaatg

SEQ ID NO: 1311803 - DNA, 15 bp, Homo sapiens
accagagtacttaat

SEQ ID NO: 1311804 - DNA, 15 bp, Homo sapiens
gaccagagtacttaa

SEQ ID NO: 1311805 - DNA, 15 bp, Homo sapiens
cgaccagagtactta

SEQ ID NO: 1311806 - DNA, 15 bp, Homo sapiens
ccgaccagagtactt

SEQ ID NO: 1311807 - DNA, 15 bp, Homo sapiens
accgaccagagtact

SEQ ID NO: 1311808 - DNA, 15 bp, Homo sapiens
aaccgaccagagtac

SEQ ID NO: 1311809 - DNA, 15 bp, Homo sapiens
aaaccgaccagagta

SEQ ID NO: 1311810 - DNA, 15 bp, Homo sapiens
taaaccgaccagagt

SEQ ID NO: 1311811 - DNA, 15 bp, Homo sapiens
ctaaaccgaccagag

SEQ ID NO: 1311812 - DNA, 15 bp, Homo sapiens
tctaaaccgaccaga

SEQ ID NO: 1311813 - DNA, 15 bp, Homo sapiens
atctaaaccgaccag

SEQ ID NO: 1311814 - DNA, 15 bp, Homo sapiens
tatctaaaccgacca

SEQ ID NO: 1311815 - DNA, 15 bp, Homo sapiens
atatctaaaccgacc

SEQ ID NO: 1311816 - DNA, 15 bp, Homo sapiens
aatatctaaaccgac

SEQ ID NO: 1311817 - DNA, 15 bp, Homo sapiens
taatatctaaaccga

SEQ ID NO: 1311818 - DNA, 15 bp, Homo sapiens
ttaatatctaaaccg

SEQ ID NO: 1311819 - DNA, 15 bp, Homo sapiens
attaatatctaaacc

SEQ ID NO: 1311820 - DNA, 15 bp, Homo sapiens
cattaatatctaaac

SEQ ID NO: 1311821 - DNA, 15 bp, Homo sapiens
acattaatatctaaa

SEQ ID NO: 1311822 - DNA, 15 bp, Homo sapiens
cacattaatatctaa

SEQ ID NO: 1311823 - DNA, 15 bp, Homo sapiens
acacattaatatcta

SEQ ID NO: 1311824 - DNA, 15 bp, Homo sapiens
cacacattaatatct

SEQ ID NO: 1311825 - DNA, 15 bp, Homo sapiens
acacacattaatatc

SEQ ID NO: 1311826 - DNA, 15 bp, Homo sapiens
aacacacattaatat

SEQ ID NO: 1311827 - DNA, 15 bp, Homo sapiens
gaacacacattaata

SEQ ID NO: 1311828 - DNA, 15 bp, Homo sapiens
agaacacacattaat

SEQ ID NO: 1311829 - DNA, 15 bp, Homo sapiens
tagaacacacattaa

SEQ ID NO: 1311830 - DNA, 15 bp, Homo sapiens
gtagaacacacatta

SEQ ID NO: 1311831 - DNA, 15 bp, Homo sapiens
tgtagaacacacatt

SEQ ID NO: 1311832 - DNA, 15 bp, Homo sapiens
atgtagaacacacat

SEQ ID NO: 1311833 - DNA, 15 bp, Homo sapiens
aatgtagaacacaca

SEQ ID NO: 1311834 - DNA, 15 bp, Homo sapiens
gaatgtagaacacac

SEQ ID NO: 1311835 - DNA, 15 bp, Homo sapiens
agaatgtagaacaca

SEQ ID NO: 1311836 - DNA, 15 bp, Homo sapiens
aagaatgtagaacac

SEQ ID NO: 1311837 - DNA, 15 bp, Homo sapiens
taagaatgtagaaca

SEQ ID NO: 1311838 - DNA, 15 bp, Homo sapiens
ttaagaatgtagaac

SEQ ID NO: 1311839 - DNA, 15 bp, Homo sapiens
cttaagaatgtagaa

SEQ ID NO: 1311840 - DNA, 15 bp, Homo sapiens
acttaagaatgtaga

SEQ ID NO: 1311841 - DNA, 15 bp, Homo sapiens
aacttaagaatgtag

SEQ ID NO: 1311842 - DNA, 15 bp, Homo sapiens
aaacttaagaatgta

SEQ ID NO: 1311843 - DNA, 15 bp, Homo sapiens
caaacttaagaatgt

SEQ ID NO: 1311844 - DNA, 15 bp, Homo sapiens
acaaacttaagaatg

SEQ ID NO: 1311845 - DNA, 15 bp, Homo sapiens
aacaaacttaagaat

SEQ ID NO: 1311846 - DNA, 15 bp, Homo sapiens
gaacaaacttaagaa

SEQ ID NO: 1311847 - DNA, 15 bp, Homo sapiens
tgaacaaacttaaga

SEQ ID NO: 1311848 - DNA, 15 bp, Homo sapiens
atgaacaaacttaag

SEQ ID NO: 1311849 - DNA, 15 bp, Homo sapiens
aatgaacaaacttaa

SEQ ID NO: 1311850 - DNA, 15 bp, Homo sapiens
taatgaacaaactta

SEQ ID NO: 1311851 - DNA, 15 bp, Homo sapiens
ctaatgaacaaactt

SEQ ID NO: 1311852 - DNA, 15 bp, Homo sapiens
actaatgaacaaact

SEQ ID NO: 1311853 - DNA, 15 bp, Homo sapiens
gactaatgaacaaac

SEQ ID NO: 1311854 - DNA, 15 bp, Homo sapiens
ggactaatgaacaaa

SEQ ID NO: 1311855 - DNA, 15 bp, Homo sapiens
aggactaatgaacaa

SEQ ID NO: 1311856 - DNA, 15 bp, Homo sapiens
aaggactaatgaaca

SEQ ID NO: 1311857 - DNA, 15 bp, Homo sapiens
aaaggactaatgaac

SEQ ID NO: 1311858 - DNA, 15 bp, Homo sapiens
aaaaggactaatgaa

SEQ ID NO: 1311859 - DNA, 15 bp, Homo sapiens
aaaaaggactaatga

SEQ ID NO: 1311860 - DNA, 15 bp, Homo sapiens
taaaaaggactaatg

SEQ ID NO: 1311861 - DNA, 15 bp, Homo sapiens
ttaaaaaggactaat

SEQ ID NO: 1311862 - DNA, 15 bp, Homo sapiens
attaaaaaggactaa

SEQ ID NO: 1311863 - DNA, 15 bp, Homo sapiens
aattaaaaaggacta

SEQ ID NO: 1311864 - DNA, 15 bp, Homo sapiens
aaattaaaaaggact

SEQ ID NO: 1311865 - DNA, 15 bp, Homo sapiens
caaattaaaaaggac

SEQ ID NO: 1311866 - DNA, 15 bp, Homo sapiens
acaaattaaaaagga

SEQ ID NO: 1311867 - DNA, 15 bp, Homo sapiens
tacaaattaaaaagg

SEQ ID NO: 1311868 - DNA, 15 bp, Homo sapiens
ttacaaattaaaaag

SEQ ID NO: 1311869 - DNA, 15 bp, Homo sapiens
attacaaattaaaaa

SEQ ID NO: 1311870 - DNA, 15 bp, Homo sapiens
aattacaaattaaaa

SEQ ID NO: 1311871 - DNA, 15 bp, Homo sapiens
aaattacaaattaaa

SEQ ID NO: 1311872 - DNA, 15 bp, Homo sapiens
taaattacaaattaa

SEQ ID NO: 1311873 - DNA, 15 bp, Homo sapiens
ataaattacaaatta

SEQ ID NO: 1311874 - DNA, 15 bp, Homo sapiens
aataaattacaaatt

SEQ ID NO: 1311875 - DNA, 15 bp, Homo sapiens
aaataaattacaaat

SEQ ID NO: 1311876 - DNA, 15 bp, Homo sapiens
gaaataaattacaaa

SEQ ID NO: 1311877 - DNA, 15 bp, Homo sapiens
agaaataaattacaa

SEQ ID NO: 1311878 - DNA, 15 bp, Homo sapiens
aagaaataaattaca

SEQ ID NO: 1311879 - DNA, 15 bp, Homo sapiens
taagaaataaattac

SEQ ID NO: 1311880 - DNA, 15 bp, Homo sapiens
tctaagaaataaatt

SEQ ID NO: 1311881 - DNA, 15 bp, Homo sapiens
ttctaagaaataaat

SEQ ID NO: 1311882 - DNA, 15 bp, Homo sapiens
cttctaagaaataaa

SEQ ID NO: 1311883 - DNA, 15 bp, Homo sapiens
gcttctaagaaataa

SEQ ID NO: 1311884 - DNA, 15 bp, Homo sapiens
ggcttctaagaaata

SEQ ID NO: 1311885 - DNA, 15 bp, Homo sapiens
tggcttctaagaaat

SEQ ID NO: 1311886 - DNA, 15 bp, Homo sapiens
atggcttctaagaaa

SEQ ID NO: 1311887 - DNA, 15 bp, Homo sapiens
catggcttctaagaa

SEQ ID NO: 1311888 - DNA, 15 bp, Homo sapiens
acatggcttctaaga

SEQ ID NO: 1311889 - DNA, 15 bp, Homo sapiens
aacatggcttctaag

SEQ ID NO: 1311890 - DNA, 15 bp, Homo sapiens
ataacatggcttcta

SEQ ID NO: 1311891 - DNA, 15 bp, Homo sapiens
tataacatggcttct

SEQ ID NO: 1311892 - DNA, 15 bp, Homo sapiens
ttataacatggcttc

SEQ ID NO: 1311893 - DNA, 15 bp, Homo sapiens
tttataacatggctt

SEQ ID NO: 1311894 - DNA, 15 bp, Homo sapiens
atttataacatggct

SEQ ID NO: 1311895 - DNA, 15 bp, Homo sapiens
catttataacatggc

SEQ ID NO: 1311896 - DNA, 15 bp, Homo sapiens
ccatttataacatgg

SEQ ID NO: 1311897 - DNA, 15 bp, Homo sapiens
cccatttataacatg

SEQ ID NO: 1311898 - DNA, 15 bp, Homo sapiens
acccatttataacat

SEQ ID NO: 1311899 - DNA, 15 bp, Homo sapiens
tacccatttataaca

SEQ ID NO: 1311900 - DNA, 15 bp, Homo sapiens
ttacccatttataac

SEQ ID NO: 1311901 - DNA, 15 bp, Homo sapiens
attacccatttataa

SEQ ID NO: 1311902 - DNA, 15 bp, Homo sapiens
aattacccatttata

SEQ ID NO: 1311903 - DNA, 15 bp, Homo sapiens
gaattacccatttat

SEQ ID NO: 1311904 - DNA, 15 bp, Homo sapiens
tgaattacccattta

SEQ ID NO: 1311905 - DNA, 15 bp, Homo sapiens
ctgaattacccattt

SEQ ID NO: 1311906 - DNA, 15 bp, Homo sapiens
actgaattacccatt

SEQ ID NO: 1311907 - DNA, 15 bp, Homo sapiens
aactgaattacccat

SEQ ID NO: 1311908 - DNA, 15 bp, Homo sapiens
aaactgaattaccca

SEQ ID NO: 1311909 - DNA, 15 bp, Homo sapiens
aaaactgaattaccc

SEQ ID NO: 1311910 - DNA, 15 bp, Homo sapiens
gaaaactgaattacc

SEQ ID NO: 1311911 - DNA, 15 bp, Homo sapiens
tgaaaactgaattac

SEQ ID NO: 1311912 - DNA, 15 bp, Homo sapiens
ctgaaaactgaatta

SEQ ID NO: 1311913 - DNA, 15 bp, Homo sapiens
cctgaaaactgaatt

SEQ ID NO: 1311914 - DNA, 15 bp, Homo sapiens
tcctgaaaactgaat

SEQ ID NO: 1311915 - DNA, 15 bp, Homo sapiens
ttcctgaaaactgaa

SEQ ID NO: 1311916 - DNA, 15 bp, Homo sapiens
tttcctgaaaactga

SEQ ID NO: 1311917 - DNA, 15 bp, Homo sapiens
ctttcctgaaaactg

SEQ ID NO: 1311918 - DNA, 15 bp, Homo sapiens
gctttcctgaaaact

SEQ ID NO: 1311919 - DNA, 15 bp, Homo sapiens
ggctttcctgaaaac

SEQ ID NO: 1311920 - DNA, 15 bp, Homo sapiens
gggctttcctgaaaa

SEQ ID NO: 1311921 - DNA, 15 bp, Homo sapiens
ggggctttcctgaaa

SEQ ID NO: 1311922 - DNA, 15 bp, Homo sapiens
tggggctttcctgaa

SEQ ID NO: 1311923 - DNA, 15 bp, Homo sapiens
ttggggctttcctga

SEQ ID NO: 1311924 - DNA, 15 bp, Homo sapiens
tttggggctttcctg

SEQ ID NO: 1311925 - DNA, 15 bp, Homo sapiens
ttttggggctttcct

SEQ ID NO: 1311926 - DNA, 15 bp, Homo sapiens
tttttggggctttcc

SEQ ID NO: 1311927 - DNA, 15 bp, Homo sapiens
ctttttggggctttc

SEQ ID NO: 1311928 - DNA, 15 bp, Homo sapiens
gctttttggggcttt

SEQ ID NO: 1311929 - DNA, 15 bp, Homo sapiens
agctttttggggctt

SEQ ID NO: 1311930 - DNA, 15 bp, Homo sapiens
aagctttttggggct

SEQ ID NO: 1311931 - DNA, 15 bp, Homo sapiens
aaagctttttggggc

SEQ ID NO: 1311932 - DNA, 15 bp, Homo sapiens
aaaagctttttgggg

SEQ ID NO: 1311933 - DNA, 15 bp, Homo sapiens
aaaaagctttttggg

SEQ ID NO: 1311934 - DNA, 15 bp, Homo sapiens
taaaaagctttttgg

SEQ ID NO: 1311935 - DNA, 15 bp, Homo sapiens
ttaaaaagctttttg

SEQ ID NO: 1311936 - DNA, 15 bp, Homo sapiens
tttaaaaagcttttt

SEQ ID NO: 1311937 - DNA, 15 bp, Homo sapiens
ttttaaaaagctttt

SEQ ID NO: 1311938 - DNA, 15 bp, Homo sapiens
tttttaaaaagcttt

SEQ ID NO: 1311939 - DNA, 15 bp, Homo sapiens
ctttttaaaaagctt

SEQ ID NO: 1311940 - DNA, 15 bp, Homo sapiens
actttttaaaaagct

SEQ ID NO: 1311941 - DNA, 15 bp, Homo sapiens
aactttttaaaaagc

SEQ ID NO: 1311942 - DNA, 15 bp, Homo sapiens
aaactttttaaaaag

SEQ ID NO: 1311943 - DNA, 15 bp, Homo sapiens
caaactttttaaaaa

SEQ ID NO: 1311944 - DNA, 15 bp, Homo sapiens
acaaactttttaaaa

SEQ ID NO: 1311945 - DNA, 15 bp, Homo sapiens
aacaaactttttaaa

SEQ ID NO: 1311946 - DNA, 15 bp, Homo sapiens
aaacaaactttttaa

SEQ ID NO: 1311947 - DNA, 15 bp, Homo sapiens
aaaacaaacttttta

SEQ ID NO: 1311948 - DNA, 15 bp, Homo sapiens
aaaaacaaacttttt

SEQ ID NO: 1311949 - DNA, 15 bp, Homo sapiens
caaaaacaaactttt

SEQ ID NO: 1311950 - DNA, 15 bp, Homo sapiens
ccaaaaacaaacttt

SEQ ID NO: 1311951 - DNA, 15 bp, Homo sapiens
tccaaaaacaaactt

SEQ ID NO: 1311952 - DNA, 15 bp, Homo sapiens
ctccaaaaacaaact

SEQ ID NO: 1311953 - DNA, 15 bp, Homo sapiens
actccaaaaacaaac

SEQ ID NO: 1311954 - DNA, 15 bp, Homo sapiens
gactccaaaaacaaa

SEQ ID NO: 1311955 - DNA, 15 bp, Homo sapiens
agactccaaaaacaa

SEQ ID NO: 1311956 - DNA, 15 bp, Homo sapiens
aagactccaaaaaca

SEQ ID NO: 1311957 - DNA, 15 bp, Homo sapiens
aaagactccaaaaac

SEQ ID NO: 1311958 - DNA, 15 bp, Homo sapiens
taaagactccaaaaa

SEQ ID NO: 1311959 - DNA, 15 bp, Homo sapiens
ttaaagactccaaaa

SEQ ID NO: 1311960 - DNA, 15 bp, Homo sapiens
cttaaagactccaaa

SEQ ID NO: 1311961 - DNA, 15 bp, Homo sapiens
tcttaaagactccaa

SEQ ID NO: 1311962 - DNA, 15 bp, Homo sapiens
atcttaaagactcca

SEQ ID NO: 1311963 - DNA, 15 bp, Homo sapiens
aatcttaaagactcc

SEQ ID NO: 1311964 - DNA, 15 bp, Homo sapiens
aaatcttaaagactc

SEQ ID NO: 1311965 - DNA, 15 bp, Homo sapiens
gaaatcttaaagact

SEQ ID NO: 1311966 - DNA, 15 bp, Homo sapiens
tgaaatcttaaagac

SEQ ID NO: 1311967 - DNA, 15 bp, Homo sapiens
atgaaatcttaaaga

SEQ ID NO: 1311968 - DNA, 15 bp, Homo sapiens
gatgaaatcttaaag

SEQ ID NO: 1311969 - DNA, 15 bp, Homo sapiens
ggatgaaatcttaaa

SEQ ID NO: 1311970 - DNA, 15 bp, Homo sapiens
gggatgaaatcttaa

SEQ ID NO: 1311971 - DNA, 15 bp, Homo sapiens
agggatgaaatctta

SEQ ID NO: 1311972 - DNA, 15 bp, Homo sapiens
cagggatgaaatctt

SEQ ID NO: 1311973 - DNA, 15 bp, Homo sapiens
gcagggatgaaatct

SEQ ID NO: 1311974 - DNA, 15 bp, Homo sapiens
ggcagggatgaaatc

SEQ ID NO: 1311975 - DNA, 15 bp, Homo sapiens
aggcagggatgaaat

SEQ ID NO: 1311976 - DNA, 15 bp, Homo sapiens
taggcagggatgaaa

SEQ ID NO: 1311977 - DNA, 15 bp, Homo sapiens
ttaggcagggatgaa

SEQ ID NO: 1311978 - DNA, 15 bp, Homo sapiens
cttaggcagggatga

SEQ ID NO: 1311979 - DNA, 15 bp, Homo sapiens
gcttaggcagggatg

SEQ ID NO: 1311980 - DNA, 15 bp, Homo sapiens
tgcttaggcagggat

SEQ ID NO: 1311981 - DNA, 15 bp, Homo sapiens
gtgcttaggcaggga

SEQ ID NO: 1311982 - DNA, 15 bp, Homo sapiens
agtgcttaggcaggg

SEQ ID NO: 1311983 - DNA, 15 bp, Homo sapiens
cagtgcttaggcagg

SEQ ID NO: 1311984 - DNA, 15 bp, Homo sapiens
acagtgcttaggcag

SEQ ID NO: 1311985 - DNA, 15 bp, Homo sapiens
aacagtgcttaggca

SEQ ID NO: 1311986 - DNA, 15 bp, Homo sapiens
aaacagtgcttaggc

SEQ ID NO: 1311987 - DNA, 15 bp, Homo sapiens
taaacagtgcttagg

SEQ ID NO: 1311988 - DNA, 15 bp, Homo sapiens
ataaacagtgcttag

SEQ ID NO: 1311989 - DNA, 15 bp, Homo sapiens
tataaacagtgctta

SEQ ID NO: 1311990 - DNA, 15 bp, Homo sapiens
ttataaacagtgctt

SEQ ID NO: 1311991 - DNA, 15 bp, Homo sapiens
tttataaacagtgct

SEQ ID NO: 1311992 - DNA, 15 bp, Homo sapiens
ttttataaacagtgc

SEQ ID NO: 1311993 - DNA, 15 bp, Homo sapiens
attttataaacagtg

SEQ ID NO: 1311994 - DNA, 15 bp, Homo sapiens
aattttataaacagt

SEQ ID NO: 1311995 - DNA, 15 bp, Homo sapiens
caattttataaacag

SEQ ID NO: 1311996 - DNA, 15 bp, Homo sapiens
acaattttataaaca

SEQ ID NO: 1311997 - DNA, 15 bp, Homo sapiens
aacaattttataaac

SEQ ID NO: 1311998 - DNA, 15 bp, Homo sapiens
aaacaattttataaa

SEQ ID NO: 1311999 - DNA, 15 bp, Homo sapiens
gaaacaattttataa

SEQ ID NO: 1312000 - DNA, 15 bp, Homo sapiens
agaaacaattttata

SEQ ID NO: 1312001 - DNA, 15 bp, Homo sapiens
tagaaacaattttat

SEQ ID NO: 1312002 - DNA, 15 bp, Homo sapiens
gtagaaacaatttta

SEQ ID NO: 1312003 - DNA, 15 bp, Homo sapiens
tgtagaaacaatttt

SEQ ID NO: 1312004 - DNA, 15 bp, Homo sapiens
gtgtagaaacaattt

SEQ ID NO: 1312005 - DNA, 15 bp, Homo sapiens
tgtgtagaaacaatt

SEQ ID NO: 1312006 - DNA, 15 bp, Homo sapiens
ttgtgtagaaacaat

SEQ ID NO: 1312007 - DNA, 15 bp, Homo sapiens
tttgtgtagaaacaa

SEQ ID NO: 1312008 - DNA, 15 bp, Homo sapiens
ttttgtgtagaaaca

SEQ ID NO: 1312009 - DNA, 15 bp, Homo sapiens
tttttgtgtagaaac

SEQ ID NO: 1312010 - DNA, 15 bp, Homo sapiens
atttttgtgtagaaa

SEQ ID NO: 1312011 - DNA, 15 bp, Homo sapiens
aatttttgtgtagaa

SEQ ID NO: 1312012 - DNA, 15 bp, Homo sapiens
aaatttttgtgtaga

SEQ ID NO: 1312013 - DNA, 15 bp, Homo sapiens
taaatttttgtgtag

SEQ ID NO: 1312014 - DNA, 15 bp, Homo sapiens
ataaatttttgtgta

SEQ ID NO: 1312015 - DNA, 15 bp, Homo sapiens
aataaatttttgtgt

SEQ ID NO: 1312016 - DNA, 15 bp, Homo sapiens
gaataaatttttgtg

SEQ ID NO: 1312017 - DNA, 15 bp, Homo sapiens
tgaataaatttttgt

SEQ ID NO: 1312018 - DNA, 15 bp, Homo sapiens
gtgaataaatttttg

SEQ ID NO: 1312019 - DNA, 15 bp, Homo sapiens
tgtgaataaattttt

SEQ ID NO: 1312020 - DNA, 15 bp, Homo sapiens
ttgtgaataaatttt

SEQ ID NO: 1312021 - DNA, 15 bp, Homo sapiens
gttgtgaataaattt

SEQ ID NO: 1312022 - DNA, 15 bp, Homo sapiens
agttgtgaataaatt

SEQ ID NO: 1312023 - DNA, 15 bp, Homo sapiens
tagttgtgaataaat

SEQ ID NO: 1312024 - DNA, 15 bp, Homo sapiens
ttagttgtgaataaa

SEQ ID NO: 1312025 - DNA, 15 bp, Homo sapiens
cttagttgtgaataa

SEQ ID NO: 1312026 - DNA, 15 bp, Homo sapiens
tcttagttgtgaata

SEQ ID NO: 1312027 - DNA, 15 bp, Homo sapiens
ttcttagttgtgaat

SEQ ID NO: 1312028 - DNA, 15 bp, Homo sapiens
gttcttagttgtgaa

SEQ ID NO: 1312029 - DNA, 15 bp, Homo sapiens
tgttcttagttgtga

SEQ ID NO: 1312030 - DNA, 15 bp, Homo sapiens
atgttcttagttgtg

SEQ ID NO: 1312031 - DNA, 15 bp, Homo sapiens
aatgttcttagttgt

SEQ ID NO: 1312032 - DNA, 15 bp, Homo sapiens
aaatgttcttagttg

SEQ ID NO: 1312033 - DNA, 15 bp, Homo sapiens
caaatgttcttagtt

SEQ ID NO: 1312034 - DNA, 15 bp, Homo sapiens
acaaatgttcttagt

SEQ ID NO: 1312035 - DNA, 15 bp, Homo sapiens
cacaaatgttcttag

SEQ ID NO: 1312036 - DNA, 15 bp, Homo sapiens
tcacaaatgttctta

SEQ ID NO: 1312037 - DNA, 15 bp, Homo sapiens
gtcacaaatgttctt

SEQ ID NO: 1312038 - DNA, 15 bp, Homo sapiens
tgtcacaaatgttct

SEQ ID NO: 1312039 - DNA, 15 bp, Homo sapiens
atgtcacaaatgttc

SEQ ID NO: 1312040 - DNA, 15 bp, Homo sapiens
gatgtcacaaatgtt

SEQ ID NO: 1312041 - DNA, 15 bp, Homo sapiens
ggatgtcacaaatgt

SEQ ID NO: 1312042 - DNA, 15 bp, Homo sapiens
tggatgtcacaaatg

SEQ ID NO: 1312043 - DNA, 15 bp, Homo sapiens
ctggatgtcacaaat

SEQ ID NO: 1312044 - DNA, 15 bp, Homo sapiens
tctggatgtcacaaa

SEQ ID NO: 1312045 - DNA, 15 bp, Homo sapiens
ctctggatgtcacaa

SEQ ID NO: 1312046 - DNA, 15 bp, Homo sapiens
actctggatgtcaca

SEQ ID NO: 1312047 - DNA, 15 bp, Homo sapiens
aactctggatgtcac

SEQ ID NO: 1312048 - DNA, 15 bp, Homo sapiens
caactctggatgtca

SEQ ID NO: 1312049 - DNA, 15 bp, Homo sapiens
ccaactctggatgtc

SEQ ID NO: 1312050 - DNA, 15 bp, Homo sapiens
tccaactctggatgt

SEQ ID NO: 1312051 - DNA, 15 bp, Homo sapiens
gtccaactctggatg

SEQ ID NO: 1312052 - DNA, 15 bp, Homo sapiens
agtccaactctggat

SEQ ID NO: 1312053 - DNA, 15 bp, Homo sapiens
cagtccaactctgga

SEQ ID NO: 1312054 - DNA, 15 bp, Homo sapiens
ccagtccaactctgg

SEQ ID NO: 1312055 - DNA, 15 bp, Homo sapiens
gccagtccaactctg

SEQ ID NO: 1312056 - DNA, 15 bp, Homo sapiens
tgccagtccaactct

SEQ ID NO: 1312057 - DNA, 15 bp, Homo sapiens
atgccagtccaactc

SEQ ID NO: 1312058 - DNA, 15 bp, Homo sapiens
aatgccagtccaact

SEQ ID NO: 1312059 - DNA, 15 bp, Homo sapiens
aaatgccagtccaac

SEQ ID NO: 1312060 - DNA, 15 bp, Homo sapiens
taaatgccagtccaa

SEQ ID NO: 1312061 - DNA, 15 bp, Homo sapiens
ctaaatgccagtcca

SEQ ID NO: 1312062 - DNA, 15 bp, Homo sapiens
cctaaatgccagtcc

SEQ ID NO: 1312063 - DNA, 15 bp, Homo sapiens
gcctaaatgccagtc

SEQ ID NO: 1312064 - DNA, 15 bp, Homo sapiens
tgcctaaatgccagt

SEQ ID NO: 1312065 - DNA, 15 bp, Homo sapiens
gtgcctaaatgccag

SEQ ID NO: 1312066 - DNA, 15 bp, Homo sapiens
cgtgcctaaatgcca

SEQ ID NO: 1312067 - DNA, 15 bp, Homo sapiens
tcgtgcctaaatgcc

SEQ ID NO: 1312068 - DNA, 15 bp, Homo sapiens
ttcgtgcctaaatgc

SEQ ID NO: 1312069 - DNA, 15 bp, Homo sapiens
tttcgtgcctaaatg

SEQ ID NO: 1312070 - DNA, 15 bp, Homo sapiens
ttttcgtgcctaaat

SEQ ID NO: 1312071 - DNA, 15 bp, Homo sapiens
tttttcgtgcctaaa

SEQ ID NO: 1312072 - DNA, 15 bp, Homo sapiens
ttttttcgtgcctaa

SEQ ID NO: 1312073 - DNA, 15 bp, Homo sapiens
cttttttcgtgccta

SEQ ID NO: 1312074 - DNA, 15 bp, Homo sapiens
acttttttcgtgcct

SEQ ID NO: 1312075 - DNA, 15 bp, Homo sapiens
aacttttttcgtgcc

SEQ ID NO: 1312076 - DNA, 15 bp, Homo sapiens
aaacttttttcgtgc

SEQ ID NO: 1312077 - DNA, 15 bp, Homo sapiens
taaacttttttcgtg

SEQ ID NO: 1312078 - DNA, 15 bp, Homo sapiens
ctaaacttttttcgt

SEQ ID NO: 1312079 - DNA, 15 bp, Homo sapiens
cctaaacttttttcg

SEQ ID NO: 1312080 - DNA, 15 bp, Homo sapiens
acctaaacttttttc

SEQ ID NO: 1312081 - DNA, 15 bp, Homo sapiens
cacctaaactttttt

SEQ ID NO: 1312082 - DNA, 15 bp, Homo sapiens
gcacctaaacttttt

SEQ ID NO: 1312083 - DNA, 15 bp, Homo sapiens
agcacctaaactttt

SEQ ID NO: 1312084 - DNA, 15 bp, Homo sapiens
cagcacctaaacttt

SEQ ID NO: 1312085 - DNA, 15 bp, Homo sapiens
ccagcacctaaactt

SEQ ID NO: 1312086 - DNA, 15 bp, Homo sapiens
tccagcacctaaact

SEQ ID NO: 1312087 - DNA, 15 bp, Homo sapiens
ttccagcacctaaac

SEQ ID NO: 1312088 - DNA, 15 bp, Homo sapiens
cttccagcacctaaa

SEQ ID NO: 1312089 - DNA, 15 bp, Homo sapiens
ccttccagcacctaa

SEQ ID NO: 1312090 - DNA, 15 bp, Homo sapiens
accttccagcaccta

SEQ ID NO: 1312091 - DNA, 15 bp, Homo sapiens
taccttccagcacct

SEQ ID NO: 1312092 - DNA, 15 bp, Homo sapiens
ctaccttccagcacc

SEQ ID NO: 1312093 - DNA, 15 bp, Homo sapiens
actaccttccagcac

SEQ ID NO: 1312094 - DNA, 15 bp, Homo sapiens
cactaccttccagca

SEQ ID NO: 1312095 - DNA, 15 bp, Homo sapiens
tcactaccttccagc

SEQ ID NO: 1312096 - DNA, 15 bp, Homo sapiens
atcactaccttccag

SEQ ID NO: 1312097 - DNA, 15 bp, Homo sapiens
catcactaccttcca

SEQ ID NO: 1312098 - DNA, 15 bp, Homo sapiens
gcatcactaccttcc

SEQ ID NO: 1312099 - DNA, 15 bp, Homo sapiens
agcatcactaccttc

SEQ ID NO: 1312100 - DNA, 15 bp, Homo sapiens
aagcatcactacctt

SEQ ID NO: 1312101 - DNA, 15 bp, Homo sapiens
gaagcatcactacct

SEQ ID NO: 1312102 - DNA, 15 bp, Homo sapiens
agaagcatcactacc

SEQ ID NO: 1312103 - DNA, 15 bp, Homo sapiens
aagaagcatcactac

SEQ ID NO: 1312104 - DNA, 15 bp, Homo sapiens
gaagaagcatcacta

SEQ ID NO: 1312105 - DNA, 15 bp, Homo sapiens
agaagaagcatcact

SEQ ID NO: 1312106 - DNA, 15 bp, Homo sapiens
aagaagaagcatcac

SEQ ID NO: 1312107 - DNA, 15 bp, Homo sapiens
caagaagaagcatca

SEQ ID NO: 1312108 - DNA, 15 bp, Homo sapiens
ccaagaagaagcatc

SEQ ID NO: 1312109 - DNA, 15 bp, Homo sapiens
tccaagaagaagcat

SEQ ID NO: 1312110 - DNA, 15 bp, Homo sapiens
ttccaagaagaagca

SEQ ID NO: 1312111 - DNA, 15 bp, Homo sapiens
tttccaagaagaagc

SEQ ID NO: 1312112 - DNA, 15 bp, Homo sapiens
atttccaagaagaag

SEQ ID NO: 1312113 - DNA, 15 bp, Homo sapiens
tatttccaagaagaa

SEQ ID NO: 1312114 - DNA, 15 bp, Homo sapiens
ctatttccaagaaga

SEQ ID NO: 1312115 - DNA, 15 bp, Homo sapiens
actatttccaagaag

SEQ ID NO: 1312116 - DNA, 15 bp, Homo sapiens
tactatttccaagaa

SEQ ID NO: 1312117 - DNA, 15 bp, Homo sapiens
ttactatttccaaga

SEQ ID NO: 1312118 - DNA, 15 bp, Homo sapiens
attactatttccaag

SEQ ID NO: 1312119 - DNA, 15 bp, Homo sapiens
aattactatttccaa

SEQ ID NO: 1312120 - DNA, 15 bp, Homo sapiens
aaattactatttcca

SEQ ID NO: 1312121 - DNA, 15 bp, Homo sapiens
taaattactatttcc

SEQ ID NO: 1312122 - DNA, 15 bp, Homo sapiens
ttaaattactatttc

SEQ ID NO: 1312123 - DNA, 15 bp, Homo sapiens
attaaattactattt

SEQ ID NO: 1312124 - DNA, 15 bp, Homo sapiens
tattaaattactatt

SEQ ID NO: 1312125 - DNA, 15 bp, Homo sapiens
atattaaattactat

SEQ ID NO: 1312126 - DNA, 15 bp, Homo sapiens
tatattaaattacta

SEQ ID NO: 1312127 - DNA, 15 bp, Homo sapiens
atatattaaattact

SEQ ID NO: 1312128 - DNA, 15 bp, Homo sapiens
aatatattaaattac

SEQ ID NO: 1312129 - DNA, 15 bp, Homo sapiens
caatatattaaatta

SEQ ID NO: 1312130 - DNA, 15 bp, Homo sapiens
tcaatatattaaatt

SEQ ID NO: 1312131 - DNA, 15 bp, Homo sapiens
gtcaatatattaaat

SEQ ID NO: 1312132 - DNA, 15 bp, Homo sapiens
tgtcaatatattaaa

SEQ ID NO: 1312133 - DNA, 15 bp, Homo sapiens
ttgtcaatatattaa

SEQ ID NO: 1312134 - DNA, 15 bp, Homo sapiens
tttgtcaatatatta

SEQ ID NO: 1312135 - DNA, 15 bp, Homo sapiens
ctttgtcaatatatt

SEQ ID NO: 1312136 - DNA, 15 bp, Homo sapiens
cctttgtcaatatat

SEQ ID NO: 1312137 - DNA, 15 bp, Homo sapiens
tcctttgtcaatata

SEQ ID NO: 1312138 - DNA, 15 bp, Homo sapiens
gtcctttgtcaatat

SEQ ID NO: 1312139 - DNA, 15 bp, Homo sapiens
tgtcctttgtcaata

SEQ ID NO: 1312140 - DNA, 15 bp, Homo sapiens
ttgtcctttgtcaat

SEQ ID NO: 1312141 - DNA, 15 bp, Homo sapiens
tttgtcctttgtcaa

SEQ ID NO: 1312142 - DNA, 15 bp, Homo sapiens
ttttgtcctttgtca

SEQ ID NO: 1312143 - DNA, 15 bp, Homo sapiens
attttgtcctttgtc

SEQ ID NO: 1312144 - DNA, 15 bp, Homo sapiens
tattttgtcctttgt

SEQ ID NO: 1312145 - DNA, 15 bp, Homo sapiens
gtattttgtcctttg

SEQ ID NO: 1312146 - DNA, 15 bp, Homo sapiens
agtattttgtccttt

SEQ ID NO: 1312147 - DNA, 15 bp, Homo sapiens
aagtattttgtcctt

SEQ ID NO: 1312148 - DNA, 15 bp, Homo sapiens
caagtattttgtcct

SEQ ID NO: 1312149 - DNA, 15 bp, Homo sapiens
ccaagtattttgtcc

SEQ ID NO: 1312150 - DNA, 15 bp, Homo sapiens
accaagtattttgtc

SEQ ID NO: 1312151 - DNA, 15 bp, Homo sapiens
aaccaagtattttgt

SEQ ID NO: 1312152 - DNA, 15 bp, Homo sapiens
gaaccaagtattttg

SEQ ID NO: 1312153 - DNA, 15 bp, Homo sapiens
tgaaccaagtatttt

SEQ ID NO: 1312154 - DNA, 15 bp, Homo sapiens
atgaaccaagtattt

SEQ ID NO: 1312155 - DNA, 15 bp, Homo sapiens
gatgaaccaagtatt

SEQ ID NO: 1312156 - DNA, 15 bp, Homo sapiens
tgatgaaccaagtat

SEQ ID NO: 1312157 - DNA, 15 bp, Homo sapiens
ctgatgaaccaagta

SEQ ID NO: 1312158 - DNA, 15 bp, Homo sapiens
cctgatgaaccaagt

SEQ ID NO: 1312159 - DNA, 15 bp, Homo sapiens
acctgatgaaccaag

SEQ ID NO: 1312160 - DNA, 15 bp, Homo sapiens
cacctgatgaaccaa

SEQ ID NO: 1312161 - DNA, 15 bp, Homo sapiens
acacctgatgaacca

SEQ ID NO: 1312162 - DNA, 15 bp, Homo sapiens
gacacctgatgaacc

SEQ ID NO: 1312163 - DNA, 15 bp, Homo sapiens
ggacacctgatgaac

SEQ ID NO: 1312164 - DNA, 15 bp, Homo sapiens
tggacacctgatgaa

SEQ ID NO: 1312165 - DNA, 15 bp, Homo sapiens
ttggacacctgatga

SEQ ID NO: 1312166 - DNA, 15 bp, Homo sapiens
tttggacacctgatg

SEQ ID NO: 1312167 - DNA, 15 bp, Homo sapiens
ttttggacacctgat

SEQ ID NO: 1312168 - DNA, 15 bp, Homo sapiens
attttggacacctga

SEQ ID NO: 1312169 - DNA, 15 bp, Homo sapiens
aattttggacacctg

SEQ ID NO: 1312170 - DNA, 15 bp, Homo sapiens
caattttggacacct

SEQ ID NO: 1312171 - DNA, 15 bp, Homo sapiens
acaattttggacacc

SEQ ID NO: 1312172 - DNA, 15 bp, Homo sapiens
tacaattttggacac

SEQ ID NO: 1312173 - DNA, 15 bp, Homo sapiens
ctacaattttggaca

SEQ ID NO: 1312174 - DNA, 15 bp, Homo sapiens
cctacaattttggac

SEQ ID NO: 1312175 - DNA, 15 bp, Homo sapiens
tcctacaattttgga

SEQ ID NO: 1312176 - DNA, 15 bp, Homo sapiens
gtcctacaattttgg

SEQ ID NO: 1312177 - DNA, 15 bp, Homo sapiens
ggtcctacaattttg

SEQ ID NO: 1312178 - DNA, 15 bp, Homo sapiens
tggtcctacaatttt

SEQ ID NO: 1312179 - DNA, 15 bp, Homo sapiens
ttggtcctacaattt

SEQ ID NO: 1312180 - DNA, 15 bp, Homo sapiens
tttggtcctacaatt

SEQ ID NO: 1312181 - DNA, 15 bp, Homo sapiens
ttttggtcctacaat

SEQ ID NO: 1312182 - DNA, 15 bp, Homo sapiens
tttttggtcctacaa

SEQ ID NO: 1312183 - DNA, 15 bp, Homo sapiens
ctttttggtcctaca

SEQ ID NO: 1312184 - DNA, 15 bp, Homo sapiens
gctttttggtcctac

SEQ ID NO: 1312185 - DNA, 15 bp, Homo sapiens
tgctttttggtccta

SEQ ID NO: 1312186 - DNA, 15 bp, Homo sapiens
ttgctttttggtcct

SEQ ID NO: 1312187 - DNA, 15 bp, Homo sapiens
attgctttttggtcc

SEQ ID NO: 1312188 - DNA, 15 bp, Homo sapiens
aattgctttttggtc

SEQ ID NO: 1312189 - DNA, 15 bp, Homo sapiens
caattgctttttggt

SEQ ID NO: 1312190 - DNA, 15 bp, Homo sapiens
gcaattgctttttgg

SEQ ID NO: 1312191 - DNA, 15 bp, Homo sapiens
agcaattgctttttg

SEQ ID NO: 1312192 - DNA, 15 bp, Homo sapiens
aagcaattgcttttt

SEQ ID NO: 1312193 - DNA, 15 bp, Homo sapiens
gaagcaattgctttt

SEQ ID NO: 1312194 - DNA, 15 bp, Homo sapiens
tgaagcaattgcttt

SEQ ID NO: 1312195 - DNA, 15 bp, Homo sapiens
ctgaagcaattgctt

SEQ ID NO: 1312196 - DNA, 15 bp, Homo sapiens
tctgaagcaattgct

SEQ ID NO: 1312197 - DNA, 15 bp, Homo sapiens
atctgaagcaattgc

SEQ ID NO: 1312198 - DNA, 15 bp, Homo sapiens
aatctgaagcaattg

SEQ ID NO: 1312199 - DNA, 15 bp, Homo sapiens
gaatctgaagcaatt

SEQ ID NO: 1312200 - DNA, 15 bp, Homo sapiens
agaatctgaagcaat

SEQ ID NO: 1312201 - DNA, 15 bp, Homo sapiens
aagaatctgaagcaa

SEQ ID NO: 1312202 - DNA, 15 bp, Homo sapiens
caagaatctgaagca

SEQ ID NO: 1312203 - DNA, 15 bp, Homo sapiens
tcaagaatctgaagc

SEQ ID NO: 1312204 - DNA, 15 bp, Homo sapiens
atcaagaatctgaag

SEQ ID NO: 1312205 - DNA, 15 bp, Homo sapiens
tatcaagaatctgaa

SEQ ID NO: 1312206 - DNA, 15 bp, Homo sapiens
ttatcaagaatctga

SEQ ID NO: 1312207 - DNA, 15 bp, Homo sapiens
gttatcaagaatctg

SEQ ID NO: 1312208 - DNA, 15 bp, Homo sapiens
agttatcaagaatct

SEQ ID NO: 1312209 - DNA, 15 bp, Homo sapiens
tagttatcaagaatc

SEQ ID NO: 1312210 - DNA, 15 bp, Homo sapiens
atagttatcaagaat

SEQ ID NO: 1312211 - DNA, 15 bp, Homo sapiens
catagttatcaagaa

SEQ ID NO: 1312212 - DNA, 15 bp, Homo sapiens
acatagttatcaaga

SEQ ID NO: 1312213 - DNA, 15 bp, Homo sapiens
tacatagttatcaag

SEQ ID NO: 1312214 - DNA, 15 bp, Homo sapiens
gtacatagttatcaa

SEQ ID NO: 1312215 - DNA, 15 bp, Homo sapiens
ggtacatagttatca

SEQ ID NO: 1312216 - DNA, 15 bp, Homo sapiens
tggtacatagttatc

SEQ ID NO: 1312217 - DNA, 15 bp, Homo sapiens
atggtacatagttat

SEQ ID NO: 1312218 - DNA, 15 bp, Homo sapiens
aatggtacatagtta

SEQ ID NO: 1312219 - DNA, 15 bp, Homo sapiens
gaatggtacatagtt

SEQ ID NO: 1312220 - DNA, 15 bp, Homo sapiens
tgaatggtacatagt

SEQ ID NO: 1312221 - DNA, 15 bp, Homo sapiens
atgaatggtacatag

SEQ ID NO: 1312222 - DNA, 15 bp, Homo sapiens
catgaatggtacata

SEQ ID NO: 1312223 - DNA, 15 bp, Homo sapiens
tcatgaatggtacat

SEQ ID NO: 1312224 - DNA, 15 bp, Homo sapiens
ttcatgaatggtaca

SEQ ID NO: 1312225 - DNA, 15 bp, Homo sapiens
gttcatgaatggtac

SEQ ID NO: 1312226 - DNA, 15 bp, Homo sapiens
ggttcatgaatggta

SEQ ID NO: 1312227 - DNA, 15 bp, Homo sapiens
tggttcatgaatggt

SEQ ID NO: 1312228 - DNA, 15 bp, Homo sapiens
ttggttcatgaatgg

SEQ ID NO: 1312229 - DNA, 15 bp, Homo sapiens
tttggttcatgaatg

SEQ ID NO: 1312230 - DNA, 15 bp, Homo sapiens
atttggttcatgaat

SEQ ID NO: 1312231 - DNA, 15 bp, Homo sapiens
catttggttcatgaa

SEQ ID NO: 1312232 - DNA, 15 bp, Homo sapiens
acatttggttcatga

SEQ ID NO: 1312233 - DNA, 15 bp, Homo sapiens
aacatttggttcatg

SEQ ID NO: 1312234 - DNA, 15 bp, Homo sapiens
aaacatttggttcat

SEQ ID NO: 1312235 - DNA, 15 bp, Homo sapiens
gaaacatttggttca

SEQ ID NO: 1312236 - DNA, 15 bp, Homo sapiens
agaaacatttggttc

SEQ ID NO: 1312237 - DNA, 15 bp, Homo sapiens
gagaaacatttggtt

SEQ ID NO: 1312238 - DNA, 15 bp, Homo sapiens
cgagaaacatttggt

SEQ ID NO: 1312239 - DNA, 15 bp, Homo sapiens
ccgagaaacatttgg

SEQ ID NO: 1312240 - DNA, 15 bp, Homo sapiens
tccgagaaacatttg

SEQ ID NO: 1312241 - DNA, 15 bp, Homo sapiens
atccgagaaacattt

SEQ ID NO: 1312242 - DNA, 15 bp, Homo sapiens
catccgagaaacatt

SEQ ID NO: 1312243 - DNA, 15 bp, Homo sapiens
ccatccgagaaacat

SEQ ID NO: 1312244 - DNA, 15 bp, Homo sapiens
cccatccgagaaaca

SEQ ID NO: 1312245 - DNA, 15 bp, Homo sapiens
tcccatccgagaaac

SEQ ID NO: 1312246 - DNA, 15 bp, Homo sapiens
ttcccatccgagaaa

SEQ ID NO: 1312247 - DNA, 15 bp, Homo sapiens
attcccatccgagaa

SEQ ID NO: 1312248 - DNA, 15 bp, Homo sapiens
tattcccatccgaga

SEQ ID NO: 1312249 - DNA, 15 bp, Homo sapiens
atattcccatccgag

SEQ ID NO: 1312250 - DNA, 15 bp, Homo sapiens
catattcccatccga

SEQ ID NO: 1312251 - DNA, 15 bp, Homo sapiens
tcatattcccatccg

SEQ ID NO: 1312252 - DNA, 15 bp, Homo sapiens
ttcatattcccatcc

SEQ ID NO: 1312253 - DNA, 15 bp, Homo sapiens
cttcatattcccatc

SEQ ID NO: 1312254 - DNA, 15 bp, Homo sapiens
acttcatattcccat

SEQ ID NO: 1312255 - DNA, 15 bp, Homo sapiens
aacttcatattccca

SEQ ID NO: 1312256 - DNA, 15 bp, Homo sapiens
aaacttcatattccc

SEQ ID NO: 1312257 - DNA, 15 bp, Homo sapiens
caaacttcatattcc

SEQ ID NO: 1312258 - DNA, 15 bp, Homo sapiens
gcaaacttcatattc

SEQ ID NO: 1312259 - DNA, 15 bp, Homo sapiens
agcaaacttcatatt

SEQ ID NO: 1312260 - DNA, 15 bp, Homo sapiens
gagcaaacttcatat

SEQ ID NO: 1312261 - DNA, 15 bp, Homo sapiens
ggagcaaacttcata

SEQ ID NO: 1312262 - DNA, 15 bp, Homo sapiens
tggagcaaacttcat

SEQ ID NO: 1312263 - DNA, 15 bp, Homo sapiens
atggagcaaacttca

SEQ ID NO: 1312264 - DNA, 15 bp, Homo sapiens
aatggagcaaacttc

SEQ ID NO: 1312265 - DNA, 15 bp, Homo sapiens
aaatggagcaaactt

SEQ ID NO: 1312266 - DNA, 15 bp, Homo sapiens
aaaatggagcaaact

SEQ ID NO: 1312267 - DNA, 15 bp, Homo sapiens
gaaaatggagcaaac

SEQ ID NO: 1312268 - DNA, 15 bp, Homo sapiens
agaaaatggagcaaa

SEQ ID NO: 1312269 - DNA, 15 bp, Homo sapiens
tagaaaatggagcaa

SEQ ID NO: 1312270 - DNA, 15 bp, Homo sapiens
atagaaaatggagca

SEQ ID NO: 1312271 - DNA, 15 bp, Homo sapiens
aatagaaaatggagc

SEQ ID NO: 1312272 - DNA, 15 bp, Homo sapiens
aaatagaaaatggag

SEQ ID NO: 1312273 - DNA, 15 bp, Homo sapiens
aaaatagaaaatgga

SEQ ID NO: 1312274 - DNA, 15 bp, Homo sapiens
taaaatagaaaatgg

SEQ ID NO: 1312275 - DNA, 15 bp, Homo sapiens
ataaaatagaaaatg

SEQ ID NO: 1312276 - DNA, 15 bp, Homo sapiens
tataaaatagaaaat

SEQ ID NO: 1312277 - DNA, 15 bp, Homo sapiens
atataaaatagaaaa

SEQ ID NO: 1312278 - DNA, 15 bp, Homo sapiens
aatataaaatagaaa

SEQ ID NO: 1312279 - DNA, 15 bp, Homo sapiens
aaatataaaatagaa

SEQ ID NO: 1312280 - DNA, 15 bp, Homo sapiens
gaaatataaaataga

SEQ ID NO: 1312281 - DNA, 15 bp, Homo sapiens
agaaatataaaatag

SEQ ID NO: 1312282 - DNA, 15 bp, Homo sapiens
gagaaatataaaata

SEQ ID NO: 1312283 - DNA, 15 bp, Homo sapiens
tgagaaatataaaat

SEQ ID NO: 1312284 - DNA, 15 bp, Homo sapiens
ttgagaaatataaaa

SEQ ID NO: 1312285 - DNA, 15 bp, Homo sapiens
attgagaaatataaa

SEQ ID NO: 1312286 - DNA, 15 bp, Homo sapiens
aattgagaaatataa

SEQ ID NO: 1312287 - DNA, 15 bp, Homo sapiens
aaattgagaaatata

SEQ ID NO: 1312288 - DNA, 15 bp, Homo sapiens
taaattgagaaatat

SEQ ID NO: 1312289 - DNA, 15 bp, Homo sapiens
ctaaattgagaaata

SEQ ID NO: 1312290 - DNA, 15 bp, Homo sapiens
actaaattgagaaat

SEQ ID NO: 1312291 - DNA, 15 bp, Homo sapiens
cactaaattgagaaa

SEQ ID NO: 1312292 - DNA, 15 bp, Homo sapiens
tcactaaattgagaa

SEQ ID NO: 1312293 - DNA, 15 bp, Homo sapiens
gtcactaaattgaga

SEQ ID NO: 1312294 - DNA, 15 bp, Homo sapiens
agtcactaaattgag

SEQ ID NO: 1312295 - DNA, 15 bp, Homo sapiens
tagtcactaaattga

SEQ ID NO: 1312296 - DNA, 15 bp, Homo sapiens
ttagtcactaaattg

SEQ ID NO: 1312297 - DNA, 15 bp, Homo sapiens
attagtcactaaatt

SEQ ID NO: 1312298 - DNA, 15 bp, Homo sapiens
aattagtcactaaat

SEQ ID NO: 1312299 - DNA, 15 bp, Homo sapiens
aaattagtcactaaa

SEQ ID NO: 1312300 - DNA, 15 bp, Homo sapiens
gaaattagtcactaa

SEQ ID NO: 1312301 - DNA, 15 bp, Homo sapiens
agaaattagtcacta

SEQ ID NO: 1312302 - DNA, 15 bp, Homo sapiens
aagaaattagtcact

SEQ ID NO: 1312303 - DNA, 15 bp, Homo sapiens
aaagaaattagtcac

SEQ ID NO: 1312304 - DNA, 15 bp, Homo sapiens
taaagaaattagtca

SEQ ID NO: 1312305 - DNA, 15 bp, Homo sapiens
ttaaagaaattagtc

SEQ ID NO: 1312306 - DNA, 15 bp, Homo sapiens
tttaaagaaattagt

SEQ ID NO: 1312307 - DNA, 15 bp, Homo sapiens
atttaaagaaattag

SEQ ID NO: 1312308 - DNA, 15 bp, Homo sapiens
tatttaaagaaatta

SEQ ID NO: 1312309 - DNA, 15 bp, Homo sapiens
gtatttaaagaaatt

SEQ ID NO: 1312310 - DNA, 15 bp, Homo sapiens
ggtatttaaagaaat

SEQ ID NO: 1312311 - DNA, 15 bp, Homo sapiens
tggtatttaaagaaa

SEQ ID NO: 1312312 - DNA, 15 bp, Homo sapiens
ttggtatttaaagaa

SEQ ID NO: 1312313 - DNA, 15 bp, Homo sapiens
attggtatttaaaga

SEQ ID NO: 1312314 - DNA, 15 bp, Homo sapiens
tattggtatttaaag

SEQ ID NO: 1312315 - DNA, 15 bp, Homo sapiens
atattggtatttaaa

SEQ ID NO: 1312316 - DNA, 15 bp, Homo sapiens
gatattggtatttaa

SEQ ID NO: 1312317 - DNA, 15 bp, Homo sapiens
agatattggtattta

SEQ ID NO: 1312318 - DNA, 15 bp, Homo sapiens
tagatattggtattt

SEQ ID NO: 1312319 - DNA, 15 bp, Homo sapiens
atagatattggtatt

SEQ ID NO: 1312320 - DNA, 15 bp, Homo sapiens
tatagatattggtat

SEQ ID NO: 1312321 - DNA, 15 bp, Homo sapiens
ttatagatattggta

SEQ ID NO: 1312322 - DNA, 15 bp, Homo sapiens
attatagatattggt

SEQ ID NO: 1312323 - DNA, 15 bp, Homo sapiens
aattatagatattgg

SEQ ID NO: 1312324 - DNA, 15 bp, Homo sapiens
taattatagatattg

SEQ ID NO: 1312325 - DNA, 15 bp, Homo sapiens
ttaattatagatatt

SEQ ID NO: 1312326 - DNA, 15 bp, Homo sapiens
cttaattatagatat

SEQ ID NO: 1312327 - DNA, 15 bp, Homo sapiens
tcttaattatagata

SEQ ID NO: 1312328 - DNA, 15 bp, Homo sapiens
atcttaattatagat

SEQ ID NO: 1312329 - DNA, 15 bp, Homo sapiens
aatcttaattataga

SEQ ID NO: 1312330 - DNA, 15 bp, Homo sapiens
aaatcttaattatag

SEQ ID NO: 1312331 - DNA, 15 bp, Homo sapiens
gaaatcttaattata

SEQ ID NO: 1312332 - DNA, 15 bp, Homo sapiens
agaaatcttaattat

SEQ ID NO: 1312333 - DNA, 15 bp, Homo sapiens
tagaaatcttaatta

SEQ ID NO: 1312334 - DNA, 15 bp, Homo sapiens
atagaaatcttaatt

SEQ ID NO: 1312335 - DNA, 15 bp, Homo sapiens
aatagaaatcttaat

SEQ ID NO: 1312336 - DNA, 15 bp, Homo sapiens
aaatagaaatcttaa

SEQ ID NO: 1312337 - DNA, 15 bp, Homo sapiens
gaaatagaaatctta

SEQ ID NO: 1312338 - DNA, 15 bp, Homo sapiens
ggaaatagaaatctt

SEQ ID NO: 1312339 - DNA, 15 bp, Homo sapiens
tggaaatagaaatct

SEQ ID NO: 1312340 - DNA, 15 bp, Homo sapiens
ttggaaatagaaatc

SEQ ID NO: 1312341 - DNA, 15 bp, Homo sapiens
attggaaatagaaat

SEQ ID NO: 1312342 - DNA, 15 bp, Homo sapiens
aattggaaatagaaa

SEQ ID NO: 1312343 - DNA, 15 bp, Homo sapiens
aaattggaaatagaa

SEQ ID NO: 1312344 - DNA, 15 bp, Homo sapiens
taaattggaaataga

SEQ ID NO: 1312345 - DNA, 15 bp, Homo sapiens
gtaaattggaaatag

SEQ ID NO: 1312346 - DNA, 15 bp, Homo sapiens
agtaaattggaaata

SEQ ID NO: 1312347 - DNA, 15 bp, Homo sapiens
aagtaaattggaaat

SEQ ID NO: 1312348 - DNA, 15 bp, Homo sapiens
aaagtaaattggaaa

SEQ ID NO: 1312349 - DNA, 15 bp, Homo sapiens
aaaagtaaattggaa

SEQ ID NO: 1312350 - DNA, 15 bp, Homo sapiens
gaaaagtaaattgga

SEQ ID NO: 1312351 - DNA, 15 bp, Homo sapiens
tgaaaagtaaattgg

SEQ ID NO: 1312352 - DNA, 15 bp, Homo sapiens
ctgaaaagtaaattg

SEQ ID NO: 1312353 - DNA, 15 bp, Homo sapiens
gctgaaaagtaaatt

SEQ ID NO: 1312354 - DNA, 15 bp, Homo sapiens
tgctgaaaagtaaat

SEQ ID NO: 1312355 - DNA, 15 bp, Homo sapiens
atgctgaaaagtaaa

SEQ ID NO: 1312356 - DNA, 15 bp, Homo sapiens
aatgctgaaaagtaa

SEQ ID NO: 1312357 - DNA, 15 bp, Homo sapiens
aaatgctgaaaagta

SEQ ID NO: 1312358 - DNA, 15 bp, Homo sapiens
aaaatgctgaaaagt

SEQ ID NO: 1312359 - DNA, 15 bp, Homo sapiens
caaaatgctgaaaag

SEQ ID NO: 1312360 - DNA, 15 bp, Homo sapiens
tcaaaatgctgaaaa

SEQ ID NO: 1312361 - DNA, 15 bp, Homo sapiens
ttcaaaatgctgaaa

SEQ ID NO: 1312362 - DNA, 15 bp, Homo sapiens
attcaaaatgctgaa

SEQ ID NO: 1312363 - DNA, 15 bp, Homo sapiens
cattcaaaatgctga

SEQ ID NO: 1312364 - DNA, 15 bp, Homo sapiens
acattcaaaatgctg

SEQ ID NO: 1312365 - DNA, 15 bp, Homo sapiens
tacattcaaaatgct

SEQ ID NO: 1312366 - DNA, 15 bp, Homo sapiens
ctacattcaaaatgc

SEQ ID NO: 1312367 - DNA, 15 bp, Homo sapiens
tctacattcaaaatg

SEQ ID NO: 1312368 - DNA, 15 bp, Homo sapiens
ttctacattcaaaat

SEQ ID NO: 1312369 - DNA, 15 bp, Homo sapiens
attctacattcaaaa

SEQ ID NO: 1312370 - DNA, 15 bp, Homo sapiens
tattctacattcaaa

SEQ ID NO: 1312371 - DNA, 15 bp, Homo sapiens
atattctacattcaa

SEQ ID NO: 1312372 - DNA, 15 bp, Homo sapiens
aatattctacattca

SEQ ID NO: 1312373 - DNA, 15 bp, Homo sapiens
taatattctacattc

SEQ ID NO: 1312374 - DNA, 15 bp, Homo sapiens
ttaatattctacatt

SEQ ID NO: 1312375 - DNA, 15 bp, Homo sapiens
cttaatattctacat

SEQ ID NO: 1312376 - DNA, 15 bp, Homo sapiens
ccttaatattctaca

SEQ ID NO: 1312377 - DNA, 15 bp, Homo sapiens
accttaatattctac

SEQ ID NO: 1312378 - DNA, 15 bp, Homo sapiens
aaccttaatattcta

SEQ ID NO: 1312379 - DNA, 15 bp, Homo sapiens
gaaccttaatattct

SEQ ID NO: 1312380 - DNA, 15 bp, Homo sapiens
tgaaccttaatattc

SEQ ID NO: 1312381 - DNA, 15 bp, Homo sapiens
atgaaccttaatatt

SEQ ID NO: 1312382 - DNA, 15 bp, Homo sapiens
aatgaaccttaatat

SEQ ID NO: 1312383 - DNA, 15 bp, Homo sapiens
caatgaaccttaata

SEQ ID NO: 1312384 - DNA, 15 bp, Homo sapiens
tcaatgaaccttaat

SEQ ID NO: 1312385 - DNA, 15 bp, Homo sapiens
atcaatgaaccttaa

SEQ ID NO: 1312386 - DNA, 15 bp, Homo sapiens
tatcaatgaacctta

SEQ ID NO: 1312387 - DNA, 15 bp, Homo sapiens
ctatcaatgaacctt

SEQ ID NO: 1312388 - DNA, 15 bp, Homo sapiens
gctatcaatgaacct

SEQ ID NO: 1312389 - DNA, 15 bp, Homo sapiens
agctatcaatgaacc

SEQ ID NO: 1312390 - DNA, 15 bp, Homo sapiens
gagctatcaatgaac

SEQ ID NO: 1312391 - DNA, 15 bp, Homo sapiens
ggagctatcaatgaa

SEQ ID NO: 1312392 - DNA, 15 bp, Homo sapiens
aggagctatcaatga

SEQ ID NO: 1312393 - DNA, 15 bp, Homo sapiens
aaggagctatcaatg

SEQ ID NO: 1312394 - DNA, 15 bp, Homo sapiens
taaggagctatcaat

SEQ ID NO: 1312395 - DNA, 15 bp, Homo sapiens
ttaaggagctatcaa

SEQ ID NO: 1312396 - DNA, 15 bp, Homo sapiens
cttaaggagctatca

SEQ ID NO: 1312397 - DNA, 15 bp, Homo sapiens
acttaaggagctatc

SEQ ID NO: 1312398 - DNA, 15 bp, Homo sapiens
tacttaaggagctat

SEQ ID NO: 1312399 - DNA, 15 bp, Homo sapiens
ctacttaaggagcta

SEQ ID NO: 1312400 - DNA, 15 bp, Homo sapiens
actacttaaggagct

SEQ ID NO: 1312401 - DNA, 15 bp, Homo sapiens
cactacttaaggagc

SEQ ID NO: 1312402 - DNA, 15 bp, Homo sapiens
acactacttaaggag

SEQ ID NO: 1312403 - DNA, 15 bp, Homo sapiens
gacactacttaagga

SEQ ID NO: 1312404 - DNA, 15 bp, Homo sapiens
agacactacttaagg

SEQ ID NO: 1312405 - DNA, 15 bp, Homo sapiens
aagacactacttaag

SEQ ID NO: 1312406 - DNA, 15 bp, Homo sapiens
ctgaagacactactt

SEQ ID NO: 1312407 - DNA, 15 bp, Homo sapiens
actgaagacactact

SEQ ID NO: 1312408 - DNA, 15 bp, Homo sapiens
aactgaagacactac

SEQ ID NO: 1312409 - DNA, 15 bp, Homo sapiens
aaactgaagacacta

SEQ ID NO: 1312410 - DNA, 15 bp, Homo sapiens
taaactgaagacact

SEQ ID NO: 1312411 - DNA, 15 bp, Homo sapiens
ttaaactgaagacac

SEQ ID NO: 1312412 - DNA, 15 bp, Homo sapiens
attaaactgaagaca

SEQ ID NO: 1312413 - DNA, 15 bp, Homo sapiens
aattaaactgaagac

SEQ ID NO: 1312414 - DNA, 15 bp, Homo sapiens
aaattaaactgaaga

SEQ ID NO: 1312415 - DNA, 15 bp, Homo sapiens
aaaattaaactgaag

SEQ ID NO: 1312416 - DNA, 15 bp, Homo sapiens
gaaaattaaactgaa

SEQ ID NO: 1312417 - DNA, 15 bp, Homo sapiens
agaaaattaaactga

SEQ ID NO: 1312418 - DNA, 15 bp, Homo sapiens
cagaaaattaaactg

SEQ ID NO: 1312419 - DNA, 15 bp, Homo sapiens
acagaaaattaaact

SEQ ID NO: 1312420 - DNA, 15 bp, Homo sapiens
cacagaaaattaaac

SEQ ID NO: 1312421 - DNA, 15 bp, Homo sapiens
tcacagaaaattaaa

SEQ ID NO: 1312422 - DNA, 15 bp, Homo sapiens
ttcacagaaaattaa

SEQ ID NO: 1312423 - DNA, 15 bp, Homo sapiens
attcacagaaaatta

SEQ ID NO: 1312424 - DNA, 15 bp, Homo sapiens
tattcacagaaaatt

SEQ ID NO: 1312425 - DNA, 15 bp, Homo sapiens
atattcacagaaaat

SEQ ID NO: 1312426 - DNA, 15 bp, Homo sapiens
tatattcacagaaaa

SEQ ID NO: 1312427 - DNA, 15 bp, Homo sapiens
ttatattcacagaaa

SEQ ID NO: 1312428 - DNA, 15 bp, Homo sapiens
attatattcacagaa

SEQ ID NO: 1312429 - DNA, 15 bp, Homo sapiens
tattatattcacaga

SEQ ID NO: 1312430 - DNA, 15 bp, Homo sapiens
atattatattcacag

SEQ ID NO: 1312431 - DNA, 15 bp, Homo sapiens
tatattatattcaca

SEQ ID NO: 1312432 - DNA, 15 bp, Homo sapiens
atatattatattcac

SEQ ID NO: 1312433 - DNA, 15 bp, Homo sapiens
tatatattatattca

SEQ ID NO: 1312434 - DNA, 15 bp, Homo sapiens
atatatattatattc

SEQ ID NO: 1312435 - DNA, 15 bp, Homo sapiens
tatatatattatatt

SEQ ID NO: 1312436 - DNA, 15 bp, Homo sapiens
ttatatatattatat

SEQ ID NO: 1312437 - DNA, 15 bp, Homo sapiens
attatatatattata

SEQ ID NO: 1312438 - DNA, 15 bp, Homo sapiens
tattatatatattat

SEQ ID NO: 1312439 - DNA, 15 bp, Homo sapiens
gtattatatatatta

SEQ ID NO: 1312440 - DNA, 15 bp, Homo sapiens
tgtattatatatatt

SEQ ID NO: 1312441 - DNA, 15 bp, Homo sapiens
atgtattatatatat

SEQ ID NO: 1312442 - DNA, 15 bp, Homo sapiens
tatgtattatatata

SEQ ID NO: 1312443 - DNA, 15 bp, Homo sapiens
atatgtattatatat

SEQ ID NO: 1312444 - DNA, 15 bp, Homo sapiens
tatatgtattatata

SEQ ID NO: 1312445 - DNA, 15 bp, Homo sapiens
atatatgtattatat

SEQ ID NO: 1312446 - DNA, 15 bp, Homo sapiens
aatatatgtattata

SEQ ID NO: 1312447 - DNA, 15 bp, Homo sapiens
aaatatatgtattat

SEQ ID NO: 1312448 - DNA, 15 bp, Homo sapiens
aaaatatatgtatta

SEQ ID NO: 1312449 - DNA, 15 bp, Homo sapiens
taaaaatatatgtat

SEQ ID NO: 1312450 - DNA, 15 bp, Homo sapiens
ataaaaatatatgta

SEQ ID NO: 1312451 - DNA, 15 bp, Homo sapiens
cataaaaatatatgt

SEQ ID NO: 1312452 - DNA, 15 bp, Homo sapiens
gcataaaaatatatg

SEQ ID NO: 1312453 - DNA, 15 bp, Homo sapiens
agcataaaaatatat

SEQ ID NO: 1312454 - DNA, 15 bp, Homo sapiens
aagcataaaaatata

SEQ ID NO: 1312455 - DNA, 15 bp, Homo sapiens
aaagcataaaaatat

SEQ ID NO: 1312456 - DNA, 15 bp, Homo sapiens
aaaagcataaaaata

SEQ ID NO: 1312457 - DNA, 15 bp, Homo sapiens
aaaaagcataaaaat

SEQ ID NO: 1312458 - DNA, 15 bp, Homo sapiens
taaaaagcataaaaa

SEQ ID NO: 1312459 - DNA, 15 bp, Homo sapiens
ttaaaaagcataaaa

SEQ ID NO: 1312460 - DNA, 15 bp, Homo sapiens
tttaaaaagcataaa

SEQ ID NO: 1312461 - DNA, 15 bp, Homo sapiens
ttttaaaaagcataa

SEQ ID NO: 1312462 - DNA, 15 bp, Homo sapiens
attttaaaaagcata

SEQ ID NO: 1312463 - DNA, 15 bp, Homo sapiens
tattttaaaaagcat

SEQ ID NO: 1312464 - DNA, 15 bp, Homo sapiens
ttattttaaaaagca

SEQ ID NO: 1312465 - DNA, 15 bp, Homo sapiens
tttattttaaaaagc

SEQ ID NO: 1312466 - DNA, 15 bp, Homo sapiens
gtttattttaaaaag

SEQ ID NO: 1312467 - DNA, 15 bp, Homo sapiens
agtttattttaaaaa

SEQ ID NO: 1312468 - DNA, 15 bp, Homo sapiens
tagtttattttaaaa

SEQ ID NO: 1312469 - DNA, 15 bp, Homo sapiens
ctagtttattttaaa

SEQ ID NO: 1312470 - DNA, 15 bp, Homo sapiens
cctagtttattttaa

SEQ ID NO: 1312471 - DNA, 15 bp, Homo sapiens
acctagtttatttta

SEQ ID NO: 1312472 - DNA, 15 bp, Homo sapiens
tacctagtttatttt

SEQ ID NO: 1312473 - DNA, 15 bp, Homo sapiens
gtacctagtttattt

SEQ ID NO: 1312474 - DNA, 15 bp, Homo sapiens
agtacctagtttatt

SEQ ID NO: 1312475 - DNA, 15 bp, Homo sapiens
aagtacctagtttat

SEQ ID NO: 1312476 - DNA, 15 bp, Homo sapiens
caagtacctagttta

SEQ ID NO: 1312477 - DNA, 15 bp, Homo sapiens
tcaagtacctagttt

SEQ ID NO: 1312478 - DNA, 15 bp, Homo sapiens
atcaagtacctagtt

SEQ ID NO: 1312479 - DNA, 15 bp, Homo sapiens
tatcaagtacctagt

SEQ ID NO: 1312480 - DNA, 15 bp, Homo sapiens
atatcaagtacctag

SEQ ID NO: 1312481 - DNA, 15 bp, Homo sapiens
aatatcaagtaccta

SEQ ID NO: 1312482 - DNA, 15 bp, Homo sapiens
aaatatcaagtacct

SEQ ID NO: 1312483 - DNA, 15 bp, Homo sapiens
aaaatatcaagtacc

SEQ ID NO: 1312484 - DNA, 15 bp, Homo sapiens
gaaaatatcaagtac

SEQ ID NO: 1312485 - DNA, 15 bp, Homo sapiens
agaaaatatcaagta

SEQ ID NO: 1312486 - DNA, 15 bp, Homo sapiens
gagaaaatatcaagt

SEQ ID NO: 1312487 - DNA, 15 bp, Homo sapiens
tgagaaaatatcaag

SEQ ID NO: 1312488 - DNA, 15 bp, Homo sapiens
ctgagaaaatatcaa

SEQ ID NO: 1312489 - DNA, 15 bp, Homo sapiens
actgagaaaatatca

SEQ ID NO: 1312490 - DNA, 15 bp, Homo sapiens
tactgagaaaatatc

SEQ ID NO: 1312491 - DNA, 15 bp, Homo sapiens
ttactgagaaaatat

SEQ ID NO: 1312492 - DNA, 15 bp, Homo sapiens
tttactgagaaaata

SEQ ID NO: 1312493 - DNA, 15 bp, Homo sapiens
ctttactgagaaaat

SEQ ID NO: 1312494 - DNA, 15 bp, Homo sapiens
tctttactgagaaaa

SEQ ID NO: 1312495 - DNA, 15 bp, Homo sapiens
atctttactgagaaa

SEQ ID NO: 1312496 - DNA, 15 bp, Homo sapiens
catctttactgagaa

SEQ ID NO: 1312497 - DNA, 15 bp, Homo sapiens
tcatctttactgaga

SEQ ID NO: 1312498 - DNA, 15 bp, Homo sapiens
atcatctttactgag

SEQ ID NO: 1312499 - DNA, 15 bp, Homo sapiens
aatcatctttactga

SEQ ID NO: 1312500 - DNA, 15 bp, Homo sapiens
aaatcatctttactg

SEQ ID NO: 1312501 - DNA, 15 bp, Homo sapiens
gaaatcatctttact

SEQ ID NO: 1312502 - DNA, 15 bp, Homo sapiens
agaaatcatctttac

SEQ ID NO: 1312503 - DNA, 15 bp, Homo sapiens
tagaaatcatcttta

SEQ ID NO: 1312504 - DNA, 15 bp, Homo sapiens
ttagaaatcatcttt

SEQ ID NO: 1312505 - DNA, 15 bp, Homo sapiens
cttagaaatcatctt

SEQ ID NO: 1312506 - DNA, 15 bp, Homo sapiens
acttagaaatcatct

SEQ ID NO: 1312507 - DNA, 15 bp, Homo sapiens
aacttagaaatcatc

SEQ ID NO: 1312508 - DNA, 15 bp, Homo sapiens
gaacttagaaatcat

SEQ ID NO: 1312509 - DNA, 15 bp, Homo sapiens
tgaacttagaaatca

SEQ ID NO: 1312510 - DNA, 15 bp, Homo sapiens
ctgaacttagaaatc

SEQ ID NO: 1312511 - DNA, 15 bp, Homo sapiens
tctgaacttagaaat

SEQ ID NO: 1312512 - DNA, 15 bp, Homo sapiens
ttctgaacttagaaa

SEQ ID NO: 1312513 - DNA, 15 bp, Homo sapiens
tttctgaacttagaa

SEQ ID NO: 1312514 - DNA, 15 bp, Homo sapiens
atttctgaacttaga

SEQ ID NO: 1312515 - DNA, 15 bp, Homo sapiens
aatttctgaacttag

SEQ ID NO: 1312516 - DNA, 15 bp, Homo sapiens
taatttctgaactta

SEQ ID NO: 1312517 - DNA, 15 bp, Homo sapiens
ataatttctgaactt

SEQ ID NO: 1312518 - DNA, 15 bp, Homo sapiens
aataatttctgaact

SEQ ID NO: 1312519 - DNA, 15 bp, Homo sapiens
taataatttctgaac

SEQ ID NO: 1312520 - DNA, 15 bp, Homo sapiens
ctaataatttctgaa

SEQ ID NO: 1312521 - DNA, 15 bp, Homo sapiens
cctaataatttctga

SEQ ID NO: 1312522 - DNA, 15 bp, Homo sapiens
tcctaataatttctg

SEQ ID NO: 1312523 - DNA, 15 bp, Homo sapiens
atcctaataatttct

SEQ ID NO: 1312524 - DNA, 15 bp, Homo sapiens
catcctaataatttc

SEQ ID NO: 1312525 - DNA, 15 bp, Homo sapiens
gcatcctaataattt

SEQ ID NO: 1312526 - DNA, 15 bp, Homo sapiens
agcatcctaataatt

SEQ ID NO: 1312527 - DNA, 15 bp, Homo sapiens
cagcatcctaataat

SEQ ID NO: 1312528 - DNA, 15 bp, Homo sapiens
ccagcatcctaataa

SEQ ID NO: 1312529 - DNA, 15 bp, Homo sapiens
tccagcatcctaata

SEQ ID NO: 1312530 - DNA, 15 bp, Homo sapiens
ttccagcatcctaat

SEQ ID NO: 1312531 - DNA, 15 bp, Homo sapiens
tttccagcatcctaa

SEQ ID NO: 1312532 - DNA, 15 bp, Homo sapiens
ctttccagcatccta

SEQ ID NO: 1312533 - DNA, 15 bp, Homo sapiens
gctttccagcatcct

SEQ ID NO: 1312534 - DNA, 15 bp, Homo sapiens
ggctttccagcatcc

SEQ ID NO: 1312535 - DNA, 15 bp, Homo sapiens
tggctttccagcatc

SEQ ID NO: 1312536 - DNA, 15 bp, Homo sapiens
atggctttccagcat

SEQ ID NO: 1312537 - DNA, 15 bp, Homo sapiens
aatggctttccagca

SEQ ID NO: 1312538 - DNA, 15 bp, Homo sapiens
aaatggctttccagc

SEQ ID NO: 1312539 - DNA, 15 bp, Homo sapiens
aaaatggctttccag

SEQ ID NO: 1312540 - DNA, 15 bp, Homo sapiens
aaaaatggctttcca

SEQ ID NO: 1312541 - DNA, 15 bp, Homo sapiens
gaaaaatggctttcc

SEQ ID NO: 1312542 - DNA, 15 bp, Homo sapiens
ggaaaaatggctttc

SEQ ID NO: 1312543 - DNA, 15 bp, Homo sapiens
tggaaaaatggcttt

SEQ ID NO: 1312544 - DNA, 15 bp, Homo sapiens
gtggaaaaatggctt

SEQ ID NO: 1312545 - DNA, 15 bp, Homo sapiens
tgtggaaaaatggct

SEQ ID NO: 1312546 - DNA, 15 bp, Homo sapiens
gtgtggaaaaatggc

SEQ ID NO: 1312547 - DNA, 15 bp, Homo sapiens
ggtgtggaaaaatgg

SEQ ID NO: 1312548 - DNA, 15 bp, Homo sapiens
aggtgtggaaaaatg

SEQ ID NO: 1312549 - DNA, 15 bp, Homo sapiens
caggtgtggaaaaat

SEQ ID NO: 1312550 - DNA, 15 bp, Homo sapiens
tcaggtgtggaaaaa

SEQ ID NO: 1312551 - DNA, 15 bp, Homo sapiens
ttcaggtgtggaaaa

SEQ ID NO: 1312552 - DNA, 15 bp, Homo sapiens
tttcaggtgtggaaa

SEQ ID NO: 1312553 - DNA, 15 bp, Homo sapiens
ttttcaggtgtggaa

SEQ ID NO: 1312554 - DNA, 15 bp, Homo sapiens
tttttcaggtgtgga

SEQ ID NO: 1312555 - DNA, 15 bp, Homo sapiens
atttttcaggtgtgg

SEQ ID NO: 1312556 - DNA, 15 bp, Homo sapiens
aatttttcaggtgtg

SEQ ID NO: 1312557 - DNA, 15 bp, Homo sapiens
aaatttttcaggtgt

SEQ ID NO: 1312558 - DNA, 15 bp, Homo sapiens
aaaatttttcaggtg

SEQ ID NO: 1312559 - DNA, 15 bp, Homo sapiens
gaaaatttttcaggt

SEQ ID NO: 1312560 - DNA, 15 bp, Homo sapiens
agaaaatttttcagg

SEQ ID NO: 1312561 - DNA, 15 bp, Homo sapiens
gagaaaatttttcag

SEQ ID NO: 1312562 - DNA, 15 bp, Homo sapiens
tgagaaaatttttca

SEQ ID NO: 1312563 - DNA, 15 bp, Homo sapiens
ctgagaaaatttttc

SEQ ID NO: 1312564 - DNA, 15 bp, Homo sapiens
gctgagaaaattttt

SEQ ID NO: 1312565 - DNA, 15 bp, Homo sapiens
agctgagaaaatttt

SEQ ID NO: 1312566 - DNA, 15 bp, Homo sapiens
aagctgagaaaattt

SEQ ID NO: 1312567 - DNA, 15 bp, Homo sapiens
taagctgagaaaatt

SEQ ID NO: 1312568 - DNA, 15 bp, Homo sapiens
gtaagctgagaaaat

SEQ ID NO: 1312569 - DNA, 15 bp, Homo sapiens
agtaagctgagaaaa

SEQ ID NO: 1312570 - DNA, 15 bp, Homo sapiens
cagtaagctgagaaa

SEQ ID NO: 1312571 - DNA, 15 bp, Homo sapiens
acagtaagctgagaa

SEQ ID NO: 1312572 - DNA, 15 bp, Homo sapiens
cacagtaagctgaga

SEQ ID NO: 1312573 - DNA, 15 bp, Homo sapiens
acacagtaagctgag

SEQ ID NO: 1312574 - DNA, 15 bp, Homo sapiens
aacacagtaagctga

SEQ ID NO: 1312575 - DNA, 15 bp, Homo sapiens
gaacacagtaagctg

SEQ ID NO: 1312576 - DNA, 15 bp, Homo sapiens
ggaacacagtaagct

SEQ ID NO: 1312577 - DNA, 15 bp, Homo sapiens
aggaacacagtaagc

SEQ ID NO: 1312578 - DNA, 15 bp, Homo sapiens
aaggaacacagtaag

SEQ ID NO: 1312579 - DNA, 15 bp, Homo sapiens
aaaggaacacagtaa

SEQ ID NO: 1312580 - DNA, 15 bp, Homo sapiens
caaaggaacacagta

SEQ ID NO: 1312581 - DNA, 15 bp, Homo sapiens
tcaaaggaacacagt

SEQ ID NO: 1312582 - DNA, 15 bp, Homo sapiens
ttcaaaggaacacag

SEQ ID NO: 1312583 - DNA, 15 bp, Homo sapiens
cttcaaaggaacaca

SEQ ID NO: 1312584 - DNA, 15 bp, Homo sapiens
ccttcaaaggaacac

SEQ ID NO: 1312585 - DNA, 15 bp, Homo sapiens
cccttcaaaggaaca

SEQ ID NO: 1312586 - DNA, 15 bp, Homo sapiens
tcccttcaaaggaac

SEQ ID NO: 1312587 - DNA, 15 bp, Homo sapiens
ctcccttcaaaggaa

SEQ ID NO: 1312588 - DNA, 15 bp, Homo sapiens
actcccttcaaagga

SEQ ID NO: 1312589 - DNA, 15 bp, Homo sapiens
aactcccttcaaagg

SEQ ID NO: 1312590 - DNA, 15 bp, Homo sapiens
taactcccttcaaag

SEQ ID NO: 1312591 - DNA, 15 bp, Homo sapiens
ttaactcccttcaaa

SEQ ID NO: 1312592 - DNA, 15 bp, Homo sapiens
attaactcccttcaa

SEQ ID NO: 1312593 - DNA, 15 bp, Homo sapiens
cattaactcccttca

SEQ ID NO: 1312594 - DNA, 15 bp, Homo sapiens
acattaactcccttc

SEQ ID NO: 1312595 - DNA, 15 bp, Homo sapiens
cacattaactccctt

SEQ ID NO: 1312596 - DNA, 15 bp, Homo sapiens
ccacattaactccct

SEQ ID NO: 1312597 - DNA, 15 bp, Homo sapiens
cccacattaactccc

SEQ ID NO: 1312598 - DNA, 15 bp, Homo sapiens
tcccacattaactcc

SEQ ID NO: 1312599 - DNA, 15 bp, Homo sapiens
ttcccacattaactc

SEQ ID NO: 1312600 - DNA, 15 bp, Homo sapiens
cttcccacattaact

SEQ ID NO: 1312601 - DNA, 15 bp, Homo sapiens
ccttcccacattaac

SEQ ID NO: 1312602 - DNA, 15 bp, Homo sapiens
tccttcccacattaa

SEQ ID NO: 1312603 - DNA, 15 bp, Homo sapiens
ttccttcccacatta

SEQ ID NO: 1312604 - DNA, 15 bp, Homo sapiens
cttccttcccacatt

SEQ ID NO: 1312605 - DNA, 15 bp, Homo sapiens
tcttccttcccacat

SEQ ID NO: 1312606 - DNA, 15 bp, Homo sapiens
atcttccttcccaca

SEQ ID NO: 1312607 - DNA, 15 bp, Homo sapiens
aatcttccttcccac

SEQ ID NO: 1312608 - DNA, 15 bp, Homo sapiens
taatcttccttccca

SEQ ID NO: 1312609 - DNA, 15 bp, Homo sapiens
ctaatcttccttccc

SEQ ID NO: 1312610 - DNA, 15 bp, Homo sapiens
actaatcttccttcc

SEQ ID NO: 1312611 - DNA, 15 bp, Homo sapiens
gactaatcttccttc

SEQ ID NO: 1312612 - DNA, 15 bp, Homo sapiens
tgactaatcttcctt

SEQ ID NO: 1312613 - DNA, 15 bp, Homo sapiens
ttgactaatcttcct

SEQ ID NO: 1312614 - DNA, 15 bp, Homo sapiens
tttgactaatcttcc

SEQ ID NO: 1312615 - DNA, 15 bp, Homo sapiens
atttgactaatcttc

SEQ ID NO: 1312616 - DNA, 15 bp, Homo sapiens
gatttgactaatctt

SEQ ID NO: 1312617 - DNA, 15 bp, Homo sapiens
tgatttgactaatct

SEQ ID NO: 1312618 - DNA, 15 bp, Homo sapiens
atgatttgactaatc

SEQ ID NO: 1312619 - DNA, 15 bp, Homo sapiens
gatgatttgactaat

SEQ ID NO: 1312620 - DNA, 15 bp, Homo sapiens
agatgatttgactaa

SEQ ID NO: 1312621 - DNA, 15 bp, Homo sapiens
tagatgatttgacta

SEQ ID NO: 1312622 - DNA, 15 bp, Homo sapiens
gtagatgatttgact

SEQ ID NO: 1312623 - DNA, 15 bp, Homo sapiens
ggtagatgatttgac

SEQ ID NO: 1312624 - DNA, 15 bp, Homo sapiens
cggtagatgatttga

SEQ ID NO: 1312625 - DNA, 15 bp, Homo sapiens
acggtagatgatttg

SEQ ID NO: 1312626 - DNA, 15 bp, Homo sapiens
aacggtagatgattt

SEQ ID NO: 1312627 - DNA, 15 bp, Homo sapiens
aaacggtagatgatt

SEQ ID NO: 1312628 - DNA, 15 bp, Homo sapiens
aaaacggtagatgat

SEQ ID NO: 1312629 - DNA, 15 bp, Homo sapiens
taaaacggtagatga

SEQ ID NO: 1312630 - DNA, 15 bp, Homo sapiens
ataaaacggtagatg

SEQ ID NO: 1312631 - DNA, 15 bp, Homo sapiens
cataaaacggtagat

SEQ ID NO: 1312632 - DNA, 15 bp, Homo sapiens
tcataaaacggtaga

SEQ ID NO: 1312633 - DNA, 15 bp, Homo sapiens
ttcataaaacggtag

SEQ ID NO: 1312634 - DNA, 15 bp, Homo sapiens
tttcataaaacggta

SEQ ID NO: 1312635 - DNA, 15 bp, Homo sapiens
ttttcataaaacggt

SEQ ID NO: 1312636 - DNA, 15 bp, Homo sapiens
attttcataaaacgg

SEQ ID NO: 1312637 - DNA, 15 bp, Homo sapiens
cattttcataaaacg

SEQ ID NO: 1312638 - DNA, 15 bp, Homo sapiens
acattttcataaaac

SEQ ID NO: 1312639 - DNA, 15 bp, Homo sapiens
aacattttcataaaa

SEQ ID NO: 1312640 - DNA, 15 bp, Homo sapiens
taacattttcataaa

SEQ ID NO: 1312641 - DNA, 15 bp, Homo sapiens
ttaacattttcataa

SEQ ID NO: 1312642 - DNA, 15 bp, Homo sapiens
attaacattttcata

SEQ ID NO: 1312643 - DNA, 15 bp, Homo sapiens
tattaacattttcat

SEQ ID NO: 1312644 - DNA, 15 bp, Homo sapiens
ttattaacattttca

SEQ ID NO: 1312645 - DNA, 15 bp, Homo sapiens
gttattaacattttc

SEQ ID NO: 1312646 - DNA, 15 bp, Homo sapiens
tgttattaacatttt

SEQ ID NO: 1312647 - DNA, 15 bp, Homo sapiens
ctgttattaacattt

SEQ ID NO: 1312648 - DNA, 15 bp, Homo sapiens
actgttattaacatt

SEQ ID NO: 1312649 - DNA, 15 bp, Homo sapiens
cactgttattaacat

SEQ ID NO: 1312650 - DNA, 15 bp, Homo sapiens
ccactgttattaaca

SEQ ID NO: 1312651 - DNA, 15 bp, Homo sapiens
cccactgttattaac

SEQ ID NO: 1312652 - DNA, 15 bp, Homo sapiens
gcccactgttattaa

SEQ ID NO: 1312653 - DNA, 15 bp, Homo sapiens
tgcccactgttatta

SEQ ID NO: 1312654 - DNA, 15 bp, Homo sapiens
gtgcccactgttatt

SEQ ID NO: 1312655 - DNA, 15 bp, Homo sapiens
tgtgcccactgttat

SEQ ID NO: 1312656 - DNA, 15 bp, Homo sapiens
ctgtgcccactgtta

SEQ ID NO: 1312657 - DNA, 15 bp, Homo sapiens
actgtgcccactgtt

SEQ ID NO: 1312658 - DNA, 15 bp, Homo sapiens
aactgtgcccactgt

SEQ ID NO: 1312659 - DNA, 15 bp, Homo sapiens
aaactgtgcccactg

SEQ ID NO: 1312660 - DNA, 15 bp, Homo sapiens
aaaactgtgcccact

SEQ ID NO: 1312661 - DNA, 15 bp, Homo sapiens
aaaaactgtgcccac

SEQ ID NO: 1312662 - DNA, 15 bp, Homo sapiens
taaaaactgtgccca

SEQ ID NO: 1312663 - DNA, 15 bp, Homo sapiens
ataaaaactgtgccc

SEQ ID NO: 1312664 - DNA, 15 bp, Homo sapiens
tataaaaactgtgcc

SEQ ID NO: 1312665 - DNA, 15 bp, Homo sapiens
ctataaaaactgtgc

SEQ ID NO: 1312666 - DNA, 15 bp, Homo sapiens
cctataaaaactgtg

SEQ ID NO: 1312667 - DNA, 15 bp, Homo sapiens
ccctataaaaactgt

SEQ ID NO: 1312668 - DNA, 15 bp, Homo sapiens
cccctataaaaactg

SEQ ID NO: 1312669 - DNA, 15 bp, Homo sapiens
ccccctataaaaact

SEQ ID NO: 1312670 - DNA, 15 bp, Homo sapiens
cccccctataaaaac

SEQ ID NO: 1312671 - DNA, 15 bp, Homo sapiens
gcccccctataaaaa

SEQ ID NO: 1312672 - DNA, 15 bp, Homo sapiens
agcccccctataaaa

SEQ ID NO: 1312673 - DNA, 15 bp, Homo sapiens
aagcccccctataaa

SEQ ID NO: 1312674 - DNA, 15 bp, Homo sapiens
taagcccccctataa

SEQ ID NO: 1312675 - DNA, 15 bp, Homo sapiens
ctaagcccccctata

SEQ ID NO: 1312676 - DNA, 15 bp, Homo sapiens
actaagcccccctat

SEQ ID NO: 1312677 - DNA, 15 bp, Homo sapiens
cactaagccccccta

SEQ ID NO: 1312678 - DNA, 15 bp, Homo sapiens
gcactaagcccccct

SEQ ID NO: 1312679 - DNA, 15 bp, Homo sapiens
agcactaagcccccc

SEQ ID NO: 1312680 - DNA, 15 bp, Homo sapiens
tagcactaagccccc

SEQ ID NO: 1312681 - DNA, 15 bp, Homo sapiens
atagcactaagcccc

SEQ ID NO: 1312682 - DNA, 15 bp, Homo sapiens
gatagcactaagccc

SEQ ID NO: 1312683 - DNA, 15 bp, Homo sapiens
tgatagcactaagcc

SEQ ID NO: 1312684 - DNA, 15 bp, Homo sapiens
atgatagcactaagc

SEQ ID NO: 1312685 - DNA, 15 bp, Homo sapiens
aatgatagcactaag

SEQ ID NO: 1312686 - DNA, 15 bp, Homo sapiens
aaatgatagcactaa

SEQ ID NO: 1312687 - DNA, 15 bp, Homo sapiens
aaaatgatagcacta

SEQ ID NO: 1312688 - DNA, 15 bp, Homo sapiens
gaaaatgatagcact

SEQ ID NO: 1312689 - DNA, 15 bp, Homo sapiens
tgaaaatgatagcac

SEQ ID NO: 1312690 - DNA, 15 bp, Homo sapiens
ctgaaaatgatagca

SEQ ID NO: 1312691 - DNA, 15 bp, Homo sapiens
cctgaaaatgatagc

SEQ ID NO: 1312692 - DNA, 15 bp, Homo sapiens
acctgaaaatgatag

SEQ ID NO: 1312693 - DNA, 15 bp, Homo sapiens
tacctgaaaatgata

SEQ ID NO: 1312694 - DNA, 15 bp, Homo sapiens
ttacctgaaaatgat

SEQ ID NO: 1312695 - DNA, 15 bp, Homo sapiens
attacctgaaaatga

SEQ ID NO: 1312696 - DNA, 15 bp, Homo sapiens
gattacctgaaaatg

SEQ ID NO: 1312697 - DNA, 15 bp, Homo sapiens
tgattacctgaaaat

SEQ ID NO: 1312698 - DNA, 15 bp, Homo sapiens
ttgattacctgaaaa

SEQ ID NO: 1312699 - DNA, 15 bp, Homo sapiens
tttgattacctgaaa

SEQ ID NO: 1312700 - DNA, 15 bp, Homo sapiens
ttttgattacctgaa

SEQ ID NO: 1312701 - DNA, 15 bp, Homo sapiens
cttttgattacctga

SEQ ID NO: 1312702 - DNA, 15 bp, Homo sapiens
acttttgattacctg

SEQ ID NO: 1312703 - DNA, 15 bp, Homo sapiens
tacttttgattacct

SEQ ID NO: 1312704 - DNA, 15 bp, Homo sapiens
ttacttttgattacc

SEQ ID NO: 1312705 - DNA, 15 bp, Homo sapiens
tttacttttgattac

SEQ ID NO: 1312706 - DNA, 15 bp, Homo sapiens
ttttacttttgatta

SEQ ID NO: 1312707 - DNA, 15 bp, Homo sapiens
attttacttttgatt

SEQ ID NO: 1312708 - DNA, 15 bp, Homo sapiens
gattttacttttgat

SEQ ID NO: 1312709 - DNA, 15 bp, Homo sapiens
tgattttacttttga

SEQ ID NO: 1312710 - DNA, 15 bp, Homo sapiens
atgattttacttttg

SEQ ID NO: 1312711 - DNA, 15 bp, Homo sapiens
gatgattttactttt

SEQ ID NO: 1312712 - DNA, 15 bp, Homo sapiens
tgatgattttacttt

SEQ ID NO: 1312713 - DNA, 15 bp, Homo sapiens
ctgatgattttactt

SEQ ID NO: 1312714 - DNA, 15 bp, Homo sapiens
tctgatgattttact

SEQ ID NO: 1312715 - DNA, 15 bp, Homo sapiens
ctctgatgattttac

SEQ ID NO: 1312716 - DNA, 15 bp, Homo sapiens
actctgatgatttta

SEQ ID NO: 1312717 - DNA, 15 bp, Homo sapiens
aactctgatgatttt

SEQ ID NO: 1312718 - DNA, 15 bp, Homo sapiens
gaactctgatgattt

SEQ ID NO: 1312719 - DNA, 15 bp, Homo sapiens
agaactctgatgatt

SEQ ID NO: 1312720 - DNA, 15 bp, Homo sapiens
tagaactctgatgat

SEQ ID NO: 1312721 - DNA, 15 bp, Homo sapiens
ttagaactctgatga

SEQ ID NO: 1312722 - DNA, 15 bp, Homo sapiens
attagaactctgatg

SEQ ID NO: 1312723 - DNA, 15 bp, Homo sapiens
tattagaactctgat

SEQ ID NO: 1312724 - DNA, 15 bp, Homo sapiens
atattagaactctga

SEQ ID NO: 1312725 - DNA, 15 bp, Homo sapiens
aatattagaactctg

SEQ ID NO: 1312726 - DNA, 15 bp, Homo sapiens
taatattagaactct

SEQ ID NO: 1312727 - DNA, 15 bp, Homo sapiens
ttaatattagaactc

SEQ ID NO: 1312728 - DNA, 15 bp, Homo sapiens
attaatattagaact

SEQ ID NO: 1312729 - DNA, 15 bp, Homo sapiens
tattaatattagaac

SEQ ID NO: 1312730 - DNA, 15 bp, Homo sapiens
atattaatattagaa

SEQ ID NO: 1312731 - DNA, 15 bp, Homo sapiens
tatattaatattaga

SEQ ID NO: 1312732 - DNA, 15 bp, Homo sapiens
ctatattaatattag

SEQ ID NO: 1312733 - DNA, 15 bp, Homo sapiens
cctatattaatatta

SEQ ID NO: 1312734 - DNA, 15 bp, Homo sapiens
acctatattaatatt

SEQ ID NO: 1312735 - DNA, 15 bp, Homo sapiens
aacctatattaatat

SEQ ID NO: 1312736 - DNA, 15 bp, Homo sapiens
aaacctatattaata

SEQ ID NO: 1312737 - DNA, 15 bp, Homo sapiens
aaaacctatattaat

SEQ ID NO: 1312738 - DNA, 15 bp, Homo sapiens
aaaaacctatattaa

SEQ ID NO: 1312739 - DNA, 15 bp, Homo sapiens
gaaaaacctatatta

SEQ ID NO: 1312740 - DNA, 15 bp, Homo sapiens
agaaaaacctatatt

SEQ ID NO: 1312741 - DNA, 15 bp, Homo sapiens
cagaaaaacctatat

SEQ ID NO: 1312742 - DNA, 15 bp, Homo sapiens
tcagaaaaacctata

SEQ ID NO: 1312743 - DNA, 15 bp, Homo sapiens
ttcagaaaaacctat

SEQ ID NO: 1312744 - DNA, 15 bp, Homo sapiens
attcagaaaaaccta

SEQ ID NO: 1312745 - DNA, 15 bp, Homo sapiens
tattcagaaaaacct

SEQ ID NO: 1312746 - DNA, 15 bp, Homo sapiens
ttattcagaaaaacc

SEQ ID NO: 1312747 - DNA, 15 bp, Homo sapiens
tttattcagaaaaac

SEQ ID NO: 1312748 - DNA, 15 bp, Homo sapiens
ctttattcagaaaaa

SEQ ID NO: 1312749 - DNA, 15 bp, Homo sapiens
cctttattcagaaaa

SEQ ID NO: 1312750 - DNA, 15 bp, Homo sapiens
ccctttattcagaaa

SEQ ID NO: 1312751 - DNA, 15 bp, Homo sapiens
cccctttattcagaa

SEQ ID NO: 1312752 - DNA, 15 bp, Homo sapiens
ccccctttattcaga

SEQ ID NO: 1312753 - DNA, 15 bp, Homo sapiens
tccccctttattcag

SEQ ID NO: 1312754 - DNA, 15 bp, Homo sapiens
ttccccctttattca

SEQ ID NO: 1312755 - DNA, 15 bp, Homo sapiens
cttccccctttattc

SEQ ID NO: 1312756 - DNA, 15 bp, Homo sapiens
ccttccccctttatt

SEQ ID NO: 1312757 - DNA, 15 bp, Homo sapiens
cccttccccctttat

SEQ ID NO: 1312758 - DNA, 15 bp, Homo sapiens
tcccttcccccttta

SEQ ID NO: 1312759 - DNA, 15 bp, Homo sapiens
cttcccttccccctt

SEQ ID NO: 1312760 - DNA, 15 bp, Homo sapiens
tcttcccttccccct

SEQ ID NO: 1312761 - DNA, 15 bp, Homo sapiens
ctcttcccttccccc

SEQ ID NO: 1312762 - DNA, 15 bp, Homo sapiens
tctcttcccttcccc

SEQ ID NO: 1312763 - DNA, 15 bp, Homo sapiens
ttctcttcccttccc

SEQ ID NO: 1312764 - DNA, 15 bp, Homo sapiens
tttctcttcccttcc

SEQ ID NO: 1312765 - DNA, 15 bp, Homo sapiens
ttttctcttcccttc

SEQ ID NO: 1312766 - DNA, 15 bp, Homo sapiens
gttttctcttccctt

SEQ ID NO: 1312767 - DNA, 15 bp, Homo sapiens
ggttttctcttccct

SEQ ID NO: 1312768 - DNA, 15 bp, Homo sapiens
gggttttctcttccc

SEQ ID NO: 1312769 - DNA, 15 bp, Homo sapiens
agggttttctcttcc

SEQ ID NO: 1312770 - DNA, 15 bp, Homo sapiens
gagggttttctcttc

SEQ ID NO: 1312771 - DNA, 15 bp, Homo sapiens
tgagggttttctctt

SEQ ID NO: 1312772 - DNA, 15 bp, Homo sapiens
ctgagggttttctct

SEQ ID NO: 1312773 - DNA, 15 bp, Homo sapiens
tctgagggttttctc

SEQ ID NO: 1312774 - DNA, 15 bp, Homo sapiens
ttctgagggttttct

SEQ ID NO: 1312775 - DNA, 15 bp, Homo sapiens
attctgagggttttc

SEQ ID NO: 1312776 - DNA, 15 bp, Homo sapiens
tattctgagggtttt

SEQ ID NO: 1312777 - DNA, 15 bp, Homo sapiens
atattctgagggttt

SEQ ID NO: 1312778 - DNA, 15 bp, Homo sapiens
tatattctgagggtt

SEQ ID NO: 1312779 - DNA, 15 bp, Homo sapiens
atatattctgagggt

SEQ ID NO: 1312780 - DNA, 15 bp, Homo sapiens
catatattctgaggg

SEQ ID NO: 1312781 - DNA, 15 bp, Homo sapiens
tcatatattctgagg

SEQ ID NO: 1312782 - DNA, 15 bp, Homo sapiens
gtcatatattctgag

SEQ ID NO: 1312783 - DNA, 15 bp, Homo sapiens
agtcatatattctga

SEQ ID NO: 1312784 - DNA, 15 bp, Homo sapiens
aagtcatatattctg

SEQ ID NO: 1312785 - DNA, 15 bp, Homo sapiens
taagtcatatattct

SEQ ID NO: 1312786 - DNA, 15 bp, Homo sapiens
gtaagtcatatattc

SEQ ID NO: 1312787 - DNA, 15 bp, Homo sapiens
ggtaagtcatatatt

SEQ ID NO: 1312788 - DNA, 15 bp, Homo sapiens
tggtaagtcatatat

SEQ ID NO: 1312789 - DNA, 15 bp, Homo sapiens
gtggtaagtcatata

SEQ ID NO: 1312790 - DNA, 15 bp, Homo sapiens
tgtggtaagtcatat

SEQ ID NO: 1312791 - DNA, 15 bp, Homo sapiens
ttgtggtaagtcata

SEQ ID NO: 1312792 - DNA, 15 bp, Homo sapiens
tttgtggtaagtcat

SEQ ID NO: 1312793 - DNA, 15 bp, Homo sapiens
ctttgtggtaagtca

SEQ ID NO: 1312794 - DNA, 15 bp, Homo sapiens
actttgtggtaagtc

SEQ ID NO: 1312795 - DNA, 15 bp, Homo sapiens
tactttgtggtaagt

SEQ ID NO: 1312796 - DNA, 15 bp, Homo sapiens
gtactttgtggtaag

SEQ ID NO: 1312797 - DNA, 15 bp, Homo sapiens
tgtactttgtggtaa

SEQ ID NO: 1312798 - DNA, 15 bp, Homo sapiens
ttgtactttgtggta

SEQ ID NO: 1312799 - DNA, 15 bp, Homo sapiens
gttgtactttgtggt

SEQ ID NO: 1312800 - DNA, 15 bp, Homo sapiens
tgttgtactttgtgg

SEQ ID NO: 1312801 - DNA, 15 bp, Homo sapiens
gtgttgtactttgtg

SEQ ID NO: 1312802 - DNA, 15 bp, Homo sapiens
agtgttgtactttgt

SEQ ID NO: 1312803 - DNA, 15 bp, Homo sapiens
tagtgttgtactttg

SEQ ID NO: 1312804 - DNA, 15 bp, Homo sapiens
ctagtgttgtacttt

SEQ ID NO: 1312805 - DNA, 15 bp, Homo sapiens
gctagtgttgtactt

SEQ ID NO: 1312806 - DNA, 15 bp, Homo sapiens
tgctagtgttgtact

SEQ ID NO: 1312807 - DNA, 15 bp, Homo sapiens
ttgctagtgttgtac

SEQ ID NO: 1312808 - DNA, 15 bp, Homo sapiens
tttgctagtgttgta

SEQ ID NO: 1312809 - DNA, 15 bp, Homo sapiens
ctttgctagtgttgt

SEQ ID NO: 1312810 - DNA, 15 bp, Homo sapiens
cctttgctagtgttg

SEQ ID NO: 1312811 - DNA, 15 bp, Homo sapiens
tcctttgctagtgtt

SEQ ID NO: 1312812 - DNA, 15 bp, Homo sapiens
ttcctttgctagtgt

SEQ ID NO: 1312813 - DNA, 15 bp, Homo sapiens
tttcctttgctagtg

SEQ ID NO: 1312814 - DNA, 15 bp, Homo sapiens
ttttcctttgctagt

SEQ ID NO: 1312815 - DNA, 15 bp, Homo sapiens
attttcctttgctag

SEQ ID NO: 1312816 - DNA, 15 bp, Homo sapiens
tattttcctttgcta

SEQ ID NO: 1312817 - DNA, 15 bp, Homo sapiens
ttattttcctttgct

SEQ ID NO: 1312818 - DNA, 15 bp, Homo sapiens
tttattttcctttgc

SEQ ID NO: 1312819 - DNA, 15 bp, Homo sapiens
atttattttcctttg

SEQ ID NO: 1312820 - DNA, 15 bp, Homo sapiens
aatttattttccttt

SEQ ID NO: 1312821 - DNA, 15 bp, Homo sapiens
aaatttattttcctt

SEQ ID NO: 1312822 - DNA, 15 bp, Homo sapiens
aaaatttattttcct

SEQ ID NO: 1312823 - DNA, 15 bp, Homo sapiens
caaaatttattttcc

SEQ ID NO: 1312824 - DNA, 15 bp, Homo sapiens
acaaaatttattttc

SEQ ID NO: 1312825 - DNA, 15 bp, Homo sapiens
aacaaaatttatttt

SEQ ID NO: 1312826 - DNA, 15 bp, Homo sapiens
gaacaaaatttattt

SEQ ID NO: 1312827 - DNA, 15 bp, Homo sapiens
agaacaaaatttatt

SEQ ID NO: 1312828 - DNA, 15 bp, Homo sapiens
cagaacaaaatttat

SEQ ID NO: 1312829 - DNA, 15 bp, Homo sapiens
ccagaacaaaattta

SEQ ID NO: 1312830 - DNA, 15 bp, Homo sapiens
accagaacaaaattt

SEQ ID NO: 1312831 - DNA, 15 bp, Homo sapiens
taccagaacaaaatt

SEQ ID NO: 1312832 - DNA, 15 bp, Homo sapiens
gtaccagaacaaaat

SEQ ID NO: 1312833 - DNA, 15 bp, Homo sapiens
tgtaccagaacaaaa

SEQ ID NO: 1312834 - DNA, 15 bp, Homo sapiens
gtgtaccagaacaaa

SEQ ID NO: 1312835 - DNA, 15 bp, Homo sapiens
agtgtaccagaacaa

SEQ ID NO: 1312836 - DNA, 15 bp, Homo sapiens
aagtgtaccagaaca

SEQ ID NO: 1312837 - DNA, 15 bp, Homo sapiens
aaagtgtaccagaac

SEQ ID NO: 1312838 - DNA, 15 bp, Homo sapiens
aaaagtgtaccagaa

SEQ ID NO: 1312839 - DNA, 15 bp, Homo sapiens
aaaaagtgtaccaga

SEQ ID NO: 1312840 - DNA, 15 bp, Homo sapiens
aaaaaagtgtaccag

SEQ ID NO: 1312841 - DNA, 15 bp, Homo sapiens
aaaaaaagtgtacca

SEQ ID NO: 1312842 - DNA, 15 bp, Homo sapiens
gaaaaaaagtgtacc

SEQ ID NO: 1312843 - DNA, 15 bp, Homo sapiens
ggaaaaaaagtgtac

SEQ ID NO: 1312844 - DNA, 15 bp, Homo sapiens
tggaaaaaaagtgta

SEQ ID NO: 1312845 - DNA, 15 bp, Homo sapiens
atggaaaaaaagtgt

SEQ ID NO: 1312846 - DNA, 15 bp, Homo sapiens
tatggaaaaaaagtg

SEQ ID NO: 1312847 - DNA, 15 bp, Homo sapiens
ctatggaaaaaaagt

SEQ ID NO: 1312848 - DNA, 15 bp, Homo sapiens
actatggaaaaaaag

SEQ ID NO: 1312849 - DNA, 15 bp, Homo sapiens
aactatggaaaaaaa

SEQ ID NO: 1312850 - DNA, 15 bp, Homo sapiens
gaactatggaaaaaa

SEQ ID NO: 1312851 - DNA, 15 bp, Homo sapiens
agaactatggaaaaa

SEQ ID NO: 1312852 - DNA, 15 bp, Homo sapiens
tagaactatggaaaa

SEQ ID NO: 1312853 - DNA, 15 bp, Homo sapiens
ctagaactatggaaa

SEQ ID NO: 1312854 - DNA, 15 bp, Homo sapiens
tctagaactatggaa

SEQ ID NO: 1312855 - DNA, 15 bp, Homo sapiens
atctagaactatgga

SEQ ID NO: 1312856 - DNA, 15 bp, Homo sapiens
catctagaactatgg

SEQ ID NO: 1312857 - DNA, 15 bp, Homo sapiens
tcatctagaactatg

SEQ ID NO: 1312858 - DNA, 15 bp, Homo sapiens
ctcatctagaactat

SEQ ID NO: 1312859 - DNA, 15 bp, Homo sapiens
tctcatctagaacta

SEQ ID NO: 1312860 - DNA, 15 bp, Homo sapiens
ttctcatctagaact

SEQ ID NO: 1312861 - DNA, 15 bp, Homo sapiens
tttctcatctagaac

SEQ ID NO: 1312862 - DNA, 15 bp, Homo sapiens
ttttctcatctagaa

SEQ ID NO: 1312863 - DNA, 15 bp, Homo sapiens
gttttctcatctaga

SEQ ID NO: 1312864 - DNA, 15 bp, Homo sapiens
ggttttctcatctag

SEQ ID NO: 1312865 - DNA, 15 bp, Homo sapiens
tggttttctcatcta

SEQ ID NO: 1312866 - DNA, 15 bp, Homo sapiens
atggttttctcatct

SEQ ID NO: 1312867 - DNA, 15 bp, Homo sapiens
catggttttctcatc

SEQ ID NO: 1312868 - DNA, 15 bp, Homo sapiens
acatggttttctcat

SEQ ID NO: 1312869 - DNA, 15 bp, Homo sapiens
aacatggttttctca

SEQ ID NO: 1312870 - DNA, 15 bp, Homo sapiens
aaacatggttttctc

SEQ ID NO: 1312871 - DNA, 15 bp, Homo sapiens
caaacatggttttct

SEQ ID NO: 1312872 - DNA, 15 bp, Homo sapiens
acaaacatggttttc

SEQ ID NO: 1312873 - DNA, 15 bp, Homo sapiens
aacaaacatggtttt

SEQ ID NO: 1312874 - DNA, 15 bp, Homo sapiens
taacaaacatggttt

SEQ ID NO: 1312875 - DNA, 15 bp, Homo sapiens
ataacaaacatggtt

SEQ ID NO: 1312876 - DNA, 15 bp, Homo sapiens
gataacaaacatggt

SEQ ID NO: 1312877 - DNA, 15 bp, Homo sapiens
agataacaaacatgg

SEQ ID NO: 1312878 - DNA, 15 bp, Homo sapiens
cagataacaaacatg

SEQ ID NO: 1312879 - DNA, 15 bp, Homo sapiens
acagataacaaacat

SEQ ID NO: 1312880 - DNA, 15 bp, Homo sapiens
aacagataacaaaca

SEQ ID NO: 1312881 - DNA, 15 bp, Homo sapiens
taacagataacaaac

SEQ ID NO: 1312882 - DNA, 15 bp, Homo sapiens
ataacagataacaaa

SEQ ID NO: 1312883 - DNA, 15 bp, Homo sapiens
cataacagataacaa

SEQ ID NO: 1312884 - DNA, 15 bp, Homo sapiens
acataacagataaca

SEQ ID NO: 1312885 - DNA, 15 bp, Homo sapiens
tacataacagataac

SEQ ID NO: 1312886 - DNA, 15 bp, Homo sapiens
atacataacagataa

SEQ ID NO: 1312887 - DNA, 15 bp, Homo sapiens
aatacataacagata

SEQ ID NO: 1312888 - DNA, 15 bp, Homo sapiens
caatacataacagat

SEQ ID NO: 1312889 - DNA, 15 bp, Homo sapiens
gcaatacataacaga

SEQ ID NO: 1312890 - DNA, 15 bp, Homo sapiens
agcaatacataacag

SEQ ID NO: 1312891 - DNA, 15 bp, Homo sapiens
aagcaatacataaca

SEQ ID NO: 1312892 - DNA, 15 bp, Homo sapiens
aaagcaatacataac

SEQ ID NO: 1312893 - DNA, 15 bp, Homo sapiens
taaagcaatacataa

SEQ ID NO: 1312894 - DNA, 15 bp, Homo sapiens
ataaagcaatacata

SEQ ID NO: 1312895 - DNA, 15 bp, Homo sapiens
cataaagcaatacat

SEQ ID NO: 1312896 - DNA, 15 bp, Homo sapiens
tcataaagcaataca

SEQ ID NO: 1312897 - DNA, 15 bp, Homo sapiens
ttcataaagcaatac

SEQ ID NO: 1312898 - DNA, 15 bp, Homo sapiens
cttcataaagcaata

SEQ ID NO: 1312899 - DNA, 15 bp, Homo sapiens
tcttcataaagcaat

SEQ ID NO: 1312900 - DNA, 15 bp, Homo sapiens
ttcttcataaagcaa

SEQ ID NO: 1312901 - DNA, 15 bp, Homo sapiens
attcttcataaagca

SEQ ID NO: 1312902 - DNA, 15 bp, Homo sapiens
gattcttcataaagc

SEQ ID NO: 1312903 - DNA, 15 bp, Homo sapiens
agattcttcataaag

SEQ ID NO: 1312904 - DNA, 15 bp, Homo sapiens
aagattcttcataaa

SEQ ID NO: 1312905 - DNA, 15 bp, Homo sapiens
taagattcttcataa

SEQ ID NO: 1312906 - DNA, 15 bp, Homo sapiens
gtaagattcttcata

SEQ ID NO: 1312907 - DNA, 15 bp, Homo sapiens
tgtaagattcttcat

SEQ ID NO: 1312908 - DNA, 15 bp, Homo sapiens
ttgtaagattcttca

SEQ ID NO: 1312909 - DNA, 15 bp, Homo sapiens
tttgtaagattcttc

SEQ ID NO: 1312910 - DNA, 15 bp, Homo sapiens
ttttgtaagattctt

SEQ ID NO: 1312911 - DNA, 15 bp, Homo sapiens
gttttgtaagattct

SEQ ID NO: 1312912 - DNA, 15 bp, Homo sapiens
agttttgtaagattc

SEQ ID NO: 1312913 - DNA, 15 bp, Homo sapiens
aagttttgtaagatt

SEQ ID NO: 1312914 - DNA, 15 bp, Homo sapiens
aaagttttgtaagat

SEQ ID NO: 1312915 - DNA, 15 bp, Homo sapiens
aaaagttttgtaaga

SEQ ID NO: 1312916 - DNA, 15 bp, Homo sapiens
caaaagttttgtaag

SEQ ID NO: 1312917 - DNA, 15 bp, Homo sapiens
tcaaaagttttgtaa

SEQ ID NO: 1312918 - DNA, 15 bp, Homo sapiens
atcaaaagttttgta

SEQ ID NO: 1312919 - DNA, 15 bp, Homo sapiens
aatcaaaagttttgt

SEQ ID NO: 1312920 - DNA, 15 bp, Homo sapiens
gaatcaaaagttttg

SEQ ID NO: 1312921 - DNA, 15 bp, Homo sapiens
tgaatcaaaagtttt

SEQ ID NO: 1312922 - DNA, 15 bp, Homo sapiens
atgaatcaaaagttt

SEQ ID NO: 1312923 - DNA, 15 bp, Homo sapiens
aatgaatcaaaagtt

SEQ ID NO: 1312924 - DNA, 15 bp, Homo sapiens
aaatgaatcaaaagt

SEQ ID NO: 1312925 - DNA, 15 bp, Homo sapiens
taaatgaatcaaaag

SEQ ID NO: 1312926 - DNA, 15 bp, Homo sapiens
agataaatgaatcaa

SEQ ID NO: 1312927 - DNA, 15 bp, Homo sapiens
aagataaatgaatca

SEQ ID NO: 1312928 - DNA, 15 bp, Homo sapiens
gaagataaatgaatc

SEQ ID NO: 1312929 - DNA, 15 bp, Homo sapiens
ggaagataaatgaat

SEQ ID NO: 1312930 - DNA, 15 bp, Homo sapiens
aggaagataaatgaa

SEQ ID NO: 1312931 - DNA, 15 bp, Homo sapiens
caggaagataaatga

SEQ ID NO: 1312932 - DNA, 15 bp, Homo sapiens
acaggaagataaatg

SEQ ID NO: 1312933 - DNA, 15 bp, Homo sapiens
aacaggaagataaat

SEQ ID NO: 1312934 - DNA, 15 bp, Homo sapiens
caacaggaagataaa

SEQ ID NO: 1312935 - DNA, 15 bp, Homo sapiens
tcaacaggaagataa

SEQ ID NO: 1312936 - DNA, 15 bp, Homo sapiens
gtcaacaggaagata

SEQ ID NO: 1312937 - DNA, 15 bp, Homo sapiens
tgtcaacaggaagat

SEQ ID NO: 1312938 - DNA, 15 bp, Homo sapiens
ttgtcaacaggaaga

SEQ ID NO: 1312939 - DNA, 15 bp, Homo sapiens
cttgtcaacaggaag

SEQ ID NO: 1312940 - DNA, 15 bp, Homo sapiens
tcttgtcaacaggaa

SEQ ID NO: 1312941 - DNA, 15 bp, Homo sapiens
ctcttgtcaacagga

SEQ ID NO: 1312942 - DNA, 15 bp, Homo sapiens
tctcttgtcaacagg

SEQ ID NO: 1312943 - DNA, 15 bp, Homo sapiens
gtctcttgtcaacag

SEQ ID NO: 1312944 - DNA, 15 bp, Homo sapiens
tgtctcttgtcaaca

SEQ ID NO: 1312945 - DNA, 15 bp, Homo sapiens
gtgtctcttgtcaac

SEQ ID NO: 1312946 - DNA, 15 bp, Homo sapiens
ggtgtctcttgtcaa

SEQ ID NO: 1312947 - DNA, 15 bp, Homo sapiens
tggtgtctcttgtca

SEQ ID NO: 1312948 - DNA, 15 bp, Homo sapiens
ttggtgtctcttgtc

SEQ ID NO: 1312949 - DNA, 15 bp, Homo sapiens
tttggtgtctcttgt

SEQ ID NO: 1312950 - DNA, 15 bp, Homo sapiens
ttttggtgtctcttg

SEQ ID NO: 1312951 - DNA, 15 bp, Homo sapiens
tttttggtgtctctt

SEQ ID NO: 1312952 - DNA, 15 bp, Homo sapiens
ctttttggtgtctct

SEQ ID NO: 1312953 - DNA, 15 bp, Homo sapiens
actttttggtgtctc

SEQ ID NO: 1312954 - DNA, 15 bp, Homo sapiens
aactttttggtgtct

SEQ ID NO: 1312955 - DNA, 15 bp, Homo sapiens
aaactttttggtgtc

SEQ ID NO: 1312956 - DNA, 15 bp, Homo sapiens
gaaactttttggtgt

SEQ ID NO: 1312957 - DNA, 15 bp, Homo sapiens
agaaactttttggtg

SEQ ID NO: 1312958 - DNA, 15 bp, Homo sapiens
aagaaactttttggt

SEQ ID NO: 1312959 - DNA, 15 bp, Homo sapiens
aaagaaactttttgg

SEQ ID NO: 1312960 - DNA, 15 bp, Homo sapiens
taaagaaactttttg

SEQ ID NO: 1312961 - DNA, 15 bp, Homo sapiens
ataaagaaacttttt

SEQ ID NO: 1312962 - DNA, 15 bp, Homo sapiens
cataaagaaactttt

SEQ ID NO: 1312963 - DNA, 15 bp, Homo sapiens
tcataaagaaacttt

SEQ ID NO: 1312964 - DNA, 15 bp, Homo sapiens
ttcataaagaaactt

SEQ ID NO: 1312965 - DNA, 15 bp, Homo sapiens
gttcataaagaaact

SEQ ID NO: 1312966 - DNA, 15 bp, Homo sapiens
tgttcataaagaaac

SEQ ID NO: 1312967 - DNA, 15 bp, Homo sapiens
atgttcataaagaaa

SEQ ID NO: 1312968 - DNA, 15 bp, Homo sapiens
tatgttcataaagaa

SEQ ID NO: 1312969 - DNA, 15 bp, Homo sapiens
ctatgttcataaaga

SEQ ID NO: 1312970 - DNA, 15 bp, Homo sapiens
actatgttcataaag

SEQ ID NO: 1312971 - DNA, 15 bp, Homo sapiens
tactatgttcataaa

SEQ ID NO: 1312972 - DNA, 15 bp, Homo sapiens
ttactatgttcataa

SEQ ID NO: 1312973 - DNA, 15 bp, Homo sapiens
attactatgttcata

SEQ ID NO: 1312974 - DNA, 15 bp, Homo sapiens
tattactatgttcat

SEQ ID NO: 1312975 - DNA, 15 bp, Homo sapiens
ttattactatgttca

SEQ ID NO: 1312976 - DNA, 15 bp, Homo sapiens
gttattactatgttc

SEQ ID NO: 1312977 - DNA, 15 bp, Homo sapiens
tgttattactatgtt

SEQ ID NO: 1312978 - DNA, 15 bp, Homo sapiens
ttgttattactatgt

SEQ ID NO: 1312979 - DNA, 15 bp, Homo sapiens
gttgttattactatg

SEQ ID NO: 1312980 - DNA, 15 bp, Homo sapiens
agttgttattactat

SEQ ID NO: 1312981 - DNA, 15 bp, Homo sapiens
tagttgttattacta

SEQ ID NO: 1312982 - DNA, 15 bp, Homo sapiens
atagttgttattact

SEQ ID NO: 1312983 - DNA, 15 bp, Homo sapiens
aatagttgttattac

SEQ ID NO: 1312984 - DNA, 15 bp, Homo sapiens
aaatagttgttatta

SEQ ID NO: 1312985 - DNA, 15 bp, Homo sapiens
taaatagttgttatt

SEQ ID NO: 1312986 - DNA, 15 bp, Homo sapiens
ttaaatagttgttat

SEQ ID NO: 1312987 - DNA, 15 bp, Homo sapiens
attaaatagttgtta

SEQ ID NO: 1312988 - DNA, 15 bp, Homo sapiens
cattaaatagttgtt

SEQ ID NO: 1312989 - DNA, 15 bp, Homo sapiens
tcattaaatagttgt

SEQ ID NO: 1312990 - DNA, 15 bp, Homo sapiens
gtcattaaatagttg

SEQ ID NO: 1312991 - DNA, 15 bp, Homo sapiens
agtcattaaatagtt

SEQ ID NO: 1312992 - DNA, 15 bp, Homo sapiens
cagtcattaaatagt

SEQ ID NO: 1312993 - DNA, 15 bp, Homo sapiens
acagtcattaaatag

SEQ ID NO: 1312994 - DNA, 15 bp, Homo sapiens
aacagtcattaaata

SEQ ID NO: 1312995 - DNA, 15 bp, Homo sapiens
aaacagtcattaaat

SEQ ID NO: 1312996 - DNA, 15 bp, Homo sapiens
aaaacagtcattaaa

SEQ ID NO: 1312997 - DNA, 15 bp, Homo sapiens
taaaacagtcattaa

SEQ ID NO: 1312998 - DNA, 15 bp, Homo sapiens
ataaaacagtcatta

SEQ ID NO: 1312999 - DNA, 15 bp, Homo sapiens
aataaaacagtcatt

SEQ ID NO: 1313000 - DNA, 15 bp, Homo sapiens
aaataaaacagtcat

SEQ ID NO: 1313001 - DNA, 15 bp, Homo sapiens
caaataaaacagtca

SEQ ID NO: 1313002 - DNA, 15 bp, Homo sapiens
gcaaataaaacagtc

SEQ ID NO: 1313003 - DNA, 15 bp, Homo sapiens
tgcaaataaaacagt

SEQ ID NO: 1313004 - DNA, 15 bp, Homo sapiens
atgcaaataaaacag

SEQ ID NO: 1313005 - DNA, 15 bp, Homo sapiens
aatgcaaataaaaca

SEQ ID NO: 1313006 - DNA, 15 bp, Homo sapiens
aaatgcaaataaaac

SEQ ID NO: 1313007 - DNA, 15 bp, Homo sapiens
ttaaaatgcaaataa

SEQ ID NO: 1313008 - DNA, 15 bp, Homo sapiens
tttaaaatgcaaata

SEQ ID NO: 1313009 - DNA, 15 bp, Homo sapiens
ctttaaaatgcaaat

SEQ ID NO: 1313010 - DNA, 15 bp, Homo sapiens
actttaaaatgcaaa

SEQ ID NO: 1313011 - DNA, 15 bp, Homo sapiens
aactttaaaatgcaa

SEQ ID NO: 1313012 - DNA, 15 bp, Homo sapiens
taactttaaaatgca

SEQ ID NO: 1313013 - DNA, 15 bp, Homo sapiens
ataactttaaaatgc

SEQ ID NO: 1313014 - DNA, 15 bp, Homo sapiens
tataactttaaaatg

SEQ ID NO: 1313015 - DNA, 15 bp, Homo sapiens
atataactttaaaat

SEQ ID NO: 1313016 - DNA, 15 bp, Homo sapiens
aatataactttaaaa

SEQ ID NO: 1313017 - DNA, 15 bp, Homo sapiens
gaatataactttaaa

SEQ ID NO: 1313018 - DNA, 15 bp, Homo sapiens
tgaatataactttaa

SEQ ID NO: 1313019 - DNA, 15 bp, Homo sapiens
atgaatataacttta

SEQ ID NO: 1313020 - DNA, 15 bp, Homo sapiens
catgaatataacttt

SEQ ID NO: 1313021 - DNA, 15 bp, Homo sapiens
acatgaatataactt

SEQ ID NO: 1313022 - DNA, 15 bp, Homo sapiens
aacatgaatataact

SEQ ID NO: 1313023 - DNA, 15 bp, Homo sapiens
aaacatgaatataac

SEQ ID NO: 1313024 - DNA, 15 bp, Homo sapiens
aaaacatgaatataa

SEQ ID NO: 1313025 - DNA, 15 bp, Homo sapiens
taaaacatgaatata

SEQ ID NO: 1313026 - DNA, 15 bp, Homo sapiens
ataaaacatgaatat

SEQ ID NO: 1313027 - DNA, 15 bp, Homo sapiens
cataaaacatgaata

SEQ ID NO: 1313028 - DNA, 15 bp, Homo sapiens
tcataaaacatgaat

SEQ ID NO: 1313029 - DNA, 15 bp, Homo sapiens
atcataaaacatgaa

SEQ ID NO: 1313030 - DNA, 15 bp, Homo sapiens
gatcataaaacatga

SEQ ID NO: 1313031 - DNA, 15 bp, Homo sapiens
agatcataaaacatg

SEQ ID NO: 1313032 - DNA, 15 bp, Homo sapiens
aagatcataaaacat

SEQ ID NO: 1313033 - DNA, 15 bp, Homo sapiens
caagatcataaaaca

SEQ ID NO: 1313034 - DNA, 15 bp, Homo sapiens
gcaagatcataaaac

SEQ ID NO: 1313035 - DNA, 15 bp, Homo sapiens
ggcaagatcataaaa

SEQ ID NO: 1313036 - DNA, 15 bp, Homo sapiens
aggcaagatcataaa

SEQ ID NO: 1313037 - DNA, 15 bp, Homo sapiens
aaggcaagatcataa

SEQ ID NO: 1313038 - DNA, 15 bp, Homo sapiens
taaggcaagatcata

SEQ ID NO: 1313039 - DNA, 15 bp, Homo sapiens
ttaaggcaagatcat

SEQ ID NO: 1313040 - DNA, 15 bp, Homo sapiens
cttaaggcaagatca

SEQ ID NO: 1313041 - DNA, 15 bp, Homo sapiens
acttaaggcaagatc

SEQ ID NO: 1313042 - DNA, 15 bp, Homo sapiens
aacttaaggcaagat

SEQ ID NO: 1313043 - DNA, 15 bp, Homo sapiens
caacttaaggcaaga

SEQ ID NO: 1313044 - DNA, 15 bp, Homo sapiens
tcaacttaaggcaag

SEQ ID NO: 1313045 - DNA, 15 bp, Homo sapiens
ctcaacttaaggcaa

SEQ ID NO: 1313046 - DNA, 15 bp, Homo sapiens
tctcaacttaaggca

SEQ ID NO: 1313047 - DNA, 15 bp, Homo sapiens
atctcaacttaaggc

SEQ ID NO: 1313048 - DNA, 15 bp, Homo sapiens
gatctcaacttaagg

SEQ ID NO: 1313049 - DNA, 15 bp, Homo sapiens
agatctcaacttaag

SEQ ID NO: 1313050 - DNA, 15 bp, Homo sapiens
aagatctcaacttaa

SEQ ID NO: 1313051 - DNA, 15 bp, Homo sapiens
aaagatctcaactta

SEQ ID NO: 1313052 - DNA, 15 bp, Homo sapiens
taaagatctcaactt

SEQ ID NO: 1313053 - DNA, 15 bp, Homo sapiens
ttaaagatctcaact

SEQ ID NO: 1313054 - DNA, 15 bp, Homo sapiens
cttaaagatctcaac

SEQ ID NO: 1313055 - DNA, 15 bp, Homo sapiens
gcttaaagatctcaa

SEQ ID NO: 1313056 - DNA, 15 bp, Homo sapiens
agcttaaagatctca

SEQ ID NO: 1313057 - DNA, 15 bp, Homo sapiens
cagcttaaagatctc

SEQ ID NO: 1313058 - DNA, 15 bp, Homo sapiens
tcagcttaaagatct

SEQ ID NO: 1313059 - DNA, 15 bp, Homo sapiens
ctcagcttaaagatc

SEQ ID NO: 1313060 - DNA, 15 bp, Homo sapiens
cctcagcttaaagat

SEQ ID NO: 1313061 - DNA, 15 bp, Homo sapiens
tcctcagcttaaaga

SEQ ID NO: 1313062 - DNA, 15 bp, Homo sapiens
ctcctcagcttaaag

SEQ ID NO: 1313063 - DNA, 15 bp, Homo sapiens
tctcctcagcttaaa

SEQ ID NO: 1313064 - DNA, 15 bp, Homo sapiens
ctctcctcagcttaa

SEQ ID NO: 1313065 - DNA, 15 bp, Homo sapiens
actctcctcagctta

SEQ ID NO: 1313066 - DNA, 15 bp, Homo sapiens
aactctcctcagctt

SEQ ID NO: 1313067 - DNA, 15 bp, Homo sapiens
gaactctcctcagct

SEQ ID NO: 1313068 - DNA, 15 bp, Homo sapiens
agaactctcctcagc

SEQ ID NO: 1313069 - DNA, 15 bp, Homo sapiens
cagaactctcctcag

SEQ ID NO: 1313070 - DNA, 15 bp, Homo sapiens
tcagaactctcctca

SEQ ID NO: 1313071 - DNA, 15 bp, Homo sapiens
ctcagaactctcctc

SEQ ID NO: 1313072 - DNA, 15 bp, Homo sapiens
tctcagaactctcct

SEQ ID NO: 1313073 - DNA, 15 bp, Homo sapiens
ttctcagaactctcc

SEQ ID NO: 1313074 - DNA, 15 bp, Homo sapiens
tttctcagaactctc

SEQ ID NO: 1313075 - DNA, 15 bp, Homo sapiens
atttctcagaactct

SEQ ID NO: 1313076 - DNA, 15 bp, Homo sapiens
gatttctcagaactc

SEQ ID NO: 1313077 - DNA, 15 bp, Homo sapiens
agatttctcagaact

SEQ ID NO: 1313078 - DNA, 15 bp, Homo sapiens
gagatttctcagaac

SEQ ID NO: 1313079 - DNA, 15 bp, Homo sapiens
tgagatttctcagaa

SEQ ID NO: 1313080 - DNA, 15 bp, Homo sapiens
ttgagatttctcaga

SEQ ID NO: 1313081 - DNA, 15 bp, Homo sapiens
tttgagatttctcag

SEQ ID NO: 1313082 - DNA, 15 bp, Homo sapiens
ctttgagatttctca

SEQ ID NO: 1313083 - DNA, 15 bp, Homo sapiens
actttgagatttctc

SEQ ID NO: 1313084 - DNA, 15 bp, Homo sapiens
aactttgagatttct

SEQ ID NO: 1313085 - DNA, 15 bp, Homo sapiens
taactttgagatttc

SEQ ID NO: 1313086 - DNA, 15 bp, Homo sapiens
ataactttgagattt

SEQ ID NO: 1313087 - DNA, 15 bp, Homo sapiens
tataactttgagatt

SEQ ID NO: 1313088 - DNA, 15 bp, Homo sapiens
gtataactttgagat

SEQ ID NO: 1313089 - DNA, 15 bp, Homo sapiens
tgtataactttgaga

SEQ ID NO: 1313090 - DNA, 15 bp, Homo sapiens
ttgtataactttgag

SEQ ID NO: 1313091 - DNA, 15 bp, Homo sapiens
attgtataactttga

SEQ ID NO: 1313092 - DNA, 15 bp, Homo sapiens
aattgtataactttg

SEQ ID NO: 1313093 - DNA, 15 bp, Homo sapiens
gaattgtataacttt

SEQ ID NO: 1313094 - DNA, 15 bp, Homo sapiens
agaattgtataactt

SEQ ID NO: 1313095 - DNA, 15 bp, Homo sapiens
gagaattgtataact

SEQ ID NO: 1313096 - DNA, 15 bp, Homo sapiens
ggagaattgtataac

SEQ ID NO: 1313097 - DNA, 15 bp, Homo sapiens
tggagaattgtataa

SEQ ID NO: 1313098 - DNA, 15 bp, Homo sapiens
gtggagaattgtata

SEQ ID NO: 1313099 - DNA, 15 bp, Homo sapiens
ggtggagaattgtat

SEQ ID NO: 1313100 - DNA, 15 bp, Homo sapiens
gggtggagaattgta

SEQ ID NO: 1313101 - DNA, 15 bp, Homo sapiens
ggggtggagaattgt

SEQ ID NO: 1313102 - DNA, 15 bp, Homo sapiens
aggggtggagaattg

SEQ ID NO: 1313103 - DNA, 15 bp, Homo sapiens
aaggggtggagaatt

SEQ ID NO: 1313104 - DNA, 15 bp, Homo sapiens
aaaggggtggagaat

SEQ ID NO: 1313105 - DNA, 15 bp, Homo sapiens
gaaaggggtggagaa

SEQ ID NO: 1313106 - DNA, 15 bp, Homo sapiens
ggaaaggggtggaga

SEQ ID NO: 1313107 - DNA, 15 bp, Homo sapiens
gggaaaggggtggag

SEQ ID NO: 1313108 - DNA, 15 bp, Homo sapiens
ggggaaaggggtgga

SEQ ID NO: 1313109 - DNA, 15 bp, Homo sapiens
gggggaaaggggtgg

SEQ ID NO: 1313110 - DNA, 15 bp, Homo sapiens
tgggggaaaggggtg

SEQ ID NO: 1313111 - DNA, 15 bp, Homo sapiens
ctgggggaaaggggt

SEQ ID NO: 1313112 - DNA, 15 bp, Homo sapiens
tctgggggaaagggg

SEQ ID NO: 1313113 - DNA, 15 bp, Homo sapiens
atctgggggaaaggg

SEQ ID NO: 1313114 - DNA, 15 bp, Homo sapiens
gatctgggggaaagg

SEQ ID NO: 1313115 - DNA, 15 bp, Homo sapiens
tgatctgggggaaag

SEQ ID NO: 1313116 - DNA, 15 bp, Homo sapiens
ctgatctgggggaaa

SEQ ID NO: 1313117 - DNA, 15 bp, Homo sapiens
actgatctgggggaa

SEQ ID NO: 1313118 - DNA, 15 bp, Homo sapiens
tactgatctggggga

SEQ ID NO: 1313119 - DNA, 15 bp, Homo sapiens
ctactgatctggggg

SEQ ID NO: 1313120 - DNA, 15 bp, Homo sapiens
tctactgatctgggg

SEQ ID NO: 1313121 - DNA, 15 bp, Homo sapiens
atctactgatctggg

SEQ ID NO: 1313122 - DNA, 15 bp, Homo sapiens
aatctactgatctgg

SEQ ID NO: 1313123 - DNA, 15 bp, Homo sapiens
caatctactgatctg

SEQ ID NO: 1313124 - DNA, 15 bp, Homo sapiens
ccaatctactgatct

SEQ ID NO: 1313125 - DNA, 15 bp, Homo sapiens
accaatctactgatc

SEQ ID NO: 1313126 - DNA, 15 bp, Homo sapiens
taccaatctactgat

SEQ ID NO: 1313127 - DNA, 15 bp, Homo sapiens
ctaccaatctactga

SEQ ID NO: 1313128 - DNA, 15 bp, Homo sapiens
actaccaatctactg

SEQ ID NO: 1313129 - DNA, 15 bp, Homo sapiens
aactaccaatctact

SEQ ID NO: 1313130 - DNA, 15 bp, Homo sapiens
caactaccaatctac

SEQ ID NO: 1313131 - DNA, 15 bp, Homo sapiens
gcaactaccaatcta

SEQ ID NO: 1313132 - DNA, 15 bp, Homo sapiens
agcaactaccaatct

SEQ ID NO: 1313133 - DNA, 15 bp, Homo sapiens
aagcaactaccaatc

SEQ ID NO: 1313134 - DNA, 15 bp, Homo sapiens
gaagcaactaccaat

SEQ ID NO: 1313135 - DNA, 15 bp, Homo sapiens
agaagcaactaccaa

SEQ ID NO: 1313136 - DNA, 15 bp, Homo sapiens
gagaagcaactacca

SEQ ID NO: 1313137 - DNA, 15 bp, Homo sapiens
tgagaagcaactacc

SEQ ID NO: 1313138 - DNA, 15 bp, Homo sapiens
ttgagaagcaactac

SEQ ID NO: 1313139 - DNA, 15 bp, Homo sapiens
gttgagaagcaacta

SEQ ID NO: 1313140 - DNA, 15 bp, Homo sapiens
agttgagaagcaact

SEQ ID NO: 1313141 - DNA, 15 bp, Homo sapiens
gagttgagaagcaac

SEQ ID NO: 1313142 - DNA, 15 bp, Homo sapiens
tgagttgagaagcaa

SEQ ID NO: 1313143 - DNA, 15 bp, Homo sapiens
ctgagttgagaagca

SEQ ID NO: 1313144 - DNA, 15 bp, Homo sapiens
actgagttgagaagc

SEQ ID NO: 1313145 - DNA, 15 bp, Homo sapiens
tactgagttgagaag

SEQ ID NO: 1313146 - DNA, 15 bp, Homo sapiens
atactgagttgagaa

SEQ ID NO: 1313147 - DNA, 15 bp, Homo sapiens
catactgagttgaga

SEQ ID NO: 1313148 - DNA, 15 bp, Homo sapiens
acatactgagttgag

SEQ ID NO: 1313149 - DNA, 15 bp, Homo sapiens
aacatactgagttga

SEQ ID NO: 1313150 - DNA, 15 bp, Homo sapiens
aaacatactgagttg

SEQ ID NO: 1313151 - DNA, 15 bp, Homo sapiens
taaacatactgagtt

SEQ ID NO: 1313152 - DNA, 15 bp, Homo sapiens
ttaaacatactgagt

SEQ ID NO: 1313153 - DNA, 15 bp, Homo sapiens
cttaaacatactgag

SEQ ID NO: 1313154 - DNA, 15 bp, Homo sapiens
tcttaaacatactga

SEQ ID NO: 1313155 - DNA, 15 bp, Homo sapiens
ttcttaaacatactg

SEQ ID NO: 1313156 - DNA, 15 bp, Homo sapiens
tttcttaaacatact

SEQ ID NO: 1313157 - DNA, 15 bp, Homo sapiens
ctttcttaaacatac

SEQ ID NO: 1313158 - DNA, 15 bp, Homo sapiens
tctttcttaaacata

SEQ ID NO: 1313159 - DNA, 15 bp, Homo sapiens
ctctttcttaaacat

SEQ ID NO: 1313160 - DNA, 15 bp, Homo sapiens
actctttcttaaaca

SEQ ID NO: 1313161 - DNA, 15 bp, Homo sapiens
cactctttcttaaac

SEQ ID NO: 1313162 - DNA, 15 bp, Homo sapiens
acactctttcttaaa

SEQ ID NO: 1313163 - DNA, 15 bp, Homo sapiens
tacactctttcttaa

SEQ ID NO: 1313164 - DNA, 15 bp, Homo sapiens
atacactctttctta

SEQ ID NO: 1313165 - DNA, 15 bp, Homo sapiens
aatacactctttctt

SEQ ID NO: 1313166 - DNA, 15 bp, Homo sapiens
aaatacactctttct

SEQ ID NO: 1313167 - DNA, 15 bp, Homo sapiens
aaaatacactctttc

SEQ ID NO: 1313168 - DNA, 15 bp, Homo sapiens
aaaaatacactcttt

SEQ ID NO: 1313169 - DNA, 15 bp, Homo sapiens
taaaaatacactctt

SEQ ID NO: 1313170 - DNA, 15 bp, Homo sapiens
ataaaaatacactct

SEQ ID NO: 1313171 - DNA, 15 bp, Homo sapiens
aataaaaatacactc

SEQ ID NO: 1313172 - DNA, 15 bp, Homo sapiens
aaataaaaatacact

SEQ ID NO: 1313173 - DNA, 15 bp, Homo sapiens
taaataaaaatacac

SEQ ID NO: 1313174 - DNA, 15 bp, Homo sapiens
gtaaataaaaataca

SEQ ID NO: 1313175 - DNA, 15 bp, Homo sapiens
agtaaataaaaatac

SEQ ID NO: 1313176 - DNA, 15 bp, Homo sapiens
cagtaaataaaaata

SEQ ID NO: 1313177 - DNA, 15 bp, Homo sapiens
tcagtaaataaaaat

SEQ ID NO: 1313178 - DNA, 15 bp, Homo sapiens
ttcagtaaataaaaa

SEQ ID NO: 1313179 - DNA, 15 bp, Homo sapiens
cttcagtaaataaaa

SEQ ID NO: 1313180 - DNA, 15 bp, Homo sapiens
acttcagtaaataaa

SEQ ID NO: 1313181 - DNA, 15 bp, Homo sapiens
cacttcagtaaataa

SEQ ID NO: 1313182 - DNA, 15 bp, Homo sapiens
acacttcagtaaata

SEQ ID NO: 1313183 - DNA, 15 bp, Homo sapiens
tacacttcagtaaat

SEQ ID NO: 1313184 - DNA, 15 bp, Homo sapiens
ttacacttcagtaaa

SEQ ID NO: 1313185 - DNA, 15 bp, Homo sapiens
attacacttcagtaa

SEQ ID NO: 1313186 - DNA, 15 bp, Homo sapiens
tattacacttcagta

SEQ ID NO: 1313187 - DNA, 15 bp, Homo sapiens
atattacacttcagt

SEQ ID NO: 1313188 - DNA, 15 bp, Homo sapiens
gatattacacttcag

SEQ ID NO: 1313189 - DNA, 15 bp, Homo sapiens
tgatattacacttca

SEQ ID NO: 1313190 - DNA, 15 bp, Homo sapiens
ttgatattacacttc

SEQ ID NO: 1313191 - DNA, 15 bp, Homo sapiens
tttgatattacactt

SEQ ID NO: 1313192 - DNA, 15 bp, Homo sapiens
atttgatattacact

SEQ ID NO: 1313193 - DNA, 15 bp, Homo sapiens
tatttgatattacac

SEQ ID NO: 1313194 - DNA, 15 bp, Homo sapiens
ttatttgatattaca

SEQ ID NO: 1313195 - DNA, 15 bp, Homo sapiens
tttatttgatattac

SEQ ID NO: 1313196 - DNA, 15 bp, Homo sapiens
ctttatttgatatta

SEQ ID NO: 1313197 - DNA, 15 bp, Homo sapiens
cctttatttgatatt

SEQ ID NO: 1313198 - DNA, 15 bp, Homo sapiens
tcctttatttgatat

SEQ ID NO: 1313199 - DNA, 15 bp, Homo sapiens
ttcctttatttgata

SEQ ID NO: 1313200 - DNA, 15 bp, Homo sapiens
attcctttatttgat

SEQ ID NO: 1313201 - DNA, 15 bp, Homo sapiens
aattcctttatttga

SEQ ID NO: 1313202 - DNA, 15 bp, Homo sapiens
aaattcctttatttg

SEQ ID NO: 1313203 - DNA, 15 bp, Homo sapiens
gaaattcctttattt

SEQ ID NO: 1313204 - DNA, 15 bp, Homo sapiens
tgaaattcctttatt

SEQ ID NO: 1313205 - DNA, 15 bp, Homo sapiens
ctgaaattcctttat

SEQ ID NO: 1313206 - DNA, 15 bp, Homo sapiens
cctgaaattccttta

SEQ ID NO: 1313207 - DNA, 15 bp, Homo sapiens
acctgaaattccttt

SEQ ID NO: 1313208 - DNA, 15 bp, Homo sapiens
gacctgaaattcctt

SEQ ID NO: 1313209 - DNA, 15 bp, Homo sapiens
tgacctgaaattcct

SEQ ID NO: 1313210 - DNA, 15 bp, Homo sapiens
ttgacctgaaattcc

SEQ ID NO: 1313211 - DNA, 15 bp, Homo sapiens
attgacctgaaattc

SEQ ID NO: 1313212 - DNA, 15 bp, Homo sapiens
cattgacctgaaatt

SEQ ID NO: 1313213 - DNA, 15 bp, Homo sapiens
ccattgacctgaaat

SEQ ID NO: 1313214 - DNA, 15 bp, Homo sapiens
tccattgacctgaaa

SEQ ID NO: 1313215 - DNA, 15 bp, Homo sapiens
ttccattgacctgaa

SEQ ID NO: 1313216 - DNA, 15 bp, Homo sapiens
cttccattgacctga

SEQ ID NO: 1313217 - DNA, 15 bp, Homo sapiens
tcttccattgacctg

SEQ ID NO: 1313218 - DNA, 15 bp, Homo sapiens
ttcttccattgacct

SEQ ID NO: 1313219 - DNA, 15 bp, Homo sapiens
tttcttccattgacc

SEQ ID NO: 1313220 - DNA, 15 bp, Homo sapiens
ttttcttccattgac

SEQ ID NO: 1313221 - DNA, 15 bp, Homo sapiens
gttttcttccattga

SEQ ID NO: 1313222 - DNA, 15 bp, Homo sapiens
tgttttcttccattg

SEQ ID NO: 1313223 - DNA, 15 bp, Homo sapiens
gtgttttcttccatt

SEQ ID NO: 1313224 - DNA, 15 bp, Homo sapiens
tgtgttttcttccat

SEQ ID NO: 1313225 - DNA, 15 bp, Homo sapiens
atgtgttttcttcca

SEQ ID NO: 1313226 - DNA, 15 bp, Homo sapiens
aatgtgttttcttcc

SEQ ID NO: 1313227 - DNA, 15 bp, Homo sapiens
aaatgtgttttcttc

SEQ ID NO: 1313228 - DNA, 15 bp, Homo sapiens
taaatgtgttttctt

SEQ ID NO: 1313229 - DNA, 15 bp, Homo sapiens
ataaatgtgttttct

SEQ ID NO: 1313230 - DNA, 15 bp, Homo sapiens
tataaatgtgttttc

SEQ ID NO: 1313231 - DNA, 15 bp, Homo sapiens
atataaatgtgtttt

SEQ ID NO: 1313232 - DNA, 15 bp, Homo sapiens
aatataaatgtgttt

SEQ ID NO: 1313233 - DNA, 15 bp, Homo sapiens
taatataaatgtgtt

SEQ ID NO: 1313234 - DNA, 15 bp, Homo sapiens
ataatataaatgtgt

SEQ ID NO: 1313235 - DNA, 15 bp, Homo sapiens
cataatataaatgtg

SEQ ID NO: 1313236 - DNA, 15 bp, Homo sapiens
acataatataaatgt

SEQ ID NO: 1313237 - DNA, 15 bp, Homo sapiens
tacataatataaatg

SEQ ID NO: 1313238 - DNA, 15 bp, Homo sapiens
atacataatataaat

SEQ ID NO: 1313239 - DNA, 15 bp, Homo sapiens
tatacataatataaa

SEQ ID NO: 1313240 - DNA, 15 bp, Homo sapiens
atatacataatataa

SEQ ID NO: 1313241 - DNA, 15 bp, Homo sapiens
tatatacataatata

SEQ ID NO: 1313242 - DNA, 15 bp, Homo sapiens
atatatacataatat

SEQ ID NO: 1313243 - DNA, 15 bp, Homo sapiens
aatatatacataata

SEQ ID NO: 1313244 - DNA, 15 bp, Homo sapiens
aaatatatacataat

SEQ ID NO: 1313245 - DNA, 15 bp, Homo sapiens
gaaatatatacataa

SEQ ID NO: 1313246 - DNA, 15 bp, Homo sapiens
agaaatatatacata

SEQ ID NO: 1313247 - DNA, 15 bp, Homo sapiens
gagaaatatatacat

SEQ ID NO: 1313248 - DNA, 15 bp, Homo sapiens
agagaaatatataca

SEQ ID NO: 1313249 - DNA, 15 bp, Homo sapiens
aagagaaatatatac

SEQ ID NO: 1313250 - DNA, 15 bp, Homo sapiens
caagagaaatatata

SEQ ID NO: 1313251 - DNA, 15 bp, Homo sapiens
ccaagagaaatatat

SEQ ID NO: 1313252 - DNA, 15 bp, Homo sapiens
cccaagagaaatata

SEQ ID NO: 1313253 - DNA, 15 bp, Homo sapiens
tcccaagagaaatat

SEQ ID NO: 1313254 - DNA, 15 bp, Homo sapiens
atcccaagagaaata

SEQ ID NO: 1313255 - DNA, 15 bp, Homo sapiens
tatcccaagagaaat

SEQ ID NO: 1313256 - DNA, 15 bp, Homo sapiens
atatcccaagagaaa

SEQ ID NO: 1313257 - DNA, 15 bp, Homo sapiens
tatatcccaagagaa

SEQ ID NO: 1313258 - DNA, 15 bp, Homo sapiens
ttatatcccaagaga

SEQ ID NO: 1313259 - DNA, 15 bp, Homo sapiens
tttatatcccaagag

SEQ ID NO: 1313260 - DNA, 15 bp, Homo sapiens
ctttatatcccaaga

SEQ ID NO: 1313261 - DNA, 15 bp, Homo sapiens
cctttatatcccaag

SEQ ID NO: 1313262 - DNA, 15 bp, Homo sapiens
tcctttatatcccaa

SEQ ID NO: 1313263 - DNA, 15 bp, Homo sapiens
gtcctttatatccca

SEQ ID NO: 1313264 - DNA, 15 bp, Homo sapiens
ggtcctttatatccc

SEQ ID NO: 1313265 - DNA, 15 bp, Homo sapiens
tggtcctttatatcc

SEQ ID NO: 1313266 - DNA, 15 bp, Homo sapiens
atggtcctttatatc

SEQ ID NO: 1313267 - DNA, 15 bp, Homo sapiens
catggtcctttatat

SEQ ID NO: 1313268 - DNA, 15 bp, Homo sapiens
ccatggtcctttata

SEQ ID NO: 1313269 - DNA, 15 bp, Homo sapiens
accatggtcctttat

SEQ ID NO: 1313270 - DNA, 15 bp, Homo sapiens
aaccatggtccttta

SEQ ID NO: 1313271 - DNA, 15 bp, Homo sapiens
taaccatggtccttt

SEQ ID NO: 1313272 - DNA, 15 bp, Homo sapiens
ctaaccatggtcctt

SEQ ID NO: 1313273 - DNA, 15 bp, Homo sapiens
actaaccatggtcct

SEQ ID NO: 1313274 - DNA, 15 bp, Homo sapiens
tactaaccatggtcc

SEQ ID NO: 1313275 - DNA, 15 bp, Homo sapiens
atactaaccatggtc

SEQ ID NO: 1313276 - DNA, 15 bp, Homo sapiens
gatactaaccatggt

SEQ ID NO: 1313277 - DNA, 15 bp, Homo sapiens
agatactaaccatgg

SEQ ID NO: 1313278 - DNA, 15 bp, Homo sapiens
aagatactaaccatg

SEQ ID NO: 1313279 - DNA, 15 bp, Homo sapiens
gaagatactaaccat

SEQ ID NO: 1313280 - DNA, 15 bp, Homo sapiens
tgaagatactaacca

SEQ ID NO: 1313281 - DNA, 15 bp, Homo sapiens
gtgaagatactaacc

SEQ ID NO: 1313282 - DNA, 15 bp, Homo sapiens
agtgaagatactaac

SEQ ID NO: 1313283 - DNA, 15 bp, Homo sapiens
tagtgaagatactaa

SEQ ID NO: 1313284 - DNA, 15 bp, Homo sapiens
ctagtgaagatacta

SEQ ID NO: 1313285 - DNA, 15 bp, Homo sapiens
actagtgaagatact

SEQ ID NO: 1313286 - DNA, 15 bp, Homo sapiens
aactagtgaagatac

SEQ ID NO: 1313287 - DNA, 15 bp, Homo sapiens
aaactagtgaagata

SEQ ID NO: 1313288 - DNA, 15 bp, Homo sapiens
aaaactagtgaagat

SEQ ID NO: 1313289 - DNA, 15 bp, Homo sapiens
aaaaactagtgaaga

SEQ ID NO: 1313290 - DNA, 15 bp, Homo sapiens
aaaaaactagtgaag

SEQ ID NO: 1313291 - DNA, 15 bp, Homo sapiens
caaaaaactagtgaa

SEQ ID NO: 1313292 - DNA, 15 bp, Homo sapiens
ccaaaaaactagtga

SEQ ID NO: 1313293 - DNA, 15 bp, Homo sapiens
cccaaaaaactagtg

SEQ ID NO: 1313294 - DNA, 15 bp, Homo sapiens
acccaaaaaactagt

SEQ ID NO: 1313295 - DNA, 15 bp, Homo sapiens
aacccaaaaaactag

SEQ ID NO: 1313296 - DNA, 15 bp, Homo sapiens
aaacccaaaaaacta

SEQ ID NO: 1313297 - DNA, 15 bp, Homo sapiens
aaaacccaaaaaact

SEQ ID NO: 1313298 - DNA, 15 bp, Homo sapiens
aaaaacccaaaaaac

SEQ ID NO: 1313299 - DNA, 15 bp, Homo sapiens
aaaaaacccaaaaaa

SEQ ID NO: 1313300 - DNA, 15 bp, Homo sapiens
aaaaaaacccaaaaa

SEQ ID NO: 1313301 - DNA, 15 bp, Homo sapiens
aaaaaaaacccaaaa

SEQ ID NO: 1313302 - DNA, 15 bp, Homo sapiens
gaaaaaaaacccaaa

SEQ ID NO: 1313303 - DNA, 15 bp, Homo sapiens
agaaaaaaaacccaa

SEQ ID NO: 1313304 - DNA, 15 bp, Homo sapiens
aagaaaaaaaaccca

SEQ ID NO: 1313305 - DNA, 15 bp, Homo sapiens
aaagaaaaaaaaccc

SEQ ID NO: 1313306 - DNA, 15 bp, Homo sapiens
aaaagaaaaaaaacc

SEQ ID NO: 1313307 - DNA, 15 bp, Homo sapiens
gaaaagaaaaaaaac

SEQ ID NO: 1313308 - DNA, 15 bp, Homo sapiens
aaaagagaaaagaaa

SEQ ID NO: 1313309 - DNA, 15 bp, Homo sapiens
aaaaagagaaaagaa

SEQ ID NO: 1313310 - DNA, 15 bp, Homo sapiens
aaaaaagagaaaaga

SEQ ID NO: 1313311 - DNA, 15 bp, Homo sapiens
aaaaaaagagaaaag

SEQ ID NO: 1313312 - DNA, 15 bp, Homo sapiens
aaaaaaaagagaaaa

SEQ ID NO: 1313313 - DNA, 15 bp, Homo sapiens
aaaaaaaaagagaaa

SEQ ID NO: 1313314 - DNA, 15 bp, Homo sapiens
aaaaaaaaaagagaa

SEQ ID NO: 1313315 - DNA, 15 bp, Homo sapiens
tatctcaaaaaaaaa

SEQ ID NO: 1313316 - DNA, 15 bp, Homo sapiens
ctatctcaaaaaaaa

SEQ ID NO: 1313317 - DNA, 15 bp, Homo sapiens
cctatctcaaaaaaa

SEQ ID NO: 1313318 - DNA, 15 bp, Homo sapiens
tcctatctcaaaaaa

SEQ ID NO: 1313319 - DNA, 15 bp, Homo sapiens
atcctatctcaaaaa

SEQ ID NO: 1313320 - DNA, 15 bp, Homo sapiens
aagatcctatctcaa

SEQ ID NO: 1313321 - DNA, 15 bp, Homo sapiens
caagatcctatctca

SEQ ID NO: 1313322 - DNA, 15 bp, Homo sapiens
gcaagatcctatctc

SEQ ID NO: 1313323 - DNA, 15 bp, Homo sapiens
agcaagatcctatct

SEQ ID NO: 1313324 - DNA, 15 bp, Homo sapiens
gagcaagatcctatc

SEQ ID NO: 1313325 - DNA, 15 bp, Homo sapiens
agagcaagatcctat

SEQ ID NO: 1313326 - DNA, 15 bp, Homo sapiens
cagagcaagatccta

SEQ ID NO: 1313327 - DNA, 15 bp, Homo sapiens
acagagcaagatcct

SEQ ID NO: 1313328 - DNA, 15 bp, Homo sapiens
aacagagcaagatcc

SEQ ID NO: 1313329 - DNA, 15 bp, Homo sapiens
caacagagcaagatc

SEQ ID NO: 1313330 - DNA, 15 bp, Homo sapiens
acaacagagcaagat

SEQ ID NO: 1313331 - DNA, 15 bp, Homo sapiens
gacaacagagcaaga

SEQ ID NO: 1313332 - DNA, 15 bp, Homo sapiens
ggacaacagagcaag

SEQ ID NO: 1313333 - DNA, 15 bp, Homo sapiens
tggacaacagagcaa

SEQ ID NO: 1313334 - DNA, 15 bp, Homo sapiens
atggacaacagagca

SEQ ID NO: 1313335 - DNA, 15 bp, Homo sapiens
catggacaacagagc

SEQ ID NO: 1313336 - DNA, 15 bp, Homo sapiens
gcatggacaacagag

SEQ ID NO: 1313337 - DNA, 15 bp, Homo sapiens
agcatggacaacaga

SEQ ID NO: 1313338 - DNA, 15 bp, Homo sapiens
cagcatggacaacag

SEQ ID NO: 1313339 - DNA, 15 bp, Homo sapiens
ccagcatggacaaca

SEQ ID NO: 1313340 - DNA, 15 bp, Homo sapiens
tccagcatggacaac

SEQ ID NO: 1313341 - DNA, 15 bp, Homo sapiens
ctccagcatggacaa

SEQ ID NO: 1313342 - DNA, 15 bp, Homo sapiens
actccagcatggaca

SEQ ID NO: 1313343 - DNA, 15 bp, Homo sapiens
tactccagcatggac

SEQ ID NO: 1313344 - DNA, 15 bp, Homo sapiens
gtactccagcatgga

SEQ ID NO: 1313345 - DNA, 15 bp, Homo sapiens
tgtactccagcatgg

SEQ ID NO: 1313346 - DNA, 15 bp, Homo sapiens
ctgtactccagcatg

SEQ ID NO: 1313347 - DNA, 15 bp, Homo sapiens
actgtactccagcat

SEQ ID NO: 1313348 - DNA, 15 bp, Homo sapiens
cactgtactccagca

SEQ ID NO: 1313349 - DNA, 15 bp, Homo sapiens
acaccactgtactcc

SEQ ID NO: 1313350 - DNA, 15 bp, Homo sapiens
cacaccactgtactc

SEQ ID NO: 1313351 - DNA, 15 bp, Homo sapiens
tcacaccactgtact

SEQ ID NO: 1313352 - DNA, 15 bp, Homo sapiens
atcacaccactgtac

SEQ ID NO: 1313353 - DNA, 15 bp, Homo sapiens
gatcacaccactgta

SEQ ID NO: 1313354 - DNA, 15 bp, Homo sapiens
tgatcacaccactgt

SEQ ID NO: 1313355 - DNA, 15 bp, Homo sapiens
atatgatcacaccac

SEQ ID NO: 1313356 - DNA, 15 bp, Homo sapiens
gatatgatcacacca

SEQ ID NO: 1313357 - DNA, 15 bp, Homo sapiens
agatatgatcacacc

SEQ ID NO: 1313358 - DNA, 15 bp, Homo sapiens
gagatatgatcacac

SEQ ID NO: 1313359 - DNA, 15 bp, Homo sapiens
tgagatatgatcaca

SEQ ID NO: 1313360 - DNA, 15 bp, Homo sapiens
gtgagatatgatcac

SEQ ID NO: 1313361 - DNA, 15 bp, Homo sapiens
agtgagatatgatca

SEQ ID NO: 1313362 - DNA, 15 bp, Homo sapiens
gagtgagatatgatc

SEQ ID NO: 1313363 - DNA, 15 bp, Homo sapiens
agagtgagatatgat

SEQ ID NO: 1313364 - DNA, 15 bp, Homo sapiens
tagagtgagatatga

SEQ ID NO: 1313365 - DNA, 15 bp, Homo sapiens
ttagagtgagatatg

SEQ ID NO: 1313366 - DNA, 15 bp, Homo sapiens
gttagagtgagatat

SEQ ID NO: 1313367 - DNA, 15 bp, Homo sapiens
agttagagtgagata

SEQ ID NO: 1313368 - DNA, 15 bp, Homo sapiens
aagttagagtgagat

SEQ ID NO: 1313369 - DNA, 15 bp, Homo sapiens
caagttagagtgaga

SEQ ID NO: 1313370 - DNA, 15 bp, Homo sapiens
ccaagttagagtgag

SEQ ID NO: 1313371 - DNA, 15 bp, Homo sapiens
tccaagttagagtga

SEQ ID NO: 1313372 - DNA, 15 bp, Homo sapiens
ttccaagttagagtg

SEQ ID NO: 1313373 - DNA, 15 bp, Homo sapiens
gttccaagttagagt

SEQ ID NO: 1313374 - DNA, 15 bp, Homo sapiens
agttccaagttagag

SEQ ID NO: 1313375 - DNA, 15 bp, Homo sapiens
gagttccaagttaga

SEQ ID NO: 1313376 - DNA, 15 bp, Homo sapiens
ggagttccaagttag

SEQ ID NO: 1313377 - DNA, 15 bp, Homo sapiens
aggagttccaagtta

SEQ ID NO: 1313378 - DNA, 15 bp, Homo sapiens
caggagttccaagtt

SEQ ID NO: 1313379 - DNA, 15 bp, Homo sapiens
ccaggagttccaagt

SEQ ID NO: 1313380 - DNA, 15 bp, Homo sapiens
cccaggagttccaag

SEQ ID NO: 1313381 - DNA, 15 bp, Homo sapiens
gcccaggagttccaa

SEQ ID NO: 1313382 - DNA, 15 bp, Homo sapiens
cagcccaggagttcc

SEQ ID NO: 1313383 - DNA, 15 bp, Homo sapiens
tcagcccaggagttc

SEQ ID NO: 1313384 - DNA, 15 bp, Homo sapiens
ttcagcccaggagtt

SEQ ID NO: 1313385 - DNA, 15 bp, Homo sapiens
cttcagcccaggagt

SEQ ID NO: 1313386 - DNA, 15 bp, Homo sapiens
ccttcagcccaggag

SEQ ID NO: 1313387 - DNA, 15 bp, Homo sapiens
gccttcagcccagga

SEQ ID NO: 1313388 - DNA, 15 bp, Homo sapiens
tgccttcagcccagg

SEQ ID NO: 1313389 - DNA, 15 bp, Homo sapiens
atgccttcagcccag

SEQ ID NO: 1313390 - DNA, 15 bp, Homo sapiens
aatgccttcagccca

SEQ ID NO: 1313391 - DNA, 15 bp, Homo sapiens
taatgccttcagccc

SEQ ID NO: 1313392 - DNA, 15 bp, Homo sapiens
ttaatgccttcagcc

SEQ ID NO: 1313393 - DNA, 15 bp, Homo sapiens
tttaatgccttcagc

SEQ ID NO: 1313394 - DNA, 15 bp, Homo sapiens
ctttaatgccttcag

SEQ ID NO: 1313395 - DNA, 15 bp, Homo sapiens
tctttaatgccttca

SEQ ID NO: 1313396 - DNA, 15 bp, Homo sapiens
atctttaatgccttc

SEQ ID NO: 1313397 - DNA, 15 bp, Homo sapiens
catctttaatgcctt

SEQ ID NO: 1313398 - DNA, 15 bp, Homo sapiens
acatctttaatgcct

SEQ ID NO: 1313399 - DNA, 15 bp, Homo sapiens
tacatctttaatgcc

SEQ ID NO: 1313400 - DNA, 15 bp, Homo sapiens
atacatctttaatgc

SEQ ID NO: 1313401 - DNA, 15 bp, Homo sapiens
aatacatctttaatg

SEQ ID NO: 1313402 - DNA, 15 bp, Homo sapiens
aaaatacatctttaa

SEQ ID NO: 1313403 - DNA, 15 bp, Homo sapiens
caaaatacatcttta

SEQ ID NO: 1313404 - DNA, 15 bp, Homo sapiens
gcaaaatacatcttt

SEQ ID NO: 1313405 - DNA, 15 bp, Homo sapiens
agcaaaatacatctt

SEQ ID NO: 1313406 - DNA, 15 bp, Homo sapiens
aagcaaaatacatct

SEQ ID NO: 1313407 - DNA, 15 bp, Homo sapiens
aaagcaaaatacatc

SEQ ID NO: 1313408 - DNA, 15 bp, Homo sapiens
taaagcaaaatacat

SEQ ID NO: 1313409 - DNA, 15 bp, Homo sapiens
ctaaagcaaaataca

SEQ ID NO: 1313410 - DNA, 15 bp, Homo sapiens
cctaaagcaaaatac

SEQ ID NO: 1313411 - DNA, 15 bp, Homo sapiens
acctaaagcaaaata

SEQ ID NO: 1313412 - DNA, 15 bp, Homo sapiens
aacctaaagcaaaat

SEQ ID NO: 1313413 - DNA, 15 bp, Homo sapiens
aaacctaaagcaaaa

SEQ ID NO: 1313414 - DNA, 15 bp, Homo sapiens
taaacctaaagcaaa

SEQ ID NO: 1313415 - DNA, 15 bp, Homo sapiens
ataaacctaaagcaa

SEQ ID NO: 1313416 - DNA, 15 bp, Homo sapiens
gataaacctaaagca

SEQ ID NO: 1313417 - DNA, 15 bp, Homo sapiens
agataaacctaaagc

SEQ ID NO: 1313418 - DNA, 15 bp, Homo sapiens
tagataaacctaaag

SEQ ID NO: 1313419 - DNA, 15 bp, Homo sapiens
ttagataaacctaaa

SEQ ID NO: 1313420 - DNA, 15 bp, Homo sapiens
tttagataaacctaa

SEQ ID NO: 1313421 - DNA, 15 bp, Homo sapiens
ctttagataaaccta

SEQ ID NO: 1313422 - DNA, 15 bp, Homo sapiens
cctttagataaacct

SEQ ID NO: 1313423 - DNA, 15 bp, Homo sapiens
tcctttagataaacc

SEQ ID NO: 1313424 - DNA, 15 bp, Homo sapiens
ttcctttagataaac

SEQ ID NO: 1313425 - DNA, 15 bp, Homo sapiens
tttcctttagataaa

SEQ ID NO: 1313426 - DNA, 15 bp, Homo sapiens
gtttcctttagataa

SEQ ID NO: 1313427 - DNA, 15 bp, Homo sapiens
ggtttcctttagata

SEQ ID NO: 1313428 - DNA, 15 bp, Homo sapiens
tggtttcctttagat

SEQ ID NO: 1313429 - DNA, 15 bp, Homo sapiens
atggtttcctttaga

SEQ ID NO: 1313430 - DNA, 15 bp, Homo sapiens
catggtttcctttag

SEQ ID NO: 1313431 - DNA, 15 bp, Homo sapiens
ccatggtttccttta

SEQ ID NO: 1313432 - DNA, 15 bp, Homo sapiens
tccatggtttccttt

SEQ ID NO: 1313433 - DNA, 15 bp, Homo sapiens
atccatggtttcctt

SEQ ID NO: 1313434 - DNA, 15 bp, Homo sapiens
gatccatggtttcct

SEQ ID NO: 1313435 - DNA, 15 bp, Homo sapiens
ggatccatggtttcc

SEQ ID NO: 1313436 - DNA, 15 bp, Homo sapiens
gggatccatggtttc

SEQ ID NO: 1313437 - DNA, 15 bp, Homo sapiens
agggatccatggttt

SEQ ID NO: 1313438 - DNA, 15 bp, Homo sapiens
tagggatccatggtt

SEQ ID NO: 1313439 - DNA, 15 bp, Homo sapiens
ttagggatccatggt

SEQ ID NO: 1313440 - DNA, 15 bp, Homo sapiens
tttagggatccatgg

SEQ ID NO: 1313441 - DNA, 15 bp, Homo sapiens
ctttagggatccatg

SEQ ID NO: 1313442 - DNA, 15 bp, Homo sapiens
tctttagggatccat

SEQ ID NO: 1313443 - DNA, 15 bp, Homo sapiens
ttctttagggatcca

SEQ ID NO: 1313444 - DNA, 15 bp, Homo sapiens
tttctttagggatcc

SEQ ID NO: 1313445 - DNA, 15 bp, Homo sapiens
ttttctttagggatc

SEQ ID NO: 1313446 - DNA, 15 bp, Homo sapiens
gttttctttagggat

SEQ ID NO: 1313447 - DNA, 15 bp, Homo sapiens
ggttttctttaggga

SEQ ID NO: 1313448 - DNA, 15 bp, Homo sapiens
gggttttctttaggg

SEQ ID NO: 1313449 - DNA, 15 bp, Homo sapiens
ggggttttctttagg

SEQ ID NO: 1313450 - DNA, 15 bp, Homo sapiens
gggggttttctttag

SEQ ID NO: 1313451 - DNA, 15 bp, Homo sapiens
ggggggttttcttta

SEQ ID NO: 1313452 - DNA, 15 bp, Homo sapiens
tggggggttttcttt

SEQ ID NO: 1313453 - DNA, 15 bp, Homo sapiens
gtggggggttttctt

SEQ ID NO: 1313454 - DNA, 15 bp, Homo sapiens
agtggggggttttct

SEQ ID NO: 1313455 - DNA, 15 bp, Homo sapiens
cagtggggggttttc

SEQ ID NO: 1313456 - DNA, 15 bp, Homo sapiens
acagtggggggtttt

SEQ ID NO: 1313457 - DNA, 15 bp, Homo sapiens
aacagtggggggttt

SEQ ID NO: 1313458 - DNA, 15 bp, Homo sapiens
taacagtggggggtt

SEQ ID NO: 1313459 - DNA, 15 bp, Homo sapiens
ataacagtggggggt

SEQ ID NO: 1313460 - DNA, 15 bp, Homo sapiens
aataacagtgggggg

SEQ ID NO: 1313461 - DNA, 15 bp, Homo sapiens
aaataacagtggggg

SEQ ID NO: 1313462 - DNA, 15 bp, Homo sapiens
aaaataacagtgggg

SEQ ID NO: 1313463 - DNA, 15 bp, Homo sapiens
taaaataacagtggg

SEQ ID NO: 1313464 - DNA, 15 bp, Homo sapiens
ataaaataacagtgg

SEQ ID NO: 1313465 - DNA, 15 bp, Homo sapiens
aataaaataacagtg

SEQ ID NO: 1313466 - DNA, 15 bp, Homo sapiens
caataaaataacagt

SEQ ID NO: 1313467 - DNA, 15 bp, Homo sapiens
tcaataaaataacag

SEQ ID NO: 1313468 - DNA, 15 bp, Homo sapiens
ttcaataaaataaca

SEQ ID NO: 1313469 - DNA, 15 bp, Homo sapiens
tttcaataaaataac

SEQ ID NO: 1313470 - DNA, 15 bp, Homo sapiens
ttttcaataaaataa

SEQ ID NO: 1313471 - DNA, 15 bp, Homo sapiens
attttcaataaaata

SEQ ID NO: 1313472 - DNA, 15 bp, Homo sapiens
cattttcaataaaat

SEQ ID NO: 1313473 - DNA, 15 bp, Homo sapiens
ccattttcaataaaa

SEQ ID NO: 1313474 - DNA, 15 bp, Homo sapiens
cccattttcaataaa

SEQ ID NO: 1313475 - DNA, 15 bp, Homo sapiens
acccattttcaataa

SEQ ID NO: 1313476 - DNA, 15 bp, Homo sapiens
aacccattttcaata

SEQ ID NO: 1313477 - DNA, 15 bp, Homo sapiens
aaacccattttcaat

SEQ ID NO: 1313478 - DNA, 15 bp, Homo sapiens
taaacccattttcaa

SEQ ID NO: 1313479 - DNA, 15 bp, Homo sapiens
gtaaacccattttca

SEQ ID NO: 1313480 - DNA, 15 bp, Homo sapiens
ggtaaacccattttc

SEQ ID NO: 1313481 - DNA, 15 bp, Homo sapiens
aggtaaacccatttt

SEQ ID NO: 1313482 - DNA, 15 bp, Homo sapiens
caggtaaacccattt

SEQ ID NO: 1313483 - DNA, 15 bp, Homo sapiens
acaggtaaacccatt

SEQ ID NO: 1313484 - DNA, 15 bp, Homo sapiens
gacaggtaaacccat

SEQ ID NO: 1313485 - DNA, 15 bp, Homo sapiens
agacaggtaaaccca

SEQ ID NO: 1313486 - DNA, 15 bp, Homo sapiens
tagacaggtaaaccc

SEQ ID NO: 1313487 - DNA, 15 bp, Homo sapiens
ctagacaggtaaacc

SEQ ID NO: 1313488 - DNA, 15 bp, Homo sapiens
gctagacaggtaaac

SEQ ID NO: 1313489 - DNA, 15 bp, Homo sapiens
tgctagacaggtaaa

SEQ ID NO: 1313490 - DNA, 15 bp, Homo sapiens
ttgctagacaggtaa

SEQ ID NO: 1313491 - DNA, 15 bp, Homo sapiens
tttgctagacaggta

SEQ ID NO: 1313492 - DNA, 15 bp, Homo sapiens
atttgctagacaggt

SEQ ID NO: 1313493 - DNA, 15 bp, Homo sapiens
catttgctagacagg

SEQ ID NO: 1313494 - DNA, 15 bp, Homo sapiens
tcatttgctagacag

SEQ ID NO: 1313495 - DNA, 15 bp, Homo sapiens
atcatttgctagaca

SEQ ID NO: 1313496 - DNA, 15 bp, Homo sapiens
aatcatttgctagac

SEQ ID NO: 1313497 - DNA, 15 bp, Homo sapiens
caatcatttgctaga

SEQ ID NO: 1313498 - DNA, 15 bp, Homo sapiens
acaatcatttgctag

SEQ ID NO: 1313499 - DNA, 15 bp, Homo sapiens
cacaatcatttgcta

SEQ ID NO: 1313500 - DNA, 15 bp, Homo sapiens
tcacaatcatttgct

SEQ ID NO: 1313501 - DNA, 15 bp, Homo sapiens
atcacaatcatttgc

SEQ ID NO: 1313502 - DNA, 15 bp, Homo sapiens
aatcacaatcatttg

SEQ ID NO: 1313503 - DNA, 15 bp, Homo sapiens
aaatcacaatcattt

SEQ ID NO: 1313504 - DNA, 15 bp, Homo sapiens
aaaatcacaatcatt

SEQ ID NO: 1313505 - DNA, 15 bp, Homo sapiens
aaaaatcacaatcat

SEQ ID NO: 1313506 - DNA, 15 bp, Homo sapiens
gaaaaatcacaatca

SEQ ID NO: 1313507 - DNA, 15 bp, Homo sapiens
agaaaaatcacaatc

SEQ ID NO: 1313508 - DNA, 15 bp, Homo sapiens
cagaaaaatcacaat

SEQ ID NO: 1313509 - DNA, 15 bp, Homo sapiens
tcagaaaaatcacaa

SEQ ID NO: 1313510 - DNA, 15 bp, Homo sapiens
ttcagaaaaatcaca

SEQ ID NO: 1313511 - DNA, 15 bp, Homo sapiens
tttcagaaaaatcac

SEQ ID NO: 1313512 - DNA, 15 bp, Homo sapiens
atttcagaaaaatca

SEQ ID NO: 1313513 - DNA, 15 bp, Homo sapiens
gatttcagaaaaatc

SEQ ID NO: 1313514 - DNA, 15 bp, Homo sapiens
tgatttcagaaaaat

SEQ ID NO: 1313515 - DNA, 15 bp, Homo sapiens
atgatttcagaaaaa

SEQ ID NO: 1313516 - DNA, 15 bp, Homo sapiens
aatgatttcagaaaa

SEQ ID NO: 1313517 - DNA, 15 bp, Homo sapiens
taatgatttcagaaa

SEQ ID NO: 1313518 - DNA, 15 bp, Homo sapiens
gtaatgatttcagaa

SEQ ID NO: 1313519 - DNA, 15 bp, Homo sapiens
tgtaatgatttcaga

SEQ ID NO: 1313520 - DNA, 15 bp, Homo sapiens
gtgtaatgatttcag

SEQ ID NO: 1313521 - DNA, 15 bp, Homo sapiens
ggtgtaatgatttca

SEQ ID NO: 1313522 - DNA, 15 bp, Homo sapiens
aggtgtaatgatttc

SEQ ID NO: 1313523 - DNA, 15 bp, Homo sapiens
gaggtgtaatgattt

SEQ ID NO: 1313524 - DNA, 15 bp, Homo sapiens
tgaggtgtaatgatt

SEQ ID NO: 1313525 - DNA, 15 bp, Homo sapiens
ttgaggtgtaatgat

SEQ ID NO: 1313526 - DNA, 15 bp, Homo sapiens
tttgaggtgtaatga

SEQ ID NO: 1313527 - DNA, 15 bp, Homo sapiens
gtttgaggtgtaatg

SEQ ID NO: 1313528 - DNA, 15 bp, Homo sapiens
ggtttgaggtgtaat

SEQ ID NO: 1313529 - DNA, 15 bp, Homo sapiens
gggtttgaggtgtaa

SEQ ID NO: 1313530 - DNA, 15 bp, Homo sapiens
tgggtttgaggtgta

SEQ ID NO: 1313531 - DNA, 15 bp, Homo sapiens
ctgggtttgaggtgt

SEQ ID NO: 1313532 - DNA, 15 bp, Homo sapiens
tctgggtttgaggtg

SEQ ID NO: 1313533 - DNA, 15 bp, Homo sapiens
ctctgggtttgaggt

SEQ ID NO: 1313534 - DNA, 15 bp, Homo sapiens
tctctgggtttgagg

SEQ ID NO: 1313535 - DNA, 15 bp, Homo sapiens
ttctctgggtttgag

SEQ ID NO: 1313536 - DNA, 15 bp, Homo sapiens
gttctctgggtttga

SEQ ID NO: 1313537 - DNA, 15 bp, Homo sapiens
tgttctctgggtttg

SEQ ID NO: 1313538 - DNA, 15 bp, Homo sapiens
ctgttctctgggttt

SEQ ID NO: 1313539 - DNA, 15 bp, Homo sapiens
gctgttctctgggtt

SEQ ID NO: 1313540 - DNA, 15 bp, Homo sapiens
tgctgttctctgggt

SEQ ID NO: 1313541 - DNA, 15 bp, Homo sapiens
ttgctgttctctggg

SEQ ID NO: 1313542 - DNA, 15 bp, Homo sapiens
tttgctgttctctgg

SEQ ID NO: 1313543 - DNA, 15 bp, Homo sapiens
ttttgctgttctctg

SEQ ID NO: 1313544 - DNA, 15 bp, Homo sapiens
tttttgctgttctct

SEQ ID NO: 1313545 - DNA, 15 bp, Homo sapiens
atttttgctgttctc

SEQ ID NO: 1313546 - DNA, 15 bp, Homo sapiens
gatttttgctgttct

SEQ ID NO: 1313547 - DNA, 15 bp, Homo sapiens
tgatttttgctgttc

SEQ ID NO: 1313548 - DNA, 15 bp, Homo sapiens
ttgatttttgctgtt

SEQ ID NO: 1313549 - DNA, 15 bp, Homo sapiens
tttgatttttgctgt

SEQ ID NO: 1313550 - DNA, 15 bp, Homo sapiens
atttgatttttgctg

SEQ ID NO: 1313551 - DNA, 15 bp, Homo sapiens
aatttgatttttgct

SEQ ID NO: 1313552 - DNA, 15 bp, Homo sapiens
aaatttgatttttgc

SEQ ID NO: 1313553 - DNA, 15 bp, Homo sapiens
taaatttgatttttg

SEQ ID NO: 1313554 - DNA, 15 bp, Homo sapiens
ataaatttgattttt

SEQ ID NO: 1313555 - DNA, 15 bp, Homo sapiens
cataaatttgatttt

SEQ ID NO: 1313556 - DNA, 15 bp, Homo sapiens
acataaatttgattt

SEQ ID NO: 1313557 - DNA, 15 bp, Homo sapiens
gacataaatttgatt

SEQ ID NO: 1313558 - DNA, 15 bp, Homo sapiens
agacataaatttgat

SEQ ID NO: 1313559 - DNA, 15 bp, Homo sapiens
aagacataaatttga

SEQ ID NO: 1313560 - DNA, 15 bp, Homo sapiens
taagacataaatttg

SEQ ID NO: 1313561 - DNA, 15 bp, Homo sapiens
ttaagacataaattt

SEQ ID NO: 1313562 - DNA, 15 bp, Homo sapiens
tttaagacataaatt

SEQ ID NO: 1313563 - DNA, 15 bp, Homo sapiens
ttttaagacataaat

SEQ ID NO: 1313564 - DNA, 15 bp, Homo sapiens
cttttaagacataaa

SEQ ID NO: 1313565 - DNA, 15 bp, Homo sapiens
tcttttaagacataa

SEQ ID NO: 1313566 - DNA, 15 bp, Homo sapiens
ctcttttaagacata

SEQ ID NO: 1313567 - DNA, 15 bp, Homo sapiens
actcttttaagacat

SEQ ID NO: 1313568 - DNA, 15 bp, Homo sapiens
aactcttttaagaca

SEQ ID NO: 1313569 - DNA, 15 bp, Homo sapiens
aaactcttttaagac

SEQ ID NO: 1313570 - DNA, 15 bp, Homo sapiens
aaaactcttttaaga

SEQ ID NO: 1313571 - DNA, 15 bp, Homo sapiens
aaaaactcttttaag

SEQ ID NO: 1313572 - DNA, 15 bp, Homo sapiens
aaaaaactcttttaa

SEQ ID NO: 1313573 - DNA, 15 bp, Homo sapiens
caaaaaactctttta

SEQ ID NO: 1313574 - DNA, 15 bp, Homo sapiens
acaaaaaactctttt

SEQ ID NO: 1313575 - DNA, 15 bp, Homo sapiens
gacaaaaaactcttt

SEQ ID NO: 1313576 - DNA, 15 bp, Homo sapiens
ggacaaaaaactctt

SEQ ID NO: 1313577 - DNA, 15 bp, Homo sapiens
tggacaaaaaactct

SEQ ID NO: 1313578 - DNA, 15 bp, Homo sapiens
ttggacaaaaaactc

SEQ ID NO: 1313579 - DNA, 15 bp, Homo sapiens
cttggacaaaaaact

SEQ ID NO: 1313580 - DNA, 15 bp, Homo sapiens
acttggacaaaaaac

SEQ ID NO: 1313581 - DNA, 15 bp, Homo sapiens
aacttggacaaaaaa

SEQ ID NO: 1313582 - DNA, 15 bp, Homo sapiens
caacttggacaaaaa

SEQ ID NO: 1313583 - DNA, 15 bp, Homo sapiens
acaacttggacaaaa

SEQ ID NO: 1313584 - DNA, 15 bp, Homo sapiens
tacaacttggacaaa

SEQ ID NO: 1313585 - DNA, 15 bp, Homo sapiens
atacaacttggacaa

SEQ ID NO: 1313586 - DNA, 15 bp, Homo sapiens
aatacaacttggaca

SEQ ID NO: 1313587 - DNA, 15 bp, Homo sapiens
caatacaacttggac

SEQ ID NO: 1313588 - DNA, 15 bp, Homo sapiens
tcaatacaacttgga

SEQ ID NO: 1313589 - DNA, 15 bp, Homo sapiens
ctcaatacaacttgg

SEQ ID NO: 1313590 - DNA, 15 bp, Homo sapiens
cctcaatacaacttg

SEQ ID NO: 1313591 - DNA, 15 bp, Homo sapiens
tcctcaatacaactt

SEQ ID NO: 1313592 - DNA, 15 bp, Homo sapiens
gtcctcaatacaact

SEQ ID NO: 1313593 - DNA, 15 bp, Homo sapiens
agtcctcaatacaac

SEQ ID NO: 1313594 - DNA, 15 bp, Homo sapiens
aagtcctcaatacaa

SEQ ID NO: 1313595 - DNA, 15 bp, Homo sapiens
caagtcctcaataca

SEQ ID NO: 1313596 - DNA, 15 bp, Homo sapiens
tcaagtcctcaatac

SEQ ID NO: 1313597 - DNA, 15 bp, Homo sapiens
ttcaagtcctcaata

SEQ ID NO: 1313598 - DNA, 15 bp, Homo sapiens
tttcaagtcctcaat

SEQ ID NO: 1313599 - DNA, 15 bp, Homo sapiens
ctttcaagtcctcaa

SEQ ID NO: 1313600 - DNA, 15 bp, Homo sapiens
tctttcaagtcctca

SEQ ID NO: 1313601 - DNA, 15 bp, Homo sapiens
atctttcaagtcctc

SEQ ID NO: 1313602 - DNA, 15 bp, Homo sapiens
aatctttcaagtcct

SEQ ID NO: 1313603 - DNA, 15 bp, Homo sapiens
taatctttcaagtcc

SEQ ID NO: 1313604 - DNA, 15 bp, Homo sapiens
ttaatctttcaagtc

SEQ ID NO: 1313605 - DNA, 15 bp, Homo sapiens
cttaatctttcaagt

SEQ ID NO: 1313606 - DNA, 15 bp, Homo sapiens
tcttaatctttcaag

SEQ ID NO: 1313607 - DNA, 15 bp, Homo sapiens
gtcttaatctttcaa

SEQ ID NO: 1313608 - DNA, 15 bp, Homo sapiens
tgtcttaatctttca

SEQ ID NO: 1313609 - DNA, 15 bp, Homo sapiens
ctgtcttaatctttc

SEQ ID NO: 1313610 - DNA, 15 bp, Homo sapiens
actgtcttaatcttt

SEQ ID NO: 1313611 - DNA, 15 bp, Homo sapiens
tactgtcttaatctt

SEQ ID NO: 1313612 - DNA, 15 bp, Homo sapiens
ctactgtcttaatct

SEQ ID NO: 1313613 - DNA, 15 bp, Homo sapiens
tctactgtcttaatc

SEQ ID NO: 1313614 - DNA, 15 bp, Homo sapiens
ttctactgtcttaat

SEQ ID NO: 1313615 - DNA, 15 bp, Homo sapiens
tttctactgtcttaa

SEQ ID NO: 1313616 - DNA, 15 bp, Homo sapiens
atttctactgtctta

SEQ ID NO: 1313617 - DNA, 15 bp, Homo sapiens
gatttctactgtctt

SEQ ID NO: 1313618 - DNA, 15 bp, Homo sapiens
tgatttctactgtct

SEQ ID NO: 1313619 - DNA, 15 bp, Homo sapiens
ctgatttctactgtc

SEQ ID NO: 1313620 - DNA, 15 bp, Homo sapiens
tctgatttctactgt

SEQ ID NO: 1313621 - DNA, 15 bp, Homo sapiens
tatctgatttctact

SEQ ID NO: 1313622 - DNA, 15 bp, Homo sapiens
ctatctgatttctac

SEQ ID NO: 1313623 - DNA, 15 bp, Homo sapiens
cctatctgatttcta

SEQ ID NO: 1313624 - DNA, 15 bp, Homo sapiens
acctatctgatttct

SEQ ID NO: 1313625 - DNA, 15 bp, Homo sapiens
aacctatctgatttc

SEQ ID NO: 1313626 - DNA, 15 bp, Homo sapiens
caacctatctgattt

SEQ ID NO: 1313627 - DNA, 15 bp, Homo sapiens
ccaacctatctgatt

SEQ ID NO: 1313628 - DNA, 15 bp, Homo sapiens
tccaacctatctgat

SEQ ID NO: 1313629 - DNA, 15 bp, Homo sapiens
atccaacctatctga

SEQ ID NO: 1313630 - DNA, 15 bp, Homo sapiens
catccaacctatctg

SEQ ID NO: 1313631 - DNA, 15 bp, Homo sapiens
gcatccaacctatct

SEQ ID NO: 1313632 - DNA, 15 bp, Homo sapiens
agcatccaacctatc

SEQ ID NO: 1313633 - DNA, 15 bp, Homo sapiens
cagcatccaacctat

SEQ ID NO: 1313634 - DNA, 15 bp, Homo sapiens
tcagcatccaaccta

SEQ ID NO: 1313635 - DNA, 15 bp, Homo sapiens
ttcagcatccaacct

SEQ ID NO: 1313636 - DNA, 15 bp, Homo sapiens
attcagcatccaacc

SEQ ID NO: 1313637 - DNA, 15 bp, Homo sapiens
aattcagcatccaac

SEQ ID NO: 1313638 - DNA, 15 bp, Homo sapiens
aaattcagcatccaa

SEQ ID NO: 1313639 - DNA, 15 bp, Homo sapiens
taaattcagcatcca

SEQ ID NO: 1313640 - DNA, 15 bp, Homo sapiens
ttaaattcagcatcc

SEQ ID NO: 1313641 - DNA, 15 bp, Homo sapiens
attaaattcagcatc

SEQ ID NO: 1313642 - DNA, 15 bp, Homo sapiens
aattaaattcagcat

SEQ ID NO: 1313643 - DNA, 15 bp, Homo sapiens
taattaaattcagca

SEQ ID NO: 1313644 - DNA, 15 bp, Homo sapiens
gtaattaaattcagc

SEQ ID NO: 1313645 - DNA, 15 bp, Homo sapiens
tgtaattaaattcag

SEQ ID NO: 1313646 - DNA, 15 bp, Homo sapiens
atgtaattaaattca

SEQ ID NO: 1313647 - DNA, 15 bp, Homo sapiens
catgtaattaaattc

SEQ ID NO: 1313648 - DNA, 15 bp, Homo sapiens
acatgtaattaaatt

SEQ ID NO: 1313649 - DNA, 15 bp, Homo sapiens
gacatgtaattaaat

SEQ ID NO: 1313650 - DNA, 15 bp, Homo sapiens
ggacatgtaattaaa

SEQ ID NO: 1313651 - DNA, 15 bp, Homo sapiens
aggacatgtaattaa

SEQ ID NO: 1313652 - DNA, 15 bp, Homo sapiens
aaggacatgtaatta

SEQ ID NO: 1313653 - DNA, 15 bp, Homo sapiens
aaaggacatgtaatt

SEQ ID NO: 1313654 - DNA, 15 bp, Homo sapiens
aaaaggacatgtaat

SEQ ID NO: 1313655 - DNA, 15 bp, Homo sapiens
gaaaaggacatgtaa

SEQ ID NO: 1313656 - DNA, 15 bp, Homo sapiens
ggaaaaggacatgta

SEQ ID NO: 1313657 - DNA, 15 bp, Homo sapiens
aggaaaaggacatgt

SEQ ID NO: 1313658 - DNA, 15 bp, Homo sapiens
aaggaaaaggacatg

SEQ ID NO: 1313659 - DNA, 15 bp, Homo sapiens
taaggaaaaggacat

SEQ ID NO: 1313660 - DNA, 15 bp, Homo sapiens
ttaaggaaaaggaca

SEQ ID NO: 1313661 - DNA, 15 bp, Homo sapiens
tttaaggaaaaggac

SEQ ID NO: 1313662 - DNA, 15 bp, Homo sapiens
atttaaggaaaagga

SEQ ID NO: 1313663 - DNA, 15 bp, Homo sapiens
tatttaaggaaaagg

SEQ ID NO: 1313664 - DNA, 15 bp, Homo sapiens
ctatttaaggaaaag

SEQ ID NO: 1313665 - DNA, 15 bp, Homo sapiens
tctatttaaggaaaa

SEQ ID NO: 1313666 - DNA, 15 bp, Homo sapiens
ttctatttaaggaaa

SEQ ID NO: 1313667 - DNA, 15 bp, Homo sapiens
cttctatttaaggaa

SEQ ID NO: 1313668 - DNA, 15 bp, Homo sapiens
ccttctatttaagga

SEQ ID NO: 1313669 - DNA, 15 bp, Homo sapiens
gccttctatttaagg

SEQ ID NO: 1313670 - DNA, 15 bp, Homo sapiens
tgccttctatttaag

SEQ ID NO: 1313671 - DNA, 15 bp, Homo sapiens
atgccttctatttaa

SEQ ID NO: 1313672 - DNA, 15 bp, Homo sapiens
aatgccttctattta

SEQ ID NO: 1313673 - DNA, 15 bp, Homo sapiens
gaatgccttctattt

SEQ ID NO: 1313674 - DNA, 15 bp, Homo sapiens
agaatgccttctatt

SEQ ID NO: 1313675 - DNA, 15 bp, Homo sapiens
aagaatgccttctat

SEQ ID NO: 1313676 - DNA, 15 bp, Homo sapiens
aaagaatgccttcta

SEQ ID NO: 1313677 - DNA, 15 bp, Homo sapiens
aaaagaatgccttct

SEQ ID NO: 1313678 - DNA, 15 bp, Homo sapiens
aaaaagaatgccttc

SEQ ID NO: 1313679 - DNA, 15 bp, Homo sapiens
aaaaaagaatgcctt

SEQ ID NO: 1313680 - DNA, 15 bp, Homo sapiens
taaaaaagaatgcct

SEQ ID NO: 1313681 - DNA, 15 bp, Homo sapiens
ctaaaaaagaatgcc

SEQ ID NO: 1313682 - DNA, 15 bp, Homo sapiens
actaaaaaagaatgc

SEQ ID NO: 1313683 - DNA, 15 bp, Homo sapiens
aactaaaaaagaatg

SEQ ID NO: 1313684 - DNA, 15 bp, Homo sapiens
taactaaaaaagaat

SEQ ID NO: 1313685 - DNA, 15 bp, Homo sapiens
ttaactaaaaaagaa

SEQ ID NO: 1313686 - DNA, 15 bp, Homo sapiens
gttaactaaaaaaga

SEQ ID NO: 1313687 - DNA, 15 bp, Homo sapiens
agttaactaaaaaag

SEQ ID NO: 1313688 - DNA, 15 bp, Homo sapiens
aagttaactaaaaaa

SEQ ID NO: 1313689 - DNA, 15 bp, Homo sapiens
aaagttaactaaaaa

SEQ ID NO: 1313690 - DNA, 15 bp, Homo sapiens
caaagttaactaaaa

SEQ ID NO: 1313691 - DNA, 15 bp, Homo sapiens
ccaaagttaactaaa

SEQ ID NO: 1313692 - DNA, 15 bp, Homo sapiens
tccaaagttaactaa

SEQ ID NO: 1313693 - DNA, 15 bp, Homo sapiens
ctccaaagttaacta

SEQ ID NO: 1313694 - DNA, 15 bp, Homo sapiens
tctccaaagttaact

SEQ ID NO: 1313695 - DNA, 15 bp, Homo sapiens
ttctccaaagttaac

SEQ ID NO: 1313696 - DNA, 15 bp, Homo sapiens
gttctccaaagttaa

SEQ ID NO: 1313697 - DNA, 15 bp, Homo sapiens
agttctccaaagtta

SEQ ID NO: 1313698 - DNA, 15 bp, Homo sapiens
cagttctccaaagtt

SEQ ID NO: 1313699 - DNA, 15 bp, Homo sapiens
gcagttctccaaagt

SEQ ID NO: 1313700 - DNA, 15 bp, Homo sapiens
agcagttctccaaag

SEQ ID NO: 1313701 - DNA, 15 bp, Homo sapiens
aagcagttctccaaa

SEQ ID NO: 1313702 - DNA, 15 bp, Homo sapiens
caagcagttctccaa

SEQ ID NO: 1313703 - DNA, 15 bp, Homo sapiens
tcaagcagttctcca

SEQ ID NO: 1313704 - DNA, 15 bp, Homo sapiens
atcaagcagttctcc

SEQ ID NO: 1313705 - DNA, 15 bp, Homo sapiens
aatcaagcagttctc

SEQ ID NO: 1313706 - DNA, 15 bp, Homo sapiens
aaatcaagcagttct

SEQ ID NO: 1313707 - DNA, 15 bp, Homo sapiens
aaaatcaagcagttc

SEQ ID NO: 1313708 - DNA, 15 bp, Homo sapiens
aaaaatcaagcagtt

SEQ ID NO: 1313709 - DNA, 15 bp, Homo sapiens
aaaaaatcaagcagt

SEQ ID NO: 1313710 - DNA, 15 bp, Homo sapiens
aaaaaaatcaagcag

SEQ ID NO: 1313711 - DNA, 15 bp, Homo sapiens
aaaaaaaatcaagca

SEQ ID NO: 1313712 - DNA, 15 bp, Homo sapiens
aaaaaaaaatcaagc

SEQ ID NO: 1313713 - DNA, 15 bp, Homo sapiens
aaaaaaaaaatcaag

SEQ ID NO: 1313714 - DNA, 15 bp, Homo sapiens
aaaaaaaaaaatcaa

SEQ ID NO: 1313715 - DNA, 15 bp, Homo sapiens
aaaaaaaaaaaatca

SEQ ID NO: 1313716 - DNA, 15 bp, Homo sapiens
cgggcgacagagcga

SEQ ID NO: 1313717 - DNA, 15 bp, Homo sapiens
ccgggcgacagagcg

SEQ ID NO: 1313718 - DNA, 15 bp, Homo sapiens
gccgggcgacagagc

SEQ ID NO: 1313719 - DNA, 15 bp, Homo sapiens
agccgggcgacagag

SEQ ID NO: 1313720 - DNA, 15 bp, Homo sapiens
cagccgggcgacaga

SEQ ID NO: 1313721 - DNA, 15 bp, Homo sapiens
ccagccgggcgacag

SEQ ID NO: 1313722 - DNA, 15 bp, Homo sapiens
tccagccgggcgaca

SEQ ID NO: 1313723 - DNA, 15 bp, Homo sapiens
ctccagccgggcgac

SEQ ID NO: 1313724 - DNA, 15 bp, Homo sapiens
actccagccgggcga

SEQ ID NO: 1313725 - DNA, 15 bp, Homo sapiens
cactccagccgggcg

SEQ ID NO: 1313726 - DNA, 15 bp, Homo sapiens
gcactccagccgggc

SEQ ID NO: 1313727 - DNA, 15 bp, Homo sapiens
tcgccactgcactcc

SEQ ID NO: 1313728 - DNA, 15 bp, Homo sapiens
ctcgccactgcactc

SEQ ID NO: 1313729 - DNA, 15 bp, Homo sapiens
tctcgccactgcact

SEQ ID NO: 1313730 - DNA, 15 bp, Homo sapiens
atctcgccactgcac

SEQ ID NO: 1313731 - DNA, 15 bp, Homo sapiens
gatctcgccactgca

SEQ ID NO: 1313732 - DNA, 15 bp, Homo sapiens
agatctcgccactgc

SEQ ID NO: 1313733 - DNA, 15 bp, Homo sapiens
aagatctcgccactg

SEQ ID NO: 1313734 - DNA, 15 bp, Homo sapiens
caagatctcgccact

SEQ ID NO: 1313735 - DNA, 15 bp, Homo sapiens
ccaagatctcgccac

SEQ ID NO: 1313736 - DNA, 15 bp, Homo sapiens
gccaagatctcgcca

SEQ ID NO: 1313737 - DNA, 15 bp, Homo sapiens
agccaagatctcgcc

SEQ ID NO: 1313738 - DNA, 15 bp, Homo sapiens
gagccaagatctcgc

SEQ ID NO: 1313739 - DNA, 15 bp, Homo sapiens
tgagccaagatctcg

SEQ ID NO: 1313740 - DNA, 15 bp, Homo sapiens
gtgagccaagatctc

SEQ ID NO: 1313741 - DNA, 15 bp, Homo sapiens
agtgagccaagatct

SEQ ID NO: 1313742 - DNA, 15 bp, Homo sapiens
tcagaggttgcagtg

SEQ ID NO: 1313743 - DNA, 15 bp, Homo sapiens
gtcagaggttgcagt

SEQ ID NO: 1313744 - DNA, 15 bp, Homo sapiens
agtcagaggttgcag

SEQ ID NO: 1313745 - DNA, 15 bp, Homo sapiens
gagtcagaggttgca

SEQ ID NO: 1313746 - DNA, 15 bp, Homo sapiens
ggagtcagaggttgc

SEQ ID NO: 1313747 - DNA, 15 bp, Homo sapiens
aggagtcagaggttg

SEQ ID NO: 1313748 - DNA, 15 bp, Homo sapiens
caggagtcagaggtt

SEQ ID NO: 1313749 - DNA, 15 bp, Homo sapiens
ccaggagtcagaggt

SEQ ID NO: 1313750 - DNA, 15 bp, Homo sapiens
cccaggagtcagagg

SEQ ID NO: 1313751 - DNA, 15 bp, Homo sapiens
acccaggagtcagag

SEQ ID NO: 1313752 - DNA, 15 bp, Homo sapiens
aacccaggagtcaga

SEQ ID NO: 1313753 - DNA, 15 bp, Homo sapiens
gaacccaggagtcag

SEQ ID NO: 1313754 - DNA, 15 bp, Homo sapiens
tgaacccaggagtca

SEQ ID NO: 1313755 - DNA, 15 bp, Homo sapiens
ttgaacccaggagtc

SEQ ID NO: 1313756 - DNA, 15 bp, Homo sapiens
cttgaacccaggagt

SEQ ID NO: 1313757 - DNA, 15 bp, Homo sapiens
cgggaggcagaggca

SEQ ID NO: 1313758 - DNA, 15 bp, Homo sapiens
tcgggaggcagaggc

SEQ ID NO: 1313759 - DNA, 15 bp, Homo sapiens
ctcgggaggcagagg

SEQ ID NO: 1313760 - DNA, 15 bp, Homo sapiens
tgtggtggcacatgc

SEQ ID NO: 1313761 - DNA, 15 bp, Homo sapiens
gtgtggtggcacatg

SEQ ID NO: 1313762 - DNA, 15 bp, Homo sapiens
ctcctggccaacatg

SEQ ID NO: 1313763 - DNA, 15 bp, Homo sapiens
cctcctggccaacat

SEQ ID NO: 1313764 - DNA, 15 bp, Homo sapiens
ccctcctggccaaca

SEQ ID NO: 1313765 - DNA, 15 bp, Homo sapiens
accctcctggccaac

SEQ ID NO: 1313766 - DNA, 15 bp, Homo sapiens
gaccctcctggccaa

SEQ ID NO: 1313767 - DNA, 15 bp, Homo sapiens
agaccctcctggcca

SEQ ID NO: 1313768 - DNA, 15 bp, Homo sapiens
aagaccctcctggcc

SEQ ID NO: 1313769 - DNA, 15 bp, Homo sapiens
caagaccctcctggc

SEQ ID NO: 1313770 - DNA, 15 bp, Homo sapiens
tcaagaccctcctgg

SEQ ID NO: 1313771 - DNA, 15 bp, Homo sapiens
atcaagaccctcctg

SEQ ID NO: 1313772 - DNA, 15 bp, Homo sapiens
gatcaagaccctcct

SEQ ID NO: 1313773 - DNA, 15 bp, Homo sapiens
agatcaagaccctcc

SEQ ID NO: 1313774 - DNA, 15 bp, Homo sapiens
gagatcaagaccctc

SEQ ID NO: 1313775 - DNA, 15 bp, Homo sapiens
agagatcaagaccct

SEQ ID NO: 1313776 - DNA, 15 bp, Homo sapiens
aagagatcaagaccc

SEQ ID NO: 1313777 - DNA, 15 bp, Homo sapiens
aaggtcaagagatca

SEQ ID NO: 1313778 - DNA, 15 bp, Homo sapiens
taaggtcaagagatc

SEQ ID NO: 1313779 - DNA, 15 bp, Homo sapiens
ataaggtcaagagat

SEQ ID NO: 1313780 - DNA, 15 bp, Homo sapiens
cataaggtcaagaga

SEQ ID NO: 1313781 - DNA, 15 bp, Homo sapiens
tcataaggtcaagag

SEQ ID NO: 1313782 - DNA, 15 bp, Homo sapiens
atcataaggtcaaga

SEQ ID NO: 1313783 - DNA, 15 bp, Homo sapiens
gatcataaggtcaag

SEQ ID NO: 1313784 - DNA, 15 bp, Homo sapiens
ggatcataaggtcaa

SEQ ID NO: 1313785 - DNA, 15 bp, Homo sapiens
tggatcataaggtca

SEQ ID NO: 1313786 - DNA, 15 bp, Homo sapiens
gtggatcataaggtc

SEQ ID NO: 1313787 - DNA, 15 bp, Homo sapiens
ggtggatcataaggt

SEQ ID NO: 1313788 - DNA, 15 bp, Homo sapiens
gggtggatcataagg

SEQ ID NO: 1313789 - DNA, 15 bp, Homo sapiens
cgggtggatcataag

SEQ ID NO: 1313790 - DNA, 15 bp, Homo sapiens
gcgggtggatcataa

SEQ ID NO: 1313791 - DNA, 15 bp, Homo sapiens
ggcgggtggatcata

SEQ ID NO: 1313792 - DNA, 15 bp, Homo sapiens
tggctgaggcgggtg

SEQ ID NO: 1313793 - DNA, 15 bp, Homo sapiens
gtggctgaggcgggt

SEQ ID NO: 1313794 - DNA, 15 bp, Homo sapiens
ggtggctgaggcggg

SEQ ID NO: 1313795 - DNA, 15 bp, Homo sapiens
gggtggctgaggcgg

SEQ ID NO: 1313796 - DNA, 15 bp, Homo sapiens
tgggtggctgaggcg

SEQ ID NO: 1313797 - DNA, 15 bp, Homo sapiens
ttgggtggctgaggc

SEQ ID NO: 1313798 - DNA, 15 bp, Homo sapiens
tttgggtggctgagg

SEQ ID NO: 1313799 - DNA, 15 bp, Homo sapiens
ctttgggtggctgag

SEQ ID NO: 1313800 - DNA, 15 bp, Homo sapiens
actttgggtggctga

SEQ ID NO: 1313801 - DNA, 15 bp, Homo sapiens
cactttgggtggctg

SEQ ID NO: 1313802 - DNA, 15 bp, Homo sapiens
gcactttgggtggct

SEQ ID NO: 1313803 - DNA, 15 bp, Homo sapiens
agcactttgggtggc

SEQ ID NO: 1313804 - DNA, 15 bp, Homo sapiens
tagcactttgggtgg

SEQ ID NO: 1313805 - DNA, 15 bp, Homo sapiens
ctagcactttgggtg

SEQ ID NO: 1313806 - DNA, 15 bp, Homo sapiens
cctagcactttgggt

SEQ ID NO: 1313807 - DNA, 15 bp, Homo sapiens
cggtggttcacacct

SEQ ID NO: 1313808 - DNA, 15 bp, Homo sapiens
acggtggttcacacc

SEQ ID NO: 1313809 - DNA, 15 bp, Homo sapiens
cacggtggttcacac

SEQ ID NO: 1313810 - DNA, 15 bp, Homo sapiens
gcacggtggttcaca

SEQ ID NO: 1313811 - DNA, 15 bp, Homo sapiens
ggcacggtggttcac

SEQ ID NO: 1313812 - DNA, 15 bp, Homo sapiens
gggcacggtggttca

SEQ ID NO: 1313813 - DNA, 15 bp, Homo sapiens
cgggcacggtggttc

SEQ ID NO: 1313814 - DNA, 15 bp, Homo sapiens
ccgggcacggtggtt

SEQ ID NO: 1313815 - DNA, 15 bp, Homo sapiens
gccgggcacggtggt

SEQ ID NO: 1313816 - DNA, 15 bp, Homo sapiens
aggccgggcacggtg

SEQ ID NO: 1313817 - DNA, 15 bp, Homo sapiens
caggccgggcacggt

SEQ ID NO: 1313818 - DNA, 15 bp, Homo sapiens
tcaggccgggcacgg

SEQ ID NO: 1313819 - DNA, 15 bp, Homo sapiens
ttcaggccgggcacg

SEQ ID NO: 1313820 - DNA, 15 bp, Homo sapiens
attcaggccgggcac

SEQ ID NO: 1313821 - DNA, 15 bp, Homo sapiens
aattcaggccgggca

SEQ ID NO: 1313822 - DNA, 15 bp, Homo sapiens
aaattcaggccgggc

SEQ ID NO: 1313823 - DNA, 15 bp, Homo sapiens
aaaattcaggccggg

SEQ ID NO: 1313824 - DNA, 15 bp, Homo sapiens
aaaaattcaggccgg

SEQ ID NO: 1313825 - DNA, 15 bp, Homo sapiens
aaaaaattcaggccg

SEQ ID NO: 1313826 - DNA, 15 bp, Homo sapiens
aaaaaaattcaggcc

SEQ ID NO: 1313827 - DNA, 15 bp, Homo sapiens
taaaaaaattcaggc

SEQ ID NO: 1313828 - DNA, 15 bp, Homo sapiens
ttaaaaaaattcagg

SEQ ID NO: 1313829 - DNA, 15 bp, Homo sapiens
tttaaaaaaattcag

SEQ ID NO: 1313830 - DNA, 15 bp, Homo sapiens
ttttaaaaaaattca

SEQ ID NO: 1313831 - DNA, 15 bp, Homo sapiens
tttttaaaaaaattc

SEQ ID NO: 1313832 - DNA, 15 bp, Homo sapiens
cttttttaaaaaaat

SEQ ID NO: 1313833 - DNA, 15 bp, Homo sapiens
ccttttttaaaaaaa

SEQ ID NO: 1313834 - DNA, 15 bp, Homo sapiens
tccttttttaaaaaa

SEQ ID NO: 1313835 - DNA, 15 bp, Homo sapiens
ttccttttttaaaaa

SEQ ID NO: 1313836 - DNA, 15 bp, Homo sapiens
attccttttttaaaa

SEQ ID NO: 1313837 - DNA, 15 bp, Homo sapiens
tattccttttttaaa

SEQ ID NO: 1313838 - DNA, 15 bp, Homo sapiens
atattccttttttaa

SEQ ID NO: 1313839 - DNA, 15 bp, Homo sapiens
catattcctttttta

SEQ ID NO: 1313840 - DNA, 15 bp, Homo sapiens
acatattcctttttt

SEQ ID NO: 1313841 - DNA, 15 bp, Homo sapiens
aacatattccttttt

SEQ ID NO: 1313842 - DNA, 15 bp, Homo sapiens
caacatattcctttt

SEQ ID NO: 1313843 - DNA, 15 bp, Homo sapiens
ccaacatattccttt

SEQ ID NO: 1313844 - DNA, 15 bp, Homo sapiens
tccaacatattcctt

SEQ ID NO: 1313845 - DNA, 15 bp, Homo sapiens
atccaacatattcct

SEQ ID NO: 1313846 - DNA, 15 bp, Homo sapiens
tatccaacatattcc

SEQ ID NO: 1313847 - DNA, 15 bp, Homo sapiens
ttatccaacatattc

SEQ ID NO: 1313848 - DNA, 15 bp, Homo sapiens
attatccaacatatt

SEQ ID NO: 1313849 - DNA, 15 bp, Homo sapiens
tattatccaacatat

SEQ ID NO: 1313850 - DNA, 15 bp, Homo sapiens
ttattatccaacata

SEQ ID NO: 1313851 - DNA, 15 bp, Homo sapiens
tttattatccaacat

SEQ ID NO: 1313852 - DNA, 15 bp, Homo sapiens
ttttattatccaaca

SEQ ID NO: 1313853 - DNA, 15 bp, Homo sapiens
tttttattatccaac

SEQ ID NO: 1313854 - DNA, 15 bp, Homo sapiens
ttttttattatccaa

SEQ ID NO: 1313855 - DNA, 15 bp, Homo sapiens
cttttttattatcca

SEQ ID NO: 1313856 - DNA, 15 bp, Homo sapiens
acttttttattatcc

SEQ ID NO: 1313857 - DNA, 15 bp, Homo sapiens
aacttttttattatc

SEQ ID NO: 1313858 - DNA, 15 bp, Homo sapiens
aaacttttttattat

SEQ ID NO: 1313859 - DNA, 15 bp, Homo sapiens
aaaacttttttatta

SEQ ID NO: 1313860 - DNA, 15 bp, Homo sapiens
taaaacttttttatt

SEQ ID NO: 1313861 - DNA, 15 bp, Homo sapiens
ctaaaacttttttat

SEQ ID NO: 1313862 - DNA, 15 bp, Homo sapiens
actaaaactttttta

SEQ ID NO: 1313863 - DNA, 15 bp, Homo sapiens
cactaaaactttttt

SEQ ID NO: 1313864 - DNA, 15 bp, Homo sapiens
acactaaaacttttt

SEQ ID NO: 1313865 - DNA, 15 bp, Homo sapiens
tacactaaaactttt

SEQ ID NO: 1313866 - DNA, 15 bp, Homo sapiens
gtacactaaaacttt

SEQ ID NO: 1313867 - DNA, 15 bp, Homo sapiens
agtacactaaaactt

SEQ ID NO: 1313868 - DNA, 15 bp, Homo sapiens
aagtacactaaaact

SEQ ID NO: 1313869 - DNA, 15 bp, Homo sapiens
caagtacactaaaac

SEQ ID NO: 1313870 - DNA, 15 bp, Homo sapiens
ccaagtacactaaaa

SEQ ID NO: 1313871 - DNA, 15 bp, Homo sapiens
accaagtacactaaa

SEQ ID NO: 1313872 - DNA, 15 bp, Homo sapiens
taccaagtacactaa

SEQ ID NO: 1313873 - DNA, 15 bp, Homo sapiens
gtaccaagtacacta

SEQ ID NO: 1313874 - DNA, 15 bp, Homo sapiens
agtaccaagtacact

SEQ ID NO: 1313875 - DNA, 15 bp, Homo sapiens
aagtaccaagtacac

SEQ ID NO: 1313876 - DNA, 15 bp, Homo sapiens
aaagtaccaagtaca

SEQ ID NO: 1313877 - DNA, 15 bp, Homo sapiens
aaaagtaccaagtac

SEQ ID NO: 1313878 - DNA, 15 bp, Homo sapiens
aaaaagtaccaagta

SEQ ID NO: 1313879 - DNA, 15 bp, Homo sapiens
aaaaaagtaccaagt

SEQ ID NO: 1313880 - DNA, 15 bp, Homo sapiens
aaaaaaagtaccaag

SEQ ID NO: 1313881 - DNA, 15 bp, Homo sapiens
gaaaaaaagtaccaa

SEQ ID NO: 1313882 - DNA, 15 bp, Homo sapiens
agaaaaaaagtacca

SEQ ID NO: 1313883 - DNA, 15 bp, Homo sapiens
tagaaaaaaagtacc

SEQ ID NO: 1313884 - DNA, 15 bp, Homo sapiens
ttagaaaaaaagtac

SEQ ID NO: 1313885 - DNA, 15 bp, Homo sapiens
tttagaaaaaaagta

SEQ ID NO: 1313886 - DNA, 15 bp, Homo sapiens
ctttagaaaaaaagt

SEQ ID NO: 1313887 - DNA, 15 bp, Homo sapiens
actttagaaaaaaag

SEQ ID NO: 1313888 - DNA, 15 bp, Homo sapiens
tactttagaaaaaaa

SEQ ID NO: 1313889 - DNA, 15 bp, Homo sapiens
atactttagaaaaaa

SEQ ID NO: 1313890 - DNA, 15 bp, Homo sapiens
tatactttagaaaaa

SEQ ID NO: 1313891 - DNA, 15 bp, Homo sapiens
gtatactttagaaaa

SEQ ID NO: 1313892 - DNA, 15 bp, Homo sapiens
ggtatactttagaaa

SEQ ID NO: 1313893 - DNA, 15 bp, Homo sapiens
aggtatactttagaa

SEQ ID NO: 1313894 - DNA, 15 bp, Homo sapiens
gaggtatactttaga

SEQ ID NO: 1313895 - DNA, 15 bp, Homo sapiens
tgaggtatactttag

SEQ ID NO: 1313896 - DNA, 15 bp, Homo sapiens
ctgaggtatacttta

SEQ ID NO: 1313897 - DNA, 15 bp, Homo sapiens
tctgaggtatacttt

SEQ ID NO: 1313898 - DNA, 15 bp, Homo sapiens
ctctgaggtatactt

SEQ ID NO: 1313899 - DNA, 15 bp, Homo sapiens
gctctgaggtatact

SEQ ID NO: 1313900 - DNA, 15 bp, Homo sapiens
ggctctgaggtatac

SEQ ID NO: 1313901 - DNA, 15 bp, Homo sapiens
tggctctgaggtata

SEQ ID NO: 1313902 - DNA, 15 bp, Homo sapiens
ctggctctgaggtat

SEQ ID NO: 1313903 - DNA, 15 bp, Homo sapiens
tctggctctgaggta

SEQ ID NO: 1313904 - DNA, 15 bp, Homo sapiens
gtctggctctgaggt

SEQ ID NO: 1313905 - DNA, 15 bp, Homo sapiens
ggtctggctctgagg

SEQ ID NO: 1313906 - DNA, 15 bp, Homo sapiens
aggtctggctctgag

SEQ ID NO: 1313907 - DNA, 15 bp, Homo sapiens
taggtctggctctga

SEQ ID NO: 1313908 - DNA, 15 bp, Homo sapiens
ataggtctggctctg

SEQ ID NO: 1313909 - DNA, 15 bp, Homo sapiens
aataggtctggctct

SEQ ID NO: 1313910 - DNA, 15 bp, Homo sapiens
aaataggtctggctc

SEQ ID NO: 1313911 - DNA, 15 bp, Homo sapiens
aaaataggtctggct

SEQ ID NO: 1313912 - DNA, 15 bp, Homo sapiens
taaaataggtctggc

SEQ ID NO: 1313913 - DNA, 15 bp, Homo sapiens
ataaaataggtctgg

SEQ ID NO: 1313914 - DNA, 15 bp, Homo sapiens
cataaaataggtctg

SEQ ID NO: 1313915 - DNA, 15 bp, Homo sapiens
acataaaataggtct

SEQ ID NO: 1313916 - DNA, 15 bp, Homo sapiens
aacataaaataggtc

SEQ ID NO: 1313917 - DNA, 15 bp, Homo sapiens
aaacataaaataggt

SEQ ID NO: 1313918 - DNA, 15 bp, Homo sapiens
taaacataaaatagg

SEQ ID NO: 1313919 - DNA, 15 bp, Homo sapiens
ctaaacataaaatag

SEQ ID NO: 1313920 - DNA, 15 bp, Homo sapiens
actaaacataaaata

SEQ ID NO: 1313921 - DNA, 15 bp, Homo sapiens
cactaaacataaaat

SEQ ID NO: 1313922 - DNA, 15 bp, Homo sapiens
tcactaaacataaaa

SEQ ID NO: 1313923 - DNA, 15 bp, Homo sapiens
ttcactaaacataaa

SEQ ID NO: 1313924 - DNA, 15 bp, Homo sapiens
tttcactaaacataa

SEQ ID NO: 1313925 - DNA, 15 bp, Homo sapiens
atttcactaaacata

SEQ ID NO: 1313926 - DNA, 15 bp, Homo sapiens
catttcactaaacat

SEQ ID NO: 1313927 - DNA, 15 bp, Homo sapiens
tcatttcactaaaca

SEQ ID NO: 1313928 - DNA, 15 bp, Homo sapiens
ttcatttcactaaac

SEQ ID NO: 1313929 - DNA, 15 bp, Homo sapiens
tttcatttcactaaa

SEQ ID NO: 1313930 - DNA, 15 bp, Homo sapiens
ttttcatttcactaa

SEQ ID NO: 1313931 - DNA, 15 bp, Homo sapiens
attttcatttcacta

SEQ ID NO: 1313932 - DNA, 15 bp, Homo sapiens
tattttcatttcact

SEQ ID NO: 1313933 - DNA, 15 bp, Homo sapiens
atattttcatttcac

SEQ ID NO: 1313934 - DNA, 15 bp, Homo sapiens
tatattttcatttca

SEQ ID NO: 1313935 - DNA, 15 bp, Homo sapiens
ctatattttcatttc

SEQ ID NO: 1313936 - DNA, 15 bp, Homo sapiens
actatattttcattt

SEQ ID NO: 1313937 - DNA, 15 bp, Homo sapiens
aactatattttcatt

SEQ ID NO: 1313938 - DNA, 15 bp, Homo sapiens
aaactatattttcat

SEQ ID NO: 1313939 - DNA, 15 bp, Homo sapiens
aaaactatattttca

SEQ ID NO: 1313940 - DNA, 15 bp, Homo sapiens
caaaactatattttc

SEQ ID NO: 1313941 - DNA, 15 bp, Homo sapiens
acaaaactatatttt

SEQ ID NO: 1313942 - DNA, 15 bp, Homo sapiens
aacaaaactatattt

SEQ ID NO: 1313943 - DNA, 15 bp, Homo sapiens
aaacaaaactatatt

SEQ ID NO: 1313944 - DNA, 15 bp, Homo sapiens
taaacaaaactatat

SEQ ID NO: 1313945 - DNA, 15 bp, Homo sapiens
ctaaacaaaactata

SEQ ID NO: 1313946 - DNA, 15 bp, Homo sapiens
actaaacaaaactat

SEQ ID NO: 1313947 - DNA, 15 bp, Homo sapiens
aactaaacaaaacta

SEQ ID NO: 1313948 - DNA, 15 bp, Homo sapiens
taactaaacaaaact

SEQ ID NO: 1313949 - DNA, 15 bp, Homo sapiens
ataactaaacaaaac

SEQ ID NO: 1313950 - DNA, 15 bp, Homo sapiens
aataactaaacaaaa

SEQ ID NO: 1313951 - DNA, 15 bp, Homo sapiens
aaataactaaacaaa

SEQ ID NO: 1313952 - DNA, 15 bp, Homo sapiens
caaataactaaacaa

SEQ ID NO: 1313953 - DNA, 15 bp, Homo sapiens
ccaaataactaaaca

SEQ ID NO: 1313954 - DNA, 15 bp, Homo sapiens
gccaaataactaaac

SEQ ID NO: 1313955 - DNA, 15 bp, Homo sapiens
ggccaaataactaaa

SEQ ID NO: 1313956 - DNA, 15 bp, Homo sapiens
aggccaaataactaa

SEQ ID NO: 1313957 - DNA, 15 bp, Homo sapiens
aaggccaaataacta

SEQ ID NO: 1313958 - DNA, 15 bp, Homo sapiens
caaggccaaataact

SEQ ID NO: 1313959 - DNA, 15 bp, Homo sapiens
acaaggccaaataac

SEQ ID NO: 1313960 - DNA, 15 bp, Homo sapiens
tacaaggccaaataa

SEQ ID NO: 1313961 - DNA, 15 bp, Homo sapiens
ctacaaggccaaata

SEQ ID NO: 1313962 - DNA, 15 bp, Homo sapiens
actacaaggccaaat

SEQ ID NO: 1313963 - DNA, 15 bp, Homo sapiens
aactacaaggccaaa

SEQ ID NO: 1313964 - DNA, 15 bp, Homo sapiens
aaactacaaggccaa

SEQ ID NO: 1313965 - DNA, 15 bp, Homo sapiens
aaaactacaaggcca

SEQ ID NO: 1313966 - DNA, 15 bp, Homo sapiens
caaaactacaaggcc

SEQ ID NO: 1313967 - DNA, 15 bp, Homo sapiens
acaaaactacaaggc

SEQ ID NO: 1313968 - DNA, 15 bp, Homo sapiens
aacaaaactacaagg

SEQ ID NO: 1313969 - DNA, 15 bp, Homo sapiens
taacaaaactacaag

SEQ ID NO: 1313970 - DNA, 15 bp, Homo sapiens
gtaacaaaactacaa

SEQ ID NO: 1313971 - DNA, 15 bp, Homo sapiens
agtaacaaaactaca

SEQ ID NO: 1313972 - DNA, 15 bp, Homo sapiens
aagtaacaaaactac

SEQ ID NO: 1313973 - DNA, 15 bp, Homo sapiens
aaagtaacaaaacta

SEQ ID NO: 1313974 - DNA, 15 bp, Homo sapiens
taaagtaacaaaact

SEQ ID NO: 1313975 - DNA, 15 bp, Homo sapiens
ataaagtaacaaaac

SEQ ID NO: 1313976 - DNA, 15 bp, Homo sapiens
tataaagtaacaaaa

SEQ ID NO: 1313977 - DNA, 15 bp, Homo sapiens
ttataaagtaacaaa

SEQ ID NO: 1313978 - DNA, 15 bp, Homo sapiens
attataaagtaacaa

SEQ ID NO: 1313979 - DNA, 15 bp, Homo sapiens
cattataaagtaaca

SEQ ID NO: 1313980 - DNA, 15 bp, Homo sapiens
acattataaagtaac

SEQ ID NO: 1313981 - DNA, 15 bp, Homo sapiens
tacattataaagtaa

SEQ ID NO: 1313982 - DNA, 15 bp, Homo sapiens
ttacattataaagta

SEQ ID NO: 1313983 - DNA, 15 bp, Homo sapiens
cttacattataaagt

SEQ ID NO: 1313984 - DNA, 15 bp, Homo sapiens
ccttacattataaag

SEQ ID NO: 1313985 - DNA, 15 bp, Homo sapiens
tccttacattataaa

SEQ ID NO: 1313986 - DNA, 15 bp, Homo sapiens
ttccttacattataa

SEQ ID NO: 1313987 - DNA, 15 bp, Homo sapiens
gttccttacattata

SEQ ID NO: 1313988 - DNA, 15 bp, Homo sapiens
agttccttacattat

SEQ ID NO: 1313989 - DNA, 15 bp, Homo sapiens
cagttccttacatta

SEQ ID NO: 1313990 - DNA, 15 bp, Homo sapiens
acagttccttacatt

SEQ ID NO: 1313991 - DNA, 15 bp, Homo sapiens
cacagttccttacat

SEQ ID NO: 1313992 - DNA, 15 bp, Homo sapiens
acacagttccttaca

SEQ ID NO: 1313993 - DNA, 15 bp, Homo sapiens
gacacagttccttac

SEQ ID NO: 1313994 - DNA, 15 bp, Homo sapiens
ggacacagttcctta

SEQ ID NO: 1313995 - DNA, 15 bp, Homo sapiens
aggacacagttcctt

SEQ ID NO: 1313996 - DNA, 15 bp, Homo sapiens
aaggacacagttcct

SEQ ID NO: 1313997 - DNA, 15 bp, Homo sapiens
taaggacacagttcc

SEQ ID NO: 1313998 - DNA, 15 bp, Homo sapiens
ttaaggacacagttc

SEQ ID NO: 1313999 - DNA, 15 bp, Homo sapiens
attaaggacacagtt

SEQ ID NO: 1314000 - DNA, 15 bp, Homo sapiens
aattaaggacacagt

SEQ ID NO: 1314001 - DNA, 15 bp, Homo sapiens
taattaaggacacag

SEQ ID NO: 1314002 - DNA, 15 bp, Homo sapiens
ttaattaaggacaca

SEQ ID NO: 1314003 - DNA, 15 bp, Homo sapiens
attaattaaggacac

SEQ ID NO: 1314004 - DNA, 15 bp, Homo sapiens
gattaattaaggaca

SEQ ID NO: 1314005 - DNA, 15 bp, Homo sapiens
tgattaattaaggac

SEQ ID NO: 1314006 - DNA, 15 bp, Homo sapiens
atgattaattaagga

SEQ ID NO: 1314007 - DNA, 15 bp, Homo sapiens
aatgattaattaagg

SEQ ID NO: 1314008 - DNA, 15 bp, Homo sapiens
aaatgattaattaag

SEQ ID NO: 1314009 - DNA, 15 bp, Homo sapiens
aaaatgattaattaa

SEQ ID NO: 1314010 - DNA, 15 bp, Homo sapiens
caaaatgattaatta

SEQ ID NO: 1314011 - DNA, 15 bp, Homo sapiens
tcaaaatgattaatt

SEQ ID NO: 1314012 - DNA, 15 bp, Homo sapiens
gtcaaaatgattaat

SEQ ID NO: 1314013 - DNA, 15 bp, Homo sapiens
cgtcaaaatgattaa

SEQ ID NO: 1314014 - DNA, 15 bp, Homo sapiens
acgtcaaaatgatta

SEQ ID NO: 1314015 - DNA, 15 bp, Homo sapiens
tacgtcaaaatgatt

SEQ ID NO: 1314016 - DNA, 15 bp, Homo sapiens
gtacgtcaaaatgat

SEQ ID NO: 1314017 - DNA, 15 bp, Homo sapiens
tgtacgtcaaaatga

SEQ ID NO: 1314018 - DNA, 15 bp, Homo sapiens
ttgtacgtcaaaatg

SEQ ID NO: 1314019 - DNA, 15 bp, Homo sapiens
attgtacgtcaaaat

SEQ ID NO: 1314020 - DNA, 15 bp, Homo sapiens
tattgtacgtcaaaa

SEQ ID NO: 1314021 - DNA, 15 bp, Homo sapiens
ttattgtacgtcaaa

SEQ ID NO: 1314022 - DNA, 15 bp, Homo sapiens
gttattgtacgtcaa

SEQ ID NO: 1314023 - DNA, 15 bp, Homo sapiens
tgttattgtacgtca

SEQ ID NO: 1314024 - DNA, 15 bp, Homo sapiens
atgttattgtacgtc

SEQ ID NO: 1314025 - DNA, 15 bp, Homo sapiens
gatgttattgtacgt

SEQ ID NO: 1314026 - DNA, 15 bp, Homo sapiens
agatgttattgtacg

SEQ ID NO: 1314027 - DNA, 15 bp, Homo sapiens
aagatgttattgtac

SEQ ID NO: 1314028 - DNA, 15 bp, Homo sapiens
caagatgttattgta

SEQ ID NO: 1314029 - DNA, 15 bp, Homo sapiens
gcaagatgttattgt

SEQ ID NO: 1314030 - DNA, 15 bp, Homo sapiens
ggcaagatgttattg

SEQ ID NO: 1314031 - DNA, 15 bp, Homo sapiens
aggcaagatgttatt

SEQ ID NO: 1314032 - DNA, 15 bp, Homo sapiens
taggcaagatgttat

SEQ ID NO: 1314033 - DNA, 15 bp, Homo sapiens
gtaggcaagatgtta

SEQ ID NO: 1314034 - DNA, 15 bp, Homo sapiens
agtaggcaagatgtt

SEQ ID NO: 1314035 - DNA, 15 bp, Homo sapiens
aagtaggcaagatgt

SEQ ID NO: 1314036 - DNA, 15 bp, Homo sapiens
caagtaggcaagatg

SEQ ID NO: 1314037 - DNA, 15 bp, Homo sapiens
tcaagtaggcaagat

SEQ ID NO: 1314038 - DNA, 15 bp, Homo sapiens
ttcaagtaggcaaga

SEQ ID NO: 1314039 - DNA, 15 bp, Homo sapiens
tttcaagtaggcaag

SEQ ID NO: 1314040 - DNA, 15 bp, Homo sapiens
atttcaagtaggcaa

SEQ ID NO: 1314041 - DNA, 15 bp, Homo sapiens
tatttcaagtaggca

SEQ ID NO: 1314042 - DNA, 15 bp, Homo sapiens
ttatttcaagtaggc

SEQ ID NO: 1314043 - DNA, 15 bp, Homo sapiens
attatttcaagtagg

SEQ ID NO: 1314044 - DNA, 15 bp, Homo sapiens
cattatttcaagtag

SEQ ID NO: 1314045 - DNA, 15 bp, Homo sapiens
acattatttcaagta

SEQ ID NO: 1314046 - DNA, 15 bp, Homo sapiens
aacattatttcaagt

SEQ ID NO: 1314047 - DNA, 15 bp, Homo sapiens
aaacattatttcaag

SEQ ID NO: 1314048 - DNA, 15 bp, Homo sapiens
aaaacattatttcaa

SEQ ID NO: 1314049 - DNA, 15 bp, Homo sapiens
caaaacattatttca

SEQ ID NO: 1314050 - DNA, 15 bp, Homo sapiens
tcaaaacattatttc

SEQ ID NO: 1314051 - DNA, 15 bp, Homo sapiens
ttcaaaacattattt

SEQ ID NO: 1314052 - DNA, 15 bp, Homo sapiens
gttcaaaacattatt

SEQ ID NO: 1314053 - DNA, 15 bp, Homo sapiens
agttcaaaacattat

SEQ ID NO: 1314054 - DNA, 15 bp, Homo sapiens
aagttcaaaacatta

SEQ ID NO: 1314055 - DNA, 15 bp, Homo sapiens
gaagttcaaaacatt

SEQ ID NO: 1314056 - DNA, 15 bp, Homo sapiens
ggaagttcaaaacat

SEQ ID NO: 1314057 - DNA, 15 bp, Homo sapiens
gggaagttcaaaaca

SEQ ID NO: 1314058 - DNA, 15 bp, Homo sapiens
tgggaagttcaaaac

SEQ ID NO: 1314059 - DNA, 15 bp, Homo sapiens
ttgggaagttcaaaa

SEQ ID NO: 1314060 - DNA, 15 bp, Homo sapiens
attgggaagttcaaa

SEQ ID NO: 1314061 - DNA, 15 bp, Homo sapiens
tattgggaagttcaa

SEQ ID NO: 1314062 - DNA, 15 bp, Homo sapiens
atattgggaagttca

SEQ ID NO: 1314063 - DNA, 15 bp, Homo sapiens
aatattgggaagttc

SEQ ID NO: 1314064 - DNA, 15 bp, Homo sapiens
aaatattgggaagtt

SEQ ID NO: 1314065 - DNA, 15 bp, Homo sapiens
caaatattgggaagt

SEQ ID NO: 1314066 - DNA, 15 bp, Homo sapiens
ccaaatattgggaag

SEQ ID NO: 1314067 - DNA, 15 bp, Homo sapiens
gccaaatattgggaa

SEQ ID NO: 1314068 - DNA, 15 bp, Homo sapiens
agccaaatattggga

SEQ ID NO: 1314069 - DNA, 15 bp, Homo sapiens
aagccaaatattggg

SEQ ID NO: 1314070 - DNA, 15 bp, Homo sapiens
taagccaaatattgg

SEQ ID NO: 1314071 - DNA, 15 bp, Homo sapiens
ttaagccaaatattg

SEQ ID NO: 1314072 - DNA, 15 bp, Homo sapiens
tttaagccaaatatt

SEQ ID NO: 1314073 - DNA, 15 bp, Homo sapiens
ttttaagccaaatat

SEQ ID NO: 1314074 - DNA, 15 bp, Homo sapiens
attttaagccaaata

SEQ ID NO: 1314075 - DNA, 15 bp, Homo sapiens
cattttaagccaaat

SEQ ID NO: 1314076 - DNA, 15 bp, Homo sapiens
ccattttaagccaaa

SEQ ID NO: 1314077 - DNA, 15 bp, Homo sapiens
gccattttaagccaa

SEQ ID NO: 1314078 - DNA, 15 bp, Homo sapiens
ggccattttaagcca

SEQ ID NO: 1314079 - DNA, 15 bp, Homo sapiens
tggccattttaagcc

SEQ ID NO: 1314080 - DNA, 15 bp, Homo sapiens
ctggccattttaagc

SEQ ID NO: 1314081 - DNA, 15 bp, Homo sapiens
tctggccattttaag

SEQ ID NO: 1314082 - DNA, 15 bp, Homo sapiens
ttctggccattttaa

SEQ ID NO: 1314083 - DNA, 15 bp, Homo sapiens
cttctggccatttta

SEQ ID NO: 1314084 - DNA, 15 bp, Homo sapiens
tcttctggccatttt

SEQ ID NO: 1314085 - DNA, 15 bp, Homo sapiens
ctcttctggccattt

SEQ ID NO: 1314086 - DNA, 15 bp, Homo sapiens
actcttctggccatt

SEQ ID NO: 1314087 - DNA, 15 bp, Homo sapiens
cactcttctggccat

SEQ ID NO: 1314088 - DNA, 15 bp, Homo sapiens
tcactcttctggcca

SEQ ID NO: 1314089 - DNA, 15 bp, Homo sapiens
ttcactcttctggcc

SEQ ID NO: 1314090 - DNA, 15 bp, Homo sapiens
cttcactcttctggc

SEQ ID NO: 1314091 - DNA, 15 bp, Homo sapiens
ccttcactcttctgg

SEQ ID NO: 1314092 - DNA, 15 bp, Homo sapiens
tccttcactcttctg

SEQ ID NO: 1314093 - DNA, 15 bp, Homo sapiens
ttccttcactcttct

SEQ ID NO: 1314094 - DNA, 15 bp, Homo sapiens
tttccttcactcttc

SEQ ID NO: 1314095 - DNA, 15 bp, Homo sapiens
ttttccttcactctt

SEQ ID NO: 1314096 - DNA, 15 bp, Homo sapiens
cttttccttcactct

SEQ ID NO: 1314097 - DNA, 15 bp, Homo sapiens
tcttttccttcactc

SEQ ID NO: 1314098 - DNA, 15 bp, Homo sapiens
ttcttttccttcact

SEQ ID NO: 1314099 - DNA, 15 bp, Homo sapiens
tttcttttccttcac

SEQ ID NO: 1314100 - DNA, 15 bp, Homo sapiens
ttttcttttccttca

SEQ ID NO: 1314101 - DNA, 15 bp, Homo sapiens
attttcttttccttc

SEQ ID NO: 1314102 - DNA, 15 bp, Homo sapiens
tattttcttttcctt

SEQ ID NO: 1314103 - DNA, 15 bp, Homo sapiens
atattttcttttcct

SEQ ID NO: 1314104 - DNA, 15 bp, Homo sapiens
aatattttcttttcc

SEQ ID NO: 1314105 - DNA, 15 bp, Homo sapiens
aaatattttcttttc

SEQ ID NO: 1314106 - DNA, 15 bp, Homo sapiens
taaatattttctttt

SEQ ID NO: 1314107 - DNA, 15 bp, Homo sapiens
gtaaatattttcttt

SEQ ID NO: 1314108 - DNA, 15 bp, Homo sapiens
tgtaaatattttctt

SEQ ID NO: 1314109 - DNA, 15 bp, Homo sapiens
ctgtaaatattttct

SEQ ID NO: 1314110 - DNA, 15 bp, Homo sapiens
actgtaaatattttc

SEQ ID NO: 1314111 - DNA, 15 bp, Homo sapiens
gactgtaaatatttt

SEQ ID NO: 1314112 - DNA, 15 bp, Homo sapiens
tgactgtaaatattt

SEQ ID NO: 1314113 - DNA, 15 bp, Homo sapiens
atgactgtaaatatt

SEQ ID NO: 1314114 - DNA, 15 bp, Homo sapiens
catgactgtaaatat

SEQ ID NO: 1314115 - DNA, 15 bp, Homo sapiens
gcatgactgtaaata

SEQ ID NO: 1314116 - DNA, 15 bp, Homo sapiens
tgcatgactgtaaat

SEQ ID NO: 1314117 - DNA, 15 bp, Homo sapiens
atgcatgactgtaaa

SEQ ID NO: 1314118 - DNA, 15 bp, Homo sapiens
gatgcatgactgtaa

SEQ ID NO: 1314119 - DNA, 15 bp, Homo sapiens
tgatgcatgactgta

SEQ ID NO: 1314120 - DNA, 15 bp, Homo sapiens
gtgatgcatgactgt

SEQ ID NO: 1314121 - DNA, 15 bp, Homo sapiens
cgtgatgcatgactg

SEQ ID NO: 1314122 - DNA, 15 bp, Homo sapiens
acgtgatgcatgact

SEQ ID NO: 1314123 - DNA, 15 bp, Homo sapiens
tacgtgatgcatgac

SEQ ID NO: 1314124 - DNA, 15 bp, Homo sapiens
ttacgtgatgcatga

SEQ ID NO: 1314125 - DNA, 15 bp, Homo sapiens
attacgtgatgcatg

SEQ ID NO: 1314126 - DNA, 15 bp, Homo sapiens
tattacgtgatgcat

SEQ ID NO: 1314127 - DNA, 15 bp, Homo sapiens
ctattacgtgatgca

SEQ ID NO: 1314128 - DNA, 15 bp, Homo sapiens
gctattacgtgatgc

SEQ ID NO: 1314129 - DNA, 15 bp, Homo sapiens
tgctattacgtgatg

SEQ ID NO: 1314130 - DNA, 15 bp, Homo sapiens
atgctattacgtgat

SEQ ID NO: 1314131 - DNA, 15 bp, Homo sapiens
aatgctattacgtga

SEQ ID NO: 1314132 - DNA, 15 bp, Homo sapiens
aaatgctattacgtg

SEQ ID NO: 1314133 - DNA, 15 bp, Homo sapiens
aaaatgctattacgt

SEQ ID NO: 1314134 - DNA, 15 bp, Homo sapiens
caaaatgctattacg

SEQ ID NO: 1314135 - DNA, 15 bp, Homo sapiens
ccaaaatgctattac

SEQ ID NO: 1314136 - DNA, 15 bp, Homo sapiens
accaaaatgctatta

SEQ ID NO: 1314137 - DNA, 15 bp, Homo sapiens
gaccaaaatgctatt

SEQ ID NO: 1314138 - DNA, 15 bp, Homo sapiens
tgaccaaaatgctat

SEQ ID NO: 1314139 - DNA, 15 bp, Homo sapiens
ttgaccaaaatgcta

SEQ ID NO: 1314140 - DNA, 15 bp, Homo sapiens
attgaccaaaatgct

SEQ ID NO: 1314141 - DNA, 15 bp, Homo sapiens
cattgaccaaaatgc

SEQ ID NO: 1314142 - DNA, 15 bp, Homo sapiens
tcattgaccaaaatg

SEQ ID NO: 1314143 - DNA, 15 bp, Homo sapiens
gtcattgaccaaaat

SEQ ID NO: 1314144 - DNA, 15 bp, Homo sapiens
ggtcattgaccaaaa

SEQ ID NO: 1314145 - DNA, 15 bp, Homo sapiens
cggtcattgaccaaa

SEQ ID NO: 1314146 - DNA, 15 bp, Homo sapiens
gcggtcattgaccaa

SEQ ID NO: 1314147 - DNA, 15 bp, Homo sapiens
tgcggtcattgacca

SEQ ID NO: 1314148 - DNA, 15 bp, Homo sapiens
atgcggtcattgacc

SEQ ID NO: 1314149 - DNA, 15 bp, Homo sapiens
tatgcggtcattgac

SEQ ID NO: 1314150 - DNA, 15 bp, Homo sapiens
ttatgcggtcattga

SEQ ID NO: 1314151 - DNA, 15 bp, Homo sapiens
tttatgcggtcattg

SEQ ID NO: 1314152 - DNA, 15 bp, Homo sapiens
gtttatgcggtcatt

SEQ ID NO: 1314153 - DNA, 15 bp, Homo sapiens
cgtttatgcggtcat

SEQ ID NO: 1314154 - DNA, 15 bp, Homo sapiens
tcgtttatgcggtca

SEQ ID NO: 1314155 - DNA, 15 bp, Homo sapiens
atcgtttatgcggtc

SEQ ID NO: 1314156 - DNA, 15 bp, Homo sapiens
catcgtttatgcggt

SEQ ID NO: 1314157 - DNA, 15 bp, Homo sapiens
ccatcgtttatgcgg

SEQ ID NO: 1314158 - DNA, 15 bp, Homo sapiens
accatcgtttatgcg

SEQ ID NO: 1314159 - DNA, 15 bp, Homo sapiens
caccatcgtttatgc

SEQ ID NO: 1314160 - DNA, 15 bp, Homo sapiens
ccaccatcgtttatg

SEQ ID NO: 1314161 - DNA, 15 bp, Homo sapiens
accaccatcgtttat

SEQ ID NO: 1314162 - DNA, 15 bp, Homo sapiens
gaccaccatcgttta

SEQ ID NO: 1314163 - DNA, 15 bp, Homo sapiens
agaccaccatcgttt

SEQ ID NO: 1314164 - DNA, 15 bp, Homo sapiens
gagaccaccatcgtt

SEQ ID NO: 1314165 - DNA, 15 bp, Homo sapiens
tgagaccaccatcgt

SEQ ID NO: 1314166 - DNA, 15 bp, Homo sapiens
atgagaccaccatcg

SEQ ID NO: 1314167 - DNA, 15 bp, Homo sapiens
tatgagaccaccatc

SEQ ID NO: 1314168 - DNA, 15 bp, Homo sapiens
ttatgagaccaccat

SEQ ID NO: 1314169 - DNA, 15 bp, Homo sapiens
cttatgagaccacca

SEQ ID NO: 1314170 - DNA, 15 bp, Homo sapiens
tcttatgagaccacc

SEQ ID NO: 1314171 - DNA, 15 bp, Homo sapiens
atcttatgagaccac

SEQ ID NO: 1314172 - DNA, 15 bp, Homo sapiens
aatcttatgagacca

SEQ ID NO: 1314173 - DNA, 15 bp, Homo sapiens
taatcttatgagacc

SEQ ID NO: 1314174 - DNA, 15 bp, Homo sapiens
ataatcttatgagac

SEQ ID NO: 1314175 - DNA, 15 bp, Homo sapiens
gataatcttatgaga

SEQ ID NO: 1314176 - DNA, 15 bp, Homo sapiens
tgataatcttatgag

SEQ ID NO: 1314177 - DNA, 15 bp, Homo sapiens
atgataatcttatga

SEQ ID NO: 1314178 - DNA, 15 bp, Homo sapiens
tatgataatcttatg

SEQ ID NO: 1314179 - DNA, 15 bp, Homo sapiens
gtatgataatcttat

SEQ ID NO: 1314180 - DNA, 15 bp, Homo sapiens
agtatgataatctta

SEQ ID NO: 1314181 - DNA, 15 bp, Homo sapiens
tagtatgataatctt

SEQ ID NO: 1314182 - DNA, 15 bp, Homo sapiens
atagtatgataatct

SEQ ID NO: 1314183 - DNA, 15 bp, Homo sapiens
tatagtatgataatc

SEQ ID NO: 1314184 - DNA, 15 bp, Homo sapiens
atatagtatgataat

SEQ ID NO: 1314185 - DNA, 15 bp, Homo sapiens
aatatagtatgataa

SEQ ID NO: 1314186 - DNA, 15 bp, Homo sapiens
aaatatagtatgata

SEQ ID NO: 1314187 - DNA, 15 bp, Homo sapiens
aaaatatagtatgat

SEQ ID NO: 1314188 - DNA, 15 bp, Homo sapiens
aaaaatatagtatga

SEQ ID NO: 1314189 - DNA, 15 bp, Homo sapiens
taaaaatatagtatg

SEQ ID NO: 1314190 - DNA, 15 bp, Homo sapiens
gtaaaaatatagtat

SEQ ID NO: 1314191 - DNA, 15 bp, Homo sapiens
agtaaaaatatagta

SEQ ID NO: 1314192 - DNA, 15 bp, Homo sapiens
cagtaaaaatatagt

SEQ ID NO: 1314193 - DNA, 15 bp, Homo sapiens
acagtaaaaatatag

SEQ ID NO: 1314194 - DNA, 15 bp, Homo sapiens
tacagtaaaaatata

SEQ ID NO: 1314195 - DNA, 15 bp, Homo sapiens
gtacagtaaaaatat

SEQ ID NO: 1314196 - DNA, 15 bp, Homo sapiens
ggtacagtaaaaata

SEQ ID NO: 1314197 - DNA, 15 bp, Homo sapiens
aggtacagtaaaaat

SEQ ID NO: 1314198 - DNA, 15 bp, Homo sapiens
aaggtacagtaaaaa

SEQ ID NO: 1314199 - DNA, 15 bp, Homo sapiens
aaaggtacagtaaaa

SEQ ID NO: 1314200 - DNA, 15 bp, Homo sapiens
aaaaggtacagtaaa

SEQ ID NO: 1314201 - DNA, 15 bp, Homo sapiens
gaaaaggtacagtaa

SEQ ID NO: 1314202 - DNA, 15 bp, Homo sapiens
cagaaaaggtacagt

SEQ ID NO: 1314203 - DNA, 15 bp, Homo sapiens
acagaaaaggtacag

SEQ ID NO: 1314204 - DNA, 15 bp, Homo sapiens
cacagaaaaggtaca

SEQ ID NO: 1314205 - DNA, 15 bp, Homo sapiens
acacagaaaaggtac

SEQ ID NO: 1314206 - DNA, 15 bp, Homo sapiens
aacacagaaaaggta

SEQ ID NO: 1314207 - DNA, 15 bp, Homo sapiens
caacacagaaaaggt

SEQ ID NO: 1314208 - DNA, 15 bp, Homo sapiens
tcaacacagaaaagg

SEQ ID NO: 1314209 - DNA, 15 bp, Homo sapiens
ctcaacacagaaaag

SEQ ID NO: 1314210 - DNA, 15 bp, Homo sapiens
tctcaacacagaaaa

SEQ ID NO: 1314211 - DNA, 15 bp, Homo sapiens
atctcaacacagaaa

SEQ ID NO: 1314212 - DNA, 15 bp, Homo sapiens
catctcaacacagaa

SEQ ID NO: 1314213 - DNA, 15 bp, Homo sapiens
acatctcaacacaga

SEQ ID NO: 1314214 - DNA, 15 bp, Homo sapiens
tacatctcaacacag

SEQ ID NO: 1314215 - DNA, 15 bp, Homo sapiens
atacatctcaacaca

SEQ ID NO: 1314216 - DNA, 15 bp, Homo sapiens
aatacatctcaacac

SEQ ID NO: 1314217 - DNA, 15 bp, Homo sapiens
aaatacatctcaaca

SEQ ID NO: 1314218 - DNA, 15 bp, Homo sapiens
taaatacatctcaac

SEQ ID NO: 1314219 - DNA, 15 bp, Homo sapiens
ctaaatacatctcaa

SEQ ID NO: 1314220 - DNA, 15 bp, Homo sapiens
tctaaatacatctca

SEQ ID NO: 1314221 - DNA, 15 bp, Homo sapiens
atctaaatacatctc

SEQ ID NO: 1314222 - DNA, 15 bp, Homo sapiens
tatctaaatacatct

SEQ ID NO: 1314223 - DNA, 15 bp, Homo sapiens
gtatctaaatacatc

SEQ ID NO: 1314224 - DNA, 15 bp, Homo sapiens
tgtatctaaatacat

SEQ ID NO: 1314225 - DNA, 15 bp, Homo sapiens
gtgtatctaaataca

SEQ ID NO: 1314226 - DNA, 15 bp, Homo sapiens
tgtgtatctaaatac

SEQ ID NO: 1314227 - DNA, 15 bp, Homo sapiens
ttgtgtatctaaata

SEQ ID NO: 1314228 - DNA, 15 bp, Homo sapiens
cttgtgtatctaaat

SEQ ID NO: 1314229 - DNA, 15 bp, Homo sapiens
acttgtgtatctaaa

SEQ ID NO: 1314230 - DNA, 15 bp, Homo sapiens
tacttgtgtatctaa

SEQ ID NO: 1314231 - DNA, 15 bp, Homo sapiens
gtacttgtgtatcta

SEQ ID NO: 1314232 - DNA, 15 bp, Homo sapiens
ggtacttgtgtatct

SEQ ID NO: 1314233 - DNA, 15 bp, Homo sapiens
tggtacttgtgtatc

SEQ ID NO: 1314234 - DNA, 15 bp, Homo sapiens
atggtacttgtgtat

SEQ ID NO: 1314235 - DNA, 15 bp, Homo sapiens
aatggtacttgtgta

SEQ ID NO: 1314236 - DNA, 15 bp, Homo sapiens
taatggtacttgtgt

SEQ ID NO: 1314237 - DNA, 15 bp, Homo sapiens
ataatggtacttgtg

SEQ ID NO: 1314238 - DNA, 15 bp, Homo sapiens
atatgtggtttttat

SEQ ID NO: 1314239 - DNA, 15 bp, Homo sapiens
tatatgtggttttta

SEQ ID NO: 1314240 - DNA, 15 bp, Homo sapiens
atatatgtggttttt

SEQ ID NO: 1314241 - DNA, 15 bp, Homo sapiens
aatatatgtggtttt

SEQ ID NO: 1314242 - DNA, 15 bp, Homo sapiens
aaatatatgtggttt

SEQ ID NO: 1314243 - DNA, 15 bp, Homo sapiens
gaaatatatgtggtt

SEQ ID NO: 1314244 - DNA, 15 bp, Homo sapiens
agaaatatatgtggt

SEQ ID NO: 1314245 - DNA, 15 bp, Homo sapiens
tagaaatatatgtgg

SEQ ID NO: 1314246 - DNA, 15 bp, Homo sapiens
ttagaaatatatgtg

SEQ ID NO: 1314247 - DNA, 15 bp, Homo sapiens
cttagaaatatatgt

SEQ ID NO: 1314248 - DNA, 15 bp, Homo sapiens
acttagaaatatatg

SEQ ID NO: 1314249 - DNA, 15 bp, Homo sapiens
aacttagaaatatat

SEQ ID NO: 1314250 - DNA, 15 bp, Homo sapiens
taacttagaaatata

SEQ ID NO: 1314251 - DNA, 15 bp, Homo sapiens
ctaacttagaaatat

SEQ ID NO: 1314252 - DNA, 15 bp, Homo sapiens
actaacttagaaata

SEQ ID NO: 1314253 - DNA, 15 bp, Homo sapiens
aactaacttagaaat

SEQ ID NO: 1314254 - DNA, 15 bp, Homo sapiens
aaactaacttagaaa

SEQ ID NO: 1314255 - DNA, 15 bp, Homo sapiens
caaactaacttagaa

SEQ ID NO: 1314256 - DNA, 15 bp, Homo sapiens
gcaaactaacttaga

SEQ ID NO: 1314257 - DNA, 15 bp, Homo sapiens
agcaaactaacttag

SEQ ID NO: 1314258 - DNA, 15 bp, Homo sapiens
aagcaaactaactta

SEQ ID NO: 1314259 - DNA, 15 bp, Homo sapiens
caagcaaactaactt

SEQ ID NO: 1314260 - DNA, 15 bp, Homo sapiens
ccaagcaaactaact

SEQ ID NO: 1314261 - DNA, 15 bp, Homo sapiens
accaagcaaactaac

SEQ ID NO: 1314262 - DNA, 15 bp, Homo sapiens
caccaagcaaactaa

SEQ ID NO: 1314263 - DNA, 15 bp, Homo sapiens
ccaccaagcaaacta

SEQ ID NO: 1314264 - DNA, 15 bp, Homo sapiens
accaccaagcaaact

SEQ ID NO: 1314265 - DNA, 15 bp, Homo sapiens
aaccaccaagcaaac

SEQ ID NO: 1314266 - DNA, 15 bp, Homo sapiens
taaccaccaagcaaa

SEQ ID NO: 1314267 - DNA, 15 bp, Homo sapiens
ttaaccaccaagcaa

SEQ ID NO: 1314268 - DNA, 15 bp, Homo sapiens
gttaaccaccaagca

SEQ ID NO: 1314269 - DNA, 15 bp, Homo sapiens
tgttaaccaccaagc

SEQ ID NO: 1314270 - DNA, 15 bp, Homo sapiens
gtgttaaccaccaag

SEQ ID NO: 1314271 - DNA, 15 bp, Homo sapiens
tgtgttaaccaccaa

SEQ ID NO: 1314272 - DNA, 15 bp, Homo sapiens
atgtgttaaccacca

SEQ ID NO: 1314273 - DNA, 15 bp, Homo sapiens
aatgtgttaaccacc

SEQ ID NO: 1314274 - DNA, 15 bp, Homo sapiens
caatgtgttaaccac

SEQ ID NO: 1314275 - DNA, 15 bp, Homo sapiens
gcaatgtgttaacca

SEQ ID NO: 1314276 - DNA, 15 bp, Homo sapiens
tgcaatgtgttaacc

SEQ ID NO: 1314277 - DNA, 15 bp, Homo sapiens
atgcaatgtgttaac

SEQ ID NO: 1314278 - DNA, 15 bp, Homo sapiens
tatgcaatgtgttaa

SEQ ID NO: 1314279 - DNA, 15 bp, Homo sapiens
atatgcaatgtgtta

SEQ ID NO: 1314280 - DNA, 15 bp, Homo sapiens
aatatgcaatgtgtt

SEQ ID NO: 1314281 - DNA, 15 bp, Homo sapiens
caatatgcaatgtgt

SEQ ID NO: 1314282 - DNA, 15 bp, Homo sapiens
gcaatatgcaatgtg

SEQ ID NO: 1314283 - DNA, 15 bp, Homo sapiens
tgcaatatgcaatgt

SEQ ID NO: 1314284 - DNA, 15 bp, Homo sapiens
atgcaatatgcaatg

SEQ ID NO: 1314285 - DNA, 15 bp, Homo sapiens
aatgcaatatgcaat

SEQ ID NO: 1314286 - DNA, 15 bp, Homo sapiens
taatgcaatatgcaa

SEQ ID NO: 1314287 - DNA, 15 bp, Homo sapiens
ctaatgcaatatgca

SEQ ID NO: 1314288 - DNA, 15 bp, Homo sapiens
actaatgcaatatgc

SEQ ID NO: 1314289 - DNA, 15 bp, Homo sapiens
gactaatgcaatatg

SEQ ID NO: 1314290 - DNA, 15 bp, Homo sapiens
agactaatgcaatat

SEQ ID NO: 1314291 - DNA, 15 bp, Homo sapiens
aagactaatgcaata

SEQ ID NO: 1314292 - DNA, 15 bp, Homo sapiens
taagactaatgcaat

SEQ ID NO: 1314293 - DNA, 15 bp, Homo sapiens
ttaagactaatgcaa

SEQ ID NO: 1314294 - DNA, 15 bp, Homo sapiens
attaagactaatgca

SEQ ID NO: 1314295 - DNA, 15 bp, Homo sapiens
tattaagactaatgc

SEQ ID NO: 1314296 - DNA, 15 bp, Homo sapiens
atattaagactaatg

SEQ ID NO: 1314297 - DNA, 15 bp, Homo sapiens
gatattaagactaat

SEQ ID NO: 1314298 - DNA, 15 bp, Homo sapiens
ggatattaagactaa

SEQ ID NO: 1314299 - DNA, 15 bp, Homo sapiens
aggatattaagacta

SEQ ID NO: 1314300 - DNA, 15 bp, Homo sapiens
gaggatattaagact

SEQ ID NO: 1314301 - DNA, 15 bp, Homo sapiens
agaggatattaagac

SEQ ID NO: 1314302 - DNA, 15 bp, Homo sapiens
tagaggatattaaga

SEQ ID NO: 1314303 - DNA, 15 bp, Homo sapiens
ttagaggatattaag

SEQ ID NO: 1314304 - DNA, 15 bp, Homo sapiens
attagaggatattaa

SEQ ID NO: 1314305 - DNA, 15 bp, Homo sapiens
cattagaggatatta

SEQ ID NO: 1314306 - DNA, 15 bp, Homo sapiens
acattagaggatatt

SEQ ID NO: 1314307 - DNA, 15 bp, Homo sapiens
aacattagaggatat

SEQ ID NO: 1314308 - DNA, 15 bp, Homo sapiens
caacattagaggata

SEQ ID NO: 1314309 - DNA, 15 bp, Homo sapiens
ccaacattagaggat

SEQ ID NO: 1314310 - DNA, 15 bp, Homo sapiens
tccaacattagagga

SEQ ID NO: 1314311 - DNA, 15 bp, Homo sapiens
ctccaacattagagg

SEQ ID NO: 1314312 - DNA, 15 bp, Homo sapiens
gctccaacattagag

SEQ ID NO: 1314313 - DNA, 15 bp, Homo sapiens
agctccaacattaga

SEQ ID NO: 1314314 - DNA, 15 bp, Homo sapiens
tagctccaacattag

SEQ ID NO: 1314315 - DNA, 15 bp, Homo sapiens
ctagctccaacatta

SEQ ID NO: 1314316 - DNA, 15 bp, Homo sapiens
gctagctccaacatt

SEQ ID NO: 1314317 - DNA, 15 bp, Homo sapiens
tgctagctccaacat

SEQ ID NO: 1314318 - DNA, 15 bp, Homo sapiens
gtgctagctccaaca

SEQ ID NO: 1314319 - DNA, 15 bp, Homo sapiens
agtgctagctccaac

SEQ ID NO: 1314320 - DNA, 15 bp, Homo sapiens
cagtgctagctccaa

SEQ ID NO: 1314321 - DNA, 15 bp, Homo sapiens
ccagtgctagctcca

SEQ ID NO: 1314322 - DNA, 15 bp, Homo sapiens
tccagtgctagctcc

SEQ ID NO: 1314323 - DNA, 15 bp, Homo sapiens
atccagtgctagctc

SEQ ID NO: 1314324 - DNA, 15 bp, Homo sapiens
gatccagtgctagct

SEQ ID NO: 1314325 - DNA, 15 bp, Homo sapiens
ggatccagtgctagc

SEQ ID NO: 1314326 - DNA, 15 bp, Homo sapiens
aggatccagtgctag

SEQ ID NO: 1314327 - DNA, 15 bp, Homo sapiens
taggatccagtgcta

SEQ ID NO: 1314328 - DNA, 15 bp, Homo sapiens
ctaggatccagtgct

SEQ ID NO: 1314329 - DNA, 15 bp, Homo sapiens
tctaggatccagtgc

SEQ ID NO: 1314330 - DNA, 15 bp, Homo sapiens
ttctaggatccagtg

SEQ ID NO: 1314331 - DNA, 15 bp, Homo sapiens
tttctaggatccagt

SEQ ID NO: 1314332 - DNA, 15 bp, Homo sapiens
atttctaggatccag

SEQ ID NO: 1314333 - DNA, 15 bp, Homo sapiens
aatttctaggatcca

SEQ ID NO: 1314334 - DNA, 15 bp, Homo sapiens
gaatttctaggatcc

SEQ ID NO: 1314335 - DNA, 15 bp, Homo sapiens
tgaatttctaggatc

SEQ ID NO: 1314336 - DNA, 15 bp, Homo sapiens
ctgaatttctaggat

SEQ ID NO: 1314337 - DNA, 15 bp, Homo sapiens
tctgaatttctagga

SEQ ID NO: 1314338 - DNA, 15 bp, Homo sapiens
ttctgaatttctagg

SEQ ID NO: 1314339 - DNA, 15 bp, Homo sapiens
attctgaatttctag

SEQ ID NO: 1314340 - DNA, 15 bp, Homo sapiens
tattctgaatttcta

SEQ ID NO: 1314341 - DNA, 15 bp, Homo sapiens
ttattctgaatttct

SEQ ID NO: 1314342 - DNA, 15 bp, Homo sapiens
tttattctgaatttc

SEQ ID NO: 1314343 - DNA, 15 bp, Homo sapiens
ttttattctgaattt

SEQ ID NO: 1314344 - DNA, 15 bp, Homo sapiens
cttttattctgaatt

SEQ ID NO: 1314345 - DNA, 15 bp, Homo sapiens
acttttattctgaat

SEQ ID NO: 1314346 - DNA, 15 bp, Homo sapiens
gacttttattctgaa

SEQ ID NO: 1314347 - DNA, 15 bp, Homo sapiens
ggacttttattctga

SEQ ID NO: 1314348 - DNA, 15 bp, Homo sapiens
tggacttttattctg

SEQ ID NO: 1314349 - DNA, 15 bp, Homo sapiens
gtggacttttattct

SEQ ID NO: 1314350 - DNA, 15 bp, Homo sapiens
ggtggacttttattc

SEQ ID NO: 1314351 - DNA, 15 bp, Homo sapiens
aggtggacttttatt

SEQ ID NO: 1314352 - DNA, 15 bp, Homo sapiens
aaggtggacttttat

SEQ ID NO: 1314353 - DNA, 15 bp, Homo sapiens
taaggtggactttta

SEQ ID NO: 1314354 - DNA, 15 bp, Homo sapiens
gtaaggtggactttt

SEQ ID NO: 1314355 - DNA, 15 bp, Homo sapiens
ggtaaggtggacttt

SEQ ID NO: 1314356 - DNA, 15 bp, Homo sapiens
gggtaaggtggactt

SEQ ID NO: 1314357 - DNA, 15 bp, Homo sapiens
ggggtaaggtggact

SEQ ID NO: 1314358 - DNA, 15 bp, Homo sapiens
aggggtaaggtggac

SEQ ID NO: 1314359 - DNA, 15 bp, Homo sapiens
caggggtaaggtgga

SEQ ID NO: 1314360 - DNA, 15 bp, Homo sapiens
acaggggtaaggtgg

SEQ ID NO: 1314361 - DNA, 15 bp, Homo sapiens
aacaggggtaaggtg

SEQ ID NO: 1314362 - DNA, 15 bp, Homo sapiens
taacaggggtaaggt

SEQ ID NO: 1314363 - DNA, 15 bp, Homo sapiens
gtaacaggggtaagg

SEQ ID NO: 1314364 - DNA, 15 bp, Homo sapiens
tgtaacaggggtaag

SEQ ID NO: 1314365 - DNA, 15 bp, Homo sapiens
ttgtaacaggggtaa

SEQ ID NO: 1314366 - DNA, 15 bp, Homo sapiens
gttgtaacaggggta

SEQ ID NO: 1314367 - DNA, 15 bp, Homo sapiens
agttgtaacaggggt

SEQ ID NO: 1314368 - DNA, 15 bp, Homo sapiens
tagttgtaacagggg

SEQ ID NO: 1314369 - DNA, 15 bp, Homo sapiens
ctagttgtaacaggg

SEQ ID NO: 1314370 - DNA, 15 bp, Homo sapiens
gctagttgtaacagg

SEQ ID NO: 1314371 - DNA, 15 bp, Homo sapiens
ggctagttgtaacag

SEQ ID NO: 1314372 - DNA, 15 bp, Homo sapiens
tggctagttgtaaca

SEQ ID NO: 1314373 - DNA, 15 bp, Homo sapiens
atggctagttgtaac

SEQ ID NO: 1314374 - DNA, 15 bp, Homo sapiens
aatggctagttgtaa

SEQ ID NO: 1314375 - DNA, 15 bp, Homo sapiens
gaatggctagttgta

SEQ ID NO: 1314376 - DNA, 15 bp, Homo sapiens
tgaatggctagttgt

SEQ ID NO: 1314377 - DNA, 15 bp, Homo sapiens
atgaatggctagttg

SEQ ID NO: 1314378 - DNA, 15 bp, Homo sapiens
gatgaatggctagtt

SEQ ID NO: 1314379 - DNA, 15 bp, Homo sapiens
agatgaatggctagt

SEQ ID NO: 1314380 - DNA, 15 bp, Homo sapiens
aagatgaatggctag

SEQ ID NO: 1314381 - DNA, 15 bp, Homo sapiens
gaagatgaatggcta

SEQ ID NO: 1314382 - DNA, 15 bp, Homo sapiens
agaagatgaatggct

SEQ ID NO: 1314383 - DNA, 15 bp, Homo sapiens
aagaagatgaatggc

SEQ ID NO: 1314384 - DNA, 15 bp, Homo sapiens
aaagaagatgaatgg

SEQ ID NO: 1314385 - DNA, 15 bp, Homo sapiens
caaagaagatgaatg

SEQ ID NO: 1314386 - DNA, 15 bp, Homo sapiens
ccaaagaagatgaat

SEQ ID NO: 1314387 - DNA, 15 bp, Homo sapiens
accaaagaagatgaa

SEQ ID NO: 1314388 - DNA, 15 bp, Homo sapiens
taccaaagaagatga

SEQ ID NO: 1314389 - DNA, 15 bp, Homo sapiens
ataccaaagaagatg

SEQ ID NO: 1314390 - DNA, 15 bp, Homo sapiens
tataccaaagaagat

SEQ ID NO: 1314391 - DNA, 15 bp, Homo sapiens
atataccaaagaaga

SEQ ID NO: 1314392 - DNA, 15 bp, Homo sapiens
tatataccaaagaag

SEQ ID NO: 1314393 - DNA, 15 bp, Homo sapiens
ctatataccaaagaa

SEQ ID NO: 1314394 - DNA, 15 bp, Homo sapiens
actatataccaaaga

SEQ ID NO: 1314395 - DNA, 15 bp, Homo sapiens
aactatataccaaag

SEQ ID NO: 1314396 - DNA, 15 bp, Homo sapiens
aaactatataccaaa

SEQ ID NO: 1314397 - DNA, 15 bp, Homo sapiens
taaactatataccaa

SEQ ID NO: 1314398 - DNA, 15 bp, Homo sapiens
ctaaactatatacca

SEQ ID NO: 1314399 - DNA, 15 bp, Homo sapiens
gctaaactatatacc

SEQ ID NO: 1314400 - DNA, 15 bp, Homo sapiens
agctaaactatatac

SEQ ID NO: 1314401 - DNA, 15 bp, Homo sapiens
gagctaaactatata

SEQ ID NO: 1314402 - DNA, 15 bp, Homo sapiens
agagctaaactatat

SEQ ID NO: 1314403 - DNA, 15 bp, Homo sapiens
gagagctaaactata

SEQ ID NO: 1314404 - DNA, 15 bp, Homo sapiens
ggagagctaaactat

SEQ ID NO: 1314405 - DNA, 15 bp, Homo sapiens
aggagagctaaacta

SEQ ID NO: 1314406 - DNA, 15 bp, Homo sapiens
aaggagagctaaact

SEQ ID NO: 1314407 - DNA, 15 bp, Homo sapiens
gaaggagagctaaac

SEQ ID NO: 1314408 - DNA, 15 bp, Homo sapiens
ggaaggagagctaaa

SEQ ID NO: 1314409 - DNA, 15 bp, Homo sapiens
tggaaggagagctaa

SEQ ID NO: 1314410 - DNA, 15 bp, Homo sapiens
ctggaaggagagcta

SEQ ID NO: 1314411 - DNA, 15 bp, Homo sapiens
actggaaggagagct

SEQ ID NO: 1314412 - DNA, 15 bp, Homo sapiens
gactggaaggagagc

SEQ ID NO: 1314413 - DNA, 15 bp, Homo sapiens
tgactggaaggagag

SEQ ID NO: 1314414 - DNA, 15 bp, Homo sapiens
gtgactggaaggaga

SEQ ID NO: 1314415 - DNA, 15 bp, Homo sapiens
agtgactggaaggag

SEQ ID NO: 1314416 - DNA, 15 bp, Homo sapiens
gagtgactggaagga

SEQ ID NO: 1314417 - DNA, 15 bp, Homo sapiens
tgagtgactggaagg

SEQ ID NO: 1314418 - DNA, 15 bp, Homo sapiens
ttgagtgactggaag

SEQ ID NO: 1314419 - DNA, 15 bp, Homo sapiens
cttgagtgactggaa

SEQ ID NO: 1314420 - DNA, 15 bp, Homo sapiens
acttgagtgactgga

SEQ ID NO: 1314421 - DNA, 15 bp, Homo sapiens
tacttgagtgactgg

SEQ ID NO: 1314422 - DNA, 15 bp, Homo sapiens
gtacttgagtgactg

SEQ ID NO: 1314423 - DNA, 15 bp, Homo sapiens
tgtacttgagtgact

SEQ ID NO: 1314424 - DNA, 15 bp, Homo sapiens
ttgtacttgagtgac

SEQ ID NO: 1314425 - DNA, 15 bp, Homo sapiens
gttgtacttgagtga

SEQ ID NO: 1314426 - DNA, 15 bp, Homo sapiens
agttgtacttgagtg

SEQ ID NO: 1314427 - DNA, 15 bp, Homo sapiens
aagttgtacttgagt

SEQ ID NO: 1314428 - DNA, 15 bp, Homo sapiens
taagttgtacttgag

SEQ ID NO: 1314429 - DNA, 15 bp, Homo sapiens
ctaagttgtacttga

SEQ ID NO: 1314430 - DNA, 15 bp, Homo sapiens
cctaagttgtacttg

SEQ ID NO: 1314431 - DNA, 15 bp, Homo sapiens
tcctaagttgtactt

SEQ ID NO: 1314432 - DNA, 15 bp, Homo sapiens
ttcctaagttgtact

SEQ ID NO: 1314433 - DNA, 15 bp, Homo sapiens
tttcctaagttgtac

SEQ ID NO: 1314434 - DNA, 15 bp, Homo sapiens
gtttcctaagttgta

SEQ ID NO: 1314435 - DNA, 15 bp, Homo sapiens
agtttcctaagttgt

SEQ ID NO: 1314436 - DNA, 15 bp, Homo sapiens
tagtttcctaagttg

SEQ ID NO: 1314437 - DNA, 15 bp, Homo sapiens
ttagtttcctaagtt

SEQ ID NO: 1314438 - DNA, 15 bp, Homo sapiens
tttagtttcctaagt

SEQ ID NO: 1314439 - DNA, 15 bp, Homo sapiens
ttttagtttcctaag

SEQ ID NO: 1314440 - DNA, 15 bp, Homo sapiens
gttttagtttcctaa

SEQ ID NO: 1314441 - DNA, 15 bp, Homo sapiens
ggttttagtttccta

SEQ ID NO: 1314442 - DNA, 15 bp, Homo sapiens
tggttttagtttcct

SEQ ID NO: 1314443 - DNA, 15 bp, Homo sapiens
atggttttagtttcc

SEQ ID NO: 1314444 - DNA, 15 bp, Homo sapiens
tatggttttagtttc

SEQ ID NO: 1314445 - DNA, 15 bp, Homo sapiens
ctatggttttagttt

SEQ ID NO: 1314446 - DNA, 15 bp, Homo sapiens
gctatggttttagtt

SEQ ID NO: 1314447 - DNA, 15 bp, Homo sapiens
agctatggttttagt

SEQ ID NO: 1314448 - DNA, 15 bp, Homo sapiens
cagctatggttttag

SEQ ID NO: 1314449 - DNA, 15 bp, Homo sapiens
tcagctatggtttta

SEQ ID NO: 1314450 - DNA, 15 bp, Homo sapiens
atcagctatggtttt

SEQ ID NO: 1314451 - DNA, 15 bp, Homo sapiens
aatcagctatggttt

SEQ ID NO: 1314452 - DNA, 15 bp, Homo sapiens
taatcagctatggtt

SEQ ID NO: 1314453 - DNA, 15 bp, Homo sapiens
ataatcagctatggt

SEQ ID NO: 1314454 - DNA, 15 bp, Homo sapiens
aataatcagctatgg

SEQ ID NO: 1314455 - DNA, 15 bp, Homo sapiens
caataatcagctatg

SEQ ID NO: 1314456 - DNA, 15 bp, Homo sapiens
gcaataatcagctat

SEQ ID NO: 1314457 - DNA, 15 bp, Homo sapiens
agcaataatcagcta

SEQ ID NO: 1314458 - DNA, 15 bp, Homo sapiens
cagcaataatcagct

SEQ ID NO: 1314459 - DNA, 15 bp, Homo sapiens
ccagcaataatcagc

SEQ ID NO: 1314460 - DNA, 15 bp, Homo sapiens
tccagcaataatcag

SEQ ID NO: 1314461 - DNA, 15 bp, Homo sapiens
ctccagcaataatca

SEQ ID NO: 1314462 - DNA, 15 bp, Homo sapiens
gctccagcaataatc

SEQ ID NO: 1314463 - DNA, 15 bp, Homo sapiens
tgctccagcaataat

SEQ ID NO: 1314464 - DNA, 15 bp, Homo sapiens
ctgctccagcaataa

SEQ ID NO: 1314465 - DNA, 15 bp, Homo sapiens
cctgctccagcaata

SEQ ID NO: 1314466 - DNA, 15 bp, Homo sapiens
tcctgctccagcaat

SEQ ID NO: 1314467 - DNA, 15 bp, Homo sapiens
ttcctgctccagcaa

SEQ ID NO: 1314468 - DNA, 15 bp, Homo sapiens
gttcctgctccagca

SEQ ID NO: 1314469 - DNA, 15 bp, Homo sapiens
agttcctgctccagc

SEQ ID NO: 1314470 - DNA, 15 bp, Homo sapiens
gagttcctgctccag

SEQ ID NO: 1314471 - DNA, 15 bp, Homo sapiens
cgagttcctgctcca

SEQ ID NO: 1314472 - DNA, 15 bp, Homo sapiens
tcgagttcctgctcc

SEQ ID NO: 1314473 - DNA, 15 bp, Homo sapiens
ttcgagttcctgctc

SEQ ID NO: 1314474 - DNA, 15 bp, Homo sapiens
attcgagttcctgct

SEQ ID NO: 1314475 - DNA, 15 bp, Homo sapiens
gattcgagttcctgc

SEQ ID NO: 1314476 - DNA, 15 bp, Homo sapiens
ggattcgagttcctg

SEQ ID NO: 1314477 - DNA, 15 bp, Homo sapiens
aggattcgagttcct

SEQ ID NO: 1314478 - DNA, 15 bp, Homo sapiens
taggattcgagttcc

SEQ ID NO: 1314479 - DNA, 15 bp, Homo sapiens
ctaggattcgagttc

SEQ ID NO: 1314480 - DNA, 15 bp, Homo sapiens
actaggattcgagtt

SEQ ID NO: 1314481 - DNA, 15 bp, Homo sapiens
aactaggattcgagt

SEQ ID NO: 1314482 - DNA, 15 bp, Homo sapiens
aaactaggattcgag

SEQ ID NO: 1314483 - DNA, 15 bp, Homo sapiens
gaaactaggattcga

SEQ ID NO: 1314484 - DNA, 15 bp, Homo sapiens
agaaactaggattcg

SEQ ID NO: 1314485 - DNA, 15 bp, Homo sapiens
aagaaactaggattc

SEQ ID NO: 1314486 - DNA, 15 bp, Homo sapiens
caagaaactaggatt

SEQ ID NO: 1314487 - DNA, 15 bp, Homo sapiens
tcaagaaactaggat

SEQ ID NO: 1314488 - DNA, 15 bp, Homo sapiens
gtcaagaaactagga

SEQ ID NO: 1314489 - DNA, 15 bp, Homo sapiens
agtcaagaaactagg

SEQ ID NO: 1314490 - DNA, 15 bp, Homo sapiens
aagtcaagaaactag

SEQ ID NO: 1314491 - DNA, 15 bp, Homo sapiens
gaagtcaagaaacta

SEQ ID NO: 1314492 - DNA, 15 bp, Homo sapiens
agaagtcaagaaact

SEQ ID NO: 1314493 - DNA, 15 bp, Homo sapiens
tagaagtcaagaaac

SEQ ID NO: 1314494 - DNA, 15 bp, Homo sapiens
ctagaagtcaagaaa

SEQ ID NO: 1314495 - DNA, 15 bp, Homo sapiens
actagaagtcaagaa

SEQ ID NO: 1314496 - DNA, 15 bp, Homo sapiens
gactagaagtcaaga

SEQ ID NO: 1314497 - DNA, 15 bp, Homo sapiens
tgactagaagtcaag

SEQ ID NO: 1314498 - DNA, 15 bp, Homo sapiens
ttgactagaagtcaa

SEQ ID NO: 1314499 - DNA, 15 bp, Homo sapiens
tttgactagaagtca

SEQ ID NO: 1314500 - DNA, 15 bp, Homo sapiens
atttgactagaagtc

SEQ ID NO: 1314501 - DNA, 15 bp, Homo sapiens
catttgactagaagt

SEQ ID NO: 1314502 - DNA, 15 bp, Homo sapiens
acatttgactagaag

SEQ ID NO: 1314503 - DNA, 15 bp, Homo sapiens
aacatttgactagaa

SEQ ID NO: 1314504 - DNA, 15 bp, Homo sapiens
gaacatttgactaga

SEQ ID NO: 1314505 - DNA, 15 bp, Homo sapiens
agaacatttgactag

SEQ ID NO: 1314506 - DNA, 15 bp, Homo sapiens
gagaacatttgacta

SEQ ID NO: 1314507 - DNA, 15 bp, Homo sapiens
cgagaacatttgact

SEQ ID NO: 1314508 - DNA, 15 bp, Homo sapiens
acgagaacatttgac

SEQ ID NO: 1314509 - DNA, 15 bp, Homo sapiens
tacgagaacatttga

SEQ ID NO: 1314510 - DNA, 15 bp, Homo sapiens
ctacgagaacatttg

SEQ ID NO: 1314511 - DNA, 15 bp, Homo sapiens
actacgagaacattt

SEQ ID NO: 1314512 - DNA, 15 bp, Homo sapiens
tactacgagaacatt

SEQ ID NO: 1314513 - DNA, 15 bp, Homo sapiens
ttactacgagaacat

SEQ ID NO: 1314514 - DNA, 15 bp, Homo sapiens
gttactacgagaaca

SEQ ID NO: 1314515 - DNA, 15 bp, Homo sapiens
tgttactacgagaac

SEQ ID NO: 1314516 - DNA, 15 bp, Homo sapiens
ctgttactacgagaa

SEQ ID NO: 1314517 - DNA, 15 bp, Homo sapiens
cctgttactacgaga

SEQ ID NO: 1314518 - DNA, 15 bp, Homo sapiens
acctgttactacgag

SEQ ID NO: 1314519 - DNA, 15 bp, Homo sapiens
tacctgttactacga

SEQ ID NO: 1314520 - DNA, 15 bp, Homo sapiens
ctacctgttactacg

SEQ ID NO: 1314521 - DNA, 15 bp, Homo sapiens
gctacctgttactac

SEQ ID NO: 1314522 - DNA, 15 bp, Homo sapiens
agctacctgttacta

SEQ ID NO: 1314523 - DNA, 15 bp, Homo sapiens
aagctacctgttact

SEQ ID NO: 1314524 - DNA, 15 bp, Homo sapiens
aaagctacctgttac

SEQ ID NO: 1314525 - DNA, 15 bp, Homo sapiens
gaaagctacctgtta

SEQ ID NO: 1314526 - DNA, 15 bp, Homo sapiens
tgaaagctacctgtt

SEQ ID NO: 1314527 - DNA, 15 bp, Homo sapiens
gtgaaagctacctgt

SEQ ID NO: 1314528 - DNA, 15 bp, Homo sapiens
ggtgaaagctacctg

SEQ ID NO: 1314529 - DNA, 15 bp, Homo sapiens
gggtgaaagctacct

SEQ ID NO: 1314530 - DNA, 15 bp, Homo sapiens
agggtgaaagctacc

SEQ ID NO: 1314531 - DNA, 15 bp, Homo sapiens
aagggtgaaagctac

SEQ ID NO: 1314532 - DNA, 15 bp, Homo sapiens
aaagggtgaaagcta

SEQ ID NO: 1314533 - DNA, 15 bp, Homo sapiens
aaaagggtgaaagct

SEQ ID NO: 1314534 - DNA, 15 bp, Homo sapiens
aaaaagggtgaaagc

SEQ ID NO: 1314535 - DNA, 15 bp, Homo sapiens
aaaaaagggtgaaag

SEQ ID NO: 1314536 - DNA, 15 bp, Homo sapiens
aaaaaaagggtgaaa

SEQ ID NO: 1314537 - DNA, 15 bp, Homo sapiens
gaaaaaaagggtgaa

SEQ ID NO: 1314538 - DNA, 15 bp, Homo sapiens
agaaaaaaagggtga

SEQ ID NO: 1314539 - DNA, 15 bp, Homo sapiens
aagaaaaaaagggtg

SEQ ID NO: 1314540 - DNA, 15 bp, Homo sapiens
taagaaaaaaagggt

SEQ ID NO: 1314541 - DNA, 15 bp, Homo sapiens
gtaagaaaaaaaggg

SEQ ID NO: 1314542 - DNA, 15 bp, Homo sapiens
cagtaagaaaaaaag

SEQ ID NO: 1314543 - DNA, 15 bp, Homo sapiens
tcagtaagaaaaaaa

SEQ ID NO: 1314544 - DNA, 15 bp, Homo sapiens
atcagtaagaaaaaa

SEQ ID NO: 1314545 - DNA, 15 bp, Homo sapiens
catcagtaagaaaaa

SEQ ID NO: 1314546 - DNA, 15 bp, Homo sapiens
acatcagtaagaaaa

SEQ ID NO: 1314547 - DNA, 15 bp, Homo sapiens
aacatcagtaagaaa

SEQ ID NO: 1314548 - DNA, 15 bp, Homo sapiens
caacatcagtaagaa

SEQ ID NO: 1314549 - DNA, 15 bp, Homo sapiens
acaacatcagtaaga

SEQ ID NO: 1314550 - DNA, 15 bp, Homo sapiens
cacaacatcagtaag

SEQ ID NO: 1314551 - DNA, 15 bp, Homo sapiens
gcacaacatcagtaa

SEQ ID NO: 1314552 - DNA, 15 bp, Homo sapiens
agcacaacatcagta

SEQ ID NO: 1314553 - DNA, 15 bp, Homo sapiens
tagcacaacatcagt

SEQ ID NO: 1314554 - DNA, 15 bp, Homo sapiens
ctagcacaacatcag

SEQ ID NO: 1314555 - DNA, 15 bp, Homo sapiens
actagcacaacatca

SEQ ID NO: 1314556 - DNA, 15 bp, Homo sapiens
aactagcacaacatc

SEQ ID NO: 1314557 - DNA, 15 bp, Homo sapiens
gaactagcacaacat

SEQ ID NO: 1314558 - DNA, 15 bp, Homo sapiens
cgaactagcacaaca

SEQ ID NO: 1314559 - DNA, 15 bp, Homo sapiens
acgaactagcacaac

SEQ ID NO: 1314560 - DNA, 15 bp, Homo sapiens
aacgaactagcacaa

SEQ ID NO: 1314561 - DNA, 15 bp, Homo sapiens
gaacgaactagcaca

SEQ ID NO: 1314562 - DNA, 15 bp, Homo sapiens
agaacgaactagcac

SEQ ID NO: 1314563 - DNA, 15 bp, Homo sapiens
aagaacgaactagca

SEQ ID NO: 1314564 - DNA, 15 bp, Homo sapiens
caagaacgaactagc

SEQ ID NO: 1314565 - DNA, 15 bp, Homo sapiens
gcaagaacgaactag

SEQ ID NO: 1314566 - DNA, 15 bp, Homo sapiens
tgcaagaacgaacta

SEQ ID NO: 1314567 - DNA, 15 bp, Homo sapiens
atgcaagaacgaact

SEQ ID NO: 1314568 - DNA, 15 bp, Homo sapiens
aatgcaagaacgaac

SEQ ID NO: 1314569 - DNA, 15 bp, Homo sapiens
caatgcaagaacgaa

SEQ ID NO: 1314570 - DNA, 15 bp, Homo sapiens
gcaatgcaagaacga

SEQ ID NO: 1314571 - DNA, 15 bp, Homo sapiens
agcaatgcaagaacg

SEQ ID NO: 1314572 - DNA, 15 bp, Homo sapiens
cagcaatgcaagaac

SEQ ID NO: 1314573 - DNA, 15 bp, Homo sapiens
acagcaatgcaagaa

SEQ ID NO: 1314574 - DNA, 15 bp, Homo sapiens
tacagcaatgcaaga

SEQ ID NO: 1314575 - DNA, 15 bp, Homo sapiens
ttacagcaatgcaag

SEQ ID NO: 1314576 - DNA, 15 bp, Homo sapiens
tttacagcaatgcaa

SEQ ID NO: 1314577 - DNA, 15 bp, Homo sapiens
ctttacagcaatgca

SEQ ID NO: 1314578 - DNA, 15 bp, Homo sapiens
tctttacagcaatgc

SEQ ID NO: 1314579 - DNA, 15 bp, Homo sapiens
ttctttacagcaatg

SEQ ID NO: 1314580 - DNA, 15 bp, Homo sapiens
tttctttacagcaat

SEQ ID NO: 1314581 - DNA, 15 bp, Homo sapiens
atttctttacagcaa

SEQ ID NO: 1314582 - DNA, 15 bp, Homo sapiens
tatttctttacagca

SEQ ID NO: 1314583 - DNA, 15 bp, Homo sapiens
gtatttctttacagc

SEQ ID NO: 1314584 - DNA, 15 bp, Homo sapiens
ggtatttctttacag

SEQ ID NO: 1314585 - DNA, 15 bp, Homo sapiens
aggtatttctttaca

SEQ ID NO: 1314586 - DNA, 15 bp, Homo sapiens
caggtatttctttac

SEQ ID NO: 1314587 - DNA, 15 bp, Homo sapiens
caaattacccagtct

SEQ ID NO: 1314588 - DNA, 15 bp, Homo sapiens
acaaattacccagtc

SEQ ID NO: 1314589 - DNA, 15 bp, Homo sapiens
tacaaattacccagt

SEQ ID NO: 1314590 - DNA, 15 bp, Homo sapiens
ttacaaattacccag

SEQ ID NO: 1314591 - DNA, 15 bp, Homo sapiens
tttacaaattaccca

SEQ ID NO: 1314592 - DNA, 15 bp, Homo sapiens
ctttacaaattaccc

SEQ ID NO: 1314593 - DNA, 15 bp, Homo sapiens
tctttacaaattacc

SEQ ID NO: 1314594 - DNA, 15 bp, Homo sapiens
ttctttacaaattac

SEQ ID NO: 1314595 - DNA, 15 bp, Homo sapiens
tttctttacaaatta

SEQ ID NO: 1314596 - DNA, 15 bp, Homo sapiens
ttttctttacaaatt

SEQ ID NO: 1314597 - DNA, 15 bp, Homo sapiens
cttttctttacaaat

SEQ ID NO: 1314598 - DNA, 15 bp, Homo sapiens
tcttttctttacaaa

SEQ ID NO: 1314599 - DNA, 15 bp, Homo sapiens
ctcttttctttacaa

SEQ ID NO: 1314600 - DNA, 15 bp, Homo sapiens
actcttttctttaca

SEQ ID NO: 1314601 - DNA, 15 bp, Homo sapiens
tactcttttctttac

SEQ ID NO: 1314602 - DNA, 15 bp, Homo sapiens
ctactcttttcttta

SEQ ID NO: 1314603 - DNA, 15 bp, Homo sapiens
cctactcttttcttt

SEQ ID NO: 1314604 - DNA, 15 bp, Homo sapiens
ccctactcttttctt

SEQ ID NO: 1314605 - DNA, 15 bp, Homo sapiens
accctactcttttct

SEQ ID NO: 1314606 - DNA, 15 bp, Homo sapiens
aaccctactcttttc

SEQ ID NO: 1314607 - DNA, 15 bp, Homo sapiens
aaaccctactctttt

SEQ ID NO: 1314608 - DNA, 15 bp, Homo sapiens
taaaccctactcttt

SEQ ID NO: 1314609 - DNA, 15 bp, Homo sapiens
ctaaaccctactctt

SEQ ID NO: 1314610 - DNA, 15 bp, Homo sapiens
actaaaccctactct

SEQ ID NO: 1314611 - DNA, 15 bp, Homo sapiens
aactaaaccctactc

SEQ ID NO: 1314612 - DNA, 15 bp, Homo sapiens
caactaaaccctact

SEQ ID NO: 1314613 - DNA, 15 bp, Homo sapiens
ccaactaaaccctac

SEQ ID NO: 1314614 - DNA, 15 bp, Homo sapiens
gccaactaaacccta

SEQ ID NO: 1314615 - DNA, 15 bp, Homo sapiens
agccaactaaaccct

SEQ ID NO: 1314616 - DNA, 15 bp, Homo sapiens
gagccaactaaaccc

SEQ ID NO: 1314617 - DNA, 15 bp, Homo sapiens
tgagccaactaaacc

SEQ ID NO: 1314618 - DNA, 15 bp, Homo sapiens
gtgagccaactaaac

SEQ ID NO: 1314619 - DNA, 15 bp, Homo sapiens
cgtgagccaactaaa

SEQ ID NO: 1314620 - DNA, 15 bp, Homo sapiens
ccgtgagccaactaa

SEQ ID NO: 1314621 - DNA, 15 bp, Homo sapiens
accgtgagccaacta

SEQ ID NO: 1314622 - DNA, 15 bp, Homo sapiens
aaccgtgagccaact

SEQ ID NO: 1314623 - DNA, 15 bp, Homo sapiens
gaaccgtgagccaac

SEQ ID NO: 1314624 - DNA, 15 bp, Homo sapiens
agaaccgtgagccaa

SEQ ID NO: 1314625 - DNA, 15 bp, Homo sapiens
tgtacagcctgaaga

SEQ ID NO: 1314626 - DNA, 15 bp, Homo sapiens
ctgtacagcctgaag

SEQ ID NO: 1314627 - DNA, 15 bp, Homo sapiens
cctgtacagcctgaa

SEQ ID NO: 1314628 - DNA, 15 bp, Homo sapiens
tcctgtacagcctga

SEQ ID NO: 1314629 - DNA, 15 bp, Homo sapiens
tgccatgcttcctgt

SEQ ID NO: 1314630 - DNA, 15 bp, Homo sapiens
atgccatgcttcctg

SEQ ID NO: 1314631 - DNA, 15 bp, Homo sapiens
gatgccatgcttcct

SEQ ID NO: 1314632 - DNA, 15 bp, Homo sapiens
tgatgccatgcttcc

SEQ ID NO: 1314633 - DNA, 15 bp, Homo sapiens
ctgatgccatgcttc

SEQ ID NO: 1314634 - DNA, 15 bp, Homo sapiens
gctgatgccatgctt

SEQ ID NO: 1314635 - DNA, 15 bp, Homo sapiens
agctgatgccatgct

SEQ ID NO: 1314636 - DNA, 15 bp, Homo sapiens
aagctgatgccatgc

SEQ ID NO: 1314637 - DNA, 15 bp, Homo sapiens
gaagctgatgccatg

SEQ ID NO: 1314638 - DNA, 15 bp, Homo sapiens
agaagctgatgccat

SEQ ID NO: 1314639 - DNA, 15 bp, Homo sapiens
gagaagctgatgcca

SEQ ID NO: 1314640 - DNA, 15 bp, Homo sapiens
ggagaagctgatgcc

SEQ ID NO: 1314641 - DNA, 15 bp, Homo sapiens
aggagaagctgatgc

SEQ ID NO: 1314642 - DNA, 15 bp, Homo sapiens
gaggagaagctgatg

SEQ ID NO: 1314643 - DNA, 15 bp, Homo sapiens
tgaggagaagctgat

SEQ ID NO: 1314644 - DNA, 15 bp, Homo sapiens
ctgaggagaagctga

SEQ ID NO: 1314645 - DNA, 15 bp, Homo sapiens
gctgaggagaagctg

SEQ ID NO: 1314646 - DNA, 15 bp, Homo sapiens
agctgaggagaagct

SEQ ID NO: 1314647 - DNA, 15 bp, Homo sapiens
aagctgaggagaagc

SEQ ID NO: 1314648 - DNA, 15 bp, Homo sapiens
gaagctgaggagaag

SEQ ID NO: 1314649 - DNA, 15 bp, Homo sapiens
agaagctgaggagaa

SEQ ID NO: 1314650 - DNA, 15 bp, Homo sapiens
cagaagctgaggaga

SEQ ID NO: 1314651 - DNA, 15 bp, Homo sapiens
ccagaagctgaggag

SEQ ID NO: 1314652 - DNA, 15 bp, Homo sapiens
accagaagctgagga

SEQ ID NO: 1314653 - DNA, 15 bp, Homo sapiens
caccagaagctgagg

SEQ ID NO: 1314654 - DNA, 15 bp, Homo sapiens
tcaccagaagctgag

SEQ ID NO: 1314655 - DNA, 15 bp, Homo sapiens
ctcaccagaagctga

SEQ ID NO: 1314656 - DNA, 15 bp, Homo sapiens
actcaccagaagctg

SEQ ID NO: 1314657 - DNA, 15 bp, Homo sapiens
gactcaccagaagct

SEQ ID NO: 1314658 - DNA, 15 bp, Homo sapiens
ggactcaccagaagc

SEQ ID NO: 1314659 - DNA, 15 bp, Homo sapiens
aggactcaccagaag

SEQ ID NO: 1314660 - DNA, 15 bp, Homo sapiens
caggactcaccagaa

SEQ ID NO: 1314661 - DNA, 15 bp, Homo sapiens
tcaggactcaccaga

SEQ ID NO: 1314662 - DNA, 15 bp, Homo sapiens
ctcaggactcaccag

SEQ ID NO: 1314663 - DNA, 15 bp, Homo sapiens
cctcaggactcacca

SEQ ID NO: 1314664 - DNA, 15 bp, Homo sapiens
tcctcaggactcacc

SEQ ID NO: 1314665 - DNA, 15 bp, Homo sapiens
ttcctcaggactcac

SEQ ID NO: 1314666 - DNA, 15 bp, Homo sapiens
cttcctcaggactca

SEQ ID NO: 1314667 - DNA, 15 bp, Homo sapiens
acttcctcaggactc

SEQ ID NO: 1314668 - DNA, 15 bp, Homo sapiens
aacttcctcaggact

SEQ ID NO: 1314669 - DNA, 15 bp, Homo sapiens
aaacttcctcaggac

SEQ ID NO: 1314670 - DNA, 15 bp, Homo sapiens
taaacttcctcagga

SEQ ID NO: 1314671 - DNA, 15 bp, Homo sapiens
ataaacttcctcagg

SEQ ID NO: 1314672 - DNA, 15 bp, Homo sapiens
tataaacttcctcag

SEQ ID NO: 1314673 - DNA, 15 bp, Homo sapiens
atataaacttcctca

SEQ ID NO: 1314674 - DNA, 15 bp, Homo sapiens
aatataaacttcctc

SEQ ID NO: 1314675 - DNA, 15 bp, Homo sapiens
taatataaacttcct

SEQ ID NO: 1314676 - DNA, 15 bp, Homo sapiens
ttaatataaacttcc

SEQ ID NO: 1314677 - DNA, 15 bp, Homo sapiens
attaatataaacttc

SEQ ID NO: 1314678 - DNA, 15 bp, Homo sapiens
cattaatataaactt

SEQ ID NO: 1314679 - DNA, 15 bp, Homo sapiens
ccattaatataaact

SEQ ID NO: 1314680 - DNA, 15 bp, Homo sapiens
gccattaatataaac

SEQ ID NO: 1314681 - DNA, 15 bp, Homo sapiens
tgccattaatataaa

SEQ ID NO: 1314682 - DNA, 15 bp, Homo sapiens
ctgccattaatataa

SEQ ID NO: 1314683 - DNA, 15 bp, Homo sapiens
tctgccattaatata

SEQ ID NO: 1314684 - DNA, 15 bp, Homo sapiens
ttctgccattaatat

SEQ ID NO: 1314685 - DNA, 15 bp, Homo sapiens
cttctgccattaata

SEQ ID NO: 1314686 - DNA, 15 bp, Homo sapiens
acttctgccattaat

SEQ ID NO: 1314687 - DNA, 15 bp, Homo sapiens
gacttctgccattaa

SEQ ID NO: 1314688 - DNA, 15 bp, Homo sapiens
cgacttctgccatta

SEQ ID NO: 1314689 - DNA, 15 bp, Homo sapiens
ccgacttctgccatt

SEQ ID NO: 1314690 - DNA, 15 bp, Homo sapiens
tccgacttctgccat

SEQ ID NO: 1314691 - DNA, 15 bp, Homo sapiens
ctccgacttctgcca

SEQ ID NO: 1314692 - DNA, 15 bp, Homo sapiens
cctccgacttctgcc

SEQ ID NO: 1314693 - DNA, 15 bp, Homo sapiens
ccctccgacttctgc

SEQ ID NO: 1314694 - DNA, 15 bp, Homo sapiens
cccctccgacttctg

SEQ ID NO: 1314695 - DNA, 15 bp, Homo sapiens
tcccctccgacttct

SEQ ID NO: 1314696 - DNA, 15 bp, Homo sapiens
ttcccctccgacttc

SEQ ID NO: 1314697 - DNA, 15 bp, Homo sapiens
tttcccctccgactt

SEQ ID NO: 1314698 - DNA, 15 bp, Homo sapiens
gtttcccctccgact

SEQ ID NO: 1314699 - DNA, 15 bp, Homo sapiens
tgtttcccctccgac

SEQ ID NO: 1314700 - DNA, 15 bp, Homo sapiens
ctgtttcccctccga

SEQ ID NO: 1314701 - DNA, 15 bp, Homo sapiens
cctgtttcccctccg

SEQ ID NO: 1314702 - DNA, 15 bp, Homo sapiens
gcctgtttcccctcc

SEQ ID NO: 1314703 - DNA, 15 bp, Homo sapiens
tgcctgtttcccctc

SEQ ID NO: 1314704 - DNA, 15 bp, Homo sapiens
atgcctgtttcccct

SEQ ID NO: 1314705 - DNA, 15 bp, Homo sapiens
catgcctgtttcccc

SEQ ID NO: 1314706 - DNA, 15 bp, Homo sapiens
acatgcctgtttccc

SEQ ID NO: 1314707 - DNA, 15 bp, Homo sapiens
gacatgcctgtttcc

SEQ ID NO: 1314708 - DNA, 15 bp, Homo sapiens
tgacatgcctgtttc

SEQ ID NO: 1314709 - DNA, 15 bp, Homo sapiens
gtgacatgcctgttt

SEQ ID NO: 1314710 - DNA, 15 bp, Homo sapiens
cgtgacatgcctgtt

SEQ ID NO: 1314711 - DNA, 15 bp, Homo sapiens
acgtgacatgcctgt

SEQ ID NO: 1314712 - DNA, 15 bp, Homo sapiens
cacgtgacatgcctg

SEQ ID NO: 1314713 - DNA, 15 bp, Homo sapiens
ccacgtgacatgcct

SEQ ID NO: 1314714 - DNA, 15 bp, Homo sapiens
accacgtgacatgcc

SEQ ID NO: 1314715 - DNA, 15 bp, Homo sapiens
caccacgtgacatgc

SEQ ID NO: 1314716 - DNA, 15 bp, Homo sapiens
tcaccacgtgacatg

SEQ ID NO: 1314717 - DNA, 15 bp, Homo sapiens
gtcaccacgtgacat

SEQ ID NO: 1314718 - DNA, 15 bp, Homo sapiens
tgtcaccacgtgaca

SEQ ID NO: 1314719 - DNA, 15 bp, Homo sapiens
ttgtcaccacgtgac

SEQ ID NO: 1314720 - DNA, 15 bp, Homo sapiens
attgtcaccacgtga

SEQ ID NO: 1314721 - DNA, 15 bp, Homo sapiens
tattgtcaccacgtg

SEQ ID NO: 1314722 - DNA, 15 bp, Homo sapiens
ctattgtcaccacgt

SEQ ID NO: 1314723 - DNA, 15 bp, Homo sapiens
cctattgtcaccacg

SEQ ID NO: 1314724 - DNA, 15 bp, Homo sapiens
tcctattgtcaccac

SEQ ID NO: 1314725 - DNA, 15 bp, Homo sapiens
ctcctattgtcacca

SEQ ID NO: 1314726 - DNA, 15 bp, Homo sapiens
gctcctattgtcacc

SEQ ID NO: 1314727 - DNA, 15 bp, Homo sapiens
tgctcctattgtcac

SEQ ID NO: 1314728 - DNA, 15 bp, Homo sapiens
ttgctcctattgtca

SEQ ID NO: 1314729 - DNA, 15 bp, Homo sapiens
cttgctcctattgtc

SEQ ID NO: 1314730 - DNA, 15 bp, Homo sapiens
tcttgctcctattgt

SEQ ID NO: 1314731 - DNA, 15 bp, Homo sapiens
ctcttgctcctattg

SEQ ID NO: 1314732 - DNA, 15 bp, Homo sapiens
cctcttgctcctatt

SEQ ID NO: 1314733 - DNA, 15 bp, Homo sapiens
tcctcttgctcctat

SEQ ID NO: 1314734 - DNA, 15 bp, Homo sapiens
ttcctcttgctccta

SEQ ID NO: 1314735 - DNA, 15 bp, Homo sapiens
cttcctcttgctcct

SEQ ID NO: 1314736 - DNA, 15 bp, Homo sapiens
ccttcctcttgctcc

SEQ ID NO: 1314737 - DNA, 15 bp, Homo sapiens
tccttcctcttgctc

SEQ ID NO: 1314738 - DNA, 15 bp, Homo sapiens
ctccttcctcttgct

SEQ ID NO: 1314739 - DNA, 15 bp, Homo sapiens
cctccttcctcttgc

SEQ ID NO: 1314740 - DNA, 15 bp, Homo sapiens
tcctccttcctcttg

SEQ ID NO: 1314741 - DNA, 15 bp, Homo sapiens
ctcctccttcctctt

SEQ ID NO: 1314742 - DNA, 15 bp, Homo sapiens
cctcctccttcctct

SEQ ID NO: 1314743 - DNA, 15 bp, Homo sapiens
acctcctccttcctc

SEQ ID NO: 1314744 - DNA, 15 bp, Homo sapiens
gacctcctccttcct

SEQ ID NO: 1314745 - DNA, 15 bp, Homo sapiens
ggacctcctccttcc

SEQ ID NO: 1314746 - DNA, 15 bp, Homo sapiens
gggacctcctccttc

SEQ ID NO: 1314747 - DNA, 15 bp, Homo sapiens
tgggacctcctcctt

SEQ ID NO: 1314748 - DNA, 15 bp, Homo sapiens
atgggacctcctcct

SEQ ID NO: 1314749 - DNA, 15 bp, Homo sapiens
catgggacctcctcc

SEQ ID NO: 1314750 - DNA, 15 bp, Homo sapiens
gcatgggacctcctc

SEQ ID NO: 1314751 - DNA, 15 bp, Homo sapiens
ggcatgggacctcct

SEQ ID NO: 1314752 - DNA, 15 bp, Homo sapiens
gggcatgggacctcc

SEQ ID NO: 1314753 - DNA, 15 bp, Homo sapiens
agggcatgggacctc

SEQ ID NO: 1314754 - DNA, 15 bp, Homo sapiens
aagggcatgggacct

SEQ ID NO: 1314755 - DNA, 15 bp, Homo sapiens
aaagggcatgggacc

SEQ ID NO: 1314756 - DNA, 15 bp, Homo sapiens
aaaagggcatgggac

SEQ ID NO: 1314757 - DNA, 15 bp, Homo sapiens
aaaaagggcatggga

SEQ ID NO: 1314758 - DNA, 15 bp, Homo sapiens
taaaaagggcatggg

SEQ ID NO: 1314759 - DNA, 15 bp, Homo sapiens
ttaaaaagggcatgg

SEQ ID NO: 1314760 - DNA, 15 bp, Homo sapiens
tttaaaaagggcatg

SEQ ID NO: 1314761 - DNA, 15 bp, Homo sapiens
gtttaaaaagggcat

SEQ ID NO: 1314762 - DNA, 15 bp, Homo sapiens
tgtttaaaaagggca

SEQ ID NO: 1314763 - DNA, 15 bp, Homo sapiens
ttgtttaaaaagggc

SEQ ID NO: 1314764 - DNA, 15 bp, Homo sapiens
cttgtttaaaaaggg

SEQ ID NO: 1314765 - DNA, 15 bp, Homo sapiens
gcttgtttaaaaagg

SEQ ID NO: 1314766 - DNA, 15 bp, Homo sapiens
tgcttgtttaaaaag

SEQ ID NO: 1314767 - DNA, 15 bp, Homo sapiens
ctgcttgtttaaaaa

SEQ ID NO: 1314768 - DNA, 15 bp, Homo sapiens
tctgcttgtttaaaa

SEQ ID NO: 1314769 - DNA, 15 bp, Homo sapiens
atctgcttgtttaaa

SEQ ID NO: 1314770 - DNA, 15 bp, Homo sapiens
gatctgcttgtttaa

SEQ ID NO: 1314771 - DNA, 15 bp, Homo sapiens
agatctgcttgttta

SEQ ID NO: 1314772 - DNA, 15 bp, Homo sapiens
gagatctgcttgttt

SEQ ID NO: 1314773 - DNA, 15 bp, Homo sapiens
agagatctgcttgtt

SEQ ID NO: 1314774 - DNA, 15 bp, Homo sapiens
aagagatctgcttgt

SEQ ID NO: 1314775 - DNA, 15 bp, Homo sapiens
caagagatctgcttg

SEQ ID NO: 1314776 - DNA, 15 bp, Homo sapiens
acaagagatctgctt

SEQ ID NO: 1314777 - DNA, 15 bp, Homo sapiens
cacaagagatctgct

SEQ ID NO: 1314778 - DNA, 15 bp, Homo sapiens
tcacaagagatctgc

SEQ ID NO: 1314779 - DNA, 15 bp, Homo sapiens
ttcacaagagatctg

SEQ ID NO: 1314780 - DNA, 15 bp, Homo sapiens
gttcacaagagatct

SEQ ID NO: 1314781 - DNA, 15 bp, Homo sapiens
agttcacaagagatc

SEQ ID NO: 1314782 - DNA, 15 bp, Homo sapiens
tagttcacaagagat

SEQ ID NO: 1314783 - DNA, 15 bp, Homo sapiens
ttagttcacaagaga

SEQ ID NO: 1314784 - DNA, 15 bp, Homo sapiens
gttagttcacaagag

SEQ ID NO: 1314785 - DNA, 15 bp, Homo sapiens
agttagttcacaaga

SEQ ID NO: 1314786 - DNA, 15 bp, Homo sapiens
cagttagttcacaag

SEQ ID NO: 1314787 - DNA, 15 bp, Homo sapiens
tcagttagttcacaa

SEQ ID NO: 1314788 - DNA, 15 bp, Homo sapiens
ctcagttagttcaca

SEQ ID NO: 1314789 - DNA, 15 bp, Homo sapiens
gctcagttagttcac

SEQ ID NO: 1314790 - DNA, 15 bp, Homo sapiens
cgctcagttagttca

SEQ ID NO: 1314791 - DNA, 15 bp, Homo sapiens
tcgctcagttagttc

SEQ ID NO: 1314792 - DNA, 15 bp, Homo sapiens
ctcgctcagttagtt

SEQ ID NO: 1314793 - DNA, 15 bp, Homo sapiens
tctcgctcagttagt

SEQ ID NO: 1314794 - DNA, 15 bp, Homo sapiens
ctctcgctcagttag

SEQ ID NO: 1314795 - DNA, 15 bp, Homo sapiens
gctctcgctcagtta

SEQ ID NO: 1314796 - DNA, 15 bp, Homo sapiens
agctctcgctcagtt

SEQ ID NO: 1314797 - DNA, 15 bp, Homo sapiens
gagctctcgctcagt

SEQ ID NO: 1314798 - DNA, 15 bp, Homo sapiens
cgagctctcgctcag

SEQ ID NO: 1314799 - DNA, 15 bp, Homo sapiens
ccgagctctcgctca

SEQ ID NO: 1314800 - DNA, 15 bp, Homo sapiens
accgagctctcgctc

SEQ ID NO: 1314801 - DNA, 15 bp, Homo sapiens
aaccgagctctcgct

SEQ ID NO: 1314802 - DNA, 15 bp, Homo sapiens
taaccgagctctcgc

SEQ ID NO: 1314803 - DNA, 15 bp, Homo sapiens
ataaccgagctctcg

SEQ ID NO: 1314804 - DNA, 15 bp, Homo sapiens
gataaccgagctctc

SEQ ID NO: 1314805 - DNA, 15 bp, Homo sapiens
tgataaccgagctct

SEQ ID NO: 1314806 - DNA, 15 bp, Homo sapiens
gtgataaccgagctc

SEQ ID NO: 1314807 - DNA, 15 bp, Homo sapiens
ggtgataaccgagct

SEQ ID NO: 1314808 - DNA, 15 bp, Homo sapiens
tggtgataaccgagc

SEQ ID NO: 1314809 - DNA, 15 bp, Homo sapiens
ttggtgataaccgag

SEQ ID NO: 1314810 - DNA, 15 bp, Homo sapiens
cttggtgataaccga

SEQ ID NO: 1314811 - DNA, 15 bp, Homo sapiens
ccttggtgataaccg

SEQ ID NO: 1314812 - DNA, 15 bp, Homo sapiens
cccttggtgataacc

SEQ ID NO: 1314813 - DNA, 15 bp, Homo sapiens
ccccttggtgataac

SEQ ID NO: 1314814 - DNA, 15 bp, Homo sapiens
cccccttggtgataa

SEQ ID NO: 1314815 - DNA, 15 bp, Homo sapiens
acccccttggtgata

SEQ ID NO: 1314816 - DNA, 15 bp, Homo sapiens
cacccccttggtgat

SEQ ID NO: 1314817 - DNA, 15 bp, Homo sapiens
ccacccccttggtga

SEQ ID NO: 1314818 - DNA, 15 bp, Homo sapiens
accacccccttggtg

SEQ ID NO: 1314819 - DNA, 15 bp, Homo sapiens
caccacccccttggt

SEQ ID NO: 1314820 - DNA, 15 bp, Homo sapiens
gcaccacccccttgg

SEQ ID NO: 1314821 - DNA, 15 bp, Homo sapiens
agcaccacccccttg

SEQ ID NO: 1314822 - DNA, 15 bp, Homo sapiens
tagcaccaccccctt

SEQ ID NO: 1314823 - DNA, 15 bp, Homo sapiens
ttagcaccaccccct

SEQ ID NO: 1314824 - DNA, 15 bp, Homo sapiens
tttagcaccaccccc

SEQ ID NO: 1314825 - DNA, 15 bp, Homo sapiens
catgaatggtttagc

SEQ ID NO: 1314826 - DNA, 15 bp, Homo sapiens
tcatgaatggtttag

SEQ ID NO: 1314827 - DNA, 15 bp, Homo sapiens
cctcatgaatggttt

SEQ ID NO: 1314828 - DNA, 15 bp, Homo sapiens
ccctcatgaatggtt

SEQ ID NO: 1314829 - DNA, 15 bp, Homo sapiens
tccctcatgaatggt

SEQ ID NO: 1314830 - DNA, 15 bp, Homo sapiens
atccctcatgaatgg

SEQ ID NO: 1314831 - DNA, 15 bp, Homo sapiens
gatccctcatgaatg

SEQ ID NO: 1314832 - DNA, 15 bp, Homo sapiens
ggatccctcatgaat

SEQ ID NO: 1314833 - DNA, 15 bp, Homo sapiens
tggatccctcatgaa

SEQ ID NO: 1314834 - DNA, 15 bp, Homo sapiens
gtggatccctcatga

SEQ ID NO: 1314835 - DNA, 15 bp, Homo sapiens
ggtggatccctcatg

SEQ ID NO: 1314836 - DNA, 15 bp, Homo sapiens
gggtggatccctcat

SEQ ID NO: 1314837 - DNA, 15 bp, Homo sapiens
ggggtggatccctca

SEQ ID NO: 1314838 - DNA, 15 bp, Homo sapiens
gggggtggatccctc

SEQ ID NO: 1314839 - DNA, 15 bp, Homo sapiens
ggggggtggatccct

SEQ ID NO: 1314840 - DNA, 15 bp, Homo sapiens
aggggggtggatccc

SEQ ID NO: 1314841 - DNA, 15 bp, Homo sapiens
caggggggtggatcc

SEQ ID NO: 1314842 - DNA, 15 bp, Homo sapiens
tcaggggggtggatc

SEQ ID NO: 1314843 - DNA, 15 bp, Homo sapiens
atcaggggggtggat

SEQ ID NO: 1314844 - DNA, 15 bp, Homo sapiens
catcaggggggtgga

SEQ ID NO: 1314845 - DNA, 15 bp, Homo sapiens
acatcaggggggtgg

SEQ ID NO: 1314846 - DNA, 15 bp, Homo sapiens
tacatcaggggggtg

SEQ ID NO: 1314847 - DNA, 15 bp, Homo sapiens
ctacatcaggggggt

SEQ ID NO: 1314848 - DNA, 15 bp, Homo sapiens
actacatcagggggg

SEQ ID NO: 1314849 - DNA, 15 bp, Homo sapiens
gactacatcaggggg

SEQ ID NO: 1314850 - DNA, 15 bp, Homo sapiens
tgactacatcagggg

SEQ ID NO: 1314851 - DNA, 15 bp, Homo sapiens
atgactacatcaggg

SEQ ID NO: 1314852 - DNA, 15 bp, Homo sapiens
gatgactacatcagg

SEQ ID NO: 1314853 - DNA, 15 bp, Homo sapiens
agatgactacatcag

SEQ ID NO: 1314854 - DNA, 15 bp, Homo sapiens
aagatgactacatca

SEQ ID NO: 1314855 - DNA, 15 bp, Homo sapiens
gaagatgactacatc

SEQ ID NO: 1314856 - DNA, 15 bp, Homo sapiens
agaagatgactacat

SEQ ID NO: 1314857 - DNA, 15 bp, Homo sapiens
tagaagatgactaca

SEQ ID NO: 1314858 - DNA, 15 bp, Homo sapiens
gtagaagatgactac

SEQ ID NO: 1314859 - DNA, 15 bp, Homo sapiens
ggtagaagatgacta

SEQ ID NO: 1314860 - DNA, 15 bp, Homo sapiens
tggtagaagatgact

SEQ ID NO: 1314861 - DNA, 15 bp, Homo sapiens
ttggtagaagatgac

SEQ ID NO: 1314862 - DNA, 15 bp, Homo sapiens
tttggtagaagatga

SEQ ID NO: 1314863 - DNA, 15 bp, Homo sapiens
gtttggtagaagatg

SEQ ID NO: 1314864 - DNA, 15 bp, Homo sapiens
ggtttggtagaagat

SEQ ID NO: 1314865 - DNA, 15 bp, Homo sapiens
aggtttggtagaaga

SEQ ID NO: 1314866 - DNA, 15 bp, Homo sapiens
gaggtttggtagaag

SEQ ID NO: 1314867 - DNA, 15 bp, Homo sapiens
tgaggtttggtagaa

SEQ ID NO: 1314868 - DNA, 15 bp, Homo sapiens
gtgaggtttggtaga

SEQ ID NO: 1314869 - DNA, 15 bp, Homo sapiens
ggtgaggtttggtag

SEQ ID NO: 1314870 - DNA, 15 bp, Homo sapiens
aggtgaggtttggta

SEQ ID NO: 1314871 - DNA, 15 bp, Homo sapiens
gaggtgaggtttggt

SEQ ID NO: 1314872 - DNA, 15 bp, Homo sapiens
ggaggtgaggtttgg

SEQ ID NO: 1314873 - DNA, 15 bp, Homo sapiens
tggaggtgaggtttg

SEQ ID NO: 1314874 - DNA, 15 bp, Homo sapiens
ctggaggtgaggttt

SEQ ID NO: 1314875 - DNA, 15 bp, Homo sapiens
gctggaggtgaggtt

SEQ ID NO: 1314876 - DNA, 15 bp, Homo sapiens
tgctggaggtgaggt

SEQ ID NO: 1314877 - DNA, 15 bp, Homo sapiens
atgctggaggtgagg

SEQ ID NO: 1314878 - DNA, 15 bp, Homo sapiens
aatgctggaggtgag

SEQ ID NO: 1314879 - DNA, 15 bp, Homo sapiens
caatgctggaggtga

SEQ ID NO: 1314880 - DNA, 15 bp, Homo sapiens
ccaatgctggaggtg

SEQ ID NO: 1314881 - DNA, 15 bp, Homo sapiens
cccaatgctggaggt

SEQ ID NO: 1314882 - DNA, 15 bp, Homo sapiens
ccccaatgctggagg

SEQ ID NO: 1314883 - DNA, 15 bp, Homo sapiens
tccccaatgctggag

SEQ ID NO: 1314884 - DNA, 15 bp, Homo sapiens
ctccccaatgctgga

SEQ ID NO: 1314885 - DNA, 15 bp, Homo sapiens
gctccccaatgctgg

SEQ ID NO: 1314886 - DNA, 15 bp, Homo sapiens
tgctccccaatgctg

SEQ ID NO: 1314887 - DNA, 15 bp, Homo sapiens
gtgctccccaatgct

SEQ ID NO: 1314888 - DNA, 15 bp, Homo sapiens
tgtgctccccaatgc

SEQ ID NO: 1314889 - DNA, 15 bp, Homo sapiens
gtgtgctccccaatg

SEQ ID NO: 1314890 - DNA, 15 bp, Homo sapiens
agtgtgctccccaat

SEQ ID NO: 1314891 - DNA, 15 bp, Homo sapiens
aagtgtgctccccaa

SEQ ID NO: 1314892 - DNA, 15 bp, Homo sapiens
gaagtgtgctcccca

SEQ ID NO: 1314893 - DNA, 15 bp, Homo sapiens
tgaagtgtgctcccc

SEQ ID NO: 1314894 - DNA, 15 bp, Homo sapiens
ttgaagtgtgctccc

SEQ ID NO: 1314895 - DNA, 15 bp, Homo sapiens
gttgaagtgtgctcc

SEQ ID NO: 1314896 - DNA, 15 bp, Homo sapiens
tgttgaagtgtgctc

SEQ ID NO: 1314897 - DNA, 15 bp, Homo sapiens
gtgttgaagtgtgct

SEQ ID NO: 1314898 - DNA, 15 bp, Homo sapiens
cgtgttgaagtgtgc

SEQ ID NO: 1314899 - DNA, 15 bp, Homo sapiens
tcgtgttgaagtgtg

SEQ ID NO: 1314900 - DNA, 15 bp, Homo sapiens
ctcgtgttgaagtgt

SEQ ID NO: 1314901 - DNA, 15 bp, Homo sapiens
actcgtgttgaagtg

SEQ ID NO: 1314902 - DNA, 15 bp, Homo sapiens
gactcgtgttgaagt

SEQ ID NO: 1314903 - DNA, 15 bp, Homo sapiens
tgactcgtgttgaag

SEQ ID NO: 1314904 - DNA, 15 bp, Homo sapiens
atgactcgtgttgaa

SEQ ID NO: 1314905 - DNA, 15 bp, Homo sapiens
gatgactcgtgttga

SEQ ID NO: 1314906 - DNA, 15 bp, Homo sapiens
agatgactcgtgttg

SEQ ID NO: 1314907 - DNA, 15 bp, Homo sapiens
tagatgactcgtgtt

SEQ ID NO: 1314908 - DNA, 15 bp, Homo sapiens
gtagatgactcgtgt

SEQ ID NO: 1314909 - DNA, 15 bp, Homo sapiens
ggtagatgactcgtg

SEQ ID NO: 1314910 - DNA, 15 bp, Homo sapiens
tggtagatgactcgt

SEQ ID NO: 1314911 - DNA, 15 bp, Homo sapiens
ttggtagatgactcg

SEQ ID NO: 1314912 - DNA, 15 bp, Homo sapiens
tttggtagatgactc

SEQ ID NO: 1314913 - DNA, 15 bp, Homo sapiens
gtttggtagatgact

SEQ ID NO: 1314914 - DNA, 15 bp, Homo sapiens
ggtttggtagatgac

SEQ ID NO: 1314915 - DNA, 15 bp, Homo sapiens
aggtttggtagatga

SEQ ID NO: 1314916 - DNA, 15 bp, Homo sapiens
gaggtttggtagatg

SEQ ID NO: 1314917 - DNA, 15 bp, Homo sapiens
tgaggtttggtagat

SEQ ID NO: 1314918 - DNA, 15 bp, Homo sapiens
aagatgactcgtgtt

SEQ ID NO: 1314919 - DNA, 15 bp, Homo sapiens
gaagatgactcgtgt

SEQ ID NO: 1314920 - DNA, 15 bp, Homo sapiens
agaagatgactcgtg

SEQ ID NO: 1314921 - DNA, 15 bp, Homo sapiens
tagaagatgactcgt

SEQ ID NO: 1314922 - DNA, 15 bp, Homo sapiens
gtagaagatgactcg

SEQ ID NO: 1314923 - DNA, 15 bp, Homo sapiens
ggtagaagatgactc

SEQ ID NO: 1314924 - DNA, 15 bp, Homo sapiens
agaggtttggtagaa

SEQ ID NO: 1314925 - DNA, 15 bp, Homo sapiens
gagaggtttggtaga

SEQ ID NO: 1314926 - DNA, 15 bp, Homo sapiens
ggagaggtttggtag

SEQ ID NO: 1314927 - DNA, 15 bp, Homo sapiens
aggagaggtttggta

SEQ ID NO: 1314928 - DNA, 15 bp, Homo sapiens
gaggagaggtttggt

SEQ ID NO: 1314929 - DNA, 15 bp, Homo sapiens
ggaggagaggtttgg

SEQ ID NO: 1314930 - DNA, 15 bp, Homo sapiens
tggaggagaggtttg

SEQ ID NO: 1314931 - DNA, 15 bp, Homo sapiens
ctggaggagaggttt

SEQ ID NO: 1314932 - DNA, 15 bp, Homo sapiens
gctggaggagaggtt

SEQ ID NO: 1314933 - DNA, 15 bp, Homo sapiens
tgctggaggagaggt

SEQ ID NO: 1314934 - DNA, 15 bp, Homo sapiens
gtgctggaggagagg

SEQ ID NO: 1314935 - DNA, 15 bp, Homo sapiens
agtgctggaggagag

SEQ ID NO: 1314936 - DNA, 15 bp, Homo sapiens
cagtgctggaggaga

SEQ ID NO: 1314937 - DNA, 15 bp, Homo sapiens
ccagtgctggaggag

SEQ ID NO: 1314938 - DNA, 15 bp, Homo sapiens
cccagtgctggagga

SEQ ID NO: 1314939 - DNA, 15 bp, Homo sapiens
ccccagtgctggagg

SEQ ID NO: 1314940 - DNA, 15 bp, Homo sapiens
tccccagtgctggag

SEQ ID NO: 1314941 - DNA, 15 bp, Homo sapiens
ctccccagtgctgga

SEQ ID NO: 1314942 - DNA, 15 bp, Homo sapiens
gctccccagtgctgg

SEQ ID NO: 1314943 - DNA, 15 bp, Homo sapiens
tgctccccagtgctg

SEQ ID NO: 1314944 - DNA, 15 bp, Homo sapiens
gtgctccccagtgct

SEQ ID NO: 1314945 - DNA, 15 bp, Homo sapiens
tgtgctccccagtgc

SEQ ID NO: 1314946 - DNA, 15 bp, Homo sapiens
gtgtgctccccagtg

SEQ ID NO: 1314947 - DNA, 15 bp, Homo sapiens
agtgtgctccccagt

SEQ ID NO: 1314948 - DNA, 15 bp, Homo sapiens
aagtgtgctccccag

SEQ ID NO: 1314949 - DNA, 15 bp, Homo sapiens
gtgctggaggtgagg

SEQ ID NO: 1314950 - DNA, 15 bp, Homo sapiens
agtgctggaggtgag

SEQ ID NO: 1314951 - DNA, 15 bp, Homo sapiens
cagtgctggaggtga

SEQ ID NO: 1314952 - DNA, 15 bp, Homo sapiens
ccagtgctggaggtg

SEQ ID NO: 1314953 - DNA, 15 bp, Homo sapiens
cccagtgctggaggt

SEQ ID NO: 1314954 - DNA, 15 bp, Homo sapiens
atgtgctccccagtg

SEQ ID NO: 1314955 - DNA, 15 bp, Homo sapiens
aatgtgctccccagt

SEQ ID NO: 1314956 - DNA, 15 bp, Homo sapiens
aaatgtgctccccag

SEQ ID NO: 1314957 - DNA, 15 bp, Homo sapiens
gaaatgtgctcccca

SEQ ID NO: 1314958 - DNA, 15 bp, Homo sapiens
tgaaatgtgctcccc

SEQ ID NO: 1314959 - DNA, 15 bp, Homo sapiens
ttgaaatgtgctccc

SEQ ID NO: 1314960 - DNA, 15 bp, Homo sapiens
gttgaaatgtgctcc

SEQ ID NO: 1314961 - DNA, 15 bp, Homo sapiens
tgttgaaatgtgctc

SEQ ID NO: 1314962 - DNA, 15 bp, Homo sapiens
gtgttgaaatgtgct

SEQ ID NO: 1314963 - DNA, 15 bp, Homo sapiens
cgtgttgaaatgtgc

SEQ ID NO: 1314964 - DNA, 15 bp, Homo sapiens
tcgtgttgaaatgtg

SEQ ID NO: 1314965 - DNA, 15 bp, Homo sapiens
ctcgtgttgaaatgt

SEQ ID NO: 1314966 - DNA, 15 bp, Homo sapiens
actcgtgttgaaatg

SEQ ID NO: 1314967 - DNA, 15 bp, Homo sapiens
gactcgtgttgaaat

SEQ ID NO: 1314968 - DNA, 15 bp, Homo sapiens
tgactcgtgttgaaa

SEQ ID NO: 1314969 - DNA, 15 bp, Homo sapiens
atgtgctccccaatg

SEQ ID NO: 1314970 - DNA, 15 bp, Homo sapiens
aatgtgctccccaat

SEQ ID NO: 1314971 - DNA, 15 bp, Homo sapiens
atccccaatgctgga

SEQ ID NO: 1314972 - DNA, 15 bp, Homo sapiens
gatccccaatgctgg

SEQ ID NO: 1314973 - DNA, 15 bp, Homo sapiens
tgatccccaatgctg

SEQ ID NO: 1314974 - DNA, 15 bp, Homo sapiens
gtgatccccaatgct

SEQ ID NO: 1314975 - DNA, 15 bp, Homo sapiens
tgtgatccccaatgc

SEQ ID NO: 1314976 - DNA, 15 bp, Homo sapiens
atgtgatccccaatg

SEQ ID NO: 1314977 - DNA, 15 bp, Homo sapiens
aatgtgatccccaat

SEQ ID NO: 1314978 - DNA, 15 bp, Homo sapiens
aaatgtgatccccaa

SEQ ID NO: 1314979 - DNA, 15 bp, Homo sapiens
gaaatgtgatcccca

SEQ ID NO: 1314980 - DNA, 15 bp, Homo sapiens
tgaaatgtgatcccc

SEQ ID NO: 1314981 - DNA, 15 bp, Homo sapiens
ttgaaatgtgatccc

SEQ ID NO: 1314982 - DNA, 15 bp, Homo sapiens
gttgaaatgtgatcc

SEQ ID NO: 1314983 - DNA, 15 bp, Homo sapiens
tgttgaaatgtgatc

SEQ ID NO: 1314984 - DNA, 15 bp, Homo sapiens
gtgttgaaatgtgat

SEQ ID NO: 1314985 - DNA, 15 bp, Homo sapiens
cgtgttgaaatgtga

SEQ ID NO: 1314986 - DNA, 15 bp, Homo sapiens
tctcgtgttgaaatg

SEQ ID NO: 1314987 - DNA, 15 bp, Homo sapiens
atctcgtgttgaaat

SEQ ID NO: 1314988 - DNA, 15 bp, Homo sapiens
aatctcgtgttgaaa

SEQ ID NO: 1314989 - DNA, 15 bp, Homo sapiens
aaatctcgtgttgaa

SEQ ID NO: 1314990 - DNA, 15 bp, Homo sapiens
caaatctcgtgttga

SEQ ID NO: 1314991 - DNA, 15 bp, Homo sapiens
ccaaatctcgtgttg

SEQ ID NO: 1314992 - DNA, 15 bp, Homo sapiens
tccaaatctcgtgtt

SEQ ID NO: 1314993 - DNA, 15 bp, Homo sapiens
ttccaaatctcgtgt

SEQ ID NO: 1314994 - DNA, 15 bp, Homo sapiens
cttccaaatctcgtg

SEQ ID NO: 1314995 - DNA, 15 bp, Homo sapiens
ccttccaaatctcgt

SEQ ID NO: 1314996 - DNA, 15 bp, Homo sapiens
cccttccaaatctcg

SEQ ID NO: 1314997 - DNA, 15 bp, Homo sapiens
tcccttccaaatctc

SEQ ID NO: 1314998 - DNA, 15 bp, Homo sapiens
gtcccttccaaatct

SEQ ID NO: 1314999 - DNA, 15 bp, Homo sapiens
tgtcccttccaaatc

SEQ ID NO: 1315000 - DNA, 15 bp, Homo sapiens
ttgtcccttccaaat

SEQ ID NO: 1315001 - DNA, 15 bp, Homo sapiens
tttgtcccttccaaa

SEQ ID NO: 1315002 - DNA, 15 bp, Homo sapiens
gtttgtcccttccaa

SEQ ID NO: 1315003 - DNA, 15 bp, Homo sapiens
tgtttgtcccttcca

SEQ ID NO: 1315004 - DNA, 15 bp, Homo sapiens
atgtttgtcccttcc

SEQ ID NO: 1315005 - DNA, 15 bp, Homo sapiens
aatgtttgtcccttc

SEQ ID NO: 1315006 - DNA, 15 bp, Homo sapiens
caatgtttgtccctt

SEQ ID NO: 1315007 - DNA, 15 bp, Homo sapiens
tcaatgtttgtccct

SEQ ID NO: 1315008 - DNA, 15 bp, Homo sapiens
ttcaatgtttgtccc

SEQ ID NO: 1315009 - DNA, 15 bp, Homo sapiens
tttcaatgtttgtcc

SEQ ID NO: 1315010 - DNA, 15 bp, Homo sapiens
gtttcaatgtttgtc

SEQ ID NO: 1315011 - DNA, 15 bp, Homo sapiens
ggtttcaatgtttgt

SEQ ID NO: 1315012 - DNA, 15 bp, Homo sapiens
tggtttcaatgtttg

SEQ ID NO: 1315013 - DNA, 15 bp, Homo sapiens
atggtttcaatgttt

SEQ ID NO: 1315014 - DNA, 15 bp, Homo sapiens
tatggtttcaatgtt

SEQ ID NO: 1315015 - DNA, 15 bp, Homo sapiens
atatggtttcaatgt

SEQ ID NO: 1315016 - DNA, 15 bp, Homo sapiens
gatatggtttcaatg

SEQ ID NO: 1315017 - DNA, 15 bp, Homo sapiens
tgatatggtttcaat

SEQ ID NO: 1315018 - DNA, 15 bp, Homo sapiens
ctgatatggtttcaa

SEQ ID NO: 1315019 - DNA, 15 bp, Homo sapiens
tctgatatggtttca

SEQ ID NO: 1315020 - DNA, 15 bp, Homo sapiens
gtctgatatggtttc

SEQ ID NO: 1315021 - DNA, 15 bp, Homo sapiens
tgtctgatatggttt

SEQ ID NO: 1315022 - DNA, 15 bp, Homo sapiens
atgtctgatatggtt

SEQ ID NO: 1315023 - DNA, 15 bp, Homo sapiens
tatgtctgatatggt

SEQ ID NO: 1315024 - DNA, 15 bp, Homo sapiens
ttatgtctgatatgg

SEQ ID NO: 1315025 - DNA, 15 bp, Homo sapiens
tttatgtctgatatg

SEQ ID NO: 1315026 - DNA, 15 bp, Homo sapiens
ttttatgtctgatat

SEQ ID NO: 1315027 - DNA, 15 bp, Homo sapiens
attttatgtctgata

SEQ ID NO: 1315028 - DNA, 15 bp, Homo sapiens
tattttatgtctgat

SEQ ID NO: 1315029 - DNA, 15 bp, Homo sapiens
ctattttatgtctga

SEQ ID NO: 1315030 - DNA, 15 bp, Homo sapiens
cctattttatgtctg

SEQ ID NO: 1315031 - DNA, 15 bp, Homo sapiens
tcctattttatgtct

SEQ ID NO: 1315032 - DNA, 15 bp, Homo sapiens
ttcctattttatgtc

SEQ ID NO: 1315033 - DNA, 15 bp, Homo sapiens
tttcctattttatgt

SEQ ID NO: 1315034 - DNA, 15 bp, Homo sapiens
gtttcctattttatg

SEQ ID NO: 1315035 - DNA, 15 bp, Homo sapiens
agtttcctattttat

SEQ ID NO: 1315036 - DNA, 15 bp, Homo sapiens
aagtttcctatttta

SEQ ID NO: 1315037 - DNA, 15 bp, Homo sapiens
caagtttcctatttt

SEQ ID NO: 1315038 - DNA, 15 bp, Homo sapiens
ccaagtttcctattt

SEQ ID NO: 1315039 - DNA, 15 bp, Homo sapiens
accaagtttcctatt

SEQ ID NO: 1315040 - DNA, 15 bp, Homo sapiens
gaccaagtttcctat

SEQ ID NO: 1315041 - DNA, 15 bp, Homo sapiens
ggaccaagtttccta

SEQ ID NO: 1315042 - DNA, 15 bp, Homo sapiens
tggaccaagtttcct

SEQ ID NO: 1315043 - DNA, 15 bp, Homo sapiens
atggaccaagtttcc

SEQ ID NO: 1315044 - DNA, 15 bp, Homo sapiens
tatggaccaagtttc

SEQ ID NO: 1315045 - DNA, 15 bp, Homo sapiens
ctatggaccaagttt

SEQ ID NO: 1315046 - DNA, 15 bp, Homo sapiens
gctatggaccaagtt

SEQ ID NO: 1315047 - DNA, 15 bp, Homo sapiens
agctatggaccaagt

SEQ ID NO: 1315048 - DNA, 15 bp, Homo sapiens
aagctatggaccaag

SEQ ID NO: 1315049 - DNA, 15 bp, Homo sapiens
taagctatggaccaa

SEQ ID NO: 1315050 - DNA, 15 bp, Homo sapiens
ctaagctatggacca

SEQ ID NO: 1315051 - DNA, 15 bp, Homo sapiens
cctaagctatggacc

SEQ ID NO: 1315052 - DNA, 15 bp, Homo sapiens
acctaagctatggac

SEQ ID NO: 1315053 - DNA, 15 bp, Homo sapiens
tacctaagctatgga

SEQ ID NO: 1315054 - DNA, 15 bp, Homo sapiens
ttacctaagctatgg

SEQ ID NO: 1315055 - DNA, 15 bp, Homo sapiens
tttacctaagctatg

SEQ ID NO: 1315056 - DNA, 15 bp, Homo sapiens
atttacctaagctat

SEQ ID NO: 1315057 - DNA, 15 bp, Homo sapiens
tatttacctaagcta

SEQ ID NO: 1315058 - DNA, 15 bp, Homo sapiens
atatttacctaagct

SEQ ID NO: 1315059 - DNA, 15 bp, Homo sapiens
aatatttacctaagc

SEQ ID NO: 1315060 - DNA, 15 bp, Homo sapiens
taatatttacctaag

SEQ ID NO: 1315061 - DNA, 15 bp, Homo sapiens
ttaatatttacctaa

SEQ ID NO: 1315062 - DNA, 15 bp, Homo sapiens
cttaatatttaccta

SEQ ID NO: 1315063 - DNA, 15 bp, Homo sapiens
gcttaatatttacct

SEQ ID NO: 1315064 - DNA, 15 bp, Homo sapiens
tgcttaatatttacc

SEQ ID NO: 1315065 - DNA, 15 bp, Homo sapiens
ttgcttaatatttac

SEQ ID NO: 1315066 - DNA, 15 bp, Homo sapiens
tttgcttaatattta

SEQ ID NO: 1315067 - DNA, 15 bp, Homo sapiens
ctttgcttaatattt

SEQ ID NO: 1315068 - DNA, 15 bp, Homo sapiens
tctttgcttaatatt

SEQ ID NO: 1315069 - DNA, 15 bp, Homo sapiens
ttctttgcttaatat

SEQ ID NO: 1315070 - DNA, 15 bp, Homo sapiens
gttctttgcttaata

SEQ ID NO: 1315071 - DNA, 15 bp, Homo sapiens
agttctttgcttaat

SEQ ID NO: 1315072 - DNA, 15 bp, Homo sapiens
aagttctttgcttaa

SEQ ID NO: 1315073 - DNA, 15 bp, Homo sapiens
aaagttctttgctta

SEQ ID NO: 1315074 - DNA, 15 bp, Homo sapiens
caaagttctttgctt

SEQ ID NO: 1315075 - DNA, 15 bp, Homo sapiens
acaaagttctttgct

SEQ ID NO: 1315076 - DNA, 15 bp, Homo sapiens
gacaaagttctttgc

SEQ ID NO: 1315077 - DNA, 15 bp, Homo sapiens
agacaaagttctttg

SEQ ID NO: 1315078 - DNA, 15 bp, Homo sapiens
aagacaaagttcttt

SEQ ID NO: 1315079 - DNA, 15 bp, Homo sapiens
aaagacaaagttctt

SEQ ID NO: 1315080 - DNA, 15 bp, Homo sapiens
taaagacaaagttct

SEQ ID NO: 1315081 - DNA, 15 bp, Homo sapiens
ttaaagacaaagttc

SEQ ID NO: 1315082 - DNA, 15 bp, Homo sapiens
tttaaagacaaagtt

SEQ ID NO: 1315083 - DNA, 15 bp, Homo sapiens
atttaaagacaaagt

SEQ ID NO: 1315084 - DNA, 15 bp, Homo sapiens
catttaaagacaaag

SEQ ID NO: 1315085 - DNA, 15 bp, Homo sapiens
tcatttaaagacaaa

SEQ ID NO: 1315086 - DNA, 15 bp, Homo sapiens
ctcatttaaagacaa

SEQ ID NO: 1315087 - DNA, 15 bp, Homo sapiens
actcatttaaagaca

SEQ ID NO: 1315088 - DNA, 15 bp, Homo sapiens
tactcatttaaagac

SEQ ID NO: 1315089 - DNA, 15 bp, Homo sapiens
ttactcatttaaaga

SEQ ID NO: 1315090 - DNA, 15 bp, Homo sapiens
cttactcatttaaag

SEQ ID NO: 1315091 - DNA, 15 bp, Homo sapiens
gcttactcatttaaa

SEQ ID NO: 1315092 - DNA, 15 bp, Homo sapiens
agcttactcatttaa

SEQ ID NO: 1315093 - DNA, 15 bp, Homo sapiens
gagcttactcattta

SEQ ID NO: 1315094 - DNA, 15 bp, Homo sapiens
agagcttactcattt

SEQ ID NO: 1315095 - DNA, 15 bp, Homo sapiens
cagagcttactcatt

SEQ ID NO: 1315096 - DNA, 15 bp, Homo sapiens
gcagagcttactcat

SEQ ID NO: 1315097 - DNA, 15 bp, Homo sapiens
tgcagagcttactca

SEQ ID NO: 1315098 - DNA, 15 bp, Homo sapiens
ctgcagagcttactc

SEQ ID NO: 1315099 - DNA, 15 bp, Homo sapiens
tctgcagagcttact

SEQ ID NO: 1315100 - DNA, 15 bp, Homo sapiens
gtctgcagagcttac

SEQ ID NO: 1315101 - DNA, 15 bp, Homo sapiens
agtctgcagagctta

SEQ ID NO: 1315102 - DNA, 15 bp, Homo sapiens
aagtctgcagagctt

SEQ ID NO: 1315103 - DNA, 15 bp, Homo sapiens
aaagtctgcagagct

SEQ ID NO: 1315104 - DNA, 15 bp, Homo sapiens
aaaagtctgcagagc

SEQ ID NO: 1315105 - DNA, 15 bp, Homo sapiens
aaaaagtctgcagag

SEQ ID NO: 1315106 - DNA, 15 bp, Homo sapiens
taaaaagtctgcaga

SEQ ID NO: 1315107 - DNA, 15 bp, Homo sapiens
ttaaaaagtctgcag

SEQ ID NO: 1315108 - DNA, 15 bp, Homo sapiens
tttaaaaagtctgca

SEQ ID NO: 1315109 - DNA, 15 bp, Homo sapiens
ttttaaaaagtctgc

SEQ ID NO: 1315110 - DNA, 15 bp, Homo sapiens
gttttaaaaagtctg

SEQ ID NO: 1315111 - DNA, 15 bp, Homo sapiens
tgttttaaaaagtct

SEQ ID NO: 1315112 - DNA, 15 bp, Homo sapiens
gtgttttaaaaagtc

SEQ ID NO: 1315113 - DNA, 15 bp, Homo sapiens
agtgttttaaaaagt

SEQ ID NO: 1315114 - DNA, 15 bp, Homo sapiens
tagtgttttaaaaag

SEQ ID NO: 1315115 - DNA, 15 bp, Homo sapiens
ttagtgttttaaaaa

SEQ ID NO: 1315116 - DNA, 15 bp, Homo sapiens
tttagtgttttaaaa

SEQ ID NO: 1315117 - DNA, 15 bp, Homo sapiens
atttagtgttttaaa

SEQ ID NO: 1315118 - DNA, 15 bp, Homo sapiens
aatttagtgttttaa

SEQ ID NO: 1315119 - DNA, 15 bp, Homo sapiens
gaatttagtgtttta

SEQ ID NO: 1315120 - DNA, 15 bp, Homo sapiens
agaatttagtgtttt

SEQ ID NO: 1315121 - DNA, 15 bp, Homo sapiens
tagaatttagtgttt

SEQ ID NO: 1315122 - DNA, 15 bp, Homo sapiens
ttagaatttagtgtt

SEQ ID NO: 1315123 - DNA, 15 bp, Homo sapiens
gttagaatttagtgt

SEQ ID NO: 1315124 - DNA, 15 bp, Homo sapiens
tgttagaatttagtg

SEQ ID NO: 1315125 - DNA, 15 bp, Homo sapiens
atgttagaatttagt

SEQ ID NO: 1315126 - DNA, 15 bp, Homo sapiens
aatgttagaatttag

SEQ ID NO: 1315127 - DNA, 15 bp, Homo sapiens
taatgttagaattta

SEQ ID NO: 1315128 - DNA, 15 bp, Homo sapiens
ataatgttagaattt

SEQ ID NO: 1315129 - DNA, 15 bp, Homo sapiens
cataatgttagaatt

SEQ ID NO: 1315130 - DNA, 15 bp, Homo sapiens
tcataatgttagaat

SEQ ID NO: 1315131 - DNA, 15 bp, Homo sapiens
atcataatgttagaa

SEQ ID NO: 1315132 - DNA, 15 bp, Homo sapiens
tatcataatgttaga

SEQ ID NO: 1315133 - DNA, 15 bp, Homo sapiens
ctatcataatgttag

SEQ ID NO: 1315134 - DNA, 15 bp, Homo sapiens
tctatcataatgtta

SEQ ID NO: 1315135 - DNA, 15 bp, Homo sapiens
ttctatcataatgtt

SEQ ID NO: 1315136 - DNA, 15 bp, Homo sapiens
tttctatcataatgt

SEQ ID NO: 1315137 - DNA, 15 bp, Homo sapiens
atttctatcataatg

SEQ ID NO: 1315138 - DNA, 15 bp, Homo sapiens
aatttctatcataat

SEQ ID NO: 1315139 - DNA, 15 bp, Homo sapiens
aaatttctatcataa

SEQ ID NO: 1315140 - DNA, 15 bp, Homo sapiens
taaatttctatcata

SEQ ID NO: 1315141 - DNA, 15 bp, Homo sapiens
ttaaatttctatcat

SEQ ID NO: 1315142 - DNA, 15 bp, Homo sapiens
cttaaatttctatca

SEQ ID NO: 1315143 - DNA, 15 bp, Homo sapiens
tcttaaatttctatc

SEQ ID NO: 1315144 - DNA, 15 bp, Homo sapiens
atcttaaatttctat

SEQ ID NO: 1315145 - DNA, 15 bp, Homo sapiens
aatcttaaatttcta

SEQ ID NO: 1315146 - DNA, 15 bp, Homo sapiens
taatcttaaatttct

SEQ ID NO: 1315147 - DNA, 15 bp, Homo sapiens
ttaatcttaaatttc

SEQ ID NO: 1315148 - DNA, 15 bp, Homo sapiens
cttaatcttaaattt

SEQ ID NO: 1315149 - DNA, 15 bp, Homo sapiens
tcttaatcttaaatt

SEQ ID NO: 1315150 - DNA, 15 bp, Homo sapiens
ctcttaatcttaaat

SEQ ID NO: 1315151 - DNA, 15 bp, Homo sapiens
tctcttaatcttaaa

SEQ ID NO: 1315152 - DNA, 15 bp, Homo sapiens
atctcttaatcttaa

SEQ ID NO: 1315153 - DNA, 15 bp, Homo sapiens
aatctcttaatctta

SEQ ID NO: 1315154 - DNA, 15 bp, Homo sapiens
aaatctcttaatctt

SEQ ID NO: 1315155 - DNA, 15 bp, Homo sapiens
aaaatctcttaatct

SEQ ID NO: 1315156 - DNA, 15 bp, Homo sapiens
taaaatctcttaatc

SEQ ID NO: 1315157 - DNA, 15 bp, Homo sapiens
ctaaaatctcttaat

SEQ ID NO: 1315158 - DNA, 15 bp, Homo sapiens
tctaaaatctcttaa

SEQ ID NO: 1315159 - DNA, 15 bp, Homo sapiens
gtctaaaatctctta

SEQ ID NO: 1315160 - DNA, 15 bp, Homo sapiens
tgtctaaaatctctt

SEQ ID NO: 1315161 - DNA, 15 bp, Homo sapiens
atgtctaaaatctct

SEQ ID NO: 1315162 - DNA, 15 bp, Homo sapiens
aatgtctaaaatctc

SEQ ID NO: 1315163 - DNA, 15 bp, Homo sapiens
aaatgtctaaaatct

SEQ ID NO: 1315164 - DNA, 15 bp, Homo sapiens
aaaatgtctaaaatc

SEQ ID NO: 1315165 - DNA, 15 bp, Homo sapiens
gaaaatgtctaaaat

SEQ ID NO: 1315166 - DNA, 15 bp, Homo sapiens
tgaaaatgtctaaaa

SEQ ID NO: 1315167 - DNA, 15 bp, Homo sapiens
atgaaaatgtctaaa

SEQ ID NO: 1315168 - DNA, 15 bp, Homo sapiens
gatgaaaatgtctaa

SEQ ID NO: 1315169 - DNA, 15 bp, Homo sapiens
ggatgaaaatgtcta

SEQ ID NO: 1315170 - DNA, 15 bp, Homo sapiens
aggatgaaaatgtct

SEQ ID NO: 1315171 - DNA, 15 bp, Homo sapiens
aaggatgaaaatgtc

SEQ ID NO: 1315172 - DNA, 15 bp, Homo sapiens
gaaggatgaaaatgt

SEQ ID NO: 1315173 - DNA, 15 bp, Homo sapiens
agaaggatgaaaatg

SEQ ID NO: 1315174 - DNA, 15 bp, Homo sapiens
cagaaggatgaaaat

SEQ ID NO: 1315175 - DNA, 15 bp, Homo sapiens
acagaaggatgaaaa

SEQ ID NO: 1315176 - DNA, 15 bp, Homo sapiens
tacagaaggatgaaa

SEQ ID NO: 1315177 - DNA, 15 bp, Homo sapiens
ctacagaaggatgaa

SEQ ID NO: 1315178 - DNA, 15 bp, Homo sapiens
tctacagaaggatga

SEQ ID NO: 1315179 - DNA, 15 bp, Homo sapiens
atctacagaaggatg

SEQ ID NO: 1315180 - DNA, 15 bp, Homo sapiens
aatctacagaaggat

SEQ ID NO: 1315181 - DNA, 15 bp, Homo sapiens
taatctacagaagga

SEQ ID NO: 1315182 - DNA, 15 bp, Homo sapiens
ttaatctacagaagg

SEQ ID NO: 1315183 - DNA, 15 bp, Homo sapiens
tttaatctacagaag

SEQ ID NO: 1315184 - DNA, 15 bp, Homo sapiens
ttttaatctacagaa

SEQ ID NO: 1315185 - DNA, 15 bp, Homo sapiens
attttaatctacaga

SEQ ID NO: 1315186 - DNA, 15 bp, Homo sapiens
gattttaatctacag

SEQ ID NO: 1315187 - DNA, 15 bp, Homo sapiens
cgattttaatctaca

SEQ ID NO: 1315188 - DNA, 15 bp, Homo sapiens
acgattttaatctac

SEQ ID NO: 1315189 - DNA, 15 bp, Homo sapiens
tacgattttaatcta

SEQ ID NO: 1315190 - DNA, 15 bp, Homo sapiens
atacgattttaatct

SEQ ID NO: 1315191 - DNA, 15 bp, Homo sapiens
catacgattttaatc

SEQ ID NO: 1315192 - DNA, 15 bp, Homo sapiens
tcatacgattttaat

SEQ ID NO: 1315193 - DNA, 15 bp, Homo sapiens
atcatacgattttaa

SEQ ID NO: 1315194 - DNA, 15 bp, Homo sapiens
catcatacgatttta

SEQ ID NO: 1315195 - DNA, 15 bp, Homo sapiens
tcatcatacgatttt

SEQ ID NO: 1315196 - DNA, 15 bp, Homo sapiens
gtcatcatacgattt

SEQ ID NO: 1315197 - DNA, 15 bp, Homo sapiens
ggtcatcatacgatt

SEQ ID NO: 1315198 - DNA, 15 bp, Homo sapiens
tggtcatcatacgat

SEQ ID NO: 1315199 - DNA, 15 bp, Homo sapiens
atggtcatcatacga

SEQ ID NO: 1315200 - DNA, 15 bp, Homo sapiens
gatggtcatcatacg

SEQ ID NO: 1315201 - DNA, 15 bp, Homo sapiens
ggatggtcatcatac

SEQ ID NO: 1315202 - DNA, 15 bp, Homo sapiens
aggatggtcatcata

SEQ ID NO: 1315203 - DNA, 15 bp, Homo sapiens
aaggatggtcatcat

SEQ ID NO: 1315204 - DNA, 15 bp, Homo sapiens
gaaggatggtcatca

SEQ ID NO: 1315205 - DNA, 15 bp, Homo sapiens
tgaaggatggtcatc

SEQ ID NO: 1315206 - DNA, 15 bp, Homo sapiens
atgaaggatggtcat

SEQ ID NO: 1315207 - DNA, 15 bp, Homo sapiens
aatgaaggatggtca

SEQ ID NO: 1315208 - DNA, 15 bp, Homo sapiens
aaatgaaggatggtc

SEQ ID NO: 1315209 - DNA, 15 bp, Homo sapiens
aaaatgaaggatggt

SEQ ID NO: 1315210 - DNA, 15 bp, Homo sapiens
aaaaatgaaggatgg

SEQ ID NO: 1315211 - DNA, 15 bp, Homo sapiens
taaaaatgaaggatg

SEQ ID NO: 1315212 - DNA, 15 bp, Homo sapiens
ctaaaaatgaaggat

SEQ ID NO: 1315213 - DNA, 15 bp, Homo sapiens
gctaaaaatgaagga

SEQ ID NO: 1315214 - DNA, 15 bp, Homo sapiens
agctaaaaatgaagg

SEQ ID NO: 1315215 - DNA, 15 bp, Homo sapiens
aagctaaaaatgaag

SEQ ID NO: 1315216 - DNA, 15 bp, Homo sapiens
gaagctaaaaatgaa

SEQ ID NO: 1315217 - DNA, 15 bp, Homo sapiens
tgaagctaaaaatga

SEQ ID NO: 1315218 - DNA, 15 bp, Homo sapiens
atgaagctaaaaatg

SEQ ID NO: 1315219 - DNA, 15 bp, Homo sapiens
gatgaagctaaaaat

SEQ ID NO: 1315220 - DNA, 15 bp, Homo sapiens
agatgaagctaaaaa

SEQ ID NO: 1315221 - DNA, 15 bp, Homo sapiens
aagatgaagctaaaa

SEQ ID NO: 1315222 - DNA, 15 bp, Homo sapiens
aaagatgaagctaaa

SEQ ID NO: 1315223 - DNA, 15 bp, Homo sapiens
taaagatgaagctaa

SEQ ID NO: 1315224 - DNA, 15 bp, Homo sapiens
ataaagatgaagcta

SEQ ID NO: 1315225 - DNA, 15 bp, Homo sapiens
aataaagatgaagct

SEQ ID NO: 1315226 - DNA, 15 bp, Homo sapiens
aaataaagatgaagc

SEQ ID NO: 1315227 - DNA, 15 bp, Homo sapiens
taaataaagatgaag

SEQ ID NO: 1315228 - DNA, 15 bp, Homo sapiens
ataaataaagatgaa

SEQ ID NO: 1315229 - DNA, 15 bp, Homo sapiens
aataaataaagatga

SEQ ID NO: 1315230 - DNA, 15 bp, Homo sapiens
aaataaataaagatg

SEQ ID NO: 1315231 - DNA, 15 bp, Homo sapiens
taaataaataaagat

SEQ ID NO: 1315232 - DNA, 15 bp, Homo sapiens
ttaaataaataaaga

SEQ ID NO: 1315233 - DNA, 15 bp, Homo sapiens
tttaaataaataaag

SEQ ID NO: 1315234 - DNA, 15 bp, Homo sapiens
ttttaaataaataaa

SEQ ID NO: 1315235 - DNA, 15 bp, Homo sapiens
tttttaaataaataa

SEQ ID NO: 1315236 - DNA, 15 bp, Homo sapiens
ctttttaaataaata

SEQ ID NO: 1315237 - DNA, 15 bp, Homo sapiens
actttttaaataaat

SEQ ID NO: 1315238 - DNA, 15 bp, Homo sapiens
aactttttaaataaa

SEQ ID NO: 1315239 - DNA, 15 bp, Homo sapiens
aaactttttaaataa

SEQ ID NO: 1315240 - DNA, 15 bp, Homo sapiens
caaactttttaaata

SEQ ID NO: 1315241 - DNA, 15 bp, Homo sapiens
gcaaactttttaaat

SEQ ID NO: 1315242 - DNA, 15 bp, Homo sapiens
tgcaaactttttaaa

SEQ ID NO: 1315243 - DNA, 15 bp, Homo sapiens
atgcaaactttttaa

SEQ ID NO: 1315244 - DNA, 15 bp, Homo sapiens
aatgcaaacttttta

SEQ ID NO: 1315245 - DNA, 15 bp, Homo sapiens
aaatgcaaacttttt

SEQ ID NO: 1315246 - DNA, 15 bp, Homo sapiens
caaatgcaaactttt

SEQ ID NO: 1315247 - DNA, 15 bp, Homo sapiens
acaaatgcaaacttt

SEQ ID NO: 1315248 - DNA, 15 bp, Homo sapiens
tacaaatgcaaactt

SEQ ID NO: 1315249 - DNA, 15 bp, Homo sapiens
gtacaaatgcaaact

SEQ ID NO: 1315250 - DNA, 15 bp, Homo sapiens
tgtacaaatgcaaac

SEQ ID NO: 1315251 - DNA, 15 bp, Homo sapiens
atgtacaaatgcaaa

SEQ ID NO: 1315252 - DNA, 15 bp, Homo sapiens
tatgtacaaatgcaa

SEQ ID NO: 1315253 - DNA, 15 bp, Homo sapiens
ctatgtacaaatgca

SEQ ID NO: 1315254 - DNA, 15 bp, Homo sapiens
actatgtacaaatgc

SEQ ID NO: 1315255 - DNA, 15 bp, Homo sapiens
tactatgtacaaatg

SEQ ID NO: 1315256 - DNA, 15 bp, Homo sapiens
ttactatgtacaaat

SEQ ID NO: 1315257 - DNA, 15 bp, Homo sapiens
attactatgtacaaa

SEQ ID NO: 1315258 - DNA, 15 bp, Homo sapiens
cattactatgtacaa

SEQ ID NO: 1315259 - DNA, 15 bp, Homo sapiens
acattactatgtaca

SEQ ID NO: 1315260 - DNA, 15 bp, Homo sapiens
cacattactatgtac

SEQ ID NO: 1315261 - DNA, 15 bp, Homo sapiens
gcacattactatgta

SEQ ID NO: 1315262 - DNA, 15 bp, Homo sapiens
ggcacattactatgt

SEQ ID NO: 1315263 - DNA, 15 bp, Homo sapiens
tggcacattactatg

SEQ ID NO: 1315264 - DNA, 15 bp, Homo sapiens
ttggcacattactat

SEQ ID NO: 1315265 - DNA, 15 bp, Homo sapiens
cttggcacattacta

SEQ ID NO: 1315266 - DNA, 15 bp, Homo sapiens
acttggcacattact

SEQ ID NO: 1315267 - DNA, 15 bp, Homo sapiens
aacttggcacattac

SEQ ID NO: 1315268 - DNA, 15 bp, Homo sapiens
aaacttggcacatta

SEQ ID NO: 1315269 - DNA, 15 bp, Homo sapiens
aaaacttggcacatt

SEQ ID NO: 1315270 - DNA, 15 bp, Homo sapiens
taaaacttggcacat

SEQ ID NO: 1315271 - DNA, 15 bp, Homo sapiens
ataaaacttggcaca

SEQ ID NO: 1315272 - DNA, 15 bp, Homo sapiens
tataaaacttggcac

SEQ ID NO: 1315273 - DNA, 15 bp, Homo sapiens
gtataaaacttggca

SEQ ID NO: 1315274 - DNA, 15 bp, Homo sapiens
tgtataaaacttggc

SEQ ID NO: 1315275 - DNA, 15 bp, Homo sapiens
ttgtataaaacttgg

SEQ ID NO: 1315276 - DNA, 15 bp, Homo sapiens
tttgtataaaacttg

SEQ ID NO: 1315277 - DNA, 15 bp, Homo sapiens
ttttgtataaaactt

SEQ ID NO: 1315278 - DNA, 15 bp, Homo sapiens
cttttgtataaaact

SEQ ID NO: 1315279 - DNA, 15 bp, Homo sapiens
gcttttgtataaaac

SEQ ID NO: 1315280 - DNA, 15 bp, Homo sapiens
tgcttttgtataaaa

SEQ ID NO: 1315281 - DNA, 15 bp, Homo sapiens
ctgcttttgtataaa

SEQ ID NO: 1315282 - DNA, 15 bp, Homo sapiens
cctgcttttgtataa

SEQ ID NO: 1315283 - DNA, 15 bp, Homo sapiens
tcctgcttttgtata

SEQ ID NO: 1315284 - DNA, 15 bp, Homo sapiens
ttcctgcttttgtat

SEQ ID NO: 1315285 - DNA, 15 bp, Homo sapiens
tttcctgcttttgta

SEQ ID NO: 1315286 - DNA, 15 bp, Homo sapiens
atttcctgcttttgt

SEQ ID NO: 1315287 - DNA, 15 bp, Homo sapiens
tatttcctgcttttg

SEQ ID NO: 1315288 - DNA, 15 bp, Homo sapiens
atatttcctgctttt

SEQ ID NO: 1315289 - DNA, 15 bp, Homo sapiens
gatatttcctgcttt

SEQ ID NO: 1315290 - DNA, 15 bp, Homo sapiens
agatatttcctgctt

SEQ ID NO: 1315291 - DNA, 15 bp, Homo sapiens
gagatatttcctgct

SEQ ID NO: 1315292 - DNA, 15 bp, Homo sapiens
agagatatttcctgc

SEQ ID NO: 1315293 - DNA, 15 bp, Homo sapiens
cagagatatttcctg

SEQ ID NO: 1315294 - DNA, 15 bp, Homo sapiens
gcagagatatttcct

SEQ ID NO: 1315295 - DNA, 15 bp, Homo sapiens
agcagagatatttcc

SEQ ID NO: 1315296 - DNA, 15 bp, Homo sapiens
cagcagagatatttc

SEQ ID NO: 1315297 - DNA, 15 bp, Homo sapiens
gcagcagagatattt

SEQ ID NO: 1315298 - DNA, 15 bp, Homo sapiens
agcagcagagatatt

SEQ ID NO: 1315299 - DNA, 15 bp, Homo sapiens
aagcagcagagatat

SEQ ID NO: 1315300 - DNA, 15 bp, Homo sapiens
aaagcagcagagata

SEQ ID NO: 1315301 - DNA, 15 bp, Homo sapiens
gaaagcagcagagat

SEQ ID NO: 1315302 - DNA, 15 bp, Homo sapiens
tgaaagcagcagaga

SEQ ID NO: 1315303 - DNA, 15 bp, Homo sapiens
ttgaaagcagcagag

SEQ ID NO: 1315304 - DNA, 15 bp, Homo sapiens
tttgaaagcagcaga

SEQ ID NO: 1315305 - DNA, 15 bp, Homo sapiens
atttgaaagcagcag

SEQ ID NO: 1315306 - DNA, 15 bp, Homo sapiens
tatttgaaagcagca

SEQ ID NO: 1315307 - DNA, 15 bp, Homo sapiens
ttatttgaaagcagc

SEQ ID NO: 1315308 - DNA, 15 bp, Homo sapiens
attatttgaaagcag

SEQ ID NO: 1315309 - DNA, 15 bp, Homo sapiens
aattatttgaaagca

SEQ ID NO: 1315310 - DNA, 15 bp, Homo sapiens
taattatttgaaagc

SEQ ID NO: 1315311 - DNA, 15 bp, Homo sapiens
ctaattatttgaaag

SEQ ID NO: 1315312 - DNA, 15 bp, Homo sapiens
tctaattatttgaaa

SEQ ID NO: 1315313 - DNA, 15 bp, Homo sapiens
ttctaattatttgaa

SEQ ID NO: 1315314 - DNA, 15 bp, Homo sapiens
gttctaattatttga

SEQ ID NO: 1315315 - DNA, 15 bp, Homo sapiens
tgttctaattatttg

SEQ ID NO: 1315316 - DNA, 15 bp, Homo sapiens
ttgttctaattattt

SEQ ID NO: 1315317 - DNA, 15 bp, Homo sapiens
cttgttctaattatt

SEQ ID NO: 1315318 - DNA, 15 bp, Homo sapiens
ccttgttctaattat

SEQ ID NO: 1315319 - DNA, 15 bp, Homo sapiens
cccttgttctaatta

SEQ ID NO: 1315320 - DNA, 15 bp, Homo sapiens
acccttgttctaatt

SEQ ID NO: 1315321 - DNA, 15 bp, Homo sapiens
aacccttgttctaat

SEQ ID NO: 1315322 - DNA, 15 bp, Homo sapiens
aaacccttgttctaa

SEQ ID NO: 1315323 - DNA, 15 bp, Homo sapiens
aaaacccttgttcta

SEQ ID NO: 1315324 - DNA, 15 bp, Homo sapiens
gaaaacccttgttct

SEQ ID NO: 1315325 - DNA, 15 bp, Homo sapiens
agaaaacccttgttc

SEQ ID NO: 1315326 - DNA, 15 bp, Homo sapiens
cagaaaacccttgtt

SEQ ID NO: 1315327 - DNA, 15 bp, Homo sapiens
acagaaaacccttgt

SEQ ID NO: 1315328 - DNA, 15 bp, Homo sapiens
cacagaaaacccttg

SEQ ID NO: 1315329 - DNA, 15 bp, Homo sapiens
tcacagaaaaccctt

SEQ ID NO: 1315330 - DNA, 15 bp, Homo sapiens
ttcacagaaaaccct

SEQ ID NO: 1315331 - DNA, 15 bp, Homo sapiens
attcacagaaaaccc

SEQ ID NO: 1315332 - DNA, 15 bp, Homo sapiens
tattcacagaaaacc

SEQ ID NO: 1315333 - DNA, 15 bp, Homo sapiens
ctattcacagaaaac

SEQ ID NO: 1315334 - DNA, 15 bp, Homo sapiens
actattcacagaaaa

SEQ ID NO: 1315335 - DNA, 15 bp, Homo sapiens
tactattcacagaaa

SEQ ID NO: 1315336 - DNA, 15 bp, Homo sapiens
ttactattcacagaa

SEQ ID NO: 1315337 - DNA, 15 bp, Homo sapiens
tttactattcacaga

SEQ ID NO: 1315338 - DNA, 15 bp, Homo sapiens
atttactattcacag

SEQ ID NO: 1315339 - DNA, 15 bp, Homo sapiens
aatttactattcaca

SEQ ID NO: 1315340 - DNA, 15 bp, Homo sapiens
aaatttactattcac

SEQ ID NO: 1315341 - DNA, 15 bp, Homo sapiens
taaatttactattca

SEQ ID NO: 1315342 - DNA, 15 bp, Homo sapiens
ttaaatttactattc

SEQ ID NO: 1315343 - DNA, 15 bp, Homo sapiens
gttaaatttactatt

SEQ ID NO: 1315344 - DNA, 15 bp, Homo sapiens
tgttaaatttactat

SEQ ID NO: 1315345 - DNA, 15 bp, Homo sapiens
gtgttaaatttacta

SEQ ID NO: 1315346 - DNA, 15 bp, Homo sapiens
ggtgttaaatttact

SEQ ID NO: 1315347 - DNA, 15 bp, Homo sapiens
aggtgttaaatttac

SEQ ID NO: 1315348 - DNA, 15 bp, Homo sapiens
aaggtgttaaattta

SEQ ID NO: 1315349 - DNA, 15 bp, Homo sapiens
gaaggtgttaaattt

SEQ ID NO: 1315350 - DNA, 15 bp, Homo sapiens
ggaaggtgttaaatt

SEQ ID NO: 1315351 - DNA, 15 bp, Homo sapiens
tggaaggtgttaaat

SEQ ID NO: 1315352 - DNA, 15 bp, Homo sapiens
ctggaaggtgttaaa

SEQ ID NO: 1315353 - DNA, 15 bp, Homo sapiens
gctggaaggtgttaa

SEQ ID NO: 1315354 - DNA, 15 bp, Homo sapiens
tgctggaaggtgtta

SEQ ID NO: 1315355 - DNA, 15 bp, Homo sapiens
atgctggaaggtgtt

SEQ ID NO: 1315356 - DNA, 15 bp, Homo sapiens
tatgctggaaggtgt

SEQ ID NO: 1315357 - DNA, 15 bp, Homo sapiens
ctatgctggaaggtg

SEQ ID NO: 1315358 - DNA, 15 bp, Homo sapiens
tctatgctggaaggt

SEQ ID NO: 1315359 - DNA, 15 bp, Homo sapiens
atctatgctggaagg

SEQ ID NO: 1315360 - DNA, 15 bp, Homo sapiens
aatctatgctggaag

SEQ ID NO: 1315361 - DNA, 15 bp, Homo sapiens
taatctatgctggaa

SEQ ID NO: 1315362 - DNA, 15 bp, Homo sapiens
ataatctatgctgga

SEQ ID NO: 1315363 - DNA, 15 bp, Homo sapiens
aataatctatgctgg

SEQ ID NO: 1315364 - DNA, 15 bp, Homo sapiens
taataatctatgctg

SEQ ID NO: 1315365 - DNA, 15 bp, Homo sapiens
ataataatctatgct

SEQ ID NO: 1315366 - DNA, 15 bp, Homo sapiens
gataataatctatgc

SEQ ID NO: 1315367 - DNA, 15 bp, Homo sapiens
tgataataatctatg

SEQ ID NO: 1315368 - DNA, 15 bp, Homo sapiens
ctgataataatctat

SEQ ID NO: 1315369 - DNA, 15 bp, Homo sapiens
tctgataataatcta

SEQ ID NO: 1315370 - DNA, 15 bp, Homo sapiens
ttctgataataatct

SEQ ID NO: 1315371 - DNA, 15 bp, Homo sapiens
tttctgataataatc

SEQ ID NO: 1315372 - DNA, 15 bp, Homo sapiens
atttctgataataat

SEQ ID NO: 1315373 - DNA, 15 bp, Homo sapiens
gatttctgataataa

SEQ ID NO: 1315374 - DNA, 15 bp, Homo sapiens
ggatttctgataata

SEQ ID NO: 1315375 - DNA, 15 bp, Homo sapiens
tggatttctgataat

SEQ ID NO: 1315376 - DNA, 15 bp, Homo sapiens
ttggatttctgataa

SEQ ID NO: 1315377 - DNA, 15 bp, Homo sapiens
cttggatttctgata

SEQ ID NO: 1315378 - DNA, 15 bp, Homo sapiens
acttggatttctgat

SEQ ID NO: 1315379 - DNA, 15 bp, Homo sapiens
tacttggatttctga

SEQ ID NO: 1315380 - DNA, 15 bp, Homo sapiens
gtacttggatttctg

SEQ ID NO: 1315381 - DNA, 15 bp, Homo sapiens
agtacttggatttct

SEQ ID NO: 1315382 - DNA, 15 bp, Homo sapiens
gagtacttggatttc

SEQ ID NO: 1315383 - DNA, 15 bp, Homo sapiens
agagtacttggattt

SEQ ID NO: 1315384 - DNA, 15 bp, Homo sapiens
aagagtacttggatt

SEQ ID NO: 1315385 - DNA, 15 bp, Homo sapiens
gaagagtacttggat

SEQ ID NO: 1315386 - DNA, 15 bp, Homo sapiens
tgaagagtacttgga

SEQ ID NO: 1315387 - DNA, 15 bp, Homo sapiens
ctgaagagtacttgg

SEQ ID NO: 1315388 - DNA, 15 bp, Homo sapiens
actgaagagtacttg

SEQ ID NO: 1315389 - DNA, 15 bp, Homo sapiens
aactgaagagtactt

SEQ ID NO: 1315390 - DNA, 15 bp, Homo sapiens
taactgaagagtact

SEQ ID NO: 1315391 - DNA, 15 bp, Homo sapiens
ttaactgaagagtac

SEQ ID NO: 1315392 - DNA, 15 bp, Homo sapiens
tttaactgaagagta

SEQ ID NO: 1315393 - DNA, 15 bp, Homo sapiens
ctttaactgaagagt

SEQ ID NO: 1315394 - DNA, 15 bp, Homo sapiens
actttaactgaagag

SEQ ID NO: 1315395 - DNA, 15 bp, Homo sapiens
tactttaactgaaga

SEQ ID NO: 1315396 - DNA, 15 bp, Homo sapiens
ttactttaactgaag

SEQ ID NO: 1315397 - DNA, 15 bp, Homo sapiens
tttactttaactgaa

SEQ ID NO: 1315398 - DNA, 15 bp, Homo sapiens
gtttactttaactga

SEQ ID NO: 1315399 - DNA, 15 bp, Homo sapiens
tgtttactttaactg

SEQ ID NO: 1315400 - DNA, 15 bp, Homo sapiens
gtgtttactttaact

SEQ ID NO: 1315401 - DNA, 15 bp, Homo sapiens
agtgtttactttaac

SEQ ID NO: 1315402 - DNA, 15 bp, Homo sapiens
aagtgtttactttaa

SEQ ID NO: 1315403 - DNA, 15 bp, Homo sapiens
taagtgtttacttta

SEQ ID NO: 1315404 - DNA, 15 bp, Homo sapiens
ataagtgtttacttt

SEQ ID NO: 1315405 - DNA, 15 bp, Homo sapiens
aataagtgtttactt

SEQ ID NO: 1315406 - DNA, 15 bp, Homo sapiens
caataagtgtttact

SEQ ID NO: 1315407 - DNA, 15 bp, Homo sapiens
tcaataagtgtttac

SEQ ID NO: 1315408 - DNA, 15 bp, Homo sapiens
gtcaataagtgttta

SEQ ID NO: 1315409 - DNA, 15 bp, Homo sapiens
agtcaataagtgttt

SEQ ID NO: 1315410 - DNA, 15 bp, Homo sapiens
acaagtcaataagtg

SEQ ID NO: 1315411 - DNA, 15 bp, Homo sapiens
tacaagtcaataagt

SEQ ID NO: 1315412 - DNA, 15 bp, Homo sapiens
atacaagtcaataag

SEQ ID NO: 1315413 - DNA, 15 bp, Homo sapiens
gatacaagtcaataa

SEQ ID NO: 1315414 - DNA, 15 bp, Homo sapiens
agatacaagtcaata

SEQ ID NO: 1315415 - DNA, 15 bp, Homo sapiens
aagatacaagtcaat

SEQ ID NO: 1315416 - DNA, 15 bp, Homo sapiens
aaagatacaagtcaa

SEQ ID NO: 1315417 - DNA, 15 bp, Homo sapiens
aaaagatacaagtca

SEQ ID NO: 1315418 - DNA, 15 bp, Homo sapiens
taaaagatacaagtc

SEQ ID NO: 1315419 - DNA, 15 bp, Homo sapiens
gtaaaagatacaagt

SEQ ID NO: 1315420 - DNA, 15 bp, Homo sapiens
ggtaaaagatacaag

SEQ ID NO: 1315421 - DNA, 15 bp, Homo sapiens
aggtaaaagatacaa

SEQ ID NO: 1315422 - DNA, 15 bp, Homo sapiens
taggtaaaagataca

SEQ ID NO: 1315423 - DNA, 15 bp, Homo sapiens
ataggtaaaagatac

SEQ ID NO: 1315424 - DNA, 15 bp, Homo sapiens
aataggtaaaagata

SEQ ID NO: 1315425 - DNA, 15 bp, Homo sapiens
taataggtaaaagat

SEQ ID NO: 1315426 - DNA, 15 bp, Homo sapiens
gtaataggtaaaaga

SEQ ID NO: 1315427 - DNA, 15 bp, Homo sapiens
agtaataggtaaaag

SEQ ID NO: 1315428 - DNA, 15 bp, Homo sapiens
cagtaataggtaaaa

SEQ ID NO: 1315429 - DNA, 15 bp, Homo sapiens
tcagtaataggtaaa

SEQ ID NO: 1315430 - DNA, 15 bp, Homo sapiens
ctcagtaataggtaa

SEQ ID NO: 1315431 - DNA, 15 bp, Homo sapiens
cctcagtaataggta

SEQ ID NO: 1315432 - DNA, 15 bp, Homo sapiens
ccctcagtaataggt

SEQ ID NO: 1315433 - DNA, 15 bp, Homo sapiens
cccctcagtaatagg

SEQ ID NO: 1315434 - DNA, 15 bp, Homo sapiens
acccctcagtaatag

SEQ ID NO: 1315435 - DNA, 15 bp, Homo sapiens
tacccctcagtaata

SEQ ID NO: 1315436 - DNA, 15 bp, Homo sapiens
ctacccctcagtaat

SEQ ID NO: 1315437 - DNA, 15 bp, Homo sapiens
tctacccctcagtaa

SEQ ID NO: 1315438 - DNA, 15 bp, Homo sapiens
ttctacccctcagta

SEQ ID NO: 1315439 - DNA, 15 bp, Homo sapiens
cttctacccctcagt

SEQ ID NO: 1315440 - DNA, 15 bp, Homo sapiens
acttctacccctcag

SEQ ID NO: 1315441 - DNA, 15 bp, Homo sapiens
aacttctacccctca

SEQ ID NO: 1315442 - DNA, 15 bp, Homo sapiens
taacttctacccctc

SEQ ID NO: 1315443 - DNA, 15 bp, Homo sapiens
ttaacttctacccct

SEQ ID NO: 1315444 - DNA, 15 bp, Homo sapiens
tttaacttctacccc

SEQ ID NO: 1315445 - DNA, 15 bp, Homo sapiens
ttttaacttctaccc

SEQ ID NO: 1315446 - DNA, 15 bp, Homo sapiens
tttttaacttctacc

SEQ ID NO: 1315447 - DNA, 15 bp, Homo sapiens
ctttttaacttctac

SEQ ID NO: 1315448 - DNA, 15 bp, Homo sapiens
cctttttaacttcta

SEQ ID NO: 1315449 - DNA, 15 bp, Homo sapiens
tcctttttaacttct

SEQ ID NO: 1315450 - DNA, 15 bp, Homo sapiens
atcctttttaacttc

SEQ ID NO: 1315451 - DNA, 15 bp, Homo sapiens
aatcctttttaactt

SEQ ID NO: 1315452 - DNA, 15 bp, Homo sapiens
caatcctttttaact

SEQ ID NO: 1315453 - DNA, 15 bp, Homo sapiens
ccaatcctttttaac

SEQ ID NO: 1315454 - DNA, 15 bp, Homo sapiens
accaatcctttttaa

SEQ ID NO: 1315455 - DNA, 15 bp, Homo sapiens
gaccaatccttttta

SEQ ID NO: 1315456 - DNA, 15 bp, Homo sapiens
agaccaatccttttt

SEQ ID NO: 1315457 - DNA, 15 bp, Homo sapiens
gagaccaatcctttt

SEQ ID NO: 1315458 - DNA, 15 bp, Homo sapiens
agagaccaatccttt

SEQ ID NO: 1315459 - DNA, 15 bp, Homo sapiens
gagagaccaatcctt

SEQ ID NO: 1315460 - DNA, 15 bp, Homo sapiens
tgagagaccaatcct

SEQ ID NO: 1315461 - DNA, 15 bp, Homo sapiens
ctgagagaccaatcc

SEQ ID NO: 1315462 - DNA, 15 bp, Homo sapiens
cctgagagaccaatc

SEQ ID NO: 1315463 - DNA, 15 bp, Homo sapiens
tcctgagagaccaat

SEQ ID NO: 1315464 - DNA, 15 bp, Homo sapiens
atcctgagagaccaa

SEQ ID NO: 1315465 - DNA, 15 bp, Homo sapiens
catcctgagagacca

SEQ ID NO: 1315466 - DNA, 15 bp, Homo sapiens
gcatcctgagagacc

SEQ ID NO: 1315467 - DNA, 15 bp, Homo sapiens
agcatcctgagagac

SEQ ID NO: 1315468 - DNA, 15 bp, Homo sapiens
gagcatcctgagaga

SEQ ID NO: 1315469 - DNA, 15 bp, Homo sapiens
ggagcatcctgagag

SEQ ID NO: 1315470 - DNA, 15 bp, Homo sapiens
aggagcatcctgaga

SEQ ID NO: 1315471 - DNA, 15 bp, Homo sapiens
caggagcatcctgag

SEQ ID NO: 1315472 - DNA, 15 bp, Homo sapiens
ccaggagcatcctga

SEQ ID NO: 1315473 - DNA, 15 bp, Homo sapiens
tccaggagcatcctg

SEQ ID NO: 1315474 - DNA, 15 bp, Homo sapiens
ttccaggagcatcct

SEQ ID NO: 1315475 - DNA, 15 bp, Homo sapiens
cttccaggagcatcc

SEQ ID NO: 1315476 - DNA, 15 bp, Homo sapiens
gcttccaggagcatc

SEQ ID NO: 1315477 - DNA, 15 bp, Homo sapiens
agcttccaggagcat

SEQ ID NO: 1315478 - DNA, 15 bp, Homo sapiens
cagcttccaggagca

SEQ ID NO: 1315479 - DNA, 15 bp, Homo sapiens
gcagcttccaggagc

SEQ ID NO: 1315480 - DNA, 15 bp, Homo sapiens
tgcagcttccaggag

SEQ ID NO: 1315481 - DNA, 15 bp, Homo sapiens
atgcagcttccagga

SEQ ID NO: 1315482 - DNA, 15 bp, Homo sapiens
catgcagcttccagg

SEQ ID NO: 1315483 - DNA, 15 bp, Homo sapiens
gcatgcagcttccag

SEQ ID NO: 1315484 - DNA, 15 bp, Homo sapiens
agcatgcagcttcca

SEQ ID NO: 1315485 - DNA, 15 bp, Homo sapiens
aagcatgcagcttcc

SEQ ID NO: 1315486 - DNA, 15 bp, Homo sapiens
caagcatgcagcttc

SEQ ID NO: 1315487 - DNA, 15 bp, Homo sapiens
acaagcatgcagctt

SEQ ID NO: 1315488 - DNA, 15 bp, Homo sapiens
cacaagcatgcagct

SEQ ID NO: 1315489 - DNA, 15 bp, Homo sapiens
ccacaagcatgcagc

SEQ ID NO: 1315490 - DNA, 15 bp, Homo sapiens
gccacaagcatgcag

SEQ ID NO: 1315491 - DNA, 15 bp, Homo sapiens
agccacaagcatgca

SEQ ID NO: 1315492 - DNA, 15 bp, Homo sapiens
tagccacaagcatgc

SEQ ID NO: 1315493 - DNA, 15 bp, Homo sapiens
atagccacaagcatg

SEQ ID NO: 1315494 - DNA, 15 bp, Homo sapiens
tatagccacaagcat

SEQ ID NO: 1315495 - DNA, 15 bp, Homo sapiens
ttatagccacaagca

SEQ ID NO: 1315496 - DNA, 15 bp, Homo sapiens
tttatagccacaagc

SEQ ID NO: 1315497 - DNA, 15 bp, Homo sapiens
ctttatagccacaag

SEQ ID NO: 1315498 - DNA, 15 bp, Homo sapiens
gctttatagccacaa

SEQ ID NO: 1315499 - DNA, 15 bp, Homo sapiens
agctttatagccaca

SEQ ID NO: 1315500 - DNA, 15 bp, Homo sapiens
tagctttatagccac

SEQ ID NO: 1315501 - DNA, 15 bp, Homo sapiens
atagctttatagcca

SEQ ID NO: 1315502 - DNA, 15 bp, Homo sapiens
aatagctttatagcc

SEQ ID NO: 1315503 - DNA, 15 bp, Homo sapiens
gaatagctttatagc

SEQ ID NO: 1315504 - DNA, 15 bp, Homo sapiens
agaatagctttatag

SEQ ID NO: 1315505 - DNA, 15 bp, Homo sapiens
gagaatagctttata

SEQ ID NO: 1315506 - DNA, 15 bp, Homo sapiens
agagaatagctttat

SEQ ID NO: 1315507 - DNA, 15 bp, Homo sapiens
cagagaatagcttta

SEQ ID NO: 1315508 - DNA, 15 bp, Homo sapiens
tcagagaatagcttt

SEQ ID NO: 1315509 - DNA, 15 bp, Homo sapiens
atcagagaatagctt

SEQ ID NO: 1315510 - DNA, 15 bp, Homo sapiens
tatcagagaatagct

SEQ ID NO: 1315511 - DNA, 15 bp, Homo sapiens
atatcagagaatagc

SEQ ID NO: 1315512 - DNA, 15 bp, Homo sapiens
tatatcagagaatag

SEQ ID NO: 1315513 - DNA, 15 bp, Homo sapiens
gtatatcagagaata

SEQ ID NO: 1315514 - DNA, 15 bp, Homo sapiens
ggtatatcagagaat

SEQ ID NO: 1315515 - DNA, 15 bp, Homo sapiens
aggtatatcagagaa

SEQ ID NO: 1315516 - DNA, 15 bp, Homo sapiens
caggtatatcagaga

SEQ ID NO: 1315517 - DNA, 15 bp, Homo sapiens
tcaggtatatcagag

SEQ ID NO: 1315518 - DNA, 15 bp, Homo sapiens
ttcaggtatatcaga

SEQ ID NO: 1315519 - DNA, 15 bp, Homo sapiens
attcaggtatatcag

SEQ ID NO: 1315520 - DNA, 15 bp, Homo sapiens
aattcaggtatatca

SEQ ID NO: 1315521 - DNA, 15 bp, Homo sapiens
gaattcaggtatatc

SEQ ID NO: 1315522 - DNA, 15 bp, Homo sapiens
agaattcaggtatat

SEQ ID NO: 1315523 - DNA, 15 bp, Homo sapiens
aagaattcaggtata

SEQ ID NO: 1315524 - DNA, 15 bp, Homo sapiens
aaagaattcaggtat

SEQ ID NO: 1315525 - DNA, 15 bp, Homo sapiens
aaaagaattcaggta

SEQ ID NO: 1315526 - DNA, 15 bp, Homo sapiens
caaaagaattcaggt

SEQ ID NO: 1315527 - DNA, 15 bp, Homo sapiens
gcaaaagaattcagg

SEQ ID NO: 1315528 - DNA, 15 bp, Homo sapiens
agcaaaagaattcag

SEQ ID NO: 1315529 - DNA, 15 bp, Homo sapiens
gagcaaaagaattca

SEQ ID NO: 1315530 - DNA, 15 bp, Homo sapiens
ggagcaaaagaattc

SEQ ID NO: 1315531 - DNA, 15 bp, Homo sapiens
gggagcaaaagaatt

SEQ ID NO: 1315532 - DNA, 15 bp, Homo sapiens
tgggagcaaaagaat

SEQ ID NO: 1315533 - DNA, 15 bp, Homo sapiens
ctgggagcaaaagaa

SEQ ID NO: 1315534 - DNA, 15 bp, Homo sapiens
actgggagcaaaaga

SEQ ID NO: 1315535 - DNA, 15 bp, Homo sapiens
tactgggagcaaaag

SEQ ID NO: 1315536 - DNA, 15 bp, Homo sapiens
ctactgggagcaaaa

SEQ ID NO: 1315537 - DNA, 15 bp, Homo sapiens
actactgggagcaaa

SEQ ID NO: 1315538 - DNA, 15 bp, Homo sapiens
cactactgggagcaa

SEQ ID NO: 1315539 - DNA, 15 bp, Homo sapiens
tcactactgggagca

SEQ ID NO: 1315540 - DNA, 15 bp, Homo sapiens
ttcactactgggagc

SEQ ID NO: 1315541 - DNA, 15 bp, Homo sapiens
tttcactactgggag

SEQ ID NO: 1315542 - DNA, 15 bp, Homo sapiens
atttcactactggga

SEQ ID NO: 1315543 - DNA, 15 bp, Homo sapiens
aatttcactactggg

SEQ ID NO: 1315544 - DNA, 15 bp, Homo sapiens
caatttcactactgg

SEQ ID NO: 1315545 - DNA, 15 bp, Homo sapiens
acaatttcactactg

SEQ ID NO: 1315546 - DNA, 15 bp, Homo sapiens
cacaatttcactact

SEQ ID NO: 1315547 - DNA, 15 bp, Homo sapiens
acacaatttcactac

SEQ ID NO: 1315548 - DNA, 15 bp, Homo sapiens
cacacaatttcacta

SEQ ID NO: 1315549 - DNA, 15 bp, Homo sapiens
acacacaatttcact

SEQ ID NO: 1315550 - DNA, 15 bp, Homo sapiens
cacacacaatttcac

SEQ ID NO: 1315551 - DNA, 15 bp, Homo sapiens
acacacacaatttca

SEQ ID NO: 1315552 - DNA, 15 bp, Homo sapiens
tacacacacaatttc

SEQ ID NO: 1315553 - DNA, 15 bp, Homo sapiens
atacacacacaattt

SEQ ID NO: 1315554 - DNA, 15 bp, Homo sapiens
aatacacacacaatt

SEQ ID NO: 1315555 - DNA, 15 bp, Homo sapiens
taatacacacacaat

SEQ ID NO: 1315556 - DNA, 15 bp, Homo sapiens
cttttaatacacaca

SEQ ID NO: 1315557 - DNA, 15 bp, Homo sapiens
acttttaatacacac

SEQ ID NO: 1315558 - DNA, 15 bp, Homo sapiens
aacttttaatacaca

SEQ ID NO: 1315559 - DNA, 15 bp, Homo sapiens
aaacttttaatacac

SEQ ID NO: 1315560 - DNA, 15 bp, Homo sapiens
taaacttttaataca

SEQ ID NO: 1315561 - DNA, 15 bp, Homo sapiens
ttaaacttttaatac

SEQ ID NO: 1315562 - DNA, 15 bp, Homo sapiens
cttaaacttttaata

SEQ ID NO: 1315563 - DNA, 15 bp, Homo sapiens
gcttaaacttttaat

SEQ ID NO: 1315564 - DNA, 15 bp, Homo sapiens
tgcttaaacttttaa

SEQ ID NO: 1315565 - DNA, 15 bp, Homo sapiens
atgcttaaactttta

SEQ ID NO: 1315566 - DNA, 15 bp, Homo sapiens
aatgcttaaactttt

SEQ ID NO: 1315567 - DNA, 15 bp, Homo sapiens
caatgcttaaacttt

SEQ ID NO: 1315568 - DNA, 15 bp, Homo sapiens
acaatgcttaaactt

SEQ ID NO: 1315569 - DNA, 15 bp, Homo sapiens
aacaatgcttaaact

SEQ ID NO: 1315570 - DNA, 15 bp, Homo sapiens
aaacaatgcttaaac

SEQ ID NO: 1315571 - DNA, 15 bp, Homo sapiens
taaacaatgcttaaa

SEQ ID NO: 1315572 - DNA, 15 bp, Homo sapiens
gtaaacaatgcttaa

SEQ ID NO: 1315573 - DNA, 15 bp, Homo sapiens
agtaaacaatgctta

SEQ ID NO: 1315574 - DNA, 15 bp, Homo sapiens
gagtaaacaatgctt

SEQ ID NO: 1315575 - DNA, 15 bp, Homo sapiens
ggagtaaacaatgct

SEQ ID NO: 1315576 - DNA, 15 bp, Homo sapiens
gggagtaaacaatgc

SEQ ID NO: 1315577 - DNA, 15 bp, Homo sapiens
agggagtaaacaatg

SEQ ID NO: 1315578 - DNA, 15 bp, Homo sapiens
cagggagtaaacaat

SEQ ID NO: 1315579 - DNA, 15 bp, Homo sapiens
tcagggagtaaacaa

SEQ ID NO: 1315580 - DNA, 15 bp, Homo sapiens
atcagggagtaaaca

SEQ ID NO: 1315581 - DNA, 15 bp, Homo sapiens
aatcagggagtaaac

SEQ ID NO: 1315582 - DNA, 15 bp, Homo sapiens
aaatcagggagtaaa

SEQ ID NO: 1315583 - DNA, 15 bp, Homo sapiens
taaatcagggagtaa

SEQ ID NO: 1315584 - DNA, 15 bp, Homo sapiens
ataaatcagggagta

SEQ ID NO: 1315585 - DNA, 15 bp, Homo sapiens
tataaatcagggagt

SEQ ID NO: 1315586 - DNA, 15 bp, Homo sapiens
atataaatcagggag

SEQ ID NO: 1315587 - DNA, 15 bp, Homo sapiens
aatataaatcaggga

SEQ ID NO: 1315588 - DNA, 15 bp, Homo sapiens
aaatataaatcaggg

SEQ ID NO: 1315589 - DNA, 15 bp, Homo sapiens
caaatataaatcagg

SEQ ID NO: 1315590 - DNA, 15 bp, Homo sapiens
gcaaatataaatcag

SEQ ID NO: 1315591 - DNA, 15 bp, Homo sapiens
agcaaatataaatca

SEQ ID NO: 1315592 - DNA, 15 bp, Homo sapiens
cagcaaatataaatc

SEQ ID NO: 1315593 - DNA, 15 bp, Homo sapiens
tcagcaaatataaat

SEQ ID NO: 1315594 - DNA, 15 bp, Homo sapiens
atcagcaaatataaa

SEQ ID NO: 1315595 - DNA, 15 bp, Homo sapiens
aatcagcaaatataa

SEQ ID NO: 1315596 - DNA, 15 bp, Homo sapiens
aaatcagcaaatata

SEQ ID NO: 1315597 - DNA, 15 bp, Homo sapiens
aaaatcagcaaatat

SEQ ID NO: 1315598 - DNA, 15 bp, Homo sapiens
aaaaatcagcaaata

SEQ ID NO: 1315599 - DNA, 15 bp, Homo sapiens
gaaaaatcagcaaat

SEQ ID NO: 1315600 - DNA, 15 bp, Homo sapiens
tgaaaaatcagcaaa

SEQ ID NO: 1315601 - DNA, 15 bp, Homo sapiens
atgaaaaatcagcaa

SEQ ID NO: 1315602 - DNA, 15 bp, Homo sapiens
tatgaaaaatcagca

SEQ ID NO: 1315603 - DNA, 15 bp, Homo sapiens
atatgaaaaatcagc

SEQ ID NO: 1315604 - DNA, 15 bp, Homo sapiens
aatatgaaaaatcag

SEQ ID NO: 1315605 - DNA, 15 bp, Homo sapiens
taatatgaaaaatca

SEQ ID NO: 1315606 - DNA, 15 bp, Homo sapiens
ataatatgaaaaatc

SEQ ID NO: 1315607 - DNA, 15 bp, Homo sapiens
aataatatgaaaaat

SEQ ID NO: 1315608 - DNA, 15 bp, Homo sapiens
caataatatgaaaaa

SEQ ID NO: 1315609 - DNA, 15 bp, Homo sapiens
acaataatatgaaaa

SEQ ID NO: 1315610 - DNA, 15 bp, Homo sapiens
tacaataatatgaaa

SEQ ID NO: 1315611 - DNA, 15 bp, Homo sapiens
ttacaataatatgaa

SEQ ID NO: 1315612 - DNA, 15 bp, Homo sapiens
attacaataatatga

SEQ ID NO: 1315613 - DNA, 15 bp, Homo sapiens
cattacaataatatg

SEQ ID NO: 1315614 - DNA, 15 bp, Homo sapiens
acattacaataatat

SEQ ID NO: 1315615 - DNA, 15 bp, Homo sapiens
aacattacaataata

SEQ ID NO: 1315616 - DNA, 15 bp, Homo sapiens
taacattacaataat

SEQ ID NO: 1315617 - DNA, 15 bp, Homo sapiens
ataacattacaataa

SEQ ID NO: 1315618 - DNA, 15 bp, Homo sapiens
tataacattacaata

SEQ ID NO: 1315619 - DNA, 15 bp, Homo sapiens
ttataacattacaat

SEQ ID NO: 1315620 - DNA, 15 bp, Homo sapiens
tttataacattacaa

SEQ ID NO: 1315621 - DNA, 15 bp, Homo sapiens
ttttataacattaca

SEQ ID NO: 1315622 - DNA, 15 bp, Homo sapiens
attttataacattac

SEQ ID NO: 1315623 - DNA, 15 bp, Homo sapiens
cattttataacatta

SEQ ID NO: 1315624 - DNA, 15 bp, Homo sapiens
ccattttataacatt

SEQ ID NO: 1315625 - DNA, 15 bp, Homo sapiens
tccattttataacat

SEQ ID NO: 1315626 - DNA, 15 bp, Homo sapiens
ttccattttataaca

SEQ ID NO: 1315627 - DNA, 15 bp, Homo sapiens
cttccattttataac

SEQ ID NO: 1315628 - DNA, 15 bp, Homo sapiens
acttccattttataa

SEQ ID NO: 1315629 - DNA, 15 bp, Homo sapiens
cacttccattttata

SEQ ID NO: 1315630 - DNA, 15 bp, Homo sapiens
gcacttccattttat

SEQ ID NO: 1315631 - DNA, 15 bp, Homo sapiens
tgcacttccatttta

SEQ ID NO: 1315632 - DNA, 15 bp, Homo sapiens
ttgcacttccatttt

SEQ ID NO: 1315633 - DNA, 15 bp, Homo sapiens
tttgcacttccattt

SEQ ID NO: 1315634 - DNA, 15 bp, Homo sapiens
ttttgcacttccatt

SEQ ID NO: 1315635 - DNA, 15 bp, Homo sapiens
tttttgcacttccat

SEQ ID NO: 1315636 - DNA, 15 bp, Homo sapiens
ttttttgcacttcca

SEQ ID NO: 1315637 - DNA, 15 bp, Homo sapiens
cttttttgcacttcc

SEQ ID NO: 1315638 - DNA, 15 bp, Homo sapiens
ccttttttgcacttc

SEQ ID NO: 1315639 - DNA, 15 bp, Homo sapiens
cccttttttgcactt

SEQ ID NO: 1315640 - DNA, 15 bp, Homo sapiens
acccttttttgcact

SEQ ID NO: 1315641 - DNA, 15 bp, Homo sapiens
aacccttttttgcac

SEQ ID NO: 1315642 - DNA, 15 bp, Homo sapiens
caacccttttttgca

SEQ ID NO: 1315643 - DNA, 15 bp, Homo sapiens
acaacccttttttgc

SEQ ID NO: 1315644 - DNA, 15 bp, Homo sapiens
aacaacccttttttg

SEQ ID NO: 1315645 - DNA, 15 bp, Homo sapiens
aaacaaccctttttt

SEQ ID NO: 1315646 - DNA, 15 bp, Homo sapiens
aaaacaacccttttt

SEQ ID NO: 1315647 - DNA, 15 bp, Homo sapiens
taaaacaaccctttt

SEQ ID NO: 1315648 - DNA, 15 bp, Homo sapiens
ctaaaacaacccttt

SEQ ID NO: 1315649 - DNA, 15 bp, Homo sapiens
actaaaacaaccctt

SEQ ID NO: 1315650 - DNA, 15 bp, Homo sapiens
gactaaaacaaccct

SEQ ID NO: 1315651 - DNA, 15 bp, Homo sapiens
tgactaaaacaaccc

SEQ ID NO: 1315652 - DNA, 15 bp, Homo sapiens
ttgactaaaacaacc

SEQ ID NO: 1315653 - DNA, 15 bp, Homo sapiens
tttgactaaaacaac

SEQ ID NO: 1315654 - DNA, 15 bp, Homo sapiens
gtttgactaaaacaa

SEQ ID NO: 1315655 - DNA, 15 bp, Homo sapiens
ggtttgactaaaaca

SEQ ID NO: 1315656 - DNA, 15 bp, Homo sapiens
tggtttgactaaaac

SEQ ID NO: 1315657 - DNA, 15 bp, Homo sapiens
ttggtttgactaaaa

SEQ ID NO: 1315658 - DNA, 15 bp, Homo sapiens
cttggtttgactaaa

SEQ ID NO: 1315659 - DNA, 15 bp, Homo sapiens
acttggtttgactaa

SEQ ID NO: 1315660 - DNA, 15 bp, Homo sapiens
aacttggtttgacta

SEQ ID NO: 1315661 - DNA, 15 bp, Homo sapiens
gaacttggtttgact

SEQ ID NO: 1315662 - DNA, 15 bp, Homo sapiens
cgaacttggtttgac

SEQ ID NO: 1315663 - DNA, 15 bp, Homo sapiens
ccgaacttggtttga

SEQ ID NO: 1315664 - DNA, 15 bp, Homo sapiens
accgaacttggtttg

SEQ ID NO: 1315665 - DNA, 15 bp, Homo sapiens
caccgaacttggttt

SEQ ID NO: 1315666 - DNA, 15 bp, Homo sapiens
gcaccgaacttggtt

SEQ ID NO: 1315667 - DNA, 15 bp, Homo sapiens
agcaccgaacttggt

SEQ ID NO: 1315668 - DNA, 15 bp, Homo sapiens
aagcaccgaacttgg

SEQ ID NO: 1315669 - DNA, 15 bp, Homo sapiens
aaagcaccgaacttg

SEQ ID NO: 1315670 - DNA, 15 bp, Homo sapiens
caaagcaccgaactt

SEQ ID NO: 1315671 - DNA, 15 bp, Homo sapiens
tcaaagcaccgaact

SEQ ID NO: 1315672 - DNA, 15 bp, Homo sapiens
ttcaaagcaccgaac

SEQ ID NO: 1315673 - DNA, 15 bp, Homo sapiens
tttcaaagcaccgaa

SEQ ID NO: 1315674 - DNA, 15 bp, Homo sapiens
atttcaaagcaccga

SEQ ID NO: 1315675 - DNA, 15 bp, Homo sapiens
catttcaaagcaccg

SEQ ID NO: 1315676 - DNA, 15 bp, Homo sapiens
tcatttcaaagcacc

SEQ ID NO: 1315677 - DNA, 15 bp, Homo sapiens
gtcatttcaaagcac

SEQ ID NO: 1315678 - DNA, 15 bp, Homo sapiens
agtcatttcaaagca

SEQ ID NO: 1315679 - DNA, 15 bp, Homo sapiens
gagtcatttcaaagc

SEQ ID NO: 1315680 - DNA, 15 bp, Homo sapiens
tgagtcatttcaaag

SEQ ID NO: 1315681 - DNA, 15 bp, Homo sapiens
ctgagtcatttcaaa

SEQ ID NO: 1315682 - DNA, 15 bp, Homo sapiens
tctgagtcatttcaa

SEQ ID NO: 1315683 - DNA, 15 bp, Homo sapiens
ctctgagtcatttca

SEQ ID NO: 1315684 - DNA, 15 bp, Homo sapiens
cctctgagtcatttc

SEQ ID NO: 1315685 - DNA, 15 bp, Homo sapiens
gcctctgagtcattt

SEQ ID NO: 1315686 - DNA, 15 bp, Homo sapiens
tgcctctgagtcatt

SEQ ID NO: 1315687 - DNA, 15 bp, Homo sapiens
ttgcctctgagtcat

SEQ ID NO: 1315688 - DNA, 15 bp, Homo sapiens
cttgcctctgagtca

SEQ ID NO: 1315689 - DNA, 15 bp, Homo sapiens
acttgcctctgagtc

SEQ ID NO: 1315690 - DNA, 15 bp, Homo sapiens
aacttgcctctgagt

SEQ ID NO: 1315691 - DNA, 15 bp, Homo sapiens
caacttgcctctgag

SEQ ID NO: 1315692 - DNA, 15 bp, Homo sapiens
gcaacttgcctctga

SEQ ID NO: 1315693 - DNA, 15 bp, Homo sapiens
tgcaacttgcctctg

SEQ ID NO: 1315694 - DNA, 15 bp, Homo sapiens
ctgcaacttgcctct

SEQ ID NO: 1315695 - DNA, 15 bp, Homo sapiens
tctgcaacttgcctc

SEQ ID NO: 1315696 - DNA, 15 bp, Homo sapiens
ttctgcaacttgcct

SEQ ID NO: 1315697 - DNA, 15 bp, Homo sapiens
tttctgcaacttgcc

SEQ ID NO: 1315698 - DNA, 15 bp, Homo sapiens
ttttctgcaacttgc

SEQ ID NO: 1315699 - DNA, 15 bp, Homo sapiens
attttctgcaacttg

SEQ ID NO: 1315700 - DNA, 15 bp, Homo sapiens
tattttctgcaactt

SEQ ID NO: 1315701 - DNA, 15 bp, Homo sapiens
atattttctgcaact

SEQ ID NO: 1315702 - DNA, 15 bp, Homo sapiens
aatattttctgcaac

SEQ ID NO: 1315703 - DNA, 15 bp, Homo sapiens
caatattttctgcaa

SEQ ID NO: 1315704 - DNA, 15 bp, Homo sapiens
acaatattttctgca

SEQ ID NO: 1315705 - DNA, 15 bp, Homo sapiens
ctacaatattttctg

SEQ ID NO: 1315706 - DNA, 15 bp, Homo sapiens
tctacaatattttct

SEQ ID NO: 1315707 - DNA, 15 bp, Homo sapiens
gtctacaatattttc

SEQ ID NO: 1315708 - DNA, 15 bp, Homo sapiens
agtctacaatatttt

SEQ ID NO: 1315709 - DNA, 15 bp, Homo sapiens
aagtctacaatattt

SEQ ID NO: 1315710 - DNA, 15 bp, Homo sapiens
taagtctacaatatt

SEQ ID NO: 1315711 - DNA, 15 bp, Homo sapiens
ctaagtctacaatat

SEQ ID NO: 1315712 - DNA, 15 bp, Homo sapiens
tctaagtctacaata

SEQ ID NO: 1315713 - DNA, 15 bp, Homo sapiens
atctaagtctacaat

SEQ ID NO: 1315714 - DNA, 15 bp, Homo sapiens
catctaagtctacaa

SEQ ID NO: 1315715 - DNA, 15 bp, Homo sapiens
acatctaagtctaca

SEQ ID NO: 1315716 - DNA, 15 bp, Homo sapiens
tacatctaagtctac

SEQ ID NO: 1315717 - DNA, 15 bp, Homo sapiens
ctacatctaagtcta

SEQ ID NO: 1315718 - DNA, 15 bp, Homo sapiens
tctacatctaagtct

SEQ ID NO: 1315719 - DNA, 15 bp, Homo sapiens
ttctacatctaagtc

SEQ ID NO: 1315720 - DNA, 15 bp, Homo sapiens
tttctacatctaagt

SEQ ID NO: 1315721 - DNA, 15 bp, Homo sapiens
ttttctacatctaag

SEQ ID NO: 1315722 - DNA, 15 bp, Homo sapiens
cttttctacatctaa

SEQ ID NO: 1315723 - DNA, 15 bp, Homo sapiens
tcttttctacatcta

SEQ ID NO: 1315724 - DNA, 15 bp, Homo sapiens
atcttttctacatct

SEQ ID NO: 1315725 - DNA, 15 bp, Homo sapiens
tatcttttctacatc

SEQ ID NO: 1315726 - DNA, 15 bp, Homo sapiens
atatcttttctacat

SEQ ID NO: 1315727 - DNA, 15 bp, Homo sapiens
catatcttttctaca

SEQ ID NO: 1315728 - DNA, 15 bp, Homo sapiens
tcatatcttttctac

SEQ ID NO: 1315729 - DNA, 15 bp, Homo sapiens
ctcatatcttttcta

SEQ ID NO: 1315730 - DNA, 15 bp, Homo sapiens
cctcatatcttttct

SEQ ID NO: 1315731 - DNA, 15 bp, Homo sapiens
ccctcatatcttttc

SEQ ID NO: 1315732 - DNA, 15 bp, Homo sapiens
cccctcatatctttt

SEQ ID NO: 1315733 - DNA, 15 bp, Homo sapiens
ccccctcatatcttt

SEQ ID NO: 1315734 - DNA, 15 bp, Homo sapiens
gccccctcatatctt

SEQ ID NO: 1315735 - DNA, 15 bp, Homo sapiens
tgccccctcatatct

SEQ ID NO: 1315736 - DNA, 15 bp, Homo sapiens
ttgccccctcatatc

SEQ ID NO: 1315737 - DNA, 15 bp, Homo sapiens
gttgccccctcatat

SEQ ID NO: 1315738 - DNA, 15 bp, Homo sapiens
cgttgccccctcata

SEQ ID NO: 1315739 - DNA, 15 bp, Homo sapiens
acgttgccccctcat

SEQ ID NO: 1315740 - DNA, 15 bp, Homo sapiens
tacgttgccccctca

SEQ ID NO: 1315741 - DNA, 15 bp, Homo sapiens
ttacgttgccccctc

SEQ ID NO: 1315742 - DNA, 15 bp, Homo sapiens
cttacgttgccccct

SEQ ID NO: 1315743 - DNA, 15 bp, Homo sapiens
tcttacgttgccccc

SEQ ID NO: 1315744 - DNA, 15 bp, Homo sapiens
ttcttacgttgcccc

SEQ ID NO: 1315745 - DNA, 15 bp, Homo sapiens
tttcttacgttgccc

SEQ ID NO: 1315746 - DNA, 15 bp, Homo sapiens
gtttcttacgttgcc

SEQ ID NO: 1315747 - DNA, 15 bp, Homo sapiens
agtttcttacgttgc

SEQ ID NO: 1315748 - DNA, 15 bp, Homo sapiens
tagtttcttacgttg

SEQ ID NO: 1315749 - DNA, 15 bp, Homo sapiens
ctagtttcttacgtt

SEQ ID NO: 1315750 - DNA, 15 bp, Homo sapiens
tctagtttcttacgt

SEQ ID NO: 1315751 - DNA, 15 bp, Homo sapiens
ttctagtttcttacg

SEQ ID NO: 1315752 - DNA, 15 bp, Homo sapiens
tttctagtttcttac

SEQ ID NO: 1315753 - DNA, 15 bp, Homo sapiens
ctttctagtttctta

SEQ ID NO: 1315754 - DNA, 15 bp, Homo sapiens
cctttctagtttctt

SEQ ID NO: 1315755 - DNA, 15 bp, Homo sapiens
tcctttctagtttct

SEQ ID NO: 1315756 - DNA, 15 bp, Homo sapiens
atcctttctagtttc

SEQ ID NO: 1315757 - DNA, 15 bp, Homo sapiens
aatcctttctagttt

SEQ ID NO: 1315758 - DNA, 15 bp, Homo sapiens
caatcctttctagtt

SEQ ID NO: 1315759 - DNA, 15 bp, Homo sapiens
gcaatcctttctagt

SEQ ID NO: 1315760 - DNA, 15 bp, Homo sapiens
agcaatcctttctag

SEQ ID NO: 1315761 - DNA, 15 bp, Homo sapiens
tagcaatcctttcta

SEQ ID NO: 1315762 - DNA, 15 bp, Homo sapiens
ctagcaatcctttct

SEQ ID NO: 1315763 - DNA, 15 bp, Homo sapiens
cctagcaatcctttc

SEQ ID NO: 1315764 - DNA, 15 bp, Homo sapiens
acctagcaatccttt

SEQ ID NO: 1315765 - DNA, 15 bp, Homo sapiens
cacctagcaatcctt

SEQ ID NO: 1315766 - DNA, 15 bp, Homo sapiens
gcacctagcaatcct

SEQ ID NO: 1315767 - DNA, 15 bp, Homo sapiens
tgcacctagcaatcc

SEQ ID NO: 1315768 - DNA, 15 bp, Homo sapiens
ctgcacctagcaatc

SEQ ID NO: 1315769 - DNA, 15 bp, Homo sapiens
actgcacctagcaat

SEQ ID NO: 1315770 - DNA, 15 bp, Homo sapiens
cactgcacctagcaa

SEQ ID NO: 1315771 - DNA, 15 bp, Homo sapiens
tcactgcacctagca

SEQ ID NO: 1315772 - DNA, 15 bp, Homo sapiens
gtcactgcacctagc

SEQ ID NO: 1315773 - DNA, 15 bp, Homo sapiens
tgtcactgcacctag

SEQ ID NO: 1315774 - DNA, 15 bp, Homo sapiens
gtgtcactgcaccta

SEQ ID NO: 1315775 - DNA, 15 bp, Homo sapiens
tgtgtcactgcacct

SEQ ID NO: 1315776 - DNA, 15 bp, Homo sapiens
atgtgtcactgcacc

SEQ ID NO: 1315777 - DNA, 15 bp, Homo sapiens
catgtgtcactgcac

SEQ ID NO: 1315778 - DNA, 15 bp, Homo sapiens
gcatgtgtcactgca

SEQ ID NO: 1315779 - DNA, 15 bp, Homo sapiens
ggcatgtgtcactgc

SEQ ID NO: 1315780 - DNA, 15 bp, Homo sapiens
aggcatgtgtcactg

SEQ ID NO: 1315781 - DNA, 15 bp, Homo sapiens
caggcatgtgtcact

SEQ ID NO: 1315782 - DNA, 15 bp, Homo sapiens
acagagtagctggga

SEQ ID NO: 1315783 - DNA, 15 bp, Homo sapiens
tacagagtagctggg

SEQ ID NO: 1315784 - DNA, 15 bp, Homo sapiens
ctacagagtagctgg

SEQ ID NO: 1315785 - DNA, 15 bp, Homo sapiens
cctacagagtagctg

SEQ ID NO: 1315786 - DNA, 15 bp, Homo sapiens
gcctacagagtagct

SEQ ID NO: 1315787 - DNA, 15 bp, Homo sapiens
agcctacagagtagc

SEQ ID NO: 1315788 - DNA, 15 bp, Homo sapiens
cagcctacagagtag

SEQ ID NO: 1315789 - DNA, 15 bp, Homo sapiens
tcagcctacagagta

SEQ ID NO: 1315790 - DNA, 15 bp, Homo sapiens
ctcagcctacagagt

SEQ ID NO: 1315791 - DNA, 15 bp, Homo sapiens
cctcagcctacagag

SEQ ID NO: 1315792 - DNA, 15 bp, Homo sapiens
acctcagcctacaga

SEQ ID NO: 1315793 - DNA, 15 bp, Homo sapiens
cacctcagcctacag

SEQ ID NO: 1315794 - DNA, 15 bp, Homo sapiens
ccacctcagcctaca

SEQ ID NO: 1315795 - DNA, 15 bp, Homo sapiens
gatcttcccacctca

SEQ ID NO: 1315796 - DNA, 15 bp, Homo sapiens
tgatcttcccacctc

SEQ ID NO: 1315797 - DNA, 15 bp, Homo sapiens
gtgatcttcccacct

SEQ ID NO: 1315798 - DNA, 15 bp, Homo sapiens
agtgatcttcccacc

SEQ ID NO: 1315799 - DNA, 15 bp, Homo sapiens
cagtgatcttcccac

SEQ ID NO: 1315800 - DNA, 15 bp, Homo sapiens
ccagtgatcttccca

SEQ ID NO: 1315801 - DNA, 15 bp, Homo sapiens
tccagtgatcttccc

SEQ ID NO: 1315802 - DNA, 15 bp, Homo sapiens
ctccagtgatcttcc

SEQ ID NO: 1315803 - DNA, 15 bp, Homo sapiens
gctccagtgatcttc

SEQ ID NO: 1315804 - DNA, 15 bp, Homo sapiens
ggctccagtgatctt

SEQ ID NO: 1315805 - DNA, 15 bp, Homo sapiens
gggctccagtgatct

SEQ ID NO: 1315806 - DNA, 15 bp, Homo sapiens
tgggctccagtgatc

SEQ ID NO: 1315807 - DNA, 15 bp, Homo sapiens
ctgggctccagtgat

SEQ ID NO: 1315808 - DNA, 15 bp, Homo sapiens
cctgggctccagtga

SEQ ID NO: 1315809 - DNA, 15 bp, Homo sapiens
tcctgggctccagtg

SEQ ID NO: 1315810 - DNA, 15 bp, Homo sapiens
ctcctgggctccagt

SEQ ID NO: 1315811 - DNA, 15 bp, Homo sapiens
actcctgggctccag

SEQ ID NO: 1315812 - DNA, 15 bp, Homo sapiens
aactcctgggctcca

SEQ ID NO: 1315813 - DNA, 15 bp, Homo sapiens
gaactcctgggctcc

SEQ ID NO: 1315814 - DNA, 15 bp, Homo sapiens
agaactcctgggctc

SEQ ID NO: 1315815 - DNA, 15 bp, Homo sapiens
cagaactcctgggct

SEQ ID NO: 1315816 - DNA, 15 bp, Homo sapiens
ccagaactcctgggc

SEQ ID NO: 1315817 - DNA, 15 bp, Homo sapiens
cccagaactcctggg

SEQ ID NO: 1315818 - DNA, 15 bp, Homo sapiens
gcccagaactcctgg

SEQ ID NO: 1315819 - DNA, 15 bp, Homo sapiens
agcccagaactcctg

SEQ ID NO: 1315820 - DNA, 15 bp, Homo sapiens
cagcccagaactcct

SEQ ID NO: 1315821 - DNA, 15 bp, Homo sapiens
acagcccagaactcc

SEQ ID NO: 1315822 - DNA, 15 bp, Homo sapiens
cacagcccagaactc

SEQ ID NO: 1315823 - DNA, 15 bp, Homo sapiens
gcacagcccagaact

SEQ ID NO: 1315824 - DNA, 15 bp, Homo sapiens
cgcacagcccagaac

SEQ ID NO: 1315825 - DNA, 15 bp, Homo sapiens
gcgcacagcccagaa

SEQ ID NO: 1315826 - DNA, 15 bp, Homo sapiens
agcgcacagcccaga

SEQ ID NO: 1315827 - DNA, 15 bp, Homo sapiens
tagcgcacagcccag

SEQ ID NO: 1315828 - DNA, 15 bp, Homo sapiens
atagcgcacagccca

SEQ ID NO: 1315829 - DNA, 15 bp, Homo sapiens
catagcgcacagccc

SEQ ID NO: 1315830 - DNA, 15 bp, Homo sapiens
gcatagcgcacagcc

SEQ ID NO: 1315831 - DNA, 15 bp, Homo sapiens
agcatagcgcacagc

SEQ ID NO: 1315832 - DNA, 15 bp, Homo sapiens
cagcatagcgcacag

SEQ ID NO: 1315833 - DNA, 15 bp, Homo sapiens
tcagcatagcgcaca

SEQ ID NO: 1315834 - DNA, 15 bp, Homo sapiens
atcagcatagcgcac

SEQ ID NO: 1315835 - DNA, 15 bp, Homo sapiens
aatcagcatagcgca

SEQ ID NO: 1315836 - DNA, 15 bp, Homo sapiens
taatcagcatagcgc

SEQ ID NO: 1315837 - DNA, 15 bp, Homo sapiens
ctaatcagcatagcg

SEQ ID NO: 1315838 - DNA, 15 bp, Homo sapiens
cctaatcagcatagc

SEQ ID NO: 1315839 - DNA, 15 bp, Homo sapiens
acctaatcagcatag

SEQ ID NO: 1315840 - DNA, 15 bp, Homo sapiens
cacctaatcagcata

SEQ ID NO: 1315841 - DNA, 15 bp, Homo sapiens
acacctaatcagcat

SEQ ID NO: 1315842 - DNA, 15 bp, Homo sapiens
gacacctaatcagca

SEQ ID NO: 1315843 - DNA, 15 bp, Homo sapiens
ggacacctaatcagc

SEQ ID NO: 1315844 - DNA, 15 bp, Homo sapiens
tggacacctaatcag

SEQ ID NO: 1315845 - DNA, 15 bp, Homo sapiens
gtggacacctaatca

SEQ ID NO: 1315846 - DNA, 15 bp, Homo sapiens
tgtggacacctaatc

SEQ ID NO: 1315847 - DNA, 15 bp, Homo sapiens
gtgtggacacctaat

SEQ ID NO: 1315848 - DNA, 15 bp, Homo sapiens
agtgtggacacctaa

SEQ ID NO: 1315849 - DNA, 15 bp, Homo sapiens
tagtgtggacaccta

SEQ ID NO: 1315850 - DNA, 15 bp, Homo sapiens
ttagtgtggacacct

SEQ ID NO: 1315851 - DNA, 15 bp, Homo sapiens
cttagtgtggacacc

SEQ ID NO: 1315852 - DNA, 15 bp, Homo sapiens
acttagtgtggacac

SEQ ID NO: 1315853 - DNA, 15 bp, Homo sapiens
aacttagtgtggaca

SEQ ID NO: 1315854 - DNA, 15 bp, Homo sapiens
gaacttagtgtggac

SEQ ID NO: 1315855 - DNA, 15 bp, Homo sapiens
agaacttagtgtgga

SEQ ID NO: 1315856 - DNA, 15 bp, Homo sapiens
cagaacttagtgtgg

SEQ ID NO: 1315857 - DNA, 15 bp, Homo sapiens
gcagaacttagtgtg

SEQ ID NO: 1315858 - DNA, 15 bp, Homo sapiens
tgcagaacttagtgt

SEQ ID NO: 1315859 - DNA, 15 bp, Homo sapiens
atgcagaacttagtg

SEQ ID NO: 1315860 - DNA, 15 bp, Homo sapiens
gatgcagaacttagt

SEQ ID NO: 1315861 - DNA, 15 bp, Homo sapiens
tgatgcagaacttag

SEQ ID NO: 1315862 - DNA, 15 bp, Homo sapiens
ttgatgcagaactta

SEQ ID NO: 1315863 - DNA, 15 bp, Homo sapiens
attgatgcagaactt

SEQ ID NO: 1315864 - DNA, 15 bp, Homo sapiens
tattgatgcagaact

SEQ ID NO: 1315865 - DNA, 15 bp, Homo sapiens
atattgatgcagaac

SEQ ID NO: 1315866 - DNA, 15 bp, Homo sapiens
catattgatgcagaa

SEQ ID NO: 1315867 - DNA, 15 bp, Homo sapiens
ccatattgatgcaga

SEQ ID NO: 1315868 - DNA, 15 bp, Homo sapiens
accatattgatgcag

SEQ ID NO: 1315869 - DNA, 15 bp, Homo sapiens
caccatattgatgca

SEQ ID NO: 1315870 - DNA, 15 bp, Homo sapiens
tcaccatattgatgc

SEQ ID NO: 1315871 - DNA, 15 bp, Homo sapiens
gtcaccatattgatg

SEQ ID NO: 1315872 - DNA, 15 bp, Homo sapiens
ggtcaccatattgat

SEQ ID NO: 1315873 - DNA, 15 bp, Homo sapiens
aggtcaccatattga

SEQ ID NO: 1315874 - DNA, 15 bp, Homo sapiens
gaggtcaccatattg

SEQ ID NO: 1315875 - DNA, 15 bp, Homo sapiens
ggaggtcaccatatt

SEQ ID NO: 1315876 - DNA, 15 bp, Homo sapiens
aggaggtcaccatat

SEQ ID NO: 1315877 - DNA, 15 bp, Homo sapiens
caggaggtcaccata

SEQ ID NO: 1315878 - DNA, 15 bp, Homo sapiens
ccaggaggtcaccat

SEQ ID NO: 1315879 - DNA, 15 bp, Homo sapiens
cccaggaggtcacca

SEQ ID NO: 1315880 - DNA, 15 bp, Homo sapiens
tcccaggaggtcacc

SEQ ID NO: 1315881 - DNA, 15 bp, Homo sapiens
ctcccaggaggtcac

SEQ ID NO: 1315882 - DNA, 15 bp, Homo sapiens
gctcccaggaggtca

SEQ ID NO: 1315883 - DNA, 15 bp, Homo sapiens
tgctcccaggaggtc

SEQ ID NO: 1315884 - DNA, 15 bp, Homo sapiens
ctgctcccaggaggt

SEQ ID NO: 1315885 - DNA, 15 bp, Homo sapiens
cctgctcccaggagg

SEQ ID NO: 1315886 - DNA, 15 bp, Homo sapiens
ccctgctcccaggag

SEQ ID NO: 1315887 - DNA, 15 bp, Homo sapiens
cccctgctcccagga

SEQ ID NO: 1315888 - DNA, 15 bp, Homo sapiens
tcccctgctcccagg

SEQ ID NO: 1315889 - DNA, 15 bp, Homo sapiens
gtcccctgctcccag

SEQ ID NO: 1315890 - DNA, 15 bp, Homo sapiens
agtcccctgctccca

SEQ ID NO: 1315891 - DNA, 15 bp, Homo sapiens
tagtcccctgctccc

SEQ ID NO: 1315892 - DNA, 15 bp, Homo sapiens
gtagtcccctgctcc

SEQ ID NO: 1315893 - DNA, 15 bp, Homo sapiens
ggtagtcccctgctc

SEQ ID NO: 1315894 - DNA, 15 bp, Homo sapiens
tggtagtcccctgct

SEQ ID NO: 1315895 - DNA, 15 bp, Homo sapiens
ctggtagtcccctgc

SEQ ID NO: 1315896 - DNA, 15 bp, Homo sapiens
cctggtagtcccctg

SEQ ID NO: 1315897 - DNA, 15 bp, Homo sapiens
acctggtagtcccct

SEQ ID NO: 1315898 - DNA, 15 bp, Homo sapiens
aacctggtagtcccc

SEQ ID NO: 1315899 - DNA, 15 bp, Homo sapiens
caacctggtagtccc

SEQ ID NO: 1315900 - DNA, 15 bp, Homo sapiens
gcaacctggtagtcc

SEQ ID NO: 1315901 - DNA, 15 bp, Homo sapiens
ggcaacctggtagtc

SEQ ID NO: 1315902 - DNA, 15 bp, Homo sapiens
gggcaacctggtagt

SEQ ID NO: 1315903 - DNA, 15 bp, Homo sapiens
tgggcaacctggtag

SEQ ID NO: 1315904 - DNA, 15 bp, Homo sapiens
ttgggcaacctggta

SEQ ID NO: 1315905 - DNA, 15 bp, Homo sapiens
cttgggcaacctggt

SEQ ID NO: 1315906 - DNA, 15 bp, Homo sapiens
ccttgggcaacctgg

SEQ ID NO: 1315907 - DNA, 15 bp, Homo sapiens
tccttgggcaacctg

SEQ ID NO: 1315908 - DNA, 15 bp, Homo sapiens
ctccttgggcaacct

SEQ ID NO: 1315909 - DNA, 15 bp, Homo sapiens
cctccttgggcaacc

SEQ ID NO: 1315910 - DNA, 15 bp, Homo sapiens
ccctccttgggcaac

SEQ ID NO: 1315911 - DNA, 15 bp, Homo sapiens
cccctccttgggcaa

SEQ ID NO: 1315912 - DNA, 15 bp, Homo sapiens
gcccctccttgggca

SEQ ID NO: 1315913 - DNA, 15 bp, Homo sapiens
cgcccctccttgggc

SEQ ID NO: 1315914 - DNA, 15 bp, Homo sapiens
tcgcccctccttggg

SEQ ID NO: 1315915 - DNA, 15 bp, Homo sapiens
ttcgcccctccttgg

SEQ ID NO: 1315916 - DNA, 15 bp, Homo sapiens
gttcgcccctccttg

SEQ ID NO: 1315917 - DNA, 15 bp, Homo sapiens
ggttcgcccctcctt

SEQ ID NO: 1315918 - DNA, 15 bp, Homo sapiens
gggttcgcccctcct

SEQ ID NO: 1315919 - DNA, 15 bp, Homo sapiens
tgggttcgcccctcc

SEQ ID NO: 1315920 - DNA, 15 bp, Homo sapiens
gtgggttcgcccctc

SEQ ID NO: 1315921 - DNA, 15 bp, Homo sapiens
ggtgggttcgcccct

SEQ ID NO: 1315922 - DNA, 15 bp, Homo sapiens
gggtgggttcgcccc

SEQ ID NO: 1315923 - DNA, 15 bp, Homo sapiens
tgggtgggttcgccc

SEQ ID NO: 1315924 - DNA, 15 bp, Homo sapiens
ctgggtgggttcgcc

SEQ ID NO: 1315925 - DNA, 15 bp, Homo sapiens
cctgggtgggttcgc

SEQ ID NO: 1315926 - DNA, 15 bp, Homo sapiens
acctgggtgggttcg

SEQ ID NO: 1315927 - DNA, 15 bp, Homo sapiens
gacctgggtgggttc

SEQ ID NO: 1315928 - DNA, 15 bp, Homo sapiens
cgacctgggtgggtt

SEQ ID NO: 1315929 - DNA, 15 bp, Homo sapiens
ccgacctgggtgggt

SEQ ID NO: 1315930 - DNA, 15 bp, Homo sapiens
tccgacctgggtggg

SEQ ID NO: 1315931 - DNA, 15 bp, Homo sapiens
ttccgacctgggtgg

SEQ ID NO: 1315932 - DNA, 15 bp, Homo sapiens
tttccgacctgggtg

SEQ ID NO: 1315933 - DNA, 15 bp, Homo sapiens
ctttccgacctgggt

SEQ ID NO: 1315934 - DNA, 15 bp, Homo sapiens
actttccgacctggg

SEQ ID NO: 1315935 - DNA, 15 bp, Homo sapiens
tactttccgacctgg

SEQ ID NO: 1315936 - DNA, 15 bp, Homo sapiens
ctactttccgacctg

SEQ ID NO: 1315937 - DNA, 15 bp, Homo sapiens
tctactttccgacct

SEQ ID NO: 1315938 - DNA, 15 bp, Homo sapiens
ttctactttccgacc

SEQ ID NO: 1315939 - DNA, 15 bp, Homo sapiens
cttctactttccgac

SEQ ID NO: 1315940 - DNA, 15 bp, Homo sapiens
ccttctactttccga

SEQ ID NO: 1315941 - DNA, 15 bp, Homo sapiens
tccttctactttccg

SEQ ID NO: 1315942 - DNA, 15 bp, Homo sapiens
atccttctactttcc

SEQ ID NO: 1315943 - DNA, 15 bp, Homo sapiens
aatccttctactttc

SEQ ID NO: 1315944 - DNA, 15 bp, Homo sapiens
caatccttctacttt

SEQ ID NO: 1315945 - DNA, 15 bp, Homo sapiens
acaatccttctactt

SEQ ID NO: 1315946 - DNA, 15 bp, Homo sapiens
cacaatccttctact

SEQ ID NO: 1315947 - DNA, 15 bp, Homo sapiens
acacaatccttctac

SEQ ID NO: 1315948 - DNA, 15 bp, Homo sapiens
gacacaatccttcta

SEQ ID NO: 1315949 - DNA, 15 bp, Homo sapiens
agacacaatccttct

SEQ ID NO: 1315950 - DNA, 15 bp, Homo sapiens
gagacacaatccttc

SEQ ID NO: 1315951 - DNA, 15 bp, Homo sapiens
agagacacaatcctt

SEQ ID NO: 1315952 - DNA, 15 bp, Homo sapiens
tagagacacaatcct

SEQ ID NO: 1315953 - DNA, 15 bp, Homo sapiens
ctagagacacaatcc

SEQ ID NO: 1315954 - DNA, 15 bp, Homo sapiens
cctagagacacaatc

SEQ ID NO: 1315955 - DNA, 15 bp, Homo sapiens
gcctagagacacaat

SEQ ID NO: 1315956 - DNA, 15 bp, Homo sapiens
ggcctagagacacaa

SEQ ID NO: 1315957 - DNA, 15 bp, Homo sapiens
aggcctagagacaca

SEQ ID NO: 1315958 - DNA, 15 bp, Homo sapiens
gaggcctagagacac

SEQ ID NO: 1315959 - DNA, 15 bp, Homo sapiens
tgaggcctagagaca

SEQ ID NO: 1315960 - DNA, 15 bp, Homo sapiens
ctgaggcctagagac

SEQ ID NO: 1315961 - DNA, 15 bp, Homo sapiens
tctgaggcctagaga

SEQ ID NO: 1315962 - DNA, 15 bp, Homo sapiens
gtctgaggcctagag

SEQ ID NO: 1315963 - DNA, 15 bp, Homo sapiens
agtctgaggcctaga

SEQ ID NO: 1315964 - DNA, 15 bp, Homo sapiens
gagtctgaggcctag

SEQ ID NO: 1315965 - DNA, 15 bp, Homo sapiens
ggagtctgaggccta

SEQ ID NO: 1315966 - DNA, 15 bp, Homo sapiens
aggagtctgaggcct

SEQ ID NO: 1315967 - DNA, 15 bp, Homo sapiens
aaggagtctgaggcc

SEQ ID NO: 1315968 - DNA, 15 bp, Homo sapiens
aaaggagtctgaggc

SEQ ID NO: 1315969 - DNA, 15 bp, Homo sapiens
caaaggagtctgagg

SEQ ID NO: 1315970 - DNA, 15 bp, Homo sapiens
gcaaaggagtctgag

SEQ ID NO: 1315971 - DNA, 15 bp, Homo sapiens
tgcaaaggagtctga

SEQ ID NO: 1315972 - DNA, 15 bp, Homo sapiens
atgcaaaggagtctg

SEQ ID NO: 1315973 - DNA, 15 bp, Homo sapiens
aatgcaaaggagtct

SEQ ID NO: 1315974 - DNA, 15 bp, Homo sapiens
aaatgcaaaggagtc

SEQ ID NO: 1315975 - DNA, 15 bp, Homo sapiens
aaaatgcaaaggagt

SEQ ID NO: 1315976 - DNA, 15 bp, Homo sapiens
aaaaatgcaaaggag

SEQ ID NO: 1315977 - DNA, 15 bp, Homo sapiens
gaaaaatgcaaagga

SEQ ID NO: 1315978 - DNA, 15 bp, Homo sapiens
agaaaaatgcaaagg

SEQ ID NO: 1315979 - DNA, 15 bp, Homo sapiens
cagaaaaatgcaaag

SEQ ID NO: 1315980 - DNA, 15 bp, Homo sapiens
acagaaaaatgcaaa

SEQ ID NO: 1315981 - DNA, 15 bp, Homo sapiens
gacagaaaaatgcaa

SEQ ID NO: 1315982 - DNA, 15 bp, Homo sapiens
ggacagaaaaatgca

SEQ ID NO: 1315983 - DNA, 15 bp, Homo sapiens
aggacagaaaaatgc

SEQ ID NO: 1315984 - DNA, 15 bp, Homo sapiens
gaggacagaaaaatg

SEQ ID NO: 1315985 - DNA, 15 bp, Homo sapiens
tgaggacagaaaaat

SEQ ID NO: 1315986 - DNA, 15 bp, Homo sapiens
gtgaggacagaaaaa

SEQ ID NO: 1315987 - DNA, 15 bp, Homo sapiens
ggtgaggacagaaaa

SEQ ID NO: 1315988 - DNA, 15 bp, Homo sapiens
gggtgaggacagaaa

SEQ ID NO: 1315989 - DNA, 15 bp, Homo sapiens
agggtgaggacagaa

SEQ ID NO: 1315990 - DNA, 15 bp, Homo sapiens
cagggtgaggacaga

SEQ ID NO: 1315991 - DNA, 15 bp, Homo sapiens
gcagggtgaggacag

SEQ ID NO: 1315992 - DNA, 15 bp, Homo sapiens
tgcagggtgaggaca

SEQ ID NO: 1315993 - DNA, 15 bp, Homo sapiens
gtgcagggtgaggac

SEQ ID NO: 1315994 - DNA, 15 bp, Homo sapiens
tgtgcagggtgagga

SEQ ID NO: 1315995 - DNA, 15 bp, Homo sapiens
atgtgcagggtgagg

SEQ ID NO: 1315996 - DNA, 15 bp, Homo sapiens
tatgtgcagggtgag

SEQ ID NO: 1315997 - DNA, 15 bp, Homo sapiens
ctatgtgcagggtga

SEQ ID NO: 1315998 - DNA, 15 bp, Homo sapiens
actatgtgcagggtg

SEQ ID NO: 1315999 - DNA, 15 bp, Homo sapiens
cactatgtgcagggt

SEQ ID NO: 1316000 - DNA, 15 bp, Homo sapiens
tcactatgtgcaggg

SEQ ID NO: 1316001 - DNA, 15 bp, Homo sapiens
ttcactatgtgcagg

SEQ ID NO: 1316002 - DNA, 15 bp, Homo sapiens
tttcactatgtgcag

SEQ ID NO: 1316003 - DNA, 15 bp, Homo sapiens
ttttcactatgtgca

SEQ ID NO: 1316004 - DNA, 15 bp, Homo sapiens
attttcactatgtgc

SEQ ID NO: 1316005 - DNA, 15 bp, Homo sapiens
gattttcactatgtg

SEQ ID NO: 1316006 - DNA, 15 bp, Homo sapiens
tgattttcactatgt

SEQ ID NO: 1316007 - DNA, 15 bp, Homo sapiens
atgattttcactatg

SEQ ID NO: 1316008 - DNA, 15 bp, Homo sapiens
tatgattttcactat

SEQ ID NO: 1316009 - DNA, 15 bp, Homo sapiens
ttatgattttcacta

SEQ ID NO: 1316010 - DNA, 15 bp, Homo sapiens
tttatgattttcact

SEQ ID NO: 1316011 - DNA, 15 bp, Homo sapiens
gtttatgattttcac

SEQ ID NO: 1316012 - DNA, 15 bp, Homo sapiens
ggtttatgattttca

SEQ ID NO: 1316013 - DNA, 15 bp, Homo sapiens
gggtttatgattttc

SEQ ID NO: 1316014 - DNA, 15 bp, Homo sapiens
tgggtttatgatttt

SEQ ID NO: 1316015 - DNA, 15 bp, Homo sapiens
gtgggtttatgattt

SEQ ID NO: 1316016 - DNA, 15 bp, Homo sapiens
tgtgggtttatgatt

SEQ ID NO: 1316017 - DNA, 15 bp, Homo sapiens
atgtgggtttatgat

SEQ ID NO: 1316018 - DNA, 15 bp, Homo sapiens
aatgtgggtttatga

SEQ ID NO: 1316019 - DNA, 15 bp, Homo sapiens
taatgtgggtttatg

SEQ ID NO: 1316020 - DNA, 15 bp, Homo sapiens
ataatgtgggtttat

SEQ ID NO: 1316021 - DNA, 15 bp, Homo sapiens
aataatgtgggttta

SEQ ID NO: 1316022 - DNA, 15 bp, Homo sapiens
caataatgtgggttt

SEQ ID NO: 1316023 - DNA, 15 bp, Homo sapiens
ccaataatgtgggtt

SEQ ID NO: 1316024 - DNA, 15 bp, Homo sapiens
accaataatgtgggt

SEQ ID NO: 1316025 - DNA, 15 bp, Homo sapiens
caccaataatgtggg

SEQ ID NO: 1316026 - DNA, 15 bp, Homo sapiens
acaccaataatgtgg

SEQ ID NO: 1316027 - DNA, 15 bp, Homo sapiens
cacaccaataatgtg

SEQ ID NO: 1316028 - DNA, 15 bp, Homo sapiens
ccacaccaataatgt

SEQ ID NO: 1316029 - DNA, 15 bp, Homo sapiens
accacaccaataatg

SEQ ID NO: 1316030 - DNA, 15 bp, Homo sapiens
aaccacaccaataat

SEQ ID NO: 1316031 - DNA, 15 bp, Homo sapiens
aaaccacaccaataa

SEQ ID NO: 1316032 - DNA, 15 bp, Homo sapiens
taaaccacaccaata

SEQ ID NO: 1316033 - DNA, 15 bp, Homo sapiens
ataaaccacaccaat

SEQ ID NO: 1316034 - DNA, 15 bp, Homo sapiens
tataaaccacaccaa

SEQ ID NO: 1316035 - DNA, 15 bp, Homo sapiens
ctataaaccacacca

SEQ ID NO: 1316036 - DNA, 15 bp, Homo sapiens
tctataaaccacacc

SEQ ID NO: 1316037 - DNA, 15 bp, Homo sapiens
ttctataaaccacac

SEQ ID NO: 1316038 - DNA, 15 bp, Homo sapiens
cttctataaaccaca

SEQ ID NO: 1316039 - DNA, 15 bp, Homo sapiens
tcttctataaaccac

SEQ ID NO: 1316040 - DNA, 15 bp, Homo sapiens
ttcttctataaacca

SEQ ID NO: 1316041 - DNA, 15 bp, Homo sapiens
tttcttctataaacc

SEQ ID NO: 1316042 - DNA, 15 bp, Homo sapiens
ttttcttctataaac

SEQ ID NO: 1316043 - DNA, 15 bp, Homo sapiens
tttttcttctataaa

SEQ ID NO: 1316044 - DNA, 15 bp, Homo sapiens
gtttttcttctataa

SEQ ID NO: 1316045 - DNA, 15 bp, Homo sapiens
tgtttttcttctata

SEQ ID NO: 1316046 - DNA, 15 bp, Homo sapiens
ttgtttttcttctat

SEQ ID NO: 1316047 - DNA, 15 bp, Homo sapiens
gttgtttttcttcta

SEQ ID NO: 1316048 - DNA, 15 bp, Homo sapiens
agttgtttttcttct

SEQ ID NO: 1316049 - DNA, 15 bp, Homo sapiens
aagttgtttttcttc

SEQ ID NO: 1316050 - DNA, 15 bp, Homo sapiens
taagttgtttttctt

SEQ ID NO: 1316051 - DNA, 15 bp, Homo sapiens
ctaagttgtttttct

SEQ ID NO: 1316052 - DNA, 15 bp, Homo sapiens
tctaagttgtttttc

SEQ ID NO: 1316053 - DNA, 15 bp, Homo sapiens
ttctaagttgttttt

SEQ ID NO: 1316054 - DNA, 15 bp, Homo sapiens
gttctaagttgtttt

SEQ ID NO: 1316055 - DNA, 15 bp, Homo sapiens
agttctaagttgttt

SEQ ID NO: 1316056 - DNA, 15 bp, Homo sapiens
tagttctaagttgtt

SEQ ID NO: 1316057 - DNA, 15 bp, Homo sapiens
ttagttctaagttgt

SEQ ID NO: 1316058 - DNA, 15 bp, Homo sapiens
tttagttctaagttg

SEQ ID NO: 1316059 - DNA, 15 bp, Homo sapiens
ttttagttctaagtt

SEQ ID NO: 1316060 - DNA, 15 bp, Homo sapiens
tttttagttctaagt

SEQ ID NO: 1316061 - DNA, 15 bp, Homo sapiens
ttttttagttctaag

SEQ ID NO: 1316062 - DNA, 15 bp, Homo sapiens
tttttttagttctaa

SEQ ID NO: 1316063 - DNA, 15 bp, Homo sapiens
ttttttttagttcta

SEQ ID NO: 1316064 - DNA, 15 bp, Homo sapiens
tttttttttagttct

SEQ ID NO: 1316065 - DNA, 15 bp, Homo sapiens
ttttttttttagttc

SEQ ID NO: 1316066 - DNA, 15 bp, Homo sapiens
gttttttttttagtt

SEQ ID NO: 1316067 - DNA, 15 bp, Homo sapiens
tgttttttttttagt

SEQ ID NO: 1316068 - DNA, 15 bp, Homo sapiens
ggttttttgtttttt

SEQ ID NO: 1316069 - DNA, 15 bp, Homo sapiens
aggttttttgttttt

SEQ ID NO: 1316070 - DNA, 15 bp, Homo sapiens
aaggttttttgtttt

SEQ ID NO: 1316071 - DNA, 15 bp, Homo sapiens
caaggttttttgttt

SEQ ID NO: 1316072 - DNA, 15 bp, Homo sapiens
tcaaggttttttgtt

SEQ ID NO: 1316073 - DNA, 15 bp, Homo sapiens
gtcaaggttttttgt

SEQ ID NO: 1316074 - DNA, 15 bp, Homo sapiens
ggtcaaggttttttg

SEQ ID NO: 1316075 - DNA, 15 bp, Homo sapiens
aggtcaaggtttttt

SEQ ID NO: 1316076 - DNA, 15 bp, Homo sapiens
aaggtcaaggttttt

SEQ ID NO: 1316077 - DNA, 15 bp, Homo sapiens
taaggtcaaggtttt

SEQ ID NO: 1316078 - DNA, 15 bp, Homo sapiens
gtaaggtcaaggttt

SEQ ID NO: 1316079 - DNA, 15 bp, Homo sapiens
cgtaaggtcaaggtt

SEQ ID NO: 1316080 - DNA, 15 bp, Homo sapiens
acgtaaggtcaaggt

SEQ ID NO: 1316081 - DNA, 15 bp, Homo sapiens
tacgtaaggtcaagg

SEQ ID NO: 1316082 - DNA, 15 bp, Homo sapiens
ttacgtaaggtcaag

SEQ ID NO: 1316083 - DNA, 15 bp, Homo sapiens
tttacgtaaggtcaa

SEQ ID NO: 1316084 - DNA, 15 bp, Homo sapiens
ctttacgtaaggtca

SEQ ID NO: 1316085 - DNA, 15 bp, Homo sapiens
tctttacgtaaggtc

SEQ ID NO: 1316086 - DNA, 15 bp, Homo sapiens
ctctttacgtaaggt

SEQ ID NO: 1316087 - DNA, 15 bp, Homo sapiens
tctctttacgtaagg

SEQ ID NO: 1316088 - DNA, 15 bp, Homo sapiens
atctctttacgtaag

SEQ ID NO: 1316089 - DNA, 15 bp, Homo sapiens
aatctctttacgtaa

SEQ ID NO: 1316090 - DNA, 15 bp, Homo sapiens
aaatctctttacgta

SEQ ID NO: 1316091 - DNA, 15 bp, Homo sapiens
aaaatctctttacgt

SEQ ID NO: 1316092 - DNA, 15 bp, Homo sapiens
gaaaatctctttacg

SEQ ID NO: 1316093 - DNA, 15 bp, Homo sapiens
tgaaaatctctttac

SEQ ID NO: 1316094 - DNA, 15 bp, Homo sapiens
ttgaaaatctcttta

SEQ ID NO: 1316095 - DNA, 15 bp, Homo sapiens
tttgaaaatctcttt

SEQ ID NO: 1316096 - DNA, 15 bp, Homo sapiens
atttgaaaatctctt

SEQ ID NO: 1316097 - DNA, 15 bp, Homo sapiens
catttgaaaatctct

SEQ ID NO: 1316098 - DNA, 15 bp, Homo sapiens
tcatttgaaaatctc

SEQ ID NO: 1316099 - DNA, 15 bp, Homo sapiens
attcatttgaaaatc

SEQ ID NO: 1316100 - DNA, 15 bp, Homo sapiens
tattcatttgaaaat

SEQ ID NO: 1316101 - DNA, 15 bp, Homo sapiens
gtattcatttgaaaa

SEQ ID NO: 1316102 - DNA, 15 bp, Homo sapiens
gtgtattcatttgaa

SEQ ID NO: 1316103 - DNA, 15 bp, Homo sapiens
agtgtattcatttga

SEQ ID NO: 1316104 - DNA, 15 bp, Homo sapiens
aagtgtattcatttg

SEQ ID NO: 1316105 - DNA, 15 bp, Homo sapiens
aaagtgtattcattt

SEQ ID NO: 1316106 - DNA, 15 bp, Homo sapiens
aaaagtgtattcatt

SEQ ID NO: 1316107 - DNA, 15 bp, Homo sapiens
aaaaagtgtattcat

SEQ ID NO: 1316108 - DNA, 15 bp, Homo sapiens
caaaaagtgtattca

SEQ ID NO: 1316109 - DNA, 15 bp, Homo sapiens
acaaaaagtgtattc

SEQ ID NO: 1316110 - DNA, 15 bp, Homo sapiens
cacaaaaagtgtatt

SEQ ID NO: 1316111 - DNA, 15 bp, Homo sapiens
acacaaaaagtgtat

SEQ ID NO: 1316112 - DNA, 15 bp, Homo sapiens
aacacaaaaagtgta

SEQ ID NO: 1316113 - DNA, 15 bp, Homo sapiens
aaacacaaaaagtgt

SEQ ID NO: 1316114 - DNA, 15 bp, Homo sapiens
aaaacacaaaaagtg

SEQ ID NO: 1316115 - DNA, 15 bp, Homo sapiens
aaaaacacaaaaagt

SEQ ID NO: 1316116 - DNA, 15 bp, Homo sapiens
taaaaacacaaaaag

SEQ ID NO: 1316117 - DNA, 15 bp, Homo sapiens
ttaaaaacacaaaaa

SEQ ID NO: 1316118 - DNA, 15 bp, Homo sapiens
tttaaaaacacaaaa

SEQ ID NO: 1316119 - DNA, 15 bp, Homo sapiens
ttttaaaaacacaaa

SEQ ID NO: 1316120 - DNA, 15 bp, Homo sapiens
attttaaaaacacaa

SEQ ID NO: 1316121 - DNA, 15 bp, Homo sapiens
aattttaaaaacaca

SEQ ID NO: 1316122 - DNA, 15 bp, Homo sapiens
taattttaaaaacac

SEQ ID NO: 1316123 - DNA, 15 bp, Homo sapiens
tttaattttaaaaac

SEQ ID NO: 1316124 - DNA, 15 bp, Homo sapiens
ttttaattttaaaaa

SEQ ID NO: 1316125 - DNA, 15 bp, Homo sapiens
attttaattttaaaa

SEQ ID NO: 1316126 - DNA, 15 bp, Homo sapiens
cattttaattttaaa

SEQ ID NO: 1316127 - DNA, 15 bp, Homo sapiens
acattttaattttaa

SEQ ID NO: 1316128 - DNA, 15 bp, Homo sapiens
aacattttaatttta

SEQ ID NO: 1316129 - DNA, 15 bp, Homo sapiens
taacattttaatttt

SEQ ID NO: 1316130 - DNA, 15 bp, Homo sapiens
ataacattttaattt

SEQ ID NO: 1316131 - DNA, 15 bp, Homo sapiens
tataacattttaatt

SEQ ID NO: 1316132 - DNA, 15 bp, Homo sapiens
atataacattttaat

SEQ ID NO: 1316133 - DNA, 15 bp, Homo sapiens
catataacattttaa

SEQ ID NO: 1316134 - DNA, 15 bp, Homo sapiens
ccatataacatttta

SEQ ID NO: 1316135 - DNA, 15 bp, Homo sapiens
tccatataacatttt

SEQ ID NO: 1316136 - DNA, 15 bp, Homo sapiens
ttccatataacattt

SEQ ID NO: 1316137 - DNA, 15 bp, Homo sapiens
attccatataacatt

SEQ ID NO: 1316138 - DNA, 15 bp, Homo sapiens
aattccatataacat

SEQ ID NO: 1316139 - DNA, 15 bp, Homo sapiens
taattccatataaca

SEQ ID NO: 1316140 - DNA, 15 bp, Homo sapiens
ataattccatataac

SEQ ID NO: 1316141 - DNA, 15 bp, Homo sapiens
tataattccatataa

SEQ ID NO: 1316142 - DNA, 15 bp, Homo sapiens
atataattccatata

SEQ ID NO: 1316143 - DNA, 15 bp, Homo sapiens
tatataattccatat

SEQ ID NO: 1316144 - DNA, 15 bp, Homo sapiens
atatataattccata

SEQ ID NO: 1316145 - DNA, 15 bp, Homo sapiens
tatatataattccat

SEQ ID NO: 1316146 - DNA, 15 bp, Homo sapiens
atatatataattcca

SEQ ID NO: 1316147 - DNA, 15 bp, Homo sapiens
aatatatataattcc

SEQ ID NO: 1316148 - DNA, 15 bp, Homo sapiens
taatatatataattc

SEQ ID NO: 1316149 - DNA, 15 bp, Homo sapiens
ataatatatataatt

SEQ ID NO: 1316150 - DNA, 15 bp, Homo sapiens
aataatatatataat

SEQ ID NO: 1316151 - DNA, 15 bp, Homo sapiens
aaataatatatataa

SEQ ID NO: 1316152 - DNA, 15 bp, Homo sapiens
aaaataatatatata

SEQ ID NO: 1316153 - DNA, 15 bp, Homo sapiens
taaaataatatatat

SEQ ID NO: 1316154 - DNA, 15 bp, Homo sapiens
ttaaaataatatata

SEQ ID NO: 1316155 - DNA, 15 bp, Homo sapiens
tttaaaataatatat

SEQ ID NO: 1316156 - DNA, 15 bp, Homo sapiens
ttttaaaataatata

SEQ ID NO: 1316157 - DNA, 15 bp, Homo sapiens
attttaaaataatat

SEQ ID NO: 1316158 - DNA, 15 bp, Homo sapiens
cattttaaaataata

SEQ ID NO: 1316159 - DNA, 15 bp, Homo sapiens
tcattttaaaataat

SEQ ID NO: 1316160 - DNA, 15 bp, Homo sapiens
atcattttaaaataa

SEQ ID NO: 1316161 - DNA, 15 bp, Homo sapiens
aatcattttaaaata

SEQ ID NO: 1316162 - DNA, 15 bp, Homo sapiens
aaatcattttaaaat

SEQ ID NO: 1316163 - DNA, 15 bp, Homo sapiens
gaaatcattttaaaa

SEQ ID NO: 1316164 - DNA, 15 bp, Homo sapiens
ggaaatcattttaaa

SEQ ID NO: 1316165 - DNA, 15 bp, Homo sapiens
aggaaatcattttaa

SEQ ID NO: 1316166 - DNA, 15 bp, Homo sapiens
caggaaatcatttta

SEQ ID NO: 1316167 - DNA, 15 bp, Homo sapiens
gcaggaaatcatttt

SEQ ID NO: 1316168 - DNA, 15 bp, Homo sapiens
agcaggaaatcattt

SEQ ID NO: 1316169 - DNA, 15 bp, Homo sapiens
aagcaggaaatcatt

SEQ ID NO: 1316170 - DNA, 15 bp, Homo sapiens
taagcaggaaatcat

SEQ ID NO: 1316171 - DNA, 15 bp, Homo sapiens
gctaagcaggaaatc

SEQ ID NO: 1316172 - DNA, 15 bp, Homo sapiens
agctaagcaggaaat

SEQ ID NO: 1316173 - DNA, 15 bp, Homo sapiens
aagctaagcaggaaa

SEQ ID NO: 1316174 - DNA, 15 bp, Homo sapiens
aaagctaagcaggaa

SEQ ID NO: 1316175 - DNA, 15 bp, Homo sapiens
aaaagctaagcagga

SEQ ID NO: 1316176 - DNA, 15 bp, Homo sapiens
aaaaagctaagcagg

SEQ ID NO: 1316177 - DNA, 15 bp, Homo sapiens
taaaaagctaagcag

SEQ ID NO: 1316178 - DNA, 15 bp, Homo sapiens
ttaaaaagctaagca

SEQ ID NO: 1316179 - DNA, 15 bp, Homo sapiens
tttaaaaagctaagc

SEQ ID NO: 1316180 - DNA, 15 bp, Homo sapiens
atttaaaaagctaag

SEQ ID NO: 1316181 - DNA, 15 bp, Homo sapiens
aatttaaaaagctaa

SEQ ID NO: 1316182 - DNA, 15 bp, Homo sapiens
taatttaaaaagcta

SEQ ID NO: 1316183 - DNA, 15 bp, Homo sapiens
ttaatttaaaaagct

SEQ ID NO: 1316184 - DNA, 15 bp, Homo sapiens
gttaatttaaaaagc

SEQ ID NO: 1316185 - DNA, 15 bp, Homo sapiens
agttaatttaaaaag

SEQ ID NO: 1316186 - DNA, 15 bp, Homo sapiens
cagttaatttaaaaa

SEQ ID NO: 1316187 - DNA, 15 bp, Homo sapiens
ccagttaatttaaaa

SEQ ID NO: 1316188 - DNA, 15 bp, Homo sapiens
accagttaatttaaa

SEQ ID NO: 1316189 - DNA, 15 bp, Homo sapiens
caccagttaatttaa

SEQ ID NO: 1316190 - DNA, 15 bp, Homo sapiens
gcaccagttaattta

SEQ ID NO: 1316191 - DNA, 15 bp, Homo sapiens
ggcaccagttaattt

SEQ ID NO: 1316192 - DNA, 15 bp, Homo sapiens
tggcaccagttaatt

SEQ ID NO: 1316193 - DNA, 15 bp, Homo sapiens
ttggcaccagttaat

SEQ ID NO: 1316194 - DNA, 15 bp, Homo sapiens
attggcaccagttaa

SEQ ID NO: 1316195 - DNA, 15 bp, Homo sapiens
gattggcaccagtta

SEQ ID NO: 1316196 - DNA, 15 bp, Homo sapiens
agattggcaccagtt

SEQ ID NO: 1316197 - DNA, 15 bp, Homo sapiens
gagattggcaccagt

SEQ ID NO: 1316198 - DNA, 15 bp, Homo sapiens
agagattggcaccag

SEQ ID NO: 1316199 - DNA, 15 bp, Homo sapiens
gagagattggcacca

SEQ ID NO: 1316200 - DNA, 15 bp, Homo sapiens
tgagagattggcacc

SEQ ID NO: 1316201 - DNA, 15 bp, Homo sapiens
ttgagagattggcac

SEQ ID NO: 1316202 - DNA, 15 bp, Homo sapiens
tttgagagattggca

SEQ ID NO: 1316203 - DNA, 15 bp, Homo sapiens
atttgagagattggc

SEQ ID NO: 1316204 - DNA, 15 bp, Homo sapiens
tatttgagagattgg

SEQ ID NO: 1316205 - DNA, 15 bp, Homo sapiens
ttatttgagagattg

SEQ ID NO: 1316206 - DNA, 15 bp, Homo sapiens
cttatttgagagatt

SEQ ID NO: 1316207 - DNA, 15 bp, Homo sapiens
tcttatttgagagat

SEQ ID NO: 1316208 - DNA, 15 bp, Homo sapiens
gtcttatttgagaga

SEQ ID NO: 1316209 - DNA, 15 bp, Homo sapiens
tgtcttatttgagag

SEQ ID NO: 1316210 - DNA, 15 bp, Homo sapiens
ttgtcttatttgaga

SEQ ID NO: 1316211 - DNA, 15 bp, Homo sapiens
attgtcttatttgag

SEQ ID NO: 1316212 - DNA, 15 bp, Homo sapiens
aattgtcttatttga

SEQ ID NO: 1316213 - DNA, 15 bp, Homo sapiens
aaattgtcttatttg

SEQ ID NO: 1316214 - DNA, 15 bp, Homo sapiens
taaattgtcttattt

SEQ ID NO: 1316215 - DNA, 15 bp, Homo sapiens
ataaattgtcttatt

SEQ ID NO: 1316216 - DNA, 15 bp, Homo sapiens
cataaattgtcttat

SEQ ID NO: 1316217 - DNA, 15 bp, Homo sapiens
acataaattgtctta

SEQ ID NO: 1316218 - DNA, 15 bp, Homo sapiens
tacataaattgtctt

SEQ ID NO: 1316219 - DNA, 15 bp, Homo sapiens
gtacataaattgtct

SEQ ID NO: 1316220 - DNA, 15 bp, Homo sapiens
ggtacataaattgtc

SEQ ID NO: 1316221 - DNA, 15 bp, Homo sapiens
tggtacataaattgt

SEQ ID NO: 1316222 - DNA, 15 bp, Homo sapiens
ctggtacataaattg

SEQ ID NO: 1316223 - DNA, 15 bp, Homo sapiens
gctggtacataaatt

SEQ ID NO: 1316224 - DNA, 15 bp, Homo sapiens
tgctggtacataaat

SEQ ID NO: 1316225 - DNA, 15 bp, Homo sapiens
ctgctggtacataaa

SEQ ID NO: 1316226 - DNA, 15 bp, Homo sapiens
actgctggtacataa

SEQ ID NO: 1316227 - DNA, 15 bp, Homo sapiens
tactgctggtacata

SEQ ID NO: 1316228 - DNA, 15 bp, Homo sapiens
ttactgctggtacat

SEQ ID NO: 1316229 - DNA, 15 bp, Homo sapiens
attactgctggtaca

SEQ ID NO: 1316230 - DNA, 15 bp, Homo sapiens
gattactgctggtac

SEQ ID NO: 1316231 - DNA, 15 bp, Homo sapiens
tgattactgctggta

SEQ ID NO: 1316232 - DNA, 15 bp, Homo sapiens
ttgattactgctggt

SEQ ID NO: 1316233 - DNA, 15 bp, Homo sapiens
gttgattactgctgg

SEQ ID NO: 1316234 - DNA, 15 bp, Homo sapiens
agttgattactgctg

SEQ ID NO: 1316235 - DNA, 15 bp, Homo sapiens
cagttgattactgct

SEQ ID NO: 1316236 - DNA, 15 bp, Homo sapiens
ccagttgattactgc

SEQ ID NO: 1316237 - DNA, 15 bp, Homo sapiens
tccagttgattactg

SEQ ID NO: 1316238 - DNA, 15 bp, Homo sapiens
ttccagttgattact

SEQ ID NO: 1316239 - DNA, 15 bp, Homo sapiens
tttccagttgattac

SEQ ID NO: 1316240 - DNA, 15 bp, Homo sapiens
ttttccagttgatta

SEQ ID NO: 1316241 - DNA, 15 bp, Homo sapiens
attttccagttgatt

SEQ ID NO: 1316242 - DNA, 15 bp, Homo sapiens
cattttccagttgat

SEQ ID NO: 1316243 - DNA, 15 bp, Homo sapiens
acattttccagttga

SEQ ID NO: 1316244 - DNA, 15 bp, Homo sapiens
tacattttccagttg

SEQ ID NO: 1316245 - DNA, 15 bp, Homo sapiens
ttacattttccagtt

SEQ ID NO: 1316246 - DNA, 15 bp, Homo sapiens
attacattttccagt

SEQ ID NO: 1316247 - DNA, 15 bp, Homo sapiens
cattacattttccag

SEQ ID NO: 1316248 - DNA, 15 bp, Homo sapiens
tcattacattttcca

SEQ ID NO: 1316249 - DNA, 15 bp, Homo sapiens
ttcattacattttcc

SEQ ID NO: 1316250 - DNA, 15 bp, Homo sapiens
tttcattacattttc

SEQ ID NO: 1316251 - DNA, 15 bp, Homo sapiens
ttttcattacatttt

SEQ ID NO: 1316252 - DNA, 15 bp, Homo sapiens
tttttcattacattt

SEQ ID NO: 1316253 - DNA, 15 bp, Homo sapiens
atttttcattacatt

SEQ ID NO: 1316254 - DNA, 15 bp, Homo sapiens
tatttttcattacat

SEQ ID NO: 1316255 - DNA, 15 bp, Homo sapiens
atatttttcattaca

SEQ ID NO: 1316256 - DNA, 15 bp, Homo sapiens
aatatttttcattac

SEQ ID NO: 1316257 - DNA, 15 bp, Homo sapiens
gaatatttttcatta

SEQ ID NO: 1316258 - DNA, 15 bp, Homo sapiens
tgaatatttttcatt

SEQ ID NO: 1316259 - DNA, 15 bp, Homo sapiens
ttgaatatttttcat

SEQ ID NO: 1316260 - DNA, 15 bp, Homo sapiens
attgaatatttttca

SEQ ID NO: 1316261 - DNA, 15 bp, Homo sapiens
aattgaatatttttc

SEQ ID NO: 1316262 - DNA, 15 bp, Homo sapiens
aaattgaatattttt

SEQ ID NO: 1316263 - DNA, 15 bp, Homo sapiens
taaattgaatatttt

SEQ ID NO: 1316264 - DNA, 15 bp, Homo sapiens
gtaaattgaatattt

SEQ ID NO: 1316265 - DNA, 15 bp, Homo sapiens
tgtaaattgaatatt

SEQ ID NO: 1316266 - DNA, 15 bp, Homo sapiens
ctgtaaattgaatat

SEQ ID NO: 1316267 - DNA, 15 bp, Homo sapiens
gctgtaaattgaata

SEQ ID NO: 1316268 - DNA, 15 bp, Homo sapiens
ttgctgtaaattgaa

SEQ ID NO: 1316269 - DNA, 15 bp, Homo sapiens
attgctgtaaattga

SEQ ID NO: 1316270 - DNA, 15 bp, Homo sapiens
tattgctgtaaattg

SEQ ID NO: 1316271 - DNA, 15 bp, Homo sapiens
ttattgctgtaaatt

SEQ ID NO: 1316272 - DNA, 15 bp, Homo sapiens
gttattgctgtaaat

SEQ ID NO: 1316273 - DNA, 15 bp, Homo sapiens
tgttattgctgtaaa

SEQ ID NO: 1316274 - DNA, 15 bp, Homo sapiens
ttgttattgctgtaa

SEQ ID NO: 1316275 - DNA, 15 bp, Homo sapiens
tttgttattgctgta

SEQ ID NO: 1316276 - DNA, 15 bp, Homo sapiens
atttgttattgctgt

SEQ ID NO: 1316277 - DNA, 15 bp, Homo sapiens
tatttgttattgctg

SEQ ID NO: 1316278 - DNA, 15 bp, Homo sapiens
ctatttgttattgct

SEQ ID NO: 1316279 - DNA, 15 bp, Homo sapiens
actatttgttattgc

SEQ ID NO: 1316280 - DNA, 15 bp, Homo sapiens
tactatttgttattg

SEQ ID NO: 1316281 - DNA, 15 bp, Homo sapiens
gtactatttgttatt

SEQ ID NO: 1316282 - DNA, 15 bp, Homo sapiens
tgtactatttgttat

SEQ ID NO: 1316283 - DNA, 15 bp, Homo sapiens
ttgtactatttgtta

SEQ ID NO: 1316284 - DNA, 15 bp, Homo sapiens
tttgtactatttgtt

SEQ ID NO: 1316285 - DNA, 15 bp, Homo sapiens
ttttgtactatttgt

SEQ ID NO: 1316286 - DNA, 15 bp, Homo sapiens
attttgtactatttg

SEQ ID NO: 1316287 - DNA, 15 bp, Homo sapiens
tattttgtactattt

SEQ ID NO: 1316288 - DNA, 15 bp, Homo sapiens
gtattttgtactatt

SEQ ID NO: 1316289 - DNA, 15 bp, Homo sapiens
ggtattttgtactat

SEQ ID NO: 1316290 - DNA, 15 bp, Homo sapiens
aggtattttgtacta

SEQ ID NO: 1316291 - DNA, 15 bp, Homo sapiens
aaggtattttgtact

SEQ ID NO: 1316292 - DNA, 15 bp, Homo sapiens
taaggtattttgtac

SEQ ID NO: 1316293 - DNA, 15 bp, Homo sapiens
ctaaggtattttgta

SEQ ID NO: 1316294 - DNA, 15 bp, Homo sapiens
cctaaggtattttgt

SEQ ID NO: 1316295 - DNA, 15 bp, Homo sapiens
tcctaaggtattttg

SEQ ID NO: 1316296 - DNA, 15 bp, Homo sapiens
ttcctaaggtatttt

SEQ ID NO: 1316297 - DNA, 15 bp, Homo sapiens
attcctaaggtattt

SEQ ID NO: 1316298 - DNA, 15 bp, Homo sapiens
tattcctaaggtatt

SEQ ID NO: 1316299 - DNA, 15 bp, Homo sapiens
ttattcctaaggtat

SEQ ID NO: 1316300 - DNA, 15 bp, Homo sapiens
cttattcctaaggta

SEQ ID NO: 1316301 - DNA, 15 bp, Homo sapiens
gcttattcctaaggt

SEQ ID NO: 1316302 - DNA, 15 bp, Homo sapiens
agcttattcctaagg

SEQ ID NO: 1316303 - DNA, 15 bp, Homo sapiens
aagcttattcctaag

SEQ ID NO: 1316304 - DNA, 15 bp, Homo sapiens
taagcttattcctaa

SEQ ID NO: 1316305 - DNA, 15 bp, Homo sapiens
ttaagcttattccta

SEQ ID NO: 1316306 - DNA, 15 bp, Homo sapiens
attaagcttattcct

SEQ ID NO: 1316307 - DNA, 15 bp, Homo sapiens
tattaagcttattcc

SEQ ID NO: 1316308 - DNA, 15 bp, Homo sapiens
ctattaagcttattc

SEQ ID NO: 1316309 - DNA, 15 bp, Homo sapiens
cctattaagcttatt

SEQ ID NO: 1316310 - DNA, 15 bp, Homo sapiens
gcctattaagcttat

SEQ ID NO: 1316311 - DNA, 15 bp, Homo sapiens
tgcctattaagctta

SEQ ID NO: 1316312 - DNA, 15 bp, Homo sapiens
ttgcctattaagctt

SEQ ID NO: 1316313 - DNA, 15 bp, Homo sapiens
tttgcctattaagct

SEQ ID NO: 1316314 - DNA, 15 bp, Homo sapiens
ctttgcctattaagc

SEQ ID NO: 1316315 - DNA, 15 bp, Homo sapiens
actttgcctattaag

SEQ ID NO: 1316316 - DNA, 15 bp, Homo sapiens
cactttgcctattaa

SEQ ID NO: 1316317 - DNA, 15 bp, Homo sapiens
gcactttgcctatta

SEQ ID NO: 1316318 - DNA, 15 bp, Homo sapiens
tgcactttgcctatt

SEQ ID NO: 1316319 - DNA, 15 bp, Homo sapiens
ctgcactttgcctat

SEQ ID NO: 1316320 - DNA, 15 bp, Homo sapiens
cctgcactttgccta

SEQ ID NO: 1316321 - DNA, 15 bp, Homo sapiens
tcctgcactttgcct

SEQ ID NO: 1316322 - DNA, 15 bp, Homo sapiens
atcctgcactttgcc

SEQ ID NO: 1316323 - DNA, 15 bp, Homo sapiens
catcctgcactttgc

SEQ ID NO: 1316324 - DNA, 15 bp, Homo sapiens
acatcctgcactttg

SEQ ID NO: 1316325 - DNA, 15 bp, Homo sapiens
tacatcctgcacttt

SEQ ID NO: 1316326 - DNA, 15 bp, Homo sapiens
ctacatcctgcactt

SEQ ID NO: 1316327 - DNA, 15 bp, Homo sapiens
tctacatcctgcact

SEQ ID NO: 1316328 - DNA, 15 bp, Homo sapiens
atctacatcctgcac

SEQ ID NO: 1316329 - DNA, 15 bp, Homo sapiens
catctacatcctgca

SEQ ID NO: 1316330 - DNA, 15 bp, Homo sapiens
tcatctacatcctgc

SEQ ID NO: 1316331 - DNA, 15 bp, Homo sapiens
ttcatctacatcctg

SEQ ID NO: 1316332 - DNA, 15 bp, Homo sapiens
tttcatctacatcct

SEQ ID NO: 1316333 - DNA, 15 bp, Homo sapiens
ttttcatctacatcc

SEQ ID NO: 1316334 - DNA, 15 bp, Homo sapiens
gttttcatctacatc

SEQ ID NO: 1316335 - DNA, 15 bp, Homo sapiens
tgttttcatctacat

SEQ ID NO: 1316336 - DNA, 15 bp, Homo sapiens
ttgttttcatctaca

SEQ ID NO: 1316337 - DNA, 15 bp, Homo sapiens
tttgttttcatctac

SEQ ID NO: 1316338 - DNA, 15 bp, Homo sapiens
ctttgttttcatcta

SEQ ID NO: 1316339 - DNA, 15 bp, Homo sapiens
gctttgttttcatct

SEQ ID NO: 1316340 - DNA, 15 bp, Homo sapiens
tgctttgttttcatc

SEQ ID NO: 1316341 - DNA, 15 bp, Homo sapiens
ttgctttgttttcat

SEQ ID NO: 1316342 - DNA, 15 bp, Homo sapiens
tttgctttgttttca

SEQ ID NO: 1316343 - DNA, 15 bp, Homo sapiens
cttttgctttgtttt

SEQ ID NO: 1316344 - DNA, 15 bp, Homo sapiens
tcttttgctttgttt

SEQ ID NO: 1316345 - DNA, 15 bp, Homo sapiens
gtcttttgctttgtt

SEQ ID NO: 1316346 - DNA, 15 bp, Homo sapiens
agtcttttgctttgt

SEQ ID NO: 1316347 - DNA, 15 bp, Homo sapiens
tagtcttttgctttg

SEQ ID NO: 1316348 - DNA, 15 bp, Homo sapiens
gtagtcttttgcttt

SEQ ID NO: 1316349 - DNA, 15 bp, Homo sapiens
tgtagtcttttgctt

SEQ ID NO: 1316350 - DNA, 15 bp, Homo sapiens
ttgtagtcttttgct

SEQ ID NO: 1316351 - DNA, 15 bp, Homo sapiens
tttgtagtcttttgc

SEQ ID NO: 1316352 - DNA, 15 bp, Homo sapiens
ttttgtagtcttttg

SEQ ID NO: 1316353 - DNA, 15 bp, Homo sapiens
gttttgtagtctttt

SEQ ID NO: 1316354 - DNA, 15 bp, Homo sapiens
agttttgtagtcttt

SEQ ID NO: 1316355 - DNA, 15 bp, Homo sapiens
aagttttgtagtctt

SEQ ID NO: 1316356 - DNA, 15 bp, Homo sapiens
aaagttttgtagtct

SEQ ID NO: 1316357 - DNA, 15 bp, Homo sapiens
taaagttttgtagtc

SEQ ID NO: 1316358 - DNA, 15 bp, Homo sapiens
ttaaagttttgtagt

SEQ ID NO: 1316359 - DNA, 15 bp, Homo sapiens
attaaagttttgtag

SEQ ID NO: 1316360 - DNA, 15 bp, Homo sapiens
tattaaagttttgta

SEQ ID NO: 1316361 - DNA, 15 bp, Homo sapiens
ttattaaagttttgt

SEQ ID NO: 1316362 - DNA, 15 bp, Homo sapiens
tttattaaagttttg

SEQ ID NO: 1316363 - DNA, 15 bp, Homo sapiens
ctttattaaagtttt

SEQ ID NO: 1316364 - DNA, 15 bp, Homo sapiens
cctttattaaagttt

SEQ ID NO: 1316365 - DNA, 15 bp, Homo sapiens
gcctttattaaagtt

SEQ ID NO: 1316366 - DNA, 15 bp, Homo sapiens
ggcctttattaaagt

SEQ ID NO: 1316367 - DNA, 15 bp, Homo sapiens
tggcctttattaaag

SEQ ID NO: 1316368 - DNA, 15 bp, Homo sapiens
atggcctttattaaa

SEQ ID NO: 1316369 - DNA, 15 bp, Homo sapiens
tatggcctttattaa

SEQ ID NO: 1316370 - DNA, 15 bp, Homo sapiens
ttatggcctttatta

SEQ ID NO: 1316371 - DNA, 15 bp, Homo sapiens
cttatggcctttatt

SEQ ID NO: 1316372 - DNA, 15 bp, Homo sapiens
tcttatggcctttat

SEQ ID NO: 1316373 - DNA, 15 bp, Homo sapiens
ctcttatggccttta

SEQ ID NO: 1316374 - DNA, 15 bp, Homo sapiens
tctcttatggccttt

SEQ ID NO: 1316375 - DNA, 15 bp, Homo sapiens
ttctcttatggcctt

SEQ ID NO: 1316376 - DNA, 15 bp, Homo sapiens
attctcttatggcct

SEQ ID NO: 1316377 - DNA, 15 bp, Homo sapiens
tattctcttatggcc

SEQ ID NO: 1316378 - DNA, 15 bp, Homo sapiens
gtattctcttatggc

SEQ ID NO: 1316379 - DNA, 15 bp, Homo sapiens
agtattctcttatgg

SEQ ID NO: 1316380 - DNA, 15 bp, Homo sapiens
aagtattctcttatg

SEQ ID NO: 1316381 - DNA, 15 bp, Homo sapiens
caagtattctcttat

SEQ ID NO: 1316382 - DNA, 15 bp, Homo sapiens
tcaagtattctctta

SEQ ID NO: 1316383 - DNA, 15 bp, Homo sapiens
ttcaagtattctctt

SEQ ID NO: 1316384 - DNA, 15 bp, Homo sapiens
gttcaagtattctct

SEQ ID NO: 1316385 - DNA, 15 bp, Homo sapiens
tgttcaagtattctc

SEQ ID NO: 1316386 - DNA, 15 bp, Homo sapiens
atgttcaagtattct

SEQ ID NO: 1316387 - DNA, 15 bp, Homo sapiens
catgttcaagtattc

SEQ ID NO: 1316388 - DNA, 15 bp, Homo sapiens
acatgttcaagtatt

SEQ ID NO: 1316389 - DNA, 15 bp, Homo sapiens
cacatgttcaagtat

SEQ ID NO: 1316390 - DNA, 15 bp, Homo sapiens
gcacatgttcaagta

SEQ ID NO: 1316391 - DNA, 15 bp, Homo sapiens
ggcacatgttcaagt

SEQ ID NO: 1316392 - DNA, 15 bp, Homo sapiens
tggcacatgttcaag

SEQ ID NO: 1316393 - DNA, 15 bp, Homo sapiens
ctggcacatgttcaa

SEQ ID NO: 1316394 - DNA, 15 bp, Homo sapiens
cctggcacatgttca

SEQ ID NO: 1316395 - DNA, 15 bp, Homo sapiens
gcctggcacatgttc

SEQ ID NO: 1316396 - DNA, 15 bp, Homo sapiens
tgcctggcacatgtt

SEQ ID NO: 1316397 - DNA, 15 bp, Homo sapiens
ctgcctggcacatgt

SEQ ID NO: 1316398 - DNA, 15 bp, Homo sapiens
actgcctggcacatg

SEQ ID NO: 1316399 - DNA, 15 bp, Homo sapiens
aactgcctggcacat

SEQ ID NO: 1316400 - DNA, 15 bp, Homo sapiens
aaactgcctggcaca

SEQ ID NO: 1316401 - DNA, 15 bp, Homo sapiens
aaaactgcctggcac

SEQ ID NO: 1316402 - DNA, 15 bp, Homo sapiens
aaaaactgcctggca

SEQ ID NO: 1316403 - DNA, 15 bp, Homo sapiens
gaaaaactgcctggc

SEQ ID NO: 1316404 - DNA, 15 bp, Homo sapiens
agaaaaactgcctgg

SEQ ID NO: 1316405 - DNA, 15 bp, Homo sapiens
cagaaaaactgcctg

SEQ ID NO: 1316406 - DNA, 15 bp, Homo sapiens
ccagaaaaactgcct

SEQ ID NO: 1316407 - DNA, 15 bp, Homo sapiens
cccagaaaaactgcc

SEQ ID NO: 1316408 - DNA, 15 bp, Homo sapiens
tcccagaaaaactgc

SEQ ID NO: 1316409 - DNA, 15 bp, Homo sapiens
gtcccagaaaaactg

SEQ ID NO: 1316410 - DNA, 15 bp, Homo sapiens
tgtcccagaaaaact

SEQ ID NO: 1316411 - DNA, 15 bp, Homo sapiens
ttgtcccagaaaaac

SEQ ID NO: 1316412 - DNA, 15 bp, Homo sapiens
tttgtcccagaaaaa

SEQ ID NO: 1316413 - DNA, 15 bp, Homo sapiens
atttgtcccagaaaa

SEQ ID NO: 1316414 - DNA, 15 bp, Homo sapiens
gatttgtcccagaaa

SEQ ID NO: 1316415 - DNA, 15 bp, Homo sapiens
agatttgtcccagaa

SEQ ID NO: 1316416 - DNA, 15 bp, Homo sapiens
tagatttgtcccaga

SEQ ID NO: 1316417 - DNA, 15 bp, Homo sapiens
atagatttgtcccag

SEQ ID NO: 1316418 - DNA, 15 bp, Homo sapiens
tatagatttgtccca

SEQ ID NO: 1316419 - DNA, 15 bp, Homo sapiens
gtatagatttgtccc

SEQ ID NO: 1316420 - DNA, 15 bp, Homo sapiens
tgtatagatttgtcc

SEQ ID NO: 1316421 - DNA, 15 bp, Homo sapiens
atgtatagatttgtc

SEQ ID NO: 1316422 - DNA, 15 bp, Homo sapiens
aatgtatagatttgt

SEQ ID NO: 1316423 - DNA, 15 bp, Homo sapiens
aaatgtatagatttg

SEQ ID NO: 1316424 - DNA, 15 bp, Homo sapiens
taaatgtatagattt

SEQ ID NO: 1316425 - DNA, 15 bp, Homo sapiens
ttaaatgtatagatt

SEQ ID NO: 1316426 - DNA, 15 bp, Homo sapiens
attaaatgtatagat

SEQ ID NO: 1316427 - DNA, 15 bp, Homo sapiens
cattaaatgtataga

SEQ ID NO: 1316428 - DNA, 15 bp, Homo sapiens
gcattaaatgtatag

SEQ ID NO: 1316429 - DNA, 15 bp, Homo sapiens
ggcattaaatgtata

SEQ ID NO: 1316430 - DNA, 15 bp, Homo sapiens
tggcattaaatgtat

SEQ ID NO: 1316431 - DNA, 15 bp, Homo sapiens
ttggcattaaatgta

SEQ ID NO: 1316432 - DNA, 15 bp, Homo sapiens
attggcattaaatgt

SEQ ID NO: 1316433 - DNA, 15 bp, Homo sapiens
gattggcattaaatg

SEQ ID NO: 1316434 - DNA, 15 bp, Homo sapiens
ggattggcattaaat

SEQ ID NO: 1316435 - DNA, 15 bp, Homo sapiens
tggattggcattaaa

SEQ ID NO: 1316436 - DNA, 15 bp, Homo sapiens
ctggattggcattaa

SEQ ID NO: 1316437 - DNA, 15 bp, Homo sapiens
actggattggcatta

SEQ ID NO: 1316438 - DNA, 15 bp, Homo sapiens
tactggattggcatt

SEQ ID NO: 1316439 - DNA, 15 bp, Homo sapiens
ttactggattggcat

SEQ ID NO: 1316440 - DNA, 15 bp, Homo sapiens
tttactggattggca

SEQ ID NO: 1316441 - DNA, 15 bp, Homo sapiens
ttttactggattggc

SEQ ID NO: 1316442 - DNA, 15 bp, Homo sapiens
tttttactggattgg

SEQ ID NO: 1316443 - DNA, 15 bp, Homo sapiens
atttttactggattg

SEQ ID NO: 1316444 - DNA, 15 bp, Homo sapiens
gatttttactggatt

SEQ ID NO: 1316445 - DNA, 15 bp, Homo sapiens
agatttttactggat

SEQ ID NO: 1316446 - DNA, 15 bp, Homo sapiens
gagatttttactgga

SEQ ID NO: 1316447 - DNA, 15 bp, Homo sapiens
tgagatttttactgg

SEQ ID NO: 1316448 - DNA, 15 bp, Homo sapiens
ctgagatttttactg

SEQ ID NO: 1316449 - DNA, 15 bp, Homo sapiens
actgagatttttact

SEQ ID NO: 1316450 - DNA, 15 bp, Homo sapiens
tactgagatttttac

SEQ ID NO: 1316451 - DNA, 15 bp, Homo sapiens
atactgagattttta

SEQ ID NO: 1316452 - DNA, 15 bp, Homo sapiens
catactgagattttt

SEQ ID NO: 1316453 - DNA, 15 bp, Homo sapiens
acatactgagatttt

SEQ ID NO: 1316454 - DNA, 15 bp, Homo sapiens
aacatactgagattt

SEQ ID NO: 1316455 - DNA, 15 bp, Homo sapiens
aaacatactgagatt

SEQ ID NO: 1316456 - DNA, 15 bp, Homo sapiens
aaaacatactgagat

SEQ ID NO: 1316457 - DNA, 15 bp, Homo sapiens
gaaaacatactgaga

SEQ ID NO: 1316458 - DNA, 15 bp, Homo sapiens
tgaaaacatactgag

SEQ ID NO: 1316459 - DNA, 15 bp, Homo sapiens
ctgaaaacatactga

SEQ ID NO: 1316460 - DNA, 15 bp, Homo sapiens
actgaaaacatactg

SEQ ID NO: 1316461 - DNA, 15 bp, Homo sapiens
cactgaaaacatact

SEQ ID NO: 1316462 - DNA, 15 bp, Homo sapiens
gcactgaaaacatac

SEQ ID NO: 1316463 - DNA, 15 bp, Homo sapiens
tgcactgaaaacata

SEQ ID NO: 1316464 - DNA, 15 bp, Homo sapiens
atgcactgaaaacat

SEQ ID NO: 1316465 - DNA, 15 bp, Homo sapiens
catgcactgaaaaca

SEQ ID NO: 1316466 - DNA, 15 bp, Homo sapiens
acatgcactgaaaac

SEQ ID NO: 1316467 - DNA, 15 bp, Homo sapiens
aacatgcactgaaaa

SEQ ID NO: 1316468 - DNA, 15 bp, Homo sapiens
aaacatgcactgaaa

SEQ ID NO: 1316469 - DNA, 15 bp, Homo sapiens
aaaacatgcactgaa

SEQ ID NO: 1316470 - DNA, 15 bp, Homo sapiens
aaaaacatgcactga

SEQ ID NO: 1316471 - DNA, 15 bp, Homo sapiens
taaaaacatgcactg

SEQ ID NO: 1316472 - DNA, 15 bp, Homo sapiens
gtaaaaacatgcact

SEQ ID NO: 1316473 - DNA, 15 bp, Homo sapiens
tgtaaaaacatgcac

SEQ ID NO: 1316474 - DNA, 15 bp, Homo sapiens
ttgtaaaaacatgca

SEQ ID NO: 1316475 - DNA, 15 bp, Homo sapiens
cttgtaaaaacatgc

SEQ ID NO: 1316476 - DNA, 15 bp, Homo sapiens
acttgtaaaaacatg

SEQ ID NO: 1316477 - DNA, 15 bp, Homo sapiens
aacttgtaaaaacat

SEQ ID NO: 1316478 - DNA, 15 bp, Homo sapiens
aaacttgtaaaaaca

SEQ ID NO: 1316479 - DNA, 15 bp, Homo sapiens
caaacttgtaaaaac

SEQ ID NO: 1316480 - DNA, 15 bp, Homo sapiens
acaaacttgtaaaaa

SEQ ID NO: 1316481 - DNA, 15 bp, Homo sapiens
aacaaacttgtaaaa

SEQ ID NO: 1316482 - DNA, 15 bp, Homo sapiens
gaacaaacttgtaaa

SEQ ID NO: 1316483 - DNA, 15 bp, Homo sapiens
tgaacaaacttgtaa

SEQ ID NO: 1316484 - DNA, 15 bp, Homo sapiens
gtgaacaaacttgta

SEQ ID NO: 1316485 - DNA, 15 bp, Homo sapiens
ggtgaacaaacttgt

SEQ ID NO: 1316486 - DNA, 15 bp, Homo sapiens
aggtgaacaaacttg

SEQ ID NO: 1316487 - DNA, 15 bp, Homo sapiens
caggtgaacaaactt

SEQ ID NO: 1316488 - DNA, 15 bp, Homo sapiens
acaggtgaacaaact

SEQ ID NO: 1316489 - DNA, 15 bp, Homo sapiens
tacaggtgaacaaac

SEQ ID NO: 1316490 - DNA, 15 bp, Homo sapiens
ctacaggtgaacaaa

SEQ ID NO: 1316491 - DNA, 15 bp, Homo sapiens
tctacaggtgaacaa

SEQ ID NO: 1316492 - DNA, 15 bp, Homo sapiens
atctacaggtgaaca

SEQ ID NO: 1316493 - DNA, 15 bp, Homo sapiens
tatctacaggtgaac

SEQ ID NO: 1316494 - DNA, 15 bp, Homo sapiens
gtatctacaggtgaa

SEQ ID NO: 1316495 - DNA, 15 bp, Homo sapiens
agtatctacaggtga

SEQ ID NO: 1316496 - DNA, 15 bp, Homo sapiens
cagtatctacaggtg

SEQ ID NO: 1316497 - DNA, 15 bp, Homo sapiens
acagtatctacaggt

SEQ ID NO: 1316498 - DNA, 15 bp, Homo sapiens
cacagtatctacagg

SEQ ID NO: 1316499 - DNA, 15 bp, Homo sapiens
ccacagtatctacag

SEQ ID NO: 1316500 - DNA, 15 bp, Homo sapiens
cccacagtatctaca

SEQ ID NO: 1316501 - DNA, 15 bp, Homo sapiens
acccacagtatctac

SEQ ID NO: 1316502 - DNA, 15 bp, Homo sapiens
aacccacagtatcta

SEQ ID NO: 1316503 - DNA, 15 bp, Homo sapiens
taacccacagtatct

SEQ ID NO: 1316504 - DNA, 15 bp, Homo sapiens
ataacccacagtatc

SEQ ID NO: 1316505 - DNA, 15 bp, Homo sapiens
tataacccacagtat

SEQ ID NO: 1316506 - DNA, 15 bp, Homo sapiens
atataacccacagta

SEQ ID NO: 1316507 - DNA, 15 bp, Homo sapiens
gatataacccacagt

SEQ ID NO: 1316508 - DNA, 15 bp, Homo sapiens
tgatataacccacag

SEQ ID NO: 1316509 - DNA, 15 bp, Homo sapiens
gtgatataacccaca

SEQ ID NO: 1316510 - DNA, 15 bp, Homo sapiens
ggtgatataacccac

SEQ ID NO: 1316511 - DNA, 15 bp, Homo sapiens
aggtgatataaccca

SEQ ID NO: 1316512 - DNA, 15 bp, Homo sapiens
taggtgatataaccc

SEQ ID NO: 1316513 - DNA, 15 bp, Homo sapiens
ctaggtgatataacc

SEQ ID NO: 1316514 - DNA, 15 bp, Homo sapiens
gctaggtgatataac

SEQ ID NO: 1316515 - DNA, 15 bp, Homo sapiens
tgctaggtgatataa

SEQ ID NO: 1316516 - DNA, 15 bp, Homo sapiens
ctgctaggtgatata

SEQ ID NO: 1316517 - DNA, 15 bp, Homo sapiens
actgctaggtgatat

SEQ ID NO: 1316518 - DNA, 15 bp, Homo sapiens
aactgctaggtgata

SEQ ID NO: 1316519 - DNA, 15 bp, Homo sapiens
aaactgctaggtgat

SEQ ID NO: 1316520 - DNA, 15 bp, Homo sapiens
gaaactgctaggtga

SEQ ID NO: 1316521 - DNA, 15 bp, Homo sapiens
tgaaactgctaggtg

SEQ ID NO: 1316522 - DNA, 15 bp, Homo sapiens
atgaaactgctaggt

SEQ ID NO: 1316523 - DNA, 15 bp, Homo sapiens
aatgaaactgctagg

SEQ ID NO: 1316524 - DNA, 15 bp, Homo sapiens
aaatgaaactgctag

SEQ ID NO: 1316525 - DNA, 15 bp, Homo sapiens
gaaatgaaactgcta

SEQ ID NO: 1316526 - DNA, 15 bp, Homo sapiens
agaaatgaaactgct

SEQ ID NO: 1316527 - DNA, 15 bp, Homo sapiens
tagaaatgaaactgc

SEQ ID NO: 1316528 - DNA, 15 bp, Homo sapiens
ttagaaatgaaactg

SEQ ID NO: 1316529 - DNA, 15 bp, Homo sapiens
cttagaaatgaaact

SEQ ID NO: 1316530 - DNA, 15 bp, Homo sapiens
tcttagaaatgaaac

SEQ ID NO: 1316531 - DNA, 15 bp, Homo sapiens
ttcttagaaatgaaa

SEQ ID NO: 1316532 - DNA, 15 bp, Homo sapiens
tttcttagaaatgaa

SEQ ID NO: 1316533 - DNA, 15 bp, Homo sapiens
ttttcttagaaatga

SEQ ID NO: 1316534 - DNA, 15 bp, Homo sapiens
tttttcttagaaatg

SEQ ID NO: 1316535 - DNA, 15 bp, Homo sapiens
ttttttcttagaaat

SEQ ID NO: 1316536 - DNA, 15 bp, Homo sapiens
tttttttcttagaaa

SEQ ID NO: 1316537 - DNA, 15 bp, Homo sapiens
atttttttcttagaa

SEQ ID NO: 1316538 - DNA, 15 bp, Homo sapiens
gatttttttcttaga

SEQ ID NO: 1316539 - DNA, 15 bp, Homo sapiens
ggatttttttcttag

SEQ ID NO: 1316540 - DNA, 15 bp, Homo sapiens
gggatttttttctta

SEQ ID NO: 1316541 - DNA, 15 bp, Homo sapiens
ggggatttttttctt

SEQ ID NO: 1316542 - DNA, 15 bp, Homo sapiens
aggggatttttttct

SEQ ID NO: 1316543 - DNA, 15 bp, Homo sapiens
gaggggatttttttc

SEQ ID NO: 1316544 - DNA, 15 bp, Homo sapiens
ggaggggattttttt

SEQ ID NO: 1316545 - DNA, 15 bp, Homo sapiens
aggaggggatttttt

SEQ ID NO: 1316546 - DNA, 15 bp, Homo sapiens
taggaggggattttt

SEQ ID NO: 1316547 - DNA, 15 bp, Homo sapiens
ttaggaggggatttt

SEQ ID NO: 1316548 - DNA, 15 bp, Homo sapiens
attaggaggggattt

SEQ ID NO: 1316549 - DNA, 15 bp, Homo sapiens
aattaggaggggatt

SEQ ID NO: 1316550 - DNA, 15 bp, Homo sapiens
aaattaggaggggat

SEQ ID NO: 1316551 - DNA, 15 bp, Homo sapiens
caaattaggagggga

SEQ ID NO: 1316552 - DNA, 15 bp, Homo sapiens
gcaaattaggagggg

SEQ ID NO: 1316553 - DNA, 15 bp, Homo sapiens
tgcaaattaggaggg

SEQ ID NO: 1316554 - DNA, 15 bp, Homo sapiens
atgcaaattaggagg

SEQ ID NO: 1316555 - DNA, 15 bp, Homo sapiens
aatgcaaattaggag

SEQ ID NO: 1316556 - DNA, 15 bp, Homo sapiens
gaatgcaaattagga

SEQ ID NO: 1316557 - DNA, 15 bp, Homo sapiens
agaatgcaaattagg

SEQ ID NO: 1316558 - DNA, 15 bp, Homo sapiens
gagaatgcaaattag

SEQ ID NO: 1316559 - DNA, 15 bp, Homo sapiens
ggagaatgcaaatta

SEQ ID NO: 1316560 - DNA, 15 bp, Homo sapiens
tggagaatgcaaatt

SEQ ID NO: 1316561 - DNA, 15 bp, Homo sapiens
gtggagaatgcaaat

SEQ ID NO: 1316562 - DNA, 15 bp, Homo sapiens
tgtggagaatgcaaa

SEQ ID NO: 1316563 - DNA, 15 bp, Homo sapiens
gtgtggagaatgcaa

SEQ ID NO: 1316564 - DNA, 15 bp, Homo sapiens
ggtgtggagaatgca

SEQ ID NO: 1316565 - DNA, 15 bp, Homo sapiens
aggtgtggagaatgc

SEQ ID NO: 1316566 - DNA, 15 bp, Homo sapiens
aaggtgtggagaatg

SEQ ID NO: 1316567 - DNA, 15 bp, Homo sapiens
gaaggtgtggagaat

SEQ ID NO: 1316568 - DNA, 15 bp, Homo sapiens
tgaaggtgtggagaa

SEQ ID NO: 1316569 - DNA, 15 bp, Homo sapiens
gtgaaggtgtggaga

SEQ ID NO: 1316570 - DNA, 15 bp, Homo sapiens
ggtgaaggtgtggag

SEQ ID NO: 1316571 - DNA, 15 bp, Homo sapiens
gggtgaaggtgtgga

SEQ ID NO: 1316572 - DNA, 15 bp, Homo sapiens
tgggtgaaggtgtgg

SEQ ID NO: 1316573 - DNA, 15 bp, Homo sapiens
ttgggtgaaggtgtg

SEQ ID NO: 1316574 - DNA, 15 bp, Homo sapiens
tttgggtgaaggtgt

SEQ ID NO: 1316575 - DNA, 15 bp, Homo sapiens
gtttgggtgaaggtg

SEQ ID NO: 1316576 - DNA, 15 bp, Homo sapiens
ggtttgggtgaaggt

SEQ ID NO: 1316577 - DNA, 15 bp, Homo sapiens
tggtttgggtgaagg

SEQ ID NO: 1316578 - DNA, 15 bp, Homo sapiens
ctggtttgggtgaag

SEQ ID NO: 1316579 - DNA, 15 bp, Homo sapiens
tctggtttgggtgaa

SEQ ID NO: 1316580 - DNA, 15 bp, Homo sapiens
atctggtttgggtga

SEQ ID NO: 1316581 - DNA, 15 bp, Homo sapiens
aatctggtttgggtg

SEQ ID NO: 1316582 - DNA, 15 bp, Homo sapiens
taatctggtttgggt

SEQ ID NO: 1316583 - DNA, 15 bp, Homo sapiens
ataatctggtttggg

SEQ ID NO: 1316584 - DNA, 15 bp, Homo sapiens
aataatctggtttgg

SEQ ID NO: 1316585 - DNA, 15 bp, Homo sapiens
taataatctggtttg

SEQ ID NO: 1316586 - DNA, 15 bp, Homo sapiens
ataataatctggttt

SEQ ID NO: 1316587 - DNA, 15 bp, Homo sapiens
aataataatctggtt

SEQ ID NO: 1316588 - DNA, 15 bp, Homo sapiens
taataataatctggt

SEQ ID NO: 1316589 - DNA, 15 bp, Homo sapiens
ctaataataatctgg

SEQ ID NO: 1316590 - DNA, 15 bp, Homo sapiens
tctaataataatctg

SEQ ID NO: 1316591 - DNA, 15 bp, Homo sapiens
gtctaataataatct

SEQ ID NO: 1316592 - DNA, 15 bp, Homo sapiens
agtctaataataatc

SEQ ID NO: 1316593 - DNA, 15 bp, Homo sapiens
aagtctaataataat

SEQ ID NO: 1316594 - DNA, 15 bp, Homo sapiens
aaagtctaataataa

SEQ ID NO: 1316595 - DNA, 15 bp, Homo sapiens
aaaagtctaataata

SEQ ID NO: 1316596 - DNA, 15 bp, Homo sapiens
taaaagtctaataat

SEQ ID NO: 1316597 - DNA, 15 bp, Homo sapiens
ttaaaagtctaataa

SEQ ID NO: 1316598 - DNA, 15 bp, Homo sapiens
gttaaaagtctaata

SEQ ID NO: 1316599 - DNA, 15 bp, Homo sapiens
tgttaaaagtctaat

SEQ ID NO: 1316600 - DNA, 15 bp, Homo sapiens
ctgttaaaagtctaa

SEQ ID NO: 1316601 - DNA, 15 bp, Homo sapiens
cctgttaaaagtcta

SEQ ID NO: 1316602 - DNA, 15 bp, Homo sapiens
acctgttaaaagtct

SEQ ID NO: 1316603 - DNA, 15 bp, Homo sapiens
gacctgttaaaagtc

SEQ ID NO: 1316604 - DNA, 15 bp, Homo sapiens
tgacctgttaaaagt

SEQ ID NO: 1316605 - DNA, 15 bp, Homo sapiens
ttgacctgttaaaag

SEQ ID NO: 1316606 - DNA, 15 bp, Homo sapiens
tttgacctgttaaaa

SEQ ID NO: 1316607 - DNA, 15 bp, Homo sapiens
ctttgacctgttaaa

SEQ ID NO: 1316608 - DNA, 15 bp, Homo sapiens
actttgacctgttaa

SEQ ID NO: 1316609 - DNA, 15 bp, Homo sapiens
tactttgacctgtta

SEQ ID NO: 1316610 - DNA, 15 bp, Homo sapiens
ctactttgacctgtt

SEQ ID NO: 1316611 - DNA, 15 bp, Homo sapiens
actactttgacctgt

SEQ ID NO: 1316612 - DNA, 15 bp, Homo sapiens
tactactttgacctg

SEQ ID NO: 1316613 - DNA, 15 bp, Homo sapiens
atactactttgacct

SEQ ID NO: 1316614 - DNA, 15 bp, Homo sapiens
gatactactttgacc

SEQ ID NO: 1316615 - DNA, 15 bp, Homo sapiens
agatactactttgac

SEQ ID NO: 1316616 - DNA, 15 bp, Homo sapiens
aagatactactttga

SEQ ID NO: 1316617 - DNA, 15 bp, Homo sapiens
caagatactactttg

SEQ ID NO: 1316618 - DNA, 15 bp, Homo sapiens
acaagatactacttt

SEQ ID NO: 1316619 - DNA, 15 bp, Homo sapiens
aacaagatactactt

SEQ ID NO: 1316620 - DNA, 15 bp, Homo sapiens
aaacaagatactact

SEQ ID NO: 1316621 - DNA, 15 bp, Homo sapiens
taaacaagatactac

SEQ ID NO: 1316622 - DNA, 15 bp, Homo sapiens
ctaaacaagatacta

SEQ ID NO: 1316623 - DNA, 15 bp, Homo sapiens
actaaacaagatact

SEQ ID NO: 1316624 - DNA, 15 bp, Homo sapiens
aactaaacaagatac

SEQ ID NO: 1316625 - DNA, 15 bp, Homo sapiens
aaactaaacaagata

SEQ ID NO: 1316626 - DNA, 15 bp, Homo sapiens
caaactaaacaagat

SEQ ID NO: 1316627 - DNA, 15 bp, Homo sapiens
gcaaactaaacaaga

SEQ ID NO: 1316628 - DNA, 15 bp, Homo sapiens
tgcaaactaaacaag

SEQ ID NO: 1316629 - DNA, 15 bp, Homo sapiens
atgcaaactaaacaa

SEQ ID NO: 1316630 - DNA, 15 bp, Homo sapiens
aatgcaaactaaaca

SEQ ID NO: 1316631 - DNA, 15 bp, Homo sapiens
aaatgcaaactaaac

SEQ ID NO: 1316632 - DNA, 15 bp, Homo sapiens
gaaatgcaaactaaa

SEQ ID NO: 1316633 - DNA, 15 bp, Homo sapiens
agaaatgcaaactaa

SEQ ID NO: 1316634 - DNA, 15 bp, Homo sapiens
aagaaatgcaaacta

SEQ ID NO: 1316635 - DNA, 15 bp, Homo sapiens
aaagaaatgcaaact

SEQ ID NO: 1316636 - DNA, 15 bp, Homo sapiens
taaagaaatgcaaac

SEQ ID NO: 1316637 - DNA, 15 bp, Homo sapiens
ctaaagaaatgcaaa

SEQ ID NO: 1316638 - DNA, 15 bp, Homo sapiens
actaaagaaatgcaa

SEQ ID NO: 1316639 - DNA, 15 bp, Homo sapiens
aactaaagaaatgca

SEQ ID NO: 1316640 - DNA, 15 bp, Homo sapiens
taactaaagaaatgc

SEQ ID NO: 1316641 - DNA, 15 bp, Homo sapiens
ataactaaagaaatg

SEQ ID NO: 1316642 - DNA, 15 bp, Homo sapiens
tataactaaagaaat

SEQ ID NO: 1316643 - DNA, 15 bp, Homo sapiens
ttataactaaagaaa

SEQ ID NO: 1316644 - DNA, 15 bp, Homo sapiens
cttataactaaagaa

SEQ ID NO: 1316645 - DNA, 15 bp, Homo sapiens
ccttataactaaaga

SEQ ID NO: 1316646 - DNA, 15 bp, Homo sapiens
tccttataactaaag

SEQ ID NO: 1316647 - DNA, 15 bp, Homo sapiens
ctccttataactaaa

SEQ ID NO: 1316648 - DNA, 15 bp, Homo sapiens
actccttataactaa

SEQ ID NO: 1316649 - DNA, 15 bp, Homo sapiens
gactccttataacta

SEQ ID NO: 1316650 - DNA, 15 bp, Homo sapiens
ggactccttataact

SEQ ID NO: 1316651 - DNA, 15 bp, Homo sapiens
tggactccttataac

SEQ ID NO: 1316652 - DNA, 15 bp, Homo sapiens
ctggactccttataa

SEQ ID NO: 1316653 - DNA, 15 bp, Homo sapiens
tctggactccttata

SEQ ID NO: 1316654 - DNA, 15 bp, Homo sapiens
ttctggactccttat

SEQ ID NO: 1316655 - DNA, 15 bp, Homo sapiens
tttctggactcctta

SEQ ID NO: 1316656 - DNA, 15 bp, Homo sapiens
atttctggactcctt

SEQ ID NO: 1316657 - DNA, 15 bp, Homo sapiens
tatttctggactcct

SEQ ID NO: 1316658 - DNA, 15 bp, Homo sapiens
ttatttctggactcc

SEQ ID NO: 1316659 - DNA, 15 bp, Homo sapiens
attatttctggactc

SEQ ID NO: 1316660 - DNA, 15 bp, Homo sapiens
gattatttctggact

SEQ ID NO: 1316661 - DNA, 15 bp, Homo sapiens
ggattatttctggac

SEQ ID NO: 1316662 - DNA, 15 bp, Homo sapiens
gggattatttctgga

SEQ ID NO: 1316663 - DNA, 15 bp, Homo sapiens
tgggattatttctgg

SEQ ID NO: 1316664 - DNA, 15 bp, Homo sapiens
atgggattatttctg

SEQ ID NO: 1316665 - DNA, 15 bp, Homo sapiens
tatgggattatttct

SEQ ID NO: 1316666 - DNA, 15 bp, Homo sapiens
gtatgggattatttc

SEQ ID NO: 1316667 - DNA, 15 bp, Homo sapiens
ggtatgggattattt

SEQ ID NO: 1316668 - DNA, 15 bp, Homo sapiens
gggtatgggattatt

SEQ ID NO: 1316669 - DNA, 15 bp, Homo sapiens
tgggtatgggattat

SEQ ID NO: 1316670 - DNA, 15 bp, Homo sapiens
ctgggtatgggatta

SEQ ID NO: 1316671 - DNA, 15 bp, Homo sapiens
cctgggtatgggatt

SEQ ID NO: 1316672 - DNA, 15 bp, Homo sapiens
ccctgggtatgggat

SEQ ID NO: 1316673 - DNA, 15 bp, Homo sapiens
cccctgggtatggga

SEQ ID NO: 1316674 - DNA, 15 bp, Homo sapiens
tcccctgggtatggg

SEQ ID NO: 1316675 - DNA, 15 bp, Homo sapiens
ttcccctgggtatgg

SEQ ID NO: 1316676 - DNA, 15 bp, Homo sapiens
attcccctgggtatg

SEQ ID NO: 1316677 - DNA, 15 bp, Homo sapiens
aattcccctgggtat

SEQ ID NO: 1316678 - DNA, 15 bp, Homo sapiens
aaattcccctgggta

SEQ ID NO: 1316679 - DNA, 15 bp, Homo sapiens
taaattcccctgggt

SEQ ID NO: 1316680 - DNA, 15 bp, Homo sapiens
ttaaattcccctggg

SEQ ID NO: 1316681 - DNA, 15 bp, Homo sapiens
attaaattcccctgg

SEQ ID NO: 1316682 - DNA, 15 bp, Homo sapiens
cattaaattcccctg

SEQ ID NO: 1316683 - DNA, 15 bp, Homo sapiens
acattaaattcccct

SEQ ID NO: 1316684 - DNA, 15 bp, Homo sapiens
tacattaaattcccc

SEQ ID NO: 1316685 - DNA, 15 bp, Homo sapiens
atacattaaattccc

SEQ ID NO: 1316686 - DNA, 15 bp, Homo sapiens
catacattaaattcc

SEQ ID NO: 1316687 - DNA, 15 bp, Homo sapiens
tcatacattaaattc

SEQ ID NO: 1316688 - DNA, 15 bp, Homo sapiens
atcatacattaaatt

SEQ ID NO: 1316689 - DNA, 15 bp, Homo sapiens
tatcatacattaaat

SEQ ID NO: 1316690 - DNA, 15 bp, Homo sapiens
ttatcatacattaaa

SEQ ID NO: 1316691 - DNA, 15 bp, Homo sapiens
attatcatacattaa

SEQ ID NO: 1316692 - DNA, 15 bp, Homo sapiens
aattatcatacatta

SEQ ID NO: 1316693 - DNA, 15 bp, Homo sapiens
aaattatcatacatt

SEQ ID NO: 1316694 - DNA, 15 bp, Homo sapiens
taaattatcatacat

SEQ ID NO: 1316695 - DNA, 15 bp, Homo sapiens
ataaattatcataca

SEQ ID NO: 1316696 - DNA, 15 bp, Homo sapiens
gataaattatcatac

SEQ ID NO: 1316697 - DNA, 15 bp, Homo sapiens
ggataaattatcata

SEQ ID NO: 1316698 - DNA, 15 bp, Homo sapiens
tggataaattatcat

SEQ ID NO: 1316699 - DNA, 15 bp, Homo sapiens
gtggataaattatca

SEQ ID NO: 1316700 - DNA, 15 bp, Homo sapiens
agtggataaattatc

SEQ ID NO: 1316701 - DNA, 15 bp, Homo sapiens
aagtggataaattat

SEQ ID NO: 1316702 - DNA, 15 bp, Homo sapiens
gaagtggataaatta

SEQ ID NO: 1316703 - DNA, 15 bp, Homo sapiens
tgaagtggataaatt

SEQ ID NO: 1316704 - DNA, 15 bp, Homo sapiens
ttgaagtggataaat

SEQ ID NO: 1316705 - DNA, 15 bp, Homo sapiens
tttgaagtggataaa

SEQ ID NO: 1316706 - DNA, 15 bp, Homo sapiens
atttgaagtggataa

SEQ ID NO: 1316707 - DNA, 15 bp, Homo sapiens
gatttgaagtggata

SEQ ID NO: 1316708 - DNA, 15 bp, Homo sapiens
tgatttgaagtggat

SEQ ID NO: 1316709 - DNA, 15 bp, Homo sapiens
ctgatttgaagtgga

SEQ ID NO: 1316710 - DNA, 15 bp, Homo sapiens
actgatttgaagtgg

SEQ ID NO: 1316711 - DNA, 15 bp, Homo sapiens
cactgatttgaagtg

SEQ ID NO: 1316712 - DNA, 15 bp, Homo sapiens
ccactgatttgaagt

SEQ ID NO: 1316713 - DNA, 15 bp, Homo sapiens
tccactgatttgaag

SEQ ID NO: 1316714 - DNA, 15 bp, Homo sapiens
ctccactgatttgaa

SEQ ID NO: 1316715 - DNA, 15 bp, Homo sapiens
tctccactgatttga

SEQ ID NO: 1316716 - DNA, 15 bp, Homo sapiens
ttctccactgatttg

SEQ ID NO: 1316717 - DNA, 15 bp, Homo sapiens
tttctccactgattt

SEQ ID NO: 1316718 - DNA, 15 bp, Homo sapiens
ttttctccactgatt

SEQ ID NO: 1316719 - DNA, 15 bp, Homo sapiens
attttctccactgat

SEQ ID NO: 1316720 - DNA, 15 bp, Homo sapiens
aattttctccactga

SEQ ID NO: 1316721 - DNA, 15 bp, Homo sapiens
gaattttctccactg

SEQ ID NO: 1316722 - DNA, 15 bp, Homo sapiens
tgaattttctccact

SEQ ID NO: 1316723 - DNA, 15 bp, Homo sapiens
ctgaattttctccac

SEQ ID NO: 1316724 - DNA, 15 bp, Homo sapiens
cctgaattttctcca

SEQ ID NO: 1316725 - DNA, 15 bp, Homo sapiens
tcctgaattttctcc

SEQ ID NO: 1316726 - DNA, 15 bp, Homo sapiens
atcctgaattttctc

SEQ ID NO: 1316727 - DNA, 15 bp, Homo sapiens
tatcctgaattttct

SEQ ID NO: 1316728 - DNA, 15 bp, Homo sapiens
ttatcctgaattttc

SEQ ID NO: 1316729 - DNA, 15 bp, Homo sapiens
attatcctgaatttt

SEQ ID NO: 1316730 - DNA, 15 bp, Homo sapiens
aattatcctgaattt

SEQ ID NO: 1316731 - DNA, 15 bp, Homo sapiens
gaattatcctgaatt

SEQ ID NO: 1316732 - DNA, 15 bp, Homo sapiens
tgaattatcctgaat

SEQ ID NO: 1316733 - DNA, 15 bp, Homo sapiens
ctgaattatcctgaa

SEQ ID NO: 1316734 - DNA, 15 bp, Homo sapiens
actgaattatcctga

SEQ ID NO: 1316735 - DNA, 15 bp, Homo sapiens
tactgaattatcctg

SEQ ID NO: 1316736 - DNA, 15 bp, Homo sapiens
ttactgaattatcct

SEQ ID NO: 1316737 - DNA, 15 bp, Homo sapiens
tttactgaattatcc

SEQ ID NO: 1316738 - DNA, 15 bp, Homo sapiens
atttactgaattatc

SEQ ID NO: 1316739 - DNA, 15 bp, Homo sapiens
catttactgaattat

SEQ ID NO: 1316740 - DNA, 15 bp, Homo sapiens
gcatttactgaatta

SEQ ID NO: 1316741 - DNA, 15 bp, Homo sapiens
agcatttactgaatt

SEQ ID NO: 1316742 - DNA, 15 bp, Homo sapiens
gagcatttactgaat

SEQ ID NO: 1316743 - DNA, 15 bp, Homo sapiens
tgagcatttactgaa

SEQ ID NO: 1316744 - DNA, 15 bp, Homo sapiens
atgagcatttactga

SEQ ID NO: 1316745 - DNA, 15 bp, Homo sapiens
catgagcatttactg

SEQ ID NO: 1316746 - DNA, 15 bp, Homo sapiens
tcatgagcatttact

SEQ ID NO: 1316747 - DNA, 15 bp, Homo sapiens
ctcatgagcatttac

SEQ ID NO: 1316748 - DNA, 15 bp, Homo sapiens
actcatgagcattta

SEQ ID NO: 1316749 - DNA, 15 bp, Homo sapiens
aactcatgagcattt

SEQ ID NO: 1316750 - DNA, 15 bp, Homo sapiens
taactcatgagcatt

SEQ ID NO: 1316751 - DNA, 15 bp, Homo sapiens
ataactcatgagcat

SEQ ID NO: 1316752 - DNA, 15 bp, Homo sapiens
gataactcatgagca

SEQ ID NO: 1316753 - DNA, 15 bp, Homo sapiens
tgataactcatgagc

SEQ ID NO: 1316754 - DNA, 15 bp, Homo sapiens
ctgataactcatgag

SEQ ID NO: 1316755 - DNA, 15 bp, Homo sapiens
cctgataactcatga

SEQ ID NO: 1316756 - DNA, 15 bp, Homo sapiens
tcctgataactcatg

SEQ ID NO: 1316757 - DNA, 15 bp, Homo sapiens
atcctgataactcat

SEQ ID NO: 1316758 - DNA, 15 bp, Homo sapiens
tatcctgataactca

SEQ ID NO: 1316759 - DNA, 15 bp, Homo sapiens
ctatcctgataactc

SEQ ID NO: 1316760 - DNA, 15 bp, Homo sapiens
gctatcctgataact

SEQ ID NO: 1316761 - DNA, 15 bp, Homo sapiens
tgctatcctgataac

SEQ ID NO: 1316762 - DNA, 15 bp, Homo sapiens
ttgctatcctgataa

SEQ ID NO: 1316763 - DNA, 15 bp, Homo sapiens
attgctatcctgata

SEQ ID NO: 1316764 - DNA, 15 bp, Homo sapiens
aattgctatcctgat

SEQ ID NO: 1316765 - DNA, 15 bp, Homo sapiens
aaattgctatcctga

SEQ ID NO: 1316766 - DNA, 15 bp, Homo sapiens
caaattgctatcctg

SEQ ID NO: 1316767 - DNA, 15 bp, Homo sapiens
tcaaattgctatcct

SEQ ID NO: 1316768 - DNA, 15 bp, Homo sapiens
ttcaaattgctatcc

SEQ ID NO: 1316769 - DNA, 15 bp, Homo sapiens
tttcaaattgctatc

SEQ ID NO: 1316770 - DNA, 15 bp, Homo sapiens
ttttcaaattgctat

SEQ ID NO: 1316771 - DNA, 15 bp, Homo sapiens
tttttcaaattgcta

SEQ ID NO: 1316772 - DNA, 15 bp, Homo sapiens
ttttttcaaattgct

SEQ ID NO: 1316773 - DNA, 15 bp, Homo sapiens
tttttttcaaattgc

SEQ ID NO: 1316774 - DNA, 15 bp, Homo sapiens
ctttttttcaaattg

SEQ ID NO: 1316775 - DNA, 15 bp, Homo sapiens
tctttttttcaaatt

SEQ ID NO: 1316776 - DNA, 15 bp, Homo sapiens
ctctttttttcaaat

SEQ ID NO: 1316777 - DNA, 15 bp, Homo sapiens
cctctttttttcaaa

SEQ ID NO: 1316778 - DNA, 15 bp, Homo sapiens
acctctttttttcaa

SEQ ID NO: 1316779 - DNA, 15 bp, Homo sapiens
tacctctttttttca

SEQ ID NO: 1316780 - DNA, 15 bp, Homo sapiens
ctacctctttttttc

SEQ ID NO: 1316781 - DNA, 15 bp, Homo sapiens
tctacctcttttttt

SEQ ID NO: 1316782 - DNA, 15 bp, Homo sapiens
gtctacctctttttt

SEQ ID NO: 1316783 - DNA, 15 bp, Homo sapiens
agtctacctcttttt

SEQ ID NO: 1316784 - DNA, 15 bp, Homo sapiens
aagtctacctctttt

SEQ ID NO: 1316785 - DNA, 15 bp, Homo sapiens
aaagtctacctcttt

SEQ ID NO: 1316786 - DNA, 15 bp, Homo sapiens
caaagtctacctctt

SEQ ID NO: 1316787 - DNA, 15 bp, Homo sapiens
tcaaagtctacctct

SEQ ID NO: 1316788 - DNA, 15 bp, Homo sapiens
atcaaagtctacctc

SEQ ID NO: 1316789 - DNA, 15 bp, Homo sapiens
aatcaaagtctacct

SEQ ID NO: 1316790 - DNA, 15 bp, Homo sapiens
aaatcaaagtctacc

SEQ ID NO: 1316791 - DNA, 15 bp, Homo sapiens
taaatcaaagtctac

SEQ ID NO: 1316792 - DNA, 15 bp, Homo sapiens
ataaatcaaagtcta

SEQ ID NO: 1316793 - DNA, 15 bp, Homo sapiens
aataaatcaaagtct

SEQ ID NO: 1316794 - DNA, 15 bp, Homo sapiens
gaataaatcaaagtc

SEQ ID NO: 1316795 - DNA, 15 bp, Homo sapiens
agaataaatcaaagt

SEQ ID NO: 1316796 - DNA, 15 bp, Homo sapiens
aagaataaatcaaag

SEQ ID NO: 1316797 - DNA, 15 bp, Homo sapiens
aaagaataaatcaaa

SEQ ID NO: 1316798 - DNA, 15 bp, Homo sapiens
taaagaataaatcaa

SEQ ID NO: 1316799 - DNA, 15 bp, Homo sapiens
ataaagaataaatca

SEQ ID NO: 1316800 - DNA, 15 bp, Homo sapiens
tataaagaataaatc

SEQ ID NO: 1316801 - DNA, 15 bp, Homo sapiens
gtataaagaataaat

SEQ ID NO: 1316802 - DNA, 15 bp, Homo sapiens
ggtataaagaataaa

SEQ ID NO: 1316803 - DNA, 15 bp, Homo sapiens
tggtataaagaataa

SEQ ID NO: 1316804 - DNA, 15 bp, Homo sapiens
ttggtataaagaata

SEQ ID NO: 1316805 - DNA, 15 bp, Homo sapiens
tttggtataaagaat

SEQ ID NO: 1316806 - DNA, 15 bp, Homo sapiens
ttttggtataaagaa

SEQ ID NO: 1316807 - DNA, 15 bp, Homo sapiens
attttggtataaaga

SEQ ID NO: 1316808 - DNA, 15 bp, Homo sapiens
tattttggtataaag

SEQ ID NO: 1316809 - DNA, 15 bp, Homo sapiens
ttattttggtataaa

SEQ ID NO: 1316810 - DNA, 15 bp, Homo sapiens
tttattttggtataa

SEQ ID NO: 1316811 - DNA, 15 bp, Homo sapiens
atttattttggtata

SEQ ID NO: 1316812 - DNA, 15 bp, Homo sapiens
aatttattttggtat

SEQ ID NO: 1316813 - DNA, 15 bp, Homo sapiens
gaatttattttggta

SEQ ID NO: 1316814 - DNA, 15 bp, Homo sapiens
agaatttattttggt

SEQ ID NO: 1316815 - DNA, 15 bp, Homo sapiens
tagaatttattttgg

SEQ ID NO: 1316816 - DNA, 15 bp, Homo sapiens
ctagaatttattttg

SEQ ID NO: 1316817 - DNA, 15 bp, Homo sapiens
gctagaatttatttt

SEQ ID NO: 1316818 - DNA, 15 bp, Homo sapiens
agctagaatttattt

SEQ ID NO: 1316819 - DNA, 15 bp, Homo sapiens
tagctagaatttatt

SEQ ID NO: 1316820 - DNA, 15 bp, Homo sapiens
ctagctagaatttat

SEQ ID NO: 1316821 - DNA, 15 bp, Homo sapiens
tctagctagaattta

SEQ ID NO: 1316822 - DNA, 15 bp, Homo sapiens
atctagctagaattt

SEQ ID NO: 1316823 - DNA, 15 bp, Homo sapiens
gatctagctagaatt

SEQ ID NO: 1316824 - DNA, 15 bp, Homo sapiens
tgatctagctagaat

SEQ ID NO: 1316825 - DNA, 15 bp, Homo sapiens
ttgatctagctagaa

SEQ ID NO: 1316826 - DNA, 15 bp, Homo sapiens
attgatctagctaga

SEQ ID NO: 1316827 - DNA, 15 bp, Homo sapiens
tattgatctagctag

SEQ ID NO: 1316828 - DNA, 15 bp, Homo sapiens
ttattgatctagcta

SEQ ID NO: 1316829 - DNA, 15 bp, Homo sapiens
attattgatctagct

SEQ ID NO: 1316830 - DNA, 15 bp, Homo sapiens
gattattgatctagc

SEQ ID NO: 1316831 - DNA, 15 bp, Homo sapiens
agattattgatctag

SEQ ID NO: 1316832 - DNA, 15 bp, Homo sapiens
gagattattgatcta

SEQ ID NO: 1316833 - DNA, 15 bp, Homo sapiens
tgagattattgatct

SEQ ID NO: 1316834 - DNA, 15 bp, Homo sapiens
ttgagattattgatc

SEQ ID NO: 1316835 - DNA, 15 bp, Homo sapiens
attgagattattgat

SEQ ID NO: 1316836 - DNA, 15 bp, Homo sapiens
tattgagattattga

SEQ ID NO: 1316837 - DNA, 15 bp, Homo sapiens
ttattgagattattg

SEQ ID NO: 1316838 - DNA, 15 bp, Homo sapiens
tttattgagattatt

SEQ ID NO: 1316839 - DNA, 15 bp, Homo sapiens
ttttattgagattat

SEQ ID NO: 1316840 - DNA, 15 bp, Homo sapiens
tttttattgagatta

SEQ ID NO: 1316841 - DNA, 15 bp, Homo sapiens
ttttttattgagatt

SEQ ID NO: 1316842 - DNA, 15 bp, Homo sapiens
attttttattgagat

SEQ ID NO: 1316843 - DNA, 15 bp, Homo sapiens
cattttttattgaga

SEQ ID NO: 1316844 - DNA, 15 bp, Homo sapiens
tcattttttattgag

SEQ ID NO: 1316845 - DNA, 15 bp, Homo sapiens
gtcattttttattga

SEQ ID NO: 1316846 - DNA, 15 bp, Homo sapiens
agtcattttttattg

SEQ ID NO: 1316847 - DNA, 15 bp, Homo sapiens
gagtcattttttatt

SEQ ID NO: 1316848 - DNA, 15 bp, Homo sapiens
ggagtcattttttat

SEQ ID NO: 1316849 - DNA, 15 bp, Homo sapiens
tggagtcatttttta

SEQ ID NO: 1316850 - DNA, 15 bp, Homo sapiens
atggagtcatttttt

SEQ ID NO: 1316851 - DNA, 15 bp, Homo sapiens
aatggagtcattttt

SEQ ID NO: 1316852 - DNA, 15 bp, Homo sapiens
aaatggagtcatttt

SEQ ID NO: 1316853 - DNA, 15 bp, Homo sapiens
taaatggagtcattt

SEQ ID NO: 1316854 - DNA, 15 bp, Homo sapiens
ttaaatggagtcatt

SEQ ID NO: 1316855 - DNA, 15 bp, Homo sapiens
tttaaatggagtcat

SEQ ID NO: 1316856 - DNA, 15 bp, Homo sapiens
ttttaaatggagtca

SEQ ID NO: 1316857 - DNA, 15 bp, Homo sapiens
tttttaaatggagtc

SEQ ID NO: 1316858 - DNA, 15 bp, Homo sapiens
ttttttaaatggagt

SEQ ID NO: 1316859 - DNA, 15 bp, Homo sapiens
attttttaaatggag

SEQ ID NO: 1316860 - DNA, 15 bp, Homo sapiens
cattttttaaatgga

SEQ ID NO: 1316861 - DNA, 15 bp, Homo sapiens
tcattttttaaatgg

SEQ ID NO: 1316862 - DNA, 15 bp, Homo sapiens
gtcattttttaaatg

SEQ ID NO: 1316863 - DNA, 15 bp, Homo sapiens
agtcattttttaaat

SEQ ID NO: 1316864 - DNA, 15 bp, Homo sapiens
gagtcattttttaaa

SEQ ID NO: 1316865 - DNA, 15 bp, Homo sapiens
ggagtcattttttaa

SEQ ID NO: 1316866 - DNA, 15 bp, Homo sapiens
tatggagtcattttt

SEQ ID NO: 1316867 - DNA, 15 bp, Homo sapiens
atatggagtcatttt

SEQ ID NO: 1316868 - DNA, 15 bp, Homo sapiens
tatatggagtcattt

SEQ ID NO: 1316869 - DNA, 15 bp, Homo sapiens
ttatatggagtcatt

SEQ ID NO: 1316870 - DNA, 15 bp, Homo sapiens
cttatatggagtcat

SEQ ID NO: 1316871 - DNA, 15 bp, Homo sapiens
acttatatggagtca

SEQ ID NO: 1316872 - DNA, 15 bp, Homo sapiens
aacttatatggagtc

SEQ ID NO: 1316873 - DNA, 15 bp, Homo sapiens
gaacttatatggagt

SEQ ID NO: 1316874 - DNA, 15 bp, Homo sapiens
agaacttatatggag

SEQ ID NO: 1316875 - DNA, 15 bp, Homo sapiens
cagaacttatatgga

SEQ ID NO: 1316876 - DNA, 15 bp, Homo sapiens
ccagaacttatatgg

SEQ ID NO: 1316877 - DNA, 15 bp, Homo sapiens
tccagaacttatatg

SEQ ID NO: 1316878 - DNA, 15 bp, Homo sapiens
ttccagaacttatat

SEQ ID NO: 1316879 - DNA, 15 bp, Homo sapiens
tttccagaacttata

SEQ ID NO: 1316880 - DNA, 15 bp, Homo sapiens
ttttccagaacttat

SEQ ID NO: 1316881 - DNA, 15 bp, Homo sapiens
tttttccagaactta

SEQ ID NO: 1316882 - DNA, 15 bp, Homo sapiens
ttttttccagaactt

SEQ ID NO: 1316883 - DNA, 15 bp, Homo sapiens
tttttttccagaact

SEQ ID NO: 1316884 - DNA, 15 bp, Homo sapiens
atttttttccagaac

SEQ ID NO: 1316885 - DNA, 15 bp, Homo sapiens
catttttttccagaa

SEQ ID NO: 1316886 - DNA, 15 bp, Homo sapiens
tcatttttttccaga

SEQ ID NO: 1316887 - DNA, 15 bp, Homo sapiens
ctcatttttttccag

SEQ ID NO: 1316888 - DNA, 15 bp, Homo sapiens
gctcatttttttcca

SEQ ID NO: 1316889 - DNA, 15 bp, Homo sapiens
tgctcatttttttcc

SEQ ID NO: 1316890 - DNA, 15 bp, Homo sapiens
gtgctcatttttttc

SEQ ID NO: 1316891 - DNA, 15 bp, Homo sapiens
cgtgctcattttttt

SEQ ID NO: 1316892 - DNA, 15 bp, Homo sapiens
acgtgctcatttttt

SEQ ID NO: 1316893 - DNA, 15 bp, Homo sapiens
aacgtgctcattttt

SEQ ID NO: 1316894 - DNA, 15 bp, Homo sapiens
taacgtgctcatttt

SEQ ID NO: 1316895 - DNA, 15 bp, Homo sapiens
ctaacgtgctcattt

SEQ ID NO: 1316896 - DNA, 15 bp, Homo sapiens
tctaacgtgctcatt

SEQ ID NO: 1316897 - DNA, 15 bp, Homo sapiens
ttctaacgtgctcat

SEQ ID NO: 1316898 - DNA, 15 bp, Homo sapiens
tttctaacgtgctca

SEQ ID NO: 1316899 - DNA, 15 bp, Homo sapiens
ttttctaacgtgctc

SEQ ID NO: 1316900 - DNA, 15 bp, Homo sapiens
tttttctaacgtgct

SEQ ID NO: 1316901 - DNA, 15 bp, Homo sapiens
atttttctaacgtgc

SEQ ID NO: 1316902 - DNA, 15 bp, Homo sapiens
tatttttctaacgtg

SEQ ID NO: 1316903 - DNA, 15 bp, Homo sapiens
ttatttttctaacgt

SEQ ID NO: 1316904 - DNA, 15 bp, Homo sapiens
gttatttttctaacg

SEQ ID NO: 1316905 - DNA, 15 bp, Homo sapiens
tgttatttttctaac

SEQ ID NO: 1316906 - DNA, 15 bp, Homo sapiens
actgttatttttcta

SEQ ID NO: 1316907 - DNA, 15 bp, Homo sapiens
tactgttatttttct

SEQ ID NO: 1316908 - DNA, 15 bp, Homo sapiens
ctactgttatttttc

SEQ ID NO: 1316909 - DNA, 15 bp, Homo sapiens
tctactgttattttt

SEQ ID NO: 1316910 - DNA, 15 bp, Homo sapiens
ctctactgttatttt

SEQ ID NO: 1316911 - DNA, 15 bp, Homo sapiens
cctctactgttattt

SEQ ID NO: 1316912 - DNA, 15 bp, Homo sapiens
gcctctactgttatt

SEQ ID NO: 1316913 - DNA, 15 bp, Homo sapiens
ggcctctactgttat

SEQ ID NO: 1316914 - DNA, 15 bp, Homo sapiens
tggcctctactgtta

SEQ ID NO: 1316915 - DNA, 15 bp, Homo sapiens
ctggcctctactgtt

SEQ ID NO: 1316916 - DNA, 15 bp, Homo sapiens
cctggcctctactgt

SEQ ID NO: 1316917 - DNA, 15 bp, Homo sapiens
gcctggcctctactg

SEQ ID NO: 1316918 - DNA, 15 bp, Homo sapiens
tgcctggcctctact

SEQ ID NO: 1316919 - DNA, 15 bp, Homo sapiens
gtgcctggcctctac

SEQ ID NO: 1316920 - DNA, 15 bp, Homo sapiens
agtgcctggcctcta

SEQ ID NO: 1316921 - DNA, 15 bp, Homo sapiens
cagtgcctggcctct

SEQ ID NO: 1316922 - DNA, 15 bp, Homo sapiens
acagtgcctggcctc

SEQ ID NO: 1316923 - DNA, 15 bp, Homo sapiens
cacagtgcctggcct

SEQ ID NO: 1316924 - DNA, 15 bp, Homo sapiens
ccacagtgcctggcc

SEQ ID NO: 1316925 - DNA, 15 bp, Homo sapiens
gccacagtgcctggc

SEQ ID NO: 1316926 - DNA, 15 bp, Homo sapiens
agccacagtgcctgg

SEQ ID NO: 1316927 - DNA, 15 bp, Homo sapiens
atgagccacagtgcc

SEQ ID NO: 1316928 - DNA, 15 bp, Homo sapiens
catgagccacagtgc

SEQ ID NO: 1316929 - DNA, 15 bp, Homo sapiens
gcatgagccacagtg

SEQ ID NO: 1316930 - DNA, 15 bp, Homo sapiens
ggcatgagccacagt

SEQ ID NO: 1316931 - DNA, 15 bp, Homo sapiens
aggcatgagccacag

SEQ ID NO: 1316932 - DNA, 15 bp, Homo sapiens
taggcatgagccaca

SEQ ID NO: 1316933 - DNA, 15 bp, Homo sapiens
tctcgcctcccaaag

SEQ ID NO: 1316934 - DNA, 15 bp, Homo sapiens
gtctcgcctcccaaa

SEQ ID NO: 1316935 - DNA, 15 bp, Homo sapiens
tgtctcgcctcccaa

SEQ ID NO: 1316936 - DNA, 15 bp, Homo sapiens
ctgtctcgcctccca

SEQ ID NO: 1316937 - DNA, 15 bp, Homo sapiens
cctgtctcgcctccc

SEQ ID NO: 1316938 - DNA, 15 bp, Homo sapiens
acctgtctcgcctcc

SEQ ID NO: 1316939 - DNA, 15 bp, Homo sapiens
cacctgtctcgcctc

SEQ ID NO: 1316940 - DNA, 15 bp, Homo sapiens
ccacctgtctcgcct

SEQ ID NO: 1316941 - DNA, 15 bp, Homo sapiens
cccacctgtctcgcc

SEQ ID NO: 1316942 - DNA, 15 bp, Homo sapiens
acccacctgtctcgc

SEQ ID NO: 1316943 - DNA, 15 bp, Homo sapiens
gacccacctgtctcg

SEQ ID NO: 1316944 - DNA, 15 bp, Homo sapiens
tgacccacctgtctc

SEQ ID NO: 1316945 - DNA, 15 bp, Homo sapiens
atgacccacctgtct

SEQ ID NO: 1316946 - DNA, 15 bp, Homo sapiens
gatgacccacctgtc

SEQ ID NO: 1316947 - DNA, 15 bp, Homo sapiens
agatgacccacctgt

SEQ ID NO: 1316948 - DNA, 15 bp, Homo sapiens
cagatgacccacctg

SEQ ID NO: 1316949 - DNA, 15 bp, Homo sapiens
tcagatgacccacct

SEQ ID NO: 1316950 - DNA, 15 bp, Homo sapiens
ctcagatgacccacc

SEQ ID NO: 1316951 - DNA, 15 bp, Homo sapiens
cctcagatgacccac

SEQ ID NO: 1316952 - DNA, 15 bp, Homo sapiens
acctcagatgaccca

SEQ ID NO: 1316953 - DNA, 15 bp, Homo sapiens
gacctcagatgaccc

SEQ ID NO: 1316954 - DNA, 15 bp, Homo sapiens
tgacctcagatgacc

SEQ ID NO: 1316955 - DNA, 15 bp, Homo sapiens
ctgacctcagatgac

SEQ ID NO: 1316956 - DNA, 15 bp, Homo sapiens
cctgacctcagatga

SEQ ID NO: 1316957 - DNA, 15 bp, Homo sapiens
tcctgacctcagatg

SEQ ID NO: 1316958 - DNA, 15 bp, Homo sapiens
ctcctgacctcagat

SEQ ID NO: 1316959 - DNA, 15 bp, Homo sapiens
actcctgacctcaga

SEQ ID NO: 1316960 - DNA, 15 bp, Homo sapiens
gtcaaactcctgacc

SEQ ID NO: 1316961 - DNA, 15 bp, Homo sapiens
tgtcaaactcctgac

SEQ ID NO: 1316962 - DNA, 15 bp, Homo sapiens
gtgtcaaactcctga

SEQ ID NO: 1316963 - DNA, 15 bp, Homo sapiens
ggtgtcaaactcctg

SEQ ID NO: 1316964 - DNA, 15 bp, Homo sapiens
tggtgtcaaactcct

SEQ ID NO: 1316965 - DNA, 15 bp, Homo sapiens
ctggtgtcaaactcc

SEQ ID NO: 1316966 - DNA, 15 bp, Homo sapiens
gctggtgtcaaactc

SEQ ID NO: 1316967 - DNA, 15 bp, Homo sapiens
ggctggtgtcaaact

SEQ ID NO: 1316968 - DNA, 15 bp, Homo sapiens
aggctggtgtcaaac

SEQ ID NO: 1316969 - DNA, 15 bp, Homo sapiens
taggctggtgtcaaa

SEQ ID NO: 1316970 - DNA, 15 bp, Homo sapiens
ctaggctggtgtcaa

SEQ ID NO: 1316971 - DNA, 15 bp, Homo sapiens
gctaggctggtgtca

SEQ ID NO: 1316972 - DNA, 15 bp, Homo sapiens
agctaggctggtgtc

SEQ ID NO: 1316973 - DNA, 15 bp, Homo sapiens
tagctaggctggtgt

SEQ ID NO: 1316974 - DNA, 15 bp, Homo sapiens
ttagctaggctggtg

SEQ ID NO: 1316975 - DNA, 15 bp, Homo sapiens
gttagctaggctggt

SEQ ID NO: 1316976 - DNA, 15 bp, Homo sapiens
cgttagctaggctgg

SEQ ID NO: 1316977 - DNA, 15 bp, Homo sapiens
acgttagctaggctg

SEQ ID NO: 1316978 - DNA, 15 bp, Homo sapiens
cacgttagctaggct

SEQ ID NO: 1316979 - DNA, 15 bp, Homo sapiens
ccacgttagctaggc

SEQ ID NO: 1316980 - DNA, 15 bp, Homo sapiens
accacgttagctagg

SEQ ID NO: 1316981 - DNA, 15 bp, Homo sapiens
caccacgttagctag

SEQ ID NO: 1316982 - DNA, 15 bp, Homo sapiens
tcaccacgttagcta

SEQ ID NO: 1316983 - DNA, 15 bp, Homo sapiens
ttcaccacgttagct

SEQ ID NO: 1316984 - DNA, 15 bp, Homo sapiens
tttcaccacgttagc

SEQ ID NO: 1316985 - DNA, 15 bp, Homo sapiens
gtttcaccacgttag

SEQ ID NO: 1316986 - DNA, 15 bp, Homo sapiens
ggtttcaccacgtta

SEQ ID NO: 1316987 - DNA, 15 bp, Homo sapiens
cggggtttcaccacg

SEQ ID NO: 1316988 - DNA, 15 bp, Homo sapiens
acggggtttcaccac

SEQ ID NO: 1316989 - DNA, 15 bp, Homo sapiens
acgtgccaccatgcc

SEQ ID NO: 1316990 - DNA, 15 bp, Homo sapiens
cacgtgccaccatgc

SEQ ID NO: 1316991 - DNA, 15 bp, Homo sapiens
gcacgtgccaccatg

SEQ ID NO: 1316992 - DNA, 15 bp, Homo sapiens
ggcacgtgccaccat

SEQ ID NO: 1316993 - DNA, 15 bp, Homo sapiens
ctacaggcacgtgcc

SEQ ID NO: 1316994 - DNA, 15 bp, Homo sapiens
actacaggcacgtgc

SEQ ID NO: 1316995 - DNA, 15 bp, Homo sapiens
gactacaggcacgtg

SEQ ID NO: 1316996 - DNA, 15 bp, Homo sapiens
tctgggactacaggc

SEQ ID NO: 1316997 - DNA, 15 bp, Homo sapiens
atctgggactacagg

SEQ ID NO: 1316998 - DNA, 15 bp, Homo sapiens
tatctgggactacag

SEQ ID NO: 1316999 - DNA, 15 bp, Homo sapiens
gtatctgggactaca

SEQ ID NO: 1317000 - DNA, 15 bp, Homo sapiens
agtatctgggactac

SEQ ID NO: 1317001 - DNA, 15 bp, Homo sapiens
gagtatctgggacta

SEQ ID NO: 1317002 - DNA, 15 bp, Homo sapiens
cgagtatctgggact

SEQ ID NO: 1317003 - DNA, 15 bp, Homo sapiens
ccgagtatctgggac

SEQ ID NO: 1317004 - DNA, 15 bp, Homo sapiens
tccgagtatctggga

SEQ ID NO: 1317005 - DNA, 15 bp, Homo sapiens
ttccgagtatctggg

SEQ ID NO: 1317006 - DNA, 15 bp, Homo sapiens
cttccgagtatctgg

SEQ ID NO: 1317007 - DNA, 15 bp, Homo sapiens
ccttccgagtatctg

SEQ ID NO: 1317008 - DNA, 15 bp, Homo sapiens
gccttccgagtatct

SEQ ID NO: 1317009 - DNA, 15 bp, Homo sapiens
agccttccgagtatc

SEQ ID NO: 1317010 - DNA, 15 bp, Homo sapiens
cagccttccgagtat

SEQ ID NO: 1317011 - DNA, 15 bp, Homo sapiens
tcagccttccgagta

SEQ ID NO: 1317012 - DNA, 15 bp, Homo sapiens
ctcagccttccgagt

SEQ ID NO: 1317013 - DNA, 15 bp, Homo sapiens
cctcagccttccgag

SEQ ID NO: 1317014 - DNA, 15 bp, Homo sapiens
gcctcagccttccga

SEQ ID NO: 1317015 - DNA, 15 bp, Homo sapiens
tgcctcagccttccg

SEQ ID NO: 1317016 - DNA, 15 bp, Homo sapiens
agccattctcctgcc

SEQ ID NO: 1317017 - DNA, 15 bp, Homo sapiens
aagccattctcctgc

SEQ ID NO: 1317018 - DNA, 15 bp, Homo sapiens
caagccattctcctg

SEQ ID NO: 1317019 - DNA, 15 bp, Homo sapiens
tcaagccattctcct

SEQ ID NO: 1317020 - DNA, 15 bp, Homo sapiens
ttcaagccattctcc

SEQ ID NO: 1317021 - DNA, 15 bp, Homo sapiens
gttcaagccattctc

SEQ ID NO: 1317022 - DNA, 15 bp, Homo sapiens
tgggttcaagccatt

SEQ ID NO: 1317023 - DNA, 15 bp, Homo sapiens
ctgggttcaagccat

SEQ ID NO: 1317024 - DNA, 15 bp, Homo sapiens
cctgggttcaagcca

SEQ ID NO: 1317025 - DNA, 15 bp, Homo sapiens
ccctgggttcaagcc

SEQ ID NO: 1317026 - DNA, 15 bp, Homo sapiens
cccctgggttcaagc

SEQ ID NO: 1317027 - DNA, 15 bp, Homo sapiens
ccccctgggttcaag

SEQ ID NO: 1317028 - DNA, 15 bp, Homo sapiens
gccccctgggttcaa

SEQ ID NO: 1317029 - DNA, 15 bp, Homo sapiens
cctccgccccctggg

SEQ ID NO: 1317030 - DNA, 15 bp, Homo sapiens
acctccgccccctgg

SEQ ID NO: 1317031 - DNA, 15 bp, Homo sapiens
aacctccgccccctg

SEQ ID NO: 1317032 - DNA, 15 bp, Homo sapiens
caacctccgccccct

SEQ ID NO: 1317033 - DNA, 15 bp, Homo sapiens
gatggagactcactc

SEQ ID NO: 1317034 - DNA, 15 bp, Homo sapiens
agatggagactcact

SEQ ID NO: 1317035 - DNA, 15 bp, Homo sapiens
gagatggagactcac

SEQ ID NO: 1317036 - DNA, 15 bp, Homo sapiens
tgagatggagactca

SEQ ID NO: 1317037 - DNA, 15 bp, Homo sapiens
ttgagatggagactc

SEQ ID NO: 1317038 - DNA, 15 bp, Homo sapiens
tttgagatggagact

SEQ ID NO: 1317039 - DNA, 15 bp, Homo sapiens
ttttgagatggagac

SEQ ID NO: 1317040 - DNA, 15 bp, Homo sapiens
tttttgagatggaga

SEQ ID NO: 1317041 - DNA, 15 bp, Homo sapiens
gtttttttgtttttg

SEQ ID NO: 1317042 - DNA, 15 bp, Homo sapiens
gtttgtttttttgtt

SEQ ID NO: 1317043 - DNA, 15 bp, Homo sapiens
tgtttgtttttttgt

SEQ ID NO: 1317044 - DNA, 15 bp, Homo sapiens
ttgtttgtttttttg

SEQ ID NO: 1317045 - DNA, 15 bp, Homo sapiens
tttgtttgttttttt

SEQ ID NO: 1317046 - DNA, 15 bp, Homo sapiens
gttttttttttttgt

SEQ ID NO: 1317047 - DNA, 15 bp, Homo sapiens
actgttttttttttt

SEQ ID NO: 1317048 - DNA, 15 bp, Homo sapiens
tactgtttttttttt

SEQ ID NO: 1317049 - DNA, 15 bp, Homo sapiens
ctactgttttttttt

SEQ ID NO: 1317050 - DNA, 15 bp, Homo sapiens
tctactgtttttttt

SEQ ID NO: 1317051 - DNA, 15 bp, Homo sapiens
ctctactgttttttt

SEQ ID NO: 1317052 - DNA, 15 bp, Homo sapiens
cctctactgtttttt

SEQ ID NO: 1317053 - DNA, 15 bp, Homo sapiens
gcctctactgttttt

SEQ ID NO: 1317054 - DNA, 15 bp, Homo sapiens
ggcctctactgtttt

SEQ ID NO: 1317055 - DNA, 15 bp, Homo sapiens
aggcctctactgttt

SEQ ID NO: 1317056 - DNA, 15 bp, Homo sapiens
caggcctctactgtt

SEQ ID NO: 1317057 - DNA, 15 bp, Homo sapiens
gcaggcctctactgt

SEQ ID NO: 1317058 - DNA, 15 bp, Homo sapiens
agcaggcctctactg

SEQ ID NO: 1317059 - DNA, 15 bp, Homo sapiens
cagcaggcctctact

SEQ ID NO: 1317060 - DNA, 15 bp, Homo sapiens
acagcaggcctctac

SEQ ID NO: 1317061 - DNA, 15 bp, Homo sapiens
cacagcaggcctcta

SEQ ID NO: 1317062 - DNA, 15 bp, Homo sapiens
ccacagcaggcctct

SEQ ID NO: 1317063 - DNA, 15 bp, Homo sapiens
gccacagcaggcctc

SEQ ID NO: 1317064 - DNA, 15 bp, Homo sapiens
agccacagcaggcct

SEQ ID NO: 1317065 - DNA, 15 bp, Homo sapiens
gagccacagcaggcc

SEQ ID NO: 1317066 - DNA, 15 bp, Homo sapiens
tgagccacagcaggc

SEQ ID NO: 1317067 - DNA, 15 bp, Homo sapiens
gtgagccacagcagg

SEQ ID NO: 1317068 - DNA, 15 bp, Homo sapiens
tgtgagccacagcag

SEQ ID NO: 1317069 - DNA, 15 bp, Homo sapiens
gtgtgagccacagca

SEQ ID NO: 1317070 - DNA, 15 bp, Homo sapiens
tttgctgggattaca

SEQ ID NO: 1317071 - DNA, 15 bp, Homo sapiens
ctttgctgggattac

SEQ ID NO: 1317072 - DNA, 15 bp, Homo sapiens
tctttgctgggatta

SEQ ID NO: 1317073 - DNA, 15 bp, Homo sapiens
ctctttgctgggatt

SEQ ID NO: 1317074 - DNA, 15 bp, Homo sapiens
cctctttgctgggat

SEQ ID NO: 1317075 - DNA, 15 bp, Homo sapiens
gcctctttgctggga

SEQ ID NO: 1317076 - DNA, 15 bp, Homo sapiens
agcctctttgctggg

SEQ ID NO: 1317077 - DNA, 15 bp, Homo sapiens
cagcctctttgctgg

SEQ ID NO: 1317078 - DNA, 15 bp, Homo sapiens
tcagcctctttgctg

SEQ ID NO: 1317079 - DNA, 15 bp, Homo sapiens
ttcagcctctttgct

SEQ ID NO: 1317080 - DNA, 15 bp, Homo sapiens
cttcagcctctttgc

SEQ ID NO: 1317081 - DNA, 15 bp, Homo sapiens
gcttcagcctctttg

SEQ ID NO: 1317082 - DNA, 15 bp, Homo sapiens
tgcttcagcctcttt

SEQ ID NO: 1317083 - DNA, 15 bp, Homo sapiens
ctgcttcagcctctt

SEQ ID NO: 1317084 - DNA, 15 bp, Homo sapiens
tctgcttcagcctct

SEQ ID NO: 1317085 - DNA, 15 bp, Homo sapiens
ccttctgcttcagcc

SEQ ID NO: 1317086 - DNA, 15 bp, Homo sapiens
tccttctgcttcagc

SEQ ID NO: 1317087 - DNA, 15 bp, Homo sapiens
atccttctgcttcag

SEQ ID NO: 1317088 - DNA, 15 bp, Homo sapiens
aatccttctgcttca

SEQ ID NO: 1317089 - DNA, 15 bp, Homo sapiens
caatccttctgcttc

SEQ ID NO: 1317090 - DNA, 15 bp, Homo sapiens
tcaatccttctgctt

SEQ ID NO: 1317091 - DNA, 15 bp, Homo sapiens
atcaatccttctgct

SEQ ID NO: 1317092 - DNA, 15 bp, Homo sapiens
aatcaatccttctgc

SEQ ID NO: 1317093 - DNA, 15 bp, Homo sapiens
aaatcaatccttctg

SEQ ID NO: 1317094 - DNA, 15 bp, Homo sapiens
gaaatcaatccttct

SEQ ID NO: 1317095 - DNA, 15 bp, Homo sapiens
agaaatcaatccttc

SEQ ID NO: 1317096 - DNA, 15 bp, Homo sapiens
cagaaatcaatcctt

SEQ ID NO: 1317097 - DNA, 15 bp, Homo sapiens
ccagaaatcaatcct

SEQ ID NO: 1317098 - DNA, 15 bp, Homo sapiens
tccagaaatcaatcc

SEQ ID NO: 1317099 - DNA, 15 bp, Homo sapiens
ctccagaaatcaatc

SEQ ID NO: 1317100 - DNA, 15 bp, Homo sapiens
gctccagaaatcaat

SEQ ID NO: 1317101 - DNA, 15 bp, Homo sapiens
ggctccagaaatcaa

SEQ ID NO: 1317102 - DNA, 15 bp, Homo sapiens
gggctccagaaatca

SEQ ID NO: 1317103 - DNA, 15 bp, Homo sapiens
tgggctccagaaatc

SEQ ID NO: 1317104 - DNA, 15 bp, Homo sapiens
ctgggctccagaaat

SEQ ID NO: 1317105 - DNA, 15 bp, Homo sapiens
cctgggctccagaaa

SEQ ID NO: 1317106 - DNA, 15 bp, Homo sapiens
tcctgggctccagaa

SEQ ID NO: 1317107 - DNA, 15 bp, Homo sapiens
ctcctgggctccaga

SEQ ID NO: 1317108 - DNA, 15 bp, Homo sapiens
aaactcctgggctcc

SEQ ID NO: 1317109 - DNA, 15 bp, Homo sapiens
ccaaactcctgggct

SEQ ID NO: 1317110 - DNA, 15 bp, Homo sapiens
cccaaactcctgggc

SEQ ID NO: 1317111 - DNA, 15 bp, Homo sapiens
ccccaaactcctggg

SEQ ID NO: 1317112 - DNA, 15 bp, Homo sapiens
gccccaaactcctgg

SEQ ID NO: 1317113 - DNA, 15 bp, Homo sapiens
agccccaaactcctg

SEQ ID NO: 1317114 - DNA, 15 bp, Homo sapiens
cagccccaaactcct

SEQ ID NO: 1317115 - DNA, 15 bp, Homo sapiens
gcagccccaaactcc

SEQ ID NO: 1317116 - DNA, 15 bp, Homo sapiens
tgcagccccaaactc

SEQ ID NO: 1317117 - DNA, 15 bp, Homo sapiens
ctgcagccccaaact

SEQ ID NO: 1317118 - DNA, 15 bp, Homo sapiens
actgcagccccaaac

SEQ ID NO: 1317119 - DNA, 15 bp, Homo sapiens
tactgcagccccaaa

SEQ ID NO: 1317120 - DNA, 15 bp, Homo sapiens
ctactgcagccccaa

SEQ ID NO: 1317121 - DNA, 15 bp, Homo sapiens
cctactgcagcccca

SEQ ID NO: 1317122 - DNA, 15 bp, Homo sapiens
gcctactgcagcccc

SEQ ID NO: 1317123 - DNA, 15 bp, Homo sapiens
ggcctactgcagccc

SEQ ID NO: 1317124 - DNA, 15 bp, Homo sapiens
tggcctactgcagcc

SEQ ID NO: 1317125 - DNA, 15 bp, Homo sapiens
atggcctactgcagc

SEQ ID NO: 1317126 - DNA, 15 bp, Homo sapiens
catggcctactgcag

SEQ ID NO: 1317127 - DNA, 15 bp, Homo sapiens
gcatggcctactgca

SEQ ID NO: 1317128 - DNA, 15 bp, Homo sapiens
ggcatggcctactgc

SEQ ID NO: 1317129 - DNA, 15 bp, Homo sapiens
tggcatggcctactg

SEQ ID NO: 1317130 - DNA, 15 bp, Homo sapiens
gtggcatggcctact

SEQ ID NO: 1317131 - DNA, 15 bp, Homo sapiens
cagtggcatggccta

SEQ ID NO: 1317132 - DNA, 15 bp, Homo sapiens
acagtggcatggcct

SEQ ID NO: 1317133 - DNA, 15 bp, Homo sapiens
tacagtggcatggcc

SEQ ID NO: 1317134 - DNA, 15 bp, Homo sapiens
gtacagtggcatggc

SEQ ID NO: 1317135 - DNA, 15 bp, Homo sapiens
agtacagtggcatgg

SEQ ID NO: 1317136 - DNA, 15 bp, Homo sapiens
aagtacagtggcatg

SEQ ID NO: 1317137 - DNA, 15 bp, Homo sapiens
gaagtacagtggcat

SEQ ID NO: 1317138 - DNA, 15 bp, Homo sapiens
tgaagtacagtggca

SEQ ID NO: 1317139 - DNA, 15 bp, Homo sapiens
ctgaagtacagtggc

SEQ ID NO: 1317140 - DNA, 15 bp, Homo sapiens
gctgaagtacagtgg

SEQ ID NO: 1317141 - DNA, 15 bp, Homo sapiens
ggctgaagtacagtg

SEQ ID NO: 1317142 - DNA, 15 bp, Homo sapiens
aggctgaagtacagt

SEQ ID NO: 1317143 - DNA, 15 bp, Homo sapiens
caggctgaagtacag

SEQ ID NO: 1317144 - DNA, 15 bp, Homo sapiens
ccaggctgaagtaca

SEQ ID NO: 1317145 - DNA, 15 bp, Homo sapiens
cccaggctgaagtac

SEQ ID NO: 1317146 - DNA, 15 bp, Homo sapiens
acccaggctgaagta

SEQ ID NO: 1317147 - DNA, 15 bp, Homo sapiens
gctgtcacccaggct

SEQ ID NO: 1317148 - DNA, 15 bp, Homo sapiens
ggctgtcacccaggc

SEQ ID NO: 1317149 - DNA, 15 bp, Homo sapiens
gggctgtcacccagg

SEQ ID NO: 1317150 - DNA, 15 bp, Homo sapiens
tgggctgtcacccag

SEQ ID NO: 1317151 - DNA, 15 bp, Homo sapiens
ttgggctgtcaccca

SEQ ID NO: 1317152 - DNA, 15 bp, Homo sapiens
gttgggctgtcaccc

SEQ ID NO: 1317153 - DNA, 15 bp, Homo sapiens
agttgggctgtcacc

SEQ ID NO: 1317154 - DNA, 15 bp, Homo sapiens
gagttgggctgtcac

SEQ ID NO: 1317155 - DNA, 15 bp, Homo sapiens
agagttgggctgtca

SEQ ID NO: 1317156 - DNA, 15 bp, Homo sapiens
tagagttgggctgtc

SEQ ID NO: 1317157 - DNA, 15 bp, Homo sapiens
ttagagttgggctgt

SEQ ID NO: 1317158 - DNA, 15 bp, Homo sapiens
gttagagttgggctg

SEQ ID NO: 1317159 - DNA, 15 bp, Homo sapiens
tgttagagttgggct

SEQ ID NO: 1317160 - DNA, 15 bp, Homo sapiens
ttgttagagttgggc

SEQ ID NO: 1317161 - DNA, 15 bp, Homo sapiens
attgttagagttggg

SEQ ID NO: 1317162 - DNA, 15 bp, Homo sapiens
aattgttagagttgg

SEQ ID NO: 1317163 - DNA, 15 bp, Homo sapiens
taattgttagagttg

SEQ ID NO: 1317164 - DNA, 15 bp, Homo sapiens
ttaattgttagagtt

SEQ ID NO: 1317165 - DNA, 15 bp, Homo sapiens
tttaattgttagagt

SEQ ID NO: 1317166 - DNA, 15 bp, Homo sapiens
ttttaattgttagag

SEQ ID NO: 1317167 - DNA, 15 bp, Homo sapiens
attttaattgttaga

SEQ ID NO: 1317168 - DNA, 15 bp, Homo sapiens
tattttaattgttag

SEQ ID NO: 1317169 - DNA, 15 bp, Homo sapiens
ttattttaattgtta

SEQ ID NO: 1317170 - DNA, 15 bp, Homo sapiens
tttattttaattgtt

SEQ ID NO: 1317171 - DNA, 15 bp, Homo sapiens
ttttattttaattgt

SEQ ID NO: 1317172 - DNA, 15 bp, Homo sapiens
attttattttaattg

SEQ ID NO: 1317173 - DNA, 15 bp, Homo sapiens
tattttattttaatt

SEQ ID NO: 1317174 - DNA, 15 bp, Homo sapiens
ttattttattttaat

SEQ ID NO: 1317175 - DNA, 15 bp, Homo sapiens
attattttattttaa

SEQ ID NO: 1317176 - DNA, 15 bp, Homo sapiens
tattattttatttta

SEQ ID NO: 1317177 - DNA, 15 bp, Homo sapiens
atattattttatttt

SEQ ID NO: 1317178 - DNA, 15 bp, Homo sapiens
tatattattttattt

SEQ ID NO: 1317179 - DNA, 15 bp, Homo sapiens
aatatattattttat

SEQ ID NO: 1317180 - DNA, 15 bp, Homo sapiens
aaatatattatttta

SEQ ID NO: 1317181 - DNA, 15 bp, Homo sapiens
taaatatattatttt

SEQ ID NO: 1317182 - DNA, 15 bp, Homo sapiens
ttaaatatattattt

SEQ ID NO: 1317183 - DNA, 15 bp, Homo sapiens
tttaaatatattatt

SEQ ID NO: 1317184 - DNA, 15 bp, Homo sapiens
ttttaaatatattat

SEQ ID NO: 1317185 - DNA, 15 bp, Homo sapiens
tttttaaatatatta

SEQ ID NO: 1317186 - DNA, 15 bp, Homo sapiens
atttttaaatatatt

SEQ ID NO: 1317187 - DNA, 15 bp, Homo sapiens
tatttttaaatatat

SEQ ID NO: 1317188 - DNA, 15 bp, Homo sapiens
gctatttttaaatat

SEQ ID NO: 1317189 - DNA, 15 bp, Homo sapiens
tgctatttttaaata

SEQ ID NO: 1317190 - DNA, 15 bp, Homo sapiens
ctgctatttttaaat

SEQ ID NO: 1317191 - DNA, 15 bp, Homo sapiens
actgctatttttaaa

SEQ ID NO: 1317192 - DNA, 15 bp, Homo sapiens
tactgctatttttaa

SEQ ID NO: 1317193 - DNA, 15 bp, Homo sapiens
ctactgctattttta

SEQ ID NO: 1317194 - DNA, 15 bp, Homo sapiens
tctactgctattttt

SEQ ID NO: 1317195 - DNA, 15 bp, Homo sapiens
ctctactgctatttt

SEQ ID NO: 1317196 - DNA, 15 bp, Homo sapiens
cctctactgctattt

SEQ ID NO: 1317197 - DNA, 15 bp, Homo sapiens
gcctctactgctatt

SEQ ID NO: 1317198 - DNA, 15 bp, Homo sapiens
agcctctactgctat

SEQ ID NO: 1317199 - DNA, 15 bp, Homo sapiens
aagcctctactgcta

SEQ ID NO: 1317200 - DNA, 15 bp, Homo sapiens
aaagcctctactgct

SEQ ID NO: 1317201 - DNA, 15 bp, Homo sapiens
gaaagcctctactgc

SEQ ID NO: 1317202 - DNA, 15 bp, Homo sapiens
agaaagcctctactg

SEQ ID NO: 1317203 - DNA, 15 bp, Homo sapiens
tagaaagcctctact

SEQ ID NO: 1317204 - DNA, 15 bp, Homo sapiens
ttagaaagcctctac

SEQ ID NO: 1317205 - DNA, 15 bp, Homo sapiens
cttagaaagcctcta

SEQ ID NO: 1317206 - DNA, 15 bp, Homo sapiens
acttagaaagcctct

SEQ ID NO: 1317207 - DNA, 15 bp, Homo sapiens
tacttagaaagcctc

SEQ ID NO: 1317208 - DNA, 15 bp, Homo sapiens
atacttagaaagcct

SEQ ID NO: 1317209 - DNA, 15 bp, Homo sapiens
aatacttagaaagcc

SEQ ID NO: 1317210 - DNA, 15 bp, Homo sapiens
taatacttagaaagc

SEQ ID NO: 1317211 - DNA, 15 bp, Homo sapiens
ataatacttagaaag

SEQ ID NO: 1317212 - DNA, 15 bp, Homo sapiens
tataatacttagaaa

SEQ ID NO: 1317213 - DNA, 15 bp, Homo sapiens
atataatacttagaa

SEQ ID NO: 1317214 - DNA, 15 bp, Homo sapiens
tatataatacttaga

SEQ ID NO: 1317215 - DNA, 15 bp, Homo sapiens
ttatataatacttag

SEQ ID NO: 1317216 - DNA, 15 bp, Homo sapiens
tttatataatactta

SEQ ID NO: 1317217 - DNA, 15 bp, Homo sapiens
ttttatataatactt

SEQ ID NO: 1317218 - DNA, 15 bp, Homo sapiens
attttatataatact

SEQ ID NO: 1317219 - DNA, 15 bp, Homo sapiens
gattttatataatac

SEQ ID NO: 1317220 - DNA, 15 bp, Homo sapiens
agattttatataata

SEQ ID NO: 1317221 - DNA, 15 bp, Homo sapiens
tagattttatataat

SEQ ID NO: 1317222 - DNA, 15 bp, Homo sapiens
ctagattttatataa

SEQ ID NO: 1317223 - DNA, 15 bp, Homo sapiens
actagattttatata

SEQ ID NO: 1317224 - DNA, 15 bp, Homo sapiens
cactagattttatat

SEQ ID NO: 1317225 - DNA, 15 bp, Homo sapiens
acactagattttata

SEQ ID NO: 1317226 - DNA, 15 bp, Homo sapiens
aacactagattttat

SEQ ID NO: 1317227 - DNA, 15 bp, Homo sapiens
aaacactagatttta

SEQ ID NO: 1317228 - DNA, 15 bp, Homo sapiens
taaacactagatttt

SEQ ID NO: 1317229 - DNA, 15 bp, Homo sapiens
ttaaacactagattt

SEQ ID NO: 1317230 - DNA, 15 bp, Homo sapiens
tttaaacactagatt

SEQ ID NO: 1317231 - DNA, 15 bp, Homo sapiens
ttttaaacactagat

SEQ ID NO: 1317232 - DNA, 15 bp, Homo sapiens
tttttaaacactaga

SEQ ID NO: 1317233 - DNA, 15 bp, Homo sapiens
ttttttaaacactag

SEQ ID NO: 1317234 - DNA, 15 bp, Homo sapiens
tttttttaaacacta

SEQ ID NO: 1317235 - DNA, 15 bp, Homo sapiens
ctttttttaaacact

SEQ ID NO: 1317236 - DNA, 15 bp, Homo sapiens
tctttttttaaacac

SEQ ID NO: 1317237 - DNA, 15 bp, Homo sapiens
atctttttttaaaca

SEQ ID NO: 1317238 - DNA, 15 bp, Homo sapiens
tatctttttttaaac

SEQ ID NO: 1317239 - DNA, 15 bp, Homo sapiens
ctatctttttttaaa

SEQ ID NO: 1317240 - DNA, 15 bp, Homo sapiens
cctatctttttttaa

SEQ ID NO: 1317241 - DNA, 15 bp, Homo sapiens
acctatcttttttta

SEQ ID NO: 1317242 - DNA, 15 bp, Homo sapiens
aacctatcttttttt

SEQ ID NO: 1317243 - DNA, 15 bp, Homo sapiens
aaacctatctttttt

SEQ ID NO: 1317244 - DNA, 15 bp, Homo sapiens
caaacctatcttttt

SEQ ID NO: 1317245 - DNA, 15 bp, Homo sapiens
tcaaacctatctttt

SEQ ID NO: 1317246 - DNA, 15 bp, Homo sapiens
gtcaaacctatcttt

SEQ ID NO: 1317247 - DNA, 15 bp, Homo sapiens
agtcaaacctatctt

SEQ ID NO: 1317248 - DNA, 15 bp, Homo sapiens
tagtcaaacctatct

SEQ ID NO: 1317249 - DNA, 15 bp, Homo sapiens
ttagtcaaacctatc

SEQ ID NO: 1317250 - DNA, 15 bp, Homo sapiens
tttagtcaaacctat

SEQ ID NO: 1317251 - DNA, 15 bp, Homo sapiens
atttagtcaaaccta

SEQ ID NO: 1317252 - DNA, 15 bp, Homo sapiens
tatttagtcaaacct

SEQ ID NO: 1317253 - DNA, 15 bp, Homo sapiens
ttatttagtcaaacc

SEQ ID NO: 1317254 - DNA, 15 bp, Homo sapiens
attatttagtcaaac

SEQ ID NO: 1317255 - DNA, 15 bp, Homo sapiens
aattatttagtcaaa

SEQ ID NO: 1317256 - DNA, 15 bp, Homo sapiens
aaattatttagtcaa

SEQ ID NO: 1317257 - DNA, 15 bp, Homo sapiens
aaaattatttagtca

SEQ ID NO: 1317258 - DNA, 15 bp, Homo sapiens
caaaattatttagtc

SEQ ID NO: 1317259 - DNA, 15 bp, Homo sapiens
acaaaattatttagt

SEQ ID NO: 1317260 - DNA, 15 bp, Homo sapiens
aacaaaattatttag

SEQ ID NO: 1317261 - DNA, 15 bp, Homo sapiens
caacaaaattattta

SEQ ID NO: 1317262 - DNA, 15 bp, Homo sapiens
gcaacaaaattattt

SEQ ID NO: 1317263 - DNA, 15 bp, Homo sapiens
tgcaacaaaattatt

SEQ ID NO: 1317264 - DNA, 15 bp, Homo sapiens
ttgcaacaaaattat

SEQ ID NO: 1317265 - DNA, 15 bp, Homo sapiens
cttgcaacaaaatta

SEQ ID NO: 1317266 - DNA, 15 bp, Homo sapiens
tcttgcaacaaaatt

SEQ ID NO: 1317267 - DNA, 15 bp, Homo sapiens
ttcttgcaacaaaat

SEQ ID NO: 1317268 - DNA, 15 bp, Homo sapiens
gttcttgcaacaaaa

SEQ ID NO: 1317269 - DNA, 15 bp, Homo sapiens
tgttcttgcaacaaa

SEQ ID NO: 1317270 - DNA, 15 bp, Homo sapiens
ttgttcttgcaacaa

SEQ ID NO: 1317271 - DNA, 15 bp, Homo sapiens
gttgttcttgcaaca

SEQ ID NO: 1317272 - DNA, 15 bp, Homo sapiens
tgttgttcttgcaac

SEQ ID NO: 1317273 - DNA, 15 bp, Homo sapiens
atgttgttcttgcaa

SEQ ID NO: 1317274 - DNA, 15 bp, Homo sapiens
tatgttgttcttgca

SEQ ID NO: 1317275 - DNA, 15 bp, Homo sapiens
ttatgttgttcttgc

SEQ ID NO: 1317276 - DNA, 15 bp, Homo sapiens
tttatgttgttcttg

SEQ ID NO: 1317277 - DNA, 15 bp, Homo sapiens
ctttatgttgttctt

SEQ ID NO: 1317278 - DNA, 15 bp, Homo sapiens
actttatgttgttct

SEQ ID NO: 1317279 - DNA, 15 bp, Homo sapiens
cactttatgttgttc

SEQ ID NO: 1317280 - DNA, 15 bp, Homo sapiens
ccactttatgttgtt

SEQ ID NO: 1317281 - DNA, 15 bp, Homo sapiens
tccactttatgttgt

SEQ ID NO: 1317282 - DNA, 15 bp, Homo sapiens
ttccactttatgttg

SEQ ID NO: 1317283 - DNA, 15 bp, Homo sapiens
attccactttatgtt

SEQ ID NO: 1317284 - DNA, 15 bp, Homo sapiens
cattccactttatgt

SEQ ID NO: 1317285 - DNA, 15 bp, Homo sapiens
tcattccactttatg

SEQ ID NO: 1317286 - DNA, 15 bp, Homo sapiens
ttcattccactttat

SEQ ID NO: 1317287 - DNA, 15 bp, Homo sapiens
tttcattccacttta

SEQ ID NO: 1317288 - DNA, 15 bp, Homo sapiens
ttttcattccacttt

SEQ ID NO: 1317289 - DNA, 15 bp, Homo sapiens
gttttcattccactt

SEQ ID NO: 1317290 - DNA, 15 bp, Homo sapiens
tgttttcattccact

SEQ ID NO: 1317291 - DNA, 15 bp, Homo sapiens
atgttttcattccac

SEQ ID NO: 1317292 - DNA, 15 bp, Homo sapiens
gatgttttcattcca

SEQ ID NO: 1317293 - DNA, 15 bp, Homo sapiens
tgatgttttcattcc

SEQ ID NO: 1317294 - DNA, 15 bp, Homo sapiens
ctgatgttttcattc

SEQ ID NO: 1317295 - DNA, 15 bp, Homo sapiens
actgatgttttcatt

SEQ ID NO: 1317296 - DNA, 15 bp, Homo sapiens
gactgatgttttcat

SEQ ID NO: 1317297 - DNA, 15 bp, Homo sapiens
ggactgatgttttca

SEQ ID NO: 1317298 - DNA, 15 bp, Homo sapiens
tggactgatgttttc

SEQ ID NO: 1317299 - DNA, 15 bp, Homo sapiens
atggactgatgtttt

SEQ ID NO: 1317300 - DNA, 15 bp, Homo sapiens
gatggactgatgttt

SEQ ID NO: 1317301 - DNA, 15 bp, Homo sapiens
tgatggactgatgtt

SEQ ID NO: 1317302 - DNA, 15 bp, Homo sapiens
atgatggactgatgt

SEQ ID NO: 1317303 - DNA, 15 bp, Homo sapiens
tatgatggactgatg

SEQ ID NO: 1317304 - DNA, 15 bp, Homo sapiens
atatgatggactgat

SEQ ID NO: 1317305 - DNA, 15 bp, Homo sapiens
catatgatggactga

SEQ ID NO: 1317306 - DNA, 15 bp, Homo sapiens
tcatatgatggactg

SEQ ID NO: 1317307 - DNA, 15 bp, Homo sapiens
ttcatatgatggact

SEQ ID NO: 1317308 - DNA, 15 bp, Homo sapiens
attcatatgatggac

SEQ ID NO: 1317309 - DNA, 15 bp, Homo sapiens
gattcatatgatgga

SEQ ID NO: 1317310 - DNA, 15 bp, Homo sapiens
tgattcatatgatgg

SEQ ID NO: 1317311 - DNA, 15 bp, Homo sapiens
atgattcatatgatg

SEQ ID NO: 1317312 - DNA, 15 bp, Homo sapiens
tatgattcatatgat

SEQ ID NO: 1317313 - DNA, 15 bp, Homo sapiens
atatgattcatatga

SEQ ID NO: 1317314 - DNA, 15 bp, Homo sapiens
catatgattcatatg

SEQ ID NO: 1317315 - DNA, 15 bp, Homo sapiens
tcatatgattcatat

SEQ ID NO: 1317316 - DNA, 15 bp, Homo sapiens
ctcatatgattcata

SEQ ID NO: 1317317 - DNA, 15 bp, Homo sapiens
actcatatgattcat

SEQ ID NO: 1317318 - DNA, 15 bp, Homo sapiens
aactcatatgattca

SEQ ID NO: 1317319 - DNA, 15 bp, Homo sapiens
taactcatatgattc

SEQ ID NO: 1317320 - DNA, 15 bp, Homo sapiens
ataactcatatgatt

SEQ ID NO: 1317321 - DNA, 15 bp, Homo sapiens
tataactcatatgat

SEQ ID NO: 1317322 - DNA, 15 bp, Homo sapiens
ttataactcatatga

SEQ ID NO: 1317323 - DNA, 15 bp, Homo sapiens
gttataactcatatg

SEQ ID NO: 1317324 - DNA, 15 bp, Homo sapiens
tgttataactcatat

SEQ ID NO: 1317325 - DNA, 15 bp, Homo sapiens
atgttataactcata

SEQ ID NO: 1317326 - DNA, 15 bp, Homo sapiens
aatgttataactcat

SEQ ID NO: 1317327 - DNA, 15 bp, Homo sapiens
aaatgttataactca

SEQ ID NO: 1317328 - DNA, 15 bp, Homo sapiens
taaatgttataactc

SEQ ID NO: 1317329 - DNA, 15 bp, Homo sapiens
gtaaatgttataact

SEQ ID NO: 1317330 - DNA, 15 bp, Homo sapiens
tgtaaatgttataac

SEQ ID NO: 1317331 - DNA, 15 bp, Homo sapiens
ctgtaaatgttataa

SEQ ID NO: 1317332 - DNA, 15 bp, Homo sapiens
tctgtaaatgttata

SEQ ID NO: 1317333 - DNA, 15 bp, Homo sapiens
ttctgtaaatgttat

SEQ ID NO: 1317334 - DNA, 15 bp, Homo sapiens
attctgtaaatgtta

SEQ ID NO: 1317335 - DNA, 15 bp, Homo sapiens
tattctgtaaatgtt

SEQ ID NO: 1317336 - DNA, 15 bp, Homo sapiens
ctattctgtaaatgt

SEQ ID NO: 1317337 - DNA, 15 bp, Homo sapiens
actattctgtaaatg

SEQ ID NO: 1317338 - DNA, 15 bp, Homo sapiens
aactattctgtaaat

SEQ ID NO: 1317339 - DNA, 15 bp, Homo sapiens
taactattctgtaaa

SEQ ID NO: 1317340 - DNA, 15 bp, Homo sapiens
ttaactattctgtaa

SEQ ID NO: 1317341 - DNA, 15 bp, Homo sapiens
tttaactattctgta

SEQ ID NO: 1317342 - DNA, 15 bp, Homo sapiens
atttaactattctgt

SEQ ID NO: 1317343 - DNA, 15 bp, Homo sapiens
catttaactattctg

SEQ ID NO: 1317344 - DNA, 15 bp, Homo sapiens
tcatttaactattct

SEQ ID NO: 1317345 - DNA, 15 bp, Homo sapiens
gtcatttaactattc

SEQ ID NO: 1317346 - DNA, 15 bp, Homo sapiens
tgtcatttaactatt

SEQ ID NO: 1317347 - DNA, 15 bp, Homo sapiens
ttgtcatttaactat

SEQ ID NO: 1317348 - DNA, 15 bp, Homo sapiens
tttgtcatttaacta

SEQ ID NO: 1317349 - DNA, 15 bp, Homo sapiens
atttgtcatttaact

SEQ ID NO: 1317350 - DNA, 15 bp, Homo sapiens
aatttgtcatttaac

SEQ ID NO: 1317351 - DNA, 15 bp, Homo sapiens
taatttgtcatttaa

SEQ ID NO: 1317352 - DNA, 15 bp, Homo sapiens
ataatttgtcattta

SEQ ID NO: 1317353 - DNA, 15 bp, Homo sapiens
cataatttgtcattt

SEQ ID NO: 1317354 - DNA, 15 bp, Homo sapiens
ccataatttgtcatt

SEQ ID NO: 1317355 - DNA, 15 bp, Homo sapiens
tccataatttgtcat

SEQ ID NO: 1317356 - DNA, 15 bp, Homo sapiens
ttccataatttgtca

SEQ ID NO: 1317357 - DNA, 15 bp, Homo sapiens
tttccataatttgtc

SEQ ID NO: 1317358 - DNA, 15 bp, Homo sapiens
gtttccataatttgt

SEQ ID NO: 1317359 - DNA, 15 bp, Homo sapiens
tgtttccataatttg

SEQ ID NO: 1317360 - DNA, 15 bp, Homo sapiens
ttgtttccataattt

SEQ ID NO: 1317361 - DNA, 15 bp, Homo sapiens
cttgtttccataatt

SEQ ID NO: 1317362 - DNA, 15 bp, Homo sapiens
acttgtttccataat

SEQ ID NO: 1317363 - DNA, 15 bp, Homo sapiens
gacttgtttccataa

SEQ ID NO: 1317364 - DNA, 15 bp, Homo sapiens
agacttgtttccata

SEQ ID NO: 1317365 - DNA, 15 bp, Homo sapiens
cagacttgtttccat

SEQ ID NO: 1317366 - DNA, 15 bp, Homo sapiens
acagacttgtttcca

SEQ ID NO: 1317367 - DNA, 15 bp, Homo sapiens
aacagacttgtttcc

SEQ ID NO: 1317368 - DNA, 15 bp, Homo sapiens
taacagacttgtttc

SEQ ID NO: 1317369 - DNA, 15 bp, Homo sapiens
ctaacagacttgttt

SEQ ID NO: 1317370 - DNA, 15 bp, Homo sapiens
tctaacagacttgtt

SEQ ID NO: 1317371 - DNA, 15 bp, Homo sapiens
ttctaacagacttgt

SEQ ID NO: 1317372 - DNA, 15 bp, Homo sapiens
gttctaacagacttg

SEQ ID NO: 1317373 - DNA, 15 bp, Homo sapiens
tgttctaacagactt

SEQ ID NO: 1317374 - DNA, 15 bp, Homo sapiens
ttgttctaacagact

SEQ ID NO: 1317375 - DNA, 15 bp, Homo sapiens
tttgttctaacagac

SEQ ID NO: 1317376 - DNA, 15 bp, Homo sapiens
gtttgttctaacaga

SEQ ID NO: 1317377 - DNA, 15 bp, Homo sapiens
agtttgttctaacag

SEQ ID NO: 1317378 - DNA, 15 bp, Homo sapiens
tagtttgttctaaca

SEQ ID NO: 1317379 - DNA, 15 bp, Homo sapiens
ttagtttgttctaac

SEQ ID NO: 1317380 - DNA, 15 bp, Homo sapiens
gttagtttgttctaa

SEQ ID NO: 1317381 - DNA, 15 bp, Homo sapiens
tgttagtttgttcta

SEQ ID NO: 1317382 - DNA, 15 bp, Homo sapiens
ttgttagtttgttct

SEQ ID NO: 1317383 - DNA, 15 bp, Homo sapiens
tttgttagtttgttc

SEQ ID NO: 1317384 - DNA, 15 bp, Homo sapiens
ttttgttagtttgtt

SEQ ID NO: 1317385 - DNA, 15 bp, Homo sapiens
tttttgttagtttgt

SEQ ID NO: 1317386 - DNA, 15 bp, Homo sapiens
ttttttgttagtttg

SEQ ID NO: 1317387 - DNA, 15 bp, Homo sapiens
attttttgttagttt

SEQ ID NO: 1317388 - DNA, 15 bp, Homo sapiens
tattttttgttagtt

SEQ ID NO: 1317389 - DNA, 15 bp, Homo sapiens
ttattttttgttagt

SEQ ID NO: 1317390 - DNA, 15 bp, Homo sapiens
gttattttttgttag

SEQ ID NO: 1317391 - DNA, 15 bp, Homo sapiens
tgttattttttgtta

SEQ ID NO: 1317392 - DNA, 15 bp, Homo sapiens
ttgttattttttgtt

SEQ ID NO: 1317393 - DNA, 15 bp, Homo sapiens
gttgttattttttgt

SEQ ID NO: 1317394 - DNA, 15 bp, Homo sapiens
ggttgttattttttg

SEQ ID NO: 1317395 - DNA, 15 bp, Homo sapiens
gggttgttatttttt

SEQ ID NO: 1317396 - DNA, 15 bp, Homo sapiens
tgggttgttattttt

SEQ ID NO: 1317397 - DNA, 15 bp, Homo sapiens
atgggttgttatttt

SEQ ID NO: 1317398 - DNA, 15 bp, Homo sapiens
aatgggttgttattt

SEQ ID NO: 1317399 - DNA, 15 bp, Homo sapiens
gaatgggttgttatt

SEQ ID NO: 1317400 - DNA, 15 bp, Homo sapiens
tgaatgggttgttat

SEQ ID NO: 1317401 - DNA, 15 bp, Homo sapiens
ttgaatgggttgtta

SEQ ID NO: 1317402 - DNA, 15 bp, Homo sapiens
tttgaatgggttgtt

SEQ ID NO: 1317403 - DNA, 15 bp, Homo sapiens
ttttgaatgggttgt

SEQ ID NO: 1317404 - DNA, 15 bp, Homo sapiens
tttttgaatgggttg

SEQ ID NO: 1317405 - DNA, 15 bp, Homo sapiens
ctttttgaatgggtt

SEQ ID NO: 1317406 - DNA, 15 bp, Homo sapiens
cctttttgaatgggt

SEQ ID NO: 1317407 - DNA, 15 bp, Homo sapiens
acctttttgaatggg

SEQ ID NO: 1317408 - DNA, 15 bp, Homo sapiens
cacctttttgaatgg

SEQ ID NO: 1317409 - DNA, 15 bp, Homo sapiens
ccacctttttgaatg

SEQ ID NO: 1317410 - DNA, 15 bp, Homo sapiens
cccacctttttgaat

SEQ ID NO: 1317411 - DNA, 15 bp, Homo sapiens
tcccacctttttgaa

SEQ ID NO: 1317412 - DNA, 15 bp, Homo sapiens
ctcccacctttttga

SEQ ID NO: 1317413 - DNA, 15 bp, Homo sapiens
tctcccacctttttg

SEQ ID NO: 1317414 - DNA, 15 bp, Homo sapiens
atctcccaccttttt

SEQ ID NO: 1317415 - DNA, 15 bp, Homo sapiens
catctcccacctttt

SEQ ID NO: 1317416 - DNA, 15 bp, Homo sapiens
gcatctcccaccttt

SEQ ID NO: 1317417 - DNA, 15 bp, Homo sapiens
tgcatctcccacctt

SEQ ID NO: 1317418 - DNA, 15 bp, Homo sapiens
atgcatctcccacct

SEQ ID NO: 1317419 - DNA, 15 bp, Homo sapiens
gatgcatctcccacc

SEQ ID NO: 1317420 - DNA, 15 bp, Homo sapiens
agatgcatctcccac

SEQ ID NO: 1317421 - DNA, 15 bp, Homo sapiens
tagatgcatctccca

SEQ ID NO: 1317422 - DNA, 15 bp, Homo sapiens
ttagatgcatctccc

SEQ ID NO: 1317423 - DNA, 15 bp, Homo sapiens
tttagatgcatctcc

SEQ ID NO: 1317424 - DNA, 15 bp, Homo sapiens
gtttagatgcatctc

SEQ ID NO: 1317425 - DNA, 15 bp, Homo sapiens
tgtttagatgcatct

SEQ ID NO: 1317426 - DNA, 15 bp, Homo sapiens
ttgtttagatgcatc

SEQ ID NO: 1317427 - DNA, 15 bp, Homo sapiens
cttgtttagatgcat

SEQ ID NO: 1317428 - DNA, 15 bp, Homo sapiens
gcttgtttagatgca

SEQ ID NO: 1317429 - DNA, 15 bp, Homo sapiens
tgcttgtttagatgc

SEQ ID NO: 1317430 - DNA, 15 bp, Homo sapiens
atgcttgtttagatg

SEQ ID NO: 1317431 - DNA, 15 bp, Homo sapiens
tatgcttgtttagat

SEQ ID NO: 1317432 - DNA, 15 bp, Homo sapiens
atatgcttgtttaga

SEQ ID NO: 1317433 - DNA, 15 bp, Homo sapiens
gatatgcttgtttag

SEQ ID NO: 1317434 - DNA, 15 bp, Homo sapiens
tgatatgcttgttta

SEQ ID NO: 1317435 - DNA, 15 bp, Homo sapiens
atgatatgcttgttt

SEQ ID NO: 1317436 - DNA, 15 bp, Homo sapiens
aatgatatgcttgtt

SEQ ID NO: 1317437 - DNA, 15 bp, Homo sapiens
aaatgatatgcttgt

SEQ ID NO: 1317438 - DNA, 15 bp, Homo sapiens
aaaatgatatgcttg

SEQ ID NO: 1317439 - DNA, 15 bp, Homo sapiens
caaaatgatatgctt

SEQ ID NO: 1317440 - DNA, 15 bp, Homo sapiens
acaaaatgatatgct

SEQ ID NO: 1317441 - DNA, 15 bp, Homo sapiens
gacaaaatgatatgc

SEQ ID NO: 1317442 - DNA, 15 bp, Homo sapiens
ggacaaaatgatatg

SEQ ID NO: 1317443 - DNA, 15 bp, Homo sapiens
aggacaaaatgatat

SEQ ID NO: 1317444 - DNA, 15 bp, Homo sapiens
aaggacaaaatgata

SEQ ID NO: 1317445 - DNA, 15 bp, Homo sapiens
taaggacaaaatgat

SEQ ID NO: 1317446 - DNA, 15 bp, Homo sapiens
ttaaggacaaaatga

SEQ ID NO: 1317447 - DNA, 15 bp, Homo sapiens
gttaaggacaaaatg

SEQ ID NO: 1317448 - DNA, 15 bp, Homo sapiens
agttaaggacaaaat

SEQ ID NO: 1317449 - DNA, 15 bp, Homo sapiens
aagttaaggacaaaa

SEQ ID NO: 1317450 - DNA, 15 bp, Homo sapiens
taagttaaggacaaa

SEQ ID NO: 1317451 - DNA, 15 bp, Homo sapiens
ttaagttaaggacaa

SEQ ID NO: 1317452 - DNA, 15 bp, Homo sapiens
tttaagttaaggaca

SEQ ID NO: 1317453 - DNA, 15 bp, Homo sapiens
ttttaagttaaggac

SEQ ID NO: 1317454 - DNA, 15 bp, Homo sapiens
cttttaagttaagga

SEQ ID NO: 1317455 - DNA, 15 bp, Homo sapiens
acttttaagttaagg

SEQ ID NO: 1317456 - DNA, 15 bp, Homo sapiens
cacttttaagttaag

SEQ ID NO: 1317457 - DNA, 15 bp, Homo sapiens
ccacttttaagttaa

SEQ ID NO: 1317458 - DNA, 15 bp, Homo sapiens
accacttttaagtta

SEQ ID NO: 1317459 - DNA, 15 bp, Homo sapiens
aaccacttttaagtt

SEQ ID NO: 1317460 - DNA, 15 bp, Homo sapiens
gaaccacttttaagt

SEQ ID NO: 1317461 - DNA, 15 bp, Homo sapiens
agaaccacttttaag

SEQ ID NO: 1317462 - DNA, 15 bp, Homo sapiens
gagaaccacttttaa

SEQ ID NO: 1317463 - DNA, 15 bp, Homo sapiens
tgagaaccactttta

SEQ ID NO: 1317464 - DNA, 15 bp, Homo sapiens
ctgagaaccactttt

SEQ ID NO: 1317465 - DNA, 15 bp, Homo sapiens
actgagaaccacttt

SEQ ID NO: 1317466 - DNA, 15 bp, Homo sapiens
aactgagaaccactt

SEQ ID NO: 1317467 - DNA, 15 bp, Homo sapiens
aaactgagaaccact

SEQ ID NO: 1317468 - DNA, 15 bp, Homo sapiens
aaaactgagaaccac

SEQ ID NO: 1317469 - DNA, 15 bp, Homo sapiens
taaaactgagaacca

SEQ ID NO: 1317470 - DNA, 15 bp, Homo sapiens
ctaaaactgagaacc

SEQ ID NO: 1317471 - DNA, 15 bp, Homo sapiens
cctaaaactgagaac

SEQ ID NO: 1317472 - DNA, 15 bp, Homo sapiens
acctaaaactgagaa

SEQ ID NO: 1317473 - DNA, 15 bp, Homo sapiens
tacctaaaactgaga

SEQ ID NO: 1317474 - DNA, 15 bp, Homo sapiens
gtacctaaaactgag

SEQ ID NO: 1317475 - DNA, 15 bp, Homo sapiens
ggtacctaaaactga

SEQ ID NO: 1317476 - DNA, 15 bp, Homo sapiens
gggtacctaaaactg

SEQ ID NO: 1317477 - DNA, 15 bp, Homo sapiens
tgggtacctaaaact

SEQ ID NO: 1317478 - DNA, 15 bp, Homo sapiens
ttgggtacctaaaac

SEQ ID NO: 1317479 - DNA, 15 bp, Homo sapiens
tttgggtacctaaaa

SEQ ID NO: 1317480 - DNA, 15 bp, Homo sapiens
atttgggtacctaaa

SEQ ID NO: 1317481 - DNA, 15 bp, Homo sapiens
aatttgggtacctaa

SEQ ID NO: 1317482 - DNA, 15 bp, Homo sapiens
aaatttgggtaccta

SEQ ID NO: 1317483 - DNA, 15 bp, Homo sapiens
taaatttgggtacct

SEQ ID NO: 1317484 - DNA, 15 bp, Homo sapiens
ttaaatttgggtacc

SEQ ID NO: 1317485 - DNA, 15 bp, Homo sapiens
attaaatttgggtac

SEQ ID NO: 1317486 - DNA, 15 bp, Homo sapiens
tattaaatttgggta

SEQ ID NO: 1317487 - DNA, 15 bp, Homo sapiens
atattaaatttgggt

SEQ ID NO: 1317488 - DNA, 15 bp, Homo sapiens
aatattaaatttggg

SEQ ID NO: 1317489 - DNA, 15 bp, Homo sapiens
aaatattaaatttgg

SEQ ID NO: 1317490 - DNA, 15 bp, Homo sapiens
caaatattaaatttg

SEQ ID NO: 1317491 - DNA, 15 bp, Homo sapiens
acaaatattaaattt

SEQ ID NO: 1317492 - DNA, 15 bp, Homo sapiens
tacaaatattaaatt

SEQ ID NO: 1317493 - DNA, 15 bp, Homo sapiens
atacaaatattaaat

SEQ ID NO: 1317494 - DNA, 15 bp, Homo sapiens
aatacaaatattaaa

SEQ ID NO: 1317495 - DNA, 15 bp, Homo sapiens
aaatacaaatattaa

SEQ ID NO: 1317496 - DNA, 15 bp, Homo sapiens
aaaaaatacaaatat

SEQ ID NO: 1317497 - DNA, 15 bp, Homo sapiens
aaaaaaatacaaata

SEQ ID NO: 1317498 - DNA, 15 bp, Homo sapiens
aaaaaaaatacaaat

SEQ ID NO: 1317499 - DNA, 15 bp, Homo sapiens
taaaaaaaatacaaa

SEQ ID NO: 1317500 - DNA, 15 bp, Homo sapiens
ttaaaaaaaatacaa

SEQ ID NO: 1317501 - DNA, 15 bp, Homo sapiens
cttaaaaaaaataca

SEQ ID NO: 1317502 - DNA, 15 bp, Homo sapiens
acttaaaaaaaatac

SEQ ID NO: 1317503 - DNA, 15 bp, Homo sapiens
aacttaaaaaaaata

SEQ ID NO: 1317504 - DNA, 15 bp, Homo sapiens
aaacttaaaaaaaat

SEQ ID NO: 1317505 - DNA, 15 bp, Homo sapiens
aaaacttaaaaaaaa

SEQ ID NO: 1317506 - DNA, 15 bp, Homo sapiens
caaaacttaaaaaaa

SEQ ID NO: 1317507 - DNA, 15 bp, Homo sapiens
ccaaaacttaaaaaa

SEQ ID NO: 1317508 - DNA, 15 bp, Homo sapiens
gccaaaacttaaaaa

SEQ ID NO: 1317509 - DNA, 15 bp, Homo sapiens
ggccaaaacttaaaa

SEQ ID NO: 1317510 - DNA, 15 bp, Homo sapiens
aggccaaaacttaaa

SEQ ID NO: 1317511 - DNA, 15 bp, Homo sapiens
aaggccaaaacttaa

SEQ ID NO: 1317512 - DNA, 15 bp, Homo sapiens
gaaggccaaaactta

SEQ ID NO: 1317513 - DNA, 15 bp, Homo sapiens
tgaaggccaaaactt

SEQ ID NO: 1317514 - DNA, 15 bp, Homo sapiens
ttgaaggccaaaact

SEQ ID NO: 1317515 - DNA, 15 bp, Homo sapiens
tttgaaggccaaaac

SEQ ID NO: 1317516 - DNA, 15 bp, Homo sapiens
ttttgaaggccaaaa

SEQ ID NO: 1317517 - DNA, 15 bp, Homo sapiens
attttgaaggccaaa

SEQ ID NO: 1317518 - DNA, 15 bp, Homo sapiens
tattttgaaggccaa

SEQ ID NO: 1317519 - DNA, 15 bp, Homo sapiens
ttattttgaaggcca

SEQ ID NO: 1317520 - DNA, 15 bp, Homo sapiens
tttattttgaaggcc

SEQ ID NO: 1317521 - DNA, 15 bp, Homo sapiens
ttttattttgaaggc

SEQ ID NO: 1317522 - DNA, 15 bp, Homo sapiens
tttttattttgaagg

SEQ ID NO: 1317523 - DNA, 15 bp, Homo sapiens
atttttattttgaag

SEQ ID NO: 1317524 - DNA, 15 bp, Homo sapiens
tcatttttattttga

SEQ ID NO: 1317525 - DNA, 15 bp, Homo sapiens
gtcatttttattttg

SEQ ID NO: 1317526 - DNA, 15 bp, Homo sapiens
agtcatttttatttt

SEQ ID NO: 1317527 - DNA, 15 bp, Homo sapiens
tagtcatttttattt

SEQ ID NO: 1317528 - DNA, 15 bp, Homo sapiens
atagtcatttttatt

SEQ ID NO: 1317529 - DNA, 15 bp, Homo sapiens
tatagtcatttttat

SEQ ID NO: 1317530 - DNA, 15 bp, Homo sapiens
gtatagtcattttta

SEQ ID NO: 1317531 - DNA, 15 bp, Homo sapiens
tgtatagtcattttt

SEQ ID NO: 1317532 - DNA, 15 bp, Homo sapiens
atgtatagtcatttt

SEQ ID NO: 1317533 - DNA, 15 bp, Homo sapiens
aatgtatagtcattt

SEQ ID NO: 1317534 - DNA, 15 bp, Homo sapiens
aaatgtatagtcatt

SEQ ID NO: 1317535 - DNA, 15 bp, Homo sapiens
caaatgtatagtcat

SEQ ID NO: 1317536 - DNA, 15 bp, Homo sapiens
tcaaatgtatagtca

SEQ ID NO: 1317537 - DNA, 15 bp, Homo sapiens
atcaaatgtatagtc

SEQ ID NO: 1317538 - DNA, 15 bp, Homo sapiens
aatcaaatgtatagt

SEQ ID NO: 1317539 - DNA, 15 bp, Homo sapiens
taatcaaatgtatag

SEQ ID NO: 1317540 - DNA, 15 bp, Homo sapiens
ctaatcaaatgtata

SEQ ID NO: 1317541 - DNA, 15 bp, Homo sapiens
tctaatcaaatgtat

SEQ ID NO: 1317542 - DNA, 15 bp, Homo sapiens
gtctaatcaaatgta

SEQ ID NO: 1317543 - DNA, 15 bp, Homo sapiens
agtctaatcaaatgt

SEQ ID NO: 1317544 - DNA, 15 bp, Homo sapiens
aagtctaatcaaatg

SEQ ID NO: 1317545 - DNA, 15 bp, Homo sapiens
gaagtctaatcaaat

SEQ ID NO: 1317546 - DNA, 15 bp, Homo sapiens
agaagtctaatcaaa

SEQ ID NO: 1317547 - DNA, 15 bp, Homo sapiens
aagaagtctaatcaa

SEQ ID NO: 1317548 - DNA, 15 bp, Homo sapiens
aaagaagtctaatca

SEQ ID NO: 1317549 - DNA, 15 bp, Homo sapiens
gaaagaagtctaatc

SEQ ID NO: 1317550 - DNA, 15 bp, Homo sapiens
agaaagaagtctaat

SEQ ID NO: 1317551 - DNA, 15 bp, Homo sapiens
aagaaagaagtctaa

SEQ ID NO: 1317552 - DNA, 15 bp, Homo sapiens
aaagaaagaagtcta

SEQ ID NO: 1317553 - DNA, 15 bp, Homo sapiens
aaaagaaagaagtct

SEQ ID NO: 1317554 - DNA, 15 bp, Homo sapiens
gaaaagaaagaagtc

SEQ ID NO: 1317555 - DNA, 15 bp, Homo sapiens
agaaaagaaagaagt

SEQ ID NO: 1317556 - DNA, 15 bp, Homo sapiens
aagaaaagaaagaag

SEQ ID NO: 1317557 - DNA, 15 bp, Homo sapiens
taaaaagaaaagaaa

SEQ ID NO: 1317558 - DNA, 15 bp, Homo sapiens
ataaaaagaaaagaa

SEQ ID NO: 1317559 - DNA, 15 bp, Homo sapiens
aataaaaagaaaaga

SEQ ID NO: 1317560 - DNA, 15 bp, Homo sapiens
taataaaaagaaaag

SEQ ID NO: 1317561 - DNA, 15 bp, Homo sapiens
ataataaaaagaaaa

SEQ ID NO: 1317562 - DNA, 15 bp, Homo sapiens
tataataaaaagaaa

SEQ ID NO: 1317563 - DNA, 15 bp, Homo sapiens
ctataataaaaagaa

SEQ ID NO: 1317564 - DNA, 15 bp, Homo sapiens
tctataataaaaaga

SEQ ID NO: 1317565 - DNA, 15 bp, Homo sapiens
atctataataaaaag

SEQ ID NO: 1317566 - DNA, 15 bp, Homo sapiens
catctataataaaaa

SEQ ID NO: 1317567 - DNA, 15 bp, Homo sapiens
tcatctataataaaa

SEQ ID NO: 1317568 - DNA, 15 bp, Homo sapiens
aatcatctataataa

SEQ ID NO: 1317569 - DNA, 15 bp, Homo sapiens
caatcatctataata

SEQ ID NO: 1317570 - DNA, 15 bp, Homo sapiens
tcaatcatctataat

SEQ ID NO: 1317571 - DNA, 15 bp, Homo sapiens
atcaatcatctataa

SEQ ID NO: 1317572 - DNA, 15 bp, Homo sapiens
aatcaatcatctata

SEQ ID NO: 1317573 - DNA, 15 bp, Homo sapiens
aaatcaatcatctat

SEQ ID NO: 1317574 - DNA, 15 bp, Homo sapiens
aaaatcaatcatcta

SEQ ID NO: 1317575 - DNA, 15 bp, Homo sapiens
aaaaatcaatcatct

SEQ ID NO: 1317576 - DNA, 15 bp, Homo sapiens
taaaaatcaatcatc

SEQ ID NO: 1317577 - DNA, 15 bp, Homo sapiens
ttaaaaatcaatcat

SEQ ID NO: 1317578 - DNA, 15 bp, Homo sapiens
cttaaaaatcaatca

SEQ ID NO: 1317579 - DNA, 15 bp, Homo sapiens
ccttaaaaatcaatc

SEQ ID NO: 1317580 - DNA, 15 bp, Homo sapiens
tccttaaaaatcaat

SEQ ID NO: 1317581 - DNA, 15 bp, Homo sapiens
gtccttaaaaatcaa

SEQ ID NO: 1317582 - DNA, 15 bp, Homo sapiens
agtccttaaaaatca

SEQ ID NO: 1317583 - DNA, 15 bp, Homo sapiens
tagtccttaaaaatc

SEQ ID NO: 1317584 - DNA, 15 bp, Homo sapiens
ctagtccttaaaaat

SEQ ID NO: 1317585 - DNA, 15 bp, Homo sapiens
actagtccttaaaaa

SEQ ID NO: 1317586 - DNA, 15 bp, Homo sapiens
cactagtccttaaaa

SEQ ID NO: 1317587 - DNA, 15 bp, Homo sapiens
gcactagtccttaaa

SEQ ID NO: 1317588 - DNA, 15 bp, Homo sapiens
agcactagtccttaa

SEQ ID NO: 1317589 - DNA, 15 bp, Homo sapiens
tagcactagtcctta

SEQ ID NO: 1317590 - DNA, 15 bp, Homo sapiens
atagcactagtcctt

SEQ ID NO: 1317591 - DNA, 15 bp, Homo sapiens
catagcactagtcct

SEQ ID NO: 1317592 - DNA, 15 bp, Homo sapiens
tcatagcactagtcc

SEQ ID NO: 1317593 - DNA, 15 bp, Homo sapiens
ttcatagcactagtc

SEQ ID NO: 1317594 - DNA, 15 bp, Homo sapiens
gttcatagcactagt

SEQ ID NO: 1317595 - DNA, 15 bp, Homo sapiens
tgttcatagcactag

SEQ ID NO: 1317596 - DNA, 15 bp, Homo sapiens
atgttcatagcacta

SEQ ID NO: 1317597 - DNA, 15 bp, Homo sapiens
aatgttcatagcact

SEQ ID NO: 1317598 - DNA, 15 bp, Homo sapiens
taatgttcatagcac

SEQ ID NO: 1317599 - DNA, 15 bp, Homo sapiens
ttaatgttcatagca

SEQ ID NO: 1317600 - DNA, 15 bp, Homo sapiens
tttaatgttcatagc

SEQ ID NO: 1317601 - DNA, 15 bp, Homo sapiens
ctttaatgttcatag

SEQ ID NO: 1317602 - DNA, 15 bp, Homo sapiens
gctttaatgttcata

SEQ ID NO: 1317603 - DNA, 15 bp, Homo sapiens
tgctttaatgttcat

SEQ ID NO: 1317604 - DNA, 15 bp, Homo sapiens
ttgctttaatgttca

SEQ ID NO: 1317605 - DNA, 15 bp, Homo sapiens
cttgctttaatgttc

SEQ ID NO: 1317606 - DNA, 15 bp, Homo sapiens
acttgctttaatgtt

SEQ ID NO: 1317607 - DNA, 15 bp, Homo sapiens
tacttgctttaatgt

SEQ ID NO: 1317608 - DNA, 15 bp, Homo sapiens
atacttgctttaatg

SEQ ID NO: 1317609 - DNA, 15 bp, Homo sapiens
catacttgctttaat

SEQ ID NO: 1317610 - DNA, 15 bp, Homo sapiens
gcatacttgctttaa

SEQ ID NO: 1317611 - DNA, 15 bp, Homo sapiens
agcatacttgcttta

SEQ ID NO: 1317612 - DNA, 15 bp, Homo sapiens
aagcatacttgcttt

SEQ ID NO: 1317613 - DNA, 15 bp, Homo sapiens
taagcatacttgctt

SEQ ID NO: 1317614 - DNA, 15 bp, Homo sapiens
ttaagcatacttgct

SEQ ID NO: 1317615 - DNA, 15 bp, Homo sapiens
tttaagcatacttgc

SEQ ID NO: 1317616 - DNA, 15 bp, Homo sapiens
ttttaagcatacttg

SEQ ID NO: 1317617 - DNA, 15 bp, Homo sapiens
gttttaagcatactt

SEQ ID NO: 1317618 - DNA, 15 bp, Homo sapiens
ggttttaagcatact

SEQ ID NO: 1317619 - DNA, 15 bp, Homo sapiens
tggttttaagcatac

SEQ ID NO: 1317620 - DNA, 15 bp, Homo sapiens
ttggttttaagcata

SEQ ID NO: 1317621 - DNA, 15 bp, Homo sapiens
tttggttttaagcat

SEQ ID NO: 1317622 - DNA, 15 bp, Homo sapiens
ttttggttttaagca

SEQ ID NO: 1317623 - DNA, 15 bp, Homo sapiens
tttttggttttaagc

SEQ ID NO: 1317624 - DNA, 15 bp, Homo sapiens
gtttttggttttaag

SEQ ID NO: 1317625 - DNA, 15 bp, Homo sapiens
tgtttttggttttaa

SEQ ID NO: 1317626 - DNA, 15 bp, Homo sapiens
atgtttttggtttta

SEQ ID NO: 1317627 - DNA, 15 bp, Homo sapiens
tatgtttttggtttt

SEQ ID NO: 1317628 - DNA, 15 bp, Homo sapiens
atatgtttttggttt

SEQ ID NO: 1317629 - DNA, 15 bp, Homo sapiens
aatatgtttttggtt

SEQ ID NO: 1317630 - DNA, 15 bp, Homo sapiens
aaatatgtttttggt

SEQ ID NO: 1317631 - DNA, 15 bp, Homo sapiens
aaaatatgtttttgg

SEQ ID NO: 1317632 - DNA, 15 bp, Homo sapiens
caaaatatgtttttg

SEQ ID NO: 1317633 - DNA, 15 bp, Homo sapiens
tcaaaatatgttttt

SEQ ID NO: 1317634 - DNA, 15 bp, Homo sapiens
gtcaaaatatgtttt

SEQ ID NO: 1317635 - DNA, 15 bp, Homo sapiens
agtcaaaatatgttt

SEQ ID NO: 1317636 - DNA, 15 bp, Homo sapiens
aagtcaaaatatgtt

SEQ ID NO: 1317637 - DNA, 15 bp, Homo sapiens
aaagtcaaaatatgt

SEQ ID NO: 1317638 - DNA, 15 bp, Homo sapiens
taaagtcaaaatatg

SEQ ID NO: 1317639 - DNA, 15 bp, Homo sapiens
ctaaagtcaaaatat

SEQ ID NO: 1317640 - DNA, 15 bp, Homo sapiens
cctaaagtcaaaata

SEQ ID NO: 1317641 - DNA, 15 bp, Homo sapiens
gcctaaagtcaaaat

SEQ ID NO: 1317642 - DNA, 15 bp, Homo sapiens
tgcctaaagtcaaaa

SEQ ID NO: 1317643 - DNA, 15 bp, Homo sapiens
atgcctaaagtcaaa

SEQ ID NO: 1317644 - DNA, 15 bp, Homo sapiens
aatgcctaaagtcaa

SEQ ID NO: 1317645 - DNA, 15 bp, Homo sapiens
aaatgcctaaagtca

SEQ ID NO: 1317646 - DNA, 15 bp, Homo sapiens
taaatgcctaaagtc

SEQ ID NO: 1317647 - DNA, 15 bp, Homo sapiens
ataaatgcctaaagt

SEQ ID NO: 1317648 - DNA, 15 bp, Homo sapiens
cataaatgcctaaag

SEQ ID NO: 1317649 - DNA, 15 bp, Homo sapiens
gcataaatgcctaaa

SEQ ID NO: 1317650 - DNA, 15 bp, Homo sapiens
tgcataaatgcctaa

SEQ ID NO: 1317651 - DNA, 15 bp, Homo sapiens
ctgcataaatgccta

SEQ ID NO: 1317652 - DNA, 15 bp, Homo sapiens
tctgcataaatgcct

SEQ ID NO: 1317653 - DNA, 15 bp, Homo sapiens
atctgcataaatgcc

SEQ ID NO: 1317654 - DNA, 15 bp, Homo sapiens
tatctgcataaatgc

SEQ ID NO: 1317655 - DNA, 15 bp, Homo sapiens
ttatctgcataaatg

SEQ ID NO: 1317656 - DNA, 15 bp, Homo sapiens
tttatctgcataaat

SEQ ID NO: 1317657 - DNA, 15 bp, Homo sapiens
atttatctgcataaa

SEQ ID NO: 1317658 - DNA, 15 bp, Homo sapiens
catttatctgcataa

SEQ ID NO: 1317659 - DNA, 15 bp, Homo sapiens
acatttatctgcata

SEQ ID NO: 1317660 - DNA, 15 bp, Homo sapiens
aacatttatctgcat

SEQ ID NO: 1317661 - DNA, 15 bp, Homo sapiens
aaacatttatctgca

SEQ ID NO: 1317662 - DNA, 15 bp, Homo sapiens
gaaacatttatctgc

SEQ ID NO: 1317663 - DNA, 15 bp, Homo sapiens
cgaaacatttatctg

SEQ ID NO: 1317664 - DNA, 15 bp, Homo sapiens
gcgaaacatttatct

SEQ ID NO: 1317665 - DNA, 15 bp, Homo sapiens
agcgaaacatttatc

SEQ ID NO: 1317666 - DNA, 15 bp, Homo sapiens
gagcgaaacatttat

SEQ ID NO: 1317667 - DNA, 15 bp, Homo sapiens
agagcgaaacattta

SEQ ID NO: 1317668 - DNA, 15 bp, Homo sapiens
aagagcgaaacattt

SEQ ID NO: 1317669 - DNA, 15 bp, Homo sapiens
taagagcgaaacatt

SEQ ID NO: 1317670 - DNA, 15 bp, Homo sapiens
ttaagagcgaaacat

SEQ ID NO: 1317671 - DNA, 15 bp, Homo sapiens
gttaagagcgaaaca

SEQ ID NO: 1317672 - DNA, 15 bp, Homo sapiens
ggttaagagcgaaac

SEQ ID NO: 1317673 - DNA, 15 bp, Homo sapiens
gggttaagagcgaaa

SEQ ID NO: 1317674 - DNA, 15 bp, Homo sapiens
tgggttaagagcgaa

SEQ ID NO: 1317675 - DNA, 15 bp, Homo sapiens
gtgggttaagagcga

SEQ ID NO: 1317676 - DNA, 15 bp, Homo sapiens
agtgggttaagagcg

SEQ ID NO: 1317677 - DNA, 15 bp, Homo sapiens
aagtgggttaagagc

SEQ ID NO: 1317678 - DNA, 15 bp, Homo sapiens
caagtgggttaagag

SEQ ID NO: 1317679 - DNA, 15 bp, Homo sapiens
ccaagtgggttaaga

SEQ ID NO: 1317680 - DNA, 15 bp, Homo sapiens
tccaagtgggttaag

SEQ ID NO: 1317681 - DNA, 15 bp, Homo sapiens
ttccaagtgggttaa

SEQ ID NO: 1317682 - DNA, 15 bp, Homo sapiens
attccaagtgggtta

SEQ ID NO: 1317683 - DNA, 15 bp, Homo sapiens
aattccaagtgggtt

SEQ ID NO: 1317684 - DNA, 15 bp, Homo sapiens
gaattccaagtgggt

SEQ ID NO: 1317685 - DNA, 15 bp, Homo sapiens
tgaattccaagtggg

SEQ ID NO: 1317686 - DNA, 15 bp, Homo sapiens
ttgaattccaagtgg

SEQ ID NO: 1317687 - DNA, 15 bp, Homo sapiens
tttgaattccaagtg

SEQ ID NO: 1317688 - DNA, 15 bp, Homo sapiens
ctttgaattccaagt

SEQ ID NO: 1317689 - DNA, 15 bp, Homo sapiens
tctttgaattccaag

SEQ ID NO: 1317690 - DNA, 15 bp, Homo sapiens
ctctttgaattccaa

SEQ ID NO: 1317691 - DNA, 15 bp, Homo sapiens
tctctttgaattcca

SEQ ID NO: 1317692 - DNA, 15 bp, Homo sapiens
gtctctttgaattcc

SEQ ID NO: 1317693 - DNA, 15 bp, Homo sapiens
agtctctttgaattc

SEQ ID NO: 1317694 - DNA, 15 bp, Homo sapiens
tagtctctttgaatt

SEQ ID NO: 1317695 - DNA, 15 bp, Homo sapiens
ctagtctctttgaat

SEQ ID NO: 1317696 - DNA, 15 bp, Homo sapiens
gctagtctctttgaa

SEQ ID NO: 1317697 - DNA, 15 bp, Homo sapiens
agctagtctctttga

SEQ ID NO: 1317698 - DNA, 15 bp, Homo sapiens
gagctagtctctttg

SEQ ID NO: 1317699 - DNA, 15 bp, Homo sapiens
agagctagtctcttt

SEQ ID NO: 1317700 - DNA, 15 bp, Homo sapiens
aagagctagtctctt

SEQ ID NO: 1317701 - DNA, 15 bp, Homo sapiens
aaagagctagtctct

SEQ ID NO: 1317702 - DNA, 15 bp, Homo sapiens
taaagagctagtctc

SEQ ID NO: 1317703 - DNA, 15 bp, Homo sapiens
ttaaagagctagtct

SEQ ID NO: 1317704 - DNA, 15 bp, Homo sapiens
gttaaagagctagtc

SEQ ID NO: 1317705 - DNA, 15 bp, Homo sapiens
tgttaaagagctagt

SEQ ID NO: 1317706 - DNA, 15 bp, Homo sapiens
ctgttaaagagctag

SEQ ID NO: 1317707 - DNA, 15 bp, Homo sapiens
tctgttaaagagcta

SEQ ID NO: 1317708 - DNA, 15 bp, Homo sapiens
atctgttaaagagct

SEQ ID NO: 1317709 - DNA, 15 bp, Homo sapiens
tatctgttaaagagc

SEQ ID NO: 1317710 - DNA, 15 bp, Homo sapiens
gtatctgttaaagag

SEQ ID NO: 1317711 - DNA, 15 bp, Homo sapiens
agtatctgttaaaga

SEQ ID NO: 1317712 - DNA, 15 bp, Homo sapiens
cagtatctgttaaag

SEQ ID NO: 1317713 - DNA, 15 bp, Homo sapiens
tcagtatctgttaaa

SEQ ID NO: 1317714 - DNA, 15 bp, Homo sapiens
atcagtatctgttaa

SEQ ID NO: 1317715 - DNA, 15 bp, Homo sapiens
tatcagtatctgtta

SEQ ID NO: 1317716 - DNA, 15 bp, Homo sapiens
gtatcagtatctgtt

SEQ ID NO: 1317717 - DNA, 15 bp, Homo sapiens
agtatcagtatctgt

SEQ ID NO: 1317718 - DNA, 15 bp, Homo sapiens
gagtatcagtatctg

SEQ ID NO: 1317719 - DNA, 15 bp, Homo sapiens
tgagtatcagtatct

SEQ ID NO: 1317720 - DNA, 15 bp, Homo sapiens
ttgagtatcagtatc

SEQ ID NO: 1317721 - DNA, 15 bp, Homo sapiens
tttgagtatcagtat

SEQ ID NO: 1317722 - DNA, 15 bp, Homo sapiens
ctttgagtatcagta

SEQ ID NO: 1317723 - DNA, 15 bp, Homo sapiens
cctttgagtatcagt

SEQ ID NO: 1317724 - DNA, 15 bp, Homo sapiens
acctttgagtatcag

SEQ ID NO: 1317725 - DNA, 15 bp, Homo sapiens
tacctttgagtatca

SEQ ID NO: 1317726 - DNA, 15 bp, Homo sapiens
ttacctttgagtatc

SEQ ID NO: 1317727 - DNA, 15 bp, Homo sapiens
cttacctttgagtat

SEQ ID NO: 1317728 - DNA, 15 bp, Homo sapiens
ccttacctttgagta

SEQ ID NO: 1317729 - DNA, 15 bp, Homo sapiens
tccttacctttgagt

SEQ ID NO: 1317730 - DNA, 15 bp, Homo sapiens
ttccttacctttgag

SEQ ID NO: 1317731 - DNA, 15 bp, Homo sapiens
cttccttacctttga

SEQ ID NO: 1317732 - DNA, 15 bp, Homo sapiens
tcttccttacctttg

SEQ ID NO: 1317733 - DNA, 15 bp, Homo sapiens
ttcttccttaccttt

SEQ ID NO: 1317734 - DNA, 15 bp, Homo sapiens
attcttccttacctt

SEQ ID NO: 1317735 - DNA, 15 bp, Homo sapiens
aattcttccttacct

SEQ ID NO: 1317736 - DNA, 15 bp, Homo sapiens
taattcttccttacc

SEQ ID NO: 1317737 - DNA, 15 bp, Homo sapiens
ataattcttccttac

SEQ ID NO: 1317738 - DNA, 15 bp, Homo sapiens
aataattcttcctta

SEQ ID NO: 1317739 - DNA, 15 bp, Homo sapiens
caataattcttcctt

SEQ ID NO: 1317740 - DNA, 15 bp, Homo sapiens
ccaataattcttcct

SEQ ID NO: 1317741 - DNA, 15 bp, Homo sapiens
accaataattcttcc

SEQ ID NO: 1317742 - DNA, 15 bp, Homo sapiens
taccaataattcttc

SEQ ID NO: 1317743 - DNA, 15 bp, Homo sapiens
ataccaataattctt

SEQ ID NO: 1317744 - DNA, 15 bp, Homo sapiens
cataccaataattct

SEQ ID NO: 1317745 - DNA, 15 bp, Homo sapiens
tcataccaataattc

SEQ ID NO: 1317746 - DNA, 15 bp, Homo sapiens
atcataccaataatt

SEQ ID NO: 1317747 - DNA, 15 bp, Homo sapiens
aatcataccaataat

SEQ ID NO: 1317748 - DNA, 15 bp, Homo sapiens
gaatcataccaataa

SEQ ID NO: 1317749 - DNA, 15 bp, Homo sapiens
agaatcataccaata

SEQ ID NO: 1317750 - DNA, 15 bp, Homo sapiens
tagaatcataccaat

SEQ ID NO: 1317751 - DNA, 15 bp, Homo sapiens
ttagaatcataccaa

SEQ ID NO: 1317752 - DNA, 15 bp, Homo sapiens
cttagaatcatacca

SEQ ID NO: 1317753 - DNA, 15 bp, Homo sapiens
gcttagaatcatacc

SEQ ID NO: 1317754 - DNA, 15 bp, Homo sapiens
ggcttagaatcatac

SEQ ID NO: 1317755 - DNA, 15 bp, Homo sapiens
tggcttagaatcata

SEQ ID NO: 1317756 - DNA, 15 bp, Homo sapiens
gtggcttagaatcat

SEQ ID NO: 1317757 - DNA, 15 bp, Homo sapiens
agtggcttagaatca

SEQ ID NO: 1317758 - DNA, 15 bp, Homo sapiens
tagtggcttagaatc

SEQ ID NO: 1317759 - DNA, 15 bp, Homo sapiens
ctagtggcttagaat

SEQ ID NO: 1317760 - DNA, 15 bp, Homo sapiens
actagtggcttagaa

SEQ ID NO: 1317761 - DNA, 15 bp, Homo sapiens
gactagtggcttaga

SEQ ID NO: 1317762 - DNA, 15 bp, Homo sapiens
tgactagtggcttag

SEQ ID NO: 1317763 - DNA, 15 bp, Homo sapiens
atgactagtggctta

SEQ ID NO: 1317764 - DNA, 15 bp, Homo sapiens
gatgactagtggctt

SEQ ID NO: 1317765 - DNA, 15 bp, Homo sapiens
agatgactagtggct

SEQ ID NO: 1317766 - DNA, 15 bp, Homo sapiens
tagatgactagtggc

SEQ ID NO: 1317767 - DNA, 15 bp, Homo sapiens
atagatgactagtgg

SEQ ID NO: 1317768 - DNA, 15 bp, Homo sapiens
aatagatgactagtg

SEQ ID NO: 1317769 - DNA, 15 bp, Homo sapiens
gaatagatgactagt

SEQ ID NO: 1317770 - DNA, 15 bp, Homo sapiens
ggaatagatgactag

SEQ ID NO: 1317771 - DNA, 15 bp, Homo sapiens
gggaatagatgacta

SEQ ID NO: 1317772 - DNA, 15 bp, Homo sapiens
tgggaatagatgact

SEQ ID NO: 1317773 - DNA, 15 bp, Homo sapiens
ctgggaatagatgac

SEQ ID NO: 1317774 - DNA, 15 bp, Homo sapiens
tctgggaatagatga

SEQ ID NO: 1317775 - DNA, 15 bp, Homo sapiens
ctctgggaatagatg

SEQ ID NO: 1317776 - DNA, 15 bp, Homo sapiens
gctctgggaatagat

SEQ ID NO: 1317777 - DNA, 15 bp, Homo sapiens
tgctctgggaataga

SEQ ID NO: 1317778 - DNA, 15 bp, Homo sapiens
ttgctctgggaatag

SEQ ID NO: 1317779 - DNA, 15 bp, Homo sapiens
tttgctctgggaata

SEQ ID NO: 1317780 - DNA, 15 bp, Homo sapiens
ttttgctctgggaat

SEQ ID NO: 1317781 - DNA, 15 bp, Homo sapiens
attttgctctgggaa

SEQ ID NO: 1317782 - DNA, 15 bp, Homo sapiens
aattttgctctggga

SEQ ID NO: 1317783 - DNA, 15 bp, Homo sapiens
aaattttgctctggg

SEQ ID NO: 1317784 - DNA, 15 bp, Homo sapiens
gaaattttgctctgg

SEQ ID NO: 1317785 - DNA, 15 bp, Homo sapiens
agaaattttgctctg

SEQ ID NO: 1317786 - DNA, 15 bp, Homo sapiens
cagaaattttgctct

SEQ ID NO: 1317787 - DNA, 15 bp, Homo sapiens
acagaaattttgctc

SEQ ID NO: 1317788 - DNA, 15 bp, Homo sapiens
cacagaaattttgct

SEQ ID NO: 1317789 - DNA, 15 bp, Homo sapiens
ccacagaaattttgc

SEQ ID NO: 1317790 - DNA, 15 bp, Homo sapiens
accacagaaattttg

SEQ ID NO: 1317791 - DNA, 15 bp, Homo sapiens
aaccacagaaatttt

SEQ ID NO: 1317792 - DNA, 15 bp, Homo sapiens
taaccacagaaattt

SEQ ID NO: 1317793 - DNA, 15 bp, Homo sapiens
gtaaccacagaaatt

SEQ ID NO: 1317794 - DNA, 15 bp, Homo sapiens
agtaaccacagaaat

SEQ ID NO: 1317795 - DNA, 15 bp, Homo sapiens
aagtaaccacagaaa

SEQ ID NO: 1317796 - DNA, 15 bp, Homo sapiens
aaagtaaccacagaa

SEQ ID NO: 1317797 - DNA, 15 bp, Homo sapiens
aaaagtaaccacaga

SEQ ID NO: 1317798 - DNA, 15 bp, Homo sapiens
aaaaagtaaccacag

SEQ ID NO: 1317799 - DNA, 15 bp, Homo sapiens
aaaaaagtaaccaca

SEQ ID NO: 1317800 - DNA, 15 bp, Homo sapiens
aaaaaaagtaaccac

SEQ ID NO: 1317801 - DNA, 15 bp, Homo sapiens
aaaaaaaagtaacca

SEQ ID NO: 1317802 - DNA, 15 bp, Homo sapiens
taaaaaaaagtaacc

SEQ ID NO: 1317803 - DNA, 15 bp, Homo sapiens
ataaaaaaaagtaac

SEQ ID NO: 1317804 - DNA, 15 bp, Homo sapiens
caataaaaaaaagta

SEQ ID NO: 1317805 - DNA, 15 bp, Homo sapiens
ccaataaaaaaaagt

SEQ ID NO: 1317806 - DNA, 15 bp, Homo sapiens
accaataaaaaaaag

SEQ ID NO: 1317807 - DNA, 15 bp, Homo sapiens
aaccaataaaaaaaa

SEQ ID NO: 1317808 - DNA, 15 bp, Homo sapiens
aaaccaataaaaaaa

SEQ ID NO: 1317809 - DNA, 15 bp, Homo sapiens
aaaaccaataaaaaa

SEQ ID NO: 1317810 - DNA, 15 bp, Homo sapiens
gaaaaccaataaaaa

SEQ ID NO: 1317811 - DNA, 15 bp, Homo sapiens
agaaaaccaataaaa

SEQ ID NO: 1317812 - DNA, 15 bp, Homo sapiens
tagaaaaccaataaa

SEQ ID NO: 1317813 - DNA, 15 bp, Homo sapiens
actagaaaaccaata

SEQ ID NO: 1317814 - DNA, 15 bp, Homo sapiens
cactagaaaaccaat

SEQ ID NO: 1317815 - DNA, 15 bp, Homo sapiens
acactagaaaaccaa

SEQ ID NO: 1317816 - DNA, 15 bp, Homo sapiens
cacactagaaaacca

SEQ ID NO: 1317817 - DNA, 15 bp, Homo sapiens
gcacactagaaaacc

SEQ ID NO: 1317818 - DNA, 15 bp, Homo sapiens
agcacactagaaaac

SEQ ID NO: 1317819 - DNA, 15 bp, Homo sapiens
aagcacactagaaaa

SEQ ID NO: 1317820 - DNA, 15 bp, Homo sapiens
caagcacactagaaa

SEQ ID NO: 1317821 - DNA, 15 bp, Homo sapiens
gcaagcacactagaa

SEQ ID NO: 1317822 - DNA, 15 bp, Homo sapiens
agcaagcacactaga

SEQ ID NO: 1317823 - DNA, 15 bp, Homo sapiens
aagcaagcacactag

SEQ ID NO: 1317824 - DNA, 15 bp, Homo sapiens
aaagcaagcacacta

SEQ ID NO: 1317825 - DNA, 15 bp, Homo sapiens
taaagcaagcacact

SEQ ID NO: 1317826 - DNA, 15 bp, Homo sapiens
ttaaagcaagcacac

SEQ ID NO: 1317827 - DNA, 15 bp, Homo sapiens
attaaagcaagcaca

SEQ ID NO: 1317828 - DNA, 15 bp, Homo sapiens
gattaaagcaagcac

SEQ ID NO: 1317829 - DNA, 15 bp, Homo sapiens
tgattaaagcaagca

SEQ ID NO: 1317830 - DNA, 15 bp, Homo sapiens
ttgattaaagcaagc

SEQ ID NO: 1317831 - DNA, 15 bp, Homo sapiens
gttgattaaagcaag

SEQ ID NO: 1317832 - DNA, 15 bp, Homo sapiens
agttgattaaagcaa

SEQ ID NO: 1317833 - DNA, 15 bp, Homo sapiens
cagttgattaaagca

SEQ ID NO: 1317834 - DNA, 15 bp, Homo sapiens
acagttgattaaagc

SEQ ID NO: 1317835 - DNA, 15 bp, Homo sapiens
aacagttgattaaag

SEQ ID NO: 1317836 - DNA, 15 bp, Homo sapiens
aaacagttgattaaa

SEQ ID NO: 1317837 - DNA, 15 bp, Homo sapiens
aaaacagttgattaa

SEQ ID NO: 1317838 - DNA, 15 bp, Homo sapiens
gaaaacagttgatta

SEQ ID NO: 1317839 - DNA, 15 bp, Homo sapiens
tgaaaacagttgatt

SEQ ID NO: 1317840 - DNA, 15 bp, Homo sapiens
gtgaaaacagttgat

SEQ ID NO: 1317841 - DNA, 15 bp, Homo sapiens
tgtgaaaacagttga

SEQ ID NO: 1317842 - DNA, 15 bp, Homo sapiens
atgtgaaaacagttg

SEQ ID NO: 1317843 - DNA, 15 bp, Homo sapiens
catgtgaaaacagtt

SEQ ID NO: 1317844 - DNA, 15 bp, Homo sapiens
acatgtgaaaacagt

SEQ ID NO: 1317845 - DNA, 15 bp, Homo sapiens
aacatgtgaaaacag

SEQ ID NO: 1317846 - DNA, 15 bp, Homo sapiens
aaacatgtgaaaaca

SEQ ID NO: 1317847 - DNA, 15 bp, Homo sapiens
caaacatgtgaaaac

SEQ ID NO: 1317848 - DNA, 15 bp, Homo sapiens
ccaaacatgtgaaaa

SEQ ID NO: 1317849 - DNA, 15 bp, Homo sapiens
tccaaacatgtgaaa

SEQ ID NO: 1317850 - DNA, 15 bp, Homo sapiens
ttccaaacatgtgaa

SEQ ID NO: 1317851 - DNA, 15 bp, Homo sapiens
tttccaaacatgtga

SEQ ID NO: 1317852 - DNA, 15 bp, Homo sapiens
ttttccaaacatgtg

SEQ ID NO: 1317853 - DNA, 15 bp, Homo sapiens
attttccaaacatgt

SEQ ID NO: 1317854 - DNA, 15 bp, Homo sapiens
aattttccaaacatg

SEQ ID NO: 1317855 - DNA, 15 bp, Homo sapiens
aaattttccaaacat

SEQ ID NO: 1317856 - DNA, 15 bp, Homo sapiens
caaattttccaaaca

SEQ ID NO: 1317857 - DNA, 15 bp, Homo sapiens
tcaaattttccaaac

SEQ ID NO: 1317858 - DNA, 15 bp, Homo sapiens
ctcaaattttccaaa

SEQ ID NO: 1317859 - DNA, 15 bp, Homo sapiens
cctcaaattttccaa

SEQ ID NO: 1317860 - DNA, 15 bp, Homo sapiens
ccctcaaattttcca

SEQ ID NO: 1317861 - DNA, 15 bp, Homo sapiens
accctcaaattttcc

SEQ ID NO: 1317862 - DNA, 15 bp, Homo sapiens
aaccctcaaattttc

SEQ ID NO: 1317863 - DNA, 15 bp, Homo sapiens
aaaccctcaaatttt

SEQ ID NO: 1317864 - DNA, 15 bp, Homo sapiens
gaaaccctcaaattt

SEQ ID NO: 1317865 - DNA, 15 bp, Homo sapiens
ggaaaccctcaaatt

SEQ ID NO: 1317866 - DNA, 15 bp, Homo sapiens
aggaaaccctcaaat

SEQ ID NO: 1317867 - DNA, 15 bp, Homo sapiens
caggaaaccctcaaa

SEQ ID NO: 1317868 - DNA, 15 bp, Homo sapiens
acaggaaaccctcaa

SEQ ID NO: 1317869 - DNA, 15 bp, Homo sapiens
gacaggaaaccctca

SEQ ID NO: 1317870 - DNA, 15 bp, Homo sapiens
agacaggaaaccctc

SEQ ID NO: 1317871 - DNA, 15 bp, Homo sapiens
tagacaggaaaccct

SEQ ID NO: 1317872 - DNA, 15 bp, Homo sapiens
atagacaggaaaccc

SEQ ID NO: 1317873 - DNA, 15 bp, Homo sapiens
tatagacaggaaacc

SEQ ID NO: 1317874 - DNA, 15 bp, Homo sapiens
gtatagacaggaaac

SEQ ID NO: 1317875 - DNA, 15 bp, Homo sapiens
agtatagacaggaaa

SEQ ID NO: 1317876 - DNA, 15 bp, Homo sapiens
tagtatagacaggaa

SEQ ID NO: 1317877 - DNA, 15 bp, Homo sapiens
ctagtatagacagga

SEQ ID NO: 1317878 - DNA, 15 bp, Homo sapiens
tctagtatagacagg

SEQ ID NO: 1317879 - DNA, 15 bp, Homo sapiens
ttctagtatagacag

SEQ ID NO: 1317880 - DNA, 15 bp, Homo sapiens
cttctagtatagaca

SEQ ID NO: 1317881 - DNA, 15 bp, Homo sapiens
tcttctagtatagac

SEQ ID NO: 1317882 - DNA, 15 bp, Homo sapiens
atcttctagtataga

SEQ ID NO: 1317883 - DNA, 15 bp, Homo sapiens
tatcttctagtatag

SEQ ID NO: 1317884 - DNA, 15 bp, Homo sapiens
gtatcttctagtata

SEQ ID NO: 1317885 - DNA, 15 bp, Homo sapiens
cgtatcttctagtat

SEQ ID NO: 1317886 - DNA, 15 bp, Homo sapiens
tcgtatcttctagta

SEQ ID NO: 1317887 - DNA, 15 bp, Homo sapiens
ctcgtatcttctagt

SEQ ID NO: 1317888 - DNA, 15 bp, Homo sapiens
gctcgtatcttctag

SEQ ID NO: 1317889 - DNA, 15 bp, Homo sapiens
tgctcgtatcttcta

SEQ ID NO: 1317890 - DNA, 15 bp, Homo sapiens
gtgctcgtatcttct

SEQ ID NO: 1317891 - DNA, 15 bp, Homo sapiens
agtgctcgtatcttc

SEQ ID NO: 1317892 - DNA, 15 bp, Homo sapiens
tagtgctcgtatctt

SEQ ID NO: 1317893 - DNA, 15 bp, Homo sapiens
gtagtgctcgtatct

SEQ ID NO: 1317894 - DNA, 15 bp, Homo sapiens
agtagtgctcgtatc

SEQ ID NO: 1317895 - DNA, 15 bp, Homo sapiens
gagtagtgctcgtat

SEQ ID NO: 1317896 - DNA, 15 bp, Homo sapiens
ggagtagtgctcgta

SEQ ID NO: 1317897 - DNA, 15 bp, Homo sapiens
tggagtagtgctcgt

SEQ ID NO: 1317898 - DNA, 15 bp, Homo sapiens
ctggagtagtgctcg

SEQ ID NO: 1317899 - DNA, 15 bp, Homo sapiens
tctggagtagtgctc

SEQ ID NO: 1317900 - DNA, 15 bp, Homo sapiens
ttctggagtagtgct

SEQ ID NO: 1317901 - DNA, 15 bp, Homo sapiens
tttctggagtagtgc

SEQ ID NO: 1317902 - DNA, 15 bp, Homo sapiens
ctttctggagtagtg

SEQ ID NO: 1317903 - DNA, 15 bp, Homo sapiens
cctttctggagtagt

SEQ ID NO: 1317904 - DNA, 15 bp, Homo sapiens
acctttctggagtag

SEQ ID NO: 1317905 - DNA, 15 bp, Homo sapiens
aacctttctggagta

SEQ ID NO: 1317906 - DNA, 15 bp, Homo sapiens
taacctttctggagt

SEQ ID NO: 1317907 - DNA, 15 bp, Homo sapiens
ctaacctttctggag

SEQ ID NO: 1317908 - DNA, 15 bp, Homo sapiens
tctaacctttctgga

SEQ ID NO: 1317909 - DNA, 15 bp, Homo sapiens
ttctaacctttctgg

SEQ ID NO: 1317910 - DNA, 15 bp, Homo sapiens
tttctaacctttctg

SEQ ID NO: 1317911 - DNA, 15 bp, Homo sapiens
gtttctaacctttct

SEQ ID NO: 1317912 - DNA, 15 bp, Homo sapiens
tgtttctaacctttc

SEQ ID NO: 1317913 - DNA, 15 bp, Homo sapiens
ttgtttctaaccttt

SEQ ID NO: 1317914 - DNA, 15 bp, Homo sapiens
tttgtttctaacctt

SEQ ID NO: 1317915 - DNA, 15 bp, Homo sapiens
ttttgtttctaacct

SEQ ID NO: 1317916 - DNA, 15 bp, Homo sapiens
cttttgtttctaacc

SEQ ID NO: 1317917 - DNA, 15 bp, Homo sapiens
tcttttgtttctaac

SEQ ID NO: 1317918 - DNA, 15 bp, Homo sapiens
gtcttttgtttctaa

SEQ ID NO: 1317919 - DNA, 15 bp, Homo sapiens
ggtcttttgtttcta

SEQ ID NO: 1317920 - DNA, 15 bp, Homo sapiens
tggtcttttgtttct

SEQ ID NO: 1317921 - DNA, 15 bp, Homo sapiens
ttggtcttttgtttc

SEQ ID NO: 1317922 - DNA, 15 bp, Homo sapiens
tttggtcttttgttt

SEQ ID NO: 1317923 - DNA, 15 bp, Homo sapiens
ctttggtcttttgtt

SEQ ID NO: 1317924 - DNA, 15 bp, Homo sapiens
cctttggtcttttgt

SEQ ID NO: 1317925 - DNA, 15 bp, Homo sapiens
tcctttggtcttttg

SEQ ID NO: 1317926 - DNA, 15 bp, Homo sapiens
gtcctttggtctttt

SEQ ID NO: 1317927 - DNA, 15 bp, Homo sapiens
cgtcctttggtcttt

SEQ ID NO: 1317928 - DNA, 15 bp, Homo sapiens
ccgtcctttggtctt

SEQ ID NO: 1317929 - DNA, 15 bp, Homo sapiens
gccgtcctttggtct

SEQ ID NO: 1317930 - DNA, 15 bp, Homo sapiens
agccgtcctttggtc

SEQ ID NO: 1317931 - DNA, 15 bp, Homo sapiens
aagccgtcctttggt

SEQ ID NO: 1317932 - DNA, 15 bp, Homo sapiens
gaagccgtcctttgg

SEQ ID NO: 1317933 - DNA, 15 bp, Homo sapiens
agaagccgtcctttg

SEQ ID NO: 1317934 - DNA, 15 bp, Homo sapiens
tagaagccgtccttt

SEQ ID NO: 1317935 - DNA, 15 bp, Homo sapiens
gtagaagccgtcctt

SEQ ID NO: 1317936 - DNA, 15 bp, Homo sapiens
tgtagaagccgtcct

SEQ ID NO: 1317937 - DNA, 15 bp, Homo sapiens
ttgtagaagccgtcc

SEQ ID NO: 1317938 - DNA, 15 bp, Homo sapiens
tttgtagaagccgtc

SEQ ID NO: 1317939 - DNA, 15 bp, Homo sapiens
ttttgtagaagccgt

SEQ ID NO: 1317940 - DNA, 15 bp, Homo sapiens
cttttgtagaagccg

SEQ ID NO: 1317941 - DNA, 15 bp, Homo sapiens
ccttttgtagaagcc

SEQ ID NO: 1317942 - DNA, 15 bp, Homo sapiens
gccttttgtagaagc

SEQ ID NO: 1317943 - DNA, 15 bp, Homo sapiens
ggccttttgtagaag

SEQ ID NO: 1317944 - DNA, 15 bp, Homo sapiens
gggccttttgtagaa

SEQ ID NO: 1317945 - DNA, 15 bp, Homo sapiens
ggggccttttgtaga

SEQ ID NO: 1317946 - DNA, 15 bp, Homo sapiens
gggggccttttgtag

SEQ ID NO: 1317947 - DNA, 15 bp, Homo sapiens
agggggccttttgta

SEQ ID NO: 1317948 - DNA, 15 bp, Homo sapiens
cagggggccttttgt

SEQ ID NO: 1317949 - DNA, 15 bp, Homo sapiens
acagggggccttttg

SEQ ID NO: 1317950 - DNA, 15 bp, Homo sapiens
aacagggggcctttt

SEQ ID NO: 1317951 - DNA, 15 bp, Homo sapiens
taacagggggccttt

SEQ ID NO: 1317952 - DNA, 15 bp, Homo sapiens
ttaacagggggcctt

SEQ ID NO: 1317953 - DNA, 15 bp, Homo sapiens
tttaacagggggcct

SEQ ID NO: 1317954 - DNA, 15 bp, Homo sapiens
ctttaacagggggcc

SEQ ID NO: 1317955 - DNA, 15 bp, Homo sapiens
gctttaacagggggc

SEQ ID NO: 1317956 - DNA, 15 bp, Homo sapiens
ggctttaacaggggg

SEQ ID NO: 1317957 - DNA, 15 bp, Homo sapiens
gggctttaacagggg

SEQ ID NO: 1317958 - DNA, 15 bp, Homo sapiens
tgggctttaacaggg

SEQ ID NO: 1317959 - DNA, 15 bp, Homo sapiens
ctgggctttaacagg

SEQ ID NO: 1317960 - DNA, 15 bp, Homo sapiens
gctgggctttaacag

SEQ ID NO: 1317961 - DNA, 15 bp, Homo sapiens
ggctgggctttaaca

SEQ ID NO: 1317962 - DNA, 15 bp, Homo sapiens
cggctgggctttaac

SEQ ID NO: 1317963 - DNA, 15 bp, Homo sapiens
acggctgggctttaa

SEQ ID NO: 1317964 - DNA, 15 bp, Homo sapiens
aacggctgggcttta

SEQ ID NO: 1317965 - DNA, 15 bp, Homo sapiens
aaacggctgggcttt

SEQ ID NO: 1317966 - DNA, 15 bp, Homo sapiens
caaacggctgggctt

SEQ ID NO: 1317967 - DNA, 15 bp, Homo sapiens
acaaacggctgggct

SEQ ID NO: 1317968 - DNA, 15 bp, Homo sapiens
aacaaacggctgggc

SEQ ID NO: 1317969 - DNA, 15 bp, Homo sapiens
caacaaacggctggg

SEQ ID NO: 1317970 - DNA, 15 bp, Homo sapiens
acaacaaacggctgg

SEQ ID NO: 1317971 - DNA, 15 bp, Homo sapiens
aacaacaaacggctg

SEQ ID NO: 1317972 - DNA, 15 bp, Homo sapiens
caacaacaaacggct

SEQ ID NO: 1317973 - DNA, 15 bp, Homo sapiens
acaacaacaaacggc

SEQ ID NO: 1317974 - DNA, 15 bp, Homo sapiens
aacaacaacaaacgg

SEQ ID NO: 1317975 - DNA, 15 bp, Homo sapiens
aaacaacaacaaacg

SEQ ID NO: 1317976 - DNA, 15 bp, Homo sapiens
aaaacaacaacaaac

SEQ ID NO: 1317977 - DNA, 15 bp, Homo sapiens
ctaaaacaacaacaa

SEQ ID NO: 1317978 - DNA, 15 bp, Homo sapiens
actaaaacaacaaca

SEQ ID NO: 1317979 - DNA, 15 bp, Homo sapiens
aactaaaacaacaac

SEQ ID NO: 1317980 - DNA, 15 bp, Homo sapiens
taactaaaacaacaa

SEQ ID NO: 1317981 - DNA, 15 bp, Homo sapiens
ttaactaaaacaaca

SEQ ID NO: 1317982 - DNA, 15 bp, Homo sapiens
tttaactaaaacaac

SEQ ID NO: 1317983 - DNA, 15 bp, Homo sapiens
gtttaactaaaacaa

SEQ ID NO: 1317984 - DNA, 15 bp, Homo sapiens
tgtttaactaaaaca

SEQ ID NO: 1317985 - DNA, 15 bp, Homo sapiens
ctgtttaactaaaac

SEQ ID NO: 1317986 - DNA, 15 bp, Homo sapiens
tctgtttaactaaaa

SEQ ID NO: 1317987 - DNA, 15 bp, Homo sapiens
ttctgtttaactaaa

SEQ ID NO: 1317988 - DNA, 15 bp, Homo sapiens
cttctgtttaactaa

SEQ ID NO: 1317989 - DNA, 15 bp, Homo sapiens
acttctgtttaacta

SEQ ID NO: 1317990 - DNA, 15 bp, Homo sapiens
cacttctgtttaact

SEQ ID NO: 1317991 - DNA, 15 bp, Homo sapiens
ccacttctgtttaac

SEQ ID NO: 1317992 - DNA, 15 bp, Homo sapiens
tccacttctgtttaa

SEQ ID NO: 1317993 - DNA, 15 bp, Homo sapiens
gtccacttctgttta

SEQ ID NO: 1317994 - DNA, 15 bp, Homo sapiens
agtccacttctgttt

SEQ ID NO: 1317995 - DNA, 15 bp, Homo sapiens
tagtccacttctgtt

SEQ ID NO: 1317996 - DNA, 15 bp, Homo sapiens
atagtccacttctgt

SEQ ID NO: 1317997 - DNA, 15 bp, Homo sapiens
aatagtccacttctg

SEQ ID NO: 1317998 - DNA, 15 bp, Homo sapiens
aaatagtccacttct

SEQ ID NO: 1317999 - DNA, 15 bp, Homo sapiens
gaaatagtccacttc

SEQ ID NO: 1318000 - DNA, 15 bp, Homo sapiens
tgaaatagtccactt

SEQ ID NO: 1318001 - DNA, 15 bp, Homo sapiens
ttgaaatagtccact

SEQ ID NO: 1318002 - DNA, 15 bp, Homo sapiens
gttgaaatagtccac

SEQ ID NO: 1318003 - DNA, 15 bp, Homo sapiens
ggttgaaatagtcca

SEQ ID NO: 1318004 - DNA, 15 bp, Homo sapiens
aggttgaaatagtcc

SEQ ID NO: 1318005 - DNA, 15 bp, Homo sapiens
taggttgaaatagtc

SEQ ID NO: 1318006 - DNA, 15 bp, Homo sapiens
ttaggttgaaatagt

SEQ ID NO: 1318007 - DNA, 15 bp, Homo sapiens
gttaggttgaaatag

SEQ ID NO: 1318008 - DNA, 15 bp, Homo sapiens
ggttaggttgaaata

SEQ ID NO: 1318009 - DNA, 15 bp, Homo sapiens
cggttaggttgaaat

SEQ ID NO: 1318010 - DNA, 15 bp, Homo sapiens
tcggttaggttgaaa

SEQ ID NO: 1318011 - DNA, 15 bp, Homo sapiens
ttcggttaggttgaa

SEQ ID NO: 1318012 - DNA, 15 bp, Homo sapiens
tttcggttaggttga

SEQ ID NO: 1318013 - DNA, 15 bp, Homo sapiens
ttttcggttaggttg

SEQ ID NO: 1318014 - DNA, 15 bp, Homo sapiens
tttttcggttaggtt

SEQ ID NO: 1318015 - DNA, 15 bp, Homo sapiens
ctttttcggttaggt

SEQ ID NO: 1318016 - DNA, 15 bp, Homo sapiens
tctttttcggttagg

SEQ ID NO: 1318017 - DNA, 15 bp, Homo sapiens
atctttttcggttag

SEQ ID NO: 1318018 - DNA, 15 bp, Homo sapiens
aatctttttcggtta

SEQ ID NO: 1318019 - DNA, 15 bp, Homo sapiens
caatctttttcggtt

SEQ ID NO: 1318020 - DNA, 15 bp, Homo sapiens
gcaatctttttcggt

SEQ ID NO: 1318021 - DNA, 15 bp, Homo sapiens
agcaatctttttcgg

SEQ ID NO: 1318022 - DNA, 15 bp, Homo sapiens
cagcaatctttttcg

SEQ ID NO: 1318023 - DNA, 15 bp, Homo sapiens
ccagcaatctttttc

SEQ ID NO: 1318024 - DNA, 15 bp, Homo sapiens
tccagcaatcttttt

SEQ ID NO: 1318025 - DNA, 15 bp, Homo sapiens
atccagcaatctttt

SEQ ID NO: 1318026 - DNA, 15 bp, Homo sapiens
aatccagcaatcttt

SEQ ID NO: 1318027 - DNA, 15 bp, Homo sapiens
aaatccagcaatctt

SEQ ID NO: 1318028 - DNA, 15 bp, Homo sapiens
aaaatccagcaatct

SEQ ID NO: 1318029 - DNA, 15 bp, Homo sapiens
aaaaatccagcaatc

SEQ ID NO: 1318030 - DNA, 15 bp, Homo sapiens
caaaaatccagcaat

SEQ ID NO: 1318031 - DNA, 15 bp, Homo sapiens
gcaaaaatccagcaa

SEQ ID NO: 1318032 - DNA, 15 bp, Homo sapiens
ggcaaaaatccagca

SEQ ID NO: 1318033 - DNA, 15 bp, Homo sapiens
gggcaaaaatccagc

SEQ ID NO: 1318034 - DNA, 15 bp, Homo sapiens
agggcaaaaatccag

SEQ ID NO: 1318035 - DNA, 15 bp, Homo sapiens
cagggcaaaaatcca

SEQ ID NO: 1318036 - DNA, 15 bp, Homo sapiens
ccagggcaaaaatcc

SEQ ID NO: 1318037 - DNA, 15 bp, Homo sapiens
gccagggcaaaaatc

SEQ ID NO: 1318038 - DNA, 15 bp, Homo sapiens
ggccagggcaaaaat

SEQ ID NO: 1318039 - DNA, 15 bp, Homo sapiens
tggccagggcaaaaa

SEQ ID NO: 1318040 - DNA, 15 bp, Homo sapiens
atggccagggcaaaa

SEQ ID NO: 1318041 - DNA, 15 bp, Homo sapiens
tatggccagggcaaa

SEQ ID NO: 1318042 - DNA, 15 bp, Homo sapiens
atatggccagggcaa

SEQ ID NO: 1318043 - DNA, 15 bp, Homo sapiens
tatatggccagggca

SEQ ID NO: 1318044 - DNA, 15 bp, Homo sapiens
ttatatggccagggc

SEQ ID NO: 1318045 - DNA, 15 bp, Homo sapiens
tttatatggccaggg

SEQ ID NO: 1318046 - DNA, 15 bp, Homo sapiens
atttatatggccagg

SEQ ID NO: 1318047 - DNA, 15 bp, Homo sapiens
tatttatatggccag

SEQ ID NO: 1318048 - DNA, 15 bp, Homo sapiens
ctatttatatggcca

SEQ ID NO: 1318049 - DNA, 15 bp, Homo sapiens
cctatttatatggcc

SEQ ID NO: 1318050 - DNA, 15 bp, Homo sapiens
tcctatttatatggc

SEQ ID NO: 1318051 - DNA, 15 bp, Homo sapiens
ttcctatttatatgg

SEQ ID NO: 1318052 - DNA, 15 bp, Homo sapiens
tttcctatttatatg

SEQ ID NO: 1318053 - DNA, 15 bp, Homo sapiens
atttcctatttatat

SEQ ID NO: 1318054 - DNA, 15 bp, Homo sapiens
aatttcctatttata

SEQ ID NO: 1318055 - DNA, 15 bp, Homo sapiens
taatttcctatttat

SEQ ID NO: 1318056 - DNA, 15 bp, Homo sapiens
ttaatttcctattta

SEQ ID NO: 1318057 - DNA, 15 bp, Homo sapiens
cttaatttcctattt

SEQ ID NO: 1318058 - DNA, 15 bp, Homo sapiens
tcttaatttcctatt

SEQ ID NO: 1318059 - DNA, 15 bp, Homo sapiens
gtcttaatttcctat

SEQ ID NO: 1318060 - DNA, 15 bp, Homo sapiens
tgtcttaatttccta

SEQ ID NO: 1318061 - DNA, 15 bp, Homo sapiens
ctgtcttaatttcct

SEQ ID NO: 1318062 - DNA, 15 bp, Homo sapiens
cctgtcttaatttcc

SEQ ID NO: 1318063 - DNA, 15 bp, Homo sapiens
gcctgtcttaatttc

SEQ ID NO: 1318064 - DNA, 15 bp, Homo sapiens
tgcctgtcttaattt

SEQ ID NO: 1318065 - DNA, 15 bp, Homo sapiens
atgcctgtcttaatt

SEQ ID NO: 1318066 - DNA, 15 bp, Homo sapiens
tatgcctgtcttaat

SEQ ID NO: 1318067 - DNA, 15 bp, Homo sapiens
atatgcctgtcttaa

SEQ ID NO: 1318068 - DNA, 15 bp, Homo sapiens
aatatgcctgtctta

SEQ ID NO: 1318069 - DNA, 15 bp, Homo sapiens
taatatgcctgtctt

SEQ ID NO: 1318070 - DNA, 15 bp, Homo sapiens
ttaatatgcctgtct

SEQ ID NO: 1318071 - DNA, 15 bp, Homo sapiens
tttaatatgcctgtc

SEQ ID NO: 1318072 - DNA, 15 bp, Homo sapiens
ttttaatatgcctgt

SEQ ID NO: 1318073 - DNA, 15 bp, Homo sapiens
attttaatatgcctg

SEQ ID NO: 1318074 - DNA, 15 bp, Homo sapiens
aattttaatatgcct

SEQ ID NO: 1318075 - DNA, 15 bp, Homo sapiens
aaattttaatatgcc

SEQ ID NO: 1318076 - DNA, 15 bp, Homo sapiens
aaaattttaatatgc

SEQ ID NO: 1318077 - DNA, 15 bp, Homo sapiens
aaaaattttaatatg

SEQ ID NO: 1318078 - DNA, 15 bp, Homo sapiens
aaaaaattttaatat

SEQ ID NO: 1318079 - DNA, 15 bp, Homo sapiens
gaaaaaattttaata

SEQ ID NO: 1318080 - DNA, 15 bp, Homo sapiens
ggaaaaaattttaat

SEQ ID NO: 1318081 - DNA, 15 bp, Homo sapiens
aggaaaaaattttaa

SEQ ID NO: 1318082 - DNA, 15 bp, Homo sapiens
caggaaaaaatttta

SEQ ID NO: 1318083 - DNA, 15 bp, Homo sapiens
gcaggaaaaaatttt

SEQ ID NO: 1318084 - DNA, 15 bp, Homo sapiens
agcaggaaaaaattt

SEQ ID NO: 1318085 - DNA, 15 bp, Homo sapiens
aagcaggaaaaaatt

SEQ ID NO: 1318086 - DNA, 15 bp, Homo sapiens
taagcaggaaaaaat

SEQ ID NO: 1318087 - DNA, 15 bp, Homo sapiens
ataagcaggaaaaaa

SEQ ID NO: 1318088 - DNA, 15 bp, Homo sapiens
cataagcaggaaaaa

SEQ ID NO: 1318089 - DNA, 15 bp, Homo sapiens
acataagcaggaaaa

SEQ ID NO: 1318090 - DNA, 15 bp, Homo sapiens
aacataagcaggaaa

SEQ ID NO: 1318091 - DNA, 15 bp, Homo sapiens
caacataagcaggaa

SEQ ID NO: 1318092 - DNA, 15 bp, Homo sapiens
acaacataagcagga

SEQ ID NO: 1318093 - DNA, 15 bp, Homo sapiens
gacaacataagcagg

SEQ ID NO: 1318094 - DNA, 15 bp, Homo sapiens
agacaacataagcag

SEQ ID NO: 1318095 - DNA, 15 bp, Homo sapiens
aagacaacataagca

SEQ ID NO: 1318096 - DNA, 15 bp, Homo sapiens
gaagacaacataagc

SEQ ID NO: 1318097 - DNA, 15 bp, Homo sapiens
tgaagacaacataag

SEQ ID NO: 1318098 - DNA, 15 bp, Homo sapiens
atgaagacaacataa

SEQ ID NO: 1318099 - DNA, 15 bp, Homo sapiens
gatgaagacaacata

SEQ ID NO: 1318100 - DNA, 15 bp, Homo sapiens
agatgaagacaacat

SEQ ID NO: 1318101 - DNA, 15 bp, Homo sapiens
gagatgaagacaaca

SEQ ID NO: 1318102 - DNA, 15 bp, Homo sapiens
agagatgaagacaac

SEQ ID NO: 1318103 - DNA, 15 bp, Homo sapiens
cagagatgaagacaa

SEQ ID NO: 1318104 - DNA, 15 bp, Homo sapiens
ccagagatgaagaca

SEQ ID NO: 1318105 - DNA, 15 bp, Homo sapiens
cccagagatgaagac

SEQ ID NO: 1318106 - DNA, 15 bp, Homo sapiens
acccagagatgaaga

SEQ ID NO: 1318107 - DNA, 15 bp, Homo sapiens
gacccagagatgaag

SEQ ID NO: 1318108 - DNA, 15 bp, Homo sapiens
tgacccagagatgaa

SEQ ID NO: 1318109 - DNA, 15 bp, Homo sapiens
ttgacccagagatga

SEQ ID NO: 1318110 - DNA, 15 bp, Homo sapiens
gttgacccagagatg

SEQ ID NO: 1318111 - DNA, 15 bp, Homo sapiens
agttgacccagagat

SEQ ID NO: 1318112 - DNA, 15 bp, Homo sapiens
cagttgacccagaga

SEQ ID NO: 1318113 - DNA, 15 bp, Homo sapiens
tcagttgacccagag

SEQ ID NO: 1318114 - DNA, 15 bp, Homo sapiens
atcagttgacccaga

SEQ ID NO: 1318115 - DNA, 15 bp, Homo sapiens
tatcagttgacccag

SEQ ID NO: 1318116 - DNA, 15 bp, Homo sapiens
gtatcagttgaccca

SEQ ID NO: 1318117 - DNA, 15 bp, Homo sapiens
agtatcagttgaccc

SEQ ID NO: 1318118 - DNA, 15 bp, Homo sapiens
aagtatcagttgacc

SEQ ID NO: 1318119 - DNA, 15 bp, Homo sapiens
taagtatcagttgac

SEQ ID NO: 1318120 - DNA, 15 bp, Homo sapiens
ataagtatcagttga

SEQ ID NO: 1318121 - DNA, 15 bp, Homo sapiens
aataagtatcagttg

SEQ ID NO: 1318122 - DNA, 15 bp, Homo sapiens
aaataagtatcagtt

SEQ ID NO: 1318123 - DNA, 15 bp, Homo sapiens
aaaataagtatcagt

SEQ ID NO: 1318124 - DNA, 15 bp, Homo sapiens
aaaaataagtatcag

SEQ ID NO: 1318125 - DNA, 15 bp, Homo sapiens
aaaaaataagtatca

SEQ ID NO: 1318126 - DNA, 15 bp, Homo sapiens
aaaaaaataagtatc

SEQ ID NO: 1318127 - DNA, 15 bp, Homo sapiens
aaaaaaaataagtat

SEQ ID NO: 1318128 - DNA, 15 bp, Homo sapiens
aaaaaaaaataagta

SEQ ID NO: 1318129 - DNA, 15 bp, Homo sapiens
gaaaaaaaaataagt

SEQ ID NO: 1318130 - DNA, 15 bp, Homo sapiens
ggaaaaaaaaataag

SEQ ID NO: 1318131 - DNA, 15 bp, Homo sapiens
tggaaaaaaaaataa

SEQ ID NO: 1318132 - DNA, 15 bp, Homo sapiens
ctggaaaaaaaaata

SEQ ID NO: 1318133 - DNA, 15 bp, Homo sapiens
actggaaaaaaaaat

SEQ ID NO: 1318134 - DNA, 15 bp, Homo sapiens
tactggaaaaaaaaa

SEQ ID NO: 1318135 - DNA, 15 bp, Homo sapiens
ctactggaaaaaaaa

SEQ ID NO: 1318136 - DNA, 15 bp, Homo sapiens
gctactggaaaaaaa

SEQ ID NO: 1318137 - DNA, 15 bp, Homo sapiens
tgctactggaaaaaa

SEQ ID NO: 1318138 - DNA, 15 bp, Homo sapiens
ttgctactggaaaaa

SEQ ID NO: 1318139 - DNA, 15 bp, Homo sapiens
tttgctactggaaaa

SEQ ID NO: 1318140 - DNA, 15 bp, Homo sapiens
ttttgctactggaaa

SEQ ID NO: 1318141 - DNA, 15 bp, Homo sapiens
attttgctactggaa

SEQ ID NO: 1318142 - DNA, 15 bp, Homo sapiens
tattttgctactgga

SEQ ID NO: 1318143 - DNA, 15 bp, Homo sapiens
atattttgctactgg

SEQ ID NO: 1318144 - DNA, 15 bp, Homo sapiens
ataaatattttgcta

SEQ ID NO: 1318145 - DNA, 15 bp, Homo sapiens
aataaatattttgct

SEQ ID NO: 1318146 - DNA, 15 bp, Homo sapiens
caataaatattttgc

SEQ ID NO: 1318147 - DNA, 15 bp, Homo sapiens
tcaataaatattttg

SEQ ID NO: 1318148 - DNA, 15 bp, Homo sapiens
ctcaataaatatttt

SEQ ID NO: 1318149 - DNA, 15 bp, Homo sapiens
actcaataaatattt

SEQ ID NO: 1318150 - DNA, 15 bp, Homo sapiens
cactcaataaatatt

SEQ ID NO: 1318151 - DNA, 15 bp, Homo sapiens
acactcaataaatat

SEQ ID NO: 1318152 - DNA, 15 bp, Homo sapiens
tacactcaataaata

SEQ ID NO: 1318153 - DNA, 15 bp, Homo sapiens
ttacactcaataaat

SEQ ID NO: 1318154 - DNA, 15 bp, Homo sapiens
gttacactcaataaa

SEQ ID NO: 1318155 - DNA, 15 bp, Homo sapiens
agttacactcaataa

SEQ ID NO: 1318156 - DNA, 15 bp, Homo sapiens
cagttacactcaata

SEQ ID NO: 1318157 - DNA, 15 bp, Homo sapiens
acagttacactcaat

SEQ ID NO: 1318158 - DNA, 15 bp, Homo sapiens
cacagttacactcaa

SEQ ID NO: 1318159 - DNA, 15 bp, Homo sapiens
acacagttacactca

SEQ ID NO: 1318160 - DNA, 15 bp, Homo sapiens
tacacagttacactc

SEQ ID NO: 1318161 - DNA, 15 bp, Homo sapiens
gtacacagttacact

SEQ ID NO: 1318162 - DNA, 15 bp, Homo sapiens
ggtacacagttacac

SEQ ID NO: 1318163 - DNA, 15 bp, Homo sapiens
tggtacacagttaca

SEQ ID NO: 1318164 - DNA, 15 bp, Homo sapiens
ctggtacacagttac

SEQ ID NO: 1318165 - DNA, 15 bp, Homo sapiens
cctggtacacagtta

SEQ ID NO: 1318166 - DNA, 15 bp, Homo sapiens
acctggtacacagtt

SEQ ID NO: 1318167 - DNA, 15 bp, Homo sapiens
cacctggtacacagt

SEQ ID NO: 1318168 - DNA, 15 bp, Homo sapiens
gcacctggtacacag

SEQ ID NO: 1318169 - DNA, 15 bp, Homo sapiens
agcacctggtacaca

SEQ ID NO: 1318170 - DNA, 15 bp, Homo sapiens
aagcacctggtacac

SEQ ID NO: 1318171 - DNA, 15 bp, Homo sapiens
aaagcacctggtaca

SEQ ID NO: 1318172 - DNA, 15 bp, Homo sapiens
aaaagcacctggtac

SEQ ID NO: 1318173 - DNA, 15 bp, Homo sapiens
gaaaagcacctggta

SEQ ID NO: 1318174 - DNA, 15 bp, Homo sapiens
agaaaagcacctggt

SEQ ID NO: 1318175 - DNA, 15 bp, Homo sapiens
tagaaaagcacctgg

SEQ ID NO: 1318176 - DNA, 15 bp, Homo sapiens
ctagaaaagcacctg

SEQ ID NO: 1318177 - DNA, 15 bp, Homo sapiens
cctagaaaagcacct

SEQ ID NO: 1318178 - DNA, 15 bp, Homo sapiens
acctagaaaagcacc

SEQ ID NO: 1318179 - DNA, 15 bp, Homo sapiens
cacctagaaaagcac

SEQ ID NO: 1318180 - DNA, 15 bp, Homo sapiens
gcacctagaaaagca

SEQ ID NO: 1318181 - DNA, 15 bp, Homo sapiens
agcacctagaaaagc

SEQ ID NO: 1318182 - DNA, 15 bp, Homo sapiens
cagcacctagaaaag

SEQ ID NO: 1318183 - DNA, 15 bp, Homo sapiens
ccagcacctagaaaa

SEQ ID NO: 1318184 - DNA, 15 bp, Homo sapiens
cccagcacctagaaa

SEQ ID NO: 1318185 - DNA, 15 bp, Homo sapiens
tcccagcacctagaa

SEQ ID NO: 1318186 - DNA, 15 bp, Homo sapiens
ttcccagcacctaga

SEQ ID NO: 1318187 - DNA, 15 bp, Homo sapiens
attcccagcacctag

SEQ ID NO: 1318188 - DNA, 15 bp, Homo sapiens
tattcccagcaccta

SEQ ID NO: 1318189 - DNA, 15 bp, Homo sapiens
atattcccagcacct

SEQ ID NO: 1318190 - DNA, 15 bp, Homo sapiens
tatattcccagcacc

SEQ ID NO: 1318191 - DNA, 15 bp, Homo sapiens
ctatattcccagcac

SEQ ID NO: 1318192 - DNA, 15 bp, Homo sapiens
gctatattcccagca

SEQ ID NO: 1318193 - DNA, 15 bp, Homo sapiens
tgctatattcccagc

SEQ ID NO: 1318194 - DNA, 15 bp, Homo sapiens
ctgctatattcccag

SEQ ID NO: 1318195 - DNA, 15 bp, Homo sapiens
actgctatattccca

SEQ ID NO: 1318196 - DNA, 15 bp, Homo sapiens
cactgctatattccc

SEQ ID NO: 1318197 - DNA, 15 bp, Homo sapiens
tcactgctatattcc

SEQ ID NO: 1318198 - DNA, 15 bp, Homo sapiens
ttcactgctatattc

SEQ ID NO: 1318199 - DNA, 15 bp, Homo sapiens
attcactgctatatt

SEQ ID NO: 1318200 - DNA, 15 bp, Homo sapiens
tattcactgctatat

SEQ ID NO: 1318201 - DNA, 15 bp, Homo sapiens
ttattcactgctata

SEQ ID NO: 1318202 - DNA, 15 bp, Homo sapiens
tttattcactgctat

SEQ ID NO: 1318203 - DNA, 15 bp, Homo sapiens
ttttattcactgcta

SEQ ID NO: 1318204 - DNA, 15 bp, Homo sapiens
gttttattcactgct

SEQ ID NO: 1318205 - DNA, 15 bp, Homo sapiens
tgttttattcactgc

SEQ ID NO: 1318206 - DNA, 15 bp, Homo sapiens
ttgttttattcactg

SEQ ID NO: 1318207 - DNA, 15 bp, Homo sapiens
tttgttttattcact

SEQ ID NO: 1318208 - DNA, 15 bp, Homo sapiens
ttttgttttattcac

SEQ ID NO: 1318209 - DNA, 15 bp, Homo sapiens
attttgttttattca

SEQ ID NO: 1318210 - DNA, 15 bp, Homo sapiens
gattttgttttattc

SEQ ID NO: 1318211 - DNA, 15 bp, Homo sapiens
ggattttgttttatt

SEQ ID NO: 1318212 - DNA, 15 bp, Homo sapiens
gggattttgttttat

SEQ ID NO: 1318213 - DNA, 15 bp, Homo sapiens
agggattttgtttta

SEQ ID NO: 1318214 - DNA, 15 bp, Homo sapiens
cagggattttgtttt

SEQ ID NO: 1318215 - DNA, 15 bp, Homo sapiens
tcagggattttgttt

SEQ ID NO: 1318216 - DNA, 15 bp, Homo sapiens
ctcagggattttgtt

SEQ ID NO: 1318217 - DNA, 15 bp, Homo sapiens
gctcagggattttgt

SEQ ID NO: 1318218 - DNA, 15 bp, Homo sapiens
agctcagggattttg

SEQ ID NO: 1318219 - DNA, 15 bp, Homo sapiens
aagctcagggatttt

SEQ ID NO: 1318220 - DNA, 15 bp, Homo sapiens
taagctcagggattt

SEQ ID NO: 1318221 - DNA, 15 bp, Homo sapiens
ataagctcagggatt

SEQ ID NO: 1318222 - DNA, 15 bp, Homo sapiens
tataagctcagggat

SEQ ID NO: 1318223 - DNA, 15 bp, Homo sapiens
atataagctcaggga

SEQ ID NO: 1318224 - DNA, 15 bp, Homo sapiens
aatataagctcaggg

SEQ ID NO: 1318225 - DNA, 15 bp, Homo sapiens
aaatataagctcagg

SEQ ID NO: 1318226 - DNA, 15 bp, Homo sapiens
aaaatataagctcag

SEQ ID NO: 1318227 - DNA, 15 bp, Homo sapiens
taaaatataagctca

SEQ ID NO: 1318228 - DNA, 15 bp, Homo sapiens
ataaaatataagctc

SEQ ID NO: 1318229 - DNA, 15 bp, Homo sapiens
aataaaatataagct

SEQ ID NO: 1318230 - DNA, 15 bp, Homo sapiens
aaataaaatataagc

SEQ ID NO: 1318231 - DNA, 15 bp, Homo sapiens
caaataaaatataag

SEQ ID NO: 1318232 - DNA, 15 bp, Homo sapiens
ccaaataaaatataa

SEQ ID NO: 1318233 - DNA, 15 bp, Homo sapiens
tccaaataaaatata

SEQ ID NO: 1318234 - DNA, 15 bp, Homo sapiens
ctccaaataaaatat

SEQ ID NO: 1318235 - DNA, 15 bp, Homo sapiens
tctccaaataaaata

SEQ ID NO: 1318236 - DNA, 15 bp, Homo sapiens
ttctccaaataaaat

SEQ ID NO: 1318237 - DNA, 15 bp, Homo sapiens
cttctccaaataaaa

SEQ ID NO: 1318238 - DNA, 15 bp, Homo sapiens
tcttctccaaataaa

SEQ ID NO: 1318239 - DNA, 15 bp, Homo sapiens
gtcttctccaaataa

SEQ ID NO: 1318240 - DNA, 15 bp, Homo sapiens
tgtcttctccaaata

SEQ ID NO: 1318241 - DNA, 15 bp, Homo sapiens
ttgtcttctccaaat

SEQ ID NO: 1318242 - DNA, 15 bp, Homo sapiens
attgtcttctccaaa

SEQ ID NO: 1318243 - DNA, 15 bp, Homo sapiens
gattgtcttctccaa

SEQ ID NO: 1318244 - DNA, 15 bp, Homo sapiens
tgattgtcttctcca

SEQ ID NO: 1318245 - DNA, 15 bp, Homo sapiens
ttgattgtcttctcc

SEQ ID NO: 1318246 - DNA, 15 bp, Homo sapiens
attgattgtcttctc

SEQ ID NO: 1318247 - DNA, 15 bp, Homo sapiens
tattgattgtcttct

SEQ ID NO: 1318248 - DNA, 15 bp, Homo sapiens
ttattgattgtcttc

SEQ ID NO: 1318249 - DNA, 15 bp, Homo sapiens
tttattgattgtctt

SEQ ID NO: 1318250 - DNA, 15 bp, Homo sapiens
atttattgattgtct

SEQ ID NO: 1318251 - DNA, 15 bp, Homo sapiens
tatttattgattgtc

SEQ ID NO: 1318252 - DNA, 15 bp, Homo sapiens
ttatttattgattgt

SEQ ID NO: 1318253 - DNA, 15 bp, Homo sapiens
tttatttattgattg

SEQ ID NO: 1318254 - DNA, 15 bp, Homo sapiens
gtttatttattgatt

SEQ ID NO: 1318255 - DNA, 15 bp, Homo sapiens
tgtttatttattgat

SEQ ID NO: 1318256 - DNA, 15 bp, Homo sapiens
ttgtttatttattga

SEQ ID NO: 1318257 - DNA, 15 bp, Homo sapiens
attgtttatttattg

SEQ ID NO: 1318258 - DNA, 15 bp, Homo sapiens
aattgtttatttatt

SEQ ID NO: 1318259 - DNA, 15 bp, Homo sapiens
taattgtttatttat

SEQ ID NO: 1318260 - DNA, 15 bp, Homo sapiens
ataattgtttattta

SEQ ID NO: 1318261 - DNA, 15 bp, Homo sapiens
tataattgtttattt

SEQ ID NO: 1318262 - DNA, 15 bp, Homo sapiens
gtataattgtttatt

SEQ ID NO: 1318263 - DNA, 15 bp, Homo sapiens
tgtataattgtttat

SEQ ID NO: 1318264 - DNA, 15 bp, Homo sapiens
ttgtataattgttta

SEQ ID NO: 1318265 - DNA, 15 bp, Homo sapiens
gttgtataattgttt

SEQ ID NO: 1318266 - DNA, 15 bp, Homo sapiens
agttgtataattgtt

SEQ ID NO: 1318267 - DNA, 15 bp, Homo sapiens
cagttgtataattgt

SEQ ID NO: 1318268 - DNA, 15 bp, Homo sapiens
ccagttgtataattg

SEQ ID NO: 1318269 - DNA, 15 bp, Homo sapiens
accagttgtataatt

SEQ ID NO: 1318270 - DNA, 15 bp, Homo sapiens
gaccagttgtataat

SEQ ID NO: 1318271 - DNA, 15 bp, Homo sapiens
tgaccagttgtataa

SEQ ID NO: 1318272 - DNA, 15 bp, Homo sapiens
atgaccagttgtata

SEQ ID NO: 1318273 - DNA, 15 bp, Homo sapiens
tatgaccagttgtat

SEQ ID NO: 1318274 - DNA, 15 bp, Homo sapiens
atatgaccagttgta

SEQ ID NO: 1318275 - DNA, 15 bp, Homo sapiens
catatgaccagttgt

SEQ ID NO: 1318276 - DNA, 15 bp, Homo sapiens
ccatatgaccagttg

SEQ ID NO: 1318277 - DNA, 15 bp, Homo sapiens
accatatgaccagtt

SEQ ID NO: 1318278 - DNA, 15 bp, Homo sapiens
caccatatgaccagt

SEQ ID NO: 1318279 - DNA, 15 bp, Homo sapiens
tcaccatatgaccag

SEQ ID NO: 1318280 - DNA, 15 bp, Homo sapiens
atcaccatatgacca

SEQ ID NO: 1318281 - DNA, 15 bp, Homo sapiens
tatcaccatatgacc

SEQ ID NO: 1318282 - DNA, 15 bp, Homo sapiens
ttatcaccatatgac

SEQ ID NO: 1318283 - DNA, 15 bp, Homo sapiens
cttatcaccatatga

SEQ ID NO: 1318284 - DNA, 15 bp, Homo sapiens
acttatcaccatatg

SEQ ID NO: 1318285 - DNA, 15 bp, Homo sapiens
aacttatcaccatat

SEQ ID NO: 1318286 - DNA, 15 bp, Homo sapiens
gaacttatcaccata

SEQ ID NO: 1318287 - DNA, 15 bp, Homo sapiens
agaacttatcaccat

SEQ ID NO: 1318288 - DNA, 15 bp, Homo sapiens
gagaacttatcacca

SEQ ID NO: 1318289 - DNA, 15 bp, Homo sapiens
agagaacttatcacc

SEQ ID NO: 1318290 - DNA, 15 bp, Homo sapiens
cagagaacttatcac

SEQ ID NO: 1318291 - DNA, 15 bp, Homo sapiens
tcagagaacttatca

SEQ ID NO: 1318292 - DNA, 15 bp, Homo sapiens
ttcagagaacttatc

SEQ ID NO: 1318293 - DNA, 15 bp, Homo sapiens
cttcagagaacttat

SEQ ID NO: 1318294 - DNA, 15 bp, Homo sapiens
tcttcagagaactta

SEQ ID NO: 1318295 - DNA, 15 bp, Homo sapiens
ttcttcagagaactt

SEQ ID NO: 1318296 - DNA, 15 bp, Homo sapiens
tttcttcagagaact

SEQ ID NO: 1318297 - DNA, 15 bp, Homo sapiens
ttttcttcagagaac

SEQ ID NO: 1318298 - DNA, 15 bp, Homo sapiens
tttttcttcagagaa

SEQ ID NO: 1318299 - DNA, 15 bp, Homo sapiens
atttttcttcagaga

SEQ ID NO: 1318300 - DNA, 15 bp, Homo sapiens
tatttttcttcagag

SEQ ID NO: 1318301 - DNA, 15 bp, Homo sapiens
attatttttcttcag

SEQ ID NO: 1318302 - DNA, 15 bp, Homo sapiens
aattatttttcttca

SEQ ID NO: 1318303 - DNA, 15 bp, Homo sapiens
aaattatttttcttc

SEQ ID NO: 1318304 - DNA, 15 bp, Homo sapiens
taaattatttttctt

SEQ ID NO: 1318305 - DNA, 15 bp, Homo sapiens
ctaaattatttttct

SEQ ID NO: 1318306 - DNA, 15 bp, Homo sapiens
cctaaattatttttc

SEQ ID NO: 1318307 - DNA, 15 bp, Homo sapiens
tcctaaattattttt

SEQ ID NO: 1318308 - DNA, 15 bp, Homo sapiens
ctcctaaattatttt

SEQ ID NO: 1318309 - DNA, 15 bp, Homo sapiens
cctcctaaattattt

SEQ ID NO: 1318310 - DNA, 15 bp, Homo sapiens
tcctcctaaattatt

SEQ ID NO: 1318311 - DNA, 15 bp, Homo sapiens
ttcctcctaaattat

SEQ ID NO: 1318312 - DNA, 15 bp, Homo sapiens
tttcctcctaaatta

SEQ ID NO: 1318313 - DNA, 15 bp, Homo sapiens
ttttcctcctaaatt

SEQ ID NO: 1318314 - DNA, 15 bp, Homo sapiens
tttttcctcctaaat

SEQ ID NO: 1318315 - DNA, 15 bp, Homo sapiens
ctttttcctcctaaa

SEQ ID NO: 1318316 - DNA, 15 bp, Homo sapiens
cctttttcctcctaa

SEQ ID NO: 1318317 - DNA, 15 bp, Homo sapiens
ccctttttcctccta

SEQ ID NO: 1318318 - DNA, 15 bp, Homo sapiens
cccctttttcctcct

SEQ ID NO: 1318319 - DNA, 15 bp, Homo sapiens
ccccctttttcctcc

SEQ ID NO: 1318320 - DNA, 15 bp, Homo sapiens
accccctttttcctc

SEQ ID NO: 1318321 - DNA, 15 bp, Homo sapiens
caccccctttttcct

SEQ ID NO: 1318322 - DNA, 15 bp, Homo sapiens
ccaccccctttttcc

SEQ ID NO: 1318323 - DNA, 15 bp, Homo sapiens
cccaccccctttttc

SEQ ID NO: 1318324 - DNA, 15 bp, Homo sapiens
gcccacccccttttt

SEQ ID NO: 1318325 - DNA, 15 bp, Homo sapiens
agcccaccccctttt

SEQ ID NO: 1318326 - DNA, 15 bp, Homo sapiens
aagcccacccccttt

SEQ ID NO: 1318327 - DNA, 15 bp, Homo sapiens
aaagcccaccccctt

SEQ ID NO: 1318328 - DNA, 15 bp, Homo sapiens
aaaagcccaccccct

SEQ ID NO: 1318329 - DNA, 15 bp, Homo sapiens
taaaagcccaccccc

SEQ ID NO: 1318330 - DNA, 15 bp, Homo sapiens
gtaaaagcccacccc

SEQ ID NO: 1318331 - DNA, 15 bp, Homo sapiens
agtaaaagcccaccc

SEQ ID NO: 1318332 - DNA, 15 bp, Homo sapiens
cagtaaaagcccacc

SEQ ID NO: 1318333 - DNA, 15 bp, Homo sapiens
acagtaaaagcccac

SEQ ID NO: 1318334 - DNA, 15 bp, Homo sapiens
aacagtaaaagccca

SEQ ID NO: 1318335 - DNA, 15 bp, Homo sapiens
gaacagtaaaagccc

SEQ ID NO: 1318336 - DNA, 15 bp, Homo sapiens
agaacagtaaaagcc

SEQ ID NO: 1318337 - DNA, 15 bp, Homo sapiens
tagaacagtaaaagc

SEQ ID NO: 1318338 - DNA, 15 bp, Homo sapiens
gtagaacagtaaaag

SEQ ID NO: 1318339 - DNA, 15 bp, Homo sapiens
tgtagaacagtaaaa

SEQ ID NO: 1318340 - DNA, 15 bp, Homo sapiens
atgtagaacagtaaa

SEQ ID NO: 1318341 - DNA, 15 bp, Homo sapiens
tatgtagaacagtaa

SEQ ID NO: 1318342 - DNA, 15 bp, Homo sapiens
ctatgtagaacagta

SEQ ID NO: 1318343 - DNA, 15 bp, Homo sapiens
cctatgtagaacagt

SEQ ID NO: 1318344 - DNA, 15 bp, Homo sapiens
ccctatgtagaacag

SEQ ID NO: 1318345 - DNA, 15 bp, Homo sapiens
tccctatgtagaaca

SEQ ID NO: 1318346 - DNA, 15 bp, Homo sapiens
ctccctatgtagaac

SEQ ID NO: 1318347 - DNA, 15 bp, Homo sapiens
cctccctatgtagaa

SEQ ID NO: 1318348 - DNA, 15 bp, Homo sapiens
acctccctatgtaga

SEQ ID NO: 1318349 - DNA, 15 bp, Homo sapiens
gacctccctatgtag

SEQ ID NO: 1318350 - DNA, 15 bp, Homo sapiens
tgacctccctatgta

SEQ ID NO: 1318351 - DNA, 15 bp, Homo sapiens
ttgacctccctatgt

SEQ ID NO: 1318352 - DNA, 15 bp, Homo sapiens
tttgacctccctatg

SEQ ID NO: 1318353 - DNA, 15 bp, Homo sapiens
ctttgacctccctat

SEQ ID NO: 1318354 - DNA, 15 bp, Homo sapiens
tctttgacctcccta

SEQ ID NO: 1318355 - DNA, 15 bp, Homo sapiens
ttctttgacctccct

SEQ ID NO: 1318356 - DNA, 15 bp, Homo sapiens
cttctttgacctccc

SEQ ID NO: 1318357 - DNA, 15 bp, Homo sapiens
ccttctttgacctcc

SEQ ID NO: 1318358 - DNA, 15 bp, Homo sapiens
gccttctttgacctc

SEQ ID NO: 1318359 - DNA, 15 bp, Homo sapiens
ggccttctttgacct

SEQ ID NO: 1318360 - DNA, 15 bp, Homo sapiens
aggccttctttgacc

SEQ ID NO: 1318361 - DNA, 15 bp, Homo sapiens
aaggccttctttgac

SEQ ID NO: 1318362 - DNA, 15 bp, Homo sapiens
caaggccttctttga

SEQ ID NO: 1318363 - DNA, 15 bp, Homo sapiens
gcaaggccttctttg

SEQ ID NO: 1318364 - DNA, 15 bp, Homo sapiens
agcaaggccttcttt

SEQ ID NO: 1318365 - DNA, 15 bp, Homo sapiens
tagcaaggccttctt

SEQ ID NO: 1318366 - DNA, 15 bp, Homo sapiens
ttagcaaggccttct

SEQ ID NO: 1318367 - DNA, 15 bp, Homo sapiens
attagcaaggccttc

SEQ ID NO: 1318368 - DNA, 15 bp, Homo sapiens
tattagcaaggcctt

SEQ ID NO: 1318369 - DNA, 15 bp, Homo sapiens
ttattagcaaggcct

SEQ ID NO: 1318370 - DNA, 15 bp, Homo sapiens
cttattagcaaggcc

SEQ ID NO: 1318371 - DNA, 15 bp, Homo sapiens
ccttattagcaaggc

SEQ ID NO: 1318372 - DNA, 15 bp, Homo sapiens
cccttattagcaagg

SEQ ID NO: 1318373 - DNA, 15 bp, Homo sapiens
ccccttattagcaag

SEQ ID NO: 1318374 - DNA, 15 bp, Homo sapiens
tccccttattagcaa

SEQ ID NO: 1318375 - DNA, 15 bp, Homo sapiens
gtccccttattagca

SEQ ID NO: 1318376 - DNA, 15 bp, Homo sapiens
tgtccccttattagc

SEQ ID NO: 1318377 - DNA, 15 bp, Homo sapiens
atgtccccttattag

SEQ ID NO: 1318378 - DNA, 15 bp, Homo sapiens
aatgtccccttatta

SEQ ID NO: 1318379 - DNA, 15 bp, Homo sapiens
aaatgtccccttatt

SEQ ID NO: 1318380 - DNA, 15 bp, Homo sapiens
caaatgtccccttat

SEQ ID NO: 1318381 - DNA, 15 bp, Homo sapiens
tcaaatgtcccctta

SEQ ID NO: 1318382 - DNA, 15 bp, Homo sapiens
ttcaaatgtcccctt

SEQ ID NO: 1318383 - DNA, 15 bp, Homo sapiens
gttcaaatgtcccct

SEQ ID NO: 1318384 - DNA, 15 bp, Homo sapiens
tgttcaaatgtcccc

SEQ ID NO: 1318385 - DNA, 15 bp, Homo sapiens
ctgttcaaatgtccc

SEQ ID NO: 1318386 - DNA, 15 bp, Homo sapiens
tctgttcaaatgtcc

SEQ ID NO: 1318387 - DNA, 15 bp, Homo sapiens
ctctgttcaaatgtc

SEQ ID NO: 1318388 - DNA, 15 bp, Homo sapiens
tctctgttcaaatgt

SEQ ID NO: 1318389 - DNA, 15 bp, Homo sapiens
gtctctgttcaaatg

SEQ ID NO: 1318390 - DNA, 15 bp, Homo sapiens
agtctctgttcaaat

SEQ ID NO: 1318391 - DNA, 15 bp, Homo sapiens
aagtctctgttcaaa

SEQ ID NO: 1318392 - DNA, 15 bp, Homo sapiens
caagtctctgttcaa

SEQ ID NO: 1318393 - DNA, 15 bp, Homo sapiens
tcaagtctctgttca

SEQ ID NO: 1318394 - DNA, 15 bp, Homo sapiens
ttcaagtctctgttc

SEQ ID NO: 1318395 - DNA, 15 bp, Homo sapiens
tttcaagtctctgtt

SEQ ID NO: 1318396 - DNA, 15 bp, Homo sapiens
ctttcaagtctctgt

SEQ ID NO: 1318397 - DNA, 15 bp, Homo sapiens
tctttcaagtctctg

SEQ ID NO: 1318398 - DNA, 15 bp, Homo sapiens
ttctttcaagtctct

SEQ ID NO: 1318399 - DNA, 15 bp, Homo sapiens
cttctttcaagtctc

SEQ ID NO: 1318400 - DNA, 15 bp, Homo sapiens
acttctttcaagtct

SEQ ID NO: 1318401 - DNA, 15 bp, Homo sapiens
cacttctttcaagtc

SEQ ID NO: 1318402 - DNA, 15 bp, Homo sapiens
tcacttctttcaagt

SEQ ID NO: 1318403 - DNA, 15 bp, Homo sapiens
ttcacttctttcaag

SEQ ID NO: 1318404 - DNA, 15 bp, Homo sapiens
cttcacttctttcaa

SEQ ID NO: 1318405 - DNA, 15 bp, Homo sapiens
ccttcacttctttca

SEQ ID NO: 1318406 - DNA, 15 bp, Homo sapiens
tccttcacttctttc

SEQ ID NO: 1318407 - DNA, 15 bp, Homo sapiens
ttccttcacttcttt

SEQ ID NO: 1318408 - DNA, 15 bp, Homo sapiens
attccttcacttctt

SEQ ID NO: 1318409 - DNA, 15 bp, Homo sapiens
cattccttcacttct

SEQ ID NO: 1318410 - DNA, 15 bp, Homo sapiens
tcattccttcacttc

SEQ ID NO: 1318411 - DNA, 15 bp, Homo sapiens
ttcattccttcactt

SEQ ID NO: 1318412 - DNA, 15 bp, Homo sapiens
attcattccttcact

SEQ ID NO: 1318413 - DNA, 15 bp, Homo sapiens
gattcattccttcac

SEQ ID NO: 1318414 - DNA, 15 bp, Homo sapiens
tgattcattccttca

SEQ ID NO: 1318415 - DNA, 15 bp, Homo sapiens
atgattcattccttc

SEQ ID NO: 1318416 - DNA, 15 bp, Homo sapiens
catgattcattcctt

SEQ ID NO: 1318417 - DNA, 15 bp, Homo sapiens
acatgattcattcct

SEQ ID NO: 1318418 - DNA, 15 bp, Homo sapiens
cacatgattcattcc

SEQ ID NO: 1318419 - DNA, 15 bp, Homo sapiens
ccacatgattcattc

SEQ ID NO: 1318420 - DNA, 15 bp, Homo sapiens
accacatgattcatt

SEQ ID NO: 1318421 - DNA, 15 bp, Homo sapiens
aaccacatgattcat

SEQ ID NO: 1318422 - DNA, 15 bp, Homo sapiens
caaccacatgattca

SEQ ID NO: 1318423 - DNA, 15 bp, Homo sapiens
acaaccacatgattc

SEQ ID NO: 1318424 - DNA, 15 bp, Homo sapiens
gacaaccacatgatt

SEQ ID NO: 1318425 - DNA, 15 bp, Homo sapiens
agacaaccacatgat

SEQ ID NO: 1318426 - DNA, 15 bp, Homo sapiens
gagacaaccacatga

SEQ ID NO: 1318427 - DNA, 15 bp, Homo sapiens
tgagacaaccacatg

SEQ ID NO: 1318428 - DNA, 15 bp, Homo sapiens
ctgagacaaccacat

SEQ ID NO: 1318429 - DNA, 15 bp, Homo sapiens
cctgagacaaccaca

SEQ ID NO: 1318430 - DNA, 15 bp, Homo sapiens
ccctgagacaaccac

SEQ ID NO: 1318431 - DNA, 15 bp, Homo sapiens
tccctgagacaacca

SEQ ID NO: 1318432 - DNA, 15 bp, Homo sapiens
ttccctgagacaacc

SEQ ID NO: 1318433 - DNA, 15 bp, Homo sapiens
attccctgagacaac

SEQ ID NO: 1318434 - DNA, 15 bp, Homo sapiens
aattccctgagacaa

SEQ ID NO: 1318435 - DNA, 15 bp, Homo sapiens
taattccctgagaca

SEQ ID NO: 1318436 - DNA, 15 bp, Homo sapiens
ttaattccctgagac

SEQ ID NO: 1318437 - DNA, 15 bp, Homo sapiens
gttaattccctgaga

SEQ ID NO: 1318438 - DNA, 15 bp, Homo sapiens
ggttaattccctgag

SEQ ID NO: 1318439 - DNA, 15 bp, Homo sapiens
aggttaattccctga

SEQ ID NO: 1318440 - DNA, 15 bp, Homo sapiens
aaggttaattccctg

SEQ ID NO: 1318441 - DNA, 15 bp, Homo sapiens
aaaggttaattccct

SEQ ID NO: 1318442 - DNA, 15 bp, Homo sapiens
taaaggttaattccc

SEQ ID NO: 1318443 - DNA, 15 bp, Homo sapiens
ttaaaggttaattcc

SEQ ID NO: 1318444 - DNA, 15 bp, Homo sapiens
gttaaaggttaattc

SEQ ID NO: 1318445 - DNA, 15 bp, Homo sapiens
agttaaaggttaatt

SEQ ID NO: 1318446 - DNA, 15 bp, Homo sapiens
cagttaaaggttaat

SEQ ID NO: 1318447 - DNA, 15 bp, Homo sapiens
tcagttaaaggttaa

SEQ ID NO: 1318448 - DNA, 15 bp, Homo sapiens
atcagttaaaggtta

SEQ ID NO: 1318449 - DNA, 15 bp, Homo sapiens
gatcagttaaaggtt

SEQ ID NO: 1318450 - DNA, 15 bp, Homo sapiens
tgatcagttaaaggt

SEQ ID NO: 1318451 - DNA, 15 bp, Homo sapiens
ttgatcagttaaagg

SEQ ID NO: 1318452 - DNA, 15 bp, Homo sapiens
gttgatcagttaaag

SEQ ID NO: 1318453 - DNA, 15 bp, Homo sapiens
tgttgatcagttaaa

SEQ ID NO: 1318454 - DNA, 15 bp, Homo sapiens
atgttgatcagttaa

SEQ ID NO: 1318455 - DNA, 15 bp, Homo sapiens
gatgttgatcagtta

SEQ ID NO: 1318456 - DNA, 15 bp, Homo sapiens
agatgttgatcagtt

SEQ ID NO: 1318457 - DNA, 15 bp, Homo sapiens
aagatgttgatcagt

SEQ ID NO: 1318458 - DNA, 15 bp, Homo sapiens
aaagatgttgatcag

SEQ ID NO: 1318459 - DNA, 15 bp, Homo sapiens
taaagatgttgatca

SEQ ID NO: 1318460 - DNA, 15 bp, Homo sapiens
ttaaagatgttgatc

SEQ ID NO: 1318461 - DNA, 15 bp, Homo sapiens
tttaaagatgttgat

SEQ ID NO: 1318462 - DNA, 15 bp, Homo sapiens
ttttaaagatgttga

SEQ ID NO: 1318463 - DNA, 15 bp, Homo sapiens
cttttaaagatgttg

SEQ ID NO: 1318464 - DNA, 15 bp, Homo sapiens
ccttttaaagatgtt

SEQ ID NO: 1318465 - DNA, 15 bp, Homo sapiens
gccttttaaagatgt

SEQ ID NO: 1318466 - DNA, 15 bp, Homo sapiens
ggccttttaaagatg

SEQ ID NO: 1318467 - DNA, 15 bp, Homo sapiens
aggccttttaaagat

SEQ ID NO: 1318468 - DNA, 15 bp, Homo sapiens
aaggccttttaaaga

SEQ ID NO: 1318469 - DNA, 15 bp, Homo sapiens
gaaggccttttaaag

SEQ ID NO: 1318470 - DNA, 15 bp, Homo sapiens
agaaggccttttaaa

SEQ ID NO: 1318471 - DNA, 15 bp, Homo sapiens
gagaaggccttttaa

SEQ ID NO: 1318472 - DNA, 15 bp, Homo sapiens
ggagaaggcctttta

SEQ ID NO: 1318473 - DNA, 15 bp, Homo sapiens
tggagaaggcctttt

SEQ ID NO: 1318474 - DNA, 15 bp, Homo sapiens
ttggagaaggccttt

SEQ ID NO: 1318475 - DNA, 15 bp, Homo sapiens
attggagaaggcctt

SEQ ID NO: 1318476 - DNA, 15 bp, Homo sapiens
gattggagaaggcct

SEQ ID NO: 1318477 - DNA, 15 bp, Homo sapiens
agattggagaaggcc

SEQ ID NO: 1318478 - DNA, 15 bp, Homo sapiens
cagattggagaaggc

SEQ ID NO: 1318479 - DNA, 15 bp, Homo sapiens
acagattggagaagg

SEQ ID NO: 1318480 - DNA, 15 bp, Homo sapiens
tacagattggagaag

SEQ ID NO: 1318481 - DNA, 15 bp, Homo sapiens
atacagattggagaa

SEQ ID NO: 1318482 - DNA, 15 bp, Homo sapiens
aatacagattggaga

SEQ ID NO: 1318483 - DNA, 15 bp, Homo sapiens
aaatacagattggag

SEQ ID NO: 1318484 - DNA, 15 bp, Homo sapiens
gaaatacagattgga

SEQ ID NO: 1318485 - DNA, 15 bp, Homo sapiens
ggaaatacagattgg

SEQ ID NO: 1318486 - DNA, 15 bp, Homo sapiens
tggaaatacagattg

SEQ ID NO: 1318487 - DNA, 15 bp, Homo sapiens
ctggaaatacagatt

SEQ ID NO: 1318488 - DNA, 15 bp, Homo sapiens
gctggaaatacagat

SEQ ID NO: 1318489 - DNA, 15 bp, Homo sapiens
agctggaaatacaga

SEQ ID NO: 1318490 - DNA, 15 bp, Homo sapiens
gagctggaaatacag

SEQ ID NO: 1318491 - DNA, 15 bp, Homo sapiens
tgagctggaaataca

SEQ ID NO: 1318492 - DNA, 15 bp, Homo sapiens
gtgagctggaaatac

SEQ ID NO: 1318493 - DNA, 15 bp, Homo sapiens
ggtgagctggaaata

SEQ ID NO: 1318494 - DNA, 15 bp, Homo sapiens
aggtgagctggaaat

SEQ ID NO: 1318495 - DNA, 15 bp, Homo sapiens
gaggtgagctggaaa

SEQ ID NO: 1318496 - DNA, 15 bp, Homo sapiens
ggaggtgagctggaa

SEQ ID NO: 1318497 - DNA, 15 bp, Homo sapiens
gggaggtgagctgga

SEQ ID NO: 1318498 - DNA, 15 bp, Homo sapiens
tgggaggtgagctgg

SEQ ID NO: 1318499 - DNA, 15 bp, Homo sapiens
ctgggaggtgagctg

SEQ ID NO: 1318500 - DNA, 15 bp, Homo sapiens
tctgggaggtgagct

SEQ ID NO: 1318501 - DNA, 15 bp, Homo sapiens
ttctgggaggtgagc

SEQ ID NO: 1318502 - DNA, 15 bp, Homo sapiens
tttctgggaggtgag

SEQ ID NO: 1318503 - DNA, 15 bp, Homo sapiens
atttctgggaggtga

SEQ ID NO: 1318504 - DNA, 15 bp, Homo sapiens
aatttctgggaggtg

SEQ ID NO: 1318505 - DNA, 15 bp, Homo sapiens
gaatttctgggaggt

SEQ ID NO: 1318506 - DNA, 15 bp, Homo sapiens
tgaatttctgggagg

SEQ ID NO: 1318507 - DNA, 15 bp, Homo sapiens
gtgaatttctgggag

SEQ ID NO: 1318508 - DNA, 15 bp, Homo sapiens
agtgaatttctggga

SEQ ID NO: 1318509 - DNA, 15 bp, Homo sapiens
gagtgaatttctggg

SEQ ID NO: 1318510 - DNA, 15 bp, Homo sapiens
tgagtgaatttctgg

SEQ ID NO: 1318511 - DNA, 15 bp, Homo sapiens
gtgagtgaatttctg

SEQ ID NO: 1318512 - DNA, 15 bp, Homo sapiens
ggtgagtgaatttct

SEQ ID NO: 1318513 - DNA, 15 bp, Homo sapiens
tggtgagtgaatttc

SEQ ID NO: 1318514 - DNA, 15 bp, Homo sapiens
atggtgagtgaattt

SEQ ID NO: 1318515 - DNA, 15 bp, Homo sapiens
catggtgagtgaatt

SEQ ID NO: 1318516 - DNA, 15 bp, Homo sapiens
acatggtgagtgaat

SEQ ID NO: 1318517 - DNA, 15 bp, Homo sapiens
aacatggtgagtgaa

SEQ ID NO: 1318518 - DNA, 15 bp, Homo sapiens
gaacatggtgagtga

SEQ ID NO: 1318519 - DNA, 15 bp, Homo sapiens
tgaacatggtgagtg

SEQ ID NO: 1318520 - DNA, 15 bp, Homo sapiens
atgaacatggtgagt

SEQ ID NO: 1318521 - DNA, 15 bp, Homo sapiens
catgaacatggtgag

SEQ ID NO: 1318522 - DNA, 15 bp, Homo sapiens
acatgaacatggtga

SEQ ID NO: 1318523 - DNA, 15 bp, Homo sapiens
gacatgaacatggtg

SEQ ID NO: 1318524 - DNA, 15 bp, Homo sapiens
ggacatgaacatggt

SEQ ID NO: 1318525 - DNA, 15 bp, Homo sapiens
gggacatgaacatgg

SEQ ID NO: 1318526 - DNA, 15 bp, Homo sapiens
ggggacatgaacatg

SEQ ID NO: 1318527 - DNA, 15 bp, Homo sapiens
tggggacatgaacat

SEQ ID NO: 1318528 - DNA, 15 bp, Homo sapiens
ttggggacatgaaca

SEQ ID NO: 1318529 - DNA, 15 bp, Homo sapiens
cttggggacatgaac

SEQ ID NO: 1318530 - DNA, 15 bp, Homo sapiens
tcttggggacatgaa

SEQ ID NO: 1318531 - DNA, 15 bp, Homo sapiens
atcttggggacatga

SEQ ID NO: 1318532 - DNA, 15 bp, Homo sapiens
gatcttggggacatg

SEQ ID NO: 1318533 - DNA, 15 bp, Homo sapiens
agatcttggggacat

SEQ ID NO: 1318534 - DNA, 15 bp, Homo sapiens
aagatcttggggaca

SEQ ID NO: 1318535 - DNA, 15 bp, Homo sapiens
aaagatcttggggac

SEQ ID NO: 1318536 - DNA, 15 bp, Homo sapiens
caaagatcttgggga

SEQ ID NO: 1318537 - DNA, 15 bp, Homo sapiens
ccaaagatcttgggg

SEQ ID NO: 1318538 - DNA, 15 bp, Homo sapiens
cccaaagatcttggg

SEQ ID NO: 1318539 - DNA, 15 bp, Homo sapiens
ccccaaagatcttgg

SEQ ID NO: 1318540 - DNA, 15 bp, Homo sapiens
gccccaaagatcttg

SEQ ID NO: 1318541 - DNA, 15 bp, Homo sapiens
tgccccaaagatctt

SEQ ID NO: 1318542 - DNA, 15 bp, Homo sapiens
ttgccccaaagatct

SEQ ID NO: 1318543 - DNA, 15 bp, Homo sapiens
tttgccccaaagatc

SEQ ID NO: 1318544 - DNA, 15 bp, Homo sapiens
atttgccccaaagat

SEQ ID NO: 1318545 - DNA, 15 bp, Homo sapiens
tatttgccccaaaga

SEQ ID NO: 1318546 - DNA, 15 bp, Homo sapiens
ctatttgccccaaag

SEQ ID NO: 1318547 - DNA, 15 bp, Homo sapiens
tctatttgccccaaa

SEQ ID NO: 1318548 - DNA, 15 bp, Homo sapiens
ttctatttgccccaa

SEQ ID NO: 1318549 - DNA, 15 bp, Homo sapiens
tttctatttgcccca

SEQ ID NO: 1318550 - DNA, 15 bp, Homo sapiens
atttctatttgcccc

SEQ ID NO: 1318551 - DNA, 15 bp, Homo sapiens
aatttctatttgccc

SEQ ID NO: 1318552 - DNA, 15 bp, Homo sapiens
aaatttctatttgcc

SEQ ID NO: 1318553 - DNA, 15 bp, Homo sapiens
gaaatttctatttgc

SEQ ID NO: 1318554 - DNA, 15 bp, Homo sapiens
agaaatttctatttg

SEQ ID NO: 1318555 - DNA, 15 bp, Homo sapiens
tagaaatttctattt

SEQ ID NO: 1318556 - DNA, 15 bp, Homo sapiens
ttagaaatttctatt

SEQ ID NO: 1318557 - DNA, 15 bp, Homo sapiens
tttagaaatttctat

SEQ ID NO: 1318558 - DNA, 15 bp, Homo sapiens
gtttagaaatttcta

SEQ ID NO: 1318559 - DNA, 15 bp, Homo sapiens
tgtttagaaatttct

SEQ ID NO: 1318560 - DNA, 15 bp, Homo sapiens
ctgtttagaaatttc

SEQ ID NO: 1318561 - DNA, 15 bp, Homo sapiens
actgtttagaaattt

SEQ ID NO: 1318562 - DNA, 15 bp, Homo sapiens
tactgtttagaaatt

SEQ ID NO: 1318563 - DNA, 15 bp, Homo sapiens
atactgtttagaaat

SEQ ID NO: 1318564 - DNA, 15 bp, Homo sapiens
aatactgtttagaaa

SEQ ID NO: 1318565 - DNA, 15 bp, Homo sapiens
aaatactgtttagaa

SEQ ID NO: 1318566 - DNA, 15 bp, Homo sapiens
gaaatactgtttaga

SEQ ID NO: 1318567 - DNA, 15 bp, Homo sapiens
tgaaatactgtttag

SEQ ID NO: 1318568 - DNA, 15 bp, Homo sapiens
ttgaaatactgttta

SEQ ID NO: 1318569 - DNA, 15 bp, Homo sapiens
gttgaaatactgttt

SEQ ID NO: 1318570 - DNA, 15 bp, Homo sapiens
agttgaaatactgtt

SEQ ID NO: 1318571 - DNA, 15 bp, Homo sapiens
aagttgaaatactgt

SEQ ID NO: 1318572 - DNA, 15 bp, Homo sapiens
caagttgaaatactg

SEQ ID NO: 1318573 - DNA, 15 bp, Homo sapiens
ccaagttgaaatact

SEQ ID NO: 1318574 - DNA, 15 bp, Homo sapiens
accaagttgaaatac

SEQ ID NO: 1318575 - DNA, 15 bp, Homo sapiens
taccaagttgaaata

SEQ ID NO: 1318576 - DNA, 15 bp, Homo sapiens
ttaccaagttgaaat

SEQ ID NO: 1318577 - DNA, 15 bp, Homo sapiens
cttaccaagttgaaa

SEQ ID NO: 1318578 - DNA, 15 bp, Homo sapiens
tcttaccaagttgaa

SEQ ID NO: 1318579 - DNA, 15 bp, Homo sapiens
atcttaccaagttga

SEQ ID NO: 1318580 - DNA, 15 bp, Homo sapiens
aatcttaccaagttg

SEQ ID NO: 1318581 - DNA, 15 bp, Homo sapiens
gaatcttaccaagtt

SEQ ID NO: 1318582 - DNA, 15 bp, Homo sapiens
agaatcttaccaagt

SEQ ID NO: 1318583 - DNA, 15 bp, Homo sapiens
tagaatcttaccaag

SEQ ID NO: 1318584 - DNA, 15 bp, Homo sapiens
gtagaatcttaccaa

SEQ ID NO: 1318585 - DNA, 15 bp, Homo sapiens
tgtagaatcttacca

SEQ ID NO: 1318586 - DNA, 15 bp, Homo sapiens
atgtagaatcttacc

SEQ ID NO: 1318587 - DNA, 15 bp, Homo sapiens
aatgtagaatcttac

SEQ ID NO: 1318588 - DNA, 15 bp, Homo sapiens
aaatgtagaatctta

SEQ ID NO: 1318589 - DNA, 15 bp, Homo sapiens
gaaatgtagaatctt

SEQ ID NO: 1318590 - DNA, 15 bp, Homo sapiens
agaaatgtagaatct

SEQ ID NO: 1318591 - DNA, 15 bp, Homo sapiens
cagaaatgtagaatc

SEQ ID NO: 1318592 - DNA, 15 bp, Homo sapiens
gcagaaatgtagaat

SEQ ID NO: 1318593 - DNA, 15 bp, Homo sapiens
agcagaaatgtagaa

SEQ ID NO: 1318594 - DNA, 15 bp, Homo sapiens
aagcagaaatgtaga

SEQ ID NO: 1318595 - DNA, 15 bp, Homo sapiens
gaagcagaaatgtag

SEQ ID NO: 1318596 - DNA, 15 bp, Homo sapiens
agaagcagaaatgta

SEQ ID NO: 1318597 - DNA, 15 bp, Homo sapiens
cagaagcagaaatgt

SEQ ID NO: 1318598 - DNA, 15 bp, Homo sapiens
tcagaagcagaaatg

SEQ ID NO: 1318599 - DNA, 15 bp, Homo sapiens
atcagaagcagaaat

SEQ ID NO: 1318600 - DNA, 15 bp, Homo sapiens
aatcagaagcagaaa

SEQ ID NO: 1318601 - DNA, 15 bp, Homo sapiens
gaatcagaagcagaa

SEQ ID NO: 1318602 - DNA, 15 bp, Homo sapiens
agaatcagaagcaga

SEQ ID NO: 1318603 - DNA, 15 bp, Homo sapiens
aagaatcagaagcag

SEQ ID NO: 1318604 - DNA, 15 bp, Homo sapiens
taagaatcagaagca

SEQ ID NO: 1318605 - DNA, 15 bp, Homo sapiens
ataagaatcagaagc

SEQ ID NO: 1318606 - DNA, 15 bp, Homo sapiens
aataagaatcagaag

SEQ ID NO: 1318607 - DNA, 15 bp, Homo sapiens
aaataagaatcagaa

SEQ ID NO: 1318608 - DNA, 15 bp, Homo sapiens
aaaaataagaatcag

SEQ ID NO: 1318609 - DNA, 15 bp, Homo sapiens
gaaaaataagaatca

SEQ ID NO: 1318610 - DNA, 15 bp, Homo sapiens
tgaaaaataagaatc

SEQ ID NO: 1318611 - DNA, 15 bp, Homo sapiens
atgaaaaataagaat

SEQ ID NO: 1318612 - DNA, 15 bp, Homo sapiens
catgaaaaataagaa

SEQ ID NO: 1318613 - DNA, 15 bp, Homo sapiens
ccatgaaaaataaga

SEQ ID NO: 1318614 - DNA, 15 bp, Homo sapiens
gccatgaaaaataag

SEQ ID NO: 1318615 - DNA, 15 bp, Homo sapiens
tgccatgaaaaataa

SEQ ID NO: 1318616 - DNA, 15 bp, Homo sapiens
gtgccatgaaaaata

SEQ ID NO: 1318617 - DNA, 15 bp, Homo sapiens
ggtgccatgaaaaat

SEQ ID NO: 1318618 - DNA, 15 bp, Homo sapiens
aggtgccatgaaaaa

SEQ ID NO: 1318619 - DNA, 15 bp, Homo sapiens
gaggtgccatgaaaa

SEQ ID NO: 1318620 - DNA, 15 bp, Homo sapiens
tgaggtgccatgaaa

SEQ ID NO: 1318621 - DNA, 15 bp, Homo sapiens
atgaggtgccatgaa

SEQ ID NO: 1318622 - DNA, 15 bp, Homo sapiens
tatgaggtgccatga

SEQ ID NO: 1318623 - DNA, 15 bp, Homo sapiens
ttatgaggtgccatg

SEQ ID NO: 1318624 - DNA, 15 bp, Homo sapiens
tttatgaggtgccat

SEQ ID NO: 1318625 - DNA, 15 bp, Homo sapiens
ttttatgaggtgcca

SEQ ID NO: 1318626 - DNA, 15 bp, Homo sapiens
attttatgaggtgcc

SEQ ID NO: 1318627 - DNA, 15 bp, Homo sapiens
tattttatgaggtgc

SEQ ID NO: 1318628 - DNA, 15 bp, Homo sapiens
ctattttatgaggtg

SEQ ID NO: 1318629 - DNA, 15 bp, Homo sapiens
cctattttatgaggt

SEQ ID NO: 1318630 - DNA, 15 bp, Homo sapiens
tcctattttatgagg

SEQ ID NO: 1318631 - DNA, 15 bp, Homo sapiens
ttcctattttatgag

SEQ ID NO: 1318632 - DNA, 15 bp, Homo sapiens
attcctattttatga

SEQ ID NO: 1318633 - DNA, 15 bp, Homo sapiens
cattcctattttatg

SEQ ID NO: 1318634 - DNA, 15 bp, Homo sapiens
gcattcctattttat

SEQ ID NO: 1318635 - DNA, 15 bp, Homo sapiens
tgcattcctatttta

SEQ ID NO: 1318636 - DNA, 15 bp, Homo sapiens
atgcattcctatttt

SEQ ID NO: 1318637 - DNA, 15 bp, Homo sapiens
catgcattcctattt

SEQ ID NO: 1318638 - DNA, 15 bp, Homo sapiens
acatgcattcctatt

SEQ ID NO: 1318639 - DNA, 15 bp, Homo sapiens
aacatgcattcctat

SEQ ID NO: 1318640 - DNA, 15 bp, Homo sapiens
aaacatgcattccta

SEQ ID NO: 1318641 - DNA, 15 bp, Homo sapiens
aaaacatgcattcct

SEQ ID NO: 1318642 - DNA, 15 bp, Homo sapiens
caaaacatgcattcc

SEQ ID NO: 1318643 - DNA, 15 bp, Homo sapiens
acaaaacatgcattc

SEQ ID NO: 1318644 - DNA, 15 bp, Homo sapiens
aacaaaacatgcatt

SEQ ID NO: 1318645 - DNA, 15 bp, Homo sapiens
aaacaaaacatgcat

SEQ ID NO: 1318646 - DNA, 15 bp, Homo sapiens
aaaacaaaacatgca

SEQ ID NO: 1318647 - DNA, 15 bp, Homo sapiens
aaaaacaaaacatgc

SEQ ID NO: 1318648 - DNA, 15 bp, Homo sapiens
aaaaaacaaaacatg

SEQ ID NO: 1318649 - DNA, 15 bp, Homo sapiens
aaaaaaacaaaacat

SEQ ID NO: 1318650 - DNA, 15 bp, Homo sapiens
caaaaaaacaaaaca

SEQ ID NO: 1318651 - DNA, 15 bp, Homo sapiens
acaaaaaaacaaaac

SEQ ID NO: 1318652 - DNA, 15 bp, Homo sapiens
aacaaaaaaacaaaa

SEQ ID NO: 1318653 - DNA, 15 bp, Homo sapiens
aaacaaaaaaacaaa

SEQ ID NO: 1318654 - DNA, 15 bp, Homo sapiens
aaaacaaaaaaacaa

SEQ ID NO: 1318655 - DNA, 15 bp, Homo sapiens
aaaaacaaaaaaaca

SEQ ID NO: 1318656 - DNA, 15 bp, Homo sapiens
aaaaaacaaaaaaac

SEQ ID NO: 1318657 - DNA, 15 bp, Homo sapiens
caaaaaaaaaaacaa

SEQ ID NO: 1318658 - DNA, 15 bp, Homo sapiens
ccaaaaaaaaaaaca

SEQ ID NO: 1318659 - DNA, 15 bp, Homo sapiens
cccaaaaaaaaaaac

SEQ ID NO: 1318660 - DNA, 15 bp, Homo sapiens
gcccaaaaaaaaaaa

SEQ ID NO: 1318661 - DNA, 15 bp, Homo sapiens
agcccaaaaaaaaaa

SEQ ID NO: 1318662 - DNA, 15 bp, Homo sapiens
tagcccaaaaaaaaa

SEQ ID NO: 1318663 - DNA, 15 bp, Homo sapiens
gtagcccaaaaaaaa

SEQ ID NO: 1318664 - DNA, 15 bp, Homo sapiens
agtagcccaaaaaaa

SEQ ID NO: 1318665 - DNA, 15 bp, Homo sapiens
aagtagcccaaaaaa

SEQ ID NO: 1318666 - DNA, 15 bp, Homo sapiens
caagtagcccaaaaa

SEQ ID NO: 1318667 - DNA, 15 bp, Homo sapiens
gcaagtagcccaaaa

SEQ ID NO: 1318668 - DNA, 15 bp, Homo sapiens
ggcaagtagcccaaa

SEQ ID NO: 1318669 - DNA, 15 bp, Homo sapiens
tggcaagtagcccaa

SEQ ID NO: 1318670 - DNA, 15 bp, Homo sapiens
ctggcaagtagccca

SEQ ID NO: 1318671 - DNA, 15 bp, Homo sapiens
actggcaagtagccc

SEQ ID NO: 1318672 - DNA, 15 bp, Homo sapiens
cactggcaagtagcc

SEQ ID NO: 1318673 - DNA, 15 bp, Homo sapiens
acactggcaagtagc

SEQ ID NO: 1318674 - DNA, 15 bp, Homo sapiens
aacactggcaagtag

SEQ ID NO: 1318675 - DNA, 15 bp, Homo sapiens
gaacactggcaagta

SEQ ID NO: 1318676 - DNA, 15 bp, Homo sapiens
agaacactggcaagt

SEQ ID NO: 1318677 - DNA, 15 bp, Homo sapiens
cagaacactggcaag

SEQ ID NO: 1318678 - DNA, 15 bp, Homo sapiens
tcagaacactggcaa

SEQ ID NO: 1318679 - DNA, 15 bp, Homo sapiens
ttcagaacactggca

SEQ ID NO: 1318680 - DNA, 15 bp, Homo sapiens
tttcagaacactggc

SEQ ID NO: 1318681 - DNA, 15 bp, Homo sapiens
gtttcagaacactgg

SEQ ID NO: 1318682 - DNA, 15 bp, Homo sapiens
agtttcagaacactg

SEQ ID NO: 1318683 - DNA, 15 bp, Homo sapiens
tagtttcagaacact

SEQ ID NO: 1318684 - DNA, 15 bp, Homo sapiens
ttagtttcagaacac

SEQ ID NO: 1318685 - DNA, 15 bp, Homo sapiens
tttagtttcagaaca

SEQ ID NO: 1318686 - DNA, 15 bp, Homo sapiens
atttagtttcagaac

SEQ ID NO: 1318687 - DNA, 15 bp, Homo sapiens
tatttagtttcagaa

SEQ ID NO: 1318688 - DNA, 15 bp, Homo sapiens
gtatttagtttcaga

SEQ ID NO: 1318689 - DNA, 15 bp, Homo sapiens
agtatttagtttcag

SEQ ID NO: 1318690 - DNA, 15 bp, Homo sapiens
aagtatttagtttca

SEQ ID NO: 1318691 - DNA, 15 bp, Homo sapiens
gaagtatttagtttc

SEQ ID NO: 1318692 - DNA, 15 bp, Homo sapiens
agaagtatttagttt

SEQ ID NO: 1318693 - DNA, 15 bp, Homo sapiens
gagaagtatttagtt

SEQ ID NO: 1318694 - DNA, 15 bp, Homo sapiens
cgagaagtatttagt

SEQ ID NO: 1318695 - DNA, 15 bp, Homo sapiens
ccgagaagtatttag

SEQ ID NO: 1318696 - DNA, 15 bp, Homo sapiens
tccgagaagtattta

SEQ ID NO: 1318697 - DNA, 15 bp, Homo sapiens
ctccgagaagtattt

SEQ ID NO: 1318698 - DNA, 15 bp, Homo sapiens
tctccgagaagtatt

SEQ ID NO: 1318699 - DNA, 15 bp, Homo sapiens
ctctccgagaagtat

SEQ ID NO: 1318700 - DNA, 15 bp, Homo sapiens
actctccgagaagta

SEQ ID NO: 1318701 - DNA, 15 bp, Homo sapiens
tactctccgagaagt

SEQ ID NO: 1318702 - DNA, 15 bp, Homo sapiens
ctactctccgagaag

SEQ ID NO: 1318703 - DNA, 15 bp, Homo sapiens
gctactctccgagaa

SEQ ID NO: 1318704 - DNA, 15 bp, Homo sapiens
agctactctccgaga

SEQ ID NO: 1318705 - DNA, 15 bp, Homo sapiens
cagctactctccgag

SEQ ID NO: 1318706 - DNA, 15 bp, Homo sapiens
acagctactctccga

SEQ ID NO: 1318707 - DNA, 15 bp, Homo sapiens
gacagctactctccg

SEQ ID NO: 1318708 - DNA, 15 bp, Homo sapiens
agacagctactctcc

SEQ ID NO: 1318709 - DNA, 15 bp, Homo sapiens
gagacagctactctc

SEQ ID NO: 1318710 - DNA, 15 bp, Homo sapiens
agagacagctactct

SEQ ID NO: 1318711 - DNA, 15 bp, Homo sapiens
gagagacagctactc

SEQ ID NO: 1318712 - DNA, 15 bp, Homo sapiens
tgagagacagctact

SEQ ID NO: 1318713 - DNA, 15 bp, Homo sapiens
atgagagacagctac

SEQ ID NO: 1318714 - DNA, 15 bp, Homo sapiens
aatgagagacagcta

SEQ ID NO: 1318715 - DNA, 15 bp, Homo sapiens
taatgagagacagct

SEQ ID NO: 1318716 - DNA, 15 bp, Homo sapiens
ttaatgagagacagc

SEQ ID NO: 1318717 - DNA, 15 bp, Homo sapiens
tttaatgagagacag

SEQ ID NO: 1318718 - DNA, 15 bp, Homo sapiens
ctttaatgagagaca

SEQ ID NO: 1318719 - DNA, 15 bp, Homo sapiens
tctttaatgagagac

SEQ ID NO: 1318720 - DNA, 15 bp, Homo sapiens
ctctttaatgagaga

SEQ ID NO: 1318721 - DNA, 15 bp, Homo sapiens
gctctttaatgagag

SEQ ID NO: 1318722 - DNA, 15 bp, Homo sapiens
ggctctttaatgaga

SEQ ID NO: 1318723 - DNA, 15 bp, Homo sapiens
gggctctttaatgag

SEQ ID NO: 1318724 - DNA, 15 bp, Homo sapiens
ggggctctttaatga

SEQ ID NO: 1318725 - DNA, 15 bp, Homo sapiens
tggggctctttaatg

SEQ ID NO: 1318726 - DNA, 15 bp, Homo sapiens
ctggggctctttaat

SEQ ID NO: 1318727 - DNA, 15 bp, Homo sapiens
tctggggctctttaa

SEQ ID NO: 1318728 - DNA, 15 bp, Homo sapiens
atctggggctcttta

SEQ ID NO: 1318729 - DNA, 15 bp, Homo sapiens
gatctggggctcttt

SEQ ID NO: 1318730 - DNA, 15 bp, Homo sapiens
tgatctggggctctt

SEQ ID NO: 1318731 - DNA, 15 bp, Homo sapiens
ttgatctggggctct

SEQ ID NO: 1318732 - DNA, 15 bp, Homo sapiens
gttgatctggggctc

SEQ ID NO: 1318733 - DNA, 15 bp, Homo sapiens
tgttgatctggggct

SEQ ID NO: 1318734 - DNA, 15 bp, Homo sapiens
ctgttgatctggggc

SEQ ID NO: 1318735 - DNA, 15 bp, Homo sapiens
actgttgatctgggg

SEQ ID NO: 1318736 - DNA, 15 bp, Homo sapiens
aactgttgatctggg

SEQ ID NO: 1318737 - DNA, 15 bp, Homo sapiens
gaactgttgatctgg

SEQ ID NO: 1318738 - DNA, 15 bp, Homo sapiens
ggaactgttgatctg

SEQ ID NO: 1318739 - DNA, 15 bp, Homo sapiens
tggaactgttgatct

SEQ ID NO: 1318740 - DNA, 15 bp, Homo sapiens
atggaactgttgatc

SEQ ID NO: 1318741 - DNA, 15 bp, Homo sapiens
aatggaactgttgat

SEQ ID NO: 1318742 - DNA, 15 bp, Homo sapiens
aaatggaactgttga

SEQ ID NO: 1318743 - DNA, 15 bp, Homo sapiens
gaaatggaactgttg

SEQ ID NO: 1318744 - DNA, 15 bp, Homo sapiens
tgaaatggaactgtt

SEQ ID NO: 1318745 - DNA, 15 bp, Homo sapiens
ctgaaatggaactgt

SEQ ID NO: 1318746 - DNA, 15 bp, Homo sapiens
actgaaatggaactg

SEQ ID NO: 1318747 - DNA, 15 bp, Homo sapiens
gactgaaatggaact

SEQ ID NO: 1318748 - DNA, 15 bp, Homo sapiens
tgactgaaatggaac

SEQ ID NO: 1318749 - DNA, 15 bp, Homo sapiens
gtgactgaaatggaa

SEQ ID NO: 1318750 - DNA, 15 bp, Homo sapiens
tgtgactgaaatgga

SEQ ID NO: 1318751 - DNA, 15 bp, Homo sapiens
atgtgactgaaatgg

SEQ ID NO: 1318752 - DNA, 15 bp, Homo sapiens
aatgtgactgaaatg

SEQ ID NO: 1318753 - DNA, 15 bp, Homo sapiens
gaatgtgactgaaat

SEQ ID NO: 1318754 - DNA, 15 bp, Homo sapiens
ggaatgtgactgaaa

SEQ ID NO: 1318755 - DNA, 15 bp, Homo sapiens
tggaatgtgactgaa

SEQ ID NO: 1318756 - DNA, 15 bp, Homo sapiens
gtggaatgtgactga

SEQ ID NO: 1318757 - DNA, 15 bp, Homo sapiens
ggtggaatgtgactg

SEQ ID NO: 1318758 - DNA, 15 bp, Homo sapiens
gggtggaatgtgact

SEQ ID NO: 1318759 - DNA, 15 bp, Homo sapiens
agggtggaatgtgac

SEQ ID NO: 1318760 - DNA, 15 bp, Homo sapiens
cagggtggaatgtga

SEQ ID NO: 1318761 - DNA, 15 bp, Homo sapiens
tcagggtggaatgtg

SEQ ID NO: 1318762 - DNA, 15 bp, Homo sapiens
gtcagggtggaatgt

SEQ ID NO: 1318763 - DNA, 15 bp, Homo sapiens
agtcagggtggaatg

SEQ ID NO: 1318764 - DNA, 15 bp, Homo sapiens
aagtcagggtggaat

SEQ ID NO: 1318765 - DNA, 15 bp, Homo sapiens
caagtcagggtggaa

SEQ ID NO: 1318766 - DNA, 15 bp, Homo sapiens
acaagtcagggtgga

SEQ ID NO: 1318767 - DNA, 15 bp, Homo sapiens
gacaagtcagggtgg

SEQ ID NO: 1318768 - DNA, 15 bp, Homo sapiens
agacaagtcagggtg

SEQ ID NO: 1318769 - DNA, 15 bp, Homo sapiens
gagacaagtcagggt

SEQ ID NO: 1318770 - DNA, 15 bp, Homo sapiens
agagacaagtcaggg

SEQ ID NO: 1318771 - DNA, 15 bp, Homo sapiens
aagagacaagtcagg

SEQ ID NO: 1318772 - DNA, 15 bp, Homo sapiens
gaagagacaagtcag

SEQ ID NO: 1318773 - DNA, 15 bp, Homo sapiens
agaagagacaagtca

SEQ ID NO: 1318774 - DNA, 15 bp, Homo sapiens
gagaagagacaagtc

SEQ ID NO: 1318775 - DNA, 15 bp, Homo sapiens
tgagaagagacaagt

SEQ ID NO: 1318776 - DNA, 15 bp, Homo sapiens
gtgagaagagacaag

SEQ ID NO: 1318777 - DNA, 15 bp, Homo sapiens
ggtgagaagagacaa

SEQ ID NO: 1318778 - DNA, 15 bp, Homo sapiens
tggtgagaagagaca

SEQ ID NO: 1318779 - DNA, 15 bp, Homo sapiens
atggtgagaagagac

SEQ ID NO: 1318780 - DNA, 15 bp, Homo sapiens
aatggtgagaagaga

SEQ ID NO: 1318781 - DNA, 15 bp, Homo sapiens
gaatggtgagaagag

SEQ ID NO: 1318782 - DNA, 15 bp, Homo sapiens
cgaatggtgagaaga

SEQ ID NO: 1318783 - DNA, 15 bp, Homo sapiens
ccgaatggtgagaag

SEQ ID NO: 1318784 - DNA, 15 bp, Homo sapiens
accgaatggtgagaa

SEQ ID NO: 1318785 - DNA, 15 bp, Homo sapiens
caccgaatggtgaga

SEQ ID NO: 1318786 - DNA, 15 bp, Homo sapiens
tcaccgaatggtgag

SEQ ID NO: 1318787 - DNA, 15 bp, Homo sapiens
atcaccgaatggtga

SEQ ID NO: 1318788 - DNA, 15 bp, Homo sapiens
aatcaccgaatggtg

SEQ ID NO: 1318789 - DNA, 15 bp, Homo sapiens
taatcaccgaatggt

SEQ ID NO: 1318790 - DNA, 15 bp, Homo sapiens
ctaatcaccgaatgg

SEQ ID NO: 1318791 - DNA, 15 bp, Homo sapiens
cctaatcaccgaatg

SEQ ID NO: 1318792 - DNA, 15 bp, Homo sapiens
acctaatcaccgaat

SEQ ID NO: 1318793 - DNA, 15 bp, Homo sapiens
aacctaatcaccgaa

SEQ ID NO: 1318794 - DNA, 15 bp, Homo sapiens
gaacctaatcaccga

SEQ ID NO: 1318795 - DNA, 15 bp, Homo sapiens
tgaacctaatcaccg

SEQ ID NO: 1318796 - DNA, 15 bp, Homo sapiens
atgaacctaatcacc

SEQ ID NO: 1318797 - DNA, 15 bp, Homo sapiens
catgaacctaatcac

SEQ ID NO: 1318798 - DNA, 15 bp, Homo sapiens
acatgaacctaatca

SEQ ID NO: 1318799 - DNA, 15 bp, Homo sapiens
gacatgaacctaatc

SEQ ID NO: 1318800 - DNA, 15 bp, Homo sapiens
agacatgaacctaat

SEQ ID NO: 1318801 - DNA, 15 bp, Homo sapiens
aagacatgaacctaa

SEQ ID NO: 1318802 - DNA, 15 bp, Homo sapiens
aaagacatgaaccta

SEQ ID NO: 1318803 - DNA, 15 bp, Homo sapiens
aaaagacatgaacct

SEQ ID NO: 1318804 - DNA, 15 bp, Homo sapiens
taaaagacatgaacc

SEQ ID NO: 1318805 - DNA, 15 bp, Homo sapiens
gtaaaagacatgaac

SEQ ID NO: 1318806 - DNA, 15 bp, Homo sapiens
agtaaaagacatgaa

SEQ ID NO: 1318807 - DNA, 15 bp, Homo sapiens
gagtaaaagacatga

SEQ ID NO: 1318808 - DNA, 15 bp, Homo sapiens
agagtaaaagacatg

SEQ ID NO: 1318809 - DNA, 15 bp, Homo sapiens
aagagtaaaagacat

SEQ ID NO: 1318810 - DNA, 15 bp, Homo sapiens
aaagagtaaaagaca

SEQ ID NO: 1318811 - DNA, 15 bp, Homo sapiens
taaagagtaaaagac

SEQ ID NO: 1318812 - DNA, 15 bp, Homo sapiens
ttaaagagtaaaaga

SEQ ID NO: 1318813 - DNA, 15 bp, Homo sapiens
attaaagagtaaaag

SEQ ID NO: 1318814 - DNA, 15 bp, Homo sapiens
cattaaagagtaaaa

SEQ ID NO: 1318815 - DNA, 15 bp, Homo sapiens
gcattaaagagtaaa

SEQ ID NO: 1318816 - DNA, 15 bp, Homo sapiens
agcattaaagagtaa

SEQ ID NO: 1318817 - DNA, 15 bp, Homo sapiens
aagcattaaagagta

SEQ ID NO: 1318818 - DNA, 15 bp, Homo sapiens
aaagcattaaagagt

SEQ ID NO: 1318819 - DNA, 15 bp, Homo sapiens
caaagcattaaagag

SEQ ID NO: 1318820 - DNA, 15 bp, Homo sapiens
accaaagcattaaag

SEQ ID NO: 1318821 - DNA, 15 bp, Homo sapiens
aaccaaagcattaaa

SEQ ID NO: 1318822 - DNA, 15 bp, Homo sapiens
taaccaaagcattaa

SEQ ID NO: 1318823 - DNA, 15 bp, Homo sapiens
ctaaccaaagcatta

SEQ ID NO: 1318824 - DNA, 15 bp, Homo sapiens
gctaaccaaagcatt

SEQ ID NO: 1318825 - DNA, 15 bp, Homo sapiens
tgctaaccaaagcat

SEQ ID NO: 1318826 - DNA, 15 bp, Homo sapiens
atgctaaccaaagca

SEQ ID NO: 1318827 - DNA, 15 bp, Homo sapiens
gatgctaaccaaagc

SEQ ID NO: 1318828 - DNA, 15 bp, Homo sapiens
ggatgctaaccaaag

SEQ ID NO: 1318829 - DNA, 15 bp, Homo sapiens
aggatgctaaccaaa

SEQ ID NO: 1318830 - DNA, 15 bp, Homo sapiens
caggatgctaaccaa

SEQ ID NO: 1318831 - DNA, 15 bp, Homo sapiens
acaggatgctaacca

SEQ ID NO: 1318832 - DNA, 15 bp, Homo sapiens
aacaggatgctaacc

SEQ ID NO: 1318833 - DNA, 15 bp, Homo sapiens
aaacaggatgctaac

SEQ ID NO: 1318834 - DNA, 15 bp, Homo sapiens
taaacaggatgctaa

SEQ ID NO: 1318835 - DNA, 15 bp, Homo sapiens
gtaaacaggatgcta

SEQ ID NO: 1318836 - DNA, 15 bp, Homo sapiens
ggtaaacaggatgct

SEQ ID NO: 1318837 - DNA, 15 bp, Homo sapiens
aggtaaacaggatgc

SEQ ID NO: 1318838 - DNA, 15 bp, Homo sapiens
gaggtaaacaggatg

SEQ ID NO: 1318839 - DNA, 15 bp, Homo sapiens
tgaggtaaacaggat

SEQ ID NO: 1318840 - DNA, 15 bp, Homo sapiens
ttgaggtaaacagga

SEQ ID NO: 1318841 - DNA, 15 bp, Homo sapiens
cttgaggtaaacagg

SEQ ID NO: 1318842 - DNA, 15 bp, Homo sapiens
tcttgaggtaaacag

SEQ ID NO: 1318843 - DNA, 15 bp, Homo sapiens
ctcttgaggtaaaca

SEQ ID NO: 1318844 - DNA, 15 bp, Homo sapiens
tctcttgaggtaaac

SEQ ID NO: 1318845 - DNA, 15 bp, Homo sapiens
gtctcttgaggtaaa

SEQ ID NO: 1318846 - DNA, 15 bp, Homo sapiens
agtctcttgaggtaa

SEQ ID NO: 1318847 - DNA, 15 bp, Homo sapiens
cagtctcttgaggta

SEQ ID NO: 1318848 - DNA, 15 bp, Homo sapiens
tcagtctcttgaggt

SEQ ID NO: 1318849 - DNA, 15 bp, Homo sapiens
ttcagtctcttgagg

SEQ ID NO: 1318850 - DNA, 15 bp, Homo sapiens
gttcagtctcttgag

SEQ ID NO: 1318851 - DNA, 15 bp, Homo sapiens
agttcagtctcttga

SEQ ID NO: 1318852 - DNA, 15 bp, Homo sapiens
aagttcagtctcttg

SEQ ID NO: 1318853 - DNA, 15 bp, Homo sapiens
aaagttcagtctctt

SEQ ID NO: 1318854 - DNA, 15 bp, Homo sapiens
gaaagttcagtctct

SEQ ID NO: 1318855 - DNA, 15 bp, Homo sapiens
agaaagttcagtctc

SEQ ID NO: 1318856 - DNA, 15 bp, Homo sapiens
aagaaagttcagtct

SEQ ID NO: 1318857 - DNA, 15 bp, Homo sapiens
gaagaaagttcagtc

SEQ ID NO: 1318858 - DNA, 15 bp, Homo sapiens
agaagaaagttcagt

SEQ ID NO: 1318859 - DNA, 15 bp, Homo sapiens
gagaagaaagttcag

SEQ ID NO: 1318860 - DNA, 15 bp, Homo sapiens
ggagaagaaagttca

SEQ ID NO: 1318861 - DNA, 15 bp, Homo sapiens
aggagaagaaagttc

SEQ ID NO: 1318862 - DNA, 15 bp, Homo sapiens
caggagaagaaagtt

SEQ ID NO: 1318863 - DNA, 15 bp, Homo sapiens
tcaggagaagaaagt

SEQ ID NO: 1318864 - DNA, 15 bp, Homo sapiens
ttcaggagaagaaag

SEQ ID NO: 1318865 - DNA, 15 bp, Homo sapiens
attcaggagaagaaa

SEQ ID NO: 1318866 - DNA, 15 bp, Homo sapiens
aattcaggagaagaa

SEQ ID NO: 1318867 - DNA, 15 bp, Homo sapiens
aaattcaggagaaga

SEQ ID NO: 1318868 - DNA, 15 bp, Homo sapiens
taaattcaggagaag

SEQ ID NO: 1318869 - DNA, 15 bp, Homo sapiens
ttaaattcaggagaa

SEQ ID NO: 1318870 - DNA, 15 bp, Homo sapiens
attaaattcaggaga

SEQ ID NO: 1318871 - DNA, 15 bp, Homo sapiens
aattaaattcaggag

SEQ ID NO: 1318872 - DNA, 15 bp, Homo sapiens
aaattaaattcagga

SEQ ID NO: 1318873 - DNA, 15 bp, Homo sapiens
gaaattaaattcagg

SEQ ID NO: 1318874 - DNA, 15 bp, Homo sapiens
ggaaattaaattcag

SEQ ID NO: 1318875 - DNA, 15 bp, Homo sapiens
gggaaattaaattca

SEQ ID NO: 1318876 - DNA, 15 bp, Homo sapiens
agggaaattaaattc

SEQ ID NO: 1318877 - DNA, 15 bp, Homo sapiens
cagggaaattaaatt

SEQ ID NO: 1318878 - DNA, 15 bp, Homo sapiens
tcagggaaattaaat

SEQ ID NO: 1318879 - DNA, 15 bp, Homo sapiens
atcagggaaattaaa

SEQ ID NO: 1318880 - DNA, 15 bp, Homo sapiens
tatcagggaaattaa

SEQ ID NO: 1318881 - DNA, 15 bp, Homo sapiens
ctatcagggaaatta

SEQ ID NO: 1318882 - DNA, 15 bp, Homo sapiens
gctatcagggaaatt

SEQ ID NO: 1318883 - DNA, 15 bp, Homo sapiens
tgctatcagggaaat

SEQ ID NO: 1318884 - DNA, 15 bp, Homo sapiens
ctgctatcagggaaa

SEQ ID NO: 1318885 - DNA, 15 bp, Homo sapiens
cctgctatcagggaa

SEQ ID NO: 1318886 - DNA, 15 bp, Homo sapiens
ccctgctatcaggga

SEQ ID NO: 1318887 - DNA, 15 bp, Homo sapiens
tccctgctatcaggg

SEQ ID NO: 1318888 - DNA, 15 bp, Homo sapiens
gtccctgctatcagg

SEQ ID NO: 1318889 - DNA, 15 bp, Homo sapiens
tgtccctgctatcag

SEQ ID NO: 1318890 - DNA, 15 bp, Homo sapiens
atgtccctgctatca

SEQ ID NO: 1318891 - DNA, 15 bp, Homo sapiens
gatgtccctgctatc

SEQ ID NO: 1318892 - DNA, 15 bp, Homo sapiens
agatgtccctgctat

SEQ ID NO: 1318893 - DNA, 15 bp, Homo sapiens
cagatgtccctgcta

SEQ ID NO: 1318894 - DNA, 15 bp, Homo sapiens
tcagatgtccctgct

SEQ ID NO: 1318895 - DNA, 15 bp, Homo sapiens
gtcagatgtccctgc

SEQ ID NO: 1318896 - DNA, 15 bp, Homo sapiens
tgtcagatgtccctg

SEQ ID NO: 1318897 - DNA, 15 bp, Homo sapiens
ctgtcagatgtccct

SEQ ID NO: 1318898 - DNA, 15 bp, Homo sapiens
gctgtcagatgtccc

SEQ ID NO: 1318899 - DNA, 15 bp, Homo sapiens
ggctgtcagatgtcc

SEQ ID NO: 1318900 - DNA, 15 bp, Homo sapiens
aggctgtcagatgtc

SEQ ID NO: 1318901 - DNA, 15 bp, Homo sapiens
taggctgtcagatgt

SEQ ID NO: 1318902 - DNA, 15 bp, Homo sapiens
ataggctgtcagatg

SEQ ID NO: 1318903 - DNA, 15 bp, Homo sapiens
cataggctgtcagat

SEQ ID NO: 1318904 - DNA, 15 bp, Homo sapiens
acataggctgtcaga

SEQ ID NO: 1318905 - DNA, 15 bp, Homo sapiens
gacataggctgtcag

SEQ ID NO: 1318906 - DNA, 15 bp, Homo sapiens
tgacataggctgtca

SEQ ID NO: 1318907 - DNA, 15 bp, Homo sapiens
ttgacataggctgtc

SEQ ID NO: 1318908 - DNA, 15 bp, Homo sapiens
gttgacataggctgt

SEQ ID NO: 1318909 - DNA, 15 bp, Homo sapiens
agttgacataggctg

SEQ ID NO: 1318910 - DNA, 15 bp, Homo sapiens
cagttgacataggct

SEQ ID NO: 1318911 - DNA, 15 bp, Homo sapiens
acagttgacataggc

SEQ ID NO: 1318912 - DNA, 15 bp, Homo sapiens
gacagttgacatagg

SEQ ID NO: 1318913 - DNA, 15 bp, Homo sapiens
agacagttgacatag

SEQ ID NO: 1318914 - DNA, 15 bp, Homo sapiens
aagacagttgacata

SEQ ID NO: 1318915 - DNA, 15 bp, Homo sapiens
gaagacagttgacat

SEQ ID NO: 1318916 - DNA, 15 bp, Homo sapiens
ggaagacagttgaca

SEQ ID NO: 1318917 - DNA, 15 bp, Homo sapiens
aggaagacagttgac

SEQ ID NO: 1318918 - DNA, 15 bp, Homo sapiens
aaggaagacagttga

SEQ ID NO: 1318919 - DNA, 15 bp, Homo sapiens
caaggaagacagttg

SEQ ID NO: 1318920 - DNA, 15 bp, Homo sapiens
tcaaggaagacagtt

SEQ ID NO: 1318921 - DNA, 15 bp, Homo sapiens
gtcaaggaagacagt

SEQ ID NO: 1318922 - DNA, 15 bp, Homo sapiens
agtcaaggaagacag

SEQ ID NO: 1318923 - DNA, 15 bp, Homo sapiens
aagtcaaggaagaca

SEQ ID NO: 1318924 - DNA, 15 bp, Homo sapiens
gaagtcaaggaagac

SEQ ID NO: 1318925 - DNA, 15 bp, Homo sapiens
agaagtcaaggaaga

SEQ ID NO: 1318926 - DNA, 15 bp, Homo sapiens
cagaagtcaaggaag

SEQ ID NO: 1318927 - DNA, 15 bp, Homo sapiens
acagaagtcaaggaa

SEQ ID NO: 1318928 - DNA, 15 bp, Homo sapiens
gacagaagtcaagga

SEQ ID NO: 1318929 - DNA, 15 bp, Homo sapiens
tgacagaagtcaagg

SEQ ID NO: 1318930 - DNA, 15 bp, Homo sapiens
ttgacagaagtcaag

SEQ ID NO: 1318931 - DNA, 15 bp, Homo sapiens
attgacagaagtcaa

SEQ ID NO: 1318932 - DNA, 15 bp, Homo sapiens
aattgacagaagtca

SEQ ID NO: 1318933 - DNA, 15 bp, Homo sapiens
taattgacagaagtc

SEQ ID NO: 1318934 - DNA, 15 bp, Homo sapiens
ataattgacagaagt

SEQ ID NO: 1318935 - DNA, 15 bp, Homo sapiens
aataattgacagaag

SEQ ID NO: 1318936 - DNA, 15 bp, Homo sapiens
aaataattgacagaa

SEQ ID NO: 1318937 - DNA, 15 bp, Homo sapiens
caaataattgacaga

SEQ ID NO: 1318938 - DNA, 15 bp, Homo sapiens
acaaataattgacag

SEQ ID NO: 1318939 - DNA, 15 bp, Homo sapiens
gacaaataattgaca

SEQ ID NO: 1318940 - DNA, 15 bp, Homo sapiens
ggacaaataattgac

SEQ ID NO: 1318941 - DNA, 15 bp, Homo sapiens
aggacaaataattga

SEQ ID NO: 1318942 - DNA, 15 bp, Homo sapiens
taggacaaataattg

SEQ ID NO: 1318943 - DNA, 15 bp, Homo sapiens
ttaggacaaataatt

SEQ ID NO: 1318944 - DNA, 15 bp, Homo sapiens
gttaggacaaataat

SEQ ID NO: 1318945 - DNA, 15 bp, Homo sapiens
agttaggacaaataa

SEQ ID NO: 1318946 - DNA, 15 bp, Homo sapiens
tagttaggacaaata

SEQ ID NO: 1318947 - DNA, 15 bp, Homo sapiens
atagttaggacaaat

SEQ ID NO: 1318948 - DNA, 15 bp, Homo sapiens
catagttaggacaaa

SEQ ID NO: 1318949 - DNA, 15 bp, Homo sapiens
gcatagttaggacaa

SEQ ID NO: 1318950 - DNA, 15 bp, Homo sapiens
agcatagttaggaca

SEQ ID NO: 1318951 - DNA, 15 bp, Homo sapiens
aagcatagttaggac

SEQ ID NO: 1318952 - DNA, 15 bp, Homo sapiens
caagcatagttagga

SEQ ID NO: 1318953 - DNA, 15 bp, Homo sapiens
tcaagcatagttagg

SEQ ID NO: 1318954 - DNA, 15 bp, Homo sapiens
ctcaagcatagttag

SEQ ID NO: 1318955 - DNA, 15 bp, Homo sapiens
actcaagcatagtta

SEQ ID NO: 1318956 - DNA, 15 bp, Homo sapiens
tactcaagcatagtt

SEQ ID NO: 1318957 - DNA, 15 bp, Homo sapiens
ttactcaagcatagt

SEQ ID NO: 1318958 - DNA, 15 bp, Homo sapiens
cttactcaagcatag

SEQ ID NO: 1318959 - DNA, 15 bp, Homo sapiens
gcttactcaagcata

SEQ ID NO: 1318960 - DNA, 15 bp, Homo sapiens
cgcttactcaagcat

SEQ ID NO: 1318961 - DNA, 15 bp, Homo sapiens
acgcttactcaagca

SEQ ID NO: 1318962 - DNA, 15 bp, Homo sapiens
tacgcttactcaagc

SEQ ID NO: 1318963 - DNA, 15 bp, Homo sapiens
gtacgcttactcaag

SEQ ID NO: 1318964 - DNA, 15 bp, Homo sapiens
tgtacgcttactcaa

SEQ ID NO: 1318965 - DNA, 15 bp, Homo sapiens
ctgtacgcttactca

SEQ ID NO: 1318966 - DNA, 15 bp, Homo sapiens
cctgtacgcttactc

SEQ ID NO: 1318967 - DNA, 15 bp, Homo sapiens
tcctgtacgcttact

SEQ ID NO: 1318968 - DNA, 15 bp, Homo sapiens
ttcctgtacgcttac

SEQ ID NO: 1318969 - DNA, 15 bp, Homo sapiens
attcctgtacgctta

SEQ ID NO: 1318970 - DNA, 15 bp, Homo sapiens
tattcctgtacgctt

SEQ ID NO: 1318971 - DNA, 15 bp, Homo sapiens
atattcctgtacgct

SEQ ID NO: 1318972 - DNA, 15 bp, Homo sapiens
tatattcctgtacgc

SEQ ID NO: 1318973 - DNA, 15 bp, Homo sapiens
ttatattcctgtacg

SEQ ID NO: 1318974 - DNA, 15 bp, Homo sapiens
tttatattcctgtac

SEQ ID NO: 1318975 - DNA, 15 bp, Homo sapiens
ttttatattcctgta

SEQ ID NO: 1318976 - DNA, 15 bp, Homo sapiens
attttatattcctgt

SEQ ID NO: 1318977 - DNA, 15 bp, Homo sapiens
aattttatattcctg

SEQ ID NO: 1318978 - DNA, 15 bp, Homo sapiens
aaattttatattcct

SEQ ID NO: 1318979 - DNA, 15 bp, Homo sapiens
aaaattttatattcc

SEQ ID NO: 1318980 - DNA, 15 bp, Homo sapiens
taaaattttatattc

SEQ ID NO: 1318981 - DNA, 15 bp, Homo sapiens
ataaaattttatatt

SEQ ID NO: 1318982 - DNA, 15 bp, Homo sapiens
aataaaattttatat

SEQ ID NO: 1318983 - DNA, 15 bp, Homo sapiens
aaataaaattttata

SEQ ID NO: 1318984 - DNA, 15 bp, Homo sapiens
gaaataaaattttat

SEQ ID NO: 1318985 - DNA, 15 bp, Homo sapiens
ggaaataaaatttta

SEQ ID NO: 1318986 - DNA, 15 bp, Homo sapiens
aggaaataaaatttt

SEQ ID NO: 1318987 - DNA, 15 bp, Homo sapiens
aaggaaataaaattt

SEQ ID NO: 1318988 - DNA, 15 bp, Homo sapiens
caaggaaataaaatt

SEQ ID NO: 1318989 - DNA, 15 bp, Homo sapiens
ccaaggaaataaaat

SEQ ID NO: 1318990 - DNA, 15 bp, Homo sapiens
tccaaggaaataaaa

SEQ ID NO: 1318991 - DNA, 15 bp, Homo sapiens
ttccaaggaaataaa

SEQ ID NO: 1318992 - DNA, 15 bp, Homo sapiens
attccaaggaaataa

SEQ ID NO: 1318993 - DNA, 15 bp, Homo sapiens
tattccaaggaaata

SEQ ID NO: 1318994 - DNA, 15 bp, Homo sapiens
ttattccaaggaaat

SEQ ID NO: 1318995 - DNA, 15 bp, Homo sapiens
tttattccaaggaaa

SEQ ID NO: 1318996 - DNA, 15 bp, Homo sapiens
ttttattccaaggaa

SEQ ID NO: 1318997 - DNA, 15 bp, Homo sapiens
attttattccaagga

SEQ ID NO: 1318998 - DNA, 15 bp, Homo sapiens
aattttattccaagg

SEQ ID NO: 1318999 - DNA, 15 bp, Homo sapiens
aaattttattccaag

SEQ ID NO: 1319000 - DNA, 15 bp, Homo sapiens
aaaattttattccaa

SEQ ID NO: 1319001 - DNA, 15 bp, Homo sapiens
taaaattttattcca

SEQ ID NO: 1319002 - DNA, 15 bp, Homo sapiens
ttaaaattttattcc

SEQ ID NO: 1319003 - DNA, 15 bp, Homo sapiens
attaaaattttattc

SEQ ID NO: 1319004 - DNA, 15 bp, Homo sapiens
aattaaaattttatt

SEQ ID NO: 1319005 - DNA, 15 bp, Homo sapiens
aaattaaaattttat

SEQ ID NO: 1319006 - DNA, 15 bp, Homo sapiens
taaattaaaatttta

SEQ ID NO: 1319007 - DNA, 15 bp, Homo sapiens
ataaattaaaatttt

SEQ ID NO: 1319008 - DNA, 15 bp, Homo sapiens
tataaattaaaattt

SEQ ID NO: 1319009 - DNA, 15 bp, Homo sapiens
ttataaattaaaatt

SEQ ID NO: 1319010 - DNA, 15 bp, Homo sapiens
attataaattaaaat

SEQ ID NO: 1319011 - DNA, 15 bp, Homo sapiens
tattataaattaaaa

SEQ ID NO: 1319012 - DNA, 15 bp, Homo sapiens
atattataaattaaa

SEQ ID NO: 1319013 - DNA, 15 bp, Homo sapiens
tatattataaattaa

SEQ ID NO: 1319014 - DNA, 15 bp, Homo sapiens
ctatattataaatta

SEQ ID NO: 1319015 - DNA, 15 bp, Homo sapiens
cctatattataaatt

SEQ ID NO: 1319016 - DNA, 15 bp, Homo sapiens
tcctatattataaat

SEQ ID NO: 1319017 - DNA, 15 bp, Homo sapiens
ctcctatattataaa

SEQ ID NO: 1319018 - DNA, 15 bp, Homo sapiens
tctcctatattataa

SEQ ID NO: 1319019 - DNA, 15 bp, Homo sapiens
ctctcctatattata

SEQ ID NO: 1319020 - DNA, 15 bp, Homo sapiens
tctctcctatattat

SEQ ID NO: 1319021 - DNA, 15 bp, Homo sapiens
atctctcctatatta

SEQ ID NO: 1319022 - DNA, 15 bp, Homo sapiens
tatctctcctatatt

SEQ ID NO: 1319023 - DNA, 15 bp, Homo sapiens
atatctctcctatat

SEQ ID NO: 1319024 - DNA, 15 bp, Homo sapiens
aatatctctcctata

SEQ ID NO: 1319025 - DNA, 15 bp, Homo sapiens
taatatctctcctat

SEQ ID NO: 1319026 - DNA, 15 bp, Homo sapiens
gtaatatctctccta

SEQ ID NO: 1319027 - DNA, 15 bp, Homo sapiens
agtaatatctctcct

SEQ ID NO: 1319028 - DNA, 15 bp, Homo sapiens
tagtaatatctctcc

SEQ ID NO: 1319029 - DNA, 15 bp, Homo sapiens
atagtaatatctctc

SEQ ID NO: 1319030 - DNA, 15 bp, Homo sapiens
aatagtaatatctct

SEQ ID NO: 1319031 - DNA, 15 bp, Homo sapiens
taatagtaatatctc

SEQ ID NO: 1319032 - DNA, 15 bp, Homo sapiens
ttaatagtaatatct

SEQ ID NO: 1319033 - DNA, 15 bp, Homo sapiens
cttaatagtaatatc

SEQ ID NO: 1319034 - DNA, 15 bp, Homo sapiens
ccttaatagtaatat

SEQ ID NO: 1319035 - DNA, 15 bp, Homo sapiens
gccttaatagtaata

SEQ ID NO: 1319036 - DNA, 15 bp, Homo sapiens
agccttaatagtaat

SEQ ID NO: 1319037 - DNA, 15 bp, Homo sapiens
gagccttaatagtaa

SEQ ID NO: 1319038 - DNA, 15 bp, Homo sapiens
agagccttaatagta

SEQ ID NO: 1319039 - DNA, 15 bp, Homo sapiens
aagagccttaatagt

SEQ ID NO: 1319040 - DNA, 15 bp, Homo sapiens
caagagccttaatag

SEQ ID NO: 1319041 - DNA, 15 bp, Homo sapiens
tcaagagccttaata

SEQ ID NO: 1319042 - DNA, 15 bp, Homo sapiens
ttcaagagccttaat

SEQ ID NO: 1319043 - DNA, 15 bp, Homo sapiens
tttcaagagccttaa

SEQ ID NO: 1319044 - DNA, 15 bp, Homo sapiens
ttttcaagagcctta

SEQ ID NO: 1319045 - DNA, 15 bp, Homo sapiens
cttttcaagagcctt

SEQ ID NO: 1319046 - DNA, 15 bp, Homo sapiens
gcttttcaagagcct

SEQ ID NO: 1319047 - DNA, 15 bp, Homo sapiens
tgcttttcaagagcc

SEQ ID NO: 1319048 - DNA, 15 bp, Homo sapiens
ttgcttttcaagagc

SEQ ID NO: 1319049 - DNA, 15 bp, Homo sapiens
attgcttttcaagag

SEQ ID NO: 1319050 - DNA, 15 bp, Homo sapiens
aattgcttttcaaga

SEQ ID NO: 1319051 - DNA, 15 bp, Homo sapiens
taattgcttttcaag

SEQ ID NO: 1319052 - DNA, 15 bp, Homo sapiens
ataattgcttttcaa

SEQ ID NO: 1319053 - DNA, 15 bp, Homo sapiens
tataattgcttttca

SEQ ID NO: 1319054 - DNA, 15 bp, Homo sapiens
ttataattgcttttc

SEQ ID NO: 1319055 - DNA, 15 bp, Homo sapiens
cttataattgctttt

SEQ ID NO: 1319056 - DNA, 15 bp, Homo sapiens
tcttataattgcttt

SEQ ID NO: 1319057 - DNA, 15 bp, Homo sapiens
ctcttataattgctt

SEQ ID NO: 1319058 - DNA, 15 bp, Homo sapiens
tctcttataattgct

SEQ ID NO: 1319059 - DNA, 15 bp, Homo sapiens
gtctcttataattgc

SEQ ID NO: 1319060 - DNA, 15 bp, Homo sapiens
tgtctcttataattg

SEQ ID NO: 1319061 - DNA, 15 bp, Homo sapiens
ctgtctcttataatt

SEQ ID NO: 1319062 - DNA, 15 bp, Homo sapiens
tctgtctcttataat

SEQ ID NO: 1319063 - DNA, 15 bp, Homo sapiens
ttctgtctcttataa

SEQ ID NO: 1319064 - DNA, 15 bp, Homo sapiens
attctgtctcttata

SEQ ID NO: 1319065 - DNA, 15 bp, Homo sapiens
tattctgtctcttat

SEQ ID NO: 1319066 - DNA, 15 bp, Homo sapiens
ttattctgtctctta

SEQ ID NO: 1319067 - DNA, 15 bp, Homo sapiens
tttattctgtctctt

SEQ ID NO: 1319068 - DNA, 15 bp, Homo sapiens
ttttattctgtctct

SEQ ID NO: 1319069 - DNA, 15 bp, Homo sapiens
attttattctgtctc

SEQ ID NO: 1319070 - DNA, 15 bp, Homo sapiens
aattttattctgtct

SEQ ID NO: 1319071 - DNA, 15 bp, Homo sapiens
taattttattctgtc

SEQ ID NO: 1319072 - DNA, 15 bp, Homo sapiens
ttaattttattctgt

SEQ ID NO: 1319073 - DNA, 15 bp, Homo sapiens
cttttaattttattc

SEQ ID NO: 1319074 - DNA, 15 bp, Homo sapiens
ccttttaattttatt

SEQ ID NO: 1319075 - DNA, 15 bp, Homo sapiens
tccttttaattttat

SEQ ID NO: 1319076 - DNA, 15 bp, Homo sapiens
ttccttttaatttta

SEQ ID NO: 1319077 - DNA, 15 bp, Homo sapiens
tttccttttaatttt

SEQ ID NO: 1319078 - DNA, 15 bp, Homo sapiens
ttttccttttaattt

SEQ ID NO: 1319079 - DNA, 15 bp, Homo sapiens
tttttccttttaatt

SEQ ID NO: 1319080 - DNA, 15 bp, Homo sapiens
ttttttccttttaat

SEQ ID NO: 1319081 - DNA, 15 bp, Homo sapiens
cttttttccttttaa

SEQ ID NO: 1319082 - DNA, 15 bp, Homo sapiens
tcttttttcctttta

SEQ ID NO: 1319083 - DNA, 15 bp, Homo sapiens
atcttttttcctttt

SEQ ID NO: 1319084 - DNA, 15 bp, Homo sapiens
tatcttttttccttt

SEQ ID NO: 1319085 - DNA, 15 bp, Homo sapiens
ctatcttttttcctt

SEQ ID NO: 1319086 - DNA, 15 bp, Homo sapiens
gctatcttttttcct

SEQ ID NO: 1319087 - DNA, 15 bp, Homo sapiens
tgctatcttttttcc

SEQ ID NO: 1319088 - DNA, 15 bp, Homo sapiens
atgctatcttttttc

SEQ ID NO: 1319089 - DNA, 15 bp, Homo sapiens
tatgctatctttttt

SEQ ID NO: 1319090 - DNA, 15 bp, Homo sapiens
ttatgctatcttttt

SEQ ID NO: 1319091 - DNA, 15 bp, Homo sapiens
gttatgctatctttt

SEQ ID NO: 1319092 - DNA, 15 bp, Homo sapiens
ggttatgctatcttt

SEQ ID NO: 1319093 - DNA, 15 bp, Homo sapiens
gggttatgctatctt

SEQ ID NO: 1319094 - DNA, 15 bp, Homo sapiens
agggttatgctatct

SEQ ID NO: 1319095 - DNA, 15 bp, Homo sapiens
tagggttatgctatc

SEQ ID NO: 1319096 - DNA, 15 bp, Homo sapiens
gtagggttatgctat

SEQ ID NO: 1319097 - DNA, 15 bp, Homo sapiens
tgtagggttatgcta

SEQ ID NO: 1319098 - DNA, 15 bp, Homo sapiens
ttgtagggttatgct

SEQ ID NO: 1319099 - DNA, 15 bp, Homo sapiens
gttgtagggttatgc

SEQ ID NO: 1319100 - DNA, 15 bp, Homo sapiens
agttgtagggttatg

SEQ ID NO: 1319101 - DNA, 15 bp, Homo sapiens
gagttgtagggttat

SEQ ID NO: 1319102 - DNA, 15 bp, Homo sapiens
agagttgtagggtta

SEQ ID NO: 1319103 - DNA, 15 bp, Homo sapiens
tagagttgtagggtt

SEQ ID NO: 1319104 - DNA, 15 bp, Homo sapiens
ttagagttgtagggt

SEQ ID NO: 1319105 - DNA, 15 bp, Homo sapiens
attagagttgtaggg

SEQ ID NO: 1319106 - DNA, 15 bp, Homo sapiens
tattagagttgtagg

SEQ ID NO: 1319107 - DNA, 15 bp, Homo sapiens
ttattagagttgtag

SEQ ID NO: 1319108 - DNA, 15 bp, Homo sapiens
tttattagagttgta

SEQ ID NO: 1319109 - DNA, 15 bp, Homo sapiens
atttattagagttgt

SEQ ID NO: 1319110 - DNA, 15 bp, Homo sapiens
gatttattagagttg

SEQ ID NO: 1319111 - DNA, 15 bp, Homo sapiens
agatttattagagtt

SEQ ID NO: 1319112 - DNA, 15 bp, Homo sapiens
cagatttattagagt

SEQ ID NO: 1319113 - DNA, 15 bp, Homo sapiens
gcagatttattagag

SEQ ID NO: 1319114 - DNA, 15 bp, Homo sapiens
agcagatttattaga

SEQ ID NO: 1319115 - DNA, 15 bp, Homo sapiens
cagcagatttattag

SEQ ID NO: 1319116 - DNA, 15 bp, Homo sapiens
acagcagatttatta

SEQ ID NO: 1319117 - DNA, 15 bp, Homo sapiens
aacagcagatttatt

SEQ ID NO: 1319118 - DNA, 15 bp, Homo sapiens
aaacagcagatttat

SEQ ID NO: 1319119 - DNA, 15 bp, Homo sapiens
taaacagcagattta

SEQ ID NO: 1319120 - DNA, 15 bp, Homo sapiens
ataaacagcagattt

SEQ ID NO: 1319121 - DNA, 15 bp, Homo sapiens
cataaacagcagatt

SEQ ID NO: 1319122 - DNA, 15 bp, Homo sapiens
tcataaacagcagat

SEQ ID NO: 1319123 - DNA, 15 bp, Homo sapiens
atcataaacagcaga

SEQ ID NO: 1319124 - DNA, 15 bp, Homo sapiens
aatcataaacagcag

SEQ ID NO: 1319125 - DNA, 15 bp, Homo sapiens
aaatcataaacagca

SEQ ID NO: 1319126 - DNA, 15 bp, Homo sapiens
aaaatcataaacagc

SEQ ID NO: 1319127 - DNA, 15 bp, Homo sapiens
gaaaatcataaacag

SEQ ID NO: 1319128 - DNA, 15 bp, Homo sapiens
ggaaaatcataaaca

SEQ ID NO: 1319129 - DNA, 15 bp, Homo sapiens
tggaaaatcataaac

SEQ ID NO: 1319130 - DNA, 15 bp, Homo sapiens
ctggaaaatcataaa

SEQ ID NO: 1319131 - DNA, 15 bp, Homo sapiens
tctggaaaatcataa

SEQ ID NO: 1319132 - DNA, 15 bp, Homo sapiens
atctggaaaatcata

SEQ ID NO: 1319133 - DNA, 15 bp, Homo sapiens
aatctggaaaatcat

SEQ ID NO: 1319134 - DNA, 15 bp, Homo sapiens
aaatctggaaaatca

SEQ ID NO: 1319135 - DNA, 15 bp, Homo sapiens
taaatctggaaaatc

SEQ ID NO: 1319136 - DNA, 15 bp, Homo sapiens
ttaaatctggaaaat

SEQ ID NO: 1319137 - DNA, 15 bp, Homo sapiens
attaaatctggaaaa

SEQ ID NO: 1319138 - DNA, 15 bp, Homo sapiens
aattaaatctggaaa

SEQ ID NO: 1319139 - DNA, 15 bp, Homo sapiens
aaattaaatctggaa

SEQ ID NO: 1319140 - DNA, 15 bp, Homo sapiens
gaaattaaatctgga

SEQ ID NO: 1319141 - DNA, 15 bp, Homo sapiens
tgaaattaaatctgg

SEQ ID NO: 1319142 - DNA, 15 bp, Homo sapiens
ctgaaattaaatctg

SEQ ID NO: 1319143 - DNA, 15 bp, Homo sapiens
actgaaattaaatct

SEQ ID NO: 1319144 - DNA, 15 bp, Homo sapiens
gactgaaattaaatc

SEQ ID NO: 1319145 - DNA, 15 bp, Homo sapiens
agactgaaattaaat

SEQ ID NO: 1319146 - DNA, 15 bp, Homo sapiens
aagactgaaattaaa

SEQ ID NO: 1319147 - DNA, 15 bp, Homo sapiens
aaagactgaaattaa

SEQ ID NO: 1319148 - DNA, 15 bp, Homo sapiens
caaagactgaaatta

SEQ ID NO: 1319149 - DNA, 15 bp, Homo sapiens
gcaaagactgaaatt

SEQ ID NO: 1319150 - DNA, 15 bp, Homo sapiens
agcaaagactgaaat

SEQ ID NO: 1319151 - DNA, 15 bp, Homo sapiens
tagcaaagactgaaa

SEQ ID NO: 1319152 - DNA, 15 bp, Homo sapiens
atagcaaagactgaa

SEQ ID NO: 1319153 - DNA, 15 bp, Homo sapiens
aatagcaaagactga

SEQ ID NO: 1319154 - DNA, 15 bp, Homo sapiens
taatagcaaagactg

SEQ ID NO: 1319155 - DNA, 15 bp, Homo sapiens
ataatagcaaagact

SEQ ID NO: 1319156 - DNA, 15 bp, Homo sapiens
cataatagcaaagac

SEQ ID NO: 1319157 - DNA, 15 bp, Homo sapiens
gcataatagcaaaga

SEQ ID NO: 1319158 - DNA, 15 bp, Homo sapiens
agcataatagcaaag

SEQ ID NO: 1319159 - DNA, 15 bp, Homo sapiens
aagcataatagcaaa

SEQ ID NO: 1319160 - DNA, 15 bp, Homo sapiens
taagcataatagcaa

SEQ ID NO: 1319161 - DNA, 15 bp, Homo sapiens
ataagcataatagca

SEQ ID NO: 1319162 - DNA, 15 bp, Homo sapiens
tataagcataatagc

SEQ ID NO: 1319163 - DNA, 15 bp, Homo sapiens
atataagcataatag

SEQ ID NO: 1319164 - DNA, 15 bp, Homo sapiens
tatataagcataata

SEQ ID NO: 1319165 - DNA, 15 bp, Homo sapiens
ctatataagcataat

SEQ ID NO: 1319166 - DNA, 15 bp, Homo sapiens
actatataagcataa

SEQ ID NO: 1319167 - DNA, 15 bp, Homo sapiens
aactatataagcata

SEQ ID NO: 1319168 - DNA, 15 bp, Homo sapiens
caactatataagcat

SEQ ID NO: 1319169 - DNA, 15 bp, Homo sapiens
tcaactatataagca

SEQ ID NO: 1319170 - DNA, 15 bp, Homo sapiens
ttcaactatataagc

SEQ ID NO: 1319171 - DNA, 15 bp, Homo sapiens
tttcaactatataag

SEQ ID NO: 1319172 - DNA, 15 bp, Homo sapiens
atttcaactatataa

SEQ ID NO: 1319173 - DNA, 15 bp, Homo sapiens
gatttcaactatata

SEQ ID NO: 1319174 - DNA, 15 bp, Homo sapiens
tgatttcaactatat

SEQ ID NO: 1319175 - DNA, 15 bp, Homo sapiens
ctgatttcaactata

SEQ ID NO: 1319176 - DNA, 15 bp, Homo sapiens
tctgatttcaactat

SEQ ID NO: 1319177 - DNA, 15 bp, Homo sapiens
ctctgatttcaacta

SEQ ID NO: 1319178 - DNA, 15 bp, Homo sapiens
tctctgatttcaact

SEQ ID NO: 1319179 - DNA, 15 bp, Homo sapiens
ttctctgatttcaac

SEQ ID NO: 1319180 - DNA, 15 bp, Homo sapiens
attctctgatttcaa

SEQ ID NO: 1319181 - DNA, 15 bp, Homo sapiens
tattctctgatttca

SEQ ID NO: 1319182 - DNA, 15 bp, Homo sapiens
ttattctctgatttc

SEQ ID NO: 1319183 - DNA, 15 bp, Homo sapiens
attattctctgattt

SEQ ID NO: 1319184 - DNA, 15 bp, Homo sapiens
tattattctctgatt

SEQ ID NO: 1319185 - DNA, 15 bp, Homo sapiens
atattattctctgat

SEQ ID NO: 1319186 - DNA, 15 bp, Homo sapiens
gatattattctctga

SEQ ID NO: 1319187 - DNA, 15 bp, Homo sapiens
agatattattctctg

SEQ ID NO: 1319188 - DNA, 15 bp, Homo sapiens
aagatattattctct

SEQ ID NO: 1319189 - DNA, 15 bp, Homo sapiens
aaagatattattctc

SEQ ID NO: 1319190 - DNA, 15 bp, Homo sapiens
taaagatattattct

SEQ ID NO: 1319191 - DNA, 15 bp, Homo sapiens
ttaaagatattattc

SEQ ID NO: 1319192 - DNA, 15 bp, Homo sapiens
cttaaagatattatt

SEQ ID NO: 1319193 - DNA, 15 bp, Homo sapiens
tcttaaagatattat

SEQ ID NO: 1319194 - DNA, 15 bp, Homo sapiens
atcttaaagatatta

SEQ ID NO: 1319195 - DNA, 15 bp, Homo sapiens
aatcttaaagatatt

SEQ ID NO: 1319196 - DNA, 15 bp, Homo sapiens
aaatcttaaagatat

SEQ ID NO: 1319197 - DNA, 15 bp, Homo sapiens
caaatcttaaagata

SEQ ID NO: 1319198 - DNA, 15 bp, Homo sapiens
ccaaatcttaaagat

SEQ ID NO: 1319199 - DNA, 15 bp, Homo sapiens
tccaaatcttaaaga

SEQ ID NO: 1319200 - DNA, 15 bp, Homo sapiens
ttccaaatcttaaag

SEQ ID NO: 1319201 - DNA, 15 bp, Homo sapiens
attccaaatcttaaa

SEQ ID NO: 1319202 - DNA, 15 bp, Homo sapiens
cattccaaatcttaa

SEQ ID NO: 1319203 - DNA, 15 bp, Homo sapiens
ccattccaaatctta

SEQ ID NO: 1319204 - DNA, 15 bp, Homo sapiens
cccattccaaatctt

SEQ ID NO: 1319205 - DNA, 15 bp, Homo sapiens
tcccattccaaatct

SEQ ID NO: 1319206 - DNA, 15 bp, Homo sapiens
atcccattccaaatc

SEQ ID NO: 1319207 - DNA, 15 bp, Homo sapiens
tatcccattccaaat

SEQ ID NO: 1319208 - DNA, 15 bp, Homo sapiens
gtatcccattccaaa

SEQ ID NO: 1319209 - DNA, 15 bp, Homo sapiens
agtatcccattccaa

SEQ ID NO: 1319210 - DNA, 15 bp, Homo sapiens
cagtatcccattcca

SEQ ID NO: 1319211 - DNA, 15 bp, Homo sapiens
gcagtatcccattcc

SEQ ID NO: 1319212 - DNA, 15 bp, Homo sapiens
agcagtatcccattc

SEQ ID NO: 1319213 - DNA, 15 bp, Homo sapiens
gagcagtatcccatt

SEQ ID NO: 1319214 - DNA, 15 bp, Homo sapiens
agagcagtatcccat

SEQ ID NO: 1319215 - DNA, 15 bp, Homo sapiens
aagagcagtatccca

SEQ ID NO: 1319216 - DNA, 15 bp, Homo sapiens
aaagagcagtatccc

SEQ ID NO: 1319217 - DNA, 15 bp, Homo sapiens
gaaagagcagtatcc

SEQ ID NO: 1319218 - DNA, 15 bp, Homo sapiens
agaaagagcagtatc

SEQ ID NO: 1319219 - DNA, 15 bp, Homo sapiens
aagaaagagcagtat

SEQ ID NO: 1319220 - DNA, 15 bp, Homo sapiens
aaagaaagagcagta

SEQ ID NO: 1319221 - DNA, 15 bp, Homo sapiens
aaaagaaagagcagt

SEQ ID NO: 1319222 - DNA, 15 bp, Homo sapiens
aaaaagaaagagcag

SEQ ID NO: 1319223 - DNA, 15 bp, Homo sapiens
taaaaagaaagagca

SEQ ID NO: 1319224 - DNA, 15 bp, Homo sapiens
ataaaaagaaagagc

SEQ ID NO: 1319225 - DNA, 15 bp, Homo sapiens
cataaaaagaaagag

SEQ ID NO: 1319226 - DNA, 15 bp, Homo sapiens
acataaaaagaaaga

SEQ ID NO: 1319227 - DNA, 15 bp, Homo sapiens
cacataaaaagaaag

SEQ ID NO: 1319228 - DNA, 15 bp, Homo sapiens
gcacataaaaagaaa

SEQ ID NO: 1319229 - DNA, 15 bp, Homo sapiens
agcacataaaaagaa

SEQ ID NO: 1319230 - DNA, 15 bp, Homo sapiens
gagcacataaaaaga

SEQ ID NO: 1319231 - DNA, 15 bp, Homo sapiens
agagcacataaaaag

SEQ ID NO: 1319232 - DNA, 15 bp, Homo sapiens
aagagcacataaaaa

SEQ ID NO: 1319233 - DNA, 15 bp, Homo sapiens
taagagcacataaaa

SEQ ID NO: 1319234 - DNA, 15 bp, Homo sapiens
ctaagagcacataaa

SEQ ID NO: 1319235 - DNA, 15 bp, Homo sapiens
tctaagagcacataa

SEQ ID NO: 1319236 - DNA, 15 bp, Homo sapiens
atctaagagcacata

SEQ ID NO: 1319237 - DNA, 15 bp, Homo sapiens
tatctaagagcacat

SEQ ID NO: 1319238 - DNA, 15 bp, Homo sapiens
ttatctaagagcaca

SEQ ID NO: 1319239 - DNA, 15 bp, Homo sapiens
cttatctaagagcac

SEQ ID NO: 1319240 - DNA, 15 bp, Homo sapiens
tcttatctaagagca

SEQ ID NO: 1319241 - DNA, 15 bp, Homo sapiens
ttcttatctaagagc

SEQ ID NO: 1319242 - DNA, 15 bp, Homo sapiens
gttcttatctaagag

SEQ ID NO: 1319243 - DNA, 15 bp, Homo sapiens
agttcttatctaaga

SEQ ID NO: 1319244 - DNA, 15 bp, Homo sapiens
gagttcttatctaag

SEQ ID NO: 1319245 - DNA, 15 bp, Homo sapiens
agagttcttatctaa

SEQ ID NO: 1319246 - DNA, 15 bp, Homo sapiens
aagagttcttatcta

SEQ ID NO: 1319247 - DNA, 15 bp, Homo sapiens
aaagagttcttatct

SEQ ID NO: 1319248 - DNA, 15 bp, Homo sapiens
gaaagagttcttatc

SEQ ID NO: 1319249 - DNA, 15 bp, Homo sapiens
agaaagagttcttat

SEQ ID NO: 1319250 - DNA, 15 bp, Homo sapiens
tagaaagagttctta

SEQ ID NO: 1319251 - DNA, 15 bp, Homo sapiens
gtagaaagagttctt

SEQ ID NO: 1319252 - DNA, 15 bp, Homo sapiens
agtagaaagagttct

SEQ ID NO: 1319253 - DNA, 15 bp, Homo sapiens
cagtagaaagagttc

SEQ ID NO: 1319254 - DNA, 15 bp, Homo sapiens
acagtagaaagagtt

SEQ ID NO: 1319255 - DNA, 15 bp, Homo sapiens
cacagtagaaagagt

SEQ ID NO: 1319256 - DNA, 15 bp, Homo sapiens
acacagtagaaagag

SEQ ID NO: 1319257 - DNA, 15 bp, Homo sapiens
gacacagtagaaaga

SEQ ID NO: 1319258 - DNA, 15 bp, Homo sapiens
agacacagtagaaag

SEQ ID NO: 1319259 - DNA, 15 bp, Homo sapiens
aagacacagtagaaa

SEQ ID NO: 1319260 - DNA, 15 bp, Homo sapiens
taagacacagtagaa

SEQ ID NO: 1319261 - DNA, 15 bp, Homo sapiens
ataagacacagtaga

SEQ ID NO: 1319262 - DNA, 15 bp, Homo sapiens
tataagacacagtag

SEQ ID NO: 1319263 - DNA, 15 bp, Homo sapiens
ttataagacacagta

SEQ ID NO: 1319264 - DNA, 15 bp, Homo sapiens
tttataagacacagt

SEQ ID NO: 1319265 - DNA, 15 bp, Homo sapiens
gtttataagacacag

SEQ ID NO: 1319266 - DNA, 15 bp, Homo sapiens
agtttataagacaca

SEQ ID NO: 1319267 - DNA, 15 bp, Homo sapiens
gagtttataagacac

SEQ ID NO: 1319268 - DNA, 15 bp, Homo sapiens
agagtttataagaca

SEQ ID NO: 1319269 - DNA, 15 bp, Homo sapiens
cagagtttataagac

SEQ ID NO: 1319270 - DNA, 15 bp, Homo sapiens
acagagtttataaga

SEQ ID NO: 1319271 - DNA, 15 bp, Homo sapiens
gacagagtttataag

SEQ ID NO: 1319272 - DNA, 15 bp, Homo sapiens
tgacagagtttataa

SEQ ID NO: 1319273 - DNA, 15 bp, Homo sapiens
atgacagagtttata

SEQ ID NO: 1319274 - DNA, 15 bp, Homo sapiens
tatgacagagtttat

SEQ ID NO: 1319275 - DNA, 15 bp, Homo sapiens
gtatgacagagttta

SEQ ID NO: 1319276 - DNA, 15 bp, Homo sapiens
ggtatgacagagttt

SEQ ID NO: 1319277 - DNA, 15 bp, Homo sapiens
tggtatgacagagtt

SEQ ID NO: 1319278 - DNA, 15 bp, Homo sapiens
atggtatgacagagt

SEQ ID NO: 1319279 - DNA, 15 bp, Homo sapiens
tatggtatgacagag

SEQ ID NO: 1319280 - DNA, 15 bp, Homo sapiens
ttatggtatgacaga

SEQ ID NO: 1319281 - DNA, 15 bp, Homo sapiens
cttatggtatgacag

SEQ ID NO: 1319282 - DNA, 15 bp, Homo sapiens
acttatggtatgaca

SEQ ID NO: 1319283 - DNA, 15 bp, Homo sapiens
aacttatggtatgac

SEQ ID NO: 1319284 - DNA, 15 bp, Homo sapiens
aaacttatggtatga

SEQ ID NO: 1319285 - DNA, 15 bp, Homo sapiens
gaaacttatggtatg

SEQ ID NO: 1319286 - DNA, 15 bp, Homo sapiens
agaaacttatggtat

SEQ ID NO: 1319287 - DNA, 15 bp, Homo sapiens
gagaaacttatggta

SEQ ID NO: 1319288 - DNA, 15 bp, Homo sapiens
tgagaaacttatggt

SEQ ID NO: 1319289 - DNA, 15 bp, Homo sapiens
ttgagaaacttatgg

SEQ ID NO: 1319290 - DNA, 15 bp, Homo sapiens
tttgagaaacttatg

SEQ ID NO: 1319291 - DNA, 15 bp, Homo sapiens
ctttgagaaacttat

SEQ ID NO: 1319292 - DNA, 15 bp, Homo sapiens
actttgagaaactta

SEQ ID NO: 1319293 - DNA, 15 bp, Homo sapiens
cactttgagaaactt

SEQ ID NO: 1319294 - DNA, 15 bp, Homo sapiens
tcactttgagaaact

SEQ ID NO: 1319295 - DNA, 15 bp, Homo sapiens
atcactttgagaaac

SEQ ID NO: 1319296 - DNA, 15 bp, Homo sapiens
aatcactttgagaaa

SEQ ID NO: 1319297 - DNA, 15 bp, Homo sapiens
aaatcactttgagaa

SEQ ID NO: 1319298 - DNA, 15 bp, Homo sapiens
aaaatcactttgaga

SEQ ID NO: 1319299 - DNA, 15 bp, Homo sapiens
taaaatcactttgag

SEQ ID NO: 1319300 - DNA, 15 bp, Homo sapiens
ttaaaatcactttga

SEQ ID NO: 1319301 - DNA, 15 bp, Homo sapiens
gttaaaatcactttg

SEQ ID NO: 1319302 - DNA, 15 bp, Homo sapiens
ggttaaaatcacttt

SEQ ID NO: 1319303 - DNA, 15 bp, Homo sapiens
tggttaaaatcactt

SEQ ID NO: 1319304 - DNA, 15 bp, Homo sapiens
gtggttaaaatcact

SEQ ID NO: 1319305 - DNA, 15 bp, Homo sapiens
agtggttaaaatcac

SEQ ID NO: 1319306 - DNA, 15 bp, Homo sapiens
cagtggttaaaatca

SEQ ID NO: 1319307 - DNA, 15 bp, Homo sapiens
acagtggttaaaatc

SEQ ID NO: 1319308 - DNA, 15 bp, Homo sapiens
tacagtggttaaaat

SEQ ID NO: 1319309 - DNA, 15 bp, Homo sapiens
gtacagtggttaaaa

SEQ ID NO: 1319310 - DNA, 15 bp, Homo sapiens
tgtacagtggttaaa

SEQ ID NO: 1319311 - DNA, 15 bp, Homo sapiens
atgtacagtggttaa

SEQ ID NO: 1319312 - DNA, 15 bp, Homo sapiens
aatgtacagtggtta

SEQ ID NO: 1319313 - DNA, 15 bp, Homo sapiens
aaatgtacagtggtt

SEQ ID NO: 1319314 - DNA, 15 bp, Homo sapiens
aaaatgtacagtggt

SEQ ID NO: 1319315 - DNA, 15 bp, Homo sapiens
taaaatgtacagtgg

SEQ ID NO: 1319316 - DNA, 15 bp, Homo sapiens
ttaaaatgtacagtg

SEQ ID NO: 1319317 - DNA, 15 bp, Homo sapiens
tttaaaatgtacagt

SEQ ID NO: 1319318 - DNA, 15 bp, Homo sapiens
gtttaaaatgtacag

SEQ ID NO: 1319319 - DNA, 15 bp, Homo sapiens
tgtttaaaatgtaca

SEQ ID NO: 1319320 - DNA, 15 bp, Homo sapiens
ttgtttaaaatgtac

SEQ ID NO: 1319321 - DNA, 15 bp, Homo sapiens
attgtttaaaatgta

SEQ ID NO: 1319322 - DNA, 15 bp, Homo sapiens
tattgtttaaaatgt

SEQ ID NO: 1319323 - DNA, 15 bp, Homo sapiens
atattgtttaaaatg

SEQ ID NO: 1319324 - DNA, 15 bp, Homo sapiens
catattgtttaaaat

SEQ ID NO: 1319325 - DNA, 15 bp, Homo sapiens
tcatattgtttaaaa

SEQ ID NO: 1319326 - DNA, 15 bp, Homo sapiens
ctcatattgtttaaa

SEQ ID NO: 1319327 - DNA, 15 bp, Homo sapiens
tctcatattgtttaa

SEQ ID NO: 1319328 - DNA, 15 bp, Homo sapiens
ttctcatattgttta

SEQ ID NO: 1319329 - DNA, 15 bp, Homo sapiens
tttctcatattgttt

SEQ ID NO: 1319330 - DNA, 15 bp, Homo sapiens
atttctcatattgtt

SEQ ID NO: 1319331 - DNA, 15 bp, Homo sapiens
tatttctcatattgt

SEQ ID NO: 1319332 - DNA, 15 bp, Homo sapiens
ttatttctcatattg

SEQ ID NO: 1319333 - DNA, 15 bp, Homo sapiens
tttatttctcatatt

SEQ ID NO: 1319334 - DNA, 15 bp, Homo sapiens
atttatttctcatat

SEQ ID NO: 1319335 - DNA, 15 bp, Homo sapiens
aatttatttctcata

SEQ ID NO: 1319336 - DNA, 15 bp, Homo sapiens
taatttatttctcat

SEQ ID NO: 1319337 - DNA, 15 bp, Homo sapiens
ttaatttatttctca

SEQ ID NO: 1319338 - DNA, 15 bp, Homo sapiens
attaatttatttctc

SEQ ID NO: 1319339 - DNA, 15 bp, Homo sapiens
aattaatttatttct

SEQ ID NO: 1319340 - DNA, 15 bp, Homo sapiens
aaattaatttatttc

SEQ ID NO: 1319341 - DNA, 15 bp, Homo sapiens
gaaattaatttattt

SEQ ID NO: 1319342 - DNA, 15 bp, Homo sapiens
agaaattaatttatt

SEQ ID NO: 1319343 - DNA, 15 bp, Homo sapiens
cagaaattaatttat

SEQ ID NO: 1319344 - DNA, 15 bp, Homo sapiens
tcagaaattaattta

SEQ ID NO: 1319345 - DNA, 15 bp, Homo sapiens
atcagaaattaattt

SEQ ID NO: 1319346 - DNA, 15 bp, Homo sapiens
tatcagaaattaatt

SEQ ID NO: 1319347 - DNA, 15 bp, Homo sapiens
atatcagaaattaat

SEQ ID NO: 1319348 - DNA, 15 bp, Homo sapiens
catatcagaaattaa

SEQ ID NO: 1319349 - DNA, 15 bp, Homo sapiens
tcatatcagaaatta

SEQ ID NO: 1319350 - DNA, 15 bp, Homo sapiens
ttcatatcagaaatt

SEQ ID NO: 1319351 - DNA, 15 bp, Homo sapiens
gttcatatcagaaat

SEQ ID NO: 1319352 - DNA, 15 bp, Homo sapiens
tgttcatatcagaaa

SEQ ID NO: 1319353 - DNA, 15 bp, Homo sapiens
atgttcatatcagaa

SEQ ID NO: 1319354 - DNA, 15 bp, Homo sapiens
tatgttcatatcaga

SEQ ID NO: 1319355 - DNA, 15 bp, Homo sapiens
gtatgttcatatcag

SEQ ID NO: 1319356 - DNA, 15 bp, Homo sapiens
tgtatgttcatatca

SEQ ID NO: 1319357 - DNA, 15 bp, Homo sapiens
atgtatgttcatatc

SEQ ID NO: 1319358 - DNA, 15 bp, Homo sapiens
catgtatgttcatat

SEQ ID NO: 1319359 - DNA, 15 bp, Homo sapiens
acatgtatgttcata

SEQ ID NO: 1319360 - DNA, 15 bp, Homo sapiens
tacatgtatgttcat

SEQ ID NO: 1319361 - DNA, 15 bp, Homo sapiens
ttacatgtatgttca

SEQ ID NO: 1319362 - DNA, 15 bp, Homo sapiens
cttacatgtatgttc

SEQ ID NO: 1319363 - DNA, 15 bp, Homo sapiens
gcttacatgtatgtt

SEQ ID NO: 1319364 - DNA, 15 bp, Homo sapiens
agcttacatgtatgt

SEQ ID NO: 1319365 - DNA, 15 bp, Homo sapiens
tagcttacatgtatg

SEQ ID NO: 1319366 - DNA, 15 bp, Homo sapiens
gtagcttacatgtat

SEQ ID NO: 1319367 - DNA, 15 bp, Homo sapiens
agtagcttacatgta

SEQ ID NO: 1319368 - DNA, 15 bp, Homo sapiens
tagtagcttacatgt

SEQ ID NO: 1319369 - DNA, 15 bp, Homo sapiens
ttagtagcttacatg

SEQ ID NO: 1319370 - DNA, 15 bp, Homo sapiens
tttagtagcttacat

SEQ ID NO: 1319371 - DNA, 15 bp, Homo sapiens
gtttagtagcttaca

SEQ ID NO: 1319372 - DNA, 15 bp, Homo sapiens
ggtttagtagcttac

SEQ ID NO: 1319373 - DNA, 15 bp, Homo sapiens
aggtttagtagctta

SEQ ID NO: 1319374 - DNA, 15 bp, Homo sapiens
gaggtttagtagctt

SEQ ID NO: 1319375 - DNA, 15 bp, Homo sapiens
tgaggtttagtagct

SEQ ID NO: 1319376 - DNA, 15 bp, Homo sapiens
ctgaggtttagtagc

SEQ ID NO: 1319377 - DNA, 15 bp, Homo sapiens
actgaggtttagtag

SEQ ID NO: 1319378 - DNA, 15 bp, Homo sapiens
tactgaggtttagta

SEQ ID NO: 1319379 - DNA, 15 bp, Homo sapiens
atactgaggtttagt

SEQ ID NO: 1319380 - DNA, 15 bp, Homo sapiens
aatactgaggtttag

SEQ ID NO: 1319381 - DNA, 15 bp, Homo sapiens
taatactgaggttta

SEQ ID NO: 1319382 - DNA, 15 bp, Homo sapiens
ataatactgaggttt

SEQ ID NO: 1319383 - DNA, 15 bp, Homo sapiens
cataatactgaggtt

SEQ ID NO: 1319384 - DNA, 15 bp, Homo sapiens
tcataatactgaggt

SEQ ID NO: 1319385 - DNA, 15 bp, Homo sapiens
ttcataatactgagg

SEQ ID NO: 1319386 - DNA, 15 bp, Homo sapiens
tttcataatactgag

SEQ ID NO: 1319387 - DNA, 15 bp, Homo sapiens
atttcataatactga

SEQ ID NO: 1319388 - DNA, 15 bp, Homo sapiens
tatttcataatactg

SEQ ID NO: 1319389 - DNA, 15 bp, Homo sapiens
atatttcataatact

SEQ ID NO: 1319390 - DNA, 15 bp, Homo sapiens
gatatttcataatac

SEQ ID NO: 1319391 - DNA, 15 bp, Homo sapiens
agatatttcataata

SEQ ID NO: 1319392 - DNA, 15 bp, Homo sapiens
tagatatttcataat

SEQ ID NO: 1319393 - DNA, 15 bp, Homo sapiens
ttagatatttcataa

SEQ ID NO: 1319394 - DNA, 15 bp, Homo sapiens
tttagatatttcata

SEQ ID NO: 1319395 - DNA, 15 bp, Homo sapiens
ttttagatatttcat

SEQ ID NO: 1319396 - DNA, 15 bp, Homo sapiens
gttttagatatttca

SEQ ID NO: 1319397 - DNA, 15 bp, Homo sapiens
cgttttagatatttc

SEQ ID NO: 1319398 - DNA, 15 bp, Homo sapiens
acgttttagatattt

SEQ ID NO: 1319399 - DNA, 15 bp, Homo sapiens
cacgttttagatatt

SEQ ID NO: 1319400 - DNA, 15 bp, Homo sapiens
tcacgttttagatat

SEQ ID NO: 1319401 - DNA, 15 bp, Homo sapiens
gtcacgttttagata

SEQ ID NO: 1319402 - DNA, 15 bp, Homo sapiens
agtcacgttttagat

SEQ ID NO: 1319403 - DNA, 15 bp, Homo sapiens
aagtcacgttttaga

SEQ ID NO: 1319404 - DNA, 15 bp, Homo sapiens
taagtcacgttttag

SEQ ID NO: 1319405 - DNA, 15 bp, Homo sapiens
ataagtcacgtttta

SEQ ID NO: 1319406 - DNA, 15 bp, Homo sapiens
aataagtcacgtttt

SEQ ID NO: 1319407 - DNA, 15 bp, Homo sapiens
taataagtcacgttt

SEQ ID NO: 1319408 - DNA, 15 bp, Homo sapiens
ctaataagtcacgtt

SEQ ID NO: 1319409 - DNA, 15 bp, Homo sapiens
tctaataagtcacgt

SEQ ID NO: 1319410 - DNA, 15 bp, Homo sapiens
ttctaataagtcacg

SEQ ID NO: 1319411 - DNA, 15 bp, Homo sapiens
tttctaataagtcac

SEQ ID NO: 1319412 - DNA, 15 bp, Homo sapiens
atttctaataagtca

SEQ ID NO: 1319413 - DNA, 15 bp, Homo sapiens
tatttctaataagtc

SEQ ID NO: 1319414 - DNA, 15 bp, Homo sapiens
ctatttctaataagt

SEQ ID NO: 1319415 - DNA, 15 bp, Homo sapiens
tctatttctaataag

SEQ ID NO: 1319416 - DNA, 15 bp, Homo sapiens
atctatttctaataa

SEQ ID NO: 1319417 - DNA, 15 bp, Homo sapiens
aatctatttctaata

SEQ ID NO: 1319418 - DNA, 15 bp, Homo sapiens
gaatctatttctaat

SEQ ID NO: 1319419 - DNA, 15 bp, Homo sapiens
agaatctatttctaa

SEQ ID NO: 1319420 - DNA, 15 bp, Homo sapiens
aagaatctatttcta

SEQ ID NO: 1319421 - DNA, 15 bp, Homo sapiens
aaagaatctatttct

SEQ ID NO: 1319422 - DNA, 15 bp, Homo sapiens
aaaagaatctatttc

SEQ ID NO: 1319423 - DNA, 15 bp, Homo sapiens
taaaagaatctattt

SEQ ID NO: 1319424 - DNA, 15 bp, Homo sapiens
ctaaaagaatctatt

SEQ ID NO: 1319425 - DNA, 15 bp, Homo sapiens
tctaaaagaatctat

SEQ ID NO: 1319426 - DNA, 15 bp, Homo sapiens
gtctaaaagaatcta

SEQ ID NO: 1319427 - DNA, 15 bp, Homo sapiens
cgtctaaaagaatct

SEQ ID NO: 1319428 - DNA, 15 bp, Homo sapiens
acgtctaaaagaatc

SEQ ID NO: 1319429 - DNA, 15 bp, Homo sapiens
aacgtctaaaagaat

SEQ ID NO: 1319430 - DNA, 15 bp, Homo sapiens
taacgtctaaaagaa

SEQ ID NO: 1319431 - DNA, 15 bp, Homo sapiens
ttaacgtctaaaaga

SEQ ID NO: 1319432 - DNA, 15 bp, Homo sapiens
attaacgtctaaaag

SEQ ID NO: 1319433 - DNA, 15 bp, Homo sapiens
aattaacgtctaaaa

SEQ ID NO: 1319434 - DNA, 15 bp, Homo sapiens
aaattaacgtctaaa

SEQ ID NO: 1319435 - DNA, 15 bp, Homo sapiens
aaaattaacgtctaa

SEQ ID NO: 1319436 - DNA, 15 bp, Homo sapiens
aaaaattaacgtcta

SEQ ID NO: 1319437 - DNA, 15 bp, Homo sapiens
aaaaaattaacgtct

SEQ ID NO: 1319438 - DNA, 15 bp, Homo sapiens
aaaaaaattaacgtc

SEQ ID NO: 1319439 - DNA, 15 bp, Homo sapiens
aaaaaaaattaacgt

SEQ ID NO: 1319440 - DNA, 15 bp, Homo sapiens
aaaaaaaaattaacg

SEQ ID NO: 1319441 - DNA, 15 bp, Homo sapiens
gaaaaaaaaattaac

SEQ ID NO: 1319442 - DNA, 15 bp, Homo sapiens
tgaaaaaaaaattaa

SEQ ID NO: 1319443 - DNA, 15 bp, Homo sapiens
ttgaaaaaaaaatta

SEQ ID NO: 1319444 - DNA, 15 bp, Homo sapiens
tttgaaaaaaaaatt

SEQ ID NO: 1319445 - DNA, 15 bp, Homo sapiens
ttttgaaaaaaaaat

SEQ ID NO: 1319446 - DNA, 15 bp, Homo sapiens
tttttgaaaaaaaaa

SEQ ID NO: 1319447 - DNA, 15 bp, Homo sapiens
ctttttgaaaaaaaa

SEQ ID NO: 1319448 - DNA, 15 bp, Homo sapiens
tctttttgaaaaaaa

SEQ ID NO: 1319449 - DNA, 15 bp, Homo sapiens
atctttttgaaaaaa

SEQ ID NO: 1319450 - DNA, 15 bp, Homo sapiens
tatctttttgaaaaa

SEQ ID NO: 1319451 - DNA, 15 bp, Homo sapiens
gtatctttttgaaaa

SEQ ID NO: 1319452 - DNA, 15 bp, Homo sapiens
tgtatctttttgaaa

SEQ ID NO: 1319453 - DNA, 15 bp, Homo sapiens
atgtatctttttgaa

SEQ ID NO: 1319454 - DNA, 15 bp, Homo sapiens
tatgtatctttttga

SEQ ID NO: 1319455 - DNA, 15 bp, Homo sapiens
atatgtatctttttg

SEQ ID NO: 1319456 - DNA, 15 bp, Homo sapiens
catatgtatcttttt

SEQ ID NO: 1319457 - DNA, 15 bp, Homo sapiens
acatatgtatctttt

SEQ ID NO: 1319458 - DNA, 15 bp, Homo sapiens
tacatatgtatcttt

SEQ ID NO: 1319459 - DNA, 15 bp, Homo sapiens
gtacatatgtatctt

SEQ ID NO: 1319460 - DNA, 15 bp, Homo sapiens
agtacatatgtatct

SEQ ID NO: 1319461 - DNA, 15 bp, Homo sapiens
aagtacatatgtatc

SEQ ID NO: 1319462 - DNA, 15 bp, Homo sapiens
aaagtacatatgtat

SEQ ID NO: 1319463 - DNA, 15 bp, Homo sapiens
aaaagtacatatgta

SEQ ID NO: 1319464 - DNA, 15 bp, Homo sapiens
gaaaagtacatatgt

SEQ ID NO: 1319465 - DNA, 15 bp, Homo sapiens
agaaaagtacatatg

SEQ ID NO: 1319466 - DNA, 15 bp, Homo sapiens
tagaaaagtacatat

SEQ ID NO: 1319467 - DNA, 15 bp, Homo sapiens
atagaaaagtacata

SEQ ID NO: 1319468 - DNA, 15 bp, Homo sapiens
aatagaaaagtacat

SEQ ID NO: 1319469 - DNA, 15 bp, Homo sapiens
aaatagaaaagtaca

SEQ ID NO: 1319470 - DNA, 15 bp, Homo sapiens
taaatagaaaagtac

SEQ ID NO: 1319471 - DNA, 15 bp, Homo sapiens
ataaatagaaaagta

SEQ ID NO: 1319472 - DNA, 15 bp, Homo sapiens
cataaatagaaaagt

SEQ ID NO: 1319473 - DNA, 15 bp, Homo sapiens
tcataaatagaaaag

SEQ ID NO: 1319474 - DNA, 15 bp, Homo sapiens
ctcataaatagaaaa

SEQ ID NO: 1319475 - DNA, 15 bp, Homo sapiens
actcataaatagaaa

SEQ ID NO: 1319476 - DNA, 15 bp, Homo sapiens
tactcataaatagaa

SEQ ID NO: 1319477 - DNA, 15 bp, Homo sapiens
atactcataaataga

SEQ ID NO: 1319478 - DNA, 15 bp, Homo sapiens
tatactcataaatag

SEQ ID NO: 1319479 - DNA, 15 bp, Homo sapiens
gtatactcataaata

SEQ ID NO: 1319480 - DNA, 15 bp, Homo sapiens
ggtatactcataaat

SEQ ID NO: 1319481 - DNA, 15 bp, Homo sapiens
aggtatactcataaa

SEQ ID NO: 1319482 - DNA, 15 bp, Homo sapiens
caggtatactcataa

SEQ ID NO: 1319483 - DNA, 15 bp, Homo sapiens
ccaggtatactcata

SEQ ID NO: 1319484 - DNA, 15 bp, Homo sapiens
cccaggtatactcat

SEQ ID NO: 1319485 - DNA, 15 bp, Homo sapiens
acccaggtatactca

SEQ ID NO: 1319486 - DNA, 15 bp, Homo sapiens
tacccaggtatactc

SEQ ID NO: 1319487 - DNA, 15 bp, Homo sapiens
ttacccaggtatact

SEQ ID NO: 1319488 - DNA, 15 bp, Homo sapiens
tttacccaggtatac

SEQ ID NO: 1319489 - DNA, 15 bp, Homo sapiens
atttacccaggtata

SEQ ID NO: 1319490 - DNA, 15 bp, Homo sapiens
tatttacccaggtat

SEQ ID NO: 1319491 - DNA, 15 bp, Homo sapiens
atatttacccaggta

SEQ ID NO: 1319492 - DNA, 15 bp, Homo sapiens
tatatttacccaggt

SEQ ID NO: 1319493 - DNA, 15 bp, Homo sapiens
ctatatttacccagg

SEQ ID NO: 1319494 - DNA, 15 bp, Homo sapiens
tctatatttacccag

SEQ ID NO: 1319495 - DNA, 15 bp, Homo sapiens
ttctatatttaccca

SEQ ID NO: 1319496 - DNA, 15 bp, Homo sapiens
gttctatatttaccc

SEQ ID NO: 1319497 - DNA, 15 bp, Homo sapiens
tgttctatatttacc

SEQ ID NO: 1319498 - DNA, 15 bp, Homo sapiens
atgttctatatttac

SEQ ID NO: 1319499 - DNA, 15 bp, Homo sapiens
tatgttctatattta

SEQ ID NO: 1319500 - DNA, 15 bp, Homo sapiens
ctatgttctatattt

SEQ ID NO: 1319501 - DNA, 15 bp, Homo sapiens
cctatgttctatatt

SEQ ID NO: 1319502 - DNA, 15 bp, Homo sapiens
tcctatgttctatat

SEQ ID NO: 1319503 - DNA, 15 bp, Homo sapiens
ttcctatgttctata

SEQ ID NO: 1319504 - DNA, 15 bp, Homo sapiens
tttcctatgttctat

SEQ ID NO: 1319505 - DNA, 15 bp, Homo sapiens
ttttcctatgttcta

SEQ ID NO: 1319506 - DNA, 15 bp, Homo sapiens
attttcctatgttct

SEQ ID NO: 1319507 - DNA, 15 bp, Homo sapiens
cattttcctatgttc

SEQ ID NO: 1319508 - DNA, 15 bp, Homo sapiens
acattttcctatgtt

SEQ ID NO: 1319509 - DNA, 15 bp, Homo sapiens
tacattttcctatgt

SEQ ID NO: 1319510 - DNA, 15 bp, Homo sapiens
gtacattttcctatg

SEQ ID NO: 1319511 - DNA, 15 bp, Homo sapiens
agtacattttcctat

SEQ ID NO: 1319512 - DNA, 15 bp, Homo sapiens
aagtacattttccta

SEQ ID NO: 1319513 - DNA, 15 bp, Homo sapiens
aaagtacattttcct

SEQ ID NO: 1319514 - DNA, 15 bp, Homo sapiens
caaagtacattttcc

SEQ ID NO: 1319515 - DNA, 15 bp, Homo sapiens
tcaaagtacattttc

SEQ ID NO: 1319516 - DNA, 15 bp, Homo sapiens
atcaaagtacatttt

SEQ ID NO: 1319517 - DNA, 15 bp, Homo sapiens
catcaaagtacattt

SEQ ID NO: 1319518 - DNA, 15 bp, Homo sapiens
acatcaaagtacatt

SEQ ID NO: 1319519 - DNA, 15 bp, Homo sapiens
aacatcaaagtacat

SEQ ID NO: 1319520 - DNA, 15 bp, Homo sapiens
aaacatcaaagtaca

SEQ ID NO: 1319521 - DNA, 15 bp, Homo sapiens
aaaacatcaaagtac

SEQ ID NO: 1319522 - DNA, 15 bp, Homo sapiens
taaaacatcaaagta

SEQ ID NO: 1319523 - DNA, 15 bp, Homo sapiens
ttaaaacatcaaagt

SEQ ID NO: 1319524 - DNA, 15 bp, Homo sapiens
tttaaaacatcaaag

SEQ ID NO: 1319525 - DNA, 15 bp, Homo sapiens
ttttaaaacatcaaa

SEQ ID NO: 1319526 - DNA, 15 bp, Homo sapiens
gttttaaaacatcaa

SEQ ID NO: 1319527 - DNA, 15 bp, Homo sapiens
tgttttaaaacatca

SEQ ID NO: 1319528 - DNA, 15 bp, Homo sapiens
atgttttaaaacatc

SEQ ID NO: 1319529 - DNA, 15 bp, Homo sapiens
aatgttttaaaacat

SEQ ID NO: 1319530 - DNA, 15 bp, Homo sapiens
aaatgttttaaaaca

SEQ ID NO: 1319531 - DNA, 15 bp, Homo sapiens
taaatgttttaaaac

SEQ ID NO: 1319532 - DNA, 15 bp, Homo sapiens
ttaaatgttttaaaa

SEQ ID NO: 1319533 - DNA, 15 bp, Homo sapiens
tttaaatgttttaaa

SEQ ID NO: 1319534 - DNA, 15 bp, Homo sapiens
attttaaatgtttta

SEQ ID NO: 1319535 - DNA, 15 bp, Homo sapiens
aattttaaatgtttt

SEQ ID NO: 1319536 - DNA, 15 bp, Homo sapiens
taattttaaatgttt

SEQ ID NO: 1319537 - DNA, 15 bp, Homo sapiens
ataattttaaatgtt

SEQ ID NO: 1319538 - DNA, 15 bp, Homo sapiens
aataattttaaatgt

SEQ ID NO: 1319539 - DNA, 15 bp, Homo sapiens
aaataattttaaatg

SEQ ID NO: 1319540 - DNA, 15 bp, Homo sapiens
taaataattttaaat

SEQ ID NO: 1319541 - DNA, 15 bp, Homo sapiens
ttaaataattttaaa

SEQ ID NO: 1319542 - DNA, 15 bp, Homo sapiens
tttaaataattttaa

SEQ ID NO: 1319543 - DNA, 15 bp, Homo sapiens
atttaaataatttta

SEQ ID NO: 1319544 - DNA, 15 bp, Homo sapiens
tatttaaataatttt

SEQ ID NO: 1319545 - DNA, 15 bp, Homo sapiens
atatttaaataattt

SEQ ID NO: 1319546 - DNA, 15 bp, Homo sapiens
tatatttaaataatt

SEQ ID NO: 1319547 - DNA, 15 bp, Homo sapiens
gtatatttaaataat

SEQ ID NO: 1319548 - DNA, 15 bp, Homo sapiens
ggtatatttaaataa

SEQ ID NO: 1319549 - DNA, 15 bp, Homo sapiens
tggtatatttaaata

SEQ ID NO: 1319550 - DNA, 15 bp, Homo sapiens
gtggtatatttaaat

SEQ ID NO: 1319551 - DNA, 15 bp, Homo sapiens
agtggtatatttaaa

SEQ ID NO: 1319552 - DNA, 15 bp, Homo sapiens
tagtggtatatttaa

SEQ ID NO: 1319553 - DNA, 15 bp, Homo sapiens
ttagtggtatattta

SEQ ID NO: 1319554 - DNA, 15 bp, Homo sapiens
gttagtggtatattt

SEQ ID NO: 1319555 - DNA, 15 bp, Homo sapiens
agttagtggtatatt

SEQ ID NO: 1319556 - DNA, 15 bp, Homo sapiens
gagttagtggtatat

SEQ ID NO: 1319557 - DNA, 15 bp, Homo sapiens
agagttagtggtata

SEQ ID NO: 1319558 - DNA, 15 bp, Homo sapiens
tagagttagtggtat

SEQ ID NO: 1319559 - DNA, 15 bp, Homo sapiens
ttagagttagtggta

SEQ ID NO: 1319560 - DNA, 15 bp, Homo sapiens
tttagagttagtggt

SEQ ID NO: 1319561 - DNA, 15 bp, Homo sapiens
atttagagttagtgg

SEQ ID NO: 1319562 - DNA, 15 bp, Homo sapiens
aatttagagttagtg

SEQ ID NO: 1319563 - DNA, 15 bp, Homo sapiens
aaatttagagttagt

SEQ ID NO: 1319564 - DNA, 15 bp, Homo sapiens
aaaatttagagttag

SEQ ID NO: 1319565 - DNA, 15 bp, Homo sapiens
taaaatttagagtta

SEQ ID NO: 1319566 - DNA, 15 bp, Homo sapiens
ttaaaatttagagtt

SEQ ID NO: 1319567 - DNA, 15 bp, Homo sapiens
tttaaaatttagagt

SEQ ID NO: 1319568 - DNA, 15 bp, Homo sapiens
ttttaaaatttagag

SEQ ID NO: 1319569 - DNA, 15 bp, Homo sapiens
attttaaaatttaga

SEQ ID NO: 1319570 - DNA, 15 bp, Homo sapiens
aattttaaaatttag

SEQ ID NO: 1319571 - DNA, 15 bp, Homo sapiens
taattttaaaattta

SEQ ID NO: 1319572 - DNA, 15 bp, Homo sapiens
aagataattttaaaa

SEQ ID NO: 1319573 - DNA, 15 bp, Homo sapiens
aaagataattttaaa

SEQ ID NO: 1319574 - DNA, 15 bp, Homo sapiens
caaagataattttaa

SEQ ID NO: 1319575 - DNA, 15 bp, Homo sapiens
tcaaagataatttta

SEQ ID NO: 1319576 - DNA, 15 bp, Homo sapiens
atcaaagataatttt

SEQ ID NO: 1319577 - DNA, 15 bp, Homo sapiens
aatcaaagataattt

SEQ ID NO: 1319578 - DNA, 15 bp, Homo sapiens
taatcaaagataatt

SEQ ID NO: 1319579 - DNA, 15 bp, Homo sapiens
ctaatcaaagataat

SEQ ID NO: 1319580 - DNA, 15 bp, Homo sapiens
tctaatcaaagataa

SEQ ID NO: 1319581 - DNA, 15 bp, Homo sapiens
ttctaatcaaagata

SEQ ID NO: 1319582 - DNA, 15 bp, Homo sapiens
cttctaatcaaagat

SEQ ID NO: 1319583 - DNA, 15 bp, Homo sapiens
gcttctaatcaaaga

SEQ ID NO: 1319584 - DNA, 15 bp, Homo sapiens
tgcttctaatcaaag

SEQ ID NO: 1319585 - DNA, 15 bp, Homo sapiens
atgcttctaatcaaa

SEQ ID NO: 1319586 - DNA, 15 bp, Homo sapiens
aatgcttctaatcaa

SEQ ID NO: 1319587 - DNA, 15 bp, Homo sapiens
taatgcttctaatca

SEQ ID NO: 1319588 - DNA, 15 bp, Homo sapiens
ttaatgcttctaatc

SEQ ID NO: 1319589 - DNA, 15 bp, Homo sapiens
tttaatgcttctaat

SEQ ID NO: 1319590 - DNA, 15 bp, Homo sapiens
ttttaatgcttctaa

SEQ ID NO: 1319591 - DNA, 15 bp, Homo sapiens
attttaatgcttcta

SEQ ID NO: 1319592 - DNA, 15 bp, Homo sapiens
aattttaatgcttct

SEQ ID NO: 1319593 - DNA, 15 bp, Homo sapiens
gaattttaatgcttc

SEQ ID NO: 1319594 - DNA, 15 bp, Homo sapiens
agaattttaatgctt

SEQ ID NO: 1319595 - DNA, 15 bp, Homo sapiens
aagaattttaatgct

SEQ ID NO: 1319596 - DNA, 15 bp, Homo sapiens
taagaattttaatgc

SEQ ID NO: 1319597 - DNA, 15 bp, Homo sapiens
ataagaattttaatg

SEQ ID NO: 1319598 - DNA, 15 bp, Homo sapiens
aataagaattttaat

SEQ ID NO: 1319599 - DNA, 15 bp, Homo sapiens
taaataagaatttta

SEQ ID NO: 1319600 - DNA, 15 bp, Homo sapiens
ttaaataagaatttt

SEQ ID NO: 1319601 - DNA, 15 bp, Homo sapiens
cttaaataagaattt

SEQ ID NO: 1319602 - DNA, 15 bp, Homo sapiens
tcttaaataagaatt

SEQ ID NO: 1319603 - DNA, 15 bp, Homo sapiens
atcttaaataagaat

SEQ ID NO: 1319604 - DNA, 15 bp, Homo sapiens
catcttaaataagaa

SEQ ID NO: 1319605 - DNA, 15 bp, Homo sapiens
acatcttaaataaga

SEQ ID NO: 1319606 - DNA, 15 bp, Homo sapiens
tacatcttaaataag

SEQ ID NO: 1319607 - DNA, 15 bp, Homo sapiens
atacatcttaaataa

SEQ ID NO: 1319608 - DNA, 15 bp, Homo sapiens
tatacatcttaaata

SEQ ID NO: 1319609 - DNA, 15 bp, Homo sapiens
gtatacatcttaaat

SEQ ID NO: 1319610 - DNA, 15 bp, Homo sapiens
agtatacatcttaaa

SEQ ID NO: 1319611 - DNA, 15 bp, Homo sapiens
tagtatacatcttaa

SEQ ID NO: 1319612 - DNA, 15 bp, Homo sapiens
atagtatacatctta

SEQ ID NO: 1319613 - DNA, 15 bp, Homo sapiens
aatagtatacatctt

SEQ ID NO: 1319614 - DNA, 15 bp, Homo sapiens
aaatagtatacatct

SEQ ID NO: 1319615 - DNA, 15 bp, Homo sapiens
caaatagtatacatc

SEQ ID NO: 1319616 - DNA, 15 bp, Homo sapiens
tcaaatagtatacat

SEQ ID NO: 1319617 - DNA, 15 bp, Homo sapiens
ttcaaatagtataca

SEQ ID NO: 1319618 - DNA, 15 bp, Homo sapiens
cttcaaatagtatac

SEQ ID NO: 1319619 - DNA, 15 bp, Homo sapiens
tcttcaaatagtata

SEQ ID NO: 1319620 - DNA, 15 bp, Homo sapiens
ttcttcaaatagtat

SEQ ID NO: 1319621 - DNA, 15 bp, Homo sapiens
cttcttcaaatagta

SEQ ID NO: 1319622 - DNA, 15 bp, Homo sapiens
tcttcttcaaatagt

SEQ ID NO: 1319623 - DNA, 15 bp, Homo sapiens
ctcttcttcaaatag

SEQ ID NO: 1319624 - DNA, 15 bp, Homo sapiens
tctcttcttcaaata

SEQ ID NO: 1319625 - DNA, 15 bp, Homo sapiens
ttctcttcttcaaat

SEQ ID NO: 1319626 - DNA, 15 bp, Homo sapiens
attctcttcttcaaa

SEQ ID NO: 1319627 - DNA, 15 bp, Homo sapiens
aattctcttcttcaa

SEQ ID NO: 1319628 - DNA, 15 bp, Homo sapiens
caattctcttcttca

SEQ ID NO: 1319629 - DNA, 15 bp, Homo sapiens
ccaattctcttcttc

SEQ ID NO: 1319630 - DNA, 15 bp, Homo sapiens
cccaattctcttctt

SEQ ID NO: 1319631 - DNA, 15 bp, Homo sapiens
tcccaattctcttct

SEQ ID NO: 1319632 - DNA, 15 bp, Homo sapiens
atcccaattctcttc

SEQ ID NO: 1319633 - DNA, 15 bp, Homo sapiens
aatcccaattctctt

SEQ ID NO: 1319634 - DNA, 15 bp, Homo sapiens
gaatcccaattctct

SEQ ID NO: 1319635 - DNA, 15 bp, Homo sapiens
agaatcccaattctc

SEQ ID NO: 1319636 - DNA, 15 bp, Homo sapiens
cagaatcccaattct

SEQ ID NO: 1319637 - DNA, 15 bp, Homo sapiens
acagaatcccaattc

SEQ ID NO: 1319638 - DNA, 15 bp, Homo sapiens
aacagaatcccaatt

SEQ ID NO: 1319639 - DNA, 15 bp, Homo sapiens
caacagaatcccaat

SEQ ID NO: 1319640 - DNA, 15 bp, Homo sapiens
gcaacagaatcccaa

SEQ ID NO: 1319641 - DNA, 15 bp, Homo sapiens
ggcaacagaatccca

SEQ ID NO: 1319642 - DNA, 15 bp, Homo sapiens
aggcaacagaatccc

SEQ ID NO: 1319643 - DNA, 15 bp, Homo sapiens
aaggcaacagaatcc

SEQ ID NO: 1319644 - DNA, 15 bp, Homo sapiens
caaggcaacagaatc

SEQ ID NO: 1319645 - DNA, 15 bp, Homo sapiens
gcaaggcaacagaat

SEQ ID NO: 1319646 - DNA, 15 bp, Homo sapiens
agcaaggcaacagaa

SEQ ID NO: 1319647 - DNA, 15 bp, Homo sapiens
aagcaaggcaacaga

SEQ ID NO: 1319648 - DNA, 15 bp, Homo sapiens
aaagcaaggcaacag

SEQ ID NO: 1319649 - DNA, 15 bp, Homo sapiens
caaagcaaggcaaca

SEQ ID NO: 1319650 - DNA, 15 bp, Homo sapiens
acaaagcaaggcaac

SEQ ID NO: 1319651 - DNA, 15 bp, Homo sapiens
tacaaagcaaggcaa

SEQ ID NO: 1319652 - DNA, 15 bp, Homo sapiens
ttacaaagcaaggca

SEQ ID NO: 1319653 - DNA, 15 bp, Homo sapiens
gttacaaagcaaggc

SEQ ID NO: 1319654 - DNA, 15 bp, Homo sapiens
agttacaaagcaagg

SEQ ID NO: 1319655 - DNA, 15 bp, Homo sapiens
aagttacaaagcaag

SEQ ID NO: 1319656 - DNA, 15 bp, Homo sapiens
taagttacaaagcaa

SEQ ID NO: 1319657 - DNA, 15 bp, Homo sapiens
ttaagttacaaagca

SEQ ID NO: 1319658 - DNA, 15 bp, Homo sapiens
tttaagttacaaagc

SEQ ID NO: 1319659 - DNA, 15 bp, Homo sapiens
ttttaagttacaaag

SEQ ID NO: 1319660 - DNA, 15 bp, Homo sapiens
cttttaagttacaaa

SEQ ID NO: 1319661 - DNA, 15 bp, Homo sapiens
tcttttaagttacaa

SEQ ID NO: 1319662 - DNA, 15 bp, Homo sapiens
ctcttttaagttaca

SEQ ID NO: 1319663 - DNA, 15 bp, Homo sapiens
gctcttttaagttac

SEQ ID NO: 1319664 - DNA, 15 bp, Homo sapiens
agctcttttaagtta

SEQ ID NO: 1319665 - DNA, 15 bp, Homo sapiens
aagctcttttaagtt

SEQ ID NO: 1319666 - DNA, 15 bp, Homo sapiens
aaagctcttttaagt

SEQ ID NO: 1319667 - DNA, 15 bp, Homo sapiens
aaaagctcttttaag

SEQ ID NO: 1319668 - DNA, 15 bp, Homo sapiens
aaaaagctcttttaa

SEQ ID NO: 1319669 - DNA, 15 bp, Homo sapiens
gaaaaagctctttta

SEQ ID NO: 1319670 - DNA, 15 bp, Homo sapiens
tgaaaaagctctttt

SEQ ID NO: 1319671 - DNA, 15 bp, Homo sapiens
ctgaaaaagctcttt

SEQ ID NO: 1319672 - DNA, 15 bp, Homo sapiens
cctgaaaaagctctt

SEQ ID NO: 1319673 - DNA, 15 bp, Homo sapiens
ccctgaaaaagctct

SEQ ID NO: 1319674 - DNA, 15 bp, Homo sapiens
tccctgaaaaagctc

SEQ ID NO: 1319675 - DNA, 15 bp, Homo sapiens
gtccctgaaaaagct

SEQ ID NO: 1319676 - DNA, 15 bp, Homo sapiens
agtccctgaaaaagc

SEQ ID NO: 1319677 - DNA, 15 bp, Homo sapiens
gagtccctgaaaaag

SEQ ID NO: 1319678 - DNA, 15 bp, Homo sapiens
ggagtccctgaaaaa

SEQ ID NO: 1319679 - DNA, 15 bp, Homo sapiens
gggagtccctgaaaa

SEQ ID NO: 1319680 - DNA, 15 bp, Homo sapiens
agggagtccctgaaa

SEQ ID NO: 1319681 - DNA, 15 bp, Homo sapiens
gagggagtccctgaa

SEQ ID NO: 1319682 - DNA, 15 bp, Homo sapiens
tgagggagtccctga

SEQ ID NO: 1319683 - DNA, 15 bp, Homo sapiens
ctgagggagtccctg

SEQ ID NO: 1319684 - DNA, 15 bp, Homo sapiens
tctgagggagtccct

SEQ ID NO: 1319685 - DNA, 15 bp, Homo sapiens
ctctgagggagtccc

SEQ ID NO: 1319686 - DNA, 15 bp, Homo sapiens
actctgagggagtcc

SEQ ID NO: 1319687 - DNA, 15 bp, Homo sapiens
tactctgagggagtc

SEQ ID NO: 1319688 - DNA, 15 bp, Homo sapiens
gtactctgagggagt

SEQ ID NO: 1319689 - DNA, 15 bp, Homo sapiens
ggtactctgagggag

SEQ ID NO: 1319690 - DNA, 15 bp, Homo sapiens
aggtactctgaggga

SEQ ID NO: 1319691 - DNA, 15 bp, Homo sapiens
caggtactctgaggg

SEQ ID NO: 1319692 - DNA, 15 bp, Homo sapiens
gcaggtactctgagg

SEQ ID NO: 1319693 - DNA, 15 bp, Homo sapiens
agcaggtactctgag

SEQ ID NO: 1319694 - DNA, 15 bp, Homo sapiens
cagcaggtactctga

SEQ ID NO: 1319695 - DNA, 15 bp, Homo sapiens
ccagcaggtactctg

SEQ ID NO: 1319696 - DNA, 15 bp, Homo sapiens
tccagcaggtactct

SEQ ID NO: 1319697 - DNA, 15 bp, Homo sapiens
ctccagcaggtactc

SEQ ID NO: 1319698 - DNA, 15 bp, Homo sapiens
tctccagcaggtact

SEQ ID NO: 1319699 - DNA, 15 bp, Homo sapiens
atctccagcaggtac

SEQ ID NO: 1319700 - DNA, 15 bp, Homo sapiens
catctccagcaggta

SEQ ID NO: 1319701 - DNA, 15 bp, Homo sapiens
tcatctccagcaggt

SEQ ID NO: 1319702 - DNA, 15 bp, Homo sapiens
ttcatctccagcagg

SEQ ID NO: 1319703 - DNA, 15 bp, Homo sapiens
attcatctccagcag

SEQ ID NO: 1319704 - DNA, 15 bp, Homo sapiens
gattcatctccagca

SEQ ID NO: 1319705 - DNA, 15 bp, Homo sapiens
agattcatctccagc

SEQ ID NO: 1319706 - DNA, 15 bp, Homo sapiens
cagattcatctccag

SEQ ID NO: 1319707 - DNA, 15 bp, Homo sapiens
acagattcatctcca

SEQ ID NO: 1319708 - DNA, 15 bp, Homo sapiens
tacagattcatctcc

SEQ ID NO: 1319709 - DNA, 15 bp, Homo sapiens
ttacagattcatctc

SEQ ID NO: 1319710 - DNA, 15 bp, Homo sapiens
tttacagattcatct

SEQ ID NO: 1319711 - DNA, 15 bp, Homo sapiens
ttttacagattcatc

SEQ ID NO: 1319712 - DNA, 15 bp, Homo sapiens
tttttacagattcat

SEQ ID NO: 1319713 - DNA, 15 bp, Homo sapiens
ttttttacagattca

SEQ ID NO: 1319714 - DNA, 15 bp, Homo sapiens
attttttacagattc

SEQ ID NO: 1319715 - DNA, 15 bp, Homo sapiens
aattttttacagatt

SEQ ID NO: 1319716 - DNA, 15 bp, Homo sapiens
aaattttttacagat

SEQ ID NO: 1319717 - DNA, 15 bp, Homo sapiens
aaaattttttacaga

SEQ ID NO: 1319718 - DNA, 15 bp, Homo sapiens
aaaaattttttacag

SEQ ID NO: 1319719 - DNA, 15 bp, Homo sapiens
caaaaattttttaca

SEQ ID NO: 1319720 - DNA, 15 bp, Homo sapiens
acaaaaattttttac

SEQ ID NO: 1319721 - DNA, 15 bp, Homo sapiens
aacaaaaatttttta

SEQ ID NO: 1319722 - DNA, 15 bp, Homo sapiens
gaacaaaaatttttt

SEQ ID NO: 1319723 - DNA, 15 bp, Homo sapiens
tgaacaaaaattttt

SEQ ID NO: 1319724 - DNA, 15 bp, Homo sapiens
ctgaacaaaaatttt

SEQ ID NO: 1319725 - DNA, 15 bp, Homo sapiens
tctgaacaaaaattt

SEQ ID NO: 1319726 - DNA, 15 bp, Homo sapiens
ctctgaacaaaaatt

SEQ ID NO: 1319727 - DNA, 15 bp, Homo sapiens
tctctgaacaaaaat

SEQ ID NO: 1319728 - DNA, 15 bp, Homo sapiens
ttctctgaacaaaaa

SEQ ID NO: 1319729 - DNA, 15 bp, Homo sapiens
attctctgaacaaaa

SEQ ID NO: 1319730 - DNA, 15 bp, Homo sapiens
aattctctgaacaaa

SEQ ID NO: 1319731 - DNA, 15 bp, Homo sapiens
aaattctctgaacaa

SEQ ID NO: 1319732 - DNA, 15 bp, Homo sapiens
gaaattctctgaaca

SEQ ID NO: 1319733 - DNA, 15 bp, Homo sapiens
agaaattctctgaac

SEQ ID NO: 1319734 - DNA, 15 bp, Homo sapiens
cagaaattctctgaa

SEQ ID NO: 1319735 - DNA, 15 bp, Homo sapiens
gcagaaattctctga

SEQ ID NO: 1319736 - DNA, 15 bp, Homo sapiens
ggcagaaattctctg

SEQ ID NO: 1319737 - DNA, 15 bp, Homo sapiens
tggcagaaattctct

SEQ ID NO: 1319738 - DNA, 15 bp, Homo sapiens
gtggcagaaattctc

SEQ ID NO: 1319739 - DNA, 15 bp, Homo sapiens
agtggcagaaattct

SEQ ID NO: 1319740 - DNA, 15 bp, Homo sapiens
tagtggcagaaattc

SEQ ID NO: 1319741 - DNA, 15 bp, Homo sapiens
ttagtggcagaaatt

SEQ ID NO: 1319742 - DNA, 15 bp, Homo sapiens
tttagtggcagaaat

SEQ ID NO: 1319743 - DNA, 15 bp, Homo sapiens
atttagtggcagaaa

SEQ ID NO: 1319744 - DNA, 15 bp, Homo sapiens
tatttagtggcagaa

SEQ ID NO: 1319745 - DNA, 15 bp, Homo sapiens
ttatttagtggcaga

SEQ ID NO: 1319746 - DNA, 15 bp, Homo sapiens
cttatttagtggcag

SEQ ID NO: 1319747 - DNA, 15 bp, Homo sapiens
acttatttagtggca

SEQ ID NO: 1319748 - DNA, 15 bp, Homo sapiens
gacttatttagtggc

SEQ ID NO: 1319749 - DNA, 15 bp, Homo sapiens
agacttatttagtgg

SEQ ID NO: 1319750 - DNA, 15 bp, Homo sapiens
aagacttatttagtg

SEQ ID NO: 1319751 - DNA, 15 bp, Homo sapiens
taagacttatttagt

SEQ ID NO: 1319752 - DNA, 15 bp, Homo sapiens
ttaagacttatttag

SEQ ID NO: 1319753 - DNA, 15 bp, Homo sapiens
tttaagacttattta

SEQ ID NO: 1319754 - DNA, 15 bp, Homo sapiens
atttaagacttattt

SEQ ID NO: 1319755 - DNA, 15 bp, Homo sapiens
tatttaagacttatt

SEQ ID NO: 1319756 - DNA, 15 bp, Homo sapiens
ttatttaagacttat

SEQ ID NO: 1319757 - DNA, 15 bp, Homo sapiens
cttatttaagactta

SEQ ID NO: 1319758 - DNA, 15 bp, Homo sapiens
acttatttaagactt

SEQ ID NO: 1319759 - DNA, 15 bp, Homo sapiens
tacttatttaagact

SEQ ID NO: 1319760 - DNA, 15 bp, Homo sapiens
atacttatttaagac

SEQ ID NO: 1319761 - DNA, 15 bp, Homo sapiens
catacttatttaaga

SEQ ID NO: 1319762 - DNA, 15 bp, Homo sapiens
gcatacttatttaag

SEQ ID NO: 1319763 - DNA, 15 bp, Homo sapiens
ggcatacttatttaa

SEQ ID NO: 1319764 - DNA, 15 bp, Homo sapiens
tggcatacttattta

SEQ ID NO: 1319765 - DNA, 15 bp, Homo sapiens
gtggcatacttattt

SEQ ID NO: 1319766 - DNA, 15 bp, Homo sapiens
tgtggcatacttatt

SEQ ID NO: 1319767 - DNA, 15 bp, Homo sapiens
atgtggcatacttat

SEQ ID NO: 1319768 - DNA, 15 bp, Homo sapiens
tatgtggcatactta

SEQ ID NO: 1319769 - DNA, 15 bp, Homo sapiens
ctatgtggcatactt

SEQ ID NO: 1319770 - DNA, 15 bp, Homo sapiens
cctatgtggcatact

SEQ ID NO: 1319771 - DNA, 15 bp, Homo sapiens
tcctatgtggcatac

SEQ ID NO: 1319772 - DNA, 15 bp, Homo sapiens
atcctatgtggcata

SEQ ID NO: 1319773 - DNA, 15 bp, Homo sapiens
tatcctatgtggcat

SEQ ID NO: 1319774 - DNA, 15 bp, Homo sapiens
ctatcctatgtggca

SEQ ID NO: 1319775 - DNA, 15 bp, Homo sapiens
tctatcctatgtggc

SEQ ID NO: 1319776 - DNA, 15 bp, Homo sapiens
gtctatcctatgtgg

SEQ ID NO: 1319777 - DNA, 15 bp, Homo sapiens
agtctatcctatgtg

SEQ ID NO: 1319778 - DNA, 15 bp, Homo sapiens
cagtctatcctatgt

SEQ ID NO: 1319779 - DNA, 15 bp, Homo sapiens
acagtctatcctatg

SEQ ID NO: 1319780 - DNA, 15 bp, Homo sapiens
tacagtctatcctat

SEQ ID NO: 1319781 - DNA, 15 bp, Homo sapiens
atacagtctatccta

SEQ ID NO: 1319782 - DNA, 15 bp, Homo sapiens
aatacagtctatcct

SEQ ID NO: 1319783 - DNA, 15 bp, Homo sapiens
aaatacagtctatcc

SEQ ID NO: 1319784 - DNA, 15 bp, Homo sapiens
taaatacagtctatc

SEQ ID NO: 1319785 - DNA, 15 bp, Homo sapiens
ttaaatacagtctat

SEQ ID NO: 1319786 - DNA, 15 bp, Homo sapiens
tttaaatacagtcta

SEQ ID NO: 1319787 - DNA, 15 bp, Homo sapiens
atttaaatacagtct

SEQ ID NO: 1319788 - DNA, 15 bp, Homo sapiens
catttaaatacagtc

SEQ ID NO: 1319789 - DNA, 15 bp, Homo sapiens
tcatttaaatacagt

SEQ ID NO: 1319790 - DNA, 15 bp, Homo sapiens
ttcatttaaatacag

SEQ ID NO: 1319791 - DNA, 15 bp, Homo sapiens
tttcatttaaataca

SEQ ID NO: 1319792 - DNA, 15 bp, Homo sapiens
gtttcatttaaatac

SEQ ID NO: 1319793 - DNA, 15 bp, Homo sapiens
ggtttcatttaaata

SEQ ID NO: 1319794 - DNA, 15 bp, Homo sapiens
tggtttcatttaaat

SEQ ID NO: 1319795 - DNA, 15 bp, Homo sapiens
atggtttcatttaaa

SEQ ID NO: 1319796 - DNA, 15 bp, Homo sapiens
aatggtttcatttaa

SEQ ID NO: 1319797 - DNA, 15 bp, Homo sapiens
aaatggtttcattta

SEQ ID NO: 1319798 - DNA, 15 bp, Homo sapiens
aaaatggtttcattt

SEQ ID NO: 1319799 - DNA, 15 bp, Homo sapiens
aaaaatggtttcatt

SEQ ID NO: 1319800 - DNA, 15 bp, Homo sapiens
aaaaaatggtttcat

SEQ ID NO: 1319801 - DNA, 15 bp, Homo sapiens
taaaaaatggtttca

SEQ ID NO: 1319802 - DNA, 15 bp, Homo sapiens
ataaaaaatggtttc

SEQ ID NO: 1319803 - DNA, 15 bp, Homo sapiens
tataaaaaatggttt

SEQ ID NO: 1319804 - DNA, 15 bp, Homo sapiens
ttataaaaaatggtt

SEQ ID NO: 1319805 - DNA, 15 bp, Homo sapiens
gttataaaaaatggt

SEQ ID NO: 1319806 - DNA, 15 bp, Homo sapiens
agttataaaaaatgg

SEQ ID NO: 1319807 - DNA, 15 bp, Homo sapiens
aagttataaaaaatg

SEQ ID NO: 1319808 - DNA, 15 bp, Homo sapiens
gtaagttataaaaaa

SEQ ID NO: 1319809 - DNA, 15 bp, Homo sapiens
tgtaagttataaaaa

SEQ ID NO: 1319810 - DNA, 15 bp, Homo sapiens
gtgtaagttataaaa

SEQ ID NO: 1319811 - DNA, 15 bp, Homo sapiens
ggtgtaagttataaa

SEQ ID NO: 1319812 - DNA, 15 bp, Homo sapiens
tggtgtaagttataa

SEQ ID NO: 1319813 - DNA, 15 bp, Homo sapiens
ttggtgtaagttata

SEQ ID NO: 1319814 - DNA, 15 bp, Homo sapiens
tttggtgtaagttat

SEQ ID NO: 1319815 - DNA, 15 bp, Homo sapiens
atttggtgtaagtta

SEQ ID NO: 1319816 - DNA, 15 bp, Homo sapiens
tatttggtgtaagtt

SEQ ID NO: 1319817 - DNA, 15 bp, Homo sapiens
atatttggtgtaagt

SEQ ID NO: 1319818 - DNA, 15 bp, Homo sapiens
aatatttggtgtaag

SEQ ID NO: 1319819 - DNA, 15 bp, Homo sapiens
taatatttggtgtaa

SEQ ID NO: 1319820 - DNA, 15 bp, Homo sapiens
ataatatttggtgta

SEQ ID NO: 1319821 - DNA, 15 bp, Homo sapiens
cataatatttggtgt

SEQ ID NO: 1319822 - DNA, 15 bp, Homo sapiens
tcataatatttggtg

SEQ ID NO: 1319823 - DNA, 15 bp, Homo sapiens
gtcataatatttggt

SEQ ID NO: 1319824 - DNA, 15 bp, Homo sapiens
tgtcataatatttgg

SEQ ID NO: 1319825 - DNA, 15 bp, Homo sapiens
ttgtcataatatttg

SEQ ID NO: 1319826 - DNA, 15 bp, Homo sapiens
tttgtcataatattt

SEQ ID NO: 1319827 - DNA, 15 bp, Homo sapiens
ttttgtcataatatt

SEQ ID NO: 1319828 - DNA, 15 bp, Homo sapiens
cttttgtcataatat

SEQ ID NO: 1319829 - DNA, 15 bp, Homo sapiens
gcttttgtcataata

SEQ ID NO: 1319830 - DNA, 15 bp, Homo sapiens
tgcttttgtcataat

SEQ ID NO: 1319831 - DNA, 15 bp, Homo sapiens
atgcttttgtcataa

SEQ ID NO: 1319832 - DNA, 15 bp, Homo sapiens
tatgcttttgtcata

SEQ ID NO: 1319833 - DNA, 15 bp, Homo sapiens
ttatgcttttgtcat

SEQ ID NO: 1319834 - DNA, 15 bp, Homo sapiens
attatgcttttgtca

SEQ ID NO: 1319835 - DNA, 15 bp, Homo sapiens
aattatgcttttgtc

SEQ ID NO: 1319836 - DNA, 15 bp, Homo sapiens
caattatgcttttgt

SEQ ID NO: 1319837 - DNA, 15 bp, Homo sapiens
acaattatgcttttg

SEQ ID NO: 1319838 - DNA, 15 bp, Homo sapiens
aacaattatgctttt

SEQ ID NO: 1319839 - DNA, 15 bp, Homo sapiens
aaacaattatgcttt

SEQ ID NO: 1319840 - DNA, 15 bp, Homo sapiens
gaaacaattatgctt

SEQ ID NO: 1319841 - DNA, 15 bp, Homo sapiens
agaaacaattatgct

SEQ ID NO: 1319842 - DNA, 15 bp, Homo sapiens
aagaaacaattatgc

SEQ ID NO: 1319843 - DNA, 15 bp, Homo sapiens
caagaaacaattatg

SEQ ID NO: 1319844 - DNA, 15 bp, Homo sapiens
tcaagaaacaattat

SEQ ID NO: 1319845 - DNA, 15 bp, Homo sapiens
atcaagaaacaatta

SEQ ID NO: 1319846 - DNA, 15 bp, Homo sapiens
tatcaagaaacaatt

SEQ ID NO: 1319847 - DNA, 15 bp, Homo sapiens
gctgaaggattttag

SEQ ID NO: 1319848 - DNA, 15 bp, Homo sapiens
cgctgaaggatttta

SEQ ID NO: 1319849 - DNA, 15 bp, Homo sapiens
tcgctgaaggatttt

SEQ ID NO: 1319850 - DNA, 15 bp, Homo sapiens
ctcgctgaaggattt

SEQ ID NO: 1319851 - DNA, 15 bp, Homo sapiens
actcgctgaaggatt

SEQ ID NO: 1319852 - DNA, 15 bp, Homo sapiens
aactcgctgaaggat

SEQ ID NO: 1319853 - DNA, 15 bp, Homo sapiens
aaactcgctgaagga

SEQ ID NO: 1319854 - DNA, 15 bp, Homo sapiens
taaactcgctgaagg

SEQ ID NO: 1319855 - DNA, 15 bp, Homo sapiens
ataaactcgctgaag

SEQ ID NO: 1319856 - DNA, 15 bp, Homo sapiens
tataaactcgctgaa

SEQ ID NO: 1319857 - DNA, 15 bp, Homo sapiens
atataaactcgctga

SEQ ID NO: 1319858 - DNA, 15 bp, Homo sapiens
aatataaactcgctg

SEQ ID NO: 1319859 - DNA, 15 bp, Homo sapiens
aaatataaactcgct

SEQ ID NO: 1319860 - DNA, 15 bp, Homo sapiens
aaaatataaactcgc

SEQ ID NO: 1319861 - DNA, 15 bp, Homo sapiens
caaaatataaactcg

SEQ ID NO: 1319862 - DNA, 15 bp, Homo sapiens
gcaaaatataaactc

SEQ ID NO: 1319863 - DNA, 15 bp, Homo sapiens
agcaaaatataaact

SEQ ID NO: 1319864 - DNA, 15 bp, Homo sapiens
tagcaaaatataaac

SEQ ID NO: 1319865 - DNA, 15 bp, Homo sapiens
atagcaaaatataaa

SEQ ID NO: 1319866 - DNA, 15 bp, Homo sapiens
aatagcaaaatataa

SEQ ID NO: 1319867 - DNA, 15 bp, Homo sapiens
aaatagcaaaatata

SEQ ID NO: 1319868 - DNA, 15 bp, Homo sapiens
gaaatagcaaaatat

SEQ ID NO: 1319869 - DNA, 15 bp, Homo sapiens
ggaaatagcaaaata

SEQ ID NO: 1319870 - DNA, 15 bp, Homo sapiens
aggaaatagcaaaat

SEQ ID NO: 1319871 - DNA, 15 bp, Homo sapiens
aaggaaatagcaaaa

SEQ ID NO: 1319872 - DNA, 15 bp, Homo sapiens
caaggaaatagcaaa

SEQ ID NO: 1319873 - DNA, 15 bp, Homo sapiens
gcaaggaaatagcaa

SEQ ID NO: 1319874 - DNA, 15 bp, Homo sapiens
agcaaggaaatagca

SEQ ID NO: 1319875 - DNA, 15 bp, Homo sapiens
tagcaaggaaatagc

SEQ ID NO: 1319876 - DNA, 15 bp, Homo sapiens
atagcaaggaaatag

SEQ ID NO: 1319877 - DNA, 15 bp, Homo sapiens
catagcaaggaaata

SEQ ID NO: 1319878 - DNA, 15 bp, Homo sapiens
tcatagcaaggaaat

SEQ ID NO: 1319879 - DNA, 15 bp, Homo sapiens
ttcatagcaaggaaa

SEQ ID NO: 1319880 - DNA, 15 bp, Homo sapiens
tttcatagcaaggaa

SEQ ID NO: 1319881 - DNA, 15 bp, Homo sapiens
atttcatagcaagga

SEQ ID NO: 1319882 - DNA, 15 bp, Homo sapiens
gatttcatagcaagg

SEQ ID NO: 1319883 - DNA, 15 bp, Homo sapiens
agatttcatagcaag

SEQ ID NO: 1319884 - DNA, 15 bp, Homo sapiens
cagatttcatagcaa

SEQ ID NO: 1319885 - DNA, 15 bp, Homo sapiens
acagatttcatagca

SEQ ID NO: 1319886 - DNA, 15 bp, Homo sapiens
tacagatttcatagc

SEQ ID NO: 1319887 - DNA, 15 bp, Homo sapiens
atacagatttcatag

SEQ ID NO: 1319888 - DNA, 15 bp, Homo sapiens
aatacagatttcata

SEQ ID NO: 1319889 - DNA, 15 bp, Homo sapiens
aaatacagatttcat

SEQ ID NO: 1319890 - DNA, 15 bp, Homo sapiens
aaaatacagatttca

SEQ ID NO: 1319891 - DNA, 15 bp, Homo sapiens
taaaatacagatttc

SEQ ID NO: 1319892 - DNA, 15 bp, Homo sapiens
ctaaaatacagattt

SEQ ID NO: 1319893 - DNA, 15 bp, Homo sapiens
gctaaaatacagatt

SEQ ID NO: 1319894 - DNA, 15 bp, Homo sapiens
tgctaaaatacagat

SEQ ID NO: 1319895 - DNA, 15 bp, Homo sapiens
atgctaaaatacaga

SEQ ID NO: 1319896 - DNA, 15 bp, Homo sapiens
aatgctaaaatacag

SEQ ID NO: 1319897 - DNA, 15 bp, Homo sapiens
taatgctaaaataca

SEQ ID NO: 1319898 - DNA, 15 bp, Homo sapiens
ataatgctaaaatac

SEQ ID NO: 1319899 - DNA, 15 bp, Homo sapiens
cataatgctaaaata

SEQ ID NO: 1319900 - DNA, 15 bp, Homo sapiens
ccataatgctaaaat

SEQ ID NO: 1319901 - DNA, 15 bp, Homo sapiens
tccataatgctaaaa

SEQ ID NO: 1319902 - DNA, 15 bp, Homo sapiens
ttccataatgctaaa

SEQ ID NO: 1319903 - DNA, 15 bp, Homo sapiens
tttccataatgctaa

SEQ ID NO: 1319904 - DNA, 15 bp, Homo sapiens
ctttccataatgcta

SEQ ID NO: 1319905 - DNA, 15 bp, Homo sapiens
tctttccataatgct

SEQ ID NO: 1319906 - DNA, 15 bp, Homo sapiens
ttctttccataatgc

SEQ ID NO: 1319907 - DNA, 15 bp, Homo sapiens
tttctttccataatg

SEQ ID NO: 1319908 - DNA, 15 bp, Homo sapiens
ttttctttccataat

SEQ ID NO: 1319909 - DNA, 15 bp, Homo sapiens
tttttctttccataa

SEQ ID NO: 1319910 - DNA, 15 bp, Homo sapiens
atttttctttccata

SEQ ID NO: 1319911 - DNA, 15 bp, Homo sapiens
aatttttctttccat

SEQ ID NO: 1319912 - DNA, 15 bp, Homo sapiens
aaatttttctttcca

SEQ ID NO: 1319913 - DNA, 15 bp, Homo sapiens
gaaatttttctttcc

SEQ ID NO: 1319914 - DNA, 15 bp, Homo sapiens
agaaatttttctttc

SEQ ID NO: 1319915 - DNA, 15 bp, Homo sapiens
cagaaatttttcttt

SEQ ID NO: 1319916 - DNA, 15 bp, Homo sapiens
acagaaatttttctt

SEQ ID NO: 1319917 - DNA, 15 bp, Homo sapiens
gacagaaatttttct

SEQ ID NO: 1319918 - DNA, 15 bp, Homo sapiens
agacagaaatttttc

SEQ ID NO: 1319919 - DNA, 15 bp, Homo sapiens
gagacagaaattttt

SEQ ID NO: 1319920 - DNA, 15 bp, Homo sapiens
tgagacagaaatttt

SEQ ID NO: 1319921 - DNA, 15 bp, Homo sapiens
ttgagacagaaattt

SEQ ID NO: 1319922 - DNA, 15 bp, Homo sapiens
tttgagacagaaatt

SEQ ID NO: 1319923 - DNA, 15 bp, Homo sapiens
ctttgagacagaaat

SEQ ID NO: 1319924 - DNA, 15 bp, Homo sapiens
cctttgagacagaaa

SEQ ID NO: 1319925 - DNA, 15 bp, Homo sapiens
gcctttgagacagaa

SEQ ID NO: 1319926 - DNA, 15 bp, Homo sapiens
agcctttgagacaga

SEQ ID NO: 1319927 - DNA, 15 bp, Homo sapiens
aagcctttgagacag

SEQ ID NO: 1319928 - DNA, 15 bp, Homo sapiens
caagcctttgagaca

SEQ ID NO: 1319929 - DNA, 15 bp, Homo sapiens
acaagcctttgagac

SEQ ID NO: 1319930 - DNA, 15 bp, Homo sapiens
cacaagcctttgaga

SEQ ID NO: 1319931 - DNA, 15 bp, Homo sapiens
acacaagcctttgag

SEQ ID NO: 1319932 - DNA, 15 bp, Homo sapiens
cacacaagcctttga

SEQ ID NO: 1319933 - DNA, 15 bp, Homo sapiens
gcacacaagcctttg

SEQ ID NO: 1319934 - DNA, 15 bp, Homo sapiens
ggcacacaagccttt

SEQ ID NO: 1319935 - DNA, 15 bp, Homo sapiens
tggcacacaagcctt

SEQ ID NO: 1319936 - DNA, 15 bp, Homo sapiens
ctggcacacaagcct

SEQ ID NO: 1319937 - DNA, 15 bp, Homo sapiens
cctggcacacaagcc

SEQ ID NO: 1319938 - DNA, 15 bp, Homo sapiens
acctggcacacaagc

SEQ ID NO: 1319939 - DNA, 15 bp, Homo sapiens
cacctggcacacaag

SEQ ID NO: 1319940 - DNA, 15 bp, Homo sapiens
gcacctggcacacaa

SEQ ID NO: 1319941 - DNA, 15 bp, Homo sapiens
ggcacctggcacaca

SEQ ID NO: 1319942 - DNA, 15 bp, Homo sapiens
gggcacctggcacac

SEQ ID NO: 1319943 - DNA, 15 bp, Homo sapiens
agggcacctggcaca

SEQ ID NO: 1319944 - DNA, 15 bp, Homo sapiens
aagggcacctggcac

SEQ ID NO: 1319945 - DNA, 15 bp, Homo sapiens
gaagggcacctggca

SEQ ID NO: 1319946 - DNA, 15 bp, Homo sapiens
agaagggcacctggc

SEQ ID NO: 1319947 - DNA, 15 bp, Homo sapiens
tagaagggcacctgg

SEQ ID NO: 1319948 - DNA, 15 bp, Homo sapiens
ttagaagggcacctg

SEQ ID NO: 1319949 - DNA, 15 bp, Homo sapiens
cttagaagggcacct

SEQ ID NO: 1319950 - DNA, 15 bp, Homo sapiens
gcttagaagggcacc

SEQ ID NO: 1319951 - DNA, 15 bp, Homo sapiens
tgcttagaagggcac

SEQ ID NO: 1319952 - DNA, 15 bp, Homo sapiens
gtgcttagaagggca

SEQ ID NO: 1319953 - DNA, 15 bp, Homo sapiens
agtgcttagaagggc

SEQ ID NO: 1319954 - DNA, 15 bp, Homo sapiens
aagtgcttagaaggg

SEQ ID NO: 1319955 - DNA, 15 bp, Homo sapiens
aaagtgcttagaagg

SEQ ID NO: 1319956 - DNA, 15 bp, Homo sapiens
taaagtgcttagaag

SEQ ID NO: 1319957 - DNA, 15 bp, Homo sapiens
gtaaagtgcttagaa

SEQ ID NO: 1319958 - DNA, 15 bp, Homo sapiens
tgtaaagtgcttaga

SEQ ID NO: 1319959 - DNA, 15 bp, Homo sapiens
atgtaaagtgcttag

SEQ ID NO: 1319960 - DNA, 15 bp, Homo sapiens
aatgtaaagtgctta

SEQ ID NO: 1319961 - DNA, 15 bp, Homo sapiens
aaatgtaaagtgctt

SEQ ID NO: 1319962 - DNA, 15 bp, Homo sapiens
taaatgtaaagtgct

SEQ ID NO: 1319963 - DNA, 15 bp, Homo sapiens
ataaatgtaaagtgc

SEQ ID NO: 1319964 - DNA, 15 bp, Homo sapiens
aataaatgtaaagtg

SEQ ID NO: 1319965 - DNA, 15 bp, Homo sapiens
taataaatgtaaagt

SEQ ID NO: 1319966 - DNA, 15 bp, Homo sapiens
ataataaatgtaaag

SEQ ID NO: 1319967 - DNA, 15 bp, Homo sapiens
gataataaatgtaaa

SEQ ID NO: 1319968 - DNA, 15 bp, Homo sapiens
agataataaatgtaa

SEQ ID NO: 1319969 - DNA, 15 bp, Homo sapiens
tagataataaatgta

SEQ ID NO: 1319970 - DNA, 15 bp, Homo sapiens
ttagataataaatgt

SEQ ID NO: 1319971 - DNA, 15 bp, Homo sapiens
gttagataataaatg

SEQ ID NO: 1319972 - DNA, 15 bp, Homo sapiens
agttagataataaat

SEQ ID NO: 1319973 - DNA, 15 bp, Homo sapiens
aagttagataataaa

SEQ ID NO: 1319974 - DNA, 15 bp, Homo sapiens
taagttagataataa

SEQ ID NO: 1319975 - DNA, 15 bp, Homo sapiens
ctaagttagataata

SEQ ID NO: 1319976 - DNA, 15 bp, Homo sapiens
actaagttagataat

SEQ ID NO: 1319977 - DNA, 15 bp, Homo sapiens
aactaagttagataa

SEQ ID NO: 1319978 - DNA, 15 bp, Homo sapiens
caactaagttagata

SEQ ID NO: 1319979 - DNA, 15 bp, Homo sapiens
acaactaagttagat

SEQ ID NO: 1319980 - DNA, 15 bp, Homo sapiens
gacaactaagttaga

SEQ ID NO: 1319981 - DNA, 15 bp, Homo sapiens
tgacaactaagttag

SEQ ID NO: 1319982 - DNA, 15 bp, Homo sapiens
ttgacaactaagtta

SEQ ID NO: 1319983 - DNA, 15 bp, Homo sapiens
tttgacaactaagtt

SEQ ID NO: 1319984 - DNA, 15 bp, Homo sapiens
ttttgacaactaagt

SEQ ID NO: 1319985 - DNA, 15 bp, Homo sapiens
gttttgacaactaag

SEQ ID NO: 1319986 - DNA, 15 bp, Homo sapiens
tgttttgacaactaa

SEQ ID NO: 1319987 - DNA, 15 bp, Homo sapiens
ctgttttgacaacta

SEQ ID NO: 1319988 - DNA, 15 bp, Homo sapiens
gctgttttgacaact

SEQ ID NO: 1319989 - DNA, 15 bp, Homo sapiens
ggctgttttgacaac

SEQ ID NO: 1319990 - DNA, 15 bp, Homo sapiens
gggctgttttgacaa

SEQ ID NO: 1319991 - DNA, 15 bp, Homo sapiens
agggctgttttgaca

SEQ ID NO: 1319992 - DNA, 15 bp, Homo sapiens
tagggctgttttgac

SEQ ID NO: 1319993 - DNA, 15 bp, Homo sapiens
atagggctgttttga

SEQ ID NO: 1319994 - DNA, 15 bp, Homo sapiens
tatagggctgttttg

SEQ ID NO: 1319995 - DNA, 15 bp, Homo sapiens
ctatagggctgtttt

SEQ ID NO: 1319996 - DNA, 15 bp, Homo sapiens
actatagggctgttt

SEQ ID NO: 1319997 - DNA, 15 bp, Homo sapiens
tactatagggctgtt

SEQ ID NO: 1319998 - DNA, 15 bp, Homo sapiens
ttactatagggctgt

SEQ ID NO: 1319999 - DNA, 15 bp, Homo sapiens
cttactatagggctg

SEQ ID NO: 1320000 - DNA, 15 bp, Homo sapiens
gcttactatagggct

SEQ ID NO: 1320001 - DNA, 15 bp, Homo sapiens
tgcttactatagggc

SEQ ID NO: 1320002 - DNA, 15 bp, Homo sapiens
atgcttactataggg

SEQ ID NO: 1320003 - DNA, 15 bp, Homo sapiens
aatgcttactatagg

SEQ ID NO: 1320004 - DNA, 15 bp, Homo sapiens
taatgcttactatag

SEQ ID NO: 1320005 - DNA, 15 bp, Homo sapiens
ataatgcttactata

SEQ ID NO: 1320006 - DNA, 15 bp, Homo sapiens
aataatgcttactat

SEQ ID NO: 1320007 - DNA, 15 bp, Homo sapiens
aaataatgcttacta

SEQ ID NO: 1320008 - DNA, 15 bp, Homo sapiens
aaaataatgcttact

SEQ ID NO: 1320009 - DNA, 15 bp, Homo sapiens
taagaaaaataatgc

SEQ ID NO: 1320010 - DNA, 15 bp, Homo sapiens
ataagaaaaataatg

SEQ ID NO: 1320011 - DNA, 15 bp, Homo sapiens
gataagaaaaataat

SEQ ID NO: 1320012 - DNA, 15 bp, Homo sapiens
agataagaaaaataa

SEQ ID NO: 1320013 - DNA, 15 bp, Homo sapiens
aagataagaaaaata

SEQ ID NO: 1320014 - DNA, 15 bp, Homo sapiens
taagataagaaaaat

SEQ ID NO: 1320015 - DNA, 15 bp, Homo sapiens
ataagataagaaaaa

SEQ ID NO: 1320016 - DNA, 15 bp, Homo sapiens
tataagataagaaaa

SEQ ID NO: 1320017 - DNA, 15 bp, Homo sapiens
ctataagataagaaa

SEQ ID NO: 1320018 - DNA, 15 bp, Homo sapiens
tctataagataagaa

SEQ ID NO: 1320019 - DNA, 15 bp, Homo sapiens
atctataagataaga

SEQ ID NO: 1320020 - DNA, 15 bp, Homo sapiens
aatctataagataag

SEQ ID NO: 1320021 - DNA, 15 bp, Homo sapiens
taatctataagataa

SEQ ID NO: 1320022 - DNA, 15 bp, Homo sapiens
ctaatctataagata

SEQ ID NO: 1320023 - DNA, 15 bp, Homo sapiens
gctaatctataagat

SEQ ID NO: 1320024 - DNA, 15 bp, Homo sapiens
agctaatctataaga

SEQ ID NO: 1320025 - DNA, 15 bp, Homo sapiens
cagctaatctataag

SEQ ID NO: 1320026 - DNA, 15 bp, Homo sapiens
gcagctaatctataa

SEQ ID NO: 1320027 - DNA, 15 bp, Homo sapiens
tgcagctaatctata

SEQ ID NO: 1320028 - DNA, 15 bp, Homo sapiens
atgcagctaatctat

SEQ ID NO: 1320029 - DNA, 15 bp, Homo sapiens
catgcagctaatcta

SEQ ID NO: 1320030 - DNA, 15 bp, Homo sapiens
tcatgcagctaatct

SEQ ID NO: 1320031 - DNA, 15 bp, Homo sapiens
ttcatgcagctaatc

SEQ ID NO: 1320032 - DNA, 15 bp, Homo sapiens
cttcatgcagctaat

SEQ ID NO: 1320033 - DNA, 15 bp, Homo sapiens
acttcatgcagctaa

SEQ ID NO: 1320034 - DNA, 15 bp, Homo sapiens
aacttcatgcagcta

SEQ ID NO: 1320035 - DNA, 15 bp, Homo sapiens
aaacttcatgcagct

SEQ ID NO: 1320036 - DNA, 15 bp, Homo sapiens
gaaacttcatgcagc

SEQ ID NO: 1320037 - DNA, 15 bp, Homo sapiens
ggaaacttcatgcag

SEQ ID NO: 1320038 - DNA, 15 bp, Homo sapiens
gggaaacttcatgca

SEQ ID NO: 1320039 - DNA, 15 bp, Homo sapiens
ggggaaacttcatgc

SEQ ID NO: 1320040 - DNA, 15 bp, Homo sapiens
tggggaaacttcatg

SEQ ID NO: 1320041 - DNA, 15 bp, Homo sapiens
ctggggaaacttcat

SEQ ID NO: 1320042 - DNA, 15 bp, Homo sapiens
cctggggaaacttca

SEQ ID NO: 1320043 - DNA, 15 bp, Homo sapiens
ccctggggaaacttc

SEQ ID NO: 1320044 - DNA, 15 bp, Homo sapiens
gccctggggaaactt

SEQ ID NO: 1320045 - DNA, 15 bp, Homo sapiens
ggccctggggaaact

SEQ ID NO: 1320046 - DNA, 15 bp, Homo sapiens
tggccctggggaaac

SEQ ID NO: 1320047 - DNA, 15 bp, Homo sapiens
atggccctggggaaa

SEQ ID NO: 1320048 - DNA, 15 bp, Homo sapiens
tatggccctggggaa

SEQ ID NO: 1320049 - DNA, 15 bp, Homo sapiens
atatggccctgggga

SEQ ID NO: 1320050 - DNA, 15 bp, Homo sapiens
aatatggccctgggg

SEQ ID NO: 1320051 - DNA, 15 bp, Homo sapiens
taatatggccctggg

SEQ ID NO: 1320052 - DNA, 15 bp, Homo sapiens
ataatatggccctgg

SEQ ID NO: 1320053 - DNA, 15 bp, Homo sapiens
aataatatggccctg

SEQ ID NO: 1320054 - DNA, 15 bp, Homo sapiens
aaataatatggccct

SEQ ID NO: 1320055 - DNA, 15 bp, Homo sapiens
aaaataatatggccc

SEQ ID NO: 1320056 - DNA, 15 bp, Homo sapiens
aaaaataatatggcc

SEQ ID NO: 1320057 - DNA, 15 bp, Homo sapiens
aaaaaataatatggc

SEQ ID NO: 1320058 - DNA, 15 bp, Homo sapiens
gaaaaaataatatgg

SEQ ID NO: 1320059 - DNA, 15 bp, Homo sapiens
agaaaaaataatatg

SEQ ID NO: 1320060 - DNA, 15 bp, Homo sapiens
aagaaaaaataatat

SEQ ID NO: 1320061 - DNA, 15 bp, Homo sapiens
gaagaaaaaataata

SEQ ID NO: 1320062 - DNA, 15 bp, Homo sapiens
agaagaaaaaataat

SEQ ID NO: 1320063 - DNA, 15 bp, Homo sapiens
gagaagaaaaaataa

SEQ ID NO: 1320064 - DNA, 15 bp, Homo sapiens
agagaagaaaaaata

SEQ ID NO: 1320065 - DNA, 15 bp, Homo sapiens
aagagaagaaaaaat

SEQ ID NO: 1320066 - DNA, 15 bp, Homo sapiens
caagagaagaaaaaa

SEQ ID NO: 1320067 - DNA, 15 bp, Homo sapiens
gcaagagaagaaaaa

SEQ ID NO: 1320068 - DNA, 15 bp, Homo sapiens
agcaagagaagaaaa

SEQ ID NO: 1320069 - DNA, 15 bp, Homo sapiens
aagcaagagaagaaa

SEQ ID NO: 1320070 - DNA, 15 bp, Homo sapiens
gaagcaagagaagaa

SEQ ID NO: 1320071 - DNA, 15 bp, Homo sapiens
agaagcaagagaaga

SEQ ID NO: 1320072 - DNA, 15 bp, Homo sapiens
cagaagcaagagaag

SEQ ID NO: 1320073 - DNA, 15 bp, Homo sapiens
tcagaagcaagagaa

SEQ ID NO: 1320074 - DNA, 15 bp, Homo sapiens
ctcagaagcaagaga

SEQ ID NO: 1320075 - DNA, 15 bp, Homo sapiens
gctcagaagcaagag

SEQ ID NO: 1320076 - DNA, 15 bp, Homo sapiens
tgctcagaagcaaga

SEQ ID NO: 1320077 - DNA, 15 bp, Homo sapiens
gtgctcagaagcaag

SEQ ID NO: 1320078 - DNA, 15 bp, Homo sapiens
tgtgctcagaagcaa

SEQ ID NO: 1320079 - DNA, 15 bp, Homo sapiens
gtgtgctcagaagca

SEQ ID NO: 1320080 - DNA, 15 bp, Homo sapiens
agtgtgctcagaagc

SEQ ID NO: 1320081 - DNA, 15 bp, Homo sapiens
tagtgtgctcagaag

SEQ ID NO: 1320082 - DNA, 15 bp, Homo sapiens
atagtgtgctcagaa

SEQ ID NO: 1320083 - DNA, 15 bp, Homo sapiens
aatagtgtgctcaga

SEQ ID NO: 1320084 - DNA, 15 bp, Homo sapiens
gaatagtgtgctcag

SEQ ID NO: 1320085 - DNA, 15 bp, Homo sapiens
agaatagtgtgctca

SEQ ID NO: 1320086 - DNA, 15 bp, Homo sapiens
aagaatagtgtgctc

SEQ ID NO: 1320087 - DNA, 15 bp, Homo sapiens
gaagaatagtgtgct

SEQ ID NO: 1320088 - DNA, 15 bp, Homo sapiens
agaagaatagtgtgc

SEQ ID NO: 1320089 - DNA, 15 bp, Homo sapiens
cagaagaatagtgtg

SEQ ID NO: 1320090 - DNA, 15 bp, Homo sapiens
gcagaagaatagtgt

SEQ ID NO: 1320091 - DNA, 15 bp, Homo sapiens
agcagaagaatagtg

SEQ ID NO: 1320092 - DNA, 15 bp, Homo sapiens
aagcagaagaatagt

SEQ ID NO: 1320093 - DNA, 15 bp, Homo sapiens
aaagcagaagaatag

SEQ ID NO: 1320094 - DNA, 15 bp, Homo sapiens
aaaagcagaagaata

SEQ ID NO: 1320095 - DNA, 15 bp, Homo sapiens
aaaaagcagaagaat

SEQ ID NO: 1320096 - DNA, 15 bp, Homo sapiens
taaaaagcagaagaa

SEQ ID NO: 1320097 - DNA, 15 bp, Homo sapiens
gtaaaaagcagaaga

SEQ ID NO: 1320098 - DNA, 15 bp, Homo sapiens
agtaaaaagcagaag

SEQ ID NO: 1320099 - DNA, 15 bp, Homo sapiens
aagtaaaaagcagaa

SEQ ID NO: 1320100 - DNA, 15 bp, Homo sapiens
taagtaaaaagcaga

SEQ ID NO: 1320101 - DNA, 15 bp, Homo sapiens
ttaagtaaaaagcag

SEQ ID NO: 1320102 - DNA, 15 bp, Homo sapiens
tttaagtaaaaagca

SEQ ID NO: 1320103 - DNA, 15 bp, Homo sapiens
ttttaagtaaaaagc

SEQ ID NO: 1320104 - DNA, 15 bp, Homo sapiens
attttaagtaaaaag

SEQ ID NO: 1320105 - DNA, 15 bp, Homo sapiens
tattttaagtaaaaa

SEQ ID NO: 1320106 - DNA, 15 bp, Homo sapiens
ttattttaagtaaaa

SEQ ID NO: 1320107 - DNA, 15 bp, Homo sapiens
attattttaagtaaa

SEQ ID NO: 1320108 - DNA, 15 bp, Homo sapiens
aattattttaagtaa

SEQ ID NO: 1320109 - DNA, 15 bp, Homo sapiens
gaacaaattatttta

SEQ ID NO: 1320110 - DNA, 15 bp, Homo sapiens
agaacaaattatttt

SEQ ID NO: 1320111 - DNA, 15 bp, Homo sapiens
aagaacaaattattt

SEQ ID NO: 1320112 - DNA, 15 bp, Homo sapiens
aaagaacaaattatt

SEQ ID NO: 1320113 - DNA, 15 bp, Homo sapiens
gaaagaacaaattat

SEQ ID NO: 1320114 - DNA, 15 bp, Homo sapiens
agaaagaacaaatta

SEQ ID NO: 1320115 - DNA, 15 bp, Homo sapiens
aagaaagaacaaatt

SEQ ID NO: 1320116 - DNA, 15 bp, Homo sapiens
aaagaaagaacaaat

SEQ ID NO: 1320117 - DNA, 15 bp, Homo sapiens
taaagaaagaacaaa

SEQ ID NO: 1320118 - DNA, 15 bp, Homo sapiens
ctaaagaaagaacaa

SEQ ID NO: 1320119 - DNA, 15 bp, Homo sapiens
cctaaagaaagaaca

SEQ ID NO: 1320120 - DNA, 15 bp, Homo sapiens
tcctaaagaaagaac

SEQ ID NO: 1320121 - DNA, 15 bp, Homo sapiens
atcctaaagaaagaa

SEQ ID NO: 1320122 - DNA, 15 bp, Homo sapiens
aatcctaaagaaaga

SEQ ID NO: 1320123 - DNA, 15 bp, Homo sapiens
gaatcctaaagaaag

SEQ ID NO: 1320124 - DNA, 15 bp, Homo sapiens
tgaatcctaaagaaa

SEQ ID NO: 1320125 - DNA, 15 bp, Homo sapiens
ttgaatcctaaagaa

SEQ ID NO: 1320126 - DNA, 15 bp, Homo sapiens
gttgaatcctaaaga

SEQ ID NO: 1320127 - DNA, 15 bp, Homo sapiens
agttgaatcctaaag

SEQ ID NO: 1320128 - DNA, 15 bp, Homo sapiens
gagttgaatcctaaa

SEQ ID NO: 1320129 - DNA, 15 bp, Homo sapiens
tgagttgaatcctaa

SEQ ID NO: 1320130 - DNA, 15 bp, Homo sapiens
ttgagttgaatccta

SEQ ID NO: 1320131 - DNA, 15 bp, Homo sapiens
cttgagttgaatcct

SEQ ID NO: 1320132 - DNA, 15 bp, Homo sapiens
gcttgagttgaatcc

SEQ ID NO: 1320133 - DNA, 15 bp, Homo sapiens
tgcttgagttgaatc

SEQ ID NO: 1320134 - DNA, 15 bp, Homo sapiens
atgcttgagttgaat

SEQ ID NO: 1320135 - DNA, 15 bp, Homo sapiens
tatgcttgagttgaa

SEQ ID NO: 1320136 - DNA, 15 bp, Homo sapiens
ttatgcttgagttga

SEQ ID NO: 1320137 - DNA, 15 bp, Homo sapiens
attatgcttgagttg

SEQ ID NO: 1320138 - DNA, 15 bp, Homo sapiens
gattatgcttgagtt

SEQ ID NO: 1320139 - DNA, 15 bp, Homo sapiens
agattatgcttgagt

SEQ ID NO: 1320140 - DNA, 15 bp, Homo sapiens
gagattatgcttgag

SEQ ID NO: 1320141 - DNA, 15 bp, Homo sapiens
agagattatgcttga

SEQ ID NO: 1320142 - DNA, 15 bp, Homo sapiens
aagagattatgcttg

SEQ ID NO: 1320143 - DNA, 15 bp, Homo sapiens
gaagagattatgctt

SEQ ID NO: 1320144 - DNA, 15 bp, Homo sapiens
ggaagagattatgct

SEQ ID NO: 1320145 - DNA, 15 bp, Homo sapiens
tggaagagattatgc

SEQ ID NO: 1320146 - DNA, 15 bp, Homo sapiens
ttggaagagattatg

SEQ ID NO: 1320147 - DNA, 15 bp, Homo sapiens
cttggaagagattat

SEQ ID NO: 1320148 - DNA, 15 bp, Homo sapiens
tcttggaagagatta

SEQ ID NO: 1320149 - DNA, 15 bp, Homo sapiens
ttcttggaagagatt

SEQ ID NO: 1320150 - DNA, 15 bp, Homo sapiens
cttcttggaagagat

SEQ ID NO: 1320151 - DNA, 15 bp, Homo sapiens
acttcttggaagaga

SEQ ID NO: 1320152 - DNA, 15 bp, Homo sapiens
aacttcttggaagag

SEQ ID NO: 1320153 - DNA, 15 bp, Homo sapiens
aaacttcttggaaga

SEQ ID NO: 1320154 - DNA, 15 bp, Homo sapiens
aaaacttcttggaag

SEQ ID NO: 1320155 - DNA, 15 bp, Homo sapiens
gaaaacttcttggaa

SEQ ID NO: 1320156 - DNA, 15 bp, Homo sapiens
agaaaacttcttgga

SEQ ID NO: 1320157 - DNA, 15 bp, Homo sapiens
gagaaaacttcttgg

SEQ ID NO: 1320158 - DNA, 15 bp, Homo sapiens
agagaaaacttcttg

SEQ ID NO: 1320159 - DNA, 15 bp, Homo sapiens
tagagaaaacttctt

SEQ ID NO: 1320160 - DNA, 15 bp, Homo sapiens
ttagagaaaacttct

SEQ ID NO: 1320161 - DNA, 15 bp, Homo sapiens
attagagaaaacttc

SEQ ID NO: 1320162 - DNA, 15 bp, Homo sapiens
cattagagaaaactt

SEQ ID NO: 1320163 - DNA, 15 bp, Homo sapiens
gcattagagaaaact

SEQ ID NO: 1320164 - DNA, 15 bp, Homo sapiens
agcattagagaaaac

SEQ ID NO: 1320165 - DNA, 15 bp, Homo sapiens
gagcattagagaaaa

SEQ ID NO: 1320166 - DNA, 15 bp, Homo sapiens
ggagcattagagaaa

SEQ ID NO: 1320167 - DNA, 15 bp, Homo sapiens
aggagcattagagaa

SEQ ID NO: 1320168 - DNA, 15 bp, Homo sapiens
taggagcattagaga

SEQ ID NO: 1320169 - DNA, 15 bp, Homo sapiens
ttaggagcattagag

SEQ ID NO: 1320170 - DNA, 15 bp, Homo sapiens
attaggagcattaga

SEQ ID NO: 1320171 - DNA, 15 bp, Homo sapiens
gattaggagcattag

SEQ ID NO: 1320172 - DNA, 15 bp, Homo sapiens
agattaggagcatta

SEQ ID NO: 1320173 - DNA, 15 bp, Homo sapiens
cagattaggagcatt

SEQ ID NO: 1320174 - DNA, 15 bp, Homo sapiens
tcagattaggagcat

SEQ ID NO: 1320175 - DNA, 15 bp, Homo sapiens
ctcagattaggagca

SEQ ID NO: 1320176 - DNA, 15 bp, Homo sapiens
actcagattaggagc

SEQ ID NO: 1320177 - DNA, 15 bp, Homo sapiens
aactcagattaggag

SEQ ID NO: 1320178 - DNA, 15 bp, Homo sapiens
taactcagattagga

SEQ ID NO: 1320179 - DNA, 15 bp, Homo sapiens
ctaactcagattagg

SEQ ID NO: 1320180 - DNA, 15 bp, Homo sapiens
actaactcagattag

SEQ ID NO: 1320181 - DNA, 15 bp, Homo sapiens
aactaactcagatta

SEQ ID NO: 1320182 - DNA, 15 bp, Homo sapiens
caactaactcagatt

SEQ ID NO: 1320183 - DNA, 15 bp, Homo sapiens
acaactaactcagat

SEQ ID NO: 1320184 - DNA, 15 bp, Homo sapiens
gacaactaactcaga

SEQ ID NO: 1320185 - DNA, 15 bp, Homo sapiens
agacaactaactcag

SEQ ID NO: 1320186 - DNA, 15 bp, Homo sapiens
gagacaactaactca

SEQ ID NO: 1320187 - DNA, 15 bp, Homo sapiens
agagacaactaactc

SEQ ID NO: 1320188 - DNA, 15 bp, Homo sapiens
aagagacaactaact

SEQ ID NO: 1320189 - DNA, 15 bp, Homo sapiens
gaagagacaactaac

SEQ ID NO: 1320190 - DNA, 15 bp, Homo sapiens
agaagagacaactaa

SEQ ID NO: 1320191 - DNA, 15 bp, Homo sapiens
cagaagagacaacta

SEQ ID NO: 1320192 - DNA, 15 bp, Homo sapiens
tcagaagagacaact

SEQ ID NO: 1320193 - DNA, 15 bp, Homo sapiens
atcagaagagacaac

SEQ ID NO: 1320194 - DNA, 15 bp, Homo sapiens
aatcagaagagacaa

SEQ ID NO: 1320195 - DNA, 15 bp, Homo sapiens
aaatcagaagagaca

SEQ ID NO: 1320196 - DNA, 15 bp, Homo sapiens
gaaaatcagaagaga

SEQ ID NO: 1320197 - DNA, 15 bp, Homo sapiens
tgaaaatcagaagag

SEQ ID NO: 1320198 - DNA, 15 bp, Homo sapiens
atgaaaatcagaaga

SEQ ID NO: 1320199 - DNA, 15 bp, Homo sapiens
catgaaaatcagaag

SEQ ID NO: 1320200 - DNA, 15 bp, Homo sapiens
ccatgaaaatcagaa

SEQ ID NO: 1320201 - DNA, 15 bp, Homo sapiens
gccatgaaaatcaga

SEQ ID NO: 1320202 - DNA, 15 bp, Homo sapiens
tgccatgaaaatcag

SEQ ID NO: 1320203 - DNA, 15 bp, Homo sapiens
gtgccatgaaaatca

SEQ ID NO: 1320204 - DNA, 15 bp, Homo sapiens
ggtgccatgaaaatc

SEQ ID NO: 1320205 - DNA, 15 bp, Homo sapiens
gggtgccatgaaaat

SEQ ID NO: 1320206 - DNA, 15 bp, Homo sapiens
agggtgccatgaaaa

SEQ ID NO: 1320207 - DNA, 15 bp, Homo sapiens
cagggtgccatgaaa

SEQ ID NO: 1320208 - DNA, 15 bp, Homo sapiens
acagggtgccatgaa

SEQ ID NO: 1320209 - DNA, 15 bp, Homo sapiens
cacagggtgccatga

SEQ ID NO: 1320210 - DNA, 15 bp, Homo sapiens
acacagggtgccatg

SEQ ID NO: 1320211 - DNA, 15 bp, Homo sapiens
tacacagggtgccat

SEQ ID NO: 1320212 - DNA, 15 bp, Homo sapiens
atacacagggtgcca

SEQ ID NO: 1320213 - DNA, 15 bp, Homo sapiens
aatacacagggtgcc

SEQ ID NO: 1320214 - DNA, 15 bp, Homo sapiens
gaatacacagggtgc

SEQ ID NO: 1320215 - DNA, 15 bp, Homo sapiens
agaatacacagggtg

SEQ ID NO: 1320216 - DNA, 15 bp, Homo sapiens
aagaatacacagggt

SEQ ID NO: 1320217 - DNA, 15 bp, Homo sapiens
aaagaatacacaggg

SEQ ID NO: 1320218 - DNA, 15 bp, Homo sapiens
aaaagaatacacagg

SEQ ID NO: 1320219 - DNA, 15 bp, Homo sapiens
taaaagaatacacag

SEQ ID NO: 1320220 - DNA, 15 bp, Homo sapiens
ataaaagaatacaca

SEQ ID NO: 1320221 - DNA, 15 bp, Homo sapiens
aataaaagaatacac

SEQ ID NO: 1320222 - DNA, 15 bp, Homo sapiens
gaataaaagaataca

SEQ ID NO: 1320223 - DNA, 15 bp, Homo sapiens
agaataaaagaatac

SEQ ID NO: 1320224 - DNA, 15 bp, Homo sapiens
cagaataaaagaata

SEQ ID NO: 1320225 - DNA, 15 bp, Homo sapiens
ccagaataaaagaat

SEQ ID NO: 1320226 - DNA, 15 bp, Homo sapiens
accagaataaaagaa

SEQ ID NO: 1320227 - DNA, 15 bp, Homo sapiens
taccagaataaaaga

SEQ ID NO: 1320228 - DNA, 15 bp, Homo sapiens
gtaccagaataaaag

SEQ ID NO: 1320229 - DNA, 15 bp, Homo sapiens
agtaccagaataaaa

SEQ ID NO: 1320230 - DNA, 15 bp, Homo sapiens
aagtaccagaataaa

SEQ ID NO: 1320231 - DNA, 15 bp, Homo sapiens
taagtaccagaataa

SEQ ID NO: 1320232 - DNA, 15 bp, Homo sapiens
ctaagtaccagaata

SEQ ID NO: 1320233 - DNA, 15 bp, Homo sapiens
gctaagtaccagaat

SEQ ID NO: 1320234 - DNA, 15 bp, Homo sapiens
tgctaagtaccagaa

SEQ ID NO: 1320235 - DNA, 15 bp, Homo sapiens
gtgctaagtaccaga

SEQ ID NO: 1320236 - DNA, 15 bp, Homo sapiens
agtgctaagtaccag

SEQ ID NO: 1320237 - DNA, 15 bp, Homo sapiens
aagtgctaagtacca

SEQ ID NO: 1320238 - DNA, 15 bp, Homo sapiens
aaagtgctaagtacc

SEQ ID NO: 1320239 - DNA, 15 bp, Homo sapiens
caaagtgctaagtac

SEQ ID NO: 1320240 - DNA, 15 bp, Homo sapiens
acaaagtgctaagta

SEQ ID NO: 1320241 - DNA, 15 bp, Homo sapiens
tacaaagtgctaagt

SEQ ID NO: 1320242 - DNA, 15 bp, Homo sapiens
atacaaagtgctaag

SEQ ID NO: 1320243 - DNA, 15 bp, Homo sapiens
aatacaaagtgctaa

SEQ ID NO: 1320244 - DNA, 15 bp, Homo sapiens
caatacaaagtgcta

SEQ ID NO: 1320245 - DNA, 15 bp, Homo sapiens
gcaatacaaagtgct

SEQ ID NO: 1320246 - DNA, 15 bp, Homo sapiens
agcaatacaaagtgc

SEQ ID NO: 1320247 - DNA, 15 bp, Homo sapiens
tagcaatacaaagtg

SEQ ID NO: 1320248 - DNA, 15 bp, Homo sapiens
atagcaatacaaagt

SEQ ID NO: 1320249 - DNA, 15 bp, Homo sapiens
aatagcaatacaaag

SEQ ID NO: 1320250 - DNA, 15 bp, Homo sapiens
aaatagcaatacaaa

SEQ ID NO: 1320251 - DNA, 15 bp, Homo sapiens
aaaatagcaatacaa

SEQ ID NO: 1320252 - DNA, 15 bp, Homo sapiens
aaaaatagcaataca

SEQ ID NO: 1320253 - DNA, 15 bp, Homo sapiens
aaaaaatagcaatac

SEQ ID NO: 1320254 - DNA, 15 bp, Homo sapiens
taaaaaatagcaata

SEQ ID NO: 1320255 - DNA, 15 bp, Homo sapiens
ataaaaaatagcaat

SEQ ID NO: 1320256 - DNA, 15 bp, Homo sapiens
aataaaaaatagcaa

SEQ ID NO: 1320257 - DNA, 15 bp, Homo sapiens
aaataaaaaatagca

SEQ ID NO: 1320258 - DNA, 15 bp, Homo sapiens
taaataaaaaatagc

SEQ ID NO: 1320259 - DNA, 15 bp, Homo sapiens
gtaaataaaaaatag

SEQ ID NO: 1320260 - DNA, 15 bp, Homo sapiens
agtaaataaaaaata

SEQ ID NO: 1320261 - DNA, 15 bp, Homo sapiens
aagtaaataaaaaat

SEQ ID NO: 1320262 - DNA, 15 bp, Homo sapiens
taagtaaataaaaaa

SEQ ID NO: 1320263 - DNA, 15 bp, Homo sapiens
ataagtaaataaaaa

SEQ ID NO: 1320264 - DNA, 15 bp, Homo sapiens
gataagtaaataaaa

SEQ ID NO: 1320265 - DNA, 15 bp, Homo sapiens
agataagtaaataaa

SEQ ID NO: 1320266 - DNA, 15 bp, Homo sapiens
cagataagtaaataa

SEQ ID NO: 1320267 - DNA, 15 bp, Homo sapiens
acagataagtaaata

SEQ ID NO: 1320268 - DNA, 15 bp, Homo sapiens
aacagataagtaaat

SEQ ID NO: 1320269 - DNA, 15 bp, Homo sapiens
aaacagataagtaaa

SEQ ID NO: 1320270 - DNA, 15 bp, Homo sapiens
aaaacagataagtaa

SEQ ID NO: 1320271 - DNA, 15 bp, Homo sapiens
aaaaacagataagta

SEQ ID NO: 1320272 - DNA, 15 bp, Homo sapiens
aaaaaacagataagt

SEQ ID NO: 1320273 - DNA, 15 bp, Homo sapiens
aaaaaaacagataag

SEQ ID NO: 1320274 - DNA, 15 bp, Homo sapiens
aaaaaaaacagataa

SEQ ID NO: 1320275 - DNA, 15 bp, Homo sapiens
aaaaaaaaacagata

SEQ ID NO: 1320276 - DNA, 15 bp, Homo sapiens
aaaaaaaaaacagat

SEQ ID NO: 1320277 - DNA, 15 bp, Homo sapiens
gaaaaaaaaaacaga

SEQ ID NO: 1320278 - DNA, 15 bp, Homo sapiens
tgaaaaaaaaaacag

SEQ ID NO: 1320279 - DNA, 15 bp, Homo sapiens
atgaaaaaaaaaaca

SEQ ID NO: 1320280 - DNA, 15 bp, Homo sapiens
aatgaaaaaaaaaac

SEQ ID NO: 1320281 - DNA, 15 bp, Homo sapiens
taatgaaaaaaaaaa

SEQ ID NO: 1320282 - DNA, 15 bp, Homo sapiens
ctaatgaaaaaaaaa

SEQ ID NO: 1320283 - DNA, 15 bp, Homo sapiens
tctaatgaaaaaaaa

SEQ ID NO: 1320284 - DNA, 15 bp, Homo sapiens
gtctaatgaaaaaaa

SEQ ID NO: 1320285 - DNA, 15 bp, Homo sapiens
agtctaatgaaaaaa

SEQ ID NO: 1320286 - DNA, 15 bp, Homo sapiens
cagtctaatgaaaaa

SEQ ID NO: 1320287 - DNA, 15 bp, Homo sapiens
acagtctaatgaaaa

SEQ ID NO: 1320288 - DNA, 15 bp, Homo sapiens
tacagtctaatgaaa

SEQ ID NO: 1320289 - DNA, 15 bp, Homo sapiens
ttacagtctaatgaa

SEQ ID NO: 1320290 - DNA, 15 bp, Homo sapiens
tttacagtctaatga

SEQ ID NO: 1320291 - DNA, 15 bp, Homo sapiens
gtttacagtctaatg

SEQ ID NO: 1320292 - DNA, 15 bp, Homo sapiens
agtttacagtctaat

SEQ ID NO: 1320293 - DNA, 15 bp, Homo sapiens
tagtttacagtctaa

SEQ ID NO: 1320294 - DNA, 15 bp, Homo sapiens
atagtttacagtcta

SEQ ID NO: 1320295 - DNA, 15 bp, Homo sapiens
tatagtttacagtct

SEQ ID NO: 1320296 - DNA, 15 bp, Homo sapiens
ctatagtttacagtc

SEQ ID NO: 1320297 - DNA, 15 bp, Homo sapiens
gctatagtttacagt

SEQ ID NO: 1320298 - DNA, 15 bp, Homo sapiens
tgctatagtttacag

SEQ ID NO: 1320299 - DNA, 15 bp, Homo sapiens
atgctatagtttaca

SEQ ID NO: 1320300 - DNA, 15 bp, Homo sapiens
tatgctatagtttac

SEQ ID NO: 1320301 - DNA, 15 bp, Homo sapiens
ttatgctatagttta

SEQ ID NO: 1320302 - DNA, 15 bp, Homo sapiens
tttatgctatagttt

SEQ ID NO: 1320303 - DNA, 15 bp, Homo sapiens
ttttatgctatagtt

SEQ ID NO: 1320304 - DNA, 15 bp, Homo sapiens
cttttatgctatagt

SEQ ID NO: 1320305 - DNA, 15 bp, Homo sapiens
acttttatgctatag

SEQ ID NO: 1320306 - DNA, 15 bp, Homo sapiens
aacttttatgctata

SEQ ID NO: 1320307 - DNA, 15 bp, Homo sapiens
gaacttttatgctat

SEQ ID NO: 1320308 - DNA, 15 bp, Homo sapiens
tgaacttttatgcta

SEQ ID NO: 1320309 - DNA, 15 bp, Homo sapiens
ttgaacttttatgct

SEQ ID NO: 1320310 - DNA, 15 bp, Homo sapiens
tttgaacttttatgc

SEQ ID NO: 1320311 - DNA, 15 bp, Homo sapiens
ttttgaacttttatg

SEQ ID NO: 1320312 - DNA, 15 bp, Homo sapiens
gttttgaacttttat

SEQ ID NO: 1320313 - DNA, 15 bp, Homo sapiens
tgttttgaactttta

SEQ ID NO: 1320314 - DNA, 15 bp, Homo sapiens
ttgttttgaactttt

SEQ ID NO: 1320315 - DNA, 15 bp, Homo sapiens
tttgttttgaacttt

SEQ ID NO: 1320316 - DNA, 15 bp, Homo sapiens
ctttgttttgaactt

SEQ ID NO: 1320317 - DNA, 15 bp, Homo sapiens
cctttgttttgaact

SEQ ID NO: 1320318 - DNA, 15 bp, Homo sapiens
gcctttgttttgaac

SEQ ID NO: 1320319 - DNA, 15 bp, Homo sapiens
agcctttgttttgaa

SEQ ID NO: 1320320 - DNA, 15 bp, Homo sapiens
gagcctttgttttga

SEQ ID NO: 1320321 - DNA, 15 bp, Homo sapiens
agagcctttgttttg

SEQ ID NO: 1320322 - DNA, 15 bp, Homo sapiens
cagagcctttgtttt

SEQ ID NO: 1320323 - DNA, 15 bp, Homo sapiens
tcagagcctttgttt

SEQ ID NO: 1320324 - DNA, 15 bp, Homo sapiens
ttcagagcctttgtt

SEQ ID NO: 1320325 - DNA, 15 bp, Homo sapiens
tttcagagcctttgt

SEQ ID NO: 1320326 - DNA, 15 bp, Homo sapiens
atttcagagcctttg

SEQ ID NO: 1320327 - DNA, 15 bp, Homo sapiens
gatttcagagccttt

SEQ ID NO: 1320328 - DNA, 15 bp, Homo sapiens
tgatttcagagcctt

SEQ ID NO: 1320329 - DNA, 15 bp, Homo sapiens
ttgatttcagagcct

SEQ ID NO: 1320330 - DNA, 15 bp, Homo sapiens
tttgatttcagagcc

SEQ ID NO: 1320331 - DNA, 15 bp, Homo sapiens
gtttgatttcagagc

SEQ ID NO: 1320332 - DNA, 15 bp, Homo sapiens
tgtttgatttcagag

SEQ ID NO: 1320333 - DNA, 15 bp, Homo sapiens
ctgtttgatttcaga

SEQ ID NO: 1320334 - DNA, 15 bp, Homo sapiens
actgtttgatttcag

SEQ ID NO: 1320335 - DNA, 15 bp, Homo sapiens
aactgtttgatttca

SEQ ID NO: 1320336 - DNA, 15 bp, Homo sapiens
aaactgtttgatttc

SEQ ID NO: 1320337 - DNA, 15 bp, Homo sapiens
caaactgtttgattt

SEQ ID NO: 1320338 - DNA, 15 bp, Homo sapiens
ccaaactgtttgatt

SEQ ID NO: 1320339 - DNA, 15 bp, Homo sapiens
tccaaactgtttgat

SEQ ID NO: 1320340 - DNA, 15 bp, Homo sapiens
ttccaaactgtttga

SEQ ID NO: 1320341 - DNA, 15 bp, Homo sapiens
gttccaaactgtttg

SEQ ID NO: 1320342 - DNA, 15 bp, Homo sapiens
agttccaaactgttt

SEQ ID NO: 1320343 - DNA, 15 bp, Homo sapiens
cagttccaaactgtt

SEQ ID NO: 1320344 - DNA, 15 bp, Homo sapiens
acagttccaaactgt

SEQ ID NO: 1320345 - DNA, 15 bp, Homo sapiens
cacagttccaaactg

SEQ ID NO: 1320346 - DNA, 15 bp, Homo sapiens
acacagttccaaact

SEQ ID NO: 1320347 - DNA, 15 bp, Homo sapiens
gacacagttccaaac

SEQ ID NO: 1320348 - DNA, 15 bp, Homo sapiens
ggacacagttccaaa

SEQ ID NO: 1320349 - DNA, 15 bp, Homo sapiens
aggacacagttccaa

SEQ ID NO: 1320350 - DNA, 15 bp, Homo sapiens
caggacacagttcca

SEQ ID NO: 1320351 - DNA, 15 bp, Homo sapiens
ccaggacacagttcc

SEQ ID NO: 1320352 - DNA, 15 bp, Homo sapiens
tccaggacacagttc

SEQ ID NO: 1320353 - DNA, 15 bp, Homo sapiens
atccaggacacagtt

SEQ ID NO: 1320354 - DNA, 15 bp, Homo sapiens
gatccaggacacagt

SEQ ID NO: 1320355 - DNA, 15 bp, Homo sapiens
ggatccaggacacag

SEQ ID NO: 1320356 - DNA, 15 bp, Homo sapiens
tggatccaggacaca

SEQ ID NO: 1320357 - DNA, 15 bp, Homo sapiens
gtggatccaggacac

SEQ ID NO: 1320358 - DNA, 15 bp, Homo sapiens
ggtggatccaggaca

SEQ ID NO: 1320359 - DNA, 15 bp, Homo sapiens
tggtggatccaggac

SEQ ID NO: 1320360 - DNA, 15 bp, Homo sapiens
gtggtggatccagga

SEQ ID NO: 1320361 - DNA, 15 bp, Homo sapiens
agtggtggatccagg

SEQ ID NO: 1320362 - DNA, 15 bp, Homo sapiens
aagtggtggatccag

SEQ ID NO: 1320363 - DNA, 15 bp, Homo sapiens
taagtggtggatcca

SEQ ID NO: 1320364 - DNA, 15 bp, Homo sapiens
ataagtggtggatcc

SEQ ID NO: 1320365 - DNA, 15 bp, Homo sapiens
aataagtggtggatc

SEQ ID NO: 1320366 - DNA, 15 bp, Homo sapiens
gaataagtggtggat

SEQ ID NO: 1320367 - DNA, 15 bp, Homo sapiens
tgaataagtggtgga

SEQ ID NO: 1320368 - DNA, 15 bp, Homo sapiens
atgaataagtggtgg

SEQ ID NO: 1320369 - DNA, 15 bp, Homo sapiens
catgaataagtggtg

SEQ ID NO: 1320370 - DNA, 15 bp, Homo sapiens
acatgaataagtggt

SEQ ID NO: 1320371 - DNA, 15 bp, Homo sapiens
cacatgaataagtgg

SEQ ID NO: 1320372 - DNA, 15 bp, Homo sapiens
tcacatgaataagtg

SEQ ID NO: 1320373 - DNA, 15 bp, Homo sapiens
gtcacatgaataagt

SEQ ID NO: 1320374 - DNA, 15 bp, Homo sapiens
agtcacatgaataag

SEQ ID NO: 1320375 - DNA, 15 bp, Homo sapiens
cagtcacatgaataa

SEQ ID NO: 1320376 - DNA, 15 bp, Homo sapiens
ccagtcacatgaata

SEQ ID NO: 1320377 - DNA, 15 bp, Homo sapiens
tccagtcacatgaat

SEQ ID NO: 1320378 - DNA, 15 bp, Homo sapiens
gtccagtcacatgaa

SEQ ID NO: 1320379 - DNA, 15 bp, Homo sapiens
tgtccagtcacatga

SEQ ID NO: 1320380 - DNA, 15 bp, Homo sapiens
ttgtccagtcacatg

SEQ ID NO: 1320381 - DNA, 15 bp, Homo sapiens
attgtccagtcacat

SEQ ID NO: 1320382 - DNA, 15 bp, Homo sapiens
aattgtccagtcaca

SEQ ID NO: 1320383 - DNA, 15 bp, Homo sapiens
aaattgtccagtcac

SEQ ID NO: 1320384 - DNA, 15 bp, Homo sapiens
taaattgtccagtca

SEQ ID NO: 1320385 - DNA, 15 bp, Homo sapiens
gtaaattgtccagtc

SEQ ID NO: 1320386 - DNA, 15 bp, Homo sapiens
agtaaattgtccagt

SEQ ID NO: 1320387 - DNA, 15 bp, Homo sapiens
gagtaaattgtccag

SEQ ID NO: 1320388 - DNA, 15 bp, Homo sapiens
ggagtaaattgtcca

SEQ ID NO: 1320389 - DNA, 15 bp, Homo sapiens
aggagtaaattgtcc

SEQ ID NO: 1320390 - DNA, 15 bp, Homo sapiens
aaggagtaaattgtc

SEQ ID NO: 1320391 - DNA, 15 bp, Homo sapiens
caaggagtaaattgt

SEQ ID NO: 1320392 - DNA, 15 bp, Homo sapiens
acaaggagtaaattg

SEQ ID NO: 1320393 - DNA, 15 bp, Homo sapiens
gacaaggagtaaatt

SEQ ID NO: 1320394 - DNA, 15 bp, Homo sapiens
agacaaggagtaaat

SEQ ID NO: 1320395 - DNA, 15 bp, Homo sapiens
tagacaaggagtaaa

SEQ ID NO: 1320396 - DNA, 15 bp, Homo sapiens
gtagacaaggagtaa

SEQ ID NO: 1320397 - DNA, 15 bp, Homo sapiens
ggtagacaaggagta

SEQ ID NO: 1320398 - DNA, 15 bp, Homo sapiens
aggtagacaaggagt

SEQ ID NO: 1320399 - DNA, 15 bp, Homo sapiens
aaggtagacaaggag

SEQ ID NO: 1320400 - DNA, 15 bp, Homo sapiens
aaaggtagacaagga

SEQ ID NO: 1320401 - DNA, 15 bp, Homo sapiens
gaaaggtagacaagg

SEQ ID NO: 1320402 - DNA, 15 bp, Homo sapiens
agaaaggtagacaag

SEQ ID NO: 1320403 - DNA, 15 bp, Homo sapiens
aagaaaggtagacaa

SEQ ID NO: 1320404 - DNA, 15 bp, Homo sapiens
gaagaaaggtagaca

SEQ ID NO: 1320405 - DNA, 15 bp, Homo sapiens
tgaagaaaggtagac

SEQ ID NO: 1320406 - DNA, 15 bp, Homo sapiens
gtgaagaaaggtaga

SEQ ID NO: 1320407 - DNA, 15 bp, Homo sapiens
agtgaagaaaggtag

SEQ ID NO: 1320408 - DNA, 15 bp, Homo sapiens
aagtgaagaaaggta

SEQ ID NO: 1320409 - DNA, 15 bp, Homo sapiens
taagtgaagaaaggt

SEQ ID NO: 1320410 - DNA, 15 bp, Homo sapiens
ataagtgaagaaagg

SEQ ID NO: 1320411 - DNA, 15 bp, Homo sapiens
tataagtgaagaaag

SEQ ID NO: 1320412 - DNA, 15 bp, Homo sapiens
ttataagtgaagaaa

SEQ ID NO: 1320413 - DNA, 15 bp, Homo sapiens
tttataagtgaagaa

SEQ ID NO: 1320414 - DNA, 15 bp, Homo sapiens
ttttataagtgaaga

SEQ ID NO: 1320415 - DNA, 15 bp, Homo sapiens
attttataagtgaag

SEQ ID NO: 1320416 - DNA, 15 bp, Homo sapiens
cattttataagtgaa

SEQ ID NO: 1320417 - DNA, 15 bp, Homo sapiens
ccattttataagtga

SEQ ID NO: 1320418 - DNA, 15 bp, Homo sapiens
gccattttataagtg

SEQ ID NO: 1320419 - DNA, 15 bp, Homo sapiens
tgccattttataagt

SEQ ID NO: 1320420 - DNA, 15 bp, Homo sapiens
atgccattttataag

SEQ ID NO: 1320421 - DNA, 15 bp, Homo sapiens
aatgccattttataa

SEQ ID NO: 1320422 - DNA, 15 bp, Homo sapiens
aaatgccattttata

SEQ ID NO: 1320423 - DNA, 15 bp, Homo sapiens
taaatgccattttat

SEQ ID NO: 1320424 - DNA, 15 bp, Homo sapiens
ttaaatgccatttta

SEQ ID NO: 1320425 - DNA, 15 bp, Homo sapiens
tttaaatgccatttt

SEQ ID NO: 1320426 - DNA, 15 bp, Homo sapiens
ttttaaatgccattt

SEQ ID NO: 1320427 - DNA, 15 bp, Homo sapiens
tttttaaatgccatt

SEQ ID NO: 1320428 - DNA, 15 bp, Homo sapiens
ttttttaaatgccat

SEQ ID NO: 1320429 - DNA, 15 bp, Homo sapiens
attttttaaatgcca

SEQ ID NO: 1320430 - DNA, 15 bp, Homo sapiens
tattttttaaatgcc

SEQ ID NO: 1320431 - DNA, 15 bp, Homo sapiens
ttattttttaaatgc

SEQ ID NO: 1320432 - DNA, 15 bp, Homo sapiens
attattttttaaatg

SEQ ID NO: 1320433 - DNA, 15 bp, Homo sapiens
aattattttttaaat

SEQ ID NO: 1320434 - DNA, 15 bp, Homo sapiens
taattattttttaaa

SEQ ID NO: 1320435 - DNA, 15 bp, Homo sapiens
gtaattattttttaa

SEQ ID NO: 1320436 - DNA, 15 bp, Homo sapiens
ggtaattatttttta

SEQ ID NO: 1320437 - DNA, 15 bp, Homo sapiens
aggtaattatttttt

SEQ ID NO: 1320438 - DNA, 15 bp, Homo sapiens
aaggtaattattttt

SEQ ID NO: 1320439 - DNA, 15 bp, Homo sapiens
gaaggtaattatttt

SEQ ID NO: 1320440 - DNA, 15 bp, Homo sapiens
agaaggtaattattt

SEQ ID NO: 1320441 - DNA, 15 bp, Homo sapiens
aagaaggtaattatt

SEQ ID NO: 1320442 - DNA, 15 bp, Homo sapiens
aaagaaggtaattat

SEQ ID NO: 1320443 - DNA, 15 bp, Homo sapiens
gaaagaaggtaatta

SEQ ID NO: 1320444 - DNA, 15 bp, Homo sapiens
agaaagaaggtaatt

SEQ ID NO: 1320445 - DNA, 15 bp, Homo sapiens
tagaaagaaggtaat

SEQ ID NO: 1320446 - DNA, 15 bp, Homo sapiens
ctagaaagaaggtaa

SEQ ID NO: 1320447 - DNA, 15 bp, Homo sapiens
tctagaaagaaggta

SEQ ID NO: 1320448 - DNA, 15 bp, Homo sapiens
ctctagaaagaaggt

SEQ ID NO: 1320449 - DNA, 15 bp, Homo sapiens
actctagaaagaagg

SEQ ID NO: 1320450 - DNA, 15 bp, Homo sapiens
aactctagaaagaag

SEQ ID NO: 1320451 - DNA, 15 bp, Homo sapiens
aaactctagaaagaa

SEQ ID NO: 1320452 - DNA, 15 bp, Homo sapiens
caaactctagaaaga

SEQ ID NO: 1320453 - DNA, 15 bp, Homo sapiens
acaaactctagaaag

SEQ ID NO: 1320454 - DNA, 15 bp, Homo sapiens
aacaaactctagaaa

SEQ ID NO: 1320455 - DNA, 15 bp, Homo sapiens
caacaaactctagaa

SEQ ID NO: 1320456 - DNA, 15 bp, Homo sapiens
acaacaaactctaga

SEQ ID NO: 1320457 - DNA, 15 bp, Homo sapiens
cacaacaaactctag

SEQ ID NO: 1320458 - DNA, 15 bp, Homo sapiens
tcacaacaaactcta

SEQ ID NO: 1320459 - DNA, 15 bp, Homo sapiens
ctcacaacaaactct

SEQ ID NO: 1320460 - DNA, 15 bp, Homo sapiens
tctcacaacaaactc

SEQ ID NO: 1320461 - DNA, 15 bp, Homo sapiens
ttctcacaacaaact

SEQ ID NO: 1320462 - DNA, 15 bp, Homo sapiens
attctcacaacaaac

SEQ ID NO: 1320463 - DNA, 15 bp, Homo sapiens
aattctcacaacaaa

SEQ ID NO: 1320464 - DNA, 15 bp, Homo sapiens
taattctcacaacaa

SEQ ID NO: 1320465 - DNA, 15 bp, Homo sapiens
ttaattctcacaaca

SEQ ID NO: 1320466 - DNA, 15 bp, Homo sapiens
tttaattctcacaac

SEQ ID NO: 1320467 - DNA, 15 bp, Homo sapiens
atttaattctcacaa

SEQ ID NO: 1320468 - DNA, 15 bp, Homo sapiens
tatttaattctcaca

SEQ ID NO: 1320469 - DNA, 15 bp, Homo sapiens
ttatttaattctcac

SEQ ID NO: 1320470 - DNA, 15 bp, Homo sapiens
attatttaattctca

SEQ ID NO: 1320471 - DNA, 15 bp, Homo sapiens
tattatttaattctc

SEQ ID NO: 1320472 - DNA, 15 bp, Homo sapiens
atattatttaattct

SEQ ID NO: 1320473 - DNA, 15 bp, Homo sapiens
tatattatttaattc

SEQ ID NO: 1320474 - DNA, 15 bp, Homo sapiens
ttatattatttaatt

SEQ ID NO: 1320475 - DNA, 15 bp, Homo sapiens
cttatattatttaat

SEQ ID NO: 1320476 - DNA, 15 bp, Homo sapiens
acttatattatttaa

SEQ ID NO: 1320477 - DNA, 15 bp, Homo sapiens
tacttatattattta

SEQ ID NO: 1320478 - DNA, 15 bp, Homo sapiens
ttacttatattattt

SEQ ID NO: 1320479 - DNA, 15 bp, Homo sapiens
attacttatattatt

SEQ ID NO: 1320480 - DNA, 15 bp, Homo sapiens
cattacttatattat

SEQ ID NO: 1320481 - DNA, 15 bp, Homo sapiens
acattacttatatta

SEQ ID NO: 1320482 - DNA, 15 bp, Homo sapiens
cacattacttatatt

SEQ ID NO: 1320483 - DNA, 15 bp, Homo sapiens
ccacattacttatat

SEQ ID NO: 1320484 - DNA, 15 bp, Homo sapiens
accacattacttata

SEQ ID NO: 1320485 - DNA, 15 bp, Homo sapiens
aaccacattacttat

SEQ ID NO: 1320486 - DNA, 15 bp, Homo sapiens
caaccacattactta

SEQ ID NO: 1320487 - DNA, 15 bp, Homo sapiens
ccaaccacattactt

SEQ ID NO: 1320488 - DNA, 15 bp, Homo sapiens
accaaccacattact

SEQ ID NO: 1320489 - DNA, 15 bp, Homo sapiens
caccaaccacattac

SEQ ID NO: 1320490 - DNA, 15 bp, Homo sapiens
gcaccaaccacatta

SEQ ID NO: 1320491 - DNA, 15 bp, Homo sapiens
agcaccaaccacatt

SEQ ID NO: 1320492 - DNA, 15 bp, Homo sapiens
tagcaccaaccacat

SEQ ID NO: 1320493 - DNA, 15 bp, Homo sapiens
atagcaccaaccaca

SEQ ID NO: 1320494 - DNA, 15 bp, Homo sapiens
catagcaccaaccac

SEQ ID NO: 1320495 - DNA, 15 bp, Homo sapiens
acatagcaccaacca

SEQ ID NO: 1320496 - DNA, 15 bp, Homo sapiens
gacatagcaccaacc

SEQ ID NO: 1320497 - DNA, 15 bp, Homo sapiens
agacatagcaccaac

SEQ ID NO: 1320498 - DNA, 15 bp, Homo sapiens
cagacatagcaccaa

SEQ ID NO: 1320499 - DNA, 15 bp, Homo sapiens
ccagacatagcacca

SEQ ID NO: 1320500 - DNA, 15 bp, Homo sapiens
gccagacatagcacc

SEQ ID NO: 1320501 - DNA, 15 bp, Homo sapiens
tgccagacatagcac

SEQ ID NO: 1320502 - DNA, 15 bp, Homo sapiens
atgccagacatagca

SEQ ID NO: 1320503 - DNA, 15 bp, Homo sapiens
aatgccagacatagc

SEQ ID NO: 1320504 - DNA, 15 bp, Homo sapiens
gaatgccagacatag

SEQ ID NO: 1320505 - DNA, 15 bp, Homo sapiens
tgaatgccagacata

SEQ ID NO: 1320506 - DNA, 15 bp, Homo sapiens
ttgaatgccagacat

SEQ ID NO: 1320507 - DNA, 15 bp, Homo sapiens
attgaatgccagaca

SEQ ID NO: 1320508 - DNA, 15 bp, Homo sapiens
tattgaatgccagac

SEQ ID NO: 1320509 - DNA, 15 bp, Homo sapiens
ttattgaatgccaga

SEQ ID NO: 1320510 - DNA, 15 bp, Homo sapiens
tttattgaatgccag

SEQ ID NO: 1320511 - DNA, 15 bp, Homo sapiens
atttattgaatgcca

SEQ ID NO: 1320512 - DNA, 15 bp, Homo sapiens
catttattgaatgcc

SEQ ID NO: 1320513 - DNA, 15 bp, Homo sapiens
acatttattgaatgc

SEQ ID NO: 1320514 - DNA, 15 bp, Homo sapiens
aacatttattgaatg

SEQ ID NO: 1320515 - DNA, 15 bp, Homo sapiens
taacatttattgaat

SEQ ID NO: 1320516 - DNA, 15 bp, Homo sapiens
ataacatttattgaa

SEQ ID NO: 1320517 - DNA, 15 bp, Homo sapiens
gataacatttattga

SEQ ID NO: 1320518 - DNA, 15 bp, Homo sapiens
agataacatttattg

SEQ ID NO: 1320519 - DNA, 15 bp, Homo sapiens
cagataacatttatt

SEQ ID NO: 1320520 - DNA, 15 bp, Homo sapiens
acagataacatttat

SEQ ID NO: 1320521 - DNA, 15 bp, Homo sapiens
aacagataacattta

SEQ ID NO: 1320522 - DNA, 15 bp, Homo sapiens
taacagataacattt

SEQ ID NO: 1320523 - DNA, 15 bp, Homo sapiens
ttaacagataacatt

SEQ ID NO: 1320524 - DNA, 15 bp, Homo sapiens
cttaacagataacat

SEQ ID NO: 1320525 - DNA, 15 bp, Homo sapiens
gcttaacagataaca

SEQ ID NO: 1320526 - DNA, 15 bp, Homo sapiens
agcttaacagataac

SEQ ID NO: 1320527 - DNA, 15 bp, Homo sapiens
gagcttaacagataa

SEQ ID NO: 1320528 - DNA, 15 bp, Homo sapiens
agagcttaacagata

SEQ ID NO: 1320529 - DNA, 15 bp, Homo sapiens
aagagcttaacagat

SEQ ID NO: 1320530 - DNA, 15 bp, Homo sapiens
aaagagcttaacaga

SEQ ID NO: 1320531 - DNA, 15 bp, Homo sapiens
caaagagcttaacag

SEQ ID NO: 1320532 - DNA, 15 bp, Homo sapiens
tcaaagagcttaaca

SEQ ID NO: 1320533 - DNA, 15 bp, Homo sapiens
ctcaaagagcttaac

SEQ ID NO: 1320534 - DNA, 15 bp, Homo sapiens
cctcaaagagcttaa

SEQ ID NO: 1320535 - DNA, 15 bp, Homo sapiens
ccctcaaagagctta

SEQ ID NO: 1320536 - DNA, 15 bp, Homo sapiens
accctcaaagagctt

SEQ ID NO: 1320537 - DNA, 15 bp, Homo sapiens
taccctcaaagagct

SEQ ID NO: 1320538 - DNA, 15 bp, Homo sapiens
ctaccctcaaagagc

SEQ ID NO: 1320539 - DNA, 15 bp, Homo sapiens
tctaccctcaaagag

SEQ ID NO: 1320540 - DNA, 15 bp, Homo sapiens
ttctaccctcaaaga

SEQ ID NO: 1320541 - DNA, 15 bp, Homo sapiens
attctaccctcaaag

SEQ ID NO: 1320542 - DNA, 15 bp, Homo sapiens
aattctaccctcaaa

SEQ ID NO: 1320543 - DNA, 15 bp, Homo sapiens
taattctaccctcaa

SEQ ID NO: 1320544 - DNA, 15 bp, Homo sapiens
ataattctaccctca

SEQ ID NO: 1320545 - DNA, 15 bp, Homo sapiens
aataattctaccctc

SEQ ID NO: 1320546 - DNA, 15 bp, Homo sapiens
caataattctaccct

SEQ ID NO: 1320547 - DNA, 15 bp, Homo sapiens
tcaataattctaccc

SEQ ID NO: 1320548 - DNA, 15 bp, Homo sapiens
atcaataattctacc

SEQ ID NO: 1320549 - DNA, 15 bp, Homo sapiens
aatcaataattctac

SEQ ID NO: 1320550 - DNA, 15 bp, Homo sapiens
caatcaataattcta

SEQ ID NO: 1320551 - DNA, 15 bp, Homo sapiens
gcaatcaataattct

SEQ ID NO: 1320552 - DNA, 15 bp, Homo sapiens
agcaatcaataattc

SEQ ID NO: 1320553 - DNA, 15 bp, Homo sapiens
aagcaatcaataatt

SEQ ID NO: 1320554 - DNA, 15 bp, Homo sapiens
taagcaatcaataat

SEQ ID NO: 1320555 - DNA, 15 bp, Homo sapiens
ataagcaatcaataa

SEQ ID NO: 1320556 - DNA, 15 bp, Homo sapiens
gataagcaatcaata

SEQ ID NO: 1320557 - DNA, 15 bp, Homo sapiens
tgataagcaatcaat

SEQ ID NO: 1320558 - DNA, 15 bp, Homo sapiens
atgataagcaatcaa

SEQ ID NO: 1320559 - DNA, 15 bp, Homo sapiens
catgataagcaatca

SEQ ID NO: 1320560 - DNA, 15 bp, Homo sapiens
acatgataagcaatc

SEQ ID NO: 1320561 - DNA, 15 bp, Homo sapiens
cacatgataagcaat

SEQ ID NO: 1320562 - DNA, 15 bp, Homo sapiens
gcacatgataagcaa

SEQ ID NO: 1320563 - DNA, 15 bp, Homo sapiens
ggcacatgataagca

SEQ ID NO: 1320564 - DNA, 15 bp, Homo sapiens
tggcacatgataagc

SEQ ID NO: 1320565 - DNA, 15 bp, Homo sapiens
atggcacatgataag

SEQ ID NO: 1320566 - DNA, 15 bp, Homo sapiens
catggcacatgataa

SEQ ID NO: 1320567 - DNA, 15 bp, Homo sapiens
acatggcacatgata

SEQ ID NO: 1320568 - DNA, 15 bp, Homo sapiens
tacatggcacatgat

SEQ ID NO: 1320569 - DNA, 15 bp, Homo sapiens
atacatggcacatga

SEQ ID NO: 1320570 - DNA, 15 bp, Homo sapiens
gatacatggcacatg

SEQ ID NO: 1320571 - DNA, 15 bp, Homo sapiens
tgatacatggcacat

SEQ ID NO: 1320572 - DNA, 15 bp, Homo sapiens
atgatacatggcaca

SEQ ID NO: 1320573 - DNA, 15 bp, Homo sapiens
tatgatacatggcac

SEQ ID NO: 1320574 - DNA, 15 bp, Homo sapiens
gtatgatacatggca

SEQ ID NO: 1320575 - DNA, 15 bp, Homo sapiens
ggtatgatacatggc

SEQ ID NO: 1320576 - DNA, 15 bp, Homo sapiens
tggtatgatacatgg

SEQ ID NO: 1320577 - DNA, 15 bp, Homo sapiens
ttggtatgatacatg

SEQ ID NO: 1320578 - DNA, 15 bp, Homo sapiens
tttggtatgatacat

SEQ ID NO: 1320579 - DNA, 15 bp, Homo sapiens
gtttggtatgataca

SEQ ID NO: 1320580 - DNA, 15 bp, Homo sapiens
agtttggtatgatac

SEQ ID NO: 1320581 - DNA, 15 bp, Homo sapiens
aagtttggtatgata

SEQ ID NO: 1320582 - DNA, 15 bp, Homo sapiens
aaagtttggtatgat

SEQ ID NO: 1320583 - DNA, 15 bp, Homo sapiens
aaaagtttggtatga

SEQ ID NO: 1320584 - DNA, 15 bp, Homo sapiens
aaaaagtttggtatg

SEQ ID NO: 1320585 - DNA, 15 bp, Homo sapiens
taaaaagtttggtat

SEQ ID NO: 1320586 - DNA, 15 bp, Homo sapiens
ataaaaagtttggta

SEQ ID NO: 1320587 - DNA, 15 bp, Homo sapiens
tataaaaagtttggt

SEQ ID NO: 1320588 - DNA, 15 bp, Homo sapiens
atataaaaagtttgg

SEQ ID NO: 1320589 - DNA, 15 bp, Homo sapiens
tatataaaaagtttg

SEQ ID NO: 1320590 - DNA, 15 bp, Homo sapiens
ctatataaaaagttt

SEQ ID NO: 1320591 - DNA, 15 bp, Homo sapiens
cctatataaaaagtt

SEQ ID NO: 1320592 - DNA, 15 bp, Homo sapiens
acctatataaaaagt

SEQ ID NO: 1320593 - DNA, 15 bp, Homo sapiens
aacctatataaaaag

SEQ ID NO: 1320594 - DNA, 15 bp, Homo sapiens
taacctatataaaaa

SEQ ID NO: 1320595 - DNA, 15 bp, Homo sapiens
ataacctatataaaa

SEQ ID NO: 1320596 - DNA, 15 bp, Homo sapiens
aataacctatataaa

SEQ ID NO: 1320597 - DNA, 15 bp, Homo sapiens
aaataacctatataa

SEQ ID NO: 1320598 - DNA, 15 bp, Homo sapiens
aaaataacctatata

SEQ ID NO: 1320599 - DNA, 15 bp, Homo sapiens
taaaataacctatat

SEQ ID NO: 1320600 - DNA, 15 bp, Homo sapiens
ataaaataacctata

SEQ ID NO: 1320601 - DNA, 15 bp, Homo sapiens
aataaaataacctat

SEQ ID NO: 1320602 - DNA, 15 bp, Homo sapiens
aaaataaaataacct

SEQ ID NO: 1320603 - DNA, 15 bp, Homo sapiens
gaaaataaaataacc

SEQ ID NO: 1320604 - DNA, 15 bp, Homo sapiens
tgaaaataaaataac

SEQ ID NO: 1320605 - DNA, 15 bp, Homo sapiens
gtgaaaataaaataa

SEQ ID NO: 1320606 - DNA, 15 bp, Homo sapiens
tgtgaaaataaaata

SEQ ID NO: 1320607 - DNA, 15 bp, Homo sapiens
ttgtgaaaataaaat

SEQ ID NO: 1320608 - DNA, 15 bp, Homo sapiens
gttgtgaaaataaaa

SEQ ID NO: 1320609 - DNA, 15 bp, Homo sapiens
tgttgtgaaaataaa

SEQ ID NO: 1320610 - DNA, 15 bp, Homo sapiens
ttgttgtgaaaataa

SEQ ID NO: 1320611 - DNA, 15 bp, Homo sapiens
gttgttgtgaaaata

SEQ ID NO: 1320612 - DNA, 15 bp, Homo sapiens
agttgttgtgaaaat

SEQ ID NO: 1320613 - DNA, 15 bp, Homo sapiens
gagttgttgtgaaaa

SEQ ID NO: 1320614 - DNA, 15 bp, Homo sapiens
agagttgttgtgaaa

SEQ ID NO: 1320615 - DNA, 15 bp, Homo sapiens
tagagttgttgtgaa

SEQ ID NO: 1320616 - DNA, 15 bp, Homo sapiens
atagagttgttgtga

SEQ ID NO: 1320617 - DNA, 15 bp, Homo sapiens
catagagttgttgtg

SEQ ID NO: 1320618 - DNA, 15 bp, Homo sapiens
acatagagttgttgt

SEQ ID NO: 1320619 - DNA, 15 bp, Homo sapiens
tacatagagttgttg

SEQ ID NO: 1320620 - DNA, 15 bp, Homo sapiens
ctacatagagttgtt

SEQ ID NO: 1320621 - DNA, 15 bp, Homo sapiens
actacatagagttgt

SEQ ID NO: 1320622 - DNA, 15 bp, Homo sapiens
cactacatagagttg

SEQ ID NO: 1320623 - DNA, 15 bp, Homo sapiens
ccactacatagagtt

SEQ ID NO: 1320624 - DNA, 15 bp, Homo sapiens
cccactacatagagt

SEQ ID NO: 1320625 - DNA, 15 bp, Homo sapiens
acccactacatagag

SEQ ID NO: 1320626 - DNA, 15 bp, Homo sapiens
tacccactacataga

SEQ ID NO: 1320627 - DNA, 15 bp, Homo sapiens
gtacccactacatag

SEQ ID NO: 1320628 - DNA, 15 bp, Homo sapiens
agtacccactacata

SEQ ID NO: 1320629 - DNA, 15 bp, Homo sapiens
tagtacccactacat

SEQ ID NO: 1320630 - DNA, 15 bp, Homo sapiens
gtagtacccactaca

SEQ ID NO: 1320631 - DNA, 15 bp, Homo sapiens
agtagtacccactac

SEQ ID NO: 1320632 - DNA, 15 bp, Homo sapiens
tagtagtacccacta

SEQ ID NO: 1320633 - DNA, 15 bp, Homo sapiens
atagtagtacccact

SEQ ID NO: 1320634 - DNA, 15 bp, Homo sapiens
catagtagtacccac

SEQ ID NO: 1320635 - DNA, 15 bp, Homo sapiens
tcatagtagtaccca

SEQ ID NO: 1320636 - DNA, 15 bp, Homo sapiens
ttcatagtagtaccc

SEQ ID NO: 1320637 - DNA, 15 bp, Homo sapiens
attcatagtagtacc

SEQ ID NO: 1320638 - DNA, 15 bp, Homo sapiens
cattcatagtagtac

SEQ ID NO: 1320639 - DNA, 15 bp, Homo sapiens
acattcatagtagta

SEQ ID NO: 1320640 - DNA, 15 bp, Homo sapiens
cacattcatagtagt

SEQ ID NO: 1320641 - DNA, 15 bp, Homo sapiens
gcacattcatagtag

SEQ ID NO: 1320642 - DNA, 15 bp, Homo sapiens
agcacattcatagta

SEQ ID NO: 1320643 - DNA, 15 bp, Homo sapiens
tagcacattcatagt

SEQ ID NO: 1320644 - DNA, 15 bp, Homo sapiens
atagcacattcatag

SEQ ID NO: 1320645 - DNA, 15 bp, Homo sapiens
aatagcacattcata

SEQ ID NO: 1320646 - DNA, 15 bp, Homo sapiens
aaatagcacattcat

SEQ ID NO: 1320647 - DNA, 15 bp, Homo sapiens
gaaatagcacattca

SEQ ID NO: 1320648 - DNA, 15 bp, Homo sapiens
agaaatagcacattc

SEQ ID NO: 1320649 - DNA, 15 bp, Homo sapiens
gagaaatagcacatt

SEQ ID NO: 1320650 - DNA, 15 bp, Homo sapiens
agagaaatagcacat

SEQ ID NO: 1320651 - DNA, 15 bp, Homo sapiens
aagagaaatagcaca

SEQ ID NO: 1320652 - DNA, 15 bp, Homo sapiens
taagagaaatagcac

SEQ ID NO: 1320653 - DNA, 15 bp, Homo sapiens
ctaagagaaatagca

SEQ ID NO: 1320654 - DNA, 15 bp, Homo sapiens
gctaagagaaatagc

SEQ ID NO: 1320655 - DNA, 15 bp, Homo sapiens
tgctaagagaaatag

SEQ ID NO: 1320656 - DNA, 15 bp, Homo sapiens
atgctaagagaaata

SEQ ID NO: 1320657 - DNA, 15 bp, Homo sapiens
gatgctaagagaaat

SEQ ID NO: 1320658 - DNA, 15 bp, Homo sapiens
agatgctaagagaaa

SEQ ID NO: 1320659 - DNA, 15 bp, Homo sapiens
gagatgctaagagaa

SEQ ID NO: 1320660 - DNA, 15 bp, Homo sapiens
agagatgctaagaga

SEQ ID NO: 1320661 - DNA, 15 bp, Homo sapiens
tagagatgctaagag

SEQ ID NO: 1320662 - DNA, 15 bp, Homo sapiens
ctagagatgctaaga

SEQ ID NO: 1320663 - DNA, 15 bp, Homo sapiens
tctagagatgctaag

SEQ ID NO: 1320664 - DNA, 15 bp, Homo sapiens
atctagagatgctaa

SEQ ID NO: 1320665 - DNA, 15 bp, Homo sapiens
catctagagatgcta

SEQ ID NO: 1320666 - DNA, 15 bp, Homo sapiens
tcatctagagatgct

SEQ ID NO: 1320667 - DNA, 15 bp, Homo sapiens
ttcatctagagatgc

SEQ ID NO: 1320668 - DNA, 15 bp, Homo sapiens
attcatctagagatg

SEQ ID NO: 1320669 - DNA, 15 bp, Homo sapiens
cattcatctagagat

SEQ ID NO: 1320670 - DNA, 15 bp, Homo sapiens
ccattcatctagaga

SEQ ID NO: 1320671 - DNA, 15 bp, Homo sapiens
tccattcatctagag

SEQ ID NO: 1320672 - DNA, 15 bp, Homo sapiens
atccattcatctaga

SEQ ID NO: 1320673 - DNA, 15 bp, Homo sapiens
gatccattcatctag

SEQ ID NO: 1320674 - DNA, 15 bp, Homo sapiens
tgatccattcatcta

SEQ ID NO: 1320675 - DNA, 15 bp, Homo sapiens
ctgatccattcatct

SEQ ID NO: 1320676 - DNA, 15 bp, Homo sapiens
actgatccattcatc

SEQ ID NO: 1320677 - DNA, 15 bp, Homo sapiens
cactgatccattcat

SEQ ID NO: 1320678 - DNA, 15 bp, Homo sapiens
tcactgatccattca

SEQ ID NO: 1320679 - DNA, 15 bp, Homo sapiens
ttcactgatccattc

SEQ ID NO: 1320680 - DNA, 15 bp, Homo sapiens
attcactgatccatt

SEQ ID NO: 1320681 - DNA, 15 bp, Homo sapiens
cattcactgatccat

SEQ ID NO: 1320682 - DNA, 15 bp, Homo sapiens
tcattcactgatcca

SEQ ID NO: 1320683 - DNA, 15 bp, Homo sapiens
ttcattcactgatcc

SEQ ID NO: 1320684 - DNA, 15 bp, Homo sapiens
attcattcactgatc

SEQ ID NO: 1320685 - DNA, 15 bp, Homo sapiens
cattcattcactgat

SEQ ID NO: 1320686 - DNA, 15 bp, Homo sapiens
tcattcattcactga

SEQ ID NO: 1320687 - DNA, 15 bp, Homo sapiens
atcattcattcactg

SEQ ID NO: 1320688 - DNA, 15 bp, Homo sapiens
tatcattcattcact

SEQ ID NO: 1320689 - DNA, 15 bp, Homo sapiens
ctatcattcattcac

SEQ ID NO: 1320690 - DNA, 15 bp, Homo sapiens
tctatcattcattca

SEQ ID NO: 1320691 - DNA, 15 bp, Homo sapiens
atctatcattcattc

SEQ ID NO: 1320692 - DNA, 15 bp, Homo sapiens
catctatcattcatt

SEQ ID NO: 1320693 - DNA, 15 bp, Homo sapiens
ccatctatcattcat

SEQ ID NO: 1320694 - DNA, 15 bp, Homo sapiens
tccatctatcattca

SEQ ID NO: 1320695 - DNA, 15 bp, Homo sapiens
ttccatctatcattc

SEQ ID NO: 1320696 - DNA, 15 bp, Homo sapiens
attccatctatcatt

SEQ ID NO: 1320697 - DNA, 15 bp, Homo sapiens
aattccatctatcat

SEQ ID NO: 1320698 - DNA, 15 bp, Homo sapiens
caattccatctatca

SEQ ID NO: 1320699 - DNA, 15 bp, Homo sapiens
acaattccatctatc

SEQ ID NO: 1320700 - DNA, 15 bp, Homo sapiens
cacaattccatctat

SEQ ID NO: 1320701 - DNA, 15 bp, Homo sapiens
ccacaattccatcta

SEQ ID NO: 1320702 - DNA, 15 bp, Homo sapiens
gccacaattccatct

SEQ ID NO: 1320703 - DNA, 15 bp, Homo sapiens
ggccacaattccatc

SEQ ID NO: 1320704 - DNA, 15 bp, Homo sapiens
tggccacaattccat

SEQ ID NO: 1320705 - DNA, 15 bp, Homo sapiens
ctggccacaattcca

SEQ ID NO: 1320706 - DNA, 15 bp, Homo sapiens
actggccacaattcc

SEQ ID NO: 1320707 - DNA, 15 bp, Homo sapiens
cactggccacaattc

SEQ ID NO: 1320708 - DNA, 15 bp, Homo sapiens
ccactggccacaatt

SEQ ID NO: 1320709 - DNA, 15 bp, Homo sapiens
tccactggccacaat

SEQ ID NO: 1320710 - DNA, 15 bp, Homo sapiens
ttccactggccacaa

SEQ ID NO: 1320711 - DNA, 15 bp, Homo sapiens
gttccactggccaca

SEQ ID NO: 1320712 - DNA, 15 bp, Homo sapiens
agttccactggccac

SEQ ID NO: 1320713 - DNA, 15 bp, Homo sapiens
tagttccactggcca

SEQ ID NO: 1320714 - DNA, 15 bp, Homo sapiens
ttagttccactggcc

SEQ ID NO: 1320715 - DNA, 15 bp, Homo sapiens
attagttccactggc

SEQ ID NO: 1320716 - DNA, 15 bp, Homo sapiens
aattagttccactgg

SEQ ID NO: 1320717 - DNA, 15 bp, Homo sapiens
caattagttccactg

SEQ ID NO: 1320718 - DNA, 15 bp, Homo sapiens
acaattagttccact

SEQ ID NO: 1320719 - DNA, 15 bp, Homo sapiens
tacaattagttccac

SEQ ID NO: 1320720 - DNA, 15 bp, Homo sapiens
ctacaattagttcca

SEQ ID NO: 1320721 - DNA, 15 bp, Homo sapiens
cctacaattagttcc

SEQ ID NO: 1320722 - DNA, 15 bp, Homo sapiens
ccctacaattagttc

SEQ ID NO: 1320723 - DNA, 15 bp, Homo sapiens
cccctacaattagtt

SEQ ID NO: 1320724 - DNA, 15 bp, Homo sapiens
acccctacaattagt

SEQ ID NO: 1320725 - DNA, 15 bp, Homo sapiens
tacccctacaattag

SEQ ID NO: 1320726 - DNA, 15 bp, Homo sapiens
ttacccctacaatta

SEQ ID NO: 1320727 - DNA, 15 bp, Homo sapiens
tttacccctacaatt

SEQ ID NO: 1320728 - DNA, 15 bp, Homo sapiens
gtttacccctacaat

SEQ ID NO: 1320729 - DNA, 15 bp, Homo sapiens
tgtttacccctacaa

SEQ ID NO: 1320730 - DNA, 15 bp, Homo sapiens
ctgtttacccctaca

SEQ ID NO: 1320731 - DNA, 15 bp, Homo sapiens
gctgtttacccctac

SEQ ID NO: 1320732 - DNA, 15 bp, Homo sapiens
tgctgtttaccccta

SEQ ID NO: 1320733 - DNA, 15 bp, Homo sapiens
ttgctgtttacccct

SEQ ID NO: 1320734 - DNA, 15 bp, Homo sapiens
gttgctgtttacccc

SEQ ID NO: 1320735 - DNA, 15 bp, Homo sapiens
ggttgctgtttaccc

SEQ ID NO: 1320736 - DNA, 15 bp, Homo sapiens
taggttgctgtttac

SEQ ID NO: 1320737 - DNA, 15 bp, Homo sapiens
ctaggttgctgttta

SEQ ID NO: 1320738 - DNA, 15 bp, Homo sapiens
tctaggttgctgttt

SEQ ID NO: 1320739 - DNA, 15 bp, Homo sapiens
ttctaggttgctgtt

SEQ ID NO: 1320740 - DNA, 15 bp, Homo sapiens
tttctaggttgctgt

SEQ ID NO: 1320741 - DNA, 15 bp, Homo sapiens
gtttctaggttgctg

SEQ ID NO: 1320742 - DNA, 15 bp, Homo sapiens
tgtttctaggttgct

SEQ ID NO: 1320743 - DNA, 15 bp, Homo sapiens
atgtttctaggttgc

SEQ ID NO: 1320744 - DNA, 15 bp, Homo sapiens
catgtttctaggttg

SEQ ID NO: 1320745 - DNA, 15 bp, Homo sapiens
ccatgtttctaggtt

SEQ ID NO: 1320746 - DNA, 15 bp, Homo sapiens
accatgtttctaggt

SEQ ID NO: 1320747 - DNA, 15 bp, Homo sapiens
aaccatgtttctagg

SEQ ID NO: 1320748 - DNA, 15 bp, Homo sapiens
taaccatgtttctag

SEQ ID NO: 1320749 - DNA, 15 bp, Homo sapiens
ttaaccatgtttcta

SEQ ID NO: 1320750 - DNA, 15 bp, Homo sapiens
tttaaccatgtttct

SEQ ID NO: 1320751 - DNA, 15 bp, Homo sapiens
ttttaaccatgtttc

SEQ ID NO: 1320752 - DNA, 15 bp, Homo sapiens
cttttaaccatgttt

SEQ ID NO: 1320753 - DNA, 15 bp, Homo sapiens
gcttttaaccatgtt

SEQ ID NO: 1320754 - DNA, 15 bp, Homo sapiens
tgcttttaaccatgt

SEQ ID NO: 1320755 - DNA, 15 bp, Homo sapiens
atgcttttaaccatg

SEQ ID NO: 1320756 - DNA, 15 bp, Homo sapiens
catgcttttaaccat

SEQ ID NO: 1320757 - DNA, 15 bp, Homo sapiens
tcatgcttttaacca

SEQ ID NO: 1320758 - DNA, 15 bp, Homo sapiens
gtcatgcttttaacc

SEQ ID NO: 1320759 - DNA, 15 bp, Homo sapiens
tgtcatgcttttaac

SEQ ID NO: 1320760 - DNA, 15 bp, Homo sapiens
ttgtcatgcttttaa

SEQ ID NO: 1320761 - DNA, 15 bp, Homo sapiens
attgtcatgctttta

SEQ ID NO: 1320762 - DNA, 15 bp, Homo sapiens
cattgtcatgctttt

SEQ ID NO: 1320763 - DNA, 15 bp, Homo sapiens
ccattgtcatgcttt

SEQ ID NO: 1320764 - DNA, 15 bp, Homo sapiens
cccattgtcatgctt

SEQ ID NO: 1320765 - DNA, 15 bp, Homo sapiens
gcccattgtcatgct

SEQ ID NO: 1320766 - DNA, 15 bp, Homo sapiens
tgcccattgtcatgc

SEQ ID NO: 1320767 - DNA, 15 bp, Homo sapiens
ttgcccattgtcatg

SEQ ID NO: 1320768 - DNA, 15 bp, Homo sapiens
tttgcccattgtcat

SEQ ID NO: 1320769 - DNA, 15 bp, Homo sapiens
ctttgcccattgtca

SEQ ID NO: 1320770 - DNA, 15 bp, Homo sapiens
tctttgcccattgtc

SEQ ID NO: 1320771 - DNA, 15 bp, Homo sapiens
ttctttgcccattgt

SEQ ID NO: 1320772 - DNA, 15 bp, Homo sapiens
tttctttgcccattg

SEQ ID NO: 1320773 - DNA, 15 bp, Homo sapiens
ctttctttgcccatt

SEQ ID NO: 1320774 - DNA, 15 bp, Homo sapiens
tctttctttgcccat

SEQ ID NO: 1320775 - DNA, 15 bp, Homo sapiens
ctctttctttgccca

SEQ ID NO: 1320776 - DNA, 15 bp, Homo sapiens
actctttctttgccc

SEQ ID NO: 1320777 - DNA, 15 bp, Homo sapiens
cactctttctttgcc

SEQ ID NO: 1320778 - DNA, 15 bp, Homo sapiens
tcactctttctttgc

SEQ ID NO: 1320779 - DNA, 15 bp, Homo sapiens
ttcactctttctttg

SEQ ID NO: 1320780 - DNA, 15 bp, Homo sapiens
tttcactctttcttt

SEQ ID NO: 1320781 - DNA, 15 bp, Homo sapiens
ctttcactctttctt

SEQ ID NO: 1320782 - DNA, 15 bp, Homo sapiens
tctttcactctttct

SEQ ID NO: 1320783 - DNA, 15 bp, Homo sapiens
ctctttcactctttc

SEQ ID NO: 1320784 - DNA, 15 bp, Homo sapiens
cctctttcactcttt

SEQ ID NO: 1320785 - DNA, 15 bp, Homo sapiens
gcctctttcactctt

SEQ ID NO: 1320786 - DNA, 15 bp, Homo sapiens
tgcctctttcactct

SEQ ID NO: 1320787 - DNA, 15 bp, Homo sapiens
ctgcctctttcactc

SEQ ID NO: 1320788 - DNA, 15 bp, Homo sapiens
actgcctctttcact

SEQ ID NO: 1320789 - DNA, 15 bp, Homo sapiens
tactgcctctttcac

SEQ ID NO: 1320790 - DNA, 15 bp, Homo sapiens
ttactgcctctttca

SEQ ID NO: 1320791 - DNA, 15 bp, Homo sapiens
cttactgcctctttc

SEQ ID NO: 1320792 - DNA, 15 bp, Homo sapiens
gcttactgcctcttt

SEQ ID NO: 1320793 - DNA, 15 bp, Homo sapiens
tgcttactgcctctt

SEQ ID NO: 1320794 - DNA, 15 bp, Homo sapiens
ttgcttactgcctct

SEQ ID NO: 1320795 - DNA, 15 bp, Homo sapiens
tttgcttactgcctc

SEQ ID NO: 1320796 - DNA, 15 bp, Homo sapiens
ctttgcttactgcct

SEQ ID NO: 1320797 - DNA, 15 bp, Homo sapiens
cctttgcttactgcc

SEQ ID NO: 1320798 - DNA, 15 bp, Homo sapiens
tcctttgcttactgc

SEQ ID NO: 1320799 - DNA, 15 bp, Homo sapiens
ttcctttgcttactg

SEQ ID NO: 1320800 - DNA, 15 bp, Homo sapiens
gttcctttgcttact

SEQ ID NO: 1320801 - DNA, 15 bp, Homo sapiens
cgttcctttgcttac

SEQ ID NO: 1320802 - DNA, 15 bp, Homo sapiens
acgttcctttgctta

SEQ ID NO: 1320803 - DNA, 15 bp, Homo sapiens
cacgttcctttgctt

SEQ ID NO: 1320804 - DNA, 15 bp, Homo sapiens
tcacgttcctttgct

SEQ ID NO: 1320805 - DNA, 15 bp, Homo sapiens
gtcacgttcctttgc

SEQ ID NO: 1320806 - DNA, 15 bp, Homo sapiens
agtcacgttcctttg

SEQ ID NO: 1320807 - DNA, 15 bp, Homo sapiens
gagtcacgttccttt

SEQ ID NO: 1320808 - DNA, 15 bp, Homo sapiens
ggagtcacgttcctt

SEQ ID NO: 1320809 - DNA, 15 bp, Homo sapiens
gggagtcacgttcct

SEQ ID NO: 1320810 - DNA, 15 bp, Homo sapiens
tgggagtcacgttcc

SEQ ID NO: 1320811 - DNA, 15 bp, Homo sapiens
atgggagtcacgttc

SEQ ID NO: 1320812 - DNA, 15 bp, Homo sapiens
tatgggagtcacgtt

SEQ ID NO: 1320813 - DNA, 15 bp, Homo sapiens
gtatgggagtcacgt

SEQ ID NO: 1320814 - DNA, 15 bp, Homo sapiens
agtatgggagtcacg

SEQ ID NO: 1320815 - DNA, 15 bp, Homo sapiens
tagtatgggagtcac

SEQ ID NO: 1320816 - DNA, 15 bp, Homo sapiens
ctagtatgggagtca

SEQ ID NO: 1320817 - DNA, 15 bp, Homo sapiens
actagtatgggagtc

SEQ ID NO: 1320818 - DNA, 15 bp, Homo sapiens
tactagtatgggagt

SEQ ID NO: 1320819 - DNA, 15 bp, Homo sapiens
atactagtatgggag

SEQ ID NO: 1320820 - DNA, 15 bp, Homo sapiens
tatactagtatggga

SEQ ID NO: 1320821 - DNA, 15 bp, Homo sapiens
ctatactagtatggg

SEQ ID NO: 1320822 - DNA, 15 bp, Homo sapiens
gctatactagtatgg

SEQ ID NO: 1320823 - DNA, 15 bp, Homo sapiens
tgctatactagtatg

SEQ ID NO: 1320824 - DNA, 15 bp, Homo sapiens
ctgctatactagtat

SEQ ID NO: 1320825 - DNA, 15 bp, Homo sapiens
gctgctatactagta

SEQ ID NO: 1320826 - DNA, 15 bp, Homo sapiens
agctgctatactagt

SEQ ID NO: 1320827 - DNA, 15 bp, Homo sapiens
tagctgctatactag

SEQ ID NO: 1320828 - DNA, 15 bp, Homo sapiens
ttagctgctatacta

SEQ ID NO: 1320829 - DNA, 15 bp, Homo sapiens
gttagctgctatact

SEQ ID NO: 1320830 - DNA, 15 bp, Homo sapiens
cgttagctgctatac

SEQ ID NO: 1320831 - DNA, 15 bp, Homo sapiens
ccgttagctgctata

SEQ ID NO: 1320832 - DNA, 15 bp, Homo sapiens
gccgttagctgctat

SEQ ID NO: 1320833 - DNA, 15 bp, Homo sapiens
tgccgttagctgcta

SEQ ID NO: 1320834 - DNA, 15 bp, Homo sapiens
gtgccgttagctgct

SEQ ID NO: 1320835 - DNA, 15 bp, Homo sapiens
tgtgccgttagctgc

SEQ ID NO: 1320836 - DNA, 15 bp, Homo sapiens
ttgtgccgttagctg

SEQ ID NO: 1320837 - DNA, 15 bp, Homo sapiens
cttgtgccgttagct

SEQ ID NO: 1320838 - DNA, 15 bp, Homo sapiens
acttgtgccgttagc

SEQ ID NO: 1320839 - DNA, 15 bp, Homo sapiens
aacttgtgccgttag

SEQ ID NO: 1320840 - DNA, 15 bp, Homo sapiens
aaacttgtgccgtta

SEQ ID NO: 1320841 - DNA, 15 bp, Homo sapiens
aaaacttgtgccgtt

SEQ ID NO: 1320842 - DNA, 15 bp, Homo sapiens
taaaacttgtgccgt

SEQ ID NO: 1320843 - DNA, 15 bp, Homo sapiens
ctaaaacttgtgccg

SEQ ID NO: 1320844 - DNA, 15 bp, Homo sapiens
tctaaaacttgtgcc

SEQ ID NO: 1320845 - DNA, 15 bp, Homo sapiens
ttctaaaacttgtgc

SEQ ID NO: 1320846 - DNA, 15 bp, Homo sapiens
tttctaaaacttgtg

SEQ ID NO: 1320847 - DNA, 15 bp, Homo sapiens
gtttctaaaacttgt

SEQ ID NO: 1320848 - DNA, 15 bp, Homo sapiens
tgtttctaaaacttg

SEQ ID NO: 1320849 - DNA, 15 bp, Homo sapiens
ctgtttctaaaactt

SEQ ID NO: 1320850 - DNA, 15 bp, Homo sapiens
cctgtttctaaaact

SEQ ID NO: 1320851 - DNA, 15 bp, Homo sapiens
acctgtttctaaaac

SEQ ID NO: 1320852 - DNA, 15 bp, Homo sapiens
tacctgtttctaaaa

SEQ ID NO: 1320853 - DNA, 15 bp, Homo sapiens
ctacctgtttctaaa

SEQ ID NO: 1320854 - DNA, 15 bp, Homo sapiens
tctacctgtttctaa

SEQ ID NO: 1320855 - DNA, 15 bp, Homo sapiens
gtctacctgtttcta

SEQ ID NO: 1320856 - DNA, 15 bp, Homo sapiens
agtctacctgtttct

SEQ ID NO: 1320857 - DNA, 15 bp, Homo sapiens
aagtctacctgtttc

SEQ ID NO: 1320858 - DNA, 15 bp, Homo sapiens
caagtctacctgttt

SEQ ID NO: 1320859 - DNA, 15 bp, Homo sapiens
ccaagtctacctgtt

SEQ ID NO: 1320860 - DNA, 15 bp, Homo sapiens
cccaagtctacctgt

SEQ ID NO: 1320861 - DNA, 15 bp, Homo sapiens
acccaagtctacctg

SEQ ID NO: 1320862 - DNA, 15 bp, Homo sapiens
aacccaagtctacct

SEQ ID NO: 1320863 - DNA, 15 bp, Homo sapiens
aaacccaagtctacc

SEQ ID NO: 1320864 - DNA, 15 bp, Homo sapiens
caaacccaagtctac

SEQ ID NO: 1320865 - DNA, 15 bp, Homo sapiens
tcaaacccaagtcta

SEQ ID NO: 1320866 - DNA, 15 bp, Homo sapiens
ttcaaacccaagtct

SEQ ID NO: 1320867 - DNA, 15 bp, Homo sapiens
attcaaacccaagtc

SEQ ID NO: 1320868 - DNA, 15 bp, Homo sapiens
gattcaaacccaagt

SEQ ID NO: 1320869 - DNA, 15 bp, Homo sapiens
gtgattcaaacccaa

SEQ ID NO: 1320870 - DNA, 15 bp, Homo sapiens
agtgattcaaaccca

SEQ ID NO: 1320871 - DNA, 15 bp, Homo sapiens
cagtgattcaaaccc

SEQ ID NO: 1320872 - DNA, 15 bp, Homo sapiens
gcagtgattcaaacc

SEQ ID NO: 1320873 - DNA, 15 bp, Homo sapiens
agcagtgattcaaac

SEQ ID NO: 1320874 - DNA, 15 bp, Homo sapiens
gagcagtgattcaaa

SEQ ID NO: 1320875 - DNA, 15 bp, Homo sapiens
ggagcagtgattcaa

SEQ ID NO: 1320876 - DNA, 15 bp, Homo sapiens
tggagcagtgattca

SEQ ID NO: 1320877 - DNA, 15 bp, Homo sapiens
atggagcagtgattc

SEQ ID NO: 1320878 - DNA, 15 bp, Homo sapiens
gatggagcagtgatt

SEQ ID NO: 1320879 - DNA, 15 bp, Homo sapiens
tgatggagcagtgat

SEQ ID NO: 1320880 - DNA, 15 bp, Homo sapiens
gtgatggagcagtga

SEQ ID NO: 1320881 - DNA, 15 bp, Homo sapiens
agtgatggagcagtg

SEQ ID NO: 1320882 - DNA, 15 bp, Homo sapiens
aagtgatggagcagt

SEQ ID NO: 1320883 - DNA, 15 bp, Homo sapiens
taagtgatggagcag

SEQ ID NO: 1320884 - DNA, 15 bp, Homo sapiens
ataagtgatggagca

SEQ ID NO: 1320885 - DNA, 15 bp, Homo sapiens
gataagtgatggagc

SEQ ID NO: 1320886 - DNA, 15 bp, Homo sapiens
tgataagtgatggag

SEQ ID NO: 1320887 - DNA, 15 bp, Homo sapiens
ctgataagtgatgga

SEQ ID NO: 1320888 - DNA, 15 bp, Homo sapiens
gctgataagtgatgg

SEQ ID NO: 1320889 - DNA, 15 bp, Homo sapiens
ggctgataagtgatg

SEQ ID NO: 1320890 - DNA, 15 bp, Homo sapiens
tggctgataagtgat

SEQ ID NO: 1320891 - DNA, 15 bp, Homo sapiens
atggctgataagtga

SEQ ID NO: 1320892 - DNA, 15 bp, Homo sapiens
tatggctgataagtg

SEQ ID NO: 1320893 - DNA, 15 bp, Homo sapiens
atatggctgataagt

SEQ ID NO: 1320894 - DNA, 15 bp, Homo sapiens
tatatggctgataag

SEQ ID NO: 1320895 - DNA, 15 bp, Homo sapiens
ttatatggctgataa

SEQ ID NO: 1320896 - DNA, 15 bp, Homo sapiens
attatatggctgata

SEQ ID NO: 1320897 - DNA, 15 bp, Homo sapiens
tattatatggctgat

SEQ ID NO: 1320898 - DNA, 15 bp, Homo sapiens
atattatatggctga

SEQ ID NO: 1320899 - DNA, 15 bp, Homo sapiens
catattatatggctg

SEQ ID NO: 1320900 - DNA, 15 bp, Homo sapiens
ccatattatatggct

SEQ ID NO: 1320901 - DNA, 15 bp, Homo sapiens
cccatattatatggc

SEQ ID NO: 1320902 - DNA, 15 bp, Homo sapiens
ccccatattatatgg

SEQ ID NO: 1320903 - DNA, 15 bp, Homo sapiens
gccccatattatatg

SEQ ID NO: 1320904 - DNA, 15 bp, Homo sapiens
tgccccatattatat

SEQ ID NO: 1320905 - DNA, 15 bp, Homo sapiens
ttgccccatattata

SEQ ID NO: 1320906 - DNA, 15 bp, Homo sapiens
tttgccccatattat

SEQ ID NO: 1320907 - DNA, 15 bp, Homo sapiens
ttttgccccatatta

SEQ ID NO: 1320908 - DNA, 15 bp, Homo sapiens
attttgccccatatt

SEQ ID NO: 1320909 - DNA, 15 bp, Homo sapiens
aattttgccccatat

SEQ ID NO: 1320910 - DNA, 15 bp, Homo sapiens
aaattttgccccata

SEQ ID NO: 1320911 - DNA, 15 bp, Homo sapiens
taaattttgccccat

SEQ ID NO: 1320912 - DNA, 15 bp, Homo sapiens
ataaattttgcccca

SEQ ID NO: 1320913 - DNA, 15 bp, Homo sapiens
tataaattttgcccc

SEQ ID NO: 1320914 - DNA, 15 bp, Homo sapiens
ttataaattttgccc

SEQ ID NO: 1320915 - DNA, 15 bp, Homo sapiens
attataaattttgcc

SEQ ID NO: 1320916 - DNA, 15 bp, Homo sapiens
aattataaattttgc

SEQ ID NO: 1320917 - DNA, 15 bp, Homo sapiens
aaattataaattttg

SEQ ID NO: 1320918 - DNA, 15 bp, Homo sapiens
gaaattataaatttt

SEQ ID NO: 1320919 - DNA, 15 bp, Homo sapiens
agaaattataaattt

SEQ ID NO: 1320920 - DNA, 15 bp, Homo sapiens
tagaaattataaatt

SEQ ID NO: 1320921 - DNA, 15 bp, Homo sapiens
atagaaattataaat

SEQ ID NO: 1320922 - DNA, 15 bp, Homo sapiens
tatagaaattataaa

SEQ ID NO: 1320923 - DNA, 15 bp, Homo sapiens
ttatagaaattataa

SEQ ID NO: 1320924 - DNA, 15 bp, Homo sapiens
tttatagaaattata

SEQ ID NO: 1320925 - DNA, 15 bp, Homo sapiens
ttttatagaaattat

SEQ ID NO: 1320926 - DNA, 15 bp, Homo sapiens
attttatagaaatta

SEQ ID NO: 1320927 - DNA, 15 bp, Homo sapiens
tattttatagaaatt

SEQ ID NO: 1320928 - DNA, 15 bp, Homo sapiens
gtattttatagaaat

SEQ ID NO: 1320929 - DNA, 15 bp, Homo sapiens
tgtattttatagaaa

SEQ ID NO: 1320930 - DNA, 15 bp, Homo sapiens
gtgtattttatagaa

SEQ ID NO: 1320931 - DNA, 15 bp, Homo sapiens
tgtgtattttataga

SEQ ID NO: 1320932 - DNA, 15 bp, Homo sapiens
atgtgtattttatag

SEQ ID NO: 1320933 - DNA, 15 bp, Homo sapiens
tatgtgtattttata

SEQ ID NO: 1320934 - DNA, 15 bp, Homo sapiens
atatgtgtattttat

SEQ ID NO: 1320935 - DNA, 15 bp, Homo sapiens
gatatgtgtatttta

SEQ ID NO: 1320936 - DNA, 15 bp, Homo sapiens
agatatgtgtatttt

SEQ ID NO: 1320937 - DNA, 15 bp, Homo sapiens
tagatatgtgtattt

SEQ ID NO: 1320938 - DNA, 15 bp, Homo sapiens
gtagatatgtgtatt

SEQ ID NO: 1320939 - DNA, 15 bp, Homo sapiens
agtagatatgtgtat

SEQ ID NO: 1320940 - DNA, 15 bp, Homo sapiens
aagtagatatgtgta

SEQ ID NO: 1320941 - DNA, 15 bp, Homo sapiens
aaagtagatatgtgt

SEQ ID NO: 1320942 - DNA, 15 bp, Homo sapiens
taaagtagatatgtg

SEQ ID NO: 1320943 - DNA, 15 bp, Homo sapiens
ataaagtagatatgt

SEQ ID NO: 1320944 - DNA, 15 bp, Homo sapiens
cataaagtagatatg

SEQ ID NO: 1320945 - DNA, 15 bp, Homo sapiens
ccataaagtagatat

SEQ ID NO: 1320946 - DNA, 15 bp, Homo sapiens
tccataaagtagata

SEQ ID NO: 1320947 - DNA, 15 bp, Homo sapiens
gtccataaagtagat

SEQ ID NO: 1320948 - DNA, 15 bp, Homo sapiens
cgtccataaagtaga

SEQ ID NO: 1320949 - DNA, 15 bp, Homo sapiens
acgtccataaagtag

SEQ ID NO: 1320950 - DNA, 15 bp, Homo sapiens
tacgtccataaagta

SEQ ID NO: 1320951 - DNA, 15 bp, Homo sapiens
atacgtccataaagt

SEQ ID NO: 1320952 - DNA, 15 bp, Homo sapiens
aatacgtccataaag

SEQ ID NO: 1320953 - DNA, 15 bp, Homo sapiens
aaatacgtccataaa

SEQ ID NO: 1320954 - DNA, 15 bp, Homo sapiens
aaaatacgtccataa

SEQ ID NO: 1320955 - DNA, 15 bp, Homo sapiens
caaaatacgtccata

SEQ ID NO: 1320956 - DNA, 15 bp, Homo sapiens
tcaaaatacgtccat

SEQ ID NO: 1320957 - DNA, 15 bp, Homo sapiens
ttcaaaatacgtcca

SEQ ID NO: 1320958 - DNA, 15 bp, Homo sapiens
cttcaaaatacgtcc

SEQ ID NO: 1320959 - DNA, 15 bp, Homo sapiens
tcttcaaaatacgtc

SEQ ID NO: 1320960 - DNA, 15 bp, Homo sapiens
atcttcaaaatacgt

SEQ ID NO: 1320961 - DNA, 15 bp, Homo sapiens
aatcttcaaaatacg

SEQ ID NO: 1320962 - DNA, 15 bp, Homo sapiens
taatcttcaaaatac

SEQ ID NO: 1320963 - DNA, 15 bp, Homo sapiens
ttaatcttcaaaata

SEQ ID NO: 1320964 - DNA, 15 bp, Homo sapiens
tttaatcttcaaaat

SEQ ID NO: 1320965 - DNA, 15 bp, Homo sapiens
atttaatcttcaaaa

SEQ ID NO: 1320966 - DNA, 15 bp, Homo sapiens
catttaatcttcaaa

SEQ ID NO: 1320967 - DNA, 15 bp, Homo sapiens
tcatttaatcttcaa

SEQ ID NO: 1320968 - DNA, 15 bp, Homo sapiens
ctcatttaatcttca

SEQ ID NO: 1320969 - DNA, 15 bp, Homo sapiens
tatctcatttaatct

SEQ ID NO: 1320970 - DNA, 15 bp, Homo sapiens
ttatctcatttaatc

SEQ ID NO: 1320971 - DNA, 15 bp, Homo sapiens
attatctcatttaat

SEQ ID NO: 1320972 - DNA, 15 bp, Homo sapiens
tattatctcatttaa

SEQ ID NO: 1320973 - DNA, 15 bp, Homo sapiens
atattatctcattta

SEQ ID NO: 1320974 - DNA, 15 bp, Homo sapiens
tatattatctcattt

SEQ ID NO: 1320975 - DNA, 15 bp, Homo sapiens
atatattatctcatt

SEQ ID NO: 1320976 - DNA, 15 bp, Homo sapiens
catatattatctcat

SEQ ID NO: 1320977 - DNA, 15 bp, Homo sapiens
acatatattatctca

SEQ ID NO: 1320978 - DNA, 15 bp, Homo sapiens
tacatatattatctc

SEQ ID NO: 1320979 - DNA, 15 bp, Homo sapiens
ttacatatattatct

SEQ ID NO: 1320980 - DNA, 15 bp, Homo sapiens
tttacatatattatc

SEQ ID NO: 1320981 - DNA, 15 bp, Homo sapiens
ttttacatatattat

SEQ ID NO: 1320982 - DNA, 15 bp, Homo sapiens
attttacatatatta

SEQ ID NO: 1320983 - DNA, 15 bp, Homo sapiens
tattttacatatatt

SEQ ID NO: 1320984 - DNA, 15 bp, Homo sapiens
atattttacatatat

SEQ ID NO: 1320985 - DNA, 15 bp, Homo sapiens
aatattttacatata

SEQ ID NO: 1320986 - DNA, 15 bp, Homo sapiens
aaatattttacatat

SEQ ID NO: 1320987 - DNA, 15 bp, Homo sapiens
taaatattttacata

SEQ ID NO: 1320988 - DNA, 15 bp, Homo sapiens
ctaaatattttacat

SEQ ID NO: 1320989 - DNA, 15 bp, Homo sapiens
gctaaatattttaca

SEQ ID NO: 1320990 - DNA, 15 bp, Homo sapiens
tgctaaatattttac

SEQ ID NO: 1320991 - DNA, 15 bp, Homo sapiens
atgctaaatatttta

SEQ ID NO: 1320992 - DNA, 15 bp, Homo sapiens
tatgctaaatatttt

SEQ ID NO: 1320993 - DNA, 15 bp, Homo sapiens
ctatgctaaatattt

SEQ ID NO: 1320994 - DNA, 15 bp, Homo sapiens
tctatgctaaatatt

SEQ ID NO: 1320995 - DNA, 15 bp, Homo sapiens
ttctatgctaaatat

SEQ ID NO: 1320996 - DNA, 15 bp, Homo sapiens
gttctatgctaaata

SEQ ID NO: 1320997 - DNA, 15 bp, Homo sapiens
ggttctatgctaaat

SEQ ID NO: 1320998 - DNA, 15 bp, Homo sapiens
aggttctatgctaaa

SEQ ID NO: 1320999 - DNA, 15 bp, Homo sapiens
taggttctatgctaa

SEQ ID NO: 1321000 - DNA, 15 bp, Homo sapiens
ctaggttctatgcta

SEQ ID NO: 1321001 - DNA, 15 bp, Homo sapiens
gctaggttctatgct

SEQ ID NO: 1321002 - DNA, 15 bp, Homo sapiens
tgctaggttctatgc

SEQ ID NO: 1321003 - DNA, 15 bp, Homo sapiens
atgctaggttctatg

SEQ ID NO: 1321004 - DNA, 15 bp, Homo sapiens
tatgctaggttctat

SEQ ID NO: 1321005 - DNA, 15 bp, Homo sapiens
atatgctaggttcta

SEQ ID NO: 1321006 - DNA, 15 bp, Homo sapiens
tatatgctaggttct

SEQ ID NO: 1321007 - DNA, 15 bp, Homo sapiens
ctatatgctaggttc

SEQ ID NO: 1321008 - DNA, 15 bp, Homo sapiens
actatatgctaggtt

SEQ ID NO: 1321009 - DNA, 15 bp, Homo sapiens
tactatatgctaggt

SEQ ID NO: 1321010 - DNA, 15 bp, Homo sapiens
ctactatatgctagg

SEQ ID NO: 1321011 - DNA, 15 bp, Homo sapiens
tctactatatgctag

SEQ ID NO: 1321012 - DNA, 15 bp, Homo sapiens
atctactatatgcta

SEQ ID NO: 1321013 - DNA, 15 bp, Homo sapiens
tatctactatatgct

SEQ ID NO: 1321014 - DNA, 15 bp, Homo sapiens
atatctactatatgc

SEQ ID NO: 1321015 - DNA, 15 bp, Homo sapiens
aatatctactatatg

SEQ ID NO: 1321016 - DNA, 15 bp, Homo sapiens
gaatatctactatat

SEQ ID NO: 1321017 - DNA, 15 bp, Homo sapiens
tgaatatctactata

SEQ ID NO: 1321018 - DNA, 15 bp, Homo sapiens
ttgaatatctactat

SEQ ID NO: 1321019 - DNA, 15 bp, Homo sapiens
attgaatatctacta

SEQ ID NO: 1321020 - DNA, 15 bp, Homo sapiens
tattgaatatctact

SEQ ID NO: 1321021 - DNA, 15 bp, Homo sapiens
ttattgaatatctac

SEQ ID NO: 1321022 - DNA, 15 bp, Homo sapiens
tttattgaatatcta

SEQ ID NO: 1321023 - DNA, 15 bp, Homo sapiens
atttattgaatatct

SEQ ID NO: 1321024 - DNA, 15 bp, Homo sapiens
tatttattgaatatc

SEQ ID NO: 1321025 - DNA, 15 bp, Homo sapiens
atatttattgaatat

SEQ ID NO: 1321026 - DNA, 15 bp, Homo sapiens
taatatttattgaat

SEQ ID NO: 1321027 - DNA, 15 bp, Homo sapiens
ttaatatttattgaa

SEQ ID NO: 1321028 - DNA, 15 bp, Homo sapiens
gttaatatttattga

SEQ ID NO: 1321029 - DNA, 15 bp, Homo sapiens
agttaatatttattg

SEQ ID NO: 1321030 - DNA, 15 bp, Homo sapiens
tagttaatatttatt

SEQ ID NO: 1321031 - DNA, 15 bp, Homo sapiens
ctagttaatatttat

SEQ ID NO: 1321032 - DNA, 15 bp, Homo sapiens
actagttaatattta

SEQ ID NO: 1321033 - DNA, 15 bp, Homo sapiens
tactagttaatattt

SEQ ID NO: 1321034 - DNA, 15 bp, Homo sapiens
gtactagttaatatt

SEQ ID NO: 1321035 - DNA, 15 bp, Homo sapiens
agtactagttaatat

SEQ ID NO: 1321036 - DNA, 15 bp, Homo sapiens
tagtactagttaata

SEQ ID NO: 1321037 - DNA, 15 bp, Homo sapiens
atagtactagttaat

SEQ ID NO: 1321038 - DNA, 15 bp, Homo sapiens
aatagtactagttaa

SEQ ID NO: 1321039 - DNA, 15 bp, Homo sapiens
taatagtactagtta

SEQ ID NO: 1321040 - DNA, 15 bp, Homo sapiens
ataatagtactagtt

SEQ ID NO: 1321041 - DNA, 15 bp, Homo sapiens
aataatagtactagt

SEQ ID NO: 1321042 - DNA, 15 bp, Homo sapiens
taataatagtactag

SEQ ID NO: 1321043 - DNA, 15 bp, Homo sapiens
ttaataatagtacta

SEQ ID NO: 1321044 - DNA, 15 bp, Homo sapiens
tttaataatagtact

SEQ ID NO: 1321045 - DNA, 15 bp, Homo sapiens
atttaataatagtac

SEQ ID NO: 1321046 - DNA, 15 bp, Homo sapiens
aatttaataatagta

SEQ ID NO: 1321047 - DNA, 15 bp, Homo sapiens
taatttaataatagt

SEQ ID NO: 1321048 - DNA, 15 bp, Homo sapiens
ttaatttaataatag

SEQ ID NO: 1321049 - DNA, 15 bp, Homo sapiens
cttaatttaataata

SEQ ID NO: 1321050 - DNA, 15 bp, Homo sapiens
tcttaatttaataat

SEQ ID NO: 1321051 - DNA, 15 bp, Homo sapiens
atcttaatttaataa

SEQ ID NO: 1321052 - DNA, 15 bp, Homo sapiens
tatcttaatttaata

SEQ ID NO: 1321053 - DNA, 15 bp, Homo sapiens
ttatcttaatttaat

SEQ ID NO: 1321054 - DNA, 15 bp, Homo sapiens
attatcttaatttaa

SEQ ID NO: 1321055 - DNA, 15 bp, Homo sapiens
gattatcttaattta

SEQ ID NO: 1321056 - DNA, 15 bp, Homo sapiens
tgattatcttaattt

SEQ ID NO: 1321057 - DNA, 15 bp, Homo sapiens
atgattatcttaatt

SEQ ID NO: 1321058 - DNA, 15 bp, Homo sapiens
catgattatcttaat

SEQ ID NO: 1321059 - DNA, 15 bp, Homo sapiens
tcatgattatcttaa

SEQ ID NO: 1321060 - DNA, 15 bp, Homo sapiens
ttcatgattatctta

SEQ ID NO: 1321061 - DNA, 15 bp, Homo sapiens
cttcatgattatctt

SEQ ID NO: 1321062 - DNA, 15 bp, Homo sapiens
tcttcatgattatct

SEQ ID NO: 1321063 - DNA, 15 bp, Homo sapiens
gtcttcatgattatc

SEQ ID NO: 1321064 - DNA, 15 bp, Homo sapiens
tgtcttcatgattat

SEQ ID NO: 1321065 - DNA, 15 bp, Homo sapiens
ctgtcttcatgatta

SEQ ID NO: 1321066 - DNA, 15 bp, Homo sapiens
tctgtcttcatgatt

SEQ ID NO: 1321067 - DNA, 15 bp, Homo sapiens
ttctgtcttcatgat

SEQ ID NO: 1321068 - DNA, 15 bp, Homo sapiens
attctgtcttcatga

SEQ ID NO: 1321069 - DNA, 15 bp, Homo sapiens
aattctgtcttcatg

SEQ ID NO: 1321070 - DNA, 15 bp, Homo sapiens
aaattctgtcttcat

SEQ ID NO: 1321071 - DNA, 15 bp, Homo sapiens
aaaattctgtcttca

SEQ ID NO: 1321072 - DNA, 15 bp, Homo sapiens
caaaattctgtcttc

SEQ ID NO: 1321073 - DNA, 15 bp, Homo sapiens
ccaaaattctgtctt

SEQ ID NO: 1321074 - DNA, 15 bp, Homo sapiens
accaaaattctgtct

SEQ ID NO: 1321075 - DNA, 15 bp, Homo sapiens
taccaaaattctgtc

SEQ ID NO: 1321076 - DNA, 15 bp, Homo sapiens
ctaccaaaattctgt

SEQ ID NO: 1321077 - DNA, 15 bp, Homo sapiens
actaccaaaattctg

SEQ ID NO: 1321078 - DNA, 15 bp, Homo sapiens
cactaccaaaattct

SEQ ID NO: 1321079 - DNA, 15 bp, Homo sapiens
tcactaccaaaattc

SEQ ID NO: 1321080 - DNA, 15 bp, Homo sapiens
ctcactaccaaaatt

SEQ ID NO: 1321081 - DNA, 15 bp, Homo sapiens
cctcactaccaaaat

SEQ ID NO: 1321082 - DNA, 15 bp, Homo sapiens
acctcactaccaaaa

SEQ ID NO: 1321083 - DNA, 15 bp, Homo sapiens
tacctcactaccaaa

SEQ ID NO: 1321084 - DNA, 15 bp, Homo sapiens
ctacctcactaccaa

SEQ ID NO: 1321085 - DNA, 15 bp, Homo sapiens
actacctcactacca

SEQ ID NO: 1321086 - DNA, 15 bp, Homo sapiens
cactacctcactacc

SEQ ID NO: 1321087 - DNA, 15 bp, Homo sapiens
tcactacctcactac

SEQ ID NO: 1321088 - DNA, 15 bp, Homo sapiens
ctcactacctcacta

SEQ ID NO: 1321089 - DNA, 15 bp, Homo sapiens
tctcactacctcact

SEQ ID NO: 1321090 - DNA, 15 bp, Homo sapiens
ctctcactacctcac

SEQ ID NO: 1321091 - DNA, 15 bp, Homo sapiens
tctctcactacctca

SEQ ID NO: 1321092 - DNA, 15 bp, Homo sapiens
ttctctcactacctc

SEQ ID NO: 1321093 - DNA, 15 bp, Homo sapiens
tttctctcactacct

SEQ ID NO: 1321094 - DNA, 15 bp, Homo sapiens
atttctctcactacc

SEQ ID NO: 1321095 - DNA, 15 bp, Homo sapiens
tatttctctcactac

SEQ ID NO: 1321096 - DNA, 15 bp, Homo sapiens
ttatttctctcacta

SEQ ID NO: 1321097 - DNA, 15 bp, Homo sapiens
tttatttctctcact

SEQ ID NO: 1321098 - DNA, 15 bp, Homo sapiens
ttttatttctctcac

SEQ ID NO: 1321099 - DNA, 15 bp, Homo sapiens
attttatttctctca

SEQ ID NO: 1321100 - DNA, 15 bp, Homo sapiens
tattttatttctctc

SEQ ID NO: 1321101 - DNA, 15 bp, Homo sapiens
ctattttatttctct

SEQ ID NO: 1321102 - DNA, 15 bp, Homo sapiens
tctattttatttctc

SEQ ID NO: 1321103 - DNA, 15 bp, Homo sapiens
ttctattttatttct

SEQ ID NO: 1321104 - DNA, 15 bp, Homo sapiens
attctattttatttc

SEQ ID NO: 1321105 - DNA, 15 bp, Homo sapiens
gattctattttattt

SEQ ID NO: 1321106 - DNA, 15 bp, Homo sapiens
tgattctattttatt

SEQ ID NO: 1321107 - DNA, 15 bp, Homo sapiens
atgattctattttat

SEQ ID NO: 1321108 - DNA, 15 bp, Homo sapiens
catgattctatttta

SEQ ID NO: 1321109 - DNA, 15 bp, Homo sapiens
tcatgattctatttt

SEQ ID NO: 1321110 - DNA, 15 bp, Homo sapiens
ttcatgattctattt

SEQ ID NO: 1321111 - DNA, 15 bp, Homo sapiens
cttcatgattctatt

SEQ ID NO: 1321112 - DNA, 15 bp, Homo sapiens
acttcatgattctat

SEQ ID NO: 1321113 - DNA, 15 bp, Homo sapiens
tacttcatgattcta

SEQ ID NO: 1321114 - DNA, 15 bp, Homo sapiens
atacttcatgattct

SEQ ID NO: 1321115 - DNA, 15 bp, Homo sapiens
tatacttcatgattc

SEQ ID NO: 1321116 - DNA, 15 bp, Homo sapiens
ttatacttcatgatt

SEQ ID NO: 1321117 - DNA, 15 bp, Homo sapiens
cttatacttcatgat

SEQ ID NO: 1321118 - DNA, 15 bp, Homo sapiens
ccttatacttcatga

SEQ ID NO: 1321119 - DNA, 15 bp, Homo sapiens
accttatacttcatg

SEQ ID NO: 1321120 - DNA, 15 bp, Homo sapiens
taccttatacttcat

SEQ ID NO: 1321121 - DNA, 15 bp, Homo sapiens
ttaccttatacttca

SEQ ID NO: 1321122 - DNA, 15 bp, Homo sapiens
attaccttatacttc

SEQ ID NO: 1321123 - DNA, 15 bp, Homo sapiens
cattaccttatactt

SEQ ID NO: 1321124 - DNA, 15 bp, Homo sapiens
tcattaccttatact

SEQ ID NO: 1321125 - DNA, 15 bp, Homo sapiens
gtcattaccttatac

SEQ ID NO: 1321126 - DNA, 15 bp, Homo sapiens
agtcattaccttata

SEQ ID NO: 1321127 - DNA, 15 bp, Homo sapiens
aagtcattaccttat

SEQ ID NO: 1321128 - DNA, 15 bp, Homo sapiens
aaagtcattacctta

SEQ ID NO: 1321129 - DNA, 15 bp, Homo sapiens
caaagtcattacctt

SEQ ID NO: 1321130 - DNA, 15 bp, Homo sapiens
tcaaagtcattacct

SEQ ID NO: 1321131 - DNA, 15 bp, Homo sapiens
ttcaaagtcattacc

SEQ ID NO: 1321132 - DNA, 15 bp, Homo sapiens
attcaaagtcattac

SEQ ID NO: 1321133 - DNA, 15 bp, Homo sapiens
gattcaaagtcatta

SEQ ID NO: 1321134 - DNA, 15 bp, Homo sapiens
tgattcaaagtcatt

SEQ ID NO: 1321135 - DNA, 15 bp, Homo sapiens
atgattcaaagtcat

SEQ ID NO: 1321136 - DNA, 15 bp, Homo sapiens
aatgattcaaagtca

SEQ ID NO: 1321137 - DNA, 15 bp, Homo sapiens
taatgattcaaagtc

SEQ ID NO: 1321138 - DNA, 15 bp, Homo sapiens
ttaatgattcaaagt

SEQ ID NO: 1321139 - DNA, 15 bp, Homo sapiens
attaatgattcaaag

SEQ ID NO: 1321140 - DNA, 15 bp, Homo sapiens
gattaatgattcaaa

SEQ ID NO: 1321141 - DNA, 15 bp, Homo sapiens
tgattaatgattcaa

SEQ ID NO: 1321142 - DNA, 15 bp, Homo sapiens
atgattaatgattca

SEQ ID NO: 1321143 - DNA, 15 bp, Homo sapiens
tatgattaatgattc

SEQ ID NO: 1321144 - DNA, 15 bp, Homo sapiens
ctatgattaatgatt

SEQ ID NO: 1321145 - DNA, 15 bp, Homo sapiens
actatgattaatgat

SEQ ID NO: 1321146 - DNA, 15 bp, Homo sapiens
aactatgattaatga

SEQ ID NO: 1321147 - DNA, 15 bp, Homo sapiens
taactatgattaatg

SEQ ID NO: 1321148 - DNA, 15 bp, Homo sapiens
ataactatgattaat

SEQ ID NO: 1321149 - DNA, 15 bp, Homo sapiens
gataactatgattaa

SEQ ID NO: 1321150 - DNA, 15 bp, Homo sapiens
cgataactatgatta

SEQ ID NO: 1321151 - DNA, 15 bp, Homo sapiens
tcgataactatgatt

SEQ ID NO: 1321152 - DNA, 15 bp, Homo sapiens
ttcgataactatgat

SEQ ID NO: 1321153 - DNA, 15 bp, Homo sapiens
tttcgataactatga

SEQ ID NO: 1321154 - DNA, 15 bp, Homo sapiens
atttcgataactatg

SEQ ID NO: 1321155 - DNA, 15 bp, Homo sapiens
gatttcgataactat

SEQ ID NO: 1321156 - DNA, 15 bp, Homo sapiens
tgatttcgataacta

SEQ ID NO: 1321157 - DNA, 15 bp, Homo sapiens
ctgatttcgataact

SEQ ID NO: 1321158 - DNA, 15 bp, Homo sapiens
cctgatttcgataac

SEQ ID NO: 1321159 - DNA, 15 bp, Homo sapiens
gcctgatttcgataa

SEQ ID NO: 1321160 - DNA, 15 bp, Homo sapiens
tgcctgatttcgata

SEQ ID NO: 1321161 - DNA, 15 bp, Homo sapiens
atgcctgatttcgat

SEQ ID NO: 1321162 - DNA, 15 bp, Homo sapiens
catgcctgatttcga

SEQ ID NO: 1321163 - DNA, 15 bp, Homo sapiens
tcatgcctgatttcg

SEQ ID NO: 1321164 - DNA, 15 bp, Homo sapiens
atcatgcctgatttc

SEQ ID NO: 1321165 - DNA, 15 bp, Homo sapiens
tatcatgcctgattt

SEQ ID NO: 1321166 - DNA, 15 bp, Homo sapiens
ctatcatgcctgatt

SEQ ID NO: 1321167 - DNA, 15 bp, Homo sapiens
tctatcatgcctgat

SEQ ID NO: 1321168 - DNA, 15 bp, Homo sapiens
ttctatcatgcctga

SEQ ID NO: 1321169 - DNA, 15 bp, Homo sapiens
tttctatcatgcctg

SEQ ID NO: 1321170 - DNA, 15 bp, Homo sapiens
ctttctatcatgcct

SEQ ID NO: 1321171 - DNA, 15 bp, Homo sapiens
tctttctatcatgcc

SEQ ID NO: 1321172 - DNA, 15 bp, Homo sapiens
atctttctatcatgc

SEQ ID NO: 1321173 - DNA, 15 bp, Homo sapiens
aatctttctatcatg

SEQ ID NO: 1321174 - DNA, 15 bp, Homo sapiens
taatctttctatcat

SEQ ID NO: 1321175 - DNA, 15 bp, Homo sapiens
gtaatctttctatca

SEQ ID NO: 1321176 - DNA, 15 bp, Homo sapiens
cgtaatctttctatc

SEQ ID NO: 1321177 - DNA, 15 bp, Homo sapiens
ccgtaatctttctat

SEQ ID NO: 1321178 - DNA, 15 bp, Homo sapiens
accgtaatctttcta

SEQ ID NO: 1321179 - DNA, 15 bp, Homo sapiens
aaccgtaatctttct

SEQ ID NO: 1321180 - DNA, 15 bp, Homo sapiens
caaccgtaatctttc

SEQ ID NO: 1321181 - DNA, 15 bp, Homo sapiens
acaaccgtaatcttt

SEQ ID NO: 1321182 - DNA, 15 bp, Homo sapiens
aacaaccgtaatctt

SEQ ID NO: 1321183 - DNA, 15 bp, Homo sapiens
taacaaccgtaatct

SEQ ID NO: 1321184 - DNA, 15 bp, Homo sapiens
ttaacaaccgtaatc

SEQ ID NO: 1321185 - DNA, 15 bp, Homo sapiens
attaacaaccgtaat

SEQ ID NO: 1321186 - DNA, 15 bp, Homo sapiens
gattaacaaccgtaa

SEQ ID NO: 1321187 - DNA, 15 bp, Homo sapiens
agattaacaaccgta

SEQ ID NO: 1321188 - DNA, 15 bp, Homo sapiens
aagattaacaaccgt

SEQ ID NO: 1321189 - DNA, 15 bp, Homo sapiens
gaagattaacaaccg

SEQ ID NO: 1321190 - DNA, 15 bp, Homo sapiens
ggaagattaacaacc

SEQ ID NO: 1321191 - DNA, 15 bp, Homo sapiens
aggaagattaacaac

SEQ ID NO: 1321192 - DNA, 15 bp, Homo sapiens
aaggaagattaacaa

SEQ ID NO: 1321193 - DNA, 15 bp, Homo sapiens
taaggaagattaaca

SEQ ID NO: 1321194 - DNA, 15 bp, Homo sapiens
ataaggaagattaac

SEQ ID NO: 1321195 - DNA, 15 bp, Homo sapiens
tataaggaagattaa

SEQ ID NO: 1321196 - DNA, 15 bp, Homo sapiens
ctataaggaagatta

SEQ ID NO: 1321197 - DNA, 15 bp, Homo sapiens
actataaggaagatt

SEQ ID NO: 1321198 - DNA, 15 bp, Homo sapiens
cactataaggaagat

SEQ ID NO: 1321199 - DNA, 15 bp, Homo sapiens
gcactataaggaaga

SEQ ID NO: 1321200 - DNA, 15 bp, Homo sapiens
tgcactataaggaag

SEQ ID NO: 1321201 - DNA, 15 bp, Homo sapiens
ttgcactataaggaa

SEQ ID NO: 1321202 - DNA, 15 bp, Homo sapiens
attgcactataagga

SEQ ID NO: 1321203 - DNA, 15 bp, Homo sapiens
tattgcactataagg

SEQ ID NO: 1321204 - DNA, 15 bp, Homo sapiens
atattgcactataag

SEQ ID NO: 1321205 - DNA, 15 bp, Homo sapiens
gatattgcactataa

SEQ ID NO: 1321206 - DNA, 15 bp, Homo sapiens
ggatattgcactata

SEQ ID NO: 1321207 - DNA, 15 bp, Homo sapiens
aggatattgcactat

SEQ ID NO: 1321208 - DNA, 15 bp, Homo sapiens
gaggatattgcacta

SEQ ID NO: 1321209 - DNA, 15 bp, Homo sapiens
tgaggatattgcact

SEQ ID NO: 1321210 - DNA, 15 bp, Homo sapiens
gtgaggatattgcac

SEQ ID NO: 1321211 - DNA, 15 bp, Homo sapiens
ggtgaggatattgca

SEQ ID NO: 1321212 - DNA, 15 bp, Homo sapiens
tggtgaggatattgc

SEQ ID NO: 1321213 - DNA, 15 bp, Homo sapiens
ctggtgaggatattg

SEQ ID NO: 1321214 - DNA, 15 bp, Homo sapiens
actggtgaggatatt

SEQ ID NO: 1321215 - DNA, 15 bp, Homo sapiens
gactggtgaggatat

SEQ ID NO: 1321216 - DNA, 15 bp, Homo sapiens
ggactggtgaggata

SEQ ID NO: 1321217 - DNA, 15 bp, Homo sapiens
tggactggtgaggat

SEQ ID NO: 1321218 - DNA, 15 bp, Homo sapiens
gtggactggtgagga

SEQ ID NO: 1321219 - DNA, 15 bp, Homo sapiens
tgtggactggtgagg

SEQ ID NO: 1321220 - DNA, 15 bp, Homo sapiens
gtgtggactggtgag

SEQ ID NO: 1321221 - DNA, 15 bp, Homo sapiens
tgtgtggactggtga

SEQ ID NO: 1321222 - DNA, 15 bp, Homo sapiens
ttgtgtggactggtg

SEQ ID NO: 1321223 - DNA, 15 bp, Homo sapiens
gttgtgtggactggt

SEQ ID NO: 1321224 - DNA, 15 bp, Homo sapiens
tgttgtgtggactgg

SEQ ID NO: 1321225 - DNA, 15 bp, Homo sapiens
atgttgtgtggactg

SEQ ID NO: 1321226 - DNA, 15 bp, Homo sapiens
aatgttgtgtggact

SEQ ID NO: 1321227 - DNA, 15 bp, Homo sapiens
aaatgttgtgtggac

SEQ ID NO: 1321228 - DNA, 15 bp, Homo sapiens
aaaatgttgtgtgga

SEQ ID NO: 1321229 - DNA, 15 bp, Homo sapiens
aaaaatgttgtgtgg

SEQ ID NO: 1321230 - DNA, 15 bp, Homo sapiens
caaaaatgttgtgtg

SEQ ID NO: 1321231 - DNA, 15 bp, Homo sapiens
gcaaaaatgttgtgt

SEQ ID NO: 1321232 - DNA, 15 bp, Homo sapiens
ggcaaaaatgttgtg

SEQ ID NO: 1321233 - DNA, 15 bp, Homo sapiens
gggcaaaaatgttgt

SEQ ID NO: 1321234 - DNA, 15 bp, Homo sapiens
tgggcaaaaatgttg

SEQ ID NO: 1321235 - DNA, 15 bp, Homo sapiens
gtgggcaaaaatgtt

SEQ ID NO: 1321236 - DNA, 15 bp, Homo sapiens
agtgggcaaaaatgt

SEQ ID NO: 1321237 - DNA, 15 bp, Homo sapiens
cagtgggcaaaaatg

SEQ ID NO: 1321238 - DNA, 15 bp, Homo sapiens
tcagtgggcaaaaat

SEQ ID NO: 1321239 - DNA, 15 bp, Homo sapiens
ctcagtgggcaaaaa

SEQ ID NO: 1321240 - DNA, 15 bp, Homo sapiens
actcagtgggcaaaa

SEQ ID NO: 1321241 - DNA, 15 bp, Homo sapiens
gactcagtgggcaaa

SEQ ID NO: 1321242 - DNA, 15 bp, Homo sapiens
agactcagtgggcaa

SEQ ID NO: 1321243 - DNA, 15 bp, Homo sapiens
cagactcagtgggca

SEQ ID NO: 1321244 - DNA, 15 bp, Homo sapiens
ccagactcagtgggc

SEQ ID NO: 1321245 - DNA, 15 bp, Homo sapiens
cccagactcagtggg

SEQ ID NO: 1321246 - DNA, 15 bp, Homo sapiens
tcccagactcagtgg

SEQ ID NO: 1321247 - DNA, 15 bp, Homo sapiens
atcccagactcagtg

SEQ ID NO: 1321248 - DNA, 15 bp, Homo sapiens
tatcccagactcagt

SEQ ID NO: 1321249 - DNA, 15 bp, Homo sapiens
ttatcccagactcag

SEQ ID NO: 1321250 - DNA, 15 bp, Homo sapiens
tttatcccagactca

SEQ ID NO: 1321251 - DNA, 15 bp, Homo sapiens
ctttatcccagactc

SEQ ID NO: 1321252 - DNA, 15 bp, Homo sapiens
actttatcccagact

SEQ ID NO: 1321253 - DNA, 15 bp, Homo sapiens
aactttatcccagac

SEQ ID NO: 1321254 - DNA, 15 bp, Homo sapiens
taactttatcccaga

SEQ ID NO: 1321255 - DNA, 15 bp, Homo sapiens
ttaactttatcccag

SEQ ID NO: 1321256 - DNA, 15 bp, Homo sapiens
tttaactttatccca

SEQ ID NO: 1321257 - DNA, 15 bp, Homo sapiens
ttttaactttatccc

SEQ ID NO: 1321258 - DNA, 15 bp, Homo sapiens
tttttaactttatcc

SEQ ID NO: 1321259 - DNA, 15 bp, Homo sapiens
atttttaactttatc

SEQ ID NO: 1321260 - DNA, 15 bp, Homo sapiens
aatttttaactttat

SEQ ID NO: 1321261 - DNA, 15 bp, Homo sapiens
taatttttaacttta

SEQ ID NO: 1321262 - DNA, 15 bp, Homo sapiens
ttaatttttaacttt

SEQ ID NO: 1321263 - DNA, 15 bp, Homo sapiens
attaatttttaactt

SEQ ID NO: 1321264 - DNA, 15 bp, Homo sapiens
gattaatttttaact

SEQ ID NO: 1321265 - DNA, 15 bp, Homo sapiens
ggattaatttttaac

SEQ ID NO: 1321266 - DNA, 15 bp, Homo sapiens
aggattaatttttaa

SEQ ID NO: 1321267 - DNA, 15 bp, Homo sapiens
gaggattaattttta

SEQ ID NO: 1321268 - DNA, 15 bp, Homo sapiens
tgaggattaattttt

SEQ ID NO: 1321269 - DNA, 15 bp, Homo sapiens
atgaggattaatttt

SEQ ID NO: 1321270 - DNA, 15 bp, Homo sapiens
tatgaggattaattt

SEQ ID NO: 1321271 - DNA, 15 bp, Homo sapiens
ttatgaggattaatt

SEQ ID NO: 1321272 - DNA, 15 bp, Homo sapiens
tttatgaggattaat

SEQ ID NO: 1321273 - DNA, 15 bp, Homo sapiens
gtttatgaggattaa

SEQ ID NO: 1321274 - DNA, 15 bp, Homo sapiens
agtttatgaggatta

SEQ ID NO: 1321275 - DNA, 15 bp, Homo sapiens
tagtttatgaggatt

SEQ ID NO: 1321276 - DNA, 15 bp, Homo sapiens
ttagtttatgaggat

SEQ ID NO: 1321277 - DNA, 15 bp, Homo sapiens
tttagtttatgagga

SEQ ID NO: 1321278 - DNA, 15 bp, Homo sapiens
ctttagtttatgagg

SEQ ID NO: 1321279 - DNA, 15 bp, Homo sapiens
actttagtttatgag

SEQ ID NO: 1321280 - DNA, 15 bp, Homo sapiens
aactttagtttatga

SEQ ID NO: 1321281 - DNA, 15 bp, Homo sapiens
taactttagtttatg

SEQ ID NO: 1321282 - DNA, 15 bp, Homo sapiens
ttaactttagtttat

SEQ ID NO: 1321283 - DNA, 15 bp, Homo sapiens
attaactttagttta

SEQ ID NO: 1321284 - DNA, 15 bp, Homo sapiens
cattaactttagttt

SEQ ID NO: 1321285 - DNA, 15 bp, Homo sapiens
tcattaactttagtt

SEQ ID NO: 1321286 - DNA, 15 bp, Homo sapiens
ttcattaactttagt

SEQ ID NO: 1321287 - DNA, 15 bp, Homo sapiens
tttcattaactttag

SEQ ID NO: 1321288 - DNA, 15 bp, Homo sapiens
atttcattaacttta

SEQ ID NO: 1321289 - DNA, 15 bp, Homo sapiens
catttcattaacttt

SEQ ID NO: 1321290 - DNA, 15 bp, Homo sapiens
acatttcattaactt

SEQ ID NO: 1321291 - DNA, 15 bp, Homo sapiens
aacatttcattaact

SEQ ID NO: 1321292 - DNA, 15 bp, Homo sapiens
gaacatttcattaac

SEQ ID NO: 1321293 - DNA, 15 bp, Homo sapiens
tgaacatttcattaa

SEQ ID NO: 1321294 - DNA, 15 bp, Homo sapiens
ctgaacatttcatta

SEQ ID NO: 1321295 - DNA, 15 bp, Homo sapiens
tctgaacatttcatt

SEQ ID NO: 1321296 - DNA, 15 bp, Homo sapiens
ttctgaacatttcat

SEQ ID NO: 1321297 - DNA, 15 bp, Homo sapiens
attctgaacatttca

SEQ ID NO: 1321298 - DNA, 15 bp, Homo sapiens
tattctgaacatttc

SEQ ID NO: 1321299 - DNA, 15 bp, Homo sapiens
atattctgaacattt

SEQ ID NO: 1321300 - DNA, 15 bp, Homo sapiens
aatattctgaacatt

SEQ ID NO: 1321301 - DNA, 15 bp, Homo sapiens
gaatattctgaacat

SEQ ID NO: 1321302 - DNA, 15 bp, Homo sapiens
agaatattctgaaca

SEQ ID NO: 1321303 - DNA, 15 bp, Homo sapiens
cagaatattctgaac

SEQ ID NO: 1321304 - DNA, 15 bp, Homo sapiens
gcagaatattctgaa

SEQ ID NO: 1321305 - DNA, 15 bp, Homo sapiens
ggcagaatattctga

SEQ ID NO: 1321306 - DNA, 15 bp, Homo sapiens
aggcagaatattctg

SEQ ID NO: 1321307 - DNA, 15 bp, Homo sapiens
aaggcagaatattct

SEQ ID NO: 1321308 - DNA, 15 bp, Homo sapiens
gaaggcagaatattc

SEQ ID NO: 1321309 - DNA, 15 bp, Homo sapiens
agaaggcagaatatt

SEQ ID NO: 1321310 - DNA, 15 bp, Homo sapiens
aagaaggcagaatat

SEQ ID NO: 1321311 - DNA, 15 bp, Homo sapiens
taagaaggcagaata

SEQ ID NO: 1321312 - DNA, 15 bp, Homo sapiens
gtaagaaggcagaat

SEQ ID NO: 1321313 - DNA, 15 bp, Homo sapiens
ggtaagaaggcagaa

SEQ ID NO: 1321314 - DNA, 15 bp, Homo sapiens
cggtaagaaggcaga

SEQ ID NO: 1321315 - DNA, 15 bp, Homo sapiens
acggtaagaaggcag

SEQ ID NO: 1321316 - DNA, 15 bp, Homo sapiens
tacggtaagaaggca

SEQ ID NO: 1321317 - DNA, 15 bp, Homo sapiens
atacggtaagaaggc

SEQ ID NO: 1321318 - DNA, 15 bp, Homo sapiens
gatacggtaagaagg

SEQ ID NO: 1321319 - DNA, 15 bp, Homo sapiens
tgatacggtaagaag

SEQ ID NO: 1321320 - DNA, 15 bp, Homo sapiens
atgatacggtaagaa

SEQ ID NO: 1321321 - DNA, 15 bp, Homo sapiens
gatgatacggtaaga

SEQ ID NO: 1321322 - DNA, 15 bp, Homo sapiens
tgatgatacggtaag

SEQ ID NO: 1321323 - DNA, 15 bp, Homo sapiens
gtgatgatacggtaa

SEQ ID NO: 1321324 - DNA, 15 bp, Homo sapiens
agtgatgatacggta

SEQ ID NO: 1321325 - DNA, 15 bp, Homo sapiens
aagtgatgatacggt

SEQ ID NO: 1321326 - DNA, 15 bp, Homo sapiens
aaagtgatgatacgg

SEQ ID NO: 1321327 - DNA, 15 bp, Homo sapiens
taaagtgatgatacg

SEQ ID NO: 1321328 - DNA, 15 bp, Homo sapiens
ctaaagtgatgatac

SEQ ID NO: 1321329 - DNA, 15 bp, Homo sapiens
gctaaagtgatgata

SEQ ID NO: 1321330 - DNA, 15 bp, Homo sapiens
ggctaaagtgatgat

SEQ ID NO: 1321331 - DNA, 15 bp, Homo sapiens
gggctaaagtgatga

SEQ ID NO: 1321332 - DNA, 15 bp, Homo sapiens
tgggctaaagtgatg

SEQ ID NO: 1321333 - DNA, 15 bp, Homo sapiens
ttgggctaaagtgat

SEQ ID NO: 1321334 - DNA, 15 bp, Homo sapiens
tttgggctaaagtga

SEQ ID NO: 1321335 - DNA, 15 bp, Homo sapiens
atttgggctaaagtg

SEQ ID NO: 1321336 - DNA, 15 bp, Homo sapiens
catttgggctaaagt

SEQ ID NO: 1321337 - DNA, 15 bp, Homo sapiens
gcatttgggctaaag

SEQ ID NO: 1321338 - DNA, 15 bp, Homo sapiens
agcatttgggctaaa

SEQ ID NO: 1321339 - DNA, 15 bp, Homo sapiens
cagcatttgggctaa

SEQ ID NO: 1321340 - DNA, 15 bp, Homo sapiens
ccagcatttgggcta

SEQ ID NO: 1321341 - DNA, 15 bp, Homo sapiens
cccagcatttgggct

SEQ ID NO: 1321342 - DNA, 15 bp, Homo sapiens
tcccagcatttgggc

SEQ ID NO: 1321343 - DNA, 15 bp, Homo sapiens
ttcccagcatttggg

SEQ ID NO: 1321344 - DNA, 15 bp, Homo sapiens
tttcccagcatttgg

SEQ ID NO: 1321345 - DNA, 15 bp, Homo sapiens
ttttcccagcatttg

SEQ ID NO: 1321346 - DNA, 15 bp, Homo sapiens
tttttcccagcattt

SEQ ID NO: 1321347 - DNA, 15 bp, Homo sapiens
ctttttcccagcatt

SEQ ID NO: 1321348 - DNA, 15 bp, Homo sapiens
tctttttcccagcat

SEQ ID NO: 1321349 - DNA, 15 bp, Homo sapiens
ctctttttcccagca

SEQ ID NO: 1321350 - DNA, 15 bp, Homo sapiens
tctctttttcccagc

SEQ ID NO: 1321351 - DNA, 15 bp, Homo sapiens
ttctctttttcccag

SEQ ID NO: 1321352 - DNA, 15 bp, Homo sapiens
tttctctttttccca

SEQ ID NO: 1321353 - DNA, 15 bp, Homo sapiens
gtttctctttttccc

SEQ ID NO: 1321354 - DNA, 15 bp, Homo sapiens
tgtttctctttttcc

SEQ ID NO: 1321355 - DNA, 15 bp, Homo sapiens
ttgtttctctttttc

SEQ ID NO: 1321356 - DNA, 15 bp, Homo sapiens
acttttgtttctctt

SEQ ID NO: 1321357 - DNA, 15 bp, Homo sapiens
gacttttgtttctct

SEQ ID NO: 1321358 - DNA, 15 bp, Homo sapiens
agacttttgtttctc

SEQ ID NO: 1321359 - DNA, 15 bp, Homo sapiens
aagacttttgtttct

SEQ ID NO: 1321360 - DNA, 15 bp, Homo sapiens
gaagacttttgtttc

SEQ ID NO: 1321361 - DNA, 15 bp, Homo sapiens
agaagacttttgttt

SEQ ID NO: 1321362 - DNA, 15 bp, Homo sapiens
cagaagacttttgtt

SEQ ID NO: 1321363 - DNA, 15 bp, Homo sapiens
acagaagacttttgt

SEQ ID NO: 1321364 - DNA, 15 bp, Homo sapiens
gacagaagacttttg

SEQ ID NO: 1321365 - DNA, 15 bp, Homo sapiens
tgacagaagactttt

SEQ ID NO: 1321366 - DNA, 15 bp, Homo sapiens
ctgacagaagacttt

SEQ ID NO: 1321367 - DNA, 15 bp, Homo sapiens
gctgacagaagactt

SEQ ID NO: 1321368 - DNA, 15 bp, Homo sapiens
agctgacagaagact

SEQ ID NO: 1321369 - DNA, 15 bp, Homo sapiens
tagctgacagaagac

SEQ ID NO: 1321370 - DNA, 15 bp, Homo sapiens
atagctgacagaaga

SEQ ID NO: 1321371 - DNA, 15 bp, Homo sapiens
aatagctgacagaag

SEQ ID NO: 1321372 - DNA, 15 bp, Homo sapiens
caatagctgacagaa

SEQ ID NO: 1321373 - DNA, 15 bp, Homo sapiens
tcaatagctgacaga

SEQ ID NO: 1321374 - DNA, 15 bp, Homo sapiens
ttcaatagctgacag

SEQ ID NO: 1321375 - DNA, 15 bp, Homo sapiens
attcaatagctgaca

SEQ ID NO: 1321376 - DNA, 15 bp, Homo sapiens
cattcaatagctgac

SEQ ID NO: 1321377 - DNA, 15 bp, Homo sapiens
acattcaatagctga

SEQ ID NO: 1321378 - DNA, 15 bp, Homo sapiens
cacattcaatagctg

SEQ ID NO: 1321379 - DNA, 15 bp, Homo sapiens
acacattcaatagct

SEQ ID NO: 1321380 - DNA, 15 bp, Homo sapiens
aacacattcaatagc

SEQ ID NO: 1321381 - DNA, 15 bp, Homo sapiens
taacacattcaatag

SEQ ID NO: 1321382 - DNA, 15 bp, Homo sapiens
ataacacattcaata

SEQ ID NO: 1321383 - DNA, 15 bp, Homo sapiens
cataacacattcaat

SEQ ID NO: 1321384 - DNA, 15 bp, Homo sapiens
tcataacacattcaa

SEQ ID NO: 1321385 - DNA, 15 bp, Homo sapiens
atcataacacattca

SEQ ID NO: 1321386 - DNA, 15 bp, Homo sapiens
aatcataacacattc

SEQ ID NO: 1321387 - DNA, 15 bp, Homo sapiens
aaatcataacacatt

SEQ ID NO: 1321388 - DNA, 15 bp, Homo sapiens
taaatcataacacat

SEQ ID NO: 1321389 - DNA, 15 bp, Homo sapiens
ctaaatcataacaca

SEQ ID NO: 1321390 - DNA, 15 bp, Homo sapiens
tctaaatcataacac

SEQ ID NO: 1321391 - DNA, 15 bp, Homo sapiens
ctctaaatcataaca

SEQ ID NO: 1321392 - DNA, 15 bp, Homo sapiens
tctctaaatcataac

SEQ ID NO: 1321393 - DNA, 15 bp, Homo sapiens
ttctctaaatcataa

SEQ ID NO: 1321394 - DNA, 15 bp, Homo sapiens
attctctaaatcata

SEQ ID NO: 1321395 - DNA, 15 bp, Homo sapiens
aattctctaaatcat

SEQ ID NO: 1321396 - DNA, 15 bp, Homo sapiens
aaattctctaaatca

SEQ ID NO: 1321397 - DNA, 15 bp, Homo sapiens
gaaattctctaaatc

SEQ ID NO: 1321398 - DNA, 15 bp, Homo sapiens
agaaattctctaaat

SEQ ID NO: 1321399 - DNA, 15 bp, Homo sapiens
cagaaattctctaaa

SEQ ID NO: 1321400 - DNA, 15 bp, Homo sapiens
tcagaaattctctaa

SEQ ID NO: 1321401 - DNA, 15 bp, Homo sapiens
ctcagaaattctcta

SEQ ID NO: 1321402 - DNA, 15 bp, Homo sapiens
tctcagaaattctct

SEQ ID NO: 1321403 - DNA, 15 bp, Homo sapiens
atctcagaaattctc

SEQ ID NO: 1321404 - DNA, 15 bp, Homo sapiens
aatctcagaaattct

SEQ ID NO: 1321405 - DNA, 15 bp, Homo sapiens
gaatctcagaaattc

SEQ ID NO: 1321406 - DNA, 15 bp, Homo sapiens
tgaatctcagaaatt

SEQ ID NO: 1321407 - DNA, 15 bp, Homo sapiens
gtgaatctcagaaat

SEQ ID NO: 1321408 - DNA, 15 bp, Homo sapiens
tgtgaatctcagaaa

SEQ ID NO: 1321409 - DNA, 15 bp, Homo sapiens
ctgtgaatctcagaa

SEQ ID NO: 1321410 - DNA, 15 bp, Homo sapiens
actgtgaatctcaga

SEQ ID NO: 1321411 - DNA, 15 bp, Homo sapiens
tactgtgaatctcag

SEQ ID NO: 1321412 - DNA, 15 bp, Homo sapiens
ctactgtgaatctca

SEQ ID NO: 1321413 - DNA, 15 bp, Homo sapiens
tctactgtgaatctc

SEQ ID NO: 1321414 - DNA, 15 bp, Homo sapiens
ctctactgtgaatct

SEQ ID NO: 1321415 - DNA, 15 bp, Homo sapiens
actctactgtgaatc

SEQ ID NO: 1321416 - DNA, 15 bp, Homo sapiens
gactctactgtgaat

SEQ ID NO: 1321417 - DNA, 15 bp, Homo sapiens
agactctactgtgaa

SEQ ID NO: 1321418 - DNA, 15 bp, Homo sapiens
cagactctactgtga

SEQ ID NO: 1321419 - DNA, 15 bp, Homo sapiens
acagactctactgtg

SEQ ID NO: 1321420 - DNA, 15 bp, Homo sapiens
tacagactctactgt

SEQ ID NO: 1321421 - DNA, 15 bp, Homo sapiens
gtacagactctactg

SEQ ID NO: 1321422 - DNA, 15 bp, Homo sapiens
agtacagactctact

SEQ ID NO: 1321423 - DNA, 15 bp, Homo sapiens
aagtacagactctac

SEQ ID NO: 1321424 - DNA, 15 bp, Homo sapiens
aaagtacagactcta

SEQ ID NO: 1321425 - DNA, 15 bp, Homo sapiens
aaaagtacagactct

SEQ ID NO: 1321426 - DNA, 15 bp, Homo sapiens
aaaaagtacagactc

SEQ ID NO: 1321427 - DNA, 15 bp, Homo sapiens
taaaaagtacagact

SEQ ID NO: 1321428 - DNA, 15 bp, Homo sapiens
gtaaaaagtacagac

SEQ ID NO: 1321429 - DNA, 15 bp, Homo sapiens
tgtaaaaagtacaga

SEQ ID NO: 1321430 - DNA, 15 bp, Homo sapiens
atgtaaaaagtacag

SEQ ID NO: 1321431 - DNA, 15 bp, Homo sapiens
aatgtaaaaagtaca

SEQ ID NO: 1321432 - DNA, 15 bp, Homo sapiens
aaatgtaaaaagtac

SEQ ID NO: 1321433 - DNA, 15 bp, Homo sapiens
caaatgtaaaaagta

SEQ ID NO: 1321434 - DNA, 15 bp, Homo sapiens
tcaaatgtaaaaagt

SEQ ID NO: 1321435 - DNA, 15 bp, Homo sapiens
atcaaatgtaaaaag

SEQ ID NO: 1321436 - DNA, 15 bp, Homo sapiens
tatcaaatgtaaaaa

SEQ ID NO: 1321437 - DNA, 15 bp, Homo sapiens
ctatcaaatgtaaaa

SEQ ID NO: 1321438 - DNA, 15 bp, Homo sapiens
tctatcaaatgtaaa

SEQ ID NO: 1321439 - DNA, 15 bp, Homo sapiens
gtctatcaaatgtaa

SEQ ID NO: 1321440 - DNA, 15 bp, Homo sapiens
ggtctatcaaatgta

SEQ ID NO: 1321441 - DNA, 15 bp, Homo sapiens
aggtctatcaaatgt

SEQ ID NO: 1321442 - DNA, 15 bp, Homo sapiens
gaggtctatcaaatg

SEQ ID NO: 1321443 - DNA, 15 bp, Homo sapiens
tgaggtctatcaaat

SEQ ID NO: 1321444 - DNA, 15 bp, Homo sapiens
ttgaggtctatcaaa

SEQ ID NO: 1321445 - DNA, 15 bp, Homo sapiens
tttgaggtctatcaa

SEQ ID NO: 1321446 - DNA, 15 bp, Homo sapiens
atttgaggtctatca

SEQ ID NO: 1321447 - DNA, 15 bp, Homo sapiens
aatttgaggtctatc

SEQ ID NO: 1321448 - DNA, 15 bp, Homo sapiens
aaatttgaggtctat

SEQ ID NO: 1321449 - DNA, 15 bp, Homo sapiens
caaatttgaggtcta

SEQ ID NO: 1321450 - DNA, 15 bp, Homo sapiens
gcaaatttgaggtct

SEQ ID NO: 1321451 - DNA, 15 bp, Homo sapiens
ggcaaatttgaggtc

SEQ ID NO: 1321452 - DNA, 15 bp, Homo sapiens
aggcaaatttgaggt

SEQ ID NO: 1321453 - DNA, 15 bp, Homo sapiens
caggcaaatttgagg

SEQ ID NO: 1321454 - DNA, 15 bp, Homo sapiens
tcaggcaaatttgag

SEQ ID NO: 1321455 - DNA, 15 bp, Homo sapiens
ctcaggcaaatttga

SEQ ID NO: 1321456 - DNA, 15 bp, Homo sapiens
actcaggcaaatttg

SEQ ID NO: 1321457 - DNA, 15 bp, Homo sapiens
aactcaggcaaattt

SEQ ID NO: 1321458 - DNA, 15 bp, Homo sapiens
aaactcaggcaaatt

SEQ ID NO: 1321459 - DNA, 15 bp, Homo sapiens
aaaactcaggcaaat

SEQ ID NO: 1321460 - DNA, 15 bp, Homo sapiens
aaaaactcaggcaaa

SEQ ID NO: 1321461 - DNA, 15 bp, Homo sapiens
taaaaactcaggcaa

SEQ ID NO: 1321462 - DNA, 15 bp, Homo sapiens
ctaaaaactcaggca

SEQ ID NO: 1321463 - DNA, 15 bp, Homo sapiens
actaaaaactcaggc

SEQ ID NO: 1321464 - DNA, 15 bp, Homo sapiens
cactaaaaactcagg

SEQ ID NO: 1321465 - DNA, 15 bp, Homo sapiens
acactaaaaactcag

SEQ ID NO: 1321466 - DNA, 15 bp, Homo sapiens
aacactaaaaactca

SEQ ID NO: 1321467 - DNA, 15 bp, Homo sapiens
gaacactaaaaactc

SEQ ID NO: 1321468 - DNA, 15 bp, Homo sapiens
ggaacactaaaaact

SEQ ID NO: 1321469 - DNA, 15 bp, Homo sapiens
tggaacactaaaaac

SEQ ID NO: 1321470 - DNA, 15 bp, Homo sapiens
ctggaacactaaaaa

SEQ ID NO: 1321471 - DNA, 15 bp, Homo sapiens
tctggaacactaaaa

SEQ ID NO: 1321472 - DNA, 15 bp, Homo sapiens
ttctggaacactaaa

SEQ ID NO: 1321473 - DNA, 15 bp, Homo sapiens
tttctggaacactaa

SEQ ID NO: 1321474 - DNA, 15 bp, Homo sapiens
ttttctggaacacta

SEQ ID NO: 1321475 - DNA, 15 bp, Homo sapiens
attttctggaacact

SEQ ID NO: 1321476 - DNA, 15 bp, Homo sapiens
tattttctggaacac

SEQ ID NO: 1321477 - DNA, 15 bp, Homo sapiens
ctattttctggaaca

SEQ ID NO: 1321478 - DNA, 15 bp, Homo sapiens
cctattttctggaac

SEQ ID NO: 1321479 - DNA, 15 bp, Homo sapiens
gcctattttctggaa

SEQ ID NO: 1321480 - DNA, 15 bp, Homo sapiens
agcctattttctgga

SEQ ID NO: 1321481 - DNA, 15 bp, Homo sapiens
aagcctattttctgg

SEQ ID NO: 1321482 - DNA, 15 bp, Homo sapiens
aaagcctattttctg

SEQ ID NO: 1321483 - DNA, 15 bp, Homo sapiens
caaagcctattttct

SEQ ID NO: 1321484 - DNA, 15 bp, Homo sapiens
ccaaagcctattttc

SEQ ID NO: 1321485 - DNA, 15 bp, Homo sapiens
cccaaagcctatttt

SEQ ID NO: 1321486 - DNA, 15 bp, Homo sapiens
ccccaaagcctattt

SEQ ID NO: 1321487 - DNA, 15 bp, Homo sapiens
tccccaaagcctatt

SEQ ID NO: 1321488 - DNA, 15 bp, Homo sapiens
ttccccaaagcctat

SEQ ID NO: 1321489 - DNA, 15 bp, Homo sapiens
cttccccaaagccta

SEQ ID NO: 1321490 - DNA, 15 bp, Homo sapiens
ccttccccaaagcct

SEQ ID NO: 1321491 - DNA, 15 bp, Homo sapiens
accttccccaaagcc

SEQ ID NO: 1321492 - DNA, 15 bp, Homo sapiens
aaccttccccaaagc

SEQ ID NO: 1321493 - DNA, 15 bp, Homo sapiens
aaaccttccccaaag

SEQ ID NO: 1321494 - DNA, 15 bp, Homo sapiens
caaaccttccccaaa

SEQ ID NO: 1321495 - DNA, 15 bp, Homo sapiens
tcaaaccttccccaa

SEQ ID NO: 1321496 - DNA, 15 bp, Homo sapiens
ttcaaaccttcccca

SEQ ID NO: 1321497 - DNA, 15 bp, Homo sapiens
tttcaaaccttcccc

SEQ ID NO: 1321498 - DNA, 15 bp, Homo sapiens
ctttcaaaccttccc

SEQ ID NO: 1321499 - DNA, 15 bp, Homo sapiens
tctttcaaaccttcc

SEQ ID NO: 1321500 - DNA, 15 bp, Homo sapiens
ttctttcaaaccttc

SEQ ID NO: 1321501 - DNA, 15 bp, Homo sapiens
cttctttcaaacctt

SEQ ID NO: 1321502 - DNA, 15 bp, Homo sapiens
ccttctttcaaacct

SEQ ID NO: 1321503 - DNA, 15 bp, Homo sapiens
gccttctttcaaacc

SEQ ID NO: 1321504 - DNA, 15 bp, Homo sapiens
ggccttctttcaaac

SEQ ID NO: 1321505 - DNA, 15 bp, Homo sapiens
aggccttctttcaaa

SEQ ID NO: 1321506 - DNA, 15 bp, Homo sapiens
aaggccttctttcaa

SEQ ID NO: 1321507 - DNA, 15 bp, Homo sapiens
aaaggccttctttca

SEQ ID NO: 1321508 - DNA, 15 bp, Homo sapiens
aaaaggccttctttc

SEQ ID NO: 1321509 - DNA, 15 bp, Homo sapiens
aaaaaggccttcttt

SEQ ID NO: 1321510 - DNA, 15 bp, Homo sapiens
caaaaaggccttctt

SEQ ID NO: 1321511 - DNA, 15 bp, Homo sapiens
tcaaaaaggccttct

SEQ ID NO: 1321512 - DNA, 15 bp, Homo sapiens
ttcaaaaaggccttc

SEQ ID NO: 1321513 - DNA, 15 bp, Homo sapiens
gttcaaaaaggcctt

SEQ ID NO: 1321514 - DNA, 15 bp, Homo sapiens
ggttcaaaaaggcct

SEQ ID NO: 1321515 - DNA, 15 bp, Homo sapiens
aggttcaaaaaggcc

SEQ ID NO: 1321516 - DNA, 15 bp, Homo sapiens
taggttcaaaaaggc

SEQ ID NO: 1321517 - DNA, 15 bp, Homo sapiens
ttaggttcaaaaagg

SEQ ID NO: 1321518 - DNA, 15 bp, Homo sapiens
cttaggttcaaaaag

SEQ ID NO: 1321519 - DNA, 15 bp, Homo sapiens
tcttaggttcaaaaa

SEQ ID NO: 1321520 - DNA, 15 bp, Homo sapiens
ttcttaggttcaaaa

SEQ ID NO: 1321521 - DNA, 15 bp, Homo sapiens
cttcttaggttcaaa

SEQ ID NO: 1321522 - DNA, 15 bp, Homo sapiens
tcttcttaggttcaa

SEQ ID NO: 1321523 - DNA, 15 bp, Homo sapiens
gtcttcttaggttca

SEQ ID NO: 1321524 - DNA, 15 bp, Homo sapiens
tgtcttcttaggttc

SEQ ID NO: 1321525 - DNA, 15 bp, Homo sapiens
ttgtcttcttaggtt

SEQ ID NO: 1321526 - DNA, 15 bp, Homo sapiens
cttgtcttcttaggt

SEQ ID NO: 1321527 - DNA, 15 bp, Homo sapiens
tcttgtcttcttagg

SEQ ID NO: 1321528 - DNA, 15 bp, Homo sapiens
ttcttgtcttcttag

SEQ ID NO: 1321529 - DNA, 15 bp, Homo sapiens
tttcttgtcttctta

SEQ ID NO: 1321530 - DNA, 15 bp, Homo sapiens
atttcttgtcttctt

SEQ ID NO: 1321531 - DNA, 15 bp, Homo sapiens
aatttcttgtcttct

SEQ ID NO: 1321532 - DNA, 15 bp, Homo sapiens
caatttcttgtcttc

SEQ ID NO: 1321533 - DNA, 15 bp, Homo sapiens
tcaatttcttgtctt

SEQ ID NO: 1321534 - DNA, 15 bp, Homo sapiens
ttcaatttcttgtct

SEQ ID NO: 1321535 - DNA, 15 bp, Homo sapiens
gttcaatttcttgtc

SEQ ID NO: 1321536 - DNA, 15 bp, Homo sapiens
agttcaatttcttgt

SEQ ID NO: 1321537 - DNA, 15 bp, Homo sapiens
cagttcaatttcttg

SEQ ID NO: 1321538 - DNA, 15 bp, Homo sapiens
acagttcaatttctt

SEQ ID NO: 1321539 - DNA, 15 bp, Homo sapiens
aacagttcaatttct

SEQ ID NO: 1321540 - DNA, 15 bp, Homo sapiens
taacagttcaatttc

SEQ ID NO: 1321541 - DNA, 15 bp, Homo sapiens
ataacagttcaattt

SEQ ID NO: 1321542 - DNA, 15 bp, Homo sapiens
gataacagttcaatt

SEQ ID NO: 1321543 - DNA, 15 bp, Homo sapiens
tgataacagttcaat

SEQ ID NO: 1321544 - DNA, 15 bp, Homo sapiens
gtgataacagttcaa

SEQ ID NO: 1321545 - DNA, 15 bp, Homo sapiens
tgtgataacagttca

SEQ ID NO: 1321546 - DNA, 15 bp, Homo sapiens
ttgtgataacagttc

SEQ ID NO: 1321547 - DNA, 15 bp, Homo sapiens
attgtgataacagtt

SEQ ID NO: 1321548 - DNA, 15 bp, Homo sapiens
tattgtgataacagt

SEQ ID NO: 1321549 - DNA, 15 bp, Homo sapiens
atattgtgataacag

SEQ ID NO: 1321550 - DNA, 15 bp, Homo sapiens
aatattgtgataaca

SEQ ID NO: 1321551 - DNA, 15 bp, Homo sapiens
caatattgtgataac

SEQ ID NO: 1321552 - DNA, 15 bp, Homo sapiens
gcaatattgtgataa

SEQ ID NO: 1321553 - DNA, 15 bp, Homo sapiens
agcaatattgtgata

SEQ ID NO: 1321554 - DNA, 15 bp, Homo sapiens
tagcaatattgtgat

SEQ ID NO: 1321555 - DNA, 15 bp, Homo sapiens
atagcaatattgtga

SEQ ID NO: 1321556 - DNA, 15 bp, Homo sapiens
aatagcaatattgtg

SEQ ID NO: 1321557 - DNA, 15 bp, Homo sapiens
aaatagcaatattgt

SEQ ID NO: 1321558 - DNA, 15 bp, Homo sapiens
taaatagcaatattg

SEQ ID NO: 1321559 - DNA, 15 bp, Homo sapiens
ttaaatagcaatatt

SEQ ID NO: 1321560 - DNA, 15 bp, Homo sapiens
cttaaatagcaatat

SEQ ID NO: 1321561 - DNA, 15 bp, Homo sapiens
tcttaaatagcaata

SEQ ID NO: 1321562 - DNA, 15 bp, Homo sapiens
ttcttaaatagcaat

SEQ ID NO: 1321563 - DNA, 15 bp, Homo sapiens
tttcttaaatagcaa

SEQ ID NO: 1321564 - DNA, 15 bp, Homo sapiens
ctttcttaaatagca

SEQ ID NO: 1321565 - DNA, 15 bp, Homo sapiens
tctttcttaaatagc

SEQ ID NO: 1321566 - DNA, 15 bp, Homo sapiens
ttctttcttaaatag

SEQ ID NO: 1321567 - DNA, 15 bp, Homo sapiens
attctttcttaaata

SEQ ID NO: 1321568 - DNA, 15 bp, Homo sapiens
tattctttcttaaat

SEQ ID NO: 1321569 - DNA, 15 bp, Homo sapiens
atattctttcttaaa

SEQ ID NO: 1321570 - DNA, 15 bp, Homo sapiens
aatattctttcttaa

SEQ ID NO: 1321571 - DNA, 15 bp, Homo sapiens
taatattctttctta

SEQ ID NO: 1321572 - DNA, 15 bp, Homo sapiens
ttaatattctttctt

SEQ ID NO: 1321573 - DNA, 15 bp, Homo sapiens
cttaatattctttct

SEQ ID NO: 1321574 - DNA, 15 bp, Homo sapiens
acttaatattctttc

SEQ ID NO: 1321575 - DNA, 15 bp, Homo sapiens
gacttaatattcttt

SEQ ID NO: 1321576 - DNA, 15 bp, Homo sapiens
tgacttaatattctt

SEQ ID NO: 1321577 - DNA, 15 bp, Homo sapiens
gtgacttaatattct

SEQ ID NO: 1321578 - DNA, 15 bp, Homo sapiens
agtgacttaatattc

SEQ ID NO: 1321579 - DNA, 15 bp, Homo sapiens
aagtgacttaatatt

SEQ ID NO: 1321580 - DNA, 15 bp, Homo sapiens
aaagtgacttaatat

SEQ ID NO: 1321581 - DNA, 15 bp, Homo sapiens
aaaagtgacttaata

SEQ ID NO: 1321582 - DNA, 15 bp, Homo sapiens
gaaaagtgacttaat

SEQ ID NO: 1321583 - DNA, 15 bp, Homo sapiens
tgaaaagtgacttaa

SEQ ID NO: 1321584 - DNA, 15 bp, Homo sapiens
ctgaaaagtgactta

SEQ ID NO: 1321585 - DNA, 15 bp, Homo sapiens
tctgaaaagtgactt

SEQ ID NO: 1321586 - DNA, 15 bp, Homo sapiens
ttctgaaaagtgact

SEQ ID NO: 1321587 - DNA, 15 bp, Homo sapiens
tttctgaaaagtgac

SEQ ID NO: 1321588 - DNA, 15 bp, Homo sapiens
atttctgaaaagtga

SEQ ID NO: 1321589 - DNA, 15 bp, Homo sapiens
aatttctgaaaagtg

SEQ ID NO: 1321590 - DNA, 15 bp, Homo sapiens
aaatttctgaaaagt

SEQ ID NO: 1321591 - DNA, 15 bp, Homo sapiens
taaatttctgaaaag

SEQ ID NO: 1321592 - DNA, 15 bp, Homo sapiens
ataaatttctgaaaa

SEQ ID NO: 1321593 - DNA, 15 bp, Homo sapiens
tataaatttctgaaa

SEQ ID NO: 1321594 - DNA, 15 bp, Homo sapiens
atataaatttctgaa

SEQ ID NO: 1321595 - DNA, 15 bp, Homo sapiens
gatataaatttctga

SEQ ID NO: 1321596 - DNA, 15 bp, Homo sapiens
tgatataaatttctg

SEQ ID NO: 1321597 - DNA, 15 bp, Homo sapiens
ctgatataaatttct

SEQ ID NO: 1321598 - DNA, 15 bp, Homo sapiens
tctgatataaatttc

SEQ ID NO: 1321599 - DNA, 15 bp, Homo sapiens
ttctgatataaattt

SEQ ID NO: 1321600 - DNA, 15 bp, Homo sapiens
attctgatataaatt

SEQ ID NO: 1321601 - DNA, 15 bp, Homo sapiens
aattctgatataaat

SEQ ID NO: 1321602 - DNA, 15 bp, Homo sapiens
taattctgatataaa

SEQ ID NO: 1321603 - DNA, 15 bp, Homo sapiens
ctaattctgatataa

SEQ ID NO: 1321604 - DNA, 15 bp, Homo sapiens
tctaattctgatata

SEQ ID NO: 1321605 - DNA, 15 bp, Homo sapiens
ttctaattctgatat

SEQ ID NO: 1321606 - DNA, 15 bp, Homo sapiens
tttctaattctgata

SEQ ID NO: 1321607 - DNA, 15 bp, Homo sapiens
ttttctaattctgat

SEQ ID NO: 1321608 - DNA, 15 bp, Homo sapiens
tttttctaattctga

SEQ ID NO: 1321609 - DNA, 15 bp, Homo sapiens
atttttctaattctg

SEQ ID NO: 1321610 - DNA, 15 bp, Homo sapiens
catttttctaattct

SEQ ID NO: 1321611 - DNA, 15 bp, Homo sapiens
gcatttttctaattc

SEQ ID NO: 1321612 - DNA, 15 bp, Homo sapiens
tgcatttttctaatt

SEQ ID NO: 1321613 - DNA, 15 bp, Homo sapiens
ctgcatttttctaat

SEQ ID NO: 1321614 - DNA, 15 bp, Homo sapiens
tctgcatttttctaa

SEQ ID NO: 1321615 - DNA, 15 bp, Homo sapiens
ttctgcatttttcta

SEQ ID NO: 1321616 - DNA, 15 bp, Homo sapiens
tttctgcatttttct

SEQ ID NO: 1321617 - DNA, 15 bp, Homo sapiens
atttctgcatttttc

SEQ ID NO: 1321618 - DNA, 15 bp, Homo sapiens
tatttctgcattttt

SEQ ID NO: 1321619 - DNA, 15 bp, Homo sapiens
atatttctgcatttt

SEQ ID NO: 1321620 - DNA, 15 bp, Homo sapiens
tatatttctgcattt

SEQ ID NO: 1321621 - DNA, 15 bp, Homo sapiens
ctatatttctgcatt

SEQ ID NO: 1321622 - DNA, 15 bp, Homo sapiens
actatatttctgcat

SEQ ID NO: 1321623 - DNA, 15 bp, Homo sapiens
aactatatttctgca

SEQ ID NO: 1321624 - DNA, 15 bp, Homo sapiens
aaactatatttctgc

SEQ ID NO: 1321625 - DNA, 15 bp, Homo sapiens
taaactatatttctg

SEQ ID NO: 1321626 - DNA, 15 bp, Homo sapiens
ataaactatatttct

SEQ ID NO: 1321627 - DNA, 15 bp, Homo sapiens
tataaactatatttc

SEQ ID NO: 1321628 - DNA, 15 bp, Homo sapiens
gtataaactatattt

SEQ ID NO: 1321629 - DNA, 15 bp, Homo sapiens
agtataaactatatt

SEQ ID NO: 1321630 - DNA, 15 bp, Homo sapiens
aagtataaactatat

SEQ ID NO: 1321631 - DNA, 15 bp, Homo sapiens
gaagtataaactata

SEQ ID NO: 1321632 - DNA, 15 bp, Homo sapiens
agaagtataaactat

SEQ ID NO: 1321633 - DNA, 15 bp, Homo sapiens
aagaagtataaacta

SEQ ID NO: 1321634 - DNA, 15 bp, Homo sapiens
taagaagtataaact

SEQ ID NO: 1321635 - DNA, 15 bp, Homo sapiens
ttaagaagtataaac

SEQ ID NO: 1321636 - DNA, 15 bp, Homo sapiens
cttaagaagtataaa

SEQ ID NO: 1321637 - DNA, 15 bp, Homo sapiens
ccttaagaagtataa

SEQ ID NO: 1321638 - DNA, 15 bp, Homo sapiens
tccttaagaagtata

SEQ ID NO: 1321639 - DNA, 15 bp, Homo sapiens
ctccttaagaagtat

SEQ ID NO: 1321640 - DNA, 15 bp, Homo sapiens
cctccttaagaagta

SEQ ID NO: 1321641 - DNA, 15 bp, Homo sapiens
acctccttaagaagt

SEQ ID NO: 1321642 - DNA, 15 bp, Homo sapiens
cacctccttaagaag

SEQ ID NO: 1321643 - DNA, 15 bp, Homo sapiens
ccacctccttaagaa

SEQ ID NO: 1321644 - DNA, 15 bp, Homo sapiens
accacctccttaaga

SEQ ID NO: 1321645 - DNA, 15 bp, Homo sapiens
caccacctccttaag

SEQ ID NO: 1321646 - DNA, 15 bp, Homo sapiens
ccaccacctccttaa

SEQ ID NO: 1321647 - DNA, 15 bp, Homo sapiens
tccaccacctcctta

SEQ ID NO: 1321648 - DNA, 15 bp, Homo sapiens
ctccaccacctcctt

SEQ ID NO: 1321649 - DNA, 15 bp, Homo sapiens
cctccaccacctcct

SEQ ID NO: 1321650 - DNA, 15 bp, Homo sapiens
tcctccaccacctcc

SEQ ID NO: 1321651 - DNA, 15 bp, Homo sapiens
ctcctccaccacctc

SEQ ID NO: 1321652 - DNA, 15 bp, Homo sapiens
tctcctccaccacct

SEQ ID NO: 1321653 - DNA, 15 bp, Homo sapiens
atctcctccaccacc

SEQ ID NO: 1321654 - DNA, 15 bp, Homo sapiens
aatctcctccaccac

SEQ ID NO: 1321655 - DNA, 15 bp, Homo sapiens
taatctcctccacca

SEQ ID NO: 1321656 - DNA, 15 bp, Homo sapiens
ctaatctcctccacc

SEQ ID NO: 1321657 - DNA, 15 bp, Homo sapiens
tctaatctcctccac

SEQ ID NO: 1321658 - DNA, 15 bp, Homo sapiens
atctaatctcctcca

SEQ ID NO: 1321659 - DNA, 15 bp, Homo sapiens
tatctaatctcctcc

SEQ ID NO: 1321660 - DNA, 15 bp, Homo sapiens
ctatctaatctcctc

SEQ ID NO: 1321661 - DNA, 15 bp, Homo sapiens
tctatctaatctcct

SEQ ID NO: 1321662 - DNA, 15 bp, Homo sapiens
atctatctaatctcc

SEQ ID NO: 1321663 - DNA, 15 bp, Homo sapiens
tatctatctaatctc

SEQ ID NO: 1321664 - DNA, 15 bp, Homo sapiens
gtatctatctaatct

SEQ ID NO: 1321665 - DNA, 15 bp, Homo sapiens
tgtatctatctaatc

SEQ ID NO: 1321666 - DNA, 15 bp, Homo sapiens
atgtatctatctaat

SEQ ID NO: 1321667 - DNA, 15 bp, Homo sapiens
catgtatctatctaa

SEQ ID NO: 1321668 - DNA, 15 bp, Homo sapiens
gcatgtatctatcta

SEQ ID NO: 1321669 - DNA, 15 bp, Homo sapiens
tgcatgtatctatct

SEQ ID NO: 1321670 - DNA, 15 bp, Homo sapiens
atgcatgtatctatc

SEQ ID NO: 1321671 - DNA, 15 bp, Homo sapiens
tatgcatgtatctat

SEQ ID NO: 1321672 - DNA, 15 bp, Homo sapiens
gtatgcatgtatcta

SEQ ID NO: 1321673 - DNA, 15 bp, Homo sapiens
tgtatgcatgtatct

SEQ ID NO: 1321674 - DNA, 15 bp, Homo sapiens
tatgtatgcatgtat

SEQ ID NO: 1321675 - DNA, 15 bp, Homo sapiens
atatgtatgcatgta

SEQ ID NO: 1321676 - DNA, 15 bp, Homo sapiens
tatatgtatgcatgt

SEQ ID NO: 1321677 - DNA, 15 bp, Homo sapiens
atatatgtatgcatg

SEQ ID NO: 1321678 - DNA, 15 bp, Homo sapiens
tatatatgtatgcat

SEQ ID NO: 1321679 - DNA, 15 bp, Homo sapiens
gtatatatgtatgca

SEQ ID NO: 1321680 - DNA, 15 bp, Homo sapiens
tgtatatatgtatgc

SEQ ID NO: 1321681 - DNA, 15 bp, Homo sapiens
atgtatatatgtatg

SEQ ID NO: 1321682 - DNA, 15 bp, Homo sapiens
tatgtatatatgtat

SEQ ID NO: 1321683 - DNA, 15 bp, Homo sapiens
ttatgtatatatgta

SEQ ID NO: 1321684 - DNA, 15 bp, Homo sapiens
cttatgtatatatgt

SEQ ID NO: 1321685 - DNA, 15 bp, Homo sapiens
acttatgtatatatg

SEQ ID NO: 1321686 - DNA, 15 bp, Homo sapiens
gacttatgtatatat

SEQ ID NO: 1321687 - DNA, 15 bp, Homo sapiens
agacttatgtatata

SEQ ID NO: 1321688 - DNA, 15 bp, Homo sapiens
tagacttatgtatat

SEQ ID NO: 1321689 - DNA, 15 bp, Homo sapiens
ttagacttatgtata

SEQ ID NO: 1321690 - DNA, 15 bp, Homo sapiens
tttagacttatgtat

SEQ ID NO: 1321691 - DNA, 15 bp, Homo sapiens
atttagacttatgta

SEQ ID NO: 1321692 - DNA, 15 bp, Homo sapiens
tatttagacttatgt

SEQ ID NO: 1321693 - DNA, 15 bp, Homo sapiens
atatttagacttatg

SEQ ID NO: 1321694 - DNA, 15 bp, Homo sapiens
aatatttagacttat

SEQ ID NO: 1321695 - DNA, 15 bp, Homo sapiens
aaatatttagactta

SEQ ID NO: 1321696 - DNA, 15 bp, Homo sapiens
aaaatatttagactt

SEQ ID NO: 1321697 - DNA, 15 bp, Homo sapiens
aaaaatatttagact

SEQ ID NO: 1321698 - DNA, 15 bp, Homo sapiens
taaaaatatttagac

SEQ ID NO: 1321699 - DNA, 15 bp, Homo sapiens
ataaaaatatttaga

SEQ ID NO: 1321700 - DNA, 15 bp, Homo sapiens
tataaaaatatttag

SEQ ID NO: 1321701 - DNA, 15 bp, Homo sapiens
atataaaaatattta

SEQ ID NO: 1321702 - DNA, 15 bp, Homo sapiens
catataaaaatattt

SEQ ID NO: 1321703 - DNA, 15 bp, Homo sapiens
acatataaaaatatt

SEQ ID NO: 1321704 - DNA, 15 bp, Homo sapiens
tacatataaaaatat

SEQ ID NO: 1321705 - DNA, 15 bp, Homo sapiens
atacatataaaaata

SEQ ID NO: 1321706 - DNA, 15 bp, Homo sapiens
tatacatataaaaat

SEQ ID NO: 1321707 - DNA, 15 bp, Homo sapiens
atatacatataaaaa

SEQ ID NO: 1321708 - DNA, 15 bp, Homo sapiens
catatacatataaaa

SEQ ID NO: 1321709 - DNA, 15 bp, Homo sapiens
tcatatacatataaa

SEQ ID NO: 1321710 - DNA, 15 bp, Homo sapiens
ctcatatacatataa

SEQ ID NO: 1321711 - DNA, 15 bp, Homo sapiens
tctcatatacatata

SEQ ID NO: 1321712 - DNA, 15 bp, Homo sapiens
ctctcatatacatat

SEQ ID NO: 1321713 - DNA, 15 bp, Homo sapiens
tctctcatatacata

SEQ ID NO: 1321714 - DNA, 15 bp, Homo sapiens
ttctctcatatacat

SEQ ID NO: 1321715 - DNA, 15 bp, Homo sapiens
cttctctcatataca

SEQ ID NO: 1321716 - DNA, 15 bp, Homo sapiens
acttctctcatatac

SEQ ID NO: 1321717 - DNA, 15 bp, Homo sapiens
tacttctctcatata

SEQ ID NO: 1321718 - DNA, 15 bp, Homo sapiens
atacttctctcatat

SEQ ID NO: 1321719 - DNA, 15 bp, Homo sapiens
gatacttctctcata

SEQ ID NO: 1321720 - DNA, 15 bp, Homo sapiens
tgatacttctctcat

SEQ ID NO: 1321721 - DNA, 15 bp, Homo sapiens
ctgatacttctctca

SEQ ID NO: 1321722 - DNA, 15 bp, Homo sapiens
cctgatacttctctc

SEQ ID NO: 1321723 - DNA, 15 bp, Homo sapiens
tcctgatacttctct

SEQ ID NO: 1321724 - DNA, 15 bp, Homo sapiens
ttcctgatacttctc

SEQ ID NO: 1321725 - DNA, 15 bp, Homo sapiens
attcctgatacttct

SEQ ID NO: 1321726 - DNA, 15 bp, Homo sapiens
tattcctgatacttc

SEQ ID NO: 1321727 - DNA, 15 bp, Homo sapiens
ctattcctgatactt

SEQ ID NO: 1321728 - DNA, 15 bp, Homo sapiens
cctattcctgatact

SEQ ID NO: 1321729 - DNA, 15 bp, Homo sapiens
ccctattcctgatac

SEQ ID NO: 1321730 - DNA, 15 bp, Homo sapiens
accctattcctgata

SEQ ID NO: 1321731 - DNA, 15 bp, Homo sapiens
taccctattcctgat

SEQ ID NO: 1321732 - DNA, 15 bp, Homo sapiens
ctaccctattcctga

SEQ ID NO: 1321733 - DNA, 15 bp, Homo sapiens
cctaccctattcctg

SEQ ID NO: 1321734 - DNA, 15 bp, Homo sapiens
tcctaccctattcct

SEQ ID NO: 1321735 - DNA, 15 bp, Homo sapiens
ttcctaccctattcc

SEQ ID NO: 1321736 - DNA, 15 bp, Homo sapiens
cttcctaccctattc

SEQ ID NO: 1321737 - DNA, 15 bp, Homo sapiens
ccttcctaccctatt

SEQ ID NO: 1321738 - DNA, 15 bp, Homo sapiens
tccttcctaccctat

SEQ ID NO: 1321739 - DNA, 15 bp, Homo sapiens
ctccttcctacccta

SEQ ID NO: 1321740 - DNA, 15 bp, Homo sapiens
tctccttcctaccct

SEQ ID NO: 1321741 - DNA, 15 bp, Homo sapiens
atctccttcctaccc

SEQ ID NO: 1321742 - DNA, 15 bp, Homo sapiens
tatctccttcctacc

SEQ ID NO: 1321743 - DNA, 15 bp, Homo sapiens
ctatctccttcctac

SEQ ID NO: 1321744 - DNA, 15 bp, Homo sapiens
tctatctccttccta

SEQ ID NO: 1321745 - DNA, 15 bp, Homo sapiens
ttctatctccttcct

SEQ ID NO: 1321746 - DNA, 15 bp, Homo sapiens
attctatctccttcc

SEQ ID NO: 1321747 - DNA, 15 bp, Homo sapiens
tattctatctccttc

SEQ ID NO: 1321748 - DNA, 15 bp, Homo sapiens
ctattctatctcctt

SEQ ID NO: 1321749 - DNA, 15 bp, Homo sapiens
actattctatctcct

SEQ ID NO: 1321750 - DNA, 15 bp, Homo sapiens
tactattctatctcc

SEQ ID NO: 1321751 - DNA, 15 bp, Homo sapiens
ctactattctatctc

SEQ ID NO: 1321752 - DNA, 15 bp, Homo sapiens
cctactattctatct

SEQ ID NO: 1321753 - DNA, 15 bp, Homo sapiens
tcctactattctatc

SEQ ID NO: 1321754 - DNA, 15 bp, Homo sapiens
atcctactattctat

SEQ ID NO: 1321755 - DNA, 15 bp, Homo sapiens
aatcctactattcta

SEQ ID NO: 1321756 - DNA, 15 bp, Homo sapiens
taatcctactattct

SEQ ID NO: 1321757 - DNA, 15 bp, Homo sapiens
gtaatcctactattc

SEQ ID NO: 1321758 - DNA, 15 bp, Homo sapiens
tgtaatcctactatt

SEQ ID NO: 1321759 - DNA, 15 bp, Homo sapiens
atgtaatcctactat

SEQ ID NO: 1321760 - DNA, 15 bp, Homo sapiens
aatgtaatcctacta

SEQ ID NO: 1321761 - DNA, 15 bp, Homo sapiens
taatgtaatcctact

SEQ ID NO: 1321762 - DNA, 15 bp, Homo sapiens
ctaatgtaatcctac

SEQ ID NO: 1321763 - DNA, 15 bp, Homo sapiens
tctaatgtaatccta

SEQ ID NO: 1321764 - DNA, 15 bp, Homo sapiens
ttctaatgtaatcct

SEQ ID NO: 1321765 - DNA, 15 bp, Homo sapiens
attctaatgtaatcc

SEQ ID NO: 1321766 - DNA, 15 bp, Homo sapiens
gattctaatgtaatc

SEQ ID NO: 1321767 - DNA, 15 bp, Homo sapiens
agattctaatgtaat

SEQ ID NO: 1321768 - DNA, 15 bp, Homo sapiens
cagattctaatgtaa

SEQ ID NO: 1321769 - DNA, 15 bp, Homo sapiens
gcagattctaatgta

SEQ ID NO: 1321770 - DNA, 15 bp, Homo sapiens
agcagattctaatgt

SEQ ID NO: 1321771 - DNA, 15 bp, Homo sapiens
aagcagattctaatg

SEQ ID NO: 1321772 - DNA, 15 bp, Homo sapiens
taagcagattctaat

SEQ ID NO: 1321773 - DNA, 15 bp, Homo sapiens
ctaagcagattctaa

SEQ ID NO: 1321774 - DNA, 15 bp, Homo sapiens
cctaagcagattcta

SEQ ID NO: 1321775 - DNA, 15 bp, Homo sapiens
tcctaagcagattct

SEQ ID NO: 1321776 - DNA, 15 bp, Homo sapiens
ctcctaagcagattc

SEQ ID NO: 1321777 - DNA, 15 bp, Homo sapiens
gctcctaagcagatt

SEQ ID NO: 1321778 - DNA, 15 bp, Homo sapiens
agctcctaagcagat

SEQ ID NO: 1321779 - DNA, 15 bp, Homo sapiens
aagctcctaagcaga

SEQ ID NO: 1321780 - DNA, 15 bp, Homo sapiens
aaagctcctaagcag

SEQ ID NO: 1321781 - DNA, 15 bp, Homo sapiens
aaaagctcctaagca

SEQ ID NO: 1321782 - DNA, 15 bp, Homo sapiens
gaaaagctcctaagc

SEQ ID NO: 1321783 - DNA, 15 bp, Homo sapiens
agaaaagctcctaag

SEQ ID NO: 1321784 - DNA, 15 bp, Homo sapiens
aagaaaagctcctaa

SEQ ID NO: 1321785 - DNA, 15 bp, Homo sapiens
taagaaaagctccta

SEQ ID NO: 1321786 - DNA, 15 bp, Homo sapiens
gtaagaaaagctcct

SEQ ID NO: 1321787 - DNA, 15 bp, Homo sapiens
tgtaagaaaagctcc

SEQ ID NO: 1321788 - DNA, 15 bp, Homo sapiens
atgtaagaaaagctc

SEQ ID NO: 1321789 - DNA, 15 bp, Homo sapiens
catgtaagaaaagct

SEQ ID NO: 1321790 - DNA, 15 bp, Homo sapiens
acatgtaagaaaagc

SEQ ID NO: 1321791 - DNA, 15 bp, Homo sapiens
tacatgtaagaaaag

SEQ ID NO: 1321792 - DNA, 15 bp, Homo sapiens
ctacatgtaagaaaa

SEQ ID NO: 1321793 - DNA, 15 bp, Homo sapiens
tctacatgtaagaaa

SEQ ID NO: 1321794 - DNA, 15 bp, Homo sapiens
atctacatgtaagaa

SEQ ID NO: 1321795 - DNA, 15 bp, Homo sapiens
tatctacatgtaaga

SEQ ID NO: 1321796 - DNA, 15 bp, Homo sapiens
atatctacatgtaag

SEQ ID NO: 1321797 - DNA, 15 bp, Homo sapiens
aatatctacatgtaa

SEQ ID NO: 1321798 - DNA, 15 bp, Homo sapiens
gaatatctacatgta

SEQ ID NO: 1321799 - DNA, 15 bp, Homo sapiens
agaatatctacatgt

SEQ ID NO: 1321800 - DNA, 15 bp, Homo sapiens
gagaatatctacatg

SEQ ID NO: 1321801 - DNA, 15 bp, Homo sapiens
agagaatatctacat

SEQ ID NO: 1321802 - DNA, 15 bp, Homo sapiens
gagagaatatctaca

SEQ ID NO: 1321803 - DNA, 15 bp, Homo sapiens
agagagaatatctac

SEQ ID NO: 1321804 - DNA, 15 bp, Homo sapiens
aagagagaatatcta

SEQ ID NO: 1321805 - DNA, 15 bp, Homo sapiens
aaagagagaatatct

SEQ ID NO: 1321806 - DNA, 15 bp, Homo sapiens
aaaagagagaatatc

SEQ ID NO: 1321807 - DNA, 15 bp, Homo sapiens
aaaaagagagaatat

SEQ ID NO: 1321808 - DNA, 15 bp, Homo sapiens
caaaaagagagaata

SEQ ID NO: 1321809 - DNA, 15 bp, Homo sapiens
ccaaaaagagagaat

SEQ ID NO: 1321810 - DNA, 15 bp, Homo sapiens
cccaaaaagagagaa

SEQ ID NO: 1321811 - DNA, 15 bp, Homo sapiens
acccaaaaagagaga

SEQ ID NO: 1321812 - DNA, 15 bp, Homo sapiens
tacccaaaaagagag

SEQ ID NO: 1321813 - DNA, 15 bp, Homo sapiens
atacccaaaaagaga

SEQ ID NO: 1321814 - DNA, 15 bp, Homo sapiens
tatacccaaaaagag

SEQ ID NO: 1321815 - DNA, 15 bp, Homo sapiens
atatacccaaaaaga

SEQ ID NO: 1321816 - DNA, 15 bp, Homo sapiens
gatatacccaaaaag

SEQ ID NO: 1321817 - DNA, 15 bp, Homo sapiens
ttgatatacccaaaa

SEQ ID NO: 1321818 - DNA, 15 bp, Homo sapiens
tttgatatacccaaa

SEQ ID NO: 1321819 - DNA, 15 bp, Homo sapiens
ttttgatatacccaa

SEQ ID NO: 1321820 - DNA, 15 bp, Homo sapiens
attttgatataccca

SEQ ID NO: 1321821 - DNA, 15 bp, Homo sapiens
gattttgatataccc

SEQ ID NO: 1321822 - DNA, 15 bp, Homo sapiens
agattttgatatacc

SEQ ID NO: 1321823 - DNA, 15 bp, Homo sapiens
aagattttgatatac

SEQ ID NO: 1321824 - DNA, 15 bp, Homo sapiens
caagattttgatata

SEQ ID NO: 1321825 - DNA, 15 bp, Homo sapiens
ccaagattttgatat

SEQ ID NO: 1321826 - DNA, 15 bp, Homo sapiens
cccaagattttgata

SEQ ID NO: 1321827 - DNA, 15 bp, Homo sapiens
tcccaagattttgat

SEQ ID NO: 1321828 - DNA, 15 bp, Homo sapiens
ctcccaagattttga

SEQ ID NO: 1321829 - DNA, 15 bp, Homo sapiens
actcccaagattttg

SEQ ID NO: 1321830 - DNA, 15 bp, Homo sapiens
tactcccaagatttt

SEQ ID NO: 1321831 - DNA, 15 bp, Homo sapiens
ttactcccaagattt

SEQ ID NO: 1321832 - DNA, 15 bp, Homo sapiens
tttactcccaagatt

SEQ ID NO: 1321833 - DNA, 15 bp, Homo sapiens
ttttactcccaagat

SEQ ID NO: 1321834 - DNA, 15 bp, Homo sapiens
cttttactcccaaga

SEQ ID NO: 1321835 - DNA, 15 bp, Homo sapiens
ccttttactcccaag

SEQ ID NO: 1321836 - DNA, 15 bp, Homo sapiens
cccttttactcccaa

SEQ ID NO: 1321837 - DNA, 15 bp, Homo sapiens
tcccttttactccca

SEQ ID NO: 1321838 - DNA, 15 bp, Homo sapiens
ttcccttttactccc

SEQ ID NO: 1321839 - DNA, 15 bp, Homo sapiens
tttcccttttactcc

SEQ ID NO: 1321840 - DNA, 15 bp, Homo sapiens
gtttcccttttactc

SEQ ID NO: 1321841 - DNA, 15 bp, Homo sapiens
ggtttcccttttact

SEQ ID NO: 1321842 - DNA, 15 bp, Homo sapiens
aggtttcccttttac

SEQ ID NO: 1321843 - DNA, 15 bp, Homo sapiens
caggtttccctttta

SEQ ID NO: 1321844 - DNA, 15 bp, Homo sapiens
ccaggtttccctttt

SEQ ID NO: 1321845 - DNA, 15 bp, Homo sapiens
gccaggtttcccttt

SEQ ID NO: 1321846 - DNA, 15 bp, Homo sapiens
tgccaggtttccctt

SEQ ID NO: 1321847 - DNA, 15 bp, Homo sapiens
atgccaggtttccct

SEQ ID NO: 1321848 - DNA, 15 bp, Homo sapiens
catgccaggtttccc

SEQ ID NO: 1321849 - DNA, 15 bp, Homo sapiens
gcatgccaggtttcc

SEQ ID NO: 1321850 - DNA, 15 bp, Homo sapiens
tgcatgccaggtttc

SEQ ID NO: 1321851 - DNA, 15 bp, Homo sapiens
atgcatgccaggttt

SEQ ID NO: 1321852 - DNA, 15 bp, Homo sapiens
catgcatgccaggtt

SEQ ID NO: 1321853 - DNA, 15 bp, Homo sapiens
acatgcatgccaggt

SEQ ID NO: 1321854 - DNA, 15 bp, Homo sapiens
aacatgcatgccagg

SEQ ID NO: 1321855 - DNA, 15 bp, Homo sapiens
aaacatgcatgccag

SEQ ID NO: 1321856 - DNA, 15 bp, Homo sapiens
taaacatgcatgcca

SEQ ID NO: 1321857 - DNA, 15 bp, Homo sapiens
ttaaacatgcatgcc

SEQ ID NO: 1321858 - DNA, 15 bp, Homo sapiens
attaaacatgcatgc

SEQ ID NO: 1321859 - DNA, 15 bp, Homo sapiens
tattaaacatgcatg

SEQ ID NO: 1321860 - DNA, 15 bp, Homo sapiens
ttattaaacatgcat

SEQ ID NO: 1321861 - DNA, 15 bp, Homo sapiens
tttattaaacatgca

SEQ ID NO: 1321862 - DNA, 15 bp, Homo sapiens
ctttattaaacatgc

SEQ ID NO: 1321863 - DNA, 15 bp, Homo sapiens
gctttattaaacatg

SEQ ID NO: 1321864 - DNA, 15 bp, Homo sapiens
agctttattaaacat

SEQ ID NO: 1321865 - DNA, 15 bp, Homo sapiens
aagctttattaaaca

SEQ ID NO: 1321866 - DNA, 15 bp, Homo sapiens
gaagctttattaaac

SEQ ID NO: 1321867 - DNA, 15 bp, Homo sapiens
ggaagctttattaaa

SEQ ID NO: 1321868 - DNA, 15 bp, Homo sapiens
aggaagctttattaa

SEQ ID NO: 1321869 - DNA, 15 bp, Homo sapiens
aaggaagctttatta

SEQ ID NO: 1321870 - DNA, 15 bp, Homo sapiens
caaggaagctttatt

SEQ ID NO: 1321871 - DNA, 15 bp, Homo sapiens
ccaaggaagctttat

SEQ ID NO: 1321872 - DNA, 15 bp, Homo sapiens
cccaaggaagcttta

SEQ ID NO: 1321873 - DNA, 15 bp, Homo sapiens
ccccaaggaagcttt

SEQ ID NO: 1321874 - DNA, 15 bp, Homo sapiens
tccccaaggaagctt

SEQ ID NO: 1321875 - DNA, 15 bp, Homo sapiens
gtccccaaggaagct

SEQ ID NO: 1321876 - DNA, 15 bp, Homo sapiens
agtccccaaggaagc

SEQ ID NO: 1321877 - DNA, 15 bp, Homo sapiens
gagtccccaaggaag

SEQ ID NO: 1321878 - DNA, 15 bp, Homo sapiens
agagtccccaaggaa

SEQ ID NO: 1321879 - DNA, 15 bp, Homo sapiens
cagagtccccaagga

SEQ ID NO: 1321880 - DNA, 15 bp, Homo sapiens
tcagagtccccaagg

SEQ ID NO: 1321881 - DNA, 15 bp, Homo sapiens
atcagagtccccaag

SEQ ID NO: 1321882 - DNA, 15 bp, Homo sapiens
tatcagagtccccaa

SEQ ID NO: 1321883 - DNA, 15 bp, Homo sapiens
atatcagagtcccca

SEQ ID NO: 1321884 - DNA, 15 bp, Homo sapiens
tatatcagagtcccc

SEQ ID NO: 1321885 - DNA, 15 bp, Homo sapiens
atatatcagagtccc

SEQ ID NO: 1321886 - DNA, 15 bp, Homo sapiens
catatatcagagtcc

SEQ ID NO: 1321887 - DNA, 15 bp, Homo sapiens
gcatatatcagagtc

SEQ ID NO: 1321888 - DNA, 15 bp, Homo sapiens
agcatatatcagagt

SEQ ID NO: 1321889 - DNA, 15 bp, Homo sapiens
cagcatatatcagag

SEQ ID NO: 1321890 - DNA, 15 bp, Homo sapiens
gcagcatatatcaga

SEQ ID NO: 1321891 - DNA, 15 bp, Homo sapiens
ggcagcatatatcag

SEQ ID NO: 1321892 - DNA, 15 bp, Homo sapiens
aggcagcatatatca

SEQ ID NO: 1321893 - DNA, 15 bp, Homo sapiens
gaggcagcatatatc

SEQ ID NO: 1321894 - DNA, 15 bp, Homo sapiens
ggaggcagcatatat

SEQ ID NO: 1321895 - DNA, 15 bp, Homo sapiens
gggaggcagcatata

SEQ ID NO: 1321896 - DNA, 15 bp, Homo sapiens
tgggaggcagcatat

SEQ ID NO: 1321897 - DNA, 15 bp, Homo sapiens
ttgggaggcagcata

SEQ ID NO: 1321898 - DNA, 15 bp, Homo sapiens
tttgggaggcagcat

SEQ ID NO: 1321899 - DNA, 15 bp, Homo sapiens
atttgggaggcagca

SEQ ID NO: 1321900 - DNA, 15 bp, Homo sapiens
tatttgggaggcagc

SEQ ID NO: 1321901 - DNA, 15 bp, Homo sapiens
ttatttgggaggcag

SEQ ID NO: 1321902 - DNA, 15 bp, Homo sapiens
tttatttgggaggca

SEQ ID NO: 1321903 - DNA, 15 bp, Homo sapiens
atttatttgggaggc

SEQ ID NO: 1321904 - DNA, 15 bp, Homo sapiens
aatttatttgggagg

SEQ ID NO: 1321905 - DNA, 15 bp, Homo sapiens
taatttatttgggag

SEQ ID NO: 1321906 - DNA, 15 bp, Homo sapiens
gtaatttatttggga

SEQ ID NO: 1321907 - DNA, 15 bp, Homo sapiens
tgtaatttatttggg

SEQ ID NO: 1321908 - DNA, 15 bp, Homo sapiens
ttgtaatttatttgg

SEQ ID NO: 1321909 - DNA, 15 bp, Homo sapiens
cttgtaatttatttg

SEQ ID NO: 1321910 - DNA, 15 bp, Homo sapiens
gcttgtaatttattt

SEQ ID NO: 1321911 - DNA, 15 bp, Homo sapiens
ggcttgtaatttatt

SEQ ID NO: 1321912 - DNA, 15 bp, Homo sapiens
tggcttgtaatttat

SEQ ID NO: 1321913 - DNA, 15 bp, Homo sapiens
atggcttgtaattta

SEQ ID NO: 1321914 - DNA, 15 bp, Homo sapiens
tatggcttgtaattt

SEQ ID NO: 1321915 - DNA, 15 bp, Homo sapiens
atatggcttgtaatt

SEQ ID NO: 1321916 - DNA, 15 bp, Homo sapiens
gatatggcttgtaat

SEQ ID NO: 1321917 - DNA, 15 bp, Homo sapiens
tgatatggcttgtaa

SEQ ID NO: 1321918 - DNA, 15 bp, Homo sapiens
ctgatatggcttgta

SEQ ID NO: 1321919 - DNA, 15 bp, Homo sapiens
cctgatatggcttgt

SEQ ID NO: 1321920 - DNA, 15 bp, Homo sapiens
tcctgatatggcttg

SEQ ID NO: 1321921 - DNA, 15 bp, Homo sapiens
ttcctgatatggctt

SEQ ID NO: 1321922 - DNA, 15 bp, Homo sapiens
tttcctgatatggct

SEQ ID NO: 1321923 - DNA, 15 bp, Homo sapiens
atttcctgatatggc

SEQ ID NO: 1321924 - DNA, 15 bp, Homo sapiens
tatttcctgatatgg

SEQ ID NO: 1321925 - DNA, 15 bp, Homo sapiens
ctatttcctgatatg

SEQ ID NO: 1321926 - DNA, 15 bp, Homo sapiens
cctatttcctgatat

SEQ ID NO: 1321927 - DNA, 15 bp, Homo sapiens
tcctatttcctgata

SEQ ID NO: 1321928 - DNA, 15 bp, Homo sapiens
ctcctatttcctgat

SEQ ID NO: 1321929 - DNA, 15 bp, Homo sapiens
actcctatttcctga

SEQ ID NO: 1321930 - DNA, 15 bp, Homo sapiens
aactcctatttcctg

SEQ ID NO: 1321931 - DNA, 15 bp, Homo sapiens
aaactcctatttcct

SEQ ID NO: 1321932 - DNA, 15 bp, Homo sapiens
taaactcctatttcc

SEQ ID NO: 1321933 - DNA, 15 bp, Homo sapiens
gtaaactcctatttc

SEQ ID NO: 1321934 - DNA, 15 bp, Homo sapiens
tgtaaactcctattt

SEQ ID NO: 1321935 - DNA, 15 bp, Homo sapiens
ctgtaaactcctatt

SEQ ID NO: 1321936 - DNA, 15 bp, Homo sapiens
actgtaaactcctat

SEQ ID NO: 1321937 - DNA, 15 bp, Homo sapiens
tactgtaaactccta

SEQ ID NO: 1321938 - DNA, 15 bp, Homo sapiens
atactgtaaactcct

SEQ ID NO: 1321939 - DNA, 15 bp, Homo sapiens
tatactgtaaactcc

SEQ ID NO: 1321940 - DNA, 15 bp, Homo sapiens
ttatactgtaaactc

SEQ ID NO: 1321941 - DNA, 15 bp, Homo sapiens
tttatactgtaaact

SEQ ID NO: 1321942 - DNA, 15 bp, Homo sapiens
ttttatactgtaaac

SEQ ID NO: 1321943 - DNA, 15 bp, Homo sapiens
attttatactgtaaa

SEQ ID NO: 1321944 - DNA, 15 bp, Homo sapiens
tattttatactgtaa

SEQ ID NO: 1321945 - DNA, 15 bp, Homo sapiens
atattttatactgta

SEQ ID NO: 1321946 - DNA, 15 bp, Homo sapiens
tatattttatactgt

SEQ ID NO: 1321947 - DNA, 15 bp, Homo sapiens
ttatattttatactg

SEQ ID NO: 1321948 - DNA, 15 bp, Homo sapiens
gttatattttatact

SEQ ID NO: 1321949 - DNA, 15 bp, Homo sapiens
ggttatattttatac

SEQ ID NO: 1321950 - DNA, 15 bp, Homo sapiens
cggttatattttata

SEQ ID NO: 1321951 - DNA, 15 bp, Homo sapiens
tcggttatattttat

SEQ ID NO: 1321952 - DNA, 15 bp, Homo sapiens
ttcggttatatttta

SEQ ID NO: 1321953 - DNA, 15 bp, Homo sapiens
tttcggttatatttt

SEQ ID NO: 1321954 - DNA, 15 bp, Homo sapiens
ttttcggttatattt

SEQ ID NO: 1321955 - DNA, 15 bp, Homo sapiens
gttttcggttatatt

SEQ ID NO: 1321956 - DNA, 15 bp, Homo sapiens
agttttcggttatat

SEQ ID NO: 1321957 - DNA, 15 bp, Homo sapiens
tagttttcggttata

SEQ ID NO: 1321958 - DNA, 15 bp, Homo sapiens
ttagttttcggttat

SEQ ID NO: 1321959 - DNA, 15 bp, Homo sapiens
tttagttttcggtta

SEQ ID NO: 1321960 - DNA, 15 bp, Homo sapiens
ctttagttttcggtt

SEQ ID NO: 1321961 - DNA, 15 bp, Homo sapiens
actttagttttcggt

SEQ ID NO: 1321962 - DNA, 15 bp, Homo sapiens
gactttagttttcgg

SEQ ID NO: 1321963 - DNA, 15 bp, Homo sapiens
tgactttagttttcg

SEQ ID NO: 1321964 - DNA, 15 bp, Homo sapiens
ctgactttagttttc

SEQ ID NO: 1321965 - DNA, 15 bp, Homo sapiens
tctgactttagtttt

SEQ ID NO: 1321966 - DNA, 15 bp, Homo sapiens
atctgactttagttt

SEQ ID NO: 1321967 - DNA, 15 bp, Homo sapiens
catctgactttagtt

SEQ ID NO: 1321968 - DNA, 15 bp, Homo sapiens
acatctgactttagt

SEQ ID NO: 1321969 - DNA, 15 bp, Homo sapiens
aacatctgactttag

SEQ ID NO: 1321970 - DNA, 15 bp, Homo sapiens
gaacatctgacttta

SEQ ID NO: 1321971 - DNA, 15 bp, Homo sapiens
agaacatctgacttt

SEQ ID NO: 1321972 - DNA, 15 bp, Homo sapiens
tagaacatctgactt

SEQ ID NO: 1321973 - DNA, 15 bp, Homo sapiens
gtagaacatctgact

SEQ ID NO: 1321974 - DNA, 15 bp, Homo sapiens
tgtagaacatctgac

SEQ ID NO: 1321975 - DNA, 15 bp, Homo sapiens
ttgtagaacatctga

SEQ ID NO: 1321976 - DNA, 15 bp, Homo sapiens
tttgtagaacatctg

SEQ ID NO: 1321977 - DNA, 15 bp, Homo sapiens
ttttgtagaacatct

SEQ ID NO: 1321978 - DNA, 15 bp, Homo sapiens
attttgtagaacatc

SEQ ID NO: 1321979 - DNA, 15 bp, Homo sapiens
tattttgtagaacat

SEQ ID NO: 1321980 - DNA, 15 bp, Homo sapiens
atattttgtagaaca

SEQ ID NO: 1321981 - DNA, 15 bp, Homo sapiens
aatattttgtagaac

SEQ ID NO: 1321982 - DNA, 15 bp, Homo sapiens
taatattttgtagaa

SEQ ID NO: 1321983 - DNA, 15 bp, Homo sapiens
ttaatattttgtaga

SEQ ID NO: 1321984 - DNA, 15 bp, Homo sapiens
gttaatattttgtag

SEQ ID NO: 1321985 - DNA, 15 bp, Homo sapiens
agttaatattttgta

SEQ ID NO: 1321986 - DNA, 15 bp, Homo sapiens
tagttaatattttgt

SEQ ID NO: 1321987 - DNA, 15 bp, Homo sapiens
atagttaatattttg

SEQ ID NO: 1321988 - DNA, 15 bp, Homo sapiens
aatagttaatatttt

SEQ ID NO: 1321989 - DNA, 15 bp, Homo sapiens
aaatagttaatattt

SEQ ID NO: 1321990 - DNA, 15 bp, Homo sapiens
aaaatagttaatatt

SEQ ID NO: 1321991 - DNA, 15 bp, Homo sapiens
aaaaatagttaatat

SEQ ID NO: 1321992 - DNA, 15 bp, Homo sapiens
gaaaaatagttaata

SEQ ID NO: 1321993 - DNA, 15 bp, Homo sapiens
ggaaaaatagttaat

SEQ ID NO: 1321994 - DNA, 15 bp, Homo sapiens
aggaaaaatagttaa

SEQ ID NO: 1321995 - DNA, 15 bp, Homo sapiens
caggaaaaatagtta

SEQ ID NO: 1321996 - DNA, 15 bp, Homo sapiens
tcaggaaaaatagtt

SEQ ID NO: 1321997 - DNA, 15 bp, Homo sapiens
ctcaggaaaaatagt

SEQ ID NO: 1321998 - DNA, 15 bp, Homo sapiens
tctcaggaaaaatag

SEQ ID NO: 1321999 - DNA, 15 bp, Homo sapiens
atctcaggaaaaata

SEQ ID NO: 1322000 - DNA, 15 bp, Homo sapiens
tatctcaggaaaaat

SEQ ID NO: 1322001 - DNA, 15 bp, Homo sapiens
ctatctcaggaaaaa

SEQ ID NO: 1322002 - DNA, 15 bp, Homo sapiens
tctatctcaggaaaa

SEQ ID NO: 1322003 - DNA, 15 bp, Homo sapiens
ttctatctcaggaaa

SEQ ID NO: 1322004 - DNA, 15 bp, Homo sapiens
cttctatctcaggaa

SEQ ID NO: 1322005 - DNA, 15 bp, Homo sapiens
acttctatctcagga

SEQ ID NO: 1322006 - DNA, 15 bp, Homo sapiens
cacttctatctcagg

SEQ ID NO: 1322007 - DNA, 15 bp, Homo sapiens
ccacttctatctcag

SEQ ID NO: 1322008 - DNA, 15 bp, Homo sapiens
accacttctatctca

SEQ ID NO: 1322009 - DNA, 15 bp, Homo sapiens
aaccacttctatctc

SEQ ID NO: 1322010 - DNA, 15 bp, Homo sapiens
caaccacttctatct

SEQ ID NO: 1322011 - DNA, 15 bp, Homo sapiens
tcaaccacttctatc

SEQ ID NO: 1322012 - DNA, 15 bp, Homo sapiens
ttcaaccacttctat

SEQ ID NO: 1322013 - DNA, 15 bp, Homo sapiens
tttcaaccacttcta

SEQ ID NO: 1322014 - DNA, 15 bp, Homo sapiens
atttcaaccacttct

SEQ ID NO: 1322015 - DNA, 15 bp, Homo sapiens
aatttcaaccacttc

SEQ ID NO: 1322016 - DNA, 15 bp, Homo sapiens
aaatttcaaccactt

SEQ ID NO: 1322017 - DNA, 15 bp, Homo sapiens
caaatttcaaccact

SEQ ID NO: 1322018 - DNA, 15 bp, Homo sapiens
ccaaatttcaaccac

SEQ ID NO: 1322019 - DNA, 15 bp, Homo sapiens
cccaaatttcaacca

SEQ ID NO: 1322020 - DNA, 15 bp, Homo sapiens
tcccaaatttcaacc

SEQ ID NO: 1322021 - DNA, 15 bp, Homo sapiens
ctcccaaatttcaac

SEQ ID NO: 1322022 - DNA, 15 bp, Homo sapiens
tctcccaaatttcaa

SEQ ID NO: 1322023 - DNA, 15 bp, Homo sapiens
atctcccaaatttca

SEQ ID NO: 1322024 - DNA, 15 bp, Homo sapiens
tatctcccaaatttc

SEQ ID NO: 1322025 - DNA, 15 bp, Homo sapiens
ttatctcccaaattt

SEQ ID NO: 1322026 - DNA, 15 bp, Homo sapiens
gttatctcccaaatt

SEQ ID NO: 1322027 - DNA, 15 bp, Homo sapiens
agttatctcccaaat

SEQ ID NO: 1322028 - DNA, 15 bp, Homo sapiens
aagttatctcccaaa

SEQ ID NO: 1322029 - DNA, 15 bp, Homo sapiens
aaagttatctcccaa

SEQ ID NO: 1322030 - DNA, 15 bp, Homo sapiens
aaaagttatctccca

SEQ ID NO: 1322031 - DNA, 15 bp, Homo sapiens
caaaagttatctccc

SEQ ID NO: 1322032 - DNA, 15 bp, Homo sapiens
gcaaaagttatctcc

SEQ ID NO: 1322033 - DNA, 15 bp, Homo sapiens
agcaaaagttatctc

SEQ ID NO: 1322034 - DNA, 15 bp, Homo sapiens
tagcaaaagttatct

SEQ ID NO: 1322035 - DNA, 15 bp, Homo sapiens
atagcaaaagttatc

SEQ ID NO: 1322036 - DNA, 15 bp, Homo sapiens
catagcaaaagttat

SEQ ID NO: 1322037 - DNA, 15 bp, Homo sapiens
acatagcaaaagtta

SEQ ID NO: 1322038 - DNA, 15 bp, Homo sapiens
aacatagcaaaagtt

SEQ ID NO: 1322039 - DNA, 15 bp, Homo sapiens
gaacatagcaaaagt

SEQ ID NO: 1322040 - DNA, 15 bp, Homo sapiens
agaacatagcaaaag

SEQ ID NO: 1322041 - DNA, 15 bp, Homo sapiens
cagaacatagcaaaa

SEQ ID NO: 1322042 - DNA, 15 bp, Homo sapiens
acagaacatagcaaa

SEQ ID NO: 1322043 - DNA, 15 bp, Homo sapiens
cacagaacatagcaa

SEQ ID NO: 1322044 - DNA, 15 bp, Homo sapiens
tcacagaacatagca

SEQ ID NO: 1322045 - DNA, 15 bp, Homo sapiens
ctcacagaacatagc

SEQ ID NO: 1322046 - DNA, 15 bp, Homo sapiens
cctcacagaacatag

SEQ ID NO: 1322047 - DNA, 15 bp, Homo sapiens
gcctcacagaacata

SEQ ID NO: 1322048 - DNA, 15 bp, Homo sapiens
tgcctcacagaacat

SEQ ID NO: 1322049 - DNA, 15 bp, Homo sapiens
ttgcctcacagaaca

SEQ ID NO: 1322050 - DNA, 15 bp, Homo sapiens
tttgcctcacagaac

SEQ ID NO: 1322051 - DNA, 15 bp, Homo sapiens
ctttgcctcacagaa

SEQ ID NO: 1322052 - DNA, 15 bp, Homo sapiens
tctttgcctcacaga

SEQ ID NO: 1322053 - DNA, 15 bp, Homo sapiens
ctctttgcctcacag

SEQ ID NO: 1322054 - DNA, 15 bp, Homo sapiens
cctctttgcctcaca

SEQ ID NO: 1322055 - DNA, 15 bp, Homo sapiens
tcctctttgcctcac

SEQ ID NO: 1322056 - DNA, 15 bp, Homo sapiens
ctcctctttgcctca

SEQ ID NO: 1322057 - DNA, 15 bp, Homo sapiens
cctcctctttgcctc

SEQ ID NO: 1322058 - DNA, 15 bp, Homo sapiens
ccctcctctttgcct

SEQ ID NO: 1322059 - DNA, 15 bp, Homo sapiens
tccctcctctttgcc

SEQ ID NO: 1322060 - DNA, 15 bp, Homo sapiens
ctccctcctctttgc

SEQ ID NO: 1322061 - DNA, 15 bp, Homo sapiens
cctccctcctctttg

SEQ ID NO: 1322062 - DNA, 15 bp, Homo sapiens
gcctccctcctcttt

SEQ ID NO: 1322063 - DNA, 15 bp, Homo sapiens
agcctccctcctctt

SEQ ID NO: 1322064 - DNA, 15 bp, Homo sapiens
tagcctccctcctct

SEQ ID NO: 1322065 - DNA, 15 bp, Homo sapiens
ctagcctccctcctc

SEQ ID NO: 1322066 - DNA, 15 bp, Homo sapiens
tctagcctccctcct

SEQ ID NO: 1322067 - DNA, 15 bp, Homo sapiens
ctctagcctccctcc

SEQ ID NO: 1322068 - DNA, 15 bp, Homo sapiens
actctagcctccctc

SEQ ID NO: 1322069 - DNA, 15 bp, Homo sapiens
aactctagcctccct

SEQ ID NO: 1322070 - DNA, 15 bp, Homo sapiens
caactctagcctccc

SEQ ID NO: 1322071 - DNA, 15 bp, Homo sapiens
tcaactctagcctcc

SEQ ID NO: 1322072 - DNA, 15 bp, Homo sapiens
atcaactctagcctc

SEQ ID NO: 1322073 - DNA, 15 bp, Homo sapiens
catcaactctagcct

SEQ ID NO: 1322074 - DNA, 15 bp, Homo sapiens
tcatcaactctagcc

SEQ ID NO: 1322075 - DNA, 15 bp, Homo sapiens
ttcatcaactctagc

SEQ ID NO: 1322076 - DNA, 15 bp, Homo sapiens
cttcatcaactctag

SEQ ID NO: 1322077 - DNA, 15 bp, Homo sapiens
tcttcatcaactcta

SEQ ID NO: 1322078 - DNA, 15 bp, Homo sapiens
gtcttcatcaactct

SEQ ID NO: 1322079 - DNA, 15 bp, Homo sapiens
tgtcttcatcaactc

SEQ ID NO: 1322080 - DNA, 15 bp, Homo sapiens
atgtcttcatcaact

SEQ ID NO: 1322081 - DNA, 15 bp, Homo sapiens
gatgtcttcatcaac

SEQ ID NO: 1322082 - DNA, 15 bp, Homo sapiens
agatgtcttcatcaa

SEQ ID NO: 1322083 - DNA, 15 bp, Homo sapiens
aagatgtcttcatca

SEQ ID NO: 1322084 - DNA, 15 bp, Homo sapiens
aaagatgtcttcatc

SEQ ID NO: 1322085 - DNA, 15 bp, Homo sapiens
gaaagatgtcttcat

SEQ ID NO: 1322086 - DNA, 15 bp, Homo sapiens
agaaagatgtcttca

SEQ ID NO: 1322087 - DNA, 15 bp, Homo sapiens
aagaaagatgtcttc

SEQ ID NO: 1322088 - DNA, 15 bp, Homo sapiens
aaagaaagatgtctt

SEQ ID NO: 1322089 - DNA, 15 bp, Homo sapiens
aaaagaaagatgtct

SEQ ID NO: 1322090 - DNA, 15 bp, Homo sapiens
taaaagaaagatgtc

SEQ ID NO: 1322091 - DNA, 15 bp, Homo sapiens
ataaaagaaagatgt

SEQ ID NO: 1322092 - DNA, 15 bp, Homo sapiens
cataaaagaaagatg

SEQ ID NO: 1322093 - DNA, 15 bp, Homo sapiens
acataaaagaaagat

SEQ ID NO: 1322094 - DNA, 15 bp, Homo sapiens
tacataaaagaaaga

SEQ ID NO: 1322095 - DNA, 15 bp, Homo sapiens
atacataaaagaaag

SEQ ID NO: 1322096 - DNA, 15 bp, Homo sapiens
catacataaaagaaa

SEQ ID NO: 1322097 - DNA, 15 bp, Homo sapiens
tcatacataaaagaa

SEQ ID NO: 1322098 - DNA, 15 bp, Homo sapiens
atcatacataaaaga

SEQ ID NO: 1322099 - DNA, 15 bp, Homo sapiens
tatcatacataaaag

SEQ ID NO: 1322100 - DNA, 15 bp, Homo sapiens
atatcatacataaaa

SEQ ID NO: 1322101 - DNA, 15 bp, Homo sapiens
aatatcatacataaa

SEQ ID NO: 1322102 - DNA, 15 bp, Homo sapiens
caatatcatacataa

SEQ ID NO: 1322103 - DNA, 15 bp, Homo sapiens
acaatatcatacata

SEQ ID NO: 1322104 - DNA, 15 bp, Homo sapiens
gacaatatcatacat

SEQ ID NO: 1322105 - DNA, 15 bp, Homo sapiens
agacaatatcataca

SEQ ID NO: 1322106 - DNA, 15 bp, Homo sapiens
tagacaatatcatac

SEQ ID NO: 1322107 - DNA, 15 bp, Homo sapiens
atagacaatatcata

SEQ ID NO: 1322108 - DNA, 15 bp, Homo sapiens
catagacaatatcat

SEQ ID NO: 1322109 - DNA, 15 bp, Homo sapiens
acatagacaatatca

SEQ ID NO: 1322110 - DNA, 15 bp, Homo sapiens
aacatagacaatatc

SEQ ID NO: 1322111 - DNA, 15 bp, Homo sapiens
caacatagacaatat

SEQ ID NO: 1322112 - DNA, 15 bp, Homo sapiens
ccaacatagacaata

SEQ ID NO: 1322113 - DNA, 15 bp, Homo sapiens
cccaacatagacaat

SEQ ID NO: 1322114 - DNA, 15 bp, Homo sapiens
gcccaacatagacaa

SEQ ID NO: 1322115 - DNA, 15 bp, Homo sapiens
ggcccaacatagaca

SEQ ID NO: 1322116 - DNA, 15 bp, Homo sapiens
gggcccaacatagac

SEQ ID NO: 1322117 - DNA, 15 bp, Homo sapiens
agggcccaacataga

SEQ ID NO: 1322118 - DNA, 15 bp, Homo sapiens
cagggcccaacatag

SEQ ID NO: 1322119 - DNA, 15 bp, Homo sapiens
acagggcccaacata

SEQ ID NO: 1322120 - DNA, 15 bp, Homo sapiens
aacagggcccaacat

SEQ ID NO: 1322121 - DNA, 15 bp, Homo sapiens
taacagggcccaaca

SEQ ID NO: 1322122 - DNA, 15 bp, Homo sapiens
ttaacagggcccaac

SEQ ID NO: 1322123 - DNA, 15 bp, Homo sapiens
attaacagggcccaa

SEQ ID NO: 1322124 - DNA, 15 bp, Homo sapiens
aattaacagggccca

SEQ ID NO: 1322125 - DNA, 15 bp, Homo sapiens
aaattaacagggccc

SEQ ID NO: 1322126 - DNA, 15 bp, Homo sapiens
aaaattaacagggcc

SEQ ID NO: 1322127 - DNA, 15 bp, Homo sapiens
gaaaattaacagggc

SEQ ID NO: 1322128 - DNA, 15 bp, Homo sapiens
tgaaaattaacaggg

SEQ ID NO: 1322129 - DNA, 15 bp, Homo sapiens
atgaaaattaacagg

SEQ ID NO: 1322130 - DNA, 15 bp, Homo sapiens
aatgaaaattaacag

SEQ ID NO: 1322131 - DNA, 15 bp, Homo sapiens
aaatgaaaattaaca

SEQ ID NO: 1322132 - DNA, 15 bp, Homo sapiens
taaatgaaaattaac

SEQ ID NO: 1322133 - DNA, 15 bp, Homo sapiens
gtaaatgaaaattaa

SEQ ID NO: 1322134 - DNA, 15 bp, Homo sapiens
agtaaatgaaaatta

SEQ ID NO: 1322135 - DNA, 15 bp, Homo sapiens
aagtaaatgaaaatt

SEQ ID NO: 1322136 - DNA, 15 bp, Homo sapiens
taagtaaatgaaaat

SEQ ID NO: 1322137 - DNA, 15 bp, Homo sapiens
ataagtaaatgaaaa

SEQ ID NO: 1322138 - DNA, 15 bp, Homo sapiens
cataagtaaatgaaa

SEQ ID NO: 1322139 - DNA, 15 bp, Homo sapiens
acataagtaaatgaa

SEQ ID NO: 1322140 - DNA, 15 bp, Homo sapiens
tacataagtaaatga

SEQ ID NO: 1322141 - DNA, 15 bp, Homo sapiens
gtacataagtaaatg

SEQ ID NO: 1322142 - DNA, 15 bp, Homo sapiens
tgtacataagtaaat

SEQ ID NO: 1322143 - DNA, 15 bp, Homo sapiens
ttgtacataagtaaa

SEQ ID NO: 1322144 - DNA, 15 bp, Homo sapiens
tttgtacataagtaa

SEQ ID NO: 1322145 - DNA, 15 bp, Homo sapiens
atttgtacataagta

SEQ ID NO: 1322146 - DNA, 15 bp, Homo sapiens
tatttgtacataagt

SEQ ID NO: 1322147 - DNA, 15 bp, Homo sapiens
ctatttgtacataag

SEQ ID NO: 1322148 - DNA, 15 bp, Homo sapiens
gctatttgtacataa

SEQ ID NO: 1322149 - DNA, 15 bp, Homo sapiens
agctatttgtacata

SEQ ID NO: 1322150 - DNA, 15 bp, Homo sapiens
tagctatttgtacat

SEQ ID NO: 1322151 - DNA, 15 bp, Homo sapiens
ttagctatttgtaca

SEQ ID NO: 1322152 - DNA, 15 bp, Homo sapiens
attagctatttgtac

SEQ ID NO: 1322153 - DNA, 15 bp, Homo sapiens
cattagctatttgta

SEQ ID NO: 1322154 - DNA, 15 bp, Homo sapiens
gcattagctatttgt

SEQ ID NO: 1322155 - DNA, 15 bp, Homo sapiens
tgcattagctatttg

SEQ ID NO: 1322156 - DNA, 15 bp, Homo sapiens
atgcattagctattt

SEQ ID NO: 1322157 - DNA, 15 bp, Homo sapiens
tatgcattagctatt

SEQ ID NO: 1322158 - DNA, 15 bp, Homo sapiens
atatgcattagctat

SEQ ID NO: 1322159 - DNA, 15 bp, Homo sapiens
aatatgcattagcta

SEQ ID NO: 1322160 - DNA, 15 bp, Homo sapiens
aaatatgcattagct

SEQ ID NO: 1322161 - DNA, 15 bp, Homo sapiens
aaaatatgcattagc

SEQ ID NO: 1322162 - DNA, 15 bp, Homo sapiens
aaaaatatgcattag

SEQ ID NO: 1322163 - DNA, 15 bp, Homo sapiens
aaaaaatatgcatta

SEQ ID NO: 1322164 - DNA, 15 bp, Homo sapiens
taaaaaatatgcatt

SEQ ID NO: 1322165 - DNA, 15 bp, Homo sapiens
ttaaaaaatatgcat

SEQ ID NO: 1322166 - DNA, 15 bp, Homo sapiens
gttaaaaaatatgca

SEQ ID NO: 1322167 - DNA, 15 bp, Homo sapiens
agttaaaaaatatgc

SEQ ID NO: 1322168 - DNA, 15 bp, Homo sapiens
aagttaaaaaatatg

SEQ ID NO: 1322169 - DNA, 15 bp, Homo sapiens
aaagttaaaaaatat

SEQ ID NO: 1322170 - DNA, 15 bp, Homo sapiens
taaagttaaaaaata

SEQ ID NO: 1322171 - DNA, 15 bp, Homo sapiens
ttaaagttaaaaaat

SEQ ID NO: 1322172 - DNA, 15 bp, Homo sapiens
attaaagttaaaaaa

SEQ ID NO: 1322173 - DNA, 15 bp, Homo sapiens
cattaaagttaaaaa

SEQ ID NO: 1322174 - DNA, 15 bp, Homo sapiens
acattaaagttaaaa

SEQ ID NO: 1322175 - DNA, 15 bp, Homo sapiens
aacattaaagttaaa

SEQ ID NO: 1322176 - DNA, 15 bp, Homo sapiens
aaacattaaagttaa

SEQ ID NO: 1322177 - DNA, 15 bp, Homo sapiens
caaacattaaagtta

SEQ ID NO: 1322178 - DNA, 15 bp, Homo sapiens
acaaacattaaagtt

SEQ ID NO: 1322179 - DNA, 15 bp, Homo sapiens
aacaaacattaaagt

SEQ ID NO: 1322180 - DNA, 15 bp, Homo sapiens
taacaaacattaaag

SEQ ID NO: 1322181 - DNA, 15 bp, Homo sapiens
ataacaaacattaaa

SEQ ID NO: 1322182 - DNA, 15 bp, Homo sapiens
aataacaaacattaa

SEQ ID NO: 1322183 - DNA, 15 bp, Homo sapiens
aaataacaaacatta

SEQ ID NO: 1322184 - DNA, 15 bp, Homo sapiens
taaataacaaacatt

SEQ ID NO: 1322185 - DNA, 15 bp, Homo sapiens
gtaaataacaaacat

SEQ ID NO: 1322186 - DNA, 15 bp, Homo sapiens
tgtaaataacaaaca

SEQ ID NO: 1322187 - DNA, 15 bp, Homo sapiens
atgtaaataacaaac

SEQ ID NO: 1322188 - DNA, 15 bp, Homo sapiens
catgtaaataacaaa

SEQ ID NO: 1322189 - DNA, 15 bp, Homo sapiens
gcatgtaaataacaa

SEQ ID NO: 1322190 - DNA, 15 bp, Homo sapiens
tgcatgtaaataaca

SEQ ID NO: 1322191 - DNA, 15 bp, Homo sapiens
atgcatgtaaataac

SEQ ID NO: 1322192 - DNA, 15 bp, Homo sapiens
tatgcatgtaaataa

SEQ ID NO: 1322193 - DNA, 15 bp, Homo sapiens
ctatgcatgtaaata

SEQ ID NO: 1322194 - DNA, 15 bp, Homo sapiens
gctatgcatgtaaat

SEQ ID NO: 1322195 - DNA, 15 bp, Homo sapiens
ggctatgcatgtaaa

SEQ ID NO: 1322196 - DNA, 15 bp, Homo sapiens
aggctatgcatgtaa

SEQ ID NO: 1322197 - DNA, 15 bp, Homo sapiens
caggctatgcatgta

SEQ ID NO: 1322198 - DNA, 15 bp, Homo sapiens
tcaggctatgcatgt

SEQ ID NO: 1322199 - DNA, 15 bp, Homo sapiens
atcaggctatgcatg

SEQ ID NO: 1322200 - DNA, 15 bp, Homo sapiens
catcaggctatgcat

SEQ ID NO: 1322201 - DNA, 15 bp, Homo sapiens
ccatcaggctatgca

SEQ ID NO: 1322202 - DNA, 15 bp, Homo sapiens
cccatcaggctatgc

SEQ ID NO: 1322203 - DNA, 15 bp, Homo sapiens
gcccatcaggctatg

SEQ ID NO: 1322204 - DNA, 15 bp, Homo sapiens
tgcccatcaggctat

SEQ ID NO: 1322205 - DNA, 15 bp, Homo sapiens
gtgcccatcaggcta

SEQ ID NO: 1322206 - DNA, 15 bp, Homo sapiens
tgtgcccatcaggct

SEQ ID NO: 1322207 - DNA, 15 bp, Homo sapiens
atgtgcccatcaggc

SEQ ID NO: 1322208 - DNA, 15 bp, Homo sapiens
catgtgcccatcagg

SEQ ID NO: 1322209 - DNA, 15 bp, Homo sapiens
tcatgtgcccatcag

SEQ ID NO: 1322210 - DNA, 15 bp, Homo sapiens
atcatgtgcccatca

SEQ ID NO: 1322211 - DNA, 15 bp, Homo sapiens
gatcatgtgcccatc

SEQ ID NO: 1322212 - DNA, 15 bp, Homo sapiens
ggatcatgtgcccat

SEQ ID NO: 1322213 - DNA, 15 bp, Homo sapiens
tggatcatgtgccca

SEQ ID NO: 1322214 - DNA, 15 bp, Homo sapiens
ttggatcatgtgccc

SEQ ID NO: 1322215 - DNA, 15 bp, Homo sapiens
tttggatcatgtgcc

SEQ ID NO: 1322216 - DNA, 15 bp, Homo sapiens
ctttggatcatgtgc

SEQ ID NO: 1322217 - DNA, 15 bp, Homo sapiens
actttggatcatgtg

SEQ ID NO: 1322218 - DNA, 15 bp, Homo sapiens
aactttggatcatgt

SEQ ID NO: 1322219 - DNA, 15 bp, Homo sapiens
aaactttggatcatg

SEQ ID NO: 1322220 - DNA, 15 bp, Homo sapiens
taaactttggatcat

SEQ ID NO: 1322221 - DNA, 15 bp, Homo sapiens
ttaaactttggatca

SEQ ID NO: 1322222 - DNA, 15 bp, Homo sapiens
attaaactttggatc

SEQ ID NO: 1322223 - DNA, 15 bp, Homo sapiens
aattaaactttggat

SEQ ID NO: 1322224 - DNA, 15 bp, Homo sapiens
aaattaaactttgga

SEQ ID NO: 1322225 - DNA, 15 bp, Homo sapiens
aaaattaaactttgg

SEQ ID NO: 1322226 - DNA, 15 bp, Homo sapiens
aaaaattaaactttg

SEQ ID NO: 1322227 - DNA, 15 bp, Homo sapiens
aaaaaattaaacttt

SEQ ID NO: 1322228 - DNA, 15 bp, Homo sapiens
caaaaaattaaactt

SEQ ID NO: 1322229 - DNA, 15 bp, Homo sapiens
ccaaaaaattaaact

SEQ ID NO: 1322230 - DNA, 15 bp, Homo sapiens
accaaaaaattaaac

SEQ ID NO: 1322231 - DNA, 15 bp, Homo sapiens
tcaaccaaaaaatta

SEQ ID NO: 1322232 - DNA, 15 bp, Homo sapiens
ttcaaccaaaaaatt

SEQ ID NO: 1322233 - DNA, 15 bp, Homo sapiens
tttcaaccaaaaaat

SEQ ID NO: 1322234 - DNA, 15 bp, Homo sapiens
atttcaaccaaaaaa

SEQ ID NO: 1322235 - DNA, 15 bp, Homo sapiens
aatttcaaccaaaaa

SEQ ID NO: 1322236 - DNA, 15 bp, Homo sapiens
aaatttcaaccaaaa

SEQ ID NO: 1322237 - DNA, 15 bp, Homo sapiens
taaatttcaaccaaa

SEQ ID NO: 1322238 - DNA, 15 bp, Homo sapiens
ctaaatttcaaccaa

SEQ ID NO: 1322239 - DNA, 15 bp, Homo sapiens
actaaatttcaacca

SEQ ID NO: 1322240 - DNA, 15 bp, Homo sapiens
tactaaatttcaacc

SEQ ID NO: 1322241 - DNA, 15 bp, Homo sapiens
atactaaatttcaac

SEQ ID NO: 1322242 - DNA, 15 bp, Homo sapiens
aatactaaatttcaa

SEQ ID NO: 1322243 - DNA, 15 bp, Homo sapiens
aaatactaaatttca

SEQ ID NO: 1322244 - DNA, 15 bp, Homo sapiens
caaatactaaatttc

SEQ ID NO: 1322245 - DNA, 15 bp, Homo sapiens
ccaaatactaaattt

SEQ ID NO: 1322246 - DNA, 15 bp, Homo sapiens
gccaaatactaaatt

SEQ ID NO: 1322247 - DNA, 15 bp, Homo sapiens
agccaaatactaaat

SEQ ID NO: 1322248 - DNA, 15 bp, Homo sapiens
aagccaaatactaaa

SEQ ID NO: 1322249 - DNA, 15 bp, Homo sapiens
gaagccaaatactaa

SEQ ID NO: 1322250 - DNA, 15 bp, Homo sapiens
tgaagccaaatacta

SEQ ID NO: 1322251 - DNA, 15 bp, Homo sapiens
atgaagccaaatact

SEQ ID NO: 1322252 - DNA, 15 bp, Homo sapiens
tatgaagccaaatac

SEQ ID NO: 1322253 - DNA, 15 bp, Homo sapiens
atatgaagccaaata

SEQ ID NO: 1322254 - DNA, 15 bp, Homo sapiens
tatatgaagccaaat

SEQ ID NO: 1322255 - DNA, 15 bp, Homo sapiens
atatatgaagccaaa

SEQ ID NO: 1322256 - DNA, 15 bp, Homo sapiens
tatatatgaagccaa

SEQ ID NO: 1322257 - DNA, 15 bp, Homo sapiens
atatatatgaagcca

SEQ ID NO: 1322258 - DNA, 15 bp, Homo sapiens
tatatatatgaagcc

SEQ ID NO: 1322259 - DNA, 15 bp, Homo sapiens
ttatatatatgaagc

SEQ ID NO: 1322260 - DNA, 15 bp, Homo sapiens
tttatatatatgaag

SEQ ID NO: 1322261 - DNA, 15 bp, Homo sapiens
ctttatatatatgaa

SEQ ID NO: 1322262 - DNA, 15 bp, Homo sapiens
tctttatatatatga

SEQ ID NO: 1322263 - DNA, 15 bp, Homo sapiens
atctttatatatatg

SEQ ID NO: 1322264 - DNA, 15 bp, Homo sapiens
aatctttatatatat

SEQ ID NO: 1322265 - DNA, 15 bp, Homo sapiens
caatctttatatata

SEQ ID NO: 1322266 - DNA, 15 bp, Homo sapiens
ccaatctttatatat

SEQ ID NO: 1322267 - DNA, 15 bp, Homo sapiens
cccaatctttatata

SEQ ID NO: 1322268 - DNA, 15 bp, Homo sapiens
ccccaatctttatat

SEQ ID NO: 1322269 - DNA, 15 bp, Homo sapiens
accccaatctttata

SEQ ID NO: 1322270 - DNA, 15 bp, Homo sapiens
taccccaatctttat

SEQ ID NO: 1322271 - DNA, 15 bp, Homo sapiens
ttaccccaatcttta

SEQ ID NO: 1322272 - DNA, 15 bp, Homo sapiens
cttaccccaatcttt

SEQ ID NO: 1322273 - DNA, 15 bp, Homo sapiens
ccttaccccaatctt

SEQ ID NO: 1322274 - DNA, 15 bp, Homo sapiens
gccttaccccaatct

SEQ ID NO: 1322275 - DNA, 15 bp, Homo sapiens
cgccttaccccaatc

SEQ ID NO: 1322276 - DNA, 15 bp, Homo sapiens
tcgccttaccccaat

SEQ ID NO: 1322277 - DNA, 15 bp, Homo sapiens
atcgccttaccccaa

SEQ ID NO: 1322278 - DNA, 15 bp, Homo sapiens
gatcgccttacccca

SEQ ID NO: 1322279 - DNA, 15 bp, Homo sapiens
agatcgccttacccc

SEQ ID NO: 1322280 - DNA, 15 bp, Homo sapiens
cagatcgccttaccc

SEQ ID NO: 1322281 - DNA, 15 bp, Homo sapiens
gcagatcgccttacc

SEQ ID NO: 1322282 - DNA, 15 bp, Homo sapiens
ggcagatcgccttac

SEQ ID NO: 1322283 - DNA, 15 bp, Homo sapiens
aggcagatcgcctta

SEQ ID NO: 1322284 - DNA, 15 bp, Homo sapiens
aaggcagatcgcctt

SEQ ID NO: 1322285 - DNA, 15 bp, Homo sapiens
caaggcagatcgcct

SEQ ID NO: 1322286 - DNA, 15 bp, Homo sapiens
gcaaggcagatcgcc

SEQ ID NO: 1322287 - DNA, 15 bp, Homo sapiens
ggcaaggcagatcgc

SEQ ID NO: 1322288 - DNA, 15 bp, Homo sapiens
aggcaaggcagatcg

SEQ ID NO: 1322289 - DNA, 15 bp, Homo sapiens
aaggcaaggcagatc

SEQ ID NO: 1322290 - DNA, 15 bp, Homo sapiens
aaaggcaaggcagat

SEQ ID NO: 1322291 - DNA, 15 bp, Homo sapiens
gaaaggcaaggcaga

SEQ ID NO: 1322292 - DNA, 15 bp, Homo sapiens
agaaaggcaaggcag

SEQ ID NO: 1322293 - DNA, 15 bp, Homo sapiens
aagaaaggcaaggca

SEQ ID NO: 1322294 - DNA, 15 bp, Homo sapiens
gaagaaaggcaaggc

SEQ ID NO: 1322295 - DNA, 15 bp, Homo sapiens
agaagaaaggcaagg

SEQ ID NO: 1322296 - DNA, 15 bp, Homo sapiens
tagaagaaaggcaag

SEQ ID NO: 1322297 - DNA, 15 bp, Homo sapiens
gtagaagaaaggcaa

SEQ ID NO: 1322298 - DNA, 15 bp, Homo sapiens
agtagaagaaaggca

SEQ ID NO: 1322299 - DNA, 15 bp, Homo sapiens
cagtagaagaaaggc

SEQ ID NO: 1322300 - DNA, 15 bp, Homo sapiens
acagtagaagaaagg

SEQ ID NO: 1322301 - DNA, 15 bp, Homo sapiens
cacagtagaagaaag

SEQ ID NO: 1322302 - DNA, 15 bp, Homo sapiens
acacagtagaagaaa

SEQ ID NO: 1322303 - DNA, 15 bp, Homo sapiens
gacacagtagaagaa

SEQ ID NO: 1322304 - DNA, 15 bp, Homo sapiens
tgacacagtagaaga

SEQ ID NO: 1322305 - DNA, 15 bp, Homo sapiens
ttgacacagtagaag

SEQ ID NO: 1322306 - DNA, 15 bp, Homo sapiens
tttgacacagtagaa

SEQ ID NO: 1322307 - DNA, 15 bp, Homo sapiens
ctttgacacagtaga

SEQ ID NO: 1322308 - DNA, 15 bp, Homo sapiens
tctttgacacagtag

SEQ ID NO: 1322309 - DNA, 15 bp, Homo sapiens
ttctttgacacagta

SEQ ID NO: 1322310 - DNA, 15 bp, Homo sapiens
attctttgacacagt

SEQ ID NO: 1322311 - DNA, 15 bp, Homo sapiens
aattctttgacacag

SEQ ID NO: 1322312 - DNA, 15 bp, Homo sapiens
aaattctttgacaca

SEQ ID NO: 1322313 - DNA, 15 bp, Homo sapiens
taaattctttgacac

SEQ ID NO: 1322314 - DNA, 15 bp, Homo sapiens
ataaattctttgaca

SEQ ID NO: 1322315 - DNA, 15 bp, Homo sapiens
cataaattctttgac

SEQ ID NO: 1322316 - DNA, 15 bp, Homo sapiens
tcataaattctttga

SEQ ID NO: 1322317 - DNA, 15 bp, Homo sapiens
atcataaattctttg

SEQ ID NO: 1322318 - DNA, 15 bp, Homo sapiens
gatcataaattcttt

SEQ ID NO: 1322319 - DNA, 15 bp, Homo sapiens
tgatcataaattctt

SEQ ID NO: 1322320 - DNA, 15 bp, Homo sapiens
ttgatcataaattct

SEQ ID NO: 1322321 - DNA, 15 bp, Homo sapiens
cttgatcataaattc

SEQ ID NO: 1322322 - DNA, 15 bp, Homo sapiens
ccttgatcataaatt

SEQ ID NO: 1322323 - DNA, 15 bp, Homo sapiens
cccttgatcataaat

SEQ ID NO: 1322324 - DNA, 15 bp, Homo sapiens
gcccttgatcataaa

SEQ ID NO: 1322325 - DNA, 15 bp, Homo sapiens
agcccttgatcataa

SEQ ID NO: 1322326 - DNA, 15 bp, Homo sapiens
tagcccttgatcata

SEQ ID NO: 1322327 - DNA, 15 bp, Homo sapiens
ctagcccttgatcat

SEQ ID NO: 1322328 - DNA, 15 bp, Homo sapiens
tctagcccttgatca

SEQ ID NO: 1322329 - DNA, 15 bp, Homo sapiens
ctctagcccttgatc

SEQ ID NO: 1322330 - DNA, 15 bp, Homo sapiens
actctagcccttgat

SEQ ID NO: 1322331 - DNA, 15 bp, Homo sapiens
gactctagcccttga

SEQ ID NO: 1322332 - DNA, 15 bp, Homo sapiens
tgactctagcccttg

SEQ ID NO: 1322333 - DNA, 15 bp, Homo sapiens
ctgactctagccctt

SEQ ID NO: 1322334 - DNA, 15 bp, Homo sapiens
actgactctagccct

SEQ ID NO: 1322335 - DNA, 15 bp, Homo sapiens
tactgactctagccc

SEQ ID NO: 1322336 - DNA, 15 bp, Homo sapiens
atactgactctagcc

SEQ ID NO: 1322337 - DNA, 15 bp, Homo sapiens
aatactgactctagc

SEQ ID NO: 1322338 - DNA, 15 bp, Homo sapiens
taatactgactctag

SEQ ID NO: 1322339 - DNA, 15 bp, Homo sapiens
ttaatactgactcta

SEQ ID NO: 1322340 - DNA, 15 bp, Homo sapiens
attaatactgactct

SEQ ID NO: 1322341 - DNA, 15 bp, Homo sapiens
aattaatactgactc

SEQ ID NO: 1322342 - DNA, 15 bp, Homo sapiens
taattaatactgact

SEQ ID NO: 1322343 - DNA, 15 bp, Homo sapiens
ataattaatactgac

SEQ ID NO: 1322344 - DNA, 15 bp, Homo sapiens
tataattaatactga

SEQ ID NO: 1322345 - DNA, 15 bp, Homo sapiens
atataattaatactg

SEQ ID NO: 1322346 - DNA, 15 bp, Homo sapiens
catataattaatact

SEQ ID NO: 1322347 - DNA, 15 bp, Homo sapiens
tcatataattaatac

SEQ ID NO: 1322348 - DNA, 15 bp, Homo sapiens
atcatataattaata

SEQ ID NO: 1322349 - DNA, 15 bp, Homo sapiens
aatcatataattaat

SEQ ID NO: 1322350 - DNA, 15 bp, Homo sapiens
aaatcatataattaa

SEQ ID NO: 1322351 - DNA, 15 bp, Homo sapiens
aaaatcatataatta

SEQ ID NO: 1322352 - DNA, 15 bp, Homo sapiens
caaaatcatataatt

SEQ ID NO: 1322353 - DNA, 15 bp, Homo sapiens
acaaaatcatataat

SEQ ID NO: 1322354 - DNA, 15 bp, Homo sapiens
aacaaaatcatataa

SEQ ID NO: 1322355 - DNA, 15 bp, Homo sapiens
aaacaaaatcatata

SEQ ID NO: 1322356 - DNA, 15 bp, Homo sapiens
aaaacaaaatcatat

SEQ ID NO: 1322357 - DNA, 15 bp, Homo sapiens
taaaacaaaatcata

SEQ ID NO: 1322358 - DNA, 15 bp, Homo sapiens
ttaaaacaaaatcat

SEQ ID NO: 1322359 - DNA, 15 bp, Homo sapiens
gttaaaacaaaatca

SEQ ID NO: 1322360 - DNA, 15 bp, Homo sapiens
ggttaaaacaaaatc

SEQ ID NO: 1322361 - DNA, 15 bp, Homo sapiens
tggttaaaacaaaat

SEQ ID NO: 1322362 - DNA, 15 bp, Homo sapiens
ttggttaaaacaaaa

SEQ ID NO: 1322363 - DNA, 15 bp, Homo sapiens
cttggttaaaacaaa

SEQ ID NO: 1322364 - DNA, 15 bp, Homo sapiens
tcttggttaaaacaa

SEQ ID NO: 1322365 - DNA, 15 bp, Homo sapiens
ttcttggttaaaaca

SEQ ID NO: 1322366 - DNA, 15 bp, Homo sapiens
cttcttggttaaaac

SEQ ID NO: 1322367 - DNA, 15 bp, Homo sapiens
tcttcttggttaaaa

SEQ ID NO: 1322368 - DNA, 15 bp, Homo sapiens
ttcttcttggttaaa

SEQ ID NO: 1322369 - DNA, 15 bp, Homo sapiens
gttcttcttggttaa

SEQ ID NO: 1322370 - DNA, 15 bp, Homo sapiens
agttcttcttggtta

SEQ ID NO: 1322371 - DNA, 15 bp, Homo sapiens
aagttcttcttggtt

SEQ ID NO: 1322372 - DNA, 15 bp, Homo sapiens
taagttcttcttggt

SEQ ID NO: 1322373 - DNA, 15 bp, Homo sapiens
ctaagttcttcttgg

SEQ ID NO: 1322374 - DNA, 15 bp, Homo sapiens
actaagttcttcttg

SEQ ID NO: 1322375 - DNA, 15 bp, Homo sapiens
aactaagttcttctt

SEQ ID NO: 1322376 - DNA, 15 bp, Homo sapiens
taactaagttcttct

SEQ ID NO: 1322377 - DNA, 15 bp, Homo sapiens
ttaactaagttcttc

SEQ ID NO: 1322378 - DNA, 15 bp, Homo sapiens
tttaactaagttctt

SEQ ID NO: 1322379 - DNA, 15 bp, Homo sapiens
atttaactaagttct

SEQ ID NO: 1322380 - DNA, 15 bp, Homo sapiens
aatttaactaagttc

SEQ ID NO: 1322381 - DNA, 15 bp, Homo sapiens
aaatttaactaagtt

SEQ ID NO: 1322382 - DNA, 15 bp, Homo sapiens
taaatttaactaagt

SEQ ID NO: 1322383 - DNA, 15 bp, Homo sapiens
ttaaatttaactaag

SEQ ID NO: 1322384 - DNA, 15 bp, Homo sapiens
tttaaatttaactaa

SEQ ID NO: 1322385 - DNA, 15 bp, Homo sapiens
ttttaaatttaacta

SEQ ID NO: 1322386 - DNA, 15 bp, Homo sapiens
attttaaatttaact

SEQ ID NO: 1322387 - DNA, 15 bp, Homo sapiens
aattttaaatttaac

SEQ ID NO: 1322388 - DNA, 15 bp, Homo sapiens
caattttaaatttaa

SEQ ID NO: 1322389 - DNA, 15 bp, Homo sapiens
acaattttaaattta

SEQ ID NO: 1322390 - DNA, 15 bp, Homo sapiens
tacaattttaaattt

SEQ ID NO: 1322391 - DNA, 15 bp, Homo sapiens
ctacaattttaaatt

SEQ ID NO: 1322392 - DNA, 15 bp, Homo sapiens
actacaattttaaat

SEQ ID NO: 1322393 - DNA, 15 bp, Homo sapiens
aactacaattttaaa

SEQ ID NO: 1322394 - DNA, 15 bp, Homo sapiens
caactacaattttaa

SEQ ID NO: 1322395 - DNA, 15 bp, Homo sapiens
gcaactacaatttta

SEQ ID NO: 1322396 - DNA, 15 bp, Homo sapiens
tgcaactacaatttt

SEQ ID NO: 1322397 - DNA, 15 bp, Homo sapiens
gtgcaactacaattt

SEQ ID NO: 1322398 - DNA, 15 bp, Homo sapiens
agtgcaactacaatt

SEQ ID NO: 1322399 - DNA, 15 bp, Homo sapiens
gagtgcaactacaat

SEQ ID NO: 1322400 - DNA, 15 bp, Homo sapiens
tgagtgcaactacaa

SEQ ID NO: 1322401 - DNA, 15 bp, Homo sapiens
atgagtgcaactaca

SEQ ID NO: 1322402 - DNA, 15 bp, Homo sapiens
tatgagtgcaactac

SEQ ID NO: 1322403 - DNA, 15 bp, Homo sapiens
ctatgagtgcaacta

SEQ ID NO: 1322404 - DNA, 15 bp, Homo sapiens
tctatgagtgcaact

SEQ ID NO: 1322405 - DNA, 15 bp, Homo sapiens
atctatgagtgcaac

SEQ ID NO: 1322406 - DNA, 15 bp, Homo sapiens
tatctatgagtgcaa

SEQ ID NO: 1322407 - DNA, 15 bp, Homo sapiens
ttatctatgagtgca

SEQ ID NO: 1322408 - DNA, 15 bp, Homo sapiens
tttatctatgagtgc

SEQ ID NO: 1322409 - DNA, 15 bp, Homo sapiens
ctttatctatgagtg

SEQ ID NO: 1322410 - DNA, 15 bp, Homo sapiens
cctttatctatgagt

SEQ ID NO: 1322411 - DNA, 15 bp, Homo sapiens
ccctttatctatgag

SEQ ID NO: 1322412 - DNA, 15 bp, Homo sapiens
accctttatctatga

SEQ ID NO: 1322413 - DNA, 15 bp, Homo sapiens
aaccctttatctatg

SEQ ID NO: 1322414 - DNA, 15 bp, Homo sapiens
aaaccctttatctat

SEQ ID NO: 1322415 - DNA, 15 bp, Homo sapiens
aaaaccctttatcta

SEQ ID NO: 1322416 - DNA, 15 bp, Homo sapiens
gaaaaccctttatct

SEQ ID NO: 1322417 - DNA, 15 bp, Homo sapiens
agaaaaccctttatc

SEQ ID NO: 1322418 - DNA, 15 bp, Homo sapiens
aagaaaaccctttat

SEQ ID NO: 1322419 - DNA, 15 bp, Homo sapiens
aaagaaaacccttta

SEQ ID NO: 1322420 - DNA, 15 bp, Homo sapiens
caaagaaaacccttt

SEQ ID NO: 1322421 - DNA, 15 bp, Homo sapiens
acaaagaaaaccctt

SEQ ID NO: 1322422 - DNA, 15 bp, Homo sapiens
aacaaagaaaaccct

SEQ ID NO: 1322423 - DNA, 15 bp, Homo sapiens
taacaaagaaaaccc

SEQ ID NO: 1322424 - DNA, 15 bp, Homo sapiens
ttaacaaagaaaacc

SEQ ID NO: 1322425 - DNA, 15 bp, Homo sapiens
tttaacaaagaaaac

SEQ ID NO: 1322426 - DNA, 15 bp, Homo sapiens
ttttaacaaagaaaa

SEQ ID NO: 1322427 - DNA, 15 bp, Homo sapiens
cttttaacaaagaaa

SEQ ID NO: 1322428 - DNA, 15 bp, Homo sapiens
ccttttaacaaagaa

SEQ ID NO: 1322429 - DNA, 15 bp, Homo sapiens
accttttaacaaaga

SEQ ID NO: 1322430 - DNA, 15 bp, Homo sapiens
taccttttaacaaag

SEQ ID NO: 1322431 - DNA, 15 bp, Homo sapiens
ttaccttttaacaaa

SEQ ID NO: 1322432 - DNA, 15 bp, Homo sapiens
tttaccttttaacaa

SEQ ID NO: 1322433 - DNA, 15 bp, Homo sapiens
ttttaccttttaaca

SEQ ID NO: 1322434 - DNA, 15 bp, Homo sapiens
tttttaccttttaac

SEQ ID NO: 1322435 - DNA, 15 bp, Homo sapiens
ttttttaccttttaa

SEQ ID NO: 1322436 - DNA, 15 bp, Homo sapiens
cttttttacctttta

SEQ ID NO: 1322437 - DNA, 15 bp, Homo sapiens
tcttttttacctttt

SEQ ID NO: 1322438 - DNA, 15 bp, Homo sapiens
ctcttttttaccttt

SEQ ID NO: 1322439 - DNA, 15 bp, Homo sapiens
tctcttttttacctt

SEQ ID NO: 1322440 - DNA, 15 bp, Homo sapiens
gtctcttttttacct

SEQ ID NO: 1322441 - DNA, 15 bp, Homo sapiens
tgtctcttttttacc

SEQ ID NO: 1322442 - DNA, 15 bp, Homo sapiens
atgtctcttttttac

SEQ ID NO: 1322443 - DNA, 15 bp, Homo sapiens
gatgtctctttttta

SEQ ID NO: 1322444 - DNA, 15 bp, Homo sapiens
agatgtctctttttt

SEQ ID NO: 1322445 - DNA, 15 bp, Homo sapiens
gagatgtctcttttt

SEQ ID NO: 1322446 - DNA, 15 bp, Homo sapiens
agagatgtctctttt

SEQ ID NO: 1322447 - DNA, 15 bp, Homo sapiens
aagagatgtctcttt

SEQ ID NO: 1322448 - DNA, 15 bp, Homo sapiens
taagagatgtctctt

SEQ ID NO: 1322449 - DNA, 15 bp, Homo sapiens
ataagagatgtctct

SEQ ID NO: 1322450 - DNA, 15 bp, Homo sapiens
tataagagatgtctc

SEQ ID NO: 1322451 - DNA, 15 bp, Homo sapiens
gtataagagatgtct

SEQ ID NO: 1322452 - DNA, 15 bp, Homo sapiens
agtataagagatgtc

SEQ ID NO: 1322453 - DNA, 15 bp, Homo sapiens
aagtataagagatgt

SEQ ID NO: 1322454 - DNA, 15 bp, Homo sapiens
caagtataagagatg

SEQ ID NO: 1322455 - DNA, 15 bp, Homo sapiens
gcaagtataagagat

SEQ ID NO: 1322456 - DNA, 15 bp, Homo sapiens
agcaagtataagaga

SEQ ID NO: 1322457 - DNA, 15 bp, Homo sapiens
aagcaagtataagag

SEQ ID NO: 1322458 - DNA, 15 bp, Homo sapiens
taagcaagtataaga

SEQ ID NO: 1322459 - DNA, 15 bp, Homo sapiens
ttaagcaagtataag

SEQ ID NO: 1322460 - DNA, 15 bp, Homo sapiens
gttaagcaagtataa

SEQ ID NO: 1322461 - DNA, 15 bp, Homo sapiens
agttaagcaagtata

SEQ ID NO: 1322462 - DNA, 15 bp, Homo sapiens
aagttaagcaagtat

SEQ ID NO: 1322463 - DNA, 15 bp, Homo sapiens
aaagttaagcaagta

SEQ ID NO: 1322464 - DNA, 15 bp, Homo sapiens
aaaagttaagcaagt

SEQ ID NO: 1322465 - DNA, 15 bp, Homo sapiens
gaaaagttaagcaag

SEQ ID NO: 1322466 - DNA, 15 bp, Homo sapiens
tgaaaagttaagcaa

SEQ ID NO: 1322467 - DNA, 15 bp, Homo sapiens
atgaaaagttaagca

SEQ ID NO: 1322468 - DNA, 15 bp, Homo sapiens
aatgaaaagttaagc

SEQ ID NO: 1322469 - DNA, 15 bp, Homo sapiens
aaatgaaaagttaag

SEQ ID NO: 1322470 - DNA, 15 bp, Homo sapiens
taaatgaaaagttaa

SEQ ID NO: 1322471 - DNA, 15 bp, Homo sapiens
ttaaatgaaaagtta

SEQ ID NO: 1322472 - DNA, 15 bp, Homo sapiens
tttaaatgaaaagtt

SEQ ID NO: 1322473 - DNA, 15 bp, Homo sapiens
ttttaaatgaaaagt

SEQ ID NO: 1322474 - DNA, 15 bp, Homo sapiens
tttttaaatgaaaag

SEQ ID NO: 1322475 - DNA, 15 bp, Homo sapiens
ttttttaaatgaaaa

SEQ ID NO: 1322476 - DNA, 15 bp, Homo sapiens
taattttttaaatga

SEQ ID NO: 1322477 - DNA, 15 bp, Homo sapiens
ttaattttttaaatg

SEQ ID NO: 1322478 - DNA, 15 bp, Homo sapiens
cattaattttttaaa

SEQ ID NO: 1322479 - DNA, 15 bp, Homo sapiens
acattaattttttaa

SEQ ID NO: 1322480 - DNA, 15 bp, Homo sapiens
tacattaatttttta

SEQ ID NO: 1322481 - DNA, 15 bp, Homo sapiens
atacattaatttttt

SEQ ID NO: 1322482 - DNA, 15 bp, Homo sapiens
aatacattaattttt

SEQ ID NO: 1322483 - DNA, 15 bp, Homo sapiens
gaatacattaatttt

SEQ ID NO: 1322484 - DNA, 15 bp, Homo sapiens
tgaatacattaattt

SEQ ID NO: 1322485 - DNA, 15 bp, Homo sapiens
atgaatacattaatt

SEQ ID NO: 1322486 - DNA, 15 bp, Homo sapiens
tatgaatacattaat

SEQ ID NO: 1322487 - DNA, 15 bp, Homo sapiens
ttatgaatacattaa

SEQ ID NO: 1322488 - DNA, 15 bp, Homo sapiens
attatgaatacatta

SEQ ID NO: 1322489 - DNA, 15 bp, Homo sapiens
tattatgaatacatt

SEQ ID NO: 1322490 - DNA, 15 bp, Homo sapiens
ttattatgaatacat

SEQ ID NO: 1322491 - DNA, 15 bp, Homo sapiens
tttattatgaataca

SEQ ID NO: 1322492 - DNA, 15 bp, Homo sapiens
atttattatgaatac

SEQ ID NO: 1322493 - DNA, 15 bp, Homo sapiens
tatttattatgaata

SEQ ID NO: 1322494 - DNA, 15 bp, Homo sapiens
ctatttattatgaat

SEQ ID NO: 1322495 - DNA, 15 bp, Homo sapiens
tctatttattatgaa

SEQ ID NO: 1322496 - DNA, 15 bp, Homo sapiens
ttctatttattatga

SEQ ID NO: 1322497 - DNA, 15 bp, Homo sapiens
tttctatttattatg

SEQ ID NO: 1322498 - DNA, 15 bp, Homo sapiens
ttttctatttattat

SEQ ID NO: 1322499 - DNA, 15 bp, Homo sapiens
attttctatttatta

SEQ ID NO: 1322500 - DNA, 15 bp, Homo sapiens
cattttctatttatt

SEQ ID NO: 1322501 - DNA, 15 bp, Homo sapiens
tcattttctatttat

SEQ ID NO: 1322502 - DNA, 15 bp, Homo sapiens
ttcattttctattta

SEQ ID NO: 1322503 - DNA, 15 bp, Homo sapiens
tttcattttctattt

SEQ ID NO: 1322504 - DNA, 15 bp, Homo sapiens
ctttcattttctatt

SEQ ID NO: 1322505 - DNA, 15 bp, Homo sapiens
cctttcattttctat

SEQ ID NO: 1322506 - DNA, 15 bp, Homo sapiens
tcctttcattttcta

SEQ ID NO: 1322507 - DNA, 15 bp, Homo sapiens
ctcctttcattttct

SEQ ID NO: 1322508 - DNA, 15 bp, Homo sapiens
gctcctttcattttc

SEQ ID NO: 1322509 - DNA, 15 bp, Homo sapiens
agctcctttcatttt

SEQ ID NO: 1322510 - DNA, 15 bp, Homo sapiens
aagctcctttcattt

SEQ ID NO: 1322511 - DNA, 15 bp, Homo sapiens
taagctcctttcatt

SEQ ID NO: 1322512 - DNA, 15 bp, Homo sapiens
ttaagctcctttcat

SEQ ID NO: 1322513 - DNA, 15 bp, Homo sapiens
tttaagctcctttca

SEQ ID NO: 1322514 - DNA, 15 bp, Homo sapiens
ttttaagctcctttc

SEQ ID NO: 1322515 - DNA, 15 bp, Homo sapiens
tttttaagctccttt

SEQ ID NO: 1322516 - DNA, 15 bp, Homo sapiens
ctttttaagctcctt

SEQ ID NO: 1322517 - DNA, 15 bp, Homo sapiens
gctttttaagctcct

SEQ ID NO: 1322518 - DNA, 15 bp, Homo sapiens
tgctttttaagctcc

SEQ ID NO: 1322519 - DNA, 15 bp, Homo sapiens
ttgctttttaagctc

SEQ ID NO: 1322520 - DNA, 15 bp, Homo sapiens
tttgctttttaagct

SEQ ID NO: 1322521 - DNA, 15 bp, Homo sapiens
atttgctttttaagc

SEQ ID NO: 1322522 - DNA, 15 bp, Homo sapiens
aatttgctttttaag

SEQ ID NO: 1322523 - DNA, 15 bp, Homo sapiens
caatttgctttttaa

SEQ ID NO: 1322524 - DNA, 15 bp, Homo sapiens
tcaatttgcttttta

SEQ ID NO: 1322525 - DNA, 15 bp, Homo sapiens
ttcaatttgcttttt

SEQ ID NO: 1322526 - DNA, 15 bp, Homo sapiens
gttcaatttgctttt

SEQ ID NO: 1322527 - DNA, 15 bp, Homo sapiens
tgttcaatttgcttt

SEQ ID NO: 1322528 - DNA, 15 bp, Homo sapiens
gtgttcaatttgctt

SEQ ID NO: 1322529 - DNA, 15 bp, Homo sapiens
tgtgttcaatttgct

SEQ ID NO: 1322530 - DNA, 15 bp, Homo sapiens
atgtgttcaatttgc

SEQ ID NO: 1322531 - DNA, 15 bp, Homo sapiens
tatgtgttcaatttg

SEQ ID NO: 1322532 - DNA, 15 bp, Homo sapiens
ctatgtgttcaattt

SEQ ID NO: 1322533 - DNA, 15 bp, Homo sapiens
actatgtgttcaatt

SEQ ID NO: 1322534 - DNA, 15 bp, Homo sapiens
aactatgtgttcaat

SEQ ID NO: 1322535 - DNA, 15 bp, Homo sapiens
taactatgtgttcaa

SEQ ID NO: 1322536 - DNA, 15 bp, Homo sapiens
ataactatgtgttca

SEQ ID NO: 1322537 - DNA, 15 bp, Homo sapiens
gataactatgtgttc

SEQ ID NO: 1322538 - DNA, 15 bp, Homo sapiens
tgataactatgtgtt

SEQ ID NO: 1322539 - DNA, 15 bp, Homo sapiens
ctgataactatgtgt

SEQ ID NO: 1322540 - DNA, 15 bp, Homo sapiens
tctgataactatgtg

SEQ ID NO: 1322541 - DNA, 15 bp, Homo sapiens
ctctgataactatgt

SEQ ID NO: 1322542 - DNA, 15 bp, Homo sapiens
tctctgataactatg

SEQ ID NO: 1322543 - DNA, 15 bp, Homo sapiens
ttctctgataactat

SEQ ID NO: 1322544 - DNA, 15 bp, Homo sapiens
tttctctgataacta

SEQ ID NO: 1322545 - DNA, 15 bp, Homo sapiens
ttttctctgataact

SEQ ID NO: 1322546 - DNA, 15 bp, Homo sapiens
gttttctctgataac

SEQ ID NO: 1322547 - DNA, 15 bp, Homo sapiens
tgttttctctgataa

SEQ ID NO: 1322548 - DNA, 15 bp, Homo sapiens
ttgttttctctgata

SEQ ID NO: 1322549 - DNA, 15 bp, Homo sapiens
attgttttctctgat

SEQ ID NO: 1322550 - DNA, 15 bp, Homo sapiens
aattgttttctctga

SEQ ID NO: 1322551 - DNA, 15 bp, Homo sapiens
aaattgttttctctg

SEQ ID NO: 1322552 - DNA, 15 bp, Homo sapiens
aaaattgttttctct

SEQ ID NO: 1322553 - DNA, 15 bp, Homo sapiens
taaaattgttttctc

SEQ ID NO: 1322554 - DNA, 15 bp, Homo sapiens
ttaaaattgttttct

SEQ ID NO: 1322555 - DNA, 15 bp, Homo sapiens
tttaaaattgttttc

SEQ ID NO: 1322556 - DNA, 15 bp, Homo sapiens
ttttaaaattgtttt

SEQ ID NO: 1322557 - DNA, 15 bp, Homo sapiens
attttaaaattgttt

SEQ ID NO: 1322558 - DNA, 15 bp, Homo sapiens
aattttaaaattgtt

SEQ ID NO: 1322559 - DNA, 15 bp, Homo sapiens
taattttaaaattgt

SEQ ID NO: 1322560 - DNA, 15 bp, Homo sapiens
ataattttaaaattg

SEQ ID NO: 1322561 - DNA, 15 bp, Homo sapiens
cataattttaaaatt

SEQ ID NO: 1322562 - DNA, 15 bp, Homo sapiens
tcataattttaaaat

SEQ ID NO: 1322563 - DNA, 15 bp, Homo sapiens
atcataattttaaaa

SEQ ID NO: 1322564 - DNA, 15 bp, Homo sapiens
aatcataattttaaa

SEQ ID NO: 1322565 - DNA, 15 bp, Homo sapiens
aaatcataattttaa

SEQ ID NO: 1322566 - DNA, 15 bp, Homo sapiens
aaaatcataatttta

SEQ ID NO: 1322567 - DNA, 15 bp, Homo sapiens
taaaatcataatttt

SEQ ID NO: 1322568 - DNA, 15 bp, Homo sapiens
ttaaaatcataattt

SEQ ID NO: 1322569 - DNA, 15 bp, Homo sapiens
tttaaaatcataatt

SEQ ID NO: 1322570 - DNA, 15 bp, Homo sapiens
gtttaaaatcataat

SEQ ID NO: 1322571 - DNA, 15 bp, Homo sapiens
agtttaaaatcataa

SEQ ID NO: 1322572 - DNA, 15 bp, Homo sapiens
gagtttaaaatcata

SEQ ID NO: 1322573 - DNA, 15 bp, Homo sapiens
agagtttaaaatcat

SEQ ID NO: 1322574 - DNA, 15 bp, Homo sapiens
gagagtttaaaatca

SEQ ID NO: 1322575 - DNA, 15 bp, Homo sapiens
tgagagtttaaaatc

SEQ ID NO: 1322576 - DNA, 15 bp, Homo sapiens
atgagagtttaaaat

SEQ ID NO: 1322577 - DNA, 15 bp, Homo sapiens
gatgagagtttaaaa

SEQ ID NO: 1322578 - DNA, 15 bp, Homo sapiens
agatgagagtttaaa

SEQ ID NO: 1322579 - DNA, 15 bp, Homo sapiens
cagatgagagtttaa

SEQ ID NO: 1322580 - DNA, 15 bp, Homo sapiens
acagatgagagttta

SEQ ID NO: 1322581 - DNA, 15 bp, Homo sapiens
tacagatgagagttt

SEQ ID NO: 1322582 - DNA, 15 bp, Homo sapiens
atacagatgagagtt

SEQ ID NO: 1322583 - DNA, 15 bp, Homo sapiens
aatacagatgagagt

SEQ ID NO: 1322584 - DNA, 15 bp, Homo sapiens
caatacagatgagag

SEQ ID NO: 1322585 - DNA, 15 bp, Homo sapiens
gcaatacagatgaga

SEQ ID NO: 1322586 - DNA, 15 bp, Homo sapiens
agcaatacagatgag

SEQ ID NO: 1322587 - DNA, 15 bp, Homo sapiens
tagcaatacagatga

SEQ ID NO: 1322588 - DNA, 15 bp, Homo sapiens
ttagcaatacagatg

SEQ ID NO: 1322589 - DNA, 15 bp, Homo sapiens
cttagcaatacagat

SEQ ID NO: 1322590 - DNA, 15 bp, Homo sapiens
tcttagcaatacaga

SEQ ID NO: 1322591 - DNA, 15 bp, Homo sapiens
ttcttagcaatacag

SEQ ID NO: 1322592 - DNA, 15 bp, Homo sapiens
attcttagcaataca

SEQ ID NO: 1322593 - DNA, 15 bp, Homo sapiens
cattcttagcaatac

SEQ ID NO: 1322594 - DNA, 15 bp, Homo sapiens
gcattcttagcaata

SEQ ID NO: 1322595 - DNA, 15 bp, Homo sapiens
ggcattcttagcaat

SEQ ID NO: 1322596 - DNA, 15 bp, Homo sapiens
gggcattcttagcaa

SEQ ID NO: 1322597 - DNA, 15 bp, Homo sapiens
agggcattcttagca

SEQ ID NO: 1322598 - DNA, 15 bp, Homo sapiens
tagggcattcttagc

SEQ ID NO: 1322599 - DNA, 15 bp, Homo sapiens
atagggcattcttag

SEQ ID NO: 1322600 - DNA, 15 bp, Homo sapiens
tatagggcattctta

SEQ ID NO: 1322601 - DNA, 15 bp, Homo sapiens
atatagggcattctt

SEQ ID NO: 1322602 - DNA, 15 bp, Homo sapiens
aatatagggcattct

SEQ ID NO: 1322603 - DNA, 15 bp, Homo sapiens
caatatagggcattc

SEQ ID NO: 1322604 - DNA, 15 bp, Homo sapiens
acaatatagggcatt

SEQ ID NO: 1322605 - DNA, 15 bp, Homo sapiens
tacaatatagggcat

SEQ ID NO: 1322606 - DNA, 15 bp, Homo sapiens
ttacaatatagggca

SEQ ID NO: 1322607 - DNA, 15 bp, Homo sapiens
attacaatatagggc

SEQ ID NO: 1322608 - DNA, 15 bp, Homo sapiens
tattacaatataggg

SEQ ID NO: 1322609 - DNA, 15 bp, Homo sapiens
atattacaatatagg

SEQ ID NO: 1322610 - DNA, 15 bp, Homo sapiens
aatattacaatatag

SEQ ID NO: 1322611 - DNA, 15 bp, Homo sapiens
gaatattacaatata

SEQ ID NO: 1322612 - DNA, 15 bp, Homo sapiens
tgaatattacaatat

SEQ ID NO: 1322613 - DNA, 15 bp, Homo sapiens
ttgaatattacaata

SEQ ID NO: 1322614 - DNA, 15 bp, Homo sapiens
cttgaatattacaat

SEQ ID NO: 1322615 - DNA, 15 bp, Homo sapiens
ccttgaatattacaa

SEQ ID NO: 1322616 - DNA, 15 bp, Homo sapiens
accttgaatattaca

SEQ ID NO: 1322617 - DNA, 15 bp, Homo sapiens
aaccttgaatattac

SEQ ID NO: 1322618 - DNA, 15 bp, Homo sapiens
aaaccttgaatatta

SEQ ID NO: 1322619 - DNA, 15 bp, Homo sapiens
caaaccttgaatatt

SEQ ID NO: 1322620 - DNA, 15 bp, Homo sapiens
gcaaaccttgaatat

SEQ ID NO: 1322621 - DNA, 15 bp, Homo sapiens
agcaaaccttgaata

SEQ ID NO: 1322622 - DNA, 15 bp, Homo sapiens
aagcaaaccttgaat

SEQ ID NO: 1322623 - DNA, 15 bp, Homo sapiens
taagcaaaccttgaa

SEQ ID NO: 1322624 - DNA, 15 bp, Homo sapiens
ataagcaaaccttga

SEQ ID NO: 1322625 - DNA, 15 bp, Homo sapiens
tataagcaaaccttg

SEQ ID NO: 1322626 - DNA, 15 bp, Homo sapiens
ttataagcaaacctt

SEQ ID NO: 1322627 - DNA, 15 bp, Homo sapiens
attataagcaaacct

SEQ ID NO: 1322628 - DNA, 15 bp, Homo sapiens
aattataagcaaacc

SEQ ID NO: 1322629 - DNA, 15 bp, Homo sapiens
taattataagcaaac

SEQ ID NO: 1322630 - DNA, 15 bp, Homo sapiens
ttaattataagcaaa

SEQ ID NO: 1322631 - DNA, 15 bp, Homo sapiens
tttaattataagcaa

SEQ ID NO: 1322632 - DNA, 15 bp, Homo sapiens
ttttaattataagca

SEQ ID NO: 1322633 - DNA, 15 bp, Homo sapiens
attttaattataagc

SEQ ID NO: 1322634 - DNA, 15 bp, Homo sapiens
cattttaattataag

SEQ ID NO: 1322635 - DNA, 15 bp, Homo sapiens
acattttaattataa

SEQ ID NO: 1322636 - DNA, 15 bp, Homo sapiens
tacattttaattata

SEQ ID NO: 1322637 - DNA, 15 bp, Homo sapiens
ctacattttaattat

SEQ ID NO: 1322638 - DNA, 15 bp, Homo sapiens
cctacattttaatta

SEQ ID NO: 1322639 - DNA, 15 bp, Homo sapiens
ccctacattttaatt

SEQ ID NO: 1322640 - DNA, 15 bp, Homo sapiens
tccctacattttaat

SEQ ID NO: 1322641 - DNA, 15 bp, Homo sapiens
ttccctacattttaa

SEQ ID NO: 1322642 - DNA, 15 bp, Homo sapiens
cttccctacatttta

SEQ ID NO: 1322643 - DNA, 15 bp, Homo sapiens
tcttccctacatttt

SEQ ID NO: 1322644 - DNA, 15 bp, Homo sapiens
ttcttccctacattt

SEQ ID NO: 1322645 - DNA, 15 bp, Homo sapiens
tttcttccctacatt

SEQ ID NO: 1322646 - DNA, 15 bp, Homo sapiens
ttttcttccctacat

SEQ ID NO: 1322647 - DNA, 15 bp, Homo sapiens
tttttcttccctaca

SEQ ID NO: 1322648 - DNA, 15 bp, Homo sapiens
ttttttcttccctac

SEQ ID NO: 1322649 - DNA, 15 bp, Homo sapiens
tttttttcttcccta

SEQ ID NO: 1322650 - DNA, 15 bp, Homo sapiens
ctttttttcttccct

SEQ ID NO: 1322651 - DNA, 15 bp, Homo sapiens
tctttttttcttccc

SEQ ID NO: 1322652 - DNA, 15 bp, Homo sapiens
ttctttttttcttcc

SEQ ID NO: 1322653 - DNA, 15 bp, Homo sapiens
attctttttttcttc

SEQ ID NO: 1322654 - DNA, 15 bp, Homo sapiens
gattctttttttctt

SEQ ID NO: 1322655 - DNA, 15 bp, Homo sapiens
ggattctttttttct

SEQ ID NO: 1322656 - DNA, 15 bp, Homo sapiens
aggattctttttttc

SEQ ID NO: 1322657 - DNA, 15 bp, Homo sapiens
caggattcttttttt

SEQ ID NO: 1322658 - DNA, 15 bp, Homo sapiens
gcaggattctttttt

SEQ ID NO: 1322659 - DNA, 15 bp, Homo sapiens
tgcaggattcttttt

SEQ ID NO: 1322660 - DNA, 15 bp, Homo sapiens
ctgcaggattctttt

SEQ ID NO: 1322661 - DNA, 15 bp, Homo sapiens
tctgcaggattcttt

SEQ ID NO: 1322662 - DNA, 15 bp, Homo sapiens
gtctgcaggattctt

SEQ ID NO: 1322663 - DNA, 15 bp, Homo sapiens
tgtctgcaggattct

SEQ ID NO: 1322664 - DNA, 15 bp, Homo sapiens
atgtctgcaggattc

SEQ ID NO: 1322665 - DNA, 15 bp, Homo sapiens
aatgtctgcaggatt

SEQ ID NO: 1322666 - DNA, 15 bp, Homo sapiens
gaatgtctgcaggat

SEQ ID NO: 1322667 - DNA, 15 bp, Homo sapiens
agaatgtctgcagga

SEQ ID NO: 1322668 - DNA, 15 bp, Homo sapiens
tagaatgtctgcagg

SEQ ID NO: 1322669 - DNA, 15 bp, Homo sapiens
ttagaatgtctgcag

SEQ ID NO: 1322670 - DNA, 15 bp, Homo sapiens
cttagaatgtctgca

SEQ ID NO: 1322671 - DNA, 15 bp, Homo sapiens
ccttagaatgtctgc

SEQ ID NO: 1322672 - DNA, 15 bp, Homo sapiens
tccttagaatgtctg

SEQ ID NO: 1322673 - DNA, 15 bp, Homo sapiens
atccttagaatgtct

SEQ ID NO: 1322674 - DNA, 15 bp, Homo sapiens
catccttagaatgtc

SEQ ID NO: 1322675 - DNA, 15 bp, Homo sapiens
tcatccttagaatgt

SEQ ID NO: 1322676 - DNA, 15 bp, Homo sapiens
gtcatccttagaatg

SEQ ID NO: 1322677 - DNA, 15 bp, Homo sapiens
ggtcatccttagaat

SEQ ID NO: 1322678 - DNA, 15 bp, Homo sapiens
aggtcatccttagaa

SEQ ID NO: 1322679 - DNA, 15 bp, Homo sapiens
taggtcatccttaga

SEQ ID NO: 1322680 - DNA, 15 bp, Homo sapiens
ctaggtcatccttag

SEQ ID NO: 1322681 - DNA, 15 bp, Homo sapiens
cctaggtcatcctta

SEQ ID NO: 1322682 - DNA, 15 bp, Homo sapiens
gcctaggtcatcctt

SEQ ID NO: 1322683 - DNA, 15 bp, Homo sapiens
ggcctaggtcatcct

SEQ ID NO: 1322684 - DNA, 15 bp, Homo sapiens
tggcctaggtcatcc

SEQ ID NO: 1322685 - DNA, 15 bp, Homo sapiens
atggcctaggtcatc

SEQ ID NO: 1322686 - DNA, 15 bp, Homo sapiens
aatggcctaggtcat

SEQ ID NO: 1322687 - DNA, 15 bp, Homo sapiens
caatggcctaggtca

SEQ ID NO: 1322688 - DNA, 15 bp, Homo sapiens
tcaatggcctaggtc

SEQ ID NO: 1322689 - DNA, 15 bp, Homo sapiens
atcaatggcctaggt

SEQ ID NO: 1322690 - DNA, 15 bp, Homo sapiens
tatcaatggcctagg

SEQ ID NO: 1322691 - DNA, 15 bp, Homo sapiens
ctatcaatggcctag

SEQ ID NO: 1322692 - DNA, 15 bp, Homo sapiens
actatcaatggccta

SEQ ID NO: 1322693 - DNA, 15 bp, Homo sapiens
gactatcaatggcct

SEQ ID NO: 1322694 - DNA, 15 bp, Homo sapiens
agactatcaatggcc

SEQ ID NO: 1322695 - DNA, 15 bp, Homo sapiens
tagactatcaatggc

SEQ ID NO: 1322696 - DNA, 15 bp, Homo sapiens
ttagactatcaatgg

SEQ ID NO: 1322697 - DNA, 15 bp, Homo sapiens
cttagactatcaatg

SEQ ID NO: 1322698 - DNA, 15 bp, Homo sapiens
gcttagactatcaat

SEQ ID NO: 1322699 - DNA, 15 bp, Homo sapiens
agcttagactatcaa

SEQ ID NO: 1322700 - DNA, 15 bp, Homo sapiens
aagcttagactatca

SEQ ID NO: 1322701 - DNA, 15 bp, Homo sapiens
caagcttagactatc

SEQ ID NO: 1322702 - DNA, 15 bp, Homo sapiens
tcaagcttagactat

SEQ ID NO: 1322703 - DNA, 15 bp, Homo sapiens
ttcaagcttagacta

SEQ ID NO: 1322704 - DNA, 15 bp, Homo sapiens
tttcaagcttagact

SEQ ID NO: 1322705 - DNA, 15 bp, Homo sapiens
atttcaagcttagac

SEQ ID NO: 1322706 - DNA, 15 bp, Homo sapiens
aatttcaagcttaga

SEQ ID NO: 1322707 - DNA, 15 bp, Homo sapiens
taatttcaagcttag

SEQ ID NO: 1322708 - DNA, 15 bp, Homo sapiens
ttaatttcaagctta

SEQ ID NO: 1322709 - DNA, 15 bp, Homo sapiens
attaatttcaagctt

SEQ ID NO: 1322710 - DNA, 15 bp, Homo sapiens
gattaatttcaagct

SEQ ID NO: 1322711 - DNA, 15 bp, Homo sapiens
tgattaatttcaagc

SEQ ID NO: 1322712 - DNA, 15 bp, Homo sapiens
atgattaatttcaag

SEQ ID NO: 1322713 - DNA, 15 bp, Homo sapiens
aatgattaatttcaa

SEQ ID NO: 1322714 - DNA, 15 bp, Homo sapiens
taatgattaatttca

SEQ ID NO: 1322715 - DNA, 15 bp, Homo sapiens
ctaatgattaatttc

SEQ ID NO: 1322716 - DNA, 15 bp, Homo sapiens
tctaatgattaattt

SEQ ID NO: 1322717 - DNA, 15 bp, Homo sapiens
atctaatgattaatt

SEQ ID NO: 1322718 - DNA, 15 bp, Homo sapiens
aatctaatgattaat

SEQ ID NO: 1322719 - DNA, 15 bp, Homo sapiens
aaatctaatgattaa

SEQ ID NO: 1322720 - DNA, 15 bp, Homo sapiens
aaaatctaatgatta

SEQ ID NO: 1322721 - DNA, 15 bp, Homo sapiens
gaaaatctaatgatt

SEQ ID NO: 1322722 - DNA, 15 bp, Homo sapiens
agaaaatctaatgat

SEQ ID NO: 1322723 - DNA, 15 bp, Homo sapiens
cagaaaatctaatga

SEQ ID NO: 1322724 - DNA, 15 bp, Homo sapiens
tcagaaaatctaatg

SEQ ID NO: 1322725 - DNA, 15 bp, Homo sapiens
ttcagaaaatctaat

SEQ ID NO: 1322726 - DNA, 15 bp, Homo sapiens
gttcagaaaatctaa

SEQ ID NO: 1322727 - DNA, 15 bp, Homo sapiens
agttcagaaaatcta

SEQ ID NO: 1322728 - DNA, 15 bp, Homo sapiens
gagttcagaaaatct

SEQ ID NO: 1322729 - DNA, 15 bp, Homo sapiens
agagttcagaaaatc

SEQ ID NO: 1322730 - DNA, 15 bp, Homo sapiens
taagagttcagaaaa

SEQ ID NO: 1322731 - DNA, 15 bp, Homo sapiens
ataagagttcagaaa

SEQ ID NO: 1322732 - DNA, 15 bp, Homo sapiens
aataagagttcagaa

SEQ ID NO: 1322733 - DNA, 15 bp, Homo sapiens
taataagagttcaga

SEQ ID NO: 1322734 - DNA, 15 bp, Homo sapiens
gtaataagagttcag

SEQ ID NO: 1322735 - DNA, 15 bp, Homo sapiens
tgtaataagagttca

SEQ ID NO: 1322736 - DNA, 15 bp, Homo sapiens
gtgtaataagagttc

SEQ ID NO: 1322737 - DNA, 15 bp, Homo sapiens
agtgtaataagagtt

SEQ ID NO: 1322738 - DNA, 15 bp, Homo sapiens
cagtgtaataagagt

SEQ ID NO: 1322739 - DNA, 15 bp, Homo sapiens
ccagtgtaataagag

SEQ ID NO: 1322740 - DNA, 15 bp, Homo sapiens
tccagtgtaataaga

SEQ ID NO: 1322741 - DNA, 15 bp, Homo sapiens
atccagtgtaataag

SEQ ID NO: 1322742 - DNA, 15 bp, Homo sapiens
gatccagtgtaataa

SEQ ID NO: 1322743 - DNA, 15 bp, Homo sapiens
agatccagtgtaata

SEQ ID NO: 1322744 - DNA, 15 bp, Homo sapiens
cagatccagtgtaat

SEQ ID NO: 1322745 - DNA, 15 bp, Homo sapiens
acagatccagtgtaa

SEQ ID NO: 1322746 - DNA, 15 bp, Homo sapiens
aacagatccagtgta

SEQ ID NO: 1322747 - DNA, 15 bp, Homo sapiens
gaacagatccagtgt

SEQ ID NO: 1322748 - DNA, 15 bp, Homo sapiens
tgaacagatccagtg

SEQ ID NO: 1322749 - DNA, 15 bp, Homo sapiens
ctgaacagatccagt

SEQ ID NO: 1322750 - DNA, 15 bp, Homo sapiens
actgaacagatccag

SEQ ID NO: 1322751 - DNA, 15 bp, Homo sapiens
gactgaacagatcca

SEQ ID NO: 1322752 - DNA, 15 bp, Homo sapiens
agactgaacagatcc

SEQ ID NO: 1322753 - DNA, 15 bp, Homo sapiens
cagactgaacagatc

SEQ ID NO: 1322754 - DNA, 15 bp, Homo sapiens
gcagactgaacagat

SEQ ID NO: 1322755 - DNA, 15 bp, Homo sapiens
agcagactgaacaga

SEQ ID NO: 1322756 - DNA, 15 bp, Homo sapiens
aagcagactgaacag

SEQ ID NO: 1322757 - DNA, 15 bp, Homo sapiens
aaagcagactgaaca

SEQ ID NO: 1322758 - DNA, 15 bp, Homo sapiens
taaagcagactgaac

SEQ ID NO: 1322759 - DNA, 15 bp, Homo sapiens
ttaaagcagactgaa

SEQ ID NO: 1322760 - DNA, 15 bp, Homo sapiens
gttaaagcagactga

SEQ ID NO: 1322761 - DNA, 15 bp, Homo sapiens
tgttaaagcagactg

SEQ ID NO: 1322762 - DNA, 15 bp, Homo sapiens
ttgttaaagcagact

SEQ ID NO: 1322763 - DNA, 15 bp, Homo sapiens
tttgttaaagcagac

SEQ ID NO: 1322764 - DNA, 15 bp, Homo sapiens
ttttgttaaagcaga

SEQ ID NO: 1322765 - DNA, 15 bp, Homo sapiens
attttgttaaagcag

SEQ ID NO: 1322766 - DNA, 15 bp, Homo sapiens
tattttgttaaagca

SEQ ID NO: 1322767 - DNA, 15 bp, Homo sapiens
gtattttgttaaagc

SEQ ID NO: 1322768 - DNA, 15 bp, Homo sapiens
ggtattttgttaaag

SEQ ID NO: 1322769 - DNA, 15 bp, Homo sapiens
tggtattttgttaaa

SEQ ID NO: 1322770 - DNA, 15 bp, Homo sapiens
atggtattttgttaa

SEQ ID NO: 1322771 - DNA, 15 bp, Homo sapiens
tatggtattttgtta

SEQ ID NO: 1322772 - DNA, 15 bp, Homo sapiens
ctatggtattttgtt

SEQ ID NO: 1322773 - DNA, 15 bp, Homo sapiens
tctatggtattttgt

SEQ ID NO: 1322774 - DNA, 15 bp, Homo sapiens
atctatggtattttg

SEQ ID NO: 1322775 - DNA, 15 bp, Homo sapiens
aatctatggtatttt

SEQ ID NO: 1322776 - DNA, 15 bp, Homo sapiens
aaatctatggtattt

SEQ ID NO: 1322777 - DNA, 15 bp, Homo sapiens
caaatctatggtatt

SEQ ID NO: 1322778 - DNA, 15 bp, Homo sapiens
ccaaatctatggtat

SEQ ID NO: 1322779 - DNA, 15 bp, Homo sapiens
accaaatctatggta

SEQ ID NO: 1322780 - DNA, 15 bp, Homo sapiens
caccaaatctatggt

SEQ ID NO: 1322781 - DNA, 15 bp, Homo sapiens
ccaccaaatctatgg

SEQ ID NO: 1322782 - DNA, 15 bp, Homo sapiens
gccaccaaatctatg

SEQ ID NO: 1322783 - DNA, 15 bp, Homo sapiens
agccaccaaatctat

SEQ ID NO: 1322784 - DNA, 15 bp, Homo sapiens
aagccaccaaatcta

SEQ ID NO: 1322785 - DNA, 15 bp, Homo sapiens
taagccaccaaatct

SEQ ID NO: 1322786 - DNA, 15 bp, Homo sapiens
ataagccaccaaatc

SEQ ID NO: 1322787 - DNA, 15 bp, Homo sapiens
tataagccaccaaat

SEQ ID NO: 1322788 - DNA, 15 bp, Homo sapiens
ttataagccaccaaa

SEQ ID NO: 1322789 - DNA, 15 bp, Homo sapiens
tttataagccaccaa

SEQ ID NO: 1322790 - DNA, 15 bp, Homo sapiens
gtttataagccacca

SEQ ID NO: 1322791 - DNA, 15 bp, Homo sapiens
tgtttataagccacc

SEQ ID NO: 1322792 - DNA, 15 bp, Homo sapiens
ttgtttataagccac

SEQ ID NO: 1322793 - DNA, 15 bp, Homo sapiens
gttgtttataagcca

SEQ ID NO: 1322794 - DNA, 15 bp, Homo sapiens
tgttgtttataagcc

SEQ ID NO: 1322795 - DNA, 15 bp, Homo sapiens
ctgttgtttataagc

SEQ ID NO: 1322796 - DNA, 15 bp, Homo sapiens
tctgttgtttataag

SEQ ID NO: 1322797 - DNA, 15 bp, Homo sapiens
ttctgttgtttataa

SEQ ID NO: 1322798 - DNA, 15 bp, Homo sapiens
tttctgttgtttata

SEQ ID NO: 1322799 - DNA, 15 bp, Homo sapiens
atttctgttgtttat

SEQ ID NO: 1322800 - DNA, 15 bp, Homo sapiens
catttctgttgttta

SEQ ID NO: 1322801 - DNA, 15 bp, Homo sapiens
acatttctgttgttt

SEQ ID NO: 1322802 - DNA, 15 bp, Homo sapiens
tacatttctgttgtt

SEQ ID NO: 1322803 - DNA, 15 bp, Homo sapiens
atacatttctgttgt

SEQ ID NO: 1322804 - DNA, 15 bp, Homo sapiens
aatacatttctgttg

SEQ ID NO: 1322805 - DNA, 15 bp, Homo sapiens
aaatacatttctgtt

SEQ ID NO: 1322806 - DNA, 15 bp, Homo sapiens
gaaatacatttctgt

SEQ ID NO: 1322807 - DNA, 15 bp, Homo sapiens
agaaatacatttctg

SEQ ID NO: 1322808 - DNA, 15 bp, Homo sapiens
gagaaatacatttct

SEQ ID NO: 1322809 - DNA, 15 bp, Homo sapiens
tgagaaatacatttc

SEQ ID NO: 1322810 - DNA, 15 bp, Homo sapiens
gtgagaaatacattt

SEQ ID NO: 1322811 - DNA, 15 bp, Homo sapiens
tgtgagaaatacatt

SEQ ID NO: 1322812 - DNA, 15 bp, Homo sapiens
ctgtgagaaatacat

SEQ ID NO: 1322813 - DNA, 15 bp, Homo sapiens
actgtgagaaataca

SEQ ID NO: 1322814 - DNA, 15 bp, Homo sapiens
aactgtgagaaatac

SEQ ID NO: 1322815 - DNA, 15 bp, Homo sapiens
gaactgtgagaaata

SEQ ID NO: 1322816 - DNA, 15 bp, Homo sapiens
agaactgtgagaaat

SEQ ID NO: 1322817 - DNA, 15 bp, Homo sapiens
cagaactgtgagaaa

SEQ ID NO: 1322818 - DNA, 15 bp, Homo sapiens
tcagaactgtgagaa

SEQ ID NO: 1322819 - DNA, 15 bp, Homo sapiens
ttcagaactgtgaga

SEQ ID NO: 1322820 - DNA, 15 bp, Homo sapiens
tttcagaactgtgag

SEQ ID NO: 1322821 - DNA, 15 bp, Homo sapiens
ctttcagaactgtga

SEQ ID NO: 1322822 - DNA, 15 bp, Homo sapiens
gctttcagaactgtg

SEQ ID NO: 1322823 - DNA, 15 bp, Homo sapiens
agctttcagaactgt

SEQ ID NO: 1322824 - DNA, 15 bp, Homo sapiens
cagctttcagaactg

SEQ ID NO: 1322825 - DNA, 15 bp, Homo sapiens
ccagctttcagaact

SEQ ID NO: 1322826 - DNA, 15 bp, Homo sapiens
cccagctttcagaac

SEQ ID NO: 1322827 - DNA, 15 bp, Homo sapiens
tcccagctttcagaa

SEQ ID NO: 1322828 - DNA, 15 bp, Homo sapiens
ttcccagctttcaga

SEQ ID NO: 1322829 - DNA, 15 bp, Homo sapiens
cttcccagctttcag

SEQ ID NO: 1322830 - DNA, 15 bp, Homo sapiens
acttcccagctttca

SEQ ID NO: 1322831 - DNA, 15 bp, Homo sapiens
gacttcccagctttc

SEQ ID NO: 1322832 - DNA, 15 bp, Homo sapiens
ggacttcccagcttt

SEQ ID NO: 1322833 - DNA, 15 bp, Homo sapiens
tggacttcccagctt

SEQ ID NO: 1322834 - DNA, 15 bp, Homo sapiens
ttggacttcccagct

SEQ ID NO: 1322835 - DNA, 15 bp, Homo sapiens
cttggacttcccagc

SEQ ID NO: 1322836 - DNA, 15 bp, Homo sapiens
tcttggacttcccag

SEQ ID NO: 1322837 - DNA, 15 bp, Homo sapiens
atcttggacttccca

SEQ ID NO: 1322838 - DNA, 15 bp, Homo sapiens
gatcttggacttccc

SEQ ID NO: 1322839 - DNA, 15 bp, Homo sapiens
tgatcttggacttcc

SEQ ID NO: 1322840 - DNA, 15 bp, Homo sapiens
ttgatcttggacttc

SEQ ID NO: 1322841 - DNA, 15 bp, Homo sapiens
cttgatcttggactt

SEQ ID NO: 1322842 - DNA, 15 bp, Homo sapiens
acttgatcttggact

SEQ ID NO: 1322843 - DNA, 15 bp, Homo sapiens
aacttgatcttggac

SEQ ID NO: 1322844 - DNA, 15 bp, Homo sapiens
aaacttgatcttgga

SEQ ID NO: 1322845 - DNA, 15 bp, Homo sapiens
gaaacttgatcttgg

SEQ ID NO: 1322846 - DNA, 15 bp, Homo sapiens
ggaaacttgatcttg

SEQ ID NO: 1322847 - DNA, 15 bp, Homo sapiens
tggaaacttgatctt

SEQ ID NO: 1322848 - DNA, 15 bp, Homo sapiens
ctggaaacttgatct

SEQ ID NO: 1322849 - DNA, 15 bp, Homo sapiens
gctggaaacttgatc

SEQ ID NO: 1322850 - DNA, 15 bp, Homo sapiens
tgctggaaacttgat

SEQ ID NO: 1322851 - DNA, 15 bp, Homo sapiens
ctgctggaaacttga

SEQ ID NO: 1322852 - DNA, 15 bp, Homo sapiens
tctgctggaaacttg

SEQ ID NO: 1322853 - DNA, 15 bp, Homo sapiens
atctgctggaaactt

SEQ ID NO: 1322854 - DNA, 15 bp, Homo sapiens
gatctgctggaaact

SEQ ID NO: 1322855 - DNA, 15 bp, Homo sapiens
agatctgctggaaac

SEQ ID NO: 1322856 - DNA, 15 bp, Homo sapiens
cagatctgctggaaa

SEQ ID NO: 1322857 - DNA, 15 bp, Homo sapiens
tcagatctgctggaa

SEQ ID NO: 1322858 - DNA, 15 bp, Homo sapiens
atcagatctgctgga

SEQ ID NO: 1322859 - DNA, 15 bp, Homo sapiens
tatcagatctgctgg

SEQ ID NO: 1322860 - DNA, 15 bp, Homo sapiens
atatcagatctgctg

SEQ ID NO: 1322861 - DNA, 15 bp, Homo sapiens
gatatcagatctgct

SEQ ID NO: 1322862 - DNA, 15 bp, Homo sapiens
agatatcagatctgc

SEQ ID NO: 1322863 - DNA, 15 bp, Homo sapiens
cagatatcagatctg

SEQ ID NO: 1322864 - DNA, 15 bp, Homo sapiens
ccagatatcagatct

SEQ ID NO: 1322865 - DNA, 15 bp, Homo sapiens
gccagatatcagatc

SEQ ID NO: 1322866 - DNA, 15 bp, Homo sapiens
cgccagatatcagat

SEQ ID NO: 1322867 - DNA, 15 bp, Homo sapiens
ccgccagatatcaga

SEQ ID NO: 1322868 - DNA, 15 bp, Homo sapiens
tccgccagatatcag

SEQ ID NO: 1322869 - DNA, 15 bp, Homo sapiens
ctccgccagatatca

SEQ ID NO: 1322870 - DNA, 15 bp, Homo sapiens
cctccgccagatatc

SEQ ID NO: 1322871 - DNA, 15 bp, Homo sapiens
gcctccgccagatat

SEQ ID NO: 1322872 - DNA, 15 bp, Homo sapiens
ggcctccgccagata

SEQ ID NO: 1322873 - DNA, 15 bp, Homo sapiens
aggcctccgccagat

SEQ ID NO: 1322874 - DNA, 15 bp, Homo sapiens
caggcctccgccaga

SEQ ID NO: 1322875 - DNA, 15 bp, Homo sapiens
acaggcctccgccag

SEQ ID NO: 1322876 - DNA, 15 bp, Homo sapiens
aacaggcctccgcca

SEQ ID NO: 1322877 - DNA, 15 bp, Homo sapiens
aaacaggcctccgcc

SEQ ID NO: 1322878 - DNA, 15 bp, Homo sapiens
gaaacaggcctccgc

SEQ ID NO: 1322879 - DNA, 15 bp, Homo sapiens
ggaaacaggcctccg

SEQ ID NO: 1322880 - DNA, 15 bp, Homo sapiens
aggaaacaggcctcc

SEQ ID NO: 1322881 - DNA, 15 bp, Homo sapiens
caggaaacaggcctc

SEQ ID NO: 1322882 - DNA, 15 bp, Homo sapiens
accaggaaacaggcc

SEQ ID NO: 1322883 - DNA, 15 bp, Homo sapiens
aaccaggaaacaggc

SEQ ID NO: 1322884 - DNA, 15 bp, Homo sapiens
gaaccaggaaacagg

SEQ ID NO: 1322885 - DNA, 15 bp, Homo sapiens
tgaaccaggaaacag

SEQ ID NO: 1322886 - DNA, 15 bp, Homo sapiens
atgaaccaggaaaca

SEQ ID NO: 1322887 - DNA, 15 bp, Homo sapiens
tatgaaccaggaaac

SEQ ID NO: 1322888 - DNA, 15 bp, Homo sapiens
ctatgaaccaggaaa

SEQ ID NO: 1322889 - DNA, 15 bp, Homo sapiens
tctatgaaccaggaa

SEQ ID NO: 1322890 - DNA, 15 bp, Homo sapiens
atctatgaaccagga

SEQ ID NO: 1322891 - DNA, 15 bp, Homo sapiens
catctatgaaccagg

SEQ ID NO: 1322892 - DNA, 15 bp, Homo sapiens
ccatctatgaaccag

SEQ ID NO: 1322893 - DNA, 15 bp, Homo sapiens
gccatctatgaacca

SEQ ID NO: 1322894 - DNA, 15 bp, Homo sapiens
tgccatctatgaacc

SEQ ID NO: 1322895 - DNA, 15 bp, Homo sapiens
gtgccatctatgaac

SEQ ID NO: 1322896 - DNA, 15 bp, Homo sapiens
ggtgccatctatgaa

SEQ ID NO: 1322897 - DNA, 15 bp, Homo sapiens
aggtgccatctatga

SEQ ID NO: 1322898 - DNA, 15 bp, Homo sapiens
aaggtgccatctatg

SEQ ID NO: 1322899 - DNA, 15 bp, Homo sapiens
gaaggtgccatctat

SEQ ID NO: 1322900 - DNA, 15 bp, Homo sapiens
agaaggtgccatcta

SEQ ID NO: 1322901 - DNA, 15 bp, Homo sapiens
aagaaggtgccatct

SEQ ID NO: 1322902 - DNA, 15 bp, Homo sapiens
taagaaggtgccatc

SEQ ID NO: 1322903 - DNA, 15 bp, Homo sapiens
gtaagaaggtgccat

SEQ ID NO: 1322904 - DNA, 15 bp, Homo sapiens
ggtaagaaggtgcca

SEQ ID NO: 1322905 - DNA, 15 bp, Homo sapiens
tggtaagaaggtgcc

SEQ ID NO: 1322906 - DNA, 15 bp, Homo sapiens
atggtaagaaggtgc

SEQ ID NO: 1322907 - DNA, 15 bp, Homo sapiens
catggtaagaaggtg

SEQ ID NO: 1322908 - DNA, 15 bp, Homo sapiens
acatggtaagaaggt

SEQ ID NO: 1322909 - DNA, 15 bp, Homo sapiens
gacatggtaagaagg

SEQ ID NO: 1322910 - DNA, 15 bp, Homo sapiens
ggacatggtaagaag

SEQ ID NO: 1322911 - DNA, 15 bp, Homo sapiens
aggacatggtaagaa

SEQ ID NO: 1322912 - DNA, 15 bp, Homo sapiens
gaggacatggtaaga

SEQ ID NO: 1322913 - DNA, 15 bp, Homo sapiens
tgaggacatggtaag

SEQ ID NO: 1322914 - DNA, 15 bp, Homo sapiens
ctgaggacatggtaa

SEQ ID NO: 1322915 - DNA, 15 bp, Homo sapiens
tctgaggacatggta

SEQ ID NO: 1322916 - DNA, 15 bp, Homo sapiens
atctgaggacatggt

SEQ ID NO: 1322917 - DNA, 15 bp, Homo sapiens
catctgaggacatgg

SEQ ID NO: 1322918 - DNA, 15 bp, Homo sapiens
ccatctgaggacatg

SEQ ID NO: 1322919 - DNA, 15 bp, Homo sapiens
accatctgaggacat

SEQ ID NO: 1322920 - DNA, 15 bp, Homo sapiens
caccatctgaggaca

SEQ ID NO: 1322921 - DNA, 15 bp, Homo sapiens
ccaccatctgaggac

SEQ ID NO: 1322922 - DNA, 15 bp, Homo sapiens
tccaccatctgagga

SEQ ID NO: 1322923 - DNA, 15 bp, Homo sapiens
ttccaccatctgagg

SEQ ID NO: 1322924 - DNA, 15 bp, Homo sapiens
cttccaccatctgag

SEQ ID NO: 1322925 - DNA, 15 bp, Homo sapiens
ccttccaccatctga

SEQ ID NO: 1322926 - DNA, 15 bp, Homo sapiens
cccttccaccatctg

SEQ ID NO: 1322927 - DNA, 15 bp, Homo sapiens
tcccttccaccatct

SEQ ID NO: 1322928 - DNA, 15 bp, Homo sapiens
gtcccttccaccatc

SEQ ID NO: 1322929 - DNA, 15 bp, Homo sapiens
tgtcccttccaccat

SEQ ID NO: 1322930 - DNA, 15 bp, Homo sapiens
ttgtcccttccacca

SEQ ID NO: 1322931 - DNA, 15 bp, Homo sapiens
cttgtcccttccacc

SEQ ID NO: 1322932 - DNA, 15 bp, Homo sapiens
ccttgtcccttccac

SEQ ID NO: 1322933 - DNA, 15 bp, Homo sapiens
gccttgtcccttcca

SEQ ID NO: 1322934 - DNA, 15 bp, Homo sapiens
tgccttgtcccttcc

SEQ ID NO: 1322935 - DNA, 15 bp, Homo sapiens
ctgccttgtcccttc

SEQ ID NO: 1322936 - DNA, 15 bp, Homo sapiens
gctgccttgtccctt

SEQ ID NO: 1322937 - DNA, 15 bp, Homo sapiens
agctgccttgtccct

SEQ ID NO: 1322938 - DNA, 15 bp, Homo sapiens
gagctgccttgtccc

SEQ ID NO: 1322939 - DNA, 15 bp, Homo sapiens
agagctgccttgtcc

SEQ ID NO: 1322940 - DNA, 15 bp, Homo sapiens
gagagctgccttgtc

SEQ ID NO: 1322941 - DNA, 15 bp, Homo sapiens
agagagctgccttgt

SEQ ID NO: 1322942 - DNA, 15 bp, Homo sapiens
cagagagctgccttg

SEQ ID NO: 1322943 - DNA, 15 bp, Homo sapiens
ccagagagctgcctt

SEQ ID NO: 1322944 - DNA, 15 bp, Homo sapiens
cccagagagctgcct

SEQ ID NO: 1322945 - DNA, 15 bp, Homo sapiens
ccccagagagctgcc

SEQ ID NO: 1322946 - DNA, 15 bp, Homo sapiens
accccagagagctgc

SEQ ID NO: 1322947 - DNA, 15 bp, Homo sapiens
gaccccagagagctg

SEQ ID NO: 1322948 - DNA, 15 bp, Homo sapiens
ggaccccagagagct

SEQ ID NO: 1322949 - DNA, 15 bp, Homo sapiens
gggaccccagagagc

SEQ ID NO: 1322950 - DNA, 15 bp, Homo sapiens
agggaccccagagag

SEQ ID NO: 1322951 - DNA, 15 bp, Homo sapiens
aagggaccccagaga

SEQ ID NO: 1322952 - DNA, 15 bp, Homo sapiens
aaagggaccccagag

SEQ ID NO: 1322953 - DNA, 15 bp, Homo sapiens
aaaagggaccccaga

SEQ ID NO: 1322954 - DNA, 15 bp, Homo sapiens
taaaagggaccccag

SEQ ID NO: 1322955 - DNA, 15 bp, Homo sapiens
ataaaagggacccca

SEQ ID NO: 1322956 - DNA, 15 bp, Homo sapiens
tataaaagggacccc

SEQ ID NO: 1322957 - DNA, 15 bp, Homo sapiens
ttataaaagggaccc

SEQ ID NO: 1322958 - DNA, 15 bp, Homo sapiens
cttataaaagggacc

SEQ ID NO: 1322959 - DNA, 15 bp, Homo sapiens
ccttataaaagggac

SEQ ID NO: 1322960 - DNA, 15 bp, Homo sapiens
cccttataaaaggga

SEQ ID NO: 1322961 - DNA, 15 bp, Homo sapiens
acccttataaaaggg

SEQ ID NO: 1322962 - DNA, 15 bp, Homo sapiens
tacccttataaaagg

SEQ ID NO: 1322963 - DNA, 15 bp, Homo sapiens
gtacccttataaaag

SEQ ID NO: 1322964 - DNA, 15 bp, Homo sapiens
agtacccttataaaa

SEQ ID NO: 1322965 - DNA, 15 bp, Homo sapiens
tagtacccttataaa

SEQ ID NO: 1322966 - DNA, 15 bp, Homo sapiens
ttagtacccttataa

SEQ ID NO: 1322967 - DNA, 15 bp, Homo sapiens
attagtacccttata

SEQ ID NO: 1322968 - DNA, 15 bp, Homo sapiens
gattagtacccttat

SEQ ID NO: 1322969 - DNA, 15 bp, Homo sapiens
tgattagtaccctta

SEQ ID NO: 1322970 - DNA, 15 bp, Homo sapiens
atgattagtaccctt

SEQ ID NO: 1322971 - DNA, 15 bp, Homo sapiens
gatgattagtaccct

SEQ ID NO: 1322972 - DNA, 15 bp, Homo sapiens
ggatgattagtaccc

SEQ ID NO: 1322973 - DNA, 15 bp, Homo sapiens
aggatgattagtacc

SEQ ID NO: 1322974 - DNA, 15 bp, Homo sapiens
aaggatgattagtac

SEQ ID NO: 1322975 - DNA, 15 bp, Homo sapiens
aaaggatgattagta

SEQ ID NO: 1322976 - DNA, 15 bp, Homo sapiens
aaaaggatgattagt

SEQ ID NO: 1322977 - DNA, 15 bp, Homo sapiens
gaaaaggatgattag

SEQ ID NO: 1322978 - DNA, 15 bp, Homo sapiens
tgaaaaggatgatta

SEQ ID NO: 1322979 - DNA, 15 bp, Homo sapiens
atgaaaaggatgatt

SEQ ID NO: 1322980 - DNA, 15 bp, Homo sapiens
catgaaaaggatgat

SEQ ID NO: 1322981 - DNA, 15 bp, Homo sapiens
tcatgaaaaggatga

SEQ ID NO: 1322982 - DNA, 15 bp, Homo sapiens
ctcatgaaaaggatg

SEQ ID NO: 1322983 - DNA, 15 bp, Homo sapiens
cctcatgaaaaggat

SEQ ID NO: 1322984 - DNA, 15 bp, Homo sapiens
ccctcatgaaaagga

SEQ ID NO: 1322985 - DNA, 15 bp, Homo sapiens
tccctcatgaaaagg

SEQ ID NO: 1322986 - DNA, 15 bp, Homo sapiens
atccctcatgaaaag

SEQ ID NO: 1322987 - DNA, 15 bp, Homo sapiens
catccctcatgaaaa

SEQ ID NO: 1322988 - DNA, 15 bp, Homo sapiens
acatccctcatgaaa

SEQ ID NO: 1322989 - DNA, 15 bp, Homo sapiens
cacatccctcatgaa

SEQ ID NO: 1322990 - DNA, 15 bp, Homo sapiens
acacatccctcatga

SEQ ID NO: 1322991 - DNA, 15 bp, Homo sapiens
aacacatccctcatg

SEQ ID NO: 1322992 - DNA, 15 bp, Homo sapiens
caacacatccctcat

SEQ ID NO: 1322993 - DNA, 15 bp, Homo sapiens
tcaacacatccctca

SEQ ID NO: 1322994 - DNA, 15 bp, Homo sapiens
ttcaacacatccctc

SEQ ID NO: 1322995 - DNA, 15 bp, Homo sapiens
tttcaacacatccct

SEQ ID NO: 1322996 - DNA, 15 bp, Homo sapiens
gtttcaacacatccc

SEQ ID NO: 1322997 - DNA, 15 bp, Homo sapiens
agtttcaacacatcc

SEQ ID NO: 1322998 - DNA, 15 bp, Homo sapiens
tagtttcaacacatc

SEQ ID NO: 1322999 - DNA, 15 bp, Homo sapiens
ttagtttcaacacat

SEQ ID NO: 1323000 - DNA, 15 bp, Homo sapiens
tttagtttcaacaca

SEQ ID NO: 1323001 - DNA, 15 bp, Homo sapiens
atttagtttcaacac

SEQ ID NO: 1323002 - DNA, 15 bp, Homo sapiens
aatttagtttcaaca

SEQ ID NO: 1323003 - DNA, 15 bp, Homo sapiens
caatttagtttcaac

SEQ ID NO: 1323004 - DNA, 15 bp, Homo sapiens
acaatttagtttcaa

SEQ ID NO: 1323005 - DNA, 15 bp, Homo sapiens
cacaatttagtttca

SEQ ID NO: 1323006 - DNA, 15 bp, Homo sapiens
gcacaatttagtttc

SEQ ID NO: 1323007 - DNA, 15 bp, Homo sapiens
ggcacaatttagttt

SEQ ID NO: 1323008 - DNA, 15 bp, Homo sapiens
aggcacaatttagtt

SEQ ID NO: 1323009 - DNA, 15 bp, Homo sapiens
caggcacaatttagt

SEQ ID NO: 1323010 - DNA, 15 bp, Homo sapiens
tcaggcacaatttag

SEQ ID NO: 1323011 - DNA, 15 bp, Homo sapiens
ttcaggcacaattta

SEQ ID NO: 1323012 - DNA, 15 bp, Homo sapiens
cttcaggcacaattt

SEQ ID NO: 1323013 - DNA, 15 bp, Homo sapiens
tcttcaggcacaatt

SEQ ID NO: 1323014 - DNA, 15 bp, Homo sapiens
gtcttcaggcacaat

SEQ ID NO: 1323015 - DNA, 15 bp, Homo sapiens
ggtcttcaggcacaa

SEQ ID NO: 1323016 - DNA, 15 bp, Homo sapiens
gggtcttcaggcaca

SEQ ID NO: 1323017 - DNA, 15 bp, Homo sapiens
agggtcttcaggcac

SEQ ID NO: 1323018 - DNA, 15 bp, Homo sapiens
aagggtcttcaggca

SEQ ID NO: 1323019 - DNA, 15 bp, Homo sapiens
taagggtcttcaggc

SEQ ID NO: 1323020 - DNA, 15 bp, Homo sapiens
ataagggtcttcagg

SEQ ID NO: 1323021 - DNA, 15 bp, Homo sapiens
cataagggtcttcag

SEQ ID NO: 1323022 - DNA, 15 bp, Homo sapiens
acataagggtcttca

SEQ ID NO: 1323023 - DNA, 15 bp, Homo sapiens
aacataagggtcttc

SEQ ID NO: 1323024 - DNA, 15 bp, Homo sapiens
taacataagggtctt

SEQ ID NO: 1323025 - DNA, 15 bp, Homo sapiens
gtaacataagggtct

SEQ ID NO: 1323026 - DNA, 15 bp, Homo sapiens
ggtaacataagggtc

SEQ ID NO: 1323027 - DNA, 15 bp, Homo sapiens
aggtaacataagggt

SEQ ID NO: 1323028 - DNA, 15 bp, Homo sapiens
aaggtaacataaggg

SEQ ID NO: 1323029 - DNA, 15 bp, Homo sapiens
aaaggtaacataagg

SEQ ID NO: 1323030 - DNA, 15 bp, Homo sapiens
taaaggtaacataag

SEQ ID NO: 1323031 - DNA, 15 bp, Homo sapiens
gtaaaggtaacataa

SEQ ID NO: 1323032 - DNA, 15 bp, Homo sapiens
tgtaaaggtaacata

SEQ ID NO: 1323033 - DNA, 15 bp, Homo sapiens
atgtaaaggtaacat

SEQ ID NO: 1323034 - DNA, 15 bp, Homo sapiens
tatgtaaaggtaaca

SEQ ID NO: 1323035 - DNA, 15 bp, Homo sapiens
atatgtaaaggtaac

SEQ ID NO: 1323036 - DNA, 15 bp, Homo sapiens
gatatgtaaaggtaa

SEQ ID NO: 1323037 - DNA, 15 bp, Homo sapiens
tgatatgtaaaggta

SEQ ID NO: 1323038 - DNA, 15 bp, Homo sapiens
ttgatatgtaaaggt

SEQ ID NO: 1323039 - DNA, 15 bp, Homo sapiens
tttgatatgtaaagg

SEQ ID NO: 1323040 - DNA, 15 bp, Homo sapiens
atttgatatgtaaag

SEQ ID NO: 1323041 - DNA, 15 bp, Homo sapiens
aatttgatatgtaaa

SEQ ID NO: 1323042 - DNA, 15 bp, Homo sapiens
aaatttgatatgtaa

SEQ ID NO: 1323043 - DNA, 15 bp, Homo sapiens
gaaatttgatatgta

SEQ ID NO: 1323044 - DNA, 15 bp, Homo sapiens
agaaatttgatatgt

SEQ ID NO: 1323045 - DNA, 15 bp, Homo sapiens
tagaaatttgatatg

SEQ ID NO: 1323046 - DNA, 15 bp, Homo sapiens
atagaaatttgatat

SEQ ID NO: 1323047 - DNA, 15 bp, Homo sapiens
aatagaaatttgata

SEQ ID NO: 1323048 - DNA, 15 bp, Homo sapiens
caatagaaatttgat

SEQ ID NO: 1323049 - DNA, 15 bp, Homo sapiens
acaatagaaatttga

SEQ ID NO: 1323050 - DNA, 15 bp, Homo sapiens
tacaatagaaatttg

SEQ ID NO: 1323051 - DNA, 15 bp, Homo sapiens
atacaatagaaattt

SEQ ID NO: 1323052 - DNA, 15 bp, Homo sapiens
gatacaatagaaatt

SEQ ID NO: 1323053 - DNA, 15 bp, Homo sapiens
agatacaatagaaat

SEQ ID NO: 1323054 - DNA, 15 bp, Homo sapiens
cagatacaatagaaa

SEQ ID NO: 1323055 - DNA, 15 bp, Homo sapiens
ccagatacaatagaa

SEQ ID NO: 1323056 - DNA, 15 bp, Homo sapiens
gccagatacaataga

SEQ ID NO: 1323057 - DNA, 15 bp, Homo sapiens
ggccagatacaatag

SEQ ID NO: 1323058 - DNA, 15 bp, Homo sapiens
tggccagatacaata

SEQ ID NO: 1323059 - DNA, 15 bp, Homo sapiens
ttggccagatacaat

SEQ ID NO: 1323060 - DNA, 15 bp, Homo sapiens
gttggccagatacaa

SEQ ID NO: 1323061 - DNA, 15 bp, Homo sapiens
ggttggccagataca

SEQ ID NO: 1323062 - DNA, 15 bp, Homo sapiens
aggttggccagatac

SEQ ID NO: 1323063 - DNA, 15 bp, Homo sapiens
aaggttggccagata

SEQ ID NO: 1323064 - DNA, 15 bp, Homo sapiens
aaaggttggccagat

SEQ ID NO: 1323065 - DNA, 15 bp, Homo sapiens
caaaggttggccaga

SEQ ID NO: 1323066 - DNA, 15 bp, Homo sapiens
tcaaaggttggccag

SEQ ID NO: 1323067 - DNA, 15 bp, Homo sapiens
atcaaaggttggcca

SEQ ID NO: 1323068 - DNA, 15 bp, Homo sapiens
aatcaaaggttggcc

SEQ ID NO: 1323069 - DNA, 15 bp, Homo sapiens
aaatcaaaggttggc

SEQ ID NO: 1323070 - DNA, 15 bp, Homo sapiens
aaaatcaaaggttgg

SEQ ID NO: 1323071 - DNA, 15 bp, Homo sapiens
taaaatcaaaggttg

SEQ ID NO: 1323072 - DNA, 15 bp, Homo sapiens
ttaaaatcaaaggtt

SEQ ID NO: 1323073 - DNA, 15 bp, Homo sapiens
cttaaaatcaaaggt

SEQ ID NO: 1323074 - DNA, 15 bp, Homo sapiens
ccttaaaatcaaagg

SEQ ID NO: 1323075 - DNA, 15 bp, Homo sapiens
gccttaaaatcaaag

SEQ ID NO: 1323076 - DNA, 15 bp, Homo sapiens
tgccttaaaatcaaa

SEQ ID NO: 1323077 - DNA, 15 bp, Homo sapiens
gtgccttaaaatcaa

SEQ ID NO: 1323078 - DNA, 15 bp, Homo sapiens
agtgccttaaaatca

SEQ ID NO: 1323079 - DNA, 15 bp, Homo sapiens
tagtgccttaaaatc

SEQ ID NO: 1323080 - DNA, 15 bp, Homo sapiens
ctagtgccttaaaat

SEQ ID NO: 1323081 - DNA, 15 bp, Homo sapiens
cctagtgccttaaaa

SEQ ID NO: 1323082 - DNA, 15 bp, Homo sapiens
ccctagtgccttaaa

SEQ ID NO: 1323083 - DNA, 15 bp, Homo sapiens
gccctagtgccttaa

SEQ ID NO: 1323084 - DNA, 15 bp, Homo sapiens
tgccctagtgcctta

SEQ ID NO: 1323085 - DNA, 15 bp, Homo sapiens
ttgccctagtgcctt

SEQ ID NO: 1323086 - DNA, 15 bp, Homo sapiens
cttgccctagtgcct

SEQ ID NO: 1323087 - DNA, 15 bp, Homo sapiens
tcttgccctagtgcc

SEQ ID NO: 1323088 - DNA, 15 bp, Homo sapiens
ttcttgccctagtgc

SEQ ID NO: 1323089 - DNA, 15 bp, Homo sapiens
attcttgccctagtg

SEQ ID NO: 1323090 - DNA, 15 bp, Homo sapiens
cattcttgccctagt

SEQ ID NO: 1323091 - DNA, 15 bp, Homo sapiens
tcattcttgccctag

SEQ ID NO: 1323092 - DNA, 15 bp, Homo sapiens
gtcattcttgcccta

SEQ ID NO: 1323093 - DNA, 15 bp, Homo sapiens
ggtcattcttgccct

SEQ ID NO: 1323094 - DNA, 15 bp, Homo sapiens
tggtcattcttgccc

SEQ ID NO: 1323095 - DNA, 15 bp, Homo sapiens
ttggtcattcttgcc

SEQ ID NO: 1323096 - DNA, 15 bp, Homo sapiens
gttggtcattcttgc

SEQ ID NO: 1323097 - DNA, 15 bp, Homo sapiens
cgttggtcattcttg

SEQ ID NO: 1323098 - DNA, 15 bp, Homo sapiens
ccgttggtcattctt

SEQ ID NO: 1323099 - DNA, 15 bp, Homo sapiens
cccgttggtcattct

SEQ ID NO: 1323100 - DNA, 15 bp, Homo sapiens
acccgttggtcattc

SEQ ID NO: 1323101 - DNA, 15 bp, Homo sapiens
aacccgttggtcatt

SEQ ID NO: 1323102 - DNA, 15 bp, Homo sapiens
aaacccgttggtcat

SEQ ID NO: 1323103 - DNA, 15 bp, Homo sapiens
gaaacccgttggtca

SEQ ID NO: 1323104 - DNA, 15 bp, Homo sapiens
ggaaacccgttggtc

SEQ ID NO: 1323105 - DNA, 15 bp, Homo sapiens
tggaaacccgttggt

SEQ ID NO: 1323106 - DNA, 15 bp, Homo sapiens
ttggaaacccgttgg

SEQ ID NO: 1323107 - DNA, 15 bp, Homo sapiens
tttggaaacccgttg

SEQ ID NO: 1323108 - DNA, 15 bp, Homo sapiens
gtttggaaacccgtt

SEQ ID NO: 1323109 - DNA, 15 bp, Homo sapiens
tgtttggaaacccgt

SEQ ID NO: 1323110 - DNA, 15 bp, Homo sapiens
atgtttggaaacccg

SEQ ID NO: 1323111 - DNA, 15 bp, Homo sapiens
tatgtttggaaaccc

SEQ ID NO: 1323112 - DNA, 15 bp, Homo sapiens
atatgtttggaaacc

SEQ ID NO: 1323113 - DNA, 15 bp, Homo sapiens
tatatgtttggaaac

SEQ ID NO: 1323114 - DNA, 15 bp, Homo sapiens
ctatatgtttggaaa

SEQ ID NO: 1323115 - DNA, 15 bp, Homo sapiens
tctatatgtttggaa

SEQ ID NO: 1323116 - DNA, 15 bp, Homo sapiens
ttctatatgtttgga

SEQ ID NO: 1323117 - DNA, 15 bp, Homo sapiens
cttctatatgtttgg

SEQ ID NO: 1323118 - DNA, 15 bp, Homo sapiens
acttctatatgtttg

SEQ ID NO: 1323119 - DNA, 15 bp, Homo sapiens
tacttctatatgttt

SEQ ID NO: 1323120 - DNA, 15 bp, Homo sapiens
ctacttctatatgtt

SEQ ID NO: 1323121 - DNA, 15 bp, Homo sapiens
actacttctatatgt

SEQ ID NO: 1323122 - DNA, 15 bp, Homo sapiens
tactacttctatatg

SEQ ID NO: 1323123 - DNA, 15 bp, Homo sapiens
ttactacttctatat

SEQ ID NO: 1323124 - DNA, 15 bp, Homo sapiens
gttactacttctata

SEQ ID NO: 1323125 - DNA, 15 bp, Homo sapiens
tgttactacttctat

SEQ ID NO: 1323126 - DNA, 15 bp, Homo sapiens
atgttactacttcta

SEQ ID NO: 1323127 - DNA, 15 bp, Homo sapiens
catgttactacttct

SEQ ID NO: 1323128 - DNA, 15 bp, Homo sapiens
acatgttactacttc

SEQ ID NO: 1323129 - DNA, 15 bp, Homo sapiens
cacatgttactactt

SEQ ID NO: 1323130 - DNA, 15 bp, Homo sapiens
gcacatgttactact

SEQ ID NO: 1323131 - DNA, 15 bp, Homo sapiens
tgcacatgttactac

SEQ ID NO: 1323132 - DNA, 15 bp, Homo sapiens
atgcacatgttacta

SEQ ID NO: 1323133 - DNA, 15 bp, Homo sapiens
tatgcacatgttact

SEQ ID NO: 1323134 - DNA, 15 bp, Homo sapiens
atatgcacatgttac

SEQ ID NO: 1323135 - DNA, 15 bp, Homo sapiens
gatatgcacatgtta

SEQ ID NO: 1323136 - DNA, 15 bp, Homo sapiens
tgatatgcacatgtt

SEQ ID NO: 1323137 - DNA, 15 bp, Homo sapiens
ttgatatgcacatgt

SEQ ID NO: 1323138 - DNA, 15 bp, Homo sapiens
gttgatatgcacatg

SEQ ID NO: 1323139 - DNA, 15 bp, Homo sapiens
tgttgatatgcacat

SEQ ID NO: 1323140 - DNA, 15 bp, Homo sapiens
ttgttgatatgcaca

SEQ ID NO: 1323141 - DNA, 15 bp, Homo sapiens
tttgttgatatgcac

SEQ ID NO: 1323142 - DNA, 15 bp, Homo sapiens
ttttgttgatatgca

SEQ ID NO: 1323143 - DNA, 15 bp, Homo sapiens
tttttgttgatatgc

SEQ ID NO: 1323144 - DNA, 15 bp, Homo sapiens
atttttgttgatatg

SEQ ID NO: 1323145 - DNA, 15 bp, Homo sapiens
gatttttgttgatat

SEQ ID NO: 1323146 - DNA, 15 bp, Homo sapiens
tgatttttgttgata

SEQ ID NO: 1323147 - DNA, 15 bp, Homo sapiens
gtgatttttgttgat

SEQ ID NO: 1323148 - DNA, 15 bp, Homo sapiens
agtgatttttgttga

SEQ ID NO: 1323149 - DNA, 15 bp, Homo sapiens
aagtgatttttgttg

SEQ ID NO: 1323150 - DNA, 15 bp, Homo sapiens
caagtgatttttgtt

SEQ ID NO: 1323151 - DNA, 15 bp, Homo sapiens
ccaagtgatttttgt

SEQ ID NO: 1323152 - DNA, 15 bp, Homo sapiens
accaagtgatttttg

SEQ ID NO: 1323153 - DNA, 15 bp, Homo sapiens
taccaagtgattttt

SEQ ID NO: 1323154 - DNA, 15 bp, Homo sapiens
ctaccaagtgatttt

SEQ ID NO: 1323155 - DNA, 15 bp, Homo sapiens
cctaccaagtgattt

SEQ ID NO: 1323156 - DNA, 15 bp, Homo sapiens
tcctaccaagtgatt

SEQ ID NO: 1323157 - DNA, 15 bp, Homo sapiens
ttcctaccaagtgat

SEQ ID NO: 1323158 - DNA, 15 bp, Homo sapiens
gttcctaccaagtga

SEQ ID NO: 1323159 - DNA, 15 bp, Homo sapiens
ggttcctaccaagtg

SEQ ID NO: 1323160 - DNA, 15 bp, Homo sapiens
gggttcctaccaagt

SEQ ID NO: 1323161 - DNA, 15 bp, Homo sapiens
tgggttcctaccaag

SEQ ID NO: 1323162 - DNA, 15 bp, Homo sapiens
ttgggttcctaccaa

SEQ ID NO: 1323163 - DNA, 15 bp, Homo sapiens
attgggttcctacca

SEQ ID NO: 1323164 - DNA, 15 bp, Homo sapiens
tattgggttcctacc

SEQ ID NO: 1323165 - DNA, 15 bp, Homo sapiens
gtattgggttcctac

SEQ ID NO: 1323166 - DNA, 15 bp, Homo sapiens
agtattgggttccta

SEQ ID NO: 1323167 - DNA, 15 bp, Homo sapiens
tagtattgggttcct

SEQ ID NO: 1323168 - DNA, 15 bp, Homo sapiens
ctagtattgggttcc

SEQ ID NO: 1323169 - DNA, 15 bp, Homo sapiens
gctagtattgggttc

SEQ ID NO: 1323170 - DNA, 15 bp, Homo sapiens
agctagtattgggtt

SEQ ID NO: 1323171 - DNA, 15 bp, Homo sapiens
tagctagtattgggt

SEQ ID NO: 1323172 - DNA, 15 bp, Homo sapiens
ttagctagtattggg

SEQ ID NO: 1323173 - DNA, 15 bp, Homo sapiens
attagctagtattgg

SEQ ID NO: 1323174 - DNA, 15 bp, Homo sapiens
tattagctagtattg

SEQ ID NO: 1323175 - DNA, 15 bp, Homo sapiens
ttattagctagtatt

SEQ ID NO: 1323176 - DNA, 15 bp, Homo sapiens
cttattagctagtat

SEQ ID NO: 1323177 - DNA, 15 bp, Homo sapiens
gcttattagctagta

SEQ ID NO: 1323178 - DNA, 15 bp, Homo sapiens
ggcttattagctagt

SEQ ID NO: 1323179 - DNA, 15 bp, Homo sapiens
aggcttattagctag

SEQ ID NO: 1323180 - DNA, 15 bp, Homo sapiens
taggcttattagcta

SEQ ID NO: 1323181 - DNA, 15 bp, Homo sapiens
gtaggcttattagct

SEQ ID NO: 1323182 - DNA, 15 bp, Homo sapiens
agtaggcttattagc

SEQ ID NO: 1323183 - DNA, 15 bp, Homo sapiens
gagtaggcttattag

SEQ ID NO: 1323184 - DNA, 15 bp, Homo sapiens
ggagtaggcttatta

SEQ ID NO: 1323185 - DNA, 15 bp, Homo sapiens
aggagtaggcttatt

SEQ ID NO: 1323186 - DNA, 15 bp, Homo sapiens
taggagtaggcttat

SEQ ID NO: 1323187 - DNA, 15 bp, Homo sapiens
gtaggagtaggctta

SEQ ID NO: 1323188 - DNA, 15 bp, Homo sapiens
agtaggagtaggctt

SEQ ID NO: 1323189 - DNA, 15 bp, Homo sapiens
cagtaggagtaggct

SEQ ID NO: 1323190 - DNA, 15 bp, Homo sapiens
acagtaggagtaggc

SEQ ID NO: 1323191 - DNA, 15 bp, Homo sapiens
gacagtaggagtagg

SEQ ID NO: 1323192 - DNA, 15 bp, Homo sapiens
agacagtaggagtag

SEQ ID NO: 1323193 - DNA, 15 bp, Homo sapiens
aagacagtaggagta

SEQ ID NO: 1323194 - DNA, 15 bp, Homo sapiens
taagacagtaggagt

SEQ ID NO: 1323195 - DNA, 15 bp, Homo sapiens
ctaagacagtaggag

SEQ ID NO: 1323196 - DNA, 15 bp, Homo sapiens
tctaagacagtagga

SEQ ID NO: 1323197 - DNA, 15 bp, Homo sapiens
atctaagacagtagg

SEQ ID NO: 1323198 - DNA, 15 bp, Homo sapiens
gatctaagacagtag

SEQ ID NO: 1323199 - DNA, 15 bp, Homo sapiens
agatctaagacagta

SEQ ID NO: 1323200 - DNA, 15 bp, Homo sapiens
tagatctaagacagt

SEQ ID NO: 1323201 - DNA, 15 bp, Homo sapiens
ctagatctaagacag

SEQ ID NO: 1323202 - DNA, 15 bp, Homo sapiens
actagatctaagaca

SEQ ID NO: 1323203 - DNA, 15 bp, Homo sapiens
aactagatctaagac

SEQ ID NO: 1323204 - DNA, 15 bp, Homo sapiens
gaactagatctaaga

SEQ ID NO: 1323205 - DNA, 15 bp, Homo sapiens
agaactagatctaag

SEQ ID NO: 1323206 - DNA, 15 bp, Homo sapiens
cagaactagatctaa

SEQ ID NO: 1323207 - DNA, 15 bp, Homo sapiens
acagaactagatcta

SEQ ID NO: 1323208 - DNA, 15 bp, Homo sapiens
aacagaactagatct

SEQ ID NO: 1323209 - DNA, 15 bp, Homo sapiens
aaacagaactagatc

SEQ ID NO: 1323210 - DNA, 15 bp, Homo sapiens
gaaacagaactagat

SEQ ID NO: 1323211 - DNA, 15 bp, Homo sapiens
tgaaacagaactaga

SEQ ID NO: 1323212 - DNA, 15 bp, Homo sapiens
ctgaaacagaactag

SEQ ID NO: 1323213 - DNA, 15 bp, Homo sapiens
tctgaaacagaacta

SEQ ID NO: 1323214 - DNA, 15 bp, Homo sapiens
ttctgaaacagaact

SEQ ID NO: 1323215 - DNA, 15 bp, Homo sapiens
attctgaaacagaac

SEQ ID NO: 1323216 - DNA, 15 bp, Homo sapiens
aattctgaaacagaa

SEQ ID NO: 1323217 - DNA, 15 bp, Homo sapiens
caattctgaaacaga

SEQ ID NO: 1323218 - DNA, 15 bp, Homo sapiens
ccaattctgaaacag

SEQ ID NO: 1323219 - DNA, 15 bp, Homo sapiens
tccaattctgaaaca

SEQ ID NO: 1323220 - DNA, 15 bp, Homo sapiens
ttccaattctgaaac

SEQ ID NO: 1323221 - DNA, 15 bp, Homo sapiens
cttccaattctgaaa

SEQ ID NO: 1323222 - DNA, 15 bp, Homo sapiens
gcttccaattctgaa

SEQ ID NO: 1323223 - DNA, 15 bp, Homo sapiens
agcttccaattctga

SEQ ID NO: 1323224 - DNA, 15 bp, Homo sapiens
aagcttccaattctg

SEQ ID NO: 1323225 - DNA, 15 bp, Homo sapiens
aaagcttccaattct

SEQ ID NO: 1323226 - DNA, 15 bp, Homo sapiens
taaagcttccaattc

SEQ ID NO: 1323227 - DNA, 15 bp, Homo sapiens
ttaaagcttccaatt

SEQ ID NO: 1323228 - DNA, 15 bp, Homo sapiens
cttaaagcttccaat

SEQ ID NO: 1323229 - DNA, 15 bp, Homo sapiens
ccttaaagcttccaa

SEQ ID NO: 1323230 - DNA, 15 bp, Homo sapiens
tccttaaagcttcca

SEQ ID NO: 1323231 - DNA, 15 bp, Homo sapiens
atccttaaagcttcc

SEQ ID NO: 1323232 - DNA, 15 bp, Homo sapiens
aatccttaaagcttc

SEQ ID NO: 1323233 - DNA, 15 bp, Homo sapiens
taatccttaaagctt

SEQ ID NO: 1323234 - DNA, 15 bp, Homo sapiens
ataatccttaaagct

SEQ ID NO: 1323235 - DNA, 15 bp, Homo sapiens
cataatccttaaagc

SEQ ID NO: 1323236 - DNA, 15 bp, Homo sapiens
tcataatccttaaag

SEQ ID NO: 1323237 - DNA, 15 bp, Homo sapiens
ttcataatccttaaa

SEQ ID NO: 1323238 - DNA, 15 bp, Homo sapiens
tttcataatccttaa

SEQ ID NO: 1323239 - DNA, 15 bp, Homo sapiens
atttcataatcctta

SEQ ID NO: 1323240 - DNA, 15 bp, Homo sapiens
aatttcataatcctt

SEQ ID NO: 1323241 - DNA, 15 bp, Homo sapiens
gaatttcataatcct

SEQ ID NO: 1323242 - DNA, 15 bp, Homo sapiens
agaatttcataatcc

SEQ ID NO: 1323243 - DNA, 15 bp, Homo sapiens
cagaatttcataatc

SEQ ID NO: 1323244 - DNA, 15 bp, Homo sapiens
ccagaatttcataat

SEQ ID NO: 1323245 - DNA, 15 bp, Homo sapiens
cccagaatttcataa

SEQ ID NO: 1323246 - DNA, 15 bp, Homo sapiens
tcccagaatttcata

SEQ ID NO: 1323247 - DNA, 15 bp, Homo sapiens
ttcccagaatttcat

SEQ ID NO: 1323248 - DNA, 15 bp, Homo sapiens
gttcccagaatttca

SEQ ID NO: 1323249 - DNA, 15 bp, Homo sapiens
agttcccagaatttc

SEQ ID NO: 1323250 - DNA, 15 bp, Homo sapiens
aagttcccagaattt

SEQ ID NO: 1323251 - DNA, 15 bp, Homo sapiens
caagttcccagaatt

SEQ ID NO: 1323252 - DNA, 15 bp, Homo sapiens
ccaagttcccagaat

SEQ ID NO: 1323253 - DNA, 15 bp, Homo sapiens
tccaagttcccagaa

SEQ ID NO: 1323254 - DNA, 15 bp, Homo sapiens
ctccaagttcccaga

SEQ ID NO: 1323255 - DNA, 15 bp, Homo sapiens
actccaagttcccag

SEQ ID NO: 1323256 - DNA, 15 bp, Homo sapiens
tactccaagttccca

SEQ ID NO: 1323257 - DNA, 15 bp, Homo sapiens
ctactccaagttccc

SEQ ID NO: 1323258 - DNA, 15 bp, Homo sapiens
cctactccaagttcc

SEQ ID NO: 1323259 - DNA, 15 bp, Homo sapiens
acctactccaagttc

SEQ ID NO: 1323260 - DNA, 15 bp, Homo sapiens
gacctactccaagtt

SEQ ID NO: 1323261 - DNA, 15 bp, Homo sapiens
ggacctactccaagt

SEQ ID NO: 1323262 - DNA, 15 bp, Homo sapiens
tggacctactccaag

SEQ ID NO: 1323263 - DNA, 15 bp, Homo sapiens
gtggacctactccaa

SEQ ID NO: 1323264 - DNA, 15 bp, Homo sapiens
ggtggacctactcca

SEQ ID NO: 1323265 - DNA, 15 bp, Homo sapiens
aggtggacctactcc

SEQ ID NO: 1323266 - DNA, 15 bp, Homo sapiens
taggtggacctactc

SEQ ID NO: 1323267 - DNA, 15 bp, Homo sapiens
ctaggtggacctact

SEQ ID NO: 1323268 - DNA, 15 bp, Homo sapiens
tctaggtggacctac

SEQ ID NO: 1323269 - DNA, 15 bp, Homo sapiens
ttctaggtggaccta

SEQ ID NO: 1323270 - DNA, 15 bp, Homo sapiens
cttctaggtggacct

SEQ ID NO: 1323271 - DNA, 15 bp, Homo sapiens
acttctaggtggacc

SEQ ID NO: 1323272 - DNA, 15 bp, Homo sapiens
tacttctaggtggac

SEQ ID NO: 1323273 - DNA, 15 bp, Homo sapiens
ctacttctaggtgga

SEQ ID NO: 1323274 - DNA, 15 bp, Homo sapiens
tctacttctaggtgg

SEQ ID NO: 1323275 - DNA, 15 bp, Homo sapiens
ttctacttctaggtg

SEQ ID NO: 1323276 - DNA, 15 bp, Homo sapiens
cttctacttctaggt

SEQ ID NO: 1323277 - DNA, 15 bp, Homo sapiens
gcttctacttctagg

SEQ ID NO: 1323278 - DNA, 15 bp, Homo sapiens
tgcttctacttctag

SEQ ID NO: 1323279 - DNA, 15 bp, Homo sapiens
ctgcttctacttcta

SEQ ID NO: 1323280 - DNA, 15 bp, Homo sapiens
gctgcttctacttct

SEQ ID NO: 1323281 - DNA, 15 bp, Homo sapiens
tgctgcttctacttc

SEQ ID NO: 1323282 - DNA, 15 bp, Homo sapiens
ttgctgcttctactt

SEQ ID NO: 1323283 - DNA, 15 bp, Homo sapiens
tttgctgcttctact

SEQ ID NO: 1323284 - DNA, 15 bp, Homo sapiens
ttttgctgcttctac

SEQ ID NO: 1323285 - DNA, 15 bp, Homo sapiens
gttttgctgcttcta

SEQ ID NO: 1323286 - DNA, 15 bp, Homo sapiens
ggttttgctgcttct

SEQ ID NO: 1323287 - DNA, 15 bp, Homo sapiens
gggttttgctgcttc

SEQ ID NO: 1323288 - DNA, 15 bp, Homo sapiens
tgggttttgctgctt

SEQ ID NO: 1323289 - DNA, 15 bp, Homo sapiens
ttgggttttgctgct

SEQ ID NO: 1323290 - DNA, 15 bp, Homo sapiens
tttgggttttgctgc

SEQ ID NO: 1323291 - DNA, 15 bp, Homo sapiens
ttttgggttttgctg

SEQ ID NO: 1323292 - DNA, 15 bp, Homo sapiens
tttttgggttttgct

SEQ ID NO: 1323293 - DNA, 15 bp, Homo sapiens
ttttttgggttttgc

SEQ ID NO: 1323294 - DNA, 15 bp, Homo sapiens
gttttttgggttttg

SEQ ID NO: 1323295 - DNA, 15 bp, Homo sapiens
ggttttttgggtttt

SEQ ID NO: 1323296 - DNA, 15 bp, Homo sapiens
tggttttttgggttt

SEQ ID NO: 1323297 - DNA, 15 bp, Homo sapiens
ttggttttttgggtt

SEQ ID NO: 1323298 - DNA, 15 bp, Homo sapiens
attggttttttgggt

SEQ ID NO: 1323299 - DNA, 15 bp, Homo sapiens
tattggttttttggg

SEQ ID NO: 1323300 - DNA, 15 bp, Homo sapiens
gtattggttttttgg

SEQ ID NO: 1323301 - DNA, 15 bp, Homo sapiens
tgtattggttttttg

SEQ ID NO: 1323302 - DNA, 15 bp, Homo sapiens
ttgtattggtttttt

SEQ ID NO: 1323303 - DNA, 15 bp, Homo sapiens
attgtattggttttt

SEQ ID NO: 1323304 - DNA, 15 bp, Homo sapiens
aattgtattggtttt

SEQ ID NO: 1323305 - DNA, 15 bp, Homo sapiens
aaattgtattggttt

SEQ ID NO: 1323306 - DNA, 15 bp, Homo sapiens
aaaattgtattggtt

SEQ ID NO: 1323307 - DNA, 15 bp, Homo sapiens
aaaaattgtattggt

SEQ ID NO: 1323308 - DNA, 15 bp, Homo sapiens
taaaaattgtattgg

SEQ ID NO: 1323309 - DNA, 15 bp, Homo sapiens
ttaaaaattgtattg

SEQ ID NO: 1323310 - DNA, 15 bp, Homo sapiens
attaaaaattgtatt

SEQ ID NO: 1323311 - DNA, 15 bp, Homo sapiens
tattaaaaattgtat

SEQ ID NO: 1323312 - DNA, 15 bp, Homo sapiens
ctattaaaaattgta

SEQ ID NO: 1323313 - DNA, 15 bp, Homo sapiens
actattaaaaattgt

SEQ ID NO: 1323314 - DNA, 15 bp, Homo sapiens
acactattaaaaatt

SEQ ID NO: 1323315 - DNA, 15 bp, Homo sapiens
aacactattaaaaat

SEQ ID NO: 1323316 - DNA, 15 bp, Homo sapiens
caacactattaaaaa

SEQ ID NO: 1323317 - DNA, 15 bp, Homo sapiens
acaacactattaaaa

SEQ ID NO: 1323318 - DNA, 15 bp, Homo sapiens
aacaacactattaaa

SEQ ID NO: 1323319 - DNA, 15 bp, Homo sapiens
aaacaacactattaa

SEQ ID NO: 1323320 - DNA, 15 bp, Homo sapiens
taaacaacactatta

SEQ ID NO: 1323321 - DNA, 15 bp, Homo sapiens
ttaaacaacactatt

SEQ ID NO: 1323322 - DNA, 15 bp, Homo sapiens
attaaacaacactat

SEQ ID NO: 1323323 - DNA, 15 bp, Homo sapiens
aattaaacaacacta

SEQ ID NO: 1323324 - DNA, 15 bp, Homo sapiens
aaattaaacaacact

SEQ ID NO: 1323325 - DNA, 15 bp, Homo sapiens
aaaattaaacaacac

SEQ ID NO: 1323326 - DNA, 15 bp, Homo sapiens
aaaaattaaacaaca

SEQ ID NO: 1323327 - DNA, 15 bp, Homo sapiens
taaaaattaaacaac

SEQ ID NO: 1323328 - DNA, 15 bp, Homo sapiens
ttaaaaattaaacaa

SEQ ID NO: 1323329 - DNA, 15 bp, Homo sapiens
cttaaaaattaaaca

SEQ ID NO: 1323330 - DNA, 15 bp, Homo sapiens
acttaaaaattaaac

SEQ ID NO: 1323331 - DNA, 15 bp, Homo sapiens
cacttaaaaattaaa

SEQ ID NO: 1323332 - DNA, 15 bp, Homo sapiens
acacttaaaaattaa

SEQ ID NO: 1323333 - DNA, 15 bp, Homo sapiens
aacacttaaaaatta

SEQ ID NO: 1323334 - DNA, 15 bp, Homo sapiens
taacacttaaaaatt

SEQ ID NO: 1323335 - DNA, 15 bp, Homo sapiens
ataacacttaaaaat

SEQ ID NO: 1323336 - DNA, 15 bp, Homo sapiens
aataacacttaaaaa

SEQ ID NO: 1323337 - DNA, 15 bp, Homo sapiens
aaataacacttaaaa

SEQ ID NO: 1323338 - DNA, 15 bp, Homo sapiens
taaataacacttaaa

SEQ ID NO: 1323339 - DNA, 15 bp, Homo sapiens
gtaaataacacttaa

SEQ ID NO: 1323340 - DNA, 15 bp, Homo sapiens
agtaaataacactta

SEQ ID NO: 1323341 - DNA, 15 bp, Homo sapiens
tagtaaataacactt

SEQ ID NO: 1323342 - DNA, 15 bp, Homo sapiens
ctagtaaataacact

SEQ ID NO: 1323343 - DNA, 15 bp, Homo sapiens
tctagtaaataacac

SEQ ID NO: 1323344 - DNA, 15 bp, Homo sapiens
ttctagtaaataaca

SEQ ID NO: 1323345 - DNA, 15 bp, Homo sapiens
tttctagtaaataac

SEQ ID NO: 1323346 - DNA, 15 bp, Homo sapiens
ttttctagtaaataa

SEQ ID NO: 1323347 - DNA, 15 bp, Homo sapiens
attttctagtaaata

SEQ ID NO: 1323348 - DNA, 15 bp, Homo sapiens
tattttctagtaaat

SEQ ID NO: 1323349 - DNA, 15 bp, Homo sapiens
ttattttctagtaaa

SEQ ID NO: 1323350 - DNA, 15 bp, Homo sapiens
tttattttctagtaa

SEQ ID NO: 1323351 - DNA, 15 bp, Homo sapiens
ttttattttctagta

SEQ ID NO: 1323352 - DNA, 15 bp, Homo sapiens
gttttattttctagt

SEQ ID NO: 1323353 - DNA, 15 bp, Homo sapiens
agttttattttctag

SEQ ID NO: 1323354 - DNA, 15 bp, Homo sapiens
tagttttattttcta

SEQ ID NO: 1323355 - DNA, 15 bp, Homo sapiens
atagttttattttct

SEQ ID NO: 1323356 - DNA, 15 bp, Homo sapiens
tatagttttattttc

SEQ ID NO: 1323357 - DNA, 15 bp, Homo sapiens
gtatagttttatttt

SEQ ID NO: 1323358 - DNA, 15 bp, Homo sapiens
agtatagttttattt

SEQ ID NO: 1323359 - DNA, 15 bp, Homo sapiens
cagtatagttttatt

SEQ ID NO: 1323360 - DNA, 15 bp, Homo sapiens
acagtatagttttat

SEQ ID NO: 1323361 - DNA, 15 bp, Homo sapiens
cacagtatagtttta

SEQ ID NO: 1323362 - DNA, 15 bp, Homo sapiens
acacagtatagtttt

SEQ ID NO: 1323363 - DNA, 15 bp, Homo sapiens
aacacagtatagttt

SEQ ID NO: 1323364 - DNA, 15 bp, Homo sapiens
aaacacagtatagtt

SEQ ID NO: 1323365 - DNA, 15 bp, Homo sapiens
taaacacagtatagt

SEQ ID NO: 1323366 - DNA, 15 bp, Homo sapiens
ttaaacacagtatag

SEQ ID NO: 1323367 - DNA, 15 bp, Homo sapiens
attaaacacagtata

SEQ ID NO: 1323368 - DNA, 15 bp, Homo sapiens
gattaaacacagtat

SEQ ID NO: 1323369 - DNA, 15 bp, Homo sapiens
tgattaaacacagta

SEQ ID NO: 1323370 - DNA, 15 bp, Homo sapiens
atgattaaacacagt

SEQ ID NO: 1323371 - DNA, 15 bp, Homo sapiens
gatgattaaacacag

SEQ ID NO: 1323372 - DNA, 15 bp, Homo sapiens
tgatgattaaacaca

SEQ ID NO: 1323373 - DNA, 15 bp, Homo sapiens
ttgatgattaaacac

SEQ ID NO: 1323374 - DNA, 15 bp, Homo sapiens
cttgatgattaaaca

SEQ ID NO: 1323375 - DNA, 15 bp, Homo sapiens
gcttgatgattaaac

SEQ ID NO: 1323376 - DNA, 15 bp, Homo sapiens
tgcttgatgattaaa

SEQ ID NO: 1323377 - DNA, 15 bp, Homo sapiens
ttgcttgatgattaa

SEQ ID NO: 1323378 - DNA, 15 bp, Homo sapiens
attgcttgatgatta

SEQ ID NO: 1323379 - DNA, 15 bp, Homo sapiens
aattgcttgatgatt

SEQ ID NO: 1323380 - DNA, 15 bp, Homo sapiens
aaattgcttgatgat

SEQ ID NO: 1323381 - DNA, 15 bp, Homo sapiens
aaaattgcttgatga

SEQ ID NO: 1323382 - DNA, 15 bp, Homo sapiens
aaaaattgcttgatg

SEQ ID NO: 1323383 - DNA, 15 bp, Homo sapiens
taaaaattgcttgat

SEQ ID NO: 1323384 - DNA, 15 bp, Homo sapiens
ttaaaaattgcttga

SEQ ID NO: 1323385 - DNA, 15 bp, Homo sapiens
gttaaaaattgcttg

SEQ ID NO: 1323386 - DNA, 15 bp, Homo sapiens
tgttaaaaattgctt

SEQ ID NO: 1323387 - DNA, 15 bp, Homo sapiens
ttgttaaaaattgct

SEQ ID NO: 1323388 - DNA, 15 bp, Homo sapiens
tttgttaaaaattgc

SEQ ID NO: 1323389 - DNA, 15 bp, Homo sapiens
ttttgttaaaaattg

SEQ ID NO: 1323390 - DNA, 15 bp, Homo sapiens
tttttgttaaaaatt

SEQ ID NO: 1323391 - DNA, 15 bp, Homo sapiens
cttttttgttaaaaa

SEQ ID NO: 1323392 - DNA, 15 bp, Homo sapiens
acttttttgttaaaa

SEQ ID NO: 1323393 - DNA, 15 bp, Homo sapiens
aacttttttgttaaa

SEQ ID NO: 1323394 - DNA, 15 bp, Homo sapiens
aaacttttttgttaa

SEQ ID NO: 1323395 - DNA, 15 bp, Homo sapiens
taaacttttttgtta

SEQ ID NO: 1323396 - DNA, 15 bp, Homo sapiens
ctaaacttttttgtt

SEQ ID NO: 1323397 - DNA, 15 bp, Homo sapiens
gctaaacttttttgt

SEQ ID NO: 1323398 - DNA, 15 bp, Homo sapiens
tgctaaacttttttg

SEQ ID NO: 1323399 - DNA, 15 bp, Homo sapiens
gtgctaaactttttt

SEQ ID NO: 1323400 - DNA, 15 bp, Homo sapiens
agtgctaaacttttt

SEQ ID NO: 1323401 - DNA, 15 bp, Homo sapiens
tagtgctaaactttt

SEQ ID NO: 1323402 - DNA, 15 bp, Homo sapiens
ctagtgctaaacttt

SEQ ID NO: 1323403 - DNA, 15 bp, Homo sapiens
cctagtgctaaactt

SEQ ID NO: 1323404 - DNA, 15 bp, Homo sapiens
tcctagtgctaaact

SEQ ID NO: 1323405 - DNA, 15 bp, Homo sapiens
ttcctagtgctaaac

SEQ ID NO: 1323406 - DNA, 15 bp, Homo sapiens
attcctagtgctaaa

SEQ ID NO: 1323407 - DNA, 15 bp, Homo sapiens
tattcctagtgctaa

SEQ ID NO: 1323408 - DNA, 15 bp, Homo sapiens
ctattcctagtgcta

SEQ ID NO: 1323409 - DNA, 15 bp, Homo sapiens
cctattcctagtgct

SEQ ID NO: 1323410 - DNA, 15 bp, Homo sapiens
acctattcctagtgc

SEQ ID NO: 1323411 - DNA, 15 bp, Homo sapiens
aacctattcctagtg

SEQ ID NO: 1323412 - DNA, 15 bp, Homo sapiens
taacctattcctagt

SEQ ID NO: 1323413 - DNA, 15 bp, Homo sapiens
ttaacctattcctag

SEQ ID NO: 1323414 - DNA, 15 bp, Homo sapiens
tttaacctattccta

SEQ ID NO: 1323415 - DNA, 15 bp, Homo sapiens
gtttaacctattcct

SEQ ID NO: 1323416 - DNA, 15 bp, Homo sapiens
agtttaacctattcc

SEQ ID NO: 1323417 - DNA, 15 bp, Homo sapiens
aagtttaacctattc

SEQ ID NO: 1323418 - DNA, 15 bp, Homo sapiens
caagtttaacctatt

SEQ ID NO: 1323419 - DNA, 15 bp, Homo sapiens
tcaagtttaacctat

SEQ ID NO: 1323420 - DNA, 15 bp, Homo sapiens
gtcaagtttaaccta

SEQ ID NO: 1323421 - DNA, 15 bp, Homo sapiens
tgtcaagtttaacct

SEQ ID NO: 1323422 - DNA, 15 bp, Homo sapiens
gtgtcaagtttaacc

SEQ ID NO: 1323423 - DNA, 15 bp, Homo sapiens
tgtgtcaagtttaac

SEQ ID NO: 1323424 - DNA, 15 bp, Homo sapiens
ttgtgtcaagtttaa

SEQ ID NO: 1323425 - DNA, 15 bp, Homo sapiens
attgtgtcaagttta

SEQ ID NO: 1323426 - DNA, 15 bp, Homo sapiens
aattgtgtcaagttt

SEQ ID NO: 1323427 - DNA, 15 bp, Homo sapiens
aaattgtgtcaagtt

SEQ ID NO: 1323428 - DNA, 15 bp, Homo sapiens
caaattgtgtcaagt

SEQ ID NO: 1323429 - DNA, 15 bp, Homo sapiens
gcaaattgtgtcaag

SEQ ID NO: 1323430 - DNA, 15 bp, Homo sapiens
agcaaattgtgtcaa

SEQ ID NO: 1323431 - DNA, 15 bp, Homo sapiens
tagcaaattgtgtca

SEQ ID NO: 1323432 - DNA, 15 bp, Homo sapiens
atagcaaattgtgtc

SEQ ID NO: 1323433 - DNA, 15 bp, Homo sapiens
gatagcaaattgtgt

SEQ ID NO: 1323434 - DNA, 15 bp, Homo sapiens
tgatagcaaattgtg

SEQ ID NO: 1323435 - DNA, 15 bp, Homo sapiens
atgatagcaaattgt

SEQ ID NO: 1323436 - DNA, 15 bp, Homo sapiens
tatgatagcaaattg

SEQ ID NO: 1323437 - DNA, 15 bp, Homo sapiens
ctatgatagcaaatt

SEQ ID NO: 1323438 - DNA, 15 bp, Homo sapiens
tctatgatagcaaat

SEQ ID NO: 1323439 - DNA, 15 bp, Homo sapiens
ttctatgatagcaaa

SEQ ID NO: 1323440 - DNA, 15 bp, Homo sapiens
attctatgatagcaa

SEQ ID NO: 1323441 - DNA, 15 bp, Homo sapiens
aattctatgatagca

SEQ ID NO: 1323442 - DNA, 15 bp, Homo sapiens
taattctatgatagc

SEQ ID NO: 1323443 - DNA, 15 bp, Homo sapiens
ataattctatgatag

SEQ ID NO: 1323444 - DNA, 15 bp, Homo sapiens
tataattctatgata

SEQ ID NO: 1323445 - DNA, 15 bp, Homo sapiens
atataattctatgat

SEQ ID NO: 1323446 - DNA, 15 bp, Homo sapiens
tatataattctatga

SEQ ID NO: 1323447 - DNA, 15 bp, Homo sapiens
atatataattctatg

SEQ ID NO: 1323448 - DNA, 15 bp, Homo sapiens
tatatataattctat

SEQ ID NO: 1323449 - DNA, 15 bp, Homo sapiens
atatatataattcta

SEQ ID NO: 1323450 - DNA, 15 bp, Homo sapiens
catatatataattct

SEQ ID NO: 1323451 - DNA, 15 bp, Homo sapiens
ccatatatataattc

SEQ ID NO: 1323452 - DNA, 15 bp, Homo sapiens
cccatatatataatt

SEQ ID NO: 1323453 - DNA, 15 bp, Homo sapiens
acccatatatataat

SEQ ID NO: 1323454 - DNA, 15 bp, Homo sapiens
tacccatatatataa

SEQ ID NO: 1323455 - DNA, 15 bp, Homo sapiens
ttacccatatatata

SEQ ID NO: 1323456 - DNA, 15 bp, Homo sapiens
tttacccatatatat

SEQ ID NO: 1323457 - DNA, 15 bp, Homo sapiens
ctttacccatatata

SEQ ID NO: 1323458 - DNA, 15 bp, Homo sapiens
cctttacccatatat

SEQ ID NO: 1323459 - DNA, 15 bp, Homo sapiens
ccctttacccatata

SEQ ID NO: 1323460 - DNA, 15 bp, Homo sapiens
accctttacccatat

SEQ ID NO: 1323461 - DNA, 15 bp, Homo sapiens
taccctttacccata

SEQ ID NO: 1323462 - DNA, 15 bp, Homo sapiens
gtaccctttacccat

SEQ ID NO: 1323463 - DNA, 15 bp, Homo sapiens
ggtaccctttaccca

SEQ ID NO: 1323464 - DNA, 15 bp, Homo sapiens
tggtaccctttaccc

SEQ ID NO: 1323465 - DNA, 15 bp, Homo sapiens
ctggtaccctttacc

SEQ ID NO: 1323466 - DNA, 15 bp, Homo sapiens
actggtaccctttac

SEQ ID NO: 1323467 - DNA, 15 bp, Homo sapiens
aactggtacccttta

SEQ ID NO: 1323468 - DNA, 15 bp, Homo sapiens
taactggtacccttt

SEQ ID NO: 1323469 - DNA, 15 bp, Homo sapiens
ctaactggtaccctt

SEQ ID NO: 1323470 - DNA, 15 bp, Homo sapiens
tctaactggtaccct

SEQ ID NO: 1323471 - DNA, 15 bp, Homo sapiens
atctaactggtaccc

SEQ ID NO: 1323472 - DNA, 15 bp, Homo sapiens
aatctaactggtacc

SEQ ID NO: 1323473 - DNA, 15 bp, Homo sapiens
gaatctaactggtac

SEQ ID NO: 1323474 - DNA, 15 bp, Homo sapiens
ggaatctaactggta

SEQ ID NO: 1323475 - DNA, 15 bp, Homo sapiens
gggaatctaactggt

SEQ ID NO: 1323476 - DNA, 15 bp, Homo sapiens
tgggaatctaactgg

SEQ ID NO: 1323477 - DNA, 15 bp, Homo sapiens
atgggaatctaactg

SEQ ID NO: 1323478 - DNA, 15 bp, Homo sapiens
aatgggaatctaact

SEQ ID NO: 1323479 - DNA, 15 bp, Homo sapiens
caatgggaatctaac

SEQ ID NO: 1323480 - DNA, 15 bp, Homo sapiens
ccaatgggaatctaa

SEQ ID NO: 1323481 - DNA, 15 bp, Homo sapiens
gccaatgggaatcta

SEQ ID NO: 1323482 - DNA, 15 bp, Homo sapiens
tgccaatgggaatct

SEQ ID NO: 1323483 - DNA, 15 bp, Homo sapiens
ttgccaatgggaatc

SEQ ID NO: 1323484 - DNA, 15 bp, Homo sapiens
tttgccaatgggaat

SEQ ID NO: 1323485 - DNA, 15 bp, Homo sapiens
ttttgccaatgggaa

SEQ ID NO: 1323486 - DNA, 15 bp, Homo sapiens
tttttgccaatggga

SEQ ID NO: 1323487 - DNA, 15 bp, Homo sapiens
gtttttgccaatggg

SEQ ID NO: 1323488 - DNA, 15 bp, Homo sapiens
ggtttttgccaatgg

SEQ ID NO: 1323489 - DNA, 15 bp, Homo sapiens
aggtttttgccaatg

SEQ ID NO: 1323490 - DNA, 15 bp, Homo sapiens
caggtttttgccaat

SEQ ID NO: 1323491 - DNA, 15 bp, Homo sapiens
ccaggtttttgccaa

SEQ ID NO: 1323492 - DNA, 15 bp, Homo sapiens
accaggtttttgcca

SEQ ID NO: 1323493 - DNA, 15 bp, Homo sapiens
caccaggtttttgcc

SEQ ID NO: 1323494 - DNA, 15 bp, Homo sapiens
tcaccaggtttttgc

SEQ ID NO: 1323495 - DNA, 15 bp, Homo sapiens
atcaccaggtttttg

SEQ ID NO: 1323496 - DNA, 15 bp, Homo sapiens
aatcaccaggttttt

SEQ ID NO: 1323497 - DNA, 15 bp, Homo sapiens
aaatcaccaggtttt

SEQ ID NO: 1323498 - DNA, 15 bp, Homo sapiens
aaaatcaccaggttt

SEQ ID NO: 1323499 - DNA, 15 bp, Homo sapiens
gaaaatcaccaggtt

SEQ ID NO: 1323500 - DNA, 15 bp, Homo sapiens
tgaaaatcaccaggt

SEQ ID NO: 1323501 - DNA, 15 bp, Homo sapiens
atgaaaatcaccagg

SEQ ID NO: 1323502 - DNA, 15 bp, Homo sapiens
aatgaaaatcaccag

SEQ ID NO: 1323503 - DNA, 15 bp, Homo sapiens
gaatgaaaatcacca

SEQ ID NO: 1323504 - DNA, 15 bp, Homo sapiens
agaatgaaaatcacc

SEQ ID NO: 1323505 - DNA, 15 bp, Homo sapiens
cagaatgaaaatcac

SEQ ID NO: 1323506 - DNA, 15 bp, Homo sapiens
acagaatgaaaatca

SEQ ID NO: 1323507 - DNA, 15 bp, Homo sapiens
cacagaatgaaaatc

SEQ ID NO: 1323508 - DNA, 15 bp, Homo sapiens
ccacagaatgaaaat

SEQ ID NO: 1323509 - DNA, 15 bp, Homo sapiens
accacagaatgaaaa

SEQ ID NO: 1323510 - DNA, 15 bp, Homo sapiens
taccacagaatgaaa

SEQ ID NO: 1323511 - DNA, 15 bp, Homo sapiens
ataccacagaatgaa

SEQ ID NO: 1323512 - DNA, 15 bp, Homo sapiens
tataccacagaatga

SEQ ID NO: 1323513 - DNA, 15 bp, Homo sapiens
ctataccacagaatg

SEQ ID NO: 1323514 - DNA, 15 bp, Homo sapiens
tctataccacagaat

SEQ ID NO: 1323515 - DNA, 15 bp, Homo sapiens
ctctataccacagaa

SEQ ID NO: 1323516 - DNA, 15 bp, Homo sapiens
tctctataccacaga

SEQ ID NO: 1323517 - DNA, 15 bp, Homo sapiens
atctctataccacag

SEQ ID NO: 1323518 - DNA, 15 bp, Homo sapiens
gatctctataccaca

SEQ ID NO: 1323519 - DNA, 15 bp, Homo sapiens
ggatctctataccac

SEQ ID NO: 1323520 - DNA, 15 bp, Homo sapiens
aggatctctatacca

SEQ ID NO: 1323521 - DNA, 15 bp, Homo sapiens
taggatctctatacc

SEQ ID NO: 1323522 - DNA, 15 bp, Homo sapiens
ctaggatctctatac

SEQ ID NO: 1323523 - DNA, 15 bp, Homo sapiens
actaggatctctata

SEQ ID NO: 1323524 - DNA, 15 bp, Homo sapiens
aactaggatctctat

SEQ ID NO: 1323525 - DNA, 15 bp, Homo sapiens
taactaggatctcta

SEQ ID NO: 1323526 - DNA, 15 bp, Homo sapiens
ttaactaggatctct

SEQ ID NO: 1323527 - DNA, 15 bp, Homo sapiens
cttaactaggatctc

SEQ ID NO: 1323528 - DNA, 15 bp, Homo sapiens
tcttaactaggatct

SEQ ID NO: 1323529 - DNA, 15 bp, Homo sapiens
ctcttaactaggatc

SEQ ID NO: 1323530 - DNA, 15 bp, Homo sapiens
cctcttaactaggat

SEQ ID NO: 1323531 - DNA, 15 bp, Homo sapiens
gcctcttaactagga

SEQ ID NO: 1323532 - DNA, 15 bp, Homo sapiens
tgcctcttaactagg

SEQ ID NO: 1323533 - DNA, 15 bp, Homo sapiens
ctgcctcttaactag

SEQ ID NO: 1323534 - DNA, 15 bp, Homo sapiens
cctgcctcttaacta

SEQ ID NO: 1323535 - DNA, 15 bp, Homo sapiens
tcctgcctcttaact

SEQ ID NO: 1323536 - DNA, 15 bp, Homo sapiens
ttcctgcctcttaac

SEQ ID NO: 1323537 - DNA, 15 bp, Homo sapiens
attcctgcctcttaa

SEQ ID NO: 1323538 - DNA, 15 bp, Homo sapiens
aattcctgcctctta

SEQ ID NO: 1323539 - DNA, 15 bp, Homo sapiens
taattcctgcctctt

SEQ ID NO: 1323540 - DNA, 15 bp, Homo sapiens
ataattcctgcctct

SEQ ID NO: 1323541 - DNA, 15 bp, Homo sapiens
aataattcctgcctc

SEQ ID NO: 1323542 - DNA, 15 bp, Homo sapiens
aaataattcctgcct

SEQ ID NO: 1323543 - DNA, 15 bp, Homo sapiens
taaataattcctgcc

SEQ ID NO: 1323544 - DNA, 15 bp, Homo sapiens
ttaaataattcctgc

SEQ ID NO: 1323545 - DNA, 15 bp, Homo sapiens
tttaaataattcctg

SEQ ID NO: 1323546 - DNA, 15 bp, Homo sapiens
ttttaaataattcct

SEQ ID NO: 1323547 - DNA, 15 bp, Homo sapiens
tttttaaataattcc

SEQ ID NO: 1323548 - DNA, 15 bp, Homo sapiens
atttttaaataattc

SEQ ID NO: 1323549 - DNA, 15 bp, Homo sapiens
catttttaaataatt

SEQ ID NO: 1323550 - DNA, 15 bp, Homo sapiens
tcatttttaaataat

SEQ ID NO: 1323551 - DNA, 15 bp, Homo sapiens
gtcatttttaaataa

SEQ ID NO: 1323552 - DNA, 15 bp, Homo sapiens
agtcatttttaaata

SEQ ID NO: 1323553 - DNA, 15 bp, Homo sapiens
aagtcatttttaaat

SEQ ID NO: 1323554 - DNA, 15 bp, Homo sapiens
aaagtcatttttaaa

SEQ ID NO: 1323555 - DNA, 15 bp, Homo sapiens
taaagtcatttttaa

SEQ ID NO: 1323556 - DNA, 15 bp, Homo sapiens
ttaaagtcattttta

SEQ ID NO: 1323557 - DNA, 15 bp, Homo sapiens
attaaagtcattttt

SEQ ID NO: 1323558 - DNA, 15 bp, Homo sapiens
aattaaagtcatttt

SEQ ID NO: 1323559 - DNA, 15 bp, Homo sapiens
aaattaaagtcattt

SEQ ID NO: 1323560 - DNA, 15 bp, Homo sapiens
aaaattaaagtcatt

SEQ ID NO: 1323561 - DNA, 15 bp, Homo sapiens
caaaattaaagtcat

SEQ ID NO: 1323562 - DNA, 15 bp, Homo sapiens
tcaaaattaaagtca

SEQ ID NO: 1323563 - DNA, 15 bp, Homo sapiens
atcaaaattaaagtc

SEQ ID NO: 1323564 - DNA, 15 bp, Homo sapiens
gatcaaaattaaagt

SEQ ID NO: 1323565 - DNA, 15 bp, Homo sapiens
tgatcaaaattaaag

SEQ ID NO: 1323566 - DNA, 15 bp, Homo sapiens
atgatcaaaattaaa

SEQ ID NO: 1323567 - DNA, 15 bp, Homo sapiens
aatgatcaaaattaa

SEQ ID NO: 1323568 - DNA, 15 bp, Homo sapiens
aaatgatcaaaatta

SEQ ID NO: 1323569 - DNA, 15 bp, Homo sapiens
taaatgatcaaaatt

SEQ ID NO: 1323570 - DNA, 15 bp, Homo sapiens
ttaaatgatcaaaat

SEQ ID NO: 1323571 - DNA, 15 bp, Homo sapiens
attaaatgatcaaaa

SEQ ID NO: 1323572 - DNA, 15 bp, Homo sapiens
aattaaatgatcaaa

SEQ ID NO: 1323573 - DNA, 15 bp, Homo sapiens
taattaaatgatcaa

SEQ ID NO: 1323574 - DNA, 15 bp, Homo sapiens
ataattaaatgatca

SEQ ID NO: 1323575 - DNA, 15 bp, Homo sapiens
tataattaaatgatc

SEQ ID NO: 1323576 - DNA, 15 bp, Homo sapiens
ctataattaaatgat

SEQ ID NO: 1323577 - DNA, 15 bp, Homo sapiens
cctataattaaatga

SEQ ID NO: 1323578 - DNA, 15 bp, Homo sapiens
tcctataattaaatg

SEQ ID NO: 1323579 - DNA, 15 bp, Homo sapiens
gtcctataattaaat

SEQ ID NO: 1323580 - DNA, 15 bp, Homo sapiens
ggtcctataattaaa

SEQ ID NO: 1323581 - DNA, 15 bp, Homo sapiens
aggtcctataattaa

SEQ ID NO: 1323582 - DNA, 15 bp, Homo sapiens
taggtcctataatta

SEQ ID NO: 1323583 - DNA, 15 bp, Homo sapiens
ataggtcctataatt

SEQ ID NO: 1323584 - DNA, 15 bp, Homo sapiens
aataggtcctataat

SEQ ID NO: 1323585 - DNA, 15 bp, Homo sapiens
aaataggtcctataa

SEQ ID NO: 1323586 - DNA, 15 bp, Homo sapiens
taaataggtcctata

SEQ ID NO: 1323587 - DNA, 15 bp, Homo sapiens
ataaataggtcctat

SEQ ID NO: 1323588 - DNA, 15 bp, Homo sapiens
aataaataggtccta

SEQ ID NO: 1323589 - DNA, 15 bp, Homo sapiens
gaataaataggtcct

SEQ ID NO: 1323590 - DNA, 15 bp, Homo sapiens
tgaataaataggtcc

SEQ ID NO: 1323591 - DNA, 15 bp, Homo sapiens
gtgaataaataggtc

SEQ ID NO: 1323592 - DNA, 15 bp, Homo sapiens
agtgaataaataggt

SEQ ID NO: 1323593 - DNA, 15 bp, Homo sapiens
aagtgaataaatagg

SEQ ID NO: 1323594 - DNA, 15 bp, Homo sapiens
caagtgaataaatag

SEQ ID NO: 1323595 - DNA, 15 bp, Homo sapiens
acaagtgaataaata

SEQ ID NO: 1323596 - DNA, 15 bp, Homo sapiens
aacaagtgaataaat

SEQ ID NO: 1323597 - DNA, 15 bp, Homo sapiens
aaacaagtgaataaa

SEQ ID NO: 1323598 - DNA, 15 bp, Homo sapiens
aaaacaagtgaataa

SEQ ID NO: 1323599 - DNA, 15 bp, Homo sapiens
aaaaacaagtgaata

SEQ ID NO: 1323600 - DNA, 15 bp, Homo sapiens
taaaaacaagtgaat

SEQ ID NO: 1323601 - DNA, 15 bp, Homo sapiens
ttaaaaacaagtgaa

SEQ ID NO: 1323602 - DNA, 15 bp, Homo sapiens
gttaaaaacaagtga

SEQ ID NO: 1323603 - DNA, 15 bp, Homo sapiens
agttaaaaacaagtg

SEQ ID NO: 1323604 - DNA, 15 bp, Homo sapiens
aagttaaaaacaagt

SEQ ID NO: 1323605 - DNA, 15 bp, Homo sapiens
taagttaaaaacaag

SEQ ID NO: 1323606 - DNA, 15 bp, Homo sapiens
ataagttaaaaacaa

SEQ ID NO: 1323607 - DNA, 15 bp, Homo sapiens
aataagttaaaaaca

SEQ ID NO: 1323608 - DNA, 15 bp, Homo sapiens
gaataagttaaaaac

SEQ ID NO: 1323609 - DNA, 15 bp, Homo sapiens
tgaataagttaaaaa

SEQ ID NO: 1323610 - DNA, 15 bp, Homo sapiens
gtgaataagttaaaa

SEQ ID NO: 1323611 - DNA, 15 bp, Homo sapiens
tgtgaataagttaaa

SEQ ID NO: 1323612 - DNA, 15 bp, Homo sapiens
ttgtgaataagttaa

SEQ ID NO: 1323613 - DNA, 15 bp, Homo sapiens
tttgtgaataagtta

SEQ ID NO: 1323614 - DNA, 15 bp, Homo sapiens
atttgtgaataagtt

SEQ ID NO: 1323615 - DNA, 15 bp, Homo sapiens
gatttgtgaataagt

SEQ ID NO: 1323616 - DNA, 15 bp, Homo sapiens
agatttgtgaataag

SEQ ID NO: 1323617 - DNA, 15 bp, Homo sapiens
aagatttgtgaataa

SEQ ID NO: 1323618 - DNA, 15 bp, Homo sapiens
taagatttgtgaata

SEQ ID NO: 1323619 - DNA, 15 bp, Homo sapiens
ctaagatttgtgaat

SEQ ID NO: 1323620 - DNA, 15 bp, Homo sapiens
actaagatttgtgaa

SEQ ID NO: 1323621 - DNA, 15 bp, Homo sapiens
gactaagatttgtga

SEQ ID NO: 1323622 - DNA, 15 bp, Homo sapiens
tgactaagatttgtg

SEQ ID NO: 1323623 - DNA, 15 bp, Homo sapiens
atgactaagatttgt

SEQ ID NO: 1323624 - DNA, 15 bp, Homo sapiens
catgactaagatttg

SEQ ID NO: 1323625 - DNA, 15 bp, Homo sapiens
tcatgactaagattt

SEQ ID NO: 1323626 - DNA, 15 bp, Homo sapiens
ctcatgactaagatt

SEQ ID NO: 1323627 - DNA, 15 bp, Homo sapiens
gctcatgactaagat

SEQ ID NO: 1323628 - DNA, 15 bp, Homo sapiens
tgctcatgactaaga

SEQ ID NO: 1323629 - DNA, 15 bp, Homo sapiens
atgctcatgactaag

SEQ ID NO: 1323630 - DNA, 15 bp, Homo sapiens
aatgctcatgactaa

SEQ ID NO: 1323631 - DNA, 15 bp, Homo sapiens
taatgctcatgacta

SEQ ID NO: 1323632 - DNA, 15 bp, Homo sapiens
ataatgctcatgact

SEQ ID NO: 1323633 - DNA, 15 bp, Homo sapiens
aataatgctcatgac

SEQ ID NO: 1323634 - DNA, 15 bp, Homo sapiens
taataatgctcatga

SEQ ID NO: 1323635 - DNA, 15 bp, Homo sapiens
ttaataatgctcatg

SEQ ID NO: 1323636 - DNA, 15 bp, Homo sapiens
attaataatgctcat

SEQ ID NO: 1323637 - DNA, 15 bp, Homo sapiens
tattaataatgctca

SEQ ID NO: 1323638 - DNA, 15 bp, Homo sapiens
ctattaataatgctc

SEQ ID NO: 1323639 - DNA, 15 bp, Homo sapiens
tctattaataatgct

SEQ ID NO: 1323640 - DNA, 15 bp, Homo sapiens
atctattaataatgc

SEQ ID NO: 1323641 - DNA, 15 bp, Homo sapiens
tatctattaataatg

SEQ ID NO: 1323642 - DNA, 15 bp, Homo sapiens
attatctattaataa

SEQ ID NO: 1323643 - DNA, 15 bp, Homo sapiens
aattatctattaata

SEQ ID NO: 1323644 - DNA, 15 bp, Homo sapiens
aaattatctattaat

SEQ ID NO: 1323645 - DNA, 15 bp, Homo sapiens
caaattatctattaa

SEQ ID NO: 1323646 - DNA, 15 bp, Homo sapiens
tcaaattatctatta

SEQ ID NO: 1323647 - DNA, 15 bp, Homo sapiens
atcaaattatctatt

SEQ ID NO: 1323648 - DNA, 15 bp, Homo sapiens
catcaaattatctat

SEQ ID NO: 1323649 - DNA, 15 bp, Homo sapiens
gcatcaaattatcta

SEQ ID NO: 1323650 - DNA, 15 bp, Homo sapiens
ggcatcaaattatct

SEQ ID NO: 1323651 - DNA, 15 bp, Homo sapiens
aggcatcaaattatc

SEQ ID NO: 1323652 - DNA, 15 bp, Homo sapiens
aaggcatcaaattat

SEQ ID NO: 1323653 - DNA, 15 bp, Homo sapiens
caaggcatcaaatta

SEQ ID NO: 1323654 - DNA, 15 bp, Homo sapiens
acaaggcatcaaatt

SEQ ID NO: 1323655 - DNA, 15 bp, Homo sapiens
gacaaggcatcaaat

SEQ ID NO: 1323656 - DNA, 15 bp, Homo sapiens
tgacaaggcatcaaa

SEQ ID NO: 1323657 - DNA, 15 bp, Homo sapiens
gtgacaaggcatcaa

SEQ ID NO: 1323658 - DNA, 15 bp, Homo sapiens
agtgacaaggcatca

SEQ ID NO: 1323659 - DNA, 15 bp, Homo sapiens
aagtgacaaggcatc

SEQ ID NO: 1323660 - DNA, 15 bp, Homo sapiens
taagtgacaaggcat

SEQ ID NO: 1323661 - DNA, 15 bp, Homo sapiens
ctaagtgacaaggca

SEQ ID NO: 1323662 - DNA, 15 bp, Homo sapiens
gctaagtgacaaggc

SEQ ID NO: 1323663 - DNA, 15 bp, Homo sapiens
tgctaagtgacaagg

SEQ ID NO: 1323664 - DNA, 15 bp, Homo sapiens
ctgctaagtgacaag

SEQ ID NO: 1323665 - DNA, 15 bp, Homo sapiens
actgctaagtgacaa

SEQ ID NO: 1323666 - DNA, 15 bp, Homo sapiens
tactgctaagtgaca

SEQ ID NO: 1323667 - DNA, 15 bp, Homo sapiens
gtactgctaagtgac

SEQ ID NO: 1323668 - DNA, 15 bp, Homo sapiens
tgtactgctaagtga

SEQ ID NO: 1323669 - DNA, 15 bp, Homo sapiens
ttgtactgctaagtg

SEQ ID NO: 1323670 - DNA, 15 bp, Homo sapiens
cttgtactgctaagt

SEQ ID NO: 1323671 - DNA, 15 bp, Homo sapiens
gcttgtactgctaag

SEQ ID NO: 1323672 - DNA, 15 bp, Homo sapiens
tgcttgtactgctaa

SEQ ID NO: 1323673 - DNA, 15 bp, Homo sapiens
atgcttgtactgcta

SEQ ID NO: 1323674 - DNA, 15 bp, Homo sapiens
catgcttgtactgct

SEQ ID NO: 1323675 - DNA, 15 bp, Homo sapiens
acatgcttgtactgc

SEQ ID NO: 1323676 - DNA, 15 bp, Homo sapiens
aacatgcttgtactg

SEQ ID NO: 1323677 - DNA, 15 bp, Homo sapiens
aaacatgcttgtact

SEQ ID NO: 1323678 - DNA, 15 bp, Homo sapiens
taaacatgcttgtac

SEQ ID NO: 1323679 - DNA, 15 bp, Homo sapiens
ataaacatgcttgta

SEQ ID NO: 1323680 - DNA, 15 bp, Homo sapiens
aataaacatgcttgt

SEQ ID NO: 1323681 - DNA, 15 bp, Homo sapiens
aaataaacatgcttg

SEQ ID NO: 1323682 - DNA, 15 bp, Homo sapiens
gaaataaacatgctt

SEQ ID NO: 1323683 - DNA, 15 bp, Homo sapiens
agaaataaacatgct

SEQ ID NO: 1323684 - DNA, 15 bp, Homo sapiens
cagaaataaacatgc

SEQ ID NO: 1323685 - DNA, 15 bp, Homo sapiens
tcagaaataaacatg

SEQ ID NO: 1323686 - DNA, 15 bp, Homo sapiens
gtcagaaataaacat

SEQ ID NO: 1323687 - DNA, 15 bp, Homo sapiens
agtcagaaataaaca

SEQ ID NO: 1323688 - DNA, 15 bp, Homo sapiens
aagtcagaaataaac

SEQ ID NO: 1323689 - DNA, 15 bp, Homo sapiens
aaagtcagaaataaa

SEQ ID NO: 1323690 - DNA, 15 bp, Homo sapiens
aaaagtcagaaataa

SEQ ID NO: 1323691 - DNA, 15 bp, Homo sapiens
taaaagtcagaaata

SEQ ID NO: 1323692 - DNA, 15 bp, Homo sapiens
ttaaaagtcagaaat

SEQ ID NO: 1323693 - DNA, 15 bp, Homo sapiens
tttaaaagtcagaaa

SEQ ID NO: 1323694 - DNA, 15 bp, Homo sapiens
gtttaaaagtcagaa

SEQ ID NO: 1323695 - DNA, 15 bp, Homo sapiens
agtttaaaagtcaga

SEQ ID NO: 1323696 - DNA, 15 bp, Homo sapiens
gagtttaaaagtcag

SEQ ID NO: 1323697 - DNA, 15 bp, Homo sapiens
cgagtttaaaagtca

SEQ ID NO: 1323698 - DNA, 15 bp, Homo sapiens
tcgagtttaaaagtc

SEQ ID NO: 1323699 - DNA, 15 bp, Homo sapiens
ttcgagtttaaaagt

SEQ ID NO: 1323700 - DNA, 15 bp, Homo sapiens
attcgagtttaaaag

SEQ ID NO: 1323701 - DNA, 15 bp, Homo sapiens
aattcgagtttaaaa

SEQ ID NO: 1323702 - DNA, 15 bp, Homo sapiens
gaattcgagtttaaa

SEQ ID NO: 1323703 - DNA, 15 bp, Homo sapiens
tgaattcgagtttaa

SEQ ID NO: 1323704 - DNA, 15 bp, Homo sapiens
gtgaattcgagttta

SEQ ID NO: 1323705 - DNA, 15 bp, Homo sapiens
ggtgaattcgagttt

SEQ ID NO: 1323706 - DNA, 15 bp, Homo sapiens
gggtgaattcgagtt

SEQ ID NO: 1323707 - DNA, 15 bp, Homo sapiens
agggtgaattcgagt

SEQ ID NO: 1323708 - DNA, 15 bp, Homo sapiens
aagggtgaattcgag

SEQ ID NO: 1323709 - DNA, 15 bp, Homo sapiens
gaagggtgaattcga

SEQ ID NO: 1323710 - DNA, 15 bp, Homo sapiens
agaagggtgaattcg

SEQ ID NO: 1323711 - DNA, 15 bp, Homo sapiens
aagaagggtgaattc

SEQ ID NO: 1323712 - DNA, 15 bp, Homo sapiens
caagaagggtgaatt

SEQ ID NO: 1323713 - DNA, 15 bp, Homo sapiens
acaagaagggtgaat

SEQ ID NO: 1323714 - DNA, 15 bp, Homo sapiens
cacaagaagggtgaa

SEQ ID NO: 1323715 - DNA, 15 bp, Homo sapiens
acacaagaagggtga

SEQ ID NO: 1323716 - DNA, 15 bp, Homo sapiens
aacacaagaagggtg

SEQ ID NO: 1323717 - DNA, 15 bp, Homo sapiens
aaacacaagaagggt

SEQ ID NO: 1323718 - DNA, 15 bp, Homo sapiens
aaaacacaagaaggg

SEQ ID NO: 1323719 - DNA, 15 bp, Homo sapiens
aaaaacacaagaagg

SEQ ID NO: 1323720 - DNA, 15 bp, Homo sapiens
gaaaaacacaagaag

SEQ ID NO: 1323721 - DNA, 15 bp, Homo sapiens
agaaaaacacaagaa

SEQ ID NO: 1323722 - DNA, 15 bp, Homo sapiens
tagaaaaacacaaga

SEQ ID NO: 1323723 - DNA, 15 bp, Homo sapiens
atagaaaaacacaag

SEQ ID NO: 1323724 - DNA, 15 bp, Homo sapiens
aatagaaaaacacaa

SEQ ID NO: 1323725 - DNA, 15 bp, Homo sapiens
gaatagaaaaacaca

SEQ ID NO: 1323726 - DNA, 15 bp, Homo sapiens
tgaatagaaaaacac

SEQ ID NO: 1323727 - DNA, 15 bp, Homo sapiens
ctgaatagaaaaaca

SEQ ID NO: 1323728 - DNA, 15 bp, Homo sapiens
actgaatagaaaaac

SEQ ID NO: 1323729 - DNA, 15 bp, Homo sapiens
gactgaatagaaaaa

SEQ ID NO: 1323730 - DNA, 15 bp, Homo sapiens
cgactgaatagaaaa

SEQ ID NO: 1323731 - DNA, 15 bp, Homo sapiens
acgactgaatagaaa

SEQ ID NO: 1323732 - DNA, 15 bp, Homo sapiens
tacgactgaatagaa

SEQ ID NO: 1323733 - DNA, 15 bp, Homo sapiens
ttacgactgaataga

SEQ ID NO: 1323734 - DNA, 15 bp, Homo sapiens
gttacgactgaatag

SEQ ID NO: 1323735 - DNA, 15 bp, Homo sapiens
ggttacgactgaata

SEQ ID NO: 1323736 - DNA, 15 bp, Homo sapiens
gggttacgactgaat

SEQ ID NO: 1323737 - DNA, 15 bp, Homo sapiens
tgggttacgactgaa

SEQ ID NO: 1323738 - DNA, 15 bp, Homo sapiens
gtgggttacgactga

SEQ ID NO: 1323739 - DNA, 15 bp, Homo sapiens
agtgggttacgactg

SEQ ID NO: 1323740 - DNA, 15 bp, Homo sapiens
gagtgggttacgact

SEQ ID NO: 1323741 - DNA, 15 bp, Homo sapiens
ggagtgggttacgac

SEQ ID NO: 1323742 - DNA, 15 bp, Homo sapiens
aggagtgggttacga

SEQ ID NO: 1323743 - DNA, 15 bp, Homo sapiens
aaggagtgggttacg

SEQ ID NO: 1323744 - DNA, 15 bp, Homo sapiens
gaaggagtgggttac

SEQ ID NO: 1323745 - DNA, 15 bp, Homo sapiens
agaaggagtgggtta

SEQ ID NO: 1323746 - DNA, 15 bp, Homo sapiens
tagaaggagtgggtt

SEQ ID NO: 1323747 - DNA, 15 bp, Homo sapiens
gtagaaggagtgggt

SEQ ID NO: 1323748 - DNA, 15 bp, Homo sapiens
tgtagaaggagtggg

SEQ ID NO: 1323749 - DNA, 15 bp, Homo sapiens
atgtagaaggagtgg

SEQ ID NO: 1323750 - DNA, 15 bp, Homo sapiens
gatgtagaaggagtg

SEQ ID NO: 1323751 - DNA, 15 bp, Homo sapiens
agatgtagaaggagt

SEQ ID NO: 1323752 - DNA, 15 bp, Homo sapiens
tagatgtagaaggag

SEQ ID NO: 1323753 - DNA, 15 bp, Homo sapiens
gtagatgtagaagga

SEQ ID NO: 1323754 - DNA, 15 bp, Homo sapiens
tgtagatgtagaagg

SEQ ID NO: 1323755 - DNA, 15 bp, Homo sapiens
ttgtagatgtagaag

SEQ ID NO: 1323756 - DNA, 15 bp, Homo sapiens
tttgtagatgtagaa

SEQ ID NO: 1323757 - DNA, 15 bp, Homo sapiens
ttttgtagatgtaga

SEQ ID NO: 1323758 - DNA, 15 bp, Homo sapiens
attttgtagatgtag

SEQ ID NO: 1323759 - DNA, 15 bp, Homo sapiens
aattttgtagatgta

SEQ ID NO: 1323760 - DNA, 15 bp, Homo sapiens
aaattttgtagatgt

SEQ ID NO: 1323761 - DNA, 15 bp, Homo sapiens
caaattttgtagatg

SEQ ID NO: 1323762 - DNA, 15 bp, Homo sapiens
ccaaattttgtagat

SEQ ID NO: 1323763 - DNA, 15 bp, Homo sapiens
accaaattttgtaga

SEQ ID NO: 1323764 - DNA, 15 bp, Homo sapiens
caccaaattttgtag

SEQ ID NO: 1323765 - DNA, 15 bp, Homo sapiens
tcaccaaattttgta

SEQ ID NO: 1323766 - DNA, 15 bp, Homo sapiens
ctcaccaaattttgt

SEQ ID NO: 1323767 - DNA, 15 bp, Homo sapiens
cctcaccaaattttg

SEQ ID NO: 1323768 - DNA, 15 bp, Homo sapiens
gcctcaccaaatttt

SEQ ID NO: 1323769 - DNA, 15 bp, Homo sapiens
tgcctcaccaaattt

SEQ ID NO: 1323770 - DNA, 15 bp, Homo sapiens
atgcctcaccaaatt

SEQ ID NO: 1323771 - DNA, 15 bp, Homo sapiens
gatgcctcaccaaat

SEQ ID NO: 1323772 - DNA, 15 bp, Homo sapiens
agatgcctcaccaaa

SEQ ID NO: 1323773 - DNA, 15 bp, Homo sapiens
aagatgcctcaccaa

SEQ ID NO: 1323774 - DNA, 15 bp, Homo sapiens
aaagatgcctcacca

SEQ ID NO: 1323775 - DNA, 15 bp, Homo sapiens
caaagatgcctcacc

SEQ ID NO: 1323776 - DNA, 15 bp, Homo sapiens
tcaaagatgcctcac

SEQ ID NO: 1323777 - DNA, 15 bp, Homo sapiens
gtcaaagatgcctca

SEQ ID NO: 1323778 - DNA, 15 bp, Homo sapiens
agtcaaagatgcctc

SEQ ID NO: 1323779 - DNA, 15 bp, Homo sapiens
aagtcaaagatgcct

SEQ ID NO: 1323780 - DNA, 15 bp, Homo sapiens
aaagtcaaagatgcc

SEQ ID NO: 1323781 - DNA, 15 bp, Homo sapiens
gaaagtcaaagatgc

SEQ ID NO: 1323782 - DNA, 15 bp, Homo sapiens
tgaaagtcaaagatg

SEQ ID NO: 1323783 - DNA, 15 bp, Homo sapiens
atgaaagtcaaagat

SEQ ID NO: 1323784 - DNA, 15 bp, Homo sapiens
gatgaaagtcaaaga

SEQ ID NO: 1323785 - DNA, 15 bp, Homo sapiens
tgatgaaagtcaaag

SEQ ID NO: 1323786 - DNA, 15 bp, Homo sapiens
atgatgaaagtcaaa

SEQ ID NO: 1323787 - DNA, 15 bp, Homo sapiens
tatgatgaaagtcaa

SEQ ID NO: 1323788 - DNA, 15 bp, Homo sapiens
atatgatgaaagtca

SEQ ID NO: 1323789 - DNA, 15 bp, Homo sapiens
aatatgatgaaagtc

SEQ ID NO: 1323790 - DNA, 15 bp, Homo sapiens
gaatatgatgaaagt

SEQ ID NO: 1323791 - DNA, 15 bp, Homo sapiens
tgaatatgatgaaag

SEQ ID NO: 1323792 - DNA, 15 bp, Homo sapiens
ctgaatatgatgaaa

SEQ ID NO: 1323793 - DNA, 15 bp, Homo sapiens
tctgaatatgatgaa

SEQ ID NO: 1323794 - DNA, 15 bp, Homo sapiens
gtctgaatatgatga

SEQ ID NO: 1323795 - DNA, 15 bp, Homo sapiens
tgtctgaatatgatg

SEQ ID NO: 1323796 - DNA, 15 bp, Homo sapiens
atgtctgaatatgat

SEQ ID NO: 1323797 - DNA, 15 bp, Homo sapiens
catgtctgaatatga

SEQ ID NO: 1323798 - DNA, 15 bp, Homo sapiens
gcatgtctgaatatg

SEQ ID NO: 1323799 - DNA, 15 bp, Homo sapiens
agcatgtctgaatat

SEQ ID NO: 1323800 - DNA, 15 bp, Homo sapiens
tagcatgtctgaata

SEQ ID NO: 1323801 - DNA, 15 bp, Homo sapiens
ctagcatgtctgaat

SEQ ID NO: 1323802 - DNA, 15 bp, Homo sapiens
gctagcatgtctgaa

SEQ ID NO: 1323803 - DNA, 15 bp, Homo sapiens
agctagcatgtctga

SEQ ID NO: 1323804 - DNA, 15 bp, Homo sapiens
aagctagcatgtctg

SEQ ID NO: 1323805 - DNA, 15 bp, Homo sapiens
gaagctagcatgtct

SEQ ID NO: 1323806 - DNA, 15 bp, Homo sapiens
tgaagctagcatgtc

SEQ ID NO: 1323807 - DNA, 15 bp, Homo sapiens
ttgaagctagcatgt

SEQ ID NO: 1323808 - DNA, 15 bp, Homo sapiens
cttgaagctagcatg

SEQ ID NO: 1323809 - DNA, 15 bp, Homo sapiens
tcttgaagctagcat

SEQ ID NO: 1323810 - DNA, 15 bp, Homo sapiens
ttcttgaagctagca

SEQ ID NO: 1323811 - DNA, 15 bp, Homo sapiens
gttcttgaagctagc

SEQ ID NO: 1323812 - DNA, 15 bp, Homo sapiens
agttcttgaagctag

SEQ ID NO: 1323813 - DNA, 15 bp, Homo sapiens
aagttcttgaagcta

SEQ ID NO: 1323814 - DNA, 15 bp, Homo sapiens
aaagttcttgaagct

SEQ ID NO: 1323815 - DNA, 15 bp, Homo sapiens
gaaagttcttgaagc

SEQ ID NO: 1323816 - DNA, 15 bp, Homo sapiens
ggaaagttcttgaag

SEQ ID NO: 1323817 - DNA, 15 bp, Homo sapiens
aggaaagttcttgaa

SEQ ID NO: 1323818 - DNA, 15 bp, Homo sapiens
taggaaagttcttga

SEQ ID NO: 1323819 - DNA, 15 bp, Homo sapiens
ataggaaagttcttg

SEQ ID NO: 1323820 - DNA, 15 bp, Homo sapiens
aataggaaagttctt

SEQ ID NO: 1323821 - DNA, 15 bp, Homo sapiens
gaataggaaagttct

SEQ ID NO: 1323822 - DNA, 15 bp, Homo sapiens
ggaataggaaagttc

SEQ ID NO: 1323823 - DNA, 15 bp, Homo sapiens
aggaataggaaagtt

SEQ ID NO: 1323824 - DNA, 15 bp, Homo sapiens
gaggaataggaaagt

SEQ ID NO: 1323825 - DNA, 15 bp, Homo sapiens
agaggaataggaaag

SEQ ID NO: 1323826 - DNA, 15 bp, Homo sapiens
aagaggaataggaaa

SEQ ID NO: 1323827 - DNA, 15 bp, Homo sapiens
aaagaggaataggaa

SEQ ID NO: 1323828 - DNA, 15 bp, Homo sapiens
aaaagaggaatagga

SEQ ID NO: 1323829 - DNA, 15 bp, Homo sapiens
taaaagaggaatagg

SEQ ID NO: 1323830 - DNA, 15 bp, Homo sapiens
ttaaaagaggaatag

SEQ ID NO: 1323831 - DNA, 15 bp, Homo sapiens
attaaaagaggaata

SEQ ID NO: 1323832 - DNA, 15 bp, Homo sapiens
cattaaaagaggaat

SEQ ID NO: 1323833 - DNA, 15 bp, Homo sapiens
acattaaaagaggaa

SEQ ID NO: 1323834 - DNA, 15 bp, Homo sapiens
gacattaaaagagga

SEQ ID NO: 1323835 - DNA, 15 bp, Homo sapiens
agacattaaaagagg

SEQ ID NO: 1323836 - DNA, 15 bp, Homo sapiens
cagacattaaaagag

SEQ ID NO: 1323837 - DNA, 15 bp, Homo sapiens
acagacattaaaaga

SEQ ID NO: 1323838 - DNA, 15 bp, Homo sapiens
aacagacattaaaag

SEQ ID NO: 1323839 - DNA, 15 bp, Homo sapiens
aaacagacattaaaa

SEQ ID NO: 1323840 - DNA, 15 bp, Homo sapiens
gaaacagacattaaa

SEQ ID NO: 1323841 - DNA, 15 bp, Homo sapiens
agaaacagacattaa

SEQ ID NO: 1323842 - DNA, 15 bp, Homo sapiens
gagaaacagacatta

SEQ ID NO: 1323843 - DNA, 15 bp, Homo sapiens
tgagaaacagacatt

SEQ ID NO: 1323844 - DNA, 15 bp, Homo sapiens
gtgagaaacagacat

SEQ ID NO: 1323845 - DNA, 15 bp, Homo sapiens
tgtgagaaacagaca

SEQ ID NO: 1323846 - DNA, 15 bp, Homo sapiens
atgtgagaaacagac

SEQ ID NO: 1323847 - DNA, 15 bp, Homo sapiens
aatgtgagaaacaga

SEQ ID NO: 1323848 - DNA, 15 bp, Homo sapiens
caatgtgagaaacag

SEQ ID NO: 1323849 - DNA, 15 bp, Homo sapiens
acaatgtgagaaaca

SEQ ID NO: 1323850 - DNA, 15 bp, Homo sapiens
tacaatgtgagaaac

SEQ ID NO: 1323851 - DNA, 15 bp, Homo sapiens
atacaatgtgagaaa

SEQ ID NO: 1323852 - DNA, 15 bp, Homo sapiens
aatacaatgtgagaa

SEQ ID NO: 1323853 - DNA, 15 bp, Homo sapiens
taatacaatgtgaga

SEQ ID NO: 1323854 - DNA, 15 bp, Homo sapiens
ctaatacaatgtgag

SEQ ID NO: 1323855 - DNA, 15 bp, Homo sapiens
actaatacaatgtga

SEQ ID NO: 1323856 - DNA, 15 bp, Homo sapiens
aactaatacaatgtg

SEQ ID NO: 1323857 - DNA, 15 bp, Homo sapiens
gaactaatacaatgt

SEQ ID NO: 1323858 - DNA, 15 bp, Homo sapiens
ggaactaatacaatg

SEQ ID NO: 1323859 - DNA, 15 bp, Homo sapiens
aggaactaatacaat

SEQ ID NO: 1323860 - DNA, 15 bp, Homo sapiens
aaggaactaatacaa

SEQ ID NO: 1323861 - DNA, 15 bp, Homo sapiens
aaaggaactaataca

SEQ ID NO: 1323862 - DNA, 15 bp, Homo sapiens
aaaaggaactaatac

SEQ ID NO: 1323863 - DNA, 15 bp, Homo sapiens
taaaaggaactaata

SEQ ID NO: 1323864 - DNA, 15 bp, Homo sapiens
ataaaaggaactaat

SEQ ID NO: 1323865 - DNA, 15 bp, Homo sapiens
tataaaaggaactaa

SEQ ID NO: 1323866 - DNA, 15 bp, Homo sapiens
ctataaaaggaacta

SEQ ID NO: 1323867 - DNA, 15 bp, Homo sapiens
actataaaaggaact

SEQ ID NO: 1323868 - DNA, 15 bp, Homo sapiens
tactataaaaggaac

SEQ ID NO: 1323869 - DNA, 15 bp, Homo sapiens
atactataaaaggaa

SEQ ID NO: 1323870 - DNA, 15 bp, Homo sapiens
aatactataaaagga

SEQ ID NO: 1323871 - DNA, 15 bp, Homo sapiens
taatactataaaagg

SEQ ID NO: 1323872 - DNA, 15 bp, Homo sapiens
ttaatactataaaag

SEQ ID NO: 1323873 - DNA, 15 bp, Homo sapiens
attaatactataaaa

SEQ ID NO: 1323874 - DNA, 15 bp, Homo sapiens
aattaatactataaa

SEQ ID NO: 1323875 - DNA, 15 bp, Homo sapiens
gaattaatactataa

SEQ ID NO: 1323876 - DNA, 15 bp, Homo sapiens
agaattaatactata

SEQ ID NO: 1323877 - DNA, 15 bp, Homo sapiens
aagaattaatactat

SEQ ID NO: 1323878 - DNA, 15 bp, Homo sapiens
gaagaattaatacta

SEQ ID NO: 1323879 - DNA, 15 bp, Homo sapiens
ggaagaattaatact

SEQ ID NO: 1323880 - DNA, 15 bp, Homo sapiens
aggaagaattaatac

SEQ ID NO: 1323881 - DNA, 15 bp, Homo sapiens
taggaagaattaata

SEQ ID NO: 1323882 - DNA, 15 bp, Homo sapiens
gtaggaagaattaat

SEQ ID NO: 1323883 - DNA, 15 bp, Homo sapiens
tgtaggaagaattaa

SEQ ID NO: 1323884 - DNA, 15 bp, Homo sapiens
ctgtaggaagaatta

SEQ ID NO: 1323885 - DNA, 15 bp, Homo sapiens
actgtaggaagaatt

SEQ ID NO: 1323886 - DNA, 15 bp, Homo sapiens
tactgtaggaagaat

SEQ ID NO: 1323887 - DNA, 15 bp, Homo sapiens
atactgtaggaagaa

SEQ ID NO: 1323888 - DNA, 15 bp, Homo sapiens
catactgtaggaaga

SEQ ID NO: 1323889 - DNA, 15 bp, Homo sapiens
tcatactgtaggaag

SEQ ID NO: 1323890 - DNA, 15 bp, Homo sapiens
ttcatactgtaggaa

SEQ ID NO: 1323891 - DNA, 15 bp, Homo sapiens
attcatactgtagga

SEQ ID NO: 1323892 - DNA, 15 bp, Homo sapiens
aattcatactgtagg

SEQ ID NO: 1323893 - DNA, 15 bp, Homo sapiens
aaattcatactgtag

SEQ ID NO: 1323894 - DNA, 15 bp, Homo sapiens
aaaattcatactgta

SEQ ID NO: 1323895 - DNA, 15 bp, Homo sapiens
taaaattcatactgt

SEQ ID NO: 1323896 - DNA, 15 bp, Homo sapiens
ataaaattcatactg

SEQ ID NO: 1323897 - DNA, 15 bp, Homo sapiens
aataaaattcatact

SEQ ID NO: 1323898 - DNA, 15 bp, Homo sapiens
aaataaaattcatac

SEQ ID NO: 1323899 - DNA, 15 bp, Homo sapiens
aaaataaaattcata

SEQ ID NO: 1323900 - DNA, 15 bp, Homo sapiens
aaaaataaaattcat

SEQ ID NO: 1323901 - DNA, 15 bp, Homo sapiens
aaaaaataaaattca

SEQ ID NO: 1323902 - DNA, 15 bp, Homo sapiens
aaaaaaataaaattc

SEQ ID NO: 1323903 - DNA, 15 bp, Homo sapiens
aaaaaaaataaaatt

SEQ ID NO: 1323904 - DNA, 15 bp, Homo sapiens
aaaaaaaaataaaat

SEQ ID NO: 1323905 - DNA, 15 bp, Homo sapiens
aaaaaaaaaataaaa

SEQ ID NO: 1323906 - DNA, 15 bp, Homo sapiens
catttcaaaaaaaaa

SEQ ID NO: 1323907 - DNA, 15 bp, Homo sapiens
ccatttcaaaaaaaa

SEQ ID NO: 1323908 - DNA, 15 bp, Homo sapiens
tccatttcaaaaaaa

SEQ ID NO: 1323909 - DNA, 15 bp, Homo sapiens
ctccatttcaaaaaa

SEQ ID NO: 1323910 - DNA, 15 bp, Homo sapiens
actccatttcaaaaa

SEQ ID NO: 1323911 - DNA, 15 bp, Homo sapiens
gactccatttcaaaa

SEQ ID NO: 1323912 - DNA, 15 bp, Homo sapiens
agactccatttcaaa

SEQ ID NO: 1323913 - DNA, 15 bp, Homo sapiens
aagactccatttcaa

SEQ ID NO: 1323914 - DNA, 15 bp, Homo sapiens
caagactccatttca

SEQ ID NO: 1323915 - DNA, 15 bp, Homo sapiens
gcaagactccatttc

SEQ ID NO: 1323916 - DNA, 15 bp, Homo sapiens
agcaagactccattt

SEQ ID NO: 1323917 - DNA, 15 bp, Homo sapiens
gagcaagactccatt

SEQ ID NO: 1323918 - DNA, 15 bp, Homo sapiens
ggagatggtgccact

SEQ ID NO: 1323919 - DNA, 15 bp, Homo sapiens
tggagatggtgccac

SEQ ID NO: 1323920 - DNA, 15 bp, Homo sapiens
gtggagatggtgcca

SEQ ID NO: 1323921 - DNA, 15 bp, Homo sapiens
agtggagatggtgcc

SEQ ID NO: 1323922 - DNA, 15 bp, Homo sapiens
gagtggagatggtgc

SEQ ID NO: 1323923 - DNA, 15 bp, Homo sapiens
tgagtggagatggtg

SEQ ID NO: 1323924 - DNA, 15 bp, Homo sapiens
gtgagtggagatggt

SEQ ID NO: 1323925 - DNA, 15 bp, Homo sapiens
agtgagtggagatgg

SEQ ID NO: 1323926 - DNA, 15 bp, Homo sapiens
cagtgagtggagatg

SEQ ID NO: 1323927 - DNA, 15 bp, Homo sapiens
gcagtgagtggagat

SEQ ID NO: 1323928 - DNA, 15 bp, Homo sapiens
tgcagtgagtggaga

SEQ ID NO: 1323929 - DNA, 15 bp, Homo sapiens
ttgcagtgagtggag

SEQ ID NO: 1323930 - DNA, 15 bp, Homo sapiens
cttgcagtgagtgga

SEQ ID NO: 1323931 - DNA, 15 bp, Homo sapiens
gcttgcagtgagtgg

SEQ ID NO: 1323932 - DNA, 15 bp, Homo sapiens
agcttgcagtgagtg

SEQ ID NO: 1323933 - DNA, 15 bp, Homo sapiens
gagcttgcagtgagt

SEQ ID NO: 1323934 - DNA, 15 bp, Homo sapiens
aggaggcagagcttg

SEQ ID NO: 1323935 - DNA, 15 bp, Homo sapiens
caggaggcagagctt

SEQ ID NO: 1323936 - DNA, 15 bp, Homo sapiens
ccaggaggcagagct

SEQ ID NO: 1323937 - DNA, 15 bp, Homo sapiens
cccaggaggcagagc

SEQ ID NO: 1323938 - DNA, 15 bp, Homo sapiens
gtgaacccaggaggc

SEQ ID NO: 1323939 - DNA, 15 bp, Homo sapiens
gcgtgaacccaggag

SEQ ID NO: 1323940 - DNA, 15 bp, Homo sapiens
ggcgtgaacccagga

SEQ ID NO: 1323941 - DNA, 15 bp, Homo sapiens
tggcgtgaacccagg

SEQ ID NO: 1323942 - DNA, 15 bp, Homo sapiens
atggcgtgaacccag

SEQ ID NO: 1323943 - DNA, 15 bp, Homo sapiens
aatggcgtgaaccca

SEQ ID NO: 1323944 - DNA, 15 bp, Homo sapiens
aaggagaatggcgtg

SEQ ID NO: 1323945 - DNA, 15 bp, Homo sapiens
gaaggagaatggcgt

SEQ ID NO: 1323946 - DNA, 15 bp, Homo sapiens
ggaaggagaatggcg

SEQ ID NO: 1323947 - DNA, 15 bp, Homo sapiens
aggaaggagaatggc

SEQ ID NO: 1323948 - DNA, 15 bp, Homo sapiens
gaggaaggagaatgg

SEQ ID NO: 1323949 - DNA, 15 bp, Homo sapiens
tgaggaaggagaatg

SEQ ID NO: 1323950 - DNA, 15 bp, Homo sapiens
tgcatgcgcctgtag

SEQ ID NO: 1323951 - DNA, 15 bp, Homo sapiens
ttgcatgcgcctgta

SEQ ID NO: 1323952 - DNA, 15 bp, Homo sapiens
gttgcatgcgcctgt

SEQ ID NO: 1323953 - DNA, 15 bp, Homo sapiens
ggttgcatgcgcctg

SEQ ID NO: 1323954 - DNA, 15 bp, Homo sapiens
tggttgcatgcgcct

SEQ ID NO: 1323955 - DNA, 15 bp, Homo sapiens
atggttgcatgcgcc

SEQ ID NO: 1323956 - DNA, 15 bp, Homo sapiens
catggttgcatgcgc

SEQ ID NO: 1323957 - DNA, 15 bp, Homo sapiens
gcatggttgcatgcg

SEQ ID NO: 1323958 - DNA, 15 bp, Homo sapiens
ggcatggttgcatgc

SEQ ID NO: 1323959 - DNA, 15 bp, Homo sapiens
gggcatggttgcatg

SEQ ID NO: 1323960 - DNA, 15 bp, Homo sapiens
cgggcatggttgcat

SEQ ID NO: 1323961 - DNA, 15 bp, Homo sapiens
ccgggcatggttgca

SEQ ID NO: 1323962 - DNA, 15 bp, Homo sapiens
gccgggcatggttgc

SEQ ID NO: 1323963 - DNA, 15 bp, Homo sapiens
agccgggcatggttg

SEQ ID NO: 1323964 - DNA, 15 bp, Homo sapiens
tagccgggcatggtt

SEQ ID NO: 1323965 - DNA, 15 bp, Homo sapiens
aaaaaatacaaaaaa

SEQ ID NO: 1323966 - DNA, 15 bp, Homo sapiens
tccatcctggctaac

SEQ ID NO: 1323967 - DNA, 15 bp, Homo sapiens
atccatcctggctaa

SEQ ID NO: 1323968 - DNA, 15 bp, Homo sapiens
tatccatcctggcta

SEQ ID NO: 1323969 - DNA, 15 bp, Homo sapiens
atatccatcctggct

SEQ ID NO: 1323970 - DNA, 15 bp, Homo sapiens
tatatccatcctggc

SEQ ID NO: 1323971 - DNA, 15 bp, Homo sapiens
ctatatccatcctgg

SEQ ID NO: 1323972 - DNA, 15 bp, Homo sapiens
actatatccatcctg

SEQ ID NO: 1323973 - DNA, 15 bp, Homo sapiens
tactatatccatcct

SEQ ID NO: 1323974 - DNA, 15 bp, Homo sapiens
atactatatccatcc

SEQ ID NO: 1323975 - DNA, 15 bp, Homo sapiens
catactatatccatc

SEQ ID NO: 1323976 - DNA, 15 bp, Homo sapiens
tcatactatatccat

SEQ ID NO: 1323977 - DNA, 15 bp, Homo sapiens
ctcatactatatcca

SEQ ID NO: 1323978 - DNA, 15 bp, Homo sapiens
actcatactatatcc

SEQ ID NO: 1323979 - DNA, 15 bp, Homo sapiens
aactcatactatatc

SEQ ID NO: 1323980 - DNA, 15 bp, Homo sapiens
aaactcatactatat

SEQ ID NO: 1323981 - DNA, 15 bp, Homo sapiens
aaaactcatactata

SEQ ID NO: 1323982 - DNA, 15 bp, Homo sapiens
aaaaactcatactat

SEQ ID NO: 1323983 - DNA, 15 bp, Homo sapiens
taaaaactcatacta

SEQ ID NO: 1323984 - DNA, 15 bp, Homo sapiens
ataaaaactcatact

SEQ ID NO: 1323985 - DNA, 15 bp, Homo sapiens
aataaaaactcatac

SEQ ID NO: 1323986 - DNA, 15 bp, Homo sapiens
gaataaaaactcata

SEQ ID NO: 1323987 - DNA, 15 bp, Homo sapiens
tgaataaaaactcat

SEQ ID NO: 1323988 - DNA, 15 bp, Homo sapiens
atgaataaaaactca

SEQ ID NO: 1323989 - DNA, 15 bp, Homo sapiens
aatgaataaaaactc

SEQ ID NO: 1323990 - DNA, 15 bp, Homo sapiens
aaatgaataaaaact

SEQ ID NO: 1323991 - DNA, 15 bp, Homo sapiens
aaaatgaataaaaac

SEQ ID NO: 1323992 - DNA, 15 bp, Homo sapiens
caaaatgaataaaaa

SEQ ID NO: 1323993 - DNA, 15 bp, Homo sapiens
gcaaaatgaataaaa

SEQ ID NO: 1323994 - DNA, 15 bp, Homo sapiens
tgcaaaatgaataaa

SEQ ID NO: 1323995 - DNA, 15 bp, Homo sapiens
ttgcaaaatgaataa

SEQ ID NO: 1323996 - DNA, 15 bp, Homo sapiens
tttgcaaaatgaata

SEQ ID NO: 1323997 - DNA, 15 bp, Homo sapiens
atttgcaaaatgaat

SEQ ID NO: 1323998 - DNA, 15 bp, Homo sapiens
tatttgcaaaatgaa

SEQ ID NO: 1323999 - DNA, 15 bp, Homo sapiens
atatttgcaaaatga

SEQ ID NO: 1324000 - DNA, 15 bp, Homo sapiens
aatatttgcaaaatg

SEQ ID NO: 1324001 - DNA, 15 bp, Homo sapiens
gaatatttgcaaaat

SEQ ID NO: 1324002 - DNA, 15 bp, Homo sapiens
tgaatatttgcaaaa

SEQ ID NO: 1324003 - DNA, 15 bp, Homo sapiens
atgaatatttgcaaa

SEQ ID NO: 1324004 - DNA, 15 bp, Homo sapiens
gatgaatatttgcaa

SEQ ID NO: 1324005 - DNA, 15 bp, Homo sapiens
tgatgaatatttgca

SEQ ID NO: 1324006 - DNA, 15 bp, Homo sapiens
atgatgaatatttgc

SEQ ID NO: 1324007 - DNA, 15 bp, Homo sapiens
tatgatgaatatttg

SEQ ID NO: 1324008 - DNA, 15 bp, Homo sapiens
ctatgatgaatattt

SEQ ID NO: 1324009 - DNA, 15 bp, Homo sapiens
tctatgatgaatatt

SEQ ID NO: 1324010 - DNA, 15 bp, Homo sapiens
atctatgatgaatat

SEQ ID NO: 1324011 - DNA, 15 bp, Homo sapiens
tatctatgatgaata

SEQ ID NO: 1324012 - DNA, 15 bp, Homo sapiens
atatctatgatgaat

SEQ ID NO: 1324013 - DNA, 15 bp, Homo sapiens
aatatctatgatgaa

SEQ ID NO: 1324014 - DNA, 15 bp, Homo sapiens
aaatatctatgatga

SEQ ID NO: 1324015 - DNA, 15 bp, Homo sapiens
aaaatatctatgatg

SEQ ID NO: 1324016 - DNA, 15 bp, Homo sapiens
aaaaatatctatgat

SEQ ID NO: 1324017 - DNA, 15 bp, Homo sapiens
caaaaatatctatga

SEQ ID NO: 1324018 - DNA, 15 bp, Homo sapiens
acaaaaatatctatg

SEQ ID NO: 1324019 - DNA, 15 bp, Homo sapiens
gacaaaaatatctat

SEQ ID NO: 1324020 - DNA, 15 bp, Homo sapiens
agacaaaaatatcta

SEQ ID NO: 1324021 - DNA, 15 bp, Homo sapiens
aagacaaaaatatct

SEQ ID NO: 1324022 - DNA, 15 bp, Homo sapiens
taagacaaaaatatc

SEQ ID NO: 1324023 - DNA, 15 bp, Homo sapiens
ataagacaaaaatat

SEQ ID NO: 1324024 - DNA, 15 bp, Homo sapiens
aataagacaaaaata

SEQ ID NO: 1324025 - DNA, 15 bp, Homo sapiens
aaataagacaaaaat

SEQ ID NO: 1324026 - DNA, 15 bp, Homo sapiens
gaaataagacaaaaa

SEQ ID NO: 1324027 - DNA, 15 bp, Homo sapiens
tgaaataagacaaaa

SEQ ID NO: 1324028 - DNA, 15 bp, Homo sapiens
ctgaaataagacaaa

SEQ ID NO: 1324029 - DNA, 15 bp, Homo sapiens
actgaaataagacaa

SEQ ID NO: 1324030 - DNA, 15 bp, Homo sapiens
aactgaaataagaca

SEQ ID NO: 1324031 - DNA, 15 bp, Homo sapiens
taactgaaataagac

SEQ ID NO: 1324032 - DNA, 15 bp, Homo sapiens
ctaactgaaataaga

SEQ ID NO: 1324033 - DNA, 15 bp, Homo sapiens
tctaactgaaataag

SEQ ID NO: 1324034 - DNA, 15 bp, Homo sapiens
ttctaactgaaataa

SEQ ID NO: 1324035 - DNA, 15 bp, Homo sapiens
gttctaactgaaata

SEQ ID NO: 1324036 - DNA, 15 bp, Homo sapiens
tgttctaactgaaat

SEQ ID NO: 1324037 - DNA, 15 bp, Homo sapiens
ctgttctaactgaaa

SEQ ID NO: 1324038 - DNA, 15 bp, Homo sapiens
cctgttctaactgaa

SEQ ID NO: 1324039 - DNA, 15 bp, Homo sapiens
tcctgttctaactga

SEQ ID NO: 1324040 - DNA, 15 bp, Homo sapiens
atcctgttctaactg

SEQ ID NO: 1324041 - DNA, 15 bp, Homo sapiens
aatcctgttctaact

SEQ ID NO: 1324042 - DNA, 15 bp, Homo sapiens
aaatcctgttctaac

SEQ ID NO: 1324043 - DNA, 15 bp, Homo sapiens
aaaatcctgttctaa

SEQ ID NO: 1324044 - DNA, 15 bp, Homo sapiens
aaaaatcctgttcta

SEQ ID NO: 1324045 - DNA, 15 bp, Homo sapiens
aaaaaatcctgttct

SEQ ID NO: 1324046 - DNA, 15 bp, Homo sapiens
aaaaaaatcctgttc

SEQ ID NO: 1324047 - DNA, 15 bp, Homo sapiens
gaaaaaaatcctgtt

SEQ ID NO: 1324048 - DNA, 15 bp, Homo sapiens
agaaaaaaatcctgt

SEQ ID NO: 1324049 - DNA, 15 bp, Homo sapiens
aagaaaaaaatcctg

SEQ ID NO: 1324050 - DNA, 15 bp, Homo sapiens
aaagaaaaaaatcct

SEQ ID NO: 1324051 - DNA, 15 bp, Homo sapiens
caaagaaaaaaatcc

SEQ ID NO: 1324052 - DNA, 15 bp, Homo sapiens
ccaaagaaaaaaatc

SEQ ID NO: 1324053 - DNA, 15 bp, Homo sapiens
tccaaagaaaaaaat

SEQ ID NO: 1324054 - DNA, 15 bp, Homo sapiens
atccaaagaaaaaaa

SEQ ID NO: 1324055 - DNA, 15 bp, Homo sapiens
aatccaaagaaaaaa

SEQ ID NO: 1324056 - DNA, 15 bp, Homo sapiens
gaatccaaagaaaaa

SEQ ID NO: 1324057 - DNA, 15 bp, Homo sapiens
tgaatccaaagaaaa

SEQ ID NO: 1324058 - DNA, 15 bp, Homo sapiens
ctgaatccaaagaaa

SEQ ID NO: 1324059 - DNA, 15 bp, Homo sapiens
tctgaatccaaagaa

SEQ ID NO: 1324060 - DNA, 15 bp, Homo sapiens
ttctgaatccaaaga

SEQ ID NO: 1324061 - DNA, 15 bp, Homo sapiens
cttctgaatccaaag

SEQ ID NO: 1324062 - DNA, 15 bp, Homo sapiens
ccttctgaatccaaa

SEQ ID NO: 1324063 - DNA, 15 bp, Homo sapiens
accttctgaatccaa

SEQ ID NO: 1324064 - DNA, 15 bp, Homo sapiens
taccttctgaatcca

SEQ ID NO: 1324065 - DNA, 15 bp, Homo sapiens
ttaccttctgaatcc

SEQ ID NO: 1324066 - DNA, 15 bp, Homo sapiens
gttaccttctgaatc

SEQ ID NO: 1324067 - DNA, 15 bp, Homo sapiens
agttaccttctgaat

SEQ ID NO: 1324068 - DNA, 15 bp, Homo sapiens
aagttaccttctgaa

SEQ ID NO: 1324069 - DNA, 15 bp, Homo sapiens
aaagttaccttctga

SEQ ID NO: 1324070 - DNA, 15 bp, Homo sapiens
gaaagttaccttctg

SEQ ID NO: 1324071 - DNA, 15 bp, Homo sapiens
ggaaagttaccttct

SEQ ID NO: 1324072 - DNA, 15 bp, Homo sapiens
aggaaagttaccttc

SEQ ID NO: 1324073 - DNA, 15 bp, Homo sapiens
taggaaagttacctt

SEQ ID NO: 1324074 - DNA, 15 bp, Homo sapiens
gtaggaaagttacct

SEQ ID NO: 1324075 - DNA, 15 bp, Homo sapiens
agtaggaaagttacc

SEQ ID NO: 1324076 - DNA, 15 bp, Homo sapiens
cagtaggaaagttac

SEQ ID NO: 1324077 - DNA, 15 bp, Homo sapiens
acagtaggaaagtta

SEQ ID NO: 1324078 - DNA, 15 bp, Homo sapiens
tacagtaggaaagtt

SEQ ID NO: 1324079 - DNA, 15 bp, Homo sapiens
gtacagtaggaaagt

SEQ ID NO: 1324080 - DNA, 15 bp, Homo sapiens
agtacagtaggaaag

SEQ ID NO: 1324081 - DNA, 15 bp, Homo sapiens
aagtacagtaggaaa

SEQ ID NO: 1324082 - DNA, 15 bp, Homo sapiens
taagtacagtaggaa

SEQ ID NO: 1324083 - DNA, 15 bp, Homo sapiens
ctaagtacagtagga

SEQ ID NO: 1324084 - DNA, 15 bp, Homo sapiens
cctaagtacagtagg

SEQ ID NO: 1324085 - DNA, 15 bp, Homo sapiens
tcctaagtacagtag

SEQ ID NO: 1324086 - DNA, 15 bp, Homo sapiens
atcctaagtacagta

SEQ ID NO: 1324087 - DNA, 15 bp, Homo sapiens
tatcctaagtacagt

SEQ ID NO: 1324088 - DNA, 15 bp, Homo sapiens
ttatcctaagtacag

SEQ ID NO: 1324089 - DNA, 15 bp, Homo sapiens
tttatcctaagtaca

SEQ ID NO: 1324090 - DNA, 15 bp, Homo sapiens
atttatcctaagtac

SEQ ID NO: 1324091 - DNA, 15 bp, Homo sapiens
aatttatcctaagta

SEQ ID NO: 1324092 - DNA, 15 bp, Homo sapiens
gaatttatcctaagt

SEQ ID NO: 1324093 - DNA, 15 bp, Homo sapiens
ggaatttatcctaag

SEQ ID NO: 1324094 - DNA, 15 bp, Homo sapiens
tggaatttatcctaa

SEQ ID NO: 1324095 - DNA, 15 bp, Homo sapiens
gtggaatttatccta

SEQ ID NO: 1324096 - DNA, 15 bp, Homo sapiens
tgtggaatttatcct

SEQ ID NO: 1324097 - DNA, 15 bp, Homo sapiens
ttgtggaatttatcc

SEQ ID NO: 1324098 - DNA, 15 bp, Homo sapiens
tttgtggaatttatc

SEQ ID NO: 1324099 - DNA, 15 bp, Homo sapiens
ttttgtggaatttat

SEQ ID NO: 1324100 - DNA, 15 bp, Homo sapiens
tttttgtggaattta

SEQ ID NO: 1324101 - DNA, 15 bp, Homo sapiens
gtttttgtggaattt

SEQ ID NO: 1324102 - DNA, 15 bp, Homo sapiens
agtttttgtggaatt

SEQ ID NO: 1324103 - DNA, 15 bp, Homo sapiens
gagtttttgtggaat

SEQ ID NO: 1324104 - DNA, 15 bp, Homo sapiens
agagtttttgtggaa

SEQ ID NO: 1324105 - DNA, 15 bp, Homo sapiens
aagagtttttgtgga

SEQ ID NO: 1324106 - DNA, 15 bp, Homo sapiens
aaagagtttttgtgg

SEQ ID NO: 1324107 - DNA, 15 bp, Homo sapiens
taaagagtttttgtg

SEQ ID NO: 1324108 - DNA, 15 bp, Homo sapiens
ttaaagagtttttgt

SEQ ID NO: 1324109 - DNA, 15 bp, Homo sapiens
gttaaagagtttttg

SEQ ID NO: 1324110 - DNA, 15 bp, Homo sapiens
tgttaaagagttttt

SEQ ID NO: 1324111 - DNA, 15 bp, Homo sapiens
ttgttaaagagtttt

SEQ ID NO: 1324112 - DNA, 15 bp, Homo sapiens
cttgttaaagagttt

SEQ ID NO: 1324113 - DNA, 15 bp, Homo sapiens
ccttgttaaagagtt

SEQ ID NO: 1324114 - DNA, 15 bp, Homo sapiens
accttgttaaagagt

SEQ ID NO: 1324115 - DNA, 15 bp, Homo sapiens
aaccttgttaaagag

SEQ ID NO: 1324116 - DNA, 15 bp, Homo sapiens
aaaccttgttaaaga

SEQ ID NO: 1324117 - DNA, 15 bp, Homo sapiens
aaaaccttgttaaag

SEQ ID NO: 1324118 - DNA, 15 bp, Homo sapiens
aaaaaaccttgttaa

SEQ ID NO: 1324119 - DNA, 15 bp, Homo sapiens
aaaaaaaccttgtta

SEQ ID NO: 1324120 - DNA, 15 bp, Homo sapiens
gaaaaaaaccttgtt

SEQ ID NO: 1324121 - DNA, 15 bp, Homo sapiens
ggaaaaaaaccttgt

SEQ ID NO: 1324122 - DNA, 15 bp, Homo sapiens
aggaaaaaaaccttg

SEQ ID NO: 1324123 - DNA, 15 bp, Homo sapiens
caggaaaaaaacctt

SEQ ID NO: 1324124 - DNA, 15 bp, Homo sapiens
ccaggaaaaaaacct

SEQ ID NO: 1324125 - DNA, 15 bp, Homo sapiens
gccaggaaaaaaacc

SEQ ID NO: 1324126 - DNA, 15 bp, Homo sapiens
agccaggaaaaaaac

SEQ ID NO: 1324127 - DNA, 15 bp, Homo sapiens
tagccaggaaaaaaa

SEQ ID NO: 1324128 - DNA, 15 bp, Homo sapiens
atagccaggaaaaaa

SEQ ID NO: 1324129 - DNA, 15 bp, Homo sapiens
aatagccaggaaaaa

SEQ ID NO: 1324130 - DNA, 15 bp, Homo sapiens
taatagccaggaaaa

SEQ ID NO: 1324131 - DNA, 15 bp, Homo sapiens
ctaatagccaggaaa

SEQ ID NO: 1324132 - DNA, 15 bp, Homo sapiens
tctaatagccaggaa

SEQ ID NO: 1324133 - DNA, 15 bp, Homo sapiens
ttctaatagccagga

SEQ ID NO: 1324134 - DNA, 15 bp, Homo sapiens
tttctaatagccagg

SEQ ID NO: 1324135 - DNA, 15 bp, Homo sapiens
ctttctaatagccag

SEQ ID NO: 1324136 - DNA, 15 bp, Homo sapiens
cctttctaatagcca

SEQ ID NO: 1324137 - DNA, 15 bp, Homo sapiens
tcctttctaatagcc

SEQ ID NO: 1324138 - DNA, 15 bp, Homo sapiens
ctcctttctaatagc

SEQ ID NO: 1324139 - DNA, 15 bp, Homo sapiens
cctcctttctaatag

SEQ ID NO: 1324140 - DNA, 15 bp, Homo sapiens
tcctcctttctaata

SEQ ID NO: 1324141 - DNA, 15 bp, Homo sapiens
ttcctcctttctaat

SEQ ID NO: 1324142 - DNA, 15 bp, Homo sapiens
cttcctcctttctaa

SEQ ID NO: 1324143 - DNA, 15 bp, Homo sapiens
tcttcctcctttcta

SEQ ID NO: 1324144 - DNA, 15 bp, Homo sapiens
gtcttcctcctttct

SEQ ID NO: 1324145 - DNA, 15 bp, Homo sapiens
ggtcttcctcctttc

SEQ ID NO: 1324146 - DNA, 15 bp, Homo sapiens
gggtcttcctccttt

SEQ ID NO: 1324147 - DNA, 15 bp, Homo sapiens
agggtcttcctcctt

SEQ ID NO: 1324148 - DNA, 15 bp, Homo sapiens
gagggtcttcctcct

SEQ ID NO: 1324149 - DNA, 15 bp, Homo sapiens
tgagggtcttcctcc

SEQ ID NO: 1324150 - DNA, 15 bp, Homo sapiens
gtgagggtcttcctc

SEQ ID NO: 1324151 - DNA, 15 bp, Homo sapiens
agtgagggtcttcct

SEQ ID NO: 1324152 - DNA, 15 bp, Homo sapiens
cagtgagggtcttcc

SEQ ID NO: 1324153 - DNA, 15 bp, Homo sapiens
tcagtgagggtcttc

SEQ ID NO: 1324154 - DNA, 15 bp, Homo sapiens
ttcagtgagggtctt

SEQ ID NO: 1324155 - DNA, 15 bp, Homo sapiens
attcagtgagggtct

SEQ ID NO: 1324156 - DNA, 15 bp, Homo sapiens
aattcagtgagggtc

SEQ ID NO: 1324157 - DNA, 15 bp, Homo sapiens
caattcagtgagggt

SEQ ID NO: 1324158 - DNA, 15 bp, Homo sapiens
tcaattcagtgaggg

SEQ ID NO: 1324159 - DNA, 15 bp, Homo sapiens
ttcaattcagtgagg

SEQ ID NO: 1324160 - DNA, 15 bp, Homo sapiens
cttcaattcagtgag

SEQ ID NO: 1324161 - DNA, 15 bp, Homo sapiens
tcttcaattcagtga

SEQ ID NO: 1324162 - DNA, 15 bp, Homo sapiens
atcttcaattcagtg

SEQ ID NO: 1324163 - DNA, 15 bp, Homo sapiens
tatcttcaattcagt

SEQ ID NO: 1324164 - DNA, 15 bp, Homo sapiens
ctatcttcaattcag

SEQ ID NO: 1324165 - DNA, 15 bp, Homo sapiens
actatcttcaattca

SEQ ID NO: 1324166 - DNA, 15 bp, Homo sapiens
tactatcttcaattc

SEQ ID NO: 1324167 - DNA, 15 bp, Homo sapiens
ttactatcttcaatt

SEQ ID NO: 1324168 - DNA, 15 bp, Homo sapiens
attactatcttcaat

SEQ ID NO: 1324169 - DNA, 15 bp, Homo sapiens
cattactatcttcaa

SEQ ID NO: 1324170 - DNA, 15 bp, Homo sapiens
tcattactatcttca

SEQ ID NO: 1324171 - DNA, 15 bp, Homo sapiens
atcattactatcttc

SEQ ID NO: 1324172 - DNA, 15 bp, Homo sapiens
catcattactatctt

SEQ ID NO: 1324173 - DNA, 15 bp, Homo sapiens
ccatcattactatct

SEQ ID NO: 1324174 - DNA, 15 bp, Homo sapiens
cccatcattactatc

SEQ ID NO: 1324175 - DNA, 15 bp, Homo sapiens
acccatcattactat

SEQ ID NO: 1324176 - DNA, 15 bp, Homo sapiens
cacccatcattacta

SEQ ID NO: 1324177 - DNA, 15 bp, Homo sapiens
tcacccatcattact

SEQ ID NO: 1324178 - DNA, 15 bp, Homo sapiens
ctcacccatcattac

SEQ ID NO: 1324179 - DNA, 15 bp, Homo sapiens
cctcacccatcatta

SEQ ID NO: 1324180 - DNA, 15 bp, Homo sapiens
tcctcacccatcatt

SEQ ID NO: 1324181 - DNA, 15 bp, Homo sapiens
gtcctcacccatcat

SEQ ID NO: 1324182 - DNA, 15 bp, Homo sapiens
agtcctcacccatca

SEQ ID NO: 1324183 - DNA, 15 bp, Homo sapiens
aagtcctcacccatc

SEQ ID NO: 1324184 - DNA, 15 bp, Homo sapiens
aaagtcctcacccat

SEQ ID NO: 1324185 - DNA, 15 bp, Homo sapiens
caaagtcctcaccca

SEQ ID NO: 1324186 - DNA, 15 bp, Homo sapiens
tcaaagtcctcaccc

SEQ ID NO: 1324187 - DNA, 15 bp, Homo sapiens
gtcaaagtcctcacc

SEQ ID NO: 1324188 - DNA, 15 bp, Homo sapiens
agtcaaagtcctcac

SEQ ID NO: 1324189 - DNA, 15 bp, Homo sapiens
aagtcaaagtcctca

SEQ ID NO: 1324190 - DNA, 15 bp, Homo sapiens
gaagtcaaagtcctc

SEQ ID NO: 1324191 - DNA, 15 bp, Homo sapiens
agaagtcaaagtcct

SEQ ID NO: 1324192 - DNA, 15 bp, Homo sapiens
cagaagtcaaagtcc

SEQ ID NO: 1324193 - DNA, 15 bp, Homo sapiens
acagaagtcaaagtc

SEQ ID NO: 1324194 - DNA, 15 bp, Homo sapiens
aacagaagtcaaagt

SEQ ID NO: 1324195 - DNA, 15 bp, Homo sapiens
taacagaagtcaaag

SEQ ID NO: 1324196 - DNA, 15 bp, Homo sapiens
ttaacagaagtcaaa

SEQ ID NO: 1324197 - DNA, 15 bp, Homo sapiens
gttaacagaagtcaa

SEQ ID NO: 1324198 - DNA, 15 bp, Homo sapiens
tgttaacagaagtca

SEQ ID NO: 1324199 - DNA, 15 bp, Homo sapiens
gtgttaacagaagtc

SEQ ID NO: 1324200 - DNA, 15 bp, Homo sapiens
ggtgttaacagaagt

SEQ ID NO: 1324201 - DNA, 15 bp, Homo sapiens
aggtgttaacagaag

SEQ ID NO: 1324202 - DNA, 15 bp, Homo sapiens
gaggtgttaacagaa

SEQ ID NO: 1324203 - DNA, 15 bp, Homo sapiens
tgaggtgttaacaga

SEQ ID NO: 1324204 - DNA, 15 bp, Homo sapiens
atgaggtgttaacag

SEQ ID NO: 1324205 - DNA, 15 bp, Homo sapiens
aatgaggtgttaaca

SEQ ID NO: 1324206 - DNA, 15 bp, Homo sapiens
gaatgaggtgttaac

SEQ ID NO: 1324207 - DNA, 15 bp, Homo sapiens
tgaatgaggtgttaa

SEQ ID NO: 1324208 - DNA, 15 bp, Homo sapiens
ctgaatgaggtgtta

SEQ ID NO: 1324209 - DNA, 15 bp, Homo sapiens
tctgaatgaggtgtt

SEQ ID NO: 1324210 - DNA, 15 bp, Homo sapiens
atctgaatgaggtgt

SEQ ID NO: 1324211 - DNA, 15 bp, Homo sapiens
tatctgaatgaggtg

SEQ ID NO: 1324212 - DNA, 15 bp, Homo sapiens
ttatctgaatgaggt

SEQ ID NO: 1324213 - DNA, 15 bp, Homo sapiens
cttatctgaatgagg

SEQ ID NO: 1324214 - DNA, 15 bp, Homo sapiens
acttatctgaatgag

SEQ ID NO: 1324215 - DNA, 15 bp, Homo sapiens
cacttatctgaatga

SEQ ID NO: 1324216 - DNA, 15 bp, Homo sapiens
tcacttatctgaatg

SEQ ID NO: 1324217 - DNA, 15 bp, Homo sapiens
gtcacttatctgaat

SEQ ID NO: 1324218 - DNA, 15 bp, Homo sapiens
agtcacttatctgaa

SEQ ID NO: 1324219 - DNA, 15 bp, Homo sapiens
tagtcacttatctga

SEQ ID NO: 1324220 - DNA, 15 bp, Homo sapiens
atagtcacttatctg

SEQ ID NO: 1324221 - DNA, 15 bp, Homo sapiens
aatagtcacttatct

SEQ ID NO: 1324222 - DNA, 15 bp, Homo sapiens
aaatagtcacttatc

SEQ ID NO: 1324223 - DNA, 15 bp, Homo sapiens
aaaatagtcacttat

SEQ ID NO: 1324224 - DNA, 15 bp, Homo sapiens
taaaatagtcactta

SEQ ID NO: 1324225 - DNA, 15 bp, Homo sapiens
ctaaaatagtcactt

SEQ ID NO: 1324226 - DNA, 15 bp, Homo sapiens
actaaaatagtcact

SEQ ID NO: 1324227 - DNA, 15 bp, Homo sapiens
aactaaaatagtcac

SEQ ID NO: 1324228 - DNA, 15 bp, Homo sapiens
aaactaaaatagtca

SEQ ID NO: 1324229 - DNA, 15 bp, Homo sapiens
taaactaaaatagtc

SEQ ID NO: 1324230 - DNA, 15 bp, Homo sapiens
ttaaactaaaatagt

SEQ ID NO: 1324231 - DNA, 15 bp, Homo sapiens
attaaactaaaatag

SEQ ID NO: 1324232 - DNA, 15 bp, Homo sapiens
aattaaactaaaata

SEQ ID NO: 1324233 - DNA, 15 bp, Homo sapiens
taattaaactaaaat

SEQ ID NO: 1324234 - DNA, 15 bp, Homo sapiens
gtaattaaactaaaa

SEQ ID NO: 1324235 - DNA, 15 bp, Homo sapiens
tgtaattaaactaaa

SEQ ID NO: 1324236 - DNA, 15 bp, Homo sapiens
atgtaattaaactaa

SEQ ID NO: 1324237 - DNA, 15 bp, Homo sapiens
catgtaattaaacta

SEQ ID NO: 1324238 - DNA, 15 bp, Homo sapiens
tcatgtaattaaact

SEQ ID NO: 1324239 - DNA, 15 bp, Homo sapiens
ttcatgtaattaaac

SEQ ID NO: 1324240 - DNA, 15 bp, Homo sapiens
attcatgtaattaaa

SEQ ID NO: 1324241 - DNA, 15 bp, Homo sapiens
aattcatgtaattaa

SEQ ID NO: 1324242 - DNA, 15 bp, Homo sapiens
aaattcatgtaatta

SEQ ID NO: 1324243 - DNA, 15 bp, Homo sapiens
aaaattcatgtaatt

SEQ ID NO: 1324244 - DNA, 15 bp, Homo sapiens
caaaattcatgtaat

SEQ ID NO: 1324245 - DNA, 15 bp, Homo sapiens
acaaaattcatgtaa

SEQ ID NO: 1324246 - DNA, 15 bp, Homo sapiens
gacaaaattcatgta

SEQ ID NO: 1324247 - DNA, 15 bp, Homo sapiens
tgacaaaattcatgt

SEQ ID NO: 1324248 - DNA, 15 bp, Homo sapiens
atgacaaaattcatg

SEQ ID NO: 1324249 - DNA, 15 bp, Homo sapiens
gatgacaaaattcat

SEQ ID NO: 1324250 - DNA, 15 bp, Homo sapiens
agatgacaaaattca

SEQ ID NO: 1324251 - DNA, 15 bp, Homo sapiens
gagatgacaaaattc

SEQ ID NO: 1324252 - DNA, 15 bp, Homo sapiens
ggagatgacaaaatt

SEQ ID NO: 1324253 - DNA, 15 bp, Homo sapiens
gggagatgacaaaat

SEQ ID NO: 1324254 - DNA, 15 bp, Homo sapiens
agggagatgacaaaa

SEQ ID NO: 1324255 - DNA, 15 bp, Homo sapiens
aagggagatgacaaa

SEQ ID NO: 1324256 - DNA, 15 bp, Homo sapiens
caagggagatgacaa

SEQ ID NO: 1324257 - DNA, 15 bp, Homo sapiens
ccaagggagatgaca

SEQ ID NO: 1324258 - DNA, 15 bp, Homo sapiens
tccaagggagatgac

SEQ ID NO: 1324259 - DNA, 15 bp, Homo sapiens
ctccaagggagatga

SEQ ID NO: 1324260 - DNA, 15 bp, Homo sapiens
gctccaagggagatg

SEQ ID NO: 1324261 - DNA, 15 bp, Homo sapiens
agctccaagggagat

SEQ ID NO: 1324262 - DNA, 15 bp, Homo sapiens
cagctccaagggaga

SEQ ID NO: 1324263 - DNA, 15 bp, Homo sapiens
gcagctccaagggag

SEQ ID NO: 1324264 - DNA, 15 bp, Homo sapiens
ggcagctccaaggga

SEQ ID NO: 1324265 - DNA, 15 bp, Homo sapiens
aggcagctccaaggg

SEQ ID NO: 1324266 - DNA, 15 bp, Homo sapiens
gaggcagctccaagg

SEQ ID NO: 1324267 - DNA, 15 bp, Homo sapiens
ggaggcagctccaag

SEQ ID NO: 1324268 - DNA, 15 bp, Homo sapiens
tgggaggcagctcca

SEQ ID NO: 1324269 - DNA, 15 bp, Homo sapiens
taaaacagtgaaaga

SEQ ID NO: 1324270 - DNA, 15 bp, Homo sapiens
ataaaacagtgaaag

SEQ ID NO: 1324271 - DNA, 15 bp, Homo sapiens
tataaaacagtgaaa

SEQ ID NO: 1324272 - DNA, 15 bp, Homo sapiens
ttataaaacagtgaa

SEQ ID NO: 1324273 - DNA, 15 bp, Homo sapiens
tttataaaacagtga

SEQ ID NO: 1324274 - DNA, 15 bp, Homo sapiens
ttttataaaacagtg

SEQ ID NO: 1324275 - DNA, 15 bp, Homo sapiens
tttttataaaacagt

SEQ ID NO: 1324276 - DNA, 15 bp, Homo sapiens
ttttttataaaacag

SEQ ID NO: 1324277 - DNA, 15 bp, Homo sapiens
cttttttataaaaca

SEQ ID NO: 1324278 - DNA, 15 bp, Homo sapiens
ccttttttataaaac

SEQ ID NO: 1324279 - DNA, 15 bp, Homo sapiens
accttttttataaaa

SEQ ID NO: 1324280 - DNA, 15 bp, Homo sapiens
aaccttttttataaa

SEQ ID NO: 1324281 - DNA, 15 bp, Homo sapiens
taaccttttttataa

SEQ ID NO: 1324282 - DNA, 15 bp, Homo sapiens
ctaaccttttttata

SEQ ID NO: 1324283 - DNA, 15 bp, Homo sapiens
actaaccttttttat

SEQ ID NO: 1324284 - DNA, 15 bp, Homo sapiens
tactaacctttttta

SEQ ID NO: 1324285 - DNA, 15 bp, Homo sapiens
ctactaacctttttt

SEQ ID NO: 1324286 - DNA, 15 bp, Homo sapiens
tctactaaccttttt

SEQ ID NO: 1324287 - DNA, 15 bp, Homo sapiens
atctactaacctttt

SEQ ID NO: 1324288 - DNA, 15 bp, Homo sapiens
catctactaaccttt

SEQ ID NO: 1324289 - DNA, 15 bp, Homo sapiens
tcatctactaacctt

SEQ ID NO: 1324290 - DNA, 15 bp, Homo sapiens
atcatctactaacct

SEQ ID NO: 1324291 - DNA, 15 bp, Homo sapiens
aatcatctactaacc

SEQ ID NO: 1324292 - DNA, 15 bp, Homo sapiens
taatcatctactaac

SEQ ID NO: 1324293 - DNA, 15 bp, Homo sapiens
ataatcatctactaa

SEQ ID NO: 1324294 - DNA, 15 bp, Homo sapiens
aataatcatctacta

SEQ ID NO: 1324295 - DNA, 15 bp, Homo sapiens
aaataatcatctact

SEQ ID NO: 1324296 - DNA, 15 bp, Homo sapiens
aaaataatcatctac

SEQ ID NO: 1324297 - DNA, 15 bp, Homo sapiens
gaaaataatcatcta

SEQ ID NO: 1324298 - DNA, 15 bp, Homo sapiens
tgaaaataatcatct

SEQ ID NO: 1324299 - DNA, 15 bp, Homo sapiens
ttgaaaataatcatc

SEQ ID NO: 1324300 - DNA, 15 bp, Homo sapiens
cttgaaaataatcat

SEQ ID NO: 1324301 - DNA, 15 bp, Homo sapiens
tcttgaaaataatca

SEQ ID NO: 1324302 - DNA, 15 bp, Homo sapiens
ctcttgaaaataatc

SEQ ID NO: 1324303 - DNA, 15 bp, Homo sapiens
gctcttgaaaataat

SEQ ID NO: 1324304 - DNA, 15 bp, Homo sapiens
tgctcttgaaaataa

SEQ ID NO: 1324305 - DNA, 15 bp, Homo sapiens
atgctcttgaaaata

SEQ ID NO: 1324306 - DNA, 15 bp, Homo sapiens
catgctcttgaaaat

SEQ ID NO: 1324307 - DNA, 15 bp, Homo sapiens
ccatgctcttgaaaa

SEQ ID NO: 1324308 - DNA, 15 bp, Homo sapiens
tccatgctcttgaaa

SEQ ID NO: 1324309 - DNA, 15 bp, Homo sapiens
gtccatgctcttgaa

SEQ ID NO: 1324310 - DNA, 15 bp, Homo sapiens
agtccatgctcttga

SEQ ID NO: 1324311 - DNA, 15 bp, Homo sapiens
gagtccatgctcttg

SEQ ID NO: 1324312 - DNA, 15 bp, Homo sapiens
agagtccatgctctt

SEQ ID NO: 1324313 - DNA, 15 bp, Homo sapiens
cagagtccatgctct

SEQ ID NO: 1324314 - DNA, 15 bp, Homo sapiens
tcagagtccatgctc

SEQ ID NO: 1324315 - DNA, 15 bp, Homo sapiens
ttcagagtccatgct

SEQ ID NO: 1324316 - DNA, 15 bp, Homo sapiens
tttcagagtccatgc

SEQ ID NO: 1324317 - DNA, 15 bp, Homo sapiens
gtttcagagtccatg

SEQ ID NO: 1324318 - DNA, 15 bp, Homo sapiens
agtttcagagtccat

SEQ ID NO: 1324319 - DNA, 15 bp, Homo sapiens
tagtttcagagtcca

SEQ ID NO: 1324320 - DNA, 15 bp, Homo sapiens
ctagtttcagagtcc

SEQ ID NO: 1324321 - DNA, 15 bp, Homo sapiens
cctagtttcagagtc

SEQ ID NO: 1324322 - DNA, 15 bp, Homo sapiens
gcctagtttcagagt

SEQ ID NO: 1324323 - DNA, 15 bp, Homo sapiens
agcctagtttcagag

SEQ ID NO: 1324324 - DNA, 15 bp, Homo sapiens
cagcctagtttcaga

SEQ ID NO: 1324325 - DNA, 15 bp, Homo sapiens
tcagcctagtttcag

SEQ ID NO: 1324326 - DNA, 15 bp, Homo sapiens
gtcagcctagtttca

SEQ ID NO: 1324327 - DNA, 15 bp, Homo sapiens
agtcagcctagtttc

SEQ ID NO: 1324328 - DNA, 15 bp, Homo sapiens
cagtcagcctagttt

SEQ ID NO: 1324329 - DNA, 15 bp, Homo sapiens
ccagtcagcctagtt

SEQ ID NO: 1324330 - DNA, 15 bp, Homo sapiens
cccagtcagcctagt

SEQ ID NO: 1324331 - DNA, 15 bp, Homo sapiens
acccagtcagcctag

SEQ ID NO: 1324332 - DNA, 15 bp, Homo sapiens
aacccagtcagccta

SEQ ID NO: 1324333 - DNA, 15 bp, Homo sapiens
gaacccagtcagcct

SEQ ID NO: 1324334 - DNA, 15 bp, Homo sapiens
tgaacccagtcagcc

SEQ ID NO: 1324335 - DNA, 15 bp, Homo sapiens
ttgaacccagtcagc

SEQ ID NO: 1324336 - DNA, 15 bp, Homo sapiens
tttgaacccagtcag

SEQ ID NO: 1324337 - DNA, 15 bp, Homo sapiens
atttgaacccagtca

SEQ ID NO: 1324338 - DNA, 15 bp, Homo sapiens
gatttgaacccagtc

SEQ ID NO: 1324339 - DNA, 15 bp, Homo sapiens
tgatttgaacccagt

SEQ ID NO: 1324340 - DNA, 15 bp, Homo sapiens
atgatttgaacccag

SEQ ID NO: 1324341 - DNA, 15 bp, Homo sapiens
catgatttgaaccca

SEQ ID NO: 1324342 - DNA, 15 bp, Homo sapiens
acatgatttgaaccc

SEQ ID NO: 1324343 - DNA, 15 bp, Homo sapiens
aacatgatttgaacc

SEQ ID NO: 1324344 - DNA, 15 bp, Homo sapiens
aaacatgatttgaac

SEQ ID NO: 1324345 - DNA, 15 bp, Homo sapiens
gaaacatgatttgaa

SEQ ID NO: 1324346 - DNA, 15 bp, Homo sapiens
agaaacatgatttga

SEQ ID NO: 1324347 - DNA, 15 bp, Homo sapiens
aagaaacatgatttg

SEQ ID NO: 1324348 - DNA, 15 bp, Homo sapiens
gaagaaacatgattt

SEQ ID NO: 1324349 - DNA, 15 bp, Homo sapiens
agaagaaacatgatt

SEQ ID NO: 1324350 - DNA, 15 bp, Homo sapiens
tagaagaaacatgat

SEQ ID NO: 1324351 - DNA, 15 bp, Homo sapiens
gtagaagaaacatga

SEQ ID NO: 1324352 - DNA, 15 bp, Homo sapiens
agtagaagaaacatg

SEQ ID NO: 1324353 - DNA, 15 bp, Homo sapiens
aagtagaagaaacat

SEQ ID NO: 1324354 - DNA, 15 bp, Homo sapiens
aaagtagaagaaaca

SEQ ID NO: 1324355 - DNA, 15 bp, Homo sapiens
gaaagtagaagaaac

SEQ ID NO: 1324356 - DNA, 15 bp, Homo sapiens
agaaagtagaagaaa

SEQ ID NO: 1324357 - DNA, 15 bp, Homo sapiens
tagaaagtagaagaa

SEQ ID NO: 1324358 - DNA, 15 bp, Homo sapiens
ctagaaagtagaaga

SEQ ID NO: 1324359 - DNA, 15 bp, Homo sapiens
cctagaaagtagaag

SEQ ID NO: 1324360 - DNA, 15 bp, Homo sapiens
acctagaaagtagaa

SEQ ID NO: 1324361 - DNA, 15 bp, Homo sapiens
tacctagaaagtaga

SEQ ID NO: 1324362 - DNA, 15 bp, Homo sapiens
gtacctagaaagtag

SEQ ID NO: 1324363 - DNA, 15 bp, Homo sapiens
tgtacctagaaagta

SEQ ID NO: 1324364 - DNA, 15 bp, Homo sapiens
atgtacctagaaagt

SEQ ID NO: 1324365 - DNA, 15 bp, Homo sapiens
aatgtacctagaaag

SEQ ID NO: 1324366 - DNA, 15 bp, Homo sapiens
taatgtacctagaaa

SEQ ID NO: 1324367 - DNA, 15 bp, Homo sapiens
gtaatgtacctagaa

SEQ ID NO: 1324368 - DNA, 15 bp, Homo sapiens
agtaatgtacctaga

SEQ ID NO: 1324369 - DNA, 15 bp, Homo sapiens
cagtaatgtacctag

SEQ ID NO: 1324370 - DNA, 15 bp, Homo sapiens
ccagtaatgtaccta

SEQ ID NO: 1324371 - DNA, 15 bp, Homo sapiens
cccagtaatgtacct

SEQ ID NO: 1324372 - DNA, 15 bp, Homo sapiens
gcccagtaatgtacc

SEQ ID NO: 1324373 - DNA, 15 bp, Homo sapiens
tgcccagtaatgtac

SEQ ID NO: 1324374 - DNA, 15 bp, Homo sapiens
ttgcccagtaatgta

SEQ ID NO: 1324375 - DNA, 15 bp, Homo sapiens
cttgcccagtaatgt

SEQ ID NO: 1324376 - DNA, 15 bp, Homo sapiens
acttgcccagtaatg

SEQ ID NO: 1324377 - DNA, 15 bp, Homo sapiens
gacttgcccagtaat

SEQ ID NO: 1324378 - DNA, 15 bp, Homo sapiens
tgacttgcccagtaa

SEQ ID NO: 1324379 - DNA, 15 bp, Homo sapiens
gtgacttgcccagta

SEQ ID NO: 1324380 - DNA, 15 bp, Homo sapiens
agtgacttgcccagt

SEQ ID NO: 1324381 - DNA, 15 bp, Homo sapiens
aagtgacttgcccag

SEQ ID NO: 1324382 - DNA, 15 bp, Homo sapiens
taagtgacttgccca

SEQ ID NO: 1324383 - DNA, 15 bp, Homo sapiens
ttaagtgacttgccc

SEQ ID NO: 1324384 - DNA, 15 bp, Homo sapiens
attaagtgacttgcc

SEQ ID NO: 1324385 - DNA, 15 bp, Homo sapiens
tattaagtgacttgc

SEQ ID NO: 1324386 - DNA, 15 bp, Homo sapiens
atattaagtgacttg

SEQ ID NO: 1324387 - DNA, 15 bp, Homo sapiens
gatattaagtgactt

SEQ ID NO: 1324388 - DNA, 15 bp, Homo sapiens
agatattaagtgact

SEQ ID NO: 1324389 - DNA, 15 bp, Homo sapiens
gagatattaagtgac

SEQ ID NO: 1324390 - DNA, 15 bp, Homo sapiens
agagatattaagtga

SEQ ID NO: 1324391 - DNA, 15 bp, Homo sapiens
cagagatattaagtg

SEQ ID NO: 1324392 - DNA, 15 bp, Homo sapiens
acagagatattaagt

SEQ ID NO: 1324393 - DNA, 15 bp, Homo sapiens
cacagagatattaag

SEQ ID NO: 1324394 - DNA, 15 bp, Homo sapiens
acacagagatattaa

SEQ ID NO: 1324395 - DNA, 15 bp, Homo sapiens
gacacagagatatta

SEQ ID NO: 1324396 - DNA, 15 bp, Homo sapiens
agacacagagatatt

SEQ ID NO: 1324397 - DNA, 15 bp, Homo sapiens
gagacacagagatat

SEQ ID NO: 1324398 - DNA, 15 bp, Homo sapiens
tgagacacagagata

SEQ ID NO: 1324399 - DNA, 15 bp, Homo sapiens
ctgagacacagagat

SEQ ID NO: 1324400 - DNA, 15 bp, Homo sapiens
actgagacacagaga

SEQ ID NO: 1324401 - DNA, 15 bp, Homo sapiens
aactgagacacagag

SEQ ID NO: 1324402 - DNA, 15 bp, Homo sapiens
gaggaaactgagaca

SEQ ID NO: 1324403 - DNA, 15 bp, Homo sapiens
tagatgaggaaactg

SEQ ID NO: 1324404 - DNA, 15 bp, Homo sapiens
atagatgaggaaact

SEQ ID NO: 1324405 - DNA, 15 bp, Homo sapiens
tatagatgaggaaac

SEQ ID NO: 1324406 - DNA, 15 bp, Homo sapiens
ttatagatgaggaaa

SEQ ID NO: 1324407 - DNA, 15 bp, Homo sapiens
tttatagatgaggaa

SEQ ID NO: 1324408 - DNA, 15 bp, Homo sapiens
ttttatagatgagga

SEQ ID NO: 1324409 - DNA, 15 bp, Homo sapiens
attttatagatgagg

SEQ ID NO: 1324410 - DNA, 15 bp, Homo sapiens
cattttatagatgag

SEQ ID NO: 1324411 - DNA, 15 bp, Homo sapiens
ccattttatagatga

SEQ ID NO: 1324412 - DNA, 15 bp, Homo sapiens
tccattttatagatg

SEQ ID NO: 1324413 - DNA, 15 bp, Homo sapiens
ttccattttatagat

SEQ ID NO: 1324414 - DNA, 15 bp, Homo sapiens
tttccattttataga

SEQ ID NO: 1324415 - DNA, 15 bp, Homo sapiens
atttccattttatag

SEQ ID NO: 1324416 - DNA, 15 bp, Homo sapiens
catttccattttata

SEQ ID NO: 1324417 - DNA, 15 bp, Homo sapiens
tcatttccattttat

SEQ ID NO: 1324418 - DNA, 15 bp, Homo sapiens
atcatttccatttta

SEQ ID NO: 1324419 - DNA, 15 bp, Homo sapiens
tatcatttccatttt

SEQ ID NO: 1324420 - DNA, 15 bp, Homo sapiens
ttatcatttccattt

SEQ ID NO: 1324421 - DNA, 15 bp, Homo sapiens
attatcatttccatt

SEQ ID NO: 1324422 - DNA, 15 bp, Homo sapiens
cattatcatttccat

SEQ ID NO: 1324423 - DNA, 15 bp, Homo sapiens
acattatcatttcca

SEQ ID NO: 1324424 - DNA, 15 bp, Homo sapiens
aacattatcatttcc

SEQ ID NO: 1324425 - DNA, 15 bp, Homo sapiens
caacattatcatttc

SEQ ID NO: 1324426 - DNA, 15 bp, Homo sapiens
gcaacattatcattt

SEQ ID NO: 1324427 - DNA, 15 bp, Homo sapiens
cgcaacattatcatt

SEQ ID NO: 1324428 - DNA, 15 bp, Homo sapiens
tcgcaacattatcat

SEQ ID NO: 1324429 - DNA, 15 bp, Homo sapiens
ctcgcaacattatca

SEQ ID NO: 1324430 - DNA, 15 bp, Homo sapiens
tctcgcaacattatc

SEQ ID NO: 1324431 - DNA, 15 bp, Homo sapiens
atctcgcaacattat

SEQ ID NO: 1324432 - DNA, 15 bp, Homo sapiens
gatctcgcaacatta

SEQ ID NO: 1324433 - DNA, 15 bp, Homo sapiens
agatctcgcaacatt

SEQ ID NO: 1324434 - DNA, 15 bp, Homo sapiens
aagatctcgcaacat

SEQ ID NO: 1324435 - DNA, 15 bp, Homo sapiens
aaagatctcgcaaca

SEQ ID NO: 1324436 - DNA, 15 bp, Homo sapiens
gaaagatctcgcaac

SEQ ID NO: 1324437 - DNA, 15 bp, Homo sapiens
agaaagatctcgcaa

SEQ ID NO: 1324438 - DNA, 15 bp, Homo sapiens
aagaaagatctcgca

SEQ ID NO: 1324439 - DNA, 15 bp, Homo sapiens
caagaaagatctcgc

SEQ ID NO: 1324440 - DNA, 15 bp, Homo sapiens
tcaagaaagatctcg

SEQ ID NO: 1324441 - DNA, 15 bp, Homo sapiens
gtcaagaaagatctc

SEQ ID NO: 1324442 - DNA, 15 bp, Homo sapiens
agtcaagaaagatct

SEQ ID NO: 1324443 - DNA, 15 bp, Homo sapiens
tagtcaagaaagatc

SEQ ID NO: 1324444 - DNA, 15 bp, Homo sapiens
atagtcaagaaagat

SEQ ID NO: 1324445 - DNA, 15 bp, Homo sapiens
aatagtcaagaaaga

SEQ ID NO: 1324446 - DNA, 15 bp, Homo sapiens
gaatagtcaagaaag

SEQ ID NO: 1324447 - DNA, 15 bp, Homo sapiens
tgaatagtcaagaaa

SEQ ID NO: 1324448 - DNA, 15 bp, Homo sapiens
ctgaatagtcaagaa

SEQ ID NO: 1324449 - DNA, 15 bp, Homo sapiens
tctgaatagtcaaga

SEQ ID NO: 1324450 - DNA, 15 bp, Homo sapiens
ctctgaatagtcaag

SEQ ID NO: 1324451 - DNA, 15 bp, Homo sapiens
actctgaatagtcaa

SEQ ID NO: 1324452 - DNA, 15 bp, Homo sapiens
gactctgaatagtca

SEQ ID NO: 1324453 - DNA, 15 bp, Homo sapiens
cgactctgaatagtc

SEQ ID NO: 1324454 - DNA, 15 bp, Homo sapiens
acgactctgaatagt

SEQ ID NO: 1324455 - DNA, 15 bp, Homo sapiens
aacgactctgaatag

SEQ ID NO: 1324456 - DNA, 15 bp, Homo sapiens
aaacgactctgaata

SEQ ID NO: 1324457 - DNA, 15 bp, Homo sapiens
aaaacgactctgaat

SEQ ID NO: 1324458 - DNA, 15 bp, Homo sapiens
aaaaacgactctgaa

SEQ ID NO: 1324459 - DNA, 15 bp, Homo sapiens
gaaaaacgactctga

SEQ ID NO: 1324460 - DNA, 15 bp, Homo sapiens
agaaaaacgactctg

SEQ ID NO: 1324461 - DNA, 15 bp, Homo sapiens
cagaaaaacgactct

SEQ ID NO: 1324462 - DNA, 15 bp, Homo sapiens
ccagaaaaacgactc

SEQ ID NO: 1324463 - DNA, 15 bp, Homo sapiens
gccagaaaaacgact

SEQ ID NO: 1324464 - DNA, 15 bp, Homo sapiens
ggccagaaaaacgac

SEQ ID NO: 1324465 - DNA, 15 bp, Homo sapiens
cggccagaaaaacga

SEQ ID NO: 1324466 - DNA, 15 bp, Homo sapiens
ccggccagaaaaacg

SEQ ID NO: 1324467 - DNA, 15 bp, Homo sapiens
tccggccagaaaaac

SEQ ID NO: 1324468 - DNA, 15 bp, Homo sapiens
ttccggccagaaaaa

SEQ ID NO: 1324469 - DNA, 15 bp, Homo sapiens
tttccggccagaaaa

SEQ ID NO: 1324470 - DNA, 15 bp, Homo sapiens
gtttccggccagaaa

SEQ ID NO: 1324471 - DNA, 15 bp, Homo sapiens
ggtttccggccagaa

SEQ ID NO: 1324472 - DNA, 15 bp, Homo sapiens
aggtttccggccaga

SEQ ID NO: 1324473 - DNA, 15 bp, Homo sapiens
gaggtttccggccag

SEQ ID NO: 1324474 - DNA, 15 bp, Homo sapiens
agaggtttccggcca

SEQ ID NO: 1324475 - DNA, 15 bp, Homo sapiens
cagaggtttccggcc

SEQ ID NO: 1324476 - DNA, 15 bp, Homo sapiens
acagaggtttccggc

SEQ ID NO: 1324477 - DNA, 15 bp, Homo sapiens
cacagaggtttccgg

SEQ ID NO: 1324478 - DNA, 15 bp, Homo sapiens
tcacagaggtttccg

SEQ ID NO: 1324479 - DNA, 15 bp, Homo sapiens
gtcacagaggtttcc

SEQ ID NO: 1324480 - DNA, 15 bp, Homo sapiens
ggtcacagaggtttc

SEQ ID NO: 1324481 - DNA, 15 bp, Homo sapiens
cggtcacagaggttt

SEQ ID NO: 1324482 - DNA, 15 bp, Homo sapiens
ccggtcacagaggtt

SEQ ID NO: 1324483 - DNA, 15 bp, Homo sapiens
accggtcacagaggt

SEQ ID NO: 1324484 - DNA, 15 bp, Homo sapiens
caccggtcacagagg

SEQ ID NO: 1324485 - DNA, 15 bp, Homo sapiens
ccaccggtcacagag

SEQ ID NO: 1324486 - DNA, 15 bp, Homo sapiens
gccaccggtcacaga

SEQ ID NO: 1324487 - DNA, 15 bp, Homo sapiens
cgccaccggtcacag

SEQ ID NO: 1324488 - DNA, 15 bp, Homo sapiens
gcgccaccggtcaca

SEQ ID NO: 1324489 - DNA, 15 bp, Homo sapiens
ggcgccaccggtcac

SEQ ID NO: 1324490 - DNA, 15 bp, Homo sapiens
gggcgccaccggtca

SEQ ID NO: 1324491 - DNA, 15 bp, Homo sapiens
agggcgccaccggtc

SEQ ID NO: 1324492 - DNA, 15 bp, Homo sapiens
aagggcgccaccggt

SEQ ID NO: 1324493 - DNA, 15 bp, Homo sapiens
caagggcgccaccgg

SEQ ID NO: 1324494 - DNA, 15 bp, Homo sapiens
tcaagggcgccaccg

SEQ ID NO: 1324495 - DNA, 15 bp, Homo sapiens
atcaagggcgccacc

SEQ ID NO: 1324496 - DNA, 15 bp, Homo sapiens
gatcaagggcgccac

SEQ ID NO: 1324497 - DNA, 15 bp, Homo sapiens
tgatcaagggcgcca

SEQ ID NO: 1324498 - DNA, 15 bp, Homo sapiens
ttgatcaagggcgcc

SEQ ID NO: 1324499 - DNA, 15 bp, Homo sapiens
attgatcaagggcgc

SEQ ID NO: 1324500 - DNA, 15 bp, Homo sapiens
aattgatcaagggcg

SEQ ID NO: 1324501 - DNA, 15 bp, Homo sapiens
aaattgatcaagggc

SEQ ID NO: 1324502 - DNA, 15 bp, Homo sapiens
aaaattgatcaaggg

SEQ ID NO: 1324503 - DNA, 15 bp, Homo sapiens
aaaaattgatcaagg

SEQ ID NO: 1324504 - DNA, 15 bp, Homo sapiens
caaaaattgatcaag

SEQ ID NO: 1324505 - DNA, 15 bp, Homo sapiens
gcaaaaattgatcaa

SEQ ID NO: 1324506 - DNA, 15 bp, Homo sapiens
agcaaaaattgatca

SEQ ID NO: 1324507 - DNA, 15 bp, Homo sapiens
gagcaaaaattgatc

SEQ ID NO: 1324508 - DNA, 15 bp, Homo sapiens
tgagcaaaaattgat

SEQ ID NO: 1324509 - DNA, 15 bp, Homo sapiens
ctgagcaaaaattga

SEQ ID NO: 1324510 - DNA, 15 bp, Homo sapiens
cctgagcaaaaattg

SEQ ID NO: 1324511 - DNA, 15 bp, Homo sapiens
gcctgagcaaaaatt

SEQ ID NO: 1324512 - DNA, 15 bp, Homo sapiens
ggcctgagcaaaaat

SEQ ID NO: 1324513 - DNA, 15 bp, Homo sapiens
gggcctgagcaaaaa

SEQ ID NO: 1324514 - DNA, 15 bp, Homo sapiens
tgggcctgagcaaaa

SEQ ID NO: 1324515 - DNA, 15 bp, Homo sapiens
gtgggcctgagcaaa

SEQ ID NO: 1324516 - DNA, 15 bp, Homo sapiens
ggtgggcctgagcaa

SEQ ID NO: 1324517 - DNA, 15 bp, Homo sapiens
cggtgggcctgagca

SEQ ID NO: 1324518 - DNA, 15 bp, Homo sapiens
ccggtgggcctgagc

SEQ ID NO: 1324519 - DNA, 15 bp, Homo sapiens
cccggtgggcctgag

SEQ ID NO: 1324520 - DNA, 15 bp, Homo sapiens
gcccggtgggcctga

SEQ ID NO: 1324521 - DNA, 15 bp, Homo sapiens
agcccggtgggcctg

SEQ ID NO: 1324522 - DNA, 15 bp, Homo sapiens
gagcccggtgggcct

SEQ ID NO: 1324523 - DNA, 15 bp, Homo sapiens
tgagcccggtgggcc

SEQ ID NO: 1324524 - DNA, 15 bp, Homo sapiens
atgagcccggtgggc

SEQ ID NO: 1324525 - DNA, 15 bp, Homo sapiens
aatgagcccggtggg

SEQ ID NO: 1324526 - DNA, 15 bp, Homo sapiens
aaatgagcccggtgg

SEQ ID NO: 1324527 - DNA, 15 bp, Homo sapiens
gaaatgagcccggtg

SEQ ID NO: 1324528 - DNA, 15 bp, Homo sapiens
tgaaatgagcccggt

SEQ ID NO: 1324529 - DNA, 15 bp, Homo sapiens
ctgaaatgagcccgg

SEQ ID NO: 1324530 - DNA, 15 bp, Homo sapiens
gctgaaatgagcccg

SEQ ID NO: 1324531 - DNA, 15 bp, Homo sapiens
ggctgaaatgagccc

SEQ ID NO: 1324532 - DNA, 15 bp, Homo sapiens
gggctgaaatgagcc

SEQ ID NO: 1324533 - DNA, 15 bp, Homo sapiens
ggggctgaaatgagc

SEQ ID NO: 1324534 - DNA, 15 bp, Homo sapiens
aggggctgaaatgag

SEQ ID NO: 1324535 - DNA, 15 bp, Homo sapiens
aaggggctgaaatga

SEQ ID NO: 1324536 - DNA, 15 bp, Homo sapiens
caaggggctgaaatg

SEQ ID NO: 1324537 - DNA, 15 bp, Homo sapiens
ccaaggggctgaaat

SEQ ID NO: 1324538 - DNA, 15 bp, Homo sapiens
accaaggggctgaaa

SEQ ID NO: 1324539 - DNA, 15 bp, Homo sapiens
gaccaaggggctgaa

SEQ ID NO: 1324540 - DNA, 15 bp, Homo sapiens
agaccaaggggctga

SEQ ID NO: 1324541 - DNA, 15 bp, Homo sapiens
cagaccaaggggctg

SEQ ID NO: 1324542 - DNA, 15 bp, Homo sapiens
tcagaccaaggggct

SEQ ID NO: 1324543 - DNA, 15 bp, Homo sapiens
gtcagaccaaggggc

SEQ ID NO: 1324544 - DNA, 15 bp, Homo sapiens
tgtcagaccaagggg

SEQ ID NO: 1324545 - DNA, 15 bp, Homo sapiens
ctgtcagaccaaggg

SEQ ID NO: 1324546 - DNA, 15 bp, Homo sapiens
cctgtcagaccaagg

SEQ ID NO: 1324547 - DNA, 15 bp, Homo sapiens
gcctgtcagaccaag

SEQ ID NO: 1324548 - DNA, 15 bp, Homo sapiens
agcctgtcagaccaa

SEQ ID NO: 1324549 - DNA, 15 bp, Homo sapiens
cagcctgtcagacca

SEQ ID NO: 1324550 - DNA, 15 bp, Homo sapiens
gcagcctgtcagacc

SEQ ID NO: 1324551 - DNA, 15 bp, Homo sapiens
tgcagcctgtcagac

SEQ ID NO: 1324552 - DNA, 15 bp, Homo sapiens
gtgcagcctgtcaga

SEQ ID NO: 1324553 - DNA, 15 bp, Homo sapiens
agtgcagcctgtcag

SEQ ID NO: 1324554 - DNA, 15 bp, Homo sapiens
gagtgcagcctgtca

SEQ ID NO: 1324555 - DNA, 15 bp, Homo sapiens
cgagtgcagcctgtc

SEQ ID NO: 1324556 - DNA, 15 bp, Homo sapiens
ccgagtgcagcctgt

SEQ ID NO: 1324557 - DNA, 15 bp, Homo sapiens
gccgagtgcagcctg

SEQ ID NO: 1324558 - DNA, 15 bp, Homo sapiens
agccgagtgcagcct

SEQ ID NO: 1324559 - DNA, 15 bp, Homo sapiens
gagccgagtgcagcc

SEQ ID NO: 1324560 - DNA, 15 bp, Homo sapiens
tgagccgagtgcagc

SEQ ID NO: 1324561 - DNA, 15 bp, Homo sapiens
gtgagccgagtgcag

SEQ ID NO: 1324562 - DNA, 15 bp, Homo sapiens
tgtgagccgagtgca

SEQ ID NO: 1324563 - DNA, 15 bp, Homo sapiens
gtgtgagccgagtgc

SEQ ID NO: 1324564 - DNA, 15 bp, Homo sapiens
agtgtgagccgagtg

SEQ ID NO: 1324565 - DNA, 15 bp, Homo sapiens
tagtgtgagccgagt

SEQ ID NO: 1324566 - DNA, 15 bp, Homo sapiens
gtagtgtgagccgag

SEQ ID NO: 1324567 - DNA, 15 bp, Homo sapiens
ggtagtgtgagccga

SEQ ID NO: 1324568 - DNA, 15 bp, Homo sapiens
cggtagtgtgagccg

SEQ ID NO: 1324569 - DNA, 15 bp, Homo sapiens
ccggtagtgtgagcc

SEQ ID NO: 1324570 - DNA, 15 bp, Homo sapiens
gccggtagtgtgagc

SEQ ID NO: 1324571 - DNA, 15 bp, Homo sapiens
ggccggtagtgtgag

SEQ ID NO: 1324572 - DNA, 15 bp, Homo sapiens
aggccggtagtgtga

SEQ ID NO: 1324573 - DNA, 15 bp, Homo sapiens
caggccggtagtgtg

SEQ ID NO: 1324574 - DNA, 15 bp, Homo sapiens
ccaggccggtagtgt

SEQ ID NO: 1324575 - DNA, 15 bp, Homo sapiens
cccaggccggtagtg

SEQ ID NO: 1324576 - DNA, 15 bp, Homo sapiens
acccaggccggtagt

SEQ ID NO: 1324577 - DNA, 15 bp, Homo sapiens
gacccaggccggtag

SEQ ID NO: 1324578 - DNA, 15 bp, Homo sapiens
ggacccaggccggta

SEQ ID NO: 1324579 - DNA, 15 bp, Homo sapiens
tggacccaggccggt

SEQ ID NO: 1324580 - DNA, 15 bp, Homo sapiens
atggacccaggccgg

SEQ ID NO: 1324581 - DNA, 15 bp, Homo sapiens
catggacccaggccg

SEQ ID NO: 1324582 - DNA, 15 bp, Homo sapiens
gcatggacccaggcc

SEQ ID NO: 1324583 - DNA, 15 bp, Homo sapiens
ggcatggacccaggc

SEQ ID NO: 1324584 - DNA, 15 bp, Homo sapiens
tggcatggacccagg

SEQ ID NO: 1324585 - DNA, 15 bp, Homo sapiens
ctggcatggacccag

SEQ ID NO: 1324586 - DNA, 15 bp, Homo sapiens
gctggcatggaccca

SEQ ID NO: 1324587 - DNA, 15 bp, Homo sapiens
ggctggcatggaccc

SEQ ID NO: 1324588 - DNA, 15 bp, Homo sapiens
tggctggcatggacc

SEQ ID NO: 1324589 - DNA, 15 bp, Homo sapiens
ctggctggcatggac

SEQ ID NO: 1324590 - DNA, 15 bp, Homo sapiens
cctggctggcatgga

SEQ ID NO: 1324591 - DNA, 15 bp, Homo sapiens
tcctggctggcatgg

SEQ ID NO: 1324592 - DNA, 15 bp, Homo sapiens
ctcctggctggcatg

SEQ ID NO: 1324593 - DNA, 15 bp, Homo sapiens
gctcctggctggcat

SEQ ID NO: 1324594 - DNA, 15 bp, Homo sapiens
tgctcctggctggca

SEQ ID NO: 1324595 - DNA, 15 bp, Homo sapiens
ttgctcctggctggc

SEQ ID NO: 1324596 - DNA, 15 bp, Homo sapiens
cttgctcctggctgg

SEQ ID NO: 1324597 - DNA, 15 bp, Homo sapiens
acttgctcctggctg

SEQ ID NO: 1324598 - DNA, 15 bp, Homo sapiens
gacttgctcctggct

SEQ ID NO: 1324599 - DNA, 15 bp, Homo sapiens
tgacttgctcctggc

SEQ ID NO: 1324600 - DNA, 15 bp, Homo sapiens
ctgacttgctcctgg

SEQ ID NO: 1324601 - DNA, 15 bp, Homo sapiens
tctgacttgctcctg

SEQ ID NO: 1324602 - DNA, 15 bp, Homo sapiens
gtctgacttgctcct

SEQ ID NO: 1324603 - DNA, 15 bp, Homo sapiens
tgtctgacttgctcc

SEQ ID NO: 1324604 - DNA, 15 bp, Homo sapiens
atgtctgacttgctc

SEQ ID NO: 1324605 - DNA, 15 bp, Homo sapiens
catgtctgacttgct

SEQ ID NO: 1324606 - DNA, 15 bp, Homo sapiens
ccatgtctgacttgc

SEQ ID NO: 1324607 - DNA, 15 bp, Homo sapiens
tccatgtctgacttg

SEQ ID NO: 1324608 - DNA, 15 bp, Homo sapiens
ttccatgtctgactt

SEQ ID NO: 1324609 - DNA, 15 bp, Homo sapiens
gttccatgtctgact

SEQ ID NO: 1324610 - DNA, 15 bp, Homo sapiens
cgttccatgtctgac

SEQ ID NO: 1324611 - DNA, 15 bp, Homo sapiens
ccgttccatgtctga

SEQ ID NO: 1324612 - DNA, 15 bp, Homo sapiens
tccgttccatgtctg

SEQ ID NO: 1324613 - DNA, 15 bp, Homo sapiens
ctccgttccatgtct

SEQ ID NO: 1324614 - DNA, 15 bp, Homo sapiens
tctccgttccatgtc

SEQ ID NO: 1324615 - DNA, 15 bp, Homo sapiens
ctctccgttccatgt

SEQ ID NO: 1324616 - DNA, 15 bp, Homo sapiens
cctctccgttccatg

SEQ ID NO: 1324617 - DNA, 15 bp, Homo sapiens
ccctctccgttccat

SEQ ID NO: 1324618 - DNA, 15 bp, Homo sapiens
cccctctccgttcca

SEQ ID NO: 1324619 - DNA, 15 bp, Homo sapiens
acccctctccgttcc

SEQ ID NO: 1324620 - DNA, 15 bp, Homo sapiens
cacccctctccgttc

SEQ ID NO: 1324621 - DNA, 15 bp, Homo sapiens
acacccctctccgtt

SEQ ID NO: 1324622 - DNA, 15 bp, Homo sapiens
cacacccctctccgt

SEQ ID NO: 1324623 - DNA, 15 bp, Homo sapiens
acacacccctctccg

SEQ ID NO: 1324624 - DNA, 15 bp, Homo sapiens
cacacacccctctcc

SEQ ID NO: 1324625 - DNA, 15 bp, Homo sapiens
ccacacacccctctc

SEQ ID NO: 1324626 - DNA, 15 bp, Homo sapiens
cccacacacccctct

SEQ ID NO: 1324627 - DNA, 15 bp, Homo sapiens
gcccacacacccctc

SEQ ID NO: 1324628 - DNA, 15 bp, Homo sapiens
tgcccacacacccct

SEQ ID NO: 1324629 - DNA, 15 bp, Homo sapiens
ttgcccacacacccc

SEQ ID NO: 1324630 - DNA, 15 bp, Homo sapiens
cttgcccacacaccc

SEQ ID NO: 1324631 - DNA, 15 bp, Homo sapiens
gcttgcccacacacc

SEQ ID NO: 1324632 - DNA, 15 bp, Homo sapiens
tgcttgcccacacac

SEQ ID NO: 1324633 - DNA, 15 bp, Homo sapiens
atgcttgcccacaca

SEQ ID NO: 1324634 - DNA, 15 bp, Homo sapiens
catgcttgcccacac

SEQ ID NO: 1324635 - DNA, 15 bp, Homo sapiens
tcatgcttgcccaca

SEQ ID NO: 1324636 - DNA, 15 bp, Homo sapiens
ctcatgcttgcccac

SEQ ID NO: 1324637 - DNA, 15 bp, Homo sapiens
tctcatgcttgccca

SEQ ID NO: 1324638 - DNA, 15 bp, Homo sapiens
atctcatgcttgccc

SEQ ID NO: 1324639 - DNA, 15 bp, Homo sapiens
gatctcatgcttgcc

SEQ ID NO: 1324640 - DNA, 15 bp, Homo sapiens
agatctcatgcttgc

SEQ ID NO: 1324641 - DNA, 15 bp, Homo sapiens
cagatctcatgcttg

SEQ ID NO: 1324642 - DNA, 15 bp, Homo sapiens
ccagatctcatgctt

SEQ ID NO: 1324643 - DNA, 15 bp, Homo sapiens
gccagatctcatgct

SEQ ID NO: 1324644 - DNA, 15 bp, Homo sapiens
ggccagatctcatgc

SEQ ID NO: 1324645 - DNA, 15 bp, Homo sapiens
tggccagatctcatg

SEQ ID NO: 1324646 - DNA, 15 bp, Homo sapiens
atggccagatctcat

SEQ ID NO: 1324647 - DNA, 15 bp, Homo sapiens
aatggccagatctca

SEQ ID NO: 1324648 - DNA, 15 bp, Homo sapiens
caatggccagatctc

SEQ ID NO: 1324649 - DNA, 15 bp, Homo sapiens
gcaatggccagatct

SEQ ID NO: 1324650 - DNA, 15 bp, Homo sapiens
ggcaatggccagatc

SEQ ID NO: 1324651 - DNA, 15 bp, Homo sapiens
gggcaatggccagat

SEQ ID NO: 1324652 - DNA, 15 bp, Homo sapiens
tgggcaatggccaga

SEQ ID NO: 1324653 - DNA, 15 bp, Homo sapiens
gtgggcaatggccag

SEQ ID NO: 1324654 - DNA, 15 bp, Homo sapiens
tgtgggcaatggcca

SEQ ID NO: 1324655 - DNA, 15 bp, Homo sapiens
ctgtgggcaatggcc

SEQ ID NO: 1324656 - DNA, 15 bp, Homo sapiens
actgtgggcaatggc

SEQ ID NO: 1324657 - DNA, 15 bp, Homo sapiens
gactgtgggcaatgg

SEQ ID NO: 1324658 - DNA, 15 bp, Homo sapiens
tgactgtgggcaatg

SEQ ID NO: 1324659 - DNA, 15 bp, Homo sapiens
ctgactgtgggcaat

SEQ ID NO: 1324660 - DNA, 15 bp, Homo sapiens
tctgactgtgggcaa

SEQ ID NO: 1324661 - DNA, 15 bp, Homo sapiens
ttctgactgtgggca

SEQ ID NO: 1324662 - DNA, 15 bp, Homo sapiens
tttctgactgtgggc

SEQ ID NO: 1324663 - DNA, 15 bp, Homo sapiens
atttctgactgtggg

SEQ ID NO: 1324664 - DNA, 15 bp, Homo sapiens
catttctgactgtgg

SEQ ID NO: 1324665 - DNA, 15 bp, Homo sapiens
gcatttctgactgtg

SEQ ID NO: 1324666 - DNA, 15 bp, Homo sapiens
agcatttctgactgt

SEQ ID NO: 1324667 - DNA, 15 bp, Homo sapiens
cagcatttctgactg

SEQ ID NO: 1324668 - DNA, 15 bp, Homo sapiens
ccagcatttctgact

SEQ ID NO: 1324669 - DNA, 15 bp, Homo sapiens
gccagcatttctgac

SEQ ID NO: 1324670 - DNA, 15 bp, Homo sapiens
agccagcatttctga

SEQ ID NO: 1324671 - DNA, 15 bp, Homo sapiens
cagccagcatttctg

SEQ ID NO: 1324672 - DNA, 15 bp, Homo sapiens
gcagccagcatttct

SEQ ID NO: 1324673 - DNA, 15 bp, Homo sapiens
agcagccagcatttc

SEQ ID NO: 1324674 - DNA, 15 bp, Homo sapiens
cagcagccagcattt

SEQ ID NO: 1324675 - DNA, 15 bp, Homo sapiens
gcagcagccagcatt

SEQ ID NO: 1324676 - DNA, 15 bp, Homo sapiens
tgcagcagccagcat

SEQ ID NO: 1324677 - DNA, 15 bp, Homo sapiens
ctgcagcagccagca

SEQ ID NO: 1324678 - DNA, 15 bp, Homo sapiens
gctgcagcagccagc

SEQ ID NO: 1324679 - DNA, 15 bp, Homo sapiens
cgctgcagcagccag

SEQ ID NO: 1324680 - DNA, 15 bp, Homo sapiens
ccgctgcagcagcca

SEQ ID NO: 1324681 - DNA, 15 bp, Homo sapiens
cccgctgcagcagcc

SEQ ID NO: 1324682 - DNA, 15 bp, Homo sapiens
ccccgctgcagcagc

SEQ ID NO: 1324683 - DNA, 15 bp, Homo sapiens
gccccgctgcagcag

SEQ ID NO: 1324684 - DNA, 15 bp, Homo sapiens
cgccccgctgcagca

SEQ ID NO: 1324685 - DNA, 15 bp, Homo sapiens
ccgccccgctgcagc

SEQ ID NO: 1324686 - DNA, 15 bp, Homo sapiens
cccgccccgctgcag

SEQ ID NO: 1324687 - DNA, 15 bp, Homo sapiens
gcccgccccgctgca

SEQ ID NO: 1324688 - DNA, 15 bp, Homo sapiens
tgcccgccccgctgc

SEQ ID NO: 1324689 - DNA, 15 bp, Homo sapiens
ctgcccgccccgctg

SEQ ID NO: 1324690 - DNA, 15 bp, Homo sapiens
gctgcccgccccgct

SEQ ID NO: 1324691 - DNA, 15 bp, Homo sapiens
agctgcccgccccgc

SEQ ID NO: 1324692 - DNA, 15 bp, Homo sapiens
gagctgcccgccccg

SEQ ID NO: 1324693 - DNA, 15 bp, Homo sapiens
ggagctgcccgcccc

SEQ ID NO: 1324694 - DNA, 15 bp, Homo sapiens
tggagctgcccgccc

SEQ ID NO: 1324695 - DNA, 15 bp, Homo sapiens
ctggagctgcccgcc

SEQ ID NO: 1324696 - DNA, 15 bp, Homo sapiens
cctggagctgcccgc

SEQ ID NO: 1324697 - DNA, 15 bp, Homo sapiens
acctggagctgcccg

SEQ ID NO: 1324698 - DNA, 15 bp, Homo sapiens
cacctggagctgccc

SEQ ID NO: 1324699 - DNA, 15 bp, Homo sapiens
gcacctggagctgcc

SEQ ID NO: 1324700 - DNA, 15 bp, Homo sapiens
agcacctggagctgc

SEQ ID NO: 1324701 - DNA, 15 bp, Homo sapiens
cagcacctggagctg

SEQ ID NO: 1324702 - DNA, 15 bp, Homo sapiens
ccagcacctggagct

SEQ ID NO: 1324703 - DNA, 15 bp, Homo sapiens
gccagcacctggagc

SEQ ID NO: 1324704 - DNA, 15 bp, Homo sapiens
tgccagcacctggag

SEQ ID NO: 1324705 - DNA, 15 bp, Homo sapiens
gtgccagcacctgga

SEQ ID NO: 1324706 - DNA, 15 bp, Homo sapiens
tgtgccagcacctgg

SEQ ID NO: 1324707 - DNA, 15 bp, Homo sapiens
ctgtgccagcacctg

SEQ ID NO: 1324708 - DNA, 15 bp, Homo sapiens
cctgtgccagcacct

SEQ ID NO: 1324709 - DNA, 15 bp, Homo sapiens
acctgtgccagcacc

SEQ ID NO: 1324710 - DNA, 15 bp, Homo sapiens
cacctgtgccagcac

SEQ ID NO: 1324711 - DNA, 15 bp, Homo sapiens
gcacctgtgccagca

SEQ ID NO: 1324712 - DNA, 15 bp, Homo sapiens
ggcacctgtgccagc

SEQ ID NO: 1324713 - DNA, 15 bp, Homo sapiens
tggcacctgtgccag

SEQ ID NO: 1324714 - DNA, 15 bp, Homo sapiens
ttggcacctgtgcca

SEQ ID NO: 1324715 - DNA, 15 bp, Homo sapiens
gttggcacctgtgcc

SEQ ID NO: 1324716 - DNA, 15 bp, Homo sapiens
agttggcacctgtgc

SEQ ID NO: 1324717 - DNA, 15 bp, Homo sapiens
gagttggcacctgtg

SEQ ID NO: 1324718 - DNA, 15 bp, Homo sapiens
agagttggcacctgt

SEQ ID NO: 1324719 - DNA, 15 bp, Homo sapiens
gagagttggcacctg

SEQ ID NO: 1324720 - DNA, 15 bp, Homo sapiens
agagagttggcacct

SEQ ID NO: 1324721 - DNA, 15 bp, Homo sapiens
cagagagttggcacc

SEQ ID NO: 1324722 - DNA, 15 bp, Homo sapiens
acagagagttggcac

SEQ ID NO: 1324723 - DNA, 15 bp, Homo sapiens
cacagagagttggca

SEQ ID NO: 1324724 - DNA, 15 bp, Homo sapiens
tcacagagagttggc

SEQ ID NO: 1324725 - DNA, 15 bp, Homo sapiens
ctcacagagagttgg

SEQ ID NO: 1324726 - DNA, 15 bp, Homo sapiens
cctcacagagagttg

SEQ ID NO: 1324727 - DNA, 15 bp, Homo sapiens
gcctcacagagagtt

SEQ ID NO: 1324728 - DNA, 15 bp, Homo sapiens
agcctcacagagagt

SEQ ID NO: 1324729 - DNA, 15 bp, Homo sapiens
cagcctcacagagag

SEQ ID NO: 1324730 - DNA, 15 bp, Homo sapiens
gcagcctcacagaga

SEQ ID NO: 1324731 - DNA, 15 bp, Homo sapiens
tgcagcctcacagag

SEQ ID NO: 1324732 - DNA, 15 bp, Homo sapiens
gtgcagcctcacaga

SEQ ID NO: 1324733 - DNA, 15 bp, Homo sapiens
ggtgcagcctcacag

SEQ ID NO: 1324734 - DNA, 15 bp, Homo sapiens
aggtgcagcctcaca

SEQ ID NO: 1324735 - DNA, 15 bp, Homo sapiens
caggtgcagcctcac

SEQ ID NO: 1324736 - DNA, 15 bp, Homo sapiens
ccaggtgcagcctca

SEQ ID NO: 1324737 - DNA, 15 bp, Homo sapiens
tccaggtgcagcctc

SEQ ID NO: 1324738 - DNA, 15 bp, Homo sapiens
gtccaggtgcagcct

SEQ ID NO: 1324739 - DNA, 15 bp, Homo sapiens
ggtccaggtgcagcc

SEQ ID NO: 1324740 - DNA, 15 bp, Homo sapiens
tggtccaggtgcagc

SEQ ID NO: 1324741 - DNA, 15 bp, Homo sapiens
ctggtccaggtgcag

SEQ ID NO: 1324742 - DNA, 15 bp, Homo sapiens
tctggtccaggtgca

SEQ ID NO: 1324743 - DNA, 15 bp, Homo sapiens
gtctggtccaggtgc

SEQ ID NO: 1324744 - DNA, 15 bp, Homo sapiens
tgtctggtccaggtg

SEQ ID NO: 1324745 - DNA, 15 bp, Homo sapiens
gtgtctggtccaggt

SEQ ID NO: 1324746 - DNA, 15 bp, Homo sapiens
tgtgtctggtccagg

SEQ ID NO: 1324747 - DNA, 15 bp, Homo sapiens
gtgtgtctggtccag

SEQ ID NO: 1324748 - DNA, 15 bp, Homo sapiens
ggtgtgtctggtcca

SEQ ID NO: 1324749 - DNA, 15 bp, Homo sapiens
tggtgtgtctggtcc

SEQ ID NO: 1324750 - DNA, 15 bp, Homo sapiens
gtggtgtgtctggtc

SEQ ID NO: 1324751 - DNA, 15 bp, Homo sapiens
tgtggtgtgtctggt

SEQ ID NO: 1324752 - DNA, 15 bp, Homo sapiens
ttgtggtgtgtctgg

SEQ ID NO: 1324753 - DNA, 15 bp, Homo sapiens
cttgtggtgtgtctg

SEQ ID NO: 1324754 - DNA, 15 bp, Homo sapiens
gcttgtggtgtgtct

SEQ ID NO: 1324755 - DNA, 15 bp, Homo sapiens
cgcttgtggtgtgtc

SEQ ID NO: 1324756 - DNA, 15 bp, Homo sapiens
ccgcttgtggtgtgt

SEQ ID NO: 1324757 - DNA, 15 bp, Homo sapiens
accgcttgtggtgtg

SEQ ID NO: 1324758 - DNA, 15 bp, Homo sapiens
aaccgcttgtggtgt

SEQ ID NO: 1324759 - DNA, 15 bp, Homo sapiens
aaaccgcttgtggtg

SEQ ID NO: 1324760 - DNA, 15 bp, Homo sapiens
gaaaccgcttgtggt

SEQ ID NO: 1324761 - DNA, 15 bp, Homo sapiens
ggaaaccgcttgtgg

SEQ ID NO: 1324762 - DNA, 15 bp, Homo sapiens
tggaaaccgcttgtg

SEQ ID NO: 1324763 - DNA, 15 bp, Homo sapiens
gtggaaaccgcttgt

SEQ ID NO: 1324764 - DNA, 15 bp, Homo sapiens
tgtggaaaccgcttg

SEQ ID NO: 1324765 - DNA, 15 bp, Homo sapiens
ctgtggaaaccgctt

SEQ ID NO: 1324766 - DNA, 15 bp, Homo sapiens
gctgtggaaaccgct

SEQ ID NO: 1324767 - DNA, 15 bp, Homo sapiens
agctgtggaaaccgc

SEQ ID NO: 1324768 - DNA, 15 bp, Homo sapiens
cagctgtggaaaccg

SEQ ID NO: 1324769 - DNA, 15 bp, Homo sapiens
ccagctgtggaaacc

SEQ ID NO: 1324770 - DNA, 15 bp, Homo sapiens
gccagctgtggaaac

SEQ ID NO: 1324771 - DNA, 15 bp, Homo sapiens
tgccagctgtggaaa

SEQ ID NO: 1324772 - DNA, 15 bp, Homo sapiens
gtgccagctgtggaa

SEQ ID NO: 1324773 - DNA, 15 bp, Homo sapiens
agtgccagctgtgga

SEQ ID NO: 1324774 - DNA, 15 bp, Homo sapiens
cagtgccagctgtgg

SEQ ID NO: 1324775 - DNA, 15 bp, Homo sapiens
ccagtgccagctgtg

SEQ ID NO: 1324776 - DNA, 15 bp, Homo sapiens
cccagtgccagctgt

SEQ ID NO: 1324777 - DNA, 15 bp, Homo sapiens
ccccagtgccagctg

SEQ ID NO: 1324778 - DNA, 15 bp, Homo sapiens
tccccagtgccagct

SEQ ID NO: 1324779 - DNA, 15 bp, Homo sapiens
ttccccagtgccagc

SEQ ID NO: 1324780 - DNA, 15 bp, Homo sapiens
gttccccagtgccag

SEQ ID NO: 1324781 - DNA, 15 bp, Homo sapiens
tgttccccagtgcca

SEQ ID NO: 1324782 - DNA, 15 bp, Homo sapiens
ttgttccccagtgcc

SEQ ID NO: 1324783 - DNA, 15 bp, Homo sapiens
attgttccccagtgc

SEQ ID NO: 1324784 - DNA, 15 bp, Homo sapiens
tattgttccccagtg

SEQ ID NO: 1324785 - DNA, 15 bp, Homo sapiens
ttattgttccccagt

SEQ ID NO: 1324786 - DNA, 15 bp, Homo sapiens
tttattgttccccag

SEQ ID NO: 1324787 - DNA, 15 bp, Homo sapiens
ttttattgttcccca

SEQ ID NO: 1324788 - DNA, 15 bp, Homo sapiens
attttattgttcccc

SEQ ID NO: 1324789 - DNA, 15 bp, Homo sapiens
cattttattgttccc

SEQ ID NO: 1324790 - DNA, 15 bp, Homo sapiens
ccattttattgttcc

SEQ ID NO: 1324791 - DNA, 15 bp, Homo sapiens
gccattttattgttc

SEQ ID NO: 1324792 - DNA, 15 bp, Homo sapiens
agccattttattgtt

SEQ ID NO: 1324793 - DNA, 15 bp, Homo sapiens
gagccattttattgt

SEQ ID NO: 1324794 - DNA, 15 bp, Homo sapiens
ggagccattttattg

SEQ ID NO: 1324795 - DNA, 15 bp, Homo sapiens
gggagccattttatt

SEQ ID NO: 1324796 - DNA, 15 bp, Homo sapiens
tgggagccattttat

SEQ ID NO: 1324797 - DNA, 15 bp, Homo sapiens
ctgggagccatttta

SEQ ID NO: 1324798 - DNA, 15 bp, Homo sapiens
tctgggagccatttt

SEQ ID NO: 1324799 - DNA, 15 bp, Homo sapiens
ttctgggagccattt

SEQ ID NO: 1324800 - DNA, 15 bp, Homo sapiens
cttctgggagccatt

SEQ ID NO: 1324801 - DNA, 15 bp, Homo sapiens
gcttctgggagccat

SEQ ID NO: 1324802 - DNA, 15 bp, Homo sapiens
agcttctgggagcca

SEQ ID NO: 1324803 - DNA, 15 bp, Homo sapiens
aagcttctgggagcc

SEQ ID NO: 1324804 - DNA, 15 bp, Homo sapiens
caagcttctgggagc

SEQ ID NO: 1324805 - DNA, 15 bp, Homo sapiens
ccaagcttctgggag

SEQ ID NO: 1324806 - DNA, 15 bp, Homo sapiens
tccaagcttctggga

SEQ ID NO: 1324807 - DNA, 15 bp, Homo sapiens
ctccaagcttctggg

SEQ ID NO: 1324808 - DNA, 15 bp, Homo sapiens
tctccaagcttctgg

SEQ ID NO: 1324809 - DNA, 15 bp, Homo sapiens
gtctccaagcttctg

SEQ ID NO: 1324810 - DNA, 15 bp, Homo sapiens
cgtctccaagcttct

SEQ ID NO: 1324811 - DNA, 15 bp, Homo sapiens
gcgtctccaagcttc

SEQ ID NO: 1324812 - DNA, 15 bp, Homo sapiens
ggcgtctccaagctt

SEQ ID NO: 1324813 - DNA, 15 bp, Homo sapiens
tggcgtctccaagct

SEQ ID NO: 1324814 - DNA, 15 bp, Homo sapiens
ctggcgtctccaagc

SEQ ID NO: 1324815 - DNA, 15 bp, Homo sapiens
tctggcgtctccaag

SEQ ID NO: 1324816 - DNA, 15 bp, Homo sapiens
ttctggcgtctccaa

SEQ ID NO: 1324817 - DNA, 15 bp, Homo sapiens
tttctggcgtctcca

SEQ ID NO: 1324818 - DNA, 15 bp, Homo sapiens
gtttctggcgtctcc

SEQ ID NO: 1324819 - DNA, 15 bp, Homo sapiens
ggtttctggcgtctc

SEQ ID NO: 1324820 - DNA, 15 bp, Homo sapiens
tggtttctggcgtct

SEQ ID NO: 1324821 - DNA, 15 bp, Homo sapiens
gtggtttctggcgtc

SEQ ID NO: 1324822 - DNA, 15 bp, Homo sapiens
tgtggtttctggcgt

SEQ ID NO: 1324823 - DNA, 15 bp, Homo sapiens
ctgtggtttctggcg

SEQ ID NO: 1324824 - DNA, 15 bp, Homo sapiens
cctgtggtttctggc

SEQ ID NO: 1324825 - DNA, 15 bp, Homo sapiens
ccctgtggtttctgg

SEQ ID NO: 1324826 - DNA, 15 bp, Homo sapiens
gccctgtggtttctg

SEQ ID NO: 1324827 - DNA, 15 bp, Homo sapiens
ggccctgtggtttct

SEQ ID NO: 1324828 - DNA, 15 bp, Homo sapiens
gggccctgtggtttc

SEQ ID NO: 1324829 - DNA, 15 bp, Homo sapiens
ggggccctgtggttt

SEQ ID NO: 1324830 - DNA, 15 bp, Homo sapiens
tggggccctgtggtt

SEQ ID NO: 1324831 - DNA, 15 bp, Homo sapiens
ttggggccctgtggt

SEQ ID NO: 1324832 - DNA, 15 bp, Homo sapiens
tttggggccctgtgg

SEQ ID NO: 1324833 - DNA, 15 bp, Homo sapiens
ctttggggccctgtg

SEQ ID NO: 1324834 - DNA, 15 bp, Homo sapiens
tctttggggccctgt

SEQ ID NO: 1324835 - DNA, 15 bp, Homo sapiens
ctctttggggccctg

SEQ ID NO: 1324836 - DNA, 15 bp, Homo sapiens
cctctttggggccct

SEQ ID NO: 1324837 - DNA, 15 bp, Homo sapiens
ccctctttggggccc

SEQ ID NO: 1324838 - DNA, 15 bp, Homo sapiens
tccctctttggggcc

SEQ ID NO: 1324839 - DNA, 15 bp, Homo sapiens
ctccctctttggggc

SEQ ID NO: 1324840 - DNA, 15 bp, Homo sapiens
actccctctttgggg

SEQ ID NO: 1324841 - DNA, 15 bp, Homo sapiens
gactccctctttggg

SEQ ID NO: 1324842 - DNA, 15 bp, Homo sapiens
tgactccctctttgg

SEQ ID NO: 1324843 - DNA, 15 bp, Homo sapiens
gtgactccctctttg

SEQ ID NO: 1324844 - DNA, 15 bp, Homo sapiens
tgtgactccctcttt

SEQ ID NO: 1324845 - DNA, 15 bp, Homo sapiens
ctgtgactccctctt

SEQ ID NO: 1324846 - DNA, 15 bp, Homo sapiens
gctgtgactccctct

SEQ ID NO: 1324847 - DNA, 15 bp, Homo sapiens
ggctgtgactccctc

SEQ ID NO: 1324848 - DNA, 15 bp, Homo sapiens
gggctgtgactccct

SEQ ID NO: 1324849 - DNA, 15 bp, Homo sapiens
agggctgtgactccc

SEQ ID NO: 1324850 - DNA, 15 bp, Homo sapiens
cagggctgtgactcc

SEQ ID NO: 1324851 - DNA, 15 bp, Homo sapiens
ccagggctgtgactc

SEQ ID NO: 1324852 - DNA, 15 bp, Homo sapiens
gccagggctgtgact

SEQ ID NO: 1324853 - DNA, 15 bp, Homo sapiens
agccagggctgtgac

SEQ ID NO: 1324854 - DNA, 15 bp, Homo sapiens
gagccagggctgtga

SEQ ID NO: 1324855 - DNA, 15 bp, Homo sapiens
tgagccagggctgtg

SEQ ID NO: 1324856 - DNA, 15 bp, Homo sapiens
ttgagccagggctgt

SEQ ID NO: 1324857 - DNA, 15 bp, Homo sapiens
cttgagccagggctg

SEQ ID NO: 1324858 - DNA, 15 bp, Homo sapiens
ccttgagccagggct

SEQ ID NO: 1324859 - DNA, 15 bp, Homo sapiens
tccttgagccagggc

SEQ ID NO: 1324860 - DNA, 15 bp, Homo sapiens
ctccttgagccaggg

SEQ ID NO: 1324861 - DNA, 15 bp, Homo sapiens
gctccttgagccagg

SEQ ID NO: 1324862 - DNA, 15 bp, Homo sapiens
agctccttgagccag

SEQ ID NO: 1324863 - DNA, 15 bp, Homo sapiens
gagctccttgagcca

SEQ ID NO: 1324864 - DNA, 15 bp, Homo sapiens
ggagctccttgagcc

SEQ ID NO: 1324865 - DNA, 15 bp, Homo sapiens
gggagctccttgagc

SEQ ID NO: 1324866 - DNA, 15 bp, Homo sapiens
tgggagctccttgag

SEQ ID NO: 1324867 - DNA, 15 bp, Homo sapiens
ttgggagctccttga

SEQ ID NO: 1324868 - DNA, 15 bp, Homo sapiens
attgggagctccttg

SEQ ID NO: 1324869 - DNA, 15 bp, Homo sapiens
aattgggagctcctt

SEQ ID NO: 1324870 - DNA, 15 bp, Homo sapiens
gaattgggagctcct

SEQ ID NO: 1324871 - DNA, 15 bp, Homo sapiens
agaattgggagctcc

SEQ ID NO: 1324872 - DNA, 15 bp, Homo sapiens
cagaattgggagctc

SEQ ID NO: 1324873 - DNA, 15 bp, Homo sapiens
ccagaattgggagct

SEQ ID NO: 1324874 - DNA, 15 bp, Homo sapiens
cccagaattgggagc

SEQ ID NO: 1324875 - DNA, 15 bp, Homo sapiens
gcccagaattgggag

SEQ ID NO: 1324876 - DNA, 15 bp, Homo sapiens
agcccagaattggga

SEQ ID NO: 1324877 - DNA, 15 bp, Homo sapiens
gagcccagaattggg

SEQ ID NO: 1324878 - DNA, 15 bp, Homo sapiens
ggagcccagaattgg

SEQ ID NO: 1324879 - DNA, 15 bp, Homo sapiens
gggagcccagaattg

SEQ ID NO: 1324880 - DNA, 15 bp, Homo sapiens
ggggagcccagaatt

SEQ ID NO: 1324881 - DNA, 15 bp, Homo sapiens
cggggagcccagaat

SEQ ID NO: 1324882 - DNA, 15 bp, Homo sapiens
tcggggagcccagaa

SEQ ID NO: 1324883 - DNA, 15 bp, Homo sapiens
ttcggggagcccaga

SEQ ID NO: 1324884 - DNA, 15 bp, Homo sapiens
cttcggggagcccag

SEQ ID NO: 1324885 - DNA, 15 bp, Homo sapiens
ccttcggggagccca

SEQ ID NO: 1324886 - DNA, 15 bp, Homo sapiens
cccttcggggagccc

SEQ ID NO: 1324887 - DNA, 15 bp, Homo sapiens
gcccttcggggagcc

SEQ ID NO: 1324888 - DNA, 15 bp, Homo sapiens
ggcccttcggggagc

SEQ ID NO: 1324889 - DNA, 15 bp, Homo sapiens
cggcccttcggggag

SEQ ID NO: 1324890 - DNA, 15 bp, Homo sapiens
gcggcccttcgggga

SEQ ID NO: 1324891 - DNA, 15 bp, Homo sapiens
tgcggcccttcgggg

SEQ ID NO: 1324892 - DNA, 15 bp, Homo sapiens
ctgcggcccttcggg

SEQ ID NO: 1324893 - DNA, 15 bp, Homo sapiens
gctgcggcccttcgg

SEQ ID NO: 1324894 - DNA, 15 bp, Homo sapiens
agctgcggcccttcg

SEQ ID NO: 1324895 - DNA, 15 bp, Homo sapiens
gagctgcggcccttc

SEQ ID NO: 1324896 - DNA, 15 bp, Homo sapiens
agagctgcggccctt

SEQ ID NO: 1324897 - DNA, 15 bp, Homo sapiens
aagagctgcggccct

SEQ ID NO: 1324898 - DNA, 15 bp, Homo sapiens
gaagagctgcggccc

SEQ ID NO: 1324899 - DNA, 15 bp, Homo sapiens
agaagagctgcggcc

SEQ ID NO: 1324900 - DNA, 15 bp, Homo sapiens
gagaagagctgcggc

SEQ ID NO: 1324901 - DNA, 15 bp, Homo sapiens
agagaagagctgcgg

SEQ ID NO: 1324902 - DNA, 15 bp, Homo sapiens
gagagaagagctgcg

SEQ ID NO: 1324903 - DNA, 15 bp, Homo sapiens
agagagaagagctgc

SEQ ID NO: 1324904 - DNA, 15 bp, Homo sapiens
aagagagaagagctg

SEQ ID NO: 1324905 - DNA, 15 bp, Homo sapiens
gaagagagaagagct

SEQ ID NO: 1324906 - DNA, 15 bp, Homo sapiens
agaagagagaagagc

SEQ ID NO: 1324907 - DNA, 15 bp, Homo sapiens
aagaagagagaagag

SEQ ID NO: 1324908 - DNA, 15 bp, Homo sapiens
aaagaagagagaaga

SEQ ID NO: 1324909 - DNA, 15 bp, Homo sapiens
taaagaagagagaag

SEQ ID NO: 1324910 - DNA, 15 bp, Homo sapiens
gtaaagaagagagaa

SEQ ID NO: 1324911 - DNA, 15 bp, Homo sapiens
ggtaaagaagagaga

SEQ ID NO: 1324912 - DNA, 15 bp, Homo sapiens
gggtaaagaagagag

SEQ ID NO: 1324913 - DNA, 15 bp, Homo sapiens
tgggtaaagaagaga

SEQ ID NO: 1324914 - DNA, 15 bp, Homo sapiens
gtgggtaaagaagag

SEQ ID NO: 1324915 - DNA, 15 bp, Homo sapiens
tgtgggtaaagaaga

SEQ ID NO: 1324916 - DNA, 15 bp, Homo sapiens
ttgtgggtaaagaag

SEQ ID NO: 1324917 - DNA, 15 bp, Homo sapiens
gttgtgggtaaagaa

SEQ ID NO: 1324918 - DNA, 15 bp, Homo sapiens
tgttgtgggtaaaga

SEQ ID NO: 1324919 - DNA, 15 bp, Homo sapiens
atgttgtgggtaaag

SEQ ID NO: 1324920 - DNA, 15 bp, Homo sapiens
catgttgtgggtaaa

SEQ ID NO: 1324921 - DNA, 15 bp, Homo sapiens
ccatgttgtgggtaa

SEQ ID NO: 1324922 - DNA, 15 bp, Homo sapiens
gccatgttgtgggta

SEQ ID NO: 1324923 - DNA, 15 bp, Homo sapiens
cgccatgttgtgggt

SEQ ID NO: 1324924 - DNA, 15 bp, Homo sapiens
tcgccatgttgtggg

SEQ ID NO: 1324925 - DNA, 15 bp, Homo sapiens
ctcgccatgttgtgg

SEQ ID NO: 1324926 - DNA, 15 bp, Homo sapiens
gctcgccatgttgtg

SEQ ID NO: 1324927 - DNA, 15 bp, Homo sapiens
tgctcgccatgttgt

SEQ ID NO: 1324928 - DNA, 15 bp, Homo sapiens
ttgctcgccatgttg

SEQ ID NO: 1324929 - DNA, 15 bp, Homo sapiens
cttgctcgccatgtt

SEQ ID NO: 1324930 - DNA, 15 bp, Homo sapiens
ccttgctcgccatgt

SEQ ID NO: 1324931 - DNA, 15 bp, Homo sapiens
cccttgctcgccatg

SEQ ID NO: 1324932 - DNA, 15 bp, Homo sapiens
ccccttgctcgccat

SEQ ID NO: 1324933 - DNA, 15 bp, Homo sapiens
gccccttgctcgcca

SEQ ID NO: 1324934 - DNA, 15 bp, Homo sapiens
tgccccttgctcgcc

SEQ ID NO: 1324935 - DNA, 15 bp, Homo sapiens
atgccccttgctcgc

SEQ ID NO: 1324936 - DNA, 15 bp, Homo sapiens
catgccccttgctcg

SEQ ID NO: 1324937 - DNA, 15 bp, Homo sapiens
acatgccccttgctc

SEQ ID NO: 1324938 - DNA, 15 bp, Homo sapiens
aacatgccccttgct

SEQ ID NO: 1324939 - DNA, 15 bp, Homo sapiens
aaacatgccccttgc

SEQ ID NO: 1324940 - DNA, 15 bp, Homo sapiens
gaaacatgccccttg

SEQ ID NO: 1324941 - DNA, 15 bp, Homo sapiens
tgaaacatgcccctt

SEQ ID NO: 1324942 - DNA, 15 bp, Homo sapiens
ctgaaacatgcccct

SEQ ID NO: 1324943 - DNA, 15 bp, Homo sapiens
gctgaaacatgcccc

SEQ ID NO: 1324944 - DNA, 15 bp, Homo sapiens
ggctgaaacatgccc

SEQ ID NO: 1324945 - DNA, 15 bp, Homo sapiens
gggctgaaacatgcc

SEQ ID NO: 1324946 - DNA, 15 bp, Homo sapiens
agggctgaaacatgc

SEQ ID NO: 1324947 - DNA, 15 bp, Homo sapiens
cagggctgaaacatg

SEQ ID NO: 1324948 - DNA, 15 bp, Homo sapiens
acagggctgaaacat

SEQ ID NO: 1324949 - DNA, 15 bp, Homo sapiens
aacagggctgaaaca

SEQ ID NO: 1324950 - DNA, 15 bp, Homo sapiens
aaacagggctgaaac

SEQ ID NO: 1324951 - DNA, 15 bp, Homo sapiens
caaacagggctgaaa

SEQ ID NO: 1324952 - DNA, 15 bp, Homo sapiens
acaaacagggctgaa

SEQ ID NO: 1324953 - DNA, 15 bp, Homo sapiens
cacaaacagggctga

SEQ ID NO: 1324954 - DNA, 15 bp, Homo sapiens
acacaaacagggctg

SEQ ID NO: 1324955 - DNA, 15 bp, Homo sapiens
aacacaaacagggct

SEQ ID NO: 1324956 - DNA, 15 bp, Homo sapiens
taacacaaacagggc

SEQ ID NO: 1324957 - DNA, 15 bp, Homo sapiens
gtaacacaaacaggg

SEQ ID NO: 1324958 - DNA, 15 bp, Homo sapiens
tgtaacacaaacagg

SEQ ID NO: 1324959 - DNA, 15 bp, Homo sapiens
ctgtaacacaaacag

SEQ ID NO: 1324960 - DNA, 15 bp, Homo sapiens
gctgtaacacaaaca

SEQ ID NO: 1324961 - DNA, 15 bp, Homo sapiens
ggctgtaacacaaac

SEQ ID NO: 1324962 - DNA, 15 bp, Homo sapiens
gggctgtaacacaaa

SEQ ID NO: 1324963 - DNA, 15 bp, Homo sapiens
agggctgtaacacaa

SEQ ID NO: 1324964 - DNA, 15 bp, Homo sapiens
aagggctgtaacaca

SEQ ID NO: 1324965 - DNA, 15 bp, Homo sapiens
aaagggctgtaacac

SEQ ID NO: 1324966 - DNA, 15 bp, Homo sapiens
gaaagggctgtaaca

SEQ ID NO: 1324967 - DNA, 15 bp, Homo sapiens
tgaaagggctgtaac

SEQ ID NO: 1324968 - DNA, 15 bp, Homo sapiens
ctgaaagggctgtaa

SEQ ID NO: 1324969 - DNA, 15 bp, Homo sapiens
gctgaaagggctgta

SEQ ID NO: 1324970 - DNA, 15 bp, Homo sapiens
ggctgaaagggctgt

SEQ ID NO: 1324971 - DNA, 15 bp, Homo sapiens
aggctgaaagggctg

SEQ ID NO: 1324972 - DNA, 15 bp, Homo sapiens
gaggctgaaagggct

SEQ ID NO: 1324973 - DNA, 15 bp, Homo sapiens
cgaggctgaaagggc

SEQ ID NO: 1324974 - DNA, 15 bp, Homo sapiens
gcgaggctgaaaggg

SEQ ID NO: 1324975 - DNA, 15 bp, Homo sapiens
ggcgaggctgaaagg

SEQ ID NO: 1324976 - DNA, 15 bp, Homo sapiens
tggcgaggctgaaag

SEQ ID NO: 1324977 - DNA, 15 bp, Homo sapiens
atggcgaggctgaaa

SEQ ID NO: 1324978 - DNA, 15 bp, Homo sapiens
aatggcgaggctgaa

SEQ ID NO: 1324979 - DNA, 15 bp, Homo sapiens
aaatggcgaggctga

SEQ ID NO: 1324980 - DNA, 15 bp, Homo sapiens
caaatggcgaggctg

SEQ ID NO: 1324981 - DNA, 15 bp, Homo sapiens
ccaaatggcgaggct

SEQ ID NO: 1324982 - DNA, 15 bp, Homo sapiens
accaaatggcgaggc

SEQ ID NO: 1324983 - DNA, 15 bp, Homo sapiens
caccaaatggcgagg

SEQ ID NO: 1324984 - DNA, 15 bp, Homo sapiens
ccaccaaatggcgag

SEQ ID NO: 1324985 - DNA, 15 bp, Homo sapiens
cccaccaaatggcga

SEQ ID NO: 1324986 - DNA, 15 bp, Homo sapiens
acccaccaaatggcg

SEQ ID NO: 1324987 - DNA, 15 bp, Homo sapiens
gacccaccaaatggc

SEQ ID NO: 1324988 - DNA, 15 bp, Homo sapiens
ggacccaccaaatgg

SEQ ID NO: 1324989 - DNA, 15 bp, Homo sapiens
aggacccaccaaatg

SEQ ID NO: 1324990 - DNA, 15 bp, Homo sapiens
caggacccaccaaat

SEQ ID NO: 1324991 - DNA, 15 bp, Homo sapiens
tcaggacccaccaaa

SEQ ID NO: 1324992 - DNA, 15 bp, Homo sapiens
ctcaggacccaccaa

SEQ ID NO: 1324993 - DNA, 15 bp, Homo sapiens
actcaggacccacca

SEQ ID NO: 1324994 - DNA, 15 bp, Homo sapiens
aactcaggacccacc

SEQ ID NO: 1324995 - DNA, 15 bp, Homo sapiens
gaactcaggacccac

SEQ ID NO: 1324996 - DNA, 15 bp, Homo sapiens
agaactcaggaccca

SEQ ID NO: 1324997 - DNA, 15 bp, Homo sapiens
aagaactcaggaccc

SEQ ID NO: 1324998 - DNA, 15 bp, Homo sapiens
caagaactcaggacc

SEQ ID NO: 1324999 - DNA, 15 bp, Homo sapiens
acaagaactcaggac

SEQ ID NO: 1325000 - DNA, 15 bp, Homo sapiens
gacaagaactcagga

SEQ ID NO: 1325001 - DNA, 15 bp, Homo sapiens
ggacaagaactcagg

SEQ ID NO: 1325002 - DNA, 15 bp, Homo sapiens
aggacaagaactcag

SEQ ID NO: 1325003 - DNA, 15 bp, Homo sapiens
caggacaagaactca

SEQ ID NO: 1325004 - DNA, 15 bp, Homo sapiens
gcaggacaagaactc

SEQ ID NO: 1325005 - DNA, 15 bp, Homo sapiens
tgcaggacaagaact

SEQ ID NO: 1325006 - DNA, 15 bp, Homo sapiens
ctgcaggacaagaac

SEQ ID NO: 1325007 - DNA, 15 bp, Homo sapiens
gctgcaggacaagaa

SEQ ID NO: 1325008 - DNA, 15 bp, Homo sapiens
ggctgcaggacaaga

SEQ ID NO: 1325009 - DNA, 15 bp, Homo sapiens
tggctgcaggacaag

SEQ ID NO: 1325010 - DNA, 15 bp, Homo sapiens
ctggctgcaggacaa

SEQ ID NO: 1325011 - DNA, 15 bp, Homo sapiens
cctggctgcaggaca

SEQ ID NO: 1325012 - DNA, 15 bp, Homo sapiens
tcctggctgcaggac

SEQ ID NO: 1325013 - DNA, 15 bp, Homo sapiens
ttcctggctgcagga

SEQ ID NO: 1325014 - DNA, 15 bp, Homo sapiens
cttcctggctgcagg

SEQ ID NO: 1325015 - DNA, 15 bp, Homo sapiens
tcttcctggctgcag

SEQ ID NO: 1325016 - DNA, 15 bp, Homo sapiens
ttcttcctggctgca

SEQ ID NO: 1325017 - DNA, 15 bp, Homo sapiens
attcttcctggctgc

SEQ ID NO: 1325018 - DNA, 15 bp, Homo sapiens
cattcttcctggctg

SEQ ID NO: 1325019 - DNA, 15 bp, Homo sapiens
tcattcttcctggct

SEQ ID NO: 1325020 - DNA, 15 bp, Homo sapiens
ctcattcttcctggc

SEQ ID NO: 1325021 - DNA, 15 bp, Homo sapiens
cctcattcttcctgg

SEQ ID NO: 1325022 - DNA, 15 bp, Homo sapiens
acctcattcttcctg

SEQ ID NO: 1325023 - DNA, 15 bp, Homo sapiens
tacctcattcttcct

SEQ ID NO: 1325024 - DNA, 15 bp, Homo sapiens
gtacctcattcttcc

SEQ ID NO: 1325025 - DNA, 15 bp, Homo sapiens
tgtacctcattcttc

SEQ ID NO: 1325026 - DNA, 15 bp, Homo sapiens
gtgtacctcattctt

SEQ ID NO: 1325027 - DNA, 15 bp, Homo sapiens
tgtgtacctcattct

SEQ ID NO: 1325028 - DNA, 15 bp, Homo sapiens
ctgtgtacctcattc

SEQ ID NO: 1325029 - DNA, 15 bp, Homo sapiens
tctgtgtacctcatt

SEQ ID NO: 1325030 - DNA, 15 bp, Homo sapiens
gtctgtgtacctcat

SEQ ID NO: 1325031 - DNA, 15 bp, Homo sapiens
tgtctgtgtacctca

SEQ ID NO: 1325032 - DNA, 15 bp, Homo sapiens
ttgtctgtgtacctc

SEQ ID NO: 1325033 - DNA, 15 bp, Homo sapiens
cttgtctgtgtacct

SEQ ID NO: 1325034 - DNA, 15 bp, Homo sapiens
acttgtctgtgtacc

SEQ ID NO: 1325035 - DNA, 15 bp, Homo sapiens
cacttgtctgtgtac

SEQ ID NO: 1325036 - DNA, 15 bp, Homo sapiens
ccacttgtctgtgta

SEQ ID NO: 1325037 - DNA, 15 bp, Homo sapiens
tccacttgtctgtgt

SEQ ID NO: 1325038 - DNA, 15 bp, Homo sapiens
ctccacttgtctgtg

SEQ ID NO: 1325039 - DNA, 15 bp, Homo sapiens
cctccacttgtctgt

SEQ ID NO: 1325040 - DNA, 15 bp, Homo sapiens
ccctccacttgtctg

SEQ ID NO: 1325041 - DNA, 15 bp, Homo sapiens
accctccacttgtct

SEQ ID NO: 1325042 - DNA, 15 bp, Homo sapiens
caccctccacttgtc

SEQ ID NO: 1325043 - DNA, 15 bp, Homo sapiens
tcaccctccacttgt

SEQ ID NO: 1325044 - DNA, 15 bp, Homo sapiens
ctcaccctccacttg

SEQ ID NO: 1325045 - DNA, 15 bp, Homo sapiens
gctcaccctccactt

SEQ ID NO: 1325046 - DNA, 15 bp, Homo sapiens
tgctcaccctccact

SEQ ID NO: 1325047 - DNA, 15 bp, Homo sapiens
ttgctcaccctccac

SEQ ID NO: 1325048 - DNA, 15 bp, Homo sapiens
cttgctcaccctcca

SEQ ID NO: 1325049 - DNA, 15 bp, Homo sapiens
tcttgctcaccctcc

SEQ ID NO: 1325050 - DNA, 15 bp, Homo sapiens
atcttgctcaccctc

SEQ ID NO: 1325051 - DNA, 15 bp, Homo sapiens
catcttgctcaccct

SEQ ID NO: 1325052 - DNA, 15 bp, Homo sapiens
tcatcttgctcaccc

SEQ ID NO: 1325053 - DNA, 15 bp, Homo sapiens
ttcatcttgctcacc

SEQ ID NO: 1325054 - DNA, 15 bp, Homo sapiens
cttcatcttgctcac

SEQ ID NO: 1325055 - DNA, 15 bp, Homo sapiens
tcttcatcttgctca

SEQ ID NO: 1325056 - DNA, 15 bp, Homo sapiens
ctcttcatcttgctc

SEQ ID NO: 1325057 - DNA, 15 bp, Homo sapiens
cctcttcatcttgct

SEQ ID NO: 1325058 - DNA, 15 bp, Homo sapiens
tcctcttcatcttgc

SEQ ID NO: 1325059 - DNA, 15 bp, Homo sapiens
ctcctcttcatcttg

SEQ ID NO: 1325060 - DNA, 15 bp, Homo sapiens
tctcctcttcatctt

SEQ ID NO: 1325061 - DNA, 15 bp, Homo sapiens
atctcctcttcatct

SEQ ID NO: 1325062 - DNA, 15 bp, Homo sapiens
aatctcctcttcatc

SEQ ID NO: 1325063 - DNA, 15 bp, Homo sapiens
aaatctcctcttcat

SEQ ID NO: 1325064 - DNA, 15 bp, Homo sapiens
taaatctcctcttca

SEQ ID NO: 1325065 - DNA, 15 bp, Homo sapiens
ataaatctcctcttc

SEQ ID NO: 1325066 - DNA, 15 bp, Homo sapiens
aataaatctcctctt

SEQ ID NO: 1325067 - DNA, 15 bp, Homo sapiens
caataaatctcctct

SEQ ID NO: 1325068 - DNA, 15 bp, Homo sapiens
tcaataaatctcctc

SEQ ID NO: 1325069 - DNA, 15 bp, Homo sapiens
ctcaataaatctcct

SEQ ID NO: 1325070 - DNA, 15 bp, Homo sapiens
gctcaataaatctcc

SEQ ID NO: 1325071 - DNA, 15 bp, Homo sapiens
tgctcaataaatctc

SEQ ID NO: 1325072 - DNA, 15 bp, Homo sapiens
ttgctcaataaatct

SEQ ID NO: 1325073 - DNA, 15 bp, Homo sapiens
attgctcaataaatc

SEQ ID NO: 1325074 - DNA, 15 bp, Homo sapiens
tattgctcaataaat

SEQ ID NO: 1325075 - DNA, 15 bp, Homo sapiens
ctattgctcaataaa

SEQ ID NO: 1325076 - DNA, 15 bp, Homo sapiens
tctattgctcaataa

SEQ ID NO: 1325077 - DNA, 15 bp, Homo sapiens
ttctattgctcaata

SEQ ID NO: 1325078 - DNA, 15 bp, Homo sapiens
gttctattgctcaat

SEQ ID NO: 1325079 - DNA, 15 bp, Homo sapiens
tgttctattgctcaa

SEQ ID NO: 1325080 - DNA, 15 bp, Homo sapiens
ctgttctattgctca

SEQ ID NO: 1325081 - DNA, 15 bp, Homo sapiens
gctgttctattgctc

SEQ ID NO: 1325082 - DNA, 15 bp, Homo sapiens
agctgttctattgct

SEQ ID NO: 1325083 - DNA, 15 bp, Homo sapiens
aagctgttctattgc

SEQ ID NO: 1325084 - DNA, 15 bp, Homo sapiens
taagctgttctattg

SEQ ID NO: 1325085 - DNA, 15 bp, Homo sapiens
ctaagctgttctatt

SEQ ID NO: 1325086 - DNA, 15 bp, Homo sapiens
tctaagctgttctat

SEQ ID NO: 1325087 - DNA, 15 bp, Homo sapiens
ctctaagctgttcta

SEQ ID NO: 1325088 - DNA, 15 bp, Homo sapiens
tctctaagctgttct

SEQ ID NO: 1325089 - DNA, 15 bp, Homo sapiens
ttctctaagctgttc

SEQ ID NO: 1325090 - DNA, 15 bp, Homo sapiens
cttctctaagctgtt

SEQ ID NO: 1325091 - DNA, 15 bp, Homo sapiens
tcttctctaagctgt

SEQ ID NO: 1325092 - DNA, 15 bp, Homo sapiens
gtcttctctaagctg

SEQ ID NO: 1325093 - DNA, 15 bp, Homo sapiens
ggtcttctctaagct

SEQ ID NO: 1325094 - DNA, 15 bp, Homo sapiens
gggtcttctctaagc

SEQ ID NO: 1325095 - DNA, 15 bp, Homo sapiens
tgggtcttctctaag

SEQ ID NO: 1325096 - DNA, 15 bp, Homo sapiens
atgggtcttctctaa

SEQ ID NO: 1325097 - DNA, 15 bp, Homo sapiens
tatgggtcttctcta

SEQ ID NO: 1325098 - DNA, 15 bp, Homo sapiens
ctatgggtcttctct

SEQ ID NO: 1325099 - DNA, 15 bp, Homo sapiens
actatgggtcttctc

SEQ ID NO: 1325100 - DNA, 15 bp, Homo sapiens
cactatgggtcttct

SEQ ID NO: 1325101 - DNA, 15 bp, Homo sapiens
ccactatgggtcttc

SEQ ID NO: 1325102 - DNA, 15 bp, Homo sapiens
cccactatgggtctt

SEQ ID NO: 1325103 - DNA, 15 bp, Homo sapiens
gcccactatgggtct

SEQ ID NO: 1325104 - DNA, 15 bp, Homo sapiens
tgcccactatgggtc

SEQ ID NO: 1325105 - DNA, 15 bp, Homo sapiens
ctgcccactatgggt

SEQ ID NO: 1325106 - DNA, 15 bp, Homo sapiens
gctgcccactatggg

SEQ ID NO: 1325107 - DNA, 15 bp, Homo sapiens
agctgcccactatgg

SEQ ID NO: 1325108 - DNA, 15 bp, Homo sapiens
gagctgcccactatg

SEQ ID NO: 1325109 - DNA, 15 bp, Homo sapiens
ggagctgcccactat

SEQ ID NO: 1325110 - DNA, 15 bp, Homo sapiens
aggagctgcccacta

SEQ ID NO: 1325111 - DNA, 15 bp, Homo sapiens
gaggagctgcccact

SEQ ID NO: 1325112 - DNA, 15 bp, Homo sapiens
agaggagctgcccac

SEQ ID NO: 1325113 - DNA, 15 bp, Homo sapiens
gagaggagctgccca

SEQ ID NO: 1325114 - DNA, 15 bp, Homo sapiens
agagaggagctgccc

SEQ ID NO: 1325115 - DNA, 15 bp, Homo sapiens
cagagaggagctgcc

SEQ ID NO: 1325116 - DNA, 15 bp, Homo sapiens
acagagaggagctgc

SEQ ID NO: 1325117 - DNA, 15 bp, Homo sapiens
tacagagaggagctg

SEQ ID NO: 1325118 - DNA, 15 bp, Homo sapiens
ttacagagaggagct

SEQ ID NO: 1325119 - DNA, 15 bp, Homo sapiens
gttacagagaggagc

SEQ ID NO: 1325120 - DNA, 15 bp, Homo sapiens
ggttacagagaggag

SEQ ID NO: 1325121 - DNA, 15 bp, Homo sapiens
tggttacagagagga

SEQ ID NO: 1325122 - DNA, 15 bp, Homo sapiens
gtggttacagagagg

SEQ ID NO: 1325123 - DNA, 15 bp, Homo sapiens
tgtggttacagagag

SEQ ID NO: 1325124 - DNA, 15 bp, Homo sapiens
ttgtggttacagaga

SEQ ID NO: 1325125 - DNA, 15 bp, Homo sapiens
tttgtggttacagag

SEQ ID NO: 1325126 - DNA, 15 bp, Homo sapiens
ctttgtggttacaga

SEQ ID NO: 1325127 - DNA, 15 bp, Homo sapiens
actttgtggttacag

SEQ ID NO: 1325128 - DNA, 15 bp, Homo sapiens
gactttgtggttaca

SEQ ID NO: 1325129 - DNA, 15 bp, Homo sapiens
ggactttgtggttac

SEQ ID NO: 1325130 - DNA, 15 bp, Homo sapiens
gggactttgtggtta

SEQ ID NO: 1325131 - DNA, 15 bp, Homo sapiens
cgggactttgtggtt

SEQ ID NO: 1325132 - DNA, 15 bp, Homo sapiens
tcgggactttgtggt

SEQ ID NO: 1325133 - DNA, 15 bp, Homo sapiens
atcgggactttgtgg

SEQ ID NO: 1325134 - DNA, 15 bp, Homo sapiens
catcgggactttgtg

SEQ ID NO: 1325135 - DNA, 15 bp, Homo sapiens
tcatcgggactttgt

SEQ ID NO: 1325136 - DNA, 15 bp, Homo sapiens
ctcatcgggactttg

SEQ ID NO: 1325137 - DNA, 15 bp, Homo sapiens
actcatcgggacttt

SEQ ID NO: 1325138 - DNA, 15 bp, Homo sapiens
cactcatcgggactt

SEQ ID NO: 1325139 - DNA, 15 bp, Homo sapiens
acactcatcgggact

SEQ ID NO: 1325140 - DNA, 15 bp, Homo sapiens
aacactcatcgggac

SEQ ID NO: 1325141 - DNA, 15 bp, Homo sapiens
gaacactcatcggga

SEQ ID NO: 1325142 - DNA, 15 bp, Homo sapiens
tgaacactcatcggg

SEQ ID NO: 1325143 - DNA, 15 bp, Homo sapiens
ctgaacactcatcgg

SEQ ID NO: 1325144 - DNA, 15 bp, Homo sapiens
gctgaacactcatcg

SEQ ID NO: 1325145 - DNA, 15 bp, Homo sapiens
agctgaacactcatc

SEQ ID NO: 1325146 - DNA, 15 bp, Homo sapiens
gagctgaacactcat

SEQ ID NO: 1325147 - DNA, 15 bp, Homo sapiens
ggagctgaacactca

SEQ ID NO: 1325148 - DNA, 15 bp, Homo sapiens
aggagctgaacactc

SEQ ID NO: 1325149 - DNA, 15 bp, Homo sapiens
taggagctgaacact

SEQ ID NO: 1325150 - DNA, 15 bp, Homo sapiens
ctaggagctgaacac

SEQ ID NO: 1325151 - DNA, 15 bp, Homo sapiens
gctaggagctgaaca

SEQ ID NO: 1325152 - DNA, 15 bp, Homo sapiens
tgctaggagctgaac

SEQ ID NO: 1325153 - DNA, 15 bp, Homo sapiens
ctgctaggagctgaa

SEQ ID NO: 1325154 - DNA, 15 bp, Homo sapiens
tctgctaggagctga

SEQ ID NO: 1325155 - DNA, 15 bp, Homo sapiens
ctctgctaggagctg

SEQ ID NO: 1325156 - DNA, 15 bp, Homo sapiens
tctctgctaggagct

SEQ ID NO: 1325157 - DNA, 15 bp, Homo sapiens
ttctctgctaggagc

SEQ ID NO: 1325158 - DNA, 15 bp, Homo sapiens
cttctctgctaggag

SEQ ID NO: 1325159 - DNA, 15 bp, Homo sapiens
ccttctctgctagga

SEQ ID NO: 1325160 - DNA, 15 bp, Homo sapiens
accttctctgctagg

SEQ ID NO: 1325161 - DNA, 15 bp, Homo sapiens
taccttctctgctag

SEQ ID NO: 1325162 - DNA, 15 bp, Homo sapiens
ctaccttctctgcta

SEQ ID NO: 1325163 - DNA, 15 bp, Homo sapiens
gctaccttctctgct

SEQ ID NO: 1325164 - DNA, 15 bp, Homo sapiens
agctaccttctctgc

SEQ ID NO: 1325165 - DNA, 15 bp, Homo sapiens
gagctaccttctctg

SEQ ID NO: 1325166 - DNA, 15 bp, Homo sapiens
ggagctaccttctct

SEQ ID NO: 1325167 - DNA, 15 bp, Homo sapiens
aggagctaccttctc

SEQ ID NO: 1325168 - DNA, 15 bp, Homo sapiens
gaggagctaccttct

SEQ ID NO: 1325169 - DNA, 15 bp, Homo sapiens
agaggagctaccttc

SEQ ID NO: 1325170 - DNA, 15 bp, Homo sapiens
gagaggagctacctt

SEQ ID NO: 1325171 - DNA, 15 bp, Homo sapiens
agagaggagctacct

SEQ ID NO: 1325172 - DNA, 15 bp, Homo sapiens
cagagaggagctacc

SEQ ID NO: 1325173 - DNA, 15 bp, Homo sapiens
gcagagaggagctac

SEQ ID NO: 1325174 - DNA, 15 bp, Homo sapiens
tgcagagaggagcta

SEQ ID NO: 1325175 - DNA, 15 bp, Homo sapiens
ctgcagagaggagct

SEQ ID NO: 1325176 - DNA, 15 bp, Homo sapiens
cctgcagagaggagc

SEQ ID NO: 1325177 - DNA, 15 bp, Homo sapiens
gcctgcagagaggag

SEQ ID NO: 1325178 - DNA, 15 bp, Homo sapiens
tgcctgcagagagga

SEQ ID NO: 1325179 - DNA, 15 bp, Homo sapiens
ctgcctgcagagagg

SEQ ID NO: 1325180 - DNA, 15 bp, Homo sapiens
cctgcctgcagagag

SEQ ID NO: 1325181 - DNA, 15 bp, Homo sapiens
acctgcctgcagaga

SEQ ID NO: 1325182 - DNA, 15 bp, Homo sapiens
gacctgcctgcagag

SEQ ID NO: 1325183 - DNA, 15 bp, Homo sapiens
cgacctgcctgcaga

SEQ ID NO: 1325184 - DNA, 15 bp, Homo sapiens
acgacctgcctgcag

SEQ ID NO: 1325185 - DNA, 15 bp, Homo sapiens
gacgacctgcctgca

SEQ ID NO: 1325186 - DNA, 15 bp, Homo sapiens
ggacgacctgcctgc

SEQ ID NO: 1325187 - DNA, 15 bp, Homo sapiens
gggacgacctgcctg

SEQ ID NO: 1325188 - DNA, 15 bp, Homo sapiens
tgggacgacctgcct

SEQ ID NO: 1325189 - DNA, 15 bp, Homo sapiens
ttgggacgacctgcc

SEQ ID NO: 1325190 - DNA, 15 bp, Homo sapiens
gttgggacgacctgc

SEQ ID NO: 1325191 - DNA, 15 bp, Homo sapiens
tgttgggacgacctg

SEQ ID NO: 1325192 - DNA, 15 bp, Homo sapiens
ttgttgggacgacct

SEQ ID NO: 1325193 - DNA, 15 bp, Homo sapiens
cttgttgggacgacc

SEQ ID NO: 1325194 - DNA, 15 bp, Homo sapiens
acttgttgggacgac

SEQ ID NO: 1325195 - DNA, 15 bp, Homo sapiens
cacttgttgggacga

SEQ ID NO: 1325196 - DNA, 15 bp, Homo sapiens
acacttgttgggacg

SEQ ID NO: 1325197 - DNA, 15 bp, Homo sapiens
aacacttgttgggac

SEQ ID NO: 1325198 - DNA, 15 bp, Homo sapiens
gaacacttgttggga

SEQ ID NO: 1325199 - DNA, 15 bp, Homo sapiens
tgaacacttgttggg

SEQ ID NO: 1325200 - DNA, 15 bp, Homo sapiens
ctgaacacttgttgg

SEQ ID NO: 1325201 - DNA, 15 bp, Homo sapiens
actgaacacttgttg

SEQ ID NO: 1325202 - DNA, 15 bp, Homo sapiens
aactgaacacttgtt

SEQ ID NO: 1325203 - DNA, 15 bp, Homo sapiens
gaactgaacacttgt

SEQ ID NO: 1325204 - DNA, 15 bp, Homo sapiens
agaactgaacacttg

SEQ ID NO: 1325205 - DNA, 15 bp, Homo sapiens
gagaactgaacactt

SEQ ID NO: 1325206 - DNA, 15 bp, Homo sapiens
tgagaactgaacact

SEQ ID NO: 1325207 - DNA, 15 bp, Homo sapiens
ctgagaactgaacac

SEQ ID NO: 1325208 - DNA, 15 bp, Homo sapiens
gctgagaactgaaca

SEQ ID NO: 1325209 - DNA, 15 bp, Homo sapiens
tgctgagaactgaac

SEQ ID NO: 1325210 - DNA, 15 bp, Homo sapiens
ctgctgagaactgaa

SEQ ID NO: 1325211 - DNA, 15 bp, Homo sapiens
tctgctgagaactga

SEQ ID NO: 1325212 - DNA, 15 bp, Homo sapiens
ttctgctgagaactg

SEQ ID NO: 1325213 - DNA, 15 bp, Homo sapiens
tttctgctgagaact

SEQ ID NO: 1325214 - DNA, 15 bp, Homo sapiens
ctttctgctgagaac

SEQ ID NO: 1325215 - DNA, 15 bp, Homo sapiens
cctttctgctgagaa

SEQ ID NO: 1325216 - DNA, 15 bp, Homo sapiens
ccctttctgctgaga

SEQ ID NO: 1325217 - DNA, 15 bp, Homo sapiens
accctttctgctgag

SEQ ID NO: 1325218 - DNA, 15 bp, Homo sapiens
taccctttctgctga

SEQ ID NO: 1325219 - DNA, 15 bp, Homo sapiens
ctaccctttctgctg

SEQ ID NO: 1325220 - DNA, 15 bp, Homo sapiens
gctaccctttctgct

SEQ ID NO: 1325221 - DNA, 15 bp, Homo sapiens
agctaccctttctgc

SEQ ID NO: 1325222 - DNA, 15 bp, Homo sapiens
gagctaccctttctg

SEQ ID NO: 1325223 - DNA, 15 bp, Homo sapiens
ggagctaccctttct

SEQ ID NO: 1325224 - DNA, 15 bp, Homo sapiens
aggagctaccctttc

SEQ ID NO: 1325225 - DNA, 15 bp, Homo sapiens
gaggagctacccttt

SEQ ID NO: 1325226 - DNA, 15 bp, Homo sapiens
agaggagctaccctt

SEQ ID NO: 1325227 - DNA, 15 bp, Homo sapiens
gagaggagctaccct

SEQ ID NO: 1325228 - DNA, 15 bp, Homo sapiens
agagaggagctaccc

SEQ ID NO: 1325229 - DNA, 15 bp, Homo sapiens
gctgcagagaggagc

SEQ ID NO: 1325230 - DNA, 15 bp, Homo sapiens
agctgcagagaggag

SEQ ID NO: 1325231 - DNA, 15 bp, Homo sapiens
cagctgcagagagga

SEQ ID NO: 1325232 - DNA, 15 bp, Homo sapiens
gcagctgcagagagg

SEQ ID NO: 1325233 - DNA, 15 bp, Homo sapiens
agcagctgcagagag

SEQ ID NO: 1325234 - DNA, 15 bp, Homo sapiens
gagcagctgcagaga

SEQ ID NO: 1325235 - DNA, 15 bp, Homo sapiens
cgagcagctgcagag

SEQ ID NO: 1325236 - DNA, 15 bp, Homo sapiens
acgagcagctgcaga

SEQ ID NO: 1325237 - DNA, 15 bp, Homo sapiens
gacgagcagctgcag

SEQ ID NO: 1325238 - DNA, 15 bp, Homo sapiens
ggacgagcagctgca

SEQ ID NO: 1325239 - DNA, 15 bp, Homo sapiens
aggacgagcagctgc

SEQ ID NO: 1325240 - DNA, 15 bp, Homo sapiens
caggacgagcagctg

SEQ ID NO: 1325241 - DNA, 15 bp, Homo sapiens
tcaggacgagcagct

SEQ ID NO: 1325242 - DNA, 15 bp, Homo sapiens
gtcaggacgagcagc

SEQ ID NO: 1325243 - DNA, 15 bp, Homo sapiens
tgtcaggacgagcag

SEQ ID NO: 1325244 - DNA, 15 bp, Homo sapiens
ttgtcaggacgagca

SEQ ID NO: 1325245 - DNA, 15 bp, Homo sapiens
cttgtcaggacgagc

SEQ ID NO: 1325246 - DNA, 15 bp, Homo sapiens
acttgtcaggacgag

SEQ ID NO: 1325247 - DNA, 15 bp, Homo sapiens
cacttgtcaggacga

SEQ ID NO: 1325248 - DNA, 15 bp, Homo sapiens
acacttgtcaggacg

SEQ ID NO: 1325249 - DNA, 15 bp, Homo sapiens
aacacttgtcaggac

SEQ ID NO: 1325250 - DNA, 15 bp, Homo sapiens
gaacacttgtcagga

SEQ ID NO: 1325251 - DNA, 15 bp, Homo sapiens
tgaacacttgtcagg

SEQ ID NO: 1325252 - DNA, 15 bp, Homo sapiens
ctgaacacttgtcag

SEQ ID NO: 1325253 - DNA, 15 bp, Homo sapiens
gctgaacacttgtca

SEQ ID NO: 1325254 - DNA, 15 bp, Homo sapiens
agctgaacacttgtc

SEQ ID NO: 1325255 - DNA, 15 bp, Homo sapiens
tagctgaacacttgt

SEQ ID NO: 1325256 - DNA, 15 bp, Homo sapiens
atagctgaacacttg

SEQ ID NO: 1325257 - DNA, 15 bp, Homo sapiens
gatagctgaacactt

SEQ ID NO: 1325258 - DNA, 15 bp, Homo sapiens
tgatagctgaacact

SEQ ID NO: 1325259 - DNA, 15 bp, Homo sapiens
ctgatagctgaacac

SEQ ID NO: 1325260 - DNA, 15 bp, Homo sapiens
actgatagctgaaca

SEQ ID NO: 1325261 - DNA, 15 bp, Homo sapiens
tactgatagctgaac

SEQ ID NO: 1325262 - DNA, 15 bp, Homo sapiens
ctactgatagctgaa

SEQ ID NO: 1325263 - DNA, 15 bp, Homo sapiens
tctactgatagctga

SEQ ID NO: 1325264 - DNA, 15 bp, Homo sapiens
ctctactgatagctg

SEQ ID NO: 1325265 - DNA, 15 bp, Homo sapiens
tctctactgatagct

SEQ ID NO: 1325266 - DNA, 15 bp, Homo sapiens
ctctctactgatagc

SEQ ID NO: 1325267 - DNA, 15 bp, Homo sapiens
cctctctactgatag

SEQ ID NO: 1325268 - DNA, 15 bp, Homo sapiens
ccctctctactgata

SEQ ID NO: 1325269 - DNA, 15 bp, Homo sapiens
accctctctactgat

SEQ ID NO: 1325270 - DNA, 15 bp, Homo sapiens
taccctctctactga

SEQ ID NO: 1325271 - DNA, 15 bp, Homo sapiens
ctaccctctctactg

SEQ ID NO: 1325272 - DNA, 15 bp, Homo sapiens
actaccctctctact

SEQ ID NO: 1325273 - DNA, 15 bp, Homo sapiens
aactaccctctctac

SEQ ID NO: 1325274 - DNA, 15 bp, Homo sapiens
gaactaccctctcta

SEQ ID NO: 1325275 - DNA, 15 bp, Homo sapiens
ggaactaccctctct

SEQ ID NO: 1325276 - DNA, 15 bp, Homo sapiens
aggaactaccctctc

SEQ ID NO: 1325277 - DNA, 15 bp, Homo sapiens
gaggaactaccctct

SEQ ID NO: 1325278 - DNA, 15 bp, Homo sapiens
agaggaactaccctc

SEQ ID NO: 1325279 - DNA, 15 bp, Homo sapiens
gagaggaactaccct

SEQ ID NO: 1325280 - DNA, 15 bp, Homo sapiens
agagaggaactaccc

SEQ ID NO: 1325281 - DNA, 15 bp, Homo sapiens
cagagaggaactacc

SEQ ID NO: 1325282 - DNA, 15 bp, Homo sapiens
gcagagaggaactac

SEQ ID NO: 1325283 - DNA, 15 bp, Homo sapiens
tgcagagaggaacta

SEQ ID NO: 1325284 - DNA, 15 bp, Homo sapiens
ctgcagagaggaact

SEQ ID NO: 1325285 - DNA, 15 bp, Homo sapiens
gctgcagagaggaac

SEQ ID NO: 1325286 - DNA, 15 bp, Homo sapiens
agctgcagagaggaa

SEQ ID NO: 1325287 - DNA, 15 bp, Homo sapiens
tagctgcagagagga

SEQ ID NO: 1325288 - DNA, 15 bp, Homo sapiens
ctagctgcagagagg

SEQ ID NO: 1325289 - DNA, 15 bp, Homo sapiens
actagctgcagagag

SEQ ID NO: 1325290 - DNA, 15 bp, Homo sapiens
aactagctgcagaga

SEQ ID NO: 1325291 - DNA, 15 bp, Homo sapiens
caactagctgcagag

SEQ ID NO: 1325292 - DNA, 15 bp, Homo sapiens
acaactagctgcaga

SEQ ID NO: 1325293 - DNA, 15 bp, Homo sapiens
gacaactagctgcag

SEQ ID NO: 1325294 - DNA, 15 bp, Homo sapiens
agacaactagctgca

SEQ ID NO: 1325295 - DNA, 15 bp, Homo sapiens
gagacaactagctgc

SEQ ID NO: 1325296 - DNA, 15 bp, Homo sapiens
agagacaactagctg

SEQ ID NO: 1325297 - DNA, 15 bp, Homo sapiens
gagagacaactagct

SEQ ID NO: 1325298 - DNA, 15 bp, Homo sapiens
ggagagacaactagc

SEQ ID NO: 1325299 - DNA, 15 bp, Homo sapiens
tggagagacaactag

SEQ ID NO: 1325300 - DNA, 15 bp, Homo sapiens
atggagagacaacta

SEQ ID NO: 1325301 - DNA, 15 bp, Homo sapiens
gatggagagacaact

SEQ ID NO: 1325302 - DNA, 15 bp, Homo sapiens
ggatggagagacaac

SEQ ID NO: 1325303 - DNA, 15 bp, Homo sapiens
aggatggagagacaa

SEQ ID NO: 1325304 - DNA, 15 bp, Homo sapiens
gaggatggagagaca

SEQ ID NO: 1325305 - DNA, 15 bp, Homo sapiens
agaggatggagagac

SEQ ID NO: 1325306 - DNA, 15 bp, Homo sapiens
cagaggatggagaga

SEQ ID NO: 1325307 - DNA, 15 bp, Homo sapiens
gcagaggatggagag

SEQ ID NO: 1325308 - DNA, 15 bp, Homo sapiens
agcagaggatggaga

SEQ ID NO: 1325309 - DNA, 15 bp, Homo sapiens
gagcagaggatggag

SEQ ID NO: 1325310 - DNA, 15 bp, Homo sapiens
agagcagaggatgga

SEQ ID NO: 1325311 - DNA, 15 bp, Homo sapiens
cagagcagaggatgg

SEQ ID NO: 1325312 - DNA, 15 bp, Homo sapiens
gcagagcagaggatg

SEQ ID NO: 1325313 - DNA, 15 bp, Homo sapiens
agcagagcagaggat

SEQ ID NO: 1325314 - DNA, 15 bp, Homo sapiens
gagcagagcagagga

SEQ ID NO: 1325315 - DNA, 15 bp, Homo sapiens
agagcagagcagagg

SEQ ID NO: 1325316 - DNA, 15 bp, Homo sapiens
cagagcagagcagag

SEQ ID NO: 1325317 - DNA, 15 bp, Homo sapiens
ccagagcagagcaga

SEQ ID NO: 1325318 - DNA, 15 bp, Homo sapiens
gccagagcagagcag

SEQ ID NO: 1325319 - DNA, 15 bp, Homo sapiens
agccagagcagagca

SEQ ID NO: 1325320 - DNA, 15 bp, Homo sapiens
cagccagagcagagc

SEQ ID NO: 1325321 - DNA, 15 bp, Homo sapiens
tcagccagagcagag

SEQ ID NO: 1325322 - DNA, 15 bp, Homo sapiens
ctcagccagagcaga

SEQ ID NO: 1325323 - DNA, 15 bp, Homo sapiens
tctcagccagagcag

SEQ ID NO: 1325324 - DNA, 15 bp, Homo sapiens
gtctcagccagagca

SEQ ID NO: 1325325 - DNA, 15 bp, Homo sapiens
agtctcagccagagc

SEQ ID NO: 1325326 - DNA, 15 bp, Homo sapiens
gagtctcagccagag

SEQ ID NO: 1325327 - DNA, 15 bp, Homo sapiens
cgagtctcagccaga

SEQ ID NO: 1325328 - DNA, 15 bp, Homo sapiens
ccgagtctcagccag

SEQ ID NO: 1325329 - DNA, 15 bp, Homo sapiens
cccgagtctcagcca

SEQ ID NO: 1325330 - DNA, 15 bp, Homo sapiens
gcccgagtctcagcc

SEQ ID NO: 1325331 - DNA, 15 bp, Homo sapiens
agcccgagtctcagc

SEQ ID NO: 1325332 - DNA, 15 bp, Homo sapiens
aagcccgagtctcag

SEQ ID NO: 1325333 - DNA, 15 bp, Homo sapiens
gaagcccgagtctca

SEQ ID NO: 1325334 - DNA, 15 bp, Homo sapiens
agaagcccgagtctc

SEQ ID NO: 1325335 - DNA, 15 bp, Homo sapiens
cagaagcccgagtct

SEQ ID NO: 1325336 - DNA, 15 bp, Homo sapiens
acagaagcccgagtc

SEQ ID NO: 1325337 - DNA, 15 bp, Homo sapiens
cacagaagcccgagt

SEQ ID NO: 1325338 - DNA, 15 bp, Homo sapiens
ccacagaagcccgag

SEQ ID NO: 1325339 - DNA, 15 bp, Homo sapiens
cccacagaagcccga

SEQ ID NO: 1325340 - DNA, 15 bp, Homo sapiens
gcccacagaagcccg

SEQ ID NO: 1325341 - DNA, 15 bp, Homo sapiens
ggcccacagaagccc

SEQ ID NO: 1325342 - DNA, 15 bp, Homo sapiens
aggcccacagaagcc

SEQ ID NO: 1325343 - DNA, 15 bp, Homo sapiens
gaggcccacagaagc

SEQ ID NO: 1325344 - DNA, 15 bp, Homo sapiens
tgaggcccacagaag

SEQ ID NO: 1325345 - DNA, 15 bp, Homo sapiens
ctgaggcccacagaa

SEQ ID NO: 1325346 - DNA, 15 bp, Homo sapiens
gctgaggcccacaga

SEQ ID NO: 1325347 - DNA, 15 bp, Homo sapiens
cgctgaggcccacag

SEQ ID NO: 1325348 - DNA, 15 bp, Homo sapiens
ccgctgaggcccaca

SEQ ID NO: 1325349 - DNA, 15 bp, Homo sapiens
cccgctgaggcccac

SEQ ID NO: 1325350 - DNA, 15 bp, Homo sapiens
tcccgctgaggccca

SEQ ID NO: 1325351 - DNA, 15 bp, Homo sapiens
ttcccgctgaggccc

SEQ ID NO: 1325352 - DNA, 15 bp, Homo sapiens
cttcccgctgaggcc

SEQ ID NO: 1325353 - DNA, 15 bp, Homo sapiens
tcttcccgctgaggc

SEQ ID NO: 1325354 - DNA, 15 bp, Homo sapiens
ttcttcccgctgagg

SEQ ID NO: 1325355 - DNA, 15 bp, Homo sapiens
tttcttcccgctgag

SEQ ID NO: 1325356 - DNA, 15 bp, Homo sapiens
ctttcttcccgctga

SEQ ID NO: 1325357 - DNA, 15 bp, Homo sapiens
actttcttcccgctg

SEQ ID NO: 1325358 - DNA, 15 bp, Homo sapiens
cactttcttcccgct

SEQ ID NO: 1325359 - DNA, 15 bp, Homo sapiens
acactttcttcccgc

SEQ ID NO: 1325360 - DNA, 15 bp, Homo sapiens
cacactttcttcccg

SEQ ID NO: 1325361 - DNA, 15 bp, Homo sapiens
gcacactttcttccc

SEQ ID NO: 1325362 - DNA, 15 bp, Homo sapiens
tgcacactttcttcc

SEQ ID NO: 1325363 - DNA, 15 bp, Homo sapiens
gtgcacactttcttc

SEQ ID NO: 1325364 - DNA, 15 bp, Homo sapiens
ggtgcacactttctt

SEQ ID NO: 1325365 - DNA, 15 bp, Homo sapiens
cggtgcacactttct

SEQ ID NO: 1325366 - DNA, 15 bp, Homo sapiens
tcggtgcacactttc

SEQ ID NO: 1325367 - DNA, 15 bp, Homo sapiens
atcggtgcacacttt

SEQ ID NO: 1325368 - DNA, 15 bp, Homo sapiens
aatcggtgcacactt

SEQ ID NO: 1325369 - DNA, 15 bp, Homo sapiens
caatcggtgcacact

SEQ ID NO: 1325370 - DNA, 15 bp, Homo sapiens
ccaatcggtgcacac

SEQ ID NO: 1325371 - DNA, 15 bp, Homo sapiens
accaatcggtgcaca

SEQ ID NO: 1325372 - DNA, 15 bp, Homo sapiens
taccaatcggtgcac

SEQ ID NO: 1325373 - DNA, 15 bp, Homo sapiens
gtaccaatcggtgca

SEQ ID NO: 1325374 - DNA, 15 bp, Homo sapiens
tgtaccaatcggtgc

SEQ ID NO: 1325375 - DNA, 15 bp, Homo sapiens
atgtaccaatcggtg

SEQ ID NO: 1325376 - DNA, 15 bp, Homo sapiens
catgtaccaatcggt

SEQ ID NO: 1325377 - DNA, 15 bp, Homo sapiens
ccatgtaccaatcgg

SEQ ID NO: 1325378 - DNA, 15 bp, Homo sapiens
cccatgtaccaatcg

SEQ ID NO: 1325379 - DNA, 15 bp, Homo sapiens
gcccatgtaccaatc

SEQ ID NO: 1325380 - DNA, 15 bp, Homo sapiens
cgcccatgtaccaat

SEQ ID NO: 1325381 - DNA, 15 bp, Homo sapiens
ccgcccatgtaccaa

SEQ ID NO: 1325382 - DNA, 15 bp, Homo sapiens
gccgcccatgtacca

SEQ ID NO: 1325383 - DNA, 15 bp, Homo sapiens
ggccgcccatgtacc

SEQ ID NO: 1325384 - DNA, 15 bp, Homo sapiens
tggccgcccatgtac

SEQ ID NO: 1325385 - DNA, 15 bp, Homo sapiens
gtggccgcccatgta

SEQ ID NO: 1325386 - DNA, 15 bp, Homo sapiens
agtggccgcccatgt

SEQ ID NO: 1325387 - DNA, 15 bp, Homo sapiens
tagtggccgcccatg

SEQ ID NO: 1325388 - DNA, 15 bp, Homo sapiens
ctagtggccgcccat

SEQ ID NO: 1325389 - DNA, 15 bp, Homo sapiens
actagtggccgccca

SEQ ID NO: 1325390 - DNA, 15 bp, Homo sapiens
cactagtggccgccc

SEQ ID NO: 1325391 - DNA, 15 bp, Homo sapiens
ccactagtggccgcc

SEQ ID NO: 1325392 - DNA, 15 bp, Homo sapiens
cccactagtggccgc

SEQ ID NO: 1325393 - DNA, 15 bp, Homo sapiens
gcccactagtggccg

SEQ ID NO: 1325394 - DNA, 15 bp, Homo sapiens
ggcccactagtggcc

SEQ ID NO: 1325395 - DNA, 15 bp, Homo sapiens
gggcccactagtggc

SEQ ID NO: 1325396 - DNA, 15 bp, Homo sapiens
tgggcccactagtgg

SEQ ID NO: 1325397 - DNA, 15 bp, Homo sapiens
ctgggcccactagtg

SEQ ID NO: 1325398 - DNA, 15 bp, Homo sapiens
tctgggcccactagt

SEQ ID NO: 1325399 - DNA, 15 bp, Homo sapiens
ttctgggcccactag

SEQ ID NO: 1325400 - DNA, 15 bp, Homo sapiens
tttctgggcccacta

SEQ ID NO: 1325401 - DNA, 15 bp, Homo sapiens
ttttctgggcccact

SEQ ID NO: 1325402 - DNA, 15 bp, Homo sapiens
cttttctgggcccac

SEQ ID NO: 1325403 - DNA, 15 bp, Homo sapiens
ccttttctgggccca

SEQ ID NO: 1325404 - DNA, 15 bp, Homo sapiens
accttttctgggccc

SEQ ID NO: 1325405 - DNA, 15 bp, Homo sapiens
taccttttctgggcc

SEQ ID NO: 1325406 - DNA, 15 bp, Homo sapiens
gtaccttttctgggc

SEQ ID NO: 1325407 - DNA, 15 bp, Homo sapiens
ggtaccttttctggg

SEQ ID NO: 1325408 - DNA, 15 bp, Homo sapiens
tggtaccttttctgg

SEQ ID NO: 1325409 - DNA, 15 bp, Homo sapiens
gtggtaccttttctg

SEQ ID NO: 1325410 - DNA, 15 bp, Homo sapiens
tgtggtaccttttct

SEQ ID NO: 1325411 - DNA, 15 bp, Homo sapiens
ttgtggtaccttttc

SEQ ID NO: 1325412 - DNA, 15 bp, Homo sapiens
cttgtggtacctttt

SEQ ID NO: 1325413 - DNA, 15 bp, Homo sapiens
acttgtggtaccttt

SEQ ID NO: 1325414 - DNA, 15 bp, Homo sapiens
gacttgtggtacctt

SEQ ID NO: 1325415 - DNA, 15 bp, Homo sapiens
ggacttgtggtacct

SEQ ID NO: 1325416 - DNA, 15 bp, Homo sapiens
aggacttgtggtacc

SEQ ID NO: 1325417 - DNA, 15 bp, Homo sapiens
gaggacttgtggtac

SEQ ID NO: 1325418 - DNA, 15 bp, Homo sapiens
tgaggacttgtggta

SEQ ID NO: 1325419 - DNA, 15 bp, Homo sapiens
gtgaggacttgtggt

SEQ ID NO: 1325420 - DNA, 15 bp, Homo sapiens
agtgaggacttgtgg

SEQ ID NO: 1325421 - DNA, 15 bp, Homo sapiens
gagtgaggacttgtg

SEQ ID NO: 1325422 - DNA, 15 bp, Homo sapiens
ggagtgaggacttgt

SEQ ID NO: 1325423 - DNA, 15 bp, Homo sapiens
aggagtgaggacttg

SEQ ID NO: 1325424 - DNA, 15 bp, Homo sapiens
caggagtgaggactt

SEQ ID NO: 1325425 - DNA, 15 bp, Homo sapiens
acaggagtgaggact

SEQ ID NO: 1325426 - DNA, 15 bp, Homo sapiens
gacaggagtgaggac

SEQ ID NO: 1325427 - DNA, 15 bp, Homo sapiens
ggacaggagtgagga

SEQ ID NO: 1325428 - DNA, 15 bp, Homo sapiens
cggacaggagtgagg

SEQ ID NO: 1325429 - DNA, 15 bp, Homo sapiens
acggacaggagtgag

SEQ ID NO: 1325430 - DNA, 15 bp, Homo sapiens
cacggacaggagtga

SEQ ID NO: 1325431 - DNA, 15 bp, Homo sapiens
ccacggacaggagtg

SEQ ID NO: 1325432 - DNA, 15 bp, Homo sapiens
cccacggacaggagt

SEQ ID NO: 1325433 - DNA, 15 bp, Homo sapiens
tcccacggacaggag

SEQ ID NO: 1325434 - DNA, 15 bp, Homo sapiens
gtcccacggacagga

SEQ ID NO: 1325435 - DNA, 15 bp, Homo sapiens
agtcccacggacagg

SEQ ID NO: 1325436 - DNA, 15 bp, Homo sapiens
cagtcccacggacag

SEQ ID NO: 1325437 - DNA, 15 bp, Homo sapiens
ccagtcccacggaca

SEQ ID NO: 1325438 - DNA, 15 bp, Homo sapiens
gccagtcccacggac

SEQ ID NO: 1325439 - DNA, 15 bp, Homo sapiens
tgccagtcccacgga

SEQ ID NO: 1325440 - DNA, 15 bp, Homo sapiens
ctgccagtcccacgg

SEQ ID NO: 1325441 - DNA, 15 bp, Homo sapiens
gctgccagtcccacg

SEQ ID NO: 1325442 - DNA, 15 bp, Homo sapiens
cgctgccagtcccac

SEQ ID NO: 1325443 - DNA, 15 bp, Homo sapiens
gcgctgccagtccca

SEQ ID NO: 1325444 - DNA, 15 bp, Homo sapiens
ggcgctgccagtccc

SEQ ID NO: 1325445 - DNA, 15 bp, Homo sapiens
gggcgctgccagtcc

SEQ ID NO: 1325446 - DNA, 15 bp, Homo sapiens
tgggcgctgccagtc

SEQ ID NO: 1325447 - DNA, 15 bp, Homo sapiens
gtgggcgctgccagt

SEQ ID NO: 1325448 - DNA, 15 bp, Homo sapiens
ggtgggcgctgccag

SEQ ID NO: 1325449 - DNA, 15 bp, Homo sapiens
gggtgggcgctgcca

SEQ ID NO: 1325450 - DNA, 15 bp, Homo sapiens
ggggtgggcgctgcc

SEQ ID NO: 1325451 - DNA, 15 bp, Homo sapiens
gggggtgggcgctgc

SEQ ID NO: 1325452 - DNA, 15 bp, Homo sapiens
tgggggtgggcgctg

SEQ ID NO: 1325453 - DNA, 15 bp, Homo sapiens
ctgggggtgggcgct

SEQ ID NO: 1325454 - DNA, 15 bp, Homo sapiens
gctgggggtgggcgc

SEQ ID NO: 1325455 - DNA, 15 bp, Homo sapiens
ggctgggggtgggcg

SEQ ID NO: 1325456 - DNA, 15 bp, Homo sapiens
aggctgggggtgggc

SEQ ID NO: 1325457 - DNA, 15 bp, Homo sapiens
aaggctgggggtggg

SEQ ID NO: 1325458 - DNA, 15 bp, Homo sapiens
gaaggctgggggtgg

SEQ ID NO: 1325459 - DNA, 15 bp, Homo sapiens
tgaaggctgggggtg

SEQ ID NO: 1325460 - DNA, 15 bp, Homo sapiens
ctgaaggctgggggt

SEQ ID NO: 1325461 - DNA, 15 bp, Homo sapiens
cctgaaggctggggg

SEQ ID NO: 1325462 - DNA, 15 bp, Homo sapiens
gcctgaaggctgggg

SEQ ID NO: 1325463 - DNA, 15 bp, Homo sapiens
cgcctgaaggctggg

SEQ ID NO: 1325464 - DNA, 15 bp, Homo sapiens
gcgcctgaaggctgg

SEQ ID NO: 1325465 - DNA, 15 bp, Homo sapiens
agcgcctgaaggctg

SEQ ID NO: 1325466 - DNA, 15 bp, Homo sapiens
gagcgcctgaaggct

SEQ ID NO: 1325467 - DNA, 15 bp, Homo sapiens
ggagcgcctgaaggc

SEQ ID NO: 1325468 - DNA, 15 bp, Homo sapiens
gggagcgcctgaagg

SEQ ID NO: 1325469 - DNA, 15 bp, Homo sapiens
agggagcgcctgaag

SEQ ID NO: 1325470 - DNA, 15 bp, Homo sapiens
cagggagcgcctgaa

SEQ ID NO: 1325471 - DNA, 15 bp, Homo sapiens
ccagggagcgcctga

SEQ ID NO: 1325472 - DNA, 15 bp, Homo sapiens
gccagggagcgcctg

SEQ ID NO: 1325473 - DNA, 15 bp, Homo sapiens
ggccagggagcgcct

SEQ ID NO: 1325474 - DNA, 15 bp, Homo sapiens
aggccagggagcgcc

SEQ ID NO: 1325475 - DNA, 15 bp, Homo sapiens
caggccagggagcgc

SEQ ID NO: 1325476 - DNA, 15 bp, Homo sapiens
tcaggccagggagcg

SEQ ID NO: 1325477 - DNA, 15 bp, Homo sapiens
ttcaggccagggagc

SEQ ID NO: 1325478 - DNA, 15 bp, Homo sapiens
cttcaggccagggag

SEQ ID NO: 1325479 - DNA, 15 bp, Homo sapiens
ccttcaggccaggga

SEQ ID NO: 1325480 - DNA, 15 bp, Homo sapiens
accttcaggccaggg

SEQ ID NO: 1325481 - DNA, 15 bp, Homo sapiens
caccttcaggccagg

SEQ ID NO: 1325482 - DNA, 15 bp, Homo sapiens
ccaccttcaggccag

SEQ ID NO: 1325483 - DNA, 15 bp, Homo sapiens
cccaccttcaggcca

SEQ ID NO: 1325484 - DNA, 15 bp, Homo sapiens
ccccaccttcaggcc

SEQ ID NO: 1325485 - DNA, 15 bp, Homo sapiens
gccccaccttcaggc

SEQ ID NO: 1325486 - DNA, 15 bp, Homo sapiens
ggccccaccttcagg

SEQ ID NO: 1325487 - DNA, 15 bp, Homo sapiens
aggccccaccttcag

SEQ ID NO: 1325488 - DNA, 15 bp, Homo sapiens
gaggccccaccttca

SEQ ID NO: 1325489 - DNA, 15 bp, Homo sapiens
tgaggccccaccttc

SEQ ID NO: 1325490 - DNA, 15 bp, Homo sapiens
ttgaggccccacctt

SEQ ID NO: 1325491 - DNA, 15 bp, Homo sapiens
gttgaggccccacct

SEQ ID NO: 1325492 - DNA, 15 bp, Homo sapiens
tgttgaggccccacc

SEQ ID NO: 1325493 - DNA, 15 bp, Homo sapiens
ctgttgaggccccac

SEQ ID NO: 1325494 - DNA, 15 bp, Homo sapiens
cctgttgaggcccca

SEQ ID NO: 1325495 - DNA, 15 bp, Homo sapiens
ccctgttgaggcccc

SEQ ID NO: 1325496 - DNA, 15 bp, Homo sapiens
tccctgttgaggccc

SEQ ID NO: 1325497 - DNA, 15 bp, Homo sapiens
gtccctgttgaggcc

SEQ ID NO: 1325498 - DNA, 15 bp, Homo sapiens
agtccctgttgaggc

SEQ ID NO: 1325499 - DNA, 15 bp, Homo sapiens
gagtccctgttgagg

SEQ ID NO: 1325500 - DNA, 15 bp, Homo sapiens
tgagtccctgttgag

SEQ ID NO: 1325501 - DNA, 15 bp, Homo sapiens
atgagtccctgttga

SEQ ID NO: 1325502 - DNA, 15 bp, Homo sapiens
gatgagtccctgttg

SEQ ID NO: 1325503 - DNA, 15 bp, Homo sapiens
ggatgagtccctgtt

SEQ ID NO: 1325504 - DNA, 15 bp, Homo sapiens
aggatgagtccctgt

SEQ ID NO: 1325505 - DNA, 15 bp, Homo sapiens
gaggatgagtccctg

SEQ ID NO: 1325506 - DNA, 15 bp, Homo sapiens
agaggatgagtccct

SEQ ID NO: 1325507 - DNA, 15 bp, Homo sapiens
tagaggatgagtccc

SEQ ID NO: 1325508 - DNA, 15 bp, Homo sapiens
gtagaggatgagtcc

SEQ ID NO: 1325509 - DNA, 15 bp, Homo sapiens
agtagaggatgagtc

SEQ ID NO: 1325510 - DNA, 15 bp, Homo sapiens
cagtagaggatgagt

SEQ ID NO: 1325511 - DNA, 15 bp, Homo sapiens
gcagtagaggatgag

SEQ ID NO: 1325512 - DNA, 15 bp, Homo sapiens
agcagtagaggatga

SEQ ID NO: 1325513 - DNA, 15 bp, Homo sapiens
gagcagtagaggatg

SEQ ID NO: 1325514 - DNA, 15 bp, Homo sapiens
tgagcagtagaggat

SEQ ID NO: 1325515 - DNA, 15 bp, Homo sapiens
ctgagcagtagagga

SEQ ID NO: 1325516 - DNA, 15 bp, Homo sapiens
cctgagcagtagagg

SEQ ID NO: 1325517 - DNA, 15 bp, Homo sapiens
tcctgagcagtagag

SEQ ID NO: 1325518 - DNA, 15 bp, Homo sapiens
ctcctgagcagtaga

SEQ ID NO: 1325519 - DNA, 15 bp, Homo sapiens
gctcctgagcagtag

SEQ ID NO: 1325520 - DNA, 15 bp, Homo sapiens
ggctcctgagcagta

SEQ ID NO: 1325521 - DNA, 15 bp, Homo sapiens
gggctcctgagcagt

SEQ ID NO: 1325522 - DNA, 15 bp, Homo sapiens
tgggctcctgagcag

SEQ ID NO: 1325523 - DNA, 15 bp, Homo sapiens
atgggctcctgagca

SEQ ID NO: 1325524 - DNA, 15 bp, Homo sapiens
gatgggctcctgagc

SEQ ID NO: 1325525 - DNA, 15 bp, Homo sapiens
agatgggctcctgag

SEQ ID NO: 1325526 - DNA, 15 bp, Homo sapiens
cagatgggctcctga

SEQ ID NO: 1325527 - DNA, 15 bp, Homo sapiens
gcagatgggctcctg

SEQ ID NO: 1325528 - DNA, 15 bp, Homo sapiens
ggcagatgggctcct

SEQ ID NO: 1325529 - DNA, 15 bp, Homo sapiens
aggcagatgggctcc

SEQ ID NO: 1325530 - DNA, 15 bp, Homo sapiens
gaggcagatgggctc

SEQ ID NO: 1325531 - DNA, 15 bp, Homo sapiens
ggaggcagatgggct

SEQ ID NO: 1325532 - DNA, 15 bp, Homo sapiens
aggaggcagatgggc

SEQ ID NO: 1325533 - DNA, 15 bp, Homo sapiens
caggaggcagatggg

SEQ ID NO: 1325534 - DNA, 15 bp, Homo sapiens
gcaggaggcagatgg

SEQ ID NO: 1325535 - DNA, 15 bp, Homo sapiens
ggcaggaggcagatg

SEQ ID NO: 1325536 - DNA, 15 bp, Homo sapiens
cggcaggaggcagat

SEQ ID NO: 1325537 - DNA, 15 bp, Homo sapiens
gcggcaggaggcaga

SEQ ID NO: 1325538 - DNA, 15 bp, Homo sapiens
ggcggcaggaggcag

SEQ ID NO: 1325539 - DNA, 15 bp, Homo sapiens
tggcggcaggaggca

SEQ ID NO: 1325540 - DNA, 15 bp, Homo sapiens
atggcggcaggaggc

SEQ ID NO: 1325541 - DNA, 15 bp, Homo sapiens
gatggcggcaggagg

SEQ ID NO: 1325542 - DNA, 15 bp, Homo sapiens
ggatggcggcaggag

SEQ ID NO: 1325543 - DNA, 15 bp, Homo sapiens
tggatggcggcagga

SEQ ID NO: 1325544 - DNA, 15 bp, Homo sapiens
atggatggcggcagg

SEQ ID NO: 1325545 - DNA, 15 bp, Homo sapiens
catggatggcggcag

SEQ ID NO: 1325546 - DNA, 15 bp, Homo sapiens
gcatggatggcggca

SEQ ID NO: 1325547 - DNA, 15 bp, Homo sapiens
cgcatggatggcggc

SEQ ID NO: 1325548 - DNA, 15 bp, Homo sapiens
acgcatggatggcgg

SEQ ID NO: 1325549 - DNA, 15 bp, Homo sapiens
gacgcatggatggcg

SEQ ID NO: 1325550 - DNA, 15 bp, Homo sapiens
tgacgcatggatggc

SEQ ID NO: 1325551 - DNA, 15 bp, Homo sapiens
ttgacgcatggatgg

SEQ ID NO: 1325552 - DNA, 15 bp, Homo sapiens
cttgacgcatggatg

SEQ ID NO: 1325553 - DNA, 15 bp, Homo sapiens
ccttgacgcatggat

SEQ ID NO: 1325554 - DNA, 15 bp, Homo sapiens
cccttgacgcatgga

SEQ ID NO: 1325555 - DNA, 15 bp, Homo sapiens
ccccttgacgcatgg

SEQ ID NO: 1325556 - DNA, 15 bp, Homo sapiens
gccccttgacgcatg

SEQ ID NO: 1325557 - DNA, 15 bp, Homo sapiens
tgccccttgacgcat

SEQ ID NO: 1325558 - DNA, 15 bp, Homo sapiens
gtgccccttgacgca

SEQ ID NO: 1325559 - DNA, 15 bp, Homo sapiens
ggtgccccttgacgc

SEQ ID NO: 1325560 - DNA, 15 bp, Homo sapiens
aggtgccccttgacg

SEQ ID NO: 1325561 - DNA, 15 bp, Homo sapiens
caggtgccccttgac

SEQ ID NO: 1325562 - DNA, 15 bp, Homo sapiens
acaggtgccccttga

SEQ ID NO: 1325563 - DNA, 15 bp, Homo sapiens
tacaggtgccccttg

SEQ ID NO: 1325564 - DNA, 15 bp, Homo sapiens
ctacaggtgcccctt

SEQ ID NO: 1325565 - DNA, 15 bp, Homo sapiens
cctacaggtgcccct

SEQ ID NO: 1325566 - DNA, 15 bp, Homo sapiens
gcctacaggtgcccc

SEQ ID NO: 1325567 - DNA, 15 bp, Homo sapiens
ggcctacaggtgccc

SEQ ID NO: 1325568 - DNA, 15 bp, Homo sapiens
tggcctacaggtgcc

SEQ ID NO: 1325569 - DNA, 15 bp, Homo sapiens
ctggcctacaggtgc

SEQ ID NO: 1325570 - DNA, 15 bp, Homo sapiens
actggcctacaggtg

SEQ ID NO: 1325571 - DNA, 15 bp, Homo sapiens
cactggcctacaggt

SEQ ID NO: 1325572 - DNA, 15 bp, Homo sapiens
gcactggcctacagg

SEQ ID NO: 1325573 - DNA, 15 bp, Homo sapiens
ggcactggcctacag

SEQ ID NO: 1325574 - DNA, 15 bp, Homo sapiens
tggcactggcctaca

SEQ ID NO: 1325575 - DNA, 15 bp, Homo sapiens
ttggcactggcctac

SEQ ID NO: 1325576 - DNA, 15 bp, Homo sapiens
cttggcactggccta

SEQ ID NO: 1325577 - DNA, 15 bp, Homo sapiens
gcttggcactggcct

SEQ ID NO: 1325578 - DNA, 15 bp, Homo sapiens
agcttggcactggcc

SEQ ID NO: 1325579 - DNA, 15 bp, Homo sapiens
cagcttggcactggc

SEQ ID NO: 1325580 - DNA, 15 bp, Homo sapiens
gcagcttggcactgg

SEQ ID NO: 1325581 - DNA, 15 bp, Homo sapiens
ggcagcttggcactg

SEQ ID NO: 1325582 - DNA, 15 bp, Homo sapiens
gggcagcttggcact

SEQ ID NO: 1325583 - DNA, 15 bp, Homo sapiens
agggcagcttggcac

SEQ ID NO: 1325584 - DNA, 15 bp, Homo sapiens
gagggcagcttggca

SEQ ID NO: 1325585 - DNA, 15 bp, Homo sapiens
tgagggcagcttggc

SEQ ID NO: 1325586 - DNA, 15 bp, Homo sapiens
ctgagggcagcttgg

SEQ ID NO: 1325587 - DNA, 15 bp, Homo sapiens
gctgagggcagcttg

SEQ ID NO: 1325588 - DNA, 15 bp, Homo sapiens
ggctgagggcagctt

SEQ ID NO: 1325589 - DNA, 15 bp, Homo sapiens
gggctgagggcagct

SEQ ID NO: 1325590 - DNA, 15 bp, Homo sapiens
ggggctgagggcagc

SEQ ID NO: 1325591 - DNA, 15 bp, Homo sapiens
gggggctgagggcag

SEQ ID NO: 1325592 - DNA, 15 bp, Homo sapiens
cgggggctgagggca

SEQ ID NO: 1325593 - DNA, 15 bp, Homo sapiens
gcgggggctgagggc

SEQ ID NO: 1325594 - DNA, 15 bp, Homo sapiens
ggcgggggctgaggg

SEQ ID NO: 1325595 - DNA, 15 bp, Homo sapiens
aggcgggggctgagg

SEQ ID NO: 1325596 - DNA, 15 bp, Homo sapiens
gaggcgggggctgag

SEQ ID NO: 1325597 - DNA, 15 bp, Homo sapiens
cgaggcgggggctga

SEQ ID NO: 1325598 - DNA, 15 bp, Homo sapiens
ccgaggcgggggctg

SEQ ID NO: 1325599 - DNA, 15 bp, Homo sapiens
gccgaggcgggggct

SEQ ID NO: 1325600 - DNA, 15 bp, Homo sapiens
agccgaggcgggggc

SEQ ID NO: 1325601 - DNA, 15 bp, Homo sapiens
aagccgaggcggggg

SEQ ID NO: 1325602 - DNA, 15 bp, Homo sapiens
gaagccgaggcgggg

SEQ ID NO: 1325603 - DNA, 15 bp, Homo sapiens
ggaagccgaggcggg

SEQ ID NO: 1325604 - DNA, 15 bp, Homo sapiens
gggaagccgaggcgg

SEQ ID NO: 1325605 - DNA, 15 bp, Homo sapiens
ggggaagccgaggcg

SEQ ID NO: 1325606 - DNA, 15 bp, Homo sapiens
gggggaagccgaggc

SEQ ID NO: 1325607 - DNA, 15 bp, Homo sapiens
ggggggaagccgagg

SEQ ID NO: 1325608 - DNA, 15 bp, Homo sapiens
gggggggaagccgag

SEQ ID NO: 1325609 - DNA, 15 bp, Homo sapiens
cgggggggaagccga

SEQ ID NO: 1325610 - DNA, 15 bp, Homo sapiens
acgggggggaagccg

SEQ ID NO: 1325611 - DNA, 15 bp, Homo sapiens
cacgggggggaagcc

SEQ ID NO: 1325612 - DNA, 15 bp, Homo sapiens
gcacgggggggaagc

SEQ ID NO: 1325613 - DNA, 15 bp, Homo sapiens
agcacgggggggaag

SEQ ID NO: 1325614 - DNA, 15 bp, Homo sapiens
gagcacgggggggaa

SEQ ID NO: 1325615 - DNA, 15 bp, Homo sapiens
cgagcacggggggga

SEQ ID NO: 1325616 - DNA, 15 bp, Homo sapiens
acgagcacggggggg

SEQ ID NO: 1325617 - DNA, 15 bp, Homo sapiens
gacgagcacgggggg

SEQ ID NO: 1325618 - DNA, 15 bp, Homo sapiens
tgacgagcacggggg

SEQ ID NO: 1325619 - DNA, 15 bp, Homo sapiens
ctgacgagcacgggg

SEQ ID NO: 1325620 - DNA, 15 bp, Homo sapiens
gctgacgagcacggg

SEQ ID NO: 1325621 - DNA, 15 bp, Homo sapiens
cgctgacgagcacgg

SEQ ID NO: 1325622 - DNA, 15 bp, Homo sapiens
gcgctgacgagcacg

SEQ ID NO: 1325623 - DNA, 15 bp, Homo sapiens
ggcgctgacgagcac

SEQ ID NO: 1325624 - DNA, 15 bp, Homo sapiens
gggcgctgacgagca

SEQ ID NO: 1325625 - DNA, 15 bp, Homo sapiens
tgggcgctgacgagc

SEQ ID NO: 1325626 - DNA, 15 bp, Homo sapiens
ttgggcgctgacgag

SEQ ID NO: 1325627 - DNA, 15 bp, Homo sapiens
tttgggcgctgacga

SEQ ID NO: 1325628 - DNA, 15 bp, Homo sapiens
ctttgggcgctgacg

SEQ ID NO: 1325629 - DNA, 15 bp, Homo sapiens
actttgggcgctgac

SEQ ID NO: 1325630 - DNA, 15 bp, Homo sapiens
gactttgggcgctga

SEQ ID NO: 1325631 - DNA, 15 bp, Homo sapiens
agactttgggcgctg

SEQ ID NO: 1325632 - DNA, 15 bp, Homo sapiens
cagactttgggcgct

SEQ ID NO: 1325633 - DNA, 15 bp, Homo sapiens
ccagactttgggcgc

SEQ ID NO: 1325634 - DNA, 15 bp, Homo sapiens
tccagactttgggcg

SEQ ID NO: 1325635 - DNA, 15 bp, Homo sapiens
ctccagactttgggc

SEQ ID NO: 1325636 - DNA, 15 bp, Homo sapiens
tctccagactttggg

SEQ ID NO: 1325637 - DNA, 15 bp, Homo sapiens
ctctccagactttgg

SEQ ID NO: 1325638 - DNA, 15 bp, Homo sapiens
cctctccagactttg

SEQ ID NO: 1325639 - DNA, 15 bp, Homo sapiens
ccctctccagacttt

SEQ ID NO: 1325640 - DNA, 15 bp, Homo sapiens
gccctctccagactt

SEQ ID NO: 1325641 - DNA, 15 bp, Homo sapiens
agccctctccagact

SEQ ID NO: 1325642 - DNA, 15 bp, Homo sapiens
cagccctctccagac

SEQ ID NO: 1325643 - DNA, 15 bp, Homo sapiens
tcagccctctccaga

SEQ ID NO: 1325644 - DNA, 15 bp, Homo sapiens
ctcagccctctccag

SEQ ID NO: 1325645 - DNA, 15 bp, Homo sapiens
cctcagccctctcca

SEQ ID NO: 1325646 - DNA, 15 bp, Homo sapiens
gcctcagccctctcc

SEQ ID NO: 1325647 - DNA, 15 bp, Homo sapiens
cgcctcagccctctc

SEQ ID NO: 1325648 - DNA, 15 bp, Homo sapiens
ccgcctcagccctct

SEQ ID NO: 1325649 - DNA, 15 bp, Homo sapiens
gccgcctcagccctc

SEQ ID NO: 1325650 - DNA, 15 bp, Homo sapiens
tgccgcctcagccct

SEQ ID NO: 1325651 - DNA, 15 bp, Homo sapiens
ctgccgcctcagccc

SEQ ID NO: 1325652 - DNA, 15 bp, Homo sapiens
cctgccgcctcagcc

SEQ ID NO: 1325653 - DNA, 15 bp, Homo sapiens
ccctgccgcctcagc

SEQ ID NO: 1325654 - DNA, 15 bp, Homo sapiens
cccctgccgcctcag

SEQ ID NO: 1325655 - DNA, 15 bp, Homo sapiens
ccccctgccgcctca

SEQ ID NO: 1325656 - DNA, 15 bp, Homo sapiens
gccccctgccgcctc

SEQ ID NO: 1325657 - DNA, 15 bp, Homo sapiens
agccccctgccgcct

SEQ ID NO: 1325658 - DNA, 15 bp, Homo sapiens
cagccccctgccgcc

SEQ ID NO: 1325659 - DNA, 15 bp, Homo sapiens
ccagccccctgccgc

SEQ ID NO: 1325660 - DNA, 15 bp, Homo sapiens
gccagccccctgccg

SEQ ID NO: 1325661 - DNA, 15 bp, Homo sapiens
cgccagccccctgcc

SEQ ID NO: 1325662 - DNA, 15 bp, Homo sapiens
acgccagccccctgc

SEQ ID NO: 1325663 - DNA, 15 bp, Homo sapiens
cacgccagccccctg

SEQ ID NO: 1325664 - DNA, 15 bp, Homo sapiens
acacgccagccccct

SEQ ID NO: 1325665 - DNA, 15 bp, Homo sapiens
gacacgccagccccc

SEQ ID NO: 1325666 - DNA, 15 bp, Homo sapiens
tgacacgccagcccc

SEQ ID NO: 1325667 - DNA, 15 bp, Homo sapiens
ctgacacgccagccc

SEQ ID NO: 1325668 - DNA, 15 bp, Homo sapiens
gctgacacgccagcc

SEQ ID NO: 1325669 - DNA, 15 bp, Homo sapiens
cgctgacacgccagc

SEQ ID NO: 1325670 - DNA, 15 bp, Homo sapiens
gcgctgacacgccag

SEQ ID NO: 1325671 - DNA, 15 bp, Homo sapiens
agcgctgacacgcca

SEQ ID NO: 1325672 - DNA, 15 bp, Homo sapiens
cagcgctgacacgcc

SEQ ID NO: 1325673 - DNA, 15 bp, Homo sapiens
gcagcgctgacacgc

SEQ ID NO: 1325674 - DNA, 15 bp, Homo sapiens
ggcagcgctgacacg

SEQ ID NO: 1325675 - DNA, 15 bp, Homo sapiens
aggcagcgctgacac

SEQ ID NO: 1325676 - DNA, 15 bp, Homo sapiens
aaggcagcgctgaca

SEQ ID NO: 1325677 - DNA, 15 bp, Homo sapiens
caaggcagcgctgac

SEQ ID NO: 1325678 - DNA, 15 bp, Homo sapiens
tcaaggcagcgctga

SEQ ID NO: 1325679 - DNA, 15 bp, Homo sapiens
ctcaaggcagcgctg

SEQ ID NO: 1325680 - DNA, 15 bp, Homo sapiens
gctcaaggcagcgct

SEQ ID NO: 1325681 - DNA, 15 bp, Homo sapiens
cgctcaaggcagcgc

SEQ ID NO: 1325682 - DNA, 15 bp, Homo sapiens
acgctcaaggcagcg

SEQ ID NO: 1325683 - DNA, 15 bp, Homo sapiens
cacgctcaaggcagc

SEQ ID NO: 1325684 - DNA, 15 bp, Homo sapiens
gcacgctcaaggcag

SEQ ID NO: 1325685 - DNA, 15 bp, Homo sapiens
cgcacgctcaaggca

SEQ ID NO: 1325686 - DNA, 15 bp, Homo sapiens
gcgcacgctcaaggc

SEQ ID NO: 1325687 - DNA, 15 bp, Homo sapiens
tgcgcacgctcaagg

SEQ ID NO: 1325688 - DNA, 15 bp, Homo sapiens
gtgcgcacgctcaag

SEQ ID NO: 1325689 - DNA, 15 bp, Homo sapiens
tgtgcgcacgctcaa

SEQ ID NO: 1325690 - DNA, 15 bp, Homo sapiens
atgtgcgcacgctca

SEQ ID NO: 1325691 - DNA, 15 bp, Homo sapiens
gatgtgcgcacgctc

SEQ ID NO: 1325692 - DNA, 15 bp, Homo sapiens
agatgtgcgcacgct

SEQ ID NO: 1325693 - DNA, 15 bp, Homo sapiens
cagatgtgcgcacgc

SEQ ID NO: 1325694 - DNA, 15 bp, Homo sapiens
ccagatgtgcgcacg

SEQ ID NO: 1325695 - DNA, 15 bp, Homo sapiens
gccagatgtgcgcac

SEQ ID NO: 1325696 - DNA, 15 bp, Homo sapiens
agccagatgtgcgca

SEQ ID NO: 1325697 - DNA, 15 bp, Homo sapiens
cagccagatgtgcgc

SEQ ID NO: 1325698 - DNA, 15 bp, Homo sapiens
ccagccagatgtgcg

SEQ ID NO: 1325699 - DNA, 15 bp, Homo sapiens
cccagccagatgtgc

SEQ ID NO: 1325700 - DNA, 15 bp, Homo sapiens
gcccagccagatgtg

SEQ ID NO: 1325701 - DNA, 15 bp, Homo sapiens
agcccagccagatgt

SEQ ID NO: 1325702 - DNA, 15 bp, Homo sapiens
cagcccagccagatg

SEQ ID NO: 1325703 - DNA, 15 bp, Homo sapiens
gcagcccagccagat

SEQ ID NO: 1325704 - DNA, 15 bp, Homo sapiens
tgcagcccagccaga

SEQ ID NO: 1325705 - DNA, 15 bp, Homo sapiens
ctgcagcccagccag

SEQ ID NO: 1325706 - DNA, 15 bp, Homo sapiens
gctgcagcccagcca

SEQ ID NO: 1325707 - DNA, 15 bp, Homo sapiens
tgctgcagcccagcc

SEQ ID NO: 1325708 - DNA, 15 bp, Homo sapiens
ctgctgcagcccagc

SEQ ID NO: 1325709 - DNA, 15 bp, Homo sapiens
gctgctgcagcccag

SEQ ID NO: 1325710 - DNA, 15 bp, Homo sapiens
tgctgctgcagccca

SEQ ID NO: 1325711 - DNA, 15 bp, Homo sapiens
gtgctgctgcagccc

SEQ ID NO: 1325712 - DNA, 15 bp, Homo sapiens
ggtgctgctgcagcc

SEQ ID NO: 1325713 - DNA, 15 bp, Homo sapiens
gggtgctgctgcagc

SEQ ID NO: 1325714 - DNA, 15 bp, Homo sapiens
tgggtgctgctgcag

SEQ ID NO: 1325715 - DNA, 15 bp, Homo sapiens
ctgggtgctgctgca

SEQ ID NO: 1325716 - DNA, 15 bp, Homo sapiens
cctgggtgctgctgc

SEQ ID NO: 1325717 - DNA, 15 bp, Homo sapiens
gcctgggtgctgctg

SEQ ID NO: 1325718 - DNA, 15 bp, Homo sapiens
agcctgggtgctgct

SEQ ID NO: 1325719 - DNA, 15 bp, Homo sapiens
gagcctgggtgctgc

SEQ ID NO: 1325720 - DNA, 15 bp, Homo sapiens
tgagcctgggtgctg

SEQ ID NO: 1325721 - DNA, 15 bp, Homo sapiens
ctgagcctgggtgct

SEQ ID NO: 1325722 - DNA, 15 bp, Homo sapiens
gctgagcctgggtgc

SEQ ID NO: 1325723 - DNA, 15 bp, Homo sapiens
ggctgagcctgggtg

SEQ ID NO: 1325724 - DNA, 15 bp, Homo sapiens
gggctgagcctgggt

SEQ ID NO: 1325725 - DNA, 15 bp, Homo sapiens
agggctgagcctggg

SEQ ID NO: 1325726 - DNA, 15 bp, Homo sapiens
cagggctgagcctgg

SEQ ID NO: 1325727 - DNA, 15 bp, Homo sapiens
tcagggctgagcctg

SEQ ID NO: 1325728 - DNA, 15 bp, Homo sapiens
gtcagggctgagcct

SEQ ID NO: 1325729 - DNA, 15 bp, Homo sapiens
agtcagggctgagcc

SEQ ID NO: 1325730 - DNA, 15 bp, Homo sapiens
aagtcagggctgagc

SEQ ID NO: 1325731 - DNA, 15 bp, Homo sapiens
aaagtcagggctgag

SEQ ID NO: 1325732 - DNA, 15 bp, Homo sapiens
caaagtcagggctga

SEQ ID NO: 1325733 - DNA, 15 bp, Homo sapiens
gcaaagtcagggctg

SEQ ID NO: 1325734 - DNA, 15 bp, Homo sapiens
agcaaagtcagggct

SEQ ID NO: 1325735 - DNA, 15 bp, Homo sapiens
gagcaaagtcagggc

SEQ ID NO: 1325736 - DNA, 15 bp, Homo sapiens
ggagcaaagtcaggg

SEQ ID NO: 1325737 - DNA, 15 bp, Homo sapiens
cggagcaaagtcagg

SEQ ID NO: 1325738 - DNA, 15 bp, Homo sapiens
tcggagcaaagtcag

SEQ ID NO: 1325739 - DNA, 15 bp, Homo sapiens
ctcggagcaaagtca

SEQ ID NO: 1325740 - DNA, 15 bp, Homo sapiens
tctcggagcaaagtc

SEQ ID NO: 1325741 - DNA, 15 bp, Homo sapiens
atctcggagcaaagt

SEQ ID NO: 1325742 - DNA, 15 bp, Homo sapiens
aatctcggagcaaag

SEQ ID NO: 1325743 - DNA, 15 bp, Homo sapiens
caatctcggagcaaa

SEQ ID NO: 1325744 - DNA, 15 bp, Homo sapiens
ccaatctcggagcaa

SEQ ID NO: 1325745 - DNA, 15 bp, Homo sapiens
tccaatctcggagca

SEQ ID NO: 1325746 - DNA, 15 bp, Homo sapiens
ctccaatctcggagc

SEQ ID NO: 1325747 - DNA, 15 bp, Homo sapiens
actccaatctcggag

SEQ ID NO: 1325748 - DNA, 15 bp, Homo sapiens
cactccaatctcgga

SEQ ID NO: 1325749 - DNA, 15 bp, Homo sapiens
ccactccaatctcgg

SEQ ID NO: 1325750 - DNA, 15 bp, Homo sapiens
cccactccaatctcg

SEQ ID NO: 1325751 - DNA, 15 bp, Homo sapiens
gcccactccaatctc

SEQ ID NO: 1325752 - DNA, 15 bp, Homo sapiens
cgcccactccaatct

SEQ ID NO: 1325753 - DNA, 15 bp, Homo sapiens
gcgcccactccaatc

SEQ ID NO: 1325754 - DNA, 15 bp, Homo sapiens
agcgcccactccaat

SEQ ID NO: 1325755 - DNA, 15 bp, Homo sapiens
cagcgcccactccaa

SEQ ID NO: 1325756 - DNA, 15 bp, Homo sapiens
ccagcgcccactcca

SEQ ID NO: 1325757 - DNA, 15 bp, Homo sapiens
gccagcgcccactcc

SEQ ID NO: 1325758 - DNA, 15 bp, Homo sapiens
tgccagcgcccactc

SEQ ID NO: 1325759 - DNA, 15 bp, Homo sapiens
ctgccagcgcccact

SEQ ID NO: 1325760 - DNA, 15 bp, Homo sapiens
gctgccagcgcccac

SEQ ID NO: 1325761 - DNA, 15 bp, Homo sapiens
tgctgccagcgccca

SEQ ID NO: 1325762 - DNA, 15 bp, Homo sapiens
ctgctgccagcgccc

SEQ ID NO: 1325763 - DNA, 15 bp, Homo sapiens
cctgctgccagcgcc

SEQ ID NO: 1325764 - DNA, 15 bp, Homo sapiens
ccctgctgccagcgc

SEQ ID NO: 1325765 - DNA, 15 bp, Homo sapiens
tccctgctgccagcg

SEQ ID NO: 1325766 - DNA, 15 bp, Homo sapiens
ctccctgctgccagc

SEQ ID NO: 1325767 - DNA, 15 bp, Homo sapiens
tctccctgctgccag

SEQ ID NO: 1325768 - DNA, 15 bp, Homo sapiens
ttctccctgctgcca

SEQ ID NO: 1325769 - DNA, 15 bp, Homo sapiens
tttctccctgctgcc

SEQ ID NO: 1325770 - DNA, 15 bp, Homo sapiens
gtttctccctgctgc

SEQ ID NO: 1325771 - DNA, 15 bp, Homo sapiens
ggtttctccctgctg

SEQ ID NO: 1325772 - DNA, 15 bp, Homo sapiens
tggtttctccctgct

SEQ ID NO: 1325773 - DNA, 15 bp, Homo sapiens
ctggtttctccctgc

SEQ ID NO: 1325774 - DNA, 15 bp, Homo sapiens
cctggtttctccctg

SEQ ID NO: 1325775 - DNA, 15 bp, Homo sapiens
gcctggtttctccct

SEQ ID NO: 1325776 - DNA, 15 bp, Homo sapiens
tgcctggtttctccc

SEQ ID NO: 1325777 - DNA, 15 bp, Homo sapiens
ctgcctggtttctcc

SEQ ID NO: 1325778 - DNA, 15 bp, Homo sapiens
actgcctggtttctc

SEQ ID NO: 1325779 - DNA, 15 bp, Homo sapiens
cactgcctggtttct

SEQ ID NO: 1325780 - DNA, 15 bp, Homo sapiens
ccactgcctggtttc

SEQ ID NO: 1325781 - DNA, 15 bp, Homo sapiens
cccactgcctggttt

SEQ ID NO: 1325782 - DNA, 15 bp, Homo sapiens
tcccactgcctggtt

SEQ ID NO: 1325783 - DNA, 15 bp, Homo sapiens
ctcccactgcctggt

SEQ ID NO: 1325784 - DNA, 15 bp, Homo sapiens
gctcccactgcctgg

SEQ ID NO: 1325785 - DNA, 15 bp, Homo sapiens
tgctcccactgcctg

SEQ ID NO: 1325786 - DNA, 15 bp, Homo sapiens
ctgctcccactgcct

SEQ ID NO: 1325787 - DNA, 15 bp, Homo sapiens
cctgctcccactgcc

SEQ ID NO: 1325788 - DNA, 15 bp, Homo sapiens
gcctgctcccactgc

SEQ ID NO: 1325789 - DNA, 15 bp, Homo sapiens
tgcctgctcccactg

SEQ ID NO: 1325790 - DNA, 15 bp, Homo sapiens
gtgcctgctcccact

SEQ ID NO: 1325791 - DNA, 15 bp, Homo sapiens
agtgcctgctcccac

SEQ ID NO: 1325792 - DNA, 15 bp, Homo sapiens
aagtgcctgctccca

SEQ ID NO: 1325793 - DNA, 15 bp, Homo sapiens
gaagtgcctgctccc

SEQ ID NO: 1325794 - DNA, 15 bp, Homo sapiens
agaagtgcctgctcc

SEQ ID NO: 1325795 - DNA, 15 bp, Homo sapiens
cagaagtgcctgctc

SEQ ID NO: 1325796 - DNA, 15 bp, Homo sapiens
tcagaagtgcctgct

SEQ ID NO: 1325797 - DNA, 15 bp, Homo sapiens
ctcagaagtgcctgc

SEQ ID NO: 1325798 - DNA, 15 bp, Homo sapiens
gctcagaagtgcctg

SEQ ID NO: 1325799 - DNA, 15 bp, Homo sapiens
ggctcagaagtgcct

SEQ ID NO: 1325800 - DNA, 15 bp, Homo sapiens
aggctcagaagtgcc

SEQ ID NO: 1325801 - DNA, 15 bp, Homo sapiens
caggctcagaagtgc

SEQ ID NO: 1325802 - DNA, 15 bp, Homo sapiens
gcaggctcagaagtg

SEQ ID NO: 1325803 - DNA, 15 bp, Homo sapiens
cgcaggctcagaagt

SEQ ID NO: 1325804 - DNA, 15 bp, Homo sapiens
tcgcaggctcagaag

SEQ ID NO: 1325805 - DNA, 15 bp, Homo sapiens
ctcgcaggctcagaa

SEQ ID NO: 1325806 - DNA, 15 bp, Homo sapiens
cctcgcaggctcaga

SEQ ID NO: 1325807 - DNA, 15 bp, Homo sapiens
ccctcgcaggctcag

SEQ ID NO: 1325808 - DNA, 15 bp, Homo sapiens
gccctcgcaggctca

SEQ ID NO: 1325809 - DNA, 15 bp, Homo sapiens
cgccctcgcaggctc

SEQ ID NO: 1325810 - DNA, 15 bp, Homo sapiens
ccgccctcgcaggct

SEQ ID NO: 1325811 - DNA, 15 bp, Homo sapiens
accgccctcgcaggc

SEQ ID NO: 1325812 - DNA, 15 bp, Homo sapiens
caccgccctcgcagg

SEQ ID NO: 1325813 - DNA, 15 bp, Homo sapiens
ccaccgccctcgcag

SEQ ID NO: 1325814 - DNA, 15 bp, Homo sapiens
gccaccgccctcgca

SEQ ID NO: 1325815 - DNA, 15 bp, Homo sapiens
tgccaccgccctcgc

SEQ ID NO: 1325816 - DNA, 15 bp, Homo sapiens
ctgccaccgccctcg

SEQ ID NO: 1325817 - DNA, 15 bp, Homo sapiens
actgccaccgccctc

SEQ ID NO: 1325818 - DNA, 15 bp, Homo sapiens
aactgccaccgccct

SEQ ID NO: 1325819 - DNA, 15 bp, Homo sapiens
caactgccaccgccc

SEQ ID NO: 1325820 - DNA, 15 bp, Homo sapiens
ccaactgccaccgcc

SEQ ID NO: 1325821 - DNA, 15 bp, Homo sapiens
cccaactgccaccgc

SEQ ID NO: 1325822 - DNA, 15 bp, Homo sapiens
ccccaactgccaccg

SEQ ID NO: 1325823 - DNA, 15 bp, Homo sapiens
cccccaactgccacc

SEQ ID NO: 1325824 - DNA, 15 bp, Homo sapiens
ccccccaactgccac

SEQ ID NO: 1325825 - DNA, 15 bp, Homo sapiens
accccccaactgcca

SEQ ID NO: 1325826 - DNA, 15 bp, Homo sapiens
caccccccaactgcc

SEQ ID NO: 1325827 - DNA, 15 bp, Homo sapiens
gcaccccccaactgc

SEQ ID NO: 1325828 - DNA, 15 bp, Homo sapiens
ggcaccccccaactg

SEQ ID NO: 1325829 - DNA, 15 bp, Homo sapiens
aggcaccccccaact

SEQ ID NO: 1325830 - DNA, 15 bp, Homo sapiens
aaggcaccccccaac

SEQ ID NO: 1325831 - DNA, 15 bp, Homo sapiens
gaaggcaccccccaa

SEQ ID NO: 1325832 - DNA, 15 bp, Homo sapiens
ggaaggcacccccca

SEQ ID NO: 1325833 - DNA, 15 bp, Homo sapiens
gggaaggcacccccc

SEQ ID NO: 1325834 - DNA, 15 bp, Homo sapiens
ggggaaggcaccccc

SEQ ID NO: 1325835 - DNA, 15 bp, Homo sapiens
cggggaaggcacccc

SEQ ID NO: 1325836 - DNA, 15 bp, Homo sapiens
ccggggaaggcaccc

SEQ ID NO: 1325837 - DNA, 15 bp, Homo sapiens
gccggggaaggcacc

SEQ ID NO: 1325838 - DNA, 15 bp, Homo sapiens
ggccggggaaggcac

SEQ ID NO: 1325839 - DNA, 15 bp, Homo sapiens
gggccggggaaggca

SEQ ID NO: 1325840 - DNA, 15 bp, Homo sapiens
ggggccggggaaggc

SEQ ID NO: 1325841 - DNA, 15 bp, Homo sapiens
gggggccggggaagg

SEQ ID NO: 1325842 - DNA, 15 bp, Homo sapiens
tgggggccggggaag

SEQ ID NO: 1325843 - DNA, 15 bp, Homo sapiens
ttgggggccggggaa

SEQ ID NO: 1325844 - DNA, 15 bp, Homo sapiens
cttgggggccgggga

SEQ ID NO: 1325845 - DNA, 15 bp, Homo sapiens
acttgggggccgggg

SEQ ID NO: 1325846 - DNA, 15 bp, Homo sapiens
tacttgggggccggg

SEQ ID NO: 1325847 - DNA, 15 bp, Homo sapiens
atacttgggggccgg

SEQ ID NO: 1325848 - DNA, 15 bp, Homo sapiens
tatacttgggggccg

SEQ ID NO: 1325849 - DNA, 15 bp, Homo sapiens
gtatacttgggggcc

SEQ ID NO: 1325850 - DNA, 15 bp, Homo sapiens
tgtatacttgggggc

SEQ ID NO: 1325851 - DNA, 15 bp, Homo sapiens
ctgtatacttggggg

SEQ ID NO: 1325852 - DNA, 15 bp, Homo sapiens
tctgtatacttgggg

SEQ ID NO: 1325853 - DNA, 15 bp, Homo sapiens
ctctgtatacttggg

SEQ ID NO: 1325854 - DNA, 15 bp, Homo sapiens
tctctgtatacttgg

SEQ ID NO: 1325855 - DNA, 15 bp, Homo sapiens
atctctgtatacttg

SEQ ID NO: 1325856 - DNA, 15 bp, Homo sapiens
catctctgtatactt

SEQ ID NO: 1325857 - DNA, 15 bp, Homo sapiens
gcatctctgtatact

SEQ ID NO: 1325858 - DNA, 15 bp, Homo sapiens
ggcatctctgtatac

SEQ ID NO: 1325859 - DNA, 15 bp, Homo sapiens
aggcatctctgtata

SEQ ID NO: 1325860 - DNA, 15 bp, Homo sapiens
caggcatctctgtat

SEQ ID NO: 1325861 - DNA, 15 bp, Homo sapiens
ccaggcatctctgta

SEQ ID NO: 1325862 - DNA, 15 bp, Homo sapiens
cccaggcatctctgt

SEQ ID NO: 1325863 - DNA, 15 bp, Homo sapiens
acccaggcatctctg

SEQ ID NO: 1325864 - DNA, 15 bp, Homo sapiens
gacccaggcatctct

SEQ ID NO: 1325865 - DNA, 15 bp, Homo sapiens
ggacccaggcatctc

SEQ ID NO: 1325866 - DNA, 15 bp, Homo sapiens
tggacccaggcatct

SEQ ID NO: 1325867 - DNA, 15 bp, Homo sapiens
gtggacccaggcatc

SEQ ID NO: 1325868 - DNA, 15 bp, Homo sapiens
tgtggacccaggcat

SEQ ID NO: 1325869 - DNA, 15 bp, Homo sapiens
ctgtggacccaggca

SEQ ID NO: 1325870 - DNA, 15 bp, Homo sapiens
gctgtggacccaggc

SEQ ID NO: 1325871 - DNA, 15 bp, Homo sapiens
ggctgtggacccagg

SEQ ID NO: 1325872 - DNA, 15 bp, Homo sapiens
tggctgtggacccag

SEQ ID NO: 1325873 - DNA, 15 bp, Homo sapiens
gtggctgtggaccca

SEQ ID NO: 1325874 - DNA, 15 bp, Homo sapiens
cgtggctgtggaccc

SEQ ID NO: 1325875 - DNA, 15 bp, Homo sapiens
ccgtggctgtggacc

SEQ ID NO: 1325876 - DNA, 15 bp, Homo sapiens
accgtggctgtggac

SEQ ID NO: 1325877 - DNA, 15 bp, Homo sapiens
aaccgtggctgtgga

SEQ ID NO: 1325878 - DNA, 15 bp, Homo sapiens
aaaccgtggctgtgg

SEQ ID NO: 1325879 - DNA, 15 bp, Homo sapiens
caaaccgtggctgtg

SEQ ID NO: 1325880 - DNA, 15 bp, Homo sapiens
ccaaaccgtggctgt

SEQ ID NO: 1325881 - DNA, 15 bp, Homo sapiens
cccaaaccgtggctg

SEQ ID NO: 1325882 - DNA, 15 bp, Homo sapiens
acccaaaccgtggct

SEQ ID NO: 1325883 - DNA, 15 bp, Homo sapiens
tacccaaaccgtggc

SEQ ID NO: 1325884 - DNA, 15 bp, Homo sapiens
ctacccaaaccgtgg

SEQ ID NO: 1325885 - DNA, 15 bp, Homo sapiens
gctacccaaaccgtg

SEQ ID NO: 1325886 - DNA, 15 bp, Homo sapiens
agctacccaaaccgt

SEQ ID NO: 1325887 - DNA, 15 bp, Homo sapiens
cagctacccaaaccg

SEQ ID NO: 1325888 - DNA, 15 bp, Homo sapiens
gcagctacccaaacc

SEQ ID NO: 1325889 - DNA, 15 bp, Homo sapiens
tgcagctacccaaac

SEQ ID NO: 1325890 - DNA, 15 bp, Homo sapiens
ctgcagctacccaaa

SEQ ID NO: 1325891 - DNA, 15 bp, Homo sapiens
gctgcagctacccaa

SEQ ID NO: 1325892 - DNA, 15 bp, Homo sapiens
agctgcagctaccca

SEQ ID NO: 1325893 - DNA, 15 bp, Homo sapiens
cagctgcagctaccc

SEQ ID NO: 1325894 - DNA, 15 bp, Homo sapiens
gcagctgcagctacc

SEQ ID NO: 1325895 - DNA, 15 bp, Homo sapiens
tgcagctgcagctac

SEQ ID NO: 1325896 - DNA, 15 bp, Homo sapiens
gtgcagctgcagcta

SEQ ID NO: 1325897 - DNA, 15 bp, Homo sapiens
agtgcagctgcagct

SEQ ID NO: 1325898 - DNA, 15 bp, Homo sapiens
cagtgcagctgcagc

SEQ ID NO: 1325899 - DNA, 15 bp, Homo sapiens
ccagtgcagctgcag

SEQ ID NO: 1325900 - DNA, 15 bp, Homo sapiens
cccagtgcagctgca

SEQ ID NO: 1325901 - DNA, 15 bp, Homo sapiens
ccccagtgcagctgc

SEQ ID NO: 1325902 - DNA, 15 bp, Homo sapiens
tccccagtgcagctg

SEQ ID NO: 1325903 - DNA, 15 bp, Homo sapiens
ctccccagtgcagct

SEQ ID NO: 1325904 - DNA, 15 bp, Homo sapiens
cctccccagtgcagc

SEQ ID NO: 1325905 - DNA, 15 bp, Homo sapiens
ccctccccagtgcag

SEQ ID NO: 1325906 - DNA, 15 bp, Homo sapiens
accctccccagtgca

SEQ ID NO: 1325907 - DNA, 15 bp, Homo sapiens
caccctccccagtgc

SEQ ID NO: 1325908 - DNA, 15 bp, Homo sapiens
ccaccctccccagtg

SEQ ID NO: 1325909 - DNA, 15 bp, Homo sapiens
cccaccctccccagt

SEQ ID NO: 1325910 - DNA, 15 bp, Homo sapiens
tcccaccctccccag

SEQ ID NO: 1325911 - DNA, 15 bp, Homo sapiens
gtcccaccctcccca

SEQ ID NO: 1325912 - DNA, 15 bp, Homo sapiens
agtcccaccctcccc

SEQ ID NO: 1325913 - DNA, 15 bp, Homo sapiens
gagtcccaccctccc

SEQ ID NO: 1325914 - DNA, 15 bp, Homo sapiens
ggagtcccaccctcc

SEQ ID NO: 1325915 - DNA, 15 bp, Homo sapiens
aggagtcccaccctc

SEQ ID NO: 1325916 - DNA, 15 bp, Homo sapiens
taggagtcccaccct

SEQ ID NO: 1325917 - DNA, 15 bp, Homo sapiens
gtaggagtcccaccc

SEQ ID NO: 1325918 - DNA, 15 bp, Homo sapiens
ggtaggagtcccacc

SEQ ID NO: 1325919 - DNA, 15 bp, Homo sapiens
aggtaggagtcccac

SEQ ID NO: 1325920 - DNA, 15 bp, Homo sapiens
caggtaggagtccca

SEQ ID NO: 1325921 - DNA, 15 bp, Homo sapiens
gcaggtaggagtccc

SEQ ID NO: 1325922 - DNA, 15 bp, Homo sapiens
agcaggtaggagtcc

SEQ ID NO: 1325923 - DNA, 15 bp, Homo sapiens
gagcaggtaggagtc

SEQ ID NO: 1325924 - DNA, 15 bp, Homo sapiens
ggagcaggtaggagt

SEQ ID NO: 1325925 - DNA, 15 bp, Homo sapiens
gggagcaggtaggag

SEQ ID NO: 1325926 - DNA, 15 bp, Homo sapiens
ggggagcaggtagga

SEQ ID NO: 1325927 - DNA, 15 bp, Homo sapiens
tggggagcaggtagg

SEQ ID NO: 1325928 - DNA, 15 bp, Homo sapiens
ctggggagcaggtag

SEQ ID NO: 1325929 - DNA, 15 bp, Homo sapiens
gctggggagcaggta

SEQ ID NO: 1325930 - DNA, 15 bp, Homo sapiens
ggctggggagcaggt

SEQ ID NO: 1325931 - DNA, 15 bp, Homo sapiens
gggctggggagcagg

SEQ ID NO: 1325932 - DNA, 15 bp, Homo sapiens
tgggctggggagcag

SEQ ID NO: 1325933 - DNA, 15 bp, Homo sapiens
ctgggctggggagca

SEQ ID NO: 1325934 - DNA, 15 bp, Homo sapiens
tctgggctggggagc

SEQ ID NO: 1325935 - DNA, 15 bp, Homo sapiens
ctctgggctggggag

SEQ ID NO: 1325936 - DNA, 15 bp, Homo sapiens
tctctgggctgggga

SEQ ID NO: 1325937 - DNA, 15 bp, Homo sapiens
ctctctgggctgggg

SEQ ID NO: 1325938 - DNA, 15 bp, Homo sapiens
gctctctgggctggg

SEQ ID NO: 1325939 - DNA, 15 bp, Homo sapiens
tgctctctgggctgg

SEQ ID NO: 1325940 - DNA, 15 bp, Homo sapiens
gtgctctctgggctg

SEQ ID NO: 1325941 - DNA, 15 bp, Homo sapiens
tgtgctctctgggct

SEQ ID NO: 1325942 - DNA, 15 bp, Homo sapiens
ctgtgctctctgggc

SEQ ID NO: 1325943 - DNA, 15 bp, Homo sapiens
cctgtgctctctggg

SEQ ID NO: 1325944 - DNA, 15 bp, Homo sapiens
ccctgtgctctctgg

SEQ ID NO: 1325945 - DNA, 15 bp, Homo sapiens
tccctgtgctctctg

SEQ ID NO: 1325946 - DNA, 15 bp, Homo sapiens
atccctgtgctctct

SEQ ID NO: 1325947 - DNA, 15 bp, Homo sapiens
catccctgtgctctc

SEQ ID NO: 1325948 - DNA, 15 bp, Homo sapiens
gcatccctgtgctct

SEQ ID NO: 1325949 - DNA, 15 bp, Homo sapiens
ggcatccctgtgctc

SEQ ID NO: 1325950 - DNA, 15 bp, Homo sapiens
aggcatccctgtgct

SEQ ID NO: 1325951 - DNA, 15 bp, Homo sapiens
caggcatccctgtgc

SEQ ID NO: 1325952 - DNA, 15 bp, Homo sapiens
ccaggcatccctgtg

SEQ ID NO: 1325953 - DNA, 15 bp, Homo sapiens
cccaggcatccctgt

SEQ ID NO: 1325954 - DNA, 15 bp, Homo sapiens
acccaggcatccctg

SEQ ID NO: 1325955 - DNA, 15 bp, Homo sapiens
gacccaggcatccct

SEQ ID NO: 1325956 - DNA, 15 bp, Homo sapiens
ggacccaggcatccc

SEQ ID NO: 1325957 - DNA, 15 bp, Homo sapiens
cggacccaggcatcc

SEQ ID NO: 1325958 - DNA, 15 bp, Homo sapiens
gcggacccaggcatc

SEQ ID NO: 1325959 - DNA, 15 bp, Homo sapiens
tgcggacccaggcat

SEQ ID NO: 1325960 - DNA, 15 bp, Homo sapiens
ctgcggacccaggca

SEQ ID NO: 1325961 - DNA, 15 bp, Homo sapiens
gctgcggacccaggc

SEQ ID NO: 1325962 - DNA, 15 bp, Homo sapiens
cgctgcggacccagg

SEQ ID NO: 1325963 - DNA, 15 bp, Homo sapiens
ccgctgcggacccag

SEQ ID NO: 1325964 - DNA, 15 bp, Homo sapiens
accgctgcggaccca

SEQ ID NO: 1325965 - DNA, 15 bp, Homo sapiens
caccgctgcggaccc

SEQ ID NO: 1325966 - DNA, 15 bp, Homo sapiens
ccaccgctgcggacc

SEQ ID NO: 1325967 - DNA, 15 bp, Homo sapiens
gccaccgctgcggac

SEQ ID NO: 1325968 - DNA, 15 bp, Homo sapiens
agccaccgctgcgga

SEQ ID NO: 1325969 - DNA, 15 bp, Homo sapiens
aagccaccgctgcgg

SEQ ID NO: 1325970 - DNA, 15 bp, Homo sapiens
caagccaccgctgcg

SEQ ID NO: 1325971 - DNA, 15 bp, Homo sapiens
ccaagccaccgctgc

SEQ ID NO: 1325972 - DNA, 15 bp, Homo sapiens
cccaagccaccgctg

SEQ ID NO: 1325973 - DNA, 15 bp, Homo sapiens
gcccaagccaccgct

SEQ ID NO: 1325974 - DNA, 15 bp, Homo sapiens
cgcccaagccaccgc

SEQ ID NO: 1325975 - DNA, 15 bp, Homo sapiens
ccgcccaagccaccg

SEQ ID NO: 1325976 - DNA, 15 bp, Homo sapiens
gccgcccaagccacc

SEQ ID NO: 1325977 - DNA, 15 bp, Homo sapiens
agccgcccaagccac

SEQ ID NO: 1325978 - DNA, 15 bp, Homo sapiens
cagccgcccaagcca

SEQ ID NO: 1325979 - DNA, 15 bp, Homo sapiens
gcagccgcccaagcc

SEQ ID NO: 1325980 - DNA, 15 bp, Homo sapiens
tgcagccgcccaagc

SEQ ID NO: 1325981 - DNA, 15 bp, Homo sapiens
ctgcagccgcccaag

SEQ ID NO: 1325982 - DNA, 15 bp, Homo sapiens
tctgcagccgcccaa

SEQ ID NO: 1325983 - DNA, 15 bp, Homo sapiens
ttctgcagccgccca

SEQ ID NO: 1325984 - DNA, 15 bp, Homo sapiens
cttctgcagccgccc

SEQ ID NO: 1325985 - DNA, 15 bp, Homo sapiens
gcttctgcagccgcc

SEQ ID NO: 1325986 - DNA, 15 bp, Homo sapiens
tgcttctgcagccgc

SEQ ID NO: 1325987 - DNA, 15 bp, Homo sapiens
gtgcttctgcagccg

SEQ ID NO: 1325988 - DNA, 15 bp, Homo sapiens
agtgcttctgcagcc

SEQ ID NO: 1325989 - DNA, 15 bp, Homo sapiens
cagtgcttctgcagc

SEQ ID NO: 1325990 - DNA, 15 bp, Homo sapiens
ccagtgcttctgcag

SEQ ID NO: 1325991 - DNA, 15 bp, Homo sapiens
cccagtgcttctgca

SEQ ID NO: 1325992 - DNA, 15 bp, Homo sapiens
ccccagtgcttctgc

SEQ ID NO: 1325993 - DNA, 15 bp, Homo sapiens
tccccagtgcttctg

SEQ ID NO: 1325994 - DNA, 15 bp, Homo sapiens
ctccccagtgcttct

SEQ ID NO: 1325995 - DNA, 15 bp, Homo sapiens
gctccccagtgcttc

SEQ ID NO: 1325996 - DNA, 15 bp, Homo sapiens
agctccccagtgctt

SEQ ID NO: 1325997 - DNA, 15 bp, Homo sapiens
gagctccccagtgct

SEQ ID NO: 1325998 - DNA, 15 bp, Homo sapiens
ggagctccccagtgc

SEQ ID NO: 1325999 - DNA, 15 bp, Homo sapiens
aggagctccccagtg

SEQ ID NO: 1326000 - DNA, 15 bp, Homo sapiens
caggagctccccagt

SEQ ID NO: 1326001 - DNA, 15 bp, Homo sapiens
acaggagctccccag

SEQ ID NO: 1326002 - DNA, 15 bp, Homo sapiens
gacaggagctcccca

SEQ ID NO: 1326003 - DNA, 15 bp, Homo sapiens
ggacaggagctcccc

SEQ ID NO: 1326004 - DNA, 15 bp, Homo sapiens
gggacaggagctccc

SEQ ID NO: 1326005 - DNA, 15 bp, Homo sapiens
tgggacaggagctcc

SEQ ID NO: 1326006 - DNA, 15 bp, Homo sapiens
ttgggacaggagctc

SEQ ID NO: 1326007 - DNA, 15 bp, Homo sapiens
gttgggacaggagct

SEQ ID NO: 1326008 - DNA, 15 bp, Homo sapiens
agttgggacaggagc

SEQ ID NO: 1326009 - DNA, 15 bp, Homo sapiens
gagttgggacaggag

SEQ ID NO: 1326010 - DNA, 15 bp, Homo sapiens
cgagttgggacagga

SEQ ID NO: 1326011 - DNA, 15 bp, Homo sapiens
ccgagttgggacagg

SEQ ID NO: 1326012 - DNA, 15 bp, Homo sapiens
tccgagttgggacag

SEQ ID NO: 1326013 - DNA, 15 bp, Homo sapiens
ttccgagttgggaca

SEQ ID NO: 1326014 - DNA, 15 bp, Homo sapiens
cttccgagttgggac

SEQ ID NO: 1326015 - DNA, 15 bp, Homo sapiens
ccttccgagttggga

SEQ ID NO: 1326016 - DNA, 15 bp, Homo sapiens
cccttccgagttggg

SEQ ID NO: 1326017 - DNA, 15 bp, Homo sapiens
ccccttccgagttgg

SEQ ID NO: 1326018 - DNA, 15 bp, Homo sapiens
gccccttccgagttg

SEQ ID NO: 1326019 - DNA, 15 bp, Homo sapiens
cgccccttccgagtt

SEQ ID NO: 1326020 - DNA, 15 bp, Homo sapiens
ccgccccttccgagt

SEQ ID NO: 1326021 - DNA, 15 bp, Homo sapiens
cccgccccttccgag

SEQ ID NO: 1326022 - DNA, 15 bp, Homo sapiens
ccccgccccttccga

SEQ ID NO: 1326023 - DNA, 15 bp, Homo sapiens
accccgccccttccg

SEQ ID NO: 1326024 - DNA, 15 bp, Homo sapiens
aaccccgccccttcc

SEQ ID NO: 1326025 - DNA, 15 bp, Homo sapiens
gaaccccgccccttc

SEQ ID NO: 1326026 - DNA, 15 bp, Homo sapiens
ggaaccccgcccctt

SEQ ID NO: 1326027 - DNA, 15 bp, Homo sapiens
aggaaccccgcccct

SEQ ID NO: 1326028 - DNA, 15 bp, Homo sapiens
caggaaccccgcccc

SEQ ID NO: 1326029 - DNA, 15 bp, Homo sapiens
gcaggaaccccgccc

SEQ ID NO: 1326030 - DNA, 15 bp, Homo sapiens
agcaggaaccccgcc

SEQ ID NO: 1326031 - DNA, 15 bp, Homo sapiens
aagcaggaaccccgc

SEQ ID NO: 1326032 - DNA, 15 bp, Homo sapiens
caagcaggaaccccg

SEQ ID NO: 1326033 - DNA, 15 bp, Homo sapiens
acaagcaggaacccc

SEQ ID NO: 1326034 - DNA, 15 bp, Homo sapiens
gacaagcaggaaccc

SEQ ID NO: 1326035 - DNA, 15 bp, Homo sapiens
ggacaagcaggaacc

SEQ ID NO: 1326036 - DNA, 15 bp, Homo sapiens
gggacaagcaggaac

SEQ ID NO: 1326037 - DNA, 15 bp, Homo sapiens
ggggacaagcaggaa

SEQ ID NO: 1326038 - DNA, 15 bp, Homo sapiens
cggggacaagcagga

SEQ ID NO: 1326039 - DNA, 15 bp, Homo sapiens
ccggggacaagcagg

SEQ ID NO: 1326040 - DNA, 15 bp, Homo sapiens
gccggggacaagcag

SEQ ID NO: 1326041 - DNA, 15 bp, Homo sapiens
agccggggacaagca

SEQ ID NO: 1326042 - DNA, 15 bp, Homo sapiens
gagccggggacaagc

SEQ ID NO: 1326043 - DNA, 15 bp, Homo sapiens
ggagccggggacaag

SEQ ID NO: 1326044 - DNA, 15 bp, Homo sapiens
aggagccggggacaa

SEQ ID NO: 1326045 - DNA, 15 bp, Homo sapiens
gaggagccggggaca

SEQ ID NO: 1326046 - DNA, 15 bp, Homo sapiens
ggaggagccggggac

SEQ ID NO: 1326047 - DNA, 15 bp, Homo sapiens
cggaggagccgggga

SEQ ID NO: 1326048 - DNA, 15 bp, Homo sapiens
ccggaggagccgggg

SEQ ID NO: 1326049 - DNA, 15 bp, Homo sapiens
cccggaggagccggg

SEQ ID NO: 1326050 - DNA, 15 bp, Homo sapiens
gcccggaggagccgg

SEQ ID NO: 1326051 - DNA, 15 bp, Homo sapiens
agcccggaggagccg

SEQ ID NO: 1326052 - DNA, 15 bp, Homo sapiens
aagcccggaggagcc

SEQ ID NO: 1326053 - DNA, 15 bp, Homo sapiens
gaagcccggaggagc

SEQ ID NO: 1326054 - DNA, 15 bp, Homo sapiens
ggaagcccggaggag

SEQ ID NO: 1326055 - DNA, 15 bp, Homo sapiens
aggaagcccggagga

SEQ ID NO: 1326056 - DNA, 15 bp, Homo sapiens
caggaagcccggagg

SEQ ID NO: 1326057 - DNA, 15 bp, Homo sapiens
ccaggaagcccggag

SEQ ID NO: 1326058 - DNA, 15 bp, Homo sapiens
tccaggaagcccgga

SEQ ID NO: 1326059 - DNA, 15 bp, Homo sapiens
ctccaggaagcccgg

SEQ ID NO: 1326060 - DNA, 15 bp, Homo sapiens
gctccaggaagcccg

SEQ ID NO: 1326061 - DNA, 15 bp, Homo sapiens
cgctccaggaagccc

SEQ ID NO: 1326062 - DNA, 15 bp, Homo sapiens
acgctccaggaagcc

SEQ ID NO: 1326063 - DNA, 15 bp, Homo sapiens
cacgctccaggaagc

SEQ ID NO: 1326064 - DNA, 15 bp, Homo sapiens
gcacgctccaggaag

SEQ ID NO: 1326065 - DNA, 15 bp, Homo sapiens
ggcacgctccaggaa

SEQ ID NO: 1326066 - DNA, 15 bp, Homo sapiens
cggcacgctccagga

SEQ ID NO: 1326067 - DNA, 15 bp, Homo sapiens
gcggcacgctccagg

SEQ ID NO: 1326068 - DNA, 15 bp, Homo sapiens
ggcggcacgctccag

SEQ ID NO: 1326069 - DNA, 15 bp, Homo sapiens
gggcggcacgctcca

SEQ ID NO: 1326070 - DNA, 15 bp, Homo sapiens
ggggcggcacgctcc

SEQ ID NO: 1326071 - DNA, 15 bp, Homo sapiens
tggggcggcacgctc

SEQ ID NO: 1326072 - DNA, 15 bp, Homo sapiens
atggggcggcacgct

SEQ ID NO: 1326073 - DNA, 15 bp, Homo sapiens
gatggggcggcacgc

SEQ ID NO: 1326074 - DNA, 15 bp, Homo sapiens
ggatggggcggcacg

SEQ ID NO: 1326075 - DNA, 15 bp, Homo sapiens
tggatggggcggcac

SEQ ID NO: 1326076 - DNA, 15 bp, Homo sapiens
gtggatggggcggca

SEQ ID NO: 1326077 - DNA, 15 bp, Homo sapiens
cgtggatggggcggc

SEQ ID NO: 1326078 - DNA, 15 bp, Homo sapiens
gcgtggatggggcgg

SEQ ID NO: 1326079 - DNA, 15 bp, Homo sapiens
ggcgtggatggggcg

SEQ ID NO: 1326080 - DNA, 15 bp, Homo sapiens
aggcgtggatggggc

SEQ ID NO: 1326081 - DNA, 15 bp, Homo sapiens
gaggcgtggatgggg

SEQ ID NO: 1326082 - DNA, 15 bp, Homo sapiens
agaggcgtggatggg

SEQ ID NO: 1326083 - DNA, 15 bp, Homo sapiens
gagaggcgtggatgg

SEQ ID NO: 1326084 - DNA, 15 bp, Homo sapiens
agagaggcgtggatg

SEQ ID NO: 1326085 - DNA, 15 bp, Homo sapiens
cagagaggcgtggat

SEQ ID NO: 1326086 - DNA, 15 bp, Homo sapiens
gcagagaggcgtgga

SEQ ID NO: 1326087 - DNA, 15 bp, Homo sapiens
agcagagaggcgtgg

SEQ ID NO: 1326088 - DNA, 15 bp, Homo sapiens
cagcagagaggcgtg

SEQ ID NO: 1326089 - DNA, 15 bp, Homo sapiens
gcagcagagaggcgt

SEQ ID NO: 1326090 - DNA, 15 bp, Homo sapiens
tgcagcagagaggcg

SEQ ID NO: 1326091 - DNA, 15 bp, Homo sapiens
ctgcagcagagaggc

SEQ ID NO: 1326092 - DNA, 15 bp, Homo sapiens
gctgcagcagagagg

SEQ ID NO: 1326093 - DNA, 15 bp, Homo sapiens
tgctgcagcagagag

SEQ ID NO: 1326094 - DNA, 15 bp, Homo sapiens
ctgctgcagcagaga

SEQ ID NO: 1326095 - DNA, 15 bp, Homo sapiens
cctgctgcagcagag

SEQ ID NO: 1326096 - DNA, 15 bp, Homo sapiens
acctgctgcagcaga

SEQ ID NO: 1326097 - DNA, 15 bp, Homo sapiens
cacctgctgcagcag

SEQ ID NO: 1326098 - DNA, 15 bp, Homo sapiens
acacctgctgcagca

SEQ ID NO: 1326099 - DNA, 15 bp, Homo sapiens
cacacctgctgcagc

SEQ ID NO: 1326100 - DNA, 15 bp, Homo sapiens
tcacacctgctgcag

SEQ ID NO: 1326101 - DNA, 15 bp, Homo sapiens
atcacacctgctgca

SEQ ID NO: 1326102 - DNA, 15 bp, Homo sapiens
catcacacctgctgc

SEQ ID NO: 1326103 - DNA, 15 bp, Homo sapiens
acatcacacctgctg

SEQ ID NO: 1326104 - DNA, 15 bp, Homo sapiens
tacatcacacctgct

SEQ ID NO: 1326105 - DNA, 15 bp, Homo sapiens
gtacatcacacctgc

SEQ ID NO: 1326106 - DNA, 15 bp, Homo sapiens
tgtacatcacacctg

SEQ ID NO: 1326107 - DNA, 15 bp, Homo sapiens
atgtacatcacacct

SEQ ID NO: 1326108 - DNA, 15 bp, Homo sapiens
tatgtacatcacacc

SEQ ID NO: 1326109 - DNA, 15 bp, Homo sapiens
gtatgtacatcacac

SEQ ID NO: 1326110 - DNA, 15 bp, Homo sapiens
tgtatgtacatcaca

SEQ ID NO: 1326111 - DNA, 15 bp, Homo sapiens
ttgtatgtacatcac

SEQ ID NO: 1326112 - DNA, 15 bp, Homo sapiens
tttgtatgtacatca

SEQ ID NO: 1326113 - DNA, 15 bp, Homo sapiens
ttttgtatgtacatc

SEQ ID NO: 1326114 - DNA, 15 bp, Homo sapiens
cttttgtatgtacat

SEQ ID NO: 1326115 - DNA, 15 bp, Homo sapiens
acttttgtatgtaca

SEQ ID NO: 1326116 - DNA, 15 bp, Homo sapiens
tacttttgtatgtac

SEQ ID NO: 1326117 - DNA, 15 bp, Homo sapiens
ctacttttgtatgta

SEQ ID NO: 1326118 - DNA, 15 bp, Homo sapiens
actacttttgtatgt

SEQ ID NO: 1326119 - DNA, 15 bp, Homo sapiens
cactacttttgtatg

SEQ ID NO: 1326120 - DNA, 15 bp, Homo sapiens
acactacttttgtat

SEQ ID NO: 1326121 - DNA, 15 bp, Homo sapiens
cacactacttttgta

SEQ ID NO: 1326122 - DNA, 15 bp, Homo sapiens
acacactacttttgt

SEQ ID NO: 1326123 - DNA, 15 bp, Homo sapiens
aacacactacttttg

SEQ ID NO: 1326124 - DNA, 15 bp, Homo sapiens
caacacactactttt

SEQ ID NO: 1326125 - DNA, 15 bp, Homo sapiens
acaacacactacttt

SEQ ID NO: 1326126 - DNA, 15 bp, Homo sapiens
aacaacacactactt

SEQ ID NO: 1326127 - DNA, 15 bp, Homo sapiens
caacaacacactact

SEQ ID NO: 1326128 - DNA, 15 bp, Homo sapiens
gcaacaacacactac

SEQ ID NO: 1326129 - DNA, 15 bp, Homo sapiens
ggcaacaacacacta

SEQ ID NO: 1326130 - DNA, 15 bp, Homo sapiens
aggcaacaacacact

SEQ ID NO: 1326131 - DNA, 15 bp, Homo sapiens
taggcaacaacacac

SEQ ID NO: 1326132 - DNA, 15 bp, Homo sapiens
gtaggcaacaacaca

SEQ ID NO: 1326133 - DNA, 15 bp, Homo sapiens
agtaggcaacaacac

SEQ ID NO: 1326134 - DNA, 15 bp, Homo sapiens
cagtaggcaacaaca

SEQ ID NO: 1326135 - DNA, 15 bp, Homo sapiens
gcagtaggcaacaac

SEQ ID NO: 1326136 - DNA, 15 bp, Homo sapiens
tgcagtaggcaacaa

SEQ ID NO: 1326137 - DNA, 15 bp, Homo sapiens
ctgcagtaggcaaca

SEQ ID NO: 1326138 - DNA, 15 bp, Homo sapiens
tctgcagtaggcaac

SEQ ID NO: 1326139 - DNA, 15 bp, Homo sapiens
gtctgcagtaggcaa

SEQ ID NO: 1326140 - DNA, 15 bp, Homo sapiens
tgtctgcagtaggca

SEQ ID NO: 1326141 - DNA, 15 bp, Homo sapiens
gtgtctgcagtaggc

SEQ ID NO: 1326142 - DNA, 15 bp, Homo sapiens
tgtgtctgcagtagg

SEQ ID NO: 1326143 - DNA, 15 bp, Homo sapiens
atgtgtctgcagtag

SEQ ID NO: 1326144 - DNA, 15 bp, Homo sapiens
aatgtgtctgcagta

SEQ ID NO: 1326145 - DNA, 15 bp, Homo sapiens
aaatgtgtctgcagt

SEQ ID NO: 1326146 - DNA, 15 bp, Homo sapiens
gaaatgtgtctgcag

SEQ ID NO: 1326147 - DNA, 15 bp, Homo sapiens
ggaaatgtgtctgca

SEQ ID NO: 1326148 - DNA, 15 bp, Homo sapiens
aggaaatgtgtctgc

SEQ ID NO: 1326149 - DNA, 15 bp, Homo sapiens
caggaaatgtgtctg

SEQ ID NO: 1326150 - DNA, 15 bp, Homo sapiens
ccaggaaatgtgtct

SEQ ID NO: 1326151 - DNA, 15 bp, Homo sapiens
tccaggaaatgtgtc

SEQ ID NO: 1326152 - DNA, 15 bp, Homo sapiens
atccaggaaatgtgt

SEQ ID NO: 1326153 - DNA, 15 bp, Homo sapiens
tatccaggaaatgtg

SEQ ID NO: 1326154 - DNA, 15 bp, Homo sapiens
atatccaggaaatgt

SEQ ID NO: 1326155 - DNA, 15 bp, Homo sapiens
aatatccaggaaatg

SEQ ID NO: 1326156 - DNA, 15 bp, Homo sapiens
aaatatccaggaaat

SEQ ID NO: 1326157 - DNA, 15 bp, Homo sapiens
aaaatatccaggaaa

SEQ ID NO: 1326158 - DNA, 15 bp, Homo sapiens
gaaaatatccaggaa

SEQ ID NO: 1326159 - DNA, 15 bp, Homo sapiens
tgaaaatatccagga

SEQ ID NO: 1326160 - DNA, 15 bp, Homo sapiens
ctgaaaatatccagg

SEQ ID NO: 1326161 - DNA, 15 bp, Homo sapiens
cctgaaaatatccag

SEQ ID NO: 1326162 - DNA, 15 bp, Homo sapiens
tcctgaaaatatcca

SEQ ID NO: 1326163 - DNA, 15 bp, Homo sapiens
gtcctgaaaatatcc

SEQ ID NO: 1326164 - DNA, 15 bp, Homo sapiens
tgtcctgaaaatatc

SEQ ID NO: 1326165 - DNA, 15 bp, Homo sapiens
atgtcctgaaaatat

SEQ ID NO: 1326166 - DNA, 15 bp, Homo sapiens
aatgtcctgaaaata

SEQ ID NO: 1326167 - DNA, 15 bp, Homo sapiens
aaatgtcctgaaaat

SEQ ID NO: 1326168 - DNA, 15 bp, Homo sapiens
taaatgtcctgaaaa

SEQ ID NO: 1326169 - DNA, 15 bp, Homo sapiens
ttaaatgtcctgaaa

SEQ ID NO: 1326170 - DNA, 15 bp, Homo sapiens
cttaaatgtcctgaa

SEQ ID NO: 1326171 - DNA, 15 bp, Homo sapiens
tcttaaatgtcctga

SEQ ID NO: 1326172 - DNA, 15 bp, Homo sapiens
ttcttaaatgtcctg

SEQ ID NO: 1326173 - DNA, 15 bp, Homo sapiens
cttcttaaatgtcct

SEQ ID NO: 1326174 - DNA, 15 bp, Homo sapiens
ccttcttaaatgtcc

SEQ ID NO: 1326175 - DNA, 15 bp, Homo sapiens
gccttcttaaatgtc

SEQ ID NO: 1326176 - DNA, 15 bp, Homo sapiens
ggccttcttaaatgt

SEQ ID NO: 1326177 - DNA, 15 bp, Homo sapiens
tggccttcttaaatg

SEQ ID NO: 1326178 - DNA, 15 bp, Homo sapiens
ctggccttcttaaat

SEQ ID NO: 1326179 - DNA, 15 bp, Homo sapiens
actggccttcttaaa

SEQ ID NO: 1326180 - DNA, 15 bp, Homo sapiens
tactggccttcttaa

SEQ ID NO: 1326181 - DNA, 15 bp, Homo sapiens
ttactggccttctta

SEQ ID NO: 1326182 - DNA, 15 bp, Homo sapiens
gttactggccttctt

SEQ ID NO: 1326183 - DNA, 15 bp, Homo sapiens
ggttactggccttct

SEQ ID NO: 1326184 - DNA, 15 bp, Homo sapiens
tggttactggccttc

SEQ ID NO: 1326185 - DNA, 15 bp, Homo sapiens
ctggttactggcctt

SEQ ID NO: 1326186 - DNA, 15 bp, Homo sapiens
cctggttactggcct

SEQ ID NO: 1326187 - DNA, 15 bp, Homo sapiens
acctggttactggcc

SEQ ID NO: 1326188 - DNA, 15 bp, Homo sapiens
gacctggttactggc

SEQ ID NO: 1326189 - DNA, 15 bp, Homo sapiens
tgacctggttactgg

SEQ ID NO: 1326190 - DNA, 15 bp, Homo sapiens
atgacctggttactg

SEQ ID NO: 1326191 - DNA, 15 bp, Homo sapiens
catgacctggttact

SEQ ID NO: 1326192 - DNA, 15 bp, Homo sapiens
acatgacctggttac

SEQ ID NO: 1326193 - DNA, 15 bp, Homo sapiens
tacatgacctggtta

SEQ ID NO: 1326194 - DNA, 15 bp, Homo sapiens
ctacatgacctggtt

SEQ ID NO: 1326195 - DNA, 15 bp, Homo sapiens
gctacatgacctggt

SEQ ID NO: 1326196 - DNA, 15 bp, Homo sapiens
tgctacatgacctgg

SEQ ID NO: 1326197 - DNA, 15 bp, Homo sapiens
atgctacatgacctg

SEQ ID NO: 1326198 - DNA, 15 bp, Homo sapiens
aatgctacatgacct

SEQ ID NO: 1326199 - DNA, 15 bp, Homo sapiens
gaatgctacatgacc

SEQ ID NO: 1326200 - DNA, 15 bp, Homo sapiens
agaatgctacatgac

SEQ ID NO: 1326201 - DNA, 15 bp, Homo sapiens
gagaatgctacatga

SEQ ID NO: 1326202 - DNA, 15 bp, Homo sapiens
agagaatgctacatg

SEQ ID NO: 1326203 - DNA, 15 bp, Homo sapiens
cagagaatgctacat

SEQ ID NO: 1326204 - DNA, 15 bp, Homo sapiens
tcagagaatgctaca

SEQ ID NO: 1326205 - DNA, 15 bp, Homo sapiens
ctcagagaatgctac

SEQ ID NO: 1326206 - DNA, 15 bp, Homo sapiens
actcagagaatgcta

SEQ ID NO: 1326207 - DNA, 15 bp, Homo sapiens
cactcagagaatgct

SEQ ID NO: 1326208 - DNA, 15 bp, Homo sapiens
acactcagagaatgc

SEQ ID NO: 1326209 - DNA, 15 bp, Homo sapiens
cacactcagagaatg

SEQ ID NO: 1326210 - DNA, 15 bp, Homo sapiens
acacactcagagaat

SEQ ID NO: 1326211 - DNA, 15 bp, Homo sapiens
tacacactcagagaa

SEQ ID NO: 1326212 - DNA, 15 bp, Homo sapiens
atacacactcagaga

SEQ ID NO: 1326213 - DNA, 15 bp, Homo sapiens
tatacacactcagag

SEQ ID NO: 1326214 - DNA, 15 bp, Homo sapiens
atatacacactcaga

SEQ ID NO: 1326215 - DNA, 15 bp, Homo sapiens
tatatacacactcag

SEQ ID NO: 1326216 - DNA, 15 bp, Homo sapiens
atatatacacactca

SEQ ID NO: 1326217 - DNA, 15 bp, Homo sapiens
catatatacacactc

SEQ ID NO: 1326218 - DNA, 15 bp, Homo sapiens
ccatatatacacact

SEQ ID NO: 1326219 - DNA, 15 bp, Homo sapiens
accatatatacacac

SEQ ID NO: 1326220 - DNA, 15 bp, Homo sapiens
caccatatatacaca

SEQ ID NO: 1326221 - DNA, 15 bp, Homo sapiens
ccaccatatatacac

SEQ ID NO: 1326222 - DNA, 15 bp, Homo sapiens
cccaccatatataca

SEQ ID NO: 1326223 - DNA, 15 bp, Homo sapiens
ccccaccatatatac

SEQ ID NO: 1326224 - DNA, 15 bp, Homo sapiens
accccaccatatata

SEQ ID NO: 1326225 - DNA, 15 bp, Homo sapiens
caccccaccatatat

SEQ ID NO: 1326226 - DNA, 15 bp, Homo sapiens
ccaccccaccatata

SEQ ID NO: 1326227 - DNA, 15 bp, Homo sapiens
cccaccccaccatat

SEQ ID NO: 1326228 - DNA, 15 bp, Homo sapiens
ccccaccccaccata

SEQ ID NO: 1326229 - DNA, 15 bp, Homo sapiens
tccccaccccaccat

SEQ ID NO: 1326230 - DNA, 15 bp, Homo sapiens
ctccccaccccacca

SEQ ID NO: 1326231 - DNA, 15 bp, Homo sapiens
cctccccaccccacc

SEQ ID NO: 1326232 - DNA, 15 bp, Homo sapiens
acctccccaccccac

SEQ ID NO: 1326233 - DNA, 15 bp, Homo sapiens
aacctccccacccca

SEQ ID NO: 1326234 - DNA, 15 bp, Homo sapiens
caacctccccacccc

SEQ ID NO: 1326235 - DNA, 15 bp, Homo sapiens
tcaacctccccaccc

SEQ ID NO: 1326236 - DNA, 15 bp, Homo sapiens
atcaacctccccacc

SEQ ID NO: 1326237 - DNA, 15 bp, Homo sapiens
aatcaacctccccac

SEQ ID NO: 1326238 - DNA, 15 bp, Homo sapiens
aaatcaacctcccca

SEQ ID NO: 1326239 - DNA, 15 bp, Homo sapiens
caaatcaacctcccc

SEQ ID NO: 1326240 - DNA, 15 bp, Homo sapiens
tcaaatcaacctccc

SEQ ID NO: 1326241 - DNA, 15 bp, Homo sapiens
ctcaaatcaacctcc

SEQ ID NO: 1326242 - DNA, 15 bp, Homo sapiens
actcaaatcaacctc

SEQ ID NO: 1326243 - DNA, 15 bp, Homo sapiens
cactcaaatcaacct

SEQ ID NO: 1326244 - DNA, 15 bp, Homo sapiens
acactcaaatcaacc

SEQ ID NO: 1326245 - DNA, 15 bp, Homo sapiens
gacactcaaatcaac

SEQ ID NO: 1326246 - DNA, 15 bp, Homo sapiens
agacactcaaatcaa

SEQ ID NO: 1326247 - DNA, 15 bp, Homo sapiens
cagacactcaaatca

SEQ ID NO: 1326248 - DNA, 15 bp, Homo sapiens
acagacactcaaatc

SEQ ID NO: 1326249 - DNA, 15 bp, Homo sapiens
cacagacactcaaat

SEQ ID NO: 1326250 - DNA, 15 bp, Homo sapiens
gcacagacactcaaa

SEQ ID NO: 1326251 - DNA, 15 bp, Homo sapiens
tgcacagacactcaa

SEQ ID NO: 1326252 - DNA, 15 bp, Homo sapiens
atgcacagacactca

SEQ ID NO: 1326253 - DNA, 15 bp, Homo sapiens
catgcacagacactc

SEQ ID NO: 1326254 - DNA, 15 bp, Homo sapiens
gcatgcacagacact

SEQ ID NO: 1326255 - DNA, 15 bp, Homo sapiens
cgcatgcacagacac

SEQ ID NO: 1326256 - DNA, 15 bp, Homo sapiens
acgcatgcacagaca

SEQ ID NO: 1326257 - DNA, 15 bp, Homo sapiens
tacgcatgcacagac

SEQ ID NO: 1326258 - DNA, 15 bp, Homo sapiens
atacgcatgcacaga

SEQ ID NO: 1326259 - DNA, 15 bp, Homo sapiens
tatacgcatgcacag

SEQ ID NO: 1326260 - DNA, 15 bp, Homo sapiens
atatacgcatgcaca

SEQ ID NO: 1326261 - DNA, 15 bp, Homo sapiens
tatatacgcatgcac

SEQ ID NO: 1326262 - DNA, 15 bp, Homo sapiens
gtatatacgcatgca

SEQ ID NO: 1326263 - DNA, 15 bp, Homo sapiens
agtatatacgcatgc

SEQ ID NO: 1326264 - DNA, 15 bp, Homo sapiens
aagtatatacgcatg

SEQ ID NO: 1326265 - DNA, 15 bp, Homo sapiens
gaagtatatacgcat

SEQ ID NO: 1326266 - DNA, 15 bp, Homo sapiens
ggaagtatatacgca

SEQ ID NO: 1326267 - DNA, 15 bp, Homo sapiens
aggaagtatatacgc

SEQ ID NO: 1326268 - DNA, 15 bp, Homo sapiens
taggaagtatatacg

SEQ ID NO: 1326269 - DNA, 15 bp, Homo sapiens
ctaggaagtatatac

SEQ ID NO: 1326270 - DNA, 15 bp, Homo sapiens
actaggaagtatata

SEQ ID NO: 1326271 - DNA, 15 bp, Homo sapiens
aagaagtttatccaa

SEQ ID NO: 1326272 - DNA, 15 bp, Homo sapiens
aaagaagtttatcca

SEQ ID NO: 1326273 - DNA, 15 bp, Homo sapiens
aaaagaagtttatcc

SEQ ID NO: 1326274 - DNA, 15 bp, Homo sapiens
aaaaagaagtttatc

SEQ ID NO: 1326275 - DNA, 15 bp, Homo sapiens
aaaaaagaagtttat

SEQ ID NO: 1326276 - DNA, 15 bp, Homo sapiens
aaaaaaagaagttta

SEQ ID NO: 1326277 - DNA, 15 bp, Homo sapiens
aaaaaaaagaagttt

SEQ ID NO: 1326278 - DNA, 15 bp, Homo sapiens
aaaaaaaaagaagtt

SEQ ID NO: 1326279 - DNA, 15 bp, Homo sapiens
gtggcttgaacccag

SEQ ID NO: 1326280 - DNA, 15 bp, Homo sapiens
agtggcttgaaccca

SEQ ID NO: 1326281 - DNA, 15 bp, Homo sapiens
gagtggcttgaaccc

SEQ ID NO: 1326282 - DNA, 15 bp, Homo sapiens
agagtggcttgaacc

SEQ ID NO: 1326283 - DNA, 15 bp, Homo sapiens
gagagtggcttgaac

SEQ ID NO: 1326284 - DNA, 15 bp, Homo sapiens
ggagagtggcttgaa

SEQ ID NO: 1326285 - DNA, 15 bp, Homo sapiens
aggagagtggcttga

SEQ ID NO: 1326286 - DNA, 15 bp, Homo sapiens
caggagagtggcttg

SEQ ID NO: 1326287 - DNA, 15 bp, Homo sapiens
gcaggagagtggctt

SEQ ID NO: 1326288 - DNA, 15 bp, Homo sapiens
ggcaggagagtggct

SEQ ID NO: 1326289 - DNA, 15 bp, Homo sapiens
ttgaggcaggagagt

SEQ ID NO: 1326290 - DNA, 15 bp, Homo sapiens
gttgaggcaggagag

SEQ ID NO: 1326291 - DNA, 15 bp, Homo sapiens
gagaggttgaggcag

SEQ ID NO: 1326292 - DNA, 15 bp, Homo sapiens
cgagaggttgaggca

SEQ ID NO: 1326293 - DNA, 15 bp, Homo sapiens
tcgagaggttgaggc

SEQ ID NO: 1326294 - DNA, 15 bp, Homo sapiens
ctcgagaggttgagg

SEQ ID NO: 1326295 - DNA, 15 bp, Homo sapiens
actcgagaggttgag

SEQ ID NO: 1326296 - DNA, 15 bp, Homo sapiens
tactcgagaggttga

SEQ ID NO: 1326297 - DNA, 15 bp, Homo sapiens
ctactcgagaggttg

SEQ ID NO: 1326298 - DNA, 15 bp, Homo sapiens
gctactcgagaggtt

SEQ ID NO: 1326299 - DNA, 15 bp, Homo sapiens
agctactcgagaggt

SEQ ID NO: 1326300 - DNA, 15 bp, Homo sapiens
tccagctactcgaga

SEQ ID NO: 1326301 - DNA, 15 bp, Homo sapiens
ttccagctactcgag

SEQ ID NO: 1326302 - DNA, 15 bp, Homo sapiens
gttccagctactcga

SEQ ID NO: 1326303 - DNA, 15 bp, Homo sapiens
agttccagctactcg

SEQ ID NO: 1326304 - DNA, 15 bp, Homo sapiens
tgcctgtagttccag

SEQ ID NO: 1326305 - DNA, 15 bp, Homo sapiens
atgcctgtagttcca

SEQ ID NO: 1326306 - DNA, 15 bp, Homo sapiens
catgcctgtagttcc

SEQ ID NO: 1326307 - DNA, 15 bp, Homo sapiens
gcatgcctgtagttc

SEQ ID NO: 1326308 - DNA, 15 bp, Homo sapiens
tgcatgcctgtagtt

SEQ ID NO: 1326309 - DNA, 15 bp, Homo sapiens
aggcgtggtggtgca

SEQ ID NO: 1326310 - DNA, 15 bp, Homo sapiens
caggcgtggtggtgc

SEQ ID NO: 1326311 - DNA, 15 bp, Homo sapiens
aacaaaattagccag

SEQ ID NO: 1326312 - DNA, 15 bp, Homo sapiens
gaacaaaattagcca

SEQ ID NO: 1326313 - DNA, 15 bp, Homo sapiens
cgaacaaaattagcc

SEQ ID NO: 1326314 - DNA, 15 bp, Homo sapiens
acgaacaaaattagc

SEQ ID NO: 1326315 - DNA, 15 bp, Homo sapiens
aacgaacaaaattag

SEQ ID NO: 1326316 - DNA, 15 bp, Homo sapiens
aaacgaacaaaatta

SEQ ID NO: 1326317 - DNA, 15 bp, Homo sapiens
caaacgaacaaaatt

SEQ ID NO: 1326318 - DNA, 15 bp, Homo sapiens
acaaacgaacaaaat

SEQ ID NO: 1326319 - DNA, 15 bp, Homo sapiens
aacaaacgaacaaaa

SEQ ID NO: 1326320 - DNA, 15 bp, Homo sapiens
caaacaaacgaacaa

SEQ ID NO: 1326321 - DNA, 15 bp, Homo sapiens
acaaacaaacgaaca

SEQ ID NO: 1326322 - DNA, 15 bp, Homo sapiens
aacaaacaaacgaac

SEQ ID NO: 1326323 - DNA, 15 bp, Homo sapiens
caaacaaacaaacga

SEQ ID NO: 1326324 - DNA, 15 bp, Homo sapiens
acaaacaaacaaacg

SEQ ID NO: 1326325 - DNA, 15 bp, Homo sapiens
tcaaaaacaaacaaa

SEQ ID NO: 1326326 - DNA, 15 bp, Homo sapiens
ctcaaaaacaaacaa

SEQ ID NO: 1326327 - DNA, 15 bp, Homo sapiens
tctcaaaaacaaaca

SEQ ID NO: 1326328 - DNA, 15 bp, Homo sapiens
gtctcaaaaacaaac

SEQ ID NO: 1326329 - DNA, 15 bp, Homo sapiens
cgtctcaaaaacaaa

SEQ ID NO: 1326330 - DNA, 15 bp, Homo sapiens
ccgtctcaaaaacaa

SEQ ID NO: 1326331 - DNA, 15 bp, Homo sapiens
tccgtctcaaaaaca

SEQ ID NO: 1326332 - DNA, 15 bp, Homo sapiens
ctccgtctcaaaaac

SEQ ID NO: 1326333 - DNA, 15 bp, Homo sapiens
agaaactccgtctca

SEQ ID NO: 1326334 - DNA, 15 bp, Homo sapiens
gagaaactccgtctc

SEQ ID NO: 1326335 - DNA, 15 bp, Homo sapiens
agagaaactccgtct

SEQ ID NO: 1326336 - DNA, 15 bp, Homo sapiens
gagagaaactccgtc

SEQ ID NO: 1326337 - DNA, 15 bp, Homo sapiens
agagagaaactccgt

SEQ ID NO: 1326338 - DNA, 15 bp, Homo sapiens
tagagagaaactccg

SEQ ID NO: 1326339 - DNA, 15 bp, Homo sapiens
atagagagaaactcc

SEQ ID NO: 1326340 - DNA, 15 bp, Homo sapiens
gatagagagaaactc

SEQ ID NO: 1326341 - DNA, 15 bp, Homo sapiens
cgatagagagaaact

SEQ ID NO: 1326342 - DNA, 15 bp, Homo sapiens
gcgatagagagaaac

SEQ ID NO: 1326343 - DNA, 15 bp, Homo sapiens
ggcgatagagagaaa

SEQ ID NO: 1326344 - DNA, 15 bp, Homo sapiens
gggcgatagagagaa

SEQ ID NO: 1326345 - DNA, 15 bp, Homo sapiens
tgggcgatagagaga

SEQ ID NO: 1326346 - DNA, 15 bp, Homo sapiens
ctgggcgatagagag

SEQ ID NO: 1326347 - DNA, 15 bp, Homo sapiens
tctgggcgatagaga

SEQ ID NO: 1326348 - DNA, 15 bp, Homo sapiens
gtctgggcgatagag

SEQ ID NO: 1326349 - DNA, 15 bp, Homo sapiens
agtctgggcgataga

SEQ ID NO: 1326350 - DNA, 15 bp, Homo sapiens
cagtctgggcgatag

SEQ ID NO: 1326351 - DNA, 15 bp, Homo sapiens
ccagtctgggcgata

SEQ ID NO: 1326352 - DNA, 15 bp, Homo sapiens
tccagtctgggcgat

SEQ ID NO: 1326353 - DNA, 15 bp, Homo sapiens
accgagattgcacca

SEQ ID NO: 1326354 - DNA, 15 bp, Homo sapiens
aaccgagattgcacc

SEQ ID NO: 1326355 - DNA, 15 bp, Homo sapiens
gaaccgagattgcac

SEQ ID NO: 1326356 - DNA, 15 bp, Homo sapiens
tgaaccgagattgca

SEQ ID NO: 1326357 - DNA, 15 bp, Homo sapiens
gtgaaccgagattgc

SEQ ID NO: 1326358 - DNA, 15 bp, Homo sapiens
agtgaaccgagattg

SEQ ID NO: 1326359 - DNA, 15 bp, Homo sapiens
cagtgaaccgagatt

SEQ ID NO: 1326360 - DNA, 15 bp, Homo sapiens
attgcagtgaaccga

SEQ ID NO: 1326361 - DNA, 15 bp, Homo sapiens
gattgcagtgaaccg

SEQ ID NO: 1326362 - DNA, 15 bp, Homo sapiens
agattgcagtgaacc

SEQ ID NO: 1326363 - DNA, 15 bp, Homo sapiens
gagattgcagtgaac

SEQ ID NO: 1326364 - DNA, 15 bp, Homo sapiens
agagattgcagtgaa

SEQ ID NO: 1326365 - DNA, 15 bp, Homo sapiens
tagagattgcagtga

SEQ ID NO: 1326366 - DNA, 15 bp, Homo sapiens
gtagagattgcagtg

SEQ ID NO: 1326367 - DNA, 15 bp, Homo sapiens
ggtagagattgcagt

SEQ ID NO: 1326368 - DNA, 15 bp, Homo sapiens
aggtagagattgcag

SEQ ID NO: 1326369 - DNA, 15 bp, Homo sapiens
gaggtagagattgca

SEQ ID NO: 1326370 - DNA, 15 bp, Homo sapiens
ggaggtagagattgc

SEQ ID NO: 1326371 - DNA, 15 bp, Homo sapiens
gggaggtagagattg

SEQ ID NO: 1326372 - DNA, 15 bp, Homo sapiens
cgggaggtagagatt

SEQ ID NO: 1326373 - DNA, 15 bp, Homo sapiens
ccgggaggtagagat

SEQ ID NO: 1326374 - DNA, 15 bp, Homo sapiens
cccgggaggtagaga

SEQ ID NO: 1326375 - DNA, 15 bp, Homo sapiens
acccgggaggtagag

SEQ ID NO: 1326376 - DNA, 15 bp, Homo sapiens
aacccgggaggtaga

SEQ ID NO: 1326377 - DNA, 15 bp, Homo sapiens
gaacccgggaggtag

SEQ ID NO: 1326378 - DNA, 15 bp, Homo sapiens
tgaacccgggaggta

SEQ ID NO: 1326379 - DNA, 15 bp, Homo sapiens
ccttgaacccgggag

SEQ ID NO: 1326380 - DNA, 15 bp, Homo sapiens
cccttgaacccggga

SEQ ID NO: 1326381 - DNA, 15 bp, Homo sapiens
tcccttgaacccggg

SEQ ID NO: 1326382 - DNA, 15 bp, Homo sapiens
atcccttgaacccgg

SEQ ID NO: 1326383 - DNA, 15 bp, Homo sapiens
aatcccttgaacccg

SEQ ID NO: 1326384 - DNA, 15 bp, Homo sapiens
aagctactcgggagg

SEQ ID NO: 1326385 - DNA, 15 bp, Homo sapiens
caagctactcgggag

SEQ ID NO: 1326386 - DNA, 15 bp, Homo sapiens
ccaagctactcggga

SEQ ID NO: 1326387 - DNA, 15 bp, Homo sapiens
tccaagctactcggg

SEQ ID NO: 1326388 - DNA, 15 bp, Homo sapiens
gtccaagctactcgg

SEQ ID NO: 1326389 - DNA, 15 bp, Homo sapiens
agtccaagctactcg

SEQ ID NO: 1326390 - DNA, 15 bp, Homo sapiens
tagtccaagctactc

SEQ ID NO: 1326391 - DNA, 15 bp, Homo sapiens
gtagtccaagctact

SEQ ID NO: 1326392 - DNA, 15 bp, Homo sapiens
tgtagtccaagctac

SEQ ID NO: 1326393 - DNA, 15 bp, Homo sapiens
ctgtagtccaagcta

SEQ ID NO: 1326394 - DNA, 15 bp, Homo sapiens
cctgtagtccaagct

SEQ ID NO: 1326395 - DNA, 15 bp, Homo sapiens
gcctgtagtccaagc

SEQ ID NO: 1326396 - DNA, 15 bp, Homo sapiens
cgcctgtagtccaag

SEQ ID NO: 1326397 - DNA, 15 bp, Homo sapiens
gcgcctgtagtccaa

SEQ ID NO: 1326398 - DNA, 15 bp, Homo sapiens
ggcgcctgtagtcca

SEQ ID NO: 1326399 - DNA, 15 bp, Homo sapiens
atggtggcgggcgcc

SEQ ID NO: 1326400 - DNA, 15 bp, Homo sapiens
catggtggcgggcgc

SEQ ID NO: 1326401 - DNA, 15 bp, Homo sapiens
gcatggtggcgggcg

SEQ ID NO: 1326402 - DNA, 15 bp, Homo sapiens
ggcatggtggcgggc

SEQ ID NO: 1326403 - DNA, 15 bp, Homo sapiens
gggcatggtggcggg

SEQ ID NO: 1326404 - DNA, 15 bp, Homo sapiens
tgggcatggtggcgg

SEQ ID NO: 1326405 - DNA, 15 bp, Homo sapiens
ctgggcatggtggcg

SEQ ID NO: 1326406 - DNA, 15 bp, Homo sapiens
aggcggatcacgagg

SEQ ID NO: 1326407 - DNA, 15 bp, Homo sapiens
caggcggatcacgag

SEQ ID NO: 1326408 - DNA, 15 bp, Homo sapiens
gttgggaggctgagg

SEQ ID NO: 1326409 - DNA, 15 bp, Homo sapiens
cgttgggaggctgag

SEQ ID NO: 1326410 - DNA, 15 bp, Homo sapiens
acgttgggaggctga

SEQ ID NO: 1326411 - DNA, 15 bp, Homo sapiens
cacgttgggaggctg

SEQ ID NO: 1326412 - DNA, 15 bp, Homo sapiens
gcacgttgggaggct

SEQ ID NO: 1326413 - DNA, 15 bp, Homo sapiens
agcacgttgggaggc

SEQ ID NO: 1326414 - DNA, 15 bp, Homo sapiens
cagcacgttgggagg

SEQ ID NO: 1326415 - DNA, 15 bp, Homo sapiens
ccagcacgttgggag

SEQ ID NO: 1326416 - DNA, 15 bp, Homo sapiens
tggccgggcacggtg

SEQ ID NO: 1326417 - DNA, 15 bp, Homo sapiens
ttggccgggcacggt

SEQ ID NO: 1326418 - DNA, 15 bp, Homo sapiens
attggccgggcacgg

SEQ ID NO: 1326419 - DNA, 15 bp, Homo sapiens
aattggccgggcacg

SEQ ID NO: 1326420 - DNA, 15 bp, Homo sapiens
aaattggccgggcac

SEQ ID NO: 1326421 - DNA, 15 bp, Homo sapiens
aaaattggccgggca

SEQ ID NO: 1326422 - DNA, 15 bp, Homo sapiens
aaaaattggccgggc

SEQ ID NO: 1326423 - DNA, 15 bp, Homo sapiens
caaaaattggccggg

SEQ ID NO: 1326424 - DNA, 15 bp, Homo sapiens
acaaaaattggccgg

SEQ ID NO: 1326425 - DNA, 15 bp, Homo sapiens
tacaaaaattggccg

SEQ ID NO: 1326426 - DNA, 15 bp, Homo sapiens
atacaaaaattggcc

SEQ ID NO: 1326427 - DNA, 15 bp, Homo sapiens
aatacaaaaattggc

SEQ ID NO: 1326428 - DNA, 15 bp, Homo sapiens
aaatacaaaaattgg

SEQ ID NO: 1326429 - DNA, 15 bp, Homo sapiens
aaaatacaaaaattg

SEQ ID NO: 1326430 - DNA, 15 bp, Homo sapiens
ctaaaaaaaaaaaat

SEQ ID NO: 1326431 - DNA, 15 bp, Homo sapiens
gaaacctgtctctac

SEQ ID NO: 1326432 - DNA, 15 bp, Homo sapiens
tgaaacctgtctcta

SEQ ID NO: 1326433 - DNA, 15 bp, Homo sapiens
gtgaaacctgtctct

SEQ ID NO: 1326434 - DNA, 15 bp, Homo sapiens
ggtgaaacctgtctc

SEQ ID NO: 1326435 - DNA, 15 bp, Homo sapiens
tggtgaaacctgtct

SEQ ID NO: 1326436 - DNA, 15 bp, Homo sapiens
atggtgaaacctgtc

SEQ ID NO: 1326437 - DNA, 15 bp, Homo sapiens
catggtgaaacctgt

SEQ ID NO: 1326438 - DNA, 15 bp, Homo sapiens
acatggtgaaacctg

SEQ ID NO: 1326439 - DNA, 15 bp, Homo sapiens
aacatggtgaaacct

SEQ ID NO: 1326440 - DNA, 15 bp, Homo sapiens
tttgagatcagcctg

SEQ ID NO: 1326441 - DNA, 15 bp, Homo sapiens
gtttgagatcagcct

SEQ ID NO: 1326442 - DNA, 15 bp, Homo sapiens
agtttgagatcagcc

SEQ ID NO: 1326443 - DNA, 15 bp, Homo sapiens
ggagtttgagatcag

SEQ ID NO: 1326444 - DNA, 15 bp, Homo sapiens
aggagtttgagatca

SEQ ID NO: 1326445 - DNA, 15 bp, Homo sapiens
caggagtttgagatc

SEQ ID NO: 1326446 - DNA, 15 bp, Homo sapiens
tcaggagtttgagat

SEQ ID NO: 1326447 - DNA, 15 bp, Homo sapiens
agtttttctttcttt

SEQ ID NO: 1326448 - DNA, 15 bp, Homo sapiens
cagtttttctttctt

SEQ ID NO: 1326449 - DNA, 15 bp, Homo sapiens
tcagtttttctttct

SEQ ID NO: 1326450 - DNA, 15 bp, Homo sapiens
ctcagtttttctttc

SEQ ID NO: 1326451 - DNA, 15 bp, Homo sapiens
actcagtttttcttt

SEQ ID NO: 1326452 - DNA, 15 bp, Homo sapiens
aactcagtttttctt

SEQ ID NO: 1326453 - DNA, 15 bp, Homo sapiens
gaactcagtttttct

SEQ ID NO: 1326454 - DNA, 15 bp, Homo sapiens
agaactcagtttttc

SEQ ID NO: 1326455 - DNA, 15 bp, Homo sapiens
aagaactcagttttt

SEQ ID NO: 1326456 - DNA, 15 bp, Homo sapiens
aaagaactcagtttt

SEQ ID NO: 1326457 - DNA, 15 bp, Homo sapiens
aaaagaactcagttt

SEQ ID NO: 1326458 - DNA, 15 bp, Homo sapiens
aaaaagaactcagtt

SEQ ID NO: 1326459 - DNA, 15 bp, Homo sapiens
aaaaaagaactcagt

SEQ ID NO: 1326460 - DNA, 15 bp, Homo sapiens
aaaaaaagaactcag

SEQ ID NO: 1326461 - DNA, 15 bp, Homo sapiens
aaaaaaaagaactca

SEQ ID NO: 1326462 - DNA, 15 bp, Homo sapiens
taaaaaaaagaactc

SEQ ID NO: 1326463 - DNA, 15 bp, Homo sapiens
ttaaaaaaaagaact

SEQ ID NO: 1326464 - DNA, 15 bp, Homo sapiens
gttaaaaaaaagaac

SEQ ID NO: 1326465 - DNA, 15 bp, Homo sapiens
agttaaaaaaaagaa

SEQ ID NO: 1326466 - DNA, 15 bp, Homo sapiens
aagttaaaaaaaaga

SEQ ID NO: 1326467 - DNA, 15 bp, Homo sapiens
aaagttaaaaaaaag

SEQ ID NO: 1326468 - DNA, 15 bp, Homo sapiens
gaaagttaaaaaaaa

SEQ ID NO: 1326469 - DNA, 15 bp, Homo sapiens
agaaagttaaaaaaa

SEQ ID NO: 1326470 - DNA, 15 bp, Homo sapiens
aagaaagttaaaaaa

SEQ ID NO: 1326471 - DNA, 15 bp, Homo sapiens
aaagaaagttaaaaa

SEQ ID NO: 1326472 - DNA, 15 bp, Homo sapiens
aaaagaaagttaaaa

SEQ ID NO: 1326473 - DNA, 15 bp, Homo sapiens
aaaaagaaagttaaa

SEQ ID NO: 1326474 - DNA, 15 bp, Homo sapiens
aaaaaagaaagttaa

SEQ ID NO: 1326475 - DNA, 15 bp, Homo sapiens
aaaaaaagaaagtta

SEQ ID NO: 1326476 - DNA, 15 bp, Homo sapiens
taaaaaaagaaagtt

SEQ ID NO: 1326477 - DNA, 15 bp, Homo sapiens
ctaaaaaaagaaagt

SEQ ID NO: 1326478 - DNA, 15 bp, Homo sapiens
tctaaaaaaagaaag

SEQ ID NO: 1326479 - DNA, 15 bp, Homo sapiens
ctctaaaaaaagaaa

SEQ ID NO: 1326480 - DNA, 15 bp, Homo sapiens
tctctaaaaaaagaa

SEQ ID NO: 1326481 - DNA, 15 bp, Homo sapiens
gtctctaaaaaaaga

SEQ ID NO: 1326482 - DNA, 15 bp, Homo sapiens
tgtctctaaaaaaag

SEQ ID NO: 1326483 - DNA, 15 bp, Homo sapiens
tctgtctctaaaaaa

SEQ ID NO: 1326484 - DNA, 15 bp, Homo sapiens
ctctgtctctaaaaa

SEQ ID NO: 1326485 - DNA, 15 bp, Homo sapiens
actctgtctctaaaa

SEQ ID NO: 1326486 - DNA, 15 bp, Homo sapiens
gactctgtctctaaa

SEQ ID NO: 1326487 - DNA, 15 bp, Homo sapiens
agactctgtctctaa

SEQ ID NO: 1326488 - DNA, 15 bp, Homo sapiens
gagactctgtctcta

SEQ ID NO: 1326489 - DNA, 15 bp, Homo sapiens
tgagactctgtctct

SEQ ID NO: 1326490 - DNA, 15 bp, Homo sapiens
atggagtgagactct

SEQ ID NO: 1326491 - DNA, 15 bp, Homo sapiens
gatggagtgagactc

SEQ ID NO: 1326492 - DNA, 15 bp, Homo sapiens
tgatggagtgagact

SEQ ID NO: 1326493 - DNA, 15 bp, Homo sapiens
gtgatggagtgagac

SEQ ID NO: 1326494 - DNA, 15 bp, Homo sapiens
ggtgatggagtgaga

SEQ ID NO: 1326495 - DNA, 15 bp, Homo sapiens
atgggtgatggagtg

SEQ ID NO: 1326496 - DNA, 15 bp, Homo sapiens
catgggtgatggagt

SEQ ID NO: 1326497 - DNA, 15 bp, Homo sapiens
gcatgggtgatggag

SEQ ID NO: 1326498 - DNA, 15 bp, Homo sapiens
agcatgggtgatgga

SEQ ID NO: 1326499 - DNA, 15 bp, Homo sapiens
cagcatgggtgatgg

SEQ ID NO: 1326500 - DNA, 15 bp, Homo sapiens
ccagcatgggtgatg

SEQ ID NO: 1326501 - DNA, 15 bp, Homo sapiens
tccagcatgggtgat

SEQ ID NO: 1326502 - DNA, 15 bp, Homo sapiens
ctccagcatgggtga

SEQ ID NO: 1326503 - DNA, 15 bp, Homo sapiens
actccagcatgggtg

SEQ ID NO: 1326504 - DNA, 15 bp, Homo sapiens
tactccagcatgggt

SEQ ID NO: 1326505 - DNA, 15 bp, Homo sapiens
gtactccagcatggg

SEQ ID NO: 1326506 - DNA, 15 bp, Homo sapiens
tgtactccagcatgg

SEQ ID NO: 1326507 - DNA, 15 bp, Homo sapiens
ctgtactccagcatg

SEQ ID NO: 1326508 - DNA, 15 bp, Homo sapiens
actgtactccagcat

SEQ ID NO: 1326509 - DNA, 15 bp, Homo sapiens
cactgtactccagca

SEQ ID NO: 1326510 - DNA, 15 bp, Homo sapiens
cgcaccactgtactc

SEQ ID NO: 1326511 - DNA, 15 bp, Homo sapiens
tcgcaccactgtact

SEQ ID NO: 1326512 - DNA, 15 bp, Homo sapiens
atcgcaccactgtac

SEQ ID NO: 1326513 - DNA, 15 bp, Homo sapiens
gatcgcaccactgta

SEQ ID NO: 1326514 - DNA, 15 bp, Homo sapiens
agatcgcaccactgt

SEQ ID NO: 1326515 - DNA, 15 bp, Homo sapiens
attgcagtgagccaa

SEQ ID NO: 1326516 - DNA, 15 bp, Homo sapiens
gattgcagtgagcca

SEQ ID NO: 1326517 - DNA, 15 bp, Homo sapiens
agattgcagtgagcc

SEQ ID NO: 1326518 - DNA, 15 bp, Homo sapiens
aagattgcagtgagc

SEQ ID NO: 1326519 - DNA, 15 bp, Homo sapiens
caagattgcagtgag

SEQ ID NO: 1326520 - DNA, 15 bp, Homo sapiens
ccaagattgcagtga

SEQ ID NO: 1326521 - DNA, 15 bp, Homo sapiens
gccaagattgcagtg

SEQ ID NO: 1326522 - DNA, 15 bp, Homo sapiens
ggccaagattgcagt

SEQ ID NO: 1326523 - DNA, 15 bp, Homo sapiens
aggccaagattgcag

SEQ ID NO: 1326524 - DNA, 15 bp, Homo sapiens
gaggccaagattgca

SEQ ID NO: 1326525 - DNA, 15 bp, Homo sapiens
ggaggccaagattgc

SEQ ID NO: 1326526 - DNA, 15 bp, Homo sapiens
aggaggccaagattg

SEQ ID NO: 1326527 - DNA, 15 bp, Homo sapiens
caggaggccaagatt

SEQ ID NO: 1326528 - DNA, 15 bp, Homo sapiens
tcaggaggccaagat

SEQ ID NO: 1326529 - DNA, 15 bp, Homo sapiens
ctcaggaggccaaga

SEQ ID NO: 1326530 - DNA, 15 bp, Homo sapiens
aactcaggaggccaa

SEQ ID NO: 1326531 - DNA, 15 bp, Homo sapiens
gaactcaggaggcca

SEQ ID NO: 1326532 - DNA, 15 bp, Homo sapiens
tgaactcaggaggcc

SEQ ID NO: 1326533 - DNA, 15 bp, Homo sapiens
ttgaactcaggaggc

SEQ ID NO: 1326534 - DNA, 15 bp, Homo sapiens
gttgaactcaggagg

SEQ ID NO: 1326535 - DNA, 15 bp, Homo sapiens
ggttgaactcaggag

SEQ ID NO: 1326536 - DNA, 15 bp, Homo sapiens
tggttgaactcagga

SEQ ID NO: 1326537 - DNA, 15 bp, Homo sapiens
ttggttgaactcagg

SEQ ID NO: 1326538 - DNA, 15 bp, Homo sapiens
attggttgaactcag

SEQ ID NO: 1326539 - DNA, 15 bp, Homo sapiens
aattggttgaactca

SEQ ID NO: 1326540 - DNA, 15 bp, Homo sapiens
gaattggttgaactc

SEQ ID NO: 1326541 - DNA, 15 bp, Homo sapiens
agaattggttgaact

SEQ ID NO: 1326542 - DNA, 15 bp, Homo sapiens
gagaattggttgaac

SEQ ID NO: 1326543 - DNA, 15 bp, Homo sapiens
tgagaattggttgaa

SEQ ID NO: 1326544 - DNA, 15 bp, Homo sapiens
atgagaattggttga

SEQ ID NO: 1326545 - DNA, 15 bp, Homo sapiens
catgagaattggttg

SEQ ID NO: 1326546 - DNA, 15 bp, Homo sapiens
gcatgagaattggtt

SEQ ID NO: 1326547 - DNA, 15 bp, Homo sapiens
ggcatgagaattggt

SEQ ID NO: 1326548 - DNA, 15 bp, Homo sapiens
aggcatgagaattgg

SEQ ID NO: 1326549 - DNA, 15 bp, Homo sapiens
ctgaggcatgagaat

SEQ ID NO: 1326550 - DNA, 15 bp, Homo sapiens
gctgaggcatgagaa

SEQ ID NO: 1326551 - DNA, 15 bp, Homo sapiens
ggctgaggcatgaga

SEQ ID NO: 1326552 - DNA, 15 bp, Homo sapiens
aggctgaggcatgag

SEQ ID NO: 1326553 - DNA, 15 bp, Homo sapiens
gaggctgaggcatga

SEQ ID NO: 1326554 - DNA, 15 bp, Homo sapiens
cagctatttgggagg

SEQ ID NO: 1326555 - DNA, 15 bp, Homo sapiens
ccagctatttgggag

SEQ ID NO: 1326556 - DNA, 15 bp, Homo sapiens
cccagctatttggga

SEQ ID NO: 1326557 - DNA, 15 bp, Homo sapiens
tcccagctatttggg

SEQ ID NO: 1326558 - DNA, 15 bp, Homo sapiens
gtcccagctatttgg

SEQ ID NO: 1326559 - DNA, 15 bp, Homo sapiens
ggtcccagctatttg

SEQ ID NO: 1326560 - DNA, 15 bp, Homo sapiens
tggtcccagctattt

SEQ ID NO: 1326561 - DNA, 15 bp, Homo sapiens
gtggtcccagctatt

SEQ ID NO: 1326562 - DNA, 15 bp, Homo sapiens
tgtggtcccagctat

SEQ ID NO: 1326563 - DNA, 15 bp, Homo sapiens
gtgcctgtggtccca

SEQ ID NO: 1326564 - DNA, 15 bp, Homo sapiens
cgtgcctgtggtccc

SEQ ID NO: 1326565 - DNA, 15 bp, Homo sapiens
acgtgcctgtggtcc

SEQ ID NO: 1326566 - DNA, 15 bp, Homo sapiens
aacgtgcctgtggtc

SEQ ID NO: 1326567 - DNA, 15 bp, Homo sapiens
gaacgtgcctgtggt

SEQ ID NO: 1326568 - DNA, 15 bp, Homo sapiens
ggaacgtgcctgtgg

SEQ ID NO: 1326569 - DNA, 15 bp, Homo sapiens
tggaacgtgcctgtg

SEQ ID NO: 1326570 - DNA, 15 bp, Homo sapiens
gtggaacgtgcctgt

SEQ ID NO: 1326571 - DNA, 15 bp, Homo sapiens
ggtggaacgtgcctg

SEQ ID NO: 1326572 - DNA, 15 bp, Homo sapiens
tggtggaacgtgcct

SEQ ID NO: 1326573 - DNA, 15 bp, Homo sapiens
gtggtggaacgtgcc

SEQ ID NO: 1326574 - DNA, 15 bp, Homo sapiens
cgtggtggaacgtgc

SEQ ID NO: 1326575 - DNA, 15 bp, Homo sapiens
gcgtggtggaacgtg

SEQ ID NO: 1326576 - DNA, 15 bp, Homo sapiens
ggcgtggtggaacgt

SEQ ID NO: 1326577 - DNA, 15 bp, Homo sapiens
gggcgtggtggaacg

SEQ ID NO: 1326578 - DNA, 15 bp, Homo sapiens
tgggcgtggtggaac

SEQ ID NO: 1326579 - DNA, 15 bp, Homo sapiens
ctgggcgtggtggaa

SEQ ID NO: 1326580 - DNA, 15 bp, Homo sapiens
gctgggcgtggtgga

SEQ ID NO: 1326581 - DNA, 15 bp, Homo sapiens
ccaaaaaattagctg

SEQ ID NO: 1326582 - DNA, 15 bp, Homo sapiens
cccaaaaaattagct

SEQ ID NO: 1326583 - DNA, 15 bp, Homo sapiens
acccaaaaaattagc

SEQ ID NO: 1326584 - DNA, 15 bp, Homo sapiens
tacccaaaaaattag

SEQ ID NO: 1326585 - DNA, 15 bp, Homo sapiens
atacccaaaaaatta

SEQ ID NO: 1326586 - DNA, 15 bp, Homo sapiens
aatacccaaaaaatt

SEQ ID NO: 1326587 - DNA, 15 bp, Homo sapiens
aaatacccaaaaaat

SEQ ID NO: 1326588 - DNA, 15 bp, Homo sapiens
aaaatacccaaaaaa

SEQ ID NO: 1326589 - DNA, 15 bp, Homo sapiens
aaaaatacccaaaaa

SEQ ID NO: 1326590 - DNA, 15 bp, Homo sapiens
taaaaatacccaaaa

SEQ ID NO: 1326591 - DNA, 15 bp, Homo sapiens
ctaaaaatacccaaa

SEQ ID NO: 1326592 - DNA, 15 bp, Homo sapiens
actaaaaatacccaa

SEQ ID NO: 1326593 - DNA, 15 bp, Homo sapiens
tactaaaaataccca

SEQ ID NO: 1326594 - DNA, 15 bp, Homo sapiens
ctactaaaaataccc

SEQ ID NO: 1326595 - DNA, 15 bp, Homo sapiens
tctactaaaaatacc

SEQ ID NO: 1326596 - DNA, 15 bp, Homo sapiens
ggccccatctctact

SEQ ID NO: 1326597 - DNA, 15 bp, Homo sapiens
aggccccatctctac

SEQ ID NO: 1326598 - DNA, 15 bp, Homo sapiens
gaggccccatctcta

SEQ ID NO: 1326599 - DNA, 15 bp, Homo sapiens
tgaggccccatctct

SEQ ID NO: 1326600 - DNA, 15 bp, Homo sapiens
ggtgaggccccatct

SEQ ID NO: 1326601 - DNA, 15 bp, Homo sapiens
tggtgaggccccatc

SEQ ID NO: 1326602 - DNA, 15 bp, Homo sapiens
atggtgaggccccat

SEQ ID NO: 1326603 - DNA, 15 bp, Homo sapiens
catggtgaggcccca

SEQ ID NO: 1326604 - DNA, 15 bp, Homo sapiens
acatggtgaggcccc

SEQ ID NO: 1326605 - DNA, 15 bp, Homo sapiens
aacatggtgaggccc

SEQ ID NO: 1326606 - DNA, 15 bp, Homo sapiens
caacatggtgaggcc

SEQ ID NO: 1326607 - DNA, 15 bp, Homo sapiens
gcaacatggtgaggc

SEQ ID NO: 1326608 - DNA, 15 bp, Homo sapiens
agcaacatggtgagg

SEQ ID NO: 1326609 - DNA, 15 bp, Homo sapiens
gagcaacatggtgag

SEQ ID NO: 1326610 - DNA, 15 bp, Homo sapiens
tgagcaacatggtga

SEQ ID NO: 1326611 - DNA, 15 bp, Homo sapiens
ctgagcaacatggtg

SEQ ID NO: 1326612 - DNA, 15 bp, Homo sapiens
cctgagcaacatggt

SEQ ID NO: 1326613 - DNA, 15 bp, Homo sapiens
acctgagcaacatgg

SEQ ID NO: 1326614 - DNA, 15 bp, Homo sapiens
aacctgagcaacatg

SEQ ID NO: 1326615 - DNA, 15 bp, Homo sapiens
caacctgagcaacat

SEQ ID NO: 1326616 - DNA, 15 bp, Homo sapiens
ccaacctgagcaaca

SEQ ID NO: 1326617 - DNA, 15 bp, Homo sapiens
accaacctgagcaac

SEQ ID NO: 1326618 - DNA, 15 bp, Homo sapiens
gaccaacctgagcaa

SEQ ID NO: 1326619 - DNA, 15 bp, Homo sapiens
agaccaacctgagca

SEQ ID NO: 1326620 - DNA, 15 bp, Homo sapiens
cagaccaacctgagc

SEQ ID NO: 1326621 - DNA, 15 bp, Homo sapiens
tcagaccaacctgag

SEQ ID NO: 1326622 - DNA, 15 bp, Homo sapiens
ttcagaccaacctga

SEQ ID NO: 1326623 - DNA, 15 bp, Homo sapiens
tttcagaccaacctg

SEQ ID NO: 1326624 - DNA, 15 bp, Homo sapiens
gtttcagaccaacct

SEQ ID NO: 1326625 - DNA, 15 bp, Homo sapiens
agtttcagaccaacc

SEQ ID NO: 1326626 - DNA, 15 bp, Homo sapiens
gagtttcagaccaac

SEQ ID NO: 1326627 - DNA, 15 bp, Homo sapiens
ggagtttcagaccaa

SEQ ID NO: 1326628 - DNA, 15 bp, Homo sapiens
ctcaggagtttcaga

SEQ ID NO: 1326629 - DNA, 15 bp, Homo sapiens
gctcaggagtttcag

SEQ ID NO: 1326630 - DNA, 15 bp, Homo sapiens
agctcaggagtttca

SEQ ID NO: 1326631 - DNA, 15 bp, Homo sapiens
gagctcaggagtttc

SEQ ID NO: 1326632 - DNA, 15 bp, Homo sapiens
tgagctcaggagttt

SEQ ID NO: 1326633 - DNA, 15 bp, Homo sapiens
ttgagctcaggagtt

SEQ ID NO: 1326634 - DNA, 15 bp, Homo sapiens
cttgagctcaggagt

SEQ ID NO: 1326635 - DNA, 15 bp, Homo sapiens
acttgagctcaggag

SEQ ID NO: 1326636 - DNA, 15 bp, Homo sapiens
cacttgagctcagga

SEQ ID NO: 1326637 - DNA, 15 bp, Homo sapiens
tcacttgagctcagg

SEQ ID NO: 1326638 - DNA, 15 bp, Homo sapiens
atcacttgagctcag

SEQ ID NO: 1326639 - DNA, 15 bp, Homo sapiens
tggatcacttgagct

SEQ ID NO: 1326640 - DNA, 15 bp, Homo sapiens
atggatcacttgagc

SEQ ID NO: 1326641 - DNA, 15 bp, Homo sapiens
agatggatcacttga

SEQ ID NO: 1326642 - DNA, 15 bp, Homo sapiens
aagatggatcacttg

SEQ ID NO: 1326643 - DNA, 15 bp, Homo sapiens
gaagatggatcactt

SEQ ID NO: 1326644 - DNA, 15 bp, Homo sapiens
ggaagatggatcact

SEQ ID NO: 1326645 - DNA, 15 bp, Homo sapiens
aggaagatggatcac

SEQ ID NO: 1326646 - DNA, 15 bp, Homo sapiens
gaggaagatggatca

SEQ ID NO: 1326647 - DNA, 15 bp, Homo sapiens
cgaggaagatggatc

SEQ ID NO: 1326648 - DNA, 15 bp, Homo sapiens
ccgaggaagatggat

SEQ ID NO: 1326649 - DNA, 15 bp, Homo sapiens
gccgaggaagatgga

SEQ ID NO: 1326650 - DNA, 15 bp, Homo sapiens
ggccgaggaagatgg

SEQ ID NO: 1326651 - DNA, 15 bp, Homo sapiens
aggccgaggaagatg

SEQ ID NO: 1326652 - DNA, 15 bp, Homo sapiens
caggccgaggaagat

SEQ ID NO: 1326653 - DNA, 15 bp, Homo sapiens
gcaggccgaggaaga

SEQ ID NO: 1326654 - DNA, 15 bp, Homo sapiens
ggcaggccgaggaag

SEQ ID NO: 1326655 - DNA, 15 bp, Homo sapiens
tggcaggccgaggaa

SEQ ID NO: 1326656 - DNA, 15 bp, Homo sapiens
ttggcaggccgagga

SEQ ID NO: 1326657 - DNA, 15 bp, Homo sapiens
tttggcaggccgagg

SEQ ID NO: 1326658 - DNA, 15 bp, Homo sapiens
ctttggcaggccgag

SEQ ID NO: 1326659 - DNA, 15 bp, Homo sapiens
actttggcaggccga

SEQ ID NO: 1326660 - DNA, 15 bp, Homo sapiens
cactttggcaggccg

SEQ ID NO: 1326661 - DNA, 15 bp, Homo sapiens
gcactttggcaggcc

SEQ ID NO: 1326662 - DNA, 15 bp, Homo sapiens
agcactttggcaggc

SEQ ID NO: 1326663 - DNA, 15 bp, Homo sapiens
cagcactttggcagg

SEQ ID NO: 1326664 - DNA, 15 bp, Homo sapiens
ccagcactttggcag

SEQ ID NO: 1326665 - DNA, 15 bp, Homo sapiens
cccagcactttggca

SEQ ID NO: 1326666 - DNA, 15 bp, Homo sapiens
tcccagcactttggc

SEQ ID NO: 1326667 - DNA, 15 bp, Homo sapiens
tatgcctataatccc

SEQ ID NO: 1326668 - DNA, 15 bp, Homo sapiens
ttatgcctataatcc

SEQ ID NO: 1326669 - DNA, 15 bp, Homo sapiens
cttatgcctataatc

SEQ ID NO: 1326670 - DNA, 15 bp, Homo sapiens
gcttatgcctataat

SEQ ID NO: 1326671 - DNA, 15 bp, Homo sapiens
ggcttatgcctataa

SEQ ID NO: 1326672 - DNA, 15 bp, Homo sapiens
tggcttatgcctata

SEQ ID NO: 1326673 - DNA, 15 bp, Homo sapiens
gtggcttatgcctat

SEQ ID NO: 1326674 - DNA, 15 bp, Homo sapiens
agtggcttatgccta

SEQ ID NO: 1326675 - DNA, 15 bp, Homo sapiens
tgcagtggcttatgc

SEQ ID NO: 1326676 - DNA, 15 bp, Homo sapiens
gtgcagtggcttatg

SEQ ID NO: 1326677 - DNA, 15 bp, Homo sapiens
ggtgcagtggcttat

SEQ ID NO: 1326678 - DNA, 15 bp, Homo sapiens
caggtgcagtggctt

SEQ ID NO: 1326679 - DNA, 15 bp, Homo sapiens
agccaggtgcagtgg

SEQ ID NO: 1326680 - DNA, 15 bp, Homo sapiens
gagccaggtgcagtg

SEQ ID NO: 1326681 - DNA, 15 bp, Homo sapiens
ggagccaggtgcagt

SEQ ID NO: 1326682 - DNA, 15 bp, Homo sapiens
gggagccaggtgcag

SEQ ID NO: 1326683 - DNA, 15 bp, Homo sapiens
tgggagccaggtgca

SEQ ID NO: 1326684 - DNA, 15 bp, Homo sapiens
ttgggagccaggtgc

SEQ ID NO: 1326685 - DNA, 15 bp, Homo sapiens
attgggagccaggtg

SEQ ID NO: 1326686 - DNA, 15 bp, Homo sapiens
aattgggagccaggt

SEQ ID NO: 1326687 - DNA, 15 bp, Homo sapiens
aaattgggagccagg

SEQ ID NO: 1326688 - DNA, 15 bp, Homo sapiens
aaaattgggagccag

SEQ ID NO: 1326689 - DNA, 15 bp, Homo sapiens
aaaaattgggagcca

SEQ ID NO: 1326690 - DNA, 15 bp, Homo sapiens
taaaaattgggagcc

SEQ ID NO: 1326691 - DNA, 15 bp, Homo sapiens
ataaaaattgggagc

SEQ ID NO: 1326692 - DNA, 15 bp, Homo sapiens
tataaaaattgggag

SEQ ID NO: 1326693 - DNA, 15 bp, Homo sapiens
atataaaaattggga

SEQ ID NO: 1326694 - DNA, 15 bp, Homo sapiens
aatataaaaattggg

SEQ ID NO: 1326695 - DNA, 15 bp, Homo sapiens
aaatataaaaattgg

SEQ ID NO: 1326696 - DNA, 15 bp, Homo sapiens
taaatataaaaattg

SEQ ID NO: 1326697 - DNA, 15 bp, Homo sapiens
ataaatataaaaatt

SEQ ID NO: 1326698 - DNA, 15 bp, Homo sapiens
tataaatataaaaat

SEQ ID NO: 1326699 - DNA, 15 bp, Homo sapiens
atataaatataaaaa

SEQ ID NO: 1326700 - DNA, 15 bp, Homo sapiens
aatataaatataaaa

SEQ ID NO: 1326701 - DNA, 15 bp, Homo sapiens
aaatataaatataaa

SEQ ID NO: 1326702 - DNA, 15 bp, Homo sapiens
taaatataaatataa

SEQ ID NO: 1326703 - DNA, 15 bp, Homo sapiens
ataaatataaatata

SEQ ID NO: 1326704 - DNA, 15 bp, Homo sapiens
aataaatataaatat

SEQ ID NO: 1326705 - DNA, 15 bp, Homo sapiens
aaataaatataaata

SEQ ID NO: 1326706 - DNA, 15 bp, Homo sapiens
aaaataaatataaat

SEQ ID NO: 1326707 - DNA, 15 bp, Homo sapiens
aaaaataaatataaa

SEQ ID NO: 1326708 - DNA, 15 bp, Homo sapiens
taaaaataaatataa

SEQ ID NO: 1326709 - DNA, 15 bp, Homo sapiens
ataaaaataaatata

SEQ ID NO: 1326710 - DNA, 15 bp, Homo sapiens
aataaaaataaatat

SEQ ID NO: 1326711 - DNA, 15 bp, Homo sapiens
taagtaaataaaaat

SEQ ID NO: 1326712 - DNA, 15 bp, Homo sapiens
ataagtaaataaaaa

SEQ ID NO: 1326713 - DNA, 15 bp, Homo sapiens
aataagtaaataaaa

SEQ ID NO: 1326714 - DNA, 15 bp, Homo sapiens
aaataagtaaataaa

SEQ ID NO: 1326715 - DNA, 15 bp, Homo sapiens
caaaaaataaataag

SEQ ID NO: 1326716 - DNA, 15 bp, Homo sapiens
agtgccactgtactc

SEQ ID NO: 1326717 - DNA, 15 bp, Homo sapiens
tagtgccactgtact

SEQ ID NO: 1326718 - DNA, 15 bp, Homo sapiens
atagtgccactgtac

SEQ ID NO: 1326719 - DNA, 15 bp, Homo sapiens
gatagtgccactgta

SEQ ID NO: 1326720 - DNA, 15 bp, Homo sapiens
agatagtgccactgt

SEQ ID NO: 1326721 - DNA, 15 bp, Homo sapiens
gagatagtgccactg

SEQ ID NO: 1326722 - DNA, 15 bp, Homo sapiens
tgagatagtgccact

SEQ ID NO: 1326723 - DNA, 15 bp, Homo sapiens
ctgagatagtgccac

SEQ ID NO: 1326724 - DNA, 15 bp, Homo sapiens
gctgagatagtgcca

SEQ ID NO: 1326725 - DNA, 15 bp, Homo sapiens
agctgagatagtgcc

SEQ ID NO: 1326726 - DNA, 15 bp, Homo sapiens
gagctgagatagtgc

SEQ ID NO: 1326727 - DNA, 15 bp, Homo sapiens
tgagctgagatagtg

SEQ ID NO: 1326728 - DNA, 15 bp, Homo sapiens
atgagctgagatagt

SEQ ID NO: 1326729 - DNA, 15 bp, Homo sapiens
aatgagctgagatag

SEQ ID NO: 1326730 - DNA, 15 bp, Homo sapiens
caatgagctgagata

SEQ ID NO: 1326731 - DNA, 15 bp, Homo sapiens
ggttgcaatgagctg

SEQ ID NO: 1326732 - DNA, 15 bp, Homo sapiens
aggttgcaatgagct

SEQ ID NO: 1326733 - DNA, 15 bp, Homo sapiens
agaggttgcaatgag

SEQ ID NO: 1326734 - DNA, 15 bp, Homo sapiens
cagaggttgcaatga

SEQ ID NO: 1326735 - DNA, 15 bp, Homo sapiens
gcagaggttgcaatg

SEQ ID NO: 1326736 - DNA, 15 bp, Homo sapiens
ggcagaggttgcaat

SEQ ID NO: 1326737 - DNA, 15 bp, Homo sapiens
aggcagaggttgcaa

SEQ ID NO: 1326738 - DNA, 15 bp, Homo sapiens
ttcgcttgaacccag

SEQ ID NO: 1326739 - DNA, 15 bp, Homo sapiens
attcgcttgaaccca

SEQ ID NO: 1326740 - DNA, 15 bp, Homo sapiens
gattcgcttgaaccc

SEQ ID NO: 1326741 - DNA, 15 bp, Homo sapiens
agattcgcttgaacc

SEQ ID NO: 1326742 - DNA, 15 bp, Homo sapiens
gagattcgcttgaac

SEQ ID NO: 1326743 - DNA, 15 bp, Homo sapiens
cgagattcgcttgaa

SEQ ID NO: 1326744 - DNA, 15 bp, Homo sapiens
acgagattcgcttga

SEQ ID NO: 1326745 - DNA, 15 bp, Homo sapiens
cacgagattcgcttg

SEQ ID NO: 1326746 - DNA, 15 bp, Homo sapiens
gcacgagattcgctt

SEQ ID NO: 1326747 - DNA, 15 bp, Homo sapiens
ggcacgagattcgct

SEQ ID NO: 1326748 - DNA, 15 bp, Homo sapiens
aggcacgagattcgc

SEQ ID NO: 1326749 - DNA, 15 bp, Homo sapiens
gaggcacgagattcg

SEQ ID NO: 1326750 - DNA, 15 bp, Homo sapiens
tgaggcacgagattc

SEQ ID NO: 1326751 - DNA, 15 bp, Homo sapiens
ctgaggcacgagatt

SEQ ID NO: 1326752 - DNA, 15 bp, Homo sapiens
gctgaggcacgagat

SEQ ID NO: 1326753 - DNA, 15 bp, Homo sapiens
ggggcatggtggtgc

SEQ ID NO: 1326754 - DNA, 15 bp, Homo sapiens
cggggcatggtggtg

SEQ ID NO: 1326755 - DNA, 15 bp, Homo sapiens
acggggcatggtggt

SEQ ID NO: 1326756 - DNA, 15 bp, Homo sapiens
aacggggcatggtgg

SEQ ID NO: 1326757 - DNA, 15 bp, Homo sapiens
taacggggcatggtg

SEQ ID NO: 1326758 - DNA, 15 bp, Homo sapiens
ttaacggggcatggt

SEQ ID NO: 1326759 - DNA, 15 bp, Homo sapiens
attaacggggcatgg

SEQ ID NO: 1326760 - DNA, 15 bp, Homo sapiens
aattaacggggcatg

SEQ ID NO: 1326761 - DNA, 15 bp, Homo sapiens
aaattaacggggcat

SEQ ID NO: 1326762 - DNA, 15 bp, Homo sapiens
aaaattaacggggca

SEQ ID NO: 1326763 - DNA, 15 bp, Homo sapiens
aaaaattaacggggc

SEQ ID NO: 1326764 - DNA, 15 bp, Homo sapiens
aaaaaattaacgggg

SEQ ID NO: 1326765 - DNA, 15 bp, Homo sapiens
aaaaaaattaacggg

SEQ ID NO: 1326766 - DNA, 15 bp, Homo sapiens
caaaaaaattaacgg

SEQ ID NO: 1326767 - DNA, 15 bp, Homo sapiens
acaaaaaaattaacg

SEQ ID NO: 1326768 - DNA, 15 bp, Homo sapiens
tacaaaaaaattaac

SEQ ID NO: 1326769 - DNA, 15 bp, Homo sapiens
atacaaaaaaattaa

SEQ ID NO: 1326770 - DNA, 15 bp, Homo sapiens
gaaacccgtctctac

SEQ ID NO: 1326771 - DNA, 15 bp, Homo sapiens
tgaaacccgtctcta

SEQ ID NO: 1326772 - DNA, 15 bp, Homo sapiens
gtgaaacccgtctct

SEQ ID NO: 1326773 - DNA, 15 bp, Homo sapiens
ggtgaaacccgtctc

SEQ ID NO: 1326774 - DNA, 15 bp, Homo sapiens
cggtgaaacccgtct

SEQ ID NO: 1326775 - DNA, 15 bp, Homo sapiens
acggtgaaacccgtc

SEQ ID NO: 1326776 - DNA, 15 bp, Homo sapiens
cacggtgaaacccgt

SEQ ID NO: 1326777 - DNA, 15 bp, Homo sapiens
acacggtgaaacccg

SEQ ID NO: 1326778 - DNA, 15 bp, Homo sapiens
tcctgggcaacacgg

SEQ ID NO: 1326779 - DNA, 15 bp, Homo sapiens
atcctgggcaacacg

SEQ ID NO: 1326780 - DNA, 15 bp, Homo sapiens
catcctgggcaacac

SEQ ID NO: 1326781 - DNA, 15 bp, Homo sapiens
accatcctgggcaac

SEQ ID NO: 1326782 - DNA, 15 bp, Homo sapiens
gaccatcctgggcaa

SEQ ID NO: 1326783 - DNA, 15 bp, Homo sapiens
agaccatcctgggca

SEQ ID NO: 1326784 - DNA, 15 bp, Homo sapiens
gagaccatcctgggc

SEQ ID NO: 1326785 - DNA, 15 bp, Homo sapiens
cgagaccatcctggg

SEQ ID NO: 1326786 - DNA, 15 bp, Homo sapiens
ttcgagaccatcctg

SEQ ID NO: 1326787 - DNA, 15 bp, Homo sapiens
gttcgagaccatcct

SEQ ID NO: 1326788 - DNA, 15 bp, Homo sapiens
agttcgagaccatcc

SEQ ID NO: 1326789 - DNA, 15 bp, Homo sapiens
gagttcgagaccatc

SEQ ID NO: 1326790 - DNA, 15 bp, Homo sapiens
ggagttcgagaccat

SEQ ID NO: 1326791 - DNA, 15 bp, Homo sapiens
aatcacttgaggtca

SEQ ID NO: 1326792 - DNA, 15 bp, Homo sapiens
tgaatcacttgaggt

SEQ ID NO: 1326793 - DNA, 15 bp, Homo sapiens
gtgaatcacttgagg

SEQ ID NO: 1326794 - DNA, 15 bp, Homo sapiens
ggtgaatcacttgag

SEQ ID NO: 1326795 - DNA, 15 bp, Homo sapiens
gggtgaatcacttga

SEQ ID NO: 1326796 - DNA, 15 bp, Homo sapiens
tgggtgaatcacttg

SEQ ID NO: 1326797 - DNA, 15 bp, Homo sapiens
gtgggtgaatcactt

SEQ ID NO: 1326798 - DNA, 15 bp, Homo sapiens
ggtgggtgaatcact

SEQ ID NO: 1326799 - DNA, 15 bp, Homo sapiens
aggtgggtgaatcac

SEQ ID NO: 1326800 - DNA, 15 bp, Homo sapiens
gaggtgggtgaatca

SEQ ID NO: 1326801 - DNA, 15 bp, Homo sapiens
tgaggtgggtgaatc

SEQ ID NO: 1326802 - DNA, 15 bp, Homo sapiens
ctgaggtgggtgaat

SEQ ID NO: 1326803 - DNA, 15 bp, Homo sapiens
gctgaggtgggtgaa

SEQ ID NO: 1326804 - DNA, 15 bp, Homo sapiens
ggctgaggtgggtga

SEQ ID NO: 1326805 - DNA, 15 bp, Homo sapiens
agtggctcacaccta

SEQ ID NO: 1326806 - DNA, 15 bp, Homo sapiens
gagtggctcacacct

SEQ ID NO: 1326807 - DNA, 15 bp, Homo sapiens
cgagtggctcacacc

SEQ ID NO: 1326808 - DNA, 15 bp, Homo sapiens
ccgagtggctcacac

SEQ ID NO: 1326809 - DNA, 15 bp, Homo sapiens
gccgagtggctcaca

SEQ ID NO: 1326810 - DNA, 15 bp, Homo sapiens
agccgagtggctcac

SEQ ID NO: 1326811 - DNA, 15 bp, Homo sapiens
cagccgagtggctca

SEQ ID NO: 1326812 - DNA, 15 bp, Homo sapiens
tcagccgagtggctc

SEQ ID NO: 1326813 - DNA, 15 bp, Homo sapiens
atcagccgagtggct

SEQ ID NO: 1326814 - DNA, 15 bp, Homo sapiens
catcagccgagtggc

SEQ ID NO: 1326815 - DNA, 15 bp, Homo sapiens
ccatcagccgagtgg

SEQ ID NO: 1326816 - DNA, 15 bp, Homo sapiens
accatcagccgagtg

SEQ ID NO: 1326817 - DNA, 15 bp, Homo sapiens
aaccatcagccgagt

SEQ ID NO: 1326818 - DNA, 15 bp, Homo sapiens
aaaccatcagccgag

SEQ ID NO: 1326819 - DNA, 15 bp, Homo sapiens
aaaaccatcagccga

SEQ ID NO: 1326820 - DNA, 15 bp, Homo sapiens
aaaaaccatcagccg

SEQ ID NO: 1326821 - DNA, 15 bp, Homo sapiens
taaaaaccatcagcc

SEQ ID NO: 1326822 - DNA, 15 bp, Homo sapiens
ttaaaaaccatcagc

SEQ ID NO: 1326823 - DNA, 15 bp, Homo sapiens
tttaaaaaccatcag

SEQ ID NO: 1326824 - DNA, 15 bp, Homo sapiens
ttttaaaaaccatca

SEQ ID NO: 1326825 - DNA, 15 bp, Homo sapiens
tttttaaaaaccatc

SEQ ID NO: 1326826 - DNA, 15 bp, Homo sapiens
ctttttaaaaaccat

SEQ ID NO: 1326827 - DNA, 15 bp, Homo sapiens
actttttaaaaacca

SEQ ID NO: 1326828 - DNA, 15 bp, Homo sapiens
cactttttaaaaacc

SEQ ID NO: 1326829 - DNA, 15 bp, Homo sapiens
ccactttttaaaaac

SEQ ID NO: 1326830 - DNA, 15 bp, Homo sapiens
cccactttttaaaaa

SEQ ID NO: 1326831 - DNA, 15 bp, Homo sapiens
acccactttttaaaa

SEQ ID NO: 1326832 - DNA, 15 bp, Homo sapiens
gacccactttttaaa

SEQ ID NO: 1326833 - DNA, 15 bp, Homo sapiens
tgacccactttttaa

SEQ ID NO: 1326834 - DNA, 15 bp, Homo sapiens
atgacccacttttta

SEQ ID NO: 1326835 - DNA, 15 bp, Homo sapiens
catgacccacttttt

SEQ ID NO: 1326836 - DNA, 15 bp, Homo sapiens
ccatgacccactttt

SEQ ID NO: 1326837 - DNA, 15 bp, Homo sapiens
cccatgacccacttt

SEQ ID NO: 1326838 - DNA, 15 bp, Homo sapiens
ccccatgacccactt

SEQ ID NO: 1326839 - DNA, 15 bp, Homo sapiens
gccccatgacccact

SEQ ID NO: 1326840 - DNA, 15 bp, Homo sapiens
agccccatgacccac

SEQ ID NO: 1326841 - DNA, 15 bp, Homo sapiens
cagccccatgaccca

SEQ ID NO: 1326842 - DNA, 15 bp, Homo sapiens
ccagccccatgaccc

SEQ ID NO: 1326843 - DNA, 15 bp, Homo sapiens
cccagccccatgacc

SEQ ID NO: 1326844 - DNA, 15 bp, Homo sapiens
gcccagccccatgac

SEQ ID NO: 1326845 - DNA, 15 bp, Homo sapiens
cgcccagccccatga

SEQ ID NO: 1326846 - DNA, 15 bp, Homo sapiens
gcgcccagccccatg

SEQ ID NO: 1326847 - DNA, 15 bp, Homo sapiens
cgcgcccagccccat

SEQ ID NO: 1326848 - DNA, 15 bp, Homo sapiens
ccgcgcccagcccca

SEQ ID NO: 1326849 - DNA, 15 bp, Homo sapiens
accgcgcccagcccc

SEQ ID NO: 1326850 - DNA, 15 bp, Homo sapiens
caccgcgcccagccc

SEQ ID NO: 1326851 - DNA, 15 bp, Homo sapiens
accaaagtgctggga

SEQ ID NO: 1326852 - DNA, 15 bp, Homo sapiens
taccaaagtgctggg

SEQ ID NO: 1326853 - DNA, 15 bp, Homo sapiens
ctaccaaagtgctgg

SEQ ID NO: 1326854 - DNA, 15 bp, Homo sapiens
tctaccaaagtgctg

SEQ ID NO: 1326855 - DNA, 15 bp, Homo sapiens
gtctaccaaagtgct

SEQ ID NO: 1326856 - DNA, 15 bp, Homo sapiens
ggtctaccaaagtgc

SEQ ID NO: 1326857 - DNA, 15 bp, Homo sapiens
cggtctaccaaagtg

SEQ ID NO: 1326858 - DNA, 15 bp, Homo sapiens
tcggtctaccaaagt

SEQ ID NO: 1326859 - DNA, 15 bp, Homo sapiens
ctcggtctaccaaag

SEQ ID NO: 1326860 - DNA, 15 bp, Homo sapiens
cctcggtctaccaaa

SEQ ID NO: 1326861 - DNA, 15 bp, Homo sapiens
gcctcggtctaccaa

SEQ ID NO: 1326862 - DNA, 15 bp, Homo sapiens
cgcctcggtctacca

SEQ ID NO: 1326863 - DNA, 15 bp, Homo sapiens
ccgcctcggtctacc

SEQ ID NO: 1326864 - DNA, 15 bp, Homo sapiens
cccgcctcggtctac

SEQ ID NO: 1326865 - DNA, 15 bp, Homo sapiens
acccgcctcggtcta

SEQ ID NO: 1326866 - DNA, 15 bp, Homo sapiens
cacccgcctcggtct

SEQ ID NO: 1326867 - DNA, 15 bp, Homo sapiens
ccacccgcctcggtc

SEQ ID NO: 1326868 - DNA, 15 bp, Homo sapiens
tccacccgcctcggt

SEQ ID NO: 1326869 - DNA, 15 bp, Homo sapiens
gcaggatggtctcga

SEQ ID NO: 1326870 - DNA, 15 bp, Homo sapiens
ggcaggatggtctcg

SEQ ID NO: 1326871 - DNA, 15 bp, Homo sapiens
aggcaggatggtctc

SEQ ID NO: 1326872 - DNA, 15 bp, Homo sapiens
taggcaggatggtct

SEQ ID NO: 1326873 - DNA, 15 bp, Homo sapiens
ttaggcaggatggtc

SEQ ID NO: 1326874 - DNA, 15 bp, Homo sapiens
gttaggcaggatggt

SEQ ID NO: 1326875 - DNA, 15 bp, Homo sapiens
tgttaggcaggatgg

SEQ ID NO: 1326876 - DNA, 15 bp, Homo sapiens
gtgttaggcaggatg

SEQ ID NO: 1326877 - DNA, 15 bp, Homo sapiens
cgtgttaggcaggat

SEQ ID NO: 1326878 - DNA, 15 bp, Homo sapiens
ccgtgttaggcagga

SEQ ID NO: 1326879 - DNA, 15 bp, Homo sapiens
accgtgttaggcagg

SEQ ID NO: 1326880 - DNA, 15 bp, Homo sapiens
caccgtgttaggcag

SEQ ID NO: 1326881 - DNA, 15 bp, Homo sapiens
tcaccgtgttaggca

SEQ ID NO: 1326882 - DNA, 15 bp, Homo sapiens
ttcaccgtgttaggc

SEQ ID NO: 1326883 - DNA, 15 bp, Homo sapiens
tttcaccgtgttagg

SEQ ID NO: 1326884 - DNA, 15 bp, Homo sapiens
ggtaattttttgtat

SEQ ID NO: 1326885 - DNA, 15 bp, Homo sapiens
gggtaattttttgta

SEQ ID NO: 1326886 - DNA, 15 bp, Homo sapiens
tgggtaattttttgt

SEQ ID NO: 1326887 - DNA, 15 bp, Homo sapiens
ctgggtaattttttg

SEQ ID NO: 1326888 - DNA, 15 bp, Homo sapiens
cctgggtaatttttt

SEQ ID NO: 1326889 - DNA, 15 bp, Homo sapiens
gcctgggtaattttt

SEQ ID NO: 1326890 - DNA, 15 bp, Homo sapiens
tgcctgggtaatttt

SEQ ID NO: 1326891 - DNA, 15 bp, Homo sapiens
atgcctgggtaattt

SEQ ID NO: 1326892 - DNA, 15 bp, Homo sapiens
catgcctgggtaatt

SEQ ID NO: 1326893 - DNA, 15 bp, Homo sapiens
ccatgcctgggtaat

SEQ ID NO: 1326894 - DNA, 15 bp, Homo sapiens
accatgcctgggtaa

SEQ ID NO: 1326895 - DNA, 15 bp, Homo sapiens
caccatgcctgggta

SEQ ID NO: 1326896 - DNA, 15 bp, Homo sapiens
ccaccatgcctgggt

SEQ ID NO: 1326897 - DNA, 15 bp, Homo sapiens
accaccatgcctggg

SEQ ID NO: 1326898 - DNA, 15 bp, Homo sapiens
ccaccaccatgcctg

SEQ ID NO: 1326899 - DNA, 15 bp, Homo sapiens
cccaccaccatgcct

SEQ ID NO: 1326900 - DNA, 15 bp, Homo sapiens
gcccaccaccatgcc

SEQ ID NO: 1326901 - DNA, 15 bp, Homo sapiens
cgcccaccaccatgc

SEQ ID NO: 1326902 - DNA, 15 bp, Homo sapiens
gcgcccaccaccatg

SEQ ID NO: 1326903 - DNA, 15 bp, Homo sapiens
ggcgcccaccaccat

SEQ ID NO: 1326904 - DNA, 15 bp, Homo sapiens
cggtggcgtgatctc

SEQ ID NO: 1326905 - DNA, 15 bp, Homo sapiens
acggtggcgtgatct

SEQ ID NO: 1326906 - DNA, 15 bp, Homo sapiens
tacggtggcgtgatc

SEQ ID NO: 1326907 - DNA, 15 bp, Homo sapiens
gtacggtggcgtgat

SEQ ID NO: 1326908 - DNA, 15 bp, Homo sapiens
agtacggtggcgtga

SEQ ID NO: 1326909 - DNA, 15 bp, Homo sapiens
gagtacggtggcgtg

SEQ ID NO: 1326910 - DNA, 15 bp, Homo sapiens
ggagtacggtggcgt

SEQ ID NO: 1326911 - DNA, 15 bp, Homo sapiens
tggagtacggtggcg

SEQ ID NO: 1326912 - DNA, 15 bp, Homo sapiens
ctggagtacggtggc

SEQ ID NO: 1326913 - DNA, 15 bp, Homo sapiens
gctggagtacggtgg

SEQ ID NO: 1326914 - DNA, 15 bp, Homo sapiens
ggctggagtacggtg

SEQ ID NO: 1326915 - DNA, 15 bp, Homo sapiens
aggctggagtacggt

SEQ ID NO: 1326916 - DNA, 15 bp, Homo sapiens
caggctggagtacgg

SEQ ID NO: 1326917 - DNA, 15 bp, Homo sapiens
tcaggctggagtacg

SEQ ID NO: 1326918 - DNA, 15 bp, Homo sapiens
ctcaggctggagtac

SEQ ID NO: 1326919 - DNA, 15 bp, Homo sapiens
gctcaggctggagta

SEQ ID NO: 1326920 - DNA, 15 bp, Homo sapiens
gctctgtcgctcagg

SEQ ID NO: 1326921 - DNA, 15 bp, Homo sapiens
cgctctgtcgctcag

SEQ ID NO: 1326922 - DNA, 15 bp, Homo sapiens
tcgctctgtcgctca

SEQ ID NO: 1326923 - DNA, 15 bp, Homo sapiens
ctcgctctgtcgctc

SEQ ID NO: 1326924 - DNA, 15 bp, Homo sapiens
tctcgctctgtcgct

SEQ ID NO: 1326925 - DNA, 15 bp, Homo sapiens
acccacttttttttt

SEQ ID NO: 1326926 - DNA, 15 bp, Homo sapiens
gacccactttttttt

SEQ ID NO: 1326927 - DNA, 15 bp, Homo sapiens
tgacccacttttttt

SEQ ID NO: 1326928 - DNA, 15 bp, Homo sapiens
atgacccactttttt

SEQ ID NO: 1326929 - DNA, 15 bp, Homo sapiens
tatgacccacttttt

SEQ ID NO: 1326930 - DNA, 15 bp, Homo sapiens
ctatgacccactttt

SEQ ID NO: 1326931 - DNA, 15 bp, Homo sapiens
cctatgacccacttt

SEQ ID NO: 1326932 - DNA, 15 bp, Homo sapiens
acctatgacccactt

SEQ ID NO: 1326933 - DNA, 15 bp, Homo sapiens
aacctatgacccact

SEQ ID NO: 1326934 - DNA, 15 bp, Homo sapiens
aaacctatgacccac

SEQ ID NO: 1326935 - DNA, 15 bp, Homo sapiens
gaaacctatgaccca

SEQ ID NO: 1326936 - DNA, 15 bp, Homo sapiens
cgaaacctatgaccc

SEQ ID NO: 1326937 - DNA, 15 bp, Homo sapiens
ccgaaacctatgacc

SEQ ID NO: 1326938 - DNA, 15 bp, Homo sapiens
gccgaaacctatgac

SEQ ID NO: 1326939 - DNA, 15 bp, Homo sapiens
agccgaaacctatga

SEQ ID NO: 1326940 - DNA, 15 bp, Homo sapiens
aagccgaaacctatg

SEQ ID NO: 1326941 - DNA, 15 bp, Homo sapiens
taagccgaaacctat

SEQ ID NO: 1326942 - DNA, 15 bp, Homo sapiens
ataagccgaaaccta

SEQ ID NO: 1326943 - DNA, 15 bp, Homo sapiens
tataagccgaaacct

SEQ ID NO: 1326944 - DNA, 15 bp, Homo sapiens
ctataagccgaaacc

SEQ ID NO: 1326945 - DNA, 15 bp, Homo sapiens
cctataagccgaaac

SEQ ID NO: 1326946 - DNA, 15 bp, Homo sapiens
acctataagccgaaa

SEQ ID NO: 1326947 - DNA, 15 bp, Homo sapiens
gacctataagccgaa

SEQ ID NO: 1326948 - DNA, 15 bp, Homo sapiens
tgacctataagccga

SEQ ID NO: 1326949 - DNA, 15 bp, Homo sapiens
gtgacctataagccg

SEQ ID NO: 1326950 - DNA, 15 bp, Homo sapiens
tgtgacctataagcc

SEQ ID NO: 1326951 - DNA, 15 bp, Homo sapiens
ttgtgacctataagc

SEQ ID NO: 1326952 - DNA, 15 bp, Homo sapiens
cttgtgacctataag

SEQ ID NO: 1326953 - DNA, 15 bp, Homo sapiens
acttgtgacctataa

SEQ ID NO: 1326954 - DNA, 15 bp, Homo sapiens
cacttgtgacctata

SEQ ID NO: 1326955 - DNA, 15 bp, Homo sapiens
acacttgtgacctat

SEQ ID NO: 1326956 - DNA, 15 bp, Homo sapiens
aacacttgtgaccta

SEQ ID NO: 1326957 - DNA, 15 bp, Homo sapiens
aaacacttgtgacct

SEQ ID NO: 1326958 - DNA, 15 bp, Homo sapiens
taaacacttgtgacc

SEQ ID NO: 1326959 - DNA, 15 bp, Homo sapiens
ttaaacacttgtgac

SEQ ID NO: 1326960 - DNA, 15 bp, Homo sapiens
tttaaacacttgtga

SEQ ID NO: 1326961 - DNA, 15 bp, Homo sapiens
gtttaaacacttgtg

SEQ ID NO: 1326962 - DNA, 15 bp, Homo sapiens
ggtttaaacacttgt

SEQ ID NO: 1326963 - DNA, 15 bp, Homo sapiens
aggtttaaacacttg

SEQ ID NO: 1326964 - DNA, 15 bp, Homo sapiens
caggtttaaacactt

SEQ ID NO: 1326965 - DNA, 15 bp, Homo sapiens
ccaggtttaaacact

SEQ ID NO: 1326966 - DNA, 15 bp, Homo sapiens
gccaggtttaaacac

SEQ ID NO: 1326967 - DNA, 15 bp, Homo sapiens
ggccaggtttaaaca

SEQ ID NO: 1326968 - DNA, 15 bp, Homo sapiens
tggccaggtttaaac

SEQ ID NO: 1326969 - DNA, 15 bp, Homo sapiens
atggccaggtttaaa

SEQ ID NO: 1326970 - DNA, 15 bp, Homo sapiens
catggccaggtttaa

SEQ ID NO: 1326971 - DNA, 15 bp, Homo sapiens
tcatggccaggttta

SEQ ID NO: 1326972 - DNA, 15 bp, Homo sapiens
ctcatggccaggttt

SEQ ID NO: 1326973 - DNA, 15 bp, Homo sapiens
cctcatggccaggtt

SEQ ID NO: 1326974 - DNA, 15 bp, Homo sapiens
gcctcatggccaggt

SEQ ID NO: 1326975 - DNA, 15 bp, Homo sapiens
ggcctcatggccagg

SEQ ID NO: 1326976 - DNA, 15 bp, Homo sapiens
tggcctcatggccag

SEQ ID NO: 1326977 - DNA, 15 bp, Homo sapiens
ctggcctcatggcca

SEQ ID NO: 1326978 - DNA, 15 bp, Homo sapiens
cctggcctcatggcc

SEQ ID NO: 1326979 - DNA, 15 bp, Homo sapiens
gcctggcctcatggc

SEQ ID NO: 1326980 - DNA, 15 bp, Homo sapiens
cgcctggcctcatgg

SEQ ID NO: 1326981 - DNA, 15 bp, Homo sapiens
gcgcctggcctcatg

SEQ ID NO: 1326982 - DNA, 15 bp, Homo sapiens
tgcgcctggcctcat

SEQ ID NO: 1326983 - DNA, 15 bp, Homo sapiens
ctgcgcctggcctca

SEQ ID NO: 1326984 - DNA, 15 bp, Homo sapiens
actgcgcctggcctc

SEQ ID NO: 1326985 - DNA, 15 bp, Homo sapiens
cactgcgcctggcct

SEQ ID NO: 1326986 - DNA, 15 bp, Homo sapiens
cgccactgcgcctgg

SEQ ID NO: 1326987 - DNA, 15 bp, Homo sapiens
gcgccactgcgcctg

SEQ ID NO: 1326988 - DNA, 15 bp, Homo sapiens
tgcgccactgcgcct

SEQ ID NO: 1326989 - DNA, 15 bp, Homo sapiens
atgcgccactgcgcc

SEQ ID NO: 1326990 - DNA, 15 bp, Homo sapiens
catgcgccactgcgc

SEQ ID NO: 1326991 - DNA, 15 bp, Homo sapiens
gcatgcgccactgcg

SEQ ID NO: 1326992 - DNA, 15 bp, Homo sapiens
ggcatgcgccactgc

SEQ ID NO: 1326993 - DNA, 15 bp, Homo sapiens
aggcatgcgccactg

SEQ ID NO: 1326994 - DNA, 15 bp, Homo sapiens
caggcatgcgccact

SEQ ID NO: 1326995 - DNA, 15 bp, Homo sapiens
atggctgggattaca

SEQ ID NO: 1326996 - DNA, 15 bp, Homo sapiens
aatggctgggattac

SEQ ID NO: 1326997 - DNA, 15 bp, Homo sapiens
aaatggctgggatta

SEQ ID NO: 1326998 - DNA, 15 bp, Homo sapiens
caaatggctgggatt

SEQ ID NO: 1326999 - DNA, 15 bp, Homo sapiens
ccaaatggctgggat

SEQ ID NO: 1327000 - DNA, 15 bp, Homo sapiens
cccaaatggctggga

SEQ ID NO: 1327001 - DNA, 15 bp, Homo sapiens
tcccaaatggctggg

SEQ ID NO: 1327002 - DNA, 15 bp, Homo sapiens
ctcccaaatggctgg

SEQ ID NO: 1327003 - DNA, 15 bp, Homo sapiens
cctcccaaatggctg

SEQ ID NO: 1327004 - DNA, 15 bp, Homo sapiens
gcctcccaaatggct

SEQ ID NO: 1327005 - DNA, 15 bp, Homo sapiens
agcctcccaaatggc

SEQ ID NO: 1327006 - DNA, 15 bp, Homo sapiens
tagcctcccaaatgg

SEQ ID NO: 1327007 - DNA, 15 bp, Homo sapiens
ttagcctcccaaatg

SEQ ID NO: 1327008 - DNA, 15 bp, Homo sapiens
tttcctgccttagcc

SEQ ID NO: 1327009 - DNA, 15 bp, Homo sapiens
ttttcctgccttagc

SEQ ID NO: 1327010 - DNA, 15 bp, Homo sapiens
attttcctgccttag

SEQ ID NO: 1327011 - DNA, 15 bp, Homo sapiens
gattttcctgcctta

SEQ ID NO: 1327012 - DNA, 15 bp, Homo sapiens
cgattttcctgcctt

SEQ ID NO: 1327013 - DNA, 15 bp, Homo sapiens
gcgattttcctgcct

SEQ ID NO: 1327014 - DNA, 15 bp, Homo sapiens
agcgattttcctgcc

SEQ ID NO: 1327015 - DNA, 15 bp, Homo sapiens
aagcgattttcctgc

SEQ ID NO: 1327016 - DNA, 15 bp, Homo sapiens
caagcgattttcctg

SEQ ID NO: 1327017 - DNA, 15 bp, Homo sapiens
tcaagcgattttcct

SEQ ID NO: 1327018 - DNA, 15 bp, Homo sapiens
ttcaagcgattttcc

SEQ ID NO: 1327019 - DNA, 15 bp, Homo sapiens
gttcaagcgattttc

SEQ ID NO: 1327020 - DNA, 15 bp, Homo sapiens
ggttcaagcgatttt

SEQ ID NO: 1327021 - DNA, 15 bp, Homo sapiens
cggttcaagcgattt

SEQ ID NO: 1327022 - DNA, 15 bp, Homo sapiens
ctccccggttcaagc

SEQ ID NO: 1327023 - DNA, 15 bp, Homo sapiens
cctccccggttcaag

SEQ ID NO: 1327024 - DNA, 15 bp, Homo sapiens
acctccccggttcaa

SEQ ID NO: 1327025 - DNA, 15 bp, Homo sapiens
cacctccccggttca

SEQ ID NO: 1327026 - DNA, 15 bp, Homo sapiens
ccacctccccggttc

SEQ ID NO: 1327027 - DNA, 15 bp, Homo sapiens
tccacctccccggtt

SEQ ID NO: 1327028 - DNA, 15 bp, Homo sapiens
ctccacctccccggt

SEQ ID NO: 1327029 - DNA, 15 bp, Homo sapiens
cctccacctccccgg

SEQ ID NO: 1327030 - DNA, 15 bp, Homo sapiens
acctccacctccccg

SEQ ID NO: 1327031 - DNA, 15 bp, Homo sapiens
aacctccacctcccc

SEQ ID NO: 1327032 - DNA, 15 bp, Homo sapiens
tcagtggcgcgatct

SEQ ID NO: 1327033 - DNA, 15 bp, Homo sapiens
ttcagtggcgcgatc

SEQ ID NO: 1327034 - DNA, 15 bp, Homo sapiens
gttcagtggcgcgat

SEQ ID NO: 1327035 - DNA, 15 bp, Homo sapiens
agttcagtggcgcga

SEQ ID NO: 1327036 - DNA, 15 bp, Homo sapiens
gagttcagtggcgcg

SEQ ID NO: 1327037 - DNA, 15 bp, Homo sapiens
agagttcagtggcgc

SEQ ID NO: 1327038 - DNA, 15 bp, Homo sapiens
tagagttcagtggcg

SEQ ID NO: 1327039 - DNA, 15 bp, Homo sapiens
ctagagttcagtggc

SEQ ID NO: 1327040 - DNA, 15 bp, Homo sapiens
gctagagttcagtgg

SEQ ID NO: 1327041 - DNA, 15 bp, Homo sapiens
ggctagagttcagtg

SEQ ID NO: 1327042 - DNA, 15 bp, Homo sapiens
aggctagagttcagt

SEQ ID NO: 1327043 - DNA, 15 bp, Homo sapiens
caggctagagttcag

SEQ ID NO: 1327044 - DNA, 15 bp, Homo sapiens
ccaggctagagttca

SEQ ID NO: 1327045 - DNA, 15 bp, Homo sapiens
cccaggctagagttc

SEQ ID NO: 1327046 - DNA, 15 bp, Homo sapiens
acccaggctagagtt

SEQ ID NO: 1327047 - DNA, 15 bp, Homo sapiens
gtgtcacccaggcta

SEQ ID NO: 1327048 - DNA, 15 bp, Homo sapiens
tactgtgtcacccag

SEQ ID NO: 1327049 - DNA, 15 bp, Homo sapiens
ttactgtgtcaccca

SEQ ID NO: 1327050 - DNA, 15 bp, Homo sapiens
cttactgtgtcaccc

SEQ ID NO: 1327051 - DNA, 15 bp, Homo sapiens
tcttactgtgtcacc

SEQ ID NO: 1327052 - DNA, 15 bp, Homo sapiens
gtcttactgtgtcac

SEQ ID NO: 1327053 - DNA, 15 bp, Homo sapiens
agtcttactgtgtca

SEQ ID NO: 1327054 - DNA, 15 bp, Homo sapiens
gagtcttactgtgtc

SEQ ID NO: 1327055 - DNA, 15 bp, Homo sapiens
agagtcttactgtgt

SEQ ID NO: 1327056 - DNA, 15 bp, Homo sapiens
cagagtcttactgtg

SEQ ID NO: 1327057 - DNA, 15 bp, Homo sapiens
acagagtcttactgt

SEQ ID NO: 1327058 - DNA, 15 bp, Homo sapiens
gacagagtcttactg

SEQ ID NO: 1327059 - DNA, 15 bp, Homo sapiens
atttgagacagagtc

SEQ ID NO: 1327060 - DNA, 15 bp, Homo sapiens
tatttgagacagagt

SEQ ID NO: 1327061 - DNA, 15 bp, Homo sapiens
ttatttgagacagag

SEQ ID NO: 1327062 - DNA, 15 bp, Homo sapiens
tttatttgagacaga

SEQ ID NO: 1327063 - DNA, 15 bp, Homo sapiens
ttttatttgagacag

SEQ ID NO: 1327064 - DNA, 15 bp, Homo sapiens
tttttatttgagaca

SEQ ID NO: 1327065 - DNA, 15 bp, Homo sapiens
ttttttatttgagac

SEQ ID NO: 1327066 - DNA, 15 bp, Homo sapiens
tttttttatttgaga

SEQ ID NO: 1327067 - DNA, 15 bp, Homo sapiens
ttttttttatttgag

SEQ ID NO: 1327068 - DNA, 15 bp, Homo sapiens
tttttttttatttga

SEQ ID NO: 1327069 - DNA, 15 bp, Homo sapiens
ttttttttttatttg

SEQ ID NO: 1327070 - DNA, 15 bp, Homo sapiens
gttttttttttattt

SEQ ID NO: 1327071 - DNA, 15 bp, Homo sapiens
tgttttttttttatt

SEQ ID NO: 1327072 - DNA, 15 bp, Homo sapiens
ctgttttttttttat

SEQ ID NO: 1327073 - DNA, 15 bp, Homo sapiens
gctgtttttttttta

SEQ ID NO: 1327074 - DNA, 15 bp, Homo sapiens
agctgtttttttttt

SEQ ID NO: 1327075 - DNA, 15 bp, Homo sapiens
cagctgttttttttt

SEQ ID NO: 1327076 - DNA, 15 bp, Homo sapiens
tcagctgtttttttt

SEQ ID NO: 1327077 - DNA, 15 bp, Homo sapiens
atcagctgttttttt

SEQ ID NO: 1327078 - DNA, 15 bp, Homo sapiens
gatcagctgtttttt

SEQ ID NO: 1327079 - DNA, 15 bp, Homo sapiens
agatcagctgttttt

SEQ ID NO: 1327080 - DNA, 15 bp, Homo sapiens
gagatcagctgtttt

SEQ ID NO: 1327081 - DNA, 15 bp, Homo sapiens
agagatcagctgttt

SEQ ID NO: 1327082 - DNA, 15 bp, Homo sapiens
gagagatcagctgtt

SEQ ID NO: 1327083 - DNA, 15 bp, Homo sapiens
agagagatcagctgt

SEQ ID NO: 1327084 - DNA, 15 bp, Homo sapiens
aagagagatcagctg

SEQ ID NO: 1327085 - DNA, 15 bp, Homo sapiens
gaagagagatcagct

SEQ ID NO: 1327086 - DNA, 15 bp, Homo sapiens
agaagagagatcagc

SEQ ID NO: 1327087 - DNA, 15 bp, Homo sapiens
cagaagagagatcag

SEQ ID NO: 1327088 - DNA, 15 bp, Homo sapiens
gcagaagagagatca

SEQ ID NO: 1327089 - DNA, 15 bp, Homo sapiens
cgcagaagagagatc

SEQ ID NO: 1327090 - DNA, 15 bp, Homo sapiens
gcgcagaagagagat

SEQ ID NO: 1327091 - DNA, 15 bp, Homo sapiens
agcgcagaagagaga

SEQ ID NO: 1327092 - DNA, 15 bp, Homo sapiens
cagcgcagaagagag

SEQ ID NO: 1327093 - DNA, 15 bp, Homo sapiens
acagcgcagaagaga

SEQ ID NO: 1327094 - DNA, 15 bp, Homo sapiens
gacagcgcagaagag

SEQ ID NO: 1327095 - DNA, 15 bp, Homo sapiens
agacagcgcagaaga

SEQ ID NO: 1327096 - DNA, 15 bp, Homo sapiens
gagacagcgcagaag

SEQ ID NO: 1327097 - DNA, 15 bp, Homo sapiens
agagacagcgcagaa

SEQ ID NO: 1327098 - DNA, 15 bp, Homo sapiens
gagagacagcgcaga

SEQ ID NO: 1327099 - DNA, 15 bp, Homo sapiens
ggagagacagcgcag

SEQ ID NO: 1327100 - DNA, 15 bp, Homo sapiens
tggagagacagcgca

SEQ ID NO: 1327101 - DNA, 15 bp, Homo sapiens
gtggagagacagcgc

SEQ ID NO: 1327102 - DNA, 15 bp, Homo sapiens
tgtggagagacagcg

SEQ ID NO: 1327103 - DNA, 15 bp, Homo sapiens
ctgtggagagacagc

SEQ ID NO: 1327104 - DNA, 15 bp, Homo sapiens
tctgtggagagacag

SEQ ID NO: 1327105 - DNA, 15 bp, Homo sapiens
ctctgtggagagaca

SEQ ID NO: 1327106 - DNA, 15 bp, Homo sapiens
tctctgtggagagac

SEQ ID NO: 1327107 - DNA, 15 bp, Homo sapiens
ctctctgtggagaga

SEQ ID NO: 1327108 - DNA, 15 bp, Homo sapiens
gctctctgtggagag

SEQ ID NO: 1327109 - DNA, 15 bp, Homo sapiens
agctctctgtggaga

SEQ ID NO: 1327110 - DNA, 15 bp, Homo sapiens
gagctctctgtggag

SEQ ID NO: 1327111 - DNA, 15 bp, Homo sapiens
tgagctctctgtgga

SEQ ID NO: 1327112 - DNA, 15 bp, Homo sapiens
atgagctctctgtgg

SEQ ID NO: 1327113 - DNA, 15 bp, Homo sapiens
catgagctctctgtg

SEQ ID NO: 1327114 - DNA, 15 bp, Homo sapiens
gcatgagctctctgt

SEQ ID NO: 1327115 - DNA, 15 bp, Homo sapiens
cgcatgagctctctg

SEQ ID NO: 1327116 - DNA, 15 bp, Homo sapiens
acgcatgagctctct

SEQ ID NO: 1327117 - DNA, 15 bp, Homo sapiens
cacgcatgagctctc

SEQ ID NO: 1327118 - DNA, 15 bp, Homo sapiens
tcacgcatgagctct

SEQ ID NO: 1327119 - DNA, 15 bp, Homo sapiens
atcacgcatgagctc

SEQ ID NO: 1327120 - DNA, 15 bp, Homo sapiens
gatcacgcatgagct

SEQ ID NO: 1327121 - DNA, 15 bp, Homo sapiens
tgatcacgcatgagc

SEQ ID NO: 1327122 - DNA, 15 bp, Homo sapiens
ctgatcacgcatgag

SEQ ID NO: 1327123 - DNA, 15 bp, Homo sapiens
cctgatcacgcatga

SEQ ID NO: 1327124 - DNA, 15 bp, Homo sapiens
ccctgatcacgcatg

SEQ ID NO: 1327125 - DNA, 15 bp, Homo sapiens
tccctgatcacgcat

SEQ ID NO: 1327126 - DNA, 15 bp, Homo sapiens
ctccctgatcacgca

SEQ ID NO: 1327127 - DNA, 15 bp, Homo sapiens
actccctgatcacgc

SEQ ID NO: 1327128 - DNA, 15 bp, Homo sapiens
tactccctgatcacg

SEQ ID NO: 1327129 - DNA, 15 bp, Homo sapiens
ttactccctgatcac

SEQ ID NO: 1327130 - DNA, 15 bp, Homo sapiens
tttactccctgatca

SEQ ID NO: 1327131 - DNA, 15 bp, Homo sapiens
ttttactccctgatc

SEQ ID NO: 1327132 - DNA, 15 bp, Homo sapiens
gttttactccctgat

SEQ ID NO: 1327133 - DNA, 15 bp, Homo sapiens
agttttactccctga

SEQ ID NO: 1327134 - DNA, 15 bp, Homo sapiens
gagttttactccctg

SEQ ID NO: 1327135 - DNA, 15 bp, Homo sapiens
tgagttttactccct

SEQ ID NO: 1327136 - DNA, 15 bp, Homo sapiens
atgagttttactccc

SEQ ID NO: 1327137 - DNA, 15 bp, Homo sapiens
aatgagttttactcc

SEQ ID NO: 1327138 - DNA, 15 bp, Homo sapiens
gaatgagttttactc

SEQ ID NO: 1327139 - DNA, 15 bp, Homo sapiens
ggaatgagttttact

SEQ ID NO: 1327140 - DNA, 15 bp, Homo sapiens
gggaatgagttttac

SEQ ID NO: 1327141 - DNA, 15 bp, Homo sapiens
cgggaatgagtttta

SEQ ID NO: 1327142 - DNA, 15 bp, Homo sapiens
acgggaatgagtttt

SEQ ID NO: 1327143 - DNA, 15 bp, Homo sapiens
aacgggaatgagttt

SEQ ID NO: 1327144 - DNA, 15 bp, Homo sapiens
aaacgggaatgagtt

SEQ ID NO: 1327145 - DNA, 15 bp, Homo sapiens
aaaacgggaatgagt

SEQ ID NO: 1327146 - DNA, 15 bp, Homo sapiens
taaaacgggaatgag

SEQ ID NO: 1327147 - DNA, 15 bp, Homo sapiens
ctaaaacgggaatga

SEQ ID NO: 1327148 - DNA, 15 bp, Homo sapiens
cctaaaacgggaatg

SEQ ID NO: 1327149 - DNA, 15 bp, Homo sapiens
gcctaaaacgggaat

SEQ ID NO: 1327150 - DNA, 15 bp, Homo sapiens
ggcctaaaacgggaa

SEQ ID NO: 1327151 - DNA, 15 bp, Homo sapiens
tggcctaaaacggga

SEQ ID NO: 1327152 - DNA, 15 bp, Homo sapiens
ttggcctaaaacggg

SEQ ID NO: 1327153 - DNA, 15 bp, Homo sapiens
tttggcctaaaacgg

SEQ ID NO: 1327154 - DNA, 15 bp, Homo sapiens
gtttggcctaaaacg

SEQ ID NO: 1327155 - DNA, 15 bp, Homo sapiens
tgtttggcctaaaac

SEQ ID NO: 1327156 - DNA, 15 bp, Homo sapiens
gtgtttggcctaaaa

SEQ ID NO: 1327157 - DNA, 15 bp, Homo sapiens
tgtgtttggcctaaa

SEQ ID NO: 1327158 - DNA, 15 bp, Homo sapiens
ctgtgtttggcctaa

SEQ ID NO: 1327159 - DNA, 15 bp, Homo sapiens
tctgtgtttggccta

SEQ ID NO: 1327160 - DNA, 15 bp, Homo sapiens
ttctgtgtttggcct

SEQ ID NO: 1327161 - DNA, 15 bp, Homo sapiens
tttctgtgtttggcc

SEQ ID NO: 1327162 - DNA, 15 bp, Homo sapiens
ttttctgtgtttggc

SEQ ID NO: 1327163 - DNA, 15 bp, Homo sapiens
tttttctgtgtttgg

SEQ ID NO: 1327164 - DNA, 15 bp, Homo sapiens
atttttctgtgtttg

SEQ ID NO: 1327165 - DNA, 15 bp, Homo sapiens
cctaatttttctgtg

SEQ ID NO: 1327166 - DNA, 15 bp, Homo sapiens
tcctaatttttctgt

SEQ ID NO: 1327167 - DNA, 15 bp, Homo sapiens
ttcctaatttttctg

SEQ ID NO: 1327168 - DNA, 15 bp, Homo sapiens
cttcctaatttttct

SEQ ID NO: 1327169 - DNA, 15 bp, Homo sapiens
ccttcctaatttttc

SEQ ID NO: 1327170 - DNA, 15 bp, Homo sapiens
tccttcctaattttt

SEQ ID NO: 1327171 - DNA, 15 bp, Homo sapiens
gtccttcctaatttt

SEQ ID NO: 1327172 - DNA, 15 bp, Homo sapiens
tgtccttcctaattt

SEQ ID NO: 1327173 - DNA, 15 bp, Homo sapiens
ctgtccttcctaatt

SEQ ID NO: 1327174 - DNA, 15 bp, Homo sapiens
gctgtccttcctaat

SEQ ID NO: 1327175 - DNA, 15 bp, Homo sapiens
ggctgtccttcctaa

SEQ ID NO: 1327176 - DNA, 15 bp, Homo sapiens
gggctgtccttccta

SEQ ID NO: 1327177 - DNA, 15 bp, Homo sapiens
ggggctgtccttcct

SEQ ID NO: 1327178 - DNA, 15 bp, Homo sapiens
tggggctgtccttcc

SEQ ID NO: 1327179 - DNA, 15 bp, Homo sapiens
ttggggctgtccttc

SEQ ID NO: 1327180 - DNA, 15 bp, Homo sapiens
cttggggctgtcctt

SEQ ID NO: 1327181 - DNA, 15 bp, Homo sapiens
ccttggggctgtcct

SEQ ID NO: 1327182 - DNA, 15 bp, Homo sapiens
cccttggggctgtcc

SEQ ID NO: 1327183 - DNA, 15 bp, Homo sapiens
ccccttggggctgtc

SEQ ID NO: 1327184 - DNA, 15 bp, Homo sapiens
gccccttggggctgt

SEQ ID NO: 1327185 - DNA, 15 bp, Homo sapiens
ggccccttggggctg

SEQ ID NO: 1327186 - DNA, 15 bp, Homo sapiens
tggccccttggggct

SEQ ID NO: 1327187 - DNA, 15 bp, Homo sapiens
ctggccccttggggc

SEQ ID NO: 1327188 - DNA, 15 bp, Homo sapiens
tctggccccttgggg

SEQ ID NO: 1327189 - DNA, 15 bp, Homo sapiens
ttctggccccttggg

SEQ ID NO: 1327190 - DNA, 15 bp, Homo sapiens
gttctggccccttgg

SEQ ID NO: 1327191 - DNA, 15 bp, Homo sapiens
ggttctggccccttg

SEQ ID NO: 1327192 - DNA, 15 bp, Homo sapiens
tggttctggcccctt

SEQ ID NO: 1327193 - DNA, 15 bp, Homo sapiens
gtggttctggcccct

SEQ ID NO: 1327194 - DNA, 15 bp, Homo sapiens
ggtggttctggcccc

SEQ ID NO: 1327195 - DNA, 15 bp, Homo sapiens
tggtggttctggccc

SEQ ID NO: 1327196 - DNA, 15 bp, Homo sapiens
gtggtggttctggcc

SEQ ID NO: 1327197 - DNA, 15 bp, Homo sapiens
ggtggtggttctggc

SEQ ID NO: 1327198 - DNA, 15 bp, Homo sapiens
gggtggtggttctgg

SEQ ID NO: 1327199 - DNA, 15 bp, Homo sapiens
agggtggtggttctg

SEQ ID NO: 1327200 - DNA, 15 bp, Homo sapiens
tagggtggtggttct

SEQ ID NO: 1327201 - DNA, 15 bp, Homo sapiens
gtagggtggtggttc

SEQ ID NO: 1327202 - DNA, 15 bp, Homo sapiens
tgtagggtggtggtt

SEQ ID NO: 1327203 - DNA, 15 bp, Homo sapiens
gtgtagggtggtggt

SEQ ID NO: 1327204 - DNA, 15 bp, Homo sapiens
tgtgtagggtggtgg

SEQ ID NO: 1327205 - DNA, 15 bp, Homo sapiens
ttgtgtagggtggtg

SEQ ID NO: 1327206 - DNA, 15 bp, Homo sapiens
tttgtgtagggtggt

SEQ ID NO: 1327207 - DNA, 15 bp, Homo sapiens
ctttgtgtagggtgg

SEQ ID NO: 1327208 - DNA, 15 bp, Homo sapiens
gctttgtgtagggtg

SEQ ID NO: 1327209 - DNA, 15 bp, Homo sapiens
ggctttgtgtagggt

SEQ ID NO: 1327210 - DNA, 15 bp, Homo sapiens
cggctttgtgtaggg

SEQ ID NO: 1327211 - DNA, 15 bp, Homo sapiens
acggctttgtgtagg

SEQ ID NO: 1327212 - DNA, 15 bp, Homo sapiens
cacggctttgtgtag

SEQ ID NO: 1327213 - DNA, 15 bp, Homo sapiens
tcacggctttgtgta

SEQ ID NO: 1327214 - DNA, 15 bp, Homo sapiens
ctcacggctttgtgt

SEQ ID NO: 1327215 - DNA, 15 bp, Homo sapiens
cctcacggctttgtg

SEQ ID NO: 1327216 - DNA, 15 bp, Homo sapiens
tcctcacggctttgt

SEQ ID NO: 1327217 - DNA, 15 bp, Homo sapiens
ctcctcacggctttg

SEQ ID NO: 1327218 - DNA, 15 bp, Homo sapiens
tctcctcacggcttt

SEQ ID NO: 1327219 - DNA, 15 bp, Homo sapiens
gtctcctcacggctt

SEQ ID NO: 1327220 - DNA, 15 bp, Homo sapiens
tgtctcctcacggct

SEQ ID NO: 1327221 - DNA, 15 bp, Homo sapiens
ctgtctcctcacggc

SEQ ID NO: 1327222 - DNA, 15 bp, Homo sapiens
actgtctcctcacgg

SEQ ID NO: 1327223 - DNA, 15 bp, Homo sapiens
gactgtctcctcacg

SEQ ID NO: 1327224 - DNA, 15 bp, Homo sapiens
ggactgtctcctcac

SEQ ID NO: 1327225 - DNA, 15 bp, Homo sapiens
gggactgtctcctca

SEQ ID NO: 1327226 - DNA, 15 bp, Homo sapiens
agggactgtctcctc

SEQ ID NO: 1327227 - DNA, 15 bp, Homo sapiens
cagggactgtctcct

SEQ ID NO: 1327228 - DNA, 15 bp, Homo sapiens
acagggactgtctcc

SEQ ID NO: 1327229 - DNA, 15 bp, Homo sapiens
cacagggactgtctc

SEQ ID NO: 1327230 - DNA, 15 bp, Homo sapiens
gcacagggactgtct

SEQ ID NO: 1327231 - DNA, 15 bp, Homo sapiens
tgcacagggactgtc

SEQ ID NO: 1327232 - DNA, 15 bp, Homo sapiens
atgcacagggactgt

SEQ ID NO: 1327233 - DNA, 15 bp, Homo sapiens
gatgcacagggactg

SEQ ID NO: 1327234 - DNA, 15 bp, Homo sapiens
agatgcacagggact

SEQ ID NO: 1327235 - DNA, 15 bp, Homo sapiens
gagatgcacagggac

SEQ ID NO: 1327236 - DNA, 15 bp, Homo sapiens
agagatgcacaggga

SEQ ID NO: 1327237 - DNA, 15 bp, Homo sapiens
cagagatgcacaggg

SEQ ID NO: 1327238 - DNA, 15 bp, Homo sapiens
gcagagatgcacagg

SEQ ID NO: 1327239 - DNA, 15 bp, Homo sapiens
cgcagagatgcacag

SEQ ID NO: 1327240 - DNA, 15 bp, Homo sapiens
tcgcagagatgcaca

SEQ ID NO: 1327241 - DNA, 15 bp, Homo sapiens
ctcgcagagatgcac

SEQ ID NO: 1327242 - DNA, 15 bp, Homo sapiens
actcgcagagatgca

SEQ ID NO: 1327243 - DNA, 15 bp, Homo sapiens
gactcgcagagatgc

SEQ ID NO: 1327244 - DNA, 15 bp, Homo sapiens
ggactcgcagagatg

SEQ ID NO: 1327245 - DNA, 15 bp, Homo sapiens
gggactcgcagagat

SEQ ID NO: 1327246 - DNA, 15 bp, Homo sapiens
agggactcgcagaga

SEQ ID NO: 1327247 - DNA, 15 bp, Homo sapiens
cagggactcgcagag

SEQ ID NO: 1327248 - DNA, 15 bp, Homo sapiens
tcagggactcgcaga

SEQ ID NO: 1327249 - DNA, 15 bp, Homo sapiens
ttcagggactcgcag

SEQ ID NO: 1327250 - DNA, 15 bp, Homo sapiens
gttcagggactcgca

SEQ ID NO: 1327251 - DNA, 15 bp, Homo sapiens
agttcagggactcgc

SEQ ID NO: 1327252 - DNA, 15 bp, Homo sapiens
gagttcagggactcg

SEQ ID NO: 1327253 - DNA, 15 bp, Homo sapiens
tgagttcagggactc

SEQ ID NO: 1327254 - DNA, 15 bp, Homo sapiens
ttgagttcagggact

SEQ ID NO: 1327255 - DNA, 15 bp, Homo sapiens
tttgagttcagggac

SEQ ID NO: 1327256 - DNA, 15 bp, Homo sapiens
gtttgagttcaggga

SEQ ID NO: 1327257 - DNA, 15 bp, Homo sapiens
ggtttgagttcaggg

SEQ ID NO: 1327258 - DNA, 15 bp, Homo sapiens
gggtttgagttcagg

SEQ ID NO: 1327259 - DNA, 15 bp, Homo sapiens
tgggtttgagttcag

SEQ ID NO: 1327260 - DNA, 15 bp, Homo sapiens
ttgggtttgagttca

SEQ ID NO: 1327261 - DNA, 15 bp, Homo sapiens
cttgggtttgagttc

SEQ ID NO: 1327262 - DNA, 15 bp, Homo sapiens
tcttgggtttgagtt

SEQ ID NO: 1327263 - DNA, 15 bp, Homo sapiens
gtcttgggtttgagt

SEQ ID NO: 1327264 - DNA, 15 bp, Homo sapiens
agtcttgggtttgag

SEQ ID NO: 1327265 - DNA, 15 bp, Homo sapiens
aagtcttgggtttga

SEQ ID NO: 1327266 - DNA, 15 bp, Homo sapiens
gaagtcttgggtttg

SEQ ID NO: 1327267 - DNA, 15 bp, Homo sapiens
ggaagtcttgggttt

SEQ ID NO: 1327268 - DNA, 15 bp, Homo sapiens
aggaagtcttgggtt

SEQ ID NO: 1327269 - DNA, 15 bp, Homo sapiens
caggaagtcttgggt

SEQ ID NO: 1327270 - DNA, 15 bp, Homo sapiens
acaggaagtcttggg

SEQ ID NO: 1327271 - DNA, 15 bp, Homo sapiens
gacaggaagtcttgg

SEQ ID NO: 1327272 - DNA, 15 bp, Homo sapiens
agacaggaagtcttg

SEQ ID NO: 1327273 - DNA, 15 bp, Homo sapiens
gagacaggaagtctt

SEQ ID NO: 1327274 - DNA, 15 bp, Homo sapiens
ggagacaggaagtct

SEQ ID NO: 1327275 - DNA, 15 bp, Homo sapiens
aggagacaggaagtc

SEQ ID NO: 1327276 - DNA, 15 bp, Homo sapiens
caggagacaggaagt

SEQ ID NO: 1327277 - DNA, 15 bp, Homo sapiens
gcaggagacaggaag

SEQ ID NO: 1327278 - DNA, 15 bp, Homo sapiens
ggcaggagacaggaa

SEQ ID NO: 1327279 - DNA, 15 bp, Homo sapiens
tggcaggagacagga

SEQ ID NO: 1327280 - DNA, 15 bp, Homo sapiens
ctggcaggagacagg

SEQ ID NO: 1327281 - DNA, 15 bp, Homo sapiens
cctggcaggagacag

SEQ ID NO: 1327282 - DNA, 15 bp, Homo sapiens
ccctggcaggagaca

SEQ ID NO: 1327283 - DNA, 15 bp, Homo sapiens
gccctggcaggagac

SEQ ID NO: 1327284 - DNA, 15 bp, Homo sapiens
agccctggcaggaga

SEQ ID NO: 1327285 - DNA, 15 bp, Homo sapiens
gagccctggcaggag

SEQ ID NO: 1327286 - DNA, 15 bp, Homo sapiens
ggagccctggcagga

SEQ ID NO: 1327287 - DNA, 15 bp, Homo sapiens
gggagccctggcagg

SEQ ID NO: 1327288 - DNA, 15 bp, Homo sapiens
ggggagccctggcag

SEQ ID NO: 1327289 - DNA, 15 bp, Homo sapiens
tggggagccctggca

SEQ ID NO: 1327290 - DNA, 15 bp, Homo sapiens
ctggggagccctggc

SEQ ID NO: 1327291 - DNA, 15 bp, Homo sapiens
tctggggagccctgg

SEQ ID NO: 1327292 - DNA, 15 bp, Homo sapiens
gtctggggagccctg

SEQ ID NO: 1327293 - DNA, 15 bp, Homo sapiens
ggtctggggagccct

SEQ ID NO: 1327294 - DNA, 15 bp, Homo sapiens
ggggtctggggagcc

SEQ ID NO: 1327295 - DNA, 15 bp, Homo sapiens
cggggtctggggagc

SEQ ID NO: 1327296 - DNA, 15 bp, Homo sapiens
tcggggtctggggag

SEQ ID NO: 1327297 - DNA, 15 bp, Homo sapiens
gtcggggtctgggga

SEQ ID NO: 1327298 - DNA, 15 bp, Homo sapiens
tgtcggggtctgggg

SEQ ID NO: 1327299 - DNA, 15 bp, Homo sapiens
ctgtcggggtctggg

SEQ ID NO: 1327300 - DNA, 15 bp, Homo sapiens
gctgtcggggtctgg

SEQ ID NO: 1327301 - DNA, 15 bp, Homo sapiens
tgctgtcggggtctg

SEQ ID NO: 1327302 - DNA, 15 bp, Homo sapiens
gtgctgtcggggtct

SEQ ID NO: 1327303 - DNA, 15 bp, Homo sapiens
tgtgctgtcggggtc

SEQ ID NO: 1327304 - DNA, 15 bp, Homo sapiens
ctgtgctgtcggggt

SEQ ID NO: 1327305 - DNA, 15 bp, Homo sapiens
cctgtgctgtcgggg

SEQ ID NO: 1327306 - DNA, 15 bp, Homo sapiens
ccctgtgctgtcggg

SEQ ID NO: 1327307 - DNA, 15 bp, Homo sapiens
cccctgtgctgtcgg

SEQ ID NO: 1327308 - DNA, 15 bp, Homo sapiens
gcccctgtgctgtcg

SEQ ID NO: 1327309 - DNA, 15 bp, Homo sapiens
cgcccctgtgctgtc

SEQ ID NO: 1327310 - DNA, 15 bp, Homo sapiens
gcgcccctgtgctgt

SEQ ID NO: 1327311 - DNA, 15 bp, Homo sapiens
agcgcccctgtgctg

SEQ ID NO: 1327312 - DNA, 15 bp, Homo sapiens
cagcgcccctgtgct

SEQ ID NO: 1327313 - DNA, 15 bp, Homo sapiens
ccagcgcccctgtgc

SEQ ID NO: 1327314 - DNA, 15 bp, Homo sapiens
accagcgcccctgtg

SEQ ID NO: 1327315 - DNA, 15 bp, Homo sapiens
caccagcgcccctgt

SEQ ID NO: 1327316 - DNA, 15 bp, Homo sapiens
ccaccagcgcccctg

SEQ ID NO: 1327317 - DNA, 15 bp, Homo sapiens
tccaccagcgcccct

SEQ ID NO: 1327318 - DNA, 15 bp, Homo sapiens
ctccaccagcgcccc

SEQ ID NO: 1327319 - DNA, 15 bp, Homo sapiens
cctccaccagcgccc

SEQ ID NO: 1327320 - DNA, 15 bp, Homo sapiens
tcctccaccagcgcc

SEQ ID NO: 1327321 - DNA, 15 bp, Homo sapiens
ctcctccaccagcgc

SEQ ID NO: 1327322 - DNA, 15 bp, Homo sapiens
cctcctccaccagcg

SEQ ID NO: 1327323 - DNA, 15 bp, Homo sapiens
tcctcctccaccagc

SEQ ID NO: 1327324 - DNA, 15 bp, Homo sapiens
ctcctcctccaccag

SEQ ID NO: 1327325 - DNA, 15 bp, Homo sapiens
cctcctcctccacca

SEQ ID NO: 1327326 - DNA, 15 bp, Homo sapiens
tcctcctcctccacc

SEQ ID NO: 1327327 - DNA, 15 bp, Homo sapiens
atcctcctcctccac

SEQ ID NO: 1327328 - DNA, 15 bp, Homo sapiens
gatcctcctcctcca

SEQ ID NO: 1327329 - DNA, 15 bp, Homo sapiens
ggatcctcctcctcc

SEQ ID NO: 1327330 - DNA, 15 bp, Homo sapiens
aggatcctcctcctc

SEQ ID NO: 1327331 - DNA, 15 bp, Homo sapiens
aaggatcctcctcct

SEQ ID NO: 1327332 - DNA, 15 bp, Homo sapiens
aaaggatcctcctcc

SEQ ID NO: 1327333 - DNA, 15 bp, Homo sapiens
gaaaggatcctcctc

SEQ ID NO: 1327334 - DNA, 15 bp, Homo sapiens
agaaaggatcctcct

SEQ ID NO: 1327335 - DNA, 15 bp, Homo sapiens
aagaaaggatcctcc

SEQ ID NO: 1327336 - DNA, 15 bp, Homo sapiens
gaagaaaggatcctc

SEQ ID NO: 1327337 - DNA, 15 bp, Homo sapiens
tgaagaaaggatcct

SEQ ID NO: 1327338 - DNA, 15 bp, Homo sapiens
ttgaagaaaggatcc

SEQ ID NO: 1327339 - DNA, 15 bp, Homo sapiens
tttgaagaaaggatc

SEQ ID NO: 1327340 - DNA, 15 bp, Homo sapiens
ctttgaagaaaggat

SEQ ID NO: 1327341 - DNA, 15 bp, Homo sapiens
actttgaagaaagga

SEQ ID NO: 1327342 - DNA, 15 bp, Homo sapiens
gactttgaagaaagg

SEQ ID NO: 1327343 - DNA, 15 bp, Homo sapiens
ggactttgaagaaag

SEQ ID NO: 1327344 - DNA, 15 bp, Homo sapiens
gggactttgaagaaa

SEQ ID NO: 1327345 - DNA, 15 bp, Homo sapiens
ggggactttgaagaa

SEQ ID NO: 1327346 - DNA, 15 bp, Homo sapiens
cggggactttgaaga

SEQ ID NO: 1327347 - DNA, 15 bp, Homo sapiens
acggggactttgaag

SEQ ID NO: 1327348 - DNA, 15 bp, Homo sapiens
cacggggactttgaa

SEQ ID NO: 1327349 - DNA, 15 bp, Homo sapiens
tcacggggactttga

SEQ ID NO: 1327350 - DNA, 15 bp, Homo sapiens
ttcacggggactttg

SEQ ID NO: 1327351 - DNA, 15 bp, Homo sapiens
gttcacggggacttt

SEQ ID NO: 1327352 - DNA, 15 bp, Homo sapiens
tgttcacggggactt

SEQ ID NO: 1327353 - DNA, 15 bp, Homo sapiens
ttgttcacggggact

SEQ ID NO: 1327354 - DNA, 15 bp, Homo sapiens
cttgttcacggggac

SEQ ID NO: 1327355 - DNA, 15 bp, Homo sapiens
gcttgttcacgggga

SEQ ID NO: 1327356 - DNA, 15 bp, Homo sapiens
agcttgttcacgggg

SEQ ID NO: 1327357 - DNA, 15 bp, Homo sapiens
cagcttgttcacggg

SEQ ID NO: 1327358 - DNA, 15 bp, Homo sapiens
ccagcttgttcacgg

SEQ ID NO: 1327359 - DNA, 15 bp, Homo sapiens
gccagcttgttcacg

SEQ ID NO: 1327360 - DNA, 15 bp, Homo sapiens
tgccagcttgttcac

SEQ ID NO: 1327361 - DNA, 15 bp, Homo sapiens
ctgccagcttgttca

SEQ ID NO: 1327362 - DNA, 15 bp, Homo sapiens
gctgccagcttgttc

SEQ ID NO: 1327363 - DNA, 15 bp, Homo sapiens
cgctgccagcttgtt

SEQ ID NO: 1327364 - DNA, 15 bp, Homo sapiens
ccgctgccagcttgt

SEQ ID NO: 1327365 - DNA, 15 bp, Homo sapiens
gccgctgccagcttg

SEQ ID NO: 1327366 - DNA, 15 bp, Homo sapiens
agccgctgccagctt

SEQ ID NO: 1327367 - DNA, 15 bp, Homo sapiens
cagccgctgccagct

SEQ ID NO: 1327368 - DNA, 15 bp, Homo sapiens
acagccgctgccagc

SEQ ID NO: 1327369 - DNA, 15 bp, Homo sapiens
gacagccgctgccag

SEQ ID NO: 1327370 - DNA, 15 bp, Homo sapiens
agacagccgctgcca

SEQ ID NO: 1327371 - DNA, 15 bp, Homo sapiens
gagacagccgctgcc

SEQ ID NO: 1327372 - DNA, 15 bp, Homo sapiens
ggagacagccgctgc

SEQ ID NO: 1327373 - DNA, 15 bp, Homo sapiens
tggagacagccgctg

SEQ ID NO: 1327374 - DNA, 15 bp, Homo sapiens
ttggagacagccgct

SEQ ID NO: 1327375 - DNA, 15 bp, Homo sapiens
gttggagacagccgc

SEQ ID NO: 1327376 - DNA, 15 bp, Homo sapiens
agttggagacagccg

SEQ ID NO: 1327377 - DNA, 15 bp, Homo sapiens
aagttggagacagcc

SEQ ID NO: 1327378 - DNA, 15 bp, Homo sapiens
gaagttggagacagc

SEQ ID NO: 1327379 - DNA, 15 bp, Homo sapiens
cgaagttggagacag

SEQ ID NO: 1327380 - DNA, 15 bp, Homo sapiens
ccgaagttggagaca

SEQ ID NO: 1327381 - DNA, 15 bp, Homo sapiens
gccgaagttggagac

SEQ ID NO: 1327382 - DNA, 15 bp, Homo sapiens
agccgaagttggaga

SEQ ID NO: 1327383 - DNA, 15 bp, Homo sapiens
tagccgaagttggag

SEQ ID NO: 1327384 - DNA, 15 bp, Homo sapiens
atagccgaagttgga

SEQ ID NO: 1327385 - DNA, 15 bp, Homo sapiens
catagccgaagttgg

SEQ ID NO: 1327386 - DNA, 15 bp, Homo sapiens
tcatagccgaagttg

SEQ ID NO: 1327387 - DNA, 15 bp, Homo sapiens
gtcatagccgaagtt

SEQ ID NO: 1327388 - DNA, 15 bp, Homo sapiens
ggtcatagccgaagt

SEQ ID NO: 1327389 - DNA, 15 bp, Homo sapiens
aggtcatagccgaag

SEQ ID NO: 1327390 - DNA, 15 bp, Homo sapiens
caggtcatagccgaa

SEQ ID NO: 1327391 - DNA, 15 bp, Homo sapiens
acaggtcatagccga

SEQ ID NO: 1327392 - DNA, 15 bp, Homo sapiens
tacaggtcatagccg

SEQ ID NO: 1327393 - DNA, 15 bp, Homo sapiens
gtacaggtcatagcc

SEQ ID NO: 1327394 - DNA, 15 bp, Homo sapiens
ggtacaggtcatagc

SEQ ID NO: 1327395 - DNA, 15 bp, Homo sapiens
cggtacaggtcatag

SEQ ID NO: 1327396 - DNA, 15 bp, Homo sapiens
ccggtacaggtcata

SEQ ID NO: 1327397 - DNA, 15 bp, Homo sapiens
cccggtacaggtcat

SEQ ID NO: 1327398 - DNA, 15 bp, Homo sapiens
acccggtacaggtca

SEQ ID NO: 1327399 - DNA, 15 bp, Homo sapiens
cacccggtacaggtc

SEQ ID NO: 1327400 - DNA, 15 bp, Homo sapiens
gcacccggtacaggt

SEQ ID NO: 1327401 - DNA, 15 bp, Homo sapiens
cgcacccggtacagg

SEQ ID NO: 1327402 - DNA, 15 bp, Homo sapiens
tcgcacccggtacag

SEQ ID NO: 1327403 - DNA, 15 bp, Homo sapiens
atcgcacccggtaca

SEQ ID NO: 1327404 - DNA, 15 bp, Homo sapiens
gatcgcacccggtac

SEQ ID NO: 1327405 - DNA, 15 bp, Homo sapiens
ggatcgcacccggta

SEQ ID NO: 1327406 - DNA, 15 bp, Homo sapiens
tggatcgcacccggt

SEQ ID NO: 1327407 - DNA, 15 bp, Homo sapiens
ctggatcgcacccgg

SEQ ID NO: 1327408 - DNA, 15 bp, Homo sapiens
gctggatcgcacccg

SEQ ID NO: 1327409 - DNA, 15 bp, Homo sapiens
tgctggatcgcaccc

SEQ ID NO: 1327410 - DNA, 15 bp, Homo sapiens
gtgctggatcgcacc

SEQ ID NO: 1327411 - DNA, 15 bp, Homo sapiens
cgtgctggatcgcac

SEQ ID NO: 1327412 - DNA, 15 bp, Homo sapiens
tcgtgctggatcgca

SEQ ID NO: 1327413 - DNA, 15 bp, Homo sapiens
ctcgtgctggatcgc

SEQ ID NO: 1327414 - DNA, 15 bp, Homo sapiens
gctcgtgctggatcg

SEQ ID NO: 1327415 - DNA, 15 bp, Homo sapiens
ggctcgtgctggatc

SEQ ID NO: 1327416 - DNA, 15 bp, Homo sapiens
gggctcgtgctggat

SEQ ID NO: 1327417 - DNA, 15 bp, Homo sapiens
ggggctcgtgctgga

SEQ ID NO: 1327418 - DNA, 15 bp, Homo sapiens
tggggctcgtgctgg

SEQ ID NO: 1327419 - DNA, 15 bp, Homo sapiens
gtggggctcgtgctg

SEQ ID NO: 1327420 - DNA, 15 bp, Homo sapiens
cgtggggctcgtgct

SEQ ID NO: 1327421 - DNA, 15 bp, Homo sapiens
tcgtggggctcgtgc

SEQ ID NO: 1327422 - DNA, 15 bp, Homo sapiens
gtcgtggggctcgtg

SEQ ID NO: 1327423 - DNA, 15 bp, Homo sapiens
ggtcgtggggctcgt

SEQ ID NO: 1327424 - DNA, 15 bp, Homo sapiens
tggtcgtggggctcg

SEQ ID NO: 1327425 - DNA, 15 bp, Homo sapiens
ttggtcgtggggctc

SEQ ID NO: 1327426 - DNA, 15 bp, Homo sapiens
gttggtcgtggggct

SEQ ID NO: 1327427 - DNA, 15 bp, Homo sapiens
cgttggtcgtggggc

SEQ ID NO: 1327428 - DNA, 15 bp, Homo sapiens
acgttggtcgtgggg

SEQ ID NO: 1327429 - DNA, 15 bp, Homo sapiens
cacgttggtcgtggg

SEQ ID NO: 1327430 - DNA, 15 bp, Homo sapiens
gcacgttggtcgtgg

SEQ ID NO: 1327431 - DNA, 15 bp, Homo sapiens
agcacgttggtcgtg

SEQ ID NO: 1327432 - DNA, 15 bp, Homo sapiens
gagcacgttggtcgt

SEQ ID NO: 1327433 - DNA, 15 bp, Homo sapiens
ggagcacgttggtcg

SEQ ID NO: 1327434 - DNA, 15 bp, Homo sapiens
aggagcacgttggtc

SEQ ID NO: 1327435 - DNA, 15 bp, Homo sapiens
caggagcacgttggt

SEQ ID NO: 1327436 - DNA, 15 bp, Homo sapiens
acaggagcacgttgg

SEQ ID NO: 1327437 - DNA, 15 bp, Homo sapiens
gacaggagcacgttg

SEQ ID NO: 1327438 - DNA, 15 bp, Homo sapiens
agacaggagcacgtt

SEQ ID NO: 1327439 - DNA, 15 bp, Homo sapiens
gagacaggagcacgt

SEQ ID NO: 1327440 - DNA, 15 bp, Homo sapiens
ggagacaggagcacg

SEQ ID NO: 1327441 - DNA, 15 bp, Homo sapiens
aggagacaggagcac

SEQ ID NO: 1327442 - DNA, 15 bp, Homo sapiens
gaggagacaggagca

SEQ ID NO: 1327443 - DNA, 15 bp, Homo sapiens
agaggagacaggagc

SEQ ID NO: 1327444 - DNA, 15 bp, Homo sapiens
gagaggagacaggag

SEQ ID NO: 1327445 - DNA, 15 bp, Homo sapiens
tgagaggagacagga

SEQ ID NO: 1327446 - DNA, 15 bp, Homo sapiens
ctgagaggagacagg

SEQ ID NO: 1327447 - DNA, 15 bp, Homo sapiens
actgagaggagacag

SEQ ID NO: 1327448 - DNA, 15 bp, Homo sapiens
cactgagaggagaca

SEQ ID NO: 1327449 - DNA, 15 bp, Homo sapiens
acactgagaggagac

SEQ ID NO: 1327450 - DNA, 15 bp, Homo sapiens
cacactgagaggaga

SEQ ID NO: 1327451 - DNA, 15 bp, Homo sapiens
ccacactgagaggag

SEQ ID NO: 1327452 - DNA, 15 bp, Homo sapiens
gccacactgagagga

SEQ ID NO: 1327453 - DNA, 15 bp, Homo sapiens
ggccacactgagagg

SEQ ID NO: 1327454 - DNA, 15 bp, Homo sapiens
tggccacactgagag

SEQ ID NO: 1327455 - DNA, 15 bp, Homo sapiens
gtggccacactgaga

SEQ ID NO: 1327456 - DNA, 15 bp, Homo sapiens
cgtggccacactgag

SEQ ID NO: 1327457 - DNA, 15 bp, Homo sapiens
ccgtggccacactga

SEQ ID NO: 1327458 - DNA, 15 bp, Homo sapiens
gccgtggccacactg

SEQ ID NO: 1327459 - DNA, 15 bp, Homo sapiens
ggccgtggccacact

SEQ ID NO: 1327460 - DNA, 15 bp, Homo sapiens
gggccgtggccacac

SEQ ID NO: 1327461 - DNA, 15 bp, Homo sapiens
agggccgtggccaca

SEQ ID NO: 1327462 - DNA, 15 bp, Homo sapiens
gagggccgtggccac

SEQ ID NO: 1327463 - DNA, 15 bp, Homo sapiens
agagggccgtggcca

SEQ ID NO: 1327464 - DNA, 15 bp, Homo sapiens
gagagggccgtggcc

SEQ ID NO: 1327465 - DNA, 15 bp, Homo sapiens
cgagagggccgtggc

SEQ ID NO: 1327466 - DNA, 15 bp, Homo sapiens
ccgagagggccgtgg

SEQ ID NO: 1327467 - DNA, 15 bp, Homo sapiens
gccgagagggccgtg

SEQ ID NO: 1327468 - DNA, 15 bp, Homo sapiens
ggccgagagggccgt

SEQ ID NO: 1327469 - DNA, 15 bp, Homo sapiens
gggccgagagggccg

SEQ ID NO: 1327470 - DNA, 15 bp, Homo sapiens
agggccgagagggcc

SEQ ID NO: 1327471 - DNA, 15 bp, Homo sapiens
gagggccgagagggc

SEQ ID NO: 1327472 - DNA, 15 bp, Homo sapiens
agagggccgagaggg

SEQ ID NO: 1327473 - DNA, 15 bp, Homo sapiens
gagagggccgagagg

SEQ ID NO: 1327474 - DNA, 15 bp, Homo sapiens
cgagagggccgagag

SEQ ID NO: 1327475 - DNA, 15 bp, Homo sapiens
gcgagagggccgaga

SEQ ID NO: 1327476 - DNA, 15 bp, Homo sapiens
agcgagagggccgag

SEQ ID NO: 1327477 - DNA, 15 bp, Homo sapiens
cagcgagagggccga

SEQ ID NO: 1327478 - DNA, 15 bp, Homo sapiens
ccagcgagagggccg

SEQ ID NO: 1327479 - DNA, 15 bp, Homo sapiens
cccagcgagagggcc

SEQ ID NO: 1327480 - DNA, 15 bp, Homo sapiens
acccagcgagagggc

SEQ ID NO: 1327481 - DNA, 15 bp, Homo sapiens
cacccagcgagaggg

SEQ ID NO: 1327482 - DNA, 15 bp, Homo sapiens
tcacccagcgagagg

SEQ ID NO: 1327483 - DNA, 15 bp, Homo sapiens
ctcacccagcgagag

SEQ ID NO: 1327484 - DNA, 15 bp, Homo sapiens
actcacccagcgaga

SEQ ID NO: 1327485 - DNA, 15 bp, Homo sapiens
cactcacccagcgag

SEQ ID NO: 1327486 - DNA, 15 bp, Homo sapiens
gcactcacccagcga

SEQ ID NO: 1327487 - DNA, 15 bp, Homo sapiens
agcactcacccagcg

SEQ ID NO: 1327488 - DNA, 15 bp, Homo sapiens
gagcactcacccagc

SEQ ID NO: 1327489 - DNA, 15 bp, Homo sapiens
tgagcactcacccag

SEQ ID NO: 1327490 - DNA, 15 bp, Homo sapiens
ctgagcactcaccca

SEQ ID NO: 1327491 - DNA, 15 bp, Homo sapiens
tctgagcactcaccc

SEQ ID NO: 1327492 - DNA, 15 bp, Homo sapiens
atctgagcactcacc

SEQ ID NO: 1327493 - DNA, 15 bp, Homo sapiens
catctgagcactcac

SEQ ID NO: 1327494 - DNA, 15 bp, Homo sapiens
gcatctgagcactca

SEQ ID NO: 1327495 - DNA, 15 bp, Homo sapiens
tgcatctgagcactc

SEQ ID NO: 1327496 - DNA, 15 bp, Homo sapiens
ctgcatctgagcact

SEQ ID NO: 1327497 - DNA, 15 bp, Homo sapiens
cctgcatctgagcac

SEQ ID NO: 1327498 - DNA, 15 bp, Homo sapiens
tcctgcatctgagca

SEQ ID NO: 1327499 - DNA, 15 bp, Homo sapiens
ttcctgcatctgagc

SEQ ID NO: 1327500 - DNA, 15 bp, Homo sapiens
cttcctgcatctgag

SEQ ID NO: 1327501 - DNA, 15 bp, Homo sapiens
gcttcctgcatctga

SEQ ID NO: 1327502 - DNA, 15 bp, Homo sapiens
ggcttcctgcatctg

SEQ ID NO: 1327503 - DNA, 15 bp, Homo sapiens
gggcttcctgcatct

SEQ ID NO: 1327504 - DNA, 15 bp, Homo sapiens
ggggcttcctgcatc

SEQ ID NO: 1327505 - DNA, 15 bp, Homo sapiens
tggggcttcctgcat

SEQ ID NO: 1327506 - DNA, 15 bp, Homo sapiens
ctggggcttcctgca

SEQ ID NO: 1327507 - DNA, 15 bp, Homo sapiens
cctggggcttcctgc

SEQ ID NO: 1327508 - DNA, 15 bp, Homo sapiens
gcctggggcttcctg

SEQ ID NO: 1327509 - DNA, 15 bp, Homo sapiens
tgcctggggcttcct

SEQ ID NO: 1327510 - DNA, 15 bp, Homo sapiens
ctgcctggggcttcc

SEQ ID NO: 1327511 - DNA, 15 bp, Homo sapiens
tctgcctggggcttc

SEQ ID NO: 1327512 - DNA, 15 bp, Homo sapiens
gtctgcctggggctt

SEQ ID NO: 1327513 - DNA, 15 bp, Homo sapiens
ggtctgcctggggct

SEQ ID NO: 1327514 - DNA, 15 bp, Homo sapiens
aggtctgcctggggc

SEQ ID NO: 1327515 - DNA, 15 bp, Homo sapiens
caggtctgcctgggg

SEQ ID NO: 1327516 - DNA, 15 bp, Homo sapiens
ccaggtctgcctggg

SEQ ID NO: 1327517 - DNA, 15 bp, Homo sapiens
tccaggtctgcctgg

SEQ ID NO: 1327518 - DNA, 15 bp, Homo sapiens
ctccaggtctgcctg

SEQ ID NO: 1327519 - DNA, 15 bp, Homo sapiens
tctccaggtctgcct

SEQ ID NO: 1327520 - DNA, 15 bp, Homo sapiens
ctctccaggtctgcc

SEQ ID NO: 1327521 - DNA, 15 bp, Homo sapiens
cctctccaggtctgc

SEQ ID NO: 1327522 - DNA, 15 bp, Homo sapiens
gcctctccaggtctg

SEQ ID NO: 1327523 - DNA, 15 bp, Homo sapiens
ggcctctccaggtct

SEQ ID NO: 1327524 - DNA, 15 bp, Homo sapiens
gggcctctccaggtc

SEQ ID NO: 1327525 - DNA, 15 bp, Homo sapiens
ggggcctctccaggt

SEQ ID NO: 1327526 - DNA, 15 bp, Homo sapiens
gggggcctctccagg

SEQ ID NO: 1327527 - DNA, 15 bp, Homo sapiens
agggggcctctccag

SEQ ID NO: 1327528 - DNA, 15 bp, Homo sapiens
cagggggcctctcca

SEQ ID NO: 1327529 - DNA, 15 bp, Homo sapiens
acagggggcctctcc

SEQ ID NO: 1327530 - DNA, 15 bp, Homo sapiens
cacagggggcctctc

SEQ ID NO: 1327531 - DNA, 15 bp, Homo sapiens
ccacagggggcctct

SEQ ID NO: 1327532 - DNA, 15 bp, Homo sapiens
gccacagggggcctc

SEQ ID NO: 1327533 - DNA, 15 bp, Homo sapiens
ggccacagggggcct

SEQ ID NO: 1327534 - DNA, 15 bp, Homo sapiens
aggccacagggggcc

SEQ ID NO: 1327535 - DNA, 15 bp, Homo sapiens
gaggccacagggggc

SEQ ID NO: 1327536 - DNA, 15 bp, Homo sapiens
agaggccacaggggg

SEQ ID NO: 1327537 - DNA, 15 bp, Homo sapiens
cagaggccacagggg

SEQ ID NO: 1327538 - DNA, 15 bp, Homo sapiens
gcagaggccacaggg

SEQ ID NO: 1327539 - DNA, 15 bp, Homo sapiens
cgcagaggccacagg

SEQ ID NO: 1327540 - DNA, 15 bp, Homo sapiens
acgcagaggccacag

SEQ ID NO: 1327541 - DNA, 15 bp, Homo sapiens
tacgcagaggccaca

SEQ ID NO: 1327542 - DNA, 15 bp, Homo sapiens
ttacgcagaggccac

SEQ ID NO: 1327543 - DNA, 15 bp, Homo sapiens
tttacgcagaggcca

SEQ ID NO: 1327544 - DNA, 15 bp, Homo sapiens
gtttacgcagaggcc

SEQ ID NO: 1327545 - DNA, 15 bp, Homo sapiens
cgtttacgcagaggc

SEQ ID NO: 1327546 - DNA, 15 bp, Homo sapiens
acgtttacgcagagg

SEQ ID NO: 1327547 - DNA, 15 bp, Homo sapiens
cacgtttacgcagag

SEQ ID NO: 1327548 - DNA, 15 bp, Homo sapiens
ccacgtttacgcaga

SEQ ID NO: 1327549 - DNA, 15 bp, Homo sapiens
gccacgtttacgcag

SEQ ID NO: 1327550 - DNA, 15 bp, Homo sapiens
agccacgtttacgca

SEQ ID NO: 1327551 - DNA, 15 bp, Homo sapiens
cagccacgtttacgc

SEQ ID NO: 1327552 - DNA, 15 bp, Homo sapiens
tcagccacgtttacg

SEQ ID NO: 1327553 - DNA, 15 bp, Homo sapiens
ctcagccacgtttac

SEQ ID NO: 1327554 - DNA, 15 bp, Homo sapiens
actcagccacgttta

SEQ ID NO: 1327555 - DNA, 15 bp, Homo sapiens
aactcagccacgttt

SEQ ID NO: 1327556 - DNA, 15 bp, Homo sapiens
aaactcagccacgtt

SEQ ID NO: 1327557 - DNA, 15 bp, Homo sapiens
taaactcagccacgt

SEQ ID NO: 1327558 - DNA, 15 bp, Homo sapiens
ataaactcagccacg

SEQ ID NO: 1327559 - DNA, 15 bp, Homo sapiens
aataaactcagccac

SEQ ID NO: 1327560 - DNA, 15 bp, Homo sapiens
caataaactcagcca

SEQ ID NO: 1327561 - DNA, 15 bp, Homo sapiens
tcaataaactcagcc

SEQ ID NO: 1327562 - DNA, 15 bp, Homo sapiens
gtcaataaactcagc

SEQ ID NO: 1327563 - DNA, 15 bp, Homo sapiens
tgtcaataaactcag

SEQ ID NO: 1327564 - DNA, 15 bp, Homo sapiens
atgtcaataaactca

SEQ ID NO: 1327565 - DNA, 15 bp, Homo sapiens
aatgtcaataaactc

SEQ ID NO: 1327566 - DNA, 15 bp, Homo sapiens
aaatgtcaataaact

SEQ ID NO: 1327567 - DNA, 15 bp, Homo sapiens
gaaatgtcaataaac

SEQ ID NO: 1327568 - DNA, 15 bp, Homo sapiens
tgaaatgtcaataaa

SEQ ID NO: 1327569 - DNA, 15 bp, Homo sapiens
ctgaaatgtcaataa

SEQ ID NO: 1327570 - DNA, 15 bp, Homo sapiens
actgaaatgtcaata

SEQ ID NO: 1327571 - DNA, 15 bp, Homo sapiens
aactgaaatgtcaat

SEQ ID NO: 1327572 - DNA, 15 bp, Homo sapiens
gaactgaaatgtcaa

SEQ ID NO: 1327573 - DNA, 15 bp, Homo sapiens
tgaactgaaatgtca

SEQ ID NO: 1327574 - DNA, 15 bp, Homo sapiens
ctgaactgaaatgtc

SEQ ID NO: 1327575 - DNA, 15 bp, Homo sapiens
gctgaactgaaatgt

SEQ ID NO: 1327576 - DNA, 15 bp, Homo sapiens
cgctgaactgaaatg

SEQ ID NO: 1327577 - DNA, 15 bp, Homo sapiens
tcgctgaactgaaat

SEQ ID NO: 1327578 - DNA, 15 bp, Homo sapiens
ctcgctgaactgaaa

SEQ ID NO: 1327579 - DNA, 15 bp, Homo sapiens
cctcgctgaactgaa

SEQ ID NO: 1327580 - DNA, 15 bp, Homo sapiens
ccctcgctgaactga

SEQ ID NO: 1327581 - DNA, 15 bp, Homo sapiens
cccctcgctgaactg

SEQ ID NO: 1327582 - DNA, 15 bp, Homo sapiens
acccctcgctgaact

SEQ ID NO: 1327583 - DNA, 15 bp, Homo sapiens
cacccctcgctgaac

SEQ ID NO: 1327584 - DNA, 15 bp, Homo sapiens
tcacccctcgctgaa

SEQ ID NO: 1327585 - DNA, 15 bp, Homo sapiens
ttcacccctcgctga

SEQ ID NO: 1327586 - DNA, 15 bp, Homo sapiens
cttcacccctcgctg

SEQ ID NO: 1327587 - DNA, 15 bp, Homo sapiens
acttcacccctcgct

SEQ ID NO: 1327588 - DNA, 15 bp, Homo sapiens
tacttcacccctcgc

SEQ ID NO: 1327589 - DNA, 15 bp, Homo sapiens
ctacttcacccctcg

SEQ ID NO: 1327590 - DNA, 15 bp, Homo sapiens
gctacttcacccctc

SEQ ID NO: 1327591 - DNA, 15 bp, Homo sapiens
tgctacttcacccct

SEQ ID NO: 1327592 - DNA, 15 bp, Homo sapiens
gtgctacttcacccc

SEQ ID NO: 1327593 - DNA, 15 bp, Homo sapiens
ggtgctacttcaccc

SEQ ID NO: 1327594 - DNA, 15 bp, Homo sapiens
tggtgctacttcacc

SEQ ID NO: 1327595 - DNA, 15 bp, Homo sapiens
ctggtgctacttcac

SEQ ID NO: 1327596 - DNA, 15 bp, Homo sapiens
cctggtgctacttca

SEQ ID NO: 1327597 - DNA, 15 bp, Homo sapiens
ccctggtgctacttc

SEQ ID NO: 1327598 - DNA, 15 bp, Homo sapiens
cccctggtgctactt

SEQ ID NO: 1327599 - DNA, 15 bp, Homo sapiens
gcccctggtgctact

SEQ ID NO: 1327600 - DNA, 15 bp, Homo sapiens
ggcccctggtgctac

SEQ ID NO: 1327601 - DNA, 15 bp, Homo sapiens
aggcccctggtgcta

SEQ ID NO: 1327602 - DNA, 15 bp, Homo sapiens
caggcccctggtgct

SEQ ID NO: 1327603 - DNA, 15 bp, Homo sapiens
ccaggcccctggtgc

SEQ ID NO: 1327604 - DNA, 15 bp, Homo sapiens
gccaggcccctggtg

SEQ ID NO: 1327605 - DNA, 15 bp, Homo sapiens
ggccaggcccctggt

SEQ ID NO: 1327606 - DNA, 15 bp, Homo sapiens
aggccaggcccctgg

SEQ ID NO: 1327607 - DNA, 15 bp, Homo sapiens
caggccaggcccctg

SEQ ID NO: 1327608 - DNA, 15 bp, Homo sapiens
ccaggccaggcccct

SEQ ID NO: 1327609 - DNA, 15 bp, Homo sapiens
cccaggccaggcccc

SEQ ID NO: 1327610 - DNA, 15 bp, Homo sapiens
ccccaggccaggccc

SEQ ID NO: 1327611 - DNA, 15 bp, Homo sapiens
cccccaggccaggcc

SEQ ID NO: 1327612 - DNA, 15 bp, Homo sapiens
acccccaggccaggc

SEQ ID NO: 1327613 - DNA, 15 bp, Homo sapiens
gacccccaggccagg

SEQ ID NO: 1327614 - DNA, 15 bp, Homo sapiens
ggacccccaggccag

SEQ ID NO: 1327615 - DNA, 15 bp, Homo sapiens
gggacccccaggcca

SEQ ID NO: 1327616 - DNA, 15 bp, Homo sapiens
tgggacccccaggcc

SEQ ID NO: 1327617 - DNA, 15 bp, Homo sapiens
ctgggacccccaggc

SEQ ID NO: 1327618 - DNA, 15 bp, Homo sapiens
gctgggacccccagg

SEQ ID NO: 1327619 - DNA, 15 bp, Homo sapiens
agctgggacccccag

SEQ ID NO: 1327620 - DNA, 15 bp, Homo sapiens
cagctgggaccccca

SEQ ID NO: 1327621 - DNA, 15 bp, Homo sapiens
acagctgggaccccc

SEQ ID NO: 1327622 - DNA, 15 bp, Homo sapiens
cacagctgggacccc

SEQ ID NO: 1327623 - DNA, 15 bp, Homo sapiens
acacagctgggaccc

SEQ ID NO: 1327624 - DNA, 15 bp, Homo sapiens
tacacagctgggacc

SEQ ID NO: 1327625 - DNA, 15 bp, Homo sapiens
ttacacagctgggac

SEQ ID NO: 1327626 - DNA, 15 bp, Homo sapiens
cttacacagctggga

SEQ ID NO: 1327627 - DNA, 15 bp, Homo sapiens
gcttacacagctggg

SEQ ID NO: 1327628 - DNA, 15 bp, Homo sapiens
tgcttacacagctgg

SEQ ID NO: 1327629 - DNA, 15 bp, Homo sapiens
ctgcttacacagctg

SEQ ID NO: 1327630 - DNA, 15 bp, Homo sapiens
cctgcttacacagct

SEQ ID NO: 1327631 - DNA, 15 bp, Homo sapiens
tcctgcttacacagc

SEQ ID NO: 1327632 - DNA, 15 bp, Homo sapiens
ctcctgcttacacag

SEQ ID NO: 1327633 - DNA, 15 bp, Homo sapiens
gctcctgcttacaca

SEQ ID NO: 1327634 - DNA, 15 bp, Homo sapiens
agctcctgcttacac

SEQ ID NO: 1327635 - DNA, 15 bp, Homo sapiens
gagctcctgcttaca

SEQ ID NO: 1327636 - DNA, 15 bp, Homo sapiens
tgagctcctgcttac

SEQ ID NO: 1327637 - DNA, 15 bp, Homo sapiens
ctgagctcctgctta

SEQ ID NO: 1327638 - DNA, 15 bp, Homo sapiens
cctgagctcctgctt

SEQ ID NO: 1327639 - DNA, 15 bp, Homo sapiens
ccctgagctcctgct

SEQ ID NO: 1327640 - DNA, 15 bp, Homo sapiens
cccctgagctcctgc

SEQ ID NO: 1327641 - DNA, 15 bp, Homo sapiens
gcccctgagctcctg

SEQ ID NO: 1327642 - DNA, 15 bp, Homo sapiens
agcccctgagctcct

SEQ ID NO: 1327643 - DNA, 15 bp, Homo sapiens
cagcccctgagctcc

SEQ ID NO: 1327644 - DNA, 15 bp, Homo sapiens
gcagcccctgagctc

SEQ ID NO: 1327645 - DNA, 15 bp, Homo sapiens
tgcagcccctgagct

SEQ ID NO: 1327646 - DNA, 15 bp, Homo sapiens
gtgcagcccctgagc

SEQ ID NO: 1327647 - DNA, 15 bp, Homo sapiens
tgtgcagcccctgag

SEQ ID NO: 1327648 - DNA, 15 bp, Homo sapiens
gtgtgcagcccctga

SEQ ID NO: 1327649 - DNA, 15 bp, Homo sapiens
tgtgtgtgcagcccc

SEQ ID NO: 1327650 - DNA, 15 bp, Homo sapiens
gtgtgtgtgcagccc

SEQ ID NO: 1327651 - DNA, 15 bp, Homo sapiens
cgtgtgtgtgcagcc

SEQ ID NO: 1327652 - DNA, 15 bp, Homo sapiens
tcgtgtgtgtgcagc

SEQ ID NO: 1327653 - DNA, 15 bp, Homo sapiens
atcgtgtgtgtgcag

SEQ ID NO: 1327654 - DNA, 15 bp, Homo sapiens
aatcgtgtgtgtgca

SEQ ID NO: 1327655 - DNA, 15 bp, Homo sapiens
gaatcgtgtgtgtgc

SEQ ID NO: 1327656 - DNA, 15 bp, Homo sapiens
ggaatcgtgtgtgtg

SEQ ID NO: 1327657 - DNA, 15 bp, Homo sapiens
gggaatcgtgtgtgt

SEQ ID NO: 1327658 - DNA, 15 bp, Homo sapiens
ggggaatcgtgtgtg

SEQ ID NO: 1327659 - DNA, 15 bp, Homo sapiens
tggggaatcgtgtgt

SEQ ID NO: 1327660 - DNA, 15 bp, Homo sapiens
ctggggaatcgtgtg

SEQ ID NO: 1327661 - DNA, 15 bp, Homo sapiens
gctggggaatcgtgt

SEQ ID NO: 1327662 - DNA, 15 bp, Homo sapiens
agctggggaatcgtg

SEQ ID NO: 1327663 - DNA, 15 bp, Homo sapiens
gagctggggaatcgt

SEQ ID NO: 1327664 - DNA, 15 bp, Homo sapiens
ggagctggggaatcg

SEQ ID NO: 1327665 - DNA, 15 bp, Homo sapiens
gggagctggggaatc

SEQ ID NO: 1327666 - DNA, 15 bp, Homo sapiens
ggggagctggggaat

SEQ ID NO: 1327667 - DNA, 15 bp, Homo sapiens
cggggagctggggaa

SEQ ID NO: 1327668 - DNA, 15 bp, Homo sapiens
tcggggagctgggga

SEQ ID NO: 1327669 - DNA, 15 bp, Homo sapiens
ttcggggagctgggg

SEQ ID NO: 1327670 - DNA, 15 bp, Homo sapiens
tttcggggagctggg

SEQ ID NO: 1327671 - DNA, 15 bp, Homo sapiens
ctttcggggagctgg

SEQ ID NO: 1327672 - DNA, 15 bp, Homo sapiens
cctttcggggagctg

SEQ ID NO: 1327673 - DNA, 15 bp, Homo sapiens
ccctttcggggagct

SEQ ID NO: 1327674 - DNA, 15 bp, Homo sapiens
cccctttcggggagc

SEQ ID NO: 1327675 - DNA, 15 bp, Homo sapiens
gcccctttcggggag

SEQ ID NO: 1327676 - DNA, 15 bp, Homo sapiens
agcccctttcgggga

SEQ ID NO: 1327677 - DNA, 15 bp, Homo sapiens
cagcccctttcgggg

SEQ ID NO: 1327678 - DNA, 15 bp, Homo sapiens
ccagcccctttcggg

SEQ ID NO: 1327679 - DNA, 15 bp, Homo sapiens
cccagcccctttcgg

SEQ ID NO: 1327680 - DNA, 15 bp, Homo sapiens
gcccagcccctttcg

SEQ ID NO: 1327681 - DNA, 15 bp, Homo sapiens
tgcccagcccctttc

SEQ ID NO: 1327682 - DNA, 15 bp, Homo sapiens
gtgcccagccccttt

SEQ ID NO: 1327683 - DNA, 15 bp, Homo sapiens
ggtgcccagcccctt

SEQ ID NO: 1327684 - DNA, 15 bp, Homo sapiens
tggtgcccagcccct

SEQ ID NO: 1327685 - DNA, 15 bp, Homo sapiens
gtggtgcccagcccc

SEQ ID NO: 1327686 - DNA, 15 bp, Homo sapiens
agtggtgcccagccc

SEQ ID NO: 1327687 - DNA, 15 bp, Homo sapiens
cagtggtgcccagcc

SEQ ID NO: 1327688 - DNA, 15 bp, Homo sapiens
tcagtggtgcccagc

SEQ ID NO: 1327689 - DNA, 15 bp, Homo sapiens
gtcagtggtgcccag

SEQ ID NO: 1327690 - DNA, 15 bp, Homo sapiens
tgtcagtggtgccca

SEQ ID NO: 1327691 - DNA, 15 bp, Homo sapiens
atgtcagtggtgccc

SEQ ID NO: 1327692 - DNA, 15 bp, Homo sapiens
catgtcagtggtgcc

SEQ ID NO: 1327693 - DNA, 15 bp, Homo sapiens
ccatgtcagtggtgc

SEQ ID NO: 1327694 - DNA, 15 bp, Homo sapiens
gccatgtcagtggtg

SEQ ID NO: 1327695 - DNA, 15 bp, Homo sapiens
cgccatgtcagtggt

SEQ ID NO: 1327696 - DNA, 15 bp, Homo sapiens
gcgccatgtcagtgg

SEQ ID NO: 1327697 - DNA, 15 bp, Homo sapiens
agcgccatgtcagtg

SEQ ID NO: 1327698 - DNA, 15 bp, Homo sapiens
aagcgccatgtcagt

SEQ ID NO: 1327699 - DNA, 15 bp, Homo sapiens
caagcgccatgtcag

SEQ ID NO: 1327700 - DNA, 15 bp, Homo sapiens
ccaagcgccatgtca

SEQ ID NO: 1327701 - DNA, 15 bp, Homo sapiens
gccaagcgccatgtc

SEQ ID NO: 1327702 - DNA, 15 bp, Homo sapiens
ggccaagcgccatgt

SEQ ID NO: 1327703 - DNA, 15 bp, Homo sapiens
aggccaagcgccatg

SEQ ID NO: 1327704 - DNA, 15 bp, Homo sapiens
gaggccaagcgccat

SEQ ID NO: 1327705 - DNA, 15 bp, Homo sapiens
tgaggccaagcgcca

SEQ ID NO: 1327706 - DNA, 15 bp, Homo sapiens
ctgaggccaagcgcc

SEQ ID NO: 1327707 - DNA, 15 bp, Homo sapiens
cctgaggccaagcgc

SEQ ID NO: 1327708 - DNA, 15 bp, Homo sapiens
ccctgaggccaagcg

SEQ ID NO: 1327709 - DNA, 15 bp, Homo sapiens
accctgaggccaagc

SEQ ID NO: 1327710 - DNA, 15 bp, Homo sapiens
aaccctgaggccaag

SEQ ID NO: 1327711 - DNA, 15 bp, Homo sapiens
gaaccctgaggccaa

SEQ ID NO: 1327712 - DNA, 15 bp, Homo sapiens
cgaaccctgaggcca

SEQ ID NO: 1327713 - DNA, 15 bp, Homo sapiens
gcgaaccctgaggcc

SEQ ID NO: 1327714 - DNA, 15 bp, Homo sapiens
agcgaaccctgaggc

SEQ ID NO: 1327715 - DNA, 15 bp, Homo sapiens
aagcgaaccctgagg

SEQ ID NO: 1327716 - DNA, 15 bp, Homo sapiens
taagcgaaccctgag

SEQ ID NO: 1327717 - DNA, 15 bp, Homo sapiens
ataagcgaaccctga

SEQ ID NO: 1327718 - DNA, 15 bp, Homo sapiens
aataagcgaaccctg

SEQ ID NO: 1327719 - DNA, 15 bp, Homo sapiens
caataagcgaaccct

SEQ ID NO: 1327720 - DNA, 15 bp, Homo sapiens
tcaataagcgaaccc

SEQ ID NO: 1327721 - DNA, 15 bp, Homo sapiens
gtcaataagcgaacc

SEQ ID NO: 1327722 - DNA, 15 bp, Homo sapiens
tgtcaataagcgaac

SEQ ID NO: 1327723 - DNA, 15 bp, Homo sapiens
gtgtcaataagcgaa

SEQ ID NO: 1327724 - DNA, 15 bp, Homo sapiens
tgtgtcaataagcga

SEQ ID NO: 1327725 - DNA, 15 bp, Homo sapiens
ctgtgtcaataagcg

SEQ ID NO: 1327726 - DNA, 15 bp, Homo sapiens
actgtgtcaataagc

SEQ ID NO: 1327727 - DNA, 15 bp, Homo sapiens
cactgtgtcaataag

SEQ ID NO: 1327728 - DNA, 15 bp, Homo sapiens
tcactgtgtcaataa

SEQ ID NO: 1327729 - DNA, 15 bp, Homo sapiens
gtcactgtgtcaata

SEQ ID NO: 1327730 - DNA, 15 bp, Homo sapiens
agtcactgtgtcaat

SEQ ID NO: 1327731 - DNA, 15 bp, Homo sapiens
aagtcactgtgtcaa

SEQ ID NO: 1327732 - DNA, 15 bp, Homo sapiens
gaagtcactgtgtca

SEQ ID NO: 1327733 - DNA, 15 bp, Homo sapiens
tgaagtcactgtgtc

SEQ ID NO: 1327734 - DNA, 15 bp, Homo sapiens
ttgaagtcactgtgt

SEQ ID NO: 1327735 - DNA, 15 bp, Homo sapiens
cttgaagtcactgtg

SEQ ID NO: 1327736 - DNA, 15 bp, Homo sapiens
ccttgaagtcactgt

SEQ ID NO: 1327737 - DNA, 15 bp, Homo sapiens
gccttgaagtcactg

SEQ ID NO: 1327738 - DNA, 15 bp, Homo sapiens
tgccttgaagtcact

SEQ ID NO: 1327739 - DNA, 15 bp, Homo sapiens
gtgccttgaagtcac

SEQ ID NO: 1327740 - DNA, 15 bp, Homo sapiens
tgtgccttgaagtca

SEQ ID NO: 1327741 - DNA, 15 bp, Homo sapiens
atgtgccttgaagtc

SEQ ID NO: 1327742 - DNA, 15 bp, Homo sapiens
aatgtgccttgaagt

SEQ ID NO: 1327743 - DNA, 15 bp, Homo sapiens
gaatgtgccttgaag

SEQ ID NO: 1327744 - DNA, 15 bp, Homo sapiens
agaatgtgccttgaa

SEQ ID NO: 1327745 - DNA, 15 bp, Homo sapiens
aagaatgtgccttga

SEQ ID NO: 1327746 - DNA, 15 bp, Homo sapiens
caagaatgtgccttg

SEQ ID NO: 1327747 - DNA, 15 bp, Homo sapiens
gcaagaatgtgcctt

SEQ ID NO: 1327748 - DNA, 15 bp, Homo sapiens
tgcaagaatgtgcct

SEQ ID NO: 1327749 - DNA, 15 bp, Homo sapiens
atgcaagaatgtgcc

SEQ ID NO: 1327750 - DNA, 15 bp, Homo sapiens
aatgcaagaatgtgc

SEQ ID NO: 1327751 - DNA, 15 bp, Homo sapiens
gaatgcaagaatgtg

SEQ ID NO: 1327752 - DNA, 15 bp, Homo sapiens
ggaatgcaagaatgt

SEQ ID NO: 1327753 - DNA, 15 bp, Homo sapiens
aggaatgcaagaatg

SEQ ID NO: 1327754 - DNA, 15 bp, Homo sapiens
aaggaatgcaagaat

SEQ ID NO: 1327755 - DNA, 15 bp, Homo sapiens
taaggaatgcaagaa

SEQ ID NO: 1327756 - DNA, 15 bp, Homo sapiens
ttaaggaatgcaaga

SEQ ID NO: 1327757 - DNA, 15 bp, Homo sapiens
gttaaggaatgcaag

SEQ ID NO: 1327758 - DNA, 15 bp, Homo sapiens
ggttaaggaatgcaa

SEQ ID NO: 1327759 - DNA, 15 bp, Homo sapiens
tggttaaggaatgca

SEQ ID NO: 1327760 - DNA, 15 bp, Homo sapiens
ttggttaaggaatgc

SEQ ID NO: 1327761 - DNA, 15 bp, Homo sapiens
cttggttaaggaatg

SEQ ID NO: 1327762 - DNA, 15 bp, Homo sapiens
gcttggttaaggaat

SEQ ID NO: 1327763 - DNA, 15 bp, Homo sapiens
agcttggttaaggaa

SEQ ID NO: 1327764 - DNA, 15 bp, Homo sapiens
cagcttggttaagga

SEQ ID NO: 1327765 - DNA, 15 bp, Homo sapiens
ccagcttggttaagg

SEQ ID NO: 1327766 - DNA, 15 bp, Homo sapiens
accagcttggttaag

SEQ ID NO: 1327767 - DNA, 15 bp, Homo sapiens
caccagcttggttaa

SEQ ID NO: 1327768 - DNA, 15 bp, Homo sapiens
gcaccagcttggtta

SEQ ID NO: 1327769 - DNA, 15 bp, Homo sapiens
agcaccagcttggtt

SEQ ID NO: 1327770 - DNA, 15 bp, Homo sapiens
tagcaccagcttggt

SEQ ID NO: 1327771 - DNA, 15 bp, Homo sapiens
ctagcaccagcttgg

SEQ ID NO: 1327772 - DNA, 15 bp, Homo sapiens
gctagcaccagcttg

SEQ ID NO: 1327773 - DNA, 15 bp, Homo sapiens
ggctagcaccagctt

SEQ ID NO: 1327774 - DNA, 15 bp, Homo sapiens
aggctagcaccagct

SEQ ID NO: 1327775 - DNA, 15 bp, Homo sapiens
taggctagcaccagc

SEQ ID NO: 1327776 - DNA, 15 bp, Homo sapiens
ctaggctagcaccag

SEQ ID NO: 1327777 - DNA, 15 bp, Homo sapiens
cctaggctagcacca

SEQ ID NO: 1327778 - DNA, 15 bp, Homo sapiens
acctaggctagcacc

SEQ ID NO: 1327779 - DNA, 15 bp, Homo sapiens
aacctaggctagcac

SEQ ID NO: 1327780 - DNA, 15 bp, Homo sapiens
gaacctaggctagca

SEQ ID NO: 1327781 - DNA, 15 bp, Homo sapiens
ggaacctaggctagc

SEQ ID NO: 1327782 - DNA, 15 bp, Homo sapiens
aggaacctaggctag

SEQ ID NO: 1327783 - DNA, 15 bp, Homo sapiens
caggaacctaggcta

SEQ ID NO: 1327784 - DNA, 15 bp, Homo sapiens
ccaggaacctaggct

SEQ ID NO: 1327785 - DNA, 15 bp, Homo sapiens
cccaggaacctaggc

SEQ ID NO: 1327786 - DNA, 15 bp, Homo sapiens
tcccaggaacctagg

SEQ ID NO: 1327787 - DNA, 15 bp, Homo sapiens
atcccaggaacctag

SEQ ID NO: 1327788 - DNA, 15 bp, Homo sapiens
catcccaggaaccta

SEQ ID NO: 1327789 - DNA, 15 bp, Homo sapiens
acatcccaggaacct

SEQ ID NO: 1327790 - DNA, 15 bp, Homo sapiens
tacatcccaggaacc

SEQ ID NO: 1327791 - DNA, 15 bp, Homo sapiens
ttacatcccaggaac

SEQ ID NO: 1327792 - DNA, 15 bp, Homo sapiens
gttacatcccaggaa

SEQ ID NO: 1327793 - DNA, 15 bp, Homo sapiens
agttacatcccagga

SEQ ID NO: 1327794 - DNA, 15 bp, Homo sapiens
cagttacatcccagg

SEQ ID NO: 1327795 - DNA, 15 bp, Homo sapiens
gcagttacatcccag

SEQ ID NO: 1327796 - DNA, 15 bp, Homo sapiens
tgcagttacatccca

SEQ ID NO: 1327797 - DNA, 15 bp, Homo sapiens
ttgcagttacatccc

SEQ ID NO: 1327798 - DNA, 15 bp, Homo sapiens
tttgcagttacatcc

SEQ ID NO: 1327799 - DNA, 15 bp, Homo sapiens
gtttgcagttacatc

SEQ ID NO: 1327800 - DNA, 15 bp, Homo sapiens
tgtttgcagttacat

SEQ ID NO: 1327801 - DNA, 15 bp, Homo sapiens
ttgtttgcagttaca

SEQ ID NO: 1327802 - DNA, 15 bp, Homo sapiens
cttgtttgcagttac

SEQ ID NO: 1327803 - DNA, 15 bp, Homo sapiens
gcttgtttgcagtta

SEQ ID NO: 1327804 - DNA, 15 bp, Homo sapiens
tgcttgtttgcagtt

SEQ ID NO: 1327805 - DNA, 15 bp, Homo sapiens
ctgcttgtttgcagt

SEQ ID NO: 1327806 - DNA, 15 bp, Homo sapiens
cctgcttgtttgcag

SEQ ID NO: 1327807 - DNA, 15 bp, Homo sapiens
acctgcttgtttgca

SEQ ID NO: 1327808 - DNA, 15 bp, Homo sapiens
cacctgcttgtttgc

SEQ ID NO: 1327809 - DNA, 15 bp, Homo sapiens
acacctgcttgtttg

SEQ ID NO: 1327810 - DNA, 15 bp, Homo sapiens
cacacctgcttgttt

SEQ ID NO: 1327811 - DNA, 15 bp, Homo sapiens
ccacacctgcttgtt

SEQ ID NO: 1327812 - DNA, 15 bp, Homo sapiens
cccacacctgcttgt

SEQ ID NO: 1327813 - DNA, 15 bp, Homo sapiens
gcccacacctgcttg

SEQ ID NO: 1327814 - DNA, 15 bp, Homo sapiens
agcccacacctgctt

SEQ ID NO: 1327815 - DNA, 15 bp, Homo sapiens
aagcccacacctgct

SEQ ID NO: 1327816 - DNA, 15 bp, Homo sapiens
caagcccacacctgc

SEQ ID NO: 1327817 - DNA, 15 bp, Homo sapiens
gcaagcccacacctg

SEQ ID NO: 1327818 - DNA, 15 bp, Homo sapiens
ggcaagcccacacct

SEQ ID NO: 1327819 - DNA, 15 bp, Homo sapiens
gggcaagcccacacc

SEQ ID NO: 1327820 - DNA, 15 bp, Homo sapiens
agggcaagcccacac

SEQ ID NO: 1327821 - DNA, 15 bp, Homo sapiens
gagggcaagcccaca

SEQ ID NO: 1327822 - DNA, 15 bp, Homo sapiens
tgagggcaagcccac

SEQ ID NO: 1327823 - DNA, 15 bp, Homo sapiens
gtgagggcaagccca

SEQ ID NO: 1327824 - DNA, 15 bp, Homo sapiens
ggtgagggcaagccc

SEQ ID NO: 1327825 - DNA, 15 bp, Homo sapiens
cggtgagggcaagcc

SEQ ID NO: 1327826 - DNA, 15 bp, Homo sapiens
tcggtgagggcaagc

SEQ ID NO: 1327827 - DNA, 15 bp, Homo sapiens
ctcggtgagggcaag

SEQ ID NO: 1327828 - DNA, 15 bp, Homo sapiens
cctcggtgagggcaa

SEQ ID NO: 1327829 - DNA, 15 bp, Homo sapiens
tcctcggtgagggca

SEQ ID NO: 1327830 - DNA, 15 bp, Homo sapiens
gtcctcggtgagggc

SEQ ID NO: 1327831 - DNA, 15 bp, Homo sapiens
tgtcctcggtgaggg

SEQ ID NO: 1327832 - DNA, 15 bp, Homo sapiens
gtgtcctcggtgagg

SEQ ID NO: 1327833 - DNA, 15 bp, Homo sapiens
tgtgtcctcggtgag

SEQ ID NO: 1327834 - DNA, 15 bp, Homo sapiens
ctgtgtcctcggtga

SEQ ID NO: 1327835 - DNA, 15 bp, Homo sapiens
gctgtgtcctcggtg

SEQ ID NO: 1327836 - DNA, 15 bp, Homo sapiens
agctgtgtcctcggt

SEQ ID NO: 1327837 - DNA, 15 bp, Homo sapiens
cagctgtgtcctcgg

SEQ ID NO: 1327838 - DNA, 15 bp, Homo sapiens
ccagctgtgtcctcg

SEQ ID NO: 1327839 - DNA, 15 bp, Homo sapiens
cccagctgtgtcctc

SEQ ID NO: 1327840 - DNA, 15 bp, Homo sapiens
acccagctgtgtcct

SEQ ID NO: 1327841 - DNA, 15 bp, Homo sapiens
aacccagctgtgtcc

SEQ ID NO: 1327842 - DNA, 15 bp, Homo sapiens
gaacccagctgtgtc

SEQ ID NO: 1327843 - DNA, 15 bp, Homo sapiens
tgaacccagctgtgt

SEQ ID NO: 1327844 - DNA, 15 bp, Homo sapiens
gtgaacccagctgtg

SEQ ID NO: 1327845 - DNA, 15 bp, Homo sapiens
tgtgaacccagctgt

SEQ ID NO: 1327846 - DNA, 15 bp, Homo sapiens
ctgtgaacccagctg

SEQ ID NO: 1327847 - DNA, 15 bp, Homo sapiens
cctgtgaacccagct

SEQ ID NO: 1327848 - DNA, 15 bp, Homo sapiens
ccctgtgaacccagc

SEQ ID NO: 1327849 - DNA, 15 bp, Homo sapiens
cccctgtgaacccag

SEQ ID NO: 1327850 - DNA, 15 bp, Homo sapiens
tcccctgtgaaccca

SEQ ID NO: 1327851 - DNA, 15 bp, Homo sapiens
ttcccctgtgaaccc

SEQ ID NO: 1327852 - DNA, 15 bp, Homo sapiens
gttcccctgtgaacc

SEQ ID NO: 1327853 - DNA, 15 bp, Homo sapiens
agttcccctgtgaac

SEQ ID NO: 1327854 - DNA, 15 bp, Homo sapiens
tagttcccctgtgaa

SEQ ID NO: 1327855 - DNA, 15 bp, Homo sapiens
ttagttcccctgtga

SEQ ID NO: 1327856 - DNA, 15 bp, Homo sapiens
attagttcccctgtg

SEQ ID NO: 1327857 - DNA, 15 bp, Homo sapiens
tattagttcccctgt

SEQ ID NO: 1327858 - DNA, 15 bp, Homo sapiens
gtattagttcccctg

SEQ ID NO: 1327859 - DNA, 15 bp, Homo sapiens
ggtattagttcccct

SEQ ID NO: 1327860 - DNA, 15 bp, Homo sapiens
tggtattagttcccc

SEQ ID NO: 1327861 - DNA, 15 bp, Homo sapiens
ctggtattagttccc

SEQ ID NO: 1327862 - DNA, 15 bp, Homo sapiens
gctggtattagttcc

SEQ ID NO: 1327863 - DNA, 15 bp, Homo sapiens
agctggtattagttc

SEQ ID NO: 1327864 - DNA, 15 bp, Homo sapiens
gagctggtattagtt

SEQ ID NO: 1327865 - DNA, 15 bp, Homo sapiens
tgagctggtattagt

SEQ ID NO: 1327866 - DNA, 15 bp, Homo sapiens
gtgagctggtattag

SEQ ID NO: 1327867 - DNA, 15 bp, Homo sapiens
agtgagctggtatta

SEQ ID NO: 1327868 - DNA, 15 bp, Homo sapiens
tagtgagctggtatt

SEQ ID NO: 1327869 - DNA, 15 bp, Homo sapiens
gtagtgagctggtat

SEQ ID NO: 1327870 - DNA, 15 bp, Homo sapiens
tgtagtgagctggta

SEQ ID NO: 1327871 - DNA, 15 bp, Homo sapiens
ctgtagtgagctggt

SEQ ID NO: 1327872 - DNA, 15 bp, Homo sapiens
tctgtagtgagctgg

SEQ ID NO: 1327873 - DNA, 15 bp, Homo sapiens
ttctgtagtgagctg

SEQ ID NO: 1327874 - DNA, 15 bp, Homo sapiens
attctgtagtgagct

SEQ ID NO: 1327875 - DNA, 15 bp, Homo sapiens
tattctgtagtgagc

SEQ ID NO: 1327876 - DNA, 15 bp, Homo sapiens
ctattctgtagtgag

SEQ ID NO: 1327877 - DNA, 15 bp, Homo sapiens
actattctgtagtga

SEQ ID NO: 1327878 - DNA, 15 bp, Homo sapiens
gactattctgtagtg

SEQ ID NO: 1327879 - DNA, 15 bp, Homo sapiens
agactattctgtagt

SEQ ID NO: 1327880 - DNA, 15 bp, Homo sapiens
aagactattctgtag

SEQ ID NO: 1327881 - DNA, 15 bp, Homo sapiens
aaagactattctgta

SEQ ID NO: 1327882 - DNA, 15 bp, Homo sapiens
aaaagactattctgt

SEQ ID NO: 1327883 - DNA, 15 bp, Homo sapiens
aaaaagactattctg

SEQ ID NO: 1327884 - DNA, 15 bp, Homo sapiens
aaaaaagactattct

SEQ ID NO: 1327885 - DNA, 15 bp, Homo sapiens
aaaaaaagactattc

SEQ ID NO: 1327886 - DNA, 15 bp, Homo sapiens
aaaaaaaagactatt

SEQ ID NO: 1327887 - DNA, 15 bp, Homo sapiens
aaaaaaaaagactat

SEQ ID NO: 1327888 - DNA, 15 bp, Homo sapiens
aaaaaaaaaagacta

SEQ ID NO: 1327889 - DNA, 15 bp, Homo sapiens
agaaagaaaaaaaaa

SEQ ID NO: 1327890 - DNA, 15 bp, Homo sapiens
cagaaagaaaaaaaa

SEQ ID NO: 1327891 - DNA, 15 bp, Homo sapiens
tcagaaagaaaaaaa

SEQ ID NO: 1327892 - DNA, 15 bp, Homo sapiens
ctcagaaagaaaaaa

SEQ ID NO: 1327893 - DNA, 15 bp, Homo sapiens
tctcagaaagaaaaa

SEQ ID NO: 1327894 - DNA, 15 bp, Homo sapiens
gtctcagaaagaaaa

SEQ ID NO: 1327895 - DNA, 15 bp, Homo sapiens
cgtctcagaaagaaa

SEQ ID NO: 1327896 - DNA, 15 bp, Homo sapiens
ccgtctcagaaagaa

SEQ ID NO: 1327897 - DNA, 15 bp, Homo sapiens
tccgtctcagaaaga

SEQ ID NO: 1327898 - DNA, 15 bp, Homo sapiens
ctccgtctcagaaag

SEQ ID NO: 1327899 - DNA, 15 bp, Homo sapiens
actccgtctcagaaa

SEQ ID NO: 1327900 - DNA, 15 bp, Homo sapiens
aagcgagactccgtc

SEQ ID NO: 1327901 - DNA, 15 bp, Homo sapiens
aaagcgagactccgt

SEQ ID NO: 1327902 - DNA, 15 bp, Homo sapiens
caaagcgagactccg

SEQ ID NO: 1327903 - DNA, 15 bp, Homo sapiens
acaaagcgagactcc

SEQ ID NO: 1327904 - DNA, 15 bp, Homo sapiens
gacaaagcgagactc

SEQ ID NO: 1327905 - DNA, 15 bp, Homo sapiens
cgacaaagcgagact

SEQ ID NO: 1327906 - DNA, 15 bp, Homo sapiens
gcgacaaagcgagac

SEQ ID NO: 1327907 - DNA, 15 bp, Homo sapiens
tggcgacaaagcgag

SEQ ID NO: 1327908 - DNA, 15 bp, Homo sapiens
ttggcgacaaagcga

SEQ ID NO: 1327909 - DNA, 15 bp, Homo sapiens
cttggcgacaaagcg

SEQ ID NO: 1327910 - DNA, 15 bp, Homo sapiens
ccttggcgacaaagc

SEQ ID NO: 1327911 - DNA, 15 bp, Homo sapiens
gccttggcgacaaag

SEQ ID NO: 1327912 - DNA, 15 bp, Homo sapiens
agccttggcgacaaa

SEQ ID NO: 1327913 - DNA, 15 bp, Homo sapiens
cagccttggcgacaa

SEQ ID NO: 1327914 - DNA, 15 bp, Homo sapiens
ccagccttggcgaca

SEQ ID NO: 1327915 - DNA, 15 bp, Homo sapiens
tccagccttggcgac

SEQ ID NO: 1327916 - DNA, 15 bp, Homo sapiens
ctccagccttggcga

SEQ ID NO: 1327917 - DNA, 15 bp, Homo sapiens
actccagccttggcg

SEQ ID NO: 1327918 - DNA, 15 bp, Homo sapiens
cactccagccttggc

SEQ ID NO: 1327919 - DNA, 15 bp, Homo sapiens
gcactccagccttgg

SEQ ID NO: 1327920 - DNA, 15 bp, Homo sapiens
tgcactccagccttg

SEQ ID NO: 1327921 - DNA, 15 bp, Homo sapiens
ctgcactccagcctt

SEQ ID NO: 1327922 - DNA, 15 bp, Homo sapiens
ctggggggcagtgac

SEQ ID NO: 1327923 - DNA, 15 bp, Homo sapiens
tctggggggcagtga

SEQ ID NO: 1327924 - DNA, 15 bp, Homo sapiens
ttctggggggcagtg

SEQ ID NO: 1327925 - DNA, 15 bp, Homo sapiens
cttctggggggcagt

SEQ ID NO: 1327926 - DNA, 15 bp, Homo sapiens
tcttctggggggcag

SEQ ID NO: 1327927 - DNA, 15 bp, Homo sapiens
ttcttctggggggca

SEQ ID NO: 1327928 - DNA, 15 bp, Homo sapiens
gttcttctggggggc

SEQ ID NO: 1327929 - DNA, 15 bp, Homo sapiens
ggttcttctgggggg

SEQ ID NO: 1327930 - DNA, 15 bp, Homo sapiens
aggttcttctggggg

SEQ ID NO: 1327931 - DNA, 15 bp, Homo sapiens
gaggttcttctgggg

SEQ ID NO: 1327932 - DNA, 15 bp, Homo sapiens
tgaggttcttctggg

SEQ ID NO: 1327933 - DNA, 15 bp, Homo sapiens
ttgaggttcttctgg

SEQ ID NO: 1327934 - DNA, 15 bp, Homo sapiens
cttgaggttcttctg

SEQ ID NO: 1327935 - DNA, 15 bp, Homo sapiens
tcttgaggttcttct

SEQ ID NO: 1327936 - DNA, 15 bp, Homo sapiens
ctcttgaggttcttc

SEQ ID NO: 1327937 - DNA, 15 bp, Homo sapiens
actcttgaggttctt

SEQ ID NO: 1327938 - DNA, 15 bp, Homo sapiens
cactcttgaggttct

SEQ ID NO: 1327939 - DNA, 15 bp, Homo sapiens
gcactcttgaggttc

SEQ ID NO: 1327940 - DNA, 15 bp, Homo sapiens
ggcactcttgaggtt

SEQ ID NO: 1327941 - DNA, 15 bp, Homo sapiens
aggcactcttgaggt

SEQ ID NO: 1327942 - DNA, 15 bp, Homo sapiens
gaggcactcttgagg

SEQ ID NO: 1327943 - DNA, 15 bp, Homo sapiens
ggaggcactcttgag

SEQ ID NO: 1327944 - DNA, 15 bp, Homo sapiens
gggaggcactcttga

SEQ ID NO: 1327945 - DNA, 15 bp, Homo sapiens
cgggaggcactcttg

SEQ ID NO: 1327946 - DNA, 15 bp, Homo sapiens
ccgggaggcactctt

SEQ ID NO: 1327947 - DNA, 15 bp, Homo sapiens
tccgggaggcactct

SEQ ID NO: 1327948 - DNA, 15 bp, Homo sapiens
atccgggaggcactc

SEQ ID NO: 1327949 - DNA, 15 bp, Homo sapiens
gatccgggaggcact

SEQ ID NO: 1327950 - DNA, 15 bp, Homo sapiens
cgatccgggaggcac

SEQ ID NO: 1327951 - DNA, 15 bp, Homo sapiens
acgatccgggaggca

SEQ ID NO: 1327952 - DNA, 15 bp, Homo sapiens
gacgatccgggaggc

SEQ ID NO: 1327953 - DNA, 15 bp, Homo sapiens
agacgatccgggagg

SEQ ID NO: 1327954 - DNA, 15 bp, Homo sapiens
aagacgatccgggag

SEQ ID NO: 1327955 - DNA, 15 bp, Homo sapiens
aaagacgatccggga

SEQ ID NO: 1327956 - DNA, 15 bp, Homo sapiens
caaagacgatccggg

SEQ ID NO: 1327957 - DNA, 15 bp, Homo sapiens
tcaaagacgatccgg

SEQ ID NO: 1327958 - DNA, 15 bp, Homo sapiens
ctcaaagacgatccg

SEQ ID NO: 1327959 - DNA, 15 bp, Homo sapiens
tctcaaagacgatcc

SEQ ID NO: 1327960 - DNA, 15 bp, Homo sapiens
ttctcaaagacgatc

SEQ ID NO: 1327961 - DNA, 15 bp, Homo sapiens
cttctcaaagacgat

SEQ ID NO: 1327962 - DNA, 15 bp, Homo sapiens
tcttctcaaagacga

SEQ ID NO: 1327963 - DNA, 15 bp, Homo sapiens
ctcttctcaaagacg

SEQ ID NO: 1327964 - DNA, 15 bp, Homo sapiens
actcttctcaaagac

SEQ ID NO: 1327965 - DNA, 15 bp, Homo sapiens
cactcttctcaaaga

SEQ ID NO: 1327966 - DNA, 15 bp, Homo sapiens
tcactcttctcaaag

SEQ ID NO: 1327967 - DNA, 15 bp, Homo sapiens
ctcactcttctcaaa

SEQ ID NO: 1327968 - DNA, 15 bp, Homo sapiens
actcactcttctcaa

SEQ ID NO: 1327969 - DNA, 15 bp, Homo sapiens
gactcactcttctca

SEQ ID NO: 1327970 - DNA, 15 bp, Homo sapiens
cgactcactcttctc

SEQ ID NO: 1327971 - DNA, 15 bp, Homo sapiens
gcgactcactcttct

SEQ ID NO: 1327972 - DNA, 15 bp, Homo sapiens
ggcgactcactcttc

SEQ ID NO: 1327973 - DNA, 15 bp, Homo sapiens
aggcgactcactctt

SEQ ID NO: 1327974 - DNA, 15 bp, Homo sapiens
aaggcgactcactct

SEQ ID NO: 1327975 - DNA, 15 bp, Homo sapiens
aaaggcgactcactc

SEQ ID NO: 1327976 - DNA, 15 bp, Homo sapiens
caaaggcgactcact

SEQ ID NO: 1327977 - DNA, 15 bp, Homo sapiens
gcaaaggcgactcac

SEQ ID NO: 1327978 - DNA, 15 bp, Homo sapiens
tgcaaaggcgactca

SEQ ID NO: 1327979 - DNA, 15 bp, Homo sapiens
ctgcaaaggcgactc

SEQ ID NO: 1327980 - DNA, 15 bp, Homo sapiens
gctgcaaaggcgact

SEQ ID NO: 1327981 - DNA, 15 bp, Homo sapiens
ggctgcaaaggcgac

SEQ ID NO: 1327982 - DNA, 15 bp, Homo sapiens
gggctgcaaaggcga

SEQ ID NO: 1327983 - DNA, 15 bp, Homo sapiens
tgggctgcaaaggcg

SEQ ID NO: 1327984 - DNA, 15 bp, Homo sapiens
ttgggctgcaaaggc

SEQ ID NO: 1327985 - DNA, 15 bp, Homo sapiens
cttgggctgcaaagg

SEQ ID NO: 1327986 - DNA, 15 bp, Homo sapiens
acttgggctgcaaag

SEQ ID NO: 1327987 - DNA, 15 bp, Homo sapiens
aacttgggctgcaaa

SEQ ID NO: 1327988 - DNA, 15 bp, Homo sapiens
caacttgggctgcaa

SEQ ID NO: 1327989 - DNA, 15 bp, Homo sapiens
gcaacttgggctgca

SEQ ID NO: 1327990 - DNA, 15 bp, Homo sapiens
ggcaacttgggctgc

SEQ ID NO: 1327991 - DNA, 15 bp, Homo sapiens
aggcaacttgggctg

SEQ ID NO: 1327992 - DNA, 15 bp, Homo sapiens
caggcaacttgggct

SEQ ID NO: 1327993 - DNA, 15 bp, Homo sapiens
tcaggcaacttgggc

SEQ ID NO: 1327994 - DNA, 15 bp, Homo sapiens
ctcaggcaacttggg

SEQ ID NO: 1327995 - DNA, 15 bp, Homo sapiens
cctcaggcaacttgg

SEQ ID NO: 1327996 - DNA, 15 bp, Homo sapiens
gcctcaggcaacttg

SEQ ID NO: 1327997 - DNA, 15 bp, Homo sapiens
tgcctcaggcaactt

SEQ ID NO: 1327998 - DNA, 15 bp, Homo sapiens
atgcctcaggcaact

SEQ ID NO: 1327999 - DNA, 15 bp, Homo sapiens
catgcctcaggcaac

SEQ ID NO: 1328000 - DNA, 15 bp, Homo sapiens
acatgcctcaggcaa

SEQ ID NO: 1328001 - DNA, 15 bp, Homo sapiens
cacatgcctcaggca

SEQ ID NO: 1328002 - DNA, 15 bp, Homo sapiens
ccacatgcctcaggc

SEQ ID NO: 1328003 - DNA, 15 bp, Homo sapiens
cccacatgcctcagg

SEQ ID NO: 1328004 - DNA, 15 bp, Homo sapiens
gcccacatgcctcag

SEQ ID NO: 1328005 - DNA, 15 bp, Homo sapiens
agcccacatgcctca

SEQ ID NO: 1328006 - DNA, 15 bp, Homo sapiens
gagcccacatgcctc

SEQ ID NO: 1328007 - DNA, 15 bp, Homo sapiens
ggagcccacatgcct

SEQ ID NO: 1328008 - DNA, 15 bp, Homo sapiens
tggagcccacatgcc

SEQ ID NO: 1328009 - DNA, 15 bp, Homo sapiens
atggagcccacatgc

SEQ ID NO: 1328010 - DNA, 15 bp, Homo sapiens
catggagcccacatg

SEQ ID NO: 1328011 - DNA, 15 bp, Homo sapiens
gcatggagcccacat

SEQ ID NO: 1328012 - DNA, 15 bp, Homo sapiens
agcatggagcccaca

SEQ ID NO: 1328013 - DNA, 15 bp, Homo sapiens
cagcatggagcccac

SEQ ID NO: 1328014 - DNA, 15 bp, Homo sapiens
gcagcatggagccca

SEQ ID NO: 1328015 - DNA, 15 bp, Homo sapiens
tgcagcatggagccc

SEQ ID NO: 1328016 - DNA, 15 bp, Homo sapiens
ctgcagcatggagcc

SEQ ID NO: 1328017 - DNA, 15 bp, Homo sapiens
cctgcagcatggagc

SEQ ID NO: 1328018 - DNA, 15 bp, Homo sapiens
gcctgcagcatggag

SEQ ID NO: 1328019 - DNA, 15 bp, Homo sapiens
agcctgcagcatgga

SEQ ID NO: 1328020 - DNA, 15 bp, Homo sapiens
cagcctgcagcatgg

SEQ ID NO: 1328021 - DNA, 15 bp, Homo sapiens
ccagcctgcagcatg

SEQ ID NO: 1328022 - DNA, 15 bp, Homo sapiens
cccagcctgcagcat

SEQ ID NO: 1328023 - DNA, 15 bp, Homo sapiens
ccccagcctgcagca

SEQ ID NO: 1328024 - DNA, 15 bp, Homo sapiens
cccccagcctgcagc

SEQ ID NO: 1328025 - DNA, 15 bp, Homo sapiens
ccccccagcctgcag

SEQ ID NO: 1328026 - DNA, 15 bp, Homo sapiens
cccccccagcctgca

SEQ ID NO: 1328027 - DNA, 15 bp, Homo sapiens
acccccccagcctgc

SEQ ID NO: 1328028 - DNA, 15 bp, Homo sapiens
gacccccccagcctg

SEQ ID NO: 1328029 - DNA, 15 bp, Homo sapiens
agacccccccagcct

SEQ ID NO: 1328030 - DNA, 15 bp, Homo sapiens
aagacccccccagcc

SEQ ID NO: 1328031 - DNA, 15 bp, Homo sapiens
aaagacccccccagc

SEQ ID NO: 1328032 - DNA, 15 bp, Homo sapiens
aaaagacccccccag

SEQ ID NO: 1328033 - DNA, 15 bp, Homo sapiens
aaaaagaccccccca

SEQ ID NO: 1328034 - DNA, 15 bp, Homo sapiens
aaaaaagaccccccc

SEQ ID NO: 1328035 - DNA, 15 bp, Homo sapiens
aaaaaaagacccccc

SEQ ID NO: 1328036 - DNA, 15 bp, Homo sapiens
aaaaaaaagaccccc

SEQ ID NO: 1328037 - DNA, 15 bp, Homo sapiens
aaaaaaaaagacccc

SEQ ID NO: 1328038 - DNA, 15 bp, Homo sapiens
tgtgaacccgggagg

SEQ ID NO: 1328039 - DNA, 15 bp, Homo sapiens
gtgtgaacccgggag

SEQ ID NO: 1328040 - DNA, 15 bp, Homo sapiens
ggtgtgaacccggga

SEQ ID NO: 1328041 - DNA, 15 bp, Homo sapiens
tggtgtgaacccggg

SEQ ID NO: 1328042 - DNA, 15 bp, Homo sapiens
atggtgtgaacccgg

SEQ ID NO: 1328043 - DNA, 15 bp, Homo sapiens
gatggtgtgaacccg

SEQ ID NO: 1328044 - DNA, 15 bp, Homo sapiens
ggatggtgtgaaccc

SEQ ID NO: 1328045 - DNA, 15 bp, Homo sapiens
aggatggtgtgaacc

SEQ ID NO: 1328046 - DNA, 15 bp, Homo sapiens
gaggatggtgtgaac

SEQ ID NO: 1328047 - DNA, 15 bp, Homo sapiens
ggaggatggtgtgaa

SEQ ID NO: 1328048 - DNA, 15 bp, Homo sapiens
aggaggatggtgtga

SEQ ID NO: 1328049 - DNA, 15 bp, Homo sapiens
caggaggatggtgtg

SEQ ID NO: 1328050 - DNA, 15 bp, Homo sapiens
gcaggaggatggtgt

SEQ ID NO: 1328051 - DNA, 15 bp, Homo sapiens
ggcaggaggatggtg

SEQ ID NO: 1328052 - DNA, 15 bp, Homo sapiens
aggcaggaggatggt

SEQ ID NO: 1328053 - DNA, 15 bp, Homo sapiens
tgggcacctgcagtc

SEQ ID NO: 1328054 - DNA, 15 bp, Homo sapiens
ctgggcacctgcagt

SEQ ID NO: 1328055 - DNA, 15 bp, Homo sapiens
gctgggcacctgcag

SEQ ID NO: 1328056 - DNA, 15 bp, Homo sapiens
agctgggcacctgca

SEQ ID NO: 1328057 - DNA, 15 bp, Homo sapiens
tagctgggcacctgc

SEQ ID NO: 1328058 - DNA, 15 bp, Homo sapiens
ttagctgggcacctg

SEQ ID NO: 1328059 - DNA, 15 bp, Homo sapiens
attagctgggcacct

SEQ ID NO: 1328060 - DNA, 15 bp, Homo sapiens
gattagctgggcacc

SEQ ID NO: 1328061 - DNA, 15 bp, Homo sapiens
agattagctgggcac

SEQ ID NO: 1328062 - DNA, 15 bp, Homo sapiens
aagattagctgggca

SEQ ID NO: 1328063 - DNA, 15 bp, Homo sapiens
aaagattagctgggc

SEQ ID NO: 1328064 - DNA, 15 bp, Homo sapiens
aaaagattagctggg

SEQ ID NO: 1328065 - DNA, 15 bp, Homo sapiens
aaaaagattagctgg

SEQ ID NO: 1328066 - DNA, 15 bp, Homo sapiens
aaaaaagattagctg

SEQ ID NO: 1328067 - DNA, 15 bp, Homo sapiens
caaaaaagattagct

SEQ ID NO: 1328068 - DNA, 15 bp, Homo sapiens
acaaaaaagattagc

SEQ ID NO: 1328069 - DNA, 15 bp, Homo sapiens
tacaaaaaagattag

SEQ ID NO: 1328070 - DNA, 15 bp, Homo sapiens
atacaaaaaagatta

SEQ ID NO: 1328071 - DNA, 15 bp, Homo sapiens
aatacaaaaaagatt

SEQ ID NO: 1328072 - DNA, 15 bp, Homo sapiens
aaatacaaaaaagat

SEQ ID NO: 1328073 - DNA, 15 bp, Homo sapiens
aaaatacaaaaaaga

SEQ ID NO: 1328074 - DNA, 15 bp, Homo sapiens
aaaaatacaaaaaag

SEQ ID NO: 1328075 - DNA, 15 bp, Homo sapiens
gctaaaaatacaaaa

SEQ ID NO: 1328076 - DNA, 15 bp, Homo sapiens
tgctaaaaatacaaa

SEQ ID NO: 1328077 - DNA, 15 bp, Homo sapiens
ctgctaaaaatacaa

SEQ ID NO: 1328078 - DNA, 15 bp, Homo sapiens
tctgctaaaaataca

SEQ ID NO: 1328079 - DNA, 15 bp, Homo sapiens
ctctgctaaaaatac

SEQ ID NO: 1328080 - DNA, 15 bp, Homo sapiens
tctctgctaaaaata

SEQ ID NO: 1328081 - DNA, 15 bp, Homo sapiens
gtctctgctaaaaat

SEQ ID NO: 1328082 - DNA, 15 bp, Homo sapiens
aaacacggtgaaacc

SEQ ID NO: 1328083 - DNA, 15 bp, Homo sapiens
caaacacggtgaaac

SEQ ID NO: 1328084 - DNA, 15 bp, Homo sapiens
gcaaacacggtgaaa

SEQ ID NO: 1328085 - DNA, 15 bp, Homo sapiens
ggcaaacacggtgaa

SEQ ID NO: 1328086 - DNA, 15 bp, Homo sapiens
tggcaaacacggtga

SEQ ID NO: 1328087 - DNA, 15 bp, Homo sapiens
ctggcaaacacggtg

SEQ ID NO: 1328088 - DNA, 15 bp, Homo sapiens
cctggcaaacacggt

SEQ ID NO: 1328089 - DNA, 15 bp, Homo sapiens
tcctggcaaacacgg

SEQ ID NO: 1328090 - DNA, 15 bp, Homo sapiens
atcctggcaaacacg

SEQ ID NO: 1328091 - DNA, 15 bp, Homo sapiens
tatcctggcaaacac

SEQ ID NO: 1328092 - DNA, 15 bp, Homo sapiens
ctatcctggcaaaca

SEQ ID NO: 1328093 - DNA, 15 bp, Homo sapiens
actatcctggcaaac

SEQ ID NO: 1328094 - DNA, 15 bp, Homo sapiens
gactatcctggcaaa

SEQ ID NO: 1328095 - DNA, 15 bp, Homo sapiens
agactatcctggcaa

SEQ ID NO: 1328096 - DNA, 15 bp, Homo sapiens
gagactatcctggca

SEQ ID NO: 1328097 - DNA, 15 bp, Homo sapiens
cgagactatcctggc

SEQ ID NO: 1328098 - DNA, 15 bp, Homo sapiens
tcgagactatcctgg

SEQ ID NO: 1328099 - DNA, 15 bp, Homo sapiens
atcgagactatcctg

SEQ ID NO: 1328100 - DNA, 15 bp, Homo sapiens
gatcgagactatcct

SEQ ID NO: 1328101 - DNA, 15 bp, Homo sapiens
agatcgagactatcc

SEQ ID NO: 1328102 - DNA, 15 bp, Homo sapiens
gagatcgagactatc

SEQ ID NO: 1328103 - DNA, 15 bp, Homo sapiens
ggagatcgagactat

SEQ ID NO: 1328104 - DNA, 15 bp, Homo sapiens
aggagatcgagacta

SEQ ID NO: 1328105 - DNA, 15 bp, Homo sapiens
caggagatcgagact

SEQ ID NO: 1328106 - DNA, 15 bp, Homo sapiens
caggtcaggagatcg

SEQ ID NO: 1328107 - DNA, 15 bp, Homo sapiens
ccaggtcaggagatc

SEQ ID NO: 1328108 - DNA, 15 bp, Homo sapiens
accaggtcaggagat

SEQ ID NO: 1328109 - DNA, 15 bp, Homo sapiens
caccaggtcaggaga

SEQ ID NO: 1328110 - DNA, 15 bp, Homo sapiens
acaccaggtcaggag

SEQ ID NO: 1328111 - DNA, 15 bp, Homo sapiens
aacaccaggtcagga

SEQ ID NO: 1328112 - DNA, 15 bp, Homo sapiens
gaacaccaggtcagg

SEQ ID NO: 1328113 - DNA, 15 bp, Homo sapiens
agaacaccaggtcag

SEQ ID NO: 1328114 - DNA, 15 bp, Homo sapiens
cagaacaccaggtca

SEQ ID NO: 1328115 - DNA, 15 bp, Homo sapiens
gcagaacaccaggtc

SEQ ID NO: 1328116 - DNA, 15 bp, Homo sapiens
ggcagaacaccaggt

SEQ ID NO: 1328117 - DNA, 15 bp, Homo sapiens
gggcagaacaccagg

SEQ ID NO: 1328118 - DNA, 15 bp, Homo sapiens
cgggcagaacaccag

SEQ ID NO: 1328119 - DNA, 15 bp, Homo sapiens
gcgggcagaacacca

SEQ ID NO: 1328120 - DNA, 15 bp, Homo sapiens
ggcgggcagaacacc

SEQ ID NO: 1328121 - DNA, 15 bp, Homo sapiens
aggcgggcagaacac

SEQ ID NO: 1328122 - DNA, 15 bp, Homo sapiens
gaggcgggcagaaca

SEQ ID NO: 1328123 - DNA, 15 bp, Homo sapiens
cgaggcgggcagaac

SEQ ID NO: 1328124 - DNA, 15 bp, Homo sapiens
tcgaggcgggcagaa

SEQ ID NO: 1328125 - DNA, 15 bp, Homo sapiens
gtcgaggcgggcaga

SEQ ID NO: 1328126 - DNA, 15 bp, Homo sapiens
ggtcgaggcgggcag

SEQ ID NO: 1328127 - DNA, 15 bp, Homo sapiens
aggtcgaggcgggca

SEQ ID NO: 1328128 - DNA, 15 bp, Homo sapiens
gaggtcgaggcgggc

SEQ ID NO: 1328129 - DNA, 15 bp, Homo sapiens
ggaggtcgaggcggg

SEQ ID NO: 1328130 - DNA, 15 bp, Homo sapiens
gggaggtcgaggcgg

SEQ ID NO: 1328131 - DNA, 15 bp, Homo sapiens
tgggaggtcgaggcg

SEQ ID NO: 1328132 - DNA, 15 bp, Homo sapiens
ttgggaggtcgaggc

SEQ ID NO: 1328133 - DNA, 15 bp, Homo sapiens
tttgggaggtcgagg

SEQ ID NO: 1328134 - DNA, 15 bp, Homo sapiens
ctttgggaggtcgag

SEQ ID NO: 1328135 - DNA, 15 bp, Homo sapiens
actttgggaggtcga

SEQ ID NO: 1328136 - DNA, 15 bp, Homo sapiens
cgcggtggctcacac

SEQ ID NO: 1328137 - DNA, 15 bp, Homo sapiens
aggtccaagcgaggg

SEQ ID NO: 1328138 - DNA, 15 bp, Homo sapiens
caggtccaagcgagg

SEQ ID NO: 1328139 - DNA, 15 bp, Homo sapiens
gcaggtccaagcgag

SEQ ID NO: 1328140 - DNA, 15 bp, Homo sapiens
tgcaggtccaagcga

SEQ ID NO: 1328141 - DNA, 15 bp, Homo sapiens
ttgcaggtccaagcg

SEQ ID NO: 1328142 - DNA, 15 bp, Homo sapiens
cttgcaggtccaagc

SEQ ID NO: 1328143 - DNA, 15 bp, Homo sapiens
tcttgcaggtccaag

SEQ ID NO: 1328144 - DNA, 15 bp, Homo sapiens
ctcttgcaggtccaa

SEQ ID NO: 1328145 - DNA, 15 bp, Homo sapiens
tctcttgcaggtcca

SEQ ID NO: 1328146 - DNA, 15 bp, Homo sapiens
atctcttgcaggtcc

SEQ ID NO: 1328147 - DNA, 15 bp, Homo sapiens
gatctcttgcaggtc

SEQ ID NO: 1328148 - DNA, 15 bp, Homo sapiens
tgatctcttgcaggt

SEQ ID NO: 1328149 - DNA, 15 bp, Homo sapiens
ttgatctcttgcagg

SEQ ID NO: 1328150 - DNA, 15 bp, Homo sapiens
gttgatctcttgcag

SEQ ID NO: 1328151 - DNA, 15 bp, Homo sapiens
tgttgatctcttgca

SEQ ID NO: 1328152 - DNA, 15 bp, Homo sapiens
ttgttgatctcttgc

SEQ ID NO: 1328153 - DNA, 15 bp, Homo sapiens
gttgttgatctcttg

SEQ ID NO: 1328154 - DNA, 15 bp, Homo sapiens
agttgttgatctctt

SEQ ID NO: 1328155 - DNA, 15 bp, Homo sapiens
cagttgttgatctct

SEQ ID NO: 1328156 - DNA, 15 bp, Homo sapiens
ccagttgttgatctc

SEQ ID NO: 1328157 - DNA, 15 bp, Homo sapiens
cccagttgttgatct

SEQ ID NO: 1328158 - DNA, 15 bp, Homo sapiens
acccagttgttgatc

SEQ ID NO: 1328159 - DNA, 15 bp, Homo sapiens
cacccagttgttgat

SEQ ID NO: 1328160 - DNA, 15 bp, Homo sapiens
gcacccagttgttga

SEQ ID NO: 1328161 - DNA, 15 bp, Homo sapiens
tgcacccagttgttg

SEQ ID NO: 1328162 - DNA, 15 bp, Homo sapiens
ctgcacccagttgtt

SEQ ID NO: 1328163 - DNA, 15 bp, Homo sapiens
cctgcacccagttgt

SEQ ID NO: 1328164 - DNA, 15 bp, Homo sapiens
gcctgcacccagttg

SEQ ID NO: 1328165 - DNA, 15 bp, Homo sapiens
cgcctgcacccagtt

SEQ ID NO: 1328166 - DNA, 15 bp, Homo sapiens
gcgcctgcacccagt

SEQ ID NO: 1328167 - DNA, 15 bp, Homo sapiens
tgcgcctgcacccag

SEQ ID NO: 1328168 - DNA, 15 bp, Homo sapiens
ctgcgcctgcaccca

SEQ ID NO: 1328169 - DNA, 15 bp, Homo sapiens
tctgcgcctgcaccc

SEQ ID NO: 1328170 - DNA, 15 bp, Homo sapiens
atctgcgcctgcacc

SEQ ID NO: 1328171 - DNA, 15 bp, Homo sapiens
catctgcgcctgcac

SEQ ID NO: 1328172 - DNA, 15 bp, Homo sapiens
tcatctgcgcctgca

SEQ ID NO: 1328173 - DNA, 15 bp, Homo sapiens
ttcatctgcgcctgc

SEQ ID NO: 1328174 - DNA, 15 bp, Homo sapiens
tttcatctgcgcctg

SEQ ID NO: 1328175 - DNA, 15 bp, Homo sapiens
ctttcatctgcgcct

SEQ ID NO: 1328176 - DNA, 15 bp, Homo sapiens
cctttcatctgcgcc

SEQ ID NO: 1328177 - DNA, 15 bp, Homo sapiens
ccctttcatctgcgc

SEQ ID NO: 1328178 - DNA, 15 bp, Homo sapiens
tccctttcatctgcg

SEQ ID NO: 1328179 - DNA, 15 bp, Homo sapiens
ttccctttcatctgc

SEQ ID NO: 1328180 - DNA, 15 bp, Homo sapiens
cttccctttcatctg

SEQ ID NO: 1328181 - DNA, 15 bp, Homo sapiens
gcttccctttcatct

SEQ ID NO: 1328182 - DNA, 15 bp, Homo sapiens
agcttccctttcatc

SEQ ID NO: 1328183 - DNA, 15 bp, Homo sapiens
gagcttccctttcat

SEQ ID NO: 1328184 - DNA, 15 bp, Homo sapiens
cgagcttccctttca

SEQ ID NO: 1328185 - DNA, 15 bp, Homo sapiens
gcgagcttccctttc

SEQ ID NO: 1328186 - DNA, 15 bp, Homo sapiens
ggcgagcttcccttt

SEQ ID NO: 1328187 - DNA, 15 bp, Homo sapiens
tggcgagcttccctt

SEQ ID NO: 1328188 - DNA, 15 bp, Homo sapiens
ctggcgagcttccct

SEQ ID NO: 1328189 - DNA, 15 bp, Homo sapiens
cctggcgagcttccc

SEQ ID NO: 1328190 - DNA, 15 bp, Homo sapiens
acctggcgagcttcc

SEQ ID NO: 1328191 - DNA, 15 bp, Homo sapiens
gacctggcgagcttc

SEQ ID NO: 1328192 - DNA, 15 bp, Homo sapiens
ggacctggcgagctt

SEQ ID NO: 1328193 - DNA, 15 bp, Homo sapiens
tggacctggcgagct

SEQ ID NO: 1328194 - DNA, 15 bp, Homo sapiens
gtggacctggcgagc

SEQ ID NO: 1328195 - DNA, 15 bp, Homo sapiens
tgtggacctggcgag

SEQ ID NO: 1328196 - DNA, 15 bp, Homo sapiens
ttgtggacctggcga

SEQ ID NO: 1328197 - DNA, 15 bp, Homo sapiens
tttgtggacctggcg

SEQ ID NO: 1328198 - DNA, 15 bp, Homo sapiens
ctttgtggacctggc

SEQ ID NO: 1328199 - DNA, 15 bp, Homo sapiens
cctttgtggacctgg

SEQ ID NO: 1328200 - DNA, 15 bp, Homo sapiens
tcctttgtggacctg

SEQ ID NO: 1328201 - DNA, 15 bp, Homo sapiens
gtcctctcttcatcc

SEQ ID NO: 1328202 - DNA, 15 bp, Homo sapiens
ggtcctctcttcatc

SEQ ID NO: 1328203 - DNA, 15 bp, Homo sapiens
cggtcctctcttcat

SEQ ID NO: 1328204 - DNA, 15 bp, Homo sapiens
acggtcctctcttca

SEQ ID NO: 1328205 - DNA, 15 bp, Homo sapiens
cacggtcctctcttc

SEQ ID NO: 1328206 - DNA, 15 bp, Homo sapiens
tcacggtcctctctt

SEQ ID NO: 1328207 - DNA, 15 bp, Homo sapiens
ctcacggtcctctct

SEQ ID NO: 1328208 - DNA, 15 bp, Homo sapiens
cctcacggtcctctc

SEQ ID NO: 1328209 - DNA, 15 bp, Homo sapiens
ccctcacggtcctct

SEQ ID NO: 1328210 - DNA, 15 bp, Homo sapiens
accctcacggtcctc

SEQ ID NO: 1328211 - DNA, 15 bp, Homo sapiens
gaccctcacggtcct

SEQ ID NO: 1328212 - DNA, 15 bp, Homo sapiens
ggaccctcacggtcc

SEQ ID NO: 1328213 - DNA, 15 bp, Homo sapiens
gggaccctcacggtc

SEQ ID NO: 1328214 - DNA, 15 bp, Homo sapiens
ggggaccctcacggt

SEQ ID NO: 1328215 - DNA, 15 bp, Homo sapiens
tggggaccctcacgg

SEQ ID NO: 1328216 - DNA, 15 bp, Homo sapiens
atggggaccctcacg

SEQ ID NO: 1328217 - DNA, 15 bp, Homo sapiens
catggggaccctcac

SEQ ID NO: 1328218 - DNA, 15 bp, Homo sapiens
tcatggggaccctca

SEQ ID NO: 1328219 - DNA, 15 bp, Homo sapiens
atcatggggaccctc

SEQ ID NO: 1328220 - DNA, 15 bp, Homo sapiens
catcatggggaccct

SEQ ID NO: 1328221 - DNA, 15 bp, Homo sapiens
acatcatggggaccc

SEQ ID NO: 1328222 - DNA, 15 bp, Homo sapiens
gacatcatggggacc

SEQ ID NO: 1328223 - DNA, 15 bp, Homo sapiens
cgacatcatggggac

SEQ ID NO: 1328224 - DNA, 15 bp, Homo sapiens
ccgacatcatgggga

SEQ ID NO: 1328225 - DNA, 15 bp, Homo sapiens
tccgacatcatgggg

SEQ ID NO: 1328226 - DNA, 15 bp, Homo sapiens
gtccgacatcatggg

SEQ ID NO: 1328227 - DNA, 15 bp, Homo sapiens
ggtccgacatcatgg

SEQ ID NO: 1328228 - DNA, 15 bp, Homo sapiens
gggtccgacatcatg

SEQ ID NO: 1328229 - DNA, 15 bp, Homo sapiens
agggtccgacatcat

SEQ ID NO: 1328230 - DNA, 15 bp, Homo sapiens
tagggtccgacatca

SEQ ID NO: 1328231 - DNA, 15 bp, Homo sapiens
ttagggtccgacatc

SEQ ID NO: 1328232 - DNA, 15 bp, Homo sapiens
cttagggtccgacat

SEQ ID NO: 1328233 - DNA, 15 bp, Homo sapiens
ccttagggtccgaca

SEQ ID NO: 1328234 - DNA, 15 bp, Homo sapiens
gccttagggtccgac

SEQ ID NO: 1328235 - DNA, 15 bp, Homo sapiens
agccttagggtccga

SEQ ID NO: 1328236 - DNA, 15 bp, Homo sapiens
cagccttagggtccg

SEQ ID NO: 1328237 - DNA, 15 bp, Homo sapiens
cctgccttccccaac

SEQ ID NO: 1328238 - DNA, 15 bp, Homo sapiens
ccctgccttccccaa

SEQ ID NO: 1328239 - DNA, 15 bp, Homo sapiens
accctgccttcccca

SEQ ID NO: 1328240 - DNA, 15 bp, Homo sapiens
aaccctgccttcccc

SEQ ID NO: 1328241 - DNA, 15 bp, Homo sapiens
aaaccctgccttccc

SEQ ID NO: 1328242 - DNA, 15 bp, Homo sapiens
aaaaccctgccttcc

SEQ ID NO: 1328243 - DNA, 15 bp, Homo sapiens
taaaaccctgccttc

SEQ ID NO: 1328244 - DNA, 15 bp, Homo sapiens
ttaaaaccctgcctt

SEQ ID NO: 1328245 - DNA, 15 bp, Homo sapiens
gttaaaaccctgcct

SEQ ID NO: 1328246 - DNA, 15 bp, Homo sapiens
cgttaaaaccctgcc

SEQ ID NO: 1328247 - DNA, 15 bp, Homo sapiens
ccgttaaaaccctgc

SEQ ID NO: 1328248 - DNA, 15 bp, Homo sapiens
tccgttaaaaccctg

SEQ ID NO: 1328249 - DNA, 15 bp, Homo sapiens
ttccgttaaaaccct

SEQ ID NO: 1328250 - DNA, 15 bp, Homo sapiens
tttccgttaaaaccc

SEQ ID NO: 1328251 - DNA, 15 bp, Homo sapiens
atttccgttaaaacc

SEQ ID NO: 1328252 - DNA, 15 bp, Homo sapiens
gatttccgttaaaac

SEQ ID NO: 1328253 - DNA, 15 bp, Homo sapiens
agatttccgttaaaa

SEQ ID NO: 1328254 - DNA, 15 bp, Homo sapiens
gagatttccgttaaa

SEQ ID NO: 1328255 - DNA, 15 bp, Homo sapiens
agagatttccgttaa

SEQ ID NO: 1328256 - DNA, 15 bp, Homo sapiens
gagagatttccgtta

SEQ ID NO: 1328257 - DNA, 15 bp, Homo sapiens
agagagatttccgtt

SEQ ID NO: 1328258 - DNA, 15 bp, Homo sapiens
gagagagatttccgt

SEQ ID NO: 1328259 - DNA, 15 bp, Homo sapiens
ggagagagatttccg

SEQ ID NO: 1328260 - DNA, 15 bp, Homo sapiens
tggagagagatttcc

SEQ ID NO: 1328261 - DNA, 15 bp, Homo sapiens
atggagagagatttc

SEQ ID NO: 1328262 - DNA, 15 bp, Homo sapiens
gatggagagagattt

SEQ ID NO: 1328263 - DNA, 15 bp, Homo sapiens
agatggagagagatt

SEQ ID NO: 1328264 - DNA, 15 bp, Homo sapiens
gagatggagagagat

SEQ ID NO: 1328265 - DNA, 15 bp, Homo sapiens
agagatggagagaga

SEQ ID NO: 1328266 - DNA, 15 bp, Homo sapiens
tagagatggagagag

SEQ ID NO: 1328267 - DNA, 15 bp, Homo sapiens
gtagagatggagaga

SEQ ID NO: 1328268 - DNA, 15 bp, Homo sapiens
tgtagagatggagag

SEQ ID NO: 1328269 - DNA, 15 bp, Homo sapiens
ctgtagagatggaga

SEQ ID NO: 1328270 - DNA, 15 bp, Homo sapiens
tctgtagagatggag

SEQ ID NO: 1328271 - DNA, 15 bp, Homo sapiens
ctctgtagagatgga

SEQ ID NO: 1328272 - DNA, 15 bp, Homo sapiens
gctctgtagagatgg

SEQ ID NO: 1328273 - DNA, 15 bp, Homo sapiens
agctctgtagagatg

SEQ ID NO: 1328274 - DNA, 15 bp, Homo sapiens
cagctctgtagagat

SEQ ID NO: 1328275 - DNA, 15 bp, Homo sapiens
gcagctctgtagaga

SEQ ID NO: 1328276 - DNA, 15 bp, Homo sapiens
tgcagctctgtagag

SEQ ID NO: 1328277 - DNA, 15 bp, Homo sapiens
ttgcagctctgtaga

SEQ ID NO: 1328278 - DNA, 15 bp, Homo sapiens
attgcagctctgtag

SEQ ID NO: 1328279 - DNA, 15 bp, Homo sapiens
gattgcagctctgta

SEQ ID NO: 1328280 - DNA, 15 bp, Homo sapiens
ggattgcagctctgt

SEQ ID NO: 1328281 - DNA, 15 bp, Homo sapiens
aggattgcagctctg

SEQ ID NO: 1328282 - DNA, 15 bp, Homo sapiens
aaggattgcagctct

SEQ ID NO: 1328283 - DNA, 15 bp, Homo sapiens
caaggattgcagctc

SEQ ID NO: 1328284 - DNA, 15 bp, Homo sapiens
acaaggattgcagct

SEQ ID NO: 1328285 - DNA, 15 bp, Homo sapiens
aacaaggattgcagc

SEQ ID NO: 1328286 - DNA, 15 bp, Homo sapiens
aaacaaggattgcag

SEQ ID NO: 1328287 - DNA, 15 bp, Homo sapiens
caaacaaggattgca

SEQ ID NO: 1328288 - DNA, 15 bp, Homo sapiens
tcaaacaaggattgc

SEQ ID NO: 1328289 - DNA, 15 bp, Homo sapiens
atcaaacaaggattg

SEQ ID NO: 1328290 - DNA, 15 bp, Homo sapiens
aatcaaacaaggatt

SEQ ID NO: 1328291 - DNA, 15 bp, Homo sapiens
gaatcaaacaaggat

SEQ ID NO: 1328292 - DNA, 15 bp, Homo sapiens
gagtagaatacagac

SEQ ID NO: 1328293 - DNA, 15 bp, Homo sapiens
cgagtagaatacaga

SEQ ID NO: 1328294 - DNA, 15 bp, Homo sapiens
gcgagtagaatacag

SEQ ID NO: 1328295 - DNA, 15 bp, Homo sapiens
ggcgagtagaataca

SEQ ID NO: 1328296 - DNA, 15 bp, Homo sapiens
tggcgagtagaatac

SEQ ID NO: 1328297 - DNA, 15 bp, Homo sapiens
ctggcgagtagaata

SEQ ID NO: 1328298 - DNA, 15 bp, Homo sapiens
actggcgagtagaat

SEQ ID NO: 1328299 - DNA, 15 bp, Homo sapiens
aactggcgagtagaa

SEQ ID NO: 1328300 - DNA, 15 bp, Homo sapiens
aaactggcgagtaga

SEQ ID NO: 1328301 - DNA, 15 bp, Homo sapiens
caaactggcgagtag

SEQ ID NO: 1328302 - DNA, 15 bp, Homo sapiens
ccaaactggcgagta

SEQ ID NO: 1328303 - DNA, 15 bp, Homo sapiens
tccaaactggcgagt

SEQ ID NO: 1328304 - DNA, 15 bp, Homo sapiens
ctccaaactggcgag

SEQ ID NO: 1328305 - DNA, 15 bp, Homo sapiens
tctccaaactggcga

SEQ ID NO: 1328306 - DNA, 15 bp, Homo sapiens
ctctccaaactggcg

SEQ ID NO: 1328307 - DNA, 15 bp, Homo sapiens
cctctccaaactggc

SEQ ID NO: 1328308 - DNA, 15 bp, Homo sapiens
acctctccaaactgg

SEQ ID NO: 1328309 - DNA, 15 bp, Homo sapiens
gacctctccaaactg

SEQ ID NO: 1328310 - DNA, 15 bp, Homo sapiens
agacctctccaaact

SEQ ID NO: 1328311 - DNA, 15 bp, Homo sapiens
cagacctctccaaac

SEQ ID NO: 1328312 - DNA, 15 bp, Homo sapiens
ccagacctctccaaa

SEQ ID NO: 1328313 - DNA, 15 bp, Homo sapiens
accagacctctccaa

SEQ ID NO: 1328314 - DNA, 15 bp, Homo sapiens
caccagacctctcca

SEQ ID NO: 1328315 - DNA, 15 bp, Homo sapiens
ccaccagacctctcc

SEQ ID NO: 1328316 - DNA, 15 bp, Homo sapiens
tccaccagacctctc

SEQ ID NO: 1328317 - DNA, 15 bp, Homo sapiens
ctccaccagacctct

SEQ ID NO: 1328318 - DNA, 15 bp, Homo sapiens
tctccaccagacctc

SEQ ID NO: 1328319 - DNA, 15 bp, Homo sapiens
ttctccaccagacct

SEQ ID NO: 1328320 - DNA, 15 bp, Homo sapiens
tttctccaccagacc

SEQ ID NO: 1328321 - DNA, 15 bp, Homo sapiens
ttttctccaccagac

SEQ ID NO: 1328322 - DNA, 15 bp, Homo sapiens
cttttctccaccaga

SEQ ID NO: 1328323 - DNA, 15 bp, Homo sapiens
ccttttctccaccag

SEQ ID NO: 1328324 - DNA, 15 bp, Homo sapiens
tccttttctccacca

SEQ ID NO: 1328325 - DNA, 15 bp, Homo sapiens
ctccttttctccacc

SEQ ID NO: 1328326 - DNA, 15 bp, Homo sapiens
actccttttctccac

SEQ ID NO: 1328327 - DNA, 15 bp, Homo sapiens
gactccttttctcca

SEQ ID NO: 1328328 - DNA, 15 bp, Homo sapiens
agactccttttctcc

SEQ ID NO: 1328329 - DNA, 15 bp, Homo sapiens
gagactccttttctc

SEQ ID NO: 1328330 - DNA, 15 bp, Homo sapiens
agagactccttttct

SEQ ID NO: 1328331 - DNA, 15 bp, Homo sapiens
aagagactccttttc

SEQ ID NO: 1328332 - DNA, 15 bp, Homo sapiens
aaagagactcctttt

SEQ ID NO: 1328333 - DNA, 15 bp, Homo sapiens
aaaagagactccttt

SEQ ID NO: 1328334 - DNA, 15 bp, Homo sapiens
gaaaagagactcctt

SEQ ID NO: 1328335 - DNA, 15 bp, Homo sapiens
tgaaaagagactcct

SEQ ID NO: 1328336 - DNA, 15 bp, Homo sapiens
ctgaaaagagactcc

SEQ ID NO: 1328337 - DNA, 15 bp, Homo sapiens
cctgaaaagagactc

SEQ ID NO: 1328338 - DNA, 15 bp, Homo sapiens
gcctgaaaagagact

SEQ ID NO: 1328339 - DNA, 15 bp, Homo sapiens
agcctgaaaagagac

SEQ ID NO: 1328340 - DNA, 15 bp, Homo sapiens
aagcctgaaaagaga

SEQ ID NO: 1328341 - DNA, 15 bp, Homo sapiens
caagcctgaaaagag

SEQ ID NO: 1328342 - DNA, 15 bp, Homo sapiens
tcaagcctgaaaaga

SEQ ID NO: 1328343 - DNA, 15 bp, Homo sapiens
gtcaagcctgaaaag

SEQ ID NO: 1328344 - DNA, 15 bp, Homo sapiens
tgtcaagcctgaaaa

SEQ ID NO: 1328345 - DNA, 15 bp, Homo sapiens
ttgtcaagcctgaaa

SEQ ID NO: 1328346 - DNA, 15 bp, Homo sapiens
gttgtcaagcctgaa

SEQ ID NO: 1328347 - DNA, 15 bp, Homo sapiens
tgttgtcaagcctga

SEQ ID NO: 1328348 - DNA, 15 bp, Homo sapiens
ttgttgtcaagcctg

SEQ ID NO: 1328349 - DNA, 15 bp, Homo sapiens
tttgttgtcaagcct

SEQ ID NO: 1328350 - DNA, 15 bp, Homo sapiens
atttgttgtcaagcc

SEQ ID NO: 1328351 - DNA, 15 bp, Homo sapiens
tatttgttgtcaagc

SEQ ID NO: 1328352 - DNA, 15 bp, Homo sapiens
ctatttgttgtcaag

SEQ ID NO: 1328353 - DNA, 15 bp, Homo sapiens
tctatttgttgtcaa

SEQ ID NO: 1328354 - DNA, 15 bp, Homo sapiens
ttctatttgttgtca

SEQ ID NO: 1328355 - DNA, 15 bp, Homo sapiens
gttctatttgttgtc

SEQ ID NO: 1328356 - DNA, 15 bp, Homo sapiens
agttctatttgttgt

SEQ ID NO: 1328357 - DNA, 15 bp, Homo sapiens
gagttctatttgttg

SEQ ID NO: 1328358 - DNA, 15 bp, Homo sapiens
tgagttctatttgtt

SEQ ID NO: 1328359 - DNA, 15 bp, Homo sapiens
ctgagttctatttgt

SEQ ID NO: 1328360 - DNA, 15 bp, Homo sapiens
cctgagttctatttg

SEQ ID NO: 1328361 - DNA, 15 bp, Homo sapiens
ccctgagttctattt

SEQ ID NO: 1328362 - DNA, 15 bp, Homo sapiens
gccctgagttctatt

SEQ ID NO: 1328363 - DNA, 15 bp, Homo sapiens
ggccctgagttctat

SEQ ID NO: 1328364 - DNA, 15 bp, Homo sapiens
cggccctgagttcta

SEQ ID NO: 1328365 - DNA, 15 bp, Homo sapiens
ccggccctgagttct

SEQ ID NO: 1328366 - DNA, 15 bp, Homo sapiens
cccggccctgagttc

SEQ ID NO: 1328367 - DNA, 15 bp, Homo sapiens
gcccggccctgagtt

SEQ ID NO: 1328368 - DNA, 15 bp, Homo sapiens
cgcccggccctgagt

SEQ ID NO: 1328369 - DNA, 15 bp, Homo sapiens
gcgcccggccctgag

SEQ ID NO: 1328370 - DNA, 15 bp, Homo sapiens
cgcgcccggccctga

SEQ ID NO: 1328371 - DNA, 15 bp, Homo sapiens
ccgcgcccggccctg

SEQ ID NO: 1328372 - DNA, 15 bp, Homo sapiens
accgcgcccggccct

SEQ ID NO: 1328373 - DNA, 15 bp, Homo sapiens
gacaggcgtgagcca

SEQ ID NO: 1328374 - DNA, 15 bp, Homo sapiens
tgacaggcgtgagcc

SEQ ID NO: 1328375 - DNA, 15 bp, Homo sapiens
atgacaggcgtgagc

SEQ ID NO: 1328376 - DNA, 15 bp, Homo sapiens
gatgacaggcgtgag

SEQ ID NO: 1328377 - DNA, 15 bp, Homo sapiens
ggatgacaggcgtga

SEQ ID NO: 1328378 - DNA, 15 bp, Homo sapiens
gggatgacaggcgtg

SEQ ID NO: 1328379 - DNA, 15 bp, Homo sapiens
tgggatgacaggcgt

SEQ ID NO: 1328380 - DNA, 15 bp, Homo sapiens
ctgggatgacaggcg

SEQ ID NO: 1328381 - DNA, 15 bp, Homo sapiens
tgctgggatgacagg

SEQ ID NO: 1328382 - DNA, 15 bp, Homo sapiens
gtgctgggatgacag

SEQ ID NO: 1328383 - DNA, 15 bp, Homo sapiens
agtgctgggatgaca

SEQ ID NO: 1328384 - DNA, 15 bp, Homo sapiens
cagtgctgggatgac

SEQ ID NO: 1328385 - DNA, 15 bp, Homo sapiens
acagtgctgggatga

SEQ ID NO: 1328386 - DNA, 15 bp, Homo sapiens
cacagtgctgggatg

SEQ ID NO: 1328387 - DNA, 15 bp, Homo sapiens
ggcctcccacagtgc

SEQ ID NO: 1328388 - DNA, 15 bp, Homo sapiens
cggcctcccacagtg

SEQ ID NO: 1328389 - DNA, 15 bp, Homo sapiens
tcggcctcccacagt

SEQ ID NO: 1328390 - DNA, 15 bp, Homo sapiens
ttcggcctcccacag

SEQ ID NO: 1328391 - DNA, 15 bp, Homo sapiens
cttcggcctcccaca

SEQ ID NO: 1328392 - DNA, 15 bp, Homo sapiens
gcttcggcctcccac

SEQ ID NO: 1328393 - DNA, 15 bp, Homo sapiens
cgcttcggcctccca

SEQ ID NO: 1328394 - DNA, 15 bp, Homo sapiens
ccgcttcggcctccc

SEQ ID NO: 1328395 - DNA, 15 bp, Homo sapiens
cccgcttcggcctcc

SEQ ID NO: 1328396 - DNA, 15 bp, Homo sapiens
gcccgcttcggcctc

SEQ ID NO: 1328397 - DNA, 15 bp, Homo sapiens
cgcccgcttcggcct

SEQ ID NO: 1328398 - DNA, 15 bp, Homo sapiens
ccgcccgcttcggcc

SEQ ID NO: 1328399 - DNA, 15 bp, Homo sapiens
tccgcccgcttcggc

SEQ ID NO: 1328400 - DNA, 15 bp, Homo sapiens
atccgcccgcttcgg

SEQ ID NO: 1328401 - DNA, 15 bp, Homo sapiens
gatccgcccgcttcg

SEQ ID NO: 1328402 - DNA, 15 bp, Homo sapiens
tgatccgcccgcttc

SEQ ID NO: 1328403 - DNA, 15 bp, Homo sapiens
gtgatccgcccgctt

SEQ ID NO: 1328404 - DNA, 15 bp, Homo sapiens
ggtgatccgcccgct

SEQ ID NO: 1328405 - DNA, 15 bp, Homo sapiens
gctcccgacctcagg

SEQ ID NO: 1328406 - DNA, 15 bp, Homo sapiens
agctcccgacctcag

SEQ ID NO: 1328407 - DNA, 15 bp, Homo sapiens
gagctcccgacctca

SEQ ID NO: 1328408 - DNA, 15 bp, Homo sapiens
tgagctcccgacctc

SEQ ID NO: 1328409 - DNA, 15 bp, Homo sapiens
ttgagctcccgacct

SEQ ID NO: 1328410 - DNA, 15 bp, Homo sapiens
cttgagctcccgacc

SEQ ID NO: 1328411 - DNA, 15 bp, Homo sapiens
tcttgagctcccgac

SEQ ID NO: 1328412 - DNA, 15 bp, Homo sapiens
gtcttgagctcccga

SEQ ID NO: 1328413 - DNA, 15 bp, Homo sapiens
ggtcttgagctcccg

SEQ ID NO: 1328414 - DNA, 15 bp, Homo sapiens
tggtcttgagctccc

SEQ ID NO: 1328415 - DNA, 15 bp, Homo sapiens
ctggtcttgagctcc

SEQ ID NO: 1328416 - DNA, 15 bp, Homo sapiens
gctggtcttgagctc

SEQ ID NO: 1328417 - DNA, 15 bp, Homo sapiens
ggctggtcttgagct

SEQ ID NO: 1328418 - DNA, 15 bp, Homo sapiens
aggctggtcttgagc

SEQ ID NO: 1328419 - DNA, 15 bp, Homo sapiens
tccatgttggccagg

SEQ ID NO: 1328420 - DNA, 15 bp, Homo sapiens
ctccatgttggccag

SEQ ID NO: 1328421 - DNA, 15 bp, Homo sapiens
tctccatgttggcca

SEQ ID NO: 1328422 - DNA, 15 bp, Homo sapiens
ttctccatgttggcc

SEQ ID NO: 1328423 - DNA, 15 bp, Homo sapiens
tttctccatgttggc

SEQ ID NO: 1328424 - DNA, 15 bp, Homo sapiens
atttctccatgttgg

SEQ ID NO: 1328425 - DNA, 15 bp, Homo sapiens
gatttctccatgttg

SEQ ID NO: 1328426 - DNA, 15 bp, Homo sapiens
ggatttctccatgtt

SEQ ID NO: 1328427 - DNA, 15 bp, Homo sapiens
gggatttctccatgt

SEQ ID NO: 1328428 - DNA, 15 bp, Homo sapiens
tgggatttctccatg

SEQ ID NO: 1328429 - DNA, 15 bp, Homo sapiens
atgggatttctccat

SEQ ID NO: 1328430 - DNA, 15 bp, Homo sapiens
gatgggatttctcca

SEQ ID NO: 1328431 - DNA, 15 bp, Homo sapiens
agatgggatttctcc

SEQ ID NO: 1328432 - DNA, 15 bp, Homo sapiens
aagatgggatttctc

SEQ ID NO: 1328433 - DNA, 15 bp, Homo sapiens
aaagatgggatttct

SEQ ID NO: 1328434 - DNA, 15 bp, Homo sapiens
taaagatgggatttc

SEQ ID NO: 1328435 - DNA, 15 bp, Homo sapiens
gtaaagatgggattt

SEQ ID NO: 1328436 - DNA, 15 bp, Homo sapiens
agtaaagatgggatt

SEQ ID NO: 1328437 - DNA, 15 bp, Homo sapiens
tagtaaagatgggat

SEQ ID NO: 1328438 - DNA, 15 bp, Homo sapiens
ttagtaaagatggga

SEQ ID NO: 1328439 - DNA, 15 bp, Homo sapiens
gtacgcccggctaat

SEQ ID NO: 1328440 - DNA, 15 bp, Homo sapiens
agtacgcccggctaa

SEQ ID NO: 1328441 - DNA, 15 bp, Homo sapiens
cagtacgcccggcta

SEQ ID NO: 1328442 - DNA, 15 bp, Homo sapiens
ccagtacgcccggct

SEQ ID NO: 1328443 - DNA, 15 bp, Homo sapiens
gccagtacgcccggc

SEQ ID NO: 1328444 - DNA, 15 bp, Homo sapiens
cgccagtacgcccgg

SEQ ID NO: 1328445 - DNA, 15 bp, Homo sapiens
tcgccagtacgcccg

SEQ ID NO: 1328446 - DNA, 15 bp, Homo sapiens
ttcgccagtacgccc

SEQ ID NO: 1328447 - DNA, 15 bp, Homo sapiens
attcgccagtacgcc

SEQ ID NO: 1328448 - DNA, 15 bp, Homo sapiens
cattcgccagtacgc

SEQ ID NO: 1328449 - DNA, 15 bp, Homo sapiens
gcattcgccagtacg

SEQ ID NO: 1328450 - DNA, 15 bp, Homo sapiens
ggcattcgccagtac

SEQ ID NO: 1328451 - DNA, 15 bp, Homo sapiens
aggcattcgccagta

SEQ ID NO: 1328452 - DNA, 15 bp, Homo sapiens
caggcattcgccagt

SEQ ID NO: 1328453 - DNA, 15 bp, Homo sapiens
acaggcattcgccag

SEQ ID NO: 1328454 - DNA, 15 bp, Homo sapiens
tacaggcattcgcca

SEQ ID NO: 1328455 - DNA, 15 bp, Homo sapiens
ttacaggcattcgcc

SEQ ID NO: 1328456 - DNA, 15 bp, Homo sapiens
attacaggcattcgc

SEQ ID NO: 1328457 - DNA, 15 bp, Homo sapiens
cattacaggcattcg

SEQ ID NO: 1328458 - DNA, 15 bp, Homo sapiens
gcattacaggcattc

SEQ ID NO: 1328459 - DNA, 15 bp, Homo sapiens
ggcattacaggcatt

SEQ ID NO: 1328460 - DNA, 15 bp, Homo sapiens
aagctggcattacag

SEQ ID NO: 1328461 - DNA, 15 bp, Homo sapiens
gaagctggcattaca

SEQ ID NO: 1328462 - DNA, 15 bp, Homo sapiens
agaagctggcattac

SEQ ID NO: 1328463 - DNA, 15 bp, Homo sapiens
gagaagctggcatta

SEQ ID NO: 1328464 - DNA, 15 bp, Homo sapiens
cgagaagctggcatt

SEQ ID NO: 1328465 - DNA, 15 bp, Homo sapiens
ccgagaagctggcat

SEQ ID NO: 1328466 - DNA, 15 bp, Homo sapiens
cccgagaagctggca

SEQ ID NO: 1328467 - DNA, 15 bp, Homo sapiens
tcccgagaagctggc

SEQ ID NO: 1328468 - DNA, 15 bp, Homo sapiens
ctcccgagaagctgg

SEQ ID NO: 1328469 - DNA, 15 bp, Homo sapiens
cctcccgagaagctg

SEQ ID NO: 1328470 - DNA, 15 bp, Homo sapiens
gcctcccgagaagct

SEQ ID NO: 1328471 - DNA, 15 bp, Homo sapiens
agcctcccgagaagc

SEQ ID NO: 1328472 - DNA, 15 bp, Homo sapiens
cagcctcccgagaag

SEQ ID NO: 1328473 - DNA, 15 bp, Homo sapiens
tcagcctcccgagaa

SEQ ID NO: 1328474 - DNA, 15 bp, Homo sapiens
ctcagcctcccgaga

SEQ ID NO: 1328475 - DNA, 15 bp, Homo sapiens
caccgcaacctctgc

SEQ ID NO: 1328476 - DNA, 15 bp, Homo sapiens
tcaccgcaacctctg

SEQ ID NO: 1328477 - DNA, 15 bp, Homo sapiens
ttcaccgcaacctct

SEQ ID NO: 1328478 - DNA, 15 bp, Homo sapiens
tggttcaccgcaacc

SEQ ID NO: 1328479 - DNA, 15 bp, Homo sapiens
ttggttcaccgcaac

SEQ ID NO: 1328480 - DNA, 15 bp, Homo sapiens
cttggttcaccgcaa

SEQ ID NO: 1328481 - DNA, 15 bp, Homo sapiens
tcttggttcaccgca

SEQ ID NO: 1328482 - DNA, 15 bp, Homo sapiens
gtcttggttcaccgc

SEQ ID NO: 1328483 - DNA, 15 bp, Homo sapiens
agtcttggttcaccg

SEQ ID NO: 1328484 - DNA, 15 bp, Homo sapiens
cagtcttggttcacc

SEQ ID NO: 1328485 - DNA, 15 bp, Homo sapiens
acagtcttggttcac

SEQ ID NO: 1328486 - DNA, 15 bp, Homo sapiens
cacagtcttggttca

SEQ ID NO: 1328487 - DNA, 15 bp, Homo sapiens
gcacagtcttggttc

SEQ ID NO: 1328488 - DNA, 15 bp, Homo sapiens
ggcacagtcttggtt

SEQ ID NO: 1328489 - DNA, 15 bp, Homo sapiens
tggcacagtcttggt

SEQ ID NO: 1328490 - DNA, 15 bp, Homo sapiens
acagtggcacagtct

SEQ ID NO: 1328491 - DNA, 15 bp, Homo sapiens
tacagtggcacagtc

SEQ ID NO: 1328492 - DNA, 15 bp, Homo sapiens
gtacagtggcacagt

SEQ ID NO: 1328493 - DNA, 15 bp, Homo sapiens
agtacagtggcacag

SEQ ID NO: 1328494 - DNA, 15 bp, Homo sapiens
aaggctggagtacag

SEQ ID NO: 1328495 - DNA, 15 bp, Homo sapiens
caaggctggagtaca

SEQ ID NO: 1328496 - DNA, 15 bp, Homo sapiens
ccaaggctggagtac

SEQ ID NO: 1328497 - DNA, 15 bp, Homo sapiens
accaaggctggagta

SEQ ID NO: 1328498 - DNA, 15 bp, Homo sapiens
caccaaggctggagt

SEQ ID NO: 1328499 - DNA, 15 bp, Homo sapiens
tcaccaaggctggag

SEQ ID NO: 1328500 - DNA, 15 bp, Homo sapiens
gtcaccaaggctgga

SEQ ID NO: 1328501 - DNA, 15 bp, Homo sapiens
tgtcaccaaggctgg

SEQ ID NO: 1328502 - DNA, 15 bp, Homo sapiens
ctgtcaccaaggctg

SEQ ID NO: 1328503 - DNA, 15 bp, Homo sapiens
tctgtcaccaaggct

SEQ ID NO: 1328504 - DNA, 15 bp, Homo sapiens
ctctgtcaccaaggc

SEQ ID NO: 1328505 - DNA, 15 bp, Homo sapiens
cctctgtcaccaagg

SEQ ID NO: 1328506 - DNA, 15 bp, Homo sapiens
ccctctgtcaccaag

SEQ ID NO: 1328507 - DNA, 15 bp, Homo sapiens
tccctctgtcaccaa

SEQ ID NO: 1328508 - DNA, 15 bp, Homo sapiens
ctccctctgtcacca

SEQ ID NO: 1328509 - DNA, 15 bp, Homo sapiens
gagtctccctctgtc

SEQ ID NO: 1328510 - DNA, 15 bp, Homo sapiens
agagtctccctctgt

SEQ ID NO: 1328511 - DNA, 15 bp, Homo sapiens
cagagtctccctctg

SEQ ID NO: 1328512 - DNA, 15 bp, Homo sapiens
acagagtctccctct

SEQ ID NO: 1328513 - DNA, 15 bp, Homo sapiens
gacagagtctccctc

SEQ ID NO: 1328514 - DNA, 15 bp, Homo sapiens
agacagagtctccct

SEQ ID NO: 1328515 - DNA, 15 bp, Homo sapiens
aagacagagtctccc

SEQ ID NO: 1328516 - DNA, 15 bp, Homo sapiens
taagacagagtctcc

SEQ ID NO: 1328517 - DNA, 15 bp, Homo sapiens
ttaagacagagtctc

SEQ ID NO: 1328518 - DNA, 15 bp, Homo sapiens
cttaagacagagtct

SEQ ID NO: 1328519 - DNA, 15 bp, Homo sapiens
tcttaagacagagtc

SEQ ID NO: 1328520 - DNA, 15 bp, Homo sapiens
ttcttaagacagagt

SEQ ID NO: 1328521 - DNA, 15 bp, Homo sapiens
tttcttaagacagag

SEQ ID NO: 1328522 - DNA, 15 bp, Homo sapiens
ttttcttaagacaga

SEQ ID NO: 1328523 - DNA, 15 bp, Homo sapiens
tttttcttaagacag

SEQ ID NO: 1328524 - DNA, 15 bp, Homo sapiens
ttttttcttaagaca

SEQ ID NO: 1328525 - DNA, 15 bp, Homo sapiens
tttttttcttaagac

SEQ ID NO: 1328526 - DNA, 15 bp, Homo sapiens
ctttttttcttaaga

SEQ ID NO: 1328527 - DNA, 15 bp, Homo sapiens
tctttttttcttaag

SEQ ID NO: 1328528 - DNA, 15 bp, Homo sapiens
cggcccttttttttt

SEQ ID NO: 1328529 - DNA, 15 bp, Homo sapiens
ccggccctttttttt

SEQ ID NO: 1328530 - DNA, 15 bp, Homo sapiens
cccggcccttttttt

SEQ ID NO: 1328531 - DNA, 15 bp, Homo sapiens
gcccggccctttttt

SEQ ID NO: 1328532 - DNA, 15 bp, Homo sapiens
agcccggcccttttt

SEQ ID NO: 1328533 - DNA, 15 bp, Homo sapiens
gagcccggccctttt

SEQ ID NO: 1328534 - DNA, 15 bp, Homo sapiens
tgagcccggcccttt

SEQ ID NO: 1328535 - DNA, 15 bp, Homo sapiens
gtgagcccggccctt

SEQ ID NO: 1328536 - DNA, 15 bp, Homo sapiens
cgtgagcccggccct

SEQ ID NO: 1328537 - DNA, 15 bp, Homo sapiens
gcgtgagcccggccc

SEQ ID NO: 1328538 - DNA, 15 bp, Homo sapiens
ggcgtgagcccggcc

SEQ ID NO: 1328539 - DNA, 15 bp, Homo sapiens
aggcgtgagcccggc

SEQ ID NO: 1328540 - DNA, 15 bp, Homo sapiens
caggcgtgagcccgg

SEQ ID NO: 1328541 - DNA, 15 bp, Homo sapiens
acaggcgtgagcccg

SEQ ID NO: 1328542 - DNA, 15 bp, Homo sapiens
atttggcctcccaaa

SEQ ID NO: 1328543 - DNA, 15 bp, Homo sapiens
gatttggcctcccaa

SEQ ID NO: 1328544 - DNA, 15 bp, Homo sapiens
tgatttggcctccca

SEQ ID NO: 1328545 - DNA, 15 bp, Homo sapiens
gtgatttggcctccc

SEQ ID NO: 1328546 - DNA, 15 bp, Homo sapiens
ggtgatttggcctcc

SEQ ID NO: 1328547 - DNA, 15 bp, Homo sapiens
aggtgatttggcctc

SEQ ID NO: 1328548 - DNA, 15 bp, Homo sapiens
taggtgatttggcct

SEQ ID NO: 1328549 - DNA, 15 bp, Homo sapiens
ttaggtgatttggcc

SEQ ID NO: 1328550 - DNA, 15 bp, Homo sapiens
cttaggtgatttggc

SEQ ID NO: 1328551 - DNA, 15 bp, Homo sapiens
ccttaggtgatttgg

SEQ ID NO: 1328552 - DNA, 15 bp, Homo sapiens
gccttaggtgatttg

SEQ ID NO: 1328553 - DNA, 15 bp, Homo sapiens
ggccttaggtgattt

SEQ ID NO: 1328554 - DNA, 15 bp, Homo sapiens
cggccttaggtgatt

SEQ ID NO: 1328555 - DNA, 15 bp, Homo sapiens
ccggccttaggtgat

SEQ ID NO: 1328556 - DNA, 15 bp, Homo sapiens
cccggccttaggtga

SEQ ID NO: 1328557 - DNA, 15 bp, Homo sapiens
tcccggccttaggtg

SEQ ID NO: 1328558 - DNA, 15 bp, Homo sapiens
ctcccggccttaggt

SEQ ID NO: 1328559 - DNA, 15 bp, Homo sapiens
actcccggccttagg

SEQ ID NO: 1328560 - DNA, 15 bp, Homo sapiens
aactcccggccttag

SEQ ID NO: 1328561 - DNA, 15 bp, Homo sapiens
aaactcccggcctta

SEQ ID NO: 1328562 - DNA, 15 bp, Homo sapiens
caaactcccggcctt

SEQ ID NO: 1328563 - DNA, 15 bp, Homo sapiens
tcaaactcccggcct

SEQ ID NO: 1328564 - DNA, 15 bp, Homo sapiens
atcaaactcccggcc

SEQ ID NO: 1328565 - DNA, 15 bp, Homo sapiens
tatcaaactcccggc

SEQ ID NO: 1328566 - DNA, 15 bp, Homo sapiens
gtatcaaactcccgg

SEQ ID NO: 1328567 - DNA, 15 bp, Homo sapiens
ggtatcaaactcccg

SEQ ID NO: 1328568 - DNA, 15 bp, Homo sapiens
tggtatcaaactccc

SEQ ID NO: 1328569 - DNA, 15 bp, Homo sapiens
ttggtatcaaactcc

SEQ ID NO: 1328570 - DNA, 15 bp, Homo sapiens
gttggtatcaaactc

SEQ ID NO: 1328571 - DNA, 15 bp, Homo sapiens
ggttggtatcaaact

SEQ ID NO: 1328572 - DNA, 15 bp, Homo sapiens
aggttggtatcaaac

SEQ ID NO: 1328573 - DNA, 15 bp, Homo sapiens
caggttggtatcaaa

SEQ ID NO: 1328574 - DNA, 15 bp, Homo sapiens
tcaggttggtatcaa

SEQ ID NO: 1328575 - DNA, 15 bp, Homo sapiens
gtcaggttggtatca

SEQ ID NO: 1328576 - DNA, 15 bp, Homo sapiens
ggtcaggttggtatc

SEQ ID NO: 1328577 - DNA, 15 bp, Homo sapiens
tggtcaggttggtat

SEQ ID NO: 1328578 - DNA, 15 bp, Homo sapiens
ttggtcaggttggta

SEQ ID NO: 1328579 - DNA, 15 bp, Homo sapiens
tatgttggtcaggtt

SEQ ID NO: 1328580 - DNA, 15 bp, Homo sapiens
ctatgttggtcaggt

SEQ ID NO: 1328581 - DNA, 15 bp, Homo sapiens
actatgttggtcagg

SEQ ID NO: 1328582 - DNA, 15 bp, Homo sapiens
cactatgttggtcag

SEQ ID NO: 1328583 - DNA, 15 bp, Homo sapiens
tcactatgttggtca

SEQ ID NO: 1328584 - DNA, 15 bp, Homo sapiens
ttcactatgttggtc

SEQ ID NO: 1328585 - DNA, 15 bp, Homo sapiens
tttcactatgttggt

SEQ ID NO: 1328586 - DNA, 15 bp, Homo sapiens
atttcactatgttgg

SEQ ID NO: 1328587 - DNA, 15 bp, Homo sapiens
gatttcactatgttg

SEQ ID NO: 1328588 - DNA, 15 bp, Homo sapiens
ggatttcactatgtt

SEQ ID NO: 1328589 - DNA, 15 bp, Homo sapiens
gggatttcactatgt

SEQ ID NO: 1328590 - DNA, 15 bp, Homo sapiens
cgggatttcactatg

SEQ ID NO: 1328591 - DNA, 15 bp, Homo sapiens
acgggatttcactat

SEQ ID NO: 1328592 - DNA, 15 bp, Homo sapiens
gacgggatttcacta

SEQ ID NO: 1328593 - DNA, 15 bp, Homo sapiens
agacgggatttcact

SEQ ID NO: 1328594 - DNA, 15 bp, Homo sapiens
ttcagcctcccgagt

SEQ ID NO: 1328595 - DNA, 15 bp, Homo sapiens
cttcagcctcccgag

SEQ ID NO: 1328596 - DNA, 15 bp, Homo sapiens
gcttcagcctcccga

SEQ ID NO: 1328597 - DNA, 15 bp, Homo sapiens
tgcttcagcctcccg

SEQ ID NO: 1328598 - DNA, 15 bp, Homo sapiens
tgattctcctgcttc

SEQ ID NO: 1328599 - DNA, 15 bp, Homo sapiens
tccgggttcaagtga

SEQ ID NO: 1328600 - DNA, 15 bp, Homo sapiens
ttccgggttcaagtg

SEQ ID NO: 1328601 - DNA, 15 bp, Homo sapiens
cttccgggttcaagt

SEQ ID NO: 1328602 - DNA, 15 bp, Homo sapiens
ccttccgggttcaag

SEQ ID NO: 1328603 - DNA, 15 bp, Homo sapiens
gccttccgggttcaa

SEQ ID NO: 1328604 - DNA, 15 bp, Homo sapiens
cgccttccgggttca

SEQ ID NO: 1328605 - DNA, 15 bp, Homo sapiens
ccgccttccgggttc

SEQ ID NO: 1328606 - DNA, 15 bp, Homo sapiens
tccgccttccgggtt

SEQ ID NO: 1328607 - DNA, 15 bp, Homo sapiens
ctccgccttccgggt

SEQ ID NO: 1328608 - DNA, 15 bp, Homo sapiens
cctccgccttccggg

SEQ ID NO: 1328609 - DNA, 15 bp, Homo sapiens
acctccgccttccgg

SEQ ID NO: 1328610 - DNA, 15 bp, Homo sapiens
aacctccgccttccg

SEQ ID NO: 1328611 - DNA, 15 bp, Homo sapiens
caacctccgccttcc

SEQ ID NO: 1328612 - DNA, 15 bp, Homo sapiens
ggcaacctccgcctt

SEQ ID NO: 1328613 - DNA, 15 bp, Homo sapiens
cggcaacctccgcct

SEQ ID NO: 1328614 - DNA, 15 bp, Homo sapiens
acggcaacctccgcc

SEQ ID NO: 1328615 - DNA, 15 bp, Homo sapiens
tacggcaacctccgc

SEQ ID NO: 1328616 - DNA, 15 bp, Homo sapiens
ttacggcaacctccg

SEQ ID NO: 1328617 - DNA, 15 bp, Homo sapiens
cttacggcaacctcc

SEQ ID NO: 1328618 - DNA, 15 bp, Homo sapiens
gcttacggcaacctc

SEQ ID NO: 1328619 - DNA, 15 bp, Homo sapiens
ggcttacggcaacct

SEQ ID NO: 1328620 - DNA, 15 bp, Homo sapiens
tggcttacggcaacc

SEQ ID NO: 1328621 - DNA, 15 bp, Homo sapiens
ttggcttacggcaac

SEQ ID NO: 1328622 - DNA, 15 bp, Homo sapiens
cttggcttacggcaa

SEQ ID NO: 1328623 - DNA, 15 bp, Homo sapiens
tcttggcttacggca

SEQ ID NO: 1328624 - DNA, 15 bp, Homo sapiens
atcttggcttacggc

SEQ ID NO: 1328625 - DNA, 15 bp, Homo sapiens
gatcttggcttacgg

SEQ ID NO: 1328626 - DNA, 15 bp, Homo sapiens
cgatcttggcttacg

SEQ ID NO: 1328627 - DNA, 15 bp, Homo sapiens
cgcgatcttggctta

SEQ ID NO: 1328628 - DNA, 15 bp, Homo sapiens
gcgcgatcttggctt

SEQ ID NO: 1328629 - DNA, 15 bp, Homo sapiens
cgcaatggcgcgatc

SEQ ID NO: 1328630 - DNA, 15 bp, Homo sapiens
gcgcaatggcgcgat

SEQ ID NO: 1328631 - DNA, 15 bp, Homo sapiens
agcgcaatggcgcga

SEQ ID NO: 1328632 - DNA, 15 bp, Homo sapiens
gagcgcaatggcgcg

SEQ ID NO: 1328633 - DNA, 15 bp, Homo sapiens
ggttttgttttgttt

SEQ ID NO: 1328634 - DNA, 15 bp, Homo sapiens
tggttttgttttgtt

SEQ ID NO: 1328635 - DNA, 15 bp, Homo sapiens
ttggttttgttttgt

SEQ ID NO: 1328636 - DNA, 15 bp, Homo sapiens
gttggttttgttttg

SEQ ID NO: 1328637 - DNA, 15 bp, Homo sapiens
tgttggttttgtttt

SEQ ID NO: 1328638 - DNA, 15 bp, Homo sapiens
ttgttggttttgttt

SEQ ID NO: 1328639 - DNA, 15 bp, Homo sapiens
gttgttggttttgtt

SEQ ID NO: 1328640 - DNA, 15 bp, Homo sapiens
agttgttggttttgt

SEQ ID NO: 1328641 - DNA, 15 bp, Homo sapiens
gagttgttggttttg

SEQ ID NO: 1328642 - DNA, 15 bp, Homo sapiens
tgagttgttggtttt

SEQ ID NO: 1328643 - DNA, 15 bp, Homo sapiens
ctgagttgttggttt

SEQ ID NO: 1328644 - DNA, 15 bp, Homo sapiens
tctgagttgttggtt

SEQ ID NO: 1328645 - DNA, 15 bp, Homo sapiens
ttctgagttgttggt

SEQ ID NO: 1328646 - DNA, 15 bp, Homo sapiens
cttctgagttgttgg

SEQ ID NO: 1328647 - DNA, 15 bp, Homo sapiens
ccttctgagttgttg

SEQ ID NO: 1328648 - DNA, 15 bp, Homo sapiens
tccttctgagttgtt

SEQ ID NO: 1328649 - DNA, 15 bp, Homo sapiens
ctccttctgagttgt

SEQ ID NO: 1328650 - DNA, 15 bp, Homo sapiens
cctccttctgagttg

SEQ ID NO: 1328651 - DNA, 15 bp, Homo sapiens
gcctccttctgagtt

SEQ ID NO: 1328652 - DNA, 15 bp, Homo sapiens
tgcctccttctgagt

SEQ ID NO: 1328653 - DNA, 15 bp, Homo sapiens
atgcctccttctgag

SEQ ID NO: 1328654 - DNA, 15 bp, Homo sapiens
tatgcctccttctga

SEQ ID NO: 1328655 - DNA, 15 bp, Homo sapiens
atatgcctccttctg

SEQ ID NO: 1328656 - DNA, 15 bp, Homo sapiens
catatgcctccttct

SEQ ID NO: 1328657 - DNA, 15 bp, Homo sapiens
acatatgcctccttc

SEQ ID NO: 1328658 - DNA, 15 bp, Homo sapiens
cacatatgcctcctt

SEQ ID NO: 1328659 - DNA, 15 bp, Homo sapiens
acacatatgcctcct

SEQ ID NO: 1328660 - DNA, 15 bp, Homo sapiens
aacacatatgcctcc

SEQ ID NO: 1328661 - DNA, 15 bp, Homo sapiens
taacacatatgcctc

SEQ ID NO: 1328662 - DNA, 15 bp, Homo sapiens
ataacacatatgcct

SEQ ID NO: 1328663 - DNA, 15 bp, Homo sapiens
tataacacatatgcc

SEQ ID NO: 1328664 - DNA, 15 bp, Homo sapiens
ttataacacatatgc

SEQ ID NO: 1328665 - DNA, 15 bp, Homo sapiens
tttataacacatatg

SEQ ID NO: 1328666 - DNA, 15 bp, Homo sapiens
ctttataacacatat

SEQ ID NO: 1328667 - DNA, 15 bp, Homo sapiens
actttataacacata

SEQ ID NO: 1328668 - DNA, 15 bp, Homo sapiens
gactttataacacat

SEQ ID NO: 1328669 - DNA, 15 bp, Homo sapiens
agactttataacaca

SEQ ID NO: 1328670 - DNA, 15 bp, Homo sapiens
aagactttataacac

SEQ ID NO: 1328671 - DNA, 15 bp, Homo sapiens
aaagactttataaca

SEQ ID NO: 1328672 - DNA, 15 bp, Homo sapiens
taaagactttataac

SEQ ID NO: 1328673 - DNA, 15 bp, Homo sapiens
gtaaagactttataa

SEQ ID NO: 1328674 - DNA, 15 bp, Homo sapiens
agtaaagactttata

SEQ ID NO: 1328675 - DNA, 15 bp, Homo sapiens
tagtaaagactttat

SEQ ID NO: 1328676 - DNA, 15 bp, Homo sapiens
gtagtaaagacttta

SEQ ID NO: 1328677 - DNA, 15 bp, Homo sapiens
tgtagtaaagacttt

SEQ ID NO: 1328678 - DNA, 15 bp, Homo sapiens
ttgtagtaaagactt

SEQ ID NO: 1328679 - DNA, 15 bp, Homo sapiens
gttgtagtaaagact

SEQ ID NO: 1328680 - DNA, 15 bp, Homo sapiens
agttgtagtaaagac

SEQ ID NO: 1328681 - DNA, 15 bp, Homo sapiens
aagttgtagtaaaga

SEQ ID NO: 1328682 - DNA, 15 bp, Homo sapiens
aaagttgtagtaaag

SEQ ID NO: 1328683 - DNA, 15 bp, Homo sapiens
caaagttgtagtaaa

SEQ ID NO: 1328684 - DNA, 15 bp, Homo sapiens
tcaaagttgtagtaa

SEQ ID NO: 1328685 - DNA, 15 bp, Homo sapiens
atcaaagttgtagta

SEQ ID NO: 1328686 - DNA, 15 bp, Homo sapiens
aatcaaagttgtagt

SEQ ID NO: 1328687 - DNA, 15 bp, Homo sapiens
aaatcaaagttgtag

SEQ ID NO: 1328688 - DNA, 15 bp, Homo sapiens
aaaatcaaagttgta

SEQ ID NO: 1328689 - DNA, 15 bp, Homo sapiens
taaaatcaaagttgt

SEQ ID NO: 1328690 - DNA, 15 bp, Homo sapiens
ataaaatcaaagttg

SEQ ID NO: 1328691 - DNA, 15 bp, Homo sapiens
aataaaatcaaagtt

SEQ ID NO: 1328692 - DNA, 15 bp, Homo sapiens
taataaaatcaaagt

SEQ ID NO: 1328693 - DNA, 15 bp, Homo sapiens
ctaataaaatcaaag

SEQ ID NO: 1328694 - DNA, 15 bp, Homo sapiens
actaataaaatcaaa

SEQ ID NO: 1328695 - DNA, 15 bp, Homo sapiens
cactaataaaatcaa

SEQ ID NO: 1328696 - DNA, 15 bp, Homo sapiens
ccactaataaaatca

SEQ ID NO: 1328697 - DNA, 15 bp, Homo sapiens
accactaataaaatc

SEQ ID NO: 1328698 - DNA, 15 bp, Homo sapiens
aaccactaataaaat

SEQ ID NO: 1328699 - DNA, 15 bp, Homo sapiens
caaccactaataaaa

SEQ ID NO: 1328700 - DNA, 15 bp, Homo sapiens
ccaaccactaataaa

SEQ ID NO: 1328701 - DNA, 15 bp, Homo sapiens
accaaccactaataa

SEQ ID NO: 1328702 - DNA, 15 bp, Homo sapiens
aaccaaccactaata

SEQ ID NO: 1328703 - DNA, 15 bp, Homo sapiens
taaccaaccactaat

SEQ ID NO: 1328704 - DNA, 15 bp, Homo sapiens
gtaaccaaccactaa

SEQ ID NO: 1328705 - DNA, 15 bp, Homo sapiens
agtaaccaaccacta

SEQ ID NO: 1328706 - DNA, 15 bp, Homo sapiens
cagtaaccaaccact

SEQ ID NO: 1328707 - DNA, 15 bp, Homo sapiens
tcagtaaccaaccac

SEQ ID NO: 1328708 - DNA, 15 bp, Homo sapiens
gtcagtaaccaacca

SEQ ID NO: 1328709 - DNA, 15 bp, Homo sapiens
agtcagtaaccaacc

SEQ ID NO: 1328710 - DNA, 15 bp, Homo sapiens
gagtcagtaaccaac

SEQ ID NO: 1328711 - DNA, 15 bp, Homo sapiens
agagtcagtaaccaa

SEQ ID NO: 1328712 - DNA, 15 bp, Homo sapiens
cagagtcagtaacca

SEQ ID NO: 1328713 - DNA, 15 bp, Homo sapiens
gcagagtcagtaacc

SEQ ID NO: 1328714 - DNA, 15 bp, Homo sapiens
ggcagagtcagtaac

SEQ ID NO: 1328715 - DNA, 15 bp, Homo sapiens
tggcagagtcagtaa

SEQ ID NO: 1328716 - DNA, 15 bp, Homo sapiens
ttggcagagtcagta

SEQ ID NO: 1328717 - DNA, 15 bp, Homo sapiens
cttggcagagtcagt

SEQ ID NO: 1328718 - DNA, 15 bp, Homo sapiens
tcttggcagagtcag

SEQ ID NO: 1328719 - DNA, 15 bp, Homo sapiens
ctcttggcagagtca

SEQ ID NO: 1328720 - DNA, 15 bp, Homo sapiens
actcttggcagagtc

SEQ ID NO: 1328721 - DNA, 15 bp, Homo sapiens
tactcttggcagagt

SEQ ID NO: 1328722 - DNA, 15 bp, Homo sapiens
gtactcttggcagag

SEQ ID NO: 1328723 - DNA, 15 bp, Homo sapiens
tgtactcttggcaga

SEQ ID NO: 1328724 - DNA, 15 bp, Homo sapiens
ctgtactcttggcag

SEQ ID NO: 1328725 - DNA, 15 bp, Homo sapiens
tctgtactcttggca

SEQ ID NO: 1328726 - DNA, 15 bp, Homo sapiens
ttctgtactcttggc

SEQ ID NO: 1328727 - DNA, 15 bp, Homo sapiens
attctgtactcttgg

SEQ ID NO: 1328728 - DNA, 15 bp, Homo sapiens
cattctgtactcttg

SEQ ID NO: 1328729 - DNA, 15 bp, Homo sapiens
tcattctgtactctt

SEQ ID NO: 1328730 - DNA, 15 bp, Homo sapiens
ttcattctgtactct

SEQ ID NO: 1328731 - DNA, 15 bp, Homo sapiens
cttcattctgtactc

SEQ ID NO: 1328732 - DNA, 15 bp, Homo sapiens
ccttcattctgtact

SEQ ID NO: 1328733 - DNA, 15 bp, Homo sapiens
cccttcattctgtac

SEQ ID NO: 1328734 - DNA, 15 bp, Homo sapiens
gcccttcattctgta

SEQ ID NO: 1328735 - DNA, 15 bp, Homo sapiens
tgcccttcattctgt

SEQ ID NO: 1328736 - DNA, 15 bp, Homo sapiens
ctgcccttcattctg

SEQ ID NO: 1328737 - DNA, 15 bp, Homo sapiens
tctgcccttcattct

SEQ ID NO: 1328738 - DNA, 15 bp, Homo sapiens
ctctgcccttcattc

SEQ ID NO: 1328739 - DNA, 15 bp, Homo sapiens
tctctgcccttcatt

SEQ ID NO: 1328740 - DNA, 15 bp, Homo sapiens
ctctctgcccttcat

SEQ ID NO: 1328741 - DNA, 15 bp, Homo sapiens
actctctgcccttca

SEQ ID NO: 1328742 - DNA, 15 bp, Homo sapiens
tactctctgcccttc

SEQ ID NO: 1328743 - DNA, 15 bp, Homo sapiens
ttactctctgccctt

SEQ ID NO: 1328744 - DNA, 15 bp, Homo sapiens
cttactctctgccct

SEQ ID NO: 1328745 - DNA, 15 bp, Homo sapiens
ccttactctctgccc

SEQ ID NO: 1328746 - DNA, 15 bp, Homo sapiens
tccttactctctgcc

SEQ ID NO: 1328747 - DNA, 15 bp, Homo sapiens
gtccttactctctgc

SEQ ID NO: 1328748 - DNA, 15 bp, Homo sapiens
agtccttactctctg

SEQ ID NO: 1328749 - DNA, 15 bp, Homo sapiens
cagtccttactctct

SEQ ID NO: 1328750 - DNA, 15 bp, Homo sapiens
ccagtccttactctc

SEQ ID NO: 1328751 - DNA, 15 bp, Homo sapiens
tccagtccttactct

SEQ ID NO: 1328752 - DNA, 15 bp, Homo sapiens
ttccagtccttactc

SEQ ID NO: 1328753 - DNA, 15 bp, Homo sapiens
tttccagtccttact

SEQ ID NO: 1328754 - DNA, 15 bp, Homo sapiens
ttttccagtccttac

SEQ ID NO: 1328755 - DNA, 15 bp, Homo sapiens
gttttccagtcctta

SEQ ID NO: 1328756 - DNA, 15 bp, Homo sapiens
agttttccagtcctt

SEQ ID NO: 1328757 - DNA, 15 bp, Homo sapiens
cagttttccagtcct

SEQ ID NO: 1328758 - DNA, 15 bp, Homo sapiens
ccagttttccagtcc

SEQ ID NO: 1328759 - DNA, 15 bp, Homo sapiens
gccagttttccagtc

SEQ ID NO: 1328760 - DNA, 15 bp, Homo sapiens
tgccagttttccagt

SEQ ID NO: 1328761 - DNA, 15 bp, Homo sapiens
ctgccagttttccag

SEQ ID NO: 1328762 - DNA, 15 bp, Homo sapiens
cctgccagttttcca

SEQ ID NO: 1328763 - DNA, 15 bp, Homo sapiens
tcctgccagttttcc

SEQ ID NO: 1328764 - DNA, 15 bp, Homo sapiens
ttcctgccagttttc

SEQ ID NO: 1328765 - DNA, 15 bp, Homo sapiens
tttcctgccagtttt

SEQ ID NO: 1328766 - DNA, 15 bp, Homo sapiens
gtttcctgccagttt

SEQ ID NO: 1328767 - DNA, 15 bp, Homo sapiens
tgtttcctgccagtt

SEQ ID NO: 1328768 - DNA, 15 bp, Homo sapiens
gtgtttcctgccagt

SEQ ID NO: 1328769 - DNA, 15 bp, Homo sapiens
tgtgtttcctgccag

SEQ ID NO: 1328770 - DNA, 15 bp, Homo sapiens
gtgtgtttcctgcca

SEQ ID NO: 1328771 - DNA, 15 bp, Homo sapiens
agtgtgtttcctgcc

SEQ ID NO: 1328772 - DNA, 15 bp, Homo sapiens
cagtgtgtttcctgc

SEQ ID NO: 1328773 - DNA, 15 bp, Homo sapiens
tcagtgtgtttcctg

SEQ ID NO: 1328774 - DNA, 15 bp, Homo sapiens
gtcagtgtgtttcct

SEQ ID NO: 1328775 - DNA, 15 bp, Homo sapiens
tgtcagtgtgtttcc

SEQ ID NO: 1328776 - DNA, 15 bp, Homo sapiens
ctgtcagtgtgtttc

SEQ ID NO: 1328777 - DNA, 15 bp, Homo sapiens
gctgtcagtgtgttt

SEQ ID NO: 1328778 - DNA, 15 bp, Homo sapiens
ggctgtcagtgtgtt

SEQ ID NO: 1328779 - DNA, 15 bp, Homo sapiens
cggctgtcagtgtgt

SEQ ID NO: 1328780 - DNA, 15 bp, Homo sapiens
acggctgtcagtgtg

SEQ ID NO: 1328781 - DNA, 15 bp, Homo sapiens
gacggctgtcagtgt

SEQ ID NO: 1328782 - DNA, 15 bp, Homo sapiens
tgacggctgtcagtg

SEQ ID NO: 1328783 - DNA, 15 bp, Homo sapiens
atgacggctgtcagt

SEQ ID NO: 1328784 - DNA, 15 bp, Homo sapiens
gatgacggctgtcag

SEQ ID NO: 1328785 - DNA, 15 bp, Homo sapiens
ggatgacggctgtca

SEQ ID NO: 1328786 - DNA, 15 bp, Homo sapiens
gggatgacggctgtc

SEQ ID NO: 1328787 - DNA, 15 bp, Homo sapiens
agggatgacggctgt

SEQ ID NO: 1328788 - DNA, 15 bp, Homo sapiens
cagggatgacggctg

SEQ ID NO: 1328789 - DNA, 15 bp, Homo sapiens
ccagggatgacggct

SEQ ID NO: 1328790 - DNA, 15 bp, Homo sapiens
tccagggatgacggc

SEQ ID NO: 1328791 - DNA, 15 bp, Homo sapiens
ctccagggatgacgg

SEQ ID NO: 1328792 - DNA, 15 bp, Homo sapiens
cctccagggatgacg

SEQ ID NO: 1328793 - DNA, 15 bp, Homo sapiens
tcctccagggatgac

SEQ ID NO: 1328794 - DNA, 15 bp, Homo sapiens
ttcctccagggatga

SEQ ID NO: 1328795 - DNA, 15 bp, Homo sapiens
tttcctccagggatg

SEQ ID NO: 1328796 - DNA, 15 bp, Homo sapiens
gtttcctccagggat

SEQ ID NO: 1328797 - DNA, 15 bp, Homo sapiens
agtttcctccaggga

SEQ ID NO: 1328798 - DNA, 15 bp, Homo sapiens
cagtttcctccaggg

SEQ ID NO: 1328799 - DNA, 15 bp, Homo sapiens
gcagtttcctccagg

SEQ ID NO: 1328800 - DNA, 15 bp, Homo sapiens
agcagtttcctccag

SEQ ID NO: 1328801 - DNA, 15 bp, Homo sapiens
gagcagtttcctcca

SEQ ID NO: 1328802 - DNA, 15 bp, Homo sapiens
tgagcagtttcctcc

SEQ ID NO: 1328803 - DNA, 15 bp, Homo sapiens
ttgagcagtttcctc

SEQ ID NO: 1328804 - DNA, 15 bp, Homo sapiens
attgagcagtttcct

SEQ ID NO: 1328805 - DNA, 15 bp, Homo sapiens
tattgagcagtttcc

SEQ ID NO: 1328806 - DNA, 15 bp, Homo sapiens
ttattgagcagtttc

SEQ ID NO: 1328807 - DNA, 15 bp, Homo sapiens
tttattgagcagttt

SEQ ID NO: 1328808 - DNA, 15 bp, Homo sapiens
ttttattgagcagtt

SEQ ID NO: 1328809 - DNA, 15 bp, Homo sapiens
gttttattgagcagt

SEQ ID NO: 1328810 - DNA, 15 bp, Homo sapiens
cgttttattgagcag

SEQ ID NO: 1328811 - DNA, 15 bp, Homo sapiens
ccgttttattgagca

SEQ ID NO: 1328812 - DNA, 15 bp, Homo sapiens
gccgttttattgagc

SEQ ID NO: 1328813 - DNA, 15 bp, Homo sapiens
agccgttttattgag

SEQ ID NO: 1328814 - DNA, 15 bp, Homo sapiens
gagccgttttattga

SEQ ID NO: 1328815 - DNA, 15 bp, Homo sapiens
ggagccgttttattg

SEQ ID NO: 1328816 - DNA, 15 bp, Homo sapiens
tggagccgttttatt

SEQ ID NO: 1328817 - DNA, 15 bp, Homo sapiens
atggagccgttttat

SEQ ID NO: 1328818 - DNA, 15 bp, Homo sapiens
tatggagccgtttta

SEQ ID NO: 1328819 - DNA, 15 bp, Homo sapiens
atatggagccgtttt

SEQ ID NO: 1328820 - DNA, 15 bp, Homo sapiens
aatatggagccgttt

SEQ ID NO: 1328821 - DNA, 15 bp, Homo sapiens
aaatatggagccgtt

SEQ ID NO: 1328822 - DNA, 15 bp, Homo sapiens
taaatatggagccgt

SEQ ID NO: 1328823 - DNA, 15 bp, Homo sapiens
gtaaatatggagccg

SEQ ID NO: 1328824 - DNA, 15 bp, Homo sapiens
agtaaatatggagcc

SEQ ID NO: 1328825 - DNA, 15 bp, Homo sapiens
aagtaaatatggagc

SEQ ID NO: 1328826 - DNA, 15 bp, Homo sapiens
gaagtaaatatggag

SEQ ID NO: 1328827 - DNA, 15 bp, Homo sapiens
agaagtaaatatgga

SEQ ID NO: 1328828 - DNA, 15 bp, Homo sapiens
gagaagtaaatatgg

SEQ ID NO: 1328829 - DNA, 15 bp, Homo sapiens
agagaagtaaatatg

SEQ ID NO: 1328830 - DNA, 15 bp, Homo sapiens
cagagaagtaaatat

SEQ ID NO: 1328831 - DNA, 15 bp, Homo sapiens
ccagagaagtaaata

SEQ ID NO: 1328832 - DNA, 15 bp, Homo sapiens
accagagaagtaaat

SEQ ID NO: 1328833 - DNA, 15 bp, Homo sapiens
gaccagagaagtaaa

SEQ ID NO: 1328834 - DNA, 15 bp, Homo sapiens
tgaccagagaagtaa

SEQ ID NO: 1328835 - DNA, 15 bp, Homo sapiens
gtgaccagagaagta

SEQ ID NO: 1328836 - DNA, 15 bp, Homo sapiens
cgtgaccagagaagt

SEQ ID NO: 1328837 - DNA, 15 bp, Homo sapiens
ccgtgaccagagaag

SEQ ID NO: 1328838 - DNA, 15 bp, Homo sapiens
accgtgaccagagaa

SEQ ID NO: 1328839 - DNA, 15 bp, Homo sapiens
aaccgtgaccagaga

SEQ ID NO: 1328840 - DNA, 15 bp, Homo sapiens
gaaccgtgaccagag

SEQ ID NO: 1328841 - DNA, 15 bp, Homo sapiens
tgaaccgtgaccaga

SEQ ID NO: 1328842 - DNA, 15 bp, Homo sapiens
atgaaccgtgaccag

SEQ ID NO: 1328843 - DNA, 15 bp, Homo sapiens
tatgaaccgtgacca

SEQ ID NO: 1328844 - DNA, 15 bp, Homo sapiens
gtatgaaccgtgacc

SEQ ID NO: 1328845 - DNA, 15 bp, Homo sapiens
agtatgaaccgtgac

SEQ ID NO: 1328846 - DNA, 15 bp, Homo sapiens
gagtatgaaccgtga

SEQ ID NO: 1328847 - DNA, 15 bp, Homo sapiens
ggagtatgaaccgtg

SEQ ID NO: 1328848 - DNA, 15 bp, Homo sapiens
tggagtatgaaccgt

SEQ ID NO: 1328849 - DNA, 15 bp, Homo sapiens
gtggagtatgaaccg

SEQ ID NO: 1328850 - DNA, 15 bp, Homo sapiens
cgtggagtatgaacc

SEQ ID NO: 1328851 - DNA, 15 bp, Homo sapiens
tcgtggagtatgaac

SEQ ID NO: 1328852 - DNA, 15 bp, Homo sapiens
atcgtggagtatgaa

SEQ ID NO: 1328853 - DNA, 15 bp, Homo sapiens
aatcgtggagtatga

SEQ ID NO: 1328854 - DNA, 15 bp, Homo sapiens
aaatcgtggagtatg

SEQ ID NO: 1328855 - DNA, 15 bp, Homo sapiens
aaaatcgtggagtat

SEQ ID NO: 1328856 - DNA, 15 bp, Homo sapiens
taaaatcgtggagta

SEQ ID NO: 1328857 - DNA, 15 bp, Homo sapiens
ttaaaatcgtggagt

SEQ ID NO: 1328858 - DNA, 15 bp, Homo sapiens
gttaaaatcgtggag

SEQ ID NO: 1328859 - DNA, 15 bp, Homo sapiens
tgttaaaatcgtgga

SEQ ID NO: 1328860 - DNA, 15 bp, Homo sapiens
ttgttaaaatcgtgg

SEQ ID NO: 1328861 - DNA, 15 bp, Homo sapiens
tttgttaaaatcgtg

SEQ ID NO: 1328862 - DNA, 15 bp, Homo sapiens
ctttgttaaaatcgt

SEQ ID NO: 1328863 - DNA, 15 bp, Homo sapiens
cctttgttaaaatcg

SEQ ID NO: 1328864 - DNA, 15 bp, Homo sapiens
tcctttgttaaaatc

SEQ ID NO: 1328865 - DNA, 15 bp, Homo sapiens
ctcctttgttaaaat

SEQ ID NO: 1328866 - DNA, 15 bp, Homo sapiens
actcctttgttaaaa

SEQ ID NO: 1328867 - DNA, 15 bp, Homo sapiens
gactcctttgttaaa

SEQ ID NO: 1328868 - DNA, 15 bp, Homo sapiens
cgactcctttgttaa

SEQ ID NO: 1328869 - DNA, 15 bp, Homo sapiens
tcgactcctttgtta

SEQ ID NO: 1328870 - DNA, 15 bp, Homo sapiens
ctcgactcctttgtt

SEQ ID NO: 1328871 - DNA, 15 bp, Homo sapiens
cctcgactcctttgt

SEQ ID NO: 1328872 - DNA, 15 bp, Homo sapiens
tcctcgactcctttg

SEQ ID NO: 1328873 - DNA, 15 bp, Homo sapiens
ttcctcgactccttt

SEQ ID NO: 1328874 - DNA, 15 bp, Homo sapiens
cttcctcgactcctt

SEQ ID NO: 1328875 - DNA, 15 bp, Homo sapiens
gcttcctcgactcct

SEQ ID NO: 1328876 - DNA, 15 bp, Homo sapiens
agcttcctcgactcc

SEQ ID NO: 1328877 - DNA, 15 bp, Homo sapiens
tagcttcctcgactc

SEQ ID NO: 1328878 - DNA, 15 bp, Homo sapiens
ctagcttcctcgact

SEQ ID NO: 1328879 - DNA, 15 bp, Homo sapiens
tctagcttcctcgac

SEQ ID NO: 1328880 - DNA, 15 bp, Homo sapiens
atctagcttcctcga

SEQ ID NO: 1328881 - DNA, 15 bp, Homo sapiens
tatctagcttcctcg

SEQ ID NO: 1328882 - DNA, 15 bp, Homo sapiens
gtatctagcttcctc

SEQ ID NO: 1328883 - DNA, 15 bp, Homo sapiens
agtatctagcttcct

SEQ ID NO: 1328884 - DNA, 15 bp, Homo sapiens
cagtatctagcttcc

SEQ ID NO: 1328885 - DNA, 15 bp, Homo sapiens
acagtatctagcttc

SEQ ID NO: 1328886 - DNA, 15 bp, Homo sapiens
tacagtatctagctt

SEQ ID NO: 1328887 - DNA, 15 bp, Homo sapiens
ttacagtatctagct

SEQ ID NO: 1328888 - DNA, 15 bp, Homo sapiens
cttacagtatctagc

SEQ ID NO: 1328889 - DNA, 15 bp, Homo sapiens
acttacagtatctag

SEQ ID NO: 1328890 - DNA, 15 bp, Homo sapiens
cacttacagtatcta

SEQ ID NO: 1328891 - DNA, 15 bp, Homo sapiens
ccacttacagtatct

SEQ ID NO: 1328892 - DNA, 15 bp, Homo sapiens
tccacttacagtatc

SEQ ID NO: 1328893 - DNA, 15 bp, Homo sapiens
ttccacttacagtat

SEQ ID NO: 1328894 - DNA, 15 bp, Homo sapiens
gttccacttacagta

SEQ ID NO: 1328895 - DNA, 15 bp, Homo sapiens
cgttccacttacagt

SEQ ID NO: 1328896 - DNA, 15 bp, Homo sapiens
ccgttccacttacag

SEQ ID NO: 1328897 - DNA, 15 bp, Homo sapiens
accgttccacttaca

SEQ ID NO: 1328898 - DNA, 15 bp, Homo sapiens
caccgttccacttac

SEQ ID NO: 1328899 - DNA, 15 bp, Homo sapiens
acaccgttccactta

SEQ ID NO: 1328900 - DNA, 15 bp, Homo sapiens
cacaccgttccactt

SEQ ID NO: 1328901 - DNA, 15 bp, Homo sapiens
acacaccgttccact

SEQ ID NO: 1328902 - DNA, 15 bp, Homo sapiens
gacacaccgttccac

SEQ ID NO: 1328903 - DNA, 15 bp, Homo sapiens
agacacaccgttcca

SEQ ID NO: 1328904 - DNA, 15 bp, Homo sapiens
gagacacaccgttcc

SEQ ID NO: 1328905 - DNA, 15 bp, Homo sapiens
agagacacaccgttc

SEQ ID NO: 1328906 - DNA, 15 bp, Homo sapiens
cagagacacaccgtt

SEQ ID NO: 1328907 - DNA, 15 bp, Homo sapiens
ccagagacacaccgt

SEQ ID NO: 1328908 - DNA, 15 bp, Homo sapiens
tccagagacacaccg

SEQ ID NO: 1328909 - DNA, 15 bp, Homo sapiens
ctccagagacacacc

SEQ ID NO: 1328910 - DNA, 15 bp, Homo sapiens
cctccagagacacac

SEQ ID NO: 1328911 - DNA, 15 bp, Homo sapiens
acctccagagacaca

SEQ ID NO: 1328912 - DNA, 15 bp, Homo sapiens
tacctccagagacac

SEQ ID NO: 1328913 - DNA, 15 bp, Homo sapiens
ttacctccagagaca

SEQ ID NO: 1328914 - DNA, 15 bp, Homo sapiens
cttacctccagagac

SEQ ID NO: 1328915 - DNA, 15 bp, Homo sapiens
gcttacctccagaga

SEQ ID NO: 1328916 - DNA, 15 bp, Homo sapiens
tgcttacctccagag

SEQ ID NO: 1328917 - DNA, 15 bp, Homo sapiens
ctgcttacctccaga

SEQ ID NO: 1328918 - DNA, 15 bp, Homo sapiens
cctgcttacctccag

SEQ ID NO: 1328919 - DNA, 15 bp, Homo sapiens
gcctgcttacctcca

SEQ ID NO: 1328920 - DNA, 15 bp, Homo sapiens
agcctgcttacctcc

SEQ ID NO: 1328921 - DNA, 15 bp, Homo sapiens
aagcctgcttacctc

SEQ ID NO: 1328922 - DNA, 15 bp, Homo sapiens
caagcctgcttacct

SEQ ID NO: 1328923 - DNA, 15 bp, Homo sapiens
gcaagcctgcttacc

SEQ ID NO: 1328924 - DNA, 15 bp, Homo sapiens
agcaagcctgcttac

SEQ ID NO: 1328925 - DNA, 15 bp, Homo sapiens
cagcaagcctgctta

SEQ ID NO: 1328926 - DNA, 15 bp, Homo sapiens
tcagcaagcctgctt

SEQ ID NO: 1328927 - DNA, 15 bp, Homo sapiens
atcagcaagcctgct

SEQ ID NO: 1328928 - DNA, 15 bp, Homo sapiens
aatcagcaagcctgc

SEQ ID NO: 1328929 - DNA, 15 bp, Homo sapiens
aaatcagcaagcctg

SEQ ID NO: 1328930 - DNA, 15 bp, Homo sapiens
gaaatcagcaagcct

SEQ ID NO: 1328931 - DNA, 15 bp, Homo sapiens
agaaatcagcaagcc

SEQ ID NO: 1328932 - DNA, 15 bp, Homo sapiens
aagaaatcagcaagc

SEQ ID NO: 1328933 - DNA, 15 bp, Homo sapiens
caagaaatcagcaag

SEQ ID NO: 1328934 - DNA, 15 bp, Homo sapiens
acaagaaatcagcaa

SEQ ID NO: 1328935 - DNA, 15 bp, Homo sapiens
aacaagaaatcagca

SEQ ID NO: 1328936 - DNA, 15 bp, Homo sapiens
aaacaagaaatcagc

SEQ ID NO: 1328937 - DNA, 15 bp, Homo sapiens
aaaacaagaaatcag

SEQ ID NO: 1328938 - DNA, 15 bp, Homo sapiens
taaaacaagaaatca

SEQ ID NO: 1328939 - DNA, 15 bp, Homo sapiens
ataaaacaagaaatc

SEQ ID NO: 1328940 - DNA, 15 bp, Homo sapiens
tataaaacaagaaat

SEQ ID NO: 1328941 - DNA, 15 bp, Homo sapiens
ttataaaacaagaaa

SEQ ID NO: 1328942 - DNA, 15 bp, Homo sapiens
attataaaacaagaa

SEQ ID NO: 1328943 - DNA, 15 bp, Homo sapiens
aattataaaacaaga

SEQ ID NO: 1328944 - DNA, 15 bp, Homo sapiens
gaattataaaacaag

SEQ ID NO: 1328945 - DNA, 15 bp, Homo sapiens
agaattataaaacaa

SEQ ID NO: 1328946 - DNA, 15 bp, Homo sapiens
aagaattataaaaca

SEQ ID NO: 1328947 - DNA, 15 bp, Homo sapiens
aaagaattataaaac

SEQ ID NO: 1328948 - DNA, 15 bp, Homo sapiens
aaaagaattataaaa

SEQ ID NO: 1328949 - DNA, 15 bp, Homo sapiens
aaaaagaattataaa

SEQ ID NO: 1328950 - DNA, 15 bp, Homo sapiens
aaaaaagaattataa

SEQ ID NO: 1328951 - DNA, 15 bp, Homo sapiens
taaaaaagaattata

SEQ ID NO: 1328952 - DNA, 15 bp, Homo sapiens
ttaaaaaagaattat

SEQ ID NO: 1328953 - DNA, 15 bp, Homo sapiens
attaaaaaagaatta

SEQ ID NO: 1328954 - DNA, 15 bp, Homo sapiens
aattaaaaaagaatt

SEQ ID NO: 1328955 - DNA, 15 bp, Homo sapiens
taattaaaaaagaat

SEQ ID NO: 1328956 - DNA, 15 bp, Homo sapiens
gtaattaaaaaagaa

SEQ ID NO: 1328957 - DNA, 15 bp, Homo sapiens
tgtaattaaaaaaga

SEQ ID NO: 1328958 - DNA, 15 bp, Homo sapiens
ttgtaattaaaaaag

SEQ ID NO: 1328959 - DNA, 15 bp, Homo sapiens
attgtaattaaaaaa

SEQ ID NO: 1328960 - DNA, 15 bp, Homo sapiens
cattgtaattaaaaa

SEQ ID NO: 1328961 - DNA, 15 bp, Homo sapiens
acattgtaattaaaa

SEQ ID NO: 1328962 - DNA, 15 bp, Homo sapiens
tacattgtaattaaa

SEQ ID NO: 1328963 - DNA, 15 bp, Homo sapiens
ttacattgtaattaa

SEQ ID NO: 1328964 - DNA, 15 bp, Homo sapiens
gttacattgtaatta

SEQ ID NO: 1328965 - DNA, 15 bp, Homo sapiens
agttacattgtaatt

SEQ ID NO: 1328966 - DNA, 15 bp, Homo sapiens
tagttacattgtaat

SEQ ID NO: 1328967 - DNA, 15 bp, Homo sapiens
gtagttacattgtaa

SEQ ID NO: 1328968 - DNA, 15 bp, Homo sapiens
agtagttacattgta

SEQ ID NO: 1328969 - DNA, 15 bp, Homo sapiens
tagtagttacattgt

SEQ ID NO: 1328970 - DNA, 15 bp, Homo sapiens
ttagtagttacattg

SEQ ID NO: 1328971 - DNA, 15 bp, Homo sapiens
cttagtagttacatt

SEQ ID NO: 1328972 - DNA, 15 bp, Homo sapiens
tcttagtagttacat

SEQ ID NO: 1328973 - DNA, 15 bp, Homo sapiens
ctcttagtagttaca

SEQ ID NO: 1328974 - DNA, 15 bp, Homo sapiens
gctcttagtagttac

SEQ ID NO: 1328975 - DNA, 15 bp, Homo sapiens
agctcttagtagtta

SEQ ID NO: 1328976 - DNA, 15 bp, Homo sapiens
aagctcttagtagtt

SEQ ID NO: 1328977 - DNA, 15 bp, Homo sapiens
gaagctcttagtagt

SEQ ID NO: 1328978 - DNA, 15 bp, Homo sapiens
tgaagctcttagtag

SEQ ID NO: 1328979 - DNA, 15 bp, Homo sapiens
ctgaagctcttagta

SEQ ID NO: 1328980 - DNA, 15 bp, Homo sapiens
actgaagctcttagt

SEQ ID NO: 1328981 - DNA, 15 bp, Homo sapiens
aactgaagctcttag

SEQ ID NO: 1328982 - DNA, 15 bp, Homo sapiens
gaactgaagctctta

SEQ ID NO: 1328983 - DNA, 15 bp, Homo sapiens
ggaactgaagctctt

SEQ ID NO: 1328984 - DNA, 15 bp, Homo sapiens
gggaactgaagctct

SEQ ID NO: 1328985 - DNA, 15 bp, Homo sapiens
gtgggaactgaagct

SEQ ID NO: 1328986 - DNA, 15 bp, Homo sapiens
agtgggaactgaagc

SEQ ID NO: 1328987 - DNA, 15 bp, Homo sapiens
cagtgggaactgaag

SEQ ID NO: 1328988 - DNA, 15 bp, Homo sapiens
ccagtgggaactgaa

SEQ ID NO: 1328989 - DNA, 15 bp, Homo sapiens
tccagtgggaactga

SEQ ID NO: 1328990 - DNA, 15 bp, Homo sapiens
ctccagtgggaactg

SEQ ID NO: 1328991 - DNA, 15 bp, Homo sapiens
actccagtgggaact

SEQ ID NO: 1328992 - DNA, 15 bp, Homo sapiens
cactccagtgggaac

SEQ ID NO: 1328993 - DNA, 15 bp, Homo sapiens
ccactccagtgggaa

SEQ ID NO: 1328994 - DNA, 15 bp, Homo sapiens
accactccagtggga

SEQ ID NO: 1328995 - DNA, 15 bp, Homo sapiens
caccactccagtggg

SEQ ID NO: 1328996 - DNA, 15 bp, Homo sapiens
gcaccactccagtgg

SEQ ID NO: 1328997 - DNA, 15 bp, Homo sapiens
tgcaccactccagtg

SEQ ID NO: 1328998 - DNA, 15 bp, Homo sapiens
gtgcaccactccagt

SEQ ID NO: 1328999 - DNA, 15 bp, Homo sapiens
tgtgcaccactccag

SEQ ID NO: 1329000 - DNA, 15 bp, Homo sapiens
gtgtgcaccactcca

SEQ ID NO: 1329001 - DNA, 15 bp, Homo sapiens
tgtgtgcaccactcc

SEQ ID NO: 1329002 - DNA, 15 bp, Homo sapiens
atgtgtgcaccactc

SEQ ID NO: 1329003 - DNA, 15 bp, Homo sapiens
gatgtgtgcaccact

SEQ ID NO: 1329004 - DNA, 15 bp, Homo sapiens
agatgtgtgcaccac

SEQ ID NO: 1329005 - DNA, 15 bp, Homo sapiens
gagatgtgtgcacca

SEQ ID NO: 1329006 - DNA, 15 bp, Homo sapiens
tgagatgtgtgcacc

SEQ ID NO: 1329007 - DNA, 15 bp, Homo sapiens
atgagatgtgtgcac

SEQ ID NO: 1329008 - DNA, 15 bp, Homo sapiens
aatgagatgtgtgca

SEQ ID NO: 1329009 - DNA, 15 bp, Homo sapiens
taatgagatgtgtgc

SEQ ID NO: 1329010 - DNA, 15 bp, Homo sapiens
gtaatgagatgtgtg

SEQ ID NO: 1329011 - DNA, 15 bp, Homo sapiens
agtaatgagatgtgt

SEQ ID NO: 1329012 - DNA, 15 bp, Homo sapiens
tagtaatgagatgtg

SEQ ID NO: 1329013 - DNA, 15 bp, Homo sapiens
gtagtaatgagatgt

SEQ ID NO: 1329014 - DNA, 15 bp, Homo sapiens
agtagtaatgagatg

SEQ ID NO: 1329015 - DNA, 15 bp, Homo sapiens
tagtagtaatgagat

SEQ ID NO: 1329016 - DNA, 15 bp, Homo sapiens
ttagtagtaatgaga

SEQ ID NO: 1329017 - DNA, 15 bp, Homo sapiens
tttagtagtaatgag

SEQ ID NO: 1329018 - DNA, 15 bp, Homo sapiens
ttttagtagtaatga

SEQ ID NO: 1329019 - DNA, 15 bp, Homo sapiens
gttttagtagtaatg

SEQ ID NO: 1329020 - DNA, 15 bp, Homo sapiens
ggttttagtagtaat

SEQ ID NO: 1329021 - DNA, 15 bp, Homo sapiens
tggttttagtagtaa

SEQ ID NO: 1329022 - DNA, 15 bp, Homo sapiens
gtggttttagtagta

SEQ ID NO: 1329023 - DNA, 15 bp, Homo sapiens
tgtggttttagtagt

SEQ ID NO: 1329024 - DNA, 15 bp, Homo sapiens
ctgtggttttagtag

SEQ ID NO: 1329025 - DNA, 15 bp, Homo sapiens
cctgtggttttagta

SEQ ID NO: 1329026 - DNA, 15 bp, Homo sapiens
tcctgtggttttagt

SEQ ID NO: 1329027 - DNA, 15 bp, Homo sapiens
ttcctgtggttttag

SEQ ID NO: 1329028 - DNA, 15 bp, Homo sapiens
attcctgtggtttta

SEQ ID NO: 1329029 - DNA, 15 bp, Homo sapiens
cattcctgtggtttt

SEQ ID NO: 1329030 - DNA, 15 bp, Homo sapiens
acattcctgtggttt

SEQ ID NO: 1329031 - DNA, 15 bp, Homo sapiens
aacattcctgtggtt

SEQ ID NO: 1329032 - DNA, 15 bp, Homo sapiens
gaacattcctgtggt

SEQ ID NO: 1329033 - DNA, 15 bp, Homo sapiens
ggaacattcctgtgg

SEQ ID NO: 1329034 - DNA, 15 bp, Homo sapiens
tggaacattcctgtg

SEQ ID NO: 1329035 - DNA, 15 bp, Homo sapiens
ctggaacattcctgt

SEQ ID NO: 1329036 - DNA, 15 bp, Homo sapiens
cctggaacattcctg

SEQ ID NO: 1329037 - DNA, 15 bp, Homo sapiens
ccctggaacattcct

SEQ ID NO: 1329038 - DNA, 15 bp, Homo sapiens
tccctggaacattcc

SEQ ID NO: 1329039 - DNA, 15 bp, Homo sapiens
ttccctggaacattc

SEQ ID NO: 1329040 - DNA, 15 bp, Homo sapiens
tttccctggaacatt

SEQ ID NO: 1329041 - DNA, 15 bp, Homo sapiens
gtttccctggaacat

SEQ ID NO: 1329042 - DNA, 15 bp, Homo sapiens
tgtttccctggaaca

SEQ ID NO: 1329043 - DNA, 15 bp, Homo sapiens
ctgtttccctggaac

SEQ ID NO: 1329044 - DNA, 15 bp, Homo sapiens
tctgtttccctggaa

SEQ ID NO: 1329045 - DNA, 15 bp, Homo sapiens
gtctgtttccctgga

SEQ ID NO: 1329046 - DNA, 15 bp, Homo sapiens
agtctgtttccctgg

SEQ ID NO: 1329047 - DNA, 15 bp, Homo sapiens
tagtctgtttccctg

SEQ ID NO: 1329048 - DNA, 15 bp, Homo sapiens
atagtctgtttccct

SEQ ID NO: 1329049 - DNA, 15 bp, Homo sapiens
gatagtctgtttccc

SEQ ID NO: 1329050 - DNA, 15 bp, Homo sapiens
tgatagtctgtttcc

SEQ ID NO: 1329051 - DNA, 15 bp, Homo sapiens
atgatagtctgtttc

SEQ ID NO: 1329052 - DNA, 15 bp, Homo sapiens
gatgatagtctgttt

SEQ ID NO: 1329053 - DNA, 15 bp, Homo sapiens
tgatgatagtctgtt

SEQ ID NO: 1329054 - DNA, 15 bp, Homo sapiens
gtgatgatagtctgt

SEQ ID NO: 1329055 - DNA, 15 bp, Homo sapiens
agtgatgatagtctg

SEQ ID NO: 1329056 - DNA, 15 bp, Homo sapiens
cagtgatgatagtct

SEQ ID NO: 1329057 - DNA, 15 bp, Homo sapiens
tcagtgatgatagtc

SEQ ID NO: 1329058 - DNA, 15 bp, Homo sapiens
ctcagtgatgatagt

SEQ ID NO: 1329059 - DNA, 15 bp, Homo sapiens
gctcagtgatgatag

SEQ ID NO: 1329060 - DNA, 15 bp, Homo sapiens
cgctcagtgatgata

SEQ ID NO: 1329061 - DNA, 15 bp, Homo sapiens
tcgctcagtgatgat

SEQ ID NO: 1329062 - DNA, 15 bp, Homo sapiens
ctcgctcagtgatga

SEQ ID NO: 1329063 - DNA, 15 bp, Homo sapiens
cctcgctcagtgatg

SEQ ID NO: 1329064 - DNA, 15 bp, Homo sapiens
acctcgctcagtgat

SEQ ID NO: 1329065 - DNA, 15 bp, Homo sapiens
cacctcgctcagtga

SEQ ID NO: 1329066 - DNA, 15 bp, Homo sapiens
ccacctcgctcagtg

SEQ ID NO: 1329067 - DNA, 15 bp, Homo sapiens
tccacctcgctcagt

SEQ ID NO: 1329068 - DNA, 15 bp, Homo sapiens
ttccacctcgctcag

SEQ ID NO: 1329069 - DNA, 15 bp, Homo sapiens
attccacctcgctca

SEQ ID NO: 1329070 - DNA, 15 bp, Homo sapiens
gattccacctcgctc

SEQ ID NO: 1329071 - DNA, 15 bp, Homo sapiens
ggattccacctcgct

SEQ ID NO: 1329072 - DNA, 15 bp, Homo sapiens
tggattccacctcgc

SEQ ID NO: 1329073 - DNA, 15 bp, Homo sapiens
ctggattccacctcg

SEQ ID NO: 1329074 - DNA, 15 bp, Homo sapiens
gctggattccacctc

SEQ ID NO: 1329075 - DNA, 15 bp, Homo sapiens
ggctggattccacct

SEQ ID NO: 1329076 - DNA, 15 bp, Homo sapiens
tggctggattccacc

SEQ ID NO: 1329077 - DNA, 15 bp, Homo sapiens
ttggctggattccac

SEQ ID NO: 1329078 - DNA, 15 bp, Homo sapiens
tttggctggattcca

SEQ ID NO: 1329079 - DNA, 15 bp, Homo sapiens
ttttggctggattcc

SEQ ID NO: 1329080 - DNA, 15 bp, Homo sapiens
gttttggctggattc

SEQ ID NO: 1329081 - DNA, 15 bp, Homo sapiens
ggttttggctggatt

SEQ ID NO: 1329082 - DNA, 15 bp, Homo sapiens
gggttttggctggat

SEQ ID NO: 1329083 - DNA, 15 bp, Homo sapiens
ggggttttggctgga

SEQ ID NO: 1329084 - DNA, 15 bp, Homo sapiens
tggggttttggctgg

SEQ ID NO: 1329085 - DNA, 15 bp, Homo sapiens
ctggggttttggctg

SEQ ID NO: 1329086 - DNA, 15 bp, Homo sapiens
cctggggttttggct

SEQ ID NO: 1329087 - DNA, 15 bp, Homo sapiens
gcctggggttttggc

SEQ ID NO: 1329088 - DNA, 15 bp, Homo sapiens
agcctggggttttgg

SEQ ID NO: 1329089 - DNA, 15 bp, Homo sapiens
tagcctggggttttg

SEQ ID NO: 1329090 - DNA, 15 bp, Homo sapiens
ttagcctggggtttt

SEQ ID NO: 1329091 - DNA, 15 bp, Homo sapiens
gttagcctggggttt

SEQ ID NO: 1329092 - DNA, 15 bp, Homo sapiens
tgttagcctggggtt

SEQ ID NO: 1329093 - DNA, 15 bp, Homo sapiens
atgttagcctggggt

SEQ ID NO: 1329094 - DNA, 15 bp, Homo sapiens
gatgttagcctgggg

SEQ ID NO: 1329095 - DNA, 15 bp, Homo sapiens
ggatgttagcctggg

SEQ ID NO: 1329096 - DNA, 15 bp, Homo sapiens
tggatgttagcctgg

SEQ ID NO: 1329097 - DNA, 15 bp, Homo sapiens
ctggatgttagcctg

SEQ ID NO: 1329098 - DNA, 15 bp, Homo sapiens
tctggatgttagcct

SEQ ID NO: 1329099 - DNA, 15 bp, Homo sapiens
atctggatgttagcc

SEQ ID NO: 1329100 - DNA, 15 bp, Homo sapiens
catctggatgttagc

SEQ ID NO: 1329101 - DNA, 15 bp, Homo sapiens
gcatctggatgttag

SEQ ID NO: 1329102 - DNA, 15 bp, Homo sapiens
ggcatctggatgtta

SEQ ID NO: 1329103 - DNA, 15 bp, Homo sapiens
aggcatctggatgtt

SEQ ID NO: 1329104 - DNA, 15 bp, Homo sapiens
caggcatctggatgt

SEQ ID NO: 1329105 - DNA, 15 bp, Homo sapiens
gcaggcatctggatg

SEQ ID NO: 1329106 - DNA, 15 bp, Homo sapiens
tgcaggcatctggat

SEQ ID NO: 1329107 - DNA, 15 bp, Homo sapiens
ctgcaggcatctgga

SEQ ID NO: 1329108 - DNA, 15 bp, Homo sapiens
tctgcaggcatctgg

SEQ ID NO: 1329109 - DNA, 15 bp, Homo sapiens
atctgcaggcatctg

SEQ ID NO: 1329110 - DNA, 15 bp, Homo sapiens
gatctgcaggcatct

SEQ ID NO: 1329111 - DNA, 15 bp, Homo sapiens
tgatctgcaggcatc

SEQ ID NO: 1329112 - DNA, 15 bp, Homo sapiens
ctgatctgcaggcat

SEQ ID NO: 1329113 - DNA, 15 bp, Homo sapiens
gctgatctgcaggca

SEQ ID NO: 1329114 - DNA, 15 bp, Homo sapiens
agctgatctgcaggc

SEQ ID NO: 1329115 - DNA, 15 bp, Homo sapiens
tagctgatctgcagg

SEQ ID NO: 1329116 - DNA, 15 bp, Homo sapiens
ttagctgatctgcag

SEQ ID NO: 1329117 - DNA, 15 bp, Homo sapiens
tttagctgatctgca

SEQ ID NO: 1329118 - DNA, 15 bp, Homo sapiens
ttttagctgatctgc

SEQ ID NO: 1329119 - DNA, 15 bp, Homo sapiens
attttagctgatctg

SEQ ID NO: 1329120 - DNA, 15 bp, Homo sapiens
gattttagctgatct

SEQ ID NO: 1329121 - DNA, 15 bp, Homo sapiens
ggattttagctgatc

SEQ ID NO: 1329122 - DNA, 15 bp, Homo sapiens
aggattttagctgat

SEQ ID NO: 1329123 - DNA, 15 bp, Homo sapiens
aaggattttagctga

SEQ ID NO: 1329124 - DNA, 15 bp, Homo sapiens
aaaggattttagctg

SEQ ID NO: 1329125 - DNA, 15 bp, Homo sapiens
aaaaggattttagct

SEQ ID NO: 1329126 - DNA, 15 bp, Homo sapiens
taaaaggattttagc

SEQ ID NO: 1329127 - DNA, 15 bp, Homo sapiens
ttaaaaggattttag

SEQ ID NO: 1329128 - DNA, 15 bp, Homo sapiens
tttaaaaggatttta

SEQ ID NO: 1329129 - DNA, 15 bp, Homo sapiens
ctttaaaaggatttt

SEQ ID NO: 1329130 - DNA, 15 bp, Homo sapiens
cctttaaaaggattt

SEQ ID NO: 1329131 - DNA, 15 bp, Homo sapiens
gtcctttaaaaggat

SEQ ID NO: 1329132 - DNA, 15 bp, Homo sapiens
agtcctttaaaagga

SEQ ID NO: 1329133 - DNA, 15 bp, Homo sapiens
aagtcctttaaaagg

SEQ ID NO: 1329134 - DNA, 15 bp, Homo sapiens
caagtcctttaaaag

SEQ ID NO: 1329135 - DNA, 15 bp, Homo sapiens
ccaagtcctttaaaa

SEQ ID NO: 1329136 - DNA, 15 bp, Homo sapiens
tccaagtcctttaaa

SEQ ID NO: 1329137 - DNA, 15 bp, Homo sapiens
ttccaagtcctttaa

SEQ ID NO: 1329138 - DNA, 15 bp, Homo sapiens
attccaagtccttta

SEQ ID NO: 1329139 - DNA, 15 bp, Homo sapiens
gattccaagtccttt

SEQ ID NO: 1329140 - DNA, 15 bp, Homo sapiens
agattccaagtcctt

SEQ ID NO: 1329141 - DNA, 15 bp, Homo sapiens
gagattccaagtcct

SEQ ID NO: 1329142 - DNA, 15 bp, Homo sapiens
ggagattccaagtcc

SEQ ID NO: 1329143 - DNA, 15 bp, Homo sapiens
tggagattccaagtc

SEQ ID NO: 1329144 - DNA, 15 bp, Homo sapiens
ctggagattccaagt

SEQ ID NO: 1329145 - DNA, 15 bp, Homo sapiens
tctggagattccaag

SEQ ID NO: 1329146 - DNA, 15 bp, Homo sapiens
atctggagattccaa

SEQ ID NO: 1329147 - DNA, 15 bp, Homo sapiens
tatctggagattcca

SEQ ID NO: 1329148 - DNA, 15 bp, Homo sapiens
gtatctggagattcc

SEQ ID NO: 1329149 - DNA, 15 bp, Homo sapiens
agtatctggagattc

SEQ ID NO: 1329150 - DNA, 15 bp, Homo sapiens
tagtatctggagatt

SEQ ID NO: 1329151 - DNA, 15 bp, Homo sapiens
ctagtatctggagat

SEQ ID NO: 1329152 - DNA, 15 bp, Homo sapiens
actagtatctggaga

SEQ ID NO: 1329153 - DNA, 15 bp, Homo sapiens
aactagtatctggag

SEQ ID NO: 1329154 - DNA, 15 bp, Homo sapiens
aaactagtatctgga

SEQ ID NO: 1329155 - DNA, 15 bp, Homo sapiens
aaaactagtatctgg

SEQ ID NO: 1329156 - DNA, 15 bp, Homo sapiens
taaaactagtatctg

SEQ ID NO: 1329157 - DNA, 15 bp, Homo sapiens
ttaaaactagtatct

SEQ ID NO: 1329158 - DNA, 15 bp, Homo sapiens
cttaaaactagtatc

SEQ ID NO: 1329159 - DNA, 15 bp, Homo sapiens
acttaaaactagtat

SEQ ID NO: 1329160 - DNA, 15 bp, Homo sapiens
gacttaaaactagta

SEQ ID NO: 1329161 - DNA, 15 bp, Homo sapiens
agacttaaaactagt

SEQ ID NO: 1329162 - DNA, 15 bp, Homo sapiens
aagacttaaaactag

SEQ ID NO: 1329163 - DNA, 15 bp, Homo sapiens
aaagacttaaaacta

SEQ ID NO: 1329164 - DNA, 15 bp, Homo sapiens
aaaagacttaaaact

SEQ ID NO: 1329165 - DNA, 15 bp, Homo sapiens
gaaaagacttaaaac

SEQ ID NO: 1329166 - DNA, 15 bp, Homo sapiens
agaaaagacttaaaa

SEQ ID NO: 1329167 - DNA, 15 bp, Homo sapiens
cagaaaagacttaaa

SEQ ID NO: 1329168 - DNA, 15 bp, Homo sapiens
ccagaaaagacttaa

SEQ ID NO: 1329169 - DNA, 15 bp, Homo sapiens
cccagaaaagactta

SEQ ID NO: 1329170 - DNA, 15 bp, Homo sapiens
tcccagaaaagactt

SEQ ID NO: 1329171 - DNA, 15 bp, Homo sapiens
ttcccagaaaagact

SEQ ID NO: 1329172 - DNA, 15 bp, Homo sapiens
gttcccagaaaagac

SEQ ID NO: 1329173 - DNA, 15 bp, Homo sapiens
agttcccagaaaaga

SEQ ID NO: 1329174 - DNA, 15 bp, Homo sapiens
cagttcccagaaaag

SEQ ID NO: 1329175 - DNA, 15 bp, Homo sapiens
ccagttcccagaaaa

SEQ ID NO: 1329176 - DNA, 15 bp, Homo sapiens
cccagttcccagaaa

SEQ ID NO: 1329177 - DNA, 15 bp, Homo sapiens
tcccagttcccagaa

SEQ ID NO: 1329178 - DNA, 15 bp, Homo sapiens
ctcccagttcccaga

SEQ ID NO: 1329179 - DNA, 15 bp, Homo sapiens
actcccagttcccag

SEQ ID NO: 1329180 - DNA, 15 bp, Homo sapiens
aactcccagttccca

SEQ ID NO: 1329181 - DNA, 15 bp, Homo sapiens
aaactcccagttccc

SEQ ID NO: 1329182 - DNA, 15 bp, Homo sapiens
caaactcccagttcc

SEQ ID NO: 1329183 - DNA, 15 bp, Homo sapiens
acaaactcccagttc

SEQ ID NO: 1329184 - DNA, 15 bp, Homo sapiens
tacaaactcccagtt

SEQ ID NO: 1329185 - DNA, 15 bp, Homo sapiens
gtacaaactcccagt

SEQ ID NO: 1329186 - DNA, 15 bp, Homo sapiens
agtacaaactcccag

SEQ ID NO: 1329187 - DNA, 15 bp, Homo sapiens
cagtacaaactccca

SEQ ID NO: 1329188 - DNA, 15 bp, Homo sapiens
ccagtacaaactccc

SEQ ID NO: 1329189 - DNA, 15 bp, Homo sapiens
tccagtacaaactcc

SEQ ID NO: 1329190 - DNA, 15 bp, Homo sapiens
ctccagtacaaactc

SEQ ID NO: 1329191 - DNA, 15 bp, Homo sapiens
cctccagtacaaact

SEQ ID NO: 1329192 - DNA, 15 bp, Homo sapiens
gcctccagtacaaac

SEQ ID NO: 1329193 - DNA, 15 bp, Homo sapiens
ggcctccagtacaaa

SEQ ID NO: 1329194 - DNA, 15 bp, Homo sapiens
tggcctccagtacaa

SEQ ID NO: 1329195 - DNA, 15 bp, Homo sapiens
gtggcctccagtaca

SEQ ID NO: 1329196 - DNA, 15 bp, Homo sapiens
agtggcctccagtac

SEQ ID NO: 1329197 - DNA, 15 bp, Homo sapiens
aagtggcctccagta

SEQ ID NO: 1329198 - DNA, 15 bp, Homo sapiens
taagtggcctccagt

SEQ ID NO: 1329199 - DNA, 15 bp, Homo sapiens
ttaagtggcctccag

SEQ ID NO: 1329200 - DNA, 15 bp, Homo sapiens
gttaagtggcctcca

SEQ ID NO: 1329201 - DNA, 15 bp, Homo sapiens
agttaagtggcctcc

SEQ ID NO: 1329202 - DNA, 15 bp, Homo sapiens
tagttaagtggcctc

SEQ ID NO: 1329203 - DNA, 15 bp, Homo sapiens
atagttaagtggcct

SEQ ID NO: 1329204 - DNA, 15 bp, Homo sapiens
aatagttaagtggcc

SEQ ID NO: 1329205 - DNA, 15 bp, Homo sapiens
aaatagttaagtggc

SEQ ID NO: 1329206 - DNA, 15 bp, Homo sapiens
gaaatagttaagtgg

SEQ ID NO: 1329207 - DNA, 15 bp, Homo sapiens
tgaaatagttaagtg

SEQ ID NO: 1329208 - DNA, 15 bp, Homo sapiens
ttgaaatagttaagt

SEQ ID NO: 1329209 - DNA, 15 bp, Homo sapiens
tttgaaatagttaag

SEQ ID NO: 1329210 - DNA, 15 bp, Homo sapiens
ttttgaaatagttaa

SEQ ID NO: 1329211 - DNA, 15 bp, Homo sapiens
tttttgaaatagtta

SEQ ID NO: 1329212 - DNA, 15 bp, Homo sapiens
ttttttgaaatagtt

SEQ ID NO: 1329213 - DNA, 15 bp, Homo sapiens
attttttgaaatagt

SEQ ID NO: 1329214 - DNA, 15 bp, Homo sapiens
tattttttgaaatag

SEQ ID NO: 1329215 - DNA, 15 bp, Homo sapiens
atattttttgaaata

SEQ ID NO: 1329216 - DNA, 15 bp, Homo sapiens
aatattttttgaaat

SEQ ID NO: 1329217 - DNA, 15 bp, Homo sapiens
gaatattttttgaaa

SEQ ID NO: 1329218 - DNA, 15 bp, Homo sapiens
tgaatattttttgaa

SEQ ID NO: 1329219 - DNA, 15 bp, Homo sapiens
gtgaatattttttga

SEQ ID NO: 1329220 - DNA, 15 bp, Homo sapiens
ggtgaatattttttg

SEQ ID NO: 1329221 - DNA, 15 bp, Homo sapiens
tggtgaatatttttt

SEQ ID NO: 1329222 - DNA, 15 bp, Homo sapiens
ttggtgaatattttt

SEQ ID NO: 1329223 - DNA, 15 bp, Homo sapiens
tttggtgaatatttt

SEQ ID NO: 1329224 - DNA, 15 bp, Homo sapiens
ttttggtgaatattt

SEQ ID NO: 1329225 - DNA, 15 bp, Homo sapiens
attttggtgaatatt

SEQ ID NO: 1329226 - DNA, 15 bp, Homo sapiens
tattttggtgaatat

SEQ ID NO: 1329227 - DNA, 15 bp, Homo sapiens
ctattttggtgaata

SEQ ID NO: 1329228 - DNA, 15 bp, Homo sapiens
cctattttggtgaat

SEQ ID NO: 1329229 - DNA, 15 bp, Homo sapiens
acctattttggtgaa

SEQ ID NO: 1329230 - DNA, 15 bp, Homo sapiens
cacctattttggtga

SEQ ID NO: 1329231 - DNA, 15 bp, Homo sapiens
acacctattttggtg

SEQ ID NO: 1329232 - DNA, 15 bp, Homo sapiens
gacacctattttggt

SEQ ID NO: 1329233 - DNA, 15 bp, Homo sapiens
agacacctattttgg

SEQ ID NO: 1329234 - DNA, 15 bp, Homo sapiens
agagacacctatttt

SEQ ID NO: 1329235 - DNA, 15 bp, Homo sapiens
gagagacacctattt

SEQ ID NO: 1329236 - DNA, 15 bp, Homo sapiens
agagagacacctatt

SEQ ID NO: 1329237 - DNA, 15 bp, Homo sapiens
cagagagacacctat

SEQ ID NO: 1329238 - DNA, 15 bp, Homo sapiens
tcagagagacaccta

SEQ ID NO: 1329239 - DNA, 15 bp, Homo sapiens
gtcagagagacacct

SEQ ID NO: 1329240 - DNA, 15 bp, Homo sapiens
agtcagagagacacc

SEQ ID NO: 1329241 - DNA, 15 bp, Homo sapiens
cagtcagagagacac

SEQ ID NO: 1329242 - DNA, 15 bp, Homo sapiens
gcagtcagagagaca

SEQ ID NO: 1329243 - DNA, 15 bp, Homo sapiens
tgcagtcagagagac

SEQ ID NO: 1329244 - DNA, 15 bp, Homo sapiens
ttgcagtcagagaga

SEQ ID NO: 1329245 - DNA, 15 bp, Homo sapiens
gttgcagtcagagag

SEQ ID NO: 1329246 - DNA, 15 bp, Homo sapiens
cgttgcagtcagaga

SEQ ID NO: 1329247 - DNA, 15 bp, Homo sapiens
ccgttgcagtcagag

SEQ ID NO: 1329248 - DNA, 15 bp, Homo sapiens
accgttgcagtcaga

SEQ ID NO: 1329249 - DNA, 15 bp, Homo sapiens
aaccgttgcagtcag

SEQ ID NO: 1329250 - DNA, 15 bp, Homo sapiens
aaaccgttgcagtca

SEQ ID NO: 1329251 - DNA, 15 bp, Homo sapiens
caaaccgttgcagtc

SEQ ID NO: 1329252 - DNA, 15 bp, Homo sapiens
tcaaaccgttgcagt

SEQ ID NO: 1329253 - DNA, 15 bp, Homo sapiens
ctcaaaccgttgcag

SEQ ID NO: 1329254 - DNA, 15 bp, Homo sapiens
actcaaaccgttgca

SEQ ID NO: 1329255 - DNA, 15 bp, Homo sapiens
gactcaaaccgttgc

SEQ ID NO: 1329256 - DNA, 15 bp, Homo sapiens
ggactcaaaccgttg

SEQ ID NO: 1329257 - DNA, 15 bp, Homo sapiens
aggactcaaaccgtt

SEQ ID NO: 1329258 - DNA, 15 bp, Homo sapiens
gaggactcaaaccgt

SEQ ID NO: 1329259 - DNA, 15 bp, Homo sapiens
ggaggactcaaaccg

SEQ ID NO: 1329260 - DNA, 15 bp, Homo sapiens
aggaggactcaaacc

SEQ ID NO: 1329261 - DNA, 15 bp, Homo sapiens
gaggaggactcaaac

SEQ ID NO: 1329262 - DNA, 15 bp, Homo sapiens
tgaggaggactcaaa

SEQ ID NO: 1329263 - DNA, 15 bp, Homo sapiens
ctgaggaggactcaa

SEQ ID NO: 1329264 - DNA, 15 bp, Homo sapiens
gctgaggaggactca

SEQ ID NO: 1329265 - DNA, 15 bp, Homo sapiens
ggctgaggaggactc

SEQ ID NO: 1329266 - DNA, 15 bp, Homo sapiens
gggctgaggaggact

SEQ ID NO: 1329267 - DNA, 15 bp, Homo sapiens
agggctgaggaggac

SEQ ID NO: 1329268 - DNA, 15 bp, Homo sapiens
gagggctgaggagga

SEQ ID NO: 1329269 - DNA, 15 bp, Homo sapiens
tgagggctgaggagg

SEQ ID NO: 1329270 - DNA, 15 bp, Homo sapiens
atgagggctgaggag

SEQ ID NO: 1329271 - DNA, 15 bp, Homo sapiens
tatgagggctgagga

SEQ ID NO: 1329272 - DNA, 15 bp, Homo sapiens
atatgagggctgagg

SEQ ID NO: 1329273 - DNA, 15 bp, Homo sapiens
gatatgagggctgag

SEQ ID NO: 1329274 - DNA, 15 bp, Homo sapiens
ggatatgagggctga

SEQ ID NO: 1329275 - DNA, 15 bp, Homo sapiens
aggatatgagggctg

SEQ ID NO: 1329276 - DNA, 15 bp, Homo sapiens
taggatatgagggct

SEQ ID NO: 1329277 - DNA, 15 bp, Homo sapiens
ctaggatatgagggc

SEQ ID NO: 1329278 - DNA, 15 bp, Homo sapiens
cctaggatatgaggg

SEQ ID NO: 1329279 - DNA, 15 bp, Homo sapiens
gcctaggatatgagg

SEQ ID NO: 1329280 - DNA, 15 bp, Homo sapiens
agcctaggatatgag

SEQ ID NO: 1329281 - DNA, 15 bp, Homo sapiens
aagcctaggatatga

SEQ ID NO: 1329282 - DNA, 15 bp, Homo sapiens
gaagcctaggatatg

SEQ ID NO: 1329283 - DNA, 15 bp, Homo sapiens
cgaagcctaggatat

SEQ ID NO: 1329284 - DNA, 15 bp, Homo sapiens
ccgaagcctaggata

SEQ ID NO: 1329285 - DNA, 15 bp, Homo sapiens
tccgaagcctaggat

SEQ ID NO: 1329286 - DNA, 15 bp, Homo sapiens
gtccgaagcctagga

SEQ ID NO: 1329287 - DNA, 15 bp, Homo sapiens
agtccgaagcctagg

SEQ ID NO: 1329288 - DNA, 15 bp, Homo sapiens
cagtccgaagcctag

SEQ ID NO: 1329289 - DNA, 15 bp, Homo sapiens
acagtccgaagccta

SEQ ID NO: 1329290 - DNA, 15 bp, Homo sapiens
aacagtccgaagcct

SEQ ID NO: 1329291 - DNA, 15 bp, Homo sapiens
caacagtccgaagcc

SEQ ID NO: 1329292 - DNA, 15 bp, Homo sapiens
ccaacagtccgaagc

SEQ ID NO: 1329293 - DNA, 15 bp, Homo sapiens
cccaacagtccgaag

SEQ ID NO: 1329294 - DNA, 15 bp, Homo sapiens
tcccaacagtccgaa

SEQ ID NO: 1329295 - DNA, 15 bp, Homo sapiens
ttcccaacagtccga

SEQ ID NO: 1329296 - DNA, 15 bp, Homo sapiens
tttcccaacagtccg

SEQ ID NO: 1329297 - DNA, 15 bp, Homo sapiens
ctttcccaacagtcc

SEQ ID NO: 1329298 - DNA, 15 bp, Homo sapiens
actttcccaacagtc

SEQ ID NO: 1329299 - DNA, 15 bp, Homo sapiens
gactttcccaacagt

SEQ ID NO: 1329300 - DNA, 15 bp, Homo sapiens
agactttcccaacag

SEQ ID NO: 1329301 - DNA, 15 bp, Homo sapiens
aagactttcccaaca

SEQ ID NO: 1329302 - DNA, 15 bp, Homo sapiens
taagactttcccaac

SEQ ID NO: 1329303 - DNA, 15 bp, Homo sapiens
ataagactttcccaa

SEQ ID NO: 1329304 - DNA, 15 bp, Homo sapiens
gataagactttccca

SEQ ID NO: 1329305 - DNA, 15 bp, Homo sapiens
agataagactttccc

SEQ ID NO: 1329306 - DNA, 15 bp, Homo sapiens
aagataagactttcc

SEQ ID NO: 1329307 - DNA, 15 bp, Homo sapiens
gaagataagactttc

SEQ ID NO: 1329308 - DNA, 15 bp, Homo sapiens
ggaagataagacttt

SEQ ID NO: 1329309 - DNA, 15 bp, Homo sapiens
aggaagataagactt

SEQ ID NO: 1329310 - DNA, 15 bp, Homo sapiens
caggaagataagact

SEQ ID NO: 1329311 - DNA, 15 bp, Homo sapiens
tcaggaagataagac

SEQ ID NO: 1329312 - DNA, 15 bp, Homo sapiens
gtcaggaagataaga

SEQ ID NO: 1329313 - DNA, 15 bp, Homo sapiens
cgtcaggaagataag

SEQ ID NO: 1329314 - DNA, 15 bp, Homo sapiens
tcgtcaggaagataa

SEQ ID NO: 1329315 - DNA, 15 bp, Homo sapiens
ttcgtcaggaagata

SEQ ID NO: 1329316 - DNA, 15 bp, Homo sapiens
tttcgtcaggaagat

SEQ ID NO: 1329317 - DNA, 15 bp, Homo sapiens
ctttcgtcaggaaga

SEQ ID NO: 1329318 - DNA, 15 bp, Homo sapiens
gctttcgtcaggaag

SEQ ID NO: 1329319 - DNA, 15 bp, Homo sapiens
agctttcgtcaggaa

SEQ ID NO: 1329320 - DNA, 15 bp, Homo sapiens
gagctttcgtcagga

SEQ ID NO: 1329321 - DNA, 15 bp, Homo sapiens
tgagctttcgtcagg

SEQ ID NO: 1329322 - DNA, 15 bp, Homo sapiens
ctgagctttcgtcag

SEQ ID NO: 1329323 - DNA, 15 bp, Homo sapiens
gctgagctttcgtca

SEQ ID NO: 1329324 - DNA, 15 bp, Homo sapiens
tgctgagctttcgtc

SEQ ID NO: 1329325 - DNA, 15 bp, Homo sapiens
ctgctgagctttcgt

SEQ ID NO: 1329326 - DNA, 15 bp, Homo sapiens
gctgctgagctttcg

SEQ ID NO: 1329327 - DNA, 15 bp, Homo sapiens
tgctgctgagctttc

SEQ ID NO: 1329328 - DNA, 15 bp, Homo sapiens
ttgctgctgagcttt

SEQ ID NO: 1329329 - DNA, 15 bp, Homo sapiens
gttgctgctgagctt

SEQ ID NO: 1329330 - DNA, 15 bp, Homo sapiens
tgttgctgctgagct

SEQ ID NO: 1329331 - DNA, 15 bp, Homo sapiens
ctgttgctgctgagc

SEQ ID NO: 1329332 - DNA, 15 bp, Homo sapiens
tctgttgctgctgag

SEQ ID NO: 1329333 - DNA, 15 bp, Homo sapiens
ttctgttgctgctga

SEQ ID NO: 1329334 - DNA, 15 bp, Homo sapiens
gttctgttgctgctg

SEQ ID NO: 1329335 - DNA, 15 bp, Homo sapiens
ggttctgttgctgct

SEQ ID NO: 1329336 - DNA, 15 bp, Homo sapiens
aggttctgttgctgc

SEQ ID NO: 1329337 - DNA, 15 bp, Homo sapiens
caggttctgttgctg

SEQ ID NO: 1329338 - DNA, 15 bp, Homo sapiens
acaggttctgttgct

SEQ ID NO: 1329339 - DNA, 15 bp, Homo sapiens
aacaggttctgttgc

SEQ ID NO: 1329340 - DNA, 15 bp, Homo sapiens
taacaggttctgttg

SEQ ID NO: 1329341 - DNA, 15 bp, Homo sapiens
ataacaggttctgtt

SEQ ID NO: 1329342 - DNA, 15 bp, Homo sapiens
aataacaggttctgt

SEQ ID NO: 1329343 - DNA, 15 bp, Homo sapiens
aaataacaggttctg

SEQ ID NO: 1329344 - DNA, 15 bp, Homo sapiens
aaaataacaggttct

SEQ ID NO: 1329345 - DNA, 15 bp, Homo sapiens
aaaaataacaggttc

SEQ ID NO: 1329346 - DNA, 15 bp, Homo sapiens
aaaaaataacaggtt

SEQ ID NO: 1329347 - DNA, 15 bp, Homo sapiens
aaaaaaataacaggt

SEQ ID NO: 1329348 - DNA, 15 bp, Homo sapiens
caaaaaaataacagg

SEQ ID NO: 1329349 - DNA, 15 bp, Homo sapiens
acaaaaaaataacag

SEQ ID NO: 1329350 - DNA, 15 bp, Homo sapiens
aacaaaaaaataaca

SEQ ID NO: 1329351 - DNA, 15 bp, Homo sapiens
caacaaaaaaataac

SEQ ID NO: 1329352 - DNA, 15 bp, Homo sapiens
tcaacaaaaaaataa

SEQ ID NO: 1329353 - DNA, 15 bp, Homo sapiens
ctcaacaaaaaaata

SEQ ID NO: 1329354 - DNA, 15 bp, Homo sapiens
tctcaacaaaaaaat

SEQ ID NO: 1329355 - DNA, 15 bp, Homo sapiens
gtctcaacaaaaaaa

SEQ ID NO: 1329356 - DNA, 15 bp, Homo sapiens
tgtctcaacaaaaaa

SEQ ID NO: 1329357 - DNA, 15 bp, Homo sapiens
ctgtctcaacaaaaa

SEQ ID NO: 1329358 - DNA, 15 bp, Homo sapiens
cctgtctcaacaaaa

SEQ ID NO: 1329359 - DNA, 15 bp, Homo sapiens
ccctgtctcaacaaa

SEQ ID NO: 1329360 - DNA, 15 bp, Homo sapiens
accctgtctcaacaa

SEQ ID NO: 1329361 - DNA, 15 bp, Homo sapiens
gaccctgtctcaaca

SEQ ID NO: 1329362 - DNA, 15 bp, Homo sapiens
agaccctgtctcaac

SEQ ID NO: 1329363 - DNA, 15 bp, Homo sapiens
taagaccctgtctca

SEQ ID NO: 1329364 - DNA, 15 bp, Homo sapiens
gagtaagaccctgtc

SEQ ID NO: 1329365 - DNA, 15 bp, Homo sapiens
agagtaagaccctgt

SEQ ID NO: 1329366 - DNA, 15 bp, Homo sapiens
cagagtaagaccctg

SEQ ID NO: 1329367 - DNA, 15 bp, Homo sapiens
acagagtaagaccct

SEQ ID NO: 1329368 - DNA, 15 bp, Homo sapiens
gacagagtaagaccc

SEQ ID NO: 1329369 - DNA, 15 bp, Homo sapiens
tgacagagtaagacc

SEQ ID NO: 1329370 - DNA, 15 bp, Homo sapiens
gtgacagagtaagac

SEQ ID NO: 1329371 - DNA, 15 bp, Homo sapiens
ggtgacagagtaaga

SEQ ID NO: 1329372 - DNA, 15 bp, Homo sapiens
gggtgacagagtaag

SEQ ID NO: 1329373 - DNA, 15 bp, Homo sapiens
tgggtgacagagtaa

SEQ ID NO: 1329374 - DNA, 15 bp, Homo sapiens
ctgggtgacagagta

SEQ ID NO: 1329375 - DNA, 15 bp, Homo sapiens
gcactactgcactcc

SEQ ID NO: 1329376 - DNA, 15 bp, Homo sapiens
cgcactactgcactc

SEQ ID NO: 1329377 - DNA, 15 bp, Homo sapiens
tcgcactactgcact

SEQ ID NO: 1329378 - DNA, 15 bp, Homo sapiens
atcgcactactgcac

SEQ ID NO: 1329379 - DNA, 15 bp, Homo sapiens
gatcgcactactgca

SEQ ID NO: 1329380 - DNA, 15 bp, Homo sapiens
agatcgcactactgc

SEQ ID NO: 1329381 - DNA, 15 bp, Homo sapiens
aagatcgcactactg

SEQ ID NO: 1329382 - DNA, 15 bp, Homo sapiens
caagatcgcactact

SEQ ID NO: 1329383 - DNA, 15 bp, Homo sapiens
gccaagatcgcacta

SEQ ID NO: 1329384 - DNA, 15 bp, Homo sapiens
agccaagatcgcact

SEQ ID NO: 1329385 - DNA, 15 bp, Homo sapiens
aggctgaggctgcag

SEQ ID NO: 1329386 - DNA, 15 bp, Homo sapiens
taggctgaggctgca

SEQ ID NO: 1329387 - DNA, 15 bp, Homo sapiens
gtaggctgaggctgc

SEQ ID NO: 1329388 - DNA, 15 bp, Homo sapiens
ggtaggctgaggctg

SEQ ID NO: 1329389 - DNA, 15 bp, Homo sapiens
tggtaggctgaggct

SEQ ID NO: 1329390 - DNA, 15 bp, Homo sapiens
ctggtaggctgaggc

SEQ ID NO: 1329391 - DNA, 15 bp, Homo sapiens
cctggtaggctgagg

SEQ ID NO: 1329392 - DNA, 15 bp, Homo sapiens
gcctggtaggctgag

SEQ ID NO: 1329393 - DNA, 15 bp, Homo sapiens
agcctggtaggctga

SEQ ID NO: 1329394 - DNA, 15 bp, Homo sapiens
gagcctggtaggctg

SEQ ID NO: 1329395 - DNA, 15 bp, Homo sapiens
tgagcctggtaggct

SEQ ID NO: 1329396 - DNA, 15 bp, Homo sapiens
ctgagcctggtaggc

SEQ ID NO: 1329397 - DNA, 15 bp, Homo sapiens
cctgagcctggtagg

SEQ ID NO: 1329398 - DNA, 15 bp, Homo sapiens
acctgagcctggtag

SEQ ID NO: 1329399 - DNA, 15 bp, Homo sapiens
cacctgagcctggta

SEQ ID NO: 1329400 - DNA, 15 bp, Homo sapiens
tcacctgagcctggt

SEQ ID NO: 1329401 - DNA, 15 bp, Homo sapiens
gtcacctgagcctgg

SEQ ID NO: 1329402 - DNA, 15 bp, Homo sapiens
ggtcacctgagcctg

SEQ ID NO: 1329403 - DNA, 15 bp, Homo sapiens
gggtcacctgagcct

SEQ ID NO: 1329404 - DNA, 15 bp, Homo sapiens
agggtcacctgagcc

SEQ ID NO: 1329405 - DNA, 15 bp, Homo sapiens
tagggtcacctgagc

SEQ ID NO: 1329406 - DNA, 15 bp, Homo sapiens
atagggtcacctgag

SEQ ID NO: 1329407 - DNA, 15 bp, Homo sapiens
gatagggtcacctga

SEQ ID NO: 1329408 - DNA, 15 bp, Homo sapiens
agatagggtcacctg

SEQ ID NO: 1329409 - DNA, 15 bp, Homo sapiens
gagatagggtcacct

SEQ ID NO: 1329410 - DNA, 15 bp, Homo sapiens
tgagatagggtcacc

SEQ ID NO: 1329411 - DNA, 15 bp, Homo sapiens
ctgagatagggtcac

SEQ ID NO: 1329412 - DNA, 15 bp, Homo sapiens
gctgagatagggtca

SEQ ID NO: 1329413 - DNA, 15 bp, Homo sapiens
agctgagatagggtc

SEQ ID NO: 1329414 - DNA, 15 bp, Homo sapiens
aagctgagatagggt

SEQ ID NO: 1329415 - DNA, 15 bp, Homo sapiens
gaagctgagataggg

SEQ ID NO: 1329416 - DNA, 15 bp, Homo sapiens
agaagctgagatagg

SEQ ID NO: 1329417 - DNA, 15 bp, Homo sapiens
gagaagctgagatag

SEQ ID NO: 1329418 - DNA, 15 bp, Homo sapiens
cgagaagctgagata

SEQ ID NO: 1329419 - DNA, 15 bp, Homo sapiens
tcgagaagctgagat

SEQ ID NO: 1329420 - DNA, 15 bp, Homo sapiens
ctcgagaagctgaga

SEQ ID NO: 1329421 - DNA, 15 bp, Homo sapiens
actcgagaagctgag

SEQ ID NO: 1329422 - DNA, 15 bp, Homo sapiens
tactcgagaagctga

SEQ ID NO: 1329423 - DNA, 15 bp, Homo sapiens
ctactcgagaagctg

SEQ ID NO: 1329424 - DNA, 15 bp, Homo sapiens
cctactcgagaagct

SEQ ID NO: 1329425 - DNA, 15 bp, Homo sapiens
acctactcgagaagc

SEQ ID NO: 1329426 - DNA, 15 bp, Homo sapiens
cacctactcgagaag

SEQ ID NO: 1329427 - DNA, 15 bp, Homo sapiens
ccacctactcgagaa

SEQ ID NO: 1329428 - DNA, 15 bp, Homo sapiens
cccacctactcgaga

SEQ ID NO: 1329429 - DNA, 15 bp, Homo sapiens
tcccacctactcgag

SEQ ID NO: 1329430 - DNA, 15 bp, Homo sapiens
gtcccacctactcga

SEQ ID NO: 1329431 - DNA, 15 bp, Homo sapiens
agtcccacctactcg

SEQ ID NO: 1329432 - DNA, 15 bp, Homo sapiens
tagtcccacctactc

SEQ ID NO: 1329433 - DNA, 15 bp, Homo sapiens
gtagtcccacctact

SEQ ID NO: 1329434 - DNA, 15 bp, Homo sapiens
tgtagtcccacctac

SEQ ID NO: 1329435 - DNA, 15 bp, Homo sapiens
ctgtagtcccaccta

SEQ ID NO: 1329436 - DNA, 15 bp, Homo sapiens
cctgtagtcccacct

SEQ ID NO: 1329437 - DNA, 15 bp, Homo sapiens
gcctgtagtcccacc

SEQ ID NO: 1329438 - DNA, 15 bp, Homo sapiens
tgcctgtagtcccac

SEQ ID NO: 1329439 - DNA, 15 bp, Homo sapiens
agcatggtggcacat

SEQ ID NO: 1329440 - DNA, 15 bp, Homo sapiens
gagcatggtggcaca

SEQ ID NO: 1329441 - DNA, 15 bp, Homo sapiens
cgagcatggtggcac

SEQ ID NO: 1329442 - DNA, 15 bp, Homo sapiens
ccgagcatggtggca

SEQ ID NO: 1329443 - DNA, 15 bp, Homo sapiens
accgagcatggtggc

SEQ ID NO: 1329444 - DNA, 15 bp, Homo sapiens
caccgagcatggtgg

SEQ ID NO: 1329445 - DNA, 15 bp, Homo sapiens
tcaccgagcatggtg

SEQ ID NO: 1329446 - DNA, 15 bp, Homo sapiens
ttcaccgagcatggt

SEQ ID NO: 1329447 - DNA, 15 bp, Homo sapiens
gttcaccgagcatgg

SEQ ID NO: 1329448 - DNA, 15 bp, Homo sapiens
agttcaccgagcatg

SEQ ID NO: 1329449 - DNA, 15 bp, Homo sapiens
tagttcaccgagcat

SEQ ID NO: 1329450 - DNA, 15 bp, Homo sapiens
ttagttcaccgagca

SEQ ID NO: 1329451 - DNA, 15 bp, Homo sapiens
tttagttcaccgagc

SEQ ID NO: 1329452 - DNA, 15 bp, Homo sapiens
ttttagttcaccgag

SEQ ID NO: 1329453 - DNA, 15 bp, Homo sapiens
tttttagttcaccga

SEQ ID NO: 1329454 - DNA, 15 bp, Homo sapiens
ttttttagttcaccg

SEQ ID NO: 1329455 - DNA, 15 bp, Homo sapiens
tttttttagttcacc

SEQ ID NO: 1329456 - DNA, 15 bp, Homo sapiens
gtttttttagttcac

SEQ ID NO: 1329457 - DNA, 15 bp, Homo sapiens
agtttttttagttca

SEQ ID NO: 1329458 - DNA, 15 bp, Homo sapiens
aagtttttttagttc

SEQ ID NO: 1329459 - DNA, 15 bp, Homo sapiens
aaagtttttttagtt

SEQ ID NO: 1329460 - DNA, 15 bp, Homo sapiens
aaaagtttttttagt

SEQ ID NO: 1329461 - DNA, 15 bp, Homo sapiens
aaaaagtttttttag

SEQ ID NO: 1329462 - DNA, 15 bp, Homo sapiens
aaaaaagttttttta

SEQ ID NO: 1329463 - DNA, 15 bp, Homo sapiens
caaaaaagttttttt

SEQ ID NO: 1329464 - DNA, 15 bp, Homo sapiens
acaaaaaagtttttt

SEQ ID NO: 1329465 - DNA, 15 bp, Homo sapiens
tacaaaaaagttttt

SEQ ID NO: 1329466 - DNA, 15 bp, Homo sapiens
ctacaaaaaagtttt

SEQ ID NO: 1329467 - DNA, 15 bp, Homo sapiens
actacaaaaaagttt

SEQ ID NO: 1329468 - DNA, 15 bp, Homo sapiens
cactacaaaaaagtt

SEQ ID NO: 1329469 - DNA, 15 bp, Homo sapiens
tcactacaaaaaagt

SEQ ID NO: 1329470 - DNA, 15 bp, Homo sapiens
atcactacaaaaaag

SEQ ID NO: 1329471 - DNA, 15 bp, Homo sapiens
tatcactacaaaaaa

SEQ ID NO: 1329472 - DNA, 15 bp, Homo sapiens
gtatcactacaaaaa

SEQ ID NO: 1329473 - DNA, 15 bp, Homo sapiens
cgtatcactacaaaa

SEQ ID NO: 1329474 - DNA, 15 bp, Homo sapiens
ccgtatcactacaaa

SEQ ID NO: 1329475 - DNA, 15 bp, Homo sapiens
accgtatcactacaa

SEQ ID NO: 1329476 - DNA, 15 bp, Homo sapiens
gaccgtatcactaca

SEQ ID NO: 1329477 - DNA, 15 bp, Homo sapiens
agaccgtatcactac

SEQ ID NO: 1329478 - DNA, 15 bp, Homo sapiens
gagaccgtatcacta

SEQ ID NO: 1329479 - DNA, 15 bp, Homo sapiens
tgagaccgtatcact

SEQ ID NO: 1329480 - DNA, 15 bp, Homo sapiens
gtgagaccgtatcac

SEQ ID NO: 1329481 - DNA, 15 bp, Homo sapiens
agtgagaccgtatca

SEQ ID NO: 1329482 - DNA, 15 bp, Homo sapiens
tagtgagaccgtatc

SEQ ID NO: 1329483 - DNA, 15 bp, Homo sapiens
atagtgagaccgtat

SEQ ID NO: 1329484 - DNA, 15 bp, Homo sapiens
tatagtgagaccgta

SEQ ID NO: 1329485 - DNA, 15 bp, Homo sapiens
atatagtgagaccgt

SEQ ID NO: 1329486 - DNA, 15 bp, Homo sapiens
aatatagtgagaccg

SEQ ID NO: 1329487 - DNA, 15 bp, Homo sapiens
caatatagtgagacc

SEQ ID NO: 1329488 - DNA, 15 bp, Homo sapiens
gcaatatagtgagac

SEQ ID NO: 1329489 - DNA, 15 bp, Homo sapiens
ggcaatatagtgaga

SEQ ID NO: 1329490 - DNA, 15 bp, Homo sapiens
gggcaatatagtgag

SEQ ID NO: 1329491 - DNA, 15 bp, Homo sapiens
tgggcaatatagtga

SEQ ID NO: 1329492 - DNA, 15 bp, Homo sapiens
ctgggcaatatagtg

SEQ ID NO: 1329493 - DNA, 15 bp, Homo sapiens
cctgggcaatatagt

SEQ ID NO: 1329494 - DNA, 15 bp, Homo sapiens
gcctgggcaatatag

SEQ ID NO: 1329495 - DNA, 15 bp, Homo sapiens
agcctgggcaatata

SEQ ID NO: 1329496 - DNA, 15 bp, Homo sapiens
aaccagcctgggcaa

SEQ ID NO: 1329497 - DNA, 15 bp, Homo sapiens
aaaccagcctgggca

SEQ ID NO: 1329498 - DNA, 15 bp, Homo sapiens
aaaaccagcctgggc

SEQ ID NO: 1329499 - DNA, 15 bp, Homo sapiens
caaaaccagcctggg

SEQ ID NO: 1329500 - DNA, 15 bp, Homo sapiens
cccaggagttcaaaa

SEQ ID NO: 1329501 - DNA, 15 bp, Homo sapiens
gcccaggagttcaaa

SEQ ID NO: 1329502 - DNA, 15 bp, Homo sapiens
cgctgaggtgggagg

SEQ ID NO: 1329503 - DNA, 15 bp, Homo sapiens
acgctgaggtgggag

SEQ ID NO: 1329504 - DNA, 15 bp, Homo sapiens
gacgctgaggtggga

SEQ ID NO: 1329505 - DNA, 15 bp, Homo sapiens
agacgctgaggtggg

SEQ ID NO: 1329506 - DNA, 15 bp, Homo sapiens
gagacgctgaggtgg

SEQ ID NO: 1329507 - DNA, 15 bp, Homo sapiens
tgagacgctgaggtg

SEQ ID NO: 1329508 - DNA, 15 bp, Homo sapiens
ttgagacgctgaggt

SEQ ID NO: 1329509 - DNA, 15 bp, Homo sapiens
tttgagacgctgagg

SEQ ID NO: 1329510 - DNA, 15 bp, Homo sapiens
ctttgagacgctgag

SEQ ID NO: 1329511 - DNA, 15 bp, Homo sapiens
actttgagacgctga

SEQ ID NO: 1329512 - DNA, 15 bp, Homo sapiens
tactttgagacgctg

SEQ ID NO: 1329513 - DNA, 15 bp, Homo sapiens
gtactttgagacgct

SEQ ID NO: 1329514 - DNA, 15 bp, Homo sapiens
agtactttgagacgc

SEQ ID NO: 1329515 - DNA, 15 bp, Homo sapiens
cagtactttgagacg

SEQ ID NO: 1329516 - DNA, 15 bp, Homo sapiens
ccagtactttgagac

SEQ ID NO: 1329517 - DNA, 15 bp, Homo sapiens
atcccagtactttga

SEQ ID NO: 1329518 - DNA, 15 bp, Homo sapiens
aatcccagtactttg

SEQ ID NO: 1329519 - DNA, 15 bp, Homo sapiens
taatcccagtacttt

SEQ ID NO: 1329520 - DNA, 15 bp, Homo sapiens
gtaatcccagtactt

SEQ ID NO: 1329521 - DNA, 15 bp, Homo sapiens
tgtaatcccagtact

SEQ ID NO: 1329522 - DNA, 15 bp, Homo sapiens
ctgtaatcccagtac

SEQ ID NO: 1329523 - DNA, 15 bp, Homo sapiens
acctgtaatcccagt

SEQ ID NO: 1329524 - DNA, 15 bp, Homo sapiens
tagaggctcacacct

SEQ ID NO: 1329525 - DNA, 15 bp, Homo sapiens
gtagaggctcacacc

SEQ ID NO: 1329526 - DNA, 15 bp, Homo sapiens
tgtagaggctcacac

SEQ ID NO: 1329527 - DNA, 15 bp, Homo sapiens
gtgtagaggctcaca

SEQ ID NO: 1329528 - DNA, 15 bp, Homo sapiens
agtgtagaggctcac

SEQ ID NO: 1329529 - DNA, 15 bp, Homo sapiens
cagtgtagaggctca

SEQ ID NO: 1329530 - DNA, 15 bp, Homo sapiens
ccagtgtagaggctc

SEQ ID NO: 1329531 - DNA, 15 bp, Homo sapiens
cccagtgtagaggct

SEQ ID NO: 1329532 - DNA, 15 bp, Homo sapiens
gcccagtgtagaggc

SEQ ID NO: 1329533 - DNA, 15 bp, Homo sapiens
ggcccagtgtagagg

SEQ ID NO: 1329534 - DNA, 15 bp, Homo sapiens
aggcccagtgtagag

SEQ ID NO: 1329535 - DNA, 15 bp, Homo sapiens
caggcccagtgtaga

SEQ ID NO: 1329536 - DNA, 15 bp, Homo sapiens
gcaggcccagtgtag

SEQ ID NO: 1329537 - DNA, 15 bp, Homo sapiens
tgcaggcccagtgta

SEQ ID NO: 1329538 - DNA, 15 bp, Homo sapiens
ctgcaggcccagtgt

SEQ ID NO: 1329539 - DNA, 15 bp, Homo sapiens
tctgcaggcccagtg

SEQ ID NO: 1329540 - DNA, 15 bp, Homo sapiens
ttctgcaggcccagt

SEQ ID NO: 1329541 - DNA, 15 bp, Homo sapiens
gttctgcaggcccag

SEQ ID NO: 1329542 - DNA, 15 bp, Homo sapiens
ggttctgcaggccca

SEQ ID NO: 1329543 - DNA, 15 bp, Homo sapiens
aggttctgcaggccc

SEQ ID NO: 1329544 - DNA, 15 bp, Homo sapiens
taggttctgcaggcc

SEQ ID NO: 1329545 - DNA, 15 bp, Homo sapiens
gtaggttctgcaggc

SEQ ID NO: 1329546 - DNA, 15 bp, Homo sapiens
tgtaggttctgcagg

SEQ ID NO: 1329547 - DNA, 15 bp, Homo sapiens
gtgtaggttctgcag

SEQ ID NO: 1329548 - DNA, 15 bp, Homo sapiens
tgtgtaggttctgca

SEQ ID NO: 1329549 - DNA, 15 bp, Homo sapiens
ctgtgtaggttctgc

SEQ ID NO: 1329550 - DNA, 15 bp, Homo sapiens
tctgtgtaggttctg

SEQ ID NO: 1329551 - DNA, 15 bp, Homo sapiens
ttctgtgtaggttct

SEQ ID NO: 1329552 - DNA, 15 bp, Homo sapiens
attctgtgtaggttc

SEQ ID NO: 1329553 - DNA, 15 bp, Homo sapiens
gattctgtgtaggtt

SEQ ID NO: 1329554 - DNA, 15 bp, Homo sapiens
ggattctgtgtaggt

SEQ ID NO: 1329555 - DNA, 15 bp, Homo sapiens
cggattctgtgtagg

SEQ ID NO: 1329556 - DNA, 15 bp, Homo sapiens
gcggattctgtgtag

SEQ ID NO: 1329557 - DNA, 15 bp, Homo sapiens
tgcggattctgtgta

SEQ ID NO: 1329558 - DNA, 15 bp, Homo sapiens
gtgcggattctgtgt

SEQ ID NO: 1329559 - DNA, 15 bp, Homo sapiens
ggtgcggattctgtg

SEQ ID NO: 1329560 - DNA, 15 bp, Homo sapiens
aggtgcggattctgt

SEQ ID NO: 1329561 - DNA, 15 bp, Homo sapiens
caggtgcggattctg

SEQ ID NO: 1329562 - DNA, 15 bp, Homo sapiens
ccaggtgcggattct

SEQ ID NO: 1329563 - DNA, 15 bp, Homo sapiens
accaggtgcggattc

SEQ ID NO: 1329564 - DNA, 15 bp, Homo sapiens
gaccaggtgcggatt

SEQ ID NO: 1329565 - DNA, 15 bp, Homo sapiens
agaccaggtgcggat

SEQ ID NO: 1329566 - DNA, 15 bp, Homo sapiens
cagaccaggtgcgga

SEQ ID NO: 1329567 - DNA, 15 bp, Homo sapiens
gcagaccaggtgcgg

SEQ ID NO: 1329568 - DNA, 15 bp, Homo sapiens
tgcagaccaggtgcg

SEQ ID NO: 1329569 - DNA, 15 bp, Homo sapiens
ctgcagaccaggtgc

SEQ ID NO: 1329570 - DNA, 15 bp, Homo sapiens
tctgcagaccaggtg

SEQ ID NO: 1329571 - DNA, 15 bp, Homo sapiens
ttctgcagaccaggt

SEQ ID NO: 1329572 - DNA, 15 bp, Homo sapiens
gttctgcagaccagg

SEQ ID NO: 1329573 - DNA, 15 bp, Homo sapiens
ggttctgcagaccag

SEQ ID NO: 1329574 - DNA, 15 bp, Homo sapiens
gggttctgcagacca

SEQ ID NO: 1329575 - DNA, 15 bp, Homo sapiens
tgggttctgcagacc

SEQ ID NO: 1329576 - DNA, 15 bp, Homo sapiens
gtgggttctgcagac

SEQ ID NO: 1329577 - DNA, 15 bp, Homo sapiens
tgtgggttctgcaga

SEQ ID NO: 1329578 - DNA, 15 bp, Homo sapiens
gtgtgggttctgcag

SEQ ID NO: 1329579 - DNA, 15 bp, Homo sapiens
ggtgtgggttctgca

SEQ ID NO: 1329580 - DNA, 15 bp, Homo sapiens
gggtgtgggttctgc

SEQ ID NO: 1329581 - DNA, 15 bp, Homo sapiens
cgggtgtgggttctg

SEQ ID NO: 1329582 - DNA, 15 bp, Homo sapiens
tcgggtgtgggttct

SEQ ID NO: 1329583 - DNA, 15 bp, Homo sapiens
gtcgggtgtgggttc

SEQ ID NO: 1329584 - DNA, 15 bp, Homo sapiens
ggtcgggtgtgggtt

SEQ ID NO: 1329585 - DNA, 15 bp, Homo sapiens
gggtcgggtgtgggt

SEQ ID NO: 1329586 - DNA, 15 bp, Homo sapiens
tgggtcgggtgtggg

SEQ ID NO: 1329587 - DNA, 15 bp, Homo sapiens
gtgggtcgggtgtgg

SEQ ID NO: 1329588 - DNA, 15 bp, Homo sapiens
tgtgggtcgggtgtg

SEQ ID NO: 1329589 - DNA, 15 bp, Homo sapiens
ctgtgggtcgggtgt

SEQ ID NO: 1329590 - DNA, 15 bp, Homo sapiens
tctgtgggtcgggtg

SEQ ID NO: 1329591 - DNA, 15 bp, Homo sapiens
ttctgtgggtcgggt

SEQ ID NO: 1329592 - DNA, 15 bp, Homo sapiens
gttctgtgggtcggg

SEQ ID NO: 1329593 - DNA, 15 bp, Homo sapiens
ggttctgtgggtcgg

SEQ ID NO: 1329594 - DNA, 15 bp, Homo sapiens
gggttctgtgggtcg

SEQ ID NO: 1329595 - DNA, 15 bp, Homo sapiens
tgggttctgtgggtc

SEQ ID NO: 1329596 - DNA, 15 bp, Homo sapiens
gtgggttctgtgggt

SEQ ID NO: 1329597 - DNA, 15 bp, Homo sapiens
tgtgggttctgtggg

SEQ ID NO: 1329598 - DNA, 15 bp, Homo sapiens
gtgtgggttctgtgg

SEQ ID NO: 1329599 - DNA, 15 bp, Homo sapiens
ggtgtgggttctgtg

SEQ ID NO: 1329600 - DNA, 15 bp, Homo sapiens
gggtgtgggttctgt

SEQ ID NO: 1329601 - DNA, 15 bp, Homo sapiens
atgtgggttctgtgg

SEQ ID NO: 1329602 - DNA, 15 bp, Homo sapiens
gatgtgggttctgtg

SEQ ID NO: 1329603 - DNA, 15 bp, Homo sapiens
agatgtgggttctgt

SEQ ID NO: 1329604 - DNA, 15 bp, Homo sapiens
cagatgtgggttctg

SEQ ID NO: 1329605 - DNA, 15 bp, Homo sapiens
ccagatgtgggttct

SEQ ID NO: 1329606 - DNA, 15 bp, Homo sapiens
gccagatgtgggttc

SEQ ID NO: 1329607 - DNA, 15 bp, Homo sapiens
tgccagatgtgggtt

SEQ ID NO: 1329608 - DNA, 15 bp, Homo sapiens
ctgccagatgtgggt

SEQ ID NO: 1329609 - DNA, 15 bp, Homo sapiens
gctgccagatgtggg

SEQ ID NO: 1329610 - DNA, 15 bp, Homo sapiens
tgctgccagatgtgg

SEQ ID NO: 1329611 - DNA, 15 bp, Homo sapiens
ctgctgccagatgtg

SEQ ID NO: 1329612 - DNA, 15 bp, Homo sapiens
tctgctgccagatgt

SEQ ID NO: 1329613 - DNA, 15 bp, Homo sapiens
ttctgctgccagatg

SEQ ID NO: 1329614 - DNA, 15 bp, Homo sapiens
gttctgctgccagat

SEQ ID NO: 1329615 - DNA, 15 bp, Homo sapiens
ggttctgctgccaga

SEQ ID NO: 1329616 - DNA, 15 bp, Homo sapiens
aggttctgctgccag

SEQ ID NO: 1329617 - DNA, 15 bp, Homo sapiens
gaggttctgctgcca

SEQ ID NO: 1329618 - DNA, 15 bp, Homo sapiens
agaggttctgctgcc

SEQ ID NO: 1329619 - DNA, 15 bp, Homo sapiens
aagaggttctgctgc

SEQ ID NO: 1329620 - DNA, 15 bp, Homo sapiens
taagaggttctgctg

SEQ ID NO: 1329621 - DNA, 15 bp, Homo sapiens
ttaagaggttctgct

SEQ ID NO: 1329622 - DNA, 15 bp, Homo sapiens
attaagaggttctgc

SEQ ID NO: 1329623 - DNA, 15 bp, Homo sapiens
tattaagaggttctg

SEQ ID NO: 1329624 - DNA, 15 bp, Homo sapiens
atattaagaggttct

SEQ ID NO: 1329625 - DNA, 15 bp, Homo sapiens
aatattaagaggttc

SEQ ID NO: 1329626 - DNA, 15 bp, Homo sapiens
aaatattaagaggtt

SEQ ID NO: 1329627 - DNA, 15 bp, Homo sapiens
aaaatattaagaggt

SEQ ID NO: 1329628 - DNA, 15 bp, Homo sapiens
aaaaatattaagagg

SEQ ID NO: 1329629 - DNA, 15 bp, Homo sapiens
aaaaaatattaagag

SEQ ID NO: 1329630 - DNA, 15 bp, Homo sapiens
aaaaaaatattaaga

SEQ ID NO: 1329631 - DNA, 15 bp, Homo sapiens
aaaaaaaatattaag

SEQ ID NO: 1329632 - DNA, 15 bp, Homo sapiens
aaaaaaaaatattaa

SEQ ID NO: 1329633 - DNA, 15 bp, Homo sapiens
aaaaaaaaaatatta

SEQ ID NO: 1329634 - DNA, 15 bp, Homo sapiens
agaaaaaaaaaaaat

SEQ ID NO: 1329635 - DNA, 15 bp, Homo sapiens
atctcaaagaaaaaa

SEQ ID NO: 1329636 - DNA, 15 bp, Homo sapiens
catctcaaagaaaaa

SEQ ID NO: 1329637 - DNA, 15 bp, Homo sapiens
ccatctcaaagaaaa

SEQ ID NO: 1329638 - DNA, 15 bp, Homo sapiens
tccatctcaaagaaa

SEQ ID NO: 1329639 - DNA, 15 bp, Homo sapiens
ctccatctcaaagaa

SEQ ID NO: 1329640 - DNA, 15 bp, Homo sapiens
actccatctcaaaga

SEQ ID NO: 1329641 - DNA, 15 bp, Homo sapiens
gactccatctcaaag

SEQ ID NO: 1329642 - DNA, 15 bp, Homo sapiens
ccagactccatctca

SEQ ID NO: 1329643 - DNA, 15 bp, Homo sapiens
gccagactccatctc

SEQ ID NO: 1329644 - DNA, 15 bp, Homo sapiens
agccagactccatct

SEQ ID NO: 1329645 - DNA, 15 bp, Homo sapiens
gagccagactccatc

SEQ ID NO: 1329646 - DNA, 15 bp, Homo sapiens
agagccagactccat

SEQ ID NO: 1329647 - DNA, 15 bp, Homo sapiens
cagagccagactcca

SEQ ID NO: 1329648 - DNA, 15 bp, Homo sapiens
acagagccagactcc

SEQ ID NO: 1329649 - DNA, 15 bp, Homo sapiens
aagagcttgcagtga

SEQ ID NO: 1329650 - DNA, 15 bp, Homo sapiens
gaagagcttgcagtg

SEQ ID NO: 1329651 - DNA, 15 bp, Homo sapiens
ggaagagcttgcagt

SEQ ID NO: 1329652 - DNA, 15 bp, Homo sapiens
aggaagagcttgcag

SEQ ID NO: 1329653 - DNA, 15 bp, Homo sapiens
gaggaagagcttgca

SEQ ID NO: 1329654 - DNA, 15 bp, Homo sapiens
ggaggaagagcttgc

SEQ ID NO: 1329655 - DNA, 15 bp, Homo sapiens
gggaggaagagcttg

SEQ ID NO: 1329656 - DNA, 15 bp, Homo sapiens
cgggaggaagagctt

SEQ ID NO: 1329657 - DNA, 15 bp, Homo sapiens
ccgggaggaagagct

SEQ ID NO: 1329658 - DNA, 15 bp, Homo sapiens
cccgggaggaagagc

SEQ ID NO: 1329659 - DNA, 15 bp, Homo sapiens
acccgggaggaagag

SEQ ID NO: 1329660 - DNA, 15 bp, Homo sapiens
aacccgggaggaaga

SEQ ID NO: 1329661 - DNA, 15 bp, Homo sapiens
gaacccgggaggaag

SEQ ID NO: 1329662 - DNA, 15 bp, Homo sapiens
tgaacccgggaggaa

SEQ ID NO: 1329663 - DNA, 15 bp, Homo sapiens
gtgaacccgggagga

SEQ ID NO: 1329664 - DNA, 15 bp, Homo sapiens
ggtgaacccgggagg

SEQ ID NO: 1329665 - DNA, 15 bp, Homo sapiens
gggtgaacccgggag

SEQ ID NO: 1329666 - DNA, 15 bp, Homo sapiens
ggggtgaacccggga

SEQ ID NO: 1329667 - DNA, 15 bp, Homo sapiens
tggggtgaacccggg

SEQ ID NO: 1329668 - DNA, 15 bp, Homo sapiens
atggggtgaacccgg

SEQ ID NO: 1329669 - DNA, 15 bp, Homo sapiens
aatggggtgaacccg

SEQ ID NO: 1329670 - DNA, 15 bp, Homo sapiens
gaatggggtgaaccc

SEQ ID NO: 1329671 - DNA, 15 bp, Homo sapiens
agaatggggtgaacc

SEQ ID NO: 1329672 - DNA, 15 bp, Homo sapiens
gagaatggggtgaac

SEQ ID NO: 1329673 - DNA, 15 bp, Homo sapiens
ggagaatggggtgaa

SEQ ID NO: 1329674 - DNA, 15 bp, Homo sapiens
aggagaatggggtga

SEQ ID NO: 1329675 - DNA, 15 bp, Homo sapiens
caggagaatggggtg

SEQ ID NO: 1329676 - DNA, 15 bp, Homo sapiens
gcaggagaatggggt

SEQ ID NO: 1329677 - DNA, 15 bp, Homo sapiens
ggcaggagaatgggg

SEQ ID NO: 1329678 - DNA, 15 bp, Homo sapiens
aggcaggagaatggg

SEQ ID NO: 1329679 - DNA, 15 bp, Homo sapiens
gctactcgggaggtt

SEQ ID NO: 1329680 - DNA, 15 bp, Homo sapiens
acagctactcgggag

SEQ ID NO: 1329681 - DNA, 15 bp, Homo sapiens
cacagctactcggga

SEQ ID NO: 1329682 - DNA, 15 bp, Homo sapiens
tcacagctactcggg

SEQ ID NO: 1329683 - DNA, 15 bp, Homo sapiens
ttcacagctactcgg

SEQ ID NO: 1329684 - DNA, 15 bp, Homo sapiens
attcacagctactcg

SEQ ID NO: 1329685 - DNA, 15 bp, Homo sapiens
tattcacagctactc

SEQ ID NO: 1329686 - DNA, 15 bp, Homo sapiens
gtattcacagctact

SEQ ID NO: 1329687 - DNA, 15 bp, Homo sapiens
tgtattcacagctac

SEQ ID NO: 1329688 - DNA, 15 bp, Homo sapiens
ctgtattcacagcta

SEQ ID NO: 1329689 - DNA, 15 bp, Homo sapiens
cctgtattcacagct

SEQ ID NO: 1329690 - DNA, 15 bp, Homo sapiens
gcctgtattcacagc

SEQ ID NO: 1329691 - DNA, 15 bp, Homo sapiens
cgcctgtattcacag

SEQ ID NO: 1329692 - DNA, 15 bp, Homo sapiens
acgcctgtattcaca

SEQ ID NO: 1329693 - DNA, 15 bp, Homo sapiens
gacgcctgtattcac

SEQ ID NO: 1329694 - DNA, 15 bp, Homo sapiens
ggacgcctgtattca

SEQ ID NO: 1329695 - DNA, 15 bp, Homo sapiens
cggacgcctgtattc

SEQ ID NO: 1329696 - DNA, 15 bp, Homo sapiens
gcggacgcctgtatt

SEQ ID NO: 1329697 - DNA, 15 bp, Homo sapiens
ggcggacgcctgtat

SEQ ID NO: 1329698 - DNA, 15 bp, Homo sapiens
tggcggacgcctgta

SEQ ID NO: 1329699 - DNA, 15 bp, Homo sapiens
gtggcggacgcctgt

SEQ ID NO: 1329700 - DNA, 15 bp, Homo sapiens
ggtggcggacgcctg

SEQ ID NO: 1329701 - DNA, 15 bp, Homo sapiens
tggtggcggacgcct

SEQ ID NO: 1329702 - DNA, 15 bp, Homo sapiens
gtggtggcggacgcc

SEQ ID NO: 1329703 - DNA, 15 bp, Homo sapiens
cgtggtggcggacgc

SEQ ID NO: 1329704 - DNA, 15 bp, Homo sapiens
gcgtggtggcggacg

SEQ ID NO: 1329705 - DNA, 15 bp, Homo sapiens
ggcgtggtggcggac

SEQ ID NO: 1329706 - DNA, 15 bp, Homo sapiens
gggcgtggtggcgga

SEQ ID NO: 1329707 - DNA, 15 bp, Homo sapiens
tcgggcgtggtggcg

SEQ ID NO: 1329708 - DNA, 15 bp, Homo sapiens
aaaaaaattagtcgg

SEQ ID NO: 1329709 - DNA, 15 bp, Homo sapiens
caaaaaaattagtcg

SEQ ID NO: 1329710 - DNA, 15 bp, Homo sapiens
acaaaaaaattagtc

SEQ ID NO: 1329711 - DNA, 15 bp, Homo sapiens
tacaaaaaaattagt

SEQ ID NO: 1329712 - DNA, 15 bp, Homo sapiens
cagaccatcctggct

SEQ ID NO: 1329713 - DNA, 15 bp, Homo sapiens
ccagaccatcctggc

SEQ ID NO: 1329714 - DNA, 15 bp, Homo sapiens
tccagaccatcctgg

SEQ ID NO: 1329715 - DNA, 15 bp, Homo sapiens
atccagaccatcctg

SEQ ID NO: 1329716 - DNA, 15 bp, Homo sapiens
gatccagaccatcct

SEQ ID NO: 1329717 - DNA, 15 bp, Homo sapiens
agatccagaccatcc

SEQ ID NO: 1329718 - DNA, 15 bp, Homo sapiens
gagatccagaccatc

SEQ ID NO: 1329719 - DNA, 15 bp, Homo sapiens
ggagatccagaccat

SEQ ID NO: 1329720 - DNA, 15 bp, Homo sapiens
aggagatccagacca

SEQ ID NO: 1329721 - DNA, 15 bp, Homo sapiens
caggagatccagacc

SEQ ID NO: 1329722 - DNA, 15 bp, Homo sapiens
tcaggagatccagac

SEQ ID NO: 1329723 - DNA, 15 bp, Homo sapiens
gtcaggagatccaga

SEQ ID NO: 1329724 - DNA, 15 bp, Homo sapiens
ggtcaggagatccag

SEQ ID NO: 1329725 - DNA, 15 bp, Homo sapiens
aggtcaggagatcca

SEQ ID NO: 1329726 - DNA, 15 bp, Homo sapiens
gaggtcaggagatcc

SEQ ID NO: 1329727 - DNA, 15 bp, Homo sapiens
aggcagatcacgagg

SEQ ID NO: 1329728 - DNA, 15 bp, Homo sapiens
gcaggcagatcacga

SEQ ID NO: 1329729 - DNA, 15 bp, Homo sapiens
ggcaggcagatcacg

SEQ ID NO: 1329730 - DNA, 15 bp, Homo sapiens
gtgcggtggctcaag

SEQ ID NO: 1329731 - DNA, 15 bp, Homo sapiens
ggtgcggtggctcaa

SEQ ID NO: 1329732 - DNA, 15 bp, Homo sapiens
gaggccgggtgcggt

SEQ ID NO: 1329733 - DNA, 15 bp, Homo sapiens
agaggccgggtgcgg

SEQ ID NO: 1329734 - DNA, 15 bp, Homo sapiens
aagaggccgggtgcg

SEQ ID NO: 1329735 - DNA, 15 bp, Homo sapiens
taagaggccgggtgc

SEQ ID NO: 1329736 - DNA, 15 bp, Homo sapiens
ataagaggccgggtg

SEQ ID NO: 1329737 - DNA, 15 bp, Homo sapiens
aataagaggccgggt

SEQ ID NO: 1329738 - DNA, 15 bp, Homo sapiens
aaataagaggccggg

SEQ ID NO: 1329739 - DNA, 15 bp, Homo sapiens
aaaataagaggccgg

SEQ ID NO: 1329740 - DNA, 15 bp, Homo sapiens
aaaaataagaggccg

SEQ ID NO: 1329741 - DNA, 15 bp, Homo sapiens
aaaaaataagaggcc

SEQ ID NO: 1329742 - DNA, 15 bp, Homo sapiens
aaaaaaataagaggc

SEQ ID NO: 1329743 - DNA, 15 bp, Homo sapiens
aaaaaaaataagagg

SEQ ID NO: 1329744 - DNA, 15 bp, Homo sapiens
aaaaaaaaataagag

SEQ ID NO: 1329745 - DNA, 15 bp, Homo sapiens
ctcaaaaaaaaaaat

SEQ ID NO: 1329746 - DNA, 15 bp, Homo sapiens
tgtgagactccatct

SEQ ID NO: 1329747 - DNA, 15 bp, Homo sapiens
gtgtgagactccatc

SEQ ID NO: 1329748 - DNA, 15 bp, Homo sapiens
agtgtgagactccat

SEQ ID NO: 1329749 - DNA, 15 bp, Homo sapiens
cagtgtgagactcca

SEQ ID NO: 1329750 - DNA, 15 bp, Homo sapiens
acagtgtgagactcc

SEQ ID NO: 1329751 - DNA, 15 bp, Homo sapiens
gacagtgtgagactc

SEQ ID NO: 1329752 - DNA, 15 bp, Homo sapiens
tgacagtgtgagact

SEQ ID NO: 1329753 - DNA, 15 bp, Homo sapiens
gtgacagtgtgagac

SEQ ID NO: 1329754 - DNA, 15 bp, Homo sapiens
ggtgacagtgtgaga

SEQ ID NO: 1329755 - DNA, 15 bp, Homo sapiens
aggtgacagtgtgag

SEQ ID NO: 1329756 - DNA, 15 bp, Homo sapiens
caggtgacagtgtga

SEQ ID NO: 1329757 - DNA, 15 bp, Homo sapiens
ccaggtgacagtgtg

SEQ ID NO: 1329758 - DNA, 15 bp, Homo sapiens
cccaggtgacagtgt

SEQ ID NO: 1329759 - DNA, 15 bp, Homo sapiens
gcccaggtgacagtg

SEQ ID NO: 1329760 - DNA, 15 bp, Homo sapiens
agcccaggtgacagt

SEQ ID NO: 1329761 - DNA, 15 bp, Homo sapiens
cagcccaggtgacag

SEQ ID NO: 1329762 - DNA, 15 bp, Homo sapiens
ccagcccaggtgaca

SEQ ID NO: 1329763 - DNA, 15 bp, Homo sapiens
tccagcccaggtgac

SEQ ID NO: 1329764 - DNA, 15 bp, Homo sapiens
ctccagcccaggtga

SEQ ID NO: 1329765 - DNA, 15 bp, Homo sapiens
actccagcccaggtg

SEQ ID NO: 1329766 - DNA, 15 bp, Homo sapiens
cactccagcccaggt

SEQ ID NO: 1329767 - DNA, 15 bp, Homo sapiens
ctgcactccagccca

SEQ ID NO: 1329768 - DNA, 15 bp, Homo sapiens
actgcactccagccc

SEQ ID NO: 1329769 - DNA, 15 bp, Homo sapiens
cgctccactgcactc

SEQ ID NO: 1329770 - DNA, 15 bp, Homo sapiens
tcgctccactgcact

SEQ ID NO: 1329771 - DNA, 15 bp, Homo sapiens
atcgctccactgcac

SEQ ID NO: 1329772 - DNA, 15 bp, Homo sapiens
gatcgctccactgca

SEQ ID NO: 1329773 - DNA, 15 bp, Homo sapiens
agatcgctccactgc

SEQ ID NO: 1329774 - DNA, 15 bp, Homo sapiens
gagatcgctccactg

SEQ ID NO: 1329775 - DNA, 15 bp, Homo sapiens
tcttgaacccaggag

SEQ ID NO: 1329776 - DNA, 15 bp, Homo sapiens
ctcttgaacccagga

SEQ ID NO: 1329777 - DNA, 15 bp, Homo sapiens
tctcttgaacccagg

SEQ ID NO: 1329778 - DNA, 15 bp, Homo sapiens
atctcttgaacccag

SEQ ID NO: 1329779 - DNA, 15 bp, Homo sapiens
aatctcttgaaccca

SEQ ID NO: 1329780 - DNA, 15 bp, Homo sapiens
gaatctcttgaaccc

SEQ ID NO: 1329781 - DNA, 15 bp, Homo sapiens
gagaatctcttgaac

SEQ ID NO: 1329782 - DNA, 15 bp, Homo sapiens
gcacctgtaatccca

SEQ ID NO: 1329783 - DNA, 15 bp, Homo sapiens
ggcacctgtaatccc

SEQ ID NO: 1329784 - DNA, 15 bp, Homo sapiens
tgggcacctgtaatc

SEQ ID NO: 1329785 - DNA, 15 bp, Homo sapiens
gtgggcacctgtaat

SEQ ID NO: 1329786 - DNA, 15 bp, Homo sapiens
ggtgggcacctgtaa

SEQ ID NO: 1329787 - DNA, 15 bp, Homo sapiens
gtggtggtgggcacc

SEQ ID NO: 1329788 - DNA, 15 bp, Homo sapiens
cgtggtggtgggcac

SEQ ID NO: 1329789 - DNA, 15 bp, Homo sapiens
gcgtggtggtgggca

SEQ ID NO: 1329790 - DNA, 15 bp, Homo sapiens
ctagccaggcgtggt

SEQ ID NO: 1329791 - DNA, 15 bp, Homo sapiens
actagccaggcgtgg

SEQ ID NO: 1329792 - DNA, 15 bp, Homo sapiens
aactagccaggcgtg

SEQ ID NO: 1329793 - DNA, 15 bp, Homo sapiens
aaactagccaggcgt

SEQ ID NO: 1329794 - DNA, 15 bp, Homo sapiens
aaaactagccaggcg

SEQ ID NO: 1329795 - DNA, 15 bp, Homo sapiens
aaaaactagccaggc

SEQ ID NO: 1329796 - DNA, 15 bp, Homo sapiens
aaaaaactagccagg

SEQ ID NO: 1329797 - DNA, 15 bp, Homo sapiens
caaaaaactagccag

SEQ ID NO: 1329798 - DNA, 15 bp, Homo sapiens
acaaaaaactagcca

SEQ ID NO: 1329799 - DNA, 15 bp, Homo sapiens
tacaaaaaactagcc

SEQ ID NO: 1329800 - DNA, 15 bp, Homo sapiens
atacaaaaaactagc

SEQ ID NO: 1329801 - DNA, 15 bp, Homo sapiens
aatacaaaaaactag

SEQ ID NO: 1329802 - DNA, 15 bp, Homo sapiens
aaatacaaaaaacta

SEQ ID NO: 1329803 - DNA, 15 bp, Homo sapiens
aaaatacaaaaaact

SEQ ID NO: 1329804 - DNA, 15 bp, Homo sapiens
aaaaatacaaaaaac

SEQ ID NO: 1329805 - DNA, 15 bp, Homo sapiens
atgtcaggagttcaa

SEQ ID NO: 1329806 - DNA, 15 bp, Homo sapiens
gatgtcaggagttca

SEQ ID NO: 1329807 - DNA, 15 bp, Homo sapiens
taaggtgggcggatc

SEQ ID NO: 1329808 - DNA, 15 bp, Homo sapiens
ctaaggtgggcggat

SEQ ID NO: 1329809 - DNA, 15 bp, Homo sapiens
gctaaggtgggcgga

SEQ ID NO: 1329810 - DNA, 15 bp, Homo sapiens
ggctaaggtgggcgg

SEQ ID NO: 1329811 - DNA, 15 bp, Homo sapiens
aggctaaggtgggcg

SEQ ID NO: 1329812 - DNA, 15 bp, Homo sapiens
gaggctaaggtgggc

SEQ ID NO: 1329813 - DNA, 15 bp, Homo sapiens
gggaggctaaggtgg

SEQ ID NO: 1329814 - DNA, 15 bp, Homo sapiens
tgggaggctaaggtg

SEQ ID NO: 1329815 - DNA, 15 bp, Homo sapiens
ttgggaggctaaggt

SEQ ID NO: 1329816 - DNA, 15 bp, Homo sapiens
tatggtggctcacgc

SEQ ID NO: 1329817 - DNA, 15 bp, Homo sapiens
gtatggtggctcacg

SEQ ID NO: 1329818 - DNA, 15 bp, Homo sapiens
ggtatggtggctcac

SEQ ID NO: 1329819 - DNA, 15 bp, Homo sapiens
aggtatggtggctca

SEQ ID NO: 1329820 - DNA, 15 bp, Homo sapiens
caggtatggtggctc

SEQ ID NO: 1329821 - DNA, 15 bp, Homo sapiens
ccaggtatggtggct

SEQ ID NO: 1329822 - DNA, 15 bp, Homo sapiens
gccaggtatggtggc

SEQ ID NO: 1329823 - DNA, 15 bp, Homo sapiens
ggccaggtatggtgg

SEQ ID NO: 1329824 - DNA, 15 bp, Homo sapiens
tggccaggtatggtg

SEQ ID NO: 1329825 - DNA, 15 bp, Homo sapiens
ctggccaggtatggt

SEQ ID NO: 1329826 - DNA, 15 bp, Homo sapiens
gctggccaggtatgg

SEQ ID NO: 1329827 - DNA, 15 bp, Homo sapiens
tgctggccaggtatg

SEQ ID NO: 1329828 - DNA, 15 bp, Homo sapiens
ttgctggccaggtat

SEQ ID NO: 1329829 - DNA, 15 bp, Homo sapiens
tttgctggccaggta

SEQ ID NO: 1329830 - DNA, 15 bp, Homo sapiens
ttttgctggccaggt

SEQ ID NO: 1329831 - DNA, 15 bp, Homo sapiens
gttttgctggccagg

SEQ ID NO: 1329832 - DNA, 15 bp, Homo sapiens
ggttttgctggccag

SEQ ID NO: 1329833 - DNA, 15 bp, Homo sapiens
aggttttgctggcca

SEQ ID NO: 1329834 - DNA, 15 bp, Homo sapiens
gaggttttgctggcc

SEQ ID NO: 1329835 - DNA, 15 bp, Homo sapiens
agaggttttgctggc

SEQ ID NO: 1329836 - DNA, 15 bp, Homo sapiens
aagaggttttgctgg

SEQ ID NO: 1329837 - DNA, 15 bp, Homo sapiens
aaagaggttttgctg

SEQ ID NO: 1329838 - DNA, 15 bp, Homo sapiens
taaagaggttttgct

SEQ ID NO: 1329839 - DNA, 15 bp, Homo sapiens
ttaaagaggttttgc

SEQ ID NO: 1329840 - DNA, 15 bp, Homo sapiens
gttaaagaggttttg

SEQ ID NO: 1329841 - DNA, 15 bp, Homo sapiens
agttaaagaggtttt

SEQ ID NO: 1329842 - DNA, 15 bp, Homo sapiens
aagttaaagaggttt

SEQ ID NO: 1329843 - DNA, 15 bp, Homo sapiens
caagttaaagaggtt

SEQ ID NO: 1329844 - DNA, 15 bp, Homo sapiens
acaagttaaagaggt

SEQ ID NO: 1329845 - DNA, 15 bp, Homo sapiens
cacaagttaaagagg

SEQ ID NO: 1329846 - DNA, 15 bp, Homo sapiens
acacaagttaaagag

SEQ ID NO: 1329847 - DNA, 15 bp, Homo sapiens
aacacaagttaaaga

SEQ ID NO: 1329848 - DNA, 15 bp, Homo sapiens
gaacacaagttaaag

SEQ ID NO: 1329849 - DNA, 15 bp, Homo sapiens
ggaacacaagttaaa

SEQ ID NO: 1329850 - DNA, 15 bp, Homo sapiens
tggaacacaagttaa

SEQ ID NO: 1329851 - DNA, 15 bp, Homo sapiens
atggaacacaagtta

SEQ ID NO: 1329852 - DNA, 15 bp, Homo sapiens
catggaacacaagtt

SEQ ID NO: 1329853 - DNA, 15 bp, Homo sapiens
ccatggaacacaagt

SEQ ID NO: 1329854 - DNA, 15 bp, Homo sapiens
cccatggaacacaag

SEQ ID NO: 1329855 - DNA, 15 bp, Homo sapiens
gcccatggaacacaa

SEQ ID NO: 1329856 - DNA, 15 bp, Homo sapiens
agcccatggaacaca

SEQ ID NO: 1329857 - DNA, 15 bp, Homo sapiens
gagcccatggaacac

SEQ ID NO: 1329858 - DNA, 15 bp, Homo sapiens
ggagcccatggaaca

SEQ ID NO: 1329859 - DNA, 15 bp, Homo sapiens
aggagcccatggaac

SEQ ID NO: 1329860 - DNA, 15 bp, Homo sapiens
aaggagcccatggaa

SEQ ID NO: 1329861 - DNA, 15 bp, Homo sapiens
aaaggagcccatgga

SEQ ID NO: 1329862 - DNA, 15 bp, Homo sapiens
aaaaggagcccatgg

SEQ ID NO: 1329863 - DNA, 15 bp, Homo sapiens
gaaaaggagcccatg

SEQ ID NO: 1329864 - DNA, 15 bp, Homo sapiens
agaaaaggagcccat

SEQ ID NO: 1329865 - DNA, 15 bp, Homo sapiens
cagaaaaggagccca

SEQ ID NO: 1329866 - DNA, 15 bp, Homo sapiens
acagaaaaggagccc

SEQ ID NO: 1329867 - DNA, 15 bp, Homo sapiens
cacagaaaaggagcc

SEQ ID NO: 1329868 - DNA, 15 bp, Homo sapiens
ccacagaaaaggagc

SEQ ID NO: 1329869 - DNA, 15 bp, Homo sapiens
cccacagaaaaggag

SEQ ID NO: 1329870 - DNA, 15 bp, Homo sapiens
acccacagaaaagga

SEQ ID NO: 1329871 - DNA, 15 bp, Homo sapiens
gacccacagaaaagg

SEQ ID NO: 1329872 - DNA, 15 bp, Homo sapiens
tgacccacagaaaag

SEQ ID NO: 1329873 - DNA, 15 bp, Homo sapiens
ttgacccacagaaaa

SEQ ID NO: 1329874 - DNA, 15 bp, Homo sapiens
tttgacccacagaaa

SEQ ID NO: 1329875 - DNA, 15 bp, Homo sapiens
ttttgacccacagaa

SEQ ID NO: 1329876 - DNA, 15 bp, Homo sapiens
attttgacccacaga

SEQ ID NO: 1329877 - DNA, 15 bp, Homo sapiens
gattttgacccacag

SEQ ID NO: 1329878 - DNA, 15 bp, Homo sapiens
ggattttgacccaca

SEQ ID NO: 1329879 - DNA, 15 bp, Homo sapiens
aggattttgacccac

SEQ ID NO: 1329880 - DNA, 15 bp, Homo sapiens
gaggattttgaccca

SEQ ID NO: 1329881 - DNA, 15 bp, Homo sapiens
ggaggattttgaccc

SEQ ID NO: 1329882 - DNA, 15 bp, Homo sapiens
aggaggattttgacc

SEQ ID NO: 1329883 - DNA, 15 bp, Homo sapiens
caggaggattttgac

SEQ ID NO: 1329884 - DNA, 15 bp, Homo sapiens
ccaggaggattttga

SEQ ID NO: 1329885 - DNA, 15 bp, Homo sapiens
tccaggaggattttg

SEQ ID NO: 1329886 - DNA, 15 bp, Homo sapiens
ttccaggaggatttt

SEQ ID NO: 1329887 - DNA, 15 bp, Homo sapiens
gttccaggaggattt

SEQ ID NO: 1329888 - DNA, 15 bp, Homo sapiens
ggttccaggaggatt

SEQ ID NO: 1329889 - DNA, 15 bp, Homo sapiens
gggttccaggaggat

SEQ ID NO: 1329890 - DNA, 15 bp, Homo sapiens
agggttccaggagga

SEQ ID NO: 1329891 - DNA, 15 bp, Homo sapiens
tagggttccaggagg

SEQ ID NO: 1329892 - DNA, 15 bp, Homo sapiens
gtagggttccaggag

SEQ ID NO: 1329893 - DNA, 15 bp, Homo sapiens
tgtagggttccagga

SEQ ID NO: 1329894 - DNA, 15 bp, Homo sapiens
ttgtagggttccagg

SEQ ID NO: 1329895 - DNA, 15 bp, Homo sapiens
attgtagggttccag

SEQ ID NO: 1329896 - DNA, 15 bp, Homo sapiens
cattgtagggttcca

SEQ ID NO: 1329897 - DNA, 15 bp, Homo sapiens
gcattgtagggttcc

SEQ ID NO: 1329898 - DNA, 15 bp, Homo sapiens
tgcattgtagggttc

SEQ ID NO: 1329899 - DNA, 15 bp, Homo sapiens
ctgcattgtagggtt

SEQ ID NO: 1329900 - DNA, 15 bp, Homo sapiens
cctgcattgtagggt

SEQ ID NO: 1329901 - DNA, 15 bp, Homo sapiens
gcctgcattgtaggg

SEQ ID NO: 1329902 - DNA, 15 bp, Homo sapiens
ggcctgcattgtagg

SEQ ID NO: 1329903 - DNA, 15 bp, Homo sapiens
gggcctgcattgtag

SEQ ID NO: 1329904 - DNA, 15 bp, Homo sapiens
agggcctgcattgta

SEQ ID NO: 1329905 - DNA, 15 bp, Homo sapiens
tagggcctgcattgt

SEQ ID NO: 1329906 - DNA, 15 bp, Homo sapiens
gtagggcctgcattg

SEQ ID NO: 1329907 - DNA, 15 bp, Homo sapiens
tgtagggcctgcatt

SEQ ID NO: 1329908 - DNA, 15 bp, Homo sapiens
ctgtagggcctgcat

SEQ ID NO: 1329909 - DNA, 15 bp, Homo sapiens
cctgtagggcctgca

SEQ ID NO: 1329910 - DNA, 15 bp, Homo sapiens
ccctgtagggcctgc

SEQ ID NO: 1329911 - DNA, 15 bp, Homo sapiens
cccctgtagggcctg

SEQ ID NO: 1329912 - DNA, 15 bp, Homo sapiens
acccctgtagggcct

SEQ ID NO: 1329913 - DNA, 15 bp, Homo sapiens
cacccctgtagggcc

SEQ ID NO: 1329914 - DNA, 15 bp, Homo sapiens
ccacccctgtagggc

SEQ ID NO: 1329915 - DNA, 15 bp, Homo sapiens
cccacccctgtaggg

SEQ ID NO: 1329916 - DNA, 15 bp, Homo sapiens
acccacccctgtagg

SEQ ID NO: 1329917 - DNA, 15 bp, Homo sapiens
cacccacccctgtag

SEQ ID NO: 1329918 - DNA, 15 bp, Homo sapiens
ccacccacccctgta

SEQ ID NO: 1329919 - DNA, 15 bp, Homo sapiens
accacccacccctgt

SEQ ID NO: 1329920 - DNA, 15 bp, Homo sapiens
taccacccacccctg

SEQ ID NO: 1329921 - DNA, 15 bp, Homo sapiens
ttaccacccacccct

SEQ ID NO: 1329922 - DNA, 15 bp, Homo sapiens
cttaccacccacccc

SEQ ID NO: 1329923 - DNA, 15 bp, Homo sapiens
acttaccacccaccc

SEQ ID NO: 1329924 - DNA, 15 bp, Homo sapiens
gacttaccacccacc

SEQ ID NO: 1329925 - DNA, 15 bp, Homo sapiens
ggacttaccacccac

SEQ ID NO: 1329926 - DNA, 15 bp, Homo sapiens
tggacttaccaccca

SEQ ID NO: 1329927 - DNA, 15 bp, Homo sapiens
ttggacttaccaccc

SEQ ID NO: 1329928 - DNA, 15 bp, Homo sapiens
gttggacttaccacc

SEQ ID NO: 1329929 - DNA, 15 bp, Homo sapiens
tgttggacttaccac

SEQ ID NO: 1329930 - DNA, 15 bp, Homo sapiens
ttgttggacttacca

SEQ ID NO: 1329931 - DNA, 15 bp, Homo sapiens
tttgttggacttacc

SEQ ID NO: 1329932 - DNA, 15 bp, Homo sapiens
gtttgttggacttac

SEQ ID NO: 1329933 - DNA, 15 bp, Homo sapiens
tgtttgttggactta

SEQ ID NO: 1329934 - DNA, 15 bp, Homo sapiens
ctgtttgttggactt

SEQ ID NO: 1329935 - DNA, 15 bp, Homo sapiens
cctgtttgttggact

SEQ ID NO: 1329936 - DNA, 15 bp, Homo sapiens
tcctgtttgttggac

SEQ ID NO: 1329937 - DNA, 15 bp, Homo sapiens
atcctgtttgttgga

SEQ ID NO: 1329938 - DNA, 15 bp, Homo sapiens
aatcctgtttgttgg

SEQ ID NO: 1329939 - DNA, 15 bp, Homo sapiens
aaatcctgtttgttg

SEQ ID NO: 1329940 - DNA, 15 bp, Homo sapiens
gaaatcctgtttgtt

SEQ ID NO: 1329941 - DNA, 15 bp, Homo sapiens
tgaaatcctgtttgt

SEQ ID NO: 1329942 - DNA, 15 bp, Homo sapiens
atgaaatcctgtttg

SEQ ID NO: 1329943 - DNA, 15 bp, Homo sapiens
gatgaaatcctgttt

SEQ ID NO: 1329944 - DNA, 15 bp, Homo sapiens
agatgaaatcctgtt

SEQ ID NO: 1329945 - DNA, 15 bp, Homo sapiens
aagatgaaatcctgt

SEQ ID NO: 1329946 - DNA, 15 bp, Homo sapiens
gaagatgaaatcctg

SEQ ID NO: 1329947 - DNA, 15 bp, Homo sapiens
agaagatgaaatcct

SEQ ID NO: 1329948 - DNA, 15 bp, Homo sapiens
cagaagatgaaatcc

SEQ ID NO: 1329949 - DNA, 15 bp, Homo sapiens
ccagaagatgaaatc

SEQ ID NO: 1329950 - DNA, 15 bp, Homo sapiens
ctccagaagatgaaa

SEQ ID NO: 1329951 - DNA, 15 bp, Homo sapiens
gctccagaagatgaa

SEQ ID NO: 1329952 - DNA, 15 bp, Homo sapiens
agctccagaagatga

SEQ ID NO: 1329953 - DNA, 15 bp, Homo sapiens
gagctccagaagatg

SEQ ID NO: 1329954 - DNA, 15 bp, Homo sapiens
ggagctccagaagat

SEQ ID NO: 1329955 - DNA, 15 bp, Homo sapiens
aggagctccagaaga

SEQ ID NO: 1329956 - DNA, 15 bp, Homo sapiens
caggagctccagaag

SEQ ID NO: 1329957 - DNA, 15 bp, Homo sapiens
ccaggagctccagaa

SEQ ID NO: 1329958 - DNA, 15 bp, Homo sapiens
tccaggagctccaga

SEQ ID NO: 1329959 - DNA, 15 bp, Homo sapiens
atccaggagctccag

SEQ ID NO: 1329960 - DNA, 15 bp, Homo sapiens
aatccaggagctcca

SEQ ID NO: 1329961 - DNA, 15 bp, Homo sapiens
aaatccaggagctcc

SEQ ID NO: 1329962 - DNA, 15 bp, Homo sapiens
gaaatccaggagctc

SEQ ID NO: 1329963 - DNA, 15 bp, Homo sapiens
tgaaatccaggagct

SEQ ID NO: 1329964 - DNA, 15 bp, Homo sapiens
atgaaatccaggagc

SEQ ID NO: 1329965 - DNA, 15 bp, Homo sapiens
gatgaaatccaggag

SEQ ID NO: 1329966 - DNA, 15 bp, Homo sapiens
cgatgaaatccagga

SEQ ID NO: 1329967 - DNA, 15 bp, Homo sapiens
acgatgaaatccagg

SEQ ID NO: 1329968 - DNA, 15 bp, Homo sapiens
gacgatgaaatccag

SEQ ID NO: 1329969 - DNA, 15 bp, Homo sapiens
ggacgatgaaatcca

SEQ ID NO: 1329970 - DNA, 15 bp, Homo sapiens
gggacgatgaaatcc

SEQ ID NO: 1329971 - DNA, 15 bp, Homo sapiens
tgggacgatgaaatc

SEQ ID NO: 1329972 - DNA, 15 bp, Homo sapiens
atgggacgatgaaat

SEQ ID NO: 1329973 - DNA, 15 bp, Homo sapiens
catgggacgatgaaa

SEQ ID NO: 1329974 - DNA, 15 bp, Homo sapiens
ccatgggacgatgaa

SEQ ID NO: 1329975 - DNA, 15 bp, Homo sapiens
cccatgggacgatga

SEQ ID NO: 1329976 - DNA, 15 bp, Homo sapiens
gcccatgggacgatg

SEQ ID NO: 1329977 - DNA, 15 bp, Homo sapiens
ggcccatgggacgat

SEQ ID NO: 1329978 - DNA, 15 bp, Homo sapiens
tggcccatgggacga

SEQ ID NO: 1329979 - DNA, 15 bp, Homo sapiens
gtggcccatgggacg

SEQ ID NO: 1329980 - DNA, 15 bp, Homo sapiens
tgtggcccatgggac

SEQ ID NO: 1329981 - DNA, 15 bp, Homo sapiens
ctgtggcccatggga

SEQ ID NO: 1329982 - DNA, 15 bp, Homo sapiens
actgtggcccatggg

SEQ ID NO: 1329983 - DNA, 15 bp, Homo sapiens
cactgtggcccatgg

SEQ ID NO: 1329984 - DNA, 15 bp, Homo sapiens
gcactgtggcccatg

SEQ ID NO: 1329985 - DNA, 15 bp, Homo sapiens
tgcactgtggcccat

SEQ ID NO: 1329986 - DNA, 15 bp, Homo sapiens
ctgcactgtggccca

SEQ ID NO: 1329987 - DNA, 15 bp, Homo sapiens
gctgcactgtggccc

SEQ ID NO: 1329988 - DNA, 15 bp, Homo sapiens
cgctgcactgtggcc

SEQ ID NO: 1329989 - DNA, 15 bp, Homo sapiens
tcgctgcactgtggc

SEQ ID NO: 1329990 - DNA, 15 bp, Homo sapiens
gtcgctgcactgtgg

SEQ ID NO: 1329991 - DNA, 15 bp, Homo sapiens
tgtcgctgcactgtg

SEQ ID NO: 1329992 - DNA, 15 bp, Homo sapiens
ctgtcgctgcactgt

SEQ ID NO: 1329993 - DNA, 15 bp, Homo sapiens
tctgtcgctgcactg

SEQ ID NO: 1329994 - DNA, 15 bp, Homo sapiens
ttctgtcgctgcact

SEQ ID NO: 1329995 - DNA, 15 bp, Homo sapiens
gttctgtcgctgcac

SEQ ID NO: 1329996 - DNA, 15 bp, Homo sapiens
ggttctgtcgctgca

SEQ ID NO: 1329997 - DNA, 15 bp, Homo sapiens
aggttctgtcgctgc

SEQ ID NO: 1329998 - DNA, 15 bp, Homo sapiens
gaggttctgtcgctg

SEQ ID NO: 1329999 - DNA, 15 bp, Homo sapiens
ggaggttctgtcgct

SEQ ID NO: 1330000 - DNA, 15 bp, Homo sapiens
aggaggttctgtcgc

SEQ ID NO: 1330001 - DNA, 15 bp, Homo sapiens
gaggaggttctgtcg

SEQ ID NO: 1330002 - DNA, 15 bp, Homo sapiens
tgaggaggttctgtc

SEQ ID NO: 1330003 - DNA, 15 bp, Homo sapiens
ctgaggaggttctgt

SEQ ID NO: 1330004 - DNA, 15 bp, Homo sapiens
gctgaggaggttctg

SEQ ID NO: 1330005 - DNA, 15 bp, Homo sapiens
agctgaggaggttct

SEQ ID NO: 1330006 - DNA, 15 bp, Homo sapiens
aagctgaggaggttc

SEQ ID NO: 1330007 - DNA, 15 bp, Homo sapiens
aaagctgaggaggtt

SEQ ID NO: 1330008 - DNA, 15 bp, Homo sapiens
gaaagctgaggaggt

SEQ ID NO: 1330009 - DNA, 15 bp, Homo sapiens
agaaagctgaggagg

SEQ ID NO: 1330010 - DNA, 15 bp, Homo sapiens
cagaaagctgaggag

SEQ ID NO: 1330011 - DNA, 15 bp, Homo sapiens
acagaaagctgagga

SEQ ID NO: 1330012 - DNA, 15 bp, Homo sapiens
tacagaaagctgagg

SEQ ID NO: 1330013 - DNA, 15 bp, Homo sapiens
atacagaaagctgag

SEQ ID NO: 1330014 - DNA, 15 bp, Homo sapiens
aatacagaaagctga

SEQ ID NO: 1330015 - DNA, 15 bp, Homo sapiens
caatacagaaagctg

SEQ ID NO: 1330016 - DNA, 15 bp, Homo sapiens
acaatacagaaagct

SEQ ID NO: 1330017 - DNA, 15 bp, Homo sapiens
cacaatacagaaagc

SEQ ID NO: 1330018 - DNA, 15 bp, Homo sapiens
gcacaatacagaaag

SEQ ID NO: 1330019 - DNA, 15 bp, Homo sapiens
agcacaatacagaaa

SEQ ID NO: 1330020 - DNA, 15 bp, Homo sapiens
gagcacaatacagaa

SEQ ID NO: 1330021 - DNA, 15 bp, Homo sapiens
tgagcacaatacaga

SEQ ID NO: 1330022 - DNA, 15 bp, Homo sapiens
ctgagcacaatacag

SEQ ID NO: 1330023 - DNA, 15 bp, Homo sapiens
cctgagcacaataca

SEQ ID NO: 1330024 - DNA, 15 bp, Homo sapiens
ccctgagcacaatac

SEQ ID NO: 1330025 - DNA, 15 bp, Homo sapiens
gccctgagcacaata

SEQ ID NO: 1330026 - DNA, 15 bp, Homo sapiens
agccctgagcacaat

SEQ ID NO: 1330027 - DNA, 15 bp, Homo sapiens
aagccctgagcacaa

SEQ ID NO: 1330028 - DNA, 15 bp, Homo sapiens
gaagccctgagcaca

SEQ ID NO: 1330029 - DNA, 15 bp, Homo sapiens
cgaagccctgagcac

SEQ ID NO: 1330030 - DNA, 15 bp, Homo sapiens
ccgaagccctgagca

SEQ ID NO: 1330031 - DNA, 15 bp, Homo sapiens
cccgaagccctgagc

SEQ ID NO: 1330032 - DNA, 15 bp, Homo sapiens
acccgaagccctgag

SEQ ID NO: 1330033 - DNA, 15 bp, Homo sapiens
tacccgaagccctga

SEQ ID NO: 1330034 - DNA, 15 bp, Homo sapiens
gtacccgaagccctg

SEQ ID NO: 1330035 - DNA, 15 bp, Homo sapiens
agtacccgaagccct

SEQ ID NO: 1330036 - DNA, 15 bp, Homo sapiens
cagtacccgaagccc

SEQ ID NO: 1330037 - DNA, 15 bp, Homo sapiens
gcagtacccgaagcc

SEQ ID NO: 1330038 - DNA, 15 bp, Homo sapiens
tgcagtacccgaagc

SEQ ID NO: 1330039 - DNA, 15 bp, Homo sapiens
ttgcagtacccgaag

SEQ ID NO: 1330040 - DNA, 15 bp, Homo sapiens
tttgcagtacccgaa

SEQ ID NO: 1330041 - DNA, 15 bp, Homo sapiens
gtttgcagtacccga

SEQ ID NO: 1330042 - DNA, 15 bp, Homo sapiens
ggtttgcagtacccg

SEQ ID NO: 1330043 - DNA, 15 bp, Homo sapiens
aggtttgcagtaccc

SEQ ID NO: 1330044 - DNA, 15 bp, Homo sapiens
caggtttgcagtacc

SEQ ID NO: 1330045 - DNA, 15 bp, Homo sapiens
tcaggtttgcagtac

SEQ ID NO: 1330046 - DNA, 15 bp, Homo sapiens
ctcaggtttgcagta

SEQ ID NO: 1330047 - DNA, 15 bp, Homo sapiens
gctcaggtttgcagt

SEQ ID NO: 1330048 - DNA, 15 bp, Homo sapiens
ggctcaggtttgcag

SEQ ID NO: 1330049 - DNA, 15 bp, Homo sapiens
tggctcaggtttgca

SEQ ID NO: 1330050 - DNA, 15 bp, Homo sapiens
ttggctcaggtttgc

SEQ ID NO: 1330051 - DNA, 15 bp, Homo sapiens
cttggctcaggtttg

SEQ ID NO: 1330052 - DNA, 15 bp, Homo sapiens
ccttggctcaggttt

SEQ ID NO: 1330053 - DNA, 15 bp, Homo sapiens
cccttggctcaggtt

SEQ ID NO: 1330054 - DNA, 15 bp, Homo sapiens
tcccttggctcaggt

SEQ ID NO: 1330055 - DNA, 15 bp, Homo sapiens
ctcccttggctcagg

SEQ ID NO: 1330056 - DNA, 15 bp, Homo sapiens
cctcccttggctcag

SEQ ID NO: 1330057 - DNA, 15 bp, Homo sapiens
acctcccttggctca

SEQ ID NO: 1330058 - DNA, 15 bp, Homo sapiens
tacctcccttggctc

SEQ ID NO: 1330059 - DNA, 15 bp, Homo sapiens
ttacctcccttggct

SEQ ID NO: 1330060 - DNA, 15 bp, Homo sapiens
cttacctcccttggc

SEQ ID NO: 1330061 - DNA, 15 bp, Homo sapiens
tcttacctcccttgg

SEQ ID NO: 1330062 - DNA, 15 bp, Homo sapiens
ctcttacctcccttg

SEQ ID NO: 1330063 - DNA, 15 bp, Homo sapiens
cctcttacctccctt

SEQ ID NO: 1330064 - DNA, 15 bp, Homo sapiens
tcctcttacctccct

SEQ ID NO: 1330065 - DNA, 15 bp, Homo sapiens
ctcctcttacctccc

SEQ ID NO: 1330066 - DNA, 15 bp, Homo sapiens
actcctcttacctcc

SEQ ID NO: 1330067 - DNA, 15 bp, Homo sapiens
aactcctcttacctc

SEQ ID NO: 1330068 - DNA, 15 bp, Homo sapiens
taactcctcttacct

SEQ ID NO: 1330069 - DNA, 15 bp, Homo sapiens
ctaactcctcttacc

SEQ ID NO: 1330070 - DNA, 15 bp, Homo sapiens
actaactcctcttac

SEQ ID NO: 1330071 - DNA, 15 bp, Homo sapiens
aactaactcctctta

SEQ ID NO: 1330072 - DNA, 15 bp, Homo sapiens
gaactaactcctctt

SEQ ID NO: 1330073 - DNA, 15 bp, Homo sapiens
tgaactaactcctct

SEQ ID NO: 1330074 - DNA, 15 bp, Homo sapiens
gtgaactaactcctc

SEQ ID NO: 1330075 - DNA, 15 bp, Homo sapiens
agtgaactaactcct

SEQ ID NO: 1330076 - DNA, 15 bp, Homo sapiens
cagtgaactaactcc

SEQ ID NO: 1330077 - DNA, 15 bp, Homo sapiens
tcagtgaactaactc

SEQ ID NO: 1330078 - DNA, 15 bp, Homo sapiens
atcagtgaactaact

SEQ ID NO: 1330079 - DNA, 15 bp, Homo sapiens
aatcagtgaactaac

SEQ ID NO: 1330080 - DNA, 15 bp, Homo sapiens
aaatcagtgaactaa

SEQ ID NO: 1330081 - DNA, 15 bp, Homo sapiens
caaatcagtgaacta

SEQ ID NO: 1330082 - DNA, 15 bp, Homo sapiens
acaaatcagtgaact

SEQ ID NO: 1330083 - DNA, 15 bp, Homo sapiens
cacaaatcagtgaac

SEQ ID NO: 1330084 - DNA, 15 bp, Homo sapiens
tcacaaatcagtgaa

SEQ ID NO: 1330085 - DNA, 15 bp, Homo sapiens
ctcacaaatcagtga

SEQ ID NO: 1330086 - DNA, 15 bp, Homo sapiens
cctcacaaatcagtg

SEQ ID NO: 1330087 - DNA, 15 bp, Homo sapiens
gcctcacaaatcagt

SEQ ID NO: 1330088 - DNA, 15 bp, Homo sapiens
tgcctcacaaatcag

SEQ ID NO: 1330089 - DNA, 15 bp, Homo sapiens
ttgcctcacaaatca

SEQ ID NO: 1330090 - DNA, 15 bp, Homo sapiens
tttgcctcacaaatc

SEQ ID NO: 1330091 - DNA, 15 bp, Homo sapiens
atttgcctcacaaat

SEQ ID NO: 1330092 - DNA, 15 bp, Homo sapiens
catttgcctcacaaa

SEQ ID NO: 1330093 - DNA, 15 bp, Homo sapiens
acatttgcctcacaa

SEQ ID NO: 1330094 - DNA, 15 bp, Homo sapiens
aacatttgcctcaca

SEQ ID NO: 1330095 - DNA, 15 bp, Homo sapiens
taacatttgcctcac

SEQ ID NO: 1330096 - DNA, 15 bp, Homo sapiens
ttaacatttgcctca

SEQ ID NO: 1330097 - DNA, 15 bp, Homo sapiens
attaacatttgcctc

SEQ ID NO: 1330098 - DNA, 15 bp, Homo sapiens
aattaacatttgcct

SEQ ID NO: 1330099 - DNA, 15 bp, Homo sapiens
caattaacatttgcc

SEQ ID NO: 1330100 - DNA, 15 bp, Homo sapiens
tcaattaacatttgc

SEQ ID NO: 1330101 - DNA, 15 bp, Homo sapiens
ctcaattaacatttg

SEQ ID NO: 1330102 - DNA, 15 bp, Homo sapiens
cctcaattaacattt

SEQ ID NO: 1330103 - DNA, 15 bp, Homo sapiens
ccctcaattaacatt

SEQ ID NO: 1330104 - DNA, 15 bp, Homo sapiens
gccctcaattaacat

SEQ ID NO: 1330105 - DNA, 15 bp, Homo sapiens
ggccctcaattaaca

SEQ ID NO: 1330106 - DNA, 15 bp, Homo sapiens
aggccctcaattaac

SEQ ID NO: 1330107 - DNA, 15 bp, Homo sapiens
taggccctcaattaa

SEQ ID NO: 1330108 - DNA, 15 bp, Homo sapiens
gtaggccctcaatta

SEQ ID NO: 1330109 - DNA, 15 bp, Homo sapiens
agtaggccctcaatt

SEQ ID NO: 1330110 - DNA, 15 bp, Homo sapiens
gagtaggccctcaat

SEQ ID NO: 1330111 - DNA, 15 bp, Homo sapiens
tgagtaggccctcaa

SEQ ID NO: 1330112 - DNA, 15 bp, Homo sapiens
gtgagtaggccctca

SEQ ID NO: 1330113 - DNA, 15 bp, Homo sapiens
tgtgagtaggccctc

SEQ ID NO: 1330114 - DNA, 15 bp, Homo sapiens
gtgtgagtaggccct

SEQ ID NO: 1330115 - DNA, 15 bp, Homo sapiens
tgtgtgagtaggccc

SEQ ID NO: 1330116 - DNA, 15 bp, Homo sapiens
gtgtgtgagtaggcc

SEQ ID NO: 1330117 - DNA, 15 bp, Homo sapiens
ggtgtgtgagtaggc

SEQ ID NO: 1330118 - DNA, 15 bp, Homo sapiens
cggtgtgtgagtagg

SEQ ID NO: 1330119 - DNA, 15 bp, Homo sapiens
acggtgtgtgagtag

SEQ ID NO: 1330120 - DNA, 15 bp, Homo sapiens
cacggtgtgtgagta

SEQ ID NO: 1330121 - DNA, 15 bp, Homo sapiens
tcacggtgtgtgagt

SEQ ID NO: 1330122 - DNA, 15 bp, Homo sapiens
ttcacggtgtgtgag

SEQ ID NO: 1330123 - DNA, 15 bp, Homo sapiens
cttcacggtgtgtga

SEQ ID NO: 1330124 - DNA, 15 bp, Homo sapiens
tcttcacggtgtgtg

SEQ ID NO: 1330125 - DNA, 15 bp, Homo sapiens
ttcttcacggtgtgt

SEQ ID NO: 1330126 - DNA, 15 bp, Homo sapiens
attcttcacggtgtg

SEQ ID NO: 1330127 - DNA, 15 bp, Homo sapiens
cattcttcacggtgt

SEQ ID NO: 1330128 - DNA, 15 bp, Homo sapiens
acattcttcacggtg

SEQ ID NO: 1330129 - DNA, 15 bp, Homo sapiens
tacattcttcacggt

SEQ ID NO: 1330130 - DNA, 15 bp, Homo sapiens
ttacattcttcacgg

SEQ ID NO: 1330131 - DNA, 15 bp, Homo sapiens
cttacattcttcacg

SEQ ID NO: 1330132 - DNA, 15 bp, Homo sapiens
tcttacattcttcac

SEQ ID NO: 1330133 - DNA, 15 bp, Homo sapiens
atcttacattcttca

SEQ ID NO: 1330134 - DNA, 15 bp, Homo sapiens
gatcttacattcttc

SEQ ID NO: 1330135 - DNA, 15 bp, Homo sapiens
tgatcttacattctt

SEQ ID NO: 1330136 - DNA, 15 bp, Homo sapiens
atgatcttacattct

SEQ ID NO: 1330137 - DNA, 15 bp, Homo sapiens
aatgatcttacattc

SEQ ID NO: 1330138 - DNA, 15 bp, Homo sapiens
aaatgatcttacatt

SEQ ID NO: 1330139 - DNA, 15 bp, Homo sapiens
gaaatgatcttacat

SEQ ID NO: 1330140 - DNA, 15 bp, Homo sapiens
agaaatgatcttaca

SEQ ID NO: 1330141 - DNA, 15 bp, Homo sapiens
cagaaatgatcttac

SEQ ID NO: 1330142 - DNA, 15 bp, Homo sapiens
acagaaatgatctta

SEQ ID NO: 1330143 - DNA, 15 bp, Homo sapiens
gacagaaatgatctt

SEQ ID NO: 1330144 - DNA, 15 bp, Homo sapiens
tgacagaaatgatct

SEQ ID NO: 1330145 - DNA, 15 bp, Homo sapiens
atgacagaaatgatc

SEQ ID NO: 1330146 - DNA, 15 bp, Homo sapiens
gatgacagaaatgat

SEQ ID NO: 1330147 - DNA, 15 bp, Homo sapiens
tgatgacagaaatga

SEQ ID NO: 1330148 - DNA, 15 bp, Homo sapiens
ttgatgacagaaatg

SEQ ID NO: 1330149 - DNA, 15 bp, Homo sapiens
cttgatgacagaaat

SEQ ID NO: 1330150 - DNA, 15 bp, Homo sapiens
ccttgatgacagaaa

SEQ ID NO: 1330151 - DNA, 15 bp, Homo sapiens
tccttgatgacagaa

SEQ ID NO: 1330152 - DNA, 15 bp, Homo sapiens
atccttgatgacaga

SEQ ID NO: 1330153 - DNA, 15 bp, Homo sapiens
gatccttgatgacag

SEQ ID NO: 1330154 - DNA, 15 bp, Homo sapiens
ggatccttgatgaca

SEQ ID NO: 1330155 - DNA, 15 bp, Homo sapiens
aggatccttgatgac

SEQ ID NO: 1330156 - DNA, 15 bp, Homo sapiens
taggatccttgatga

SEQ ID NO: 1330157 - DNA, 15 bp, Homo sapiens
gtaggatccttgatg

SEQ ID NO: 1330158 - DNA, 15 bp, Homo sapiens
tgtaggatccttgat

SEQ ID NO: 1330159 - DNA, 15 bp, Homo sapiens
ttgtaggatccttga

SEQ ID NO: 1330160 - DNA, 15 bp, Homo sapiens
attgtaggatccttg

SEQ ID NO: 1330161 - DNA, 15 bp, Homo sapiens
gattgtaggatcctt

SEQ ID NO: 1330162 - DNA, 15 bp, Homo sapiens
agattgtaggatcct

SEQ ID NO: 1330163 - DNA, 15 bp, Homo sapiens
tagattgtaggatcc

SEQ ID NO: 1330164 - DNA, 15 bp, Homo sapiens
ctagattgtaggatc

SEQ ID NO: 1330165 - DNA, 15 bp, Homo sapiens
tctagattgtaggat

SEQ ID NO: 1330166 - DNA, 15 bp, Homo sapiens
ttctagattgtagga

SEQ ID NO: 1330167 - DNA, 15 bp, Homo sapiens
gttctagattgtagg

SEQ ID NO: 1330168 - DNA, 15 bp, Homo sapiens
tgttctagattgtag

SEQ ID NO: 1330169 - DNA, 15 bp, Homo sapiens
ctgttctagattgta

SEQ ID NO: 1330170 - DNA, 15 bp, Homo sapiens
actgttctagattgt

SEQ ID NO: 1330171 - DNA, 15 bp, Homo sapiens
tactgttctagattg

SEQ ID NO: 1330172 - DNA, 15 bp, Homo sapiens
ttactgttctagatt

SEQ ID NO: 1330173 - DNA, 15 bp, Homo sapiens
cttactgttctagat

SEQ ID NO: 1330174 - DNA, 15 bp, Homo sapiens
acttactgttctaga

SEQ ID NO: 1330175 - DNA, 15 bp, Homo sapiens
tacttactgttctag

SEQ ID NO: 1330176 - DNA, 15 bp, Homo sapiens
ttacttactgttcta

SEQ ID NO: 1330177 - DNA, 15 bp, Homo sapiens
cttacttactgttct

SEQ ID NO: 1330178 - DNA, 15 bp, Homo sapiens
tcttacttactgttc

SEQ ID NO: 1330179 - DNA, 15 bp, Homo sapiens
gtcttacttactgtt

SEQ ID NO: 1330180 - DNA, 15 bp, Homo sapiens
tgtcttacttactgt

SEQ ID NO: 1330181 - DNA, 15 bp, Homo sapiens
gtgtcttacttactg

SEQ ID NO: 1330182 - DNA, 15 bp, Homo sapiens
agtgtcttacttact

SEQ ID NO: 1330183 - DNA, 15 bp, Homo sapiens
cagtgtcttacttac

SEQ ID NO: 1330184 - DNA, 15 bp, Homo sapiens
acagtgtcttactta

SEQ ID NO: 1330185 - DNA, 15 bp, Homo sapiens
gacagtgtcttactt

SEQ ID NO: 1330186 - DNA, 15 bp, Homo sapiens
tgacagtgtcttact

SEQ ID NO: 1330187 - DNA, 15 bp, Homo sapiens
gtgacagtgtcttac

SEQ ID NO: 1330188 - DNA, 15 bp, Homo sapiens
tgtgacagtgtctta

SEQ ID NO: 1330189 - DNA, 15 bp, Homo sapiens
ttgtgacagtgtctt

SEQ ID NO: 1330190 - DNA, 15 bp, Homo sapiens
tttgtgacagtgtct

SEQ ID NO: 1330191 - DNA, 15 bp, Homo sapiens
gtttgtgacagtgtc

SEQ ID NO: 1330192 - DNA, 15 bp, Homo sapiens
tgtttgtgacagtgt

SEQ ID NO: 1330193 - DNA, 15 bp, Homo sapiens
gtgtttgtgacagtg

SEQ ID NO: 1330194 - DNA, 15 bp, Homo sapiens
cgtgtttgtgacagt

SEQ ID NO: 1330195 - DNA, 15 bp, Homo sapiens
gcgtgtttgtgacag

SEQ ID NO: 1330196 - DNA, 15 bp, Homo sapiens
agcgtgtttgtgaca

SEQ ID NO: 1330197 - DNA, 15 bp, Homo sapiens
cagcgtgtttgtgac

SEQ ID NO: 1330198 - DNA, 15 bp, Homo sapiens
gcagcgtgtttgtga

SEQ ID NO: 1330199 - DNA, 15 bp, Homo sapiens
tgcagcgtgtttgtg

SEQ ID NO: 1330200 - DNA, 15 bp, Homo sapiens
ttgcagcgtgtttgt

SEQ ID NO: 1330201 - DNA, 15 bp, Homo sapiens
tttgcagcgtgtttg

SEQ ID NO: 1330202 - DNA, 15 bp, Homo sapiens
ttttgcagcgtgttt

SEQ ID NO: 1330203 - DNA, 15 bp, Homo sapiens
gttttgcagcgtgtt

SEQ ID NO: 1330204 - DNA, 15 bp, Homo sapiens
tgttttgcagcgtgt

SEQ ID NO: 1330205 - DNA, 15 bp, Homo sapiens
ttgttttgcagcgtg

SEQ ID NO: 1330206 - DNA, 15 bp, Homo sapiens
tttgttttgcagcgt

SEQ ID NO: 1330207 - DNA, 15 bp, Homo sapiens
ttttgttttgcagcg

SEQ ID NO: 1330208 - DNA, 15 bp, Homo sapiens
cttttgttttgcagc

SEQ ID NO: 1330209 - DNA, 15 bp, Homo sapiens
acttttgttttgcag

SEQ ID NO: 1330210 - DNA, 15 bp, Homo sapiens
cacttttgttttgca

SEQ ID NO: 1330211 - DNA, 15 bp, Homo sapiens
acacttttgttttgc

SEQ ID NO: 1330212 - DNA, 15 bp, Homo sapiens
cacacttttgttttg

SEQ ID NO: 1330213 - DNA, 15 bp, Homo sapiens
tcacacttttgtttt

SEQ ID NO: 1330214 - DNA, 15 bp, Homo sapiens
ctcacacttttgttt

SEQ ID NO: 1330215 - DNA, 15 bp, Homo sapiens
tctcacacttttgtt

SEQ ID NO: 1330216 - DNA, 15 bp, Homo sapiens
ttctcacacttttgt

SEQ ID NO: 1330217 - DNA, 15 bp, Homo sapiens
tttctcacacttttg

SEQ ID NO: 1330218 - DNA, 15 bp, Homo sapiens
ttttctcacactttt

SEQ ID NO: 1330219 - DNA, 15 bp, Homo sapiens
gttttctcacacttt

SEQ ID NO: 1330220 - DNA, 15 bp, Homo sapiens
tgttttctcacactt

SEQ ID NO: 1330221 - DNA, 15 bp, Homo sapiens
ctgttttctcacact

SEQ ID NO: 1330222 - DNA, 15 bp, Homo sapiens
actgttttctcacac

SEQ ID NO: 1330223 - DNA, 15 bp, Homo sapiens
aactgttttctcaca

SEQ ID NO: 1330224 - DNA, 15 bp, Homo sapiens
taactgttttctcac

SEQ ID NO: 1330225 - DNA, 15 bp, Homo sapiens
ataactgttttctca

SEQ ID NO: 1330226 - DNA, 15 bp, Homo sapiens
tataactgttttctc

SEQ ID NO: 1330227 - DNA, 15 bp, Homo sapiens
ttataactgttttct

SEQ ID NO: 1330228 - DNA, 15 bp, Homo sapiens
tttataactgttttc

SEQ ID NO: 1330229 - DNA, 15 bp, Homo sapiens
ttttataactgtttt

SEQ ID NO: 1330230 - DNA, 15 bp, Homo sapiens
cttttataactgttt

SEQ ID NO: 1330231 - DNA, 15 bp, Homo sapiens
tcttttataactgtt

SEQ ID NO: 1330232 - DNA, 15 bp, Homo sapiens
atcttttataactgt

SEQ ID NO: 1330233 - DNA, 15 bp, Homo sapiens
tatcttttataactg

SEQ ID NO: 1330234 - DNA, 15 bp, Homo sapiens
ctatcttttataact

SEQ ID NO: 1330235 - DNA, 15 bp, Homo sapiens
actatcttttataac

SEQ ID NO: 1330236 - DNA, 15 bp, Homo sapiens
tactatcttttataa

SEQ ID NO: 1330237 - DNA, 15 bp, Homo sapiens
atactatcttttata

SEQ ID NO: 1330238 - DNA, 15 bp, Homo sapiens
tatactatcttttat

SEQ ID NO: 1330239 - DNA, 15 bp, Homo sapiens
ctatactatctttta

SEQ ID NO: 1330240 - DNA, 15 bp, Homo sapiens
tctatactatctttt

SEQ ID NO: 1330241 - DNA, 15 bp, Homo sapiens
gtctatactatcttt

SEQ ID NO: 1330242 - DNA, 15 bp, Homo sapiens
cgtctatactatctt

SEQ ID NO: 1330243 - DNA, 15 bp, Homo sapiens
gcgtctatactatct

SEQ ID NO: 1330244 - DNA, 15 bp, Homo sapiens
ggcgtctatactatc

SEQ ID NO: 1330245 - DNA, 15 bp, Homo sapiens
tggcgtctatactat

SEQ ID NO: 1330246 - DNA, 15 bp, Homo sapiens
ctggcgtctatacta

SEQ ID NO: 1330247 - DNA, 15 bp, Homo sapiens
cctggcgtctatact

SEQ ID NO: 1330248 - DNA, 15 bp, Homo sapiens
tcctggcgtctatac

SEQ ID NO: 1330249 - DNA, 15 bp, Homo sapiens
atcctggcgtctata

SEQ ID NO: 1330250 - DNA, 15 bp, Homo sapiens
gatcctggcgtctat

SEQ ID NO: 1330251 - DNA, 15 bp, Homo sapiens
ggatcctggcgtcta

SEQ ID NO: 1330252 - DNA, 15 bp, Homo sapiens
aggatcctggcgtct

SEQ ID NO: 1330253 - DNA, 15 bp, Homo sapiens
caggatcctggcgtc

SEQ ID NO: 1330254 - DNA, 15 bp, Homo sapiens
tcaggatcctggcgt

SEQ ID NO: 1330255 - DNA, 15 bp, Homo sapiens
ctcaggatcctggcg

SEQ ID NO: 1330256 - DNA, 15 bp, Homo sapiens
tctcaggatcctggc

SEQ ID NO: 1330257 - DNA, 15 bp, Homo sapiens
ttctcaggatcctgg

SEQ ID NO: 1330258 - DNA, 15 bp, Homo sapiens
gttctcaggatcctg

SEQ ID NO: 1330259 - DNA, 15 bp, Homo sapiens
tgttctcaggatcct

SEQ ID NO: 1330260 - DNA, 15 bp, Homo sapiens
gtgttctcaggatcc

SEQ ID NO: 1330261 - DNA, 15 bp, Homo sapiens
cgtgttctcaggatc

SEQ ID NO: 1330262 - DNA, 15 bp, Homo sapiens
tcgtgttctcaggat

SEQ ID NO: 1330263 - DNA, 15 bp, Homo sapiens
ctcgtgttctcagga

SEQ ID NO: 1330264 - DNA, 15 bp, Homo sapiens
cctcgtgttctcagg

SEQ ID NO: 1330265 - DNA, 15 bp, Homo sapiens
gcctcgtgttctcag

SEQ ID NO: 1330266 - DNA, 15 bp, Homo sapiens
tgcctcgtgttctca

SEQ ID NO: 1330267 - DNA, 15 bp, Homo sapiens
ttgcctcgtgttctc

SEQ ID NO: 1330268 - DNA, 15 bp, Homo sapiens
tttgcctcgtgttct

SEQ ID NO: 1330269 - DNA, 15 bp, Homo sapiens
atttgcctcgtgttc

SEQ ID NO: 1330270 - DNA, 15 bp, Homo sapiens
gatttgcctcgtgtt

SEQ ID NO: 1330271 - DNA, 15 bp, Homo sapiens
agatttgcctcgtgt

SEQ ID NO: 1330272 - DNA, 15 bp, Homo sapiens
gagatttgcctcgtg

SEQ ID NO: 1330273 - DNA, 15 bp, Homo sapiens
tgagatttgcctcgt

SEQ ID NO: 1330274 - DNA, 15 bp, Homo sapiens
ttgagatttgcctcg

SEQ ID NO: 1330275 - DNA, 15 bp, Homo sapiens
tttgagatttgcctc

SEQ ID NO: 1330276 - DNA, 15 bp, Homo sapiens
ctttgagatttgcct

SEQ ID NO: 1330277 - DNA, 15 bp, Homo sapiens
gctttgagatttgcc

SEQ ID NO: 1330278 - DNA, 15 bp, Homo sapiens
agctttgagatttgc

SEQ ID NO: 1330279 - DNA, 15 bp, Homo sapiens
aagctttgagatttg

SEQ ID NO: 1330280 - DNA, 15 bp, Homo sapiens
aaagctttgagattt

SEQ ID NO: 1330281 - DNA, 15 bp, Homo sapiens
aaaagctttgagatt

SEQ ID NO: 1330282 - DNA, 15 bp, Homo sapiens
aaaaagctttgagat

SEQ ID NO: 1330283 - DNA, 15 bp, Homo sapiens
aaaaaagctttgaga

SEQ ID NO: 1330284 - DNA, 15 bp, Homo sapiens
aaaaaaagctttgag

SEQ ID NO: 1330285 - DNA, 15 bp, Homo sapiens
aaaaaaaagctttga

SEQ ID NO: 1330286 - DNA, 15 bp, Homo sapiens
aaaaaaaaagctttg

SEQ ID NO: 1330287 - DNA, 15 bp, Homo sapiens
tcttgtctcaaaaaa

SEQ ID NO: 1330288 - DNA, 15 bp, Homo sapiens
ctcttgtctcaaaaa

SEQ ID NO: 1330289 - DNA, 15 bp, Homo sapiens
actcttgtctcaaaa

SEQ ID NO: 1330290 - DNA, 15 bp, Homo sapiens
aactcttgtctcaaa

SEQ ID NO: 1330291 - DNA, 15 bp, Homo sapiens
aaactcttgtctcaa

SEQ ID NO: 1330292 - DNA, 15 bp, Homo sapiens
gaaactcttgtctca

SEQ ID NO: 1330293 - DNA, 15 bp, Homo sapiens
tgaaactcttgtctc

SEQ ID NO: 1330294 - DNA, 15 bp, Homo sapiens
gtgaaactcttgtct

SEQ ID NO: 1330295 - DNA, 15 bp, Homo sapiens
agtgaaactcttgtc

SEQ ID NO: 1330296 - DNA, 15 bp, Homo sapiens
gagtgaaactcttgt

SEQ ID NO: 1330297 - DNA, 15 bp, Homo sapiens
agagtgaaactcttg

SEQ ID NO: 1330298 - DNA, 15 bp, Homo sapiens
aagagtgaaactctt

SEQ ID NO: 1330299 - DNA, 15 bp, Homo sapiens
caagagtgaaactct

SEQ ID NO: 1330300 - DNA, 15 bp, Homo sapiens
gacaagagtgaaact

SEQ ID NO: 1330301 - DNA, 15 bp, Homo sapiens
cgacaagagtgaaac

SEQ ID NO: 1330302 - DNA, 15 bp, Homo sapiens
gcgacaagagtgaaa

SEQ ID NO: 1330303 - DNA, 15 bp, Homo sapiens
ggcgacaagagtgaa

SEQ ID NO: 1330304 - DNA, 15 bp, Homo sapiens
gggcgacaagagtga

SEQ ID NO: 1330305 - DNA, 15 bp, Homo sapiens
tgggcgacaagagtg

SEQ ID NO: 1330306 - DNA, 15 bp, Homo sapiens
ctgggcgacaagagt

SEQ ID NO: 1330307 - DNA, 15 bp, Homo sapiens
acctgggcgacaaga

SEQ ID NO: 1330308 - DNA, 15 bp, Homo sapiens
tacctgggcgacaag

SEQ ID NO: 1330309 - DNA, 15 bp, Homo sapiens
atacctgggcgacaa

SEQ ID NO: 1330310 - DNA, 15 bp, Homo sapiens
aatacctgggcgaca

SEQ ID NO: 1330311 - DNA, 15 bp, Homo sapiens
aaatacctgggcgac

SEQ ID NO: 1330312 - DNA, 15 bp, Homo sapiens
caaatacctgggcga

SEQ ID NO: 1330313 - DNA, 15 bp, Homo sapiens
acaaatacctgggcg

SEQ ID NO: 1330314 - DNA, 15 bp, Homo sapiens
cacaaatacctgggc

SEQ ID NO: 1330315 - DNA, 15 bp, Homo sapiens
gcacaaatacctggg

SEQ ID NO: 1330316 - DNA, 15 bp, Homo sapiens
cgcacaaatacctgg

SEQ ID NO: 1330317 - DNA, 15 bp, Homo sapiens
tcgcacaaatacctg

SEQ ID NO: 1330318 - DNA, 15 bp, Homo sapiens
gtcgcacaaatacct

SEQ ID NO: 1330319 - DNA, 15 bp, Homo sapiens
ggtcgcacaaatacc

SEQ ID NO: 1330320 - DNA, 15 bp, Homo sapiens
aggtcgcacaaatac

SEQ ID NO: 1330321 - DNA, 15 bp, Homo sapiens
gaggtcgcacaaata

SEQ ID NO: 1330322 - DNA, 15 bp, Homo sapiens
cgaggtcgcacaaat

SEQ ID NO: 1330323 - DNA, 15 bp, Homo sapiens
ccgaggtcgcacaaa

SEQ ID NO: 1330324 - DNA, 15 bp, Homo sapiens
gccgaggtcgcacaa

SEQ ID NO: 1330325 - DNA, 15 bp, Homo sapiens
agccgaggtcgcaca

SEQ ID NO: 1330326 - DNA, 15 bp, Homo sapiens
caggaggttgaggca

SEQ ID NO: 1330327 - DNA, 15 bp, Homo sapiens
ccaggaggttgaggc

SEQ ID NO: 1330328 - DNA, 15 bp, Homo sapiens
cccaggaggttgagg

SEQ ID NO: 1330329 - DNA, 15 bp, Homo sapiens
gcccaggaggttgag

SEQ ID NO: 1330330 - DNA, 15 bp, Homo sapiens
tgcccaggaggttga

SEQ ID NO: 1330331 - DNA, 15 bp, Homo sapiens
ctgcccaggaggttg

SEQ ID NO: 1330332 - DNA, 15 bp, Homo sapiens
gctgcccaggaggtt

SEQ ID NO: 1330333 - DNA, 15 bp, Homo sapiens
agctgcccaggaggt

SEQ ID NO: 1330334 - DNA, 15 bp, Homo sapiens
cagctgcccaggagg

SEQ ID NO: 1330335 - DNA, 15 bp, Homo sapiens
ccagctgcccaggag

SEQ ID NO: 1330336 - DNA, 15 bp, Homo sapiens
tccagctgcccagga

SEQ ID NO: 1330337 - DNA, 15 bp, Homo sapiens
atccagctgcccagg

SEQ ID NO: 1330338 - DNA, 15 bp, Homo sapiens
aatccagctgcccag

SEQ ID NO: 1330339 - DNA, 15 bp, Homo sapiens
taatccagctgccca

SEQ ID NO: 1330340 - DNA, 15 bp, Homo sapiens
gtaatccagctgccc

SEQ ID NO: 1330341 - DNA, 15 bp, Homo sapiens
tgtaatccagctgcc

SEQ ID NO: 1330342 - DNA, 15 bp, Homo sapiens
ctgtaatccagctgc

SEQ ID NO: 1330343 - DNA, 15 bp, Homo sapiens
cctgtaatccagctg

SEQ ID NO: 1330344 - DNA, 15 bp, Homo sapiens
gcctgtaatccagct

SEQ ID NO: 1330345 - DNA, 15 bp, Homo sapiens
cacgcctgtaatcca

SEQ ID NO: 1330346 - DNA, 15 bp, Homo sapiens
ggtagctcacgcctg

SEQ ID NO: 1330347 - DNA, 15 bp, Homo sapiens
tggtagctcacgcct

SEQ ID NO: 1330348 - DNA, 15 bp, Homo sapiens
gtggtagctcacgcc

SEQ ID NO: 1330349 - DNA, 15 bp, Homo sapiens
tgtggtagctcacgc

SEQ ID NO: 1330350 - DNA, 15 bp, Homo sapiens
gtgtggtagctcacg

SEQ ID NO: 1330351 - DNA, 15 bp, Homo sapiens
ggtgtggtagctcac

SEQ ID NO: 1330352 - DNA, 15 bp, Homo sapiens
gggtgtggtagctca

SEQ ID NO: 1330353 - DNA, 15 bp, Homo sapiens
cgggtgtggtagctc

SEQ ID NO: 1330354 - DNA, 15 bp, Homo sapiens
ccgggtgtggtagct

SEQ ID NO: 1330355 - DNA, 15 bp, Homo sapiens
gccgggtgtggtagc

SEQ ID NO: 1330356 - DNA, 15 bp, Homo sapiens
aggccgggtgtggta

SEQ ID NO: 1330357 - DNA, 15 bp, Homo sapiens
gaggccgggtgtggt

SEQ ID NO: 1330358 - DNA, 15 bp, Homo sapiens
tgaggccgggtgtgg

SEQ ID NO: 1330359 - DNA, 15 bp, Homo sapiens
ttgaggccgggtgtg

SEQ ID NO: 1330360 - DNA, 15 bp, Homo sapiens
tttgaggccgggtgt

SEQ ID NO: 1330361 - DNA, 15 bp, Homo sapiens
ctttgaggccgggtg

SEQ ID NO: 1330362 - DNA, 15 bp, Homo sapiens
actttgaggccgggt

SEQ ID NO: 1330363 - DNA, 15 bp, Homo sapiens
aactttgaggccggg

SEQ ID NO: 1330364 - DNA, 15 bp, Homo sapiens
aaactttgaggccgg

SEQ ID NO: 1330365 - DNA, 15 bp, Homo sapiens
aaaactttgaggccg

SEQ ID NO: 1330366 - DNA, 15 bp, Homo sapiens
gaaaactttgaggcc

SEQ ID NO: 1330367 - DNA, 15 bp, Homo sapiens
tgaaaactttgaggc

SEQ ID NO: 1330368 - DNA, 15 bp, Homo sapiens
atgaaaactttgagg

SEQ ID NO: 1330369 - DNA, 15 bp, Homo sapiens
gatgaaaactttgag

SEQ ID NO: 1330370 - DNA, 15 bp, Homo sapiens
agatgaaaactttga

SEQ ID NO: 1330371 - DNA, 15 bp, Homo sapiens
cagatgaaaactttg

SEQ ID NO: 1330372 - DNA, 15 bp, Homo sapiens
ccagatgaaaacttt

SEQ ID NO: 1330373 - DNA, 15 bp, Homo sapiens
accagatgaaaactt

SEQ ID NO: 1330374 - DNA, 15 bp, Homo sapiens
taccagatgaaaact

SEQ ID NO: 1330375 - DNA, 15 bp, Homo sapiens
ataccagatgaaaac

SEQ ID NO: 1330376 - DNA, 15 bp, Homo sapiens
aataccagatgaaaa

SEQ ID NO: 1330377 - DNA, 15 bp, Homo sapiens
aaataccagatgaaa

SEQ ID NO: 1330378 - DNA, 15 bp, Homo sapiens
taaataccagatgaa

SEQ ID NO: 1330379 - DNA, 15 bp, Homo sapiens
gtaaataccagatga

SEQ ID NO: 1330380 - DNA, 15 bp, Homo sapiens
ggtaaataccagatg

SEQ ID NO: 1330381 - DNA, 15 bp, Homo sapiens
tggtaaataccagat

SEQ ID NO: 1330382 - DNA, 15 bp, Homo sapiens
gtggtaaataccaga

SEQ ID NO: 1330383 - DNA, 15 bp, Homo sapiens
tgtggtaaataccag

SEQ ID NO: 1330384 - DNA, 15 bp, Homo sapiens
ctgtggtaaatacca

SEQ ID NO: 1330385 - DNA, 15 bp, Homo sapiens
cctgtggtaaatacc

SEQ ID NO: 1330386 - DNA, 15 bp, Homo sapiens
acctgtggtaaatac

SEQ ID NO: 1330387 - DNA, 15 bp, Homo sapiens
aacctgtggtaaata

SEQ ID NO: 1330388 - DNA, 15 bp, Homo sapiens
aaacctgtggtaaat

SEQ ID NO: 1330389 - DNA, 15 bp, Homo sapiens
taaacctgtggtaaa

SEQ ID NO: 1330390 - DNA, 15 bp, Homo sapiens
gtaaacctgtggtaa

SEQ ID NO: 1330391 - DNA, 15 bp, Homo sapiens
tgtaaacctgtggta

SEQ ID NO: 1330392 - DNA, 15 bp, Homo sapiens
atgtaaacctgtggt

SEQ ID NO: 1330393 - DNA, 15 bp, Homo sapiens
tatgtaaacctgtgg

SEQ ID NO: 1330394 - DNA, 15 bp, Homo sapiens
ctatgtaaacctgtg

SEQ ID NO: 1330395 - DNA, 15 bp, Homo sapiens
gctatgtaaacctgt

SEQ ID NO: 1330396 - DNA, 15 bp, Homo sapiens
tgctatgtaaacctg

SEQ ID NO: 1330397 - DNA, 15 bp, Homo sapiens
ctgctatgtaaacct

SEQ ID NO: 1330398 - DNA, 15 bp, Homo sapiens
actgctatgtaaacc

SEQ ID NO: 1330399 - DNA, 15 bp, Homo sapiens
aactgctatgtaaac

SEQ ID NO: 1330400 - DNA, 15 bp, Homo sapiens
aaactgctatgtaaa

SEQ ID NO: 1330401 - DNA, 15 bp, Homo sapiens
aaaactgctatgtaa

SEQ ID NO: 1330402 - DNA, 15 bp, Homo sapiens
gaaaactgctatgta

SEQ ID NO: 1330403 - DNA, 15 bp, Homo sapiens
tgaaaactgctatgt

SEQ ID NO: 1330404 - DNA, 15 bp, Homo sapiens
atgaaaactgctatg

SEQ ID NO: 1330405 - DNA, 15 bp, Homo sapiens
aatgaaaactgctat

SEQ ID NO: 1330406 - DNA, 15 bp, Homo sapiens
aaatgaaaactgcta

SEQ ID NO: 1330407 - DNA, 15 bp, Homo sapiens
aaaatgaaaactgct

SEQ ID NO: 1330408 - DNA, 15 bp, Homo sapiens
taaaatgaaaactgc

SEQ ID NO: 1330409 - DNA, 15 bp, Homo sapiens
ctaaaatgaaaactg

SEQ ID NO: 1330410 - DNA, 15 bp, Homo sapiens
cctaaaatgaaaact

SEQ ID NO: 1330411 - DNA, 15 bp, Homo sapiens
ccctaaaatgaaaac

SEQ ID NO: 1330412 - DNA, 15 bp, Homo sapiens
accctaaaatgaaaa

SEQ ID NO: 1330413 - DNA, 15 bp, Homo sapiens
caccctaaaatgaaa

SEQ ID NO: 1330414 - DNA, 15 bp, Homo sapiens
tcaccctaaaatgaa

SEQ ID NO: 1330415 - DNA, 15 bp, Homo sapiens
gtcaccctaaaatga

SEQ ID NO: 1330416 - DNA, 15 bp, Homo sapiens
ggtcaccctaaaatg

SEQ ID NO: 1330417 - DNA, 15 bp, Homo sapiens
tggtcaccctaaaat

SEQ ID NO: 1330418 - DNA, 15 bp, Homo sapiens
atggtcaccctaaaa

SEQ ID NO: 1330419 - DNA, 15 bp, Homo sapiens
gatggtcaccctaaa

SEQ ID NO: 1330420 - DNA, 15 bp, Homo sapiens
agatggtcaccctaa

SEQ ID NO: 1330421 - DNA, 15 bp, Homo sapiens
aagatggtcacccta

SEQ ID NO: 1330422 - DNA, 15 bp, Homo sapiens
taagatggtcaccct

SEQ ID NO: 1330423 - DNA, 15 bp, Homo sapiens
ctaagatggtcaccc

SEQ ID NO: 1330424 - DNA, 15 bp, Homo sapiens
cctaagatggtcacc

SEQ ID NO: 1330425 - DNA, 15 bp, Homo sapiens
ccctaagatggtcac

SEQ ID NO: 1330426 - DNA, 15 bp, Homo sapiens
gccctaagatggtca

SEQ ID NO: 1330427 - DNA, 15 bp, Homo sapiens
agccctaagatggtc

SEQ ID NO: 1330428 - DNA, 15 bp, Homo sapiens
cagccctaagatggt

SEQ ID NO: 1330429 - DNA, 15 bp, Homo sapiens
tcagccctaagatgg

SEQ ID NO: 1330430 - DNA, 15 bp, Homo sapiens
gtcagccctaagatg

SEQ ID NO: 1330431 - DNA, 15 bp, Homo sapiens
ggtcagccctaagat

SEQ ID NO: 1330432 - DNA, 15 bp, Homo sapiens
aggtcagccctaaga

SEQ ID NO: 1330433 - DNA, 15 bp, Homo sapiens
gaggtcagccctaag

SEQ ID NO: 1330434 - DNA, 15 bp, Homo sapiens
agaggtcagccctaa

SEQ ID NO: 1330435 - DNA, 15 bp, Homo sapiens
cagaggtcagcccta

SEQ ID NO: 1330436 - DNA, 15 bp, Homo sapiens
tcagaggtcagccct

SEQ ID NO: 1330437 - DNA, 15 bp, Homo sapiens
gtcagaggtcagccc

SEQ ID NO: 1330438 - DNA, 15 bp, Homo sapiens
ggtcagaggtcagcc

SEQ ID NO: 1330439 - DNA, 15 bp, Homo sapiens
aggtcagaggtcagc

SEQ ID NO: 1330440 - DNA, 15 bp, Homo sapiens
taggtcagaggtcag

SEQ ID NO: 1330441 - DNA, 15 bp, Homo sapiens
ttaggtcagaggtca

SEQ ID NO: 1330442 - DNA, 15 bp, Homo sapiens
gttaggtcagaggtc

SEQ ID NO: 1330443 - DNA, 15 bp, Homo sapiens
agttaggtcagaggt

SEQ ID NO: 1330444 - DNA, 15 bp, Homo sapiens
gagttaggtcagagg

SEQ ID NO: 1330445 - DNA, 15 bp, Homo sapiens
agagttaggtcagag

SEQ ID NO: 1330446 - DNA, 15 bp, Homo sapiens
cagagttaggtcaga

SEQ ID NO: 1330447 - DNA, 15 bp, Homo sapiens
gcagagttaggtcag

SEQ ID NO: 1330448 - DNA, 15 bp, Homo sapiens
tgcagagttaggtca

SEQ ID NO: 1330449 - DNA, 15 bp, Homo sapiens
ctgcagagttaggtc

SEQ ID NO: 1330450 - DNA, 15 bp, Homo sapiens
gctgcagagttaggt

SEQ ID NO: 1330451 - DNA, 15 bp, Homo sapiens
ggctgcagagttagg

SEQ ID NO: 1330452 - DNA, 15 bp, Homo sapiens
gggctgcagagttag

SEQ ID NO: 1330453 - DNA, 15 bp, Homo sapiens
agggctgcagagtta

SEQ ID NO: 1330454 - DNA, 15 bp, Homo sapiens
aagggctgcagagtt

SEQ ID NO: 1330455 - DNA, 15 bp, Homo sapiens
aaagggctgcagagt

SEQ ID NO: 1330456 - DNA, 15 bp, Homo sapiens
aaaagggctgcagag

SEQ ID NO: 1330457 - DNA, 15 bp, Homo sapiens
gaaaagggctgcaga

SEQ ID NO: 1330458 - DNA, 15 bp, Homo sapiens
agaaaagggctgcag

SEQ ID NO: 1330459 - DNA, 15 bp, Homo sapiens
gagaaaagggctgca

SEQ ID NO: 1330460 - DNA, 15 bp, Homo sapiens
agagaaaagggctgc

SEQ ID NO: 1330461 - DNA, 15 bp, Homo sapiens
gagagaaaagggctg

SEQ ID NO: 1330462 - DNA, 15 bp, Homo sapiens
agagagaaaagggct

SEQ ID NO: 1330463 - DNA, 15 bp, Homo sapiens
gagagagaaaagggc

SEQ ID NO: 1330464 - DNA, 15 bp, Homo sapiens
agagagagaaaaggg

SEQ ID NO: 1330465 - DNA, 15 bp, Homo sapiens
gagagagagaaaagg

SEQ ID NO: 1330466 - DNA, 15 bp, Homo sapiens
cagagagagagaaaa

SEQ ID NO: 1330467 - DNA, 15 bp, Homo sapiens
tcagagagagagaaa

SEQ ID NO: 1330468 - DNA, 15 bp, Homo sapiens
gtcagagagagagaa

SEQ ID NO: 1330469 - DNA, 15 bp, Homo sapiens
ggtcagagagagaga

SEQ ID NO: 1330470 - DNA, 15 bp, Homo sapiens
tggtcagagagagag

SEQ ID NO: 1330471 - DNA, 15 bp, Homo sapiens
ttggtcagagagaga

SEQ ID NO: 1330472 - DNA, 15 bp, Homo sapiens
tttggtcagagagag

SEQ ID NO: 1330473 - DNA, 15 bp, Homo sapiens
gtttggtcagagaga

SEQ ID NO: 1330474 - DNA, 15 bp, Homo sapiens
tgtttggtcagagag

SEQ ID NO: 1330475 - DNA, 15 bp, Homo sapiens
ctgtttggtcagaga

SEQ ID NO: 1330476 - DNA, 15 bp, Homo sapiens
tctgtttggtcagag

SEQ ID NO: 1330477 - DNA, 15 bp, Homo sapiens
ttctgtttggtcaga

SEQ ID NO: 1330478 - DNA, 15 bp, Homo sapiens
attctgtttggtcag

SEQ ID NO: 1330479 - DNA, 15 bp, Homo sapiens
cattctgtttggtca

SEQ ID NO: 1330480 - DNA, 15 bp, Homo sapiens
acattctgtttggtc

SEQ ID NO: 1330481 - DNA, 15 bp, Homo sapiens
gacattctgtttggt

SEQ ID NO: 1330482 - DNA, 15 bp, Homo sapiens
agacattctgtttgg

SEQ ID NO: 1330483 - DNA, 15 bp, Homo sapiens
gagacattctgtttg

SEQ ID NO: 1330484 - DNA, 15 bp, Homo sapiens
agagacattctgttt

SEQ ID NO: 1330485 - DNA, 15 bp, Homo sapiens
cagagacattctgtt

SEQ ID NO: 1330486 - DNA, 15 bp, Homo sapiens
acagagacattctgt

SEQ ID NO: 1330487 - DNA, 15 bp, Homo sapiens
cacagagacattctg

SEQ ID NO: 1330488 - DNA, 15 bp, Homo sapiens
acacagagacattct

SEQ ID NO: 1330489 - DNA, 15 bp, Homo sapiens
gacacagagacattc

SEQ ID NO: 1330490 - DNA, 15 bp, Homo sapiens
agacacagagacatt

SEQ ID NO: 1330491 - DNA, 15 bp, Homo sapiens
aagacacagagacat

SEQ ID NO: 1330492 - DNA, 15 bp, Homo sapiens
caagacacagagaca

SEQ ID NO: 1330493 - DNA, 15 bp, Homo sapiens
ccaagacacagagac

SEQ ID NO: 1330494 - DNA, 15 bp, Homo sapiens
cccaagacacagaga

SEQ ID NO: 1330495 - DNA, 15 bp, Homo sapiens
acccaagacacagag

SEQ ID NO: 1330496 - DNA, 15 bp, Homo sapiens
tacccaagacacaga

SEQ ID NO: 1330497 - DNA, 15 bp, Homo sapiens
gtacccaagacacag

SEQ ID NO: 1330498 - DNA, 15 bp, Homo sapiens
ggtacccaagacaca

SEQ ID NO: 1330499 - DNA, 15 bp, Homo sapiens
tggtacccaagacac

SEQ ID NO: 1330500 - DNA, 15 bp, Homo sapiens
ctggtacccaagaca

SEQ ID NO: 1330501 - DNA, 15 bp, Homo sapiens
cctggtacccaagac

SEQ ID NO: 1330502 - DNA, 15 bp, Homo sapiens
gcctggtacccaaga

SEQ ID NO: 1330503 - DNA, 15 bp, Homo sapiens
ggcctggtacccaag

SEQ ID NO: 1330504 - DNA, 15 bp, Homo sapiens
gggcctggtacccaa

SEQ ID NO: 1330505 - DNA, 15 bp, Homo sapiens
tgggcctggtaccca

SEQ ID NO: 1330506 - DNA, 15 bp, Homo sapiens
gtgggcctggtaccc

SEQ ID NO: 1330507 - DNA, 15 bp, Homo sapiens
agtgggcctggtacc

SEQ ID NO: 1330508 - DNA, 15 bp, Homo sapiens
gagtgggcctggtac

SEQ ID NO: 1330509 - DNA, 15 bp, Homo sapiens
tgagtgggcctggta

SEQ ID NO: 1330510 - DNA, 15 bp, Homo sapiens
ctgagtgggcctggt

SEQ ID NO: 1330511 - DNA, 15 bp, Homo sapiens
gctgagtgggcctgg

SEQ ID NO: 1330512 - DNA, 15 bp, Homo sapiens
tgctgagtgggcctg

SEQ ID NO: 1330513 - DNA, 15 bp, Homo sapiens
gtgctgagtgggcct

SEQ ID NO: 1330514 - DNA, 15 bp, Homo sapiens
tgtgctgagtgggcc

SEQ ID NO: 1330515 - DNA, 15 bp, Homo sapiens
ctgtgctgagtgggc

SEQ ID NO: 1330516 - DNA, 15 bp, Homo sapiens
gctgtgctgagtggg

SEQ ID NO: 1330517 - DNA, 15 bp, Homo sapiens
ggctgtgctgagtgg

SEQ ID NO: 1330518 - DNA, 15 bp, Homo sapiens
aggctgtgctgagtg

SEQ ID NO: 1330519 - DNA, 15 bp, Homo sapiens
aaggctgtgctgagt

SEQ ID NO: 1330520 - DNA, 15 bp, Homo sapiens
taaggctgtgctgag

SEQ ID NO: 1330521 - DNA, 15 bp, Homo sapiens
ctaaggctgtgctga

SEQ ID NO: 1330522 - DNA, 15 bp, Homo sapiens
cctaaggctgtgctg

SEQ ID NO: 1330523 - DNA, 15 bp, Homo sapiens
acctaaggctgtgct

SEQ ID NO: 1330524 - DNA, 15 bp, Homo sapiens
aacctaaggctgtgc

SEQ ID NO: 1330525 - DNA, 15 bp, Homo sapiens
caacctaaggctgtg

SEQ ID NO: 1330526 - DNA, 15 bp, Homo sapiens
tcaacctaaggctgt

SEQ ID NO: 1330527 - DNA, 15 bp, Homo sapiens
ttcaacctaaggctg

SEQ ID NO: 1330528 - DNA, 15 bp, Homo sapiens
cttcaacctaaggct

SEQ ID NO: 1330529 - DNA, 15 bp, Homo sapiens
gcttcaacctaaggc

SEQ ID NO: 1330530 - DNA, 15 bp, Homo sapiens
agcttcaacctaagg

SEQ ID NO: 1330531 - DNA, 15 bp, Homo sapiens
aagcttcaacctaag

SEQ ID NO: 1330532 - DNA, 15 bp, Homo sapiens
aaagcttcaacctaa

SEQ ID NO: 1330533 - DNA, 15 bp, Homo sapiens
taaagcttcaaccta

SEQ ID NO: 1330534 - DNA, 15 bp, Homo sapiens
ttaaagcttcaacct

SEQ ID NO: 1330535 - DNA, 15 bp, Homo sapiens
cttaaagcttcaacc

SEQ ID NO: 1330536 - DNA, 15 bp, Homo sapiens
gcttaaagcttcaac

SEQ ID NO: 1330537 - DNA, 15 bp, Homo sapiens
tgcttaaagcttcaa

SEQ ID NO: 1330538 - DNA, 15 bp, Homo sapiens
gtgcttaaagcttca

SEQ ID NO: 1330539 - DNA, 15 bp, Homo sapiens
agtgcttaaagcttc

SEQ ID NO: 1330540 - DNA, 15 bp, Homo sapiens
aagtgcttaaagctt

SEQ ID NO: 1330541 - DNA, 15 bp, Homo sapiens
aaagtgcttaaagct

SEQ ID NO: 1330542 - DNA, 15 bp, Homo sapiens
gaaagtgcttaaagc

SEQ ID NO: 1330543 - DNA, 15 bp, Homo sapiens
agaaagtgcttaaag

SEQ ID NO: 1330544 - DNA, 15 bp, Homo sapiens
gagaaagtgcttaaa

SEQ ID NO: 1330545 - DNA, 15 bp, Homo sapiens
tgagaaagtgcttaa

SEQ ID NO: 1330546 - DNA, 15 bp, Homo sapiens
atgagaaagtgctta

SEQ ID NO: 1330547 - DNA, 15 bp, Homo sapiens
tatgagaaagtgctt

SEQ ID NO: 1330548 - DNA, 15 bp, Homo sapiens
ctatgagaaagtgct

SEQ ID NO: 1330549 - DNA, 15 bp, Homo sapiens
gctatgagaaagtgc

SEQ ID NO: 1330550 - DNA, 15 bp, Homo sapiens
ggctatgagaaagtg

SEQ ID NO: 1330551 - DNA, 15 bp, Homo sapiens
tggctatgagaaagt

SEQ ID NO: 1330552 - DNA, 15 bp, Homo sapiens
gtggctatgagaaag

SEQ ID NO: 1330553 - DNA, 15 bp, Homo sapiens
tgtggctatgagaaa

SEQ ID NO: 1330554 - DNA, 15 bp, Homo sapiens
atgtggctatgagaa

SEQ ID NO: 1330555 - DNA, 15 bp, Homo sapiens
tatgtggctatgaga

SEQ ID NO: 1330556 - DNA, 15 bp, Homo sapiens
gtatgtggctatgag

SEQ ID NO: 1330557 - DNA, 15 bp, Homo sapiens
tgtatgtggctatga

SEQ ID NO: 1330558 - DNA, 15 bp, Homo sapiens
gtgtatgtggctatg

SEQ ID NO: 1330559 - DNA, 15 bp, Homo sapiens
ggtgtatgtggctat

SEQ ID NO: 1330560 - DNA, 15 bp, Homo sapiens
tggtgtatgtggcta

SEQ ID NO: 1330561 - DNA, 15 bp, Homo sapiens
ttggtgtatgtggct

SEQ ID NO: 1330562 - DNA, 15 bp, Homo sapiens
cttggtgtatgtggc

SEQ ID NO: 1330563 - DNA, 15 bp, Homo sapiens
ccttggtgtatgtgg

SEQ ID NO: 1330564 - DNA, 15 bp, Homo sapiens
cccttggtgtatgtg

SEQ ID NO: 1330565 - DNA, 15 bp, Homo sapiens
gcccttggtgtatgt

SEQ ID NO: 1330566 - DNA, 15 bp, Homo sapiens
tgcccttggtgtatg

SEQ ID NO: 1330567 - DNA, 15 bp, Homo sapiens
ctgcccttggtgtat

SEQ ID NO: 1330568 - DNA, 15 bp, Homo sapiens
gctgcccttggtgta

SEQ ID NO: 1330569 - DNA, 15 bp, Homo sapiens
agctgcccttggtgt

SEQ ID NO: 1330570 - DNA, 15 bp, Homo sapiens
aagctgcccttggtg

SEQ ID NO: 1330571 - DNA, 15 bp, Homo sapiens
aaagctgcccttggt

SEQ ID NO: 1330572 - DNA, 15 bp, Homo sapiens
taaagctgcccttgg

SEQ ID NO: 1330573 - DNA, 15 bp, Homo sapiens
gtaaagctgcccttg

SEQ ID NO: 1330574 - DNA, 15 bp, Homo sapiens
ggtaaagctgccctt

SEQ ID NO: 1330575 - DNA, 15 bp, Homo sapiens
tggtaaagctgccct

SEQ ID NO: 1330576 - DNA, 15 bp, Homo sapiens
ctggtaaagctgccc

SEQ ID NO: 1330577 - DNA, 15 bp, Homo sapiens
cctggtaaagctgcc

SEQ ID NO: 1330578 - DNA, 15 bp, Homo sapiens
ccctggtaaagctgc

SEQ ID NO: 1330579 - DNA, 15 bp, Homo sapiens
accctggtaaagctg

SEQ ID NO: 1330580 - DNA, 15 bp, Homo sapiens
aaccctggtaaagct

SEQ ID NO: 1330581 - DNA, 15 bp, Homo sapiens
caaccctggtaaagc

SEQ ID NO: 1330582 - DNA, 15 bp, Homo sapiens
ccaaccctggtaaag

SEQ ID NO: 1330583 - DNA, 15 bp, Homo sapiens
tccaaccctggtaaa

SEQ ID NO: 1330584 - DNA, 15 bp, Homo sapiens
ctccaaccctggtaa

SEQ ID NO: 1330585 - DNA, 15 bp, Homo sapiens
cctccaaccctggta

SEQ ID NO: 1330586 - DNA, 15 bp, Homo sapiens
acctccaaccctggt

SEQ ID NO: 1330587 - DNA, 15 bp, Homo sapiens
aacctccaaccctgg

SEQ ID NO: 1330588 - DNA, 15 bp, Homo sapiens
gaacctccaaccctg

SEQ ID NO: 1330589 - DNA, 15 bp, Homo sapiens
ggaacctccaaccct

SEQ ID NO: 1330590 - DNA, 15 bp, Homo sapiens
tggaacctccaaccc

SEQ ID NO: 1330591 - DNA, 15 bp, Homo sapiens
gtggaacctccaacc

SEQ ID NO: 1330592 - DNA, 15 bp, Homo sapiens
ggtggaacctccaac

SEQ ID NO: 1330593 - DNA, 15 bp, Homo sapiens
gggtggaacctccaa

SEQ ID NO: 1330594 - DNA, 15 bp, Homo sapiens
cgggtggaacctcca

SEQ ID NO: 1330595 - DNA, 15 bp, Homo sapiens
ccgggtggaacctcc

SEQ ID NO: 1330596 - DNA, 15 bp, Homo sapiens
tccgggtggaacctc

SEQ ID NO: 1330597 - DNA, 15 bp, Homo sapiens
ttccgggtggaacct

SEQ ID NO: 1330598 - DNA, 15 bp, Homo sapiens
tttccgggtggaacc

SEQ ID NO: 1330599 - DNA, 15 bp, Homo sapiens
atttccgggtggaac

SEQ ID NO: 1330600 - DNA, 15 bp, Homo sapiens
gatttccgggtggaa

SEQ ID NO: 1330601 - DNA, 15 bp, Homo sapiens
ggatttccgggtgga

SEQ ID NO: 1330602 - DNA, 15 bp, Homo sapiens
aggatttccgggtgg

SEQ ID NO: 1330603 - DNA, 15 bp, Homo sapiens
caggatttccgggtg

SEQ ID NO: 1330604 - DNA, 15 bp, Homo sapiens
tcaggatttccgggt

SEQ ID NO: 1330605 - DNA, 15 bp, Homo sapiens
ttcaggatttccggg

SEQ ID NO: 1330606 - DNA, 15 bp, Homo sapiens
tttcaggatttccgg

SEQ ID NO: 1330607 - DNA, 15 bp, Homo sapiens
atttcaggatttccg

SEQ ID NO: 1330608 - DNA, 15 bp, Homo sapiens
aatttcaggatttcc

SEQ ID NO: 1330609 - DNA, 15 bp, Homo sapiens
caatttcaggatttc

SEQ ID NO: 1330610 - DNA, 15 bp, Homo sapiens
ccaatttcaggattt

SEQ ID NO: 1330611 - DNA, 15 bp, Homo sapiens
cccaatttcaggatt

SEQ ID NO: 1330612 - DNA, 15 bp, Homo sapiens
gcccaatttcaggat

SEQ ID NO: 1330613 - DNA, 15 bp, Homo sapiens
ggcccaatttcagga

SEQ ID NO: 1330614 - DNA, 15 bp, Homo sapiens
gggcccaatttcagg

SEQ ID NO: 1330615 - DNA, 15 bp, Homo sapiens
agggcccaatttcag

SEQ ID NO: 1330616 - DNA, 15 bp, Homo sapiens
tagggcccaatttca

SEQ ID NO: 1330617 - DNA, 15 bp, Homo sapiens
ttagggcccaatttc

SEQ ID NO: 1330618 - DNA, 15 bp, Homo sapiens
tttagggcccaattt

SEQ ID NO: 1330619 - DNA, 15 bp, Homo sapiens
atttagggcccaatt

SEQ ID NO: 1330620 - DNA, 15 bp, Homo sapiens
catttagggcccaat

SEQ ID NO: 1330621 - DNA, 15 bp, Homo sapiens
ccatttagggcccaa

SEQ ID NO: 1330622 - DNA, 15 bp, Homo sapiens
accatttagggccca

SEQ ID NO: 1330623 - DNA, 15 bp, Homo sapiens
gaccatttagggccc

SEQ ID NO: 1330624 - DNA, 15 bp, Homo sapiens
agaccatttagggcc

SEQ ID NO: 1330625 - DNA, 15 bp, Homo sapiens
gagaccatttagggc

SEQ ID NO: 1330626 - DNA, 15 bp, Homo sapiens
tgagaccatttaggg

SEQ ID NO: 1330627 - DNA, 15 bp, Homo sapiens
ctgagaccatttagg

SEQ ID NO: 1330628 - DNA, 15 bp, Homo sapiens
actgagaccatttag

SEQ ID NO: 1330629 - DNA, 15 bp, Homo sapiens
tactgagaccattta

SEQ ID NO: 1330630 - DNA, 15 bp, Homo sapiens
ctactgagaccattt

SEQ ID NO: 1330631 - DNA, 15 bp, Homo sapiens
gctactgagaccatt

SEQ ID NO: 1330632 - DNA, 15 bp, Homo sapiens
tgctactgagaccat

SEQ ID NO: 1330633 - DNA, 15 bp, Homo sapiens
ttgctactgagacca

SEQ ID NO: 1330634 - DNA, 15 bp, Homo sapiens
tttgctactgagacc

SEQ ID NO: 1330635 - DNA, 15 bp, Homo sapiens
ttttgctactgagac

SEQ ID NO: 1330636 - DNA, 15 bp, Homo sapiens
cttttgctactgaga

SEQ ID NO: 1330637 - DNA, 15 bp, Homo sapiens
acttttgctactgag

SEQ ID NO: 1330638 - DNA, 15 bp, Homo sapiens
cacttttgctactga

SEQ ID NO: 1330639 - DNA, 15 bp, Homo sapiens
ccacttttgctactg

SEQ ID NO: 1330640 - DNA, 15 bp, Homo sapiens
tccacttttgctact

SEQ ID NO: 1330641 - DNA, 15 bp, Homo sapiens
atccacttttgctac

SEQ ID NO: 1330642 - DNA, 15 bp, Homo sapiens
aatccacttttgcta

SEQ ID NO: 1330643 - DNA, 15 bp, Homo sapiens
caaatccacttttgc

SEQ ID NO: 1330644 - DNA, 15 bp, Homo sapiens
ccaaatccacttttg

SEQ ID NO: 1330645 - DNA, 15 bp, Homo sapiens
gccaaatccactttt

SEQ ID NO: 1330646 - DNA, 15 bp, Homo sapiens
tgccaaatccacttt

SEQ ID NO: 1330647 - DNA, 15 bp, Homo sapiens
atgccaaatccactt

SEQ ID NO: 1330648 - DNA, 15 bp, Homo sapiens
gatgccaaatccact

SEQ ID NO: 1330649 - DNA, 15 bp, Homo sapiens
tgatgccaaatccac

SEQ ID NO: 1330650 - DNA, 15 bp, Homo sapiens
ctgatgccaaatcca

SEQ ID NO: 1330651 - DNA, 15 bp, Homo sapiens
gctgatgccaaatcc

SEQ ID NO: 1330652 - DNA, 15 bp, Homo sapiens
agctgatgccaaatc

SEQ ID NO: 1330653 - DNA, 15 bp, Homo sapiens
gagctgatgccaaat

SEQ ID NO: 1330654 - DNA, 15 bp, Homo sapiens
tgagctgatgccaaa

SEQ ID NO: 1330655 - DNA, 15 bp, Homo sapiens
atgagctgatgccaa

SEQ ID NO: 1330656 - DNA, 15 bp, Homo sapiens
gatgagctgatgcca

SEQ ID NO: 1330657 - DNA, 15 bp, Homo sapiens
tgatgagctgatgcc

SEQ ID NO: 1330658 - DNA, 15 bp, Homo sapiens
ctgatgagctgatgc

SEQ ID NO: 1330659 - DNA, 15 bp, Homo sapiens
gctgatgagctgatg

SEQ ID NO: 1330660 - DNA, 15 bp, Homo sapiens
cgctgatgagctgat

SEQ ID NO: 1330661 - DNA, 15 bp, Homo sapiens
acgctgatgagctga

SEQ ID NO: 1330662 - DNA, 15 bp, Homo sapiens
cacgctgatgagctg

SEQ ID NO: 1330663 - DNA, 15 bp, Homo sapiens
gcacgctgatgagct

SEQ ID NO: 1330664 - DNA, 15 bp, Homo sapiens
agcacgctgatgagc

SEQ ID NO: 1330665 - DNA, 15 bp, Homo sapiens
cagcacgctgatgag

SEQ ID NO: 1330666 - DNA, 15 bp, Homo sapiens
acagcacgctgatga

SEQ ID NO: 1330667 - DNA, 15 bp, Homo sapiens
aacagcacgctgatg

SEQ ID NO: 1330668 - DNA, 15 bp, Homo sapiens
gaacagcacgctgat

SEQ ID NO: 1330669 - DNA, 15 bp, Homo sapiens
agaacagcacgctga

SEQ ID NO: 1330670 - DNA, 15 bp, Homo sapiens
aagaacagcacgctg

SEQ ID NO: 1330671 - DNA, 15 bp, Homo sapiens
aaagaacagcacgct

SEQ ID NO: 1330672 - DNA, 15 bp, Homo sapiens
gaaagaacagcacgc

SEQ ID NO: 1330673 - DNA, 15 bp, Homo sapiens
ggaaagaacagcacg

SEQ ID NO: 1330674 - DNA, 15 bp, Homo sapiens
aggaaagaacagcac

SEQ ID NO: 1330675 - DNA, 15 bp, Homo sapiens
aaggaaagaacagca

SEQ ID NO: 1330676 - DNA, 15 bp, Homo sapiens
aaaggaaagaacagc

SEQ ID NO: 1330677 - DNA, 15 bp, Homo sapiens
aaaaggaaagaacag

SEQ ID NO: 1330678 - DNA, 15 bp, Homo sapiens
taaaaggaaagaaca

SEQ ID NO: 1330679 - DNA, 15 bp, Homo sapiens
ttaaaaggaaagaac

SEQ ID NO: 1330680 - DNA, 15 bp, Homo sapiens
gttaaaaggaaagaa

SEQ ID NO: 1330681 - DNA, 15 bp, Homo sapiens
ggttaaaaggaaaga

SEQ ID NO: 1330682 - DNA, 15 bp, Homo sapiens
aggttaaaaggaaag

SEQ ID NO: 1330683 - DNA, 15 bp, Homo sapiens
aaggttaaaaggaaa

SEQ ID NO: 1330684 - DNA, 15 bp, Homo sapiens
gaaggttaaaaggaa

SEQ ID NO: 1330685 - DNA, 15 bp, Homo sapiens
tgaaggttaaaagga

SEQ ID NO: 1330686 - DNA, 15 bp, Homo sapiens
ttgaaggttaaaagg

SEQ ID NO: 1330687 - DNA, 15 bp, Homo sapiens
tttgaaggttaaaag

SEQ ID NO: 1330688 - DNA, 15 bp, Homo sapiens
ctttgaaggttaaaa

SEQ ID NO: 1330689 - DNA, 15 bp, Homo sapiens
actttgaaggttaaa

SEQ ID NO: 1330690 - DNA, 15 bp, Homo sapiens
tactttgaaggttaa

SEQ ID NO: 1330691 - DNA, 15 bp, Homo sapiens
ctactttgaaggtta

SEQ ID NO: 1330692 - DNA, 15 bp, Homo sapiens
tctactttgaaggtt

SEQ ID NO: 1330693 - DNA, 15 bp, Homo sapiens
ttctactttgaaggt

SEQ ID NO: 1330694 - DNA, 15 bp, Homo sapiens
gttctactttgaagg

SEQ ID NO: 1330695 - DNA, 15 bp, Homo sapiens
tgttctactttgaag

SEQ ID NO: 1330696 - DNA, 15 bp, Homo sapiens
ctgttctactttgaa

SEQ ID NO: 1330697 - DNA, 15 bp, Homo sapiens
cctgttctactttga

SEQ ID NO: 1330698 - DNA, 15 bp, Homo sapiens
ccctgttctactttg

SEQ ID NO: 1330699 - DNA, 15 bp, Homo sapiens
cccctgttctacttt

SEQ ID NO: 1330700 - DNA, 15 bp, Homo sapiens
tcccctgttctactt

SEQ ID NO: 1330701 - DNA, 15 bp, Homo sapiens
atcccctgttctact

SEQ ID NO: 1330702 - DNA, 15 bp, Homo sapiens
aatcccctgttctac

SEQ ID NO: 1330703 - DNA, 15 bp, Homo sapiens
aaatcccctgttcta

SEQ ID NO: 1330704 - DNA, 15 bp, Homo sapiens
taaatcccctgttct

SEQ ID NO: 1330705 - DNA, 15 bp, Homo sapiens
ttaaatcccctgttc

SEQ ID NO: 1330706 - DNA, 15 bp, Homo sapiens
tttaaatcccctgtt

SEQ ID NO: 1330707 - DNA, 15 bp, Homo sapiens
ttttaaatcccctgt

SEQ ID NO: 1330708 - DNA, 15 bp, Homo sapiens
gttttaaatcccctg

SEQ ID NO: 1330709 - DNA, 15 bp, Homo sapiens
tgttttaaatcccct

SEQ ID NO: 1330710 - DNA, 15 bp, Homo sapiens
ttgttttaaatcccc

SEQ ID NO: 1330711 - DNA, 15 bp, Homo sapiens
tttgttttaaatccc

SEQ ID NO: 1330712 - DNA, 15 bp, Homo sapiens
ttttgttttaaatcc

SEQ ID NO: 1330713 - DNA, 15 bp, Homo sapiens
tttttgttttaaatc

SEQ ID NO: 1330714 - DNA, 15 bp, Homo sapiens
ttttttgttttaaat

SEQ ID NO: 1330715 - DNA, 15 bp, Homo sapiens
gttttttgttttaaa

SEQ ID NO: 1330716 - DNA, 15 bp, Homo sapiens
tgttttttgttttaa

SEQ ID NO: 1330717 - DNA, 15 bp, Homo sapiens
ttgttttttgtttta

SEQ ID NO: 1330718 - DNA, 15 bp, Homo sapiens
tgtttgttttttgtt

SEQ ID NO: 1330719 - DNA, 15 bp, Homo sapiens
ttgtttgttttttgt

SEQ ID NO: 1330720 - DNA, 15 bp, Homo sapiens
gttgtttgttttttg

SEQ ID NO: 1330721 - DNA, 15 bp, Homo sapiens
tgttgtttgtttttt

SEQ ID NO: 1330722 - DNA, 15 bp, Homo sapiens
ctgttgtttgttttt

SEQ ID NO: 1330723 - DNA, 15 bp, Homo sapiens
gctgttgtttgtttt

SEQ ID NO: 1330724 - DNA, 15 bp, Homo sapiens
tgctgttgtttgttt

SEQ ID NO: 1330725 - DNA, 15 bp, Homo sapiens
ctgctgttgtttgtt

SEQ ID NO: 1330726 - DNA, 15 bp, Homo sapiens
gctgctgttgtttgt

SEQ ID NO: 1330727 - DNA, 15 bp, Homo sapiens
tgctgctgttgtttg

SEQ ID NO: 1330728 - DNA, 15 bp, Homo sapiens
ttgctgctgttgttt

SEQ ID NO: 1330729 - DNA, 15 bp, Homo sapiens
tttgctgctgttgtt

SEQ ID NO: 1330730 - DNA, 15 bp, Homo sapiens
ttttgctgctgttgt

SEQ ID NO: 1330731 - DNA, 15 bp, Homo sapiens
tttttgctgctgttg

SEQ ID NO: 1330732 - DNA, 15 bp, Homo sapiens
ttttttgctgctgtt

SEQ ID NO: 1330733 - DNA, 15 bp, Homo sapiens
cttttttgctgctgt

SEQ ID NO: 1330734 - DNA, 15 bp, Homo sapiens
gcttttttgctgctg

SEQ ID NO: 1330735 - DNA, 15 bp, Homo sapiens
tgcttttttgctgct

SEQ ID NO: 1330736 - DNA, 15 bp, Homo sapiens
ctgcttttttgctgc

SEQ ID NO: 1330737 - DNA, 15 bp, Homo sapiens
cctgcttttttgctg

SEQ ID NO: 1330738 - DNA, 15 bp, Homo sapiens
ccctgcttttttgct

SEQ ID NO: 1330739 - DNA, 15 bp, Homo sapiens
accctgcttttttgc

SEQ ID NO: 1330740 - DNA, 15 bp, Homo sapiens
aaccctgcttttttg

SEQ ID NO: 1330741 - DNA, 15 bp, Homo sapiens
aaaccctgctttttt

SEQ ID NO: 1330742 - DNA, 15 bp, Homo sapiens
gaaaccctgcttttt

SEQ ID NO: 1330743 - DNA, 15 bp, Homo sapiens
agaaaccctgctttt

SEQ ID NO: 1330744 - DNA, 15 bp, Homo sapiens
gagaaaccctgcttt

SEQ ID NO: 1330745 - DNA, 15 bp, Homo sapiens
cgagaaaccctgctt

SEQ ID NO: 1330746 - DNA, 15 bp, Homo sapiens
tcgagaaaccctgct

SEQ ID NO: 1330747 - DNA, 15 bp, Homo sapiens
gtcgagaaaccctgc

SEQ ID NO: 1330748 - DNA, 15 bp, Homo sapiens
ggtcgagaaaccctg

SEQ ID NO: 1330749 - DNA, 15 bp, Homo sapiens
gggtcgagaaaccct

SEQ ID NO: 1330750 - DNA, 15 bp, Homo sapiens
agggtcgagaaaccc

SEQ ID NO: 1330751 - DNA, 15 bp, Homo sapiens
cagggtcgagaaacc

SEQ ID NO: 1330752 - DNA, 15 bp, Homo sapiens
tcagggtcgagaaac

SEQ ID NO: 1330753 - DNA, 15 bp, Homo sapiens
gtcagggtcgagaaa

SEQ ID NO: 1330754 - DNA, 15 bp, Homo sapiens
tgtcagggtcgagaa

SEQ ID NO: 1330755 - DNA, 15 bp, Homo sapiens
gtgtcagggtcgaga

SEQ ID NO: 1330756 - DNA, 15 bp, Homo sapiens
agtgtcagggtcgag

SEQ ID NO: 1330757 - DNA, 15 bp, Homo sapiens
tagtgtcagggtcga

SEQ ID NO: 1330758 - DNA, 15 bp, Homo sapiens
atagtgtcagggtcg

SEQ ID NO: 1330759 - DNA, 15 bp, Homo sapiens
aatagtgtcagggtc

SEQ ID NO: 1330760 - DNA, 15 bp, Homo sapiens
caatagtgtcagggt

SEQ ID NO: 1330761 - DNA, 15 bp, Homo sapiens
tcaatagtgtcaggg

SEQ ID NO: 1330762 - DNA, 15 bp, Homo sapiens
gtcaatagtgtcagg

SEQ ID NO: 1330763 - DNA, 15 bp, Homo sapiens
tgtcaatagtgtcag

SEQ ID NO: 1330764 - DNA, 15 bp, Homo sapiens
gtgtcaatagtgtca

SEQ ID NO: 1330765 - DNA, 15 bp, Homo sapiens
agtgtcaatagtgtc

SEQ ID NO: 1330766 - DNA, 15 bp, Homo sapiens
cagtgtcaatagtgt

SEQ ID NO: 1330767 - DNA, 15 bp, Homo sapiens
acagtgtcaatagtg

SEQ ID NO: 1330768 - DNA, 15 bp, Homo sapiens
aacagtgtcaatagt

SEQ ID NO: 1330769 - DNA, 15 bp, Homo sapiens
caacagtgtcaatag

SEQ ID NO: 1330770 - DNA, 15 bp, Homo sapiens
gcaacagtgtcaata

SEQ ID NO: 1330771 - DNA, 15 bp, Homo sapiens
agcaacagtgtcaat

SEQ ID NO: 1330772 - DNA, 15 bp, Homo sapiens
cagcaacagtgtcaa

SEQ ID NO: 1330773 - DNA, 15 bp, Homo sapiens
ccagcaacagtgtca

SEQ ID NO: 1330774 - DNA, 15 bp, Homo sapiens
gccagcaacagtgtc

SEQ ID NO: 1330775 - DNA, 15 bp, Homo sapiens
agccagcaacagtgt

SEQ ID NO: 1330776 - DNA, 15 bp, Homo sapiens
gagccagcaacagtg

SEQ ID NO: 1330777 - DNA, 15 bp, Homo sapiens
ggagccagcaacagt

SEQ ID NO: 1330778 - DNA, 15 bp, Homo sapiens
aggagccagcaacag

SEQ ID NO: 1330779 - DNA, 15 bp, Homo sapiens
aaggagccagcaaca

SEQ ID NO: 1330780 - DNA, 15 bp, Homo sapiens
gaaggagccagcaac

SEQ ID NO: 1330781 - DNA, 15 bp, Homo sapiens
agaaggagccagcaa

SEQ ID NO: 1330782 - DNA, 15 bp, Homo sapiens
aagaaggagccagca

SEQ ID NO: 1330783 - DNA, 15 bp, Homo sapiens
aaagaaggagccagc

SEQ ID NO: 1330784 - DNA, 15 bp, Homo sapiens
caaagaaggagccag

SEQ ID NO: 1330785 - DNA, 15 bp, Homo sapiens
gcaaagaaggagcca

SEQ ID NO: 1330786 - DNA, 15 bp, Homo sapiens
agcaaagaaggagcc

SEQ ID NO: 1330787 - DNA, 15 bp, Homo sapiens
cagcaaagaaggagc

SEQ ID NO: 1330788 - DNA, 15 bp, Homo sapiens
ccagcaaagaaggag

SEQ ID NO: 1330789 - DNA, 15 bp, Homo sapiens
cccagcaaagaagga

SEQ ID NO: 1330790 - DNA, 15 bp, Homo sapiens
ccccagcaaagaagg

SEQ ID NO: 1330791 - DNA, 15 bp, Homo sapiens
accccagcaaagaag

SEQ ID NO: 1330792 - DNA, 15 bp, Homo sapiens
aaccccagcaaagaa

SEQ ID NO: 1330793 - DNA, 15 bp, Homo sapiens
caaccccagcaaaga

SEQ ID NO: 1330794 - DNA, 15 bp, Homo sapiens
ccaaccccagcaaag

SEQ ID NO: 1330795 - DNA, 15 bp, Homo sapiens
accaaccccagcaaa

SEQ ID NO: 1330796 - DNA, 15 bp, Homo sapiens
caccaaccccagcaa

SEQ ID NO: 1330797 - DNA, 15 bp, Homo sapiens
ccaccaaccccagca

SEQ ID NO: 1330798 - DNA, 15 bp, Homo sapiens
cccaccaaccccagc

SEQ ID NO: 1330799 - DNA, 15 bp, Homo sapiens
ccccaccaaccccag

SEQ ID NO: 1330800 - DNA, 15 bp, Homo sapiens
cccccaccaacccca

SEQ ID NO: 1330801 - DNA, 15 bp, Homo sapiens
ccccccaccaacccc

SEQ ID NO: 1330802 - DNA, 15 bp, Homo sapiens
cccccccaccaaccc

SEQ ID NO: 1330803 - DNA, 15 bp, Homo sapiens
ccccccccaccaacc

SEQ ID NO: 1330804 - DNA, 15 bp, Homo sapiens
gccccccccaccaac

SEQ ID NO: 1330805 - DNA, 15 bp, Homo sapiens
tgccccccccaccaa

SEQ ID NO: 1330806 - DNA, 15 bp, Homo sapiens
gtgccccccccacca

SEQ ID NO: 1330807 - DNA, 15 bp, Homo sapiens
agtgccccccccacc

SEQ ID NO: 1330808 - DNA, 15 bp, Homo sapiens
cagtgccccccccac

SEQ ID NO: 1330809 - DNA, 15 bp, Homo sapiens
acagtgcccccccca

SEQ ID NO: 1330810 - DNA, 15 bp, Homo sapiens
gacagtgcccccccc

SEQ ID NO: 1330811 - DNA, 15 bp, Homo sapiens
agacagtgccccccc

SEQ ID NO: 1330812 - DNA, 15 bp, Homo sapiens
aagacagtgcccccc

SEQ ID NO: 1330813 - DNA, 15 bp, Homo sapiens
caagacagtgccccc

SEQ ID NO: 1330814 - DNA, 15 bp, Homo sapiens
acaagacagtgcccc

SEQ ID NO: 1330815 - DNA, 15 bp, Homo sapiens
tacaagacagtgccc

SEQ ID NO: 1330816 - DNA, 15 bp, Homo sapiens
gtacaagacagtgcc

SEQ ID NO: 1330817 - DNA, 15 bp, Homo sapiens
ggtacaagacagtgc

SEQ ID NO: 1330818 - DNA, 15 bp, Homo sapiens
gggtacaagacagtg

SEQ ID NO: 1330819 - DNA, 15 bp, Homo sapiens
cgggtacaagacagt

SEQ ID NO: 1330820 - DNA, 15 bp, Homo sapiens
ccgggtacaagacag

SEQ ID NO: 1330821 - DNA, 15 bp, Homo sapiens
cccgggtacaagaca

SEQ ID NO: 1330822 - DNA, 15 bp, Homo sapiens
tcccgggtacaagac

SEQ ID NO: 1330823 - DNA, 15 bp, Homo sapiens
ctcccgggtacaaga

SEQ ID NO: 1330824 - DNA, 15 bp, Homo sapiens
cctcccgggtacaag

SEQ ID NO: 1330825 - DNA, 15 bp, Homo sapiens
tcctcccgggtacaa

SEQ ID NO: 1330826 - DNA, 15 bp, Homo sapiens
atcctcccgggtaca

SEQ ID NO: 1330827 - DNA, 15 bp, Homo sapiens
catcctcccgggtac

SEQ ID NO: 1330828 - DNA, 15 bp, Homo sapiens
gcatcctcccgggta

SEQ ID NO: 1330829 - DNA, 15 bp, Homo sapiens
agcatcctcccgggt

SEQ ID NO: 1330830 - DNA, 15 bp, Homo sapiens
aagcatcctcccggg

SEQ ID NO: 1330831 - DNA, 15 bp, Homo sapiens
taagcatcctcccgg

SEQ ID NO: 1330832 - DNA, 15 bp, Homo sapiens
ctaagcatcctcccg

SEQ ID NO: 1330833 - DNA, 15 bp, Homo sapiens
gctaagcatcctccc

SEQ ID NO: 1330834 - DNA, 15 bp, Homo sapiens
tgctaagcatcctcc

SEQ ID NO: 1330835 - DNA, 15 bp, Homo sapiens
ctgctaagcatcctc

SEQ ID NO: 1330836 - DNA, 15 bp, Homo sapiens
gctgctaagcatcct

SEQ ID NO: 1330837 - DNA, 15 bp, Homo sapiens
cacttcgccgtggcc

SEQ ID NO: 1330838 - DNA, 15 bp, Homo sapiens
gcacttcgccgtggc

SEQ ID NO: 1330839 - DNA, 15 bp, Homo sapiens
ggcacttcgccgtgg

SEQ ID NO: 1330840 - DNA, 15 bp, Homo sapiens
gggcacttcgccgtg

SEQ ID NO: 1330841 - DNA, 15 bp, Homo sapiens
tgggcacttcgccgt

SEQ ID NO: 1330842 - DNA, 15 bp, Homo sapiens
gtgggcacttcgccg

SEQ ID NO: 1330843 - DNA, 15 bp, Homo sapiens
tgtgggcacttcgcc

SEQ ID NO: 1330844 - DNA, 15 bp, Homo sapiens
ctgtgggcacttcgc

SEQ ID NO: 1330845 - DNA, 15 bp, Homo sapiens
gctgtgggcacttcg

SEQ ID NO: 1330846 - DNA, 15 bp, Homo sapiens
tgctgtgggcacttc

SEQ ID NO: 1330847 - DNA, 15 bp, Homo sapiens
ctgctgtgggcactt

SEQ ID NO: 1330848 - DNA, 15 bp, Homo sapiens
tctgctgtgggcact

SEQ ID NO: 1330849 - DNA, 15 bp, Homo sapiens
gtctgctgtgggcac

SEQ ID NO: 1330850 - DNA, 15 bp, Homo sapiens
agtctgctgtgggca

SEQ ID NO: 1330851 - DNA, 15 bp, Homo sapiens
cagtctgctgtgggc

SEQ ID NO: 1330852 - DNA, 15 bp, Homo sapiens
acagtctgctgtggg

SEQ ID NO: 1330853 - DNA, 15 bp, Homo sapiens
aacagtctgctgtgg

SEQ ID NO: 1330854 - DNA, 15 bp, Homo sapiens
gaacagtctgctgtg

SEQ ID NO: 1330855 - DNA, 15 bp, Homo sapiens
ggaacagtctgctgt

SEQ ID NO: 1330856 - DNA, 15 bp, Homo sapiens
gggaacagtctgctg

SEQ ID NO: 1330857 - DNA, 15 bp, Homo sapiens
cgggaacagtctgct

SEQ ID NO: 1330858 - DNA, 15 bp, Homo sapiens
tcgggaacagtctgc

SEQ ID NO: 1330859 - DNA, 15 bp, Homo sapiens
gtcgggaacagtctg

SEQ ID NO: 1330860 - DNA, 15 bp, Homo sapiens
cgtcgggaacagtct

SEQ ID NO: 1330861 - DNA, 15 bp, Homo sapiens
gcgtcgggaacagtc

SEQ ID NO: 1330862 - DNA, 15 bp, Homo sapiens
tgcgtcgggaacagt

SEQ ID NO: 1330863 - DNA, 15 bp, Homo sapiens
ctgcgtcgggaacag

SEQ ID NO: 1330864 - DNA, 15 bp, Homo sapiens
tctgcgtcgggaaca

SEQ ID NO: 1330865 - DNA, 15 bp, Homo sapiens
ttctgcgtcgggaac

SEQ ID NO: 1330866 - DNA, 15 bp, Homo sapiens
gttctgcgtcgggaa

SEQ ID NO: 1330867 - DNA, 15 bp, Homo sapiens
cgttctgcgtcggga

SEQ ID NO: 1330868 - DNA, 15 bp, Homo sapiens
acgttctgcgtcggg

SEQ ID NO: 1330869 - DNA, 15 bp, Homo sapiens
cacgttctgcgtcgg

SEQ ID NO: 1330870 - DNA, 15 bp, Homo sapiens
tcacgttctgcgtcg

SEQ ID NO: 1330871 - DNA, 15 bp, Homo sapiens
ttcacgttctgcgtc

SEQ ID NO: 1330872 - DNA, 15 bp, Homo sapiens
cttcacgttctgcgt

SEQ ID NO: 1330873 - DNA, 15 bp, Homo sapiens
ccttcacgttctgcg

SEQ ID NO: 1330874 - DNA, 15 bp, Homo sapiens
gccttcacgttctgc

SEQ ID NO: 1330875 - DNA, 15 bp, Homo sapiens
agccttcacgttctg

SEQ ID NO: 1330876 - DNA, 15 bp, Homo sapiens
gagccttcacgttct

SEQ ID NO: 1330877 - DNA, 15 bp, Homo sapiens
tgagccttcacgttc

SEQ ID NO: 1330878 - DNA, 15 bp, Homo sapiens
atgagccttcacgtt

SEQ ID NO: 1330879 - DNA, 15 bp, Homo sapiens
catgagccttcacgt

SEQ ID NO: 1330880 - DNA, 15 bp, Homo sapiens
gcatgagccttcacg

SEQ ID NO: 1330881 - DNA, 15 bp, Homo sapiens
agcatgagccttcac

SEQ ID NO: 1330882 - DNA, 15 bp, Homo sapiens
cagcatgagccttca

SEQ ID NO: 1330883 - DNA, 15 bp, Homo sapiens
acagcatgagccttc

SEQ ID NO: 1330884 - DNA, 15 bp, Homo sapiens
tacagcatgagcctt

SEQ ID NO: 1330885 - DNA, 15 bp, Homo sapiens
gtacagcatgagcct

SEQ ID NO: 1330886 - DNA, 15 bp, Homo sapiens
ggtacagcatgagcc

SEQ ID NO: 1330887 - DNA, 15 bp, Homo sapiens
aggtacagcatgagc

SEQ ID NO: 1330888 - DNA, 15 bp, Homo sapiens
taggtacagcatgag

SEQ ID NO: 1330889 - DNA, 15 bp, Homo sapiens
ttaggtacagcatga

SEQ ID NO: 1330890 - DNA, 15 bp, Homo sapiens
cttaggtacagcatg

SEQ ID NO: 1330891 - DNA, 15 bp, Homo sapiens
ccttaggtacagcat

SEQ ID NO: 1330892 - DNA, 15 bp, Homo sapiens
gccttaggtacagca

SEQ ID NO: 1330893 - DNA, 15 bp, Homo sapiens
tgccttaggtacagc

SEQ ID NO: 1330894 - DNA, 15 bp, Homo sapiens
ctgccttaggtacag

SEQ ID NO: 1330895 - DNA, 15 bp, Homo sapiens
gctgccttaggtaca

SEQ ID NO: 1330896 - DNA, 15 bp, Homo sapiens
tgctgccttaggtac

SEQ ID NO: 1330897 - DNA, 15 bp, Homo sapiens
gtgctgccttaggta

SEQ ID NO: 1330898 - DNA, 15 bp, Homo sapiens
tgtgctgccttaggt

SEQ ID NO: 1330899 - DNA, 15 bp, Homo sapiens
ctgtgctgccttagg

SEQ ID NO: 1330900 - DNA, 15 bp, Homo sapiens
cctgtgctgccttag

SEQ ID NO: 1330901 - DNA, 15 bp, Homo sapiens
gcctgtgctgcctta

SEQ ID NO: 1330902 - DNA, 15 bp, Homo sapiens
ggcctgtgctgcctt

SEQ ID NO: 1330903 - DNA, 15 bp, Homo sapiens
gggcctgtgctgcct

SEQ ID NO: 1330904 - DNA, 15 bp, Homo sapiens
cgggcctgtgctgcc

SEQ ID NO: 1330905 - DNA, 15 bp, Homo sapiens
ccgggcctgtgctgc

SEQ ID NO: 1330906 - DNA, 15 bp, Homo sapiens
cccgggcctgtgctg

SEQ ID NO: 1330907 - DNA, 15 bp, Homo sapiens
gcccgggcctgtgct

SEQ ID NO: 1330908 - DNA, 15 bp, Homo sapiens
ggcccgggcctgtgc

SEQ ID NO: 1330909 - DNA, 15 bp, Homo sapiens
tggcccgggcctgtg

SEQ ID NO: 1330910 - DNA, 15 bp, Homo sapiens
ctggcccgggcctgt

SEQ ID NO: 1330911 - DNA, 15 bp, Homo sapiens
cctggcccgggcctg

SEQ ID NO: 1330912 - DNA, 15 bp, Homo sapiens
gcctggcccgggcct

SEQ ID NO: 1330913 - DNA, 15 bp, Homo sapiens
ggcctggcccgggcc

SEQ ID NO: 1330914 - DNA, 15 bp, Homo sapiens
tggcctggcccgggc

SEQ ID NO: 1330915 - DNA, 15 bp, Homo sapiens
atggcctggcccggg

SEQ ID NO: 1330916 - DNA, 15 bp, Homo sapiens
gatggcctggcccgg

SEQ ID NO: 1330917 - DNA, 15 bp, Homo sapiens
ggatggcctggcccg

SEQ ID NO: 1330918 - DNA, 15 bp, Homo sapiens
cggatggcctggccc

SEQ ID NO: 1330919 - DNA, 15 bp, Homo sapiens
gcggatggcctggcc

SEQ ID NO: 1330920 - DNA, 15 bp, Homo sapiens
cgcggatggcctggc

SEQ ID NO: 1330921 - DNA, 15 bp, Homo sapiens
tcgcggatggcctgg

SEQ ID NO: 1330922 - DNA, 15 bp, Homo sapiens
atcgcggatggcctg

SEQ ID NO: 1330923 - DNA, 15 bp, Homo sapiens
gatcgcggatggcct

SEQ ID NO: 1330924 - DNA, 15 bp, Homo sapiens
agatcgcggatggcc

SEQ ID NO: 1330925 - DNA, 15 bp, Homo sapiens
gagatcgcggatggc

SEQ ID NO: 1330926 - DNA, 15 bp, Homo sapiens
agagatcgcggatgg

SEQ ID NO: 1330927 - DNA, 15 bp, Homo sapiens
gagagatcgcggatg

SEQ ID NO: 1330928 - DNA, 15 bp, Homo sapiens
ggagagatcgcggat

SEQ ID NO: 1330929 - DNA, 15 bp, Homo sapiens
gggagagatcgcgga

SEQ ID NO: 1330930 - DNA, 15 bp, Homo sapiens
tgggagagatcgcgg

SEQ ID NO: 1330931 - DNA, 15 bp, Homo sapiens
gtgggagagatcgcg

SEQ ID NO: 1330932 - DNA, 15 bp, Homo sapiens
ggtgggagagatcgc

SEQ ID NO: 1330933 - DNA, 15 bp, Homo sapiens
tggtgggagagatcg

SEQ ID NO: 1330934 - DNA, 15 bp, Homo sapiens
gtggtgggagagatc

SEQ ID NO: 1330935 - DNA, 15 bp, Homo sapiens
cgtggtgggagagat

SEQ ID NO: 1330936 - DNA, 15 bp, Homo sapiens
ccgtggtgggagaga

SEQ ID NO: 1330937 - DNA, 15 bp, Homo sapiens
gccgtggtgggagag

SEQ ID NO: 1330938 - DNA, 15 bp, Homo sapiens
cgccgtggtgggaga

SEQ ID NO: 1330939 - DNA, 15 bp, Homo sapiens
acgccgtggtgggag

SEQ ID NO: 1330940 - DNA, 15 bp, Homo sapiens
cacgccgtggtggga

SEQ ID NO: 1330941 - DNA, 15 bp, Homo sapiens
gcacgccgtggtggg

SEQ ID NO: 1330942 - DNA, 15 bp, Homo sapiens
agcacgccgtggtgg

SEQ ID NO: 1330943 - DNA, 15 bp, Homo sapiens
gagcacgccgtggtg

SEQ ID NO: 1330944 - DNA, 15 bp, Homo sapiens
agagcacgccgtggt

SEQ ID NO: 1330945 - DNA, 15 bp, Homo sapiens
cagagcacgccgtgg

SEQ ID NO: 1330946 - DNA, 15 bp, Homo sapiens
gcagagcacgccgtg

SEQ ID NO: 1330947 - DNA, 15 bp, Homo sapiens
ggcagagcacgccgt

SEQ ID NO: 1330948 - DNA, 15 bp, Homo sapiens
gggcagagcacgccg

SEQ ID NO: 1330949 - DNA, 15 bp, Homo sapiens
tgggcagagcacgcc

SEQ ID NO: 1330950 - DNA, 15 bp, Homo sapiens
gtgggcagagcacgc

SEQ ID NO: 1330951 - DNA, 15 bp, Homo sapiens
tgtgggcagagcacg

SEQ ID NO: 1330952 - DNA, 15 bp, Homo sapiens
ctgtgggcagagcac

SEQ ID NO: 1330953 - DNA, 15 bp, Homo sapiens
cctgtgggcagagca

SEQ ID NO: 1330954 - DNA, 15 bp, Homo sapiens
tcctgtgggcagagc

SEQ ID NO: 1330955 - DNA, 15 bp, Homo sapiens
ttcctgtgggcagag

SEQ ID NO: 1330956 - DNA, 15 bp, Homo sapiens
cttcctgtgggcaga

SEQ ID NO: 1330957 - DNA, 15 bp, Homo sapiens
gcttcctgtgggcag

SEQ ID NO: 1330958 - DNA, 15 bp, Homo sapiens
agcttcctgtgggca

SEQ ID NO: 1330959 - DNA, 15 bp, Homo sapiens
gagcttcctgtgggc

SEQ ID NO: 1330960 - DNA, 15 bp, Homo sapiens
agagcttcctgtggg

SEQ ID NO: 1330961 - DNA, 15 bp, Homo sapiens
gagagcttcctgtgg

SEQ ID NO: 1330962 - DNA, 15 bp, Homo sapiens
cgagagcttcctgtg

SEQ ID NO: 1330963 - DNA, 15 bp, Homo sapiens
ccgagagcttcctgt

SEQ ID NO: 1330964 - DNA, 15 bp, Homo sapiens
gccgagagcttcctg

SEQ ID NO: 1330965 - DNA, 15 bp, Homo sapiens
cgccgagagcttcct

SEQ ID NO: 1330966 - DNA, 15 bp, Homo sapiens
acgccgagagcttcc

SEQ ID NO: 1330967 - DNA, 15 bp, Homo sapiens
gacgccgagagcttc

SEQ ID NO: 1330968 - DNA, 15 bp, Homo sapiens
tgacgccgagagctt

SEQ ID NO: 1330969 - DNA, 15 bp, Homo sapiens
gtgacgccgagagct

SEQ ID NO: 1330970 - DNA, 15 bp, Homo sapiens
cgtgacgccgagagc

SEQ ID NO: 1330971 - DNA, 15 bp, Homo sapiens
gcgtgacgccgagag

SEQ ID NO: 1330972 - DNA, 15 bp, Homo sapiens
agcgtgacgccgaga

SEQ ID NO: 1330973 - DNA, 15 bp, Homo sapiens
cagcgtgacgccgag

SEQ ID NO: 1330974 - DNA, 15 bp, Homo sapiens
ccagcgtgacgccga

SEQ ID NO: 1330975 - DNA, 15 bp, Homo sapiens
gccagcgtgacgccg

SEQ ID NO: 1330976 - DNA, 15 bp, Homo sapiens
tgccagcgtgacgcc

SEQ ID NO: 1330977 - DNA, 15 bp, Homo sapiens
gtgccagcgtgacgc

SEQ ID NO: 1330978 - DNA, 15 bp, Homo sapiens
ggtgccagcgtgacg

SEQ ID NO: 1330979 - DNA, 15 bp, Homo sapiens
gggtgccagcgtgac

SEQ ID NO: 1330980 - DNA, 15 bp, Homo sapiens
ggggtgccagcgtga

SEQ ID NO: 1330981 - DNA, 15 bp, Homo sapiens
cggggtgccagcgtg

SEQ ID NO: 1330982 - DNA, 15 bp, Homo sapiens
tcggggtgccagcgt

SEQ ID NO: 1330983 - DNA, 15 bp, Homo sapiens
gtcggggtgccagcg

SEQ ID NO: 1330984 - DNA, 15 bp, Homo sapiens
tgtcggggtgccagc

SEQ ID NO: 1330985 - DNA, 15 bp, Homo sapiens
ctgtcggggtgccag

SEQ ID NO: 1330986 - DNA, 15 bp, Homo sapiens
gctgtcggggtgcca

SEQ ID NO: 1330987 - DNA, 15 bp, Homo sapiens
ggctgtcggggtgcc

SEQ ID NO: 1330988 - DNA, 15 bp, Homo sapiens
cggctgtcggggtgc

SEQ ID NO: 1330989 - DNA, 15 bp, Homo sapiens
gcggctgtcggggtg

SEQ ID NO: 1330990 - DNA, 15 bp, Homo sapiens
agcggctgtcggggt

SEQ ID NO: 1330991 - DNA, 15 bp, Homo sapiens
cagcggctgtcgggg

SEQ ID NO: 1330992 - DNA, 15 bp, Homo sapiens
tcagcggctgtcggg

SEQ ID NO: 1330993 - DNA, 15 bp, Homo sapiens
ttcagcggctgtcgg

SEQ ID NO: 1330994 - DNA, 15 bp, Homo sapiens
gttcagcggctgtcg

SEQ ID NO: 1330995 - DNA, 15 bp, Homo sapiens
tgttcagcggctgtc

SEQ ID NO: 1330996 - DNA, 15 bp, Homo sapiens
ctgttcagcggctgt

SEQ ID NO: 1330997 - DNA, 15 bp, Homo sapiens
gctgttcagcggctg

SEQ ID NO: 1330998 - DNA, 15 bp, Homo sapiens
agctgttcagcggct

SEQ ID NO: 1330999 - DNA, 15 bp, Homo sapiens
gagctgttcagcggc

SEQ ID NO: 1331000 - DNA, 15 bp, Homo sapiens
cgagctgttcagcgg

SEQ ID NO: 1331001 - DNA, 15 bp, Homo sapiens
gcgagctgttcagcg

SEQ ID NO: 1331002 - DNA, 15 bp, Homo sapiens
agcgagctgttcagc

SEQ ID NO: 1331003 - DNA, 15 bp, Homo sapiens
gagcgagctgttcag

SEQ ID NO: 1331004 - DNA, 15 bp, Homo sapiens
agagcgagctgttca

SEQ ID NO: 1331005 - DNA, 15 bp, Homo sapiens
cagagcgagctgttc

SEQ ID NO: 1331006 - DNA, 15 bp, Homo sapiens
acagagcgagctgtt

SEQ ID NO: 1331007 - DNA, 15 bp, Homo sapiens
gacagagcgagctgt

SEQ ID NO: 1331008 - DNA, 15 bp, Homo sapiens
tgacagagcgagctg

SEQ ID NO: 1331009 - DNA, 15 bp, Homo sapiens
ttgacagagcgagct

SEQ ID NO: 1331010 - DNA, 15 bp, Homo sapiens
attgacagagcgagc

SEQ ID NO: 1331011 - DNA, 15 bp, Homo sapiens
cattgacagagcgag

SEQ ID NO: 1331012 - DNA, 15 bp, Homo sapiens
gcattgacagagcga

SEQ ID NO: 1331013 - DNA, 15 bp, Homo sapiens
tgcattgacagagcg

SEQ ID NO: 1331014 - DNA, 15 bp, Homo sapiens
ctgcattgacagagc

SEQ ID NO: 1331015 - DNA, 15 bp, Homo sapiens
tctgcattgacagag

SEQ ID NO: 1331016 - DNA, 15 bp, Homo sapiens
ctctgcattgacaga

SEQ ID NO: 1331017 - DNA, 15 bp, Homo sapiens
cctctgcattgacag

SEQ ID NO: 1331018 - DNA, 15 bp, Homo sapiens
tcctctgcattgaca

SEQ ID NO: 1331019 - DNA, 15 bp, Homo sapiens
ttcctctgcattgac

SEQ ID NO: 1331020 - DNA, 15 bp, Homo sapiens
tttcctctgcattga

SEQ ID NO: 1331021 - DNA, 15 bp, Homo sapiens
ctttcctctgcattg

SEQ ID NO: 1331022 - DNA, 15 bp, Homo sapiens
tctttcctctgcatt

SEQ ID NO: 1331023 - DNA, 15 bp, Homo sapiens
gtctttcctctgcat

SEQ ID NO: 1331024 - DNA, 15 bp, Homo sapiens
cgtctttcctctgca

SEQ ID NO: 1331025 - DNA, 15 bp, Homo sapiens
acgtctttcctctgc

SEQ ID NO: 1331026 - DNA, 15 bp, Homo sapiens
gacgtctttcctctg

SEQ ID NO: 1331027 - DNA, 15 bp, Homo sapiens
agacgtctttcctct

SEQ ID NO: 1331028 - DNA, 15 bp, Homo sapiens
gagacgtctttcctc

SEQ ID NO: 1331029 - DNA, 15 bp, Homo sapiens
tgagacgtctttcct

SEQ ID NO: 1331030 - DNA, 15 bp, Homo sapiens
gtgagacgtctttcc

SEQ ID NO: 1331031 - DNA, 15 bp, Homo sapiens
agtgagacgtctttc

SEQ ID NO: 1331032 - DNA, 15 bp, Homo sapiens
tagtgagacgtcttt

SEQ ID NO: 1331033 - DNA, 15 bp, Homo sapiens
atagtgagacgtctt

SEQ ID NO: 1331034 - DNA, 15 bp, Homo sapiens
tatagtgagacgtct

SEQ ID NO: 1331035 - DNA, 15 bp, Homo sapiens
ctatagtgagacgtc

SEQ ID NO: 1331036 - DNA, 15 bp, Homo sapiens
tctatagtgagacgt

SEQ ID NO: 1331037 - DNA, 15 bp, Homo sapiens
gtctatagtgagacg

SEQ ID NO: 1331038 - DNA, 15 bp, Homo sapiens
tgtctatagtgagac

SEQ ID NO: 1331039 - DNA, 15 bp, Homo sapiens
ctgtctatagtgaga

SEQ ID NO: 1331040 - DNA, 15 bp, Homo sapiens
tctgtctatagtgag

SEQ ID NO: 1331041 - DNA, 15 bp, Homo sapiens
ttctgtctatagtga

SEQ ID NO: 1331042 - DNA, 15 bp, Homo sapiens
cttctgtctatagtg

SEQ ID NO: 1331043 - DNA, 15 bp, Homo sapiens
gcttctgtctatagt

SEQ ID NO: 1331044 - DNA, 15 bp, Homo sapiens
ggcttctgtctatag

SEQ ID NO: 1331045 - DNA, 15 bp, Homo sapiens
gggcttctgtctata

SEQ ID NO: 1331046 - DNA, 15 bp, Homo sapiens
tgggcttctgtctat

SEQ ID NO: 1331047 - DNA, 15 bp, Homo sapiens
ctgggcttctgtcta

SEQ ID NO: 1331048 - DNA, 15 bp, Homo sapiens
actgggcttctgtct

SEQ ID NO: 1331049 - DNA, 15 bp, Homo sapiens
gactgggcttctgtc

SEQ ID NO: 1331050 - DNA, 15 bp, Homo sapiens
ggactgggcttctgt

SEQ ID NO: 1331051 - DNA, 15 bp, Homo sapiens
aggactgggcttctg

SEQ ID NO: 1331052 - DNA, 15 bp, Homo sapiens
taggactgggcttct

SEQ ID NO: 1331053 - DNA, 15 bp, Homo sapiens
ctaggactgggcttc

SEQ ID NO: 1331054 - DNA, 15 bp, Homo sapiens
cctaggactgggctt

SEQ ID NO: 1331055 - DNA, 15 bp, Homo sapiens
tcctaggactgggct

SEQ ID NO: 1331056 - DNA, 15 bp, Homo sapiens
ttcctaggactgggc

SEQ ID NO: 1331057 - DNA, 15 bp, Homo sapiens
attcctaggactggg

SEQ ID NO: 1331058 - DNA, 15 bp, Homo sapiens
cattcctaggactgg

SEQ ID NO: 1331059 - DNA, 15 bp, Homo sapiens
tcattcctaggactg

SEQ ID NO: 1331060 - DNA, 15 bp, Homo sapiens
ctcattcctaggact

SEQ ID NO: 1331061 - DNA, 15 bp, Homo sapiens
tctcattcctaggac

SEQ ID NO: 1331062 - DNA, 15 bp, Homo sapiens
ttctcattcctagga

SEQ ID NO: 1331063 - DNA, 15 bp, Homo sapiens
attctcattcctagg

SEQ ID NO: 1331064 - DNA, 15 bp, Homo sapiens
gattctcattcctag

SEQ ID NO: 1331065 - DNA, 15 bp, Homo sapiens
ggattctcattccta

SEQ ID NO: 1331066 - DNA, 15 bp, Homo sapiens
tggattctcattcct

SEQ ID NO: 1331067 - DNA, 15 bp, Homo sapiens
ctggattctcattcc

SEQ ID NO: 1331068 - DNA, 15 bp, Homo sapiens
cctggattctcattc

SEQ ID NO: 1331069 - DNA, 15 bp, Homo sapiens
acctggattctcatt

SEQ ID NO: 1331070 - DNA, 15 bp, Homo sapiens
gacctggattctcat

SEQ ID NO: 1331071 - DNA, 15 bp, Homo sapiens
agacctggattctca

SEQ ID NO: 1331072 - DNA, 15 bp, Homo sapiens
gagacctggattctc

SEQ ID NO: 1331073 - DNA, 15 bp, Homo sapiens
tgagacctggattct

SEQ ID NO: 1331074 - DNA, 15 bp, Homo sapiens
ttgagacctggattc

SEQ ID NO: 1331075 - DNA, 15 bp, Homo sapiens
tttgagacctggatt

SEQ ID NO: 1331076 - DNA, 15 bp, Homo sapiens
atttgagacctggat

SEQ ID NO: 1331077 - DNA, 15 bp, Homo sapiens
gatttgagacctgga

SEQ ID NO: 1331078 - DNA, 15 bp, Homo sapiens
ggatttgagacctgg

SEQ ID NO: 1331079 - DNA, 15 bp, Homo sapiens
aggatttgagacctg

SEQ ID NO: 1331080 - DNA, 15 bp, Homo sapiens
gaggatttgagacct

SEQ ID NO: 1331081 - DNA, 15 bp, Homo sapiens
agaggatttgagacc

SEQ ID NO: 1331082 - DNA, 15 bp, Homo sapiens
cagaggatttgagac

SEQ ID NO: 1331083 - DNA, 15 bp, Homo sapiens
tcagaggatttgaga

SEQ ID NO: 1331084 - DNA, 15 bp, Homo sapiens
ttcagaggatttgag

SEQ ID NO: 1331085 - DNA, 15 bp, Homo sapiens
attcagaggatttga

SEQ ID NO: 1331086 - DNA, 15 bp, Homo sapiens
gattcagaggatttg

SEQ ID NO: 1331087 - DNA, 15 bp, Homo sapiens
tgattcagaggattt

SEQ ID NO: 1331088 - DNA, 15 bp, Homo sapiens
ctgattcagaggatt

SEQ ID NO: 1331089 - DNA, 15 bp, Homo sapiens
gctgattcagaggat

SEQ ID NO: 1331090 - DNA, 15 bp, Homo sapiens
agctgattcagagga

SEQ ID NO: 1331091 - DNA, 15 bp, Homo sapiens
cagctgattcagagg

SEQ ID NO: 1331092 - DNA, 15 bp, Homo sapiens
ccagctgattcagag

SEQ ID NO: 1331093 - DNA, 15 bp, Homo sapiens
cccagctgattcaga

SEQ ID NO: 1331094 - DNA, 15 bp, Homo sapiens
gcccagctgattcag

SEQ ID NO: 1331095 - DNA, 15 bp, Homo sapiens
agcccagctgattca

SEQ ID NO: 1331096 - DNA, 15 bp, Homo sapiens
cagcccagctgattc

SEQ ID NO: 1331097 - DNA, 15 bp, Homo sapiens
tcagcccagctgatt

SEQ ID NO: 1331098 - DNA, 15 bp, Homo sapiens
ttcagcccagctgat

SEQ ID NO: 1331099 - DNA, 15 bp, Homo sapiens
attcagcccagctga

SEQ ID NO: 1331100 - DNA, 15 bp, Homo sapiens
cattcagcccagctg

SEQ ID NO: 1331101 - DNA, 15 bp, Homo sapiens
acattcagcccagct

SEQ ID NO: 1331102 - DNA, 15 bp, Homo sapiens
cacattcagcccagc

SEQ ID NO: 1331103 - DNA, 15 bp, Homo sapiens
ccacattcagcccag

SEQ ID NO: 1331104 - DNA, 15 bp, Homo sapiens
tccacattcagccca

SEQ ID NO: 1331105 - DNA, 15 bp, Homo sapiens
ttccacattcagccc

SEQ ID NO: 1331106 - DNA, 15 bp, Homo sapiens
tttccacattcagcc

SEQ ID NO: 1331107 - DNA, 15 bp, Homo sapiens
atttccacattcagc

SEQ ID NO: 1331108 - DNA, 15 bp, Homo sapiens
aatttccacattcag

SEQ ID NO: 1331109 - DNA, 15 bp, Homo sapiens
gaatttccacattca

SEQ ID NO: 1331110 - DNA, 15 bp, Homo sapiens
ggaatttccacattc

SEQ ID NO: 1331111 - DNA, 15 bp, Homo sapiens
gggaatttccacatt

SEQ ID NO: 1331112 - DNA, 15 bp, Homo sapiens
ggggaatttccacat

SEQ ID NO: 1331113 - DNA, 15 bp, Homo sapiens
gggggaatttccaca

SEQ ID NO: 1331114 - DNA, 15 bp, Homo sapiens
agggggaatttccac

SEQ ID NO: 1331115 - DNA, 15 bp, Homo sapiens
cagggggaatttcca

SEQ ID NO: 1331116 - DNA, 15 bp, Homo sapiens
ccagggggaatttcc

SEQ ID NO: 1331117 - DNA, 15 bp, Homo sapiens
gccagggggaatttc

SEQ ID NO: 1331118 - DNA, 15 bp, Homo sapiens
ggccagggggaattt

SEQ ID NO: 1331119 - DNA, 15 bp, Homo sapiens
aggccagggggaatt

SEQ ID NO: 1331120 - DNA, 15 bp, Homo sapiens
gaggccagggggaat

SEQ ID NO: 1331121 - DNA, 15 bp, Homo sapiens
ggaggccagggggaa

SEQ ID NO: 1331122 - DNA, 15 bp, Homo sapiens
gggaggccaggggga

SEQ ID NO: 1331123 - DNA, 15 bp, Homo sapiens
agggaggccaggggg

SEQ ID NO: 1331124 - DNA, 15 bp, Homo sapiens
cagggaggccagggg

SEQ ID NO: 1331125 - DNA, 15 bp, Homo sapiens
ccagggaggccaggg

SEQ ID NO: 1331126 - DNA, 15 bp, Homo sapiens
cccagggaggccagg

SEQ ID NO: 1331127 - DNA, 15 bp, Homo sapiens
acccagggaggccag

SEQ ID NO: 1331128 - DNA, 15 bp, Homo sapiens
aacccagggaggcca

SEQ ID NO: 1331129 - DNA, 15 bp, Homo sapiens
caacccagggaggcc

SEQ ID NO: 1331130 - DNA, 15 bp, Homo sapiens
acaacccagggaggc

SEQ ID NO: 1331131 - DNA, 15 bp, Homo sapiens
gacaacccagggagg

SEQ ID NO: 1331132 - DNA, 15 bp, Homo sapiens
tgacaacccagggag

SEQ ID NO: 1331133 - DNA, 15 bp, Homo sapiens
gtgacaacccaggga

SEQ ID NO: 1331134 - DNA, 15 bp, Homo sapiens
ggtgacaacccaggg

SEQ ID NO: 1331135 - DNA, 15 bp, Homo sapiens
tggtgacaacccagg

SEQ ID NO: 1331136 - DNA, 15 bp, Homo sapiens
ttggtgacaacccag

SEQ ID NO: 1331137 - DNA, 15 bp, Homo sapiens
gttggtgacaaccca

SEQ ID NO: 1331138 - DNA, 15 bp, Homo sapiens
cgttggtgacaaccc

SEQ ID NO: 1331139 - DNA, 15 bp, Homo sapiens
gcgttggtgacaacc

SEQ ID NO: 1331140 - DNA, 15 bp, Homo sapiens
tgcgttggtgacaac

SEQ ID NO: 1331141 - DNA, 15 bp, Homo sapiens
gtgcgttggtgacaa

SEQ ID NO: 1331142 - DNA, 15 bp, Homo sapiens
tgtgcgttggtgaca

SEQ ID NO: 1331143 - DNA, 15 bp, Homo sapiens
ttgtgcgttggtgac

SEQ ID NO: 1331144 - DNA, 15 bp, Homo sapiens
attgtgcgttggtga

SEQ ID NO: 1331145 - DNA, 15 bp, Homo sapiens
cattgtgcgttggtg

SEQ ID NO: 1331146 - DNA, 15 bp, Homo sapiens
acattgtgcgttggt

SEQ ID NO: 1331147 - DNA, 15 bp, Homo sapiens
gacattgtgcgttgg

SEQ ID NO: 1331148 - DNA, 15 bp, Homo sapiens
agacattgtgcgttg

SEQ ID NO: 1331149 - DNA, 15 bp, Homo sapiens
cagacattgtgcgtt

SEQ ID NO: 1331150 - DNA, 15 bp, Homo sapiens
acagacattgtgcgt

SEQ ID NO: 1331151 - DNA, 15 bp, Homo sapiens
aacagacattgtgcg

SEQ ID NO: 1331152 - DNA, 15 bp, Homo sapiens
gaacagacattgtgc

SEQ ID NO: 1331153 - DNA, 15 bp, Homo sapiens
ggaacagacattgtg

SEQ ID NO: 1331154 - DNA, 15 bp, Homo sapiens
tggaacagacattgt

SEQ ID NO: 1331155 - DNA, 15 bp, Homo sapiens
ttggaacagacattg

SEQ ID NO: 1331156 - DNA, 15 bp, Homo sapiens
attggaacagacatt

SEQ ID NO: 1331157 - DNA, 15 bp, Homo sapiens
tattggaacagacat

SEQ ID NO: 1331158 - DNA, 15 bp, Homo sapiens
ttattggaacagaca

SEQ ID NO: 1331159 - DNA, 15 bp, Homo sapiens
tttattggaacagac

SEQ ID NO: 1331160 - DNA, 15 bp, Homo sapiens
ctttattggaacaga

SEQ ID NO: 1331161 - DNA, 15 bp, Homo sapiens
gctttattggaacag

SEQ ID NO: 1331162 - DNA, 15 bp, Homo sapiens
agctttattggaaca

SEQ ID NO: 1331163 - DNA, 15 bp, Homo sapiens
cagctttattggaac

SEQ ID NO: 1331164 - DNA, 15 bp, Homo sapiens
gcagctttattggaa

SEQ ID NO: 1331165 - DNA, 15 bp, Homo sapiens
agcagctttattgga

SEQ ID NO: 1331166 - DNA, 15 bp, Homo sapiens
cagcagctttattgg

SEQ ID NO: 1331167 - DNA, 15 bp, Homo sapiens
acagcagctttattg

SEQ ID NO: 1331168 - DNA, 15 bp, Homo sapiens
aacagcagctttatt

SEQ ID NO: 1331169 - DNA, 15 bp, Homo sapiens
aaacagcagctttat

SEQ ID NO: 1331170 - DNA, 15 bp, Homo sapiens
aaaacagcagcttta

SEQ ID NO: 1331171 - DNA, 15 bp, Homo sapiens
gaaaacagcagcttt

SEQ ID NO: 1331172 - DNA, 15 bp, Homo sapiens
agaaaacagcagctt

SEQ ID NO: 1331173 - DNA, 15 bp, Homo sapiens
aagaaaacagcagct

SEQ ID NO: 1331174 - DNA, 15 bp, Homo sapiens
gaagaaaacagcagc

SEQ ID NO: 1331175 - DNA, 15 bp, Homo sapiens
agaagaaaacagcag

SEQ ID NO: 1331176 - DNA, 15 bp, Homo sapiens
cagaagaaaacagca

SEQ ID NO: 1331177 - DNA, 15 bp, Homo sapiens
acagaagaaaacagc

SEQ ID NO: 1331178 - DNA, 15 bp, Homo sapiens
aacagaagaaaacag

SEQ ID NO: 1331179 - DNA, 15 bp, Homo sapiens
aaacagaagaaaaca

SEQ ID NO: 1331180 - DNA, 15 bp, Homo sapiens
aaaacagaagaaaac

SEQ ID NO: 1331181 - DNA, 15 bp, Homo sapiens
gaaaacagaagaaaa

SEQ ID NO: 1331182 - DNA, 15 bp, Homo sapiens
agaaaacagaagaaa

SEQ ID NO: 1331183 - DNA, 15 bp, Homo sapiens
gagaaaacagaagaa

SEQ ID NO: 1331184 - DNA, 15 bp, Homo sapiens
agagaaaacagaaga

SEQ ID NO: 1331185 - DNA, 15 bp, Homo sapiens
cagagaaaacagaag

SEQ ID NO: 1331186 - DNA, 15 bp, Homo sapiens
acagagaaaacagaa

SEQ ID NO: 1331187 - DNA, 15 bp, Homo sapiens
gacagagaaaacaga

SEQ ID NO: 1331188 - DNA, 15 bp, Homo sapiens
tgacagagaaaacag

SEQ ID NO: 1331189 - DNA, 15 bp, Homo sapiens
ctgacagagaaaaca

SEQ ID NO: 1331190 - DNA, 15 bp, Homo sapiens
actgacagagaaaac

SEQ ID NO: 1331191 - DNA, 15 bp, Homo sapiens
cactgacagagaaaa

SEQ ID NO: 1331192 - DNA, 15 bp, Homo sapiens
ccactgacagagaaa

SEQ ID NO: 1331193 - DNA, 15 bp, Homo sapiens
tccactgacagagaa

SEQ ID NO: 1331194 - DNA, 15 bp, Homo sapiens
ctccactgacagaga

SEQ ID NO: 1331195 - DNA, 15 bp, Homo sapiens
tctccactgacagag

SEQ ID NO: 1331196 - DNA, 15 bp, Homo sapiens
ttctccactgacaga

SEQ ID NO: 1331197 - DNA, 15 bp, Homo sapiens
tttctccactgacag

SEQ ID NO: 1331198 - DNA, 15 bp, Homo sapiens
ctttctccactgaca

SEQ ID NO: 1331199 - DNA, 15 bp, Homo sapiens
cctttctccactgac

SEQ ID NO: 1331200 - DNA, 15 bp, Homo sapiens
gcctttctccactga

SEQ ID NO: 1331201 - DNA, 15 bp, Homo sapiens
cgcctttctccactg

SEQ ID NO: 1331202 - DNA, 15 bp, Homo sapiens
gcgcctttctccact

SEQ ID NO: 1331203 - DNA, 15 bp, Homo sapiens
agcgcctttctccac

SEQ ID NO: 1331204 - DNA, 15 bp, Homo sapiens
tagcgcctttctcca

SEQ ID NO: 1331205 - DNA, 15 bp, Homo sapiens
ctagcgcctttctcc

SEQ ID NO: 1331206 - DNA, 15 bp, Homo sapiens
cctagcgcctttctc

SEQ ID NO: 1331207 - DNA, 15 bp, Homo sapiens
ccctagcgcctttct

SEQ ID NO: 1331208 - DNA, 15 bp, Homo sapiens
cccctagcgcctttc

SEQ ID NO: 1331209 - DNA, 15 bp, Homo sapiens
tcccctagcgccttt

SEQ ID NO: 1331210 - DNA, 15 bp, Homo sapiens
ctcccctagcgcctt

SEQ ID NO: 1331211 - DNA, 15 bp, Homo sapiens
cctcccctagcgcct

SEQ ID NO: 1331212 - DNA, 15 bp, Homo sapiens
gcctcccctagcgcc

SEQ ID NO: 1331213 - DNA, 15 bp, Homo sapiens
ggcctcccctagcgc

SEQ ID NO: 1331214 - DNA, 15 bp, Homo sapiens
aggcctcccctagcg

SEQ ID NO: 1331215 - DNA, 15 bp, Homo sapiens
gaggcctcccctagc

SEQ ID NO: 1331216 - DNA, 15 bp, Homo sapiens
ggaggcctcccctag

SEQ ID NO: 1331217 - DNA, 15 bp, Homo sapiens
gggaggcctccccta

SEQ ID NO: 1331218 - DNA, 15 bp, Homo sapiens
ggggaggcctcccct

SEQ ID NO: 1331219 - DNA, 15 bp, Homo sapiens
tggggaggcctcccc

SEQ ID NO: 1331220 - DNA, 15 bp, Homo sapiens
gtggggaggcctccc

SEQ ID NO: 1331221 - DNA, 15 bp, Homo sapiens
tgtggggaggcctcc

SEQ ID NO: 1331222 - DNA, 15 bp, Homo sapiens
atgtggggaggcctc

SEQ ID NO: 1331223 - DNA, 15 bp, Homo sapiens
aatgtggggaggcct

SEQ ID NO: 1331224 - DNA, 15 bp, Homo sapiens
aaatgtggggaggcc

SEQ ID NO: 1331225 - DNA, 15 bp, Homo sapiens
taaatgtggggaggc

SEQ ID NO: 1331226 - DNA, 15 bp, Homo sapiens
gtaaatgtggggagg

SEQ ID NO: 1331227 - DNA, 15 bp, Homo sapiens
tgtaaatgtggggag

SEQ ID NO: 1331228 - DNA, 15 bp, Homo sapiens
gtgtaaatgtgggga

SEQ ID NO: 1331229 - DNA, 15 bp, Homo sapiens
agtgtaaatgtgggg

SEQ ID NO: 1331230 - DNA, 15 bp, Homo sapiens
cagtgtaaatgtggg

SEQ ID NO: 1331231 - DNA, 15 bp, Homo sapiens
acagtgtaaatgtgg

SEQ ID NO: 1331232 - DNA, 15 bp, Homo sapiens
tacagtgtaaatgtg

SEQ ID NO: 1331233 - DNA, 15 bp, Homo sapiens
atacagtgtaaatgt

SEQ ID NO: 1331234 - DNA, 15 bp, Homo sapiens
aatacagtgtaaatg

SEQ ID NO: 1331235 - DNA, 15 bp, Homo sapiens
aaatacagtgtaaat

SEQ ID NO: 1331236 - DNA, 15 bp, Homo sapiens
aaaatacagtgtaaa

SEQ ID NO: 1331237 - DNA, 15 bp, Homo sapiens
gaaaatacagtgtaa

SEQ ID NO: 1331238 - DNA, 15 bp, Homo sapiens
tgaaaatacagtgta

SEQ ID NO: 1331239 - DNA, 15 bp, Homo sapiens
ttgaaaatacagtgt

SEQ ID NO: 1331240 - DNA, 15 bp, Homo sapiens
gttgaaaatacagtg

SEQ ID NO: 1331241 - DNA, 15 bp, Homo sapiens
tgttgaaaatacagt

SEQ ID NO: 1331242 - DNA, 15 bp, Homo sapiens
atgttgaaaatacag

SEQ ID NO: 1331243 - DNA, 15 bp, Homo sapiens
aatgttgaaaataca

SEQ ID NO: 1331244 - DNA, 15 bp, Homo sapiens
taatgttgaaaatac

SEQ ID NO: 1331245 - DNA, 15 bp, Homo sapiens
ttaatgttgaaaata

SEQ ID NO: 1331246 - DNA, 15 bp, Homo sapiens
aagttaatgttgaaa

SEQ ID NO: 1331247 - DNA, 15 bp, Homo sapiens
gaagttaatgttgaa

SEQ ID NO: 1331248 - DNA, 15 bp, Homo sapiens
ggaagttaatgttga

SEQ ID NO: 1331249 - DNA, 15 bp, Homo sapiens
gggaagttaatgttg

SEQ ID NO: 1331250 - DNA, 15 bp, Homo sapiens
tgggaagttaatgtt

SEQ ID NO: 1331251 - DNA, 15 bp, Homo sapiens
ttgggaagttaatgt

SEQ ID NO: 1331252 - DNA, 15 bp, Homo sapiens
gttgggaagttaatg

SEQ ID NO: 1331253 - DNA, 15 bp, Homo sapiens
agttgggaagttaat

SEQ ID NO: 1331254 - DNA, 15 bp, Homo sapiens
gagttgggaagttaa

SEQ ID NO: 1331255 - DNA, 15 bp, Homo sapiens
cgagttgggaagtta

SEQ ID NO: 1331256 - DNA, 15 bp, Homo sapiens
tcgagttgggaagtt

SEQ ID NO: 1331257 - DNA, 15 bp, Homo sapiens
gtcgagttgggaagt

SEQ ID NO: 1331258 - DNA, 15 bp, Homo sapiens
ggtcgagttgggaag

SEQ ID NO: 1331259 - DNA, 15 bp, Homo sapiens
tggtcgagttgggaa

SEQ ID NO: 1331260 - DNA, 15 bp, Homo sapiens
ttggtcgagttggga

SEQ ID NO: 1331261 - DNA, 15 bp, Homo sapiens
gttggtcgagttggg

SEQ ID NO: 1331262 - DNA, 15 bp, Homo sapiens
agttggtcgagttgg

SEQ ID NO: 1331263 - DNA, 15 bp, Homo sapiens
gagttggtcgagttg

SEQ ID NO: 1331264 - DNA, 15 bp, Homo sapiens
agagttggtcgagtt

SEQ ID NO: 1331265 - DNA, 15 bp, Homo sapiens
tagagttggtcgagt

SEQ ID NO: 1331266 - DNA, 15 bp, Homo sapiens
gtagagttggtcgag

SEQ ID NO: 1331267 - DNA, 15 bp, Homo sapiens
ggtagagttggtcga

SEQ ID NO: 1331268 - DNA, 15 bp, Homo sapiens
aggtagagttggtcg

SEQ ID NO: 1331269 - DNA, 15 bp, Homo sapiens
aaggtagagttggtc

SEQ ID NO: 1331270 - DNA, 15 bp, Homo sapiens
aaaggtagagttggt

SEQ ID NO: 1331271 - DNA, 15 bp, Homo sapiens
gaaaggtagagttgg

SEQ ID NO: 1331272 - DNA, 15 bp, Homo sapiens
tgaaaggtagagttg

SEQ ID NO: 1331273 - DNA, 15 bp, Homo sapiens
gtgaaaggtagagtt

SEQ ID NO: 1331274 - DNA, 15 bp, Homo sapiens
cgtgaaaggtagagt

SEQ ID NO: 1331275 - DNA, 15 bp, Homo sapiens
acgtgaaaggtagag

SEQ ID NO: 1331276 - DNA, 15 bp, Homo sapiens
tacgtgaaaggtaga

SEQ ID NO: 1331277 - DNA, 15 bp, Homo sapiens
gtacgtgaaaggtag

SEQ ID NO: 1331278 - DNA, 15 bp, Homo sapiens
cgtacgtgaaaggta

SEQ ID NO: 1331279 - DNA, 15 bp, Homo sapiens
ccgtacgtgaaaggt

SEQ ID NO: 1331280 - DNA, 15 bp, Homo sapiens
gccgtacgtgaaagg

SEQ ID NO: 1331281 - DNA, 15 bp, Homo sapiens
ggccgtacgtgaaag

SEQ ID NO: 1331282 - DNA, 15 bp, Homo sapiens
tggccgtacgtgaaa

SEQ ID NO: 1331283 - DNA, 15 bp, Homo sapiens
atggccgtacgtgaa

SEQ ID NO: 1331284 - DNA, 15 bp, Homo sapiens
catggccgtacgtga

SEQ ID NO: 1331285 - DNA, 15 bp, Homo sapiens
tcatggccgtacgtg

SEQ ID NO: 1331286 - DNA, 15 bp, Homo sapiens
atcatggccgtacgt

SEQ ID NO: 1331287 - DNA, 15 bp, Homo sapiens
aatcatggccgtacg

SEQ ID NO: 1331288 - DNA, 15 bp, Homo sapiens
aaatcatggccgtac

SEQ ID NO: 1331289 - DNA, 15 bp, Homo sapiens
gaaatcatggccgta

SEQ ID NO: 1331290 - DNA, 15 bp, Homo sapiens
agaaatcatggccgt

SEQ ID NO: 1331291 - DNA, 15 bp, Homo sapiens
gagaaatcatggccg

SEQ ID NO: 1331292 - DNA, 15 bp, Homo sapiens
agagaaatcatggcc

SEQ ID NO: 1331293 - DNA, 15 bp, Homo sapiens
aagagaaatcatggc

SEQ ID NO: 1331294 - DNA, 15 bp, Homo sapiens
caagagaaatcatgg

SEQ ID NO: 1331295 - DNA, 15 bp, Homo sapiens
tcaagagaaatcatg

SEQ ID NO: 1331296 - DNA, 15 bp, Homo sapiens
gtcaagagaaatcat

SEQ ID NO: 1331297 - DNA, 15 bp, Homo sapiens
ggtcaagagaaatca

SEQ ID NO: 1331298 - DNA, 15 bp, Homo sapiens
gggtcaagagaaatc

SEQ ID NO: 1331299 - DNA, 15 bp, Homo sapiens
agggtcaagagaaat

SEQ ID NO: 1331300 - DNA, 15 bp, Homo sapiens
cagggtcaagagaaa

SEQ ID NO: 1331301 - DNA, 15 bp, Homo sapiens
tcagggtcaagagaa

SEQ ID NO: 1331302 - DNA, 15 bp, Homo sapiens
ttcagggtcaagaga

SEQ ID NO: 1331303 - DNA, 15 bp, Homo sapiens
tttcagggtcaagag

SEQ ID NO: 1331304 - DNA, 15 bp, Homo sapiens
atttcagggtcaaga

SEQ ID NO: 1331305 - DNA, 15 bp, Homo sapiens
gatttcagggtcaag

SEQ ID NO: 1331306 - DNA, 15 bp, Homo sapiens
agatttcagggtcaa

SEQ ID NO: 1331307 - DNA, 15 bp, Homo sapiens
tagatttcagggtca

SEQ ID NO: 1331308 - DNA, 15 bp, Homo sapiens
ttagatttcagggtc

SEQ ID NO: 1331309 - DNA, 15 bp, Homo sapiens
cttagatttcagggt

SEQ ID NO: 1331310 - DNA, 15 bp, Homo sapiens
gcttagatttcaggg

SEQ ID NO: 1331311 - DNA, 15 bp, Homo sapiens
agcttagatttcagg

SEQ ID NO: 1331312 - DNA, 15 bp, Homo sapiens
tagcttagatttcag

SEQ ID NO: 1331313 - DNA, 15 bp, Homo sapiens
ttagcttagatttca

SEQ ID NO: 1331314 - DNA, 15 bp, Homo sapiens
tttagcttagatttc

SEQ ID NO: 1331315 - DNA, 15 bp, Homo sapiens
ctttagcttagattt

SEQ ID NO: 1331316 - DNA, 15 bp, Homo sapiens
cctttagcttagatt

SEQ ID NO: 1331317 - DNA, 15 bp, Homo sapiens
acctttagcttagat

SEQ ID NO: 1331318 - DNA, 15 bp, Homo sapiens
gacctttagcttaga

SEQ ID NO: 1331319 - DNA, 15 bp, Homo sapiens
tgacctttagcttag

SEQ ID NO: 1331320 - DNA, 15 bp, Homo sapiens
ttgacctttagctta

SEQ ID NO: 1331321 - DNA, 15 bp, Homo sapiens
gttgacctttagctt

SEQ ID NO: 1331322 - DNA, 15 bp, Homo sapiens
agttgacctttagct

SEQ ID NO: 1331323 - DNA, 15 bp, Homo sapiens
aagttgacctttagc

SEQ ID NO: 1331324 - DNA, 15 bp, Homo sapiens
aaagttgacctttag

SEQ ID NO: 1331325 - DNA, 15 bp, Homo sapiens
gaaagttgaccttta

SEQ ID NO: 1331326 - DNA, 15 bp, Homo sapiens
tgaaagttgaccttt

SEQ ID NO: 1331327 - DNA, 15 bp, Homo sapiens
atgaaagttgacctt

SEQ ID NO: 1331328 - DNA, 15 bp, Homo sapiens
tatgaaagttgacct

SEQ ID NO: 1331329 - DNA, 15 bp, Homo sapiens
ttatgaaagttgacc

SEQ ID NO: 1331330 - DNA, 15 bp, Homo sapiens
tttatgaaagttgac

SEQ ID NO: 1331331 - DNA, 15 bp, Homo sapiens
ctttatgaaagttga

SEQ ID NO: 1331332 - DNA, 15 bp, Homo sapiens
gctttatgaaagttg

SEQ ID NO: 1331333 - DNA, 15 bp, Homo sapiens
tgctttatgaaagtt

SEQ ID NO: 1331334 - DNA, 15 bp, Homo sapiens
ctgctttatgaaagt

SEQ ID NO: 1331335 - DNA, 15 bp, Homo sapiens
cctgctttatgaaag

SEQ ID NO: 1331336 - DNA, 15 bp, Homo sapiens
ccctgctttatgaaa

SEQ ID NO: 1331337 - DNA, 15 bp, Homo sapiens
accctgctttatgaa

SEQ ID NO: 1331338 - DNA, 15 bp, Homo sapiens
taccctgctttatga

SEQ ID NO: 1331339 - DNA, 15 bp, Homo sapiens
ttaccctgctttatg

SEQ ID NO: 1331340 - DNA, 15 bp, Homo sapiens
tttaccctgctttat

SEQ ID NO: 1331341 - DNA, 15 bp, Homo sapiens
atttaccctgcttta

SEQ ID NO: 1331342 - DNA, 15 bp, Homo sapiens
tatttaccctgcttt

SEQ ID NO: 1331343 - DNA, 15 bp, Homo sapiens
ttatttaccctgctt

SEQ ID NO: 1331344 - DNA, 15 bp, Homo sapiens
tttatttaccctgct

SEQ ID NO: 1331345 - DNA, 15 bp, Homo sapiens
ttttatttaccctgc

SEQ ID NO: 1331346 - DNA, 15 bp, Homo sapiens
tttttatttaccctg

SEQ ID NO: 1331347 - DNA, 15 bp, Homo sapiens
atttttatttaccct

SEQ ID NO: 1331348 - DNA, 15 bp, Homo sapiens
gatttttatttaccc

SEQ ID NO: 1331349 - DNA, 15 bp, Homo sapiens
ggatttttatttacc

SEQ ID NO: 1331350 - DNA, 15 bp, Homo sapiens
gggatttttatttac

SEQ ID NO: 1331351 - DNA, 15 bp, Homo sapiens
tgggatttttattta

SEQ ID NO: 1331352 - DNA, 15 bp, Homo sapiens
atgggatttttattt

SEQ ID NO: 1331353 - DNA, 15 bp, Homo sapiens
catgggatttttatt

SEQ ID NO: 1331354 - DNA, 15 bp, Homo sapiens
tcatgggatttttat

SEQ ID NO: 1331355 - DNA, 15 bp, Homo sapiens
atcatgggattttta

SEQ ID NO: 1331356 - DNA, 15 bp, Homo sapiens
catcatgggattttt

SEQ ID NO: 1331357 - DNA, 15 bp, Homo sapiens
acatcatgggatttt

SEQ ID NO: 1331358 - DNA, 15 bp, Homo sapiens
gacatcatgggattt

SEQ ID NO: 1331359 - DNA, 15 bp, Homo sapiens
tgacatcatgggatt

SEQ ID NO: 1331360 - DNA, 15 bp, Homo sapiens
ttgacatcatgggat

SEQ ID NO: 1331361 - DNA, 15 bp, Homo sapiens
cttgacatcatggga

SEQ ID NO: 1331362 - DNA, 15 bp, Homo sapiens
gcttgacatcatggg

SEQ ID NO: 1331363 - DNA, 15 bp, Homo sapiens
agcttgacatcatgg

SEQ ID NO: 1331364 - DNA, 15 bp, Homo sapiens
gagcttgacatcatg

SEQ ID NO: 1331365 - DNA, 15 bp, Homo sapiens
agagcttgacatcat

SEQ ID NO: 1331366 - DNA, 15 bp, Homo sapiens
tagagcttgacatca

SEQ ID NO: 1331367 - DNA, 15 bp, Homo sapiens
ttagagcttgacatc

SEQ ID NO: 1331368 - DNA, 15 bp, Homo sapiens
cttagagcttgacat

SEQ ID NO: 1331369 - DNA, 15 bp, Homo sapiens
ccttagagcttgaca

SEQ ID NO: 1331370 - DNA, 15 bp, Homo sapiens
gccttagagcttgac

SEQ ID NO: 1331371 - DNA, 15 bp, Homo sapiens
tgccttagagcttga

SEQ ID NO: 1331372 - DNA, 15 bp, Homo sapiens
ctgccttagagcttg

SEQ ID NO: 1331373 - DNA, 15 bp, Homo sapiens
cctgccttagagctt

SEQ ID NO: 1331374 - DNA, 15 bp, Homo sapiens
ccctgccttagagct

SEQ ID NO: 1331375 - DNA, 15 bp, Homo sapiens
accctgccttagagc

SEQ ID NO: 1331376 - DNA, 15 bp, Homo sapiens
aaccctgccttagag

SEQ ID NO: 1331377 - DNA, 15 bp, Homo sapiens
aaaccctgccttaga

SEQ ID NO: 1331378 - DNA, 15 bp, Homo sapiens
aaaaccctgccttag

SEQ ID NO: 1331379 - DNA, 15 bp, Homo sapiens
gaaaaccctgcctta

SEQ ID NO: 1331380 - DNA, 15 bp, Homo sapiens
tgaaaaccctgcctt

SEQ ID NO: 1331381 - DNA, 15 bp, Homo sapiens
ttgaaaaccctgcct

SEQ ID NO: 1331382 - DNA, 15 bp, Homo sapiens
cttgaaaaccctgcc

SEQ ID NO: 1331383 - DNA, 15 bp, Homo sapiens
ccttgaaaaccctgc

SEQ ID NO: 1331384 - DNA, 15 bp, Homo sapiens
cccttgaaaaccctg

SEQ ID NO: 1331385 - DNA, 15 bp, Homo sapiens
gcccttgaaaaccct

SEQ ID NO: 1331386 - DNA, 15 bp, Homo sapiens
tgcccttgaaaaccc

SEQ ID NO: 1331387 - DNA, 15 bp, Homo sapiens
ttgcccttgaaaacc

SEQ ID NO: 1331388 - DNA, 15 bp, Homo sapiens
attgcccttgaaaac

SEQ ID NO: 1331389 - DNA, 15 bp, Homo sapiens
cattgcccttgaaaa

SEQ ID NO: 1331390 - DNA, 15 bp, Homo sapiens
ccattgcccttgaaa

SEQ ID NO: 1331391 - DNA, 15 bp, Homo sapiens
cccattgcccttgaa

SEQ ID NO: 1331392 - DNA, 15 bp, Homo sapiens
ccccattgcccttga

SEQ ID NO: 1331393 - DNA, 15 bp, Homo sapiens
tccccattgcccttg

SEQ ID NO: 1331394 - DNA, 15 bp, Homo sapiens
ctccccattgccctt

SEQ ID NO: 1331395 - DNA, 15 bp, Homo sapiens
gctccccattgccct

SEQ ID NO: 1331396 - DNA, 15 bp, Homo sapiens
agctccccattgccc

SEQ ID NO: 1331397 - DNA, 15 bp, Homo sapiens
gagctccccattgcc

SEQ ID NO: 1331398 - DNA, 15 bp, Homo sapiens
ggagctccccattgc

SEQ ID NO: 1331399 - DNA, 15 bp, Homo sapiens
cggagctccccattg

SEQ ID NO: 1331400 - DNA, 15 bp, Homo sapiens
gcggagctccccatt

SEQ ID NO: 1331401 - DNA, 15 bp, Homo sapiens
tgcggagctccccat

SEQ ID NO: 1331402 - DNA, 15 bp, Homo sapiens
ttgcggagctcccca

SEQ ID NO: 1331403 - DNA, 15 bp, Homo sapiens
cttgcggagctcccc

SEQ ID NO: 1331404 - DNA, 15 bp, Homo sapiens
acttgcggagctccc

SEQ ID NO: 1331405 - DNA, 15 bp, Homo sapiens
gacttgcggagctcc

SEQ ID NO: 1331406 - DNA, 15 bp, Homo sapiens
agacttgcggagctc

SEQ ID NO: 1331407 - DNA, 15 bp, Homo sapiens
gagacttgcggagct

SEQ ID NO: 1331408 - DNA, 15 bp, Homo sapiens
tgagacttgcggagc

SEQ ID NO: 1331409 - DNA, 15 bp, Homo sapiens
ctgagacttgcggag

SEQ ID NO: 1331410 - DNA, 15 bp, Homo sapiens
tctgagacttgcgga

SEQ ID NO: 1331411 - DNA, 15 bp, Homo sapiens
gtctgagacttgcgg

SEQ ID NO: 1331412 - DNA, 15 bp, Homo sapiens
tgtctgagacttgcg

SEQ ID NO: 1331413 - DNA, 15 bp, Homo sapiens
ttgtctgagacttgc

SEQ ID NO: 1331414 - DNA, 15 bp, Homo sapiens
tttgtctgagacttg

SEQ ID NO: 1331415 - DNA, 15 bp, Homo sapiens
ttttgtctgagactt

SEQ ID NO: 1331416 - DNA, 15 bp, Homo sapiens
cttttgtctgagact

SEQ ID NO: 1331417 - DNA, 15 bp, Homo sapiens
gcttttgtctgagac

SEQ ID NO: 1331418 - DNA, 15 bp, Homo sapiens
tgcttttgtctgaga

SEQ ID NO: 1331419 - DNA, 15 bp, Homo sapiens
ttgcttttgtctgag

SEQ ID NO: 1331420 - DNA, 15 bp, Homo sapiens
cttgcttttgtctga

SEQ ID NO: 1331421 - DNA, 15 bp, Homo sapiens
tcttgcttttgtctg

SEQ ID NO: 1331422 - DNA, 15 bp, Homo sapiens
gtcttgcttttgtct

SEQ ID NO: 1331423 - DNA, 15 bp, Homo sapiens
tgtcttgcttttgtc

SEQ ID NO: 1331424 - DNA, 15 bp, Homo sapiens
gtgtcttgcttttgt

SEQ ID NO: 1331425 - DNA, 15 bp, Homo sapiens
agtgtcttgcttttg

SEQ ID NO: 1331426 - DNA, 15 bp, Homo sapiens
gagtgtcttgctttt

SEQ ID NO: 1331427 - DNA, 15 bp, Homo sapiens
ggagtgtcttgcttt

SEQ ID NO: 1331428 - DNA, 15 bp, Homo sapiens
aggagtgtcttgctt

SEQ ID NO: 1331429 - DNA, 15 bp, Homo sapiens
taggagtgtcttgct

SEQ ID NO: 1331430 - DNA, 15 bp, Homo sapiens
ataggagtgtcttgc

SEQ ID NO: 1331431 - DNA, 15 bp, Homo sapiens
gataggagtgtcttg

SEQ ID NO: 1331432 - DNA, 15 bp, Homo sapiens
tgataggagtgtctt

SEQ ID NO: 1331433 - DNA, 15 bp, Homo sapiens
ctgataggagtgtct

SEQ ID NO: 1331434 - DNA, 15 bp, Homo sapiens
gctgataggagtgtc

SEQ ID NO: 1331435 - DNA, 15 bp, Homo sapiens
agctgataggagtgt

SEQ ID NO: 1331436 - DNA, 15 bp, Homo sapiens
cagctgataggagtg

SEQ ID NO: 1331437 - DNA, 15 bp, Homo sapiens
ccagctgataggagt

SEQ ID NO: 1331438 - DNA, 15 bp, Homo sapiens
cccagctgataggag

SEQ ID NO: 1331439 - DNA, 15 bp, Homo sapiens
gcccagctgatagga

SEQ ID NO: 1331440 - DNA, 15 bp, Homo sapiens
agcccagctgatagg

SEQ ID NO: 1331441 - DNA, 15 bp, Homo sapiens
gagcccagctgatag

SEQ ID NO: 1331442 - DNA, 15 bp, Homo sapiens
tgagcccagctgata

SEQ ID NO: 1331443 - DNA, 15 bp, Homo sapiens
gtgagcccagctgat

SEQ ID NO: 1331444 - DNA, 15 bp, Homo sapiens
cgtgagcccagctga

SEQ ID NO: 1331445 - DNA, 15 bp, Homo sapiens
gcgtgagcccagctg

SEQ ID NO: 1331446 - DNA, 15 bp, Homo sapiens
ggcgtgagcccagct

SEQ ID NO: 1331447 - DNA, 15 bp, Homo sapiens
gggcgtgagcccagc

SEQ ID NO: 1331448 - DNA, 15 bp, Homo sapiens
ggggcgtgagcccag

SEQ ID NO: 1331449 - DNA, 15 bp, Homo sapiens
tggggcgtgagccca

SEQ ID NO: 1331450 - DNA, 15 bp, Homo sapiens
gtggggcgtgagccc

SEQ ID NO: 1331451 - DNA, 15 bp, Homo sapiens
agtggggcgtgagcc

SEQ ID NO: 1331452 - DNA, 15 bp, Homo sapiens
cagtggggcgtgagc

SEQ ID NO: 1331453 - DNA, 15 bp, Homo sapiens
gcagtggggcgtgag

SEQ ID NO: 1331454 - DNA, 15 bp, Homo sapiens
agcagtggggcgtga

SEQ ID NO: 1331455 - DNA, 15 bp, Homo sapiens
gagcagtggggcgtg

SEQ ID NO: 1331456 - DNA, 15 bp, Homo sapiens
agagcagtggggcgt

SEQ ID NO: 1331457 - DNA, 15 bp, Homo sapiens
gagagcagtggggcg

SEQ ID NO: 1331458 - DNA, 15 bp, Homo sapiens
agagagcagtggggc

SEQ ID NO: 1331459 - DNA, 15 bp, Homo sapiens
tagagagcagtgggg

SEQ ID NO: 1331460 - DNA, 15 bp, Homo sapiens
ctagagagcagtggg

SEQ ID NO: 1331461 - DNA, 15 bp, Homo sapiens
gctagagagcagtgg

SEQ ID NO: 1331462 - DNA, 15 bp, Homo sapiens
tgctagagagcagtg

SEQ ID NO: 1331463 - DNA, 15 bp, Homo sapiens
ctgctagagagcagt

SEQ ID NO: 1331464 - DNA, 15 bp, Homo sapiens
tctgctagagagcag

SEQ ID NO: 1331465 - DNA, 15 bp, Homo sapiens
ctctgctagagagca

SEQ ID NO: 1331466 - DNA, 15 bp, Homo sapiens
tctctgctagagagc

SEQ ID NO: 1331467 - DNA, 15 bp, Homo sapiens
gtctctgctagagag

SEQ ID NO: 1331468 - DNA, 15 bp, Homo sapiens
agtctctgctagaga

SEQ ID NO: 1331469 - DNA, 15 bp, Homo sapiens
tagtctctgctagag

SEQ ID NO: 1331470 - DNA, 15 bp, Homo sapiens
ctagtctctgctaga

SEQ ID NO: 1331471 - DNA, 15 bp, Homo sapiens
gctagtctctgctag

SEQ ID NO: 1331472 - DNA, 15 bp, Homo sapiens
agctagtctctgcta

SEQ ID NO: 1331473 - DNA, 15 bp, Homo sapiens
gagctagtctctgct

SEQ ID NO: 1331474 - DNA, 15 bp, Homo sapiens
agagctagtctctgc

SEQ ID NO: 1331475 - DNA, 15 bp, Homo sapiens
cagagctagtctctg

SEQ ID NO: 1331476 - DNA, 15 bp, Homo sapiens
tcagagctagtctct

SEQ ID NO: 1331477 - DNA, 15 bp, Homo sapiens
ctcagagctagtctc

SEQ ID NO: 1331478 - DNA, 15 bp, Homo sapiens
cctcagagctagtct

SEQ ID NO: 1331479 - DNA, 15 bp, Homo sapiens
tcctcagagctagtc

SEQ ID NO: 1331480 - DNA, 15 bp, Homo sapiens
ctcctcagagctagt

SEQ ID NO: 1331481 - DNA, 15 bp, Homo sapiens
cctcctcagagctag

SEQ ID NO: 1331482 - DNA, 15 bp, Homo sapiens
ccctcctcagagcta

SEQ ID NO: 1331483 - DNA, 15 bp, Homo sapiens
tccctcctcagagct

SEQ ID NO: 1331484 - DNA, 15 bp, Homo sapiens
ttccctcctcagagc

SEQ ID NO: 1331485 - DNA, 15 bp, Homo sapiens
cttccctcctcagag

SEQ ID NO: 1331486 - DNA, 15 bp, Homo sapiens
tcttccctcctcaga

SEQ ID NO: 1331487 - DNA, 15 bp, Homo sapiens
ttcttccctcctcag

SEQ ID NO: 1331488 - DNA, 15 bp, Homo sapiens
gttcttccctcctca

SEQ ID NO: 1331489 - DNA, 15 bp, Homo sapiens
ggttcttccctcctc

SEQ ID NO: 1331490 - DNA, 15 bp, Homo sapiens
cggttcttccctcct

SEQ ID NO: 1331491 - DNA, 15 bp, Homo sapiens
gcggttcttccctcc

SEQ ID NO: 1331492 - DNA, 15 bp, Homo sapiens
ggcggttcttccctc

SEQ ID NO: 1331493 - DNA, 15 bp, Homo sapiens
gggcggttcttccct

SEQ ID NO: 1331494 - DNA, 15 bp, Homo sapiens
agggcggttcttccc

SEQ ID NO: 1331495 - DNA, 15 bp, Homo sapiens
aagggcggttcttcc

SEQ ID NO: 1331496 - DNA, 15 bp, Homo sapiens
gaagggcggttcttc

SEQ ID NO: 1331497 - DNA, 15 bp, Homo sapiens
agaagggcggttctt

SEQ ID NO: 1331498 - DNA, 15 bp, Homo sapiens
tagaagggcggttct

SEQ ID NO: 1331499 - DNA, 15 bp, Homo sapiens
ctagaagggcggttc

SEQ ID NO: 1331500 - DNA, 15 bp, Homo sapiens
cctagaagggcggtt

SEQ ID NO: 1331501 - DNA, 15 bp, Homo sapiens
tcctagaagggcggt

SEQ ID NO: 1331502 - DNA, 15 bp, Homo sapiens
ttcctagaagggcgg

SEQ ID NO: 1331503 - DNA, 15 bp, Homo sapiens
cttcctagaagggcg

SEQ ID NO: 1331504 - DNA, 15 bp, Homo sapiens
acttcctagaagggc

SEQ ID NO: 1331505 - DNA, 15 bp, Homo sapiens
aacttcctagaaggg

SEQ ID NO: 1331506 - DNA, 15 bp, Homo sapiens
taacttcctagaagg

SEQ ID NO: 1331507 - DNA, 15 bp, Homo sapiens
gtaacttcctagaag

SEQ ID NO: 1331508 - DNA, 15 bp, Homo sapiens
tgtaacttcctagaa

SEQ ID NO: 1331509 - DNA, 15 bp, Homo sapiens
atgtaacttcctaga

SEQ ID NO: 1331510 - DNA, 15 bp, Homo sapiens
gatgtaacttcctag

SEQ ID NO: 1331511 - DNA, 15 bp, Homo sapiens
tgatgtaacttccta

SEQ ID NO: 1331512 - DNA, 15 bp, Homo sapiens
gtgatgtaacttcct

SEQ ID NO: 1331513 - DNA, 15 bp, Homo sapiens
agtgatgtaacttcc

SEQ ID NO: 1331514 - DNA, 15 bp, Homo sapiens
tagtgatgtaacttc

SEQ ID NO: 1331515 - DNA, 15 bp, Homo sapiens
ctagtgatgtaactt

SEQ ID NO: 1331516 - DNA, 15 bp, Homo sapiens
cctagtgatgtaact

SEQ ID NO: 1331517 - DNA, 15 bp, Homo sapiens
gcctagtgatgtaac

SEQ ID NO: 1331518 - DNA, 15 bp, Homo sapiens
ggcctagtgatgtaa

SEQ ID NO: 1331519 - DNA, 15 bp, Homo sapiens
gggcctagtgatgta

SEQ ID NO: 1331520 - DNA, 15 bp, Homo sapiens
agggcctagtgatgt

SEQ ID NO: 1331521 - DNA, 15 bp, Homo sapiens
cagggcctagtgatg

SEQ ID NO: 1331522 - DNA, 15 bp, Homo sapiens
ccagggcctagtgat

SEQ ID NO: 1331523 - DNA, 15 bp, Homo sapiens
tccagggcctagtga

SEQ ID NO: 1331524 - DNA, 15 bp, Homo sapiens
ttccagggcctagtg

SEQ ID NO: 1331525 - DNA, 15 bp, Homo sapiens
attccagggcctagt

SEQ ID NO: 1331526 - DNA, 15 bp, Homo sapiens
aattccagggcctag

SEQ ID NO: 1331527 - DNA, 15 bp, Homo sapiens
taattccagggccta

SEQ ID NO: 1331528 - DNA, 15 bp, Homo sapiens
ttaattccagggcct

SEQ ID NO: 1331529 - DNA, 15 bp, Homo sapiens
tttaattccagggcc

SEQ ID NO: 1331530 - DNA, 15 bp, Homo sapiens
ttttaattccagggc

SEQ ID NO: 1331531 - DNA, 15 bp, Homo sapiens
attttaattccaggg

SEQ ID NO: 1331532 - DNA, 15 bp, Homo sapiens
tattttaattccagg

SEQ ID NO: 1331533 - DNA, 15 bp, Homo sapiens
ttattttaattccag

SEQ ID NO: 1331534 - DNA, 15 bp, Homo sapiens
tttattttaattcca

SEQ ID NO: 1331535 - DNA, 15 bp, Homo sapiens
atttattttaattcc

SEQ ID NO: 1331536 - DNA, 15 bp, Homo sapiens
catttattttaattc

SEQ ID NO: 1331537 - DNA, 15 bp, Homo sapiens
tcatttattttaatt

SEQ ID NO: 1331538 - DNA, 15 bp, Homo sapiens
gtcatttattttaat

SEQ ID NO: 1331539 - DNA, 15 bp, Homo sapiens
tgtcatttattttaa

SEQ ID NO: 1331540 - DNA, 15 bp, Homo sapiens
gtgtcatttatttta

SEQ ID NO: 1331541 - DNA, 15 bp, Homo sapiens
agtgtcatttatttt

SEQ ID NO: 1331542 - DNA, 15 bp, Homo sapiens
gagtgtcatttattt

SEQ ID NO: 1331543 - DNA, 15 bp, Homo sapiens
tgagtgtcatttatt

SEQ ID NO: 1331544 - DNA, 15 bp, Homo sapiens
ttgagtgtcatttat

SEQ ID NO: 1331545 - DNA, 15 bp, Homo sapiens
gttgagtgtcattta

SEQ ID NO: 1331546 - DNA, 15 bp, Homo sapiens
agttgagtgtcattt

SEQ ID NO: 1331547 - DNA, 15 bp, Homo sapiens
aagttgagtgtcatt

SEQ ID NO: 1331548 - DNA, 15 bp, Homo sapiens
gaagttgagtgtcat

SEQ ID NO: 1331549 - DNA, 15 bp, Homo sapiens
agaagttgagtgtca

SEQ ID NO: 1331550 - DNA, 15 bp, Homo sapiens
cagaagttgagtgtc

SEQ ID NO: 1331551 - DNA, 15 bp, Homo sapiens
ccagaagttgagtgt

SEQ ID NO: 1331552 - DNA, 15 bp, Homo sapiens
tccagaagttgagtg

SEQ ID NO: 1331553 - DNA, 15 bp, Homo sapiens
ttccagaagttgagt

SEQ ID NO: 1331554 - DNA, 15 bp, Homo sapiens
gttccagaagttgag

SEQ ID NO: 1331555 - DNA, 15 bp, Homo sapiens
agttccagaagttga

SEQ ID NO: 1331556 - DNA, 15 bp, Homo sapiens
cagttccagaagttg

SEQ ID NO: 1331557 - DNA, 15 bp, Homo sapiens
gcagttccagaagtt

SEQ ID NO: 1331558 - DNA, 15 bp, Homo sapiens
tgcagttccagaagt

SEQ ID NO: 1331559 - DNA, 15 bp, Homo sapiens
gtgcagttccagaag

SEQ ID NO: 1331560 - DNA, 15 bp, Homo sapiens
tgtgcagttccagaa

SEQ ID NO: 1331561 - DNA, 15 bp, Homo sapiens
gtgtgcagttccaga

SEQ ID NO: 1331562 - DNA, 15 bp, Homo sapiens
tgtgtgcagttccag

SEQ ID NO: 1331563 - DNA, 15 bp, Homo sapiens
ctgtgtgcagttcca

SEQ ID NO: 1331564 - DNA, 15 bp, Homo sapiens
gctgtgtgcagttcc

SEQ ID NO: 1331565 - DNA, 15 bp, Homo sapiens
agctgtgtgcagttc

SEQ ID NO: 1331566 - DNA, 15 bp, Homo sapiens
gagctgtgtgcagtt

SEQ ID NO: 1331567 - DNA, 15 bp, Homo sapiens
tgagctgtgtgcagt

SEQ ID NO: 1331568 - DNA, 15 bp, Homo sapiens
gtgagctgtgtgcag

SEQ ID NO: 1331569 - DNA, 15 bp, Homo sapiens
cgtgagctgtgtgca

SEQ ID NO: 1331570 - DNA, 15 bp, Homo sapiens
ccgtgagctgtgtgc

SEQ ID NO: 1331571 - DNA, 15 bp, Homo sapiens
tccgtgagctgtgtg

SEQ ID NO: 1331572 - DNA, 15 bp, Homo sapiens
atccgtgagctgtgt

SEQ ID NO: 1331573 - DNA, 15 bp, Homo sapiens
catccgtgagctgtg

SEQ ID NO: 1331574 - DNA, 15 bp, Homo sapiens
acatccgtgagctgt

SEQ ID NO: 1331575 - DNA, 15 bp, Homo sapiens
gacatccgtgagctg

SEQ ID NO: 1331576 - DNA, 15 bp, Homo sapiens
tgacatccgtgagct

SEQ ID NO: 1331577 - DNA, 15 bp, Homo sapiens
ctgacatccgtgagc

SEQ ID NO: 1331578 - DNA, 15 bp, Homo sapiens
gctgacatccgtgag

SEQ ID NO: 1331579 - DNA, 15 bp, Homo sapiens
cgctgacatccgtga

SEQ ID NO: 1331580 - DNA, 15 bp, Homo sapiens
tcgctgacatccgtg

SEQ ID NO: 1331581 - DNA, 15 bp, Homo sapiens
atcgctgacatccgt

SEQ ID NO: 1331582 - DNA, 15 bp, Homo sapiens
catcgctgacatccg

SEQ ID NO: 1331583 - DNA, 15 bp, Homo sapiens
tcatcgctgacatcc

SEQ ID NO: 1331584 - DNA, 15 bp, Homo sapiens
gtcatcgctgacatc

SEQ ID NO: 1331585 - DNA, 15 bp, Homo sapiens
ggtcatcgctgacat

SEQ ID NO: 1331586 - DNA, 15 bp, Homo sapiens
gggtcatcgctgaca

SEQ ID NO: 1331587 - DNA, 15 bp, Homo sapiens
cgggtcatcgctgac

SEQ ID NO: 1331588 - DNA, 15 bp, Homo sapiens
acgggtcatcgctga

SEQ ID NO: 1331589 - DNA, 15 bp, Homo sapiens
aacgggtcatcgctg

SEQ ID NO: 1331590 - DNA, 15 bp, Homo sapiens
taacgggtcatcgct

SEQ ID NO: 1331591 - DNA, 15 bp, Homo sapiens
ctaacgggtcatcgc

SEQ ID NO: 1331592 - DNA, 15 bp, Homo sapiens
actaacgggtcatcg

SEQ ID NO: 1331593 - DNA, 15 bp, Homo sapiens
aactaacgggtcatc

SEQ ID NO: 1331594 - DNA, 15 bp, Homo sapiens
caactaacgggtcat

SEQ ID NO: 1331595 - DNA, 15 bp, Homo sapiens
ccaactaacgggtca

SEQ ID NO: 1331596 - DNA, 15 bp, Homo sapiens
gccaactaacgggtc

SEQ ID NO: 1331597 - DNA, 15 bp, Homo sapiens
tgccaactaacgggt

SEQ ID NO: 1331598 - DNA, 15 bp, Homo sapiens
ctgccaactaacggg

SEQ ID NO: 1331599 - DNA, 15 bp, Homo sapiens
cctgccaactaacgg

SEQ ID NO: 1331600 - DNA, 15 bp, Homo sapiens
ccctgccaactaacg

SEQ ID NO: 1331601 - DNA, 15 bp, Homo sapiens
cccctgccaactaac

SEQ ID NO: 1331602 - DNA, 15 bp, Homo sapiens
acccctgccaactaa

SEQ ID NO: 1331603 - DNA, 15 bp, Homo sapiens
tacccctgccaacta

SEQ ID NO: 1331604 - DNA, 15 bp, Homo sapiens
gtacccctgccaact

SEQ ID NO: 1331605 - DNA, 15 bp, Homo sapiens
agtacccctgccaac

SEQ ID NO: 1331606 - DNA, 15 bp, Homo sapiens
aagtacccctgccaa

SEQ ID NO: 1331607 - DNA, 15 bp, Homo sapiens
gaagtacccctgcca

SEQ ID NO: 1331608 - DNA, 15 bp, Homo sapiens
tgaagtacccctgcc

SEQ ID NO: 1331609 - DNA, 15 bp, Homo sapiens
ttgaagtacccctgc

SEQ ID NO: 1331610 - DNA, 15 bp, Homo sapiens
gttgaagtacccctg

SEQ ID NO: 1331611 - DNA, 15 bp, Homo sapiens
agttgaagtacccct

SEQ ID NO: 1331612 - DNA, 15 bp, Homo sapiens
aagttgaagtacccc

SEQ ID NO: 1331613 - DNA, 15 bp, Homo sapiens
taagttgaagtaccc

SEQ ID NO: 1331614 - DNA, 15 bp, Homo sapiens
ctaagttgaagtacc

SEQ ID NO: 1331615 - DNA, 15 bp, Homo sapiens
gctaagttgaagtac

SEQ ID NO: 1331616 - DNA, 15 bp, Homo sapiens
tgctaagttgaagta

SEQ ID NO: 1331617 - DNA, 15 bp, Homo sapiens
ttgctaagttgaagt

SEQ ID NO: 1331618 - DNA, 15 bp, Homo sapiens
attgctaagttgaag

SEQ ID NO: 1331619 - DNA, 15 bp, Homo sapiens
gattgctaagttgaa

SEQ ID NO: 1331620 - DNA, 15 bp, Homo sapiens
tgattgctaagttga

SEQ ID NO: 1331621 - DNA, 15 bp, Homo sapiens
ctgattgctaagttg

SEQ ID NO: 1331622 - DNA, 15 bp, Homo sapiens
tctgattgctaagtt

SEQ ID NO: 1331623 - DNA, 15 bp, Homo sapiens
atctgattgctaagt

SEQ ID NO: 1331624 - DNA, 15 bp, Homo sapiens
catctgattgctaag

SEQ ID NO: 1331625 - DNA, 15 bp, Homo sapiens
gcatctgattgctaa

SEQ ID NO: 1331626 - DNA, 15 bp, Homo sapiens
tgcatctgattgcta

SEQ ID NO: 1331627 - DNA, 15 bp, Homo sapiens
ctgcatctgattgct

SEQ ID NO: 1331628 - DNA, 15 bp, Homo sapiens
tctgcatctgattgc

SEQ ID NO: 1331629 - DNA, 15 bp, Homo sapiens
ttctgcatctgattg

SEQ ID NO: 1331630 - DNA, 15 bp, Homo sapiens
cttctgcatctgatt

SEQ ID NO: 1331631 - DNA, 15 bp, Homo sapiens
tcttctgcatctgat

SEQ ID NO: 1331632 - DNA, 15 bp, Homo sapiens
ttcttctgcatctga

SEQ ID NO: 1331633 - DNA, 15 bp, Homo sapiens
tttcttctgcatctg

SEQ ID NO: 1331634 - DNA, 15 bp, Homo sapiens
ttttcttctgcatct

SEQ ID NO: 1331635 - DNA, 15 bp, Homo sapiens
gttttcttctgcatc

SEQ ID NO: 1331636 - DNA, 15 bp, Homo sapiens
tgttttcttctgcat

SEQ ID NO: 1331637 - DNA, 15 bp, Homo sapiens
ttgttttcttctgca

SEQ ID NO: 1331638 - DNA, 15 bp, Homo sapiens
gttgttttcttctgc

SEQ ID NO: 1331639 - DNA, 15 bp, Homo sapiens
tgttgttttcttctg

SEQ ID NO: 1331640 - DNA, 15 bp, Homo sapiens
ctgttgttttcttct

SEQ ID NO: 1331641 - DNA, 15 bp, Homo sapiens
gctgttgttttcttc

SEQ ID NO: 1331642 - DNA, 15 bp, Homo sapiens
agctgttgttttctt

SEQ ID NO: 1331643 - DNA, 15 bp, Homo sapiens
cagctgttgttttct

SEQ ID NO: 1331644 - DNA, 15 bp, Homo sapiens
tcagctgttgttttc

SEQ ID NO: 1331645 - DNA, 15 bp, Homo sapiens
ttcagctgttgtttt

SEQ ID NO: 1331646 - DNA, 15 bp, Homo sapiens
tttcagctgttgttt

SEQ ID NO: 1331647 - DNA, 15 bp, Homo sapiens
atttcagctgttgtt

SEQ ID NO: 1331648 - DNA, 15 bp, Homo sapiens
gatttcagctgttgt

SEQ ID NO: 1331649 - DNA, 15 bp, Homo sapiens
tgatttcagctgttg

SEQ ID NO: 1331650 - DNA, 15 bp, Homo sapiens
gtgatttcagctgtt

SEQ ID NO: 1331651 - DNA, 15 bp, Homo sapiens
ggtgatttcagctgt

SEQ ID NO: 1331652 - DNA, 15 bp, Homo sapiens
aggtgatttcagctg

SEQ ID NO: 1331653 - DNA, 15 bp, Homo sapiens
caggtgatttcagct

SEQ ID NO: 1331654 - DNA, 15 bp, Homo sapiens
ccaggtgatttcagc

SEQ ID NO: 1331655 - DNA, 15 bp, Homo sapiens
gccaggtgatttcag

SEQ ID NO: 1331656 - DNA, 15 bp, Homo sapiens
ggccaggtgatttca

SEQ ID NO: 1331657 - DNA, 15 bp, Homo sapiens
gggccaggtgatttc

SEQ ID NO: 1331658 - DNA, 15 bp, Homo sapiens
ggggccaggtgattt

SEQ ID NO: 1331659 - DNA, 15 bp, Homo sapiens
aggggccaggtgatt

SEQ ID NO: 1331660 - DNA, 15 bp, Homo sapiens
aaggggccaggtgat

SEQ ID NO: 1331661 - DNA, 15 bp, Homo sapiens
aaaggggccaggtga

SEQ ID NO: 1331662 - DNA, 15 bp, Homo sapiens
aaaaggggccaggtg

SEQ ID NO: 1331663 - DNA, 15 bp, Homo sapiens
gaaaaggggccaggt

SEQ ID NO: 1331664 - DNA, 15 bp, Homo sapiens
tgaaaaggggccagg

SEQ ID NO: 1331665 - DNA, 15 bp, Homo sapiens
ttgaaaaggggccag

SEQ ID NO: 1331666 - DNA, 15 bp, Homo sapiens
cttgaaaaggggcca

SEQ ID NO: 1331667 - DNA, 15 bp, Homo sapiens
ccttgaaaaggggcc

SEQ ID NO: 1331668 - DNA, 15 bp, Homo sapiens
cccttgaaaaggggc

SEQ ID NO: 1331669 - DNA, 15 bp, Homo sapiens
gcccttgaaaagggg

SEQ ID NO: 1331670 - DNA, 15 bp, Homo sapiens
ggcccttgaaaaggg

SEQ ID NO: 1331671 - DNA, 15 bp, Homo sapiens
gggcccttgaaaagg

SEQ ID NO: 1331672 - DNA, 15 bp, Homo sapiens
ggggcccttgaaaag

SEQ ID NO: 1331673 - DNA, 15 bp, Homo sapiens
tggggcccttgaaaa

SEQ ID NO: 1331674 - DNA, 15 bp, Homo sapiens
gtggggcccttgaaa

SEQ ID NO: 1331675 - DNA, 15 bp, Homo sapiens
tgtggggcccttgaa

SEQ ID NO: 1331676 - DNA, 15 bp, Homo sapiens
ctgtggggcccttga

SEQ ID NO: 1331677 - DNA, 15 bp, Homo sapiens
actgtggggcccttg

SEQ ID NO: 1331678 - DNA, 15 bp, Homo sapiens
tactgtggggccctt

SEQ ID NO: 1331679 - DNA, 15 bp, Homo sapiens
ttactgtggggccct

SEQ ID NO: 1331680 - DNA, 15 bp, Homo sapiens
gttactgtggggccc

SEQ ID NO: 1331681 - DNA, 15 bp, Homo sapiens
tgttactgtggggcc

SEQ ID NO: 1331682 - DNA, 15 bp, Homo sapiens
ttgttactgtggggc

SEQ ID NO: 1331683 - DNA, 15 bp, Homo sapiens
tttgttactgtgggg

SEQ ID NO: 1331684 - DNA, 15 bp, Homo sapiens
ctttgttactgtggg

SEQ ID NO: 1331685 - DNA, 15 bp, Homo sapiens
gctttgttactgtgg

SEQ ID NO: 1331686 - DNA, 15 bp, Homo sapiens
agctttgttactgtg

SEQ ID NO: 1331687 - DNA, 15 bp, Homo sapiens
cagctttgttactgt

SEQ ID NO: 1331688 - DNA, 15 bp, Homo sapiens
ccagctttgttactg

SEQ ID NO: 1331689 - DNA, 15 bp, Homo sapiens
accagctttgttact

SEQ ID NO: 1331690 - DNA, 15 bp, Homo sapiens
gaccagctttgttac

SEQ ID NO: 1331691 - DNA, 15 bp, Homo sapiens
tgaccagctttgtta

SEQ ID NO: 1331692 - DNA, 15 bp, Homo sapiens
ctgaccagctttgtt

SEQ ID NO: 1331693 - DNA, 15 bp, Homo sapiens
cctgaccagctttgt

SEQ ID NO: 1331694 - DNA, 15 bp, Homo sapiens
ccctgaccagctttg

SEQ ID NO: 1331695 - DNA, 15 bp, Homo sapiens
accctgaccagcttt

SEQ ID NO: 1331696 - DNA, 15 bp, Homo sapiens
aaccctgaccagctt

SEQ ID NO: 1331697 - DNA, 15 bp, Homo sapiens
aaaccctgaccagct

SEQ ID NO: 1331698 - DNA, 15 bp, Homo sapiens
caaaccctgaccagc

SEQ ID NO: 1331699 - DNA, 15 bp, Homo sapiens
ccaaaccctgaccag

SEQ ID NO: 1331700 - DNA, 15 bp, Homo sapiens
tccaaaccctgacca

SEQ ID NO: 1331701 - DNA, 15 bp, Homo sapiens
gtccaaaccctgacc

SEQ ID NO: 1331702 - DNA, 15 bp, Homo sapiens
agtccaaaccctgac

SEQ ID NO: 1331703 - DNA, 15 bp, Homo sapiens
gagtccaaaccctga

SEQ ID NO: 1331704 - DNA, 15 bp, Homo sapiens
tgagtccaaaccctg

SEQ ID NO: 1331705 - DNA, 15 bp, Homo sapiens
gtgagtccaaaccct

SEQ ID NO: 1331706 - DNA, 15 bp, Homo sapiens
agtgagtccaaaccc

SEQ ID NO: 1331707 - DNA, 15 bp, Homo sapiens
cagtgagtccaaacc

SEQ ID NO: 1331708 - DNA, 15 bp, Homo sapiens
ccagtgagtccaaac

SEQ ID NO: 1331709 - DNA, 15 bp, Homo sapiens
gccagtgagtccaaa

SEQ ID NO: 1331710 - DNA, 15 bp, Homo sapiens
ggccagtgagtccaa

SEQ ID NO: 1331711 - DNA, 15 bp, Homo sapiens
aggccagtgagtcca

SEQ ID NO: 1331712 - DNA, 15 bp, Homo sapiens
taggccagtgagtcc

SEQ ID NO: 1331713 - DNA, 15 bp, Homo sapiens
ataggccagtgagtc

SEQ ID NO: 1331714 - DNA, 15 bp, Homo sapiens
tataggccagtgagt

SEQ ID NO: 1331715 - DNA, 15 bp, Homo sapiens
atataggccagtgag

SEQ ID NO: 1331716 - DNA, 15 bp, Homo sapiens
tatataggccagtga

SEQ ID NO: 1331717 - DNA, 15 bp, Homo sapiens
ctatataggccagtg

SEQ ID NO: 1331718 - DNA, 15 bp, Homo sapiens
gctatataggccagt

SEQ ID NO: 1331719 - DNA, 15 bp, Homo sapiens
ggctatataggccag

SEQ ID NO: 1331720 - DNA, 15 bp, Homo sapiens
tggctatataggcca

SEQ ID NO: 1331721 - DNA, 15 bp, Homo sapiens
atggctatataggcc

SEQ ID NO: 1331722 - DNA, 15 bp, Homo sapiens
gatggctatataggc

SEQ ID NO: 1331723 - DNA, 15 bp, Homo sapiens
agatggctatatagg

SEQ ID NO: 1331724 - DNA, 15 bp, Homo sapiens
aagatggctatatag

SEQ ID NO: 1331725 - DNA, 15 bp, Homo sapiens
caagatggctatata

SEQ ID NO: 1331726 - DNA, 15 bp, Homo sapiens
acaagatggctatat

SEQ ID NO: 1331727 - DNA, 15 bp, Homo sapiens
cacaagatggctata

SEQ ID NO: 1331728 - DNA, 15 bp, Homo sapiens
ccacaagatggctat

SEQ ID NO: 1331729 - DNA, 15 bp, Homo sapiens
gccacaagatggcta

SEQ ID NO: 1331730 - DNA, 15 bp, Homo sapiens
agccacaagatggct

SEQ ID NO: 1331731 - DNA, 15 bp, Homo sapiens
cagccacaagatggc

SEQ ID NO: 1331732 - DNA, 15 bp, Homo sapiens
ccagccacaagatgg

SEQ ID NO: 1331733 - DNA, 15 bp, Homo sapiens
gccagccacaagatg

SEQ ID NO: 1331734 - DNA, 15 bp, Homo sapiens
tgccagccacaagat

SEQ ID NO: 1331735 - DNA, 15 bp, Homo sapiens
atgccagccacaaga

SEQ ID NO: 1331736 - DNA, 15 bp, Homo sapiens
catgccagccacaag

SEQ ID NO: 1331737 - DNA, 15 bp, Homo sapiens
ccatgccagccacaa

SEQ ID NO: 1331738 - DNA, 15 bp, Homo sapiens
cccatgccagccaca

SEQ ID NO: 1331739 - DNA, 15 bp, Homo sapiens
ccccatgccagccac

SEQ ID NO: 1331740 - DNA, 15 bp, Homo sapiens
tccccatgccagcca

SEQ ID NO: 1331741 - DNA, 15 bp, Homo sapiens
atccccatgccagcc

SEQ ID NO: 1331742 - DNA, 15 bp, Homo sapiens
tatccccatgccagc

SEQ ID NO: 1331743 - DNA, 15 bp, Homo sapiens
ttatccccatgccag

SEQ ID NO: 1331744 - DNA, 15 bp, Homo sapiens
attatccccatgcca

SEQ ID NO: 1331745 - DNA, 15 bp, Homo sapiens
aattatccccatgcc

SEQ ID NO: 1331746 - DNA, 15 bp, Homo sapiens
taattatccccatgc

SEQ ID NO: 1331747 - DNA, 15 bp, Homo sapiens
gtaattatccccatg

SEQ ID NO: 1331748 - DNA, 15 bp, Homo sapiens
tgtaattatccccat

SEQ ID NO: 1331749 - DNA, 15 bp, Homo sapiens
atgtaattatcccca

SEQ ID NO: 1331750 - DNA, 15 bp, Homo sapiens
gatgtaattatcccc

SEQ ID NO: 1331751 - DNA, 15 bp, Homo sapiens
ggatgtaattatccc

SEQ ID NO: 1331752 - DNA, 15 bp, Homo sapiens
tggatgtaattatcc

SEQ ID NO: 1331753 - DNA, 15 bp, Homo sapiens
ttggatgtaattatc

SEQ ID NO: 1331754 - DNA, 15 bp, Homo sapiens
attggatgtaattat

SEQ ID NO: 1331755 - DNA, 15 bp, Homo sapiens
aattggatgtaatta

SEQ ID NO: 1331756 - DNA, 15 bp, Homo sapiens
gaattggatgtaatt

SEQ ID NO: 1331757 - DNA, 15 bp, Homo sapiens
agaattggatgtaat

SEQ ID NO: 1331758 - DNA, 15 bp, Homo sapiens
gagaattggatgtaa

SEQ ID NO: 1331759 - DNA, 15 bp, Homo sapiens
ggagaattggatgta

SEQ ID NO: 1331760 - DNA, 15 bp, Homo sapiens
gggagaattggatgt

SEQ ID NO: 1331761 - DNA, 15 bp, Homo sapiens
tgggagaattggatg

SEQ ID NO: 1331762 - DNA, 15 bp, Homo sapiens
atgggagaattggat

SEQ ID NO: 1331763 - DNA, 15 bp, Homo sapiens
gatgggagaattgga

SEQ ID NO: 1331764 - DNA, 15 bp, Homo sapiens
tgatgggagaattgg

SEQ ID NO: 1331765 - DNA, 15 bp, Homo sapiens
ctgatgggagaattg

SEQ ID NO: 1331766 - DNA, 15 bp, Homo sapiens
actgatgggagaatt

SEQ ID NO: 1331767 - DNA, 15 bp, Homo sapiens
tactgatgggagaat

SEQ ID NO: 1331768 - DNA, 15 bp, Homo sapiens
gtactgatgggagaa

SEQ ID NO: 1331769 - DNA, 15 bp, Homo sapiens
agtactgatgggaga

SEQ ID NO: 1331770 - DNA, 15 bp, Homo sapiens
cagtactgatgggag

SEQ ID NO: 1331771 - DNA, 15 bp, Homo sapiens
tcagtactgatggga

SEQ ID NO: 1331772 - DNA, 15 bp, Homo sapiens
ctcagtactgatggg

SEQ ID NO: 1331773 - DNA, 15 bp, Homo sapiens
actcagtactgatgg

SEQ ID NO: 1331774 - DNA, 15 bp, Homo sapiens
tactcagtactgatg

SEQ ID NO: 1331775 - DNA, 15 bp, Homo sapiens
atactcagtactgat

SEQ ID NO: 1331776 - DNA, 15 bp, Homo sapiens
gatactcagtactga

SEQ ID NO: 1331777 - DNA, 15 bp, Homo sapiens
ggatactcagtactg

SEQ ID NO: 1331778 - DNA, 15 bp, Homo sapiens
gggatactcagtact

SEQ ID NO: 1331779 - DNA, 15 bp, Homo sapiens
agggatactcagtac

SEQ ID NO: 1331780 - DNA, 15 bp, Homo sapiens
cagggatactcagta

SEQ ID NO: 1331781 - DNA, 15 bp, Homo sapiens
tcagggatactcagt

SEQ ID NO: 1331782 - DNA, 15 bp, Homo sapiens
ctcagggatactcag

SEQ ID NO: 1331783 - DNA, 15 bp, Homo sapiens
actcagggatactca

SEQ ID NO: 1331784 - DNA, 15 bp, Homo sapiens
gactcagggatactc

SEQ ID NO: 1331785 - DNA, 15 bp, Homo sapiens
tggactcagggatac

SEQ ID NO: 1331786 - DNA, 15 bp, Homo sapiens
ttggactcagggata

SEQ ID NO: 1331787 - DNA, 15 bp, Homo sapiens
tttggactcagggat

SEQ ID NO: 1331788 - DNA, 15 bp, Homo sapiens
ttttggactcaggga

SEQ ID NO: 1331789 - DNA, 15 bp, Homo sapiens
gttttggactcaggg

SEQ ID NO: 1331790 - DNA, 15 bp, Homo sapiens
cgttttggactcagg

SEQ ID NO: 1331791 - DNA, 15 bp, Homo sapiens
ccgttttggactcag

SEQ ID NO: 1331792 - DNA, 15 bp, Homo sapiens
accgttttggactca

SEQ ID NO: 1331793 - DNA, 15 bp, Homo sapiens
taccgttttggactc

SEQ ID NO: 1331794 - DNA, 15 bp, Homo sapiens
ataccgttttggact

SEQ ID NO: 1331795 - DNA, 15 bp, Homo sapiens
gataccgttttggac

SEQ ID NO: 1331796 - DNA, 15 bp, Homo sapiens
tgataccgttttgga

SEQ ID NO: 1331797 - DNA, 15 bp, Homo sapiens
ctgataccgttttgg

SEQ ID NO: 1331798 - DNA, 15 bp, Homo sapiens
tctgataccgttttg

SEQ ID NO: 1331799 - DNA, 15 bp, Homo sapiens
ttctgataccgtttt

SEQ ID NO: 1331800 - DNA, 15 bp, Homo sapiens
gttctgataccgttt

SEQ ID NO: 1331801 - DNA, 15 bp, Homo sapiens
tgttctgataccgtt

SEQ ID NO: 1331802 - DNA, 15 bp, Homo sapiens
ttgttctgataccgt

SEQ ID NO: 1331803 - DNA, 15 bp, Homo sapiens
tttgttctgataccg

SEQ ID NO: 1331804 - DNA, 15 bp, Homo sapiens
atttgttctgatacc

SEQ ID NO: 1331805 - DNA, 15 bp, Homo sapiens
tatttgttctgatac

SEQ ID NO: 1331806 - DNA, 15 bp, Homo sapiens
ttatttgttctgata

SEQ ID NO: 1331807 - DNA, 15 bp, Homo sapiens
tttatttgttctgat

SEQ ID NO: 1331808 - DNA, 15 bp, Homo sapiens
ttttatttgttctga

SEQ ID NO: 1331809 - DNA, 15 bp, Homo sapiens
cttttatttgttctg

SEQ ID NO: 1331810 - DNA, 15 bp, Homo sapiens
ccttttatttgttct

SEQ ID NO: 1331811 - DNA, 15 bp, Homo sapiens
cccttttatttgttc

SEQ ID NO: 1331812 - DNA, 15 bp, Homo sapiens
tcccttttatttgtt

SEQ ID NO: 1331813 - DNA, 15 bp, Homo sapiens
ttcccttttatttgt

SEQ ID NO: 1331814 - DNA, 15 bp, Homo sapiens
cttcccttttatttg

SEQ ID NO: 1331815 - DNA, 15 bp, Homo sapiens
ccttcccttttattt

SEQ ID NO: 1331816 - DNA, 15 bp, Homo sapiens
cccttcccttttatt

SEQ ID NO: 1331817 - DNA, 15 bp, Homo sapiens
ccccttcccttttat

SEQ ID NO: 1331818 - DNA, 15 bp, Homo sapiens
gccccttccctttta

SEQ ID NO: 1331819 - DNA, 15 bp, Homo sapiens
agccccttccctttt

SEQ ID NO: 1331820 - DNA, 15 bp, Homo sapiens
cagccccttcccttt

SEQ ID NO: 1331821 - DNA, 15 bp, Homo sapiens
ccagccccttccctt

SEQ ID NO: 1331822 - DNA, 15 bp, Homo sapiens
tccagccccttccct

SEQ ID NO: 1331823 - DNA, 15 bp, Homo sapiens
ctccagccccttccc

SEQ ID NO: 1331824 - DNA, 15 bp, Homo sapiens
cctccagccccttcc

SEQ ID NO: 1331825 - DNA, 15 bp, Homo sapiens
tcctccagccccttc

SEQ ID NO: 1331826 - DNA, 15 bp, Homo sapiens
gtcctccagcccctt

SEQ ID NO: 1331827 - DNA, 15 bp, Homo sapiens
ggtcctccagcccct

SEQ ID NO: 1331828 - DNA, 15 bp, Homo sapiens
ttggtcctccagccc

SEQ ID NO: 1331829 - DNA, 15 bp, Homo sapiens
tttggtcctccagcc

SEQ ID NO: 1331830 - DNA, 15 bp, Homo sapiens
ctttggtcctccagc

SEQ ID NO: 1331831 - DNA, 15 bp, Homo sapiens
gctttggtcctccag

SEQ ID NO: 1331832 - DNA, 15 bp, Homo sapiens
tgctttggtcctcca

SEQ ID NO: 1331833 - DNA, 15 bp, Homo sapiens
ctgctttggtcctcc

SEQ ID NO: 1331834 - DNA, 15 bp, Homo sapiens
cctgctttggtcctc

SEQ ID NO: 1331835 - DNA, 15 bp, Homo sapiens
ccctgctttggtcct

SEQ ID NO: 1331836 - DNA, 15 bp, Homo sapiens
tccctgctttggtcc

SEQ ID NO: 1331837 - DNA, 15 bp, Homo sapiens
ctccctgctttggtc

SEQ ID NO: 1331838 - DNA, 15 bp, Homo sapiens
gctccctgctttggt

SEQ ID NO: 1331839 - DNA, 15 bp, Homo sapiens
ggctccctgctttgg

SEQ ID NO: 1331840 - DNA, 15 bp, Homo sapiens
tggctccctgctttg

SEQ ID NO: 1331841 - DNA, 15 bp, Homo sapiens
ctggctccctgcttt

SEQ ID NO: 1331842 - DNA, 15 bp, Homo sapiens
actggctccctgctt

SEQ ID NO: 1331843 - DNA, 15 bp, Homo sapiens
gactggctccctgct

SEQ ID NO: 1331844 - DNA, 15 bp, Homo sapiens
agactggctccctgc

SEQ ID NO: 1331845 - DNA, 15 bp, Homo sapiens
gagactggctccctg

SEQ ID NO: 1331846 - DNA, 15 bp, Homo sapiens
tgagactggctccct

SEQ ID NO: 1331847 - DNA, 15 bp, Homo sapiens
gtgagactggctccc

SEQ ID NO: 1331848 - DNA, 15 bp, Homo sapiens
ggtgagactggctcc

SEQ ID NO: 1331849 - DNA, 15 bp, Homo sapiens
aggtgagactggctc

SEQ ID NO: 1331850 - DNA, 15 bp, Homo sapiens
taggtgagactggct

SEQ ID NO: 1331851 - DNA, 15 bp, Homo sapiens
ctaggtgagactggc

SEQ ID NO: 1331852 - DNA, 15 bp, Homo sapiens
actaggtgagactgg

SEQ ID NO: 1331853 - DNA, 15 bp, Homo sapiens
aactaggtgagactg

SEQ ID NO: 1331854 - DNA, 15 bp, Homo sapiens
gaactaggtgagact

SEQ ID NO: 1331855 - DNA, 15 bp, Homo sapiens
tgaactaggtgagac

SEQ ID NO: 1331856 - DNA, 15 bp, Homo sapiens
gtgaactaggtgaga

SEQ ID NO: 1331857 - DNA, 15 bp, Homo sapiens
ggtgaactaggtgag

SEQ ID NO: 1331858 - DNA, 15 bp, Homo sapiens
tggtgaactaggtga

SEQ ID NO: 1331859 - DNA, 15 bp, Homo sapiens
atggtgaactaggtg

SEQ ID NO: 1331860 - DNA, 15 bp, Homo sapiens
gatggtgaactaggt

SEQ ID NO: 1331861 - DNA, 15 bp, Homo sapiens
agatggtgaactagg

SEQ ID NO: 1331862 - DNA, 15 bp, Homo sapiens
gagatggtgaactag

SEQ ID NO: 1331863 - DNA, 15 bp, Homo sapiens
agagatggtgaacta

SEQ ID NO: 1331864 - DNA, 15 bp, Homo sapiens
cagagatggtgaact

SEQ ID NO: 1331865 - DNA, 15 bp, Homo sapiens
tcagagatggtgaac

SEQ ID NO: 1331866 - DNA, 15 bp, Homo sapiens
ctcagagatggtgaa

SEQ ID NO: 1331867 - DNA, 15 bp, Homo sapiens
tctcagagatggtga

SEQ ID NO: 1331868 - DNA, 15 bp, Homo sapiens
ttctcagagatggtg

SEQ ID NO: 1331869 - DNA, 15 bp, Homo sapiens
cttctcagagatggt

SEQ ID NO: 1331870 - DNA, 15 bp, Homo sapiens
gcttctcagagatgg

SEQ ID NO: 1331871 - DNA, 15 bp, Homo sapiens
agcttctcagagatg

SEQ ID NO: 1331872 - DNA, 15 bp, Homo sapiens
aagcttctcagagat

SEQ ID NO: 1331873 - DNA, 15 bp, Homo sapiens
gaagcttctcagaga

SEQ ID NO: 1331874 - DNA, 15 bp, Homo sapiens
agaagcttctcagag

SEQ ID NO: 1331875 - DNA, 15 bp, Homo sapiens
cagaagcttctcaga

SEQ ID NO: 1331876 - DNA, 15 bp, Homo sapiens
ccagaagcttctcag

SEQ ID NO: 1331877 - DNA, 15 bp, Homo sapiens
cccagaagcttctca

SEQ ID NO: 1331878 - DNA, 15 bp, Homo sapiens
gcccagaagcttctc

SEQ ID NO: 1331879 - DNA, 15 bp, Homo sapiens
ggcccagaagcttct

SEQ ID NO: 1331880 - DNA, 15 bp, Homo sapiens
tggcccagaagcttc

SEQ ID NO: 1331881 - DNA, 15 bp, Homo sapiens
gtggcccagaagctt

SEQ ID NO: 1331882 - DNA, 15 bp, Homo sapiens
agtggcccagaagct

SEQ ID NO: 1331883 - DNA, 15 bp, Homo sapiens
gagtggcccagaagc

SEQ ID NO: 1331884 - DNA, 15 bp, Homo sapiens
agagtggcccagaag

SEQ ID NO: 1331885 - DNA, 15 bp, Homo sapiens
cagagtggcccagaa

SEQ ID NO: 1331886 - DNA, 15 bp, Homo sapiens
tcagagtggcccaga

SEQ ID NO: 1331887 - DNA, 15 bp, Homo sapiens
gtcagagtggcccag

SEQ ID NO: 1331888 - DNA, 15 bp, Homo sapiens
ggtcagagtggccca

SEQ ID NO: 1331889 - DNA, 15 bp, Homo sapiens
aggtcagagtggccc

SEQ ID NO: 1331890 - DNA, 15 bp, Homo sapiens
caggtcagagtggcc

SEQ ID NO: 1331891 - DNA, 15 bp, Homo sapiens
gcaggtcagagtggc

SEQ ID NO: 1331892 - DNA, 15 bp, Homo sapiens
agcaggtcagagtgg

SEQ ID NO: 1331893 - DNA, 15 bp, Homo sapiens
cagcaggtcagagtg

SEQ ID NO: 1331894 - DNA, 15 bp, Homo sapiens
gcagcaggtcagagt

SEQ ID NO: 1331895 - DNA, 15 bp, Homo sapiens
agcagcaggtcagag

SEQ ID NO: 1331896 - DNA, 15 bp, Homo sapiens
cagcagcaggtcaga

SEQ ID NO: 1331897 - DNA, 15 bp, Homo sapiens
acagcagcaggtcag

SEQ ID NO: 1331898 - DNA, 15 bp, Homo sapiens
tacagcagcaggtca

SEQ ID NO: 1331899 - DNA, 15 bp, Homo sapiens
ctacagcagcaggtc

SEQ ID NO: 1331900 - DNA, 15 bp, Homo sapiens
cctacagcagcaggt

SEQ ID NO: 1331901 - DNA, 15 bp, Homo sapiens
acctacagcagcagg

SEQ ID NO: 1331902 - DNA, 15 bp, Homo sapiens
gacctacagcagcag

SEQ ID NO: 1331903 - DNA, 15 bp, Homo sapiens
ggacctacagcagca

SEQ ID NO: 1331904 - DNA, 15 bp, Homo sapiens
aggacctacagcagc

SEQ ID NO: 1331905 - DNA, 15 bp, Homo sapiens
caggacctacagcag

SEQ ID NO: 1331906 - DNA, 15 bp, Homo sapiens
acaggacctacagca

SEQ ID NO: 1331907 - DNA, 15 bp, Homo sapiens
tacaggacctacagc

SEQ ID NO: 1331908 - DNA, 15 bp, Homo sapiens
ttacaggacctacag

SEQ ID NO: 1331909 - DNA, 15 bp, Homo sapiens
gttacaggacctaca

SEQ ID NO: 1331910 - DNA, 15 bp, Homo sapiens
ggttacaggacctac

SEQ ID NO: 1331911 - DNA, 15 bp, Homo sapiens
cggttacaggaccta

SEQ ID NO: 1331912 - DNA, 15 bp, Homo sapiens
tcggttacaggacct

SEQ ID NO: 1331913 - DNA, 15 bp, Homo sapiens
ctcggttacaggacc

SEQ ID NO: 1331914 - DNA, 15 bp, Homo sapiens
tctcggttacaggac

SEQ ID NO: 1331915 - DNA, 15 bp, Homo sapiens
ctctcggttacagga

SEQ ID NO: 1331916 - DNA, 15 bp, Homo sapiens
tctctcggttacagg

SEQ ID NO: 1331917 - DNA, 15 bp, Homo sapiens
gtctctcggttacag

SEQ ID NO: 1331918 - DNA, 15 bp, Homo sapiens
ggtctctcggttaca

SEQ ID NO: 1331919 - DNA, 15 bp, Homo sapiens
tggtctctcggttac

SEQ ID NO: 1331920 - DNA, 15 bp, Homo sapiens
ctggtctctcggtta

SEQ ID NO: 1331921 - DNA, 15 bp, Homo sapiens
cctggtctctcggtt

SEQ ID NO: 1331922 - DNA, 15 bp, Homo sapiens
acctggtctctcggt

SEQ ID NO: 1331923 - DNA, 15 bp, Homo sapiens
cacctggtctctcgg

SEQ ID NO: 1331924 - DNA, 15 bp, Homo sapiens
ccacctggtctctcg

SEQ ID NO: 1331925 - DNA, 15 bp, Homo sapiens
accacctggtctctc

SEQ ID NO: 1331926 - DNA, 15 bp, Homo sapiens
gaccacctggtctct

SEQ ID NO: 1331927 - DNA, 15 bp, Homo sapiens
ggaccacctggtctc

SEQ ID NO: 1331928 - DNA, 15 bp, Homo sapiens
gggaccacctggtct

SEQ ID NO: 1331929 - DNA, 15 bp, Homo sapiens
agggaccacctggtc

SEQ ID NO: 1331930 - DNA, 15 bp, Homo sapiens
cagggaccacctggt

SEQ ID NO: 1331931 - DNA, 15 bp, Homo sapiens
gcagggaccacctgg

SEQ ID NO: 1331932 - DNA, 15 bp, Homo sapiens
agcagggaccacctg

SEQ ID NO: 1331933 - DNA, 15 bp, Homo sapiens
cagcagggaccacct

SEQ ID NO: 1331934 - DNA, 15 bp, Homo sapiens
tcagcagggaccacc

SEQ ID NO: 1331935 - DNA, 15 bp, Homo sapiens
gtcagcagggaccac

SEQ ID NO: 1331936 - DNA, 15 bp, Homo sapiens
cgtcagcagggacca

SEQ ID NO: 1331937 - DNA, 15 bp, Homo sapiens
ccgtcagcagggacc

SEQ ID NO: 1331938 - DNA, 15 bp, Homo sapiens
gccgtcagcagggac

SEQ ID NO: 1331939 - DNA, 15 bp, Homo sapiens
cgccgtcagcaggga

SEQ ID NO: 1331940 - DNA, 15 bp, Homo sapiens
ccgccgtcagcaggg

SEQ ID NO: 1331941 - DNA, 15 bp, Homo sapiens
tccgccgtcagcagg

SEQ ID NO: 1331942 - DNA, 15 bp, Homo sapiens
atccgccgtcagcag

SEQ ID NO: 1331943 - DNA, 15 bp, Homo sapiens
aatccgccgtcagca

SEQ ID NO: 1331944 - DNA, 15 bp, Homo sapiens
gaatccgccgtcagc

SEQ ID NO: 1331945 - DNA, 15 bp, Homo sapiens
agaatccgccgtcag

SEQ ID NO: 1331946 - DNA, 15 bp, Homo sapiens
cagaatccgccgtca

SEQ ID NO: 1331947 - DNA, 15 bp, Homo sapiens
gcagaatccgccgtc

SEQ ID NO: 1331948 - DNA, 15 bp, Homo sapiens
tgcagaatccgccgt

SEQ ID NO: 1331949 - DNA, 15 bp, Homo sapiens
gtgcagaatccgccg

SEQ ID NO: 1331950 - DNA, 15 bp, Homo sapiens
tgtgcagaatccgcc

SEQ ID NO: 1331951 - DNA, 15 bp, Homo sapiens
ttgtgcagaatccgc

SEQ ID NO: 1331952 - DNA, 15 bp, Homo sapiens
cttgtgcagaatccg

SEQ ID NO: 1331953 - DNA, 15 bp, Homo sapiens
tcttgtgcagaatcc

SEQ ID NO: 1331954 - DNA, 15 bp, Homo sapiens
atcttgtgcagaatc

SEQ ID NO: 1331955 - DNA, 15 bp, Homo sapiens
gatcttgtgcagaat

SEQ ID NO: 1331956 - DNA, 15 bp, Homo sapiens
agatcttgtgcagaa

SEQ ID NO: 1331957 - DNA, 15 bp, Homo sapiens
cagatcttgtgcaga

SEQ ID NO: 1331958 - DNA, 15 bp, Homo sapiens
gcagatcttgtgcag

SEQ ID NO: 1331959 - DNA, 15 bp, Homo sapiens
agcagatcttgtgca

SEQ ID NO: 1331960 - DNA, 15 bp, Homo sapiens
cagcagatcttgtgc

SEQ ID NO: 1331961 - DNA, 15 bp, Homo sapiens
gcagcagatcttgtg

SEQ ID NO: 1331962 - DNA, 15 bp, Homo sapiens
ggcagcagatcttgt

SEQ ID NO: 1331963 - DNA, 15 bp, Homo sapiens
tggcagcagatcttg

SEQ ID NO: 1331964 - DNA, 15 bp, Homo sapiens
gtggcagcagatctt

SEQ ID NO: 1331965 - DNA, 15 bp, Homo sapiens
tgtggcagcagatct

SEQ ID NO: 1331966 - DNA, 15 bp, Homo sapiens
ctgtggcagcagatc

SEQ ID NO: 1331967 - DNA, 15 bp, Homo sapiens
gctgtggcagcagat

SEQ ID NO: 1331968 - DNA, 15 bp, Homo sapiens
cgctgtggcagcaga

SEQ ID NO: 1331969 - DNA, 15 bp, Homo sapiens
gcgctgtggcagcag

SEQ ID NO: 1331970 - DNA, 15 bp, Homo sapiens
tgcgctgtggcagca

SEQ ID NO: 1331971 - DNA, 15 bp, Homo sapiens
ctgcgctgtggcagc

SEQ ID NO: 1331972 - DNA, 15 bp, Homo sapiens
gctgcgctgtggcag

SEQ ID NO: 1331973 - DNA, 15 bp, Homo sapiens
tgctgcgctgtggca

SEQ ID NO: 1331974 - DNA, 15 bp, Homo sapiens
gtgctgcgctgtggc

SEQ ID NO: 1331975 - DNA, 15 bp, Homo sapiens
cgtgctgcgctgtgg

SEQ ID NO: 1331976 - DNA, 15 bp, Homo sapiens
acgtgctgcgctgtg

SEQ ID NO: 1331977 - DNA, 15 bp, Homo sapiens
gacgtgctgcgctgt

SEQ ID NO: 1331978 - DNA, 15 bp, Homo sapiens
tgacgtgctgcgctg

SEQ ID NO: 1331979 - DNA, 15 bp, Homo sapiens
atgacgtgctgcgct

SEQ ID NO: 1331980 - DNA, 15 bp, Homo sapiens
gatgacgtgctgcgc

SEQ ID NO: 1331981 - DNA, 15 bp, Homo sapiens
agatgacgtgctgcg

SEQ ID NO: 1331982 - DNA, 15 bp, Homo sapiens
gagatgacgtgctgc

SEQ ID NO: 1331983 - DNA, 15 bp, Homo sapiens
ggagatgacgtgctg

SEQ ID NO: 1331984 - DNA, 15 bp, Homo sapiens
gggagatgacgtgct

SEQ ID NO: 1331985 - DNA, 15 bp, Homo sapiens
agggagatgacgtgc

SEQ ID NO: 1331986 - DNA, 15 bp, Homo sapiens
cagggagatgacgtg

SEQ ID NO: 1331987 - DNA, 15 bp, Homo sapiens
acagggagatgacgt

SEQ ID NO: 1331988 - DNA, 15 bp, Homo sapiens
cacagggagatgacg

SEQ ID NO: 1331989 - DNA, 15 bp, Homo sapiens
ccacagggagatgac

SEQ ID NO: 1331990 - DNA, 15 bp, Homo sapiens
tccacagggagatga

SEQ ID NO: 1331991 - DNA, 15 bp, Homo sapiens
ttccacagggagatg

SEQ ID NO: 1331992 - DNA, 15 bp, Homo sapiens
cttccacagggagat

SEQ ID NO: 1331993 - DNA, 15 bp, Homo sapiens
acttccacagggaga

SEQ ID NO: 1331994 - DNA, 15 bp, Homo sapiens
gacttccacagggag

SEQ ID NO: 1331995 - DNA, 15 bp, Homo sapiens
tgacttccacaggga

SEQ ID NO: 1331996 - DNA, 15 bp, Homo sapiens
ctgacttccacaggg

SEQ ID NO: 1331997 - DNA, 15 bp, Homo sapiens
actgacttccacagg

SEQ ID NO: 1331998 - DNA, 15 bp, Homo sapiens
aactgacttccacag

SEQ ID NO: 1331999 - DNA, 15 bp, Homo sapiens
aaactgacttccaca

SEQ ID NO: 1332000 - DNA, 15 bp, Homo sapiens
aaaactgacttccac

SEQ ID NO: 1332001 - DNA, 15 bp, Homo sapiens
gaaaactgacttcca

SEQ ID NO: 1332002 - DNA, 15 bp, Homo sapiens
agaaaactgacttcc

SEQ ID NO: 1332003 - DNA, 15 bp, Homo sapiens
gagaaaactgacttc

SEQ ID NO: 1332004 - DNA, 15 bp, Homo sapiens
agagaaaactgactt

SEQ ID NO: 1332005 - DNA, 15 bp, Homo sapiens
aagagaaaactgact

SEQ ID NO: 1332006 - DNA, 15 bp, Homo sapiens
aaagagaaaactgac

SEQ ID NO: 1332007 - DNA, 15 bp, Homo sapiens
taaagagaaaactga

SEQ ID NO: 1332008 - DNA, 15 bp, Homo sapiens
ataaagagaaaactg

SEQ ID NO: 1332009 - DNA, 15 bp, Homo sapiens
aataaagagaaaact

SEQ ID NO: 1332010 - DNA, 15 bp, Homo sapiens
gaataaagagaaaac

SEQ ID NO: 1332011 - DNA, 15 bp, Homo sapiens
ggaataaagagaaaa

SEQ ID NO: 1332012 - DNA, 15 bp, Homo sapiens
tggaataaagagaaa

SEQ ID NO: 1332013 - DNA, 15 bp, Homo sapiens
ttggaataaagagaa

SEQ ID NO: 1332014 - DNA, 15 bp, Homo sapiens
attggaataaagaga

SEQ ID NO: 1332015 - DNA, 15 bp, Homo sapiens
cattggaataaagag

SEQ ID NO: 1332016 - DNA, 15 bp, Homo sapiens
gcattggaataaaga

SEQ ID NO: 1332017 - DNA, 15 bp, Homo sapiens
ggcattggaataaag

SEQ ID NO: 1332018 - DNA, 15 bp, Homo sapiens
tggcattggaataaa

SEQ ID NO: 1332019 - DNA, 15 bp, Homo sapiens
ctggcattggaataa

SEQ ID NO: 1332020 - DNA, 15 bp, Homo sapiens
cctggcattggaata

SEQ ID NO: 1332021 - DNA, 15 bp, Homo sapiens
ccctggcattggaat

SEQ ID NO: 1332022 - DNA, 15 bp, Homo sapiens
accctggcattggaa

SEQ ID NO: 1332023 - DNA, 15 bp, Homo sapiens
gaccctggcattgga

SEQ ID NO: 1332024 - DNA, 15 bp, Homo sapiens
tgaccctggcattgg

SEQ ID NO: 1332025 - DNA, 15 bp, Homo sapiens
ctgaccctggcattg

SEQ ID NO: 1332026 - DNA, 15 bp, Homo sapiens
actgaccctggcatt

SEQ ID NO: 1332027 - DNA, 15 bp, Homo sapiens
aactgaccctggcat

SEQ ID NO: 1332028 - DNA, 15 bp, Homo sapiens
taactgaccctggca

SEQ ID NO: 1332029 - DNA, 15 bp, Homo sapiens
ataactgaccctggc

SEQ ID NO: 1332030 - DNA, 15 bp, Homo sapiens
gataactgaccctgg

SEQ ID NO: 1332031 - DNA, 15 bp, Homo sapiens
tgataactgaccctg

SEQ ID NO: 1332032 - DNA, 15 bp, Homo sapiens
ttgataactgaccct

SEQ ID NO: 1332033 - DNA, 15 bp, Homo sapiens
gttgataactgaccc

SEQ ID NO: 1332034 - DNA, 15 bp, Homo sapiens
tgttgataactgacc

SEQ ID NO: 1332035 - DNA, 15 bp, Homo sapiens
gtgttgataactgac

SEQ ID NO: 1332036 - DNA, 15 bp, Homo sapiens
ggtgttgataactga

SEQ ID NO: 1332037 - DNA, 15 bp, Homo sapiens
cggtgttgataactg

SEQ ID NO: 1332038 - DNA, 15 bp, Homo sapiens
gcggtgttgataact

SEQ ID NO: 1332039 - DNA, 15 bp, Homo sapiens
ggcggtgttgataac

SEQ ID NO: 1332040 - DNA, 15 bp, Homo sapiens
aggcggtgttgataa

SEQ ID NO: 1332041 - DNA, 15 bp, Homo sapiens
caggcggtgttgata

SEQ ID NO: 1332042 - DNA, 15 bp, Homo sapiens
acaggcggtgttgat

SEQ ID NO: 1332043 - DNA, 15 bp, Homo sapiens
cacaggcggtgttga

SEQ ID NO: 1332044 - DNA, 15 bp, Homo sapiens
gcacaggcggtgttg

SEQ ID NO: 1332045 - DNA, 15 bp, Homo sapiens
agcacaggcggtgtt

SEQ ID NO: 1332046 - DNA, 15 bp, Homo sapiens
aagcacaggcggtgt

SEQ ID NO: 1332047 - DNA, 15 bp, Homo sapiens
taagcacaggcggtg

SEQ ID NO: 1332048 - DNA, 15 bp, Homo sapiens
gtaagcacaggcggt

SEQ ID NO: 1332049 - DNA, 15 bp, Homo sapiens
tgtaagcacaggcgg

SEQ ID NO: 1332050 - DNA, 15 bp, Homo sapiens
atgtaagcacaggcg

SEQ ID NO: 1332051 - DNA, 15 bp, Homo sapiens
aatgtaagcacaggc

SEQ ID NO: 1332052 - DNA, 15 bp, Homo sapiens
taatgtaagcacagg

SEQ ID NO: 1332053 - DNA, 15 bp, Homo sapiens
gtaatgtaagcacag

SEQ ID NO: 1332054 - DNA, 15 bp, Homo sapiens
tgtaatgtaagcaca

SEQ ID NO: 1332055 - DNA, 15 bp, Homo sapiens
ctgtaatgtaagcac

SEQ ID NO: 1332056 - DNA, 15 bp, Homo sapiens
cctgtaatgtaagca

SEQ ID NO: 1332057 - DNA, 15 bp, Homo sapiens
tcctgtaatgtaagc

SEQ ID NO: 1332058 - DNA, 15 bp, Homo sapiens
gtcctgtaatgtaag

SEQ ID NO: 1332059 - DNA, 15 bp, Homo sapiens
agtcctgtaatgtaa

SEQ ID NO: 1332060 - DNA, 15 bp, Homo sapiens
cagtcctgtaatgta

SEQ ID NO: 1332061 - DNA, 15 bp, Homo sapiens
gcagtcctgtaatgt

SEQ ID NO: 1332062 - DNA, 15 bp, Homo sapiens
agcagtcctgtaatg

SEQ ID NO: 1332063 - DNA, 15 bp, Homo sapiens
gagcagtcctgtaat

SEQ ID NO: 1332064 - DNA, 15 bp, Homo sapiens
ggagcagtcctgtaa

SEQ ID NO: 1332065 - DNA, 15 bp, Homo sapiens
tggagcagtcctgta

SEQ ID NO: 1332066 - DNA, 15 bp, Homo sapiens
atggagcagtcctgt

SEQ ID NO: 1332067 - DNA, 15 bp, Homo sapiens
tatggagcagtcctg

SEQ ID NO: 1332068 - DNA, 15 bp, Homo sapiens
ctatggagcagtcct

SEQ ID NO: 1332069 - DNA, 15 bp, Homo sapiens
actatggagcagtcc

SEQ ID NO: 1332070 - DNA, 15 bp, Homo sapiens
aactatggagcagtc

SEQ ID NO: 1332071 - DNA, 15 bp, Homo sapiens
aaactatggagcagt

SEQ ID NO: 1332072 - DNA, 15 bp, Homo sapiens
gaaactatggagcag

SEQ ID NO: 1332073 - DNA, 15 bp, Homo sapiens
agaaactatggagca

SEQ ID NO: 1332074 - DNA, 15 bp, Homo sapiens
aagaaactatggagc

SEQ ID NO: 1332075 - DNA, 15 bp, Homo sapiens
taagaaactatggag

SEQ ID NO: 1332076 - DNA, 15 bp, Homo sapiens
gtaagaaactatgga

SEQ ID NO: 1332077 - DNA, 15 bp, Homo sapiens
ggtaagaaactatgg

SEQ ID NO: 1332078 - DNA, 15 bp, Homo sapiens
aggtaagaaactatg

SEQ ID NO: 1332079 - DNA, 15 bp, Homo sapiens
gaggtaagaaactat

SEQ ID NO: 1332080 - DNA, 15 bp, Homo sapiens
tgaggtaagaaacta

SEQ ID NO: 1332081 - DNA, 15 bp, Homo sapiens
atgaggtaagaaact

SEQ ID NO: 1332082 - DNA, 15 bp, Homo sapiens
catgaggtaagaaac

SEQ ID NO: 1332083 - DNA, 15 bp, Homo sapiens
ccatgaggtaagaaa

SEQ ID NO: 1332084 - DNA, 15 bp, Homo sapiens
cccatgaggtaagaa

SEQ ID NO: 1332085 - DNA, 15 bp, Homo sapiens
ccccatgaggtaaga

SEQ ID NO: 1332086 - DNA, 15 bp, Homo sapiens
cccccatgaggtaag

SEQ ID NO: 1332087 - DNA, 15 bp, Homo sapiens
tcccccatgaggtaa

SEQ ID NO: 1332088 - DNA, 15 bp, Homo sapiens
ttcccccatgaggta

SEQ ID NO: 1332089 - DNA, 15 bp, Homo sapiens
tttcccccatgaggt

SEQ ID NO: 1332090 - DNA, 15 bp, Homo sapiens
ctttcccccatgagg

SEQ ID NO: 1332091 - DNA, 15 bp, Homo sapiens
tctttcccccatgag

SEQ ID NO: 1332092 - DNA, 15 bp, Homo sapiens
ctctttcccccatga

SEQ ID NO: 1332093 - DNA, 15 bp, Homo sapiens
tctctttcccccatg

SEQ ID NO: 1332094 - DNA, 15 bp, Homo sapiens
gtctctttcccccat

SEQ ID NO: 1332095 - DNA, 15 bp, Homo sapiens
agtctctttccccca

SEQ ID NO: 1332096 - DNA, 15 bp, Homo sapiens
gagtctctttccccc

SEQ ID NO: 1332097 - DNA, 15 bp, Homo sapiens
ggagtctctttcccc

SEQ ID NO: 1332098 - DNA, 15 bp, Homo sapiens
aggagtctctttccc

SEQ ID NO: 1332099 - DNA, 15 bp, Homo sapiens
caggagtctctttcc

SEQ ID NO: 1332100 - DNA, 15 bp, Homo sapiens
acaggagtctctttc

SEQ ID NO: 1332101 - DNA, 15 bp, Homo sapiens
tacaggagtctcttt

SEQ ID NO: 1332102 - DNA, 15 bp, Homo sapiens
ttacaggagtctctt

SEQ ID NO: 1332103 - DNA, 15 bp, Homo sapiens
gttacaggagtctct

SEQ ID NO: 1332104 - DNA, 15 bp, Homo sapiens
tgttacaggagtctc

SEQ ID NO: 1332105 - DNA, 15 bp, Homo sapiens
ttgttacaggagtct

SEQ ID NO: 1332106 - DNA, 15 bp, Homo sapiens
attgttacaggagtc

SEQ ID NO: 1332107 - DNA, 15 bp, Homo sapiens
tattgttacaggagt

SEQ ID NO: 1332108 - DNA, 15 bp, Homo sapiens
gtattgttacaggag

SEQ ID NO: 1332109 - DNA, 15 bp, Homo sapiens
tgtattgttacagga

SEQ ID NO: 1332110 - DNA, 15 bp, Homo sapiens
atgtattgttacagg

SEQ ID NO: 1332111 - DNA, 15 bp, Homo sapiens
gatgtattgttacag

SEQ ID NO: 1332112 - DNA, 15 bp, Homo sapiens
cgatgtattgttaca

SEQ ID NO: 1332113 - DNA, 15 bp, Homo sapiens
acgatgtattgttac

SEQ ID NO: 1332114 - DNA, 15 bp, Homo sapiens
cacgatgtattgtta

SEQ ID NO: 1332115 - DNA, 15 bp, Homo sapiens
tcacgatgtattgtt

SEQ ID NO: 1332116 - DNA, 15 bp, Homo sapiens
gtcacgatgtattgt

SEQ ID NO: 1332117 - DNA, 15 bp, Homo sapiens
cgtcacgatgtattg

SEQ ID NO: 1332118 - DNA, 15 bp, Homo sapiens
tcgtcacgatgtatt

SEQ ID NO: 1332119 - DNA, 15 bp, Homo sapiens
ttcgtcacgatgtat

SEQ ID NO: 1332120 - DNA, 15 bp, Homo sapiens
tttcgtcacgatgta

SEQ ID NO: 1332121 - DNA, 15 bp, Homo sapiens
ctttcgtcacgatgt

SEQ ID NO: 1332122 - DNA, 15 bp, Homo sapiens
actttcgtcacgatg

SEQ ID NO: 1332123 - DNA, 15 bp, Homo sapiens
gactttcgtcacgat

SEQ ID NO: 1332124 - DNA, 15 bp, Homo sapiens
agactttcgtcacga

SEQ ID NO: 1332125 - DNA, 15 bp, Homo sapiens
cagactttcgtcacg

SEQ ID NO: 1332126 - DNA, 15 bp, Homo sapiens
tcagactttcgtcac

SEQ ID NO: 1332127 - DNA, 15 bp, Homo sapiens
ctcagactttcgtca

SEQ ID NO: 1332128 - DNA, 15 bp, Homo sapiens
gctcagactttcgtc

SEQ ID NO: 1332129 - DNA, 15 bp, Homo sapiens
cgctcagactttcgt

SEQ ID NO: 1332130 - DNA, 15 bp, Homo sapiens
tcgctcagactttcg

SEQ ID NO: 1332131 - DNA, 15 bp, Homo sapiens
ttcgctcagactttc

SEQ ID NO: 1332132 - DNA, 15 bp, Homo sapiens
attcgctcagacttt

SEQ ID NO: 1332133 - DNA, 15 bp, Homo sapiens
aattcgctcagactt

SEQ ID NO: 1332134 - DNA, 15 bp, Homo sapiens
aaattcgctcagact

SEQ ID NO: 1332135 - DNA, 15 bp, Homo sapiens
aaaattcgctcagac

SEQ ID NO: 1332136 - DNA, 15 bp, Homo sapiens
caaaattcgctcaga

SEQ ID NO: 1332137 - DNA, 15 bp, Homo sapiens
acaaaattcgctcag

SEQ ID NO: 1332138 - DNA, 15 bp, Homo sapiens
aacaaaattcgctca

SEQ ID NO: 1332139 - DNA, 15 bp, Homo sapiens
aaacaaaattcgctc

SEQ ID NO: 1332140 - DNA, 15 bp, Homo sapiens
caaacaaaattcgct

SEQ ID NO: 1332141 - DNA, 15 bp, Homo sapiens
tcaaacaaaattcgc

SEQ ID NO: 1332142 - DNA, 15 bp, Homo sapiens
atcaaacaaaattcg

SEQ ID NO: 1332143 - DNA, 15 bp, Homo sapiens
catcaaacaaaattc

SEQ ID NO: 1332144 - DNA, 15 bp, Homo sapiens
ccatcaaacaaaatt

SEQ ID NO: 1332145 - DNA, 15 bp, Homo sapiens
gccatcaaacaaaat

SEQ ID NO: 1332146 - DNA, 15 bp, Homo sapiens
cgccatcaaacaaaa

SEQ ID NO: 1332147 - DNA, 15 bp, Homo sapiens
ccgccatcaaacaaa

SEQ ID NO: 1332148 - DNA, 15 bp, Homo sapiens
gccgccatcaaacaa

SEQ ID NO: 1332149 - DNA, 15 bp, Homo sapiens
tgccgccatcaaaca

SEQ ID NO: 1332150 - DNA, 15 bp, Homo sapiens
ttgccgccatcaaac

SEQ ID NO: 1332151 - DNA, 15 bp, Homo sapiens
attgccgccatcaaa

SEQ ID NO: 1332152 - DNA, 15 bp, Homo sapiens
cattgccgccatcaa

SEQ ID NO: 1332153 - DNA, 15 bp, Homo sapiens
ccattgccgccatca

SEQ ID NO: 1332154 - DNA, 15 bp, Homo sapiens
gccattgccgccatc

SEQ ID NO: 1332155 - DNA, 15 bp, Homo sapiens
cgccattgccgccat

SEQ ID NO: 1332156 - DNA, 15 bp, Homo sapiens
ccgccattgccgcca

SEQ ID NO: 1332157 - DNA, 15 bp, Homo sapiens
gccgccattgccgcc

SEQ ID NO: 1332158 - DNA, 15 bp, Homo sapiens
tgccgccattgccgc

SEQ ID NO: 1332159 - DNA, 15 bp, Homo sapiens
ttgccgccattgccg

SEQ ID NO: 1332160 - DNA, 15 bp, Homo sapiens
attgccgccattgcc

SEQ ID NO: 1332161 - DNA, 15 bp, Homo sapiens
aattgccgccattgc

SEQ ID NO: 1332162 - DNA, 15 bp, Homo sapiens
gaattgccgccattg

SEQ ID NO: 1332163 - DNA, 15 bp, Homo sapiens
agaattgccgccatt

SEQ ID NO: 1332164 - DNA, 15 bp, Homo sapiens
tagaattgccgccat

SEQ ID NO: 1332165 - DNA, 15 bp, Homo sapiens
ttagaattgccgcca

SEQ ID NO: 1332166 - DNA, 15 bp, Homo sapiens
attagaattgccgcc

SEQ ID NO: 1332167 - DNA, 15 bp, Homo sapiens
cattagaattgccgc

SEQ ID NO: 1332168 - DNA, 15 bp, Homo sapiens
tcattagaattgccg

SEQ ID NO: 1332169 - DNA, 15 bp, Homo sapiens
ttcattagaattgcc

SEQ ID NO: 1332170 - DNA, 15 bp, Homo sapiens
cttcattagaattgc

SEQ ID NO: 1332171 - DNA, 15 bp, Homo sapiens
acttcattagaattg

SEQ ID NO: 1332172 - DNA, 15 bp, Homo sapiens
cacttcattagaatt

SEQ ID NO: 1332173 - DNA, 15 bp, Homo sapiens
acacttcattagaat

SEQ ID NO: 1332174 - DNA, 15 bp, Homo sapiens
tacacttcattagaa

SEQ ID NO: 1332175 - DNA, 15 bp, Homo sapiens
atacacttcattaga

SEQ ID NO: 1332176 - DNA, 15 bp, Homo sapiens
gatacacttcattag

SEQ ID NO: 1332177 - DNA, 15 bp, Homo sapiens
tgatacacttcatta

SEQ ID NO: 1332178 - DNA, 15 bp, Homo sapiens
ctgatacacttcatt

SEQ ID NO: 1332179 - DNA, 15 bp, Homo sapiens
gctgatacacttcat

SEQ ID NO: 1332180 - DNA, 15 bp, Homo sapiens
tgctgatacacttca

SEQ ID NO: 1332181 - DNA, 15 bp, Homo sapiens
ctgctgatacacttc

SEQ ID NO: 1332182 - DNA, 15 bp, Homo sapiens
actgctgatacactt

SEQ ID NO: 1332183 - DNA, 15 bp, Homo sapiens
tactgctgatacact

SEQ ID NO: 1332184 - DNA, 15 bp, Homo sapiens
ctactgctgatacac

SEQ ID NO: 1332185 - DNA, 15 bp, Homo sapiens
gctactgctgataca

SEQ ID NO: 1332186 - DNA, 15 bp, Homo sapiens
agctactgctgatac

SEQ ID NO: 1332187 - DNA, 15 bp, Homo sapiens
cagctactgctgata

SEQ ID NO: 1332188 - DNA, 15 bp, Homo sapiens
tcagctactgctgat

SEQ ID NO: 1332189 - DNA, 15 bp, Homo sapiens
atcagctactgctga

SEQ ID NO: 1332190 - DNA, 15 bp, Homo sapiens
gatcagctactgctg

SEQ ID NO: 1332191 - DNA, 15 bp, Homo sapiens
ggatcagctactgct

SEQ ID NO: 1332192 - DNA, 15 bp, Homo sapiens
gggatcagctactgc

SEQ ID NO: 1332193 - DNA, 15 bp, Homo sapiens
tgggatcagctactg

SEQ ID NO: 1332194 - DNA, 15 bp, Homo sapiens
gtgggatcagctact

SEQ ID NO: 1332195 - DNA, 15 bp, Homo sapiens
ggtgggatcagctac

SEQ ID NO: 1332196 - DNA, 15 bp, Homo sapiens
aggtgggatcagcta

SEQ ID NO: 1332197 - DNA, 15 bp, Homo sapiens
caggtgggatcagct

SEQ ID NO: 1332198 - DNA, 15 bp, Homo sapiens
tcaggtgggatcagc

SEQ ID NO: 1332199 - DNA, 15 bp, Homo sapiens
ctcaggtgggatcag

SEQ ID NO: 1332200 - DNA, 15 bp, Homo sapiens
tctcaggtgggatca

SEQ ID NO: 1332201 - DNA, 15 bp, Homo sapiens
atctcaggtgggatc

SEQ ID NO: 1332202 - DNA, 15 bp, Homo sapiens
aatctcaggtgggat

SEQ ID NO: 1332203 - DNA, 15 bp, Homo sapiens
aaatctcaggtggga

SEQ ID NO: 1332204 - DNA, 15 bp, Homo sapiens
gaaatctcaggtggg

SEQ ID NO: 1332205 - DNA, 15 bp, Homo sapiens
tgaaatctcaggtgg

SEQ ID NO: 1332206 - DNA, 15 bp, Homo sapiens
atgaaatctcaggtg

SEQ ID NO: 1332207 - DNA, 15 bp, Homo sapiens
aatgaaatctcaggt

SEQ ID NO: 1332208 - DNA, 15 bp, Homo sapiens
aaatgaaatctcagg

SEQ ID NO: 1332209 - DNA, 15 bp, Homo sapiens
aaaatgaaatctcag

SEQ ID NO: 1332210 - DNA, 15 bp, Homo sapiens
aaaaatgaaatctca

SEQ ID NO: 1332211 - DNA, 15 bp, Homo sapiens
caaaaatgaaatctc

SEQ ID NO: 1332212 - DNA, 15 bp, Homo sapiens
ccaaaaatgaaatct

SEQ ID NO: 1332213 - DNA, 15 bp, Homo sapiens
tccaaaaatgaaatc

SEQ ID NO: 1332214 - DNA, 15 bp, Homo sapiens
ttccaaaaatgaaat

SEQ ID NO: 1332215 - DNA, 15 bp, Homo sapiens
gttccaaaaatgaaa

SEQ ID NO: 1332216 - DNA, 15 bp, Homo sapiens
tgttccaaaaatgaa

SEQ ID NO: 1332217 - DNA, 15 bp, Homo sapiens
ctgttccaaaaatga

SEQ ID NO: 1332218 - DNA, 15 bp, Homo sapiens
tctgttccaaaaatg

SEQ ID NO: 1332219 - DNA, 15 bp, Homo sapiens
ttctgttccaaaaat

SEQ ID NO: 1332220 - DNA, 15 bp, Homo sapiens
gttctgttccaaaaa

SEQ ID NO: 1332221 - DNA, 15 bp, Homo sapiens
agttctgttccaaaa

SEQ ID NO: 1332222 - DNA, 15 bp, Homo sapiens
cagttctgttccaaa

SEQ ID NO: 1332223 - DNA, 15 bp, Homo sapiens
ccagttctgttccaa

SEQ ID NO: 1332224 - DNA, 15 bp, Homo sapiens
accagttctgttcca

SEQ ID NO: 1332225 - DNA, 15 bp, Homo sapiens
taccagttctgttcc

SEQ ID NO: 1332226 - DNA, 15 bp, Homo sapiens
gtaccagttctgttc

SEQ ID NO: 1332227 - DNA, 15 bp, Homo sapiens
tgtaccagttctgtt

SEQ ID NO: 1332228 - DNA, 15 bp, Homo sapiens
ctgtaccagttctgt

SEQ ID NO: 1332229 - DNA, 15 bp, Homo sapiens
actgtaccagttctg

SEQ ID NO: 1332230 - DNA, 15 bp, Homo sapiens
cactgtaccagttct

SEQ ID NO: 1332231 - DNA, 15 bp, Homo sapiens
gcactgtaccagttc

SEQ ID NO: 1332232 - DNA, 15 bp, Homo sapiens
tgcactgtaccagtt

SEQ ID NO: 1332233 - DNA, 15 bp, Homo sapiens
gtgcactgtaccagt

SEQ ID NO: 1332234 - DNA, 15 bp, Homo sapiens
tgtgcactgtaccag

SEQ ID NO: 1332235 - DNA, 15 bp, Homo sapiens
ttgtgcactgtacca

SEQ ID NO: 1332236 - DNA, 15 bp, Homo sapiens
attgtgcactgtacc

SEQ ID NO: 1332237 - DNA, 15 bp, Homo sapiens
aattgtgcactgtac

SEQ ID NO: 1332238 - DNA, 15 bp, Homo sapiens
aaattgtgcactgta

SEQ ID NO: 1332239 - DNA, 15 bp, Homo sapiens
gaaattgtgcactgt

SEQ ID NO: 1332240 - DNA, 15 bp, Homo sapiens
agaaattgtgcactg

SEQ ID NO: 1332241 - DNA, 15 bp, Homo sapiens
aagaaattgtgcact

SEQ ID NO: 1332242 - DNA, 15 bp, Homo sapiens
aaagaaattgtgcac

SEQ ID NO: 1332243 - DNA, 15 bp, Homo sapiens
gaaagaaattgtgca

SEQ ID NO: 1332244 - DNA, 15 bp, Homo sapiens
ggaaagaaattgtgc

SEQ ID NO: 1332245 - DNA, 15 bp, Homo sapiens
tggaaagaaattgtg

SEQ ID NO: 1332246 - DNA, 15 bp, Homo sapiens
gtggaaagaaattgt

SEQ ID NO: 1332247 - DNA, 15 bp, Homo sapiens
agtggaaagaaattg

SEQ ID NO: 1332248 - DNA, 15 bp, Homo sapiens
aagtggaaagaaatt

SEQ ID NO: 1332249 - DNA, 15 bp, Homo sapiens
gaagtggaaagaaat

SEQ ID NO: 1332250 - DNA, 15 bp, Homo sapiens
agaagtggaaagaaa

SEQ ID NO: 1332251 - DNA, 15 bp, Homo sapiens
tagaagtggaaagaa

SEQ ID NO: 1332252 - DNA, 15 bp, Homo sapiens
atagaagtggaaaga

SEQ ID NO: 1332253 - DNA, 15 bp, Homo sapiens
tatagaagtggaaag

SEQ ID NO: 1332254 - DNA, 15 bp, Homo sapiens
ctatagaagtggaaa

SEQ ID NO: 1332255 - DNA, 15 bp, Homo sapiens
gctatagaagtggaa

SEQ ID NO: 1332256 - DNA, 15 bp, Homo sapiens
ggctatagaagtgga

SEQ ID NO: 1332257 - DNA, 15 bp, Homo sapiens
gggctatagaagtgg

SEQ ID NO: 1332258 - DNA, 15 bp, Homo sapiens
ggggctatagaagtg

SEQ ID NO: 1332259 - DNA, 15 bp, Homo sapiens
aggggctatagaagt

SEQ ID NO: 1332260 - DNA, 15 bp, Homo sapiens
gaggggctatagaag

SEQ ID NO: 1332261 - DNA, 15 bp, Homo sapiens
agaggggctatagaa

SEQ ID NO: 1332262 - DNA, 15 bp, Homo sapiens
aagaggggctataga

SEQ ID NO: 1332263 - DNA, 15 bp, Homo sapiens
caagaggggctatag

SEQ ID NO: 1332264 - DNA, 15 bp, Homo sapiens
acaagaggggctata

SEQ ID NO: 1332265 - DNA, 15 bp, Homo sapiens
gacaagaggggctat

SEQ ID NO: 1332266 - DNA, 15 bp, Homo sapiens
cgacaagaggggcta

SEQ ID NO: 1332267 - DNA, 15 bp, Homo sapiens
gcgacaagaggggct

SEQ ID NO: 1332268 - DNA, 15 bp, Homo sapiens
agcgacaagaggggc

SEQ ID NO: 1332269 - DNA, 15 bp, Homo sapiens
aagcgacaagagggg

SEQ ID NO: 1332270 - DNA, 15 bp, Homo sapiens
aaagcgacaagaggg

SEQ ID NO: 1332271 - DNA, 15 bp, Homo sapiens
aaaagcgacaagagg

SEQ ID NO: 1332272 - DNA, 15 bp, Homo sapiens
aaaaagcgacaagag

SEQ ID NO: 1332273 - DNA, 15 bp, Homo sapiens
caaaaagcgacaaga

SEQ ID NO: 1332274 - DNA, 15 bp, Homo sapiens
ccaaaaagcgacaag

SEQ ID NO: 1332275 - DNA, 15 bp, Homo sapiens
cccaaaaagcgacaa

SEQ ID NO: 1332276 - DNA, 15 bp, Homo sapiens
ccccaaaaagcgaca

SEQ ID NO: 1332277 - DNA, 15 bp, Homo sapiens
gccccaaaaagcgac

SEQ ID NO: 1332278 - DNA, 15 bp, Homo sapiens
ggccccaaaaagcga

SEQ ID NO: 1332279 - DNA, 15 bp, Homo sapiens
tggccccaaaaagcg

SEQ ID NO: 1332280 - DNA, 15 bp, Homo sapiens
ctggccccaaaaagc

SEQ ID NO: 1332281 - DNA, 15 bp, Homo sapiens
cctggccccaaaaag

SEQ ID NO: 1332282 - DNA, 15 bp, Homo sapiens
tcctggccccaaaaa

SEQ ID NO: 1332283 - DNA, 15 bp, Homo sapiens
gtcctggccccaaaa

SEQ ID NO: 1332284 - DNA, 15 bp, Homo sapiens
agtcctggccccaaa

SEQ ID NO: 1332285 - DNA, 15 bp, Homo sapiens
aagtcctggccccaa

SEQ ID NO: 1332286 - DNA, 15 bp, Homo sapiens
aaagtcctggcccca

SEQ ID NO: 1332287 - DNA, 15 bp, Homo sapiens
taaagtcctggcccc

SEQ ID NO: 1332288 - DNA, 15 bp, Homo sapiens
ctaaagtcctggccc

SEQ ID NO: 1332289 - DNA, 15 bp, Homo sapiens
tctaaagtcctggcc

SEQ ID NO: 1332290 - DNA, 15 bp, Homo sapiens
atctaaagtcctggc

SEQ ID NO: 1332291 - DNA, 15 bp, Homo sapiens
catctaaagtcctgg

SEQ ID NO: 1332292 - DNA, 15 bp, Homo sapiens
tcatctaaagtcctg

SEQ ID NO: 1332293 - DNA, 15 bp, Homo sapiens
gtcatctaaagtcct

SEQ ID NO: 1332294 - DNA, 15 bp, Homo sapiens
tgtcatctaaagtcc

SEQ ID NO: 1332295 - DNA, 15 bp, Homo sapiens
ttgtcatctaaagtc

SEQ ID NO: 1332296 - DNA, 15 bp, Homo sapiens
tttgtcatctaaagt

SEQ ID NO: 1332297 - DNA, 15 bp, Homo sapiens
gtttgtcatctaaag

SEQ ID NO: 1332298 - DNA, 15 bp, Homo sapiens
tgtttgtcatctaaa

SEQ ID NO: 1332299 - DNA, 15 bp, Homo sapiens
atgtttgtcatctaa

SEQ ID NO: 1332300 - DNA, 15 bp, Homo sapiens
aatgtttgtcatcta

SEQ ID NO: 1332301 - DNA, 15 bp, Homo sapiens
aaatgtttgtcatct

SEQ ID NO: 1332302 - DNA, 15 bp, Homo sapiens
gaaatgtttgtcatc

SEQ ID NO: 1332303 - DNA, 15 bp, Homo sapiens
agaaatgtttgtcat

SEQ ID NO: 1332304 - DNA, 15 bp, Homo sapiens
aagaaatgtttgtca

SEQ ID NO: 1332305 - DNA, 15 bp, Homo sapiens
aaagaaatgtttgtc

SEQ ID NO: 1332306 - DNA, 15 bp, Homo sapiens
aaaagaaatgtttgt

SEQ ID NO: 1332307 - DNA, 15 bp, Homo sapiens
aaaaagaaatgtttg

SEQ ID NO: 1332308 - DNA, 15 bp, Homo sapiens
aaaaaagaaatgttt

SEQ ID NO: 1332309 - DNA, 15 bp, Homo sapiens
caaaaaaaagaaatg

SEQ ID NO: 1332310 - DNA, 15 bp, Homo sapiens
tcaaaaaaaagaaat

SEQ ID NO: 1332311 - DNA, 15 bp, Homo sapiens
cgagcgagactccat

SEQ ID NO: 1332312 - DNA, 15 bp, Homo sapiens
ccgagcgagactcca

SEQ ID NO: 1332313 - DNA, 15 bp, Homo sapiens
accgagcgagactcc

SEQ ID NO: 1332314 - DNA, 15 bp, Homo sapiens
gaccgagcgagactc

SEQ ID NO: 1332315 - DNA, 15 bp, Homo sapiens
agaccgagcgagact

SEQ ID NO: 1332316 - DNA, 15 bp, Homo sapiens
gagaccgagcgagac

SEQ ID NO: 1332317 - DNA, 15 bp, Homo sapiens
ggagaccgagcgaga

SEQ ID NO: 1332318 - DNA, 15 bp, Homo sapiens
tggagaccgagcgag

SEQ ID NO: 1332319 - DNA, 15 bp, Homo sapiens
ctggagaccgagcga

SEQ ID NO: 1332320 - DNA, 15 bp, Homo sapiens
cctggagaccgagcg

SEQ ID NO: 1332321 - DNA, 15 bp, Homo sapiens
gcctggagaccgagc

SEQ ID NO: 1332322 - DNA, 15 bp, Homo sapiens
agcctggagaccgag

SEQ ID NO: 1332323 - DNA, 15 bp, Homo sapiens
cagcctggagaccga

SEQ ID NO: 1332324 - DNA, 15 bp, Homo sapiens
ccagcctggagaccg

SEQ ID NO: 1332325 - DNA, 15 bp, Homo sapiens
tccagcctggagacc

SEQ ID NO: 1332326 - DNA, 15 bp, Homo sapiens
ctccagcctggagac

SEQ ID NO: 1332327 - DNA, 15 bp, Homo sapiens
actccagcctggaga

SEQ ID NO: 1332328 - DNA, 15 bp, Homo sapiens
cactccagcctggag

SEQ ID NO: 1332329 - DNA, 15 bp, Homo sapiens
gagtgagccgagatc

SEQ ID NO: 1332330 - DNA, 15 bp, Homo sapiens
ggagtgagccgagat

SEQ ID NO: 1332331 - DNA, 15 bp, Homo sapiens
tggagtgagccgaga

SEQ ID NO: 1332332 - DNA, 15 bp, Homo sapiens
ttggagtgagccgag

SEQ ID NO: 1332333 - DNA, 15 bp, Homo sapiens
cttggagtgagccga

SEQ ID NO: 1332334 - DNA, 15 bp, Homo sapiens
gcttggagtgagccg

SEQ ID NO: 1332335 - DNA, 15 bp, Homo sapiens
agcttggagtgagcc

SEQ ID NO: 1332336 - DNA, 15 bp, Homo sapiens
gagcttggagtgagc

SEQ ID NO: 1332337 - DNA, 15 bp, Homo sapiens
ggagcttggagtgag

SEQ ID NO: 1332338 - DNA, 15 bp, Homo sapiens
cggagcttggagtga

SEQ ID NO: 1332339 - DNA, 15 bp, Homo sapiens
gcggagcttggagtg

SEQ ID NO: 1332340 - DNA, 15 bp, Homo sapiens
ggcggagcttggagt

SEQ ID NO: 1332341 - DNA, 15 bp, Homo sapiens
aggcggagcttggag

SEQ ID NO: 1332342 - DNA, 15 bp, Homo sapiens
gaggcggagcttgga

SEQ ID NO: 1332343 - DNA, 15 bp, Homo sapiens
ggaggcggagcttgg

SEQ ID NO: 1332344 - DNA, 15 bp, Homo sapiens
ttggtggtgggcacc

SEQ ID NO: 1332345 - DNA, 15 bp, Homo sapiens
cttggtggtgggcac

SEQ ID NO: 1332346 - DNA, 15 bp, Homo sapiens
gcttggtggtgggca

SEQ ID NO: 1332347 - DNA, 15 bp, Homo sapiens
tagccgggcttggtg

SEQ ID NO: 1332348 - DNA, 15 bp, Homo sapiens
ttagccgggcttggt

SEQ ID NO: 1332349 - DNA, 15 bp, Homo sapiens
tttagccgggcttgg

SEQ ID NO: 1332350 - DNA, 15 bp, Homo sapiens
atttagccgggcttg

SEQ ID NO: 1332351 - DNA, 15 bp, Homo sapiens
aatttagccgggctt

SEQ ID NO: 1332352 - DNA, 15 bp, Homo sapiens
aaatttagccgggct

SEQ ID NO: 1332353 - DNA, 15 bp, Homo sapiens
aaaatttagccgggc

SEQ ID NO: 1332354 - DNA, 15 bp, Homo sapiens
aaaaatttagccggg

SEQ ID NO: 1332355 - DNA, 15 bp, Homo sapiens
caaaaatttagccgg

SEQ ID NO: 1332356 - DNA, 15 bp, Homo sapiens
acaaaaatttagccg

SEQ ID NO: 1332357 - DNA, 15 bp, Homo sapiens
cacaaaaatttagcc

SEQ ID NO: 1332358 - DNA, 15 bp, Homo sapiens
acacaaaaatttagc

SEQ ID NO: 1332359 - DNA, 15 bp, Homo sapiens
cacacaaaaatttag

SEQ ID NO: 1332360 - DNA, 15 bp, Homo sapiens
acacacaaaaattta

SEQ ID NO: 1332361 - DNA, 15 bp, Homo sapiens
cacacacaaaaattt

SEQ ID NO: 1332362 - DNA, 15 bp, Homo sapiens
acacacacaaaaatt

SEQ ID NO: 1332363 - DNA, 15 bp, Homo sapiens
aacacacacaaaaat

SEQ ID NO: 1332364 - DNA, 15 bp, Homo sapiens
ataaataacacacac

SEQ ID NO: 1332365 - DNA, 15 bp, Homo sapiens
aataaataacacaca

SEQ ID NO: 1332366 - DNA, 15 bp, Homo sapiens
aaataaataacacac

SEQ ID NO: 1332367 - DNA, 15 bp, Homo sapiens
aaaataaataacaca

SEQ ID NO: 1332368 - DNA, 15 bp, Homo sapiens
aaaaataaataacac

SEQ ID NO: 1332369 - DNA, 15 bp, Homo sapiens
aaaaaataaataaca

SEQ ID NO: 1332370 - DNA, 15 bp, Homo sapiens
tacacggtgaaaccc

SEQ ID NO: 1332371 - DNA, 15 bp, Homo sapiens
ttacacggtgaaacc

SEQ ID NO: 1332372 - DNA, 15 bp, Homo sapiens
cttacacggtgaaac

SEQ ID NO: 1332373 - DNA, 15 bp, Homo sapiens
gcttacacggtgaaa

SEQ ID NO: 1332374 - DNA, 15 bp, Homo sapiens
ggcttacacggtgaa

SEQ ID NO: 1332375 - DNA, 15 bp, Homo sapiens
tggcttacacggtga

SEQ ID NO: 1332376 - DNA, 15 bp, Homo sapiens
ctggcttacacggtg

SEQ ID NO: 1332377 - DNA, 15 bp, Homo sapiens
cctggcttacacggt

SEQ ID NO: 1332378 - DNA, 15 bp, Homo sapiens
tcctggcttacacgg

SEQ ID NO: 1332379 - DNA, 15 bp, Homo sapiens
atcctggcttacacg

SEQ ID NO: 1332380 - DNA, 15 bp, Homo sapiens
catcctggcttacac

SEQ ID NO: 1332381 - DNA, 15 bp, Homo sapiens
ccatcctggcttaca

SEQ ID NO: 1332382 - DNA, 15 bp, Homo sapiens
accatcctggcttac

SEQ ID NO: 1332383 - DNA, 15 bp, Homo sapiens
gaccatcctggctta

SEQ ID NO: 1332384 - DNA, 15 bp, Homo sapiens
agaccatcctggctt

SEQ ID NO: 1332385 - DNA, 15 bp, Homo sapiens
aaaatcgagaccatc

SEQ ID NO: 1332386 - DNA, 15 bp, Homo sapiens
gaaaatcgagaccat

SEQ ID NO: 1332387 - DNA, 15 bp, Homo sapiens
agaaaatcgagacca

SEQ ID NO: 1332388 - DNA, 15 bp, Homo sapiens
cagaaaatcgagacc

SEQ ID NO: 1332389 - DNA, 15 bp, Homo sapiens
tcagaaaatcgagac

SEQ ID NO: 1332390 - DNA, 15 bp, Homo sapiens
gtcagaaaatcgaga

SEQ ID NO: 1332391 - DNA, 15 bp, Homo sapiens
ggtcagaaaatcgag

SEQ ID NO: 1332392 - DNA, 15 bp, Homo sapiens
aggtcagaaaatcga

SEQ ID NO: 1332393 - DNA, 15 bp, Homo sapiens
gaggtcagaaaatcg

SEQ ID NO: 1332394 - DNA, 15 bp, Homo sapiens
tgaggtcagaaaatc

SEQ ID NO: 1332395 - DNA, 15 bp, Homo sapiens
atgaggtcagaaaat

SEQ ID NO: 1332396 - DNA, 15 bp, Homo sapiens
catgaggtcagaaaa

SEQ ID NO: 1332397 - DNA, 15 bp, Homo sapiens
tcatgaggtcagaaa

SEQ ID NO: 1332398 - DNA, 15 bp, Homo sapiens
atcatgaggtcagaa

SEQ ID NO: 1332399 - DNA, 15 bp, Homo sapiens
gatcatgaggtcaga

SEQ ID NO: 1332400 - DNA, 15 bp, Homo sapiens
agcggatcatgaggt

SEQ ID NO: 1332401 - DNA, 15 bp, Homo sapiens
gagcggatcatgagg

SEQ ID NO: 1332402 - DNA, 15 bp, Homo sapiens
cgagcggatcatgag

SEQ ID NO: 1332403 - DNA, 15 bp, Homo sapiens
gcgagcggatcatga

SEQ ID NO: 1332404 - DNA, 15 bp, Homo sapiens
ggcgagcggatcatg

SEQ ID NO: 1332405 - DNA, 15 bp, Homo sapiens
aggcgagcggatcat

SEQ ID NO: 1332406 - DNA, 15 bp, Homo sapiens
gaggcgagcggatca

SEQ ID NO: 1332407 - DNA, 15 bp, Homo sapiens
tgaggcgagcggatc

SEQ ID NO: 1332408 - DNA, 15 bp, Homo sapiens
ctgaggcgagcggat

SEQ ID NO: 1332409 - DNA, 15 bp, Homo sapiens
gctgaggcgagcgga

SEQ ID NO: 1332410 - DNA, 15 bp, Homo sapiens
ggctgaggcgagcgg

SEQ ID NO: 1332411 - DNA, 15 bp, Homo sapiens
aggctgaggcgagcg

SEQ ID NO: 1332412 - DNA, 15 bp, Homo sapiens
gaggctgaggcgagc

SEQ ID NO: 1332413 - DNA, 15 bp, Homo sapiens
ggaggctgaggcgag

SEQ ID NO: 1332414 - DNA, 15 bp, Homo sapiens
gggaggctgaggcga

SEQ ID NO: 1332415 - DNA, 15 bp, Homo sapiens
aggccgggcacggtg

SEQ ID NO: 1332416 - DNA, 15 bp, Homo sapiens
aaggccgggcacggt

SEQ ID NO: 1332417 - DNA, 15 bp, Homo sapiens
caaggccgggcacgg

SEQ ID NO: 1332418 - DNA, 15 bp, Homo sapiens
tcaaggccgggcacg

SEQ ID NO: 1332419 - DNA, 15 bp, Homo sapiens
atcaaggccgggcac

SEQ ID NO: 1332420 - DNA, 15 bp, Homo sapiens
catcaaggccgggca

SEQ ID NO: 1332421 - DNA, 15 bp, Homo sapiens
tcatcaaggccgggc

SEQ ID NO: 1332422 - DNA, 15 bp, Homo sapiens
gtcatcaaggccggg

SEQ ID NO: 1332423 - DNA, 15 bp, Homo sapiens
tgtcatcaaggccgg

SEQ ID NO: 1332424 - DNA, 15 bp, Homo sapiens
ttgtcatcaaggccg

SEQ ID NO: 1332425 - DNA, 15 bp, Homo sapiens
tttgtcatcaaggcc

SEQ ID NO: 1332426 - DNA, 15 bp, Homo sapiens
gtttgtcatcaaggc

SEQ ID NO: 1332427 - DNA, 15 bp, Homo sapiens
tgtttgtcatcaagg

SEQ ID NO: 1332428 - DNA, 15 bp, Homo sapiens
atgtttgtcatcaag

SEQ ID NO: 1332429 - DNA, 15 bp, Homo sapiens
aatgtttgtcatcaa

SEQ ID NO: 1332430 - DNA, 15 bp, Homo sapiens
aaatgtttgtcatca

SEQ ID NO: 1332431 - DNA, 15 bp, Homo sapiens
tagaaatgtttgtca

SEQ ID NO: 1332432 - DNA, 15 bp, Homo sapiens
ctagaaatgtttgtc

SEQ ID NO: 1332433 - DNA, 15 bp, Homo sapiens
actagaaatgtttgt

SEQ ID NO: 1332434 - DNA, 15 bp, Homo sapiens
tactagaaatgtttg

SEQ ID NO: 1332435 - DNA, 15 bp, Homo sapiens
ctactagaaatgttt

SEQ ID NO: 1332436 - DNA, 15 bp, Homo sapiens
actactagaaatgtt

SEQ ID NO: 1332437 - DNA, 15 bp, Homo sapiens
aactactagaaatgt

SEQ ID NO: 1332438 - DNA, 15 bp, Homo sapiens
taactactagaaatg

SEQ ID NO: 1332439 - DNA, 15 bp, Homo sapiens
ataactactagaaat

SEQ ID NO: 1332440 - DNA, 15 bp, Homo sapiens
cataactactagaaa

SEQ ID NO: 1332441 - DNA, 15 bp, Homo sapiens
tcataactactagaa

SEQ ID NO: 1332442 - DNA, 15 bp, Homo sapiens
ttcataactactaga

SEQ ID NO: 1332443 - DNA, 15 bp, Homo sapiens
tttcataactactag

SEQ ID NO: 1332444 - DNA, 15 bp, Homo sapiens
ttttcataactacta

SEQ ID NO: 1332445 - DNA, 15 bp, Homo sapiens
tttttcataactact

SEQ ID NO: 1332446 - DNA, 15 bp, Homo sapiens
ctttttcataactac

SEQ ID NO: 1332447 - DNA, 15 bp, Homo sapiens
actttttcataacta

SEQ ID NO: 1332448 - DNA, 15 bp, Homo sapiens
gactttttcataact

SEQ ID NO: 1332449 - DNA, 15 bp, Homo sapiens
ggactttttcataac

SEQ ID NO: 1332450 - DNA, 15 bp, Homo sapiens
aggactttttcataa

SEQ ID NO: 1332451 - DNA, 15 bp, Homo sapiens
gaggactttttcata

SEQ ID NO: 1332452 - DNA, 15 bp, Homo sapiens
tgaggactttttcat

SEQ ID NO: 1332453 - DNA, 15 bp, Homo sapiens
ctgaggactttttca

SEQ ID NO: 1332454 - DNA, 15 bp, Homo sapiens
tctgaggactttttc

SEQ ID NO: 1332455 - DNA, 15 bp, Homo sapiens
ttctgaggacttttt

SEQ ID NO: 1332456 - DNA, 15 bp, Homo sapiens
tttctgaggactttt

SEQ ID NO: 1332457 - DNA, 15 bp, Homo sapiens
ttttctgaggacttt

SEQ ID NO: 1332458 - DNA, 15 bp, Homo sapiens
gttttctgaggactt

SEQ ID NO: 1332459 - DNA, 15 bp, Homo sapiens
ggttttctgaggact

SEQ ID NO: 1332460 - DNA, 15 bp, Homo sapiens
tggttttctgaggac

SEQ ID NO: 1332461 - DNA, 15 bp, Homo sapiens
ttggttttctgagga

SEQ ID NO: 1332462 - DNA, 15 bp, Homo sapiens
attggttttctgagg

SEQ ID NO: 1332463 - DNA, 15 bp, Homo sapiens
tattggttttctgag

SEQ ID NO: 1332464 - DNA, 15 bp, Homo sapiens
ctattggttttctga

SEQ ID NO: 1332465 - DNA, 15 bp, Homo sapiens
tctattggttttctg

SEQ ID NO: 1332466 - DNA, 15 bp, Homo sapiens
ttctattggttttct

SEQ ID NO: 1332467 - DNA, 15 bp, Homo sapiens
cttctattggttttc

SEQ ID NO: 1332468 - DNA, 15 bp, Homo sapiens
ccttctattggtttt

SEQ ID NO: 1332469 - DNA, 15 bp, Homo sapiens
gccttctattggttt

SEQ ID NO: 1332470 - DNA, 15 bp, Homo sapiens
ggccttctattggtt

SEQ ID NO: 1332471 - DNA, 15 bp, Homo sapiens
tggccttctattggt

SEQ ID NO: 1332472 - DNA, 15 bp, Homo sapiens
ctggccttctattgg

SEQ ID NO: 1332473 - DNA, 15 bp, Homo sapiens
cctggccttctattg

SEQ ID NO: 1332474 - DNA, 15 bp, Homo sapiens
acctggccttctatt

SEQ ID NO: 1332475 - DNA, 15 bp, Homo sapiens
cacctggccttctat

SEQ ID NO: 1332476 - DNA, 15 bp, Homo sapiens
gcacctggccttcta

SEQ ID NO: 1332477 - DNA, 15 bp, Homo sapiens
cgcacctggccttct

SEQ ID NO: 1332478 - DNA, 15 bp, Homo sapiens
ccgcacctggccttc

SEQ ID NO: 1332479 - DNA, 15 bp, Homo sapiens
accgcacctggcctt

SEQ ID NO: 1332480 - DNA, 15 bp, Homo sapiens
caccgcacctggcct

SEQ ID NO: 1332481 - DNA, 15 bp, Homo sapiens
gccctcccaaagtgc

SEQ ID NO: 1332482 - DNA, 15 bp, Homo sapiens
cgccctcccaaagtg

SEQ ID NO: 1332483 - DNA, 15 bp, Homo sapiens
tcgccctcccaaagt

SEQ ID NO: 1332484 - DNA, 15 bp, Homo sapiens
ctcgccctcccaaag

SEQ ID NO: 1332485 - DNA, 15 bp, Homo sapiens
cctcgccctcccaaa

SEQ ID NO: 1332486 - DNA, 15 bp, Homo sapiens
gcctcgccctcccaa

SEQ ID NO: 1332487 - DNA, 15 bp, Homo sapiens
cgcctcgccctccca

SEQ ID NO: 1332488 - DNA, 15 bp, Homo sapiens
ccgcctcgccctccc

SEQ ID NO: 1332489 - DNA, 15 bp, Homo sapiens
cccgcctcgccctcc

SEQ ID NO: 1332490 - DNA, 15 bp, Homo sapiens
acccgcctcgccctc

SEQ ID NO: 1332491 - DNA, 15 bp, Homo sapiens
cacccgcctcgccct

SEQ ID NO: 1332492 - DNA, 15 bp, Homo sapiens
ccacccgcctcgccc

SEQ ID NO: 1332493 - DNA, 15 bp, Homo sapiens
tccacccgcctcgcc

SEQ ID NO: 1332494 - DNA, 15 bp, Homo sapiens
atccacccgcctcgc

SEQ ID NO: 1332495 - DNA, 15 bp, Homo sapiens
ggatccacccgcctc

SEQ ID NO: 1332496 - DNA, 15 bp, Homo sapiens
tggatccacccgcct

SEQ ID NO: 1332497 - DNA, 15 bp, Homo sapiens
atggatccacccgcc

SEQ ID NO: 1332498 - DNA, 15 bp, Homo sapiens
catggatccacccgc

SEQ ID NO: 1332499 - DNA, 15 bp, Homo sapiens
tcatggatccacccg

SEQ ID NO: 1332500 - DNA, 15 bp, Homo sapiens
ctcatggatccaccc

SEQ ID NO: 1332501 - DNA, 15 bp, Homo sapiens
cctcatggatccacc

SEQ ID NO: 1332502 - DNA, 15 bp, Homo sapiens
acctcatggatccac

SEQ ID NO: 1332503 - DNA, 15 bp, Homo sapiens
gacctcatggatcca

SEQ ID NO: 1332504 - DNA, 15 bp, Homo sapiens
tgacctcatggatcc

SEQ ID NO: 1332505 - DNA, 15 bp, Homo sapiens
ctgacctcatggatc

SEQ ID NO: 1332506 - DNA, 15 bp, Homo sapiens
cctgacctcatggat

SEQ ID NO: 1332507 - DNA, 15 bp, Homo sapiens
tcctgacctcatgga

SEQ ID NO: 1332508 - DNA, 15 bp, Homo sapiens
ctcctgacctcatgg

SEQ ID NO: 1332509 - DNA, 15 bp, Homo sapiens
ccaccaccatgcccg

SEQ ID NO: 1332510 - DNA, 15 bp, Homo sapiens
gccaccaccatgccc

SEQ ID NO: 1332511 - DNA, 15 bp, Homo sapiens
cgccaccaccatgcc

SEQ ID NO: 1332512 - DNA, 15 bp, Homo sapiens
ccgccaccaccatgc

SEQ ID NO: 1332513 - DNA, 15 bp, Homo sapiens
cccgccaccaccatg

SEQ ID NO: 1332514 - DNA, 15 bp, Homo sapiens
gcccgccaccaccat

SEQ ID NO: 1332515 - DNA, 15 bp, Homo sapiens
cgcccgccaccacca

SEQ ID NO: 1332516 - DNA, 15 bp, Homo sapiens
gtgagactacaggcg

SEQ ID NO: 1332517 - DNA, 15 bp, Homo sapiens
ggtgagactacaggc

SEQ ID NO: 1332518 - DNA, 15 bp, Homo sapiens
aggtgagactacagg

SEQ ID NO: 1332519 - DNA, 15 bp, Homo sapiens
taggtgagactacag

SEQ ID NO: 1332520 - DNA, 15 bp, Homo sapiens
gtaggtgagactaca

SEQ ID NO: 1332521 - DNA, 15 bp, Homo sapiens
agtaggtgagactac

SEQ ID NO: 1332522 - DNA, 15 bp, Homo sapiens
gagtaggtgagacta

SEQ ID NO: 1332523 - DNA, 15 bp, Homo sapiens
cgagtaggtgagact

SEQ ID NO: 1332524 - DNA, 15 bp, Homo sapiens
ccgagtaggtgagac

SEQ ID NO: 1332525 - DNA, 15 bp, Homo sapiens
cccgagtaggtgaga

SEQ ID NO: 1332526 - DNA, 15 bp, Homo sapiens
tcccgagtaggtgag

SEQ ID NO: 1332527 - DNA, 15 bp, Homo sapiens
ctcccgagtaggtga

SEQ ID NO: 1332528 - DNA, 15 bp, Homo sapiens
cctcccgagtaggtg

SEQ ID NO: 1332529 - DNA, 15 bp, Homo sapiens
gcctcccgagtaggt

SEQ ID NO: 1332530 - DNA, 15 bp, Homo sapiens
agcctcccgagtagg

SEQ ID NO: 1332531 - DNA, 15 bp, Homo sapiens
atgtcacccaggctg

SEQ ID NO: 1332532 - DNA, 15 bp, Homo sapiens
catgtcacccaggct

SEQ ID NO: 1332533 - DNA, 15 bp, Homo sapiens
tcatgtcacccaggc

SEQ ID NO: 1332534 - DNA, 15 bp, Homo sapiens
ctcatgtcacccagg

SEQ ID NO: 1332535 - DNA, 15 bp, Homo sapiens
tctcatgtcacccag

SEQ ID NO: 1332536 - DNA, 15 bp, Homo sapiens
ctctcatgtcaccca

SEQ ID NO: 1332537 - DNA, 15 bp, Homo sapiens
tctctcatgtcaccc

SEQ ID NO: 1332538 - DNA, 15 bp, Homo sapiens
ctctctcatgtcacc

SEQ ID NO: 1332539 - DNA, 15 bp, Homo sapiens
tctctctcatgtcac

SEQ ID NO: 1332540 - DNA, 15 bp, Homo sapiens
gtctctctcatgtca

SEQ ID NO: 1332541 - DNA, 15 bp, Homo sapiens
agtctctctcatgtc

SEQ ID NO: 1332542 - DNA, 15 bp, Homo sapiens
gagtctctctcatgt

SEQ ID NO: 1332543 - DNA, 15 bp, Homo sapiens
agagtctctctcatg

SEQ ID NO: 1332544 - DNA, 15 bp, Homo sapiens
cagagtctctctcat

SEQ ID NO: 1332545 - DNA, 15 bp, Homo sapiens
acagagtctctctca

SEQ ID NO: 1332546 - DNA, 15 bp, Homo sapiens
gtgagacagagtctc

SEQ ID NO: 1332547 - DNA, 15 bp, Homo sapiens
tgtgagacagagtct

SEQ ID NO: 1332548 - DNA, 15 bp, Homo sapiens
ttgtgagacagagtc

SEQ ID NO: 1332549 - DNA, 15 bp, Homo sapiens
tttgtgagacagagt

SEQ ID NO: 1332550 - DNA, 15 bp, Homo sapiens
ttttgtgagacagag

SEQ ID NO: 1332551 - DNA, 15 bp, Homo sapiens
cttttgtgagacaga

SEQ ID NO: 1332552 - DNA, 15 bp, Homo sapiens
tcttttgtgagacag

SEQ ID NO: 1332553 - DNA, 15 bp, Homo sapiens
ttcttttgtgagaca

SEQ ID NO: 1332554 - DNA, 15 bp, Homo sapiens
tttcttttgtgagac

SEQ ID NO: 1332555 - DNA, 15 bp, Homo sapiens
ttttcttttgtgaga

SEQ ID NO: 1332556 - DNA, 15 bp, Homo sapiens
tttttcttttgtgag

SEQ ID NO: 1332557 - DNA, 15 bp, Homo sapiens
ctttttcttttgtga

SEQ ID NO: 1332558 - DNA, 15 bp, Homo sapiens
tctttttcttttgtg

SEQ ID NO: 1332559 - DNA, 15 bp, Homo sapiens
gttttcttttttttt

SEQ ID NO: 1332560 - DNA, 15 bp, Homo sapiens
ttggttttctttttt

SEQ ID NO: 1332561 - DNA, 15 bp, Homo sapiens
attggttttcttttt

SEQ ID NO: 1332562 - DNA, 15 bp, Homo sapiens
tattggttttctttt

SEQ ID NO: 1332563 - DNA, 15 bp, Homo sapiens
ctattggttttcttt

SEQ ID NO: 1332564 - DNA, 15 bp, Homo sapiens
tctattggttttctt

SEQ ID NO: 1332565 - DNA, 15 bp, Homo sapiens
tttctattggttttc

SEQ ID NO: 1332566 - DNA, 15 bp, Homo sapiens
ctttctattggtttt

SEQ ID NO: 1332567 - DNA, 15 bp, Homo sapiens
cctttctattggttt

SEQ ID NO: 1332568 - DNA, 15 bp, Homo sapiens
gcctttctattggtt

SEQ ID NO: 1332569 - DNA, 15 bp, Homo sapiens
agcctttctattggt

SEQ ID NO: 1332570 - DNA, 15 bp, Homo sapiens
cagcctttctattgg

SEQ ID NO: 1332571 - DNA, 15 bp, Homo sapiens
ccagcctttctattg

SEQ ID NO: 1332572 - DNA, 15 bp, Homo sapiens
cccagcctttctatt

SEQ ID NO: 1332573 - DNA, 15 bp, Homo sapiens
gcccagcctttctat

SEQ ID NO: 1332574 - DNA, 15 bp, Homo sapiens
cgcccagcctttcta

SEQ ID NO: 1332575 - DNA, 15 bp, Homo sapiens
acgcccagcctttct

SEQ ID NO: 1332576 - DNA, 15 bp, Homo sapiens
cacgcccagcctttc

SEQ ID NO: 1332577 - DNA, 15 bp, Homo sapiens
ccacgcccagccttt

SEQ ID NO: 1332578 - DNA, 15 bp, Homo sapiens
gttgaactcctgacc

SEQ ID NO: 1332579 - DNA, 15 bp, Homo sapiens
agagacgggttttca

SEQ ID NO: 1332580 - DNA, 15 bp, Homo sapiens
tagagacgggttttc

SEQ ID NO: 1332581 - DNA, 15 bp, Homo sapiens
gtagagacgggtttt

SEQ ID NO: 1332582 - DNA, 15 bp, Homo sapiens
gtaatttttgtattt

SEQ ID NO: 1332583 - DNA, 15 bp, Homo sapiens
ggtaatttttgtatt

SEQ ID NO: 1332584 - DNA, 15 bp, Homo sapiens
gggtaatttttgtat

SEQ ID NO: 1332585 - DNA, 15 bp, Homo sapiens
cgggtaatttttgta

SEQ ID NO: 1332586 - DNA, 15 bp, Homo sapiens
ccgggtaatttttgt

SEQ ID NO: 1332587 - DNA, 15 bp, Homo sapiens
cccgggtaatttttg

SEQ ID NO: 1332588 - DNA, 15 bp, Homo sapiens
gcccgggtaattttt

SEQ ID NO: 1332589 - DNA, 15 bp, Homo sapiens
tgcccgggtaatttt

SEQ ID NO: 1332590 - DNA, 15 bp, Homo sapiens
atgcccgggtaattt

SEQ ID NO: 1332591 - DNA, 15 bp, Homo sapiens
catgcccgggtaatt

SEQ ID NO: 1332592 - DNA, 15 bp, Homo sapiens
ccatgcccgggtaat

SEQ ID NO: 1332593 - DNA, 15 bp, Homo sapiens
accatgcccgggtaa

SEQ ID NO: 1332594 - DNA, 15 bp, Homo sapiens
caccatgcccgggta

SEQ ID NO: 1332595 - DNA, 15 bp, Homo sapiens
ccaccatgcccgggt

SEQ ID NO: 1332596 - DNA, 15 bp, Homo sapiens
accaccatgcccggg

SEQ ID NO: 1332597 - DNA, 15 bp, Homo sapiens
cgtgcaccaccatgc

SEQ ID NO: 1332598 - DNA, 15 bp, Homo sapiens
gcgtgcaccaccatg

SEQ ID NO: 1332599 - DNA, 15 bp, Homo sapiens
ggcgtgcaccaccat

SEQ ID NO: 1332600 - DNA, 15 bp, Homo sapiens
acaggcgtgcaccac

SEQ ID NO: 1332601 - DNA, 15 bp, Homo sapiens
tacaggcgtgcacca

SEQ ID NO: 1332602 - DNA, 15 bp, Homo sapiens
ctacaggcgtgcacc

SEQ ID NO: 1332603 - DNA, 15 bp, Homo sapiens
actacaggcgtgcac

SEQ ID NO: 1332604 - DNA, 15 bp, Homo sapiens
aactacaggcgtgca

SEQ ID NO: 1332605 - DNA, 15 bp, Homo sapiens
gaactacaggcgtgc

SEQ ID NO: 1332606 - DNA, 15 bp, Homo sapiens
cagttcaagcgattc

SEQ ID NO: 1332607 - DNA, 15 bp, Homo sapiens
ccagttcaagcgatt

SEQ ID NO: 1332608 - DNA, 15 bp, Homo sapiens
cccagttcaagcgat

SEQ ID NO: 1332609 - DNA, 15 bp, Homo sapiens
ccccagttcaagcga

SEQ ID NO: 1332610 - DNA, 15 bp, Homo sapiens
tccccagttcaagcg

SEQ ID NO: 1332611 - DNA, 15 bp, Homo sapiens
ctccccagttcaagc

SEQ ID NO: 1332612 - DNA, 15 bp, Homo sapiens
cctccccagttcaag

SEQ ID NO: 1332613 - DNA, 15 bp, Homo sapiens
acctccccagttcaa

SEQ ID NO: 1332614 - DNA, 15 bp, Homo sapiens
cacctccccagttca

SEQ ID NO: 1332615 - DNA, 15 bp, Homo sapiens
ccacctccccagttc

SEQ ID NO: 1332616 - DNA, 15 bp, Homo sapiens
tccacctccccagtt

SEQ ID NO: 1332617 - DNA, 15 bp, Homo sapiens
ctccacctccccagt

SEQ ID NO: 1332618 - DNA, 15 bp, Homo sapiens
cctccacctccccag

SEQ ID NO: 1332619 - DNA, 15 bp, Homo sapiens
acctccacctcccca

SEQ ID NO: 1332620 - DNA, 15 bp, Homo sapiens
aacctccacctcccc

SEQ ID NO: 1332621 - DNA, 15 bp, Homo sapiens
gctgcaacctccacc

SEQ ID NO: 1332622 - DNA, 15 bp, Homo sapiens
tgctgcaacctccac

SEQ ID NO: 1332623 - DNA, 15 bp, Homo sapiens
ttgctgcaacctcca

SEQ ID NO: 1332624 - DNA, 15 bp, Homo sapiens
cttgctgcaacctcc

SEQ ID NO: 1332625 - DNA, 15 bp, Homo sapiens
gcttgctgcaacctc

SEQ ID NO: 1332626 - DNA, 15 bp, Homo sapiens
agcttgctgcaacct

SEQ ID NO: 1332627 - DNA, 15 bp, Homo sapiens
cagcttgctgcaacc

SEQ ID NO: 1332628 - DNA, 15 bp, Homo sapiens
tcagcttgctgcaac

SEQ ID NO: 1332629 - DNA, 15 bp, Homo sapiens
ctcagcttgctgcaa

SEQ ID NO: 1332630 - DNA, 15 bp, Homo sapiens
tctcagcttgctgca

SEQ ID NO: 1332631 - DNA, 15 bp, Homo sapiens
atctcagcttgctgc

SEQ ID NO: 1332632 - DNA, 15 bp, Homo sapiens
gatctcagcttgctg

SEQ ID NO: 1332633 - DNA, 15 bp, Homo sapiens
cgatctcagcttgct

SEQ ID NO: 1332634 - DNA, 15 bp, Homo sapiens
tcgatctcagcttgc

SEQ ID NO: 1332635 - DNA, 15 bp, Homo sapiens
ctcgatctcagcttg

SEQ ID NO: 1332636 - DNA, 15 bp, Homo sapiens
gctcgatctcagctt

SEQ ID NO: 1332637 - DNA, 15 bp, Homo sapiens
agctcgatctcagct

SEQ ID NO: 1332638 - DNA, 15 bp, Homo sapiens
tagctcgatctcagc

SEQ ID NO: 1332639 - DNA, 15 bp, Homo sapiens
gtagctcgatctcag

SEQ ID NO: 1332640 - DNA, 15 bp, Homo sapiens
agtagctcgatctca

SEQ ID NO: 1332641 - DNA, 15 bp, Homo sapiens
cagtagctcgatctc

SEQ ID NO: 1332642 - DNA, 15 bp, Homo sapiens
gcagtagctcgatct

SEQ ID NO: 1332643 - DNA, 15 bp, Homo sapiens
tgcagtagctcgatc

SEQ ID NO: 1332644 - DNA, 15 bp, Homo sapiens
gtgcagtagctcgat

SEQ ID NO: 1332645 - DNA, 15 bp, Homo sapiens
agtgcagtagctcga

SEQ ID NO: 1332646 - DNA, 15 bp, Homo sapiens
gagtgcagtagctcg

SEQ ID NO: 1332647 - DNA, 15 bp, Homo sapiens
ggagtgcagtagctc

SEQ ID NO: 1332648 - DNA, 15 bp, Homo sapiens
tggagtgcagtagct

SEQ ID NO: 1332649 - DNA, 15 bp, Homo sapiens
tgctggagtgcagta

SEQ ID NO: 1332650 - DNA, 15 bp, Homo sapiens
atgctggagtgcagt

SEQ ID NO: 1332651 - DNA, 15 bp, Homo sapiens
catgctggagtgcag

SEQ ID NO: 1332652 - DNA, 15 bp, Homo sapiens
ccatgctggagtgca

SEQ ID NO: 1332653 - DNA, 15 bp, Homo sapiens
accatgctggagtgc

SEQ ID NO: 1332654 - DNA, 15 bp, Homo sapiens
caccatgctggagtg

SEQ ID NO: 1332655 - DNA, 15 bp, Homo sapiens
tcaccatgctggagt

SEQ ID NO: 1332656 - DNA, 15 bp, Homo sapiens
gtcaccatgctggag

SEQ ID NO: 1332657 - DNA, 15 bp, Homo sapiens
tgtcaccatgctgga

SEQ ID NO: 1332658 - DNA, 15 bp, Homo sapiens
ctgtcaccatgctgg

SEQ ID NO: 1332659 - DNA, 15 bp, Homo sapiens
tctgtcaccatgctg

SEQ ID NO: 1332660 - DNA, 15 bp, Homo sapiens
ctctgtcaccatgct

SEQ ID NO: 1332661 - DNA, 15 bp, Homo sapiens
actctgtcaccatgc

SEQ ID NO: 1332662 - DNA, 15 bp, Homo sapiens
cactctgtcaccatg

SEQ ID NO: 1332663 - DNA, 15 bp, Homo sapiens
tcactctgtcaccat

SEQ ID NO: 1332664 - DNA, 15 bp, Homo sapiens
ctcactctgtcacca

SEQ ID NO: 1332665 - DNA, 15 bp, Homo sapiens
ctgagacagagtctc

SEQ ID NO: 1332666 - DNA, 15 bp, Homo sapiens
tctgagacagagtct

SEQ ID NO: 1332667 - DNA, 15 bp, Homo sapiens
ttctgagacagagtc

SEQ ID NO: 1332668 - DNA, 15 bp, Homo sapiens
taccctgtctttttt

SEQ ID NO: 1332669 - DNA, 15 bp, Homo sapiens
ctaccctgtcttttt

SEQ ID NO: 1332670 - DNA, 15 bp, Homo sapiens
actaccctgtctttt

SEQ ID NO: 1332671 - DNA, 15 bp, Homo sapiens
tactaccctgtcttt

SEQ ID NO: 1332672 - DNA, 15 bp, Homo sapiens
gtactaccctgtctt

SEQ ID NO: 1332673 - DNA, 15 bp, Homo sapiens
agtactaccctgtct

SEQ ID NO: 1332674 - DNA, 15 bp, Homo sapiens
cagtactaccctgtc

SEQ ID NO: 1332675 - DNA, 15 bp, Homo sapiens
acagtactaccctgt

SEQ ID NO: 1332676 - DNA, 15 bp, Homo sapiens
cacagtactaccctg

SEQ ID NO: 1332677 - DNA, 15 bp, Homo sapiens
acacagtactaccct

SEQ ID NO: 1332678 - DNA, 15 bp, Homo sapiens
aacacagtactaccc

SEQ ID NO: 1332679 - DNA, 15 bp, Homo sapiens
caacacagtactacc

SEQ ID NO: 1332680 - DNA, 15 bp, Homo sapiens
ccaacacagtactac

SEQ ID NO: 1332681 - DNA, 15 bp, Homo sapiens
accaacacagtacta

SEQ ID NO: 1332682 - DNA, 15 bp, Homo sapiens
caccaacacagtact

SEQ ID NO: 1332683 - DNA, 15 bp, Homo sapiens
tcaccaacacagtac

SEQ ID NO: 1332684 - DNA, 15 bp, Homo sapiens
ttcaccaacacagta

SEQ ID NO: 1332685 - DNA, 15 bp, Homo sapiens
tttcaccaacacagt

SEQ ID NO: 1332686 - DNA, 15 bp, Homo sapiens
ctttcaccaacacag

SEQ ID NO: 1332687 - DNA, 15 bp, Homo sapiens
cctttcaccaacaca

SEQ ID NO: 1332688 - DNA, 15 bp, Homo sapiens
tcctttcaccaacac

SEQ ID NO: 1332689 - DNA, 15 bp, Homo sapiens
atcctttcaccaaca

SEQ ID NO: 1332690 - DNA, 15 bp, Homo sapiens
tatcctttcaccaac

SEQ ID NO: 1332691 - DNA, 15 bp, Homo sapiens
ctatcctttcaccaa

SEQ ID NO: 1332692 - DNA, 15 bp, Homo sapiens
tctatcctttcacca

SEQ ID NO: 1332693 - DNA, 15 bp, Homo sapiens
gtctatcctttcacc

SEQ ID NO: 1332694 - DNA, 15 bp, Homo sapiens
tgtctatcctttcac

SEQ ID NO: 1332695 - DNA, 15 bp, Homo sapiens
atgtctatcctttca

SEQ ID NO: 1332696 - DNA, 15 bp, Homo sapiens
aatgtctatcctttc

SEQ ID NO: 1332697 - DNA, 15 bp, Homo sapiens
aaatgtctatccttt

SEQ ID NO: 1332698 - DNA, 15 bp, Homo sapiens
caaatgtctatcctt

SEQ ID NO: 1332699 - DNA, 15 bp, Homo sapiens
gcaaatgtctatcct

SEQ ID NO: 1332700 - DNA, 15 bp, Homo sapiens
tgcaaatgtctatcc

SEQ ID NO: 1332701 - DNA, 15 bp, Homo sapiens
atgcaaatgtctatc

SEQ ID NO: 1332702 - DNA, 15 bp, Homo sapiens
gatgcaaatgtctat

SEQ ID NO: 1332703 - DNA, 15 bp, Homo sapiens
tgatgcaaatgtcta

SEQ ID NO: 1332704 - DNA, 15 bp, Homo sapiens
ttgatgcaaatgtct

SEQ ID NO: 1332705 - DNA, 15 bp, Homo sapiens
attgatgcaaatgtc

SEQ ID NO: 1332706 - DNA, 15 bp, Homo sapiens
cattgatgcaaatgt

SEQ ID NO: 1332707 - DNA, 15 bp, Homo sapiens
ccattgatgcaaatg

SEQ ID NO: 1332708 - DNA, 15 bp, Homo sapiens
tccattgatgcaaat

SEQ ID NO: 1332709 - DNA, 15 bp, Homo sapiens
ttccattgatgcaaa

SEQ ID NO: 1332710 - DNA, 15 bp, Homo sapiens
gttccattgatgcaa

SEQ ID NO: 1332711 - DNA, 15 bp, Homo sapiens
tgttccattgatgca

SEQ ID NO: 1332712 - DNA, 15 bp, Homo sapiens
ctgttccattgatgc

SEQ ID NO: 1332713 - DNA, 15 bp, Homo sapiens
tctgttccattgatg

SEQ ID NO: 1332714 - DNA, 15 bp, Homo sapiens
attctgttccattga

SEQ ID NO: 1332715 - DNA, 15 bp, Homo sapiens
tattctgttccattg

SEQ ID NO: 1332716 - DNA, 15 bp, Homo sapiens
ctattctgttccatt

SEQ ID NO: 1332717 - DNA, 15 bp, Homo sapiens
tctattctgttccat

SEQ ID NO: 1332718 - DNA, 15 bp, Homo sapiens
ctctattctgttcca

SEQ ID NO: 1332719 - DNA, 15 bp, Homo sapiens
actctattctgttcc

SEQ ID NO: 1332720 - DNA, 15 bp, Homo sapiens
gactctattctgttc

SEQ ID NO: 1332721 - DNA, 15 bp, Homo sapiens
ggactctattctgtt

SEQ ID NO: 1332722 - DNA, 15 bp, Homo sapiens
tggactctattctgt

SEQ ID NO: 1332723 - DNA, 15 bp, Homo sapiens
ctggactctattctg

SEQ ID NO: 1332724 - DNA, 15 bp, Homo sapiens
tctggactctattct

SEQ ID NO: 1332725 - DNA, 15 bp, Homo sapiens
ttctggactctattc

SEQ ID NO: 1332726 - DNA, 15 bp, Homo sapiens
cttctggactctatt

SEQ ID NO: 1332727 - DNA, 15 bp, Homo sapiens
ccttctggactctat

SEQ ID NO: 1332728 - DNA, 15 bp, Homo sapiens
cccttctggactcta

SEQ ID NO: 1332729 - DNA, 15 bp, Homo sapiens
ccccttctggactct

SEQ ID NO: 1332730 - DNA, 15 bp, Homo sapiens
tccccttctggactc

SEQ ID NO: 1332731 - DNA, 15 bp, Homo sapiens
gtccccttctggact

SEQ ID NO: 1332732 - DNA, 15 bp, Homo sapiens
ggtccccttctggac

SEQ ID NO: 1332733 - DNA, 15 bp, Homo sapiens
aggtccccttctgga

SEQ ID NO: 1332734 - DNA, 15 bp, Homo sapiens
taggtccccttctgg

SEQ ID NO: 1332735 - DNA, 15 bp, Homo sapiens
gtaggtccccttctg

SEQ ID NO: 1332736 - DNA, 15 bp, Homo sapiens
cgtaggtccccttct

SEQ ID NO: 1332737 - DNA, 15 bp, Homo sapiens
ccgtaggtccccttc

SEQ ID NO: 1332738 - DNA, 15 bp, Homo sapiens
tccgtaggtcccctt

SEQ ID NO: 1332739 - DNA, 15 bp, Homo sapiens
ttccgtaggtcccct

SEQ ID NO: 1332740 - DNA, 15 bp, Homo sapiens
cttccgtaggtcccc

SEQ ID NO: 1332741 - DNA, 15 bp, Homo sapiens
gcttccgtaggtccc

SEQ ID NO: 1332742 - DNA, 15 bp, Homo sapiens
tgcttccgtaggtcc

SEQ ID NO: 1332743 - DNA, 15 bp, Homo sapiens
atgcttccgtaggtc

SEQ ID NO: 1332744 - DNA, 15 bp, Homo sapiens
catgcttccgtaggt

SEQ ID NO: 1332745 - DNA, 15 bp, Homo sapiens
tcatgcttccgtagg

SEQ ID NO: 1332746 - DNA, 15 bp, Homo sapiens
ctcatgcttccgtag

SEQ ID NO: 1332747 - DNA, 15 bp, Homo sapiens
gctcatgcttccgta

SEQ ID NO: 1332748 - DNA, 15 bp, Homo sapiens
tgctcatgcttccgt

SEQ ID NO: 1332749 - DNA, 15 bp, Homo sapiens
ttgctcatgcttccg

SEQ ID NO: 1332750 - DNA, 15 bp, Homo sapiens
attgctcatgcttcc

SEQ ID NO: 1332751 - DNA, 15 bp, Homo sapiens
aattgctcatgcttc

SEQ ID NO: 1332752 - DNA, 15 bp, Homo sapiens
caattgctcatgctt

SEQ ID NO: 1332753 - DNA, 15 bp, Homo sapiens
tcaattgctcatgct

SEQ ID NO: 1332754 - DNA, 15 bp, Homo sapiens
atcaattgctcatgc

SEQ ID NO: 1332755 - DNA, 15 bp, Homo sapiens
aatcaattgctcatg

SEQ ID NO: 1332756 - DNA, 15 bp, Homo sapiens
aaatcaattgctcat

SEQ ID NO: 1332757 - DNA, 15 bp, Homo sapiens
aaaatcaattgctca

SEQ ID NO: 1332758 - DNA, 15 bp, Homo sapiens
aaaaatcaattgctc

SEQ ID NO: 1332759 - DNA, 15 bp, Homo sapiens
aaaaaatcaattgct

SEQ ID NO: 1332760 - DNA, 15 bp, Homo sapiens
aaaaaaatcaattgc

SEQ ID NO: 1332761 - DNA, 15 bp, Homo sapiens
aaaaaaaatcaattg

SEQ ID NO: 1332762 - DNA, 15 bp, Homo sapiens
aaaaaaaaatcaatt

SEQ ID NO: 1332763 - DNA, 15 bp, Homo sapiens
aaaaaaaaaatcaat

SEQ ID NO: 1332764 - DNA, 15 bp, Homo sapiens
aaaaaaaaaaatcaa

SEQ ID NO: 1332765 - DNA, 15 bp, Homo sapiens
aaaaaaaaaaaatca

SEQ ID NO: 1332766 - DNA, 15 bp, Homo sapiens
cgtgagactccatct

SEQ ID NO: 1332767 - DNA, 15 bp, Homo sapiens
ccgtgagactccatc

SEQ ID NO: 1332768 - DNA, 15 bp, Homo sapiens
accgtgagactccat

SEQ ID NO: 1332769 - DNA, 15 bp, Homo sapiens
caccgtgagactcca

SEQ ID NO: 1332770 - DNA, 15 bp, Homo sapiens
acaccgtgagactcc

SEQ ID NO: 1332771 - DNA, 15 bp, Homo sapiens
gacaccgtgagactc

SEQ ID NO: 1332772 - DNA, 15 bp, Homo sapiens
tgacaccgtgagact

SEQ ID NO: 1332773 - DNA, 15 bp, Homo sapiens
gtgacaccgtgagac

SEQ ID NO: 1332774 - DNA, 15 bp, Homo sapiens
ggtgacaccgtgaga

SEQ ID NO: 1332775 - DNA, 15 bp, Homo sapiens
gggtgacaccgtgag

SEQ ID NO: 1332776 - DNA, 15 bp, Homo sapiens
tgggtgacaccgtga

SEQ ID NO: 1332777 - DNA, 15 bp, Homo sapiens
ctgggtgacaccgtg

SEQ ID NO: 1332778 - DNA, 15 bp, Homo sapiens
cctgggtgacaccgt

SEQ ID NO: 1332779 - DNA, 15 bp, Homo sapiens
gcctgggtgacaccg

SEQ ID NO: 1332780 - DNA, 15 bp, Homo sapiens
agcctgggtgacacc

SEQ ID NO: 1332781 - DNA, 15 bp, Homo sapiens
cagcctgggtgacac

SEQ ID NO: 1332782 - DNA, 15 bp, Homo sapiens
aagtctgaggcagga

SEQ ID NO: 1332783 - DNA, 15 bp, Homo sapiens
gaagtctgaggcagg

SEQ ID NO: 1332784 - DNA, 15 bp, Homo sapiens
ggaagtctgaggcag

SEQ ID NO: 1332785 - DNA, 15 bp, Homo sapiens
aggaagtctgaggca

SEQ ID NO: 1332786 - DNA, 15 bp, Homo sapiens
taggaagtctgaggc

SEQ ID NO: 1332787 - DNA, 15 bp, Homo sapiens
ctaggaagtctgagg

SEQ ID NO: 1332788 - DNA, 15 bp, Homo sapiens
actaggaagtctgag

SEQ ID NO: 1332789 - DNA, 15 bp, Homo sapiens
tactaggaagtctga

SEQ ID NO: 1332790 - DNA, 15 bp, Homo sapiens
ctactaggaagtctg

SEQ ID NO: 1332791 - DNA, 15 bp, Homo sapiens
gctactaggaagtct

SEQ ID NO: 1332792 - DNA, 15 bp, Homo sapiens
agctactaggaagtc

SEQ ID NO: 1332793 - DNA, 15 bp, Homo sapiens
cagctactaggaagt

SEQ ID NO: 1332794 - DNA, 15 bp, Homo sapiens
ccagctactaggaag

SEQ ID NO: 1332795 - DNA, 15 bp, Homo sapiens
cccagctactaggaa

SEQ ID NO: 1332796 - DNA, 15 bp, Homo sapiens
tcccagctactagga

SEQ ID NO: 1332797 - DNA, 15 bp, Homo sapiens
ggcacttgtagtccc

SEQ ID NO: 1332798 - DNA, 15 bp, Homo sapiens
tggcacttgtagtcc

SEQ ID NO: 1332799 - DNA, 15 bp, Homo sapiens
gtggcacttgtagtc

SEQ ID NO: 1332800 - DNA, 15 bp, Homo sapiens
ggtggcacttgtagt

SEQ ID NO: 1332801 - DNA, 15 bp, Homo sapiens
tggtggcacttgtag

SEQ ID NO: 1332802 - DNA, 15 bp, Homo sapiens
gtggtggcacttgta

SEQ ID NO: 1332803 - DNA, 15 bp, Homo sapiens
tgtggtggcacttgt

SEQ ID NO: 1332804 - DNA, 15 bp, Homo sapiens
gtgtggtggcacttg

SEQ ID NO: 1332805 - DNA, 15 bp, Homo sapiens
ggtgtggtggcactt

SEQ ID NO: 1332806 - DNA, 15 bp, Homo sapiens
gggtgtggtggcact

SEQ ID NO: 1332807 - DNA, 15 bp, Homo sapiens
ttggccaatatggtg

SEQ ID NO: 1332808 - DNA, 15 bp, Homo sapiens
cttggccaatatggt

SEQ ID NO: 1332809 - DNA, 15 bp, Homo sapiens
gcttggccaatatgg

SEQ ID NO: 1332810 - DNA, 15 bp, Homo sapiens
agcttggccaatatg

SEQ ID NO: 1332811 - DNA, 15 bp, Homo sapiens
cagcttggccaatat

SEQ ID NO: 1332812 - DNA, 15 bp, Homo sapiens
tcagcttggccaata

SEQ ID NO: 1332813 - DNA, 15 bp, Homo sapiens
atcagcttggccaat

SEQ ID NO: 1332814 - DNA, 15 bp, Homo sapiens
gatcagcttggccaa

SEQ ID NO: 1332815 - DNA, 15 bp, Homo sapiens
ggatcagcttggcca

SEQ ID NO: 1332816 - DNA, 15 bp, Homo sapiens
gggatcagcttggcc

SEQ ID NO: 1332817 - DNA, 15 bp, Homo sapiens
cgggatcagcttggc

SEQ ID NO: 1332818 - DNA, 15 bp, Homo sapiens
tcgggatcagcttgg

SEQ ID NO: 1332819 - DNA, 15 bp, Homo sapiens
ctcgggatcagcttg

SEQ ID NO: 1332820 - DNA, 15 bp, Homo sapiens
gctcgggatcagctt

SEQ ID NO: 1332821 - DNA, 15 bp, Homo sapiens
agctcgggatcagct

SEQ ID NO: 1332822 - DNA, 15 bp, Homo sapiens
gagctcgggatcagc

SEQ ID NO: 1332823 - DNA, 15 bp, Homo sapiens
ggagctcgggatcag

SEQ ID NO: 1332824 - DNA, 15 bp, Homo sapiens
aggagctcgggatca

SEQ ID NO: 1332825 - DNA, 15 bp, Homo sapiens
caggagctcgggatc

SEQ ID NO: 1332826 - DNA, 15 bp, Homo sapiens
tcaggagctcgggat

SEQ ID NO: 1332827 - DNA, 15 bp, Homo sapiens
gtcaggagctcggga

SEQ ID NO: 1332828 - DNA, 15 bp, Homo sapiens
ggtcaggagctcggg

SEQ ID NO: 1332829 - DNA, 15 bp, Homo sapiens
aggtcaggagctcgg

SEQ ID NO: 1332830 - DNA, 15 bp, Homo sapiens
gaggtcaggagctcg

SEQ ID NO: 1332831 - DNA, 15 bp, Homo sapiens
cgaggtcaggagctc

SEQ ID NO: 1332832 - DNA, 15 bp, Homo sapiens
acgaggtcaggagct

SEQ ID NO: 1332833 - DNA, 15 bp, Homo sapiens
cacgaggtcaggagc

SEQ ID NO: 1332834 - DNA, 15 bp, Homo sapiens
aacacgaggtcagga

SEQ ID NO: 1332835 - DNA, 15 bp, Homo sapiens
gaacacgaggtcagg

SEQ ID NO: 1332836 - DNA, 15 bp, Homo sapiens
ggaacacgaggtcag

SEQ ID NO: 1332837 - DNA, 15 bp, Homo sapiens
tggaacacgaggtca

SEQ ID NO: 1332838 - DNA, 15 bp, Homo sapiens
gtggaacacgaggtc

SEQ ID NO: 1332839 - DNA, 15 bp, Homo sapiens
ggtggaacacgaggt

SEQ ID NO: 1332840 - DNA, 15 bp, Homo sapiens
tggtggaacacgagg

SEQ ID NO: 1332841 - DNA, 15 bp, Homo sapiens
ctggtggaacacgag

SEQ ID NO: 1332842 - DNA, 15 bp, Homo sapiens
gctggtggaacacga

SEQ ID NO: 1332843 - DNA, 15 bp, Homo sapiens
ggctggtggaacacg

SEQ ID NO: 1332844 - DNA, 15 bp, Homo sapiens
aggctggtggaacac

SEQ ID NO: 1332845 - DNA, 15 bp, Homo sapiens
taggctggtggaaca

SEQ ID NO: 1332846 - DNA, 15 bp, Homo sapiens
ctaggctggtggaac

SEQ ID NO: 1332847 - DNA, 15 bp, Homo sapiens
cctaggctggtggaa

SEQ ID NO: 1332848 - DNA, 15 bp, Homo sapiens
gcctaggctggtgga

SEQ ID NO: 1332849 - DNA, 15 bp, Homo sapiens
ggcctaggctggtgg

SEQ ID NO: 1332850 - DNA, 15 bp, Homo sapiens
aggcctaggctggtg

SEQ ID NO: 1332851 - DNA, 15 bp, Homo sapiens
gaggcctaggctggt

SEQ ID NO: 1332852 - DNA, 15 bp, Homo sapiens
ggaggcctaggctgg

SEQ ID NO: 1332853 - DNA, 15 bp, Homo sapiens
gggaggcctaggctg

SEQ ID NO: 1332854 - DNA, 15 bp, Homo sapiens
tgggaggcctaggct

SEQ ID NO: 1332855 - DNA, 15 bp, Homo sapiens
ttgggaggcctaggc

SEQ ID NO: 1332856 - DNA, 15 bp, Homo sapiens
tttgggaggcctagg

SEQ ID NO: 1332857 - DNA, 15 bp, Homo sapiens
ctttgggaggcctag

SEQ ID NO: 1332858 - DNA, 15 bp, Homo sapiens
cctttgggaggccta

SEQ ID NO: 1332859 - DNA, 15 bp, Homo sapiens
ccctttgggaggcct

SEQ ID NO: 1332860 - DNA, 15 bp, Homo sapiens
gccctttgggaggcc

SEQ ID NO: 1332861 - DNA, 15 bp, Homo sapiens
agccctttgggaggc

SEQ ID NO: 1332862 - DNA, 15 bp, Homo sapiens
tgtaatcccagccct

SEQ ID NO: 1332863 - DNA, 15 bp, Homo sapiens
ctgtaatcccagccc

SEQ ID NO: 1332864 - DNA, 15 bp, Homo sapiens
cctgtaatcccagcc

SEQ ID NO: 1332865 - DNA, 15 bp, Homo sapiens
tgtggctcacgcctg

SEQ ID NO: 1332866 - DNA, 15 bp, Homo sapiens
ctgtggctcacgcct

SEQ ID NO: 1332867 - DNA, 15 bp, Homo sapiens
gctgtggctcacgcc

SEQ ID NO: 1332868 - DNA, 15 bp, Homo sapiens
cgctgtggctcacgc

SEQ ID NO: 1332869 - DNA, 15 bp, Homo sapiens
gcgctgtggctcacg

SEQ ID NO: 1332870 - DNA, 15 bp, Homo sapiens
ggcgctgtggctcac

SEQ ID NO: 1332871 - DNA, 15 bp, Homo sapiens
tcgggcgctgtggct

SEQ ID NO: 1332872 - DNA, 15 bp, Homo sapiens
gtcgggcgctgtggc

SEQ ID NO: 1332873 - DNA, 15 bp, Homo sapiens
ggtcgggcgctgtgg

SEQ ID NO: 1332874 - DNA, 15 bp, Homo sapiens
aggtcgggcgctgtg

SEQ ID NO: 1332875 - DNA, 15 bp, Homo sapiens
taggtcgggcgctgt

SEQ ID NO: 1332876 - DNA, 15 bp, Homo sapiens
ttaggtcgggcgctg

SEQ ID NO: 1332877 - DNA, 15 bp, Homo sapiens
tttaggtcgggcgct

SEQ ID NO: 1332878 - DNA, 15 bp, Homo sapiens
ttttaggtcgggcgc

SEQ ID NO: 1332879 - DNA, 15 bp, Homo sapiens
attttaggtcgggcg

SEQ ID NO: 1332880 - DNA, 15 bp, Homo sapiens
aattttaggtcgggc

SEQ ID NO: 1332881 - DNA, 15 bp, Homo sapiens
taattttaggtcggg

SEQ ID NO: 1332882 - DNA, 15 bp, Homo sapiens
gtaattttaggtcgg

SEQ ID NO: 1332883 - DNA, 15 bp, Homo sapiens
tgtaattttaggtcg

SEQ ID NO: 1332884 - DNA, 15 bp, Homo sapiens
ttgtaattttaggtc

SEQ ID NO: 1332885 - DNA, 15 bp, Homo sapiens
tttgtaattttaggt

SEQ ID NO: 1332886 - DNA, 15 bp, Homo sapiens
ttttgtaattttagg

SEQ ID NO: 1332887 - DNA, 15 bp, Homo sapiens
atttttgtaatttta

SEQ ID NO: 1332888 - DNA, 15 bp, Homo sapiens
aatttttgtaatttt

SEQ ID NO: 1332889 - DNA, 15 bp, Homo sapiens
taatttttgtaattt

SEQ ID NO: 1332890 - DNA, 15 bp, Homo sapiens
ataatttttgtaatt

SEQ ID NO: 1332891 - DNA, 15 bp, Homo sapiens
gataatttttgtaat

SEQ ID NO: 1332892 - DNA, 15 bp, Homo sapiens
ggataatttttgtaa

SEQ ID NO: 1332893 - DNA, 15 bp, Homo sapiens
tctggataatttttg

SEQ ID NO: 1332894 - DNA, 15 bp, Homo sapiens
atctggataattttt

SEQ ID NO: 1332895 - DNA, 15 bp, Homo sapiens
catctggataatttt

SEQ ID NO: 1332896 - DNA, 15 bp, Homo sapiens
acatctggataattt

SEQ ID NO: 1332897 - DNA, 15 bp, Homo sapiens
cacatctggataatt

SEQ ID NO: 1332898 - DNA, 15 bp, Homo sapiens
ccacatctggataat

SEQ ID NO: 1332899 - DNA, 15 bp, Homo sapiens
accacatctggataa

SEQ ID NO: 1332900 - DNA, 15 bp, Homo sapiens
caccacatctggata

SEQ ID NO: 1332901 - DNA, 15 bp, Homo sapiens
tcaccacatctggat

SEQ ID NO: 1332902 - DNA, 15 bp, Homo sapiens
atcaccacatctgga

SEQ ID NO: 1332903 - DNA, 15 bp, Homo sapiens
catcaccacatctgg

SEQ ID NO: 1332904 - DNA, 15 bp, Homo sapiens
ccatcaccacatctg

SEQ ID NO: 1332905 - DNA, 15 bp, Homo sapiens
cccatcaccacatct

SEQ ID NO: 1332906 - DNA, 15 bp, Homo sapiens
acccatcaccacatc

SEQ ID NO: 1332907 - DNA, 15 bp, Homo sapiens
cacccatcaccacat

SEQ ID NO: 1332908 - DNA, 15 bp, Homo sapiens
gcacccatcaccaca

SEQ ID NO: 1332909 - DNA, 15 bp, Homo sapiens
gtacaggcacccatc

SEQ ID NO: 1332910 - DNA, 15 bp, Homo sapiens
agtacaggcacccat

SEQ ID NO: 1332911 - DNA, 15 bp, Homo sapiens
gagtacaggcaccca

SEQ ID NO: 1332912 - DNA, 15 bp, Homo sapiens
ggagtacaggcaccc

SEQ ID NO: 1332913 - DNA, 15 bp, Homo sapiens
gggagtacaggcacc

SEQ ID NO: 1332914 - DNA, 15 bp, Homo sapiens
tgggagtacaggcac

SEQ ID NO: 1332915 - DNA, 15 bp, Homo sapiens
ccccgagtagctggg

SEQ ID NO: 1332916 - DNA, 15 bp, Homo sapiens
cccccgagtagctgg

SEQ ID NO: 1332917 - DNA, 15 bp, Homo sapiens
ccccccgagtagctg

SEQ ID NO: 1332918 - DNA, 15 bp, Homo sapiens
gccccccgagtagct

SEQ ID NO: 1332919 - DNA, 15 bp, Homo sapiens
agccccccgagtagc

SEQ ID NO: 1332920 - DNA, 15 bp, Homo sapiens
cagccccccgagtag

SEQ ID NO: 1332921 - DNA, 15 bp, Homo sapiens
tcagccccccgagta

SEQ ID NO: 1332922 - DNA, 15 bp, Homo sapiens
ctcagccccccgagt

SEQ ID NO: 1332923 - DNA, 15 bp, Homo sapiens
cctcagccccccgag

SEQ ID NO: 1332924 - DNA, 15 bp, Homo sapiens
gcctcagccccccga

SEQ ID NO: 1332925 - DNA, 15 bp, Homo sapiens
tgcctcagccccccg

SEQ ID NO: 1332926 - DNA, 15 bp, Homo sapiens
tggttcaagtgattc

SEQ ID NO: 1332927 - DNA, 15 bp, Homo sapiens
ctggttcaagtgatt

SEQ ID NO: 1332928 - DNA, 15 bp, Homo sapiens
cctggttcaagtgat

SEQ ID NO: 1332929 - DNA, 15 bp, Homo sapiens
ccctggttcaagtga

SEQ ID NO: 1332930 - DNA, 15 bp, Homo sapiens
tccctggttcaagtg

SEQ ID NO: 1332931 - DNA, 15 bp, Homo sapiens
ctccctggttcaagt

SEQ ID NO: 1332932 - DNA, 15 bp, Homo sapiens
cctccctggttcaag

SEQ ID NO: 1332933 - DNA, 15 bp, Homo sapiens
gcctccctggttcaa

SEQ ID NO: 1332934 - DNA, 15 bp, Homo sapiens
tgcctccctggttca

SEQ ID NO: 1332935 - DNA, 15 bp, Homo sapiens
ctctgcctccctggt

SEQ ID NO: 1332936 - DNA, 15 bp, Homo sapiens
cctctgcctccctgg

SEQ ID NO: 1332937 - DNA, 15 bp, Homo sapiens
acctctgcctccctg

SEQ ID NO: 1332938 - DNA, 15 bp, Homo sapiens
aacctctgcctccct

SEQ ID NO: 1332939 - DNA, 15 bp, Homo sapiens
acttggctcactgca

SEQ ID NO: 1332940 - DNA, 15 bp, Homo sapiens
aacttggctcactgc

SEQ ID NO: 1332941 - DNA, 15 bp, Homo sapiens
gaacttggctcactg

SEQ ID NO: 1332942 - DNA, 15 bp, Homo sapiens
cgaacttggctcact

SEQ ID NO: 1332943 - DNA, 15 bp, Homo sapiens
gcgaacttggctcac

SEQ ID NO: 1332944 - DNA, 15 bp, Homo sapiens
cgcgaacttggctca

SEQ ID NO: 1332945 - DNA, 15 bp, Homo sapiens
gcgcgaacttggctc

SEQ ID NO: 1332946 - DNA, 15 bp, Homo sapiens
ggcgcgaacttggct

SEQ ID NO: 1332947 - DNA, 15 bp, Homo sapiens
tggcgcgaacttggc

SEQ ID NO: 1332948 - DNA, 15 bp, Homo sapiens
gtggcgcgaacttgg

SEQ ID NO: 1332949 - DNA, 15 bp, Homo sapiens
agtggcgcgaacttg

SEQ ID NO: 1332950 - DNA, 15 bp, Homo sapiens
cagtggcgcgaactt

SEQ ID NO: 1332951 - DNA, 15 bp, Homo sapiens
cagtgcagtggcgcg

SEQ ID NO: 1332952 - DNA, 15 bp, Homo sapiens
gcagtgcagtggcgc

SEQ ID NO: 1332953 - DNA, 15 bp, Homo sapiens
tgcagtgcagtggcg

SEQ ID NO: 1332954 - DNA, 15 bp, Homo sapiens
ctgcagtgcagtggc

SEQ ID NO: 1332955 - DNA, 15 bp, Homo sapiens
agcccaggctgcagt

SEQ ID NO: 1332956 - DNA, 15 bp, Homo sapiens
tagcccaggctgcag

SEQ ID NO: 1332957 - DNA, 15 bp, Homo sapiens
atagcccaggctgca

SEQ ID NO: 1332958 - DNA, 15 bp, Homo sapiens
catagcccaggctgc

SEQ ID NO: 1332959 - DNA, 15 bp, Homo sapiens
tcatagcccaggctg

SEQ ID NO: 1332960 - DNA, 15 bp, Homo sapiens
ttcatagcccaggct

SEQ ID NO: 1332961 - DNA, 15 bp, Homo sapiens
cttcatagcccaggc

SEQ ID NO: 1332962 - DNA, 15 bp, Homo sapiens
gcttcatagcccagg

SEQ ID NO: 1332963 - DNA, 15 bp, Homo sapiens
ggcttcatagcccag

SEQ ID NO: 1332964 - DNA, 15 bp, Homo sapiens
tggcttcatagccca

SEQ ID NO: 1332965 - DNA, 15 bp, Homo sapiens
ctggcttcatagccc

SEQ ID NO: 1332966 - DNA, 15 bp, Homo sapiens
tctggcttcatagcc

SEQ ID NO: 1332967 - DNA, 15 bp, Homo sapiens
gtctggcttcatagc

SEQ ID NO: 1332968 - DNA, 15 bp, Homo sapiens
agtctggcttcatag

SEQ ID NO: 1332969 - DNA, 15 bp, Homo sapiens
gagtctggcttcata

SEQ ID NO: 1332970 - DNA, 15 bp, Homo sapiens
agagtctggcttcat

SEQ ID NO: 1332971 - DNA, 15 bp, Homo sapiens
cagagtctggcttca

SEQ ID NO: 1332972 - DNA, 15 bp, Homo sapiens
acagagtctggcttc

SEQ ID NO: 1332973 - DNA, 15 bp, Homo sapiens
gacagagtctggctt

SEQ ID NO: 1332974 - DNA, 15 bp, Homo sapiens
agacagagtctggct

SEQ ID NO: 1332975 - DNA, 15 bp, Homo sapiens
gagacagagtctggc

SEQ ID NO: 1332976 - DNA, 15 bp, Homo sapiens
tgagacagagtctgg

SEQ ID NO: 1332977 - DNA, 15 bp, Homo sapiens
ttgagacagagtctg

SEQ ID NO: 1332978 - DNA, 15 bp, Homo sapiens
atttttctttttttt

SEQ ID NO: 1332979 - DNA, 15 bp, Homo sapiens
tatttttcttttttt

SEQ ID NO: 1332980 - DNA, 15 bp, Homo sapiens
ttatttttctttttt

SEQ ID NO: 1332981 - DNA, 15 bp, Homo sapiens
tttatttttcttttt

SEQ ID NO: 1332982 - DNA, 15 bp, Homo sapiens
ttttatttttctttt

SEQ ID NO: 1332983 - DNA, 15 bp, Homo sapiens
attttatttttcttt

SEQ ID NO: 1332984 - DNA, 15 bp, Homo sapiens
aattttatttttctt

SEQ ID NO: 1332985 - DNA, 15 bp, Homo sapiens
aaattttatttttct

SEQ ID NO: 1332986 - DNA, 15 bp, Homo sapiens
aaaattttatttttc

SEQ ID NO: 1332987 - DNA, 15 bp, Homo sapiens
tgaaaattttatttt

SEQ ID NO: 1332988 - DNA, 15 bp, Homo sapiens
ctgaaaattttattt

SEQ ID NO: 1332989 - DNA, 15 bp, Homo sapiens
tctgaaaattttatt

SEQ ID NO: 1332990 - DNA, 15 bp, Homo sapiens
ttctgaaaattttat

SEQ ID NO: 1332991 - DNA, 15 bp, Homo sapiens
cttctgaaaatttta

SEQ ID NO: 1332992 - DNA, 15 bp, Homo sapiens
ccttctgaaaatttt

SEQ ID NO: 1332993 - DNA, 15 bp, Homo sapiens
tccttctgaaaattt

SEQ ID NO: 1332994 - DNA, 15 bp, Homo sapiens
ttccttctgaaaatt

SEQ ID NO: 1332995 - DNA, 15 bp, Homo sapiens
tttccttctgaaaat

SEQ ID NO: 1332996 - DNA, 15 bp, Homo sapiens
ttttccttctgaaaa

SEQ ID NO: 1332997 - DNA, 15 bp, Homo sapiens
gttttccttctgaaa

SEQ ID NO: 1332998 - DNA, 15 bp, Homo sapiens
ggttttccttctgaa

SEQ ID NO: 1332999 - DNA, 15 bp, Homo sapiens
tggttttccttctga

SEQ ID NO: 1333000 - DNA, 15 bp, Homo sapiens
ttggttttccttctg

SEQ ID NO: 1333001 - DNA, 15 bp, Homo sapiens
tttggttttccttct

SEQ ID NO: 1333002 - DNA, 15 bp, Homo sapiens
ctttggttttccttc

SEQ ID NO: 1333003 - DNA, 15 bp, Homo sapiens
tctttggttttcctt

SEQ ID NO: 1333004 - DNA, 15 bp, Homo sapiens
ttctttggttttcct

SEQ ID NO: 1333005 - DNA, 15 bp, Homo sapiens
tttctttggttttcc

SEQ ID NO: 1333006 - DNA, 15 bp, Homo sapiens
ttttctttggttttc

SEQ ID NO: 1333007 - DNA, 15 bp, Homo sapiens
attttctttggtttt

SEQ ID NO: 1333008 - DNA, 15 bp, Homo sapiens
tattttctttggttt

SEQ ID NO: 1333009 - DNA, 15 bp, Homo sapiens
atattttctttggtt

SEQ ID NO: 1333010 - DNA, 15 bp, Homo sapiens
aatattttctttggt

SEQ ID NO: 1333011 - DNA, 15 bp, Homo sapiens
aaatattttctttgg

SEQ ID NO: 1333012 - DNA, 15 bp, Homo sapiens
caaatattttctttg

SEQ ID NO: 1333013 - DNA, 15 bp, Homo sapiens
ccaaatattttcttt

SEQ ID NO: 1333014 - DNA, 15 bp, Homo sapiens
tccaaatattttctt

SEQ ID NO: 1333015 - DNA, 15 bp, Homo sapiens
ttccaaatattttct

SEQ ID NO: 1333016 - DNA, 15 bp, Homo sapiens
gttccaaatattttc

SEQ ID NO: 1333017 - DNA, 15 bp, Homo sapiens
ggttccaaatatttt

SEQ ID NO: 1333018 - DNA, 15 bp, Homo sapiens
aggttccaaatattt

SEQ ID NO: 1333019 - DNA, 15 bp, Homo sapiens
aaggttccaaatatt

SEQ ID NO: 1333020 - DNA, 15 bp, Homo sapiens
caaggttccaaatat

SEQ ID NO: 1333021 - DNA, 15 bp, Homo sapiens
ccaaggttccaaata

SEQ ID NO: 1333022 - DNA, 15 bp, Homo sapiens
cccaaggttccaaat

SEQ ID NO: 1333023 - DNA, 15 bp, Homo sapiens
acccaaggttccaaa

SEQ ID NO: 1333024 - DNA, 15 bp, Homo sapiens
aacccaaggttccaa

SEQ ID NO: 1333025 - DNA, 15 bp, Homo sapiens
taacccaaggttcca

SEQ ID NO: 1333026 - DNA, 15 bp, Homo sapiens
ctaacccaaggttcc

SEQ ID NO: 1333027 - DNA, 15 bp, Homo sapiens
cctaacccaaggttc

SEQ ID NO: 1333028 - DNA, 15 bp, Homo sapiens
acctaacccaaggtt

SEQ ID NO: 1333029 - DNA, 15 bp, Homo sapiens
tacctaacccaaggt

SEQ ID NO: 1333030 - DNA, 15 bp, Homo sapiens
ctacctaacccaagg

SEQ ID NO: 1333031 - DNA, 15 bp, Homo sapiens
tctacctaacccaag

SEQ ID NO: 1333032 - DNA, 15 bp, Homo sapiens
ctctacctaacccaa

SEQ ID NO: 1333033 - DNA, 15 bp, Homo sapiens
actctacctaaccca

SEQ ID NO: 1333034 - DNA, 15 bp, Homo sapiens
aactctacctaaccc

SEQ ID NO: 1333035 - DNA, 15 bp, Homo sapiens
gaactctacctaacc

SEQ ID NO: 1333036 - DNA, 15 bp, Homo sapiens
agaactctacctaac

SEQ ID NO: 1333037 - DNA, 15 bp, Homo sapiens
tagaactctacctaa

SEQ ID NO: 1333038 - DNA, 15 bp, Homo sapiens
gtagaactctaccta

SEQ ID NO: 1333039 - DNA, 15 bp, Homo sapiens
tgtagaactctacct

SEQ ID NO: 1333040 - DNA, 15 bp, Homo sapiens
gtgtagaactctacc

SEQ ID NO: 1333041 - DNA, 15 bp, Homo sapiens
tgtgtagaactctac

SEQ ID NO: 1333042 - DNA, 15 bp, Homo sapiens
atgtgtagaactcta

SEQ ID NO: 1333043 - DNA, 15 bp, Homo sapiens
tatgtgtagaactct

SEQ ID NO: 1333044 - DNA, 15 bp, Homo sapiens
ttatgtgtagaactc

SEQ ID NO: 1333045 - DNA, 15 bp, Homo sapiens
attatgtgtagaact

SEQ ID NO: 1333046 - DNA, 15 bp, Homo sapiens
tattatgtgtagaac

SEQ ID NO: 1333047 - DNA, 15 bp, Homo sapiens
atattatgtgtagaa

SEQ ID NO: 1333048 - DNA, 15 bp, Homo sapiens
gatattatgtgtaga

SEQ ID NO: 1333049 - DNA, 15 bp, Homo sapiens
tgatattatgtgtag

SEQ ID NO: 1333050 - DNA, 15 bp, Homo sapiens
ttgatattatgtgta

SEQ ID NO: 1333051 - DNA, 15 bp, Homo sapiens
gttgatattatgtgt

SEQ ID NO: 1333052 - DNA, 15 bp, Homo sapiens
tgttgatattatgtg

SEQ ID NO: 1333053 - DNA, 15 bp, Homo sapiens
ctgttgatattatgt

SEQ ID NO: 1333054 - DNA, 15 bp, Homo sapiens
actgttgatattatg

SEQ ID NO: 1333055 - DNA, 15 bp, Homo sapiens
tactgttgatattat

SEQ ID NO: 1333056 - DNA, 15 bp, Homo sapiens
ttactgttgatatta

SEQ ID NO: 1333057 - DNA, 15 bp, Homo sapiens
tttactgttgatatt

SEQ ID NO: 1333058 - DNA, 15 bp, Homo sapiens
ttttactgttgatat

SEQ ID NO: 1333059 - DNA, 15 bp, Homo sapiens
attttactgttgata

SEQ ID NO: 1333060 - DNA, 15 bp, Homo sapiens
aattttactgttgat

SEQ ID NO: 1333061 - DNA, 15 bp, Homo sapiens
gaattttactgttga

SEQ ID NO: 1333062 - DNA, 15 bp, Homo sapiens
tgaattttactgttg

SEQ ID NO: 1333063 - DNA, 15 bp, Homo sapiens
atgaattttactgtt

SEQ ID NO: 1333064 - DNA, 15 bp, Homo sapiens
tatgaattttactgt

SEQ ID NO: 1333065 - DNA, 15 bp, Homo sapiens
ttatgaattttactg

SEQ ID NO: 1333066 - DNA, 15 bp, Homo sapiens
tttatgaattttact

SEQ ID NO: 1333067 - DNA, 15 bp, Homo sapiens
ttttatgaattttac

SEQ ID NO: 1333068 - DNA, 15 bp, Homo sapiens
tttttatgaatttta

SEQ ID NO: 1333069 - DNA, 15 bp, Homo sapiens
ttttttatgaatttt

SEQ ID NO: 1333070 - DNA, 15 bp, Homo sapiens
tttttttatgaattt

SEQ ID NO: 1333071 - DNA, 15 bp, Homo sapiens
ttttttttatgaatt

SEQ ID NO: 1333072 - DNA, 15 bp, Homo sapiens
tttttttttatgaat

SEQ ID NO: 1333073 - DNA, 15 bp, Homo sapiens
ttttttttttatgaa

SEQ ID NO: 1333074 - DNA, 15 bp, Homo sapiens
attttttttttatga

SEQ ID NO: 1333075 - DNA, 15 bp, Homo sapiens
tattttttttttatg

SEQ ID NO: 1333076 - DNA, 15 bp, Homo sapiens
ttattttttttttat

SEQ ID NO: 1333077 - DNA, 15 bp, Homo sapiens
tttatttttttttta

SEQ ID NO: 1333078 - DNA, 15 bp, Homo sapiens
catttattttttttt

SEQ ID NO: 1333079 - DNA, 15 bp, Homo sapiens
ccatttatttttttt

SEQ ID NO: 1333080 - DNA, 15 bp, Homo sapiens
accatttattttttt

SEQ ID NO: 1333081 - DNA, 15 bp, Homo sapiens
taccatttatttttt

SEQ ID NO: 1333082 - DNA, 15 bp, Homo sapiens
ttaccatttattttt

SEQ ID NO: 1333083 - DNA, 15 bp, Homo sapiens
cttaccatttatttt

SEQ ID NO: 1333084 - DNA, 15 bp, Homo sapiens
gcttaccatttattt

SEQ ID NO: 1333085 - DNA, 15 bp, Homo sapiens
agcttaccatttatt

SEQ ID NO: 1333086 - DNA, 15 bp, Homo sapiens
cagcttaccatttat

SEQ ID NO: 1333087 - DNA, 15 bp, Homo sapiens
tcagcttaccattta

SEQ ID NO: 1333088 - DNA, 15 bp, Homo sapiens
atcagcttaccattt

SEQ ID NO: 1333089 - DNA, 15 bp, Homo sapiens
gatcagcttaccatt

SEQ ID NO: 1333090 - DNA, 15 bp, Homo sapiens
agatcagcttaccat

SEQ ID NO: 1333091 - DNA, 15 bp, Homo sapiens
aagatcagcttacca

SEQ ID NO: 1333092 - DNA, 15 bp, Homo sapiens
gaagatcagcttacc

SEQ ID NO: 1333093 - DNA, 15 bp, Homo sapiens
tgaagatcagcttac

SEQ ID NO: 1333094 - DNA, 15 bp, Homo sapiens
gtgaagatcagctta

SEQ ID NO: 1333095 - DNA, 15 bp, Homo sapiens
ggtgaagatcagctt

SEQ ID NO: 1333096 - DNA, 15 bp, Homo sapiens
tggtgaagatcagct

SEQ ID NO: 1333097 - DNA, 15 bp, Homo sapiens
ttggtgaagatcagc

SEQ ID NO: 1333098 - DNA, 15 bp, Homo sapiens
attggtgaagatcag

SEQ ID NO: 1333099 - DNA, 15 bp, Homo sapiens
tattggtgaagatca

SEQ ID NO: 1333100 - DNA, 15 bp, Homo sapiens
atattggtgaagatc

SEQ ID NO: 1333101 - DNA, 15 bp, Homo sapiens
tatattggtgaagat

SEQ ID NO: 1333102 - DNA, 15 bp, Homo sapiens
ttatattggtgaaga

SEQ ID NO: 1333103 - DNA, 15 bp, Homo sapiens
tttatattggtgaag

SEQ ID NO: 1333104 - DNA, 15 bp, Homo sapiens
ttttatattggtgaa

SEQ ID NO: 1333105 - DNA, 15 bp, Homo sapiens
tttttatattggtga

SEQ ID NO: 1333106 - DNA, 15 bp, Homo sapiens
ttttttatattggtg

SEQ ID NO: 1333107 - DNA, 15 bp, Homo sapiens
gttttttatattggt

SEQ ID NO: 1333108 - DNA, 15 bp, Homo sapiens
agttttttatattgg

SEQ ID NO: 1333109 - DNA, 15 bp, Homo sapiens
aagttttttatattg

SEQ ID NO: 1333110 - DNA, 15 bp, Homo sapiens
gaagttttttatatt

SEQ ID NO: 1333111 - DNA, 15 bp, Homo sapiens
agaagttttttatat

SEQ ID NO: 1333112 - DNA, 15 bp, Homo sapiens
cagaagttttttata

SEQ ID NO: 1333113 - DNA, 15 bp, Homo sapiens
gcagaagttttttat

SEQ ID NO: 1333114 - DNA, 15 bp, Homo sapiens
ggcagaagtttttta

SEQ ID NO: 1333115 - DNA, 15 bp, Homo sapiens
aggcagaagtttttt

SEQ ID NO: 1333116 - DNA, 15 bp, Homo sapiens
caggcagaagttttt

SEQ ID NO: 1333117 - DNA, 15 bp, Homo sapiens
ccaggcagaagtttt

SEQ ID NO: 1333118 - DNA, 15 bp, Homo sapiens
cccaggcagaagttt

SEQ ID NO: 1333119 - DNA, 15 bp, Homo sapiens
gcccaggcagaagtt

SEQ ID NO: 1333120 - DNA, 15 bp, Homo sapiens
cgcccaggcagaagt

SEQ ID NO: 1333121 - DNA, 15 bp, Homo sapiens
gcgcccaggcagaag

SEQ ID NO: 1333122 - DNA, 15 bp, Homo sapiens
tgcgcccaggcagaa

SEQ ID NO: 1333123 - DNA, 15 bp, Homo sapiens
ctgcgcccaggcaga

SEQ ID NO: 1333124 - DNA, 15 bp, Homo sapiens
actgcgcccaggcag

SEQ ID NO: 1333125 - DNA, 15 bp, Homo sapiens
cactgcgcccaggca

SEQ ID NO: 1333126 - DNA, 15 bp, Homo sapiens
ccactgcgcccaggc

SEQ ID NO: 1333127 - DNA, 15 bp, Homo sapiens
gccactgcgcccagg

SEQ ID NO: 1333128 - DNA, 15 bp, Homo sapiens
taggctggtctcgaa

SEQ ID NO: 1333129 - DNA, 15 bp, Homo sapiens
ctaggctggtctcga

SEQ ID NO: 1333130 - DNA, 15 bp, Homo sapiens
gctaggctggtctcg

SEQ ID NO: 1333131 - DNA, 15 bp, Homo sapiens
ggctaggctggtctc

SEQ ID NO: 1333132 - DNA, 15 bp, Homo sapiens
tggctaggctggtct

SEQ ID NO: 1333133 - DNA, 15 bp, Homo sapiens
ttggctaggctggtc

SEQ ID NO: 1333134 - DNA, 15 bp, Homo sapiens
gttggctaggctggt

SEQ ID NO: 1333135 - DNA, 15 bp, Homo sapiens
tgttggctaggctgg

SEQ ID NO: 1333136 - DNA, 15 bp, Homo sapiens
atgttggctaggctg

SEQ ID NO: 1333137 - DNA, 15 bp, Homo sapiens
catgttggctaggct

SEQ ID NO: 1333138 - DNA, 15 bp, Homo sapiens
ccatgttggctaggc

SEQ ID NO: 1333139 - DNA, 15 bp, Homo sapiens
gccatgttggctagg

SEQ ID NO: 1333140 - DNA, 15 bp, Homo sapiens
cgccatgttggctag

SEQ ID NO: 1333141 - DNA, 15 bp, Homo sapiens
tcgccatgttggcta

SEQ ID NO: 1333142 - DNA, 15 bp, Homo sapiens
ttcgccatgttggct

SEQ ID NO: 1333143 - DNA, 15 bp, Homo sapiens
atttcgccatgttgg

SEQ ID NO: 1333144 - DNA, 15 bp, Homo sapiens
aatttcgccatgttg

SEQ ID NO: 1333145 - DNA, 15 bp, Homo sapiens
gaatttcgccatgtt

SEQ ID NO: 1333146 - DNA, 15 bp, Homo sapiens
ggaatttcgccatgt

SEQ ID NO: 1333147 - DNA, 15 bp, Homo sapiens
tggaatttcgccatg

SEQ ID NO: 1333148 - DNA, 15 bp, Homo sapiens
atggaatttcgccat

SEQ ID NO: 1333149 - DNA, 15 bp, Homo sapiens
tatggaatttcgcca

SEQ ID NO: 1333150 - DNA, 15 bp, Homo sapiens
atatggaatttcgcc

SEQ ID NO: 1333151 - DNA, 15 bp, Homo sapiens
gatatggaatttcgc

SEQ ID NO: 1333152 - DNA, 15 bp, Homo sapiens
agatatggaatttcg

SEQ ID NO: 1333153 - DNA, 15 bp, Homo sapiens
tagatatggaatttc

SEQ ID NO: 1333154 - DNA, 15 bp, Homo sapiens
gtagatatggaattt

SEQ ID NO: 1333155 - DNA, 15 bp, Homo sapiens
agtagatatggaatt

SEQ ID NO: 1333156 - DNA, 15 bp, Homo sapiens
tagtagatatggaat

SEQ ID NO: 1333157 - DNA, 15 bp, Homo sapiens
ttagtagatatggaa

SEQ ID NO: 1333158 - DNA, 15 bp, Homo sapiens
tttagtagatatgga

SEQ ID NO: 1333159 - DNA, 15 bp, Homo sapiens
ttttagtagatatgg

SEQ ID NO: 1333160 - DNA, 15 bp, Homo sapiens
gttttagtagatatg

SEQ ID NO: 1333161 - DNA, 15 bp, Homo sapiens
ggttttagtagatat

SEQ ID NO: 1333162 - DNA, 15 bp, Homo sapiens
tggttttagtagata

SEQ ID NO: 1333163 - DNA, 15 bp, Homo sapiens
gtggttttagtagat

SEQ ID NO: 1333164 - DNA, 15 bp, Homo sapiens
tgtggttttagtaga

SEQ ID NO: 1333165 - DNA, 15 bp, Homo sapiens
ttgtggttttagtag

SEQ ID NO: 1333166 - DNA, 15 bp, Homo sapiens
tttgtggttttagta

SEQ ID NO: 1333167 - DNA, 15 bp, Homo sapiens
ttttgtggttttagt

SEQ ID NO: 1333168 - DNA, 15 bp, Homo sapiens
tttttgtggttttag

SEQ ID NO: 1333169 - DNA, 15 bp, Homo sapiens
atttttgtggtttta

SEQ ID NO: 1333170 - DNA, 15 bp, Homo sapiens
aatttttgtggtttt

SEQ ID NO: 1333171 - DNA, 15 bp, Homo sapiens
taatttttgtggttt

SEQ ID NO: 1333172 - DNA, 15 bp, Homo sapiens
ctaatttttgtggtt

SEQ ID NO: 1333173 - DNA, 15 bp, Homo sapiens
gctaatttttgtggt

SEQ ID NO: 1333174 - DNA, 15 bp, Homo sapiens
ggctaatttttgtgg

SEQ ID NO: 1333175 - DNA, 15 bp, Homo sapiens
tggctaatttttgtg

SEQ ID NO: 1333176 - DNA, 15 bp, Homo sapiens
ctgcccgccaccaca

SEQ ID NO: 1333177 - DNA, 15 bp, Homo sapiens
gctgcccgccaccac

SEQ ID NO: 1333178 - DNA, 15 bp, Homo sapiens
agctgcccgccacca

SEQ ID NO: 1333179 - DNA, 15 bp, Homo sapiens
cagctgcccgccacc

SEQ ID NO: 1333180 - DNA, 15 bp, Homo sapiens
acagctgcccgccac

SEQ ID NO: 1333181 - DNA, 15 bp, Homo sapiens
tacagctgcccgcca

SEQ ID NO: 1333182 - DNA, 15 bp, Homo sapiens
ttacagctgcccgcc

SEQ ID NO: 1333183 - DNA, 15 bp, Homo sapiens
attacagctgcccgc

SEQ ID NO: 1333184 - DNA, 15 bp, Homo sapiens
gattacagctgcccg

SEQ ID NO: 1333185 - DNA, 15 bp, Homo sapiens
ggattacagctgccc

SEQ ID NO: 1333186 - DNA, 15 bp, Homo sapiens
gggattacagctgcc

SEQ ID NO: 1333187 - DNA, 15 bp, Homo sapiens
tgggattacagctgc

SEQ ID NO: 1333188 - DNA, 15 bp, Homo sapiens
agctgggattacagc

SEQ ID NO: 1333189 - DNA, 15 bp, Homo sapiens
tgggtagctgggatt

SEQ ID NO: 1333190 - DNA, 15 bp, Homo sapiens
ctgggtagctgggat

SEQ ID NO: 1333191 - DNA, 15 bp, Homo sapiens
tctcagcctcctggg

SEQ ID NO: 1333192 - DNA, 15 bp, Homo sapiens
gtctcagcctcctgg

SEQ ID NO: 1333193 - DNA, 15 bp, Homo sapiens
agtctcagcctcctg

SEQ ID NO: 1333194 - DNA, 15 bp, Homo sapiens
cagtctcagcctcct

SEQ ID NO: 1333195 - DNA, 15 bp, Homo sapiens
ccagtctcagcctcc

SEQ ID NO: 1333196 - DNA, 15 bp, Homo sapiens
tccagtctcagcctc

SEQ ID NO: 1333197 - DNA, 15 bp, Homo sapiens
ctccagtctcagcct

SEQ ID NO: 1333198 - DNA, 15 bp, Homo sapiens
tctccagtctcagcc

SEQ ID NO: 1333199 - DNA, 15 bp, Homo sapiens
ttctccagtctcagc

SEQ ID NO: 1333200 - DNA, 15 bp, Homo sapiens
attctccagtctcag

SEQ ID NO: 1333201 - DNA, 15 bp, Homo sapiens
gattctccagtctca

SEQ ID NO: 1333202 - DNA, 15 bp, Homo sapiens
ggattctccagtctc

SEQ ID NO: 1333203 - DNA, 15 bp, Homo sapiens
gggattctccagtct

SEQ ID NO: 1333204 - DNA, 15 bp, Homo sapiens
ggggattctccagtc

SEQ ID NO: 1333205 - DNA, 15 bp, Homo sapiens
aggggattctccagt

SEQ ID NO: 1333206 - DNA, 15 bp, Homo sapiens
caggggattctccag

SEQ ID NO: 1333207 - DNA, 15 bp, Homo sapiens
tcaggggattctcca

SEQ ID NO: 1333208 - DNA, 15 bp, Homo sapiens
ttcaggggattctcc

SEQ ID NO: 1333209 - DNA, 15 bp, Homo sapiens
gttcaggggattctc

SEQ ID NO: 1333210 - DNA, 15 bp, Homo sapiens
ggttcaggggattct

SEQ ID NO: 1333211 - DNA, 15 bp, Homo sapiens
gggttcaggggattc

SEQ ID NO: 1333212 - DNA, 15 bp, Homo sapiens
tgggttcaggggatt

SEQ ID NO: 1333213 - DNA, 15 bp, Homo sapiens
ctgggttcaggggat

SEQ ID NO: 1333214 - DNA, 15 bp, Homo sapiens
cctgggttcagggga

SEQ ID NO: 1333215 - DNA, 15 bp, Homo sapiens
tcctgggttcagggg

SEQ ID NO: 1333216 - DNA, 15 bp, Homo sapiens
ctcctgggttcaggg

SEQ ID NO: 1333217 - DNA, 15 bp, Homo sapiens
cctcctgggttcagg

SEQ ID NO: 1333218 - DNA, 15 bp, Homo sapiens
gcctcctgggttcag

SEQ ID NO: 1333219 - DNA, 15 bp, Homo sapiens
atgcaacctccgcct

SEQ ID NO: 1333220 - DNA, 15 bp, Homo sapiens
aatgcaacctccgcc

SEQ ID NO: 1333221 - DNA, 15 bp, Homo sapiens
aaatgcaacctccgc

SEQ ID NO: 1333222 - DNA, 15 bp, Homo sapiens
taaatgcaacctccg

SEQ ID NO: 1333223 - DNA, 15 bp, Homo sapiens
ctaaatgcaacctcc

SEQ ID NO: 1333224 - DNA, 15 bp, Homo sapiens
gctaaatgcaacctc

SEQ ID NO: 1333225 - DNA, 15 bp, Homo sapiens
ggctaaatgcaacct

SEQ ID NO: 1333226 - DNA, 15 bp, Homo sapiens
cggctaaatgcaacc

SEQ ID NO: 1333227 - DNA, 15 bp, Homo sapiens
tcggctaaatgcaac

SEQ ID NO: 1333228 - DNA, 15 bp, Homo sapiens
ctcggctaaatgcaa

SEQ ID NO: 1333229 - DNA, 15 bp, Homo sapiens
tctcggctaaatgca

SEQ ID NO: 1333230 - DNA, 15 bp, Homo sapiens
atctcggctaaatgc

SEQ ID NO: 1333231 - DNA, 15 bp, Homo sapiens
gatctcggctaaatg

SEQ ID NO: 1333232 - DNA, 15 bp, Homo sapiens
tgatctcggctaaat

SEQ ID NO: 1333233 - DNA, 15 bp, Homo sapiens
gtgatctcggctaaa

SEQ ID NO: 1333234 - DNA, 15 bp, Homo sapiens
cgtgatctcggctaa

SEQ ID NO: 1333235 - DNA, 15 bp, Homo sapiens
gcgtgatctcggcta

SEQ ID NO: 1333236 - DNA, 15 bp, Homo sapiens
cagtgcagtggcgtg

SEQ ID NO: 1333237 - DNA, 15 bp, Homo sapiens
gcagtgcagtggcgt

SEQ ID NO: 1333238 - DNA, 15 bp, Homo sapiens
atctcgctctgttgc

SEQ ID NO: 1333239 - DNA, 15 bp, Homo sapiens
aatctcgctctgttg

SEQ ID NO: 1333240 - DNA, 15 bp, Homo sapiens
gaatctcgctctgtt

SEQ ID NO: 1333241 - DNA, 15 bp, Homo sapiens
agaatctcgctctgt

SEQ ID NO: 1333242 - DNA, 15 bp, Homo sapiens
cagaatctcgctctg

SEQ ID NO: 1333243 - DNA, 15 bp, Homo sapiens
acagaatctcgctct

SEQ ID NO: 1333244 - DNA, 15 bp, Homo sapiens
gacagaatctcgctc

SEQ ID NO: 1333245 - DNA, 15 bp, Homo sapiens
agacagaatctcgct

SEQ ID NO: 1333246 - DNA, 15 bp, Homo sapiens
gagacagaatctcgc

SEQ ID NO: 1333247 - DNA, 15 bp, Homo sapiens
tgagacagaatctcg

SEQ ID NO: 1333248 - DNA, 15 bp, Homo sapiens
gttttgagacagaat

SEQ ID NO: 1333249 - DNA, 15 bp, Homo sapiens
tgttttgagacagaa

SEQ ID NO: 1333250 - DNA, 15 bp, Homo sapiens
gttgttttgagacag

SEQ ID NO: 1333251 - DNA, 15 bp, Homo sapiens
tgttgttttgagaca

SEQ ID NO: 1333252 - DNA, 15 bp, Homo sapiens
ttgttgttttgagac

SEQ ID NO: 1333253 - DNA, 15 bp, Homo sapiens
gttgttgttttgaga

SEQ ID NO: 1333254 - DNA, 15 bp, Homo sapiens
tgttgttgttttgag

SEQ ID NO: 1333255 - DNA, 15 bp, Homo sapiens
ttgttgttgttttga

SEQ ID NO: 1333256 - DNA, 15 bp, Homo sapiens
attgttgttgttttg

SEQ ID NO: 1333257 - DNA, 15 bp, Homo sapiens
tattgttgttgtttt

SEQ ID NO: 1333258 - DNA, 15 bp, Homo sapiens
atattgttgttgttt

SEQ ID NO: 1333259 - DNA, 15 bp, Homo sapiens
tatattgttgttgtt

SEQ ID NO: 1333260 - DNA, 15 bp, Homo sapiens
ctatattgttgttgt

SEQ ID NO: 1333261 - DNA, 15 bp, Homo sapiens
tctatattgttgttg

SEQ ID NO: 1333262 - DNA, 15 bp, Homo sapiens
ttctatattgttgtt

SEQ ID NO: 1333263 - DNA, 15 bp, Homo sapiens
tttctatattgttgt

SEQ ID NO: 1333264 - DNA, 15 bp, Homo sapiens
ttttctatattgttg

SEQ ID NO: 1333265 - DNA, 15 bp, Homo sapiens
gttttctatattgtt

SEQ ID NO: 1333266 - DNA, 15 bp, Homo sapiens
agttttctatattgt

SEQ ID NO: 1333267 - DNA, 15 bp, Homo sapiens
aagttttctatattg

SEQ ID NO: 1333268 - DNA, 15 bp, Homo sapiens
gaagttttctatatt

SEQ ID NO: 1333269 - DNA, 15 bp, Homo sapiens
agaagttttctatat

SEQ ID NO: 1333270 - DNA, 15 bp, Homo sapiens
cagaagttttctata

SEQ ID NO: 1333271 - DNA, 15 bp, Homo sapiens
gcagaagttttctat

SEQ ID NO: 1333272 - DNA, 15 bp, Homo sapiens
agcagaagttttcta

SEQ ID NO: 1333273 - DNA, 15 bp, Homo sapiens
gagcagaagttttct

SEQ ID NO: 1333274 - DNA, 15 bp, Homo sapiens
agagcagaagttttc

SEQ ID NO: 1333275 - DNA, 15 bp, Homo sapiens
cagagcagaagtttt

SEQ ID NO: 1333276 - DNA, 15 bp, Homo sapiens
gcagagcagaagttt

SEQ ID NO: 1333277 - DNA, 15 bp, Homo sapiens
tgcagagcagaagtt

SEQ ID NO: 1333278 - DNA, 15 bp, Homo sapiens
ttgcagagcagaagt

SEQ ID NO: 1333279 - DNA, 15 bp, Homo sapiens
tttgcagagcagaag

SEQ ID NO: 1333280 - DNA, 15 bp, Homo sapiens
ctttgcagagcagaa

SEQ ID NO: 1333281 - DNA, 15 bp, Homo sapiens
tctttgcagagcaga

SEQ ID NO: 1333282 - DNA, 15 bp, Homo sapiens
ttctttgcagagcag

SEQ ID NO: 1333283 - DNA, 15 bp, Homo sapiens
gttctttgcagagca

SEQ ID NO: 1333284 - DNA, 15 bp, Homo sapiens
tgttctttgcagagc

SEQ ID NO: 1333285 - DNA, 15 bp, Homo sapiens
atgttctttgcagag

SEQ ID NO: 1333286 - DNA, 15 bp, Homo sapiens
catgttctttgcaga

SEQ ID NO: 1333287 - DNA, 15 bp, Homo sapiens
acatgttctttgcag

SEQ ID NO: 1333288 - DNA, 15 bp, Homo sapiens
aacatgttctttgca

SEQ ID NO: 1333289 - DNA, 15 bp, Homo sapiens
aaacatgttctttgc

SEQ ID NO: 1333290 - DNA, 15 bp, Homo sapiens
taaacatgttctttg

SEQ ID NO: 1333291 - DNA, 15 bp, Homo sapiens
ttaaacatgttcttt

SEQ ID NO: 1333292 - DNA, 15 bp, Homo sapiens
cttaaacatgttctt

SEQ ID NO: 1333293 - DNA, 15 bp, Homo sapiens
tcttaaacatgttct

SEQ ID NO: 1333294 - DNA, 15 bp, Homo sapiens
ctcttaaacatgttc

SEQ ID NO: 1333295 - DNA, 15 bp, Homo sapiens
tctcttaaacatgtt

SEQ ID NO: 1333296 - DNA, 15 bp, Homo sapiens
ttctcttaaacatgt

SEQ ID NO: 1333297 - DNA, 15 bp, Homo sapiens
attctcttaaacatg

SEQ ID NO: 1333298 - DNA, 15 bp, Homo sapiens
cattctcttaaacat

SEQ ID NO: 1333299 - DNA, 15 bp, Homo sapiens
tcattctcttaaaca

SEQ ID NO: 1333300 - DNA, 15 bp, Homo sapiens
ttcattctcttaaac

SEQ ID NO: 1333301 - DNA, 15 bp, Homo sapiens
tttcattctcttaaa

SEQ ID NO: 1333302 - DNA, 15 bp, Homo sapiens
ctttcattctcttaa

SEQ ID NO: 1333303 - DNA, 15 bp, Homo sapiens
tctttcattctctta

SEQ ID NO: 1333304 - DNA, 15 bp, Homo sapiens
atctttcattctctt

SEQ ID NO: 1333305 - DNA, 15 bp, Homo sapiens
tatctttcattctct

SEQ ID NO: 1333306 - DNA, 15 bp, Homo sapiens
ttatctttcattctc

SEQ ID NO: 1333307 - DNA, 15 bp, Homo sapiens
cttatctttcattct

SEQ ID NO: 1333308 - DNA, 15 bp, Homo sapiens
gcttatctttcattc

SEQ ID NO: 1333309 - DNA, 15 bp, Homo sapiens
agcttatctttcatt

SEQ ID NO: 1333310 - DNA, 15 bp, Homo sapiens
cagcttatctttcat

SEQ ID NO: 1333311 - DNA, 15 bp, Homo sapiens
gcagcttatctttca

SEQ ID NO: 1333312 - DNA, 15 bp, Homo sapiens
tgcagcttatctttc

SEQ ID NO: 1333313 - DNA, 15 bp, Homo sapiens
ctgcagcttatcttt

SEQ ID NO: 1333314 - DNA, 15 bp, Homo sapiens
actgcagcttatctt

SEQ ID NO: 1333315 - DNA, 15 bp, Homo sapiens
gactgcagcttatct

SEQ ID NO: 1333316 - DNA, 15 bp, Homo sapiens
agactgcagcttatc

SEQ ID NO: 1333317 - DNA, 15 bp, Homo sapiens
cagactgcagcttat

SEQ ID NO: 1333318 - DNA, 15 bp, Homo sapiens
ccagactgcagctta

SEQ ID NO: 1333319 - DNA, 15 bp, Homo sapiens
cccagactgcagctt

SEQ ID NO: 1333320 - DNA, 15 bp, Homo sapiens
tcccagactgcagct

SEQ ID NO: 1333321 - DNA, 15 bp, Homo sapiens
ctcccagactgcagc

SEQ ID NO: 1333322 - DNA, 15 bp, Homo sapiens
tctcccagactgcag

SEQ ID NO: 1333323 - DNA, 15 bp, Homo sapiens
ttctcccagactgca

SEQ ID NO: 1333324 - DNA, 15 bp, Homo sapiens
tttctcccagactgc

SEQ ID NO: 1333325 - DNA, 15 bp, Homo sapiens
atttctcccagactg

SEQ ID NO: 1333326 - DNA, 15 bp, Homo sapiens
tatttctcccagact

SEQ ID NO: 1333327 - DNA, 15 bp, Homo sapiens
atatttctcccagac

SEQ ID NO: 1333328 - DNA, 15 bp, Homo sapiens
aatatttctcccaga

SEQ ID NO: 1333329 - DNA, 15 bp, Homo sapiens
aaatatttctcccag

SEQ ID NO: 1333330 - DNA, 15 bp, Homo sapiens
caaatatttctccca

SEQ ID NO: 1333331 - DNA, 15 bp, Homo sapiens
gcaaatatttctccc

SEQ ID NO: 1333332 - DNA, 15 bp, Homo sapiens
tgcaaatatttctcc

SEQ ID NO: 1333333 - DNA, 15 bp, Homo sapiens
ttgcaaatatttctc

SEQ ID NO: 1333334 - DNA, 15 bp, Homo sapiens
cttgcaaatatttct

SEQ ID NO: 1333335 - DNA, 15 bp, Homo sapiens
acttgcaaatatttc

SEQ ID NO: 1333336 - DNA, 15 bp, Homo sapiens
gacttgcaaatattt

SEQ ID NO: 1333337 - DNA, 15 bp, Homo sapiens
tgacttgcaaatatt

SEQ ID NO: 1333338 - DNA, 15 bp, Homo sapiens
gtgacttgcaaatat

SEQ ID NO: 1333339 - DNA, 15 bp, Homo sapiens
ggtgacttgcaaata

SEQ ID NO: 1333340 - DNA, 15 bp, Homo sapiens
tggtgacttgcaaat

SEQ ID NO: 1333341 - DNA, 15 bp, Homo sapiens
ttggtgacttgcaaa

SEQ ID NO: 1333342 - DNA, 15 bp, Homo sapiens
attggtgacttgcaa

SEQ ID NO: 1333343 - DNA, 15 bp, Homo sapiens
gattggtgacttgca

SEQ ID NO: 1333344 - DNA, 15 bp, Homo sapiens
agattggtgacttgc

SEQ ID NO: 1333345 - DNA, 15 bp, Homo sapiens
cagattggtgacttg

SEQ ID NO: 1333346 - DNA, 15 bp, Homo sapiens
tcagattggtgactt

SEQ ID NO: 1333347 - DNA, 15 bp, Homo sapiens
gtcagattggtgact

SEQ ID NO: 1333348 - DNA, 15 bp, Homo sapiens
tgtcagattggtgac

SEQ ID NO: 1333349 - DNA, 15 bp, Homo sapiens
ttgtcagattggtga

SEQ ID NO: 1333350 - DNA, 15 bp, Homo sapiens
tttgtcagattggtg

SEQ ID NO: 1333351 - DNA, 15 bp, Homo sapiens
ctttgtcagattggt

SEQ ID NO: 1333352 - DNA, 15 bp, Homo sapiens
cctttgtcagattgg

SEQ ID NO: 1333353 - DNA, 15 bp, Homo sapiens
tcctttgtcagattg

SEQ ID NO: 1333354 - DNA, 15 bp, Homo sapiens
gtcctttgtcagatt

SEQ ID NO: 1333355 - DNA, 15 bp, Homo sapiens
agtcctttgtcagat

SEQ ID NO: 1333356 - DNA, 15 bp, Homo sapiens
aagtcctttgtcaga

SEQ ID NO: 1333357 - DNA, 15 bp, Homo sapiens
aaagtcctttgtcag

SEQ ID NO: 1333358 - DNA, 15 bp, Homo sapiens
aaaagtcctttgtca

SEQ ID NO: 1333359 - DNA, 15 bp, Homo sapiens
aaaaagtcctttgtc

SEQ ID NO: 1333360 - DNA, 15 bp, Homo sapiens
gaaaaagtcctttgt

SEQ ID NO: 1333361 - DNA, 15 bp, Homo sapiens
agaaaaagtcctttg

SEQ ID NO: 1333362 - DNA, 15 bp, Homo sapiens
tagaaaaagtccttt

SEQ ID NO: 1333363 - DNA, 15 bp, Homo sapiens
ctagaaaaagtcctt

SEQ ID NO: 1333364 - DNA, 15 bp, Homo sapiens
tctagaaaaagtcct

SEQ ID NO: 1333365 - DNA, 15 bp, Homo sapiens
ttctagaaaaagtcc

SEQ ID NO: 1333366 - DNA, 15 bp, Homo sapiens
attctagaaaaagtc

SEQ ID NO: 1333367 - DNA, 15 bp, Homo sapiens
tattctagaaaaagt

SEQ ID NO: 1333368 - DNA, 15 bp, Homo sapiens
atattctagaaaaag

SEQ ID NO: 1333369 - DNA, 15 bp, Homo sapiens
tatattctagaaaaa

SEQ ID NO: 1333370 - DNA, 15 bp, Homo sapiens
atatattctagaaaa

SEQ ID NO: 1333371 - DNA, 15 bp, Homo sapiens
tatatattctagaaa

SEQ ID NO: 1333372 - DNA, 15 bp, Homo sapiens
ctatatattctagaa

SEQ ID NO: 1333373 - DNA, 15 bp, Homo sapiens
tctatatattctaga

SEQ ID NO: 1333374 - DNA, 15 bp, Homo sapiens
ttctatatattctag

SEQ ID NO: 1333375 - DNA, 15 bp, Homo sapiens
tttctatatattcta

SEQ ID NO: 1333376 - DNA, 15 bp, Homo sapiens
ttttctatatattct

SEQ ID NO: 1333377 - DNA, 15 bp, Homo sapiens
gttttctatatattc

SEQ ID NO: 1333378 - DNA, 15 bp, Homo sapiens
tgttttctatatatt

SEQ ID NO: 1333379 - DNA, 15 bp, Homo sapiens
atgttttctatatat

SEQ ID NO: 1333380 - DNA, 15 bp, Homo sapiens
tatgttttctatata

SEQ ID NO: 1333381 - DNA, 15 bp, Homo sapiens
ttatgttttctatat

SEQ ID NO: 1333382 - DNA, 15 bp, Homo sapiens
cttatgttttctata

SEQ ID NO: 1333383 - DNA, 15 bp, Homo sapiens
tcttatgttttctat

SEQ ID NO: 1333384 - DNA, 15 bp, Homo sapiens
gtcttatgttttcta

SEQ ID NO: 1333385 - DNA, 15 bp, Homo sapiens
ggtcttatgttttct

SEQ ID NO: 1333386 - DNA, 15 bp, Homo sapiens
cggtcttatgttttc

SEQ ID NO: 1333387 - DNA, 15 bp, Homo sapiens
ccggtcttatgtttt

SEQ ID NO: 1333388 - DNA, 15 bp, Homo sapiens
cccggtcttatgttt

SEQ ID NO: 1333389 - DNA, 15 bp, Homo sapiens
gcccggtcttatgtt

SEQ ID NO: 1333390 - DNA, 15 bp, Homo sapiens
cgcccggtcttatgt

SEQ ID NO: 1333391 - DNA, 15 bp, Homo sapiens
gcgcccggtcttatg

SEQ ID NO: 1333392 - DNA, 15 bp, Homo sapiens
cgcgcccggtcttat

SEQ ID NO: 1333393 - DNA, 15 bp, Homo sapiens
ccgcgcccggtctta

SEQ ID NO: 1333394 - DNA, 15 bp, Homo sapiens
accgcgcccggtctt

SEQ ID NO: 1333395 - DNA, 15 bp, Homo sapiens
caccgcgcccggtct

SEQ ID NO: 1333396 - DNA, 15 bp, Homo sapiens
ccaccgcgcccggtc

SEQ ID NO: 1333397 - DNA, 15 bp, Homo sapiens
gccaccgcgcccggt

SEQ ID NO: 1333398 - DNA, 15 bp, Homo sapiens
tgcccgcctcagcct

SEQ ID NO: 1333399 - DNA, 15 bp, Homo sapiens
ctgcccgcctcagcc

SEQ ID NO: 1333400 - DNA, 15 bp, Homo sapiens
tctgcccgcctcagc

SEQ ID NO: 1333401 - DNA, 15 bp, Homo sapiens
cgtgatctgcccgcc

SEQ ID NO: 1333402 - DNA, 15 bp, Homo sapiens
tcgtgatctgcccgc

SEQ ID NO: 1333403 - DNA, 15 bp, Homo sapiens
ctcgtgatctgcccg

SEQ ID NO: 1333404 - DNA, 15 bp, Homo sapiens
cctcgtgatctgccc

SEQ ID NO: 1333405 - DNA, 15 bp, Homo sapiens
taccgtgttagccag

SEQ ID NO: 1333406 - DNA, 15 bp, Homo sapiens
ttaccgtgttagcca

SEQ ID NO: 1333407 - DNA, 15 bp, Homo sapiens
tttaccgtgttagcc

SEQ ID NO: 1333408 - DNA, 15 bp, Homo sapiens
ttttaccgtgttagc

SEQ ID NO: 1333409 - DNA, 15 bp, Homo sapiens
gttttaccgtgttag

SEQ ID NO: 1333410 - DNA, 15 bp, Homo sapiens
ggttttaccgtgtta

SEQ ID NO: 1333411 - DNA, 15 bp, Homo sapiens
gggttttaccgtgtt

SEQ ID NO: 1333412 - DNA, 15 bp, Homo sapiens
ggggttttaccgtgt

SEQ ID NO: 1333413 - DNA, 15 bp, Homo sapiens
cggggttttaccgtg

SEQ ID NO: 1333414 - DNA, 15 bp, Homo sapiens
acggggttttaccgt

SEQ ID NO: 1333415 - DNA, 15 bp, Homo sapiens
gacggggttttaccg

SEQ ID NO: 1333416 - DNA, 15 bp, Homo sapiens
acccggctaattttt

SEQ ID NO: 1333417 - DNA, 15 bp, Homo sapiens
cacccggctaatttt

SEQ ID NO: 1333418 - DNA, 15 bp, Homo sapiens
acacccggctaattt

SEQ ID NO: 1333419 - DNA, 15 bp, Homo sapiens
cacacccggctaatt

SEQ ID NO: 1333420 - DNA, 15 bp, Homo sapiens
ccacacccggctaat

SEQ ID NO: 1333421 - DNA, 15 bp, Homo sapiens
accacacccggctaa

SEQ ID NO: 1333422 - DNA, 15 bp, Homo sapiens
caccacacccggcta

SEQ ID NO: 1333423 - DNA, 15 bp, Homo sapiens
gtgccaccacacccg

SEQ ID NO: 1333424 - DNA, 15 bp, Homo sapiens
ctacaggcacgtgcc

SEQ ID NO: 1333425 - DNA, 15 bp, Homo sapiens
actacaggcacgtgc

SEQ ID NO: 1333426 - DNA, 15 bp, Homo sapiens
gactacaggcacgtg

SEQ ID NO: 1333427 - DNA, 15 bp, Homo sapiens
aacgccattctcctg

SEQ ID NO: 1333428 - DNA, 15 bp, Homo sapiens
taacgccattctcct

SEQ ID NO: 1333429 - DNA, 15 bp, Homo sapiens
ttaacgccattctcc

SEQ ID NO: 1333430 - DNA, 15 bp, Homo sapiens
gttaacgccattctc

SEQ ID NO: 1333431 - DNA, 15 bp, Homo sapiens
ggttaacgccattct

SEQ ID NO: 1333432 - DNA, 15 bp, Homo sapiens
gggttaacgccattc

SEQ ID NO: 1333433 - DNA, 15 bp, Homo sapiens
cgggttaacgccatt

SEQ ID NO: 1333434 - DNA, 15 bp, Homo sapiens
ccgggttaacgccat

SEQ ID NO: 1333435 - DNA, 15 bp, Homo sapiens
cccgggttaacgcca

SEQ ID NO: 1333436 - DNA, 15 bp, Homo sapiens
tcccgggttaacgcc

SEQ ID NO: 1333437 - DNA, 15 bp, Homo sapiens
ctcccgggttaacgc

SEQ ID NO: 1333438 - DNA, 15 bp, Homo sapiens
cctcccgggttaacg

SEQ ID NO: 1333439 - DNA, 15 bp, Homo sapiens
gcctcccgggttaac

SEQ ID NO: 1333440 - DNA, 15 bp, Homo sapiens
cgcctcccgggttaa

SEQ ID NO: 1333441 - DNA, 15 bp, Homo sapiens
tcgcctcccgggtta

SEQ ID NO: 1333442 - DNA, 15 bp, Homo sapiens
ttcgcctcccgggtt

SEQ ID NO: 1333443 - DNA, 15 bp, Homo sapiens
cttcgcctcccgggt

SEQ ID NO: 1333444 - DNA, 15 bp, Homo sapiens
ccttcgcctcccggg

SEQ ID NO: 1333445 - DNA, 15 bp, Homo sapiens
accttcgcctcccgg

SEQ ID NO: 1333446 - DNA, 15 bp, Homo sapiens
aaccttcgcctcccg

SEQ ID NO: 1333447 - DNA, 15 bp, Homo sapiens
caaccttcgcctccc

SEQ ID NO: 1333448 - DNA, 15 bp, Homo sapiens
gcaaccttcgcctcc

SEQ ID NO: 1333449 - DNA, 15 bp, Homo sapiens
tgcaaccttcgcctc

SEQ ID NO: 1333450 - DNA, 15 bp, Homo sapiens
ctgcaaccttcgcct

SEQ ID NO: 1333451 - DNA, 15 bp, Homo sapiens
gtggcgcgatctcgg

SEQ ID NO: 1333452 - DNA, 15 bp, Homo sapiens
agtggcgcgatctcg

SEQ ID NO: 1333453 - DNA, 15 bp, Homo sapiens
ggcagtggcgcgatc

SEQ ID NO: 1333454 - DNA, 15 bp, Homo sapiens
gggcagtggcgcgat

SEQ ID NO: 1333455 - DNA, 15 bp, Homo sapiens
agggcagtggcgcga

SEQ ID NO: 1333456 - DNA, 15 bp, Homo sapiens
aagggcagtggcgcg

SEQ ID NO: 1333457 - DNA, 15 bp, Homo sapiens
gaagggcagtggcgc

SEQ ID NO: 1333458 - DNA, 15 bp, Homo sapiens
tgaagggcagtggcg

SEQ ID NO: 1333459 - DNA, 15 bp, Homo sapiens
ctgaagggcagtggc

SEQ ID NO: 1333460 - DNA, 15 bp, Homo sapiens
gctgaagggcagtgg

SEQ ID NO: 1333461 - DNA, 15 bp, Homo sapiens
ggctgaagggcagtg

SEQ ID NO: 1333462 - DNA, 15 bp, Homo sapiens
aggctgaagggcagt

SEQ ID NO: 1333463 - DNA, 15 bp, Homo sapiens
caggctgaagggcag

SEQ ID NO: 1333464 - DNA, 15 bp, Homo sapiens
ccaggctgaagggca

SEQ ID NO: 1333465 - DNA, 15 bp, Homo sapiens
cccaggctgaagggc

SEQ ID NO: 1333466 - DNA, 15 bp, Homo sapiens
acccaggctgaaggg

SEQ ID NO: 1333467 - DNA, 15 bp, Homo sapiens
cacccaggctgaagg

SEQ ID NO: 1333468 - DNA, 15 bp, Homo sapiens
cgttctgtcacccag

SEQ ID NO: 1333469 - DNA, 15 bp, Homo sapiens
tcgttctgtcaccca

SEQ ID NO: 1333470 - DNA, 15 bp, Homo sapiens
ctcgttctgtcaccc

SEQ ID NO: 1333471 - DNA, 15 bp, Homo sapiens
tctcgttctgtcacc

SEQ ID NO: 1333472 - DNA, 15 bp, Homo sapiens
gtctcgttctgtcac

SEQ ID NO: 1333473 - DNA, 15 bp, Homo sapiens
agtctcgttctgtca

SEQ ID NO: 1333474 - DNA, 15 bp, Homo sapiens
gagtctcgttctgtc

SEQ ID NO: 1333475 - DNA, 15 bp, Homo sapiens
agagtctcgttctgt

SEQ ID NO: 1333476 - DNA, 15 bp, Homo sapiens
cagagtctcgttctg

SEQ ID NO: 1333477 - DNA, 15 bp, Homo sapiens
acagagtctcgttct

SEQ ID NO: 1333478 - DNA, 15 bp, Homo sapiens
gacagagtctcgttc

SEQ ID NO: 1333479 - DNA, 15 bp, Homo sapiens
agacagagtctcgtt

SEQ ID NO: 1333480 - DNA, 15 bp, Homo sapiens
gagacagagtctcgt

SEQ ID NO: 1333481 - DNA, 15 bp, Homo sapiens
gttttcttttctttt

SEQ ID NO: 1333482 - DNA, 15 bp, Homo sapiens
tgttttcttttcttt

SEQ ID NO: 1333483 - DNA, 15 bp, Homo sapiens
atgttttcttttctt

SEQ ID NO: 1333484 - DNA, 15 bp, Homo sapiens
catgttttcttttct

SEQ ID NO: 1333485 - DNA, 15 bp, Homo sapiens
tcatgttttcttttc

SEQ ID NO: 1333486 - DNA, 15 bp, Homo sapiens
ttcatgttttctttt

SEQ ID NO: 1333487 - DNA, 15 bp, Homo sapiens
tttcatgttttcttt

SEQ ID NO: 1333488 - DNA, 15 bp, Homo sapiens
gtttcatgttttctt

SEQ ID NO: 1333489 - DNA, 15 bp, Homo sapiens
tgtttcatgttttct

SEQ ID NO: 1333490 - DNA, 15 bp, Homo sapiens
gtgtttcatgttttc

SEQ ID NO: 1333491 - DNA, 15 bp, Homo sapiens
tgtgtttcatgtttt

SEQ ID NO: 1333492 - DNA, 15 bp, Homo sapiens
ttgtgtttcatgttt

SEQ ID NO: 1333493 - DNA, 15 bp, Homo sapiens
gttgtgtttcatgtt

SEQ ID NO: 1333494 - DNA, 15 bp, Homo sapiens
tgttgtgtttcatgt

SEQ ID NO: 1333495 - DNA, 15 bp, Homo sapiens
ttgttgtgtttcatg

SEQ ID NO: 1333496 - DNA, 15 bp, Homo sapiens
attgttgtgtttcat

SEQ ID NO: 1333497 - DNA, 15 bp, Homo sapiens
tattgttgtgtttca

SEQ ID NO: 1333498 - DNA, 15 bp, Homo sapiens
atattgttgtgtttc

SEQ ID NO: 1333499 - DNA, 15 bp, Homo sapiens
catattgttgtgttt

SEQ ID NO: 1333500 - DNA, 15 bp, Homo sapiens
tcatattgttgtgtt

SEQ ID NO: 1333501 - DNA, 15 bp, Homo sapiens
ttcatattgttgtgt

SEQ ID NO: 1333502 - DNA, 15 bp, Homo sapiens
tttcatattgttgtg

SEQ ID NO: 1333503 - DNA, 15 bp, Homo sapiens
ttttcatattgttgt

SEQ ID NO: 1333504 - DNA, 15 bp, Homo sapiens
gttttcatattgttg

SEQ ID NO: 1333505 - DNA, 15 bp, Homo sapiens
tgttttcatattgtt

SEQ ID NO: 1333506 - DNA, 15 bp, Homo sapiens
ctgttttcatattgt

SEQ ID NO: 1333507 - DNA, 15 bp, Homo sapiens
gctgttttcatattg

SEQ ID NO: 1333508 - DNA, 15 bp, Homo sapiens
agctgttttcatatt

SEQ ID NO: 1333509 - DNA, 15 bp, Homo sapiens
gagctgttttcatat

SEQ ID NO: 1333510 - DNA, 15 bp, Homo sapiens
agagctgttttcata

SEQ ID NO: 1333511 - DNA, 15 bp, Homo sapiens
gagagctgttttcat

SEQ ID NO: 1333512 - DNA, 15 bp, Homo sapiens
cgagagctgttttca

SEQ ID NO: 1333513 - DNA, 15 bp, Homo sapiens
ccgagagctgttttc

SEQ ID NO: 1333514 - DNA, 15 bp, Homo sapiens
gccgagagctgtttt

SEQ ID NO: 1333515 - DNA, 15 bp, Homo sapiens
agccgagagctgttt

SEQ ID NO: 1333516 - DNA, 15 bp, Homo sapiens
aagccgagagctgtt

SEQ ID NO: 1333517 - DNA, 15 bp, Homo sapiens
aaagccgagagctgt

SEQ ID NO: 1333518 - DNA, 15 bp, Homo sapiens
gaaagccgagagctg

SEQ ID NO: 1333519 - DNA, 15 bp, Homo sapiens
cgaaagccgagagct

SEQ ID NO: 1333520 - DNA, 15 bp, Homo sapiens
ccgaaagccgagagc

SEQ ID NO: 1333521 - DNA, 15 bp, Homo sapiens
gccgaaagccgagag

SEQ ID NO: 1333522 - DNA, 15 bp, Homo sapiens
agccgaaagccgaga

SEQ ID NO: 1333523 - DNA, 15 bp, Homo sapiens
gagccgaaagccgag

SEQ ID NO: 1333524 - DNA, 15 bp, Homo sapiens
cgagccgaaagccga

SEQ ID NO: 1333525 - DNA, 15 bp, Homo sapiens
ccgagccgaaagccg

SEQ ID NO: 1333526 - DNA, 15 bp, Homo sapiens
tccgagccgaaagcc

SEQ ID NO: 1333527 - DNA, 15 bp, Homo sapiens
ctccgagccgaaagc

SEQ ID NO: 1333528 - DNA, 15 bp, Homo sapiens
cctccgagccgaaag

SEQ ID NO: 1333529 - DNA, 15 bp, Homo sapiens
tcctccgagccgaaa

SEQ ID NO: 1333530 - DNA, 15 bp, Homo sapiens
ctcctccgagccgaa

SEQ ID NO: 1333531 - DNA, 15 bp, Homo sapiens
cctcctccgagccga

SEQ ID NO: 1333532 - DNA, 15 bp, Homo sapiens
gcctcctccgagccg

SEQ ID NO: 1333533 - DNA, 15 bp, Homo sapiens
ggcctcctccgagcc

SEQ ID NO: 1333534 - DNA, 15 bp, Homo sapiens
tggcctcctccgagc

SEQ ID NO: 1333535 - DNA, 15 bp, Homo sapiens
ttggcctcctccgag

SEQ ID NO: 1333536 - DNA, 15 bp, Homo sapiens
cttggcctcctccga

SEQ ID NO: 1333537 - DNA, 15 bp, Homo sapiens
ccttggcctcctccg

SEQ ID NO: 1333538 - DNA, 15 bp, Homo sapiens
accttggcctcctcc

SEQ ID NO: 1333539 - DNA, 15 bp, Homo sapiens
caccttggcctcctc

SEQ ID NO: 1333540 - DNA, 15 bp, Homo sapiens
gcaccttggcctcct

SEQ ID NO: 1333541 - DNA, 15 bp, Homo sapiens
tgcaccttggcctcc

SEQ ID NO: 1333542 - DNA, 15 bp, Homo sapiens
ttgcaccttggcctc

SEQ ID NO: 1333543 - DNA, 15 bp, Homo sapiens
gttgcaccttggcct

SEQ ID NO: 1333544 - DNA, 15 bp, Homo sapiens
agttgcaccttggcc

SEQ ID NO: 1333545 - DNA, 15 bp, Homo sapiens
aagttgcaccttggc

SEQ ID NO: 1333546 - DNA, 15 bp, Homo sapiens
aaagttgcaccttgg

SEQ ID NO: 1333547 - DNA, 15 bp, Homo sapiens
gaaagttgcaccttg

SEQ ID NO: 1333548 - DNA, 15 bp, Homo sapiens
agaaagttgcacctt

SEQ ID NO: 1333549 - DNA, 15 bp, Homo sapiens
aagaaagttgcacct

SEQ ID NO: 1333550 - DNA, 15 bp, Homo sapiens
gaagaaagttgcacc

SEQ ID NO: 1333551 - DNA, 15 bp, Homo sapiens
ggaagaaagttgcac

SEQ ID NO: 1333552 - DNA, 15 bp, Homo sapiens
cggaagaaagttgca

SEQ ID NO: 1333553 - DNA, 15 bp, Homo sapiens
acggaagaaagttgc

SEQ ID NO: 1333554 - DNA, 15 bp, Homo sapiens
gacggaagaaagttg

SEQ ID NO: 1333555 - DNA, 15 bp, Homo sapiens
cgacggaagaaagtt

SEQ ID NO: 1333556 - DNA, 15 bp, Homo sapiens
acgacggaagaaagt

SEQ ID NO: 1333557 - DNA, 15 bp, Homo sapiens
aacgacggaagaaag

SEQ ID NO: 1333558 - DNA, 15 bp, Homo sapiens
gaacgacggaagaaa

SEQ ID NO: 1333559 - DNA, 15 bp, Homo sapiens
ggaacgacggaagaa

SEQ ID NO: 1333560 - DNA, 15 bp, Homo sapiens
cggaacgacggaaga

SEQ ID NO: 1333561 - DNA, 15 bp, Homo sapiens
tcggaacgacggaag

SEQ ID NO: 1333562 - DNA, 15 bp, Homo sapiens
ttcggaacgacggaa

SEQ ID NO: 1333563 - DNA, 15 bp, Homo sapiens
attcggaacgacgga

SEQ ID NO: 1333564 - DNA, 15 bp, Homo sapiens
gattcggaacgacgg

SEQ ID NO: 1333565 - DNA, 15 bp, Homo sapiens
ggattcggaacgacg

SEQ ID NO: 1333566 - DNA, 15 bp, Homo sapiens
cggattcggaacgac

SEQ ID NO: 1333567 - DNA, 15 bp, Homo sapiens
ccggattcggaacga

SEQ ID NO: 1333568 - DNA, 15 bp, Homo sapiens
cccggattcggaacg

SEQ ID NO: 1333569 - DNA, 15 bp, Homo sapiens
acccggattcggaac

SEQ ID NO: 1333570 - DNA, 15 bp, Homo sapiens
aacccggattcggaa

SEQ ID NO: 1333571 - DNA, 15 bp, Homo sapiens
gaacccggattcgga

SEQ ID NO: 1333572 - DNA, 15 bp, Homo sapiens
tgaacccggattcgg

SEQ ID NO: 1333573 - DNA, 15 bp, Homo sapiens
atgaacccggattcg

SEQ ID NO: 1333574 - DNA, 15 bp, Homo sapiens
gatgaacccggattc

SEQ ID NO: 1333575 - DNA, 15 bp, Homo sapiens
ggatgaacccggatt

SEQ ID NO: 1333576 - DNA, 15 bp, Homo sapiens
gggatgaacccggat

SEQ ID NO: 1333577 - DNA, 15 bp, Homo sapiens
tgggatgaacccgga

SEQ ID NO: 1333578 - DNA, 15 bp, Homo sapiens
gtgggatgaacccgg

SEQ ID NO: 1333579 - DNA, 15 bp, Homo sapiens
tgtgggatgaacccg

SEQ ID NO: 1333580 - DNA, 15 bp, Homo sapiens
gtgtgggatgaaccc

SEQ ID NO: 1333581 - DNA, 15 bp, Homo sapiens
ggtgtgggatgaacc

SEQ ID NO: 1333582 - DNA, 15 bp, Homo sapiens
tggtgtgggatgaac

SEQ ID NO: 1333583 - DNA, 15 bp, Homo sapiens
ctggtgtgggatgaa

SEQ ID NO: 1333584 - DNA, 15 bp, Homo sapiens
gctggtgtgggatga

SEQ ID NO: 1333585 - DNA, 15 bp, Homo sapiens
ggctggtgtgggatg

SEQ ID NO: 1333586 - DNA, 15 bp, Homo sapiens
cggctggtgtgggat

SEQ ID NO: 1333587 - DNA, 15 bp, Homo sapiens
gcggctggtgtggga

SEQ ID NO: 1333588 - DNA, 15 bp, Homo sapiens
ggcggctggtgtggg

SEQ ID NO: 1333589 - DNA, 15 bp, Homo sapiens
aggcggctggtgtgg

SEQ ID NO: 1333590 - DNA, 15 bp, Homo sapiens
gaggcggctggtgtg

SEQ ID NO: 1333591 - DNA, 15 bp, Homo sapiens
ggaggcggctggtgt

SEQ ID NO: 1333592 - DNA, 15 bp, Homo sapiens
tggaggcggctggtg

SEQ ID NO: 1333593 - DNA, 15 bp, Homo sapiens
gtggaggcggctggt

SEQ ID NO: 1333594 - DNA, 15 bp, Homo sapiens
ggtggaggcggctgg

SEQ ID NO: 1333595 - DNA, 15 bp, Homo sapiens
tggtggaggcggctg

SEQ ID NO: 1333596 - DNA, 15 bp, Homo sapiens
atggtggaggcggct

SEQ ID NO: 1333597 - DNA, 15 bp, Homo sapiens
catggtggaggcggc

SEQ ID NO: 1333598 - DNA, 15 bp, Homo sapiens
gcatggtggaggcgg

SEQ ID NO: 1333599 - DNA, 15 bp, Homo sapiens
ggcatggtggaggcg

SEQ ID NO: 1333600 - DNA, 15 bp, Homo sapiens
tggcatggtggaggc

SEQ ID NO: 1333601 - DNA, 15 bp, Homo sapiens
gtggcatggtggagg

SEQ ID NO: 1333602 - DNA, 15 bp, Homo sapiens
ggtggcatggtggag

SEQ ID NO: 1333603 - DNA, 15 bp, Homo sapiens
cggtggcatggtgga

SEQ ID NO: 1333604 - DNA, 15 bp, Homo sapiens
tcggtggcatggtgg

SEQ ID NO: 1333605 - DNA, 15 bp, Homo sapiens
ttcggtggcatggtg

SEQ ID NO: 1333606 - DNA, 15 bp, Homo sapiens
cttcggtggcatggt

SEQ ID NO: 1333607 - DNA, 15 bp, Homo sapiens
acttcggtggcatgg

SEQ ID NO: 1333608 - DNA, 15 bp, Homo sapiens
aacttcggtggcatg

SEQ ID NO: 1333609 - DNA, 15 bp, Homo sapiens
gaacttcggtggcat

SEQ ID NO: 1333610 - DNA, 15 bp, Homo sapiens
cgaacttcggtggca

SEQ ID NO: 1333611 - DNA, 15 bp, Homo sapiens
tcgaacttcggtggc

SEQ ID NO: 1333612 - DNA, 15 bp, Homo sapiens
gtcgaacttcggtgg

SEQ ID NO: 1333613 - DNA, 15 bp, Homo sapiens
ggtcgaacttcggtg

SEQ ID NO: 1333614 - DNA, 15 bp, Homo sapiens
gggtcgaacttcggt

SEQ ID NO: 1333615 - DNA, 15 bp, Homo sapiens
ggggtcgaacttcgg

SEQ ID NO: 1333616 - DNA, 15 bp, Homo sapiens
tggggtcgaacttcg

SEQ ID NO: 1333617 - DNA, 15 bp, Homo sapiens
ttggggtcgaacttc

SEQ ID NO: 1333618 - DNA, 15 bp, Homo sapiens
gttggggtcgaactt

SEQ ID NO: 1333619 - DNA, 15 bp, Homo sapiens
tgttggggtcgaact

SEQ ID NO: 1333620 - DNA, 15 bp, Homo sapiens
ttgttggggtcgaac

SEQ ID NO: 1333621 - DNA, 15 bp, Homo sapiens
cttgttggggtcgaa

SEQ ID NO: 1333622 - DNA, 15 bp, Homo sapiens
tcttgttggggtcga

SEQ ID NO: 1333623 - DNA, 15 bp, Homo sapiens
atcttgttggggtcg

SEQ ID NO: 1333624 - DNA, 15 bp, Homo sapiens
gatcttgttggggtc

SEQ ID NO: 1333625 - DNA, 15 bp, Homo sapiens
tgatcttgttggggt

SEQ ID NO: 1333626 - DNA, 15 bp, Homo sapiens
ttgatcttgttgggg

SEQ ID NO: 1333627 - DNA, 15 bp, Homo sapiens
tttgatcttgttggg

SEQ ID NO: 1333628 - DNA, 15 bp, Homo sapiens
ctttgatcttgttgg

SEQ ID NO: 1333629 - DNA, 15 bp, Homo sapiens
actttgatcttgttg

SEQ ID NO: 1333630 - DNA, 15 bp, Homo sapiens
gactttgatcttgtt

SEQ ID NO: 1333631 - DNA, 15 bp, Homo sapiens
cgactttgatcttgt

SEQ ID NO: 1333632 - DNA, 15 bp, Homo sapiens
acgactttgatcttg

SEQ ID NO: 1333633 - DNA, 15 bp, Homo sapiens
tacgactttgatctt

SEQ ID NO: 1333634 - DNA, 15 bp, Homo sapiens
atacgactttgatct

SEQ ID NO: 1333635 - DNA, 15 bp, Homo sapiens
tatacgactttgatc

SEQ ID NO: 1333636 - DNA, 15 bp, Homo sapiens
gtatacgactttgat

SEQ ID NO: 1333637 - DNA, 15 bp, Homo sapiens
ggtatacgactttga

SEQ ID NO: 1333638 - DNA, 15 bp, Homo sapiens
aggtatacgactttg

SEQ ID NO: 1333639 - DNA, 15 bp, Homo sapiens
caggtatacgacttt

SEQ ID NO: 1333640 - DNA, 15 bp, Homo sapiens
tcaggtatacgactt

SEQ ID NO: 1333641 - DNA, 15 bp, Homo sapiens
ctcaggtatacgact

SEQ ID NO: 1333642 - DNA, 15 bp, Homo sapiens
cctcaggtatacgac

SEQ ID NO: 1333643 - DNA, 15 bp, Homo sapiens
acctcaggtatacga

SEQ ID NO: 1333644 - DNA, 15 bp, Homo sapiens
cacctcaggtatacg

SEQ ID NO: 1333645 - DNA, 15 bp, Homo sapiens
gcacctcaggtatac

SEQ ID NO: 1333646 - DNA, 15 bp, Homo sapiens
tgcacctcaggtata

SEQ ID NO: 1333647 - DNA, 15 bp, Homo sapiens
gtgcacctcaggtat

SEQ ID NO: 1333648 - DNA, 15 bp, Homo sapiens
ggtgcacctcaggta

SEQ ID NO: 1333649 - DNA, 15 bp, Homo sapiens
cggtgcacctcaggt

SEQ ID NO: 1333650 - DNA, 15 bp, Homo sapiens
ccggtgcacctcagg

SEQ ID NO: 1333651 - DNA, 15 bp, Homo sapiens
tccggtgcacctcag

SEQ ID NO: 1333652 - DNA, 15 bp, Homo sapiens
ctccggtgcacctca

SEQ ID NO: 1333653 - DNA, 15 bp, Homo sapiens
cctccggtgcacctc

SEQ ID NO: 1333654 - DNA, 15 bp, Homo sapiens
acctccggtgcacct

SEQ ID NO: 1333655 - DNA, 15 bp, Homo sapiens
cacctccggtgcacc

SEQ ID NO: 1333656 - DNA, 15 bp, Homo sapiens
tcacctccggtgcac

SEQ ID NO: 1333657 - DNA, 15 bp, Homo sapiens
ttcacctccggtgca

SEQ ID NO: 1333658 - DNA, 15 bp, Homo sapiens
cttcacctccggtgc

SEQ ID NO: 1333659 - DNA, 15 bp, Homo sapiens
acttcacctccggtg

SEQ ID NO: 1333660 - DNA, 15 bp, Homo sapiens
gacttcacctccggt

SEQ ID NO: 1333661 - DNA, 15 bp, Homo sapiens
cgacttcacctccgg

SEQ ID NO: 1333662 - DNA, 15 bp, Homo sapiens
ccgacttcacctccg

SEQ ID NO: 1333663 - DNA, 15 bp, Homo sapiens
accgacttcacctcc

SEQ ID NO: 1333664 - DNA, 15 bp, Homo sapiens
caccgacttcacctc

SEQ ID NO: 1333665 - DNA, 15 bp, Homo sapiens
gcaccgacttcacct

SEQ ID NO: 1333666 - DNA, 15 bp, Homo sapiens
ggcaccgacttcacc

SEQ ID NO: 1333667 - DNA, 15 bp, Homo sapiens
tggcaccgacttcac

SEQ ID NO: 1333668 - DNA, 15 bp, Homo sapiens
gtggcaccgacttca

SEQ ID NO: 1333669 - DNA, 15 bp, Homo sapiens
agtggcaccgacttc

SEQ ID NO: 1333670 - DNA, 15 bp, Homo sapiens
aagtggcaccgactt

SEQ ID NO: 1333671 - DNA, 15 bp, Homo sapiens
gaagtggcaccgact

SEQ ID NO: 1333672 - DNA, 15 bp, Homo sapiens
agaagtggcaccgac

SEQ ID NO: 1333673 - DNA, 15 bp, Homo sapiens
cagaagtggcaccga

SEQ ID NO: 1333674 - DNA, 15 bp, Homo sapiens
gcagaagtggcaccg

SEQ ID NO: 1333675 - DNA, 15 bp, Homo sapiens
ggcagaagtggcacc

SEQ ID NO: 1333676 - DNA, 15 bp, Homo sapiens
gggcagaagtggcac

SEQ ID NO: 1333677 - DNA, 15 bp, Homo sapiens
ccagggcagaagtgg

SEQ ID NO: 1333678 - DNA, 15 bp, Homo sapiens
gccagggcagaagtg

SEQ ID NO: 1333679 - DNA, 15 bp, Homo sapiens
ggccagggcagaagt

SEQ ID NO: 1333680 - DNA, 15 bp, Homo sapiens
gggccagggcagaag

SEQ ID NO: 1333681 - DNA, 15 bp, Homo sapiens
ggggccagggcagaa

SEQ ID NO: 1333682 - DNA, 15 bp, Homo sapiens
gggggccagggcaga

SEQ ID NO: 1333683 - DNA, 15 bp, Homo sapiens
tgggggccagggcag

SEQ ID NO: 1333684 - DNA, 15 bp, Homo sapiens
ttgggggccagggca

SEQ ID NO: 1333685 - DNA, 15 bp, Homo sapiens
cttgggggccagggc

SEQ ID NO: 1333686 - DNA, 15 bp, Homo sapiens
tcttgggggccaggg

SEQ ID NO: 1333687 - DNA, 15 bp, Homo sapiens
atcttgggggccagg

SEQ ID NO: 1333688 - DNA, 15 bp, Homo sapiens
gatcttgggggccag

SEQ ID NO: 1333689 - DNA, 15 bp, Homo sapiens
cgatcttgggggcca

SEQ ID NO: 1333690 - DNA, 15 bp, Homo sapiens
ccgatcttgggggcc

SEQ ID NO: 1333691 - DNA, 15 bp, Homo sapiens
gccgatcttgggggc

SEQ ID NO: 1333692 - DNA, 15 bp, Homo sapiens
ggccgatcttggggg

SEQ ID NO: 1333693 - DNA, 15 bp, Homo sapiens
gggccgatcttgggg

SEQ ID NO: 1333694 - DNA, 15 bp, Homo sapiens
ggggccgatcttggg

SEQ ID NO: 1333695 - DNA, 15 bp, Homo sapiens
gggggccgatcttgg

SEQ ID NO: 1333696 - DNA, 15 bp, Homo sapiens
agggggccgatcttg

SEQ ID NO: 1333697 - DNA, 15 bp, Homo sapiens
cagggggccgatctt

SEQ ID NO: 1333698 - DNA, 15 bp, Homo sapiens
ccagggggccgatct

SEQ ID NO: 1333699 - DNA, 15 bp, Homo sapiens
cccagggggccgatc

SEQ ID NO: 1333700 - DNA, 15 bp, Homo sapiens
acccagggggccgat

SEQ ID NO: 1333701 - DNA, 15 bp, Homo sapiens
gacccagggggccga

SEQ ID NO: 1333702 - DNA, 15 bp, Homo sapiens
agacccagggggccg

SEQ ID NO: 1333703 - DNA, 15 bp, Homo sapiens
cagacccagggggcc

SEQ ID NO: 1333704 - DNA, 15 bp, Homo sapiens
acagacccagggggc

SEQ ID NO: 1333705 - DNA, 15 bp, Homo sapiens
gacagacccaggggg

SEQ ID NO: 1333706 - DNA, 15 bp, Homo sapiens
agacagacccagggg

SEQ ID NO: 1333707 - DNA, 15 bp, Homo sapiens
gagacagacccaggg

SEQ ID NO: 1333708 - DNA, 15 bp, Homo sapiens
ggagacagacccagg

SEQ ID NO: 1333709 - DNA, 15 bp, Homo sapiens
tggagacagacccag

SEQ ID NO: 1333710 - DNA, 15 bp, Homo sapiens
ttggagacagaccca

SEQ ID NO: 1333711 - DNA, 15 bp, Homo sapiens
tttggagacagaccc

SEQ ID NO: 1333712 - DNA, 15 bp, Homo sapiens
ttttggagacagacc

SEQ ID NO: 1333713 - DNA, 15 bp, Homo sapiens
tttttggagacagac

SEQ ID NO: 1333714 - DNA, 15 bp, Homo sapiens
cttttttggagacag

SEQ ID NO: 1333715 - DNA, 15 bp, Homo sapiens
ccttttttggagaca

SEQ ID NO: 1333716 - DNA, 15 bp, Homo sapiens
accttttttggagac

SEQ ID NO: 1333717 - DNA, 15 bp, Homo sapiens
aaccttttttggaga

SEQ ID NO: 1333718 - DNA, 15 bp, Homo sapiens
caaccttttttggag

SEQ ID NO: 1333719 - DNA, 15 bp, Homo sapiens
ccaaccttttttgga

SEQ ID NO: 1333720 - DNA, 15 bp, Homo sapiens
accaaccttttttgg

SEQ ID NO: 1333721 - DNA, 15 bp, Homo sapiens
caccaaccttttttg

SEQ ID NO: 1333722 - DNA, 15 bp, Homo sapiens
tcaccaacctttttt

SEQ ID NO: 1333723 - DNA, 15 bp, Homo sapiens
atcaccaaccttttt

SEQ ID NO: 1333724 - DNA, 15 bp, Homo sapiens
catcaccaacctttt

SEQ ID NO: 1333725 - DNA, 15 bp, Homo sapiens
tcatcaccaaccttt

SEQ ID NO: 1333726 - DNA, 15 bp, Homo sapiens
gtcatcaccaacctt

SEQ ID NO: 1333727 - DNA, 15 bp, Homo sapiens
tgtcatcaccaacct

SEQ ID NO: 1333728 - DNA, 15 bp, Homo sapiens
aatgtcatcaccaac

SEQ ID NO: 1333729 - DNA, 15 bp, Homo sapiens
caatgtcatcaccaa

SEQ ID NO: 1333730 - DNA, 15 bp, Homo sapiens
gcaatgtcatcacca

SEQ ID NO: 1333731 - DNA, 15 bp, Homo sapiens
ggcaatgtcatcacc

SEQ ID NO: 1333732 - DNA, 15 bp, Homo sapiens
tggcaatgtcatcac

SEQ ID NO: 1333733 - DNA, 15 bp, Homo sapiens
ttggcaatgtcatca

SEQ ID NO: 1333734 - DNA, 15 bp, Homo sapiens
cttggcaatgtcatc

SEQ ID NO: 1333735 - DNA, 15 bp, Homo sapiens
ccttggcaatgtcat

SEQ ID NO: 1333736 - DNA, 15 bp, Homo sapiens
gccttggcaatgtca

SEQ ID NO: 1333737 - DNA, 15 bp, Homo sapiens
tgccttggcaatgtc

SEQ ID NO: 1333738 - DNA, 15 bp, Homo sapiens
ttgccttggcaatgt

SEQ ID NO: 1333739 - DNA, 15 bp, Homo sapiens
gttgccttggcaatg

SEQ ID NO: 1333740 - DNA, 15 bp, Homo sapiens
cgttgccttggcaat

SEQ ID NO: 1333741 - DNA, 15 bp, Homo sapiens
ccgttgccttggcaa

SEQ ID NO: 1333742 - DNA, 15 bp, Homo sapiens
cccgttgccttggca

SEQ ID NO: 1333743 - DNA, 15 bp, Homo sapiens
acccgttgccttggc

SEQ ID NO: 1333744 - DNA, 15 bp, Homo sapiens
cacccgttgccttgg

SEQ ID NO: 1333745 - DNA, 15 bp, Homo sapiens
tcacccgttgccttg

SEQ ID NO: 1333746 - DNA, 15 bp, Homo sapiens
gtcacccgttgcctt

SEQ ID NO: 1333747 - DNA, 15 bp, Homo sapiens
agtcacccgttgcct

SEQ ID NO: 1333748 - DNA, 15 bp, Homo sapiens
cagtcacccgttgcc

SEQ ID NO: 1333749 - DNA, 15 bp, Homo sapiens
ccagtcacccgttgc

SEQ ID NO: 1333750 - DNA, 15 bp, Homo sapiens
tccagtcacccgttg

SEQ ID NO: 1333751 - DNA, 15 bp, Homo sapiens
ttccagtcacccgtt

SEQ ID NO: 1333752 - DNA, 15 bp, Homo sapiens
cttccagtcacccgt

SEQ ID NO: 1333753 - DNA, 15 bp, Homo sapiens
ccttccagtcacccg

SEQ ID NO: 1333754 - DNA, 15 bp, Homo sapiens
cccttccagtcaccc

SEQ ID NO: 1333755 - DNA, 15 bp, Homo sapiens
gcccttccagtcacc

SEQ ID NO: 1333756 - DNA, 15 bp, Homo sapiens
ggcccttccagtcac

SEQ ID NO: 1333757 - DNA, 15 bp, Homo sapiens
aggcccttccagtca

SEQ ID NO: 1333758 - DNA, 15 bp, Homo sapiens
caggcccttccagtc

SEQ ID NO: 1333759 - DNA, 15 bp, Homo sapiens
tcaggcccttccagt

SEQ ID NO: 1333760 - DNA, 15 bp, Homo sapiens
ctcaggcccttccag

SEQ ID NO: 1333761 - DNA, 15 bp, Homo sapiens
cctcaggcccttcca

SEQ ID NO: 1333762 - DNA, 15 bp, Homo sapiens
tcctcaggcccttcc

SEQ ID NO: 1333763 - DNA, 15 bp, Homo sapiens
atcctcaggcccttc

SEQ ID NO: 1333764 - DNA, 15 bp, Homo sapiens
aatcctcaggccctt

SEQ ID NO: 1333765 - DNA, 15 bp, Homo sapiens
taatcctcaggccct

SEQ ID NO: 1333766 - DNA, 15 bp, Homo sapiens
gtaatcctcaggccc

SEQ ID NO: 1333767 - DNA, 15 bp, Homo sapiens
tgtaatcctcaggcc

SEQ ID NO: 1333768 - DNA, 15 bp, Homo sapiens
ctgtaatcctcaggc

SEQ ID NO: 1333769 - DNA, 15 bp, Homo sapiens
actgtaatcctcagg

SEQ ID NO: 1333770 - DNA, 15 bp, Homo sapiens
cactgtaatcctcag

SEQ ID NO: 1333771 - DNA, 15 bp, Homo sapiens
tcactgtaatcctca

SEQ ID NO: 1333772 - DNA, 15 bp, Homo sapiens
ttcactgtaatcctc

SEQ ID NO: 1333773 - DNA, 15 bp, Homo sapiens
tttcactgtaatcct

SEQ ID NO: 1333774 - DNA, 15 bp, Homo sapiens
gtttcactgtaatcc

SEQ ID NO: 1333775 - DNA, 15 bp, Homo sapiens
agtttcactgtaatc

SEQ ID NO: 1333776 - DNA, 15 bp, Homo sapiens
cagtttcactgtaat

SEQ ID NO: 1333777 - DNA, 15 bp, Homo sapiens
tcagtttcactgtaa

SEQ ID NO: 1333778 - DNA, 15 bp, Homo sapiens
gtcagtttcactgta

SEQ ID NO: 1333779 - DNA, 15 bp, Homo sapiens
tgtcagtttcactgt

SEQ ID NO: 1333780 - DNA, 15 bp, Homo sapiens
ttgtcagtttcactg

SEQ ID NO: 1333781 - DNA, 15 bp, Homo sapiens
attgtcagtttcact

SEQ ID NO: 1333782 - DNA, 15 bp, Homo sapiens
aattgtcagtttcac

SEQ ID NO: 1333783 - DNA, 15 bp, Homo sapiens
gaattgtcagtttca

SEQ ID NO: 1333784 - DNA, 15 bp, Homo sapiens
tgaattgtcagtttc

SEQ ID NO: 1333785 - DNA, 15 bp, Homo sapiens
ctgaattgtcagttt

SEQ ID NO: 1333786 - DNA, 15 bp, Homo sapiens
tctgaattgtcagtt

SEQ ID NO: 1333787 - DNA, 15 bp, Homo sapiens
ttctgaattgtcagt

SEQ ID NO: 1333788 - DNA, 15 bp, Homo sapiens
gttctgaattgtcag

SEQ ID NO: 1333789 - DNA, 15 bp, Homo sapiens
tgttctgaattgtca

SEQ ID NO: 1333790 - DNA, 15 bp, Homo sapiens
ctgttctgaattgtc

SEQ ID NO: 1333791 - DNA, 15 bp, Homo sapiens
tctgttctgaattgt

SEQ ID NO: 1333792 - DNA, 15 bp, Homo sapiens
gtctgttctgaattg

SEQ ID NO: 1333793 - DNA, 15 bp, Homo sapiens
tgtctgttctgaatt

SEQ ID NO: 1333794 - DNA, 15 bp, Homo sapiens
ttgtctgttctgaat

SEQ ID NO: 1333795 - DNA, 15 bp, Homo sapiens
cttgtctgttctgaa

SEQ ID NO: 1333796 - DNA, 15 bp, Homo sapiens
gcttgtctgttctga

SEQ ID NO: 1333797 - DNA, 15 bp, Homo sapiens
ggcttgtctgttctg

SEQ ID NO: 1333798 - DNA, 15 bp, Homo sapiens
gggcttgtctgttct

SEQ ID NO: 1333799 - DNA, 15 bp, Homo sapiens
tgggcttgtctgttc

SEQ ID NO: 1333800 - DNA, 15 bp, Homo sapiens
ctgggcttgtctgtt

SEQ ID NO: 1333801 - DNA, 15 bp, Homo sapiens
tctgggcttgtctgt

SEQ ID NO: 1333802 - DNA, 15 bp, Homo sapiens
atctgggcttgtctg

SEQ ID NO: 1333803 - DNA, 15 bp, Homo sapiens
aatctgggcttgtct

SEQ ID NO: 1333804 - DNA, 15 bp, Homo sapiens
caatctgggcttgtc

SEQ ID NO: 1333805 - DNA, 15 bp, Homo sapiens
tcaatctgggcttgt

SEQ ID NO: 1333806 - DNA, 15 bp, Homo sapiens
ctcaatctgggcttg

SEQ ID NO: 1333807 - DNA, 15 bp, Homo sapiens
cctcaatctgggctt

SEQ ID NO: 1333808 - DNA, 15 bp, Homo sapiens
acctcaatctgggct

SEQ ID NO: 1333809 - DNA, 15 bp, Homo sapiens
cacctcaatctgggc

SEQ ID NO: 1333810 - DNA, 15 bp, Homo sapiens
ccacctcaatctggg

SEQ ID NO: 1333811 - DNA, 15 bp, Homo sapiens
accacctcaatctgg

SEQ ID NO: 1333812 - DNA, 15 bp, Homo sapiens
caccacctcaatctg

SEQ ID NO: 1333813 - DNA, 15 bp, Homo sapiens
gcaccacctcaatct

SEQ ID NO: 1333814 - DNA, 15 bp, Homo sapiens
ggcaccacctcaatc

SEQ ID NO: 1333815 - DNA, 15 bp, Homo sapiens
aggcaccacctcaat

SEQ ID NO: 1333816 - DNA, 15 bp, Homo sapiens
aaggcaccacctcaa

SEQ ID NO: 1333817 - DNA, 15 bp, Homo sapiens
gaaggcaccacctca

SEQ ID NO: 1333818 - DNA, 15 bp, Homo sapiens
agaaggcaccacctc

SEQ ID NO: 1333819 - DNA, 15 bp, Homo sapiens
cagaaggcaccacct

SEQ ID NO: 1333820 - DNA, 15 bp, Homo sapiens
gcagaaggcaccacc

SEQ ID NO: 1333821 - DNA, 15 bp, Homo sapiens
ggcagaaggcaccac

SEQ ID NO: 1333822 - DNA, 15 bp, Homo sapiens
aggcagaaggcacca

SEQ ID NO: 1333823 - DNA, 15 bp, Homo sapiens
gaggcagaaggcacc

SEQ ID NO: 1333824 - DNA, 15 bp, Homo sapiens
ggaggcagaaggcac

SEQ ID NO: 1333825 - DNA, 15 bp, Homo sapiens
cggaggcagaaggca

SEQ ID NO: 1333826 - DNA, 15 bp, Homo sapiens
gcggaggcagaaggc

SEQ ID NO: 1333827 - DNA, 15 bp, Homo sapiens
ggcggaggcagaagg

SEQ ID NO: 1333828 - DNA, 15 bp, Homo sapiens
gggcggaggcagaag

SEQ ID NO: 1333829 - DNA, 15 bp, Homo sapiens
agggcggaggcagaa

SEQ ID NO: 1333830 - DNA, 15 bp, Homo sapiens
cagggcggaggcaga

SEQ ID NO: 1333831 - DNA, 15 bp, Homo sapiens
tcagggcggaggcag

SEQ ID NO: 1333832 - DNA, 15 bp, Homo sapiens
gtcagggcggaggca

SEQ ID NO: 1333833 - DNA, 15 bp, Homo sapiens
ggtcagggcggaggc

SEQ ID NO: 1333834 - DNA, 15 bp, Homo sapiens
tggtcagggcggagg

SEQ ID NO: 1333835 - DNA, 15 bp, Homo sapiens
atggtcagggcggag

SEQ ID NO: 1333836 - DNA, 15 bp, Homo sapiens
gatggtcagggcgga

SEQ ID NO: 1333837 - DNA, 15 bp, Homo sapiens
tgatggtcagggcgg

SEQ ID NO: 1333838 - DNA, 15 bp, Homo sapiens
ttgatggtcagggcg

SEQ ID NO: 1333839 - DNA, 15 bp, Homo sapiens
tttgatggtcagggc

SEQ ID NO: 1333840 - DNA, 15 bp, Homo sapiens
ctttgatggtcaggg

SEQ ID NO: 1333841 - DNA, 15 bp, Homo sapiens
gctttgatggtcagg

SEQ ID NO: 1333842 - DNA, 15 bp, Homo sapiens
ggctttgatggtcag

SEQ ID NO: 1333843 - DNA, 15 bp, Homo sapiens
gggctttgatggtca

SEQ ID NO: 1333844 - DNA, 15 bp, Homo sapiens
agggctttgatggtc

SEQ ID NO: 1333845 - DNA, 15 bp, Homo sapiens
gagggctttgatggt

SEQ ID NO: 1333846 - DNA, 15 bp, Homo sapiens
tgagggctttgatgg

SEQ ID NO: 1333847 - DNA, 15 bp, Homo sapiens
ttgagggctttgatg

SEQ ID NO: 1333848 - DNA, 15 bp, Homo sapiens
cttgagggctttgat

SEQ ID NO: 1333849 - DNA, 15 bp, Homo sapiens
ccttgagggctttga

SEQ ID NO: 1333850 - DNA, 15 bp, Homo sapiens
tccttgagggctttg

SEQ ID NO: 1333851 - DNA, 15 bp, Homo sapiens
ctccttgagggcttt

SEQ ID NO: 1333852 - DNA, 15 bp, Homo sapiens
gctccttgagggctt

SEQ ID NO: 1333853 - DNA, 15 bp, Homo sapiens
ggctccttgagggct

SEQ ID NO: 1333854 - DNA, 15 bp, Homo sapiens
tggctccttgagggc

SEQ ID NO: 1333855 - DNA, 15 bp, Homo sapiens
gtggctccttgaggg

SEQ ID NO: 1333856 - DNA, 15 bp, Homo sapiens
ggtggctccttgagg

SEQ ID NO: 1333857 - DNA, 15 bp, Homo sapiens
tggtggctccttgag

SEQ ID NO: 1333858 - DNA, 15 bp, Homo sapiens
ttggtggctccttga

SEQ ID NO: 1333859 - DNA, 15 bp, Homo sapiens
cttggtggctccttg

SEQ ID NO: 1333860 - DNA, 15 bp, Homo sapiens
tcttggtggctcctt

SEQ ID NO: 1333861 - DNA, 15 bp, Homo sapiens
ctcttggtggctcct

SEQ ID NO: 1333862 - DNA, 15 bp, Homo sapiens
tctcttggtggctcc

SEQ ID NO: 1333863 - DNA, 15 bp, Homo sapiens
gtctcttggtggctc

SEQ ID NO: 1333864 - DNA, 15 bp, Homo sapiens
cgtctcttggtggct

SEQ ID NO: 1333865 - DNA, 15 bp, Homo sapiens
ccgtctcttggtggc

SEQ ID NO: 1333866 - DNA, 15 bp, Homo sapiens
tccgtctcttggtgg

SEQ ID NO: 1333867 - DNA, 15 bp, Homo sapiens
ttccgtctcttggtg

SEQ ID NO: 1333868 - DNA, 15 bp, Homo sapiens
tttccgtctcttggt

SEQ ID NO: 1333869 - DNA, 15 bp, Homo sapiens
ctttccgtctcttgg

SEQ ID NO: 1333870 - DNA, 15 bp, Homo sapiens
tctttccgtctcttg

SEQ ID NO: 1333871 - DNA, 15 bp, Homo sapiens
ttctttccgtctctt

SEQ ID NO: 1333872 - DNA, 15 bp, Homo sapiens
tttctttccgtctct

SEQ ID NO: 1333873 - DNA, 15 bp, Homo sapiens
gtttctttccgtctc

SEQ ID NO: 1333874 - DNA, 15 bp, Homo sapiens
tgtttctttccgtct

SEQ ID NO: 1333875 - DNA, 15 bp, Homo sapiens
ctgtttctttccgtc

SEQ ID NO: 1333876 - DNA, 15 bp, Homo sapiens
tctgtttctttccgt

SEQ ID NO: 1333877 - DNA, 15 bp, Homo sapiens
ctctgtttctttccg

SEQ ID NO: 1333878 - DNA, 15 bp, Homo sapiens
tctctgtttctttcc

SEQ ID NO: 1333879 - DNA, 15 bp, Homo sapiens
gtttctctgtttctt

SEQ ID NO: 1333880 - DNA, 15 bp, Homo sapiens
tgtttctctgtttct

SEQ ID NO: 1333881 - DNA, 15 bp, Homo sapiens
atgtttctctgtttc

SEQ ID NO: 1333882 - DNA, 15 bp, Homo sapiens
aatgtttctctgttt

SEQ ID NO: 1333883 - DNA, 15 bp, Homo sapiens
taatgtttctctgtt

SEQ ID NO: 1333884 - DNA, 15 bp, Homo sapiens
ttaatgtttctctgt

SEQ ID NO: 1333885 - DNA, 15 bp, Homo sapiens
tttaatgtttctctg

SEQ ID NO: 1333886 - DNA, 15 bp, Homo sapiens
gtttaatgtttctct

SEQ ID NO: 1333887 - DNA, 15 bp, Homo sapiens
tgtttaatgtttctc

SEQ ID NO: 1333888 - DNA, 15 bp, Homo sapiens
gtgtttaatgtttct

SEQ ID NO: 1333889 - DNA, 15 bp, Homo sapiens
tgtgtttaatgtttc

SEQ ID NO: 1333890 - DNA, 15 bp, Homo sapiens
ctgtgtttaatgttt

SEQ ID NO: 1333891 - DNA, 15 bp, Homo sapiens
actgtgtttaatgtt

SEQ ID NO: 1333892 - DNA, 15 bp, Homo sapiens
cactgtgtttaatgt

SEQ ID NO: 1333893 - DNA, 15 bp, Homo sapiens
ccactgtgtttaatg

SEQ ID NO: 1333894 - DNA, 15 bp, Homo sapiens
cccactgtgtttaat

SEQ ID NO: 1333895 - DNA, 15 bp, Homo sapiens
tcccactgtgtttaa

SEQ ID NO: 1333896 - DNA, 15 bp, Homo sapiens
ttcccactgtgttta

SEQ ID NO: 1333897 - DNA, 15 bp, Homo sapiens
attcccactgtgttt

SEQ ID NO: 1333898 - DNA, 15 bp, Homo sapiens
tattcccactgtgtt

SEQ ID NO: 1333899 - DNA, 15 bp, Homo sapiens
atattcccactgtgt

SEQ ID NO: 1333900 - DNA, 15 bp, Homo sapiens
gatattcccactgtg

SEQ ID NO: 1333901 - DNA, 15 bp, Homo sapiens
tgatattcccactgt

SEQ ID NO: 1333902 - DNA, 15 bp, Homo sapiens
gtgatattcccactg

SEQ ID NO: 1333903 - DNA, 15 bp, Homo sapiens
agtgatattcccact

SEQ ID NO: 1333904 - DNA, 15 bp, Homo sapiens
aagtgatattcccac

SEQ ID NO: 1333905 - DNA, 15 bp, Homo sapiens
aaagtgatattccca

SEQ ID NO: 1333906 - DNA, 15 bp, Homo sapiens
aaaagtgatattccc

SEQ ID NO: 1333907 - DNA, 15 bp, Homo sapiens
caaaagtgatattcc

SEQ ID NO: 1333908 - DNA, 15 bp, Homo sapiens
tcaaaagtgatattc

SEQ ID NO: 1333909 - DNA, 15 bp, Homo sapiens
atcaaaagtgatatt

SEQ ID NO: 1333910 - DNA, 15 bp, Homo sapiens
catcaaaagtgatat

SEQ ID NO: 1333911 - DNA, 15 bp, Homo sapiens
tcatcaaaagtgata

SEQ ID NO: 1333912 - DNA, 15 bp, Homo sapiens
ctcatcaaaagtgat

SEQ ID NO: 1333913 - DNA, 15 bp, Homo sapiens
tctcatcaaaagtga

SEQ ID NO: 1333914 - DNA, 15 bp, Homo sapiens
atctcatcaaaagtg

SEQ ID NO: 1333915 - DNA, 15 bp, Homo sapiens
gatctcatcaaaagt

SEQ ID NO: 1333916 - DNA, 15 bp, Homo sapiens
tgatctcatcaaaag

SEQ ID NO: 1333917 - DNA, 15 bp, Homo sapiens
atgatctcatcaaaa

SEQ ID NO: 1333918 - DNA, 15 bp, Homo sapiens
gatgatctcatcaaa

SEQ ID NO: 1333919 - DNA, 15 bp, Homo sapiens
tgatgatctcatcaa

SEQ ID NO: 1333920 - DNA, 15 bp, Homo sapiens
ttgatgatctcatca

SEQ ID NO: 1333921 - DNA, 15 bp, Homo sapiens
cttgatgatctcatc

SEQ ID NO: 1333922 - DNA, 15 bp, Homo sapiens
ccttgatgatctcat

SEQ ID NO: 1333923 - DNA, 15 bp, Homo sapiens
accttgatgatctca

SEQ ID NO: 1333924 - DNA, 15 bp, Homo sapiens
aaccttgatgatctc

SEQ ID NO: 1333925 - DNA, 15 bp, Homo sapiens
caaccttgatgatct

SEQ ID NO: 1333926 - DNA, 15 bp, Homo sapiens
gcaaccttgatgatc

SEQ ID NO: 1333927 - DNA, 15 bp, Homo sapiens
agcaaccttgatgat

SEQ ID NO: 1333928 - DNA, 15 bp, Homo sapiens
gagcaaccttgatga

SEQ ID NO: 1333929 - DNA, 15 bp, Homo sapiens
cgagcaaccttgatg

SEQ ID NO: 1333930 - DNA, 15 bp, Homo sapiens
tcgagcaaccttgat

SEQ ID NO: 1333931 - DNA, 15 bp, Homo sapiens
gtcgagcaaccttga

SEQ ID NO: 1333932 - DNA, 15 bp, Homo sapiens
tgtcgagcaaccttg

SEQ ID NO: 1333933 - DNA, 15 bp, Homo sapiens
ctgtcgagcaacctt

SEQ ID NO: 1333934 - DNA, 15 bp, Homo sapiens
tctgtcgagcaacct

SEQ ID NO: 1333935 - DNA, 15 bp, Homo sapiens
atctgtcgagcaacc

SEQ ID NO: 1333936 - DNA, 15 bp, Homo sapiens
catctgtcgagcaac

SEQ ID NO: 1333937 - DNA, 15 bp, Homo sapiens
gcatctgtcgagcaa

SEQ ID NO: 1333938 - DNA, 15 bp, Homo sapiens
cgcatctgtcgagca

SEQ ID NO: 1333939 - DNA, 15 bp, Homo sapiens
ccgcatctgtcgagc

SEQ ID NO: 1333940 - DNA, 15 bp, Homo sapiens
gccgcatctgtcgag

SEQ ID NO: 1333941 - DNA, 15 bp, Homo sapiens
tgccgcatctgtcga

SEQ ID NO: 1333942 - DNA, 15 bp, Homo sapiens
gtgccgcatctgtcg

SEQ ID NO: 1333943 - DNA, 15 bp, Homo sapiens
ggtgccgcatctgtc

SEQ ID NO: 1333944 - DNA, 15 bp, Homo sapiens
cggtgccgcatctgt

SEQ ID NO: 1333945 - DNA, 15 bp, Homo sapiens
tcggtgccgcatctg

SEQ ID NO: 1333946 - DNA, 15 bp, Homo sapiens
atcggtgccgcatct

SEQ ID NO: 1333947 - DNA, 15 bp, Homo sapiens
gatcggtgccgcatc

SEQ ID NO: 1333948 - DNA, 15 bp, Homo sapiens
ggatcggtgccgcat

SEQ ID NO: 1333949 - DNA, 15 bp, Homo sapiens
aggatcggtgccgca

SEQ ID NO: 1333950 - DNA, 15 bp, Homo sapiens
aaggatcggtgccgc

SEQ ID NO: 1333951 - DNA, 15 bp, Homo sapiens
taaggatcggtgccg

SEQ ID NO: 1333952 - DNA, 15 bp, Homo sapiens
ctaaggatcggtgcc

SEQ ID NO: 1333953 - DNA, 15 bp, Homo sapiens
gctaaggatcggtgc

SEQ ID NO: 1333954 - DNA, 15 bp, Homo sapiens
ggctaaggatcggtg

SEQ ID NO: 1333955 - DNA, 15 bp, Homo sapiens
tggctaaggatcggt

SEQ ID NO: 1333956 - DNA, 15 bp, Homo sapiens
ctggctaaggatcgg

SEQ ID NO: 1333957 - DNA, 15 bp, Homo sapiens
tctggctaaggatcg

SEQ ID NO: 1333958 - DNA, 15 bp, Homo sapiens
ctctggctaaggatc

SEQ ID NO: 1333959 - DNA, 15 bp, Homo sapiens
tctctggctaaggat

SEQ ID NO: 1333960 - DNA, 15 bp, Homo sapiens
ttctctggctaagga

SEQ ID NO: 1333961 - DNA, 15 bp, Homo sapiens
gttctctggctaagg

SEQ ID NO: 1333962 - DNA, 15 bp, Homo sapiens
agttctctggctaag

SEQ ID NO: 1333963 - DNA, 15 bp, Homo sapiens
gagttctctggctaa

SEQ ID NO: 1333964 - DNA, 15 bp, Homo sapiens
agagttctctggcta

SEQ ID NO: 1333965 - DNA, 15 bp, Homo sapiens
gagagttctctggct

SEQ ID NO: 1333966 - DNA, 15 bp, Homo sapiens
agagagttctctggc

SEQ ID NO: 1333967 - DNA, 15 bp, Homo sapiens
cagagagttctctgg

SEQ ID NO: 1333968 - DNA, 15 bp, Homo sapiens
ccagagagttctctg

SEQ ID NO: 1333969 - DNA, 15 bp, Homo sapiens
tccagagagttctct

SEQ ID NO: 1333970 - DNA, 15 bp, Homo sapiens
ttccagagagttctc

SEQ ID NO: 1333971 - DNA, 15 bp, Homo sapiens
gttccagagagttct

SEQ ID NO: 1333972 - DNA, 15 bp, Homo sapiens
ggttccagagagttc

SEQ ID NO: 1333973 - DNA, 15 bp, Homo sapiens
tggttccagagagtt

SEQ ID NO: 1333974 - DNA, 15 bp, Homo sapiens
atggttccagagagt

SEQ ID NO: 1333975 - DNA, 15 bp, Homo sapiens
aatggttccagagag

SEQ ID NO: 1333976 - DNA, 15 bp, Homo sapiens
taatggttccagaga

SEQ ID NO: 1333977 - DNA, 15 bp, Homo sapiens
ttaatggttccagag

SEQ ID NO: 1333978 - DNA, 15 bp, Homo sapiens
tttaatggttccaga

SEQ ID NO: 1333979 - DNA, 15 bp, Homo sapiens
ctttaatggttccag

SEQ ID NO: 1333980 - DNA, 15 bp, Homo sapiens
tctttaatggttcca

SEQ ID NO: 1333981 - DNA, 15 bp, Homo sapiens
ctctttaatggttcc

SEQ ID NO: 1333982 - DNA, 15 bp, Homo sapiens
tctctttaatggttc

SEQ ID NO: 1333983 - DNA, 15 bp, Homo sapiens
atctctttaatggtt

SEQ ID NO: 1333984 - DNA, 15 bp, Homo sapiens
gatctctttaatggt

SEQ ID NO: 1333985 - DNA, 15 bp, Homo sapiens
ggatctctttaatgg

SEQ ID NO: 1333986 - DNA, 15 bp, Homo sapiens
aggatctctttaatg

SEQ ID NO: 1333987 - DNA, 15 bp, Homo sapiens
caggatctctttaat

SEQ ID NO: 1333988 - DNA, 15 bp, Homo sapiens
ccaggatctctttaa

SEQ ID NO: 1333989 - DNA, 15 bp, Homo sapiens
cccaggatctcttta

SEQ ID NO: 1333990 - DNA, 15 bp, Homo sapiens
ccccaggatctcttt

SEQ ID NO: 1333991 - DNA, 15 bp, Homo sapiens
tccccaggatctctt

SEQ ID NO: 1333992 - DNA, 15 bp, Homo sapiens
gtccccaggatctct

SEQ ID NO: 1333993 - DNA, 15 bp, Homo sapiens
agtccccaggatctc

SEQ ID NO: 1333994 - DNA, 15 bp, Homo sapiens
cagtccccaggatct

SEQ ID NO: 1333995 - DNA, 15 bp, Homo sapiens
gcagtccccaggatc

SEQ ID NO: 1333996 - DNA, 15 bp, Homo sapiens
ggcagtccccaggat

SEQ ID NO: 1333997 - DNA, 15 bp, Homo sapiens
gggcagtccccagga

SEQ ID NO: 1333998 - DNA, 15 bp, Homo sapiens
tgggcagtccccagg

SEQ ID NO: 1333999 - DNA, 15 bp, Homo sapiens
ctgggcagtccccag

SEQ ID NO: 1334000 - DNA, 15 bp, Homo sapiens
actgggcagtcccca

SEQ ID NO: 1334001 - DNA, 15 bp, Homo sapiens
gactgggcagtcccc

SEQ ID NO: 1334002 - DNA, 15 bp, Homo sapiens
agactgggcagtccc

SEQ ID NO: 1334003 - DNA, 15 bp, Homo sapiens
cagactgggcagtcc

SEQ ID NO: 1334004 - DNA, 15 bp, Homo sapiens
acagactgggcagtc

SEQ ID NO: 1334005 - DNA, 15 bp, Homo sapiens
cacagactgggcagt

SEQ ID NO: 1334006 - DNA, 15 bp, Homo sapiens
ccacagactgggcag

SEQ ID NO: 1334007 - DNA, 15 bp, Homo sapiens
cccacagactgggca

SEQ ID NO: 1334008 - DNA, 15 bp, Homo sapiens
gcccacagactgggc

SEQ ID NO: 1334009 - DNA, 15 bp, Homo sapiens
agcccacagactggg

SEQ ID NO: 1334010 - DNA, 15 bp, Homo sapiens
cagcccacagactgg

SEQ ID NO: 1334011 - DNA, 15 bp, Homo sapiens
acagcccacagactg

SEQ ID NO: 1334012 - DNA, 15 bp, Homo sapiens
tacagcccacagact

SEQ ID NO: 1334013 - DNA, 15 bp, Homo sapiens
ttacagcccacagac

SEQ ID NO: 1334014 - DNA, 15 bp, Homo sapiens
attacagcccacaga

SEQ ID NO: 1334015 - DNA, 15 bp, Homo sapiens
cattacagcccacag

SEQ ID NO: 1334016 - DNA, 15 bp, Homo sapiens
acattacagcccaca

SEQ ID NO: 1334017 - DNA, 15 bp, Homo sapiens
aacattacagcccac

SEQ ID NO: 1334018 - DNA, 15 bp, Homo sapiens
caacattacagccca

SEQ ID NO: 1334019 - DNA, 15 bp, Homo sapiens
tcaacattacagccc

SEQ ID NO: 1334020 - DNA, 15 bp, Homo sapiens
atcaacattacagcc

SEQ ID NO: 1334021 - DNA, 15 bp, Homo sapiens
catcaacattacagc

SEQ ID NO: 1334022 - DNA, 15 bp, Homo sapiens
ccatcaacattacag

SEQ ID NO: 1334023 - DNA, 15 bp, Homo sapiens
gccatcaacattaca

SEQ ID NO: 1334024 - DNA, 15 bp, Homo sapiens
ggccatcaacattac

SEQ ID NO: 1334025 - DNA, 15 bp, Homo sapiens
cggccatcaacatta

SEQ ID NO: 1334026 - DNA, 15 bp, Homo sapiens
gcggccatcaacatt

SEQ ID NO: 1334027 - DNA, 15 bp, Homo sapiens
ggcggccatcaacat

SEQ ID NO: 1334028 - DNA, 15 bp, Homo sapiens
tggcggccatcaaca

SEQ ID NO: 1334029 - DNA, 15 bp, Homo sapiens
gtggcggccatcaac

SEQ ID NO: 1334030 - DNA, 15 bp, Homo sapiens
agtggcggccatcaa

SEQ ID NO: 1334031 - DNA, 15 bp, Homo sapiens
gagtggcggccatca

SEQ ID NO: 1334032 - DNA, 15 bp, Homo sapiens
agagtggcggccatc

SEQ ID NO: 1334033 - DNA, 15 bp, Homo sapiens
gagagtggcggccat

SEQ ID NO: 1334034 - DNA, 15 bp, Homo sapiens
tgagagtggcggcca

SEQ ID NO: 1334035 - DNA, 15 bp, Homo sapiens
atgagagtggcggcc

SEQ ID NO: 1334036 - DNA, 15 bp, Homo sapiens
catgagagtggcggc

SEQ ID NO: 1334037 - DNA, 15 bp, Homo sapiens
tcatgagagtggcgg

SEQ ID NO: 1334038 - DNA, 15 bp, Homo sapiens
gtcatgagagtggcg

SEQ ID NO: 1334039 - DNA, 15 bp, Homo sapiens
tgtcatgagagtggc

SEQ ID NO: 1334040 - DNA, 15 bp, Homo sapiens
atgtcatgagagtgg

SEQ ID NO: 1334041 - DNA, 15 bp, Homo sapiens
gatgtcatgagagtg

SEQ ID NO: 1334042 - DNA, 15 bp, Homo sapiens
tgatgtcatgagagt

SEQ ID NO: 1334043 - DNA, 15 bp, Homo sapiens
atgatgtcatgagag

SEQ ID NO: 1334044 - DNA, 15 bp, Homo sapiens
tatgatgtcatgaga

SEQ ID NO: 1334045 - DNA, 15 bp, Homo sapiens
ctatgatgtcatgag

SEQ ID NO: 1334046 - DNA, 15 bp, Homo sapiens
tctatgatgtcatga

SEQ ID NO: 1334047 - DNA, 15 bp, Homo sapiens
atctatgatgtcatg

SEQ ID NO: 1334048 - DNA, 15 bp, Homo sapiens
catctatgatgtcat

SEQ ID NO: 1334049 - DNA, 15 bp, Homo sapiens
tcatctatgatgtca

SEQ ID NO: 1334050 - DNA, 15 bp, Homo sapiens
gtcatctatgatgtc

SEQ ID NO: 1334051 - DNA, 15 bp, Homo sapiens
tgtcatctatgatgt

SEQ ID NO: 1334052 - DNA, 15 bp, Homo sapiens
atgtcatctatgatg

SEQ ID NO: 1334053 - DNA, 15 bp, Homo sapiens
gatgtcatctatgat

SEQ ID NO: 1334054 - DNA, 15 bp, Homo sapiens
tgatgtcatctatga

SEQ ID NO: 1334055 - DNA, 15 bp, Homo sapiens
ttgatgtcatctatg

SEQ ID NO: 1334056 - DNA, 15 bp, Homo sapiens
gttgatgtcatctat

SEQ ID NO: 1334057 - DNA, 15 bp, Homo sapiens
tgttgatgtcatcta

SEQ ID NO: 1334058 - DNA, 15 bp, Homo sapiens
ctgttgatgtcatct

SEQ ID NO: 1334059 - DNA, 15 bp, Homo sapiens
actgttgatgtcatc

SEQ ID NO: 1334060 - DNA, 15 bp, Homo sapiens
cactgttgatgtcat

SEQ ID NO: 1334061 - DNA, 15 bp, Homo sapiens
tcactgttgatgtca

SEQ ID NO: 1334062 - DNA, 15 bp, Homo sapiens
gtcactgttgatgtc

SEQ ID NO: 1334063 - DNA, 15 bp, Homo sapiens
tgtcactgttgatgt

SEQ ID NO: 1334064 - DNA, 15 bp, Homo sapiens
ttgtcactgttgatg

SEQ ID NO: 1334065 - DNA, 15 bp, Homo sapiens
tttgtcactgttgat

SEQ ID NO: 1334066 - DNA, 15 bp, Homo sapiens
ctttgtcactgttga

SEQ ID NO: 1334067 - DNA, 15 bp, Homo sapiens
gctttgtcactgttg

SEQ ID NO: 1334068 - DNA, 15 bp, Homo sapiens
tgctttgtcactgtt

SEQ ID NO: 1334069 - DNA, 15 bp, Homo sapiens
ttgctttgtcactgt

SEQ ID NO: 1334070 - DNA, 15 bp, Homo sapiens
cttgctttgtcactg

SEQ ID NO: 1334071 - DNA, 15 bp, Homo sapiens
tcttgctttgtcact

SEQ ID NO: 1334072 - DNA, 15 bp, Homo sapiens
gtcttgctttgtcac

SEQ ID NO: 1334073 - DNA, 15 bp, Homo sapiens
agtcttgctttgtca

SEQ ID NO: 1334074 - DNA, 15 bp, Homo sapiens
gagtcttgctttgtc

SEQ ID NO: 1334075 - DNA, 15 bp, Homo sapiens
ggagtcttgctttgt

SEQ ID NO: 1334076 - DNA, 15 bp, Homo sapiens
tggagtcttgctttg

SEQ ID NO: 1334077 - DNA, 15 bp, Homo sapiens
atggagtcttgcttt

SEQ ID NO: 1334078 - DNA, 15 bp, Homo sapiens
gatggagtcttgctt

SEQ ID NO: 1334079 - DNA, 15 bp, Homo sapiens
gttgagatggagtct

SEQ ID NO: 1334080 - DNA, 15 bp, Homo sapiens
tgttgagatggagtc

SEQ ID NO: 1334081 - DNA, 15 bp, Homo sapiens
ttgttgagatggagt

SEQ ID NO: 1334082 - DNA, 15 bp, Homo sapiens
tttgttgagatggag

SEQ ID NO: 1334083 - DNA, 15 bp, Homo sapiens
ttttgttgagatgga

SEQ ID NO: 1334084 - DNA, 15 bp, Homo sapiens
tttttgttgagatgg

SEQ ID NO: 1334085 - DNA, 15 bp, Homo sapiens
ttttttgttgagatg

SEQ ID NO: 1334086 - DNA, 15 bp, Homo sapiens
tttttttgttgagat

SEQ ID NO: 1334087 - DNA, 15 bp, Homo sapiens
ttttttttgttgaga

SEQ ID NO: 1334088 - DNA, 15 bp, Homo sapiens
tttttttttgttgag

SEQ ID NO: 1334089 - DNA, 15 bp, Homo sapiens
ttttttttttgttga

SEQ ID NO: 1334090 - DNA, 15 bp, Homo sapiens
tttttttttttgttg

SEQ ID NO: 1334091 - DNA, 15 bp, Homo sapiens
ccctctttttttttt

SEQ ID NO: 1334092 - DNA, 15 bp, Homo sapiens
tccctcttttttttt

SEQ ID NO: 1334093 - DNA, 15 bp, Homo sapiens
ctccctctttttttt

SEQ ID NO: 1334094 - DNA, 15 bp, Homo sapiens
tctccctcttttttt

SEQ ID NO: 1334095 - DNA, 15 bp, Homo sapiens
ttctccctctttttt

SEQ ID NO: 1334096 - DNA, 15 bp, Homo sapiens
tttctccctcttttt

SEQ ID NO: 1334097 - DNA, 15 bp, Homo sapiens
ttttctccctctttt

SEQ ID NO: 1334098 - DNA, 15 bp, Homo sapiens
tttttctccctcttt

SEQ ID NO: 1334099 - DNA, 15 bp, Homo sapiens
ttttttctccctctt

SEQ ID NO: 1334100 - DNA, 15 bp, Homo sapiens
tttttttctccctct

SEQ ID NO: 1334101 - DNA, 15 bp, Homo sapiens
ttttttttctccctc

SEQ ID NO: 1334102 - DNA, 15 bp, Homo sapiens
tttttttttctccct

SEQ ID NO: 1334103 - DNA, 15 bp, Homo sapiens
cttttttttttctcc

SEQ ID NO: 1334104 - DNA, 15 bp, Homo sapiens
acttttttttttctc

SEQ ID NO: 1334105 - DNA, 15 bp, Homo sapiens
gacttttttttttct

SEQ ID NO: 1334106 - DNA, 15 bp, Homo sapiens
agacttttttttttc

SEQ ID NO: 1334107 - DNA, 15 bp, Homo sapiens
aagactttttttttt

SEQ ID NO: 1334108 - DNA, 15 bp, Homo sapiens
gcaagactttttttt

SEQ ID NO: 1334109 - DNA, 15 bp, Homo sapiens
agcaagacttttttt

SEQ ID NO: 1334110 - DNA, 15 bp, Homo sapiens
gagcaagactttttt

SEQ ID NO: 1334111 - DNA, 15 bp, Homo sapiens
agagcaagacttttt

SEQ ID NO: 1334112 - DNA, 15 bp, Homo sapiens
cagagcaagactttt

SEQ ID NO: 1334113 - DNA, 15 bp, Homo sapiens
acagagcaagacttt

SEQ ID NO: 1334114 - DNA, 15 bp, Homo sapiens
gacagagcaagactt

SEQ ID NO: 1334115 - DNA, 15 bp, Homo sapiens
agggaggaggaggtt

SEQ ID NO: 1334116 - DNA, 15 bp, Homo sapiens
cagggaggaggaggt

SEQ ID NO: 1334117 - DNA, 15 bp, Homo sapiens
ccagggaggaggagg

SEQ ID NO: 1334118 - DNA, 15 bp, Homo sapiens
accagggaggaggag

SEQ ID NO: 1334119 - DNA, 15 bp, Homo sapiens
aaccagggaggagga

SEQ ID NO: 1334120 - DNA, 15 bp, Homo sapiens
gaaccagggaggagg

SEQ ID NO: 1334121 - DNA, 15 bp, Homo sapiens
tgaaccagggaggag

SEQ ID NO: 1334122 - DNA, 15 bp, Homo sapiens
ttgaaccagggagga

SEQ ID NO: 1334123 - DNA, 15 bp, Homo sapiens
acttgaaccagggag

SEQ ID NO: 1334124 - DNA, 15 bp, Homo sapiens
cacttgaaccaggga

SEQ ID NO: 1334125 - DNA, 15 bp, Homo sapiens
tcacttgaaccaggg

SEQ ID NO: 1334126 - DNA, 15 bp, Homo sapiens
atcacttgaaccagg

SEQ ID NO: 1334127 - DNA, 15 bp, Homo sapiens
aatcacttgaaccag

SEQ ID NO: 1334128 - DNA, 15 bp, Homo sapiens
gaatcacttgaacca

SEQ ID NO: 1334129 - DNA, 15 bp, Homo sapiens
tctgtaatcacagct

SEQ ID NO: 1334130 - DNA, 15 bp, Homo sapiens
atctgtaatcacagc

SEQ ID NO: 1334131 - DNA, 15 bp, Homo sapiens
catctgtaatcacag

SEQ ID NO: 1334132 - DNA, 15 bp, Homo sapiens
gcatctgtaatcaca

SEQ ID NO: 1334133 - DNA, 15 bp, Homo sapiens
ggcatctgtaatcac

SEQ ID NO: 1334134 - DNA, 15 bp, Homo sapiens
gggcatctgtaatca

SEQ ID NO: 1334135 - DNA, 15 bp, Homo sapiens
tgggcatctgtaatc

SEQ ID NO: 1334136 - DNA, 15 bp, Homo sapiens
gtgggcatctgtaat

SEQ ID NO: 1334137 - DNA, 15 bp, Homo sapiens
ggtgggcatctgtaa

SEQ ID NO: 1334138 - DNA, 15 bp, Homo sapiens
tggtgggcatctgta

SEQ ID NO: 1334139 - DNA, 15 bp, Homo sapiens
gtggtgggcatctgt

SEQ ID NO: 1334140 - DNA, 15 bp, Homo sapiens
ggtggtgggcatctg

SEQ ID NO: 1334141 - DNA, 15 bp, Homo sapiens
tggtggtgggcatct

SEQ ID NO: 1334142 - DNA, 15 bp, Homo sapiens
atggtggtgggcatc

SEQ ID NO: 1334143 - DNA, 15 bp, Homo sapiens
catggtggtgggcat

SEQ ID NO: 1334144 - DNA, 15 bp, Homo sapiens
tgggcatggtggtgg

SEQ ID NO: 1334145 - DNA, 15 bp, Homo sapiens
tccgtctctactaaa

SEQ ID NO: 1334146 - DNA, 15 bp, Homo sapiens
ctccgtctctactaa

SEQ ID NO: 1334147 - DNA, 15 bp, Homo sapiens
actccgtctctacta

SEQ ID NO: 1334148 - DNA, 15 bp, Homo sapiens
aactccgtctctact

SEQ ID NO: 1334149 - DNA, 15 bp, Homo sapiens
aaactccgtctctac

SEQ ID NO: 1334150 - DNA, 15 bp, Homo sapiens
aaaactccgtctcta

SEQ ID NO: 1334151 - DNA, 15 bp, Homo sapiens
caaaactccgtctct

SEQ ID NO: 1334152 - DNA, 15 bp, Homo sapiens
catggcaaaactccg

SEQ ID NO: 1334153 - DNA, 15 bp, Homo sapiens
acatggcaaaactcc

SEQ ID NO: 1334154 - DNA, 15 bp, Homo sapiens
aacatggcaaaactc

SEQ ID NO: 1334155 - DNA, 15 bp, Homo sapiens
caacatggcaaaact

SEQ ID NO: 1334156 - DNA, 15 bp, Homo sapiens
aatcacttgaggtca

SEQ ID NO: 1334157 - DNA, 15 bp, Homo sapiens
aaatcacttgaggtc

SEQ ID NO: 1334158 - DNA, 15 bp, Homo sapiens
aaaatcacttgaggt

SEQ ID NO: 1334159 - DNA, 15 bp, Homo sapiens
caaaatcacttgagg

SEQ ID NO: 1334160 - DNA, 15 bp, Homo sapiens
gcaaaatcacttgag

SEQ ID NO: 1334161 - DNA, 15 bp, Homo sapiens
agcaaaatcacttga

SEQ ID NO: 1334162 - DNA, 15 bp, Homo sapiens
gagcaaaatcacttg

SEQ ID NO: 1334163 - DNA, 15 bp, Homo sapiens
cgagcaaaatcactt

SEQ ID NO: 1334164 - DNA, 15 bp, Homo sapiens
gcgagcaaaatcact

SEQ ID NO: 1334165 - DNA, 15 bp, Homo sapiens
ggcgagcaaaatcac

SEQ ID NO: 1334166 - DNA, 15 bp, Homo sapiens
aggcgagcaaaatca

SEQ ID NO: 1334167 - DNA, 15 bp, Homo sapiens
gaggcgagcaaaatc

SEQ ID NO: 1334168 - DNA, 15 bp, Homo sapiens
cgaggcgagcaaaat

SEQ ID NO: 1334169 - DNA, 15 bp, Homo sapiens
ccgaggcgagcaaaa

SEQ ID NO: 1334170 - DNA, 15 bp, Homo sapiens
gccgaggcgagcaaa

SEQ ID NO: 1334171 - DNA, 15 bp, Homo sapiens
ggccgaggcgagcaa

SEQ ID NO: 1334172 - DNA, 15 bp, Homo sapiens
aggccgaggcgagca

SEQ ID NO: 1334173 - DNA, 15 bp, Homo sapiens
gaggccgaggcgagc

SEQ ID NO: 1334174 - DNA, 15 bp, Homo sapiens
tagcattttgggagg

SEQ ID NO: 1334175 - DNA, 15 bp, Homo sapiens
ctagcattttgggag

SEQ ID NO: 1334176 - DNA, 15 bp, Homo sapiens
cctagcattttggga

SEQ ID NO: 1334177 - DNA, 15 bp, Homo sapiens
tcctagcattttggg

SEQ ID NO: 1334178 - DNA, 15 bp, Homo sapiens
atcctagcattttgg

SEQ ID NO: 1334179 - DNA, 15 bp, Homo sapiens
aatcctagcattttg

SEQ ID NO: 1334180 - DNA, 15 bp, Homo sapiens
taatcctagcatttt

SEQ ID NO: 1334181 - DNA, 15 bp, Homo sapiens
gtaatcctagcattt

SEQ ID NO: 1334182 - DNA, 15 bp, Homo sapiens
tgtaatcctagcatt

SEQ ID NO: 1334183 - DNA, 15 bp, Homo sapiens
ctgtaatcctagcat

SEQ ID NO: 1334184 - DNA, 15 bp, Homo sapiens
ggcctgtaatcctag

SEQ ID NO: 1334185 - DNA, 15 bp, Homo sapiens
cggcctgtaatccta

SEQ ID NO: 1334186 - DNA, 15 bp, Homo sapiens
acggcctgtaatcct

SEQ ID NO: 1334187 - DNA, 15 bp, Homo sapiens
cacggcctgtaatcc

SEQ ID NO: 1334188 - DNA, 15 bp, Homo sapiens
gcacggcctgtaatc

SEQ ID NO: 1334189 - DNA, 15 bp, Homo sapiens
ggcacggcctgtaat

SEQ ID NO: 1334190 - DNA, 15 bp, Homo sapiens
aggcacggcctgtaa

SEQ ID NO: 1334191 - DNA, 15 bp, Homo sapiens
caggcacggcctgta

SEQ ID NO: 1334192 - DNA, 15 bp, Homo sapiens
ccaggcacggcctgt

SEQ ID NO: 1334193 - DNA, 15 bp, Homo sapiens
gccaggcacggcctg

SEQ ID NO: 1334194 - DNA, 15 bp, Homo sapiens
ggccaggcacggcct

SEQ ID NO: 1334195 - DNA, 15 bp, Homo sapiens
tggccaggcacggcc

SEQ ID NO: 1334196 - DNA, 15 bp, Homo sapiens
ctggccaggcacggc

SEQ ID NO: 1334197 - DNA, 15 bp, Homo sapiens
actggccaggcacgg

SEQ ID NO: 1334198 - DNA, 15 bp, Homo sapiens
aactggccaggcacg

SEQ ID NO: 1334199 - DNA, 15 bp, Homo sapiens
gaactggccaggcac

SEQ ID NO: 1334200 - DNA, 15 bp, Homo sapiens
ggaactggccaggca

SEQ ID NO: 1334201 - DNA, 15 bp, Homo sapiens
aggaactggccaggc

SEQ ID NO: 1334202 - DNA, 15 bp, Homo sapiens
aaggaactggccagg

SEQ ID NO: 1334203 - DNA, 15 bp, Homo sapiens
taaggaactggccag

SEQ ID NO: 1334204 - DNA, 15 bp, Homo sapiens
gtaaggaactggcca

SEQ ID NO: 1334205 - DNA, 15 bp, Homo sapiens
agtaaggaactggcc

SEQ ID NO: 1334206 - DNA, 15 bp, Homo sapiens
tagtaaggaactggc

SEQ ID NO: 1334207 - DNA, 15 bp, Homo sapiens
atagtaaggaactgg

SEQ ID NO: 1334208 - DNA, 15 bp, Homo sapiens
aatagtaaggaactg

SEQ ID NO: 1334209 - DNA, 15 bp, Homo sapiens
aaatagtaaggaact

SEQ ID NO: 1334210 - DNA, 15 bp, Homo sapiens
aaaatagtaaggaac

SEQ ID NO: 1334211 - DNA, 15 bp, Homo sapiens
caaaatagtaaggaa

SEQ ID NO: 1334212 - DNA, 15 bp, Homo sapiens
tcaaaatagtaagga

SEQ ID NO: 1334213 - DNA, 15 bp, Homo sapiens
atcaaaatagtaagg

SEQ ID NO: 1334214 - DNA, 15 bp, Homo sapiens
catcaaaatagtaag

SEQ ID NO: 1334215 - DNA, 15 bp, Homo sapiens
ccatcaaaatagtaa

SEQ ID NO: 1334216 - DNA, 15 bp, Homo sapiens
cccatcaaaatagta

SEQ ID NO: 1334217 - DNA, 15 bp, Homo sapiens
acccatcaaaatagt

SEQ ID NO: 1334218 - DNA, 15 bp, Homo sapiens
cacccatcaaaatag

SEQ ID NO: 1334219 - DNA, 15 bp, Homo sapiens
tcacccatcaaaata

SEQ ID NO: 1334220 - DNA, 15 bp, Homo sapiens
ttcacccatcaaaat

SEQ ID NO: 1334221 - DNA, 15 bp, Homo sapiens
tttcacccatcaaaa

SEQ ID NO: 1334222 - DNA, 15 bp, Homo sapiens
ttttcacccatcaaa

SEQ ID NO: 1334223 - DNA, 15 bp, Homo sapiens
gttttcacccatcaa

SEQ ID NO: 1334224 - DNA, 15 bp, Homo sapiens
agttttcacccatca

SEQ ID NO: 1334225 - DNA, 15 bp, Homo sapiens
cagttttcacccatc

SEQ ID NO: 1334226 - DNA, 15 bp, Homo sapiens
tcagttttcacccat

SEQ ID NO: 1334227 - DNA, 15 bp, Homo sapiens
gtcagttttcaccca

SEQ ID NO: 1334228 - DNA, 15 bp, Homo sapiens
tgtcagttttcaccc

SEQ ID NO: 1334229 - DNA, 15 bp, Homo sapiens
atgtcagttttcacc

SEQ ID NO: 1334230 - DNA, 15 bp, Homo sapiens
aatgtcagttttcac

SEQ ID NO: 1334231 - DNA, 15 bp, Homo sapiens
aaatgtcagttttca

SEQ ID NO: 1334232 - DNA, 15 bp, Homo sapiens
aaaatgtcagttttc

SEQ ID NO: 1334233 - DNA, 15 bp, Homo sapiens
caaaatgtcagtttt

SEQ ID NO: 1334234 - DNA, 15 bp, Homo sapiens
acaaaatgtcagttt

SEQ ID NO: 1334235 - DNA, 15 bp, Homo sapiens
aacaaaatgtcagtt

SEQ ID NO: 1334236 - DNA, 15 bp, Homo sapiens
taacaaaatgtcagt

SEQ ID NO: 1334237 - DNA, 15 bp, Homo sapiens
ataacaaaatgtcag

SEQ ID NO: 1334238 - DNA, 15 bp, Homo sapiens
tataacaaaatgtca

SEQ ID NO: 1334239 - DNA, 15 bp, Homo sapiens
ctataacaaaatgtc

SEQ ID NO: 1334240 - DNA, 15 bp, Homo sapiens
cctataacaaaatgt

SEQ ID NO: 1334241 - DNA, 15 bp, Homo sapiens
acctataacaaaatg

SEQ ID NO: 1334242 - DNA, 15 bp, Homo sapiens
aacctataacaaaat

SEQ ID NO: 1334243 - DNA, 15 bp, Homo sapiens
taacctataacaaaa

SEQ ID NO: 1334244 - DNA, 15 bp, Homo sapiens
ttaacctataacaaa

SEQ ID NO: 1334245 - DNA, 15 bp, Homo sapiens
attaacctataacaa

SEQ ID NO: 1334246 - DNA, 15 bp, Homo sapiens
cattaacctataaca

SEQ ID NO: 1334247 - DNA, 15 bp, Homo sapiens
gcattaacctataac

SEQ ID NO: 1334248 - DNA, 15 bp, Homo sapiens
tgcattaacctataa

SEQ ID NO: 1334249 - DNA, 15 bp, Homo sapiens
atgcattaacctata

SEQ ID NO: 1334250 - DNA, 15 bp, Homo sapiens
tatgcattaacctat

SEQ ID NO: 1334251 - DNA, 15 bp, Homo sapiens
ctatgcattaaccta

SEQ ID NO: 1334252 - DNA, 15 bp, Homo sapiens
actatgcattaacct

SEQ ID NO: 1334253 - DNA, 15 bp, Homo sapiens
aactatgcattaacc

SEQ ID NO: 1334254 - DNA, 15 bp, Homo sapiens
caactatgcattaac

SEQ ID NO: 1334255 - DNA, 15 bp, Homo sapiens
acaactatgcattaa

SEQ ID NO: 1334256 - DNA, 15 bp, Homo sapiens
cacaactatgcatta

SEQ ID NO: 1334257 - DNA, 15 bp, Homo sapiens
acacaactatgcatt

SEQ ID NO: 1334258 - DNA, 15 bp, Homo sapiens
tacacaactatgcat

SEQ ID NO: 1334259 - DNA, 15 bp, Homo sapiens
atacacaactatgca

SEQ ID NO: 1334260 - DNA, 15 bp, Homo sapiens
aatacacaactatgc

SEQ ID NO: 1334261 - DNA, 15 bp, Homo sapiens
aaatacacaactatg

SEQ ID NO: 1334262 - DNA, 15 bp, Homo sapiens
taaatacacaactat

SEQ ID NO: 1334263 - DNA, 15 bp, Homo sapiens
ataaatacacaacta

SEQ ID NO: 1334264 - DNA, 15 bp, Homo sapiens
cataaatacacaact

SEQ ID NO: 1334265 - DNA, 15 bp, Homo sapiens
tcataaatacacaac

SEQ ID NO: 1334266 - DNA, 15 bp, Homo sapiens
ctcataaatacacaa

SEQ ID NO: 1334267 - DNA, 15 bp, Homo sapiens
actcataaatacaca

SEQ ID NO: 1334268 - DNA, 15 bp, Homo sapiens
cactcataaatacac

SEQ ID NO: 1334269 - DNA, 15 bp, Homo sapiens
tcactcataaataca

SEQ ID NO: 1334270 - DNA, 15 bp, Homo sapiens
ctcactcataaatac

SEQ ID NO: 1334271 - DNA, 15 bp, Homo sapiens
cctcactcataaata

SEQ ID NO: 1334272 - DNA, 15 bp, Homo sapiens
acctcactcataaat

SEQ ID NO: 1334273 - DNA, 15 bp, Homo sapiens
aacctcactcataaa

SEQ ID NO: 1334274 - DNA, 15 bp, Homo sapiens
aaacctcactcataa

SEQ ID NO: 1334275 - DNA, 15 bp, Homo sapiens
aaaacctcactcata

SEQ ID NO: 1334276 - DNA, 15 bp, Homo sapiens
taaaacctcactcat

SEQ ID NO: 1334277 - DNA, 15 bp, Homo sapiens
gtaaaacctcactca

SEQ ID NO: 1334278 - DNA, 15 bp, Homo sapiens
tgtaaaacctcactc

SEQ ID NO: 1334279 - DNA, 15 bp, Homo sapiens
ttgtaaaacctcact

SEQ ID NO: 1334280 - DNA, 15 bp, Homo sapiens
gttgtaaaacctcac

SEQ ID NO: 1334281 - DNA, 15 bp, Homo sapiens
agttgtaaaacctca

SEQ ID NO: 1334282 - DNA, 15 bp, Homo sapiens
aagttgtaaaacctc

SEQ ID NO: 1334283 - DNA, 15 bp, Homo sapiens
aaagttgtaaaacct

SEQ ID NO: 1334284 - DNA, 15 bp, Homo sapiens
gaaagttgtaaaacc

SEQ ID NO: 1334285 - DNA, 15 bp, Homo sapiens
tgaaagttgtaaaac

SEQ ID NO: 1334286 - DNA, 15 bp, Homo sapiens
atgaaagttgtaaaa

SEQ ID NO: 1334287 - DNA, 15 bp, Homo sapiens
tatgaaagttgtaaa

SEQ ID NO: 1334288 - DNA, 15 bp, Homo sapiens
atatgaaagttgtaa

SEQ ID NO: 1334289 - DNA, 15 bp, Homo sapiens
catatgaaagttgta

SEQ ID NO: 1334290 - DNA, 15 bp, Homo sapiens
acatatgaaagttgt

SEQ ID NO: 1334291 - DNA, 15 bp, Homo sapiens
aacatatgaaagttg

SEQ ID NO: 1334292 - DNA, 15 bp, Homo sapiens
aaacatatgaaagtt

SEQ ID NO: 1334293 - DNA, 15 bp, Homo sapiens
taaacatatgaaagt

SEQ ID NO: 1334294 - DNA, 15 bp, Homo sapiens
ttaaacatatgaaag

SEQ ID NO: 1334295 - DNA, 15 bp, Homo sapiens
tttaaacatatgaaa

SEQ ID NO: 1334296 - DNA, 15 bp, Homo sapiens
ttttaaacatatgaa

SEQ ID NO: 1334297 - DNA, 15 bp, Homo sapiens
cttttaaacatatga

SEQ ID NO: 1334298 - DNA, 15 bp, Homo sapiens
gcttttaaacatatg

SEQ ID NO: 1334299 - DNA, 15 bp, Homo sapiens
ggcttttaaacatat

SEQ ID NO: 1334300 - DNA, 15 bp, Homo sapiens
tggcttttaaacata

SEQ ID NO: 1334301 - DNA, 15 bp, Homo sapiens
gtggcttttaaacat

SEQ ID NO: 1334302 - DNA, 15 bp, Homo sapiens
agtggcttttaaaca

SEQ ID NO: 1334303 - DNA, 15 bp, Homo sapiens
aagtggcttttaaac

SEQ ID NO: 1334304 - DNA, 15 bp, Homo sapiens
caagtggcttttaaa

SEQ ID NO: 1334305 - DNA, 15 bp, Homo sapiens
acaagtggcttttaa

SEQ ID NO: 1334306 - DNA, 15 bp, Homo sapiens
cacaagtggctttta

SEQ ID NO: 1334307 - DNA, 15 bp, Homo sapiens
acacaagtggctttt

SEQ ID NO: 1334308 - DNA, 15 bp, Homo sapiens
gacacaagtggcttt

SEQ ID NO: 1334309 - DNA, 15 bp, Homo sapiens
ggacacaagtggctt

SEQ ID NO: 1334310 - DNA, 15 bp, Homo sapiens
aggacacaagtggct

SEQ ID NO: 1334311 - DNA, 15 bp, Homo sapiens
taggacacaagtggc

SEQ ID NO: 1334312 - DNA, 15 bp, Homo sapiens
ataggacacaagtgg

SEQ ID NO: 1334313 - DNA, 15 bp, Homo sapiens
aataggacacaagtg

SEQ ID NO: 1334314 - DNA, 15 bp, Homo sapiens
aaataggacacaagt

SEQ ID NO: 1334315 - DNA, 15 bp, Homo sapiens
aaaataggacacaag

SEQ ID NO: 1334316 - DNA, 15 bp, Homo sapiens
gaaaataggacacaa

SEQ ID NO: 1334317 - DNA, 15 bp, Homo sapiens
agaaaataggacaca

SEQ ID NO: 1334318 - DNA, 15 bp, Homo sapiens
cagaaaataggacac

SEQ ID NO: 1334319 - DNA, 15 bp, Homo sapiens
acagaaaataggaca

SEQ ID NO: 1334320 - DNA, 15 bp, Homo sapiens
cacagaaaataggac

SEQ ID NO: 1334321 - DNA, 15 bp, Homo sapiens
tcacagaaaatagga

SEQ ID NO: 1334322 - DNA, 15 bp, Homo sapiens
ttcacagaaaatagg

SEQ ID NO: 1334323 - DNA, 15 bp, Homo sapiens
gttcacagaaaatag

SEQ ID NO: 1334324 - DNA, 15 bp, Homo sapiens
agttcacagaaaata

SEQ ID NO: 1334325 - DNA, 15 bp, Homo sapiens
cagttcacagaaaat

SEQ ID NO: 1334326 - DNA, 15 bp, Homo sapiens
tcagttcacagaaaa

SEQ ID NO: 1334327 - DNA, 15 bp, Homo sapiens
ttcagttcacagaaa

SEQ ID NO: 1334328 - DNA, 15 bp, Homo sapiens
gttcagttcacagaa

SEQ ID NO: 1334329 - DNA, 15 bp, Homo sapiens
agttcagttcacaga

SEQ ID NO: 1334330 - DNA, 15 bp, Homo sapiens
gagttcagttcacag

SEQ ID NO: 1334331 - DNA, 15 bp, Homo sapiens
agagttcagttcaca

SEQ ID NO: 1334332 - DNA, 15 bp, Homo sapiens
aagagttcagttcac

SEQ ID NO: 1334333 - DNA, 15 bp, Homo sapiens
gaagagttcagttca

SEQ ID NO: 1334334 - DNA, 15 bp, Homo sapiens
tgaagagttcagttc

SEQ ID NO: 1334335 - DNA, 15 bp, Homo sapiens
atgaagagttcagtt

SEQ ID NO: 1334336 - DNA, 15 bp, Homo sapiens
aatgaagagttcagt

SEQ ID NO: 1334337 - DNA, 15 bp, Homo sapiens
aaatgaagagttcag

SEQ ID NO: 1334338 - DNA, 15 bp, Homo sapiens
gaaatgaagagttca

SEQ ID NO: 1334339 - DNA, 15 bp, Homo sapiens
ggaaatgaagagttc

SEQ ID NO: 1334340 - DNA, 15 bp, Homo sapiens
tggaaatgaagagtt

SEQ ID NO: 1334341 - DNA, 15 bp, Homo sapiens
ttggaaatgaagagt

SEQ ID NO: 1334342 - DNA, 15 bp, Homo sapiens
gttggaaatgaagag

SEQ ID NO: 1334343 - DNA, 15 bp, Homo sapiens
agttggaaatgaaga

SEQ ID NO: 1334344 - DNA, 15 bp, Homo sapiens
tagttggaaatgaag

SEQ ID NO: 1334345 - DNA, 15 bp, Homo sapiens
gtagttggaaatgaa

SEQ ID NO: 1334346 - DNA, 15 bp, Homo sapiens
cgtagttggaaatga

SEQ ID NO: 1334347 - DNA, 15 bp, Homo sapiens
gcgtagttggaaatg

SEQ ID NO: 1334348 - DNA, 15 bp, Homo sapiens
agcgtagttggaaat

SEQ ID NO: 1334349 - DNA, 15 bp, Homo sapiens
tagcgtagttggaaa

SEQ ID NO: 1334350 - DNA, 15 bp, Homo sapiens
atagcgtagttggaa

SEQ ID NO: 1334351 - DNA, 15 bp, Homo sapiens
gatagcgtagttgga

SEQ ID NO: 1334352 - DNA, 15 bp, Homo sapiens
tgatagcgtagttgg

SEQ ID NO: 1334353 - DNA, 15 bp, Homo sapiens
ttgatagcgtagttg

SEQ ID NO: 1334354 - DNA, 15 bp, Homo sapiens
attgatagcgtagtt

SEQ ID NO: 1334355 - DNA, 15 bp, Homo sapiens
gattgatagcgtagt

SEQ ID NO: 1334356 - DNA, 15 bp, Homo sapiens
agattgatagcgtag

SEQ ID NO: 1334357 - DNA, 15 bp, Homo sapiens
aagattgatagcgta

SEQ ID NO: 1334358 - DNA, 15 bp, Homo sapiens
aaagattgatagcgt

SEQ ID NO: 1334359 - DNA, 15 bp, Homo sapiens
aaaagattgatagcg

SEQ ID NO: 1334360 - DNA, 15 bp, Homo sapiens
aaaaagattgatagc

SEQ ID NO: 1334361 - DNA, 15 bp, Homo sapiens
gaaaaagattgatag

SEQ ID NO: 1334362 - DNA, 15 bp, Homo sapiens
agaaaaagattgata

SEQ ID NO: 1334363 - DNA, 15 bp, Homo sapiens
aagaaaaagattgat

SEQ ID NO: 1334364 - DNA, 15 bp, Homo sapiens
taagaaaaagattga

SEQ ID NO: 1334365 - DNA, 15 bp, Homo sapiens
gtaagaaaaagattg

SEQ ID NO: 1334366 - DNA, 15 bp, Homo sapiens
agtaagaaaaagatt

SEQ ID NO: 1334367 - DNA, 15 bp, Homo sapiens
cagtaagaaaaagat

SEQ ID NO: 1334368 - DNA, 15 bp, Homo sapiens
tcagtaagaaaaaga

SEQ ID NO: 1334369 - DNA, 15 bp, Homo sapiens
atcagtaagaaaaag

SEQ ID NO: 1334370 - DNA, 15 bp, Homo sapiens
aatcagtaagaaaaa

SEQ ID NO: 1334371 - DNA, 15 bp, Homo sapiens
taatcagtaagaaaa

SEQ ID NO: 1334372 - DNA, 15 bp, Homo sapiens
ttaatcagtaagaaa

SEQ ID NO: 1334373 - DNA, 15 bp, Homo sapiens
attaatcagtaagaa

SEQ ID NO: 1334374 - DNA, 15 bp, Homo sapiens
cattaatcagtaaga

SEQ ID NO: 1334375 - DNA, 15 bp, Homo sapiens
tcattaatcagtaag

SEQ ID NO: 1334376 - DNA, 15 bp, Homo sapiens
ctcattaatcagtaa

SEQ ID NO: 1334377 - DNA, 15 bp, Homo sapiens
tctcattaatcagta

SEQ ID NO: 1334378 - DNA, 15 bp, Homo sapiens
ctctcattaatcagt

SEQ ID NO: 1334379 - DNA, 15 bp, Homo sapiens
actctcattaatcag

SEQ ID NO: 1334380 - DNA, 15 bp, Homo sapiens
gactctcattaatca

SEQ ID NO: 1334381 - DNA, 15 bp, Homo sapiens
ggactctcattaatc

SEQ ID NO: 1334382 - DNA, 15 bp, Homo sapiens
aggactctcattaat

SEQ ID NO: 1334383 - DNA, 15 bp, Homo sapiens
aaggactctcattaa

SEQ ID NO: 1334384 - DNA, 15 bp, Homo sapiens
aaaggactctcatta

SEQ ID NO: 1334385 - DNA, 15 bp, Homo sapiens
taaaggactctcatt

SEQ ID NO: 1334386 - DNA, 15 bp, Homo sapiens
ataaaggactctcat

SEQ ID NO: 1334387 - DNA, 15 bp, Homo sapiens
tataaaggactctca

SEQ ID NO: 1334388 - DNA, 15 bp, Homo sapiens
ttataaaggactctc

SEQ ID NO: 1334389 - DNA, 15 bp, Homo sapiens
tttataaaggactct

SEQ ID NO: 1334390 - DNA, 15 bp, Homo sapiens
ctttataaaggactc

SEQ ID NO: 1334391 - DNA, 15 bp, Homo sapiens
cctttataaaggact

SEQ ID NO: 1334392 - DNA, 15 bp, Homo sapiens
atttcctttataaag

SEQ ID NO: 1334393 - DNA, 15 bp, Homo sapiens
tatttcctttataaa

SEQ ID NO: 1334394 - DNA, 15 bp, Homo sapiens
atatttcctttataa

SEQ ID NO: 1334395 - DNA, 15 bp, Homo sapiens
tatatttcctttata

SEQ ID NO: 1334396 - DNA, 15 bp, Homo sapiens
atatatttcctttat

SEQ ID NO: 1334397 - DNA, 15 bp, Homo sapiens
gatatatttccttta

SEQ ID NO: 1334398 - DNA, 15 bp, Homo sapiens
agatatatttccttt

SEQ ID NO: 1334399 - DNA, 15 bp, Homo sapiens
aaagatatatttcct

SEQ ID NO: 1334400 - DNA, 15 bp, Homo sapiens
taaagatatatttcc

SEQ ID NO: 1334401 - DNA, 15 bp, Homo sapiens
ataaagatatatttc

SEQ ID NO: 1334402 - DNA, 15 bp, Homo sapiens
cataaagatatattt

SEQ ID NO: 1334403 - DNA, 15 bp, Homo sapiens
tcataaagatatatt

SEQ ID NO: 1334404 - DNA, 15 bp, Homo sapiens
atcataaagatatat

SEQ ID NO: 1334405 - DNA, 15 bp, Homo sapiens
tatcataaagatata

SEQ ID NO: 1334406 - DNA, 15 bp, Homo sapiens
gtatcataaagatat

SEQ ID NO: 1334407 - DNA, 15 bp, Homo sapiens
agtatcataaagata

SEQ ID NO: 1334408 - DNA, 15 bp, Homo sapiens
cagtatcataaagat

SEQ ID NO: 1334409 - DNA, 15 bp, Homo sapiens
acagtatcataaaga

SEQ ID NO: 1334410 - DNA, 15 bp, Homo sapiens
tacagtatcataaag

SEQ ID NO: 1334411 - DNA, 15 bp, Homo sapiens
gtacagtatcataaa

SEQ ID NO: 1334412 - DNA, 15 bp, Homo sapiens
tgtacagtatcataa

SEQ ID NO: 1334413 - DNA, 15 bp, Homo sapiens
ctgtacagtatcata

SEQ ID NO: 1334414 - DNA, 15 bp, Homo sapiens
actgtacagtatcat

SEQ ID NO: 1334415 - DNA, 15 bp, Homo sapiens
tactgtacagtatca

SEQ ID NO: 1334416 - DNA, 15 bp, Homo sapiens
ctactgtacagtatc

SEQ ID NO: 1334417 - DNA, 15 bp, Homo sapiens
tctactgtacagtat

SEQ ID NO: 1334418 - DNA, 15 bp, Homo sapiens
ctctactgtacagta

SEQ ID NO: 1334419 - DNA, 15 bp, Homo sapiens
actctactgtacagt

SEQ ID NO: 1334420 - DNA, 15 bp, Homo sapiens
aactctactgtacag

SEQ ID NO: 1334421 - DNA, 15 bp, Homo sapiens
taactctactgtaca

SEQ ID NO: 1334422 - DNA, 15 bp, Homo sapiens
ttaactctactgtac

SEQ ID NO: 1334423 - DNA, 15 bp, Homo sapiens
cttaactctactgta

SEQ ID NO: 1334424 - DNA, 15 bp, Homo sapiens
acttaactctactgt

SEQ ID NO: 1334425 - DNA, 15 bp, Homo sapiens
aacttaactctactg

SEQ ID NO: 1334426 - DNA, 15 bp, Homo sapiens
gaacttaactctact

SEQ ID NO: 1334427 - DNA, 15 bp, Homo sapiens
tgaacttaactctac

SEQ ID NO: 1334428 - DNA, 15 bp, Homo sapiens
atgaacttaactcta

SEQ ID NO: 1334429 - DNA, 15 bp, Homo sapiens
aatgaacttaactct

SEQ ID NO: 1334430 - DNA, 15 bp, Homo sapiens
gaatgaacttaactc

SEQ ID NO: 1334431 - DNA, 15 bp, Homo sapiens
tgaatgaacttaact

SEQ ID NO: 1334432 - DNA, 15 bp, Homo sapiens
ctgaatgaacttaac

SEQ ID NO: 1334433 - DNA, 15 bp, Homo sapiens
actgaatgaacttaa

SEQ ID NO: 1334434 - DNA, 15 bp, Homo sapiens
cactgaatgaactta

SEQ ID NO: 1334435 - DNA, 15 bp, Homo sapiens
ccactgaatgaactt

SEQ ID NO: 1334436 - DNA, 15 bp, Homo sapiens
cccactgaatgaact

SEQ ID NO: 1334437 - DNA, 15 bp, Homo sapiens
acccactgaatgaac

SEQ ID NO: 1334438 - DNA, 15 bp, Homo sapiens
cacccactgaatgaa

SEQ ID NO: 1334439 - DNA, 15 bp, Homo sapiens
ccacccactgaatga

SEQ ID NO: 1334440 - DNA, 15 bp, Homo sapiens
tccacccactgaatg

SEQ ID NO: 1334441 - DNA, 15 bp, Homo sapiens
atccacccactgaat

SEQ ID NO: 1334442 - DNA, 15 bp, Homo sapiens
aatccacccactgaa

SEQ ID NO: 1334443 - DNA, 15 bp, Homo sapiens
gaatccacccactga

SEQ ID NO: 1334444 - DNA, 15 bp, Homo sapiens
agaatccacccactg

SEQ ID NO: 1334445 - DNA, 15 bp, Homo sapiens
cagaatccacccact

SEQ ID NO: 1334446 - DNA, 15 bp, Homo sapiens
gcagaatccacccac

SEQ ID NO: 1334447 - DNA, 15 bp, Homo sapiens
agcagaatccaccca

SEQ ID NO: 1334448 - DNA, 15 bp, Homo sapiens
cagcagaatccaccc

SEQ ID NO: 1334449 - DNA, 15 bp, Homo sapiens
tcagcagaatccacc

SEQ ID NO: 1334450 - DNA, 15 bp, Homo sapiens
atcagcagaatccac

SEQ ID NO: 1334451 - DNA, 15 bp, Homo sapiens
tatcagcagaatcca

SEQ ID NO: 1334452 - DNA, 15 bp, Homo sapiens
ttatcagcagaatcc

SEQ ID NO: 1334453 - DNA, 15 bp, Homo sapiens
tttatcagcagaatc

SEQ ID NO: 1334454 - DNA, 15 bp, Homo sapiens
ttttatcagcagaat

SEQ ID NO: 1334455 - DNA, 15 bp, Homo sapiens
tttttatcagcagaa

SEQ ID NO: 1334456 - DNA, 15 bp, Homo sapiens
gtttttatcagcaga

SEQ ID NO: 1334457 - DNA, 15 bp, Homo sapiens
ggtttttatcagcag

SEQ ID NO: 1334458 - DNA, 15 bp, Homo sapiens
tggtttttatcagca

SEQ ID NO: 1334459 - DNA, 15 bp, Homo sapiens
ttggtttttatcagc

SEQ ID NO: 1334460 - DNA, 15 bp, Homo sapiens
attggtttttatcag

SEQ ID NO: 1334461 - DNA, 15 bp, Homo sapiens
cattggtttttatca

SEQ ID NO: 1334462 - DNA, 15 bp, Homo sapiens
acattggtttttatc

SEQ ID NO: 1334463 - DNA, 15 bp, Homo sapiens
cacattggtttttat

SEQ ID NO: 1334464 - DNA, 15 bp, Homo sapiens
tcacattggttttta

SEQ ID NO: 1334465 - DNA, 15 bp, Homo sapiens
ttcacattggttttt

SEQ ID NO: 1334466 - DNA, 15 bp, Homo sapiens
tttcacattggtttt

SEQ ID NO: 1334467 - DNA, 15 bp, Homo sapiens
ttttcacattggttt

SEQ ID NO: 1334468 - DNA, 15 bp, Homo sapiens
attttcacattggtt

SEQ ID NO: 1334469 - DNA, 15 bp, Homo sapiens
gattttcacattggt

SEQ ID NO: 1334470 - DNA, 15 bp, Homo sapiens
tgattttcacattgg

SEQ ID NO: 1334471 - DNA, 15 bp, Homo sapiens
gtgattttcacattg

SEQ ID NO: 1334472 - DNA, 15 bp, Homo sapiens
agtgattttcacatt

SEQ ID NO: 1334473 - DNA, 15 bp, Homo sapiens
gagtgattttcacat

SEQ ID NO: 1334474 - DNA, 15 bp, Homo sapiens
ggagtgattttcaca

SEQ ID NO: 1334475 - DNA, 15 bp, Homo sapiens
aggagtgattttcac

SEQ ID NO: 1334476 - DNA, 15 bp, Homo sapiens
gaggagtgattttca

SEQ ID NO: 1334477 - DNA, 15 bp, Homo sapiens
agaggagtgattttc

SEQ ID NO: 1334478 - DNA, 15 bp, Homo sapiens
cagaggagtgatttt

SEQ ID NO: 1334479 - DNA, 15 bp, Homo sapiens
gcagaggagtgattt

SEQ ID NO: 1334480 - DNA, 15 bp, Homo sapiens
agcagaggagtgatt

SEQ ID NO: 1334481 - DNA, 15 bp, Homo sapiens
cagcagaggagtgat

SEQ ID NO: 1334482 - DNA, 15 bp, Homo sapiens
gcagcagaggagtga

SEQ ID NO: 1334483 - DNA, 15 bp, Homo sapiens
agcagcagaggagtg

SEQ ID NO: 1334484 - DNA, 15 bp, Homo sapiens
gagcagcagaggagt

SEQ ID NO: 1334485 - DNA, 15 bp, Homo sapiens
agagcagcagaggag

SEQ ID NO: 1334486 - DNA, 15 bp, Homo sapiens
cagagcagcagagga

SEQ ID NO: 1334487 - DNA, 15 bp, Homo sapiens
gcagagcagcagagg

SEQ ID NO: 1334488 - DNA, 15 bp, Homo sapiens
tgcagagcagcagag

SEQ ID NO: 1334489 - DNA, 15 bp, Homo sapiens
ttgcagagcagcaga

SEQ ID NO: 1334490 - DNA, 15 bp, Homo sapiens
gttgcagagcagcag

SEQ ID NO: 1334491 - DNA, 15 bp, Homo sapiens
ggttgcagagcagca

SEQ ID NO: 1334492 - DNA, 15 bp, Homo sapiens
aggttgcagagcagc

SEQ ID NO: 1334493 - DNA, 15 bp, Homo sapiens
taggttgcagagcag

SEQ ID NO: 1334494 - DNA, 15 bp, Homo sapiens
ctaggttgcagagca

SEQ ID NO: 1334495 - DNA, 15 bp, Homo sapiens
gctaggttgcagagc

SEQ ID NO: 1334496 - DNA, 15 bp, Homo sapiens
ggctaggttgcagag

SEQ ID NO: 1334497 - DNA, 15 bp, Homo sapiens
aggctaggttgcaga

SEQ ID NO: 1334498 - DNA, 15 bp, Homo sapiens
aaggctaggttgcag

SEQ ID NO: 1334499 - DNA, 15 bp, Homo sapiens
caaggctaggttgca

SEQ ID NO: 1334500 - DNA, 15 bp, Homo sapiens
tcaaggctaggttgc

SEQ ID NO: 1334501 - DNA, 15 bp, Homo sapiens
atcaaggctaggttg

SEQ ID NO: 1334502 - DNA, 15 bp, Homo sapiens
tatcaaggctaggtt

SEQ ID NO: 1334503 - DNA, 15 bp, Homo sapiens
ttatcaaggctaggt

SEQ ID NO: 1334504 - DNA, 15 bp, Homo sapiens
attatcaaggctagg

SEQ ID NO: 1334505 - DNA, 15 bp, Homo sapiens
tattatcaaggctag

SEQ ID NO: 1334506 - DNA, 15 bp, Homo sapiens
ttattatcaaggcta

SEQ ID NO: 1334507 - DNA, 15 bp, Homo sapiens
tttattatcaaggct

SEQ ID NO: 1334508 - DNA, 15 bp, Homo sapiens
ttttattatcaaggc

SEQ ID NO: 1334509 - DNA, 15 bp, Homo sapiens
cttttattatcaagg

SEQ ID NO: 1334510 - DNA, 15 bp, Homo sapiens
gcttttattatcaag

SEQ ID NO: 1334511 - DNA, 15 bp, Homo sapiens
agcttttattatcaa

SEQ ID NO: 1334512 - DNA, 15 bp, Homo sapiens
aagcttttattatca

SEQ ID NO: 1334513 - DNA, 15 bp, Homo sapiens
caagcttttattatc

SEQ ID NO: 1334514 - DNA, 15 bp, Homo sapiens
gcaagcttttattat

SEQ ID NO: 1334515 - DNA, 15 bp, Homo sapiens
ggcaagcttttatta

SEQ ID NO: 1334516 - DNA, 15 bp, Homo sapiens
gggcaagcttttatt

SEQ ID NO: 1334517 - DNA, 15 bp, Homo sapiens
agggcaagcttttat

SEQ ID NO: 1334518 - DNA, 15 bp, Homo sapiens
aagggcaagctttta

SEQ ID NO: 1334519 - DNA, 15 bp, Homo sapiens
aaagggcaagctttt

SEQ ID NO: 1334520 - DNA, 15 bp, Homo sapiens
gaaagggcaagcttt

SEQ ID NO: 1334521 - DNA, 15 bp, Homo sapiens
tgaaagggcaagctt

SEQ ID NO: 1334522 - DNA, 15 bp, Homo sapiens
atgaaagggcaagct

SEQ ID NO: 1334523 - DNA, 15 bp, Homo sapiens
aatgaaagggcaagc

SEQ ID NO: 1334524 - DNA, 15 bp, Homo sapiens
gaatgaaagggcaag

SEQ ID NO: 1334525 - DNA, 15 bp, Homo sapiens
ggaatgaaagggcaa

SEQ ID NO: 1334526 - DNA, 15 bp, Homo sapiens
gggaatgaaagggca

SEQ ID NO: 1334527 - DNA, 15 bp, Homo sapiens
agggaatgaaagggc

SEQ ID NO: 1334528 - DNA, 15 bp, Homo sapiens
aagggaatgaaaggg

SEQ ID NO: 1334529 - DNA, 15 bp, Homo sapiens
caagggaatgaaagg

SEQ ID NO: 1334530 - DNA, 15 bp, Homo sapiens
ccaagggaatgaaag

SEQ ID NO: 1334531 - DNA, 15 bp, Homo sapiens
cccaagggaatgaaa

SEQ ID NO: 1334532 - DNA, 15 bp, Homo sapiens
tcccaagggaatgaa

SEQ ID NO: 1334533 - DNA, 15 bp, Homo sapiens
ttcccaagggaatga

SEQ ID NO: 1334534 - DNA, 15 bp, Homo sapiens
gttcccaagggaatg

SEQ ID NO: 1334535 - DNA, 15 bp, Homo sapiens
ggttcccaagggaat

SEQ ID NO: 1334536 - DNA, 15 bp, Homo sapiens
aggttcccaagggaa

SEQ ID NO: 1334537 - DNA, 15 bp, Homo sapiens
aaggttcccaaggga

SEQ ID NO: 1334538 - DNA, 15 bp, Homo sapiens
gaaggttcccaaggg

SEQ ID NO: 1334539 - DNA, 15 bp, Homo sapiens
ggaaggttcccaagg

SEQ ID NO: 1334540 - DNA, 15 bp, Homo sapiens
aggaaggttcccaag

SEQ ID NO: 1334541 - DNA, 15 bp, Homo sapiens
gaggaaggttcccaa

SEQ ID NO: 1334542 - DNA, 15 bp, Homo sapiens
tgaggaaggttccca

SEQ ID NO: 1334543 - DNA, 15 bp, Homo sapiens
atgaggaaggttccc

SEQ ID NO: 1334544 - DNA, 15 bp, Homo sapiens
aatgaggaaggttcc

SEQ ID NO: 1334545 - DNA, 15 bp, Homo sapiens
aaatgaggaaggttc

SEQ ID NO: 1334546 - DNA, 15 bp, Homo sapiens
taaatgaggaaggtt

SEQ ID NO: 1334547 - DNA, 15 bp, Homo sapiens
ctaaatgaggaaggt

SEQ ID NO: 1334548 - DNA, 15 bp, Homo sapiens
tctaaatgaggaagg

SEQ ID NO: 1334549 - DNA, 15 bp, Homo sapiens
ctctaaatgaggaag

SEQ ID NO: 1334550 - DNA, 15 bp, Homo sapiens
gctctaaatgaggaa

SEQ ID NO: 1334551 - DNA, 15 bp, Homo sapiens
ggctctaaatgagga

SEQ ID NO: 1334552 - DNA, 15 bp, Homo sapiens
gggctctaaatgagg

SEQ ID NO: 1334553 - DNA, 15 bp, Homo sapiens
ggggctctaaatgag

SEQ ID NO: 1334554 - DNA, 15 bp, Homo sapiens
tggggctctaaatga

SEQ ID NO: 1334555 - DNA, 15 bp, Homo sapiens
ttggggctctaaatg

SEQ ID NO: 1334556 - DNA, 15 bp, Homo sapiens
attggggctctaaat

SEQ ID NO: 1334557 - DNA, 15 bp, Homo sapiens
gattggggctctaaa

SEQ ID NO: 1334558 - DNA, 15 bp, Homo sapiens
tgattggggctctaa

SEQ ID NO: 1334559 - DNA, 15 bp, Homo sapiens
atgattggggctcta

SEQ ID NO: 1334560 - DNA, 15 bp, Homo sapiens
aatgattggggctct

SEQ ID NO: 1334561 - DNA, 15 bp, Homo sapiens
taatgattggggctc

SEQ ID NO: 1334562 - DNA, 15 bp, Homo sapiens
gtaatgattggggct

SEQ ID NO: 1334563 - DNA, 15 bp, Homo sapiens
ggtaatgattggggc

SEQ ID NO: 1334564 - DNA, 15 bp, Homo sapiens
tggtaatgattgggg

SEQ ID NO: 1334565 - DNA, 15 bp, Homo sapiens
gtggtaatgattggg

SEQ ID NO: 1334566 - DNA, 15 bp, Homo sapiens
agtggtaatgattgg

SEQ ID NO: 1334567 - DNA, 15 bp, Homo sapiens
aagtggtaatgattg

SEQ ID NO: 1334568 - DNA, 15 bp, Homo sapiens
caagtggtaatgatt

SEQ ID NO: 1334569 - DNA, 15 bp, Homo sapiens
gcaagtggtaatgat

SEQ ID NO: 1334570 - DNA, 15 bp, Homo sapiens
ggcaagtggtaatga

SEQ ID NO: 1334571 - DNA, 15 bp, Homo sapiens
gggcaagtggtaatg

SEQ ID NO: 1334572 - DNA, 15 bp, Homo sapiens
agggcaagtggtaat

SEQ ID NO: 1334573 - DNA, 15 bp, Homo sapiens
tagggcaagtggtaa

SEQ ID NO: 1334574 - DNA, 15 bp, Homo sapiens
atagggcaagtggta

SEQ ID NO: 1334575 - DNA, 15 bp, Homo sapiens
tatagggcaagtggt

SEQ ID NO: 1334576 - DNA, 15 bp, Homo sapiens
atatagggcaagtgg

SEQ ID NO: 1334577 - DNA, 15 bp, Homo sapiens
catatagggcaagtg

SEQ ID NO: 1334578 - DNA, 15 bp, Homo sapiens
ccatatagggcaagt

SEQ ID NO: 1334579 - DNA, 15 bp, Homo sapiens
accatatagggcaag

SEQ ID NO: 1334580 - DNA, 15 bp, Homo sapiens
aaccatatagggcaa

SEQ ID NO: 1334581 - DNA, 15 bp, Homo sapiens
caaccatatagggca

SEQ ID NO: 1334582 - DNA, 15 bp, Homo sapiens
tcaaccatatagggc

SEQ ID NO: 1334583 - DNA, 15 bp, Homo sapiens
ttcaaccatataggg

SEQ ID NO: 1334584 - DNA, 15 bp, Homo sapiens
tttcaaccatatagg

SEQ ID NO: 1334585 - DNA, 15 bp, Homo sapiens
atttcaaccatatag

SEQ ID NO: 1334586 - DNA, 15 bp, Homo sapiens
aatttcaaccatata

SEQ ID NO: 1334587 - DNA, 15 bp, Homo sapiens
aaatttcaaccatat

SEQ ID NO: 1334588 - DNA, 15 bp, Homo sapiens
aaaatttcaaccata

SEQ ID NO: 1334589 - DNA, 15 bp, Homo sapiens
taaaatttcaaccat

SEQ ID NO: 1334590 - DNA, 15 bp, Homo sapiens
ctaaaatttcaacca

SEQ ID NO: 1334591 - DNA, 15 bp, Homo sapiens
cctaaaatttcaacc

SEQ ID NO: 1334592 - DNA, 15 bp, Homo sapiens
gcctaaaatttcaac

SEQ ID NO: 1334593 - DNA, 15 bp, Homo sapiens
ggcctaaaatttcaa

SEQ ID NO: 1334594 - DNA, 15 bp, Homo sapiens
tggcctaaaatttca

SEQ ID NO: 1334595 - DNA, 15 bp, Homo sapiens
ctggcctaaaatttc

SEQ ID NO: 1334596 - DNA, 15 bp, Homo sapiens
actggcctaaaattt

SEQ ID NO: 1334597 - DNA, 15 bp, Homo sapiens
cactggcctaaaatt

SEQ ID NO: 1334598 - DNA, 15 bp, Homo sapiens
acactggcctaaaat

SEQ ID NO: 1334599 - DNA, 15 bp, Homo sapiens
aacactggcctaaaa

SEQ ID NO: 1334600 - DNA, 15 bp, Homo sapiens
aaacactggcctaaa

SEQ ID NO: 1334601 - DNA, 15 bp, Homo sapiens
gaaacactggcctaa

SEQ ID NO: 1334602 - DNA, 15 bp, Homo sapiens
agaaacactggccta

SEQ ID NO: 1334603 - DNA, 15 bp, Homo sapiens
gagaaacactggcct

SEQ ID NO: 1334604 - DNA, 15 bp, Homo sapiens
tgagaaacactggcc

SEQ ID NO: 1334605 - DNA, 15 bp, Homo sapiens
ctgagaaacactggc

SEQ ID NO: 1334606 - DNA, 15 bp, Homo sapiens
cctgagaaacactgg

SEQ ID NO: 1334607 - DNA, 15 bp, Homo sapiens
gcctgagaaacactg

SEQ ID NO: 1334608 - DNA, 15 bp, Homo sapiens
tgcctgagaaacact

SEQ ID NO: 1334609 - DNA, 15 bp, Homo sapiens
atgcctgagaaacac

SEQ ID NO: 1334610 - DNA, 15 bp, Homo sapiens
catgcctgagaaaca

SEQ ID NO: 1334611 - DNA, 15 bp, Homo sapiens
ccatgcctgagaaac

SEQ ID NO: 1334612 - DNA, 15 bp, Homo sapiens
gccatgcctgagaaa

SEQ ID NO: 1334613 - DNA, 15 bp, Homo sapiens
tgccatgcctgagaa

SEQ ID NO: 1334614 - DNA, 15 bp, Homo sapiens
gtgccatgcctgaga

SEQ ID NO: 1334615 - DNA, 15 bp, Homo sapiens
agtgccatgcctgag

SEQ ID NO: 1334616 - DNA, 15 bp, Homo sapiens
cagtgccatgcctga

SEQ ID NO: 1334617 - DNA, 15 bp, Homo sapiens
acagtgccatgcctg

SEQ ID NO: 1334618 - DNA, 15 bp, Homo sapiens
aacagtgccatgcct

SEQ ID NO: 1334619 - DNA, 15 bp, Homo sapiens
caacagtgccatgcc

SEQ ID NO: 1334620 - DNA, 15 bp, Homo sapiens
tcaacagtgccatgc

SEQ ID NO: 1334621 - DNA, 15 bp, Homo sapiens
ttcaacagtgccatg

SEQ ID NO: 1334622 - DNA, 15 bp, Homo sapiens
tttcaacagtgccat

SEQ ID NO: 1334623 - DNA, 15 bp, Homo sapiens
atttcaacagtgcca

SEQ ID NO: 1334624 - DNA, 15 bp, Homo sapiens
aatttcaacagtgcc

SEQ ID NO: 1334625 - DNA, 15 bp, Homo sapiens
aaatttcaacagtgc

SEQ ID NO: 1334626 - DNA, 15 bp, Homo sapiens
aaaatttcaacagtg

SEQ ID NO: 1334627 - DNA, 15 bp, Homo sapiens
caaaatttcaacagt

SEQ ID NO: 1334628 - DNA, 15 bp, Homo sapiens
ccaaaatttcaacag

SEQ ID NO: 1334629 - DNA, 15 bp, Homo sapiens
gccaaaatttcaaca

SEQ ID NO: 1334630 - DNA, 15 bp, Homo sapiens
agccaaaatttcaac

SEQ ID NO: 1334631 - DNA, 15 bp, Homo sapiens
cagccaaaatttcaa

SEQ ID NO: 1334632 - DNA, 15 bp, Homo sapiens
ccagccaaaatttca

SEQ ID NO: 1334633 - DNA, 15 bp, Homo sapiens
tccagccaaaatttc

SEQ ID NO: 1334634 - DNA, 15 bp, Homo sapiens
atccagccaaaattt

SEQ ID NO: 1334635 - DNA, 15 bp, Homo sapiens
tatccagccaaaatt

SEQ ID NO: 1334636 - DNA, 15 bp, Homo sapiens
ttatccagccaaaat

SEQ ID NO: 1334637 - DNA, 15 bp, Homo sapiens
attatccagccaaaa

SEQ ID NO: 1334638 - DNA, 15 bp, Homo sapiens
aattatccagccaaa

SEQ ID NO: 1334639 - DNA, 15 bp, Homo sapiens
taattatccagccaa

SEQ ID NO: 1334640 - DNA, 15 bp, Homo sapiens
ataattatccagcca

SEQ ID NO: 1334641 - DNA, 15 bp, Homo sapiens
aataattatccagcc

SEQ ID NO: 1334642 - DNA, 15 bp, Homo sapiens
aaataattatccagc

SEQ ID NO: 1334643 - DNA, 15 bp, Homo sapiens
caaataattatccag

SEQ ID NO: 1334644 - DNA, 15 bp, Homo sapiens
acaaataattatcca

SEQ ID NO: 1334645 - DNA, 15 bp, Homo sapiens
aacaaataattatcc

SEQ ID NO: 1334646 - DNA, 15 bp, Homo sapiens
caacaaataattatc

SEQ ID NO: 1334647 - DNA, 15 bp, Homo sapiens
acaacaaataattat

SEQ ID NO: 1334648 - DNA, 15 bp, Homo sapiens
tacaacaaataatta

SEQ ID NO: 1334649 - DNA, 15 bp, Homo sapiens
ctacaacaaataatt

SEQ ID NO: 1334650 - DNA, 15 bp, Homo sapiens
tctacaacaaataat

SEQ ID NO: 1334651 - DNA, 15 bp, Homo sapiens
atctacaacaaataa

SEQ ID NO: 1334652 - DNA, 15 bp, Homo sapiens
catctacaacaaata

SEQ ID NO: 1334653 - DNA, 15 bp, Homo sapiens
ccatctacaacaaat

SEQ ID NO: 1334654 - DNA, 15 bp, Homo sapiens
gccatctacaacaaa

SEQ ID NO: 1334655 - DNA, 15 bp, Homo sapiens
agccatctacaacaa

SEQ ID NO: 1334656 - DNA, 15 bp, Homo sapiens
cagccatctacaaca

SEQ ID NO: 1334657 - DNA, 15 bp, Homo sapiens
acagccatctacaac

SEQ ID NO: 1334658 - DNA, 15 bp, Homo sapiens
aacagccatctacaa

SEQ ID NO: 1334659 - DNA, 15 bp, Homo sapiens
aaacagccatctaca

SEQ ID NO: 1334660 - DNA, 15 bp, Homo sapiens
aaaacagccatctac

SEQ ID NO: 1334661 - DNA, 15 bp, Homo sapiens
gaaaacagccatcta

SEQ ID NO: 1334662 - DNA, 15 bp, Homo sapiens
agaaaacagccatct

SEQ ID NO: 1334663 - DNA, 15 bp, Homo sapiens
tagaaaacagccatc

SEQ ID NO: 1334664 - DNA, 15 bp, Homo sapiens
ctagaaaacagccat

SEQ ID NO: 1334665 - DNA, 15 bp, Homo sapiens
tctagaaaacagcca

SEQ ID NO: 1334666 - DNA, 15 bp, Homo sapiens
atctagaaaacagcc

SEQ ID NO: 1334667 - DNA, 15 bp, Homo sapiens
aatctagaaaacagc

SEQ ID NO: 1334668 - DNA, 15 bp, Homo sapiens
aaatctagaaaacag

SEQ ID NO: 1334669 - DNA, 15 bp, Homo sapiens
gaaatctagaaaaca

SEQ ID NO: 1334670 - DNA, 15 bp, Homo sapiens
agaaatctagaaaac

SEQ ID NO: 1334671 - DNA, 15 bp, Homo sapiens
tagaaatctagaaaa

SEQ ID NO: 1334672 - DNA, 15 bp, Homo sapiens
ctagaaatctagaaa

SEQ ID NO: 1334673 - DNA, 15 bp, Homo sapiens
tctagaaatctagaa

SEQ ID NO: 1334674 - DNA, 15 bp, Homo sapiens
ttctagaaatctaga

SEQ ID NO: 1334675 - DNA, 15 bp, Homo sapiens
gttctagaaatctag

SEQ ID NO: 1334676 - DNA, 15 bp, Homo sapiens
cgttctagaaatcta

SEQ ID NO: 1334677 - DNA, 15 bp, Homo sapiens
acgttctagaaatct

SEQ ID NO: 1334678 - DNA, 15 bp, Homo sapiens
aacgttctagaaatc

SEQ ID NO: 1334679 - DNA, 15 bp, Homo sapiens
aaacgttctagaaat

SEQ ID NO: 1334680 - DNA, 15 bp, Homo sapiens
taaacgttctagaaa

SEQ ID NO: 1334681 - DNA, 15 bp, Homo sapiens
ctaaacgttctagaa

SEQ ID NO: 1334682 - DNA, 15 bp, Homo sapiens
gctaaacgttctaga

SEQ ID NO: 1334683 - DNA, 15 bp, Homo sapiens
tgctaaacgttctag

SEQ ID NO: 1334684 - DNA, 15 bp, Homo sapiens
ttgctaaacgttcta

SEQ ID NO: 1334685 - DNA, 15 bp, Homo sapiens
gttgctaaacgttct

SEQ ID NO: 1334686 - DNA, 15 bp, Homo sapiens
tgttgctaaacgttc

SEQ ID NO: 1334687 - DNA, 15 bp, Homo sapiens
gtgttgctaaacgtt

SEQ ID NO: 1334688 - DNA, 15 bp, Homo sapiens
ggtgttgctaaacgt

SEQ ID NO: 1334689 - DNA, 15 bp, Homo sapiens
gggtgttgctaaacg

SEQ ID NO: 1334690 - DNA, 15 bp, Homo sapiens
agggtgttgctaaac

SEQ ID NO: 1334691 - DNA, 15 bp, Homo sapiens
aagggtgttgctaaa

SEQ ID NO: 1334692 - DNA, 15 bp, Homo sapiens
caagggtgttgctaa

SEQ ID NO: 1334693 - DNA, 15 bp, Homo sapiens
ccaagggtgttgcta

SEQ ID NO: 1334694 - DNA, 15 bp, Homo sapiens
gccaagggtgttgct

SEQ ID NO: 1334695 - DNA, 15 bp, Homo sapiens
agccaagggtgttgc

SEQ ID NO: 1334696 - DNA, 15 bp, Homo sapiens
aagccaagggtgttg

SEQ ID NO: 1334697 - DNA, 15 bp, Homo sapiens
gaagccaagggtgtt

SEQ ID NO: 1334698 - DNA, 15 bp, Homo sapiens
agaagccaagggtgt

SEQ ID NO: 1334699 - DNA, 15 bp, Homo sapiens
tagaagccaagggtg

SEQ ID NO: 1334700 - DNA, 15 bp, Homo sapiens
atagaagccaagggt

SEQ ID NO: 1334701 - DNA, 15 bp, Homo sapiens
gatagaagccaaggg

SEQ ID NO: 1334702 - DNA, 15 bp, Homo sapiens
agatagaagccaagg

SEQ ID NO: 1334703 - DNA, 15 bp, Homo sapiens
cagatagaagccaag

SEQ ID NO: 1334704 - DNA, 15 bp, Homo sapiens
gcagatagaagccaa

SEQ ID NO: 1334705 - DNA, 15 bp, Homo sapiens
agcagatagaagcca

SEQ ID NO: 1334706 - DNA, 15 bp, Homo sapiens
cagcagatagaagcc

SEQ ID NO: 1334707 - DNA, 15 bp, Homo sapiens
ccagcagatagaagc

SEQ ID NO: 1334708 - DNA, 15 bp, Homo sapiens
tccagcagatagaag

SEQ ID NO: 1334709 - DNA, 15 bp, Homo sapiens
atccagcagatagaa

SEQ ID NO: 1334710 - DNA, 15 bp, Homo sapiens
catccagcagataga

SEQ ID NO: 1334711 - DNA, 15 bp, Homo sapiens
gcatccagcagatag

SEQ ID NO: 1334712 - DNA, 15 bp, Homo sapiens
ggcatccagcagata

SEQ ID NO: 1334713 - DNA, 15 bp, Homo sapiens
tggcatccagcagat

SEQ ID NO: 1334714 - DNA, 15 bp, Homo sapiens
ctggcatccagcaga

SEQ ID NO: 1334715 - DNA, 15 bp, Homo sapiens
gctggcatccagcag

SEQ ID NO: 1334716 - DNA, 15 bp, Homo sapiens
tgctggcatccagca

SEQ ID NO: 1334717 - DNA, 15 bp, Homo sapiens
ctgctggcatccagc

SEQ ID NO: 1334718 - DNA, 15 bp, Homo sapiens
actgctggcatccag

SEQ ID NO: 1334719 - DNA, 15 bp, Homo sapiens
tactgctggcatcca

SEQ ID NO: 1334720 - DNA, 15 bp, Homo sapiens
gtactgctggcatcc

SEQ ID NO: 1334721 - DNA, 15 bp, Homo sapiens
tgtactgctggcatc

SEQ ID NO: 1334722 - DNA, 15 bp, Homo sapiens
atgtactgctggcat

SEQ ID NO: 1334723 - DNA, 15 bp, Homo sapiens
gatgtactgctggca

SEQ ID NO: 1334724 - DNA, 15 bp, Homo sapiens
ggatgtactgctggc

SEQ ID NO: 1334725 - DNA, 15 bp, Homo sapiens
aggatgtactgctgg

SEQ ID NO: 1334726 - DNA, 15 bp, Homo sapiens
aaggatgtactgctg

SEQ ID NO: 1334727 - DNA, 15 bp, Homo sapiens
gaaggatgtactgct

SEQ ID NO: 1334728 - DNA, 15 bp, Homo sapiens
agaaggatgtactgc

SEQ ID NO: 1334729 - DNA, 15 bp, Homo sapiens
gagaaggatgtactg

SEQ ID NO: 1334730 - DNA, 15 bp, Homo sapiens
ggagaaggatgtact

SEQ ID NO: 1334731 - DNA, 15 bp, Homo sapiens
gggagaaggatgtac

SEQ ID NO: 1334732 - DNA, 15 bp, Homo sapiens
tgggagaaggatgta

SEQ ID NO: 1334733 - DNA, 15 bp, Homo sapiens
ctgggagaaggatgt

SEQ ID NO: 1334734 - DNA, 15 bp, Homo sapiens
cctgggagaaggatg

SEQ ID NO: 1334735 - DNA, 15 bp, Homo sapiens
acctgggagaaggat

SEQ ID NO: 1334736 - DNA, 15 bp, Homo sapiens
cacctgggagaagga

SEQ ID NO: 1334737 - DNA, 15 bp, Homo sapiens
acacctgggagaagg

SEQ ID NO: 1334738 - DNA, 15 bp, Homo sapiens
cacacctgggagaag

SEQ ID NO: 1334739 - DNA, 15 bp, Homo sapiens
tcacacctgggagaa

SEQ ID NO: 1334740 - DNA, 15 bp, Homo sapiens
gtcacacctgggaga

SEQ ID NO: 1334741 - DNA, 15 bp, Homo sapiens
tgtcacacctgggag

SEQ ID NO: 1334742 - DNA, 15 bp, Homo sapiens
ttgtcacacctggga

SEQ ID NO: 1334743 - DNA, 15 bp, Homo sapiens
gttgtcacacctggg

SEQ ID NO: 1334744 - DNA, 15 bp, Homo sapiens
agttgtcacacctgg

SEQ ID NO: 1334745 - DNA, 15 bp, Homo sapiens
tagttgtcacacctg

SEQ ID NO: 1334746 - DNA, 15 bp, Homo sapiens
ctagttgtcacacct

SEQ ID NO: 1334747 - DNA, 15 bp, Homo sapiens
tctagttgtcacacc

SEQ ID NO: 1334748 - DNA, 15 bp, Homo sapiens
ttctagttgtcacac

SEQ ID NO: 1334749 - DNA, 15 bp, Homo sapiens
tttctagttgtcaca

SEQ ID NO: 1334750 - DNA, 15 bp, Homo sapiens
ttttctagttgtcac

SEQ ID NO: 1334751 - DNA, 15 bp, Homo sapiens
cttttctagttgtca

SEQ ID NO: 1334752 - DNA, 15 bp, Homo sapiens
acttttctagttgtc

SEQ ID NO: 1334753 - DNA, 15 bp, Homo sapiens
gacttttctagttgt

SEQ ID NO: 1334754 - DNA, 15 bp, Homo sapiens
agacttttctagttg

SEQ ID NO: 1334755 - DNA, 15 bp, Homo sapiens
aagacttttctagtt

SEQ ID NO: 1334756 - DNA, 15 bp, Homo sapiens
aaagacttttctagt

SEQ ID NO: 1334757 - DNA, 15 bp, Homo sapiens
caaagacttttctag

SEQ ID NO: 1334758 - DNA, 15 bp, Homo sapiens
tcaaagacttttcta

SEQ ID NO: 1334759 - DNA, 15 bp, Homo sapiens
ttcaaagacttttct

SEQ ID NO: 1334760 - DNA, 15 bp, Homo sapiens
tttcaaagacttttc

SEQ ID NO: 1334761 - DNA, 15 bp, Homo sapiens
atttcaaagactttt

SEQ ID NO: 1334762 - DNA, 15 bp, Homo sapiens
catttcaaagacttt

SEQ ID NO: 1334763 - DNA, 15 bp, Homo sapiens
gacatttcaaagact

SEQ ID NO: 1334764 - DNA, 15 bp, Homo sapiens
tgacatttcaaagac

SEQ ID NO: 1334765 - DNA, 15 bp, Homo sapiens
ttgacatttcaaaga

SEQ ID NO: 1334766 - DNA, 15 bp, Homo sapiens
tttgacatttcaaag

SEQ ID NO: 1334767 - DNA, 15 bp, Homo sapiens
atttgacatttcaaa

SEQ ID NO: 1334768 - DNA, 15 bp, Homo sapiens
catttgacatttcaa

SEQ ID NO: 1334769 - DNA, 15 bp, Homo sapiens
acatttgacatttca

SEQ ID NO: 1334770 - DNA, 15 bp, Homo sapiens
gacatttgacatttc

SEQ ID NO: 1334771 - DNA, 15 bp, Homo sapiens
ggacatttgacattt

SEQ ID NO: 1334772 - DNA, 15 bp, Homo sapiens
aggacatttgacatt

SEQ ID NO: 1334773 - DNA, 15 bp, Homo sapiens
gaggacatttgacat

SEQ ID NO: 1334774 - DNA, 15 bp, Homo sapiens
agaggacatttgaca

SEQ ID NO: 1334775 - DNA, 15 bp, Homo sapiens
tagaggacatttgac

SEQ ID NO: 1334776 - DNA, 15 bp, Homo sapiens
ctagaggacatttga

SEQ ID NO: 1334777 - DNA, 15 bp, Homo sapiens
cctagaggacatttg

SEQ ID NO: 1334778 - DNA, 15 bp, Homo sapiens
ccctagaggacattt

SEQ ID NO: 1334779 - DNA, 15 bp, Homo sapiens
cccctagaggacatt

SEQ ID NO: 1334780 - DNA, 15 bp, Homo sapiens
tcccctagaggacat

SEQ ID NO: 1334781 - DNA, 15 bp, Homo sapiens
atcccctagaggaca

SEQ ID NO: 1334782 - DNA, 15 bp, Homo sapiens
catcccctagaggac

SEQ ID NO: 1334783 - DNA, 15 bp, Homo sapiens
ccatcccctagagga

SEQ ID NO: 1334784 - DNA, 15 bp, Homo sapiens
tccatcccctagagg

SEQ ID NO: 1334785 - DNA, 15 bp, Homo sapiens
ctccatcccctagag

SEQ ID NO: 1334786 - DNA, 15 bp, Homo sapiens
cctccatcccctaga

SEQ ID NO: 1334787 - DNA, 15 bp, Homo sapiens
ccctccatcccctag

SEQ ID NO: 1334788 - DNA, 15 bp, Homo sapiens
gccctccatccccta

SEQ ID NO: 1334789 - DNA, 15 bp, Homo sapiens
tgccctccatcccct

SEQ ID NO: 1334790 - DNA, 15 bp, Homo sapiens
ttgccctccatcccc

SEQ ID NO: 1334791 - DNA, 15 bp, Homo sapiens
tttgccctccatccc

SEQ ID NO: 1334792 - DNA, 15 bp, Homo sapiens
ttttgccctccatcc

SEQ ID NO: 1334793 - DNA, 15 bp, Homo sapiens
attttgccctccatc

SEQ ID NO: 1334794 - DNA, 15 bp, Homo sapiens
gattttgccctccat

SEQ ID NO: 1334795 - DNA, 15 bp, Homo sapiens
agattttgccctcca

SEQ ID NO: 1334796 - DNA, 15 bp, Homo sapiens
gagattttgccctcc

SEQ ID NO: 1334797 - DNA, 15 bp, Homo sapiens
ggagattttgccctc

SEQ ID NO: 1334798 - DNA, 15 bp, Homo sapiens
gggagattttgccct

SEQ ID NO: 1334799 - DNA, 15 bp, Homo sapiens
tgggagattttgccc

SEQ ID NO: 1334800 - DNA, 15 bp, Homo sapiens
ctgggagattttgcc

SEQ ID NO: 1334801 - DNA, 15 bp, Homo sapiens
actgggagattttgc

SEQ ID NO: 1334802 - DNA, 15 bp, Homo sapiens
aactgggagattttg

SEQ ID NO: 1334803 - DNA, 15 bp, Homo sapiens
caactgggagatttt

SEQ ID NO: 1334804 - DNA, 15 bp, Homo sapiens
tcaactgggagattt

SEQ ID NO: 1334805 - DNA, 15 bp, Homo sapiens
ctcaactgggagatt

SEQ ID NO: 1334806 - DNA, 15 bp, Homo sapiens
tctcaactgggagat

SEQ ID NO: 1334807 - DNA, 15 bp, Homo sapiens
ttctcaactgggaga

SEQ ID NO: 1334808 - DNA, 15 bp, Homo sapiens
gttctcaactgggag

SEQ ID NO: 1334809 - DNA, 15 bp, Homo sapiens
ggttctcaactggga

SEQ ID NO: 1334810 - DNA, 15 bp, Homo sapiens
tggttctcaactggg

SEQ ID NO: 1334811 - DNA, 15 bp, Homo sapiens
gtggttctcaactgg

SEQ ID NO: 1334812 - DNA, 15 bp, Homo sapiens
agtggttctcaactg

SEQ ID NO: 1334813 - DNA, 15 bp, Homo sapiens
cagtggttctcaact

SEQ ID NO: 1334814 - DNA, 15 bp, Homo sapiens
tcagtggttctcaac

SEQ ID NO: 1334815 - DNA, 15 bp, Homo sapiens
atcagtggttctcaa

SEQ ID NO: 1334816 - DNA, 15 bp, Homo sapiens
gatcagtggttctca

SEQ ID NO: 1334817 - DNA, 15 bp, Homo sapiens
agatcagtggttctc

SEQ ID NO: 1334818 - DNA, 15 bp, Homo sapiens
tagatcagtggttct

SEQ ID NO: 1334819 - DNA, 15 bp, Homo sapiens
ctagatcagtggttc

SEQ ID NO: 1334820 - DNA, 15 bp, Homo sapiens
cctagatcagtggtt

SEQ ID NO: 1334821 - DNA, 15 bp, Homo sapiens
acctagatcagtggt

SEQ ID NO: 1334822 - DNA, 15 bp, Homo sapiens
aacctagatcagtgg

SEQ ID NO: 1334823 - DNA, 15 bp, Homo sapiens
aaacctagatcagtg

SEQ ID NO: 1334824 - DNA, 15 bp, Homo sapiens
taaacctagatcagt

SEQ ID NO: 1334825 - DNA, 15 bp, Homo sapiens
ataaacctagatcag

SEQ ID NO: 1334826 - DNA, 15 bp, Homo sapiens
tataaacctagatca

SEQ ID NO: 1334827 - DNA, 15 bp, Homo sapiens
atataaacctagatc

SEQ ID NO: 1334828 - DNA, 15 bp, Homo sapiens
tatataaacctagat

SEQ ID NO: 1334829 - DNA, 15 bp, Homo sapiens
gtatataaacctaga

SEQ ID NO: 1334830 - DNA, 15 bp, Homo sapiens
agtatataaacctag

SEQ ID NO: 1334831 - DNA, 15 bp, Homo sapiens
cagtatataaaccta

SEQ ID NO: 1334832 - DNA, 15 bp, Homo sapiens
gcagtatataaacct

SEQ ID NO: 1334833 - DNA, 15 bp, Homo sapiens
agcagtatataaacc

SEQ ID NO: 1334834 - DNA, 15 bp, Homo sapiens
cagcagtatataaac

SEQ ID NO: 1334835 - DNA, 15 bp, Homo sapiens
ccagcagtatataaa

SEQ ID NO: 1334836 - DNA, 15 bp, Homo sapiens
accagcagtatataa

SEQ ID NO: 1334837 - DNA, 15 bp, Homo sapiens
caccagcagtatata

SEQ ID NO: 1334838 - DNA, 15 bp, Homo sapiens
ccaccagcagtatat

SEQ ID NO: 1334839 - DNA, 15 bp, Homo sapiens
tccaccagcagtata

SEQ ID NO: 1334840 - DNA, 15 bp, Homo sapiens
ttccaccagcagtat

SEQ ID NO: 1334841 - DNA, 15 bp, Homo sapiens
cttccaccagcagta

SEQ ID NO: 1334842 - DNA, 15 bp, Homo sapiens
ccttccaccagcagt

SEQ ID NO: 1334843 - DNA, 15 bp, Homo sapiens
gccttccaccagcag

SEQ ID NO: 1334844 - DNA, 15 bp, Homo sapiens
tgccttccaccagca

SEQ ID NO: 1334845 - DNA, 15 bp, Homo sapiens
ctgccttccaccagc

SEQ ID NO: 1334846 - DNA, 15 bp, Homo sapiens
cctgccttccaccag

SEQ ID NO: 1334847 - DNA, 15 bp, Homo sapiens
agcctgccttccacc

SEQ ID NO: 1334848 - DNA, 15 bp, Homo sapiens
cagcctgccttccac

SEQ ID NO: 1334849 - DNA, 15 bp, Homo sapiens
gcagcctgccttcca

SEQ ID NO: 1334850 - DNA, 15 bp, Homo sapiens
tgcagcctgccttcc

SEQ ID NO: 1334851 - DNA, 15 bp, Homo sapiens
atgcagcctgccttc

SEQ ID NO: 1334852 - DNA, 15 bp, Homo sapiens
catgcagcctgcctt

SEQ ID NO: 1334853 - DNA, 15 bp, Homo sapiens
tcatgcagcctgcct

SEQ ID NO: 1334854 - DNA, 15 bp, Homo sapiens
gtcatgcagcctgcc

SEQ ID NO: 1334855 - DNA, 15 bp, Homo sapiens
agtcatgcagcctgc

SEQ ID NO: 1334856 - DNA, 15 bp, Homo sapiens
tagtcatgcagcctg

SEQ ID NO: 1334857 - DNA, 15 bp, Homo sapiens
ttagtcatgcagcct

SEQ ID NO: 1334858 - DNA, 15 bp, Homo sapiens
tttagtcatgcagcc

SEQ ID NO: 1334859 - DNA, 15 bp, Homo sapiens
gtttagtcatgcagc

SEQ ID NO: 1334860 - DNA, 15 bp, Homo sapiens
agtttagtcatgcag

SEQ ID NO: 1334861 - DNA, 15 bp, Homo sapiens
cagtttagtcatgca

SEQ ID NO: 1334862 - DNA, 15 bp, Homo sapiens
gcagtttagtcatgc

SEQ ID NO: 1334863 - DNA, 15 bp, Homo sapiens
ggcagtttagtcatg

SEQ ID NO: 1334864 - DNA, 15 bp, Homo sapiens
aggcagtttagtcat

SEQ ID NO: 1334865 - DNA, 15 bp, Homo sapiens
taggcagtttagtca

SEQ ID NO: 1334866 - DNA, 15 bp, Homo sapiens
ataggcagtttagtc

SEQ ID NO: 1334867 - DNA, 15 bp, Homo sapiens
aataggcagtttagt

SEQ ID NO: 1334868 - DNA, 15 bp, Homo sapiens
aaataggcagtttag

SEQ ID NO: 1334869 - DNA, 15 bp, Homo sapiens
caaataggcagttta

SEQ ID NO: 1334870 - DNA, 15 bp, Homo sapiens
acaaataggcagttt

SEQ ID NO: 1334871 - DNA, 15 bp, Homo sapiens
aacaaataggcagtt

SEQ ID NO: 1334872 - DNA, 15 bp, Homo sapiens
taacaaataggcagt

SEQ ID NO: 1334873 - DNA, 15 bp, Homo sapiens
ataacaaataggcag

SEQ ID NO: 1334874 - DNA, 15 bp, Homo sapiens
tataacaaataggca

SEQ ID NO: 1334875 - DNA, 15 bp, Homo sapiens
ctataacaaataggc

SEQ ID NO: 1334876 - DNA, 15 bp, Homo sapiens
actataacaaatagg

SEQ ID NO: 1334877 - DNA, 15 bp, Homo sapiens
aactataacaaatag

SEQ ID NO: 1334878 - DNA, 15 bp, Homo sapiens
aaactataacaaata

SEQ ID NO: 1334879 - DNA, 15 bp, Homo sapiens
caaactataacaaat

SEQ ID NO: 1334880 - DNA, 15 bp, Homo sapiens
ccaaactataacaaa

SEQ ID NO: 1334881 - DNA, 15 bp, Homo sapiens
tccaaactataacaa

SEQ ID NO: 1334882 - DNA, 15 bp, Homo sapiens
ttccaaactataaca

SEQ ID NO: 1334883 - DNA, 15 bp, Homo sapiens
tttccaaactataac

SEQ ID NO: 1334884 - DNA, 15 bp, Homo sapiens
atttccaaactataa

SEQ ID NO: 1334885 - DNA, 15 bp, Homo sapiens
aatttccaaactata

SEQ ID NO: 1334886 - DNA, 15 bp, Homo sapiens
aaatttccaaactat

SEQ ID NO: 1334887 - DNA, 15 bp, Homo sapiens
gaaatttccaaacta

SEQ ID NO: 1334888 - DNA, 15 bp, Homo sapiens
tgaaatttccaaact

SEQ ID NO: 1334889 - DNA, 15 bp, Homo sapiens
gtgaaatttccaaac

SEQ ID NO: 1334890 - DNA, 15 bp, Homo sapiens
tgtgaaatttccaaa

SEQ ID NO: 1334891 - DNA, 15 bp, Homo sapiens
gtgtgaaatttccaa

SEQ ID NO: 1334892 - DNA, 15 bp, Homo sapiens
tgtgtgaaatttcca

SEQ ID NO: 1334893 - DNA, 15 bp, Homo sapiens
ctgtgtgaaatttcc

SEQ ID NO: 1334894 - DNA, 15 bp, Homo sapiens
gctgtgtgaaatttc

SEQ ID NO: 1334895 - DNA, 15 bp, Homo sapiens
agctgtgtgaaattt

SEQ ID NO: 1334896 - DNA, 15 bp, Homo sapiens
gagctgtgtgaaatt

SEQ ID NO: 1334897 - DNA, 15 bp, Homo sapiens
ggagctgtgtgaaat

SEQ ID NO: 1334898 - DNA, 15 bp, Homo sapiens
gggagctgtgtgaaa

SEQ ID NO: 1334899 - DNA, 15 bp, Homo sapiens
ggggagctgtgtgaa

SEQ ID NO: 1334900 - DNA, 15 bp, Homo sapiens
tggggagctgtgtga

SEQ ID NO: 1334901 - DNA, 15 bp, Homo sapiens
ttggggagctgtgtg

SEQ ID NO: 1334902 - DNA, 15 bp, Homo sapiens
tttggggagctgtgt

SEQ ID NO: 1334903 - DNA, 15 bp, Homo sapiens
atttggggagctgtg

SEQ ID NO: 1334904 - DNA, 15 bp, Homo sapiens
catttggggagctgt

SEQ ID NO: 1334905 - DNA, 15 bp, Homo sapiens
ccatttggggagctg

SEQ ID NO: 1334906 - DNA, 15 bp, Homo sapiens
accatttggggagct

SEQ ID NO: 1334907 - DNA, 15 bp, Homo sapiens
caccatttggggagc

SEQ ID NO: 1334908 - DNA, 15 bp, Homo sapiens
acaccatttggggag

SEQ ID NO: 1334909 - DNA, 15 bp, Homo sapiens
aacaccatttgggga

SEQ ID NO: 1334910 - DNA, 15 bp, Homo sapiens
aaacaccatttgggg

SEQ ID NO: 1334911 - DNA, 15 bp, Homo sapiens
caaacaccatttggg

SEQ ID NO: 1334912 - DNA, 15 bp, Homo sapiens
tcaaacaccatttgg

SEQ ID NO: 1334913 - DNA, 15 bp, Homo sapiens
atcaaacaccatttg

SEQ ID NO: 1334914 - DNA, 15 bp, Homo sapiens
tatcaaacaccattt

SEQ ID NO: 1334915 - DNA, 15 bp, Homo sapiens
ttatcaaacaccatt

SEQ ID NO: 1334916 - DNA, 15 bp, Homo sapiens
tttatcaaacaccat

SEQ ID NO: 1334917 - DNA, 15 bp, Homo sapiens
ctttatcaaacacca

SEQ ID NO: 1334918 - DNA, 15 bp, Homo sapiens
actttatcaaacacc

SEQ ID NO: 1334919 - DNA, 15 bp, Homo sapiens
cactttatcaaacac

SEQ ID NO: 1334920 - DNA, 15 bp, Homo sapiens
gcactttatcaaaca

SEQ ID NO: 1334921 - DNA, 15 bp, Homo sapiens
tgcactttatcaaac

SEQ ID NO: 1334922 - DNA, 15 bp, Homo sapiens
ctgcactttatcaaa

SEQ ID NO: 1334923 - DNA, 15 bp, Homo sapiens
tctgcactttatcaa

SEQ ID NO: 1334924 - DNA, 15 bp, Homo sapiens
ttctgcactttatca

SEQ ID NO: 1334925 - DNA, 15 bp, Homo sapiens
attctgcactttatc

SEQ ID NO: 1334926 - DNA, 15 bp, Homo sapiens
gattctgcactttat

SEQ ID NO: 1334927 - DNA, 15 bp, Homo sapiens
agattctgcacttta

SEQ ID NO: 1334928 - DNA, 15 bp, Homo sapiens
aagattctgcacttt

SEQ ID NO: 1334929 - DNA, 15 bp, Homo sapiens
taagattctgcactt

SEQ ID NO: 1334930 - DNA, 15 bp, Homo sapiens
ttaagattctgcact

SEQ ID NO: 1334931 - DNA, 15 bp, Homo sapiens
cttaagattctgcac

SEQ ID NO: 1334932 - DNA, 15 bp, Homo sapiens
acttaagattctgca

SEQ ID NO: 1334933 - DNA, 15 bp, Homo sapiens
aacttaagattctgc

SEQ ID NO: 1334934 - DNA, 15 bp, Homo sapiens
gaacttaagattctg

SEQ ID NO: 1334935 - DNA, 15 bp, Homo sapiens
agaacttaagattct

SEQ ID NO: 1334936 - DNA, 15 bp, Homo sapiens
cagaacttaagattc

SEQ ID NO: 1334937 - DNA, 15 bp, Homo sapiens
acagaacttaagatt

SEQ ID NO: 1334938 - DNA, 15 bp, Homo sapiens
aacagaacttaagat

SEQ ID NO: 1334939 - DNA, 15 bp, Homo sapiens
caacagaacttaaga

SEQ ID NO: 1334940 - DNA, 15 bp, Homo sapiens
ccaacagaacttaag

SEQ ID NO: 1334941 - DNA, 15 bp, Homo sapiens
tccaacagaacttaa

SEQ ID NO: 1334942 - DNA, 15 bp, Homo sapiens
ttccaacagaactta

SEQ ID NO: 1334943 - DNA, 15 bp, Homo sapiens
tttccaacagaactt

SEQ ID NO: 1334944 - DNA, 15 bp, Homo sapiens
ctttccaacagaact

SEQ ID NO: 1334945 - DNA, 15 bp, Homo sapiens
actttccaacagaac

SEQ ID NO: 1334946 - DNA, 15 bp, Homo sapiens
tactttccaacagaa

SEQ ID NO: 1334947 - DNA, 15 bp, Homo sapiens
gtactttccaacaga

SEQ ID NO: 1334948 - DNA, 15 bp, Homo sapiens
tgtactttccaacag

SEQ ID NO: 1334949 - DNA, 15 bp, Homo sapiens
ttgtactttccaaca

SEQ ID NO: 1334950 - DNA, 15 bp, Homo sapiens
gttgtactttccaac

SEQ ID NO: 1334951 - DNA, 15 bp, Homo sapiens
tgttgtactttccaa

SEQ ID NO: 1334952 - DNA, 15 bp, Homo sapiens
atgttgtactttcca

SEQ ID NO: 1334953 - DNA, 15 bp, Homo sapiens
aatgttgtactttcc

SEQ ID NO: 1334954 - DNA, 15 bp, Homo sapiens
aaatgttgtactttc

SEQ ID NO: 1334955 - DNA, 15 bp, Homo sapiens
caaatgttgtacttt

SEQ ID NO: 1334956 - DNA, 15 bp, Homo sapiens
acaaatgttgtactt

SEQ ID NO: 1334957 - DNA, 15 bp, Homo sapiens
gacaaatgttgtact

SEQ ID NO: 1334958 - DNA, 15 bp, Homo sapiens
agacaaatgttgtac

SEQ ID NO: 1334959 - DNA, 15 bp, Homo sapiens
aagacaaatgttgta

SEQ ID NO: 1334960 - DNA, 15 bp, Homo sapiens
aaagacaaatgttgt

SEQ ID NO: 1334961 - DNA, 15 bp, Homo sapiens
aaaagacaaatgttg

SEQ ID NO: 1334962 - DNA, 15 bp, Homo sapiens
taaaagacaaatgtt

SEQ ID NO: 1334963 - DNA, 15 bp, Homo sapiens
ttaaaagacaaatgt

SEQ ID NO: 1334964 - DNA, 15 bp, Homo sapiens
gttaaaagacaaatg

SEQ ID NO: 1334965 - DNA, 15 bp, Homo sapiens
ggttaaaagacaaat

SEQ ID NO: 1334966 - DNA, 15 bp, Homo sapiens
aggttaaaagacaaa

SEQ ID NO: 1334967 - DNA, 15 bp, Homo sapiens
gaggttaaaagacaa

SEQ ID NO: 1334968 - DNA, 15 bp, Homo sapiens
cgaggttaaaagaca

SEQ ID NO: 1334969 - DNA, 15 bp, Homo sapiens
acgaggttaaaagac

SEQ ID NO: 1334970 - DNA, 15 bp, Homo sapiens
gacgaggttaaaaga

SEQ ID NO: 1334971 - DNA, 15 bp, Homo sapiens
tgacgaggttaaaag

SEQ ID NO: 1334972 - DNA, 15 bp, Homo sapiens
ttgacgaggttaaaa

SEQ ID NO: 1334973 - DNA, 15 bp, Homo sapiens
tttgacgaggttaaa

SEQ ID NO: 1334974 - DNA, 15 bp, Homo sapiens
ttttgacgaggttaa

SEQ ID NO: 1334975 - DNA, 15 bp, Homo sapiens
tttttgacgaggtta

SEQ ID NO: 1334976 - DNA, 15 bp, Homo sapiens
ctttttgacgaggtt

SEQ ID NO: 1334977 - DNA, 15 bp, Homo sapiens
tctttttgacgaggt

SEQ ID NO: 1334978 - DNA, 15 bp, Homo sapiens
gtctttttgacgagg

SEQ ID NO: 1334979 - DNA, 15 bp, Homo sapiens
tgtctttttgacgag

SEQ ID NO: 1334980 - DNA, 15 bp, Homo sapiens
ttgtctttttgacga

SEQ ID NO: 1334981 - DNA, 15 bp, Homo sapiens
tttgtctttttgacg

SEQ ID NO: 1334982 - DNA, 15 bp, Homo sapiens
ttttgtctttttgac

SEQ ID NO: 1334983 - DNA, 15 bp, Homo sapiens
gttttgtctttttga

SEQ ID NO: 1334984 - DNA, 15 bp, Homo sapiens
tgttttgtctttttg

SEQ ID NO: 1334985 - DNA, 15 bp, Homo sapiens
ctgttttgtcttttt

SEQ ID NO: 1334986 - DNA, 15 bp, Homo sapiens
cctgttttgtctttt

SEQ ID NO: 1334987 - DNA, 15 bp, Homo sapiens
gcctgttttgtcttt

SEQ ID NO: 1334988 - DNA, 15 bp, Homo sapiens
tgcctgttttgtctt

SEQ ID NO: 1334989 - DNA, 15 bp, Homo sapiens
ctgcctgttttgtct

SEQ ID NO: 1334990 - DNA, 15 bp, Homo sapiens
tctgcctgttttgtc

SEQ ID NO: 1334991 - DNA, 15 bp, Homo sapiens
ttctgcctgttttgt

SEQ ID NO: 1334992 - DNA, 15 bp, Homo sapiens
cttctgcctgttttg

SEQ ID NO: 1334993 - DNA, 15 bp, Homo sapiens
ccttctgcctgtttt

SEQ ID NO: 1334994 - DNA, 15 bp, Homo sapiens
aggcatccttctgcc

SEQ ID NO: 1334995 - DNA, 15 bp, Homo sapiens
aaggcatccttctgc

SEQ ID NO: 1334996 - DNA, 15 bp, Homo sapiens
caaggcatccttctg

SEQ ID NO: 1334997 - DNA, 15 bp, Homo sapiens
tcaaggcatccttct

SEQ ID NO: 1334998 - DNA, 15 bp, Homo sapiens
ctcaaggcatccttc

SEQ ID NO: 1334999 - DNA, 15 bp, Homo sapiens
cctcaaggcatcctt

SEQ ID NO: 1335000 - DNA, 15 bp, Homo sapiens
acctcaaggcatcct

SEQ ID NO: 1335001 - DNA, 15 bp, Homo sapiens
gacctcaaggcatcc

SEQ ID NO: 1335002 - DNA, 15 bp, Homo sapiens
tgacctcaaggcatc

SEQ ID NO: 1335003 - DNA, 15 bp, Homo sapiens
ctgacctcaaggcat

SEQ ID NO: 1335004 - DNA, 15 bp, Homo sapiens
cctgacctcaaggca

SEQ ID NO: 1335005 - DNA, 15 bp, Homo sapiens
tcctgacctcaaggc

SEQ ID NO: 1335006 - DNA, 15 bp, Homo sapiens
ctcctgacctcaagg

SEQ ID NO: 1335007 - DNA, 15 bp, Homo sapiens
cctcaaactcctgac

SEQ ID NO: 1335008 - DNA, 15 bp, Homo sapiens
gcctcaaactcctga

SEQ ID NO: 1335009 - DNA, 15 bp, Homo sapiens
ggcctcaaactcctg

SEQ ID NO: 1335010 - DNA, 15 bp, Homo sapiens
ttggcctcaaactcc

SEQ ID NO: 1335011 - DNA, 15 bp, Homo sapiens
gttggcctcaaactc

SEQ ID NO: 1335012 - DNA, 15 bp, Homo sapiens
ggttggcctcaaact

SEQ ID NO: 1335013 - DNA, 15 bp, Homo sapiens
aggttggcctcaaac

SEQ ID NO: 1335014 - DNA, 15 bp, Homo sapiens
caggttggcctcaaa

SEQ ID NO: 1335015 - DNA, 15 bp, Homo sapiens
ccaggttggcctcaa

SEQ ID NO: 1335016 - DNA, 15 bp, Homo sapiens
cccaggttggcctca

SEQ ID NO: 1335017 - DNA, 15 bp, Homo sapiens
gcccaggttggcctc

SEQ ID NO: 1335018 - DNA, 15 bp, Homo sapiens
tgcccaggttggcct

SEQ ID NO: 1335019 - DNA, 15 bp, Homo sapiens
ttgcccaggttggcc

SEQ ID NO: 1335020 - DNA, 15 bp, Homo sapiens
gttgcccaggttggc

SEQ ID NO: 1335021 - DNA, 15 bp, Homo sapiens
atgttgcccaggttg

SEQ ID NO: 1335022 - DNA, 15 bp, Homo sapiens
tatgttgcccaggtt

SEQ ID NO: 1335023 - DNA, 15 bp, Homo sapiens
ctatgttgcccaggt

SEQ ID NO: 1335024 - DNA, 15 bp, Homo sapiens
taatagagatggggt

SEQ ID NO: 1335025 - DNA, 15 bp, Homo sapiens
ttaatagagatgggg

SEQ ID NO: 1335026 - DNA, 15 bp, Homo sapiens
tttaatagagatggg

SEQ ID NO: 1335027 - DNA, 15 bp, Homo sapiens
ttttaatagagatgg

SEQ ID NO: 1335028 - DNA, 15 bp, Homo sapiens
tttttaatagagatg

SEQ ID NO: 1335029 - DNA, 15 bp, Homo sapiens
atttttaatagagat

SEQ ID NO: 1335030 - DNA, 15 bp, Homo sapiens
aatttttaatagaga

SEQ ID NO: 1335031 - DNA, 15 bp, Homo sapiens
aaatttttaatagag

SEQ ID NO: 1335032 - DNA, 15 bp, Homo sapiens
taaatttttaataga

SEQ ID NO: 1335033 - DNA, 15 bp, Homo sapiens
ttaaatttttaatag

SEQ ID NO: 1335034 - DNA, 15 bp, Homo sapiens
tttaaatttttaata

SEQ ID NO: 1335035 - DNA, 15 bp, Homo sapiens
ttttaaatttttaat

SEQ ID NO: 1335036 - DNA, 15 bp, Homo sapiens
tttttaaatttttaa

SEQ ID NO: 1335037 - DNA, 15 bp, Homo sapiens
aatttttaaattttt

SEQ ID NO: 1335038 - DNA, 15 bp, Homo sapiens
taatttttaaatttt

SEQ ID NO: 1335039 - DNA, 15 bp, Homo sapiens
ctaatttttaaattt

SEQ ID NO: 1335040 - DNA, 15 bp, Homo sapiens
gctaatttttaaatt

SEQ ID NO: 1335041 - DNA, 15 bp, Homo sapiens
ggctaatttttaaat

SEQ ID NO: 1335042 - DNA, 15 bp, Homo sapiens
tggctaatttttaaa

SEQ ID NO: 1335043 - DNA, 15 bp, Homo sapiens
tacctggctaatttt

SEQ ID NO: 1335044 - DNA, 15 bp, Homo sapiens
atacctggctaattt

SEQ ID NO: 1335045 - DNA, 15 bp, Homo sapiens
catacctggctaatt

SEQ ID NO: 1335046 - DNA, 15 bp, Homo sapiens
ccatacctggctaat

SEQ ID NO: 1335047 - DNA, 15 bp, Homo sapiens
accatacctggctaa

SEQ ID NO: 1335048 - DNA, 15 bp, Homo sapiens
caccatacctggcta

SEQ ID NO: 1335049 - DNA, 15 bp, Homo sapiens
ccaccatacctggct

SEQ ID NO: 1335050 - DNA, 15 bp, Homo sapiens
taccaccatacctgg

SEQ ID NO: 1335051 - DNA, 15 bp, Homo sapiens
gtaccaccatacctg

SEQ ID NO: 1335052 - DNA, 15 bp, Homo sapiens
tgtaccaccatacct

SEQ ID NO: 1335053 - DNA, 15 bp, Homo sapiens
atgtaccaccatacc

SEQ ID NO: 1335054 - DNA, 15 bp, Homo sapiens
catgtaccaccatac

SEQ ID NO: 1335055 - DNA, 15 bp, Homo sapiens
ccatgtaccaccata

SEQ ID NO: 1335056 - DNA, 15 bp, Homo sapiens
gccatgtaccaccat

SEQ ID NO: 1335057 - DNA, 15 bp, Homo sapiens
agccatgtaccacca

SEQ ID NO: 1335058 - DNA, 15 bp, Homo sapiens
cagccatgtaccacc

SEQ ID NO: 1335059 - DNA, 15 bp, Homo sapiens
acagccatgtaccac

SEQ ID NO: 1335060 - DNA, 15 bp, Homo sapiens
tacagccatgtacca

SEQ ID NO: 1335061 - DNA, 15 bp, Homo sapiens
ctacagccatgtacc

SEQ ID NO: 1335062 - DNA, 15 bp, Homo sapiens
tctacagccatgtac

SEQ ID NO: 1335063 - DNA, 15 bp, Homo sapiens
gtctacagccatgta

SEQ ID NO: 1335064 - DNA, 15 bp, Homo sapiens
ggtctacagccatgt

SEQ ID NO: 1335065 - DNA, 15 bp, Homo sapiens
tggtctacagccatg

SEQ ID NO: 1335066 - DNA, 15 bp, Homo sapiens
ctggtctacagccat

SEQ ID NO: 1335067 - DNA, 15 bp, Homo sapiens
gctggtctacagcca

SEQ ID NO: 1335068 - DNA, 15 bp, Homo sapiens
agctggtctacagcc

SEQ ID NO: 1335069 - DNA, 15 bp, Homo sapiens
tagctggtctacagc

SEQ ID NO: 1335070 - DNA, 15 bp, Homo sapiens
gtagctggtctacag

SEQ ID NO: 1335071 - DNA, 15 bp, Homo sapiens
agtagctggtctaca

SEQ ID NO: 1335072 - DNA, 15 bp, Homo sapiens
aagtagctggtctac

SEQ ID NO: 1335073 - DNA, 15 bp, Homo sapiens
taagtagctggtcta

SEQ ID NO: 1335074 - DNA, 15 bp, Homo sapiens
ctaagtagctggtct

SEQ ID NO: 1335075 - DNA, 15 bp, Homo sapiens
cctaagtagctggtc

SEQ ID NO: 1335076 - DNA, 15 bp, Homo sapiens
tcctaagtagctggt

SEQ ID NO: 1335077 - DNA, 15 bp, Homo sapiens
cttcagcctcctaag

SEQ ID NO: 1335078 - DNA, 15 bp, Homo sapiens
acttcagcctcctaa

SEQ ID NO: 1335079 - DNA, 15 bp, Homo sapiens
cacttcagcctccta

SEQ ID NO: 1335080 - DNA, 15 bp, Homo sapiens
tcacttcagcctcct

SEQ ID NO: 1335081 - DNA, 15 bp, Homo sapiens
ctcacttcagcctcc

SEQ ID NO: 1335082 - DNA, 15 bp, Homo sapiens
cctcacttcagcctc

SEQ ID NO: 1335083 - DNA, 15 bp, Homo sapiens
tcctcacttcagcct

SEQ ID NO: 1335084 - DNA, 15 bp, Homo sapiens
atcctcacttcagcc

SEQ ID NO: 1335085 - DNA, 15 bp, Homo sapiens
aatcctcacttcagc

SEQ ID NO: 1335086 - DNA, 15 bp, Homo sapiens
caatcctcacttcag

SEQ ID NO: 1335087 - DNA, 15 bp, Homo sapiens
gcaatcctcacttca

SEQ ID NO: 1335088 - DNA, 15 bp, Homo sapiens
agcaatcctcacttc

SEQ ID NO: 1335089 - DNA, 15 bp, Homo sapiens
aagcaatcctcactt

SEQ ID NO: 1335090 - DNA, 15 bp, Homo sapiens
caagcaatcctcact

SEQ ID NO: 1335091 - DNA, 15 bp, Homo sapiens
tcaagcaatcctcac

SEQ ID NO: 1335092 - DNA, 15 bp, Homo sapiens
ttcaagcaatcctca

SEQ ID NO: 1335093 - DNA, 15 bp, Homo sapiens
gttcaagcaatcctc

SEQ ID NO: 1335094 - DNA, 15 bp, Homo sapiens
ggttcaagcaatcct

SEQ ID NO: 1335095 - DNA, 15 bp, Homo sapiens
gggttcaagcaatcc

SEQ ID NO: 1335096 - DNA, 15 bp, Homo sapiens
tgggttcaagcaatc

SEQ ID NO: 1335097 - DNA, 15 bp, Homo sapiens
gctgcagcctcaaac

SEQ ID NO: 1335098 - DNA, 15 bp, Homo sapiens
tgctgcagcctcaaa

SEQ ID NO: 1335099 - DNA, 15 bp, Homo sapiens
ctgctgcagcctcaa

SEQ ID NO: 1335100 - DNA, 15 bp, Homo sapiens
gctgctgcagcctca

SEQ ID NO: 1335101 - DNA, 15 bp, Homo sapiens
tgctgctgcagcctc

SEQ ID NO: 1335102 - DNA, 15 bp, Homo sapiens
ttgctgctgcagcct

SEQ ID NO: 1335103 - DNA, 15 bp, Homo sapiens
tttgctgctgcagcc

SEQ ID NO: 1335104 - DNA, 15 bp, Homo sapiens
gtttgctgctgcagc

SEQ ID NO: 1335105 - DNA, 15 bp, Homo sapiens
agtttgctgctgcag

SEQ ID NO: 1335106 - DNA, 15 bp, Homo sapiens
tagtttgctgctgca

SEQ ID NO: 1335107 - DNA, 15 bp, Homo sapiens
atagtttgctgctgc

SEQ ID NO: 1335108 - DNA, 15 bp, Homo sapiens
catagtttgctgctg

SEQ ID NO: 1335109 - DNA, 15 bp, Homo sapiens
tcatagtttgctgct

SEQ ID NO: 1335110 - DNA, 15 bp, Homo sapiens
atcatagtttgctgc

SEQ ID NO: 1335111 - DNA, 15 bp, Homo sapiens
aatcatagtttgctg

SEQ ID NO: 1335112 - DNA, 15 bp, Homo sapiens
caatcatagtttgct

SEQ ID NO: 1335113 - DNA, 15 bp, Homo sapiens
acaatcatagtttgc

SEQ ID NO: 1335114 - DNA, 15 bp, Homo sapiens
cacaatcatagtttg

SEQ ID NO: 1335115 - DNA, 15 bp, Homo sapiens
gcacaatcatagttt

SEQ ID NO: 1335116 - DNA, 15 bp, Homo sapiens
ggcacaatcatagtt

SEQ ID NO: 1335117 - DNA, 15 bp, Homo sapiens
tggcacaatcatagt

SEQ ID NO: 1335118 - DNA, 15 bp, Homo sapiens
atcttactatgttgc

SEQ ID NO: 1335119 - DNA, 15 bp, Homo sapiens
gatcttactatgttg

SEQ ID NO: 1335120 - DNA, 15 bp, Homo sapiens
ggatcttactatgtt

SEQ ID NO: 1335121 - DNA, 15 bp, Homo sapiens
aggatcttactatgt

SEQ ID NO: 1335122 - DNA, 15 bp, Homo sapiens
caggatcttactatg

SEQ ID NO: 1335123 - DNA, 15 bp, Homo sapiens
acaggatcttactat

SEQ ID NO: 1335124 - DNA, 15 bp, Homo sapiens
aacaggatcttacta

SEQ ID NO: 1335125 - DNA, 15 bp, Homo sapiens
aaacaggatcttact

SEQ ID NO: 1335126 - DNA, 15 bp, Homo sapiens
gaaacaggatcttac

SEQ ID NO: 1335127 - DNA, 15 bp, Homo sapiens
agaaacaggatctta

SEQ ID NO: 1335128 - DNA, 15 bp, Homo sapiens
cagaaacaggatctt

SEQ ID NO: 1335129 - DNA, 15 bp, Homo sapiens
tcagaaacaggatct

SEQ ID NO: 1335130 - DNA, 15 bp, Homo sapiens
ttcagaaacaggatc

SEQ ID NO: 1335131 - DNA, 15 bp, Homo sapiens
tttcagaaacaggat

SEQ ID NO: 1335132 - DNA, 15 bp, Homo sapiens
ttttcagaaacagga

SEQ ID NO: 1335133 - DNA, 15 bp, Homo sapiens
tttttcagaaacagg

SEQ ID NO: 1335134 - DNA, 15 bp, Homo sapiens
ttttttcagaaacag

SEQ ID NO: 1335135 - DNA, 15 bp, Homo sapiens
gttttttcagaaaca

SEQ ID NO: 1335136 - DNA, 15 bp, Homo sapiens
tgttttttcagaaac

SEQ ID NO: 1335137 - DNA, 15 bp, Homo sapiens
ttgttttttcagaaa

SEQ ID NO: 1335138 - DNA, 15 bp, Homo sapiens
gttgttttttcagaa

SEQ ID NO: 1335139 - DNA, 15 bp, Homo sapiens
tgttgttttttcaga

SEQ ID NO: 1335140 - DNA, 15 bp, Homo sapiens
atgttgttttttcag

SEQ ID NO: 1335141 - DNA, 15 bp, Homo sapiens
tatgttgttttttca

SEQ ID NO: 1335142 - DNA, 15 bp, Homo sapiens
atatgttgttttttc

SEQ ID NO: 1335143 - DNA, 15 bp, Homo sapiens
aatatgttgtttttt

SEQ ID NO: 1335144 - DNA, 15 bp, Homo sapiens
aaatatgttgttttt

SEQ ID NO: 1335145 - DNA, 15 bp, Homo sapiens
aaaatatgttgtttt

SEQ ID NO: 1335146 - DNA, 15 bp, Homo sapiens
taaaatatgttgttt

SEQ ID NO: 1335147 - DNA, 15 bp, Homo sapiens
ttaaaatatgttgtt

SEQ ID NO: 1335148 - DNA, 15 bp, Homo sapiens
tttaaaatatgttgt

SEQ ID NO: 1335149 - DNA, 15 bp, Homo sapiens
gtttaaaatatgttg

SEQ ID NO: 1335150 - DNA, 15 bp, Homo sapiens
ggtttaaaatatgtt

SEQ ID NO: 1335151 - DNA, 15 bp, Homo sapiens
tggtttaaaatatgt

SEQ ID NO: 1335152 - DNA, 15 bp, Homo sapiens
atggtttaaaatatg

SEQ ID NO: 1335153 - DNA, 15 bp, Homo sapiens
catggtttaaaatat

SEQ ID NO: 1335154 - DNA, 15 bp, Homo sapiens
tcatggtttaaaata

SEQ ID NO: 1335155 - DNA, 15 bp, Homo sapiens
ttcatggtttaaaat

SEQ ID NO: 1335156 - DNA, 15 bp, Homo sapiens
tttcatggtttaaaa

SEQ ID NO: 1335157 - DNA, 15 bp, Homo sapiens
ctttcatggtttaaa

SEQ ID NO: 1335158 - DNA, 15 bp, Homo sapiens
tctttcatggtttaa

SEQ ID NO: 1335159 - DNA, 15 bp, Homo sapiens
ctctttcatggttta

SEQ ID NO: 1335160 - DNA, 15 bp, Homo sapiens
actctttcatggttt

SEQ ID NO: 1335161 - DNA, 15 bp, Homo sapiens
tactctttcatggtt

SEQ ID NO: 1335162 - DNA, 15 bp, Homo sapiens
ctactctttcatggt

SEQ ID NO: 1335163 - DNA, 15 bp, Homo sapiens
gctactctttcatgg

SEQ ID NO: 1335164 - DNA, 15 bp, Homo sapiens
tgctactctttcatg

SEQ ID NO: 1335165 - DNA, 15 bp, Homo sapiens
atgctactctttcat

SEQ ID NO: 1335166 - DNA, 15 bp, Homo sapiens
gatgctactctttca

SEQ ID NO: 1335167 - DNA, 15 bp, Homo sapiens
agatgctactctttc

SEQ ID NO: 1335168 - DNA, 15 bp, Homo sapiens
cagatgctactcttt

SEQ ID NO: 1335169 - DNA, 15 bp, Homo sapiens
acagatgctactctt

SEQ ID NO: 1335170 - DNA, 15 bp, Homo sapiens
aacagatgctactct

SEQ ID NO: 1335171 - DNA, 15 bp, Homo sapiens
taacagatgctactc

SEQ ID NO: 1335172 - DNA, 15 bp, Homo sapiens
ttaacagatgctact

SEQ ID NO: 1335173 - DNA, 15 bp, Homo sapiens
tttaacagatgctac

SEQ ID NO: 1335174 - DNA, 15 bp, Homo sapiens
atttaacagatgcta

SEQ ID NO: 1335175 - DNA, 15 bp, Homo sapiens
catttaacagatgct

SEQ ID NO: 1335176 - DNA, 15 bp, Homo sapiens
acatttaacagatgc

SEQ ID NO: 1335177 - DNA, 15 bp, Homo sapiens
cacatttaacagatg

SEQ ID NO: 1335178 - DNA, 15 bp, Homo sapiens
acacatttaacagat

SEQ ID NO: 1335179 - DNA, 15 bp, Homo sapiens
tacacatttaacaga

SEQ ID NO: 1335180 - DNA, 15 bp, Homo sapiens
ctacacatttaacag

SEQ ID NO: 1335181 - DNA, 15 bp, Homo sapiens
cctacacatttaaca

SEQ ID NO: 1335182 - DNA, 15 bp, Homo sapiens
acctacacatttaac

SEQ ID NO: 1335183 - DNA, 15 bp, Homo sapiens
tacctacacatttaa

SEQ ID NO: 1335184 - DNA, 15 bp, Homo sapiens
atacctacacattta

SEQ ID NO: 1335185 - DNA, 15 bp, Homo sapiens
catacctacacattt

SEQ ID NO: 1335186 - DNA, 15 bp, Homo sapiens
gcatacctacacatt

SEQ ID NO: 1335187 - DNA, 15 bp, Homo sapiens
ggcatacctacacat

SEQ ID NO: 1335188 - DNA, 15 bp, Homo sapiens
aggcatacctacaca

SEQ ID NO: 1335189 - DNA, 15 bp, Homo sapiens
taggcatacctacac

SEQ ID NO: 1335190 - DNA, 15 bp, Homo sapiens
ctaggcatacctaca

SEQ ID NO: 1335191 - DNA, 15 bp, Homo sapiens
cctaggcatacctac

SEQ ID NO: 1335192 - DNA, 15 bp, Homo sapiens
tcctaggcataccta

SEQ ID NO: 1335193 - DNA, 15 bp, Homo sapiens
ttcctaggcatacct

SEQ ID NO: 1335194 - DNA, 15 bp, Homo sapiens
tttcctaggcatacc

SEQ ID NO: 1335195 - DNA, 15 bp, Homo sapiens
atttcctaggcatac

SEQ ID NO: 1335196 - DNA, 15 bp, Homo sapiens
gatttcctaggcata

SEQ ID NO: 1335197 - DNA, 15 bp, Homo sapiens
agatttcctaggcat

SEQ ID NO: 1335198 - DNA, 15 bp, Homo sapiens
tagatttcctaggca

SEQ ID NO: 1335199 - DNA, 15 bp, Homo sapiens
ttagatttcctaggc

SEQ ID NO: 1335200 - DNA, 15 bp, Homo sapiens
tttagatttcctagg

SEQ ID NO: 1335201 - DNA, 15 bp, Homo sapiens
ttttagatttcctag

SEQ ID NO: 1335202 - DNA, 15 bp, Homo sapiens
attttagatttccta

SEQ ID NO: 1335203 - DNA, 15 bp, Homo sapiens
cattttagatttcct

SEQ ID NO: 1335204 - DNA, 15 bp, Homo sapiens
tcattttagatttcc

SEQ ID NO: 1335205 - DNA, 15 bp, Homo sapiens
ttcattttagatttc

SEQ ID NO: 1335206 - DNA, 15 bp, Homo sapiens
cttcattttagattt

SEQ ID NO: 1335207 - DNA, 15 bp, Homo sapiens
tcttcattttagatt

SEQ ID NO: 1335208 - DNA, 15 bp, Homo sapiens
ctcttcattttagat

SEQ ID NO: 1335209 - DNA, 15 bp, Homo sapiens
tctcttcattttaga

SEQ ID NO: 1335210 - DNA, 15 bp, Homo sapiens
gtctcttcattttag

SEQ ID NO: 1335211 - DNA, 15 bp, Homo sapiens
cgtctcttcatttta

SEQ ID NO: 1335212 - DNA, 15 bp, Homo sapiens
acgtctcttcatttt

SEQ ID NO: 1335213 - DNA, 15 bp, Homo sapiens
tacgtctcttcattt

SEQ ID NO: 1335214 - DNA, 15 bp, Homo sapiens
ctacgtctcttcatt

SEQ ID NO: 1335215 - DNA, 15 bp, Homo sapiens
cctacgtctcttcat

SEQ ID NO: 1335216 - DNA, 15 bp, Homo sapiens
tcctacgtctcttca

SEQ ID NO: 1335217 - DNA, 15 bp, Homo sapiens
gtcctacgtctcttc

SEQ ID NO: 1335218 - DNA, 15 bp, Homo sapiens
tgtcctacgtctctt

SEQ ID NO: 1335219 - DNA, 15 bp, Homo sapiens
ttgtcctacgtctct

SEQ ID NO: 1335220 - DNA, 15 bp, Homo sapiens
attgtcctacgtctc

SEQ ID NO: 1335221 - DNA, 15 bp, Homo sapiens
tattgtcctacgtct

SEQ ID NO: 1335222 - DNA, 15 bp, Homo sapiens
ttattgtcctacgtc

SEQ ID NO: 1335223 - DNA, 15 bp, Homo sapiens
tttattgtcctacgt

SEQ ID NO: 1335224 - DNA, 15 bp, Homo sapiens
ctttattgtcctacg

SEQ ID NO: 1335225 - DNA, 15 bp, Homo sapiens
actttattgtcctac

SEQ ID NO: 1335226 - DNA, 15 bp, Homo sapiens
gactttattgtccta

SEQ ID NO: 1335227 - DNA, 15 bp, Homo sapiens
tgactttattgtcct

SEQ ID NO: 1335228 - DNA, 15 bp, Homo sapiens
ctgactttattgtcc

SEQ ID NO: 1335229 - DNA, 15 bp, Homo sapiens
gctgactttattgtc

SEQ ID NO: 1335230 - DNA, 15 bp, Homo sapiens
ggctgactttattgt

SEQ ID NO: 1335231 - DNA, 15 bp, Homo sapiens
tggctgactttattg

SEQ ID NO: 1335232 - DNA, 15 bp, Homo sapiens
ttggctgactttatt

SEQ ID NO: 1335233 - DNA, 15 bp, Homo sapiens
gttggctgactttat

SEQ ID NO: 1335234 - DNA, 15 bp, Homo sapiens
agttggctgacttta

SEQ ID NO: 1335235 - DNA, 15 bp, Homo sapiens
cagttggctgacttt

SEQ ID NO: 1335236 - DNA, 15 bp, Homo sapiens
gcagttggctgactt

SEQ ID NO: 1335237 - DNA, 15 bp, Homo sapiens
agcagttggctgact

SEQ ID NO: 1335238 - DNA, 15 bp, Homo sapiens
gagcagttggctgac

SEQ ID NO: 1335239 - DNA, 15 bp, Homo sapiens
tgagcagttggctga

SEQ ID NO: 1335240 - DNA, 15 bp, Homo sapiens
ttgagcagttggctg

SEQ ID NO: 1335241 - DNA, 15 bp, Homo sapiens
cttgagcagttggct

SEQ ID NO: 1335242 - DNA, 15 bp, Homo sapiens
gcttgagcagttggc

SEQ ID NO: 1335243 - DNA, 15 bp, Homo sapiens
ggcttgagcagttgg

SEQ ID NO: 1335244 - DNA, 15 bp, Homo sapiens
aggcttgagcagttg

SEQ ID NO: 1335245 - DNA, 15 bp, Homo sapiens
gaggcttgagcagtt

SEQ ID NO: 1335246 - DNA, 15 bp, Homo sapiens
tgaggcttgagcagt

SEQ ID NO: 1335247 - DNA, 15 bp, Homo sapiens
ttgaggcttgagcag

SEQ ID NO: 1335248 - DNA, 15 bp, Homo sapiens
tttgaggcttgagca

SEQ ID NO: 1335249 - DNA, 15 bp, Homo sapiens
ctttgaggcttgagc

SEQ ID NO: 1335250 - DNA, 15 bp, Homo sapiens
tctttgaggcttgag

SEQ ID NO: 1335251 - DNA, 15 bp, Homo sapiens
ctctttgaggcttga

SEQ ID NO: 1335252 - DNA, 15 bp, Homo sapiens
actctttgaggcttg

SEQ ID NO: 1335253 - DNA, 15 bp, Homo sapiens
cactctttgaggctt

SEQ ID NO: 1335254 - DNA, 15 bp, Homo sapiens
ccactctttgaggct

SEQ ID NO: 1335255 - DNA, 15 bp, Homo sapiens
cccactctttgaggc

SEQ ID NO: 1335256 - DNA, 15 bp, Homo sapiens
tcccactctttgagg

SEQ ID NO: 1335257 - DNA, 15 bp, Homo sapiens
ctcccactctttgag

SEQ ID NO: 1335258 - DNA, 15 bp, Homo sapiens
cctcccactctttga

SEQ ID NO: 1335259 - DNA, 15 bp, Homo sapiens
ccctcccactctttg

SEQ ID NO: 1335260 - DNA, 15 bp, Homo sapiens
accctcccactcttt

SEQ ID NO: 1335261 - DNA, 15 bp, Homo sapiens
gaccctcccactctt

SEQ ID NO: 1335262 - DNA, 15 bp, Homo sapiens
tgaccctcccactct

SEQ ID NO: 1335263 - DNA, 15 bp, Homo sapiens
gtgaccctcccactc

SEQ ID NO: 1335264 - DNA, 15 bp, Homo sapiens
ggtgaccctcccact

SEQ ID NO: 1335265 - DNA, 15 bp, Homo sapiens
tggtgaccctcccac

SEQ ID NO: 1335266 - DNA, 15 bp, Homo sapiens
ctggtgaccctccca

SEQ ID NO: 1335267 - DNA, 15 bp, Homo sapiens
tctggtgaccctccc

SEQ ID NO: 1335268 - DNA, 15 bp, Homo sapiens
ctctggtgaccctcc

SEQ ID NO: 1335269 - DNA, 15 bp, Homo sapiens
gctctggtgaccctc

SEQ ID NO: 1335270 - DNA, 15 bp, Homo sapiens
agctctggtgaccct

SEQ ID NO: 1335271 - DNA, 15 bp, Homo sapiens
gagctctggtgaccc

SEQ ID NO: 1335272 - DNA, 15 bp, Homo sapiens
tgagctctggtgacc

SEQ ID NO: 1335273 - DNA, 15 bp, Homo sapiens
ttgagctctggtgac

SEQ ID NO: 1335274 - DNA, 15 bp, Homo sapiens
cttgagctctggtga

SEQ ID NO: 1335275 - DNA, 15 bp, Homo sapiens
ccttgagctctggtg

SEQ ID NO: 1335276 - DNA, 15 bp, Homo sapiens
cccttgagctctggt

SEQ ID NO: 1335277 - DNA, 15 bp, Homo sapiens
gcccttgagctctgg

SEQ ID NO: 1335278 - DNA, 15 bp, Homo sapiens
agcccttgagctctg

SEQ ID NO: 1335279 - DNA, 15 bp, Homo sapiens
tagcccttgagctct

SEQ ID NO: 1335280 - DNA, 15 bp, Homo sapiens
ctagcccttgagctc

SEQ ID NO: 1335281 - DNA, 15 bp, Homo sapiens
gctagcccttgagct

SEQ ID NO: 1335282 - DNA, 15 bp, Homo sapiens
cgctagcccttgagc

SEQ ID NO: 1335283 - DNA, 15 bp, Homo sapiens
gcgctagcccttgag

SEQ ID NO: 1335284 - DNA, 15 bp, Homo sapiens
agcgctagcccttga

SEQ ID NO: 1335285 - DNA, 15 bp, Homo sapiens
gagcgctagcccttg

SEQ ID NO: 1335286 - DNA, 15 bp, Homo sapiens
tgagcgctagccctt

SEQ ID NO: 1335287 - DNA, 15 bp, Homo sapiens
ctgagcgctagccct

SEQ ID NO: 1335288 - DNA, 15 bp, Homo sapiens
gctgagcgctagccc

SEQ ID NO: 1335289 - DNA, 15 bp, Homo sapiens
agctgagcgctagcc

SEQ ID NO: 1335290 - DNA, 15 bp, Homo sapiens
aagctgagcgctagc

SEQ ID NO: 1335291 - DNA, 15 bp, Homo sapiens
caagctgagcgctag

SEQ ID NO: 1335292 - DNA, 15 bp, Homo sapiens
gcaagctgagcgcta

SEQ ID NO: 1335293 - DNA, 15 bp, Homo sapiens
tgcaagctgagcgct

SEQ ID NO: 1335294 - DNA, 15 bp, Homo sapiens
ctgcaagctgagcgc

SEQ ID NO: 1335295 - DNA, 15 bp, Homo sapiens
actgcaagctgagcg

SEQ ID NO: 1335296 - DNA, 15 bp, Homo sapiens
aactgcaagctgagc

SEQ ID NO: 1335297 - DNA, 15 bp, Homo sapiens
taactgcaagctgag

SEQ ID NO: 1335298 - DNA, 15 bp, Homo sapiens
gtaactgcaagctga

SEQ ID NO: 1335299 - DNA, 15 bp, Homo sapiens
tgtaactgcaagctg

SEQ ID NO: 1335300 - DNA, 15 bp, Homo sapiens
ttgtaactgcaagct

SEQ ID NO: 1335301 - DNA, 15 bp, Homo sapiens
tttgtaactgcaagc

SEQ ID NO: 1335302 - DNA, 15 bp, Homo sapiens
ttttgtaactgcaag

SEQ ID NO: 1335303 - DNA, 15 bp, Homo sapiens
tttttgtaactgcaa

SEQ ID NO: 1335304 - DNA, 15 bp, Homo sapiens
ttttttgtaactgca

SEQ ID NO: 1335305 - DNA, 15 bp, Homo sapiens
tttttttgtaactgc

SEQ ID NO: 1335306 - DNA, 15 bp, Homo sapiens
ctttttttgtaactg

SEQ ID NO: 1335307 - DNA, 15 bp, Homo sapiens
actttttttgtaact

SEQ ID NO: 1335308 - DNA, 15 bp, Homo sapiens
aactttttttgtaac

SEQ ID NO: 1335309 - DNA, 15 bp, Homo sapiens
taactttttttgtaa

SEQ ID NO: 1335310 - DNA, 15 bp, Homo sapiens
gtaactttttttgta

SEQ ID NO: 1335311 - DNA, 15 bp, Homo sapiens
agtaactttttttgt

SEQ ID NO: 1335312 - DNA, 15 bp, Homo sapiens
gagtaactttttttg

SEQ ID NO: 1335313 - DNA, 15 bp, Homo sapiens
agagtaacttttttt

SEQ ID NO: 1335314 - DNA, 15 bp, Homo sapiens
aagagtaactttttt

SEQ ID NO: 1335315 - DNA, 15 bp, Homo sapiens
aaagagtaacttttt

SEQ ID NO: 1335316 - DNA, 15 bp, Homo sapiens
aaaagagtaactttt

SEQ ID NO: 1335317 - DNA, 15 bp, Homo sapiens
aaaaagagtaacttt

SEQ ID NO: 1335318 - DNA, 15 bp, Homo sapiens
gaaaaagagtaactt

SEQ ID NO: 1335319 - DNA, 15 bp, Homo sapiens
ggaaaaagagtaact

SEQ ID NO: 1335320 - DNA, 15 bp, Homo sapiens
aggaaaaagagtaac

SEQ ID NO: 1335321 - DNA, 15 bp, Homo sapiens
aaggaaaaagagtaa

SEQ ID NO: 1335322 - DNA, 15 bp, Homo sapiens
aaaggaaaaagagta

SEQ ID NO: 1335323 - DNA, 15 bp, Homo sapiens
taaaggaaaaagagt

SEQ ID NO: 1335324 - DNA, 15 bp, Homo sapiens
ttaaaggaaaaagag

SEQ ID NO: 1335325 - DNA, 15 bp, Homo sapiens
tttaaaggaaaaaga

SEQ ID NO: 1335326 - DNA, 15 bp, Homo sapiens
atttaaaggaaaaag

SEQ ID NO: 1335327 - DNA, 15 bp, Homo sapiens
aatttaaaggaaaaa

SEQ ID NO: 1335328 - DNA, 15 bp, Homo sapiens
aaatttaaaggaaaa

SEQ ID NO: 1335329 - DNA, 15 bp, Homo sapiens
gaaatttaaaggaaa

SEQ ID NO: 1335330 - DNA, 15 bp, Homo sapiens
agaaatttaaaggaa

SEQ ID NO: 1335331 - DNA, 15 bp, Homo sapiens
cagaaatttaaagga

SEQ ID NO: 1335332 - DNA, 15 bp, Homo sapiens
tcagaaatttaaagg

SEQ ID NO: 1335333 - DNA, 15 bp, Homo sapiens
ttcagaaatttaaag

SEQ ID NO: 1335334 - DNA, 15 bp, Homo sapiens
tttcagaaatttaaa

SEQ ID NO: 1335335 - DNA, 15 bp, Homo sapiens
ttttcagaaatttaa

SEQ ID NO: 1335336 - DNA, 15 bp, Homo sapiens
tttttcagaaattta

SEQ ID NO: 1335337 - DNA, 15 bp, Homo sapiens
ttttttcagaaattt

SEQ ID NO: 1335338 - DNA, 15 bp, Homo sapiens
cttttttcagaaatt

SEQ ID NO: 1335339 - DNA, 15 bp, Homo sapiens
acttttttcagaaat

SEQ ID NO: 1335340 - DNA, 15 bp, Homo sapiens
aacttttttcagaaa

SEQ ID NO: 1335341 - DNA, 15 bp, Homo sapiens
gaacttttttcagaa

SEQ ID NO: 1335342 - DNA, 15 bp, Homo sapiens
agaacttttttcaga

SEQ ID NO: 1335343 - DNA, 15 bp, Homo sapiens
gagaacttttttcag

SEQ ID NO: 1335344 - DNA, 15 bp, Homo sapiens
tgagaacttttttca

SEQ ID NO: 1335345 - DNA, 15 bp, Homo sapiens
atgagaacttttttc

SEQ ID NO: 1335346 - DNA, 15 bp, Homo sapiens
aatgagaactttttt

SEQ ID NO: 1335347 - DNA, 15 bp, Homo sapiens
aaatgagaacttttt

SEQ ID NO: 1335348 - DNA, 15 bp, Homo sapiens
aaaatgagaactttt

SEQ ID NO: 1335349 - DNA, 15 bp, Homo sapiens
taaaatgagaacttt

SEQ ID NO: 1335350 - DNA, 15 bp, Homo sapiens
ttaaaatgagaactt

SEQ ID NO: 1335351 - DNA, 15 bp, Homo sapiens
attaaaatgagaact

SEQ ID NO: 1335352 - DNA, 15 bp, Homo sapiens
tattaaaatgagaac

SEQ ID NO: 1335353 - DNA, 15 bp, Homo sapiens
ttattaaaatgagaa

SEQ ID NO: 1335354 - DNA, 15 bp, Homo sapiens
attattaaaatgaga

SEQ ID NO: 1335355 - DNA, 15 bp, Homo sapiens
cattattaaaatgag

SEQ ID NO: 1335356 - DNA, 15 bp, Homo sapiens
acattattaaaatga

SEQ ID NO: 1335357 - DNA, 15 bp, Homo sapiens
cacattattaaaatg

SEQ ID NO: 1335358 - DNA, 15 bp, Homo sapiens
tcacattattaaaat

SEQ ID NO: 1335359 - DNA, 15 bp, Homo sapiens
ttcacattattaaaa

SEQ ID NO: 1335360 - DNA, 15 bp, Homo sapiens
tttcacattattaaa

SEQ ID NO: 1335361 - DNA, 15 bp, Homo sapiens
atttcacattattaa

SEQ ID NO: 1335362 - DNA, 15 bp, Homo sapiens
aatttcacattatta

SEQ ID NO: 1335363 - DNA, 15 bp, Homo sapiens
aaatttcacattatt

SEQ ID NO: 1335364 - DNA, 15 bp, Homo sapiens
aaaatttcacattat

SEQ ID NO: 1335365 - DNA, 15 bp, Homo sapiens
taaaatttcacatta

SEQ ID NO: 1335366 - DNA, 15 bp, Homo sapiens
ctaaaatttcacatt

SEQ ID NO: 1335367 - DNA, 15 bp, Homo sapiens
gctaaaatttcacat

SEQ ID NO: 1335368 - DNA, 15 bp, Homo sapiens
tgctaaaatttcaca

SEQ ID NO: 1335369 - DNA, 15 bp, Homo sapiens
ttgctaaaatttcac

SEQ ID NO: 1335370 - DNA, 15 bp, Homo sapiens
cttgctaaaatttca

SEQ ID NO: 1335371 - DNA, 15 bp, Homo sapiens
tcttgctaaaatttc

SEQ ID NO: 1335372 - DNA, 15 bp, Homo sapiens
ttcttgctaaaattt

SEQ ID NO: 1335373 - DNA, 15 bp, Homo sapiens
tttcttgctaaaatt

SEQ ID NO: 1335374 - DNA, 15 bp, Homo sapiens
atttcttgctaaaat

SEQ ID NO: 1335375 - DNA, 15 bp, Homo sapiens
tatttcttgctaaaa

SEQ ID NO: 1335376 - DNA, 15 bp, Homo sapiens
ctatttcttgctaaa

SEQ ID NO: 1335377 - DNA, 15 bp, Homo sapiens
actatttcttgctaa

SEQ ID NO: 1335378 - DNA, 15 bp, Homo sapiens
aactatttcttgcta

SEQ ID NO: 1335379 - DNA, 15 bp, Homo sapiens
taactatttcttgct

SEQ ID NO: 1335380 - DNA, 15 bp, Homo sapiens
ataactatttcttgc

SEQ ID NO: 1335381 - DNA, 15 bp, Homo sapiens
aataactatttcttg

SEQ ID NO: 1335382 - DNA, 15 bp, Homo sapiens
taataactatttctt

SEQ ID NO: 1335383 - DNA, 15 bp, Homo sapiens
ttaataactatttct

SEQ ID NO: 1335384 - DNA, 15 bp, Homo sapiens
attaataactatttc

SEQ ID NO: 1335385 - DNA, 15 bp, Homo sapiens
cattaataactattt

SEQ ID NO: 1335386 - DNA, 15 bp, Homo sapiens
acattaataactatt

SEQ ID NO: 1335387 - DNA, 15 bp, Homo sapiens
cacattaataactat

SEQ ID NO: 1335388 - DNA, 15 bp, Homo sapiens
acacattaataacta

SEQ ID NO: 1335389 - DNA, 15 bp, Homo sapiens
gacacattaataact

SEQ ID NO: 1335390 - DNA, 15 bp, Homo sapiens
ggacacattaataac

SEQ ID NO: 1335391 - DNA, 15 bp, Homo sapiens
aggacacattaataa

SEQ ID NO: 1335392 - DNA, 15 bp, Homo sapiens
gaggacacattaata

SEQ ID NO: 1335393 - DNA, 15 bp, Homo sapiens
tgaggacacattaat

SEQ ID NO: 1335394 - DNA, 15 bp, Homo sapiens
ttgaggacacattaa

SEQ ID NO: 1335395 - DNA, 15 bp, Homo sapiens
gttgaggacacatta

SEQ ID NO: 1335396 - DNA, 15 bp, Homo sapiens
ggttgaggacacatt

SEQ ID NO: 1335397 - DNA, 15 bp, Homo sapiens
gggttgaggacacat

SEQ ID NO: 1335398 - DNA, 15 bp, Homo sapiens
agggttgaggacaca

SEQ ID NO: 1335399 - DNA, 15 bp, Homo sapiens
gagggttgaggacac

SEQ ID NO: 1335400 - DNA, 15 bp, Homo sapiens
ggagggttgaggaca

SEQ ID NO: 1335401 - DNA, 15 bp, Homo sapiens
gggagggttgaggac

SEQ ID NO: 1335402 - DNA, 15 bp, Homo sapiens
tgggagggttgagga

SEQ ID NO: 1335403 - DNA, 15 bp, Homo sapiens
atgggagggttgagg

SEQ ID NO: 1335404 - DNA, 15 bp, Homo sapiens
gatgggagggttgag

SEQ ID NO: 1335405 - DNA, 15 bp, Homo sapiens
agatgggagggttga

SEQ ID NO: 1335406 - DNA, 15 bp, Homo sapiens
tagatgggagggttg

SEQ ID NO: 1335407 - DNA, 15 bp, Homo sapiens
atagatgggagggtt

SEQ ID NO: 1335408 - DNA, 15 bp, Homo sapiens
catagatgggagggt

SEQ ID NO: 1335409 - DNA, 15 bp, Homo sapiens
acatagatgggaggg

SEQ ID NO: 1335410 - DNA, 15 bp, Homo sapiens
gacatagatgggagg

SEQ ID NO: 1335411 - DNA, 15 bp, Homo sapiens
ggacatagatgggag

SEQ ID NO: 1335412 - DNA, 15 bp, Homo sapiens
tggacatagatggga

SEQ ID NO: 1335413 - DNA, 15 bp, Homo sapiens
ctggacatagatggg

SEQ ID NO: 1335414 - DNA, 15 bp, Homo sapiens
cctggacatagatgg

SEQ ID NO: 1335415 - DNA, 15 bp, Homo sapiens
gcctggacatagatg

SEQ ID NO: 1335416 - DNA, 15 bp, Homo sapiens
ggcctggacatagat

SEQ ID NO: 1335417 - DNA, 15 bp, Homo sapiens
gggcctggacataga

SEQ ID NO: 1335418 - DNA, 15 bp, Homo sapiens
ggggcctggacatag

SEQ ID NO: 1335419 - DNA, 15 bp, Homo sapiens
aggggcctggacata

SEQ ID NO: 1335420 - DNA, 15 bp, Homo sapiens
gaggggcctggacat

SEQ ID NO: 1335421 - DNA, 15 bp, Homo sapiens
tgaggggcctggaca

SEQ ID NO: 1335422 - DNA, 15 bp, Homo sapiens
ttgaggggcctggac

SEQ ID NO: 1335423 - DNA, 15 bp, Homo sapiens
attgaggggcctgga

SEQ ID NO: 1335424 - DNA, 15 bp, Homo sapiens
gattgaggggcctgg

SEQ ID NO: 1335425 - DNA, 15 bp, Homo sapiens
tgattgaggggcctg

SEQ ID NO: 1335426 - DNA, 15 bp, Homo sapiens
ctgattgaggggcct

SEQ ID NO: 1335427 - DNA, 15 bp, Homo sapiens
cctgattgaggggcc

SEQ ID NO: 1335428 - DNA, 15 bp, Homo sapiens
ccctgattgaggggc

SEQ ID NO: 1335429 - DNA, 15 bp, Homo sapiens
tccctgattgagggg

SEQ ID NO: 1335430 - DNA, 15 bp, Homo sapiens
atccctgattgaggg

SEQ ID NO: 1335431 - DNA, 15 bp, Homo sapiens
catccctgattgagg

SEQ ID NO: 1335432 - DNA, 15 bp, Homo sapiens
acatccctgattgag

SEQ ID NO: 1335433 - DNA, 15 bp, Homo sapiens
aacatccctgattga

SEQ ID NO: 1335434 - DNA, 15 bp, Homo sapiens
taacatccctgattg

SEQ ID NO: 1335435 - DNA, 15 bp, Homo sapiens
ttaacatccctgatt

SEQ ID NO: 1335436 - DNA, 15 bp, Homo sapiens
tttaacatccctgat

SEQ ID NO: 1335437 - DNA, 15 bp, Homo sapiens
ttttaacatccctga

SEQ ID NO: 1335438 - DNA, 15 bp, Homo sapiens
attttaacatccctg

SEQ ID NO: 1335439 - DNA, 15 bp, Homo sapiens
cattttaacatccct

SEQ ID NO: 1335440 - DNA, 15 bp, Homo sapiens
acattttaacatccc

SEQ ID NO: 1335441 - DNA, 15 bp, Homo sapiens
aacattttaacatcc

SEQ ID NO: 1335442 - DNA, 15 bp, Homo sapiens
taacattttaacatc

SEQ ID NO: 1335443 - DNA, 15 bp, Homo sapiens
ttaacattttaacat

SEQ ID NO: 1335444 - DNA, 15 bp, Homo sapiens
gttaacattttaaca

SEQ ID NO: 1335445 - DNA, 15 bp, Homo sapiens
tgttaacattttaac

SEQ ID NO: 1335446 - DNA, 15 bp, Homo sapiens
atgttaacattttaa

SEQ ID NO: 1335447 - DNA, 15 bp, Homo sapiens
aatgttaacatttta

SEQ ID NO: 1335448 - DNA, 15 bp, Homo sapiens
aaatgttaacatttt

SEQ ID NO: 1335449 - DNA, 15 bp, Homo sapiens
aaaatgttaacattt

SEQ ID NO: 1335450 - DNA, 15 bp, Homo sapiens
caaaatgttaacatt

SEQ ID NO: 1335451 - DNA, 15 bp, Homo sapiens
tcaaaatgttaacat

SEQ ID NO: 1335452 - DNA, 15 bp, Homo sapiens
atcaaaatgttaaca

SEQ ID NO: 1335453 - DNA, 15 bp, Homo sapiens
tatcaaaatgttaac

SEQ ID NO: 1335454 - DNA, 15 bp, Homo sapiens
atatcaaaatgttaa

SEQ ID NO: 1335455 - DNA, 15 bp, Homo sapiens
catatcaaaatgtta

SEQ ID NO: 1335456 - DNA, 15 bp, Homo sapiens
acatatcaaaatgtt

SEQ ID NO: 1335457 - DNA, 15 bp, Homo sapiens
tacatatcaaaatgt

SEQ ID NO: 1335458 - DNA, 15 bp, Homo sapiens
ttacatatcaaaatg

SEQ ID NO: 1335459 - DNA, 15 bp, Homo sapiens
gttacatatcaaaat

SEQ ID NO: 1335460 - DNA, 15 bp, Homo sapiens
agttacatatcaaaa

SEQ ID NO: 1335461 - DNA, 15 bp, Homo sapiens
aagttacatatcaaa

SEQ ID NO: 1335462 - DNA, 15 bp, Homo sapiens
caagttacatatcaa

SEQ ID NO: 1335463 - DNA, 15 bp, Homo sapiens
gcaagttacatatca

SEQ ID NO: 1335464 - DNA, 15 bp, Homo sapiens
ggcaagttacatatc

SEQ ID NO: 1335465 - DNA, 15 bp, Homo sapiens
tggcaagttacatat

SEQ ID NO: 1335466 - DNA, 15 bp, Homo sapiens
atggcaagttacata

SEQ ID NO: 1335467 - DNA, 15 bp, Homo sapiens
tatggcaagttacat

SEQ ID NO: 1335468 - DNA, 15 bp, Homo sapiens
gtatggcaagttaca

SEQ ID NO: 1335469 - DNA, 15 bp, Homo sapiens
agtatggcaagttac

SEQ ID NO: 1335470 - DNA, 15 bp, Homo sapiens
aagtatggcaagtta

SEQ ID NO: 1335471 - DNA, 15 bp, Homo sapiens
aaagtatggcaagtt

SEQ ID NO: 1335472 - DNA, 15 bp, Homo sapiens
aaaagtatggcaagt

SEQ ID NO: 1335473 - DNA, 15 bp, Homo sapiens
aaaaagtatggcaag

SEQ ID NO: 1335474 - DNA, 15 bp, Homo sapiens
gaaaaagtatggcaa

SEQ ID NO: 1335475 - DNA, 15 bp, Homo sapiens
agaaaaagtatggca

SEQ ID NO: 1335476 - DNA, 15 bp, Homo sapiens
tagaaaaagtatggc

SEQ ID NO: 1335477 - DNA, 15 bp, Homo sapiens
ttagaaaaagtatgg

SEQ ID NO: 1335478 - DNA, 15 bp, Homo sapiens
cttagaaaaagtatg

SEQ ID NO: 1335479 - DNA, 15 bp, Homo sapiens
gcttagaaaaagtat

SEQ ID NO: 1335480 - DNA, 15 bp, Homo sapiens
ggcttagaaaaagta

SEQ ID NO: 1335481 - DNA, 15 bp, Homo sapiens
aggcttagaaaaagt

SEQ ID NO: 1335482 - DNA, 15 bp, Homo sapiens
gaggcttagaaaaag

SEQ ID NO: 1335483 - DNA, 15 bp, Homo sapiens
agaggcttagaaaaa

SEQ ID NO: 1335484 - DNA, 15 bp, Homo sapiens
tagaggcttagaaaa

SEQ ID NO: 1335485 - DNA, 15 bp, Homo sapiens
gtagaggcttagaaa

SEQ ID NO: 1335486 - DNA, 15 bp, Homo sapiens
tgtagaggcttagaa

SEQ ID NO: 1335487 - DNA, 15 bp, Homo sapiens
ctgtagaggcttaga

SEQ ID NO: 1335488 - DNA, 15 bp, Homo sapiens
gctgtagaggcttag

SEQ ID NO: 1335489 - DNA, 15 bp, Homo sapiens
ggctgtagaggctta

SEQ ID NO: 1335490 - DNA, 15 bp, Homo sapiens
aggctgtagaggctt

SEQ ID NO: 1335491 - DNA, 15 bp, Homo sapiens
aaggctgtagaggct

SEQ ID NO: 1335492 - DNA, 15 bp, Homo sapiens
aaaggctgtagaggc

SEQ ID NO: 1335493 - DNA, 15 bp, Homo sapiens
aaaaggctgtagagg

SEQ ID NO: 1335494 - DNA, 15 bp, Homo sapiens
aaaaaggctgtagag

SEQ ID NO: 1335495 - DNA, 15 bp, Homo sapiens
aaaaaaggctgtaga

SEQ ID NO: 1335496 - DNA, 15 bp, Homo sapiens
aaaaaaaggctgtag

SEQ ID NO: 1335497 - DNA, 15 bp, Homo sapiens
aaaaaaaaggctgta

SEQ ID NO: 1335498 - DNA, 15 bp, Homo sapiens
aaaaaaaaaggctgt

SEQ ID NO: 1335499 - DNA, 15 bp, Homo sapiens
aaaaaaaaaaggctg

SEQ ID NO: 1335500 - DNA, 15 bp, Homo sapiens
aaaaaaaaaaaggct

SEQ ID NO: 1335501 - DNA, 15 bp, Homo sapiens
caaaagaaaaaaaaa

SEQ ID NO: 1335502 - DNA, 15 bp, Homo sapiens
tcaaaagaaaaaaaa

SEQ ID NO: 1335503 - DNA, 15 bp, Homo sapiens
ctcaaaagaaaaaaa

SEQ ID NO: 1335504 - DNA, 15 bp, Homo sapiens
tctcaaaagaaaaaa

SEQ ID NO: 1335505 - DNA, 15 bp, Homo sapiens
gtctcaaaagaaaaa

SEQ ID NO: 1335506 - DNA, 15 bp, Homo sapiens
tgtctcaaaagaaaa

SEQ ID NO: 1335507 - DNA, 15 bp, Homo sapiens
ctgtctcaaaagaaa

SEQ ID NO: 1335508 - DNA, 15 bp, Homo sapiens
tctgtctcaaaagaa

SEQ ID NO: 1335509 - DNA, 15 bp, Homo sapiens
ctctgtctcaaaaga

SEQ ID NO: 1335510 - DNA, 15 bp, Homo sapiens
actctgtctcaaaag

SEQ ID NO: 1335511 - DNA, 15 bp, Homo sapiens
atggaggttgcagtg

SEQ ID NO: 1335512 - DNA, 15 bp, Homo sapiens
gaagagaatcgcttg

SEQ ID NO: 1335513 - DNA, 15 bp, Homo sapiens
ggaagagaatcgctt

SEQ ID NO: 1335514 - DNA, 15 bp, Homo sapiens
aggaagagaatcgct

SEQ ID NO: 1335515 - DNA, 15 bp, Homo sapiens
aaggaagagaatcgc

SEQ ID NO: 1335516 - DNA, 15 bp, Homo sapiens
gaaggaagagaatcg

SEQ ID NO: 1335517 - DNA, 15 bp, Homo sapiens
tgaaggaagagaatc

SEQ ID NO: 1335518 - DNA, 15 bp, Homo sapiens
ctgaaggaagagaat

SEQ ID NO: 1335519 - DNA, 15 bp, Homo sapiens
gctgaaggaagagaa

SEQ ID NO: 1335520 - DNA, 15 bp, Homo sapiens
ggctgaaggaagaga

SEQ ID NO: 1335521 - DNA, 15 bp, Homo sapiens
aggctgaaggaagag

SEQ ID NO: 1335522 - DNA, 15 bp, Homo sapiens
gaggctgaaggaaga

SEQ ID NO: 1335523 - DNA, 15 bp, Homo sapiens
ggaggctgaaggaag

SEQ ID NO: 1335524 - DNA, 15 bp, Homo sapiens
gggaggctgaaggaa

SEQ ID NO: 1335525 - DNA, 15 bp, Homo sapiens
agggaggctgaagga

SEQ ID NO: 1335526 - DNA, 15 bp, Homo sapiens
tagggaggctgaagg

SEQ ID NO: 1335527 - DNA, 15 bp, Homo sapiens
ctagggaggctgaag

SEQ ID NO: 1335528 - DNA, 15 bp, Homo sapiens
actagggaggctgaa

SEQ ID NO: 1335529 - DNA, 15 bp, Homo sapiens
cgcatgcctgtagtc

SEQ ID NO: 1335530 - DNA, 15 bp, Homo sapiens
gcgcatgcctgtagt

SEQ ID NO: 1335531 - DNA, 15 bp, Homo sapiens
ggcgcatgcctgtag

SEQ ID NO: 1335532 - DNA, 15 bp, Homo sapiens
gggcatggtggcgca

SEQ ID NO: 1335533 - DNA, 15 bp, Homo sapiens
cgggcatggtggcgc

SEQ ID NO: 1335534 - DNA, 15 bp, Homo sapiens
ccgggcatggtggcg

SEQ ID NO: 1335535 - DNA, 15 bp, Homo sapiens
gctaaaaatacaaaa

SEQ ID NO: 1335536 - DNA, 15 bp, Homo sapiens
tgctaaaaatacaaa

SEQ ID NO: 1335537 - DNA, 15 bp, Homo sapiens
ctgctaaaaatacaa

SEQ ID NO: 1335538 - DNA, 15 bp, Homo sapiens
tctgctaaaaataca

SEQ ID NO: 1335539 - DNA, 15 bp, Homo sapiens
ctctgctaaaaatac

SEQ ID NO: 1335540 - DNA, 15 bp, Homo sapiens
tctctgctaaaaata

SEQ ID NO: 1335541 - DNA, 15 bp, Homo sapiens
gtctctgctaaaaat

SEQ ID NO: 1335542 - DNA, 15 bp, Homo sapiens
tgtctctgctaaaaa

SEQ ID NO: 1335543 - DNA, 15 bp, Homo sapiens
ctgtctctgctaaaa

SEQ ID NO: 1335544 - DNA, 15 bp, Homo sapiens
cctgtctctgctaaa

SEQ ID NO: 1335545 - DNA, 15 bp, Homo sapiens
ccctgtctctgctaa

SEQ ID NO: 1335546 - DNA, 15 bp, Homo sapiens
accctgtctctgcta

SEQ ID NO: 1335547 - DNA, 15 bp, Homo sapiens
ctgagaccagcctgg

SEQ ID NO: 1335548 - DNA, 15 bp, Homo sapiens
tctgagaccagcctg

SEQ ID NO: 1335549 - DNA, 15 bp, Homo sapiens
gtctgagaccagcct

SEQ ID NO: 1335550 - DNA, 15 bp, Homo sapiens
agtctgagaccagcc

SEQ ID NO: 1335551 - DNA, 15 bp, Homo sapiens
gagtctgagaccagc

SEQ ID NO: 1335552 - DNA, 15 bp, Homo sapiens
ggagtctgagaccag

SEQ ID NO: 1335553 - DNA, 15 bp, Homo sapiens
aggagtctgagacca

SEQ ID NO: 1335554 - DNA, 15 bp, Homo sapiens
caggagtctgagacc

SEQ ID NO: 1335555 - DNA, 15 bp, Homo sapiens
tcaggagtctgagac

SEQ ID NO: 1335556 - DNA, 15 bp, Homo sapiens
gtcaggagtctgaga

SEQ ID NO: 1335557 - DNA, 15 bp, Homo sapiens
ggtcaggagtctgag

SEQ ID NO: 1335558 - DNA, 15 bp, Homo sapiens
aggtcaggagtctga

SEQ ID NO: 1335559 - DNA, 15 bp, Homo sapiens
gaggtcaggagtctg

SEQ ID NO: 1335560 - DNA, 15 bp, Homo sapiens
cgaggtcaggagtct

SEQ ID NO: 1335561 - DNA, 15 bp, Homo sapiens
acgaggtcaggagtc

SEQ ID NO: 1335562 - DNA, 15 bp, Homo sapiens
tgggtggatcacgag

SEQ ID NO: 1335563 - DNA, 15 bp, Homo sapiens
gtgggtggatcacga

SEQ ID NO: 1335564 - DNA, 15 bp, Homo sapiens
ggtgggtggatcacg

SEQ ID NO: 1335565 - DNA, 15 bp, Homo sapiens
cctgaggtgggtgga

SEQ ID NO: 1335566 - DNA, 15 bp, Homo sapiens
gcctgaggtgggtgg

SEQ ID NO: 1335567 - DNA, 15 bp, Homo sapiens
agcctgaggtgggtg

SEQ ID NO: 1335568 - DNA, 15 bp, Homo sapiens
gagcctgaggtgggt

SEQ ID NO: 1335569 - DNA, 15 bp, Homo sapiens
ggagcctgaggtggg

SEQ ID NO: 1335570 - DNA, 15 bp, Homo sapiens
gggagcctgaggtgg

SEQ ID NO: 1335571 - DNA, 15 bp, Homo sapiens
tgggagcctgaggtg

SEQ ID NO: 1335572 - DNA, 15 bp, Homo sapiens
ttgggagcctgaggt

SEQ ID NO: 1335573 - DNA, 15 bp, Homo sapiens
tttgggagcctgagg

SEQ ID NO: 1335574 - DNA, 15 bp, Homo sapiens
ctttgggagcctgag

SEQ ID NO: 1335575 - DNA, 15 bp, Homo sapiens
actttgggagcctga

SEQ ID NO: 1335576 - DNA, 15 bp, Homo sapiens
cactttgggagcctg

SEQ ID NO: 1335577 - DNA, 15 bp, Homo sapiens
gcactttgggagcct

SEQ ID NO: 1335578 - DNA, 15 bp, Homo sapiens
agcactttgggagcc

SEQ ID NO: 1335579 - DNA, 15 bp, Homo sapiens
tagcactttgggagc

SEQ ID NO: 1335580 - DNA, 15 bp, Homo sapiens
atgcctgtaatccta

SEQ ID NO: 1335581 - DNA, 15 bp, Homo sapiens
catgcctgtaatcct

SEQ ID NO: 1335582 - DNA, 15 bp, Homo sapiens
aaggctgggcgcggt

SEQ ID NO: 1335583 - DNA, 15 bp, Homo sapiens
taaggctgggcgcgg

SEQ ID NO: 1335584 - DNA, 15 bp, Homo sapiens
ataaggctgggcgcg

SEQ ID NO: 1335585 - DNA, 15 bp, Homo sapiens
tataaggctgggcgc

SEQ ID NO: 1335586 - DNA, 15 bp, Homo sapiens
ctataaggctgggcg

SEQ ID NO: 1335587 - DNA, 15 bp, Homo sapiens
gctataaggctgggc

SEQ ID NO: 1335588 - DNA, 15 bp, Homo sapiens
ggctataaggctggg

SEQ ID NO: 1335589 - DNA, 15 bp, Homo sapiens
cggctataaggctgg

SEQ ID NO: 1335590 - DNA, 15 bp, Homo sapiens
acggctataaggctg

SEQ ID NO: 1335591 - DNA, 15 bp, Homo sapiens
tacggctataaggct

SEQ ID NO: 1335592 - DNA, 15 bp, Homo sapiens
atacggctataaggc

SEQ ID NO: 1335593 - DNA, 15 bp, Homo sapiens
aatacggctataagg

SEQ ID NO: 1335594 - DNA, 15 bp, Homo sapiens
aaatacggctataag

SEQ ID NO: 1335595 - DNA, 15 bp, Homo sapiens
taaatacggctataa

SEQ ID NO: 1335596 - DNA, 15 bp, Homo sapiens
ataaatacggctata

SEQ ID NO: 1335597 - DNA, 15 bp, Homo sapiens
tataaatacggctat

SEQ ID NO: 1335598 - DNA, 15 bp, Homo sapiens
atataaatacggcta

SEQ ID NO: 1335599 - DNA, 15 bp, Homo sapiens
catataaatacggct

SEQ ID NO: 1335600 - DNA, 15 bp, Homo sapiens
acatataaatacggc

SEQ ID NO: 1335601 - DNA, 15 bp, Homo sapiens
tacatataaatacgg

SEQ ID NO: 1335602 - DNA, 15 bp, Homo sapiens
ctacatataaatacg

SEQ ID NO: 1335603 - DNA, 15 bp, Homo sapiens
tctacatataaatac

SEQ ID NO: 1335604 - DNA, 15 bp, Homo sapiens
atctacatataaata

SEQ ID NO: 1335605 - DNA, 15 bp, Homo sapiens
tatctacatataaat

SEQ ID NO: 1335606 - DNA, 15 bp, Homo sapiens
atatctacatataaa

SEQ ID NO: 1335607 - DNA, 15 bp, Homo sapiens
aatatctacatataa

SEQ ID NO: 1335608 - DNA, 15 bp, Homo sapiens
aaatatctacatata

SEQ ID NO: 1335609 - DNA, 15 bp, Homo sapiens
aaaatatctacatat

SEQ ID NO: 1335610 - DNA, 15 bp, Homo sapiens
aaaaatatctacata

SEQ ID NO: 1335611 - DNA, 15 bp, Homo sapiens
aaaaaatatctacat

SEQ ID NO: 1335612 - DNA, 15 bp, Homo sapiens
gaaaaaatatctaca

SEQ ID NO: 1335613 - DNA, 15 bp, Homo sapiens
agaaaaaatatctac

SEQ ID NO: 1335614 - DNA, 15 bp, Homo sapiens
aagaaaaaatatcta

SEQ ID NO: 1335615 - DNA, 15 bp, Homo sapiens
aaagaaaaaatatct

SEQ ID NO: 1335616 - DNA, 15 bp, Homo sapiens
aaaagaaaaaatatc

SEQ ID NO: 1335617 - DNA, 15 bp, Homo sapiens
gaaaaagaaaaaata

SEQ ID NO: 1335618 - DNA, 15 bp, Homo sapiens
agaaaaagaaaaaat

SEQ ID NO: 1335619 - DNA, 15 bp, Homo sapiens
tgaaaaaaaaaaaag

SEQ ID NO: 1335620 - DNA, 15 bp, Homo sapiens
ttgaaaaaaaaaaaa

SEQ ID NO: 1335621 - DNA, 15 bp, Homo sapiens
cttgaaaaaaaaaaa

SEQ ID NO: 1335622 - DNA, 15 bp, Homo sapiens
tcttgaaaaaaaaaa

SEQ ID NO: 1335623 - DNA, 15 bp, Homo sapiens
gtcttgaaaaaaaaa

SEQ ID NO: 1335624 - DNA, 15 bp, Homo sapiens
tgtcttgaaaaaaaa

SEQ ID NO: 1335625 - DNA, 15 bp, Homo sapiens
ctgtcttgaaaaaaa

SEQ ID NO: 1335626 - DNA, 15 bp, Homo sapiens
cctgtcttgaaaaaa

SEQ ID NO: 1335627 - DNA, 15 bp, Homo sapiens
ccctgtcttgaaaaa

SEQ ID NO: 1335628 - DNA, 15 bp, Homo sapiens
aaagagacataaaaa

SEQ ID NO: 1335629 - DNA, 15 bp, Homo sapiens
caaagagacataaaa

SEQ ID NO: 1335630 - DNA, 15 bp, Homo sapiens
ccaaagagacataaa

SEQ ID NO: 1335631 - DNA, 15 bp, Homo sapiens
cccaaagagacataa

SEQ ID NO: 1335632 - DNA, 15 bp, Homo sapiens
gcccaaagagacata

SEQ ID NO: 1335633 - DNA, 15 bp, Homo sapiens
ggcccaaagagacat

SEQ ID NO: 1335634 - DNA, 15 bp, Homo sapiens
aggcccaaagagaca

SEQ ID NO: 1335635 - DNA, 15 bp, Homo sapiens
taggcccaaagagac

SEQ ID NO: 1335636 - DNA, 15 bp, Homo sapiens
ttaggcccaaagaga

SEQ ID NO: 1335637 - DNA, 15 bp, Homo sapiens
attaggcccaaagag

SEQ ID NO: 1335638 - DNA, 15 bp, Homo sapiens
tattaggcccaaaga

SEQ ID NO: 1335639 - DNA, 15 bp, Homo sapiens
ttattaggcccaaag

SEQ ID NO: 1335640 - DNA, 15 bp, Homo sapiens
attattaggcccaaa

SEQ ID NO: 1335641 - DNA, 15 bp, Homo sapiens
aattattaggcccaa

SEQ ID NO: 1335642 - DNA, 15 bp, Homo sapiens
aaattattaggccca

SEQ ID NO: 1335643 - DNA, 15 bp, Homo sapiens
taaattattaggccc

SEQ ID NO: 1335644 - DNA, 15 bp, Homo sapiens
ttaaattattaggcc

SEQ ID NO: 1335645 - DNA, 15 bp, Homo sapiens
tttaaattattaggc

SEQ ID NO: 1335646 - DNA, 15 bp, Homo sapiens
ttttaaattattagg

SEQ ID NO: 1335647 - DNA, 15 bp, Homo sapiens
attttaaattattag

SEQ ID NO: 1335648 - DNA, 15 bp, Homo sapiens
cattttaaattatta

SEQ ID NO: 1335649 - DNA, 15 bp, Homo sapiens
tcattttaaattatt

SEQ ID NO: 1335650 - DNA, 15 bp, Homo sapiens
gtcattttaaattat

SEQ ID NO: 1335651 - DNA, 15 bp, Homo sapiens
agtcattttaaatta

SEQ ID NO: 1335652 - DNA, 15 bp, Homo sapiens
gagtcattttaaatt

SEQ ID NO: 1335653 - DNA, 15 bp, Homo sapiens
tgagtcattttaaat

SEQ ID NO: 1335654 - DNA, 15 bp, Homo sapiens
gtgagtcattttaaa

SEQ ID NO: 1335655 - DNA, 15 bp, Homo sapiens
tgtgagtcattttaa

SEQ ID NO: 1335656 - DNA, 15 bp, Homo sapiens
atgtgagtcatttta

SEQ ID NO: 1335657 - DNA, 15 bp, Homo sapiens
aatgtgagtcatttt

SEQ ID NO: 1335658 - DNA, 15 bp, Homo sapiens
gaatgtgagtcattt

SEQ ID NO: 1335659 - DNA, 15 bp, Homo sapiens
tgaatgtgagtcatt

SEQ ID NO: 1335660 - DNA, 15 bp, Homo sapiens
atgaatgtgagtcat

SEQ ID NO: 1335661 - DNA, 15 bp, Homo sapiens
gatgaatgtgagtca

SEQ ID NO: 1335662 - DNA, 15 bp, Homo sapiens
tgatgaatgtgagtc

SEQ ID NO: 1335663 - DNA, 15 bp, Homo sapiens
ctgatgaatgtgagt

SEQ ID NO: 1335664 - DNA, 15 bp, Homo sapiens
tctgatgaatgtgag

SEQ ID NO: 1335665 - DNA, 15 bp, Homo sapiens
atctgatgaatgtga

SEQ ID NO: 1335666 - DNA, 15 bp, Homo sapiens
tatctgatgaatgtg

SEQ ID NO: 1335667 - DNA, 15 bp, Homo sapiens
ttatctgatgaatgt

SEQ ID NO: 1335668 - DNA, 15 bp, Homo sapiens
tttatctgatgaatg

SEQ ID NO: 1335669 - DNA, 15 bp, Homo sapiens
ttttatctgatgaat

SEQ ID NO: 1335670 - DNA, 15 bp, Homo sapiens
tttttatctgatgaa

SEQ ID NO: 1335671 - DNA, 15 bp, Homo sapiens
atttttatctgatga

SEQ ID NO: 1335672 - DNA, 15 bp, Homo sapiens
tatttttatctgatg

SEQ ID NO: 1335673 - DNA, 15 bp, Homo sapiens
gtatttttatctgat

SEQ ID NO: 1335674 - DNA, 15 bp, Homo sapiens
agtatttttatctga

SEQ ID NO: 1335675 - DNA, 15 bp, Homo sapiens
aagtatttttatctg

SEQ ID NO: 1335676 - DNA, 15 bp, Homo sapiens
aaagtatttttatct

SEQ ID NO: 1335677 - DNA, 15 bp, Homo sapiens
aaaagtatttttatc

SEQ ID NO: 1335678 - DNA, 15 bp, Homo sapiens
gaaaagtatttttat

SEQ ID NO: 1335679 - DNA, 15 bp, Homo sapiens
agaaaagtattttta

SEQ ID NO: 1335680 - DNA, 15 bp, Homo sapiens
aagaaaagtattttt

SEQ ID NO: 1335681 - DNA, 15 bp, Homo sapiens
aaagaaaagtatttt

SEQ ID NO: 1335682 - DNA, 15 bp, Homo sapiens
aaaagaaaagtattt

SEQ ID NO: 1335683 - DNA, 15 bp, Homo sapiens
gaaaagaaaagtatt

SEQ ID NO: 1335684 - DNA, 15 bp, Homo sapiens
agaaaagaaaagtat

SEQ ID NO: 1335685 - DNA, 15 bp, Homo sapiens
gagaaaagaaaagta

SEQ ID NO: 1335686 - DNA, 15 bp, Homo sapiens
tgagaaaagaaaagt

SEQ ID NO: 1335687 - DNA, 15 bp, Homo sapiens
atgagaaaagaaaag

SEQ ID NO: 1335688 - DNA, 15 bp, Homo sapiens
tatgagaaaagaaaa

SEQ ID NO: 1335689 - DNA, 15 bp, Homo sapiens
ctatgagaaaagaaa

SEQ ID NO: 1335690 - DNA, 15 bp, Homo sapiens
cctatgagaaaagaa

SEQ ID NO: 1335691 - DNA, 15 bp, Homo sapiens
gcctatgagaaaaga

SEQ ID NO: 1335692 - DNA, 15 bp, Homo sapiens
tgcctatgagaaaag

SEQ ID NO: 1335693 - DNA, 15 bp, Homo sapiens
atgcctatgagaaaa

SEQ ID NO: 1335694 - DNA, 15 bp, Homo sapiens
tatgcctatgagaaa

SEQ ID NO: 1335695 - DNA, 15 bp, Homo sapiens
atatgcctatgagaa

SEQ ID NO: 1335696 - DNA, 15 bp, Homo sapiens
tatatgcctatgaga

SEQ ID NO: 1335697 - DNA, 15 bp, Homo sapiens
ctatatgcctatgag

SEQ ID NO: 1335698 - DNA, 15 bp, Homo sapiens
tctatatgcctatga

SEQ ID NO: 1335699 - DNA, 15 bp, Homo sapiens
ctctatatgcctatg

SEQ ID NO: 1335700 - DNA, 15 bp, Homo sapiens
cctctatatgcctat

SEQ ID NO: 1335701 - DNA, 15 bp, Homo sapiens
acctctatatgccta

SEQ ID NO: 1335702 - DNA, 15 bp, Homo sapiens
aacctctatatgcct

SEQ ID NO: 1335703 - DNA, 15 bp, Homo sapiens
aaacctctatatgcc

SEQ ID NO: 1335704 - DNA, 15 bp, Homo sapiens
taaacctctatatgc

SEQ ID NO: 1335705 - DNA, 15 bp, Homo sapiens
ttaaacctctatatg

SEQ ID NO: 1335706 - DNA, 15 bp, Homo sapiens
tttaaacctctatat

SEQ ID NO: 1335707 - DNA, 15 bp, Homo sapiens
ttttaaacctctata

SEQ ID NO: 1335708 - DNA, 15 bp, Homo sapiens
tttttaaacctctat

SEQ ID NO: 1335709 - DNA, 15 bp, Homo sapiens
ttttttaaacctcta

SEQ ID NO: 1335710 - DNA, 15 bp, Homo sapiens
attttttaaacctct

SEQ ID NO: 1335711 - DNA, 15 bp, Homo sapiens
tattttttaaacctc

SEQ ID NO: 1335712 - DNA, 15 bp, Homo sapiens
ttattttttaaacct

SEQ ID NO: 1335713 - DNA, 15 bp, Homo sapiens
attattttttaaacc

SEQ ID NO: 1335714 - DNA, 15 bp, Homo sapiens
tattattttttaaac

SEQ ID NO: 1335715 - DNA, 15 bp, Homo sapiens
ttattattttttaaa

SEQ ID NO: 1335716 - DNA, 15 bp, Homo sapiens
aattattattatttt

SEQ ID NO: 1335717 - DNA, 15 bp, Homo sapiens
caattattattattt

SEQ ID NO: 1335718 - DNA, 15 bp, Homo sapiens
ccaattattattatt

SEQ ID NO: 1335719 - DNA, 15 bp, Homo sapiens
gccaattattattat

SEQ ID NO: 1335720 - DNA, 15 bp, Homo sapiens
ggccaattattatta

SEQ ID NO: 1335721 - DNA, 15 bp, Homo sapiens
tggccaattattatt

SEQ ID NO: 1335722 - DNA, 15 bp, Homo sapiens
ctggccaattattat

SEQ ID NO: 1335723 - DNA, 15 bp, Homo sapiens
cctggccaattatta

SEQ ID NO: 1335724 - DNA, 15 bp, Homo sapiens
gcctggccaattatt

SEQ ID NO: 1335725 - DNA, 15 bp, Homo sapiens
tgcctggccaattat

SEQ ID NO: 1335726 - DNA, 15 bp, Homo sapiens
gtgcctggccaatta

SEQ ID NO: 1335727 - DNA, 15 bp, Homo sapiens
tgtgcctggccaatt

SEQ ID NO: 1335728 - DNA, 15 bp, Homo sapiens
ctgtgcctggccaat

SEQ ID NO: 1335729 - DNA, 15 bp, Homo sapiens
actgtgcctggccaa

SEQ ID NO: 1335730 - DNA, 15 bp, Homo sapiens
tcactgtgcctggcc

SEQ ID NO: 1335731 - DNA, 15 bp, Homo sapiens
tgtgagtcactgtgc

SEQ ID NO: 1335732 - DNA, 15 bp, Homo sapiens
gtgtgagtcactgtg

SEQ ID NO: 1335733 - DNA, 15 bp, Homo sapiens
taggtgtgagtcact

SEQ ID NO: 1335734 - DNA, 15 bp, Homo sapiens
ataggtgtgagtcac

SEQ ID NO: 1335735 - DNA, 15 bp, Homo sapiens
tataggtgtgagtca

SEQ ID NO: 1335736 - DNA, 15 bp, Homo sapiens
ttataggtgtgagtc

SEQ ID NO: 1335737 - DNA, 15 bp, Homo sapiens
attataggtgtgagt

SEQ ID NO: 1335738 - DNA, 15 bp, Homo sapiens
cattataggtgtgag

SEQ ID NO: 1335739 - DNA, 15 bp, Homo sapiens
gcattataggtgtga

SEQ ID NO: 1335740 - DNA, 15 bp, Homo sapiens
ggcattataggtgtg

SEQ ID NO: 1335741 - DNA, 15 bp, Homo sapiens
tggcattataggtgt

SEQ ID NO: 1335742 - DNA, 15 bp, Homo sapiens
ctggcattataggtg

SEQ ID NO: 1335743 - DNA, 15 bp, Homo sapiens
gctggcattataggt

SEQ ID NO: 1335744 - DNA, 15 bp, Homo sapiens
tgctggcattatagg

SEQ ID NO: 1335745 - DNA, 15 bp, Homo sapiens
gtgctggcattatag

SEQ ID NO: 1335746 - DNA, 15 bp, Homo sapiens
agtgctggcattata

SEQ ID NO: 1335747 - DNA, 15 bp, Homo sapiens
aagtgctggcattat

SEQ ID NO: 1335748 - DNA, 15 bp, Homo sapiens
gggtctcaaactcct

SEQ ID NO: 1335749 - DNA, 15 bp, Homo sapiens
cgggtctcaaactcc

SEQ ID NO: 1335750 - DNA, 15 bp, Homo sapiens
gcgggtctcaaactc

SEQ ID NO: 1335751 - DNA, 15 bp, Homo sapiens
ggcgggtctcaaact

SEQ ID NO: 1335752 - DNA, 15 bp, Homo sapiens
aggcgggtctcaaac

SEQ ID NO: 1335753 - DNA, 15 bp, Homo sapiens
caggcgggtctcaaa

SEQ ID NO: 1335754 - DNA, 15 bp, Homo sapiens
ccaggcgggtctcaa

SEQ ID NO: 1335755 - DNA, 15 bp, Homo sapiens
gccaggcgggtctca

SEQ ID NO: 1335756 - DNA, 15 bp, Homo sapiens
ggccaggcgggtctc

SEQ ID NO: 1335757 - DNA, 15 bp, Homo sapiens
tggccaggcgggtct

SEQ ID NO: 1335758 - DNA, 15 bp, Homo sapiens
ttggccaggcgggtc

SEQ ID NO: 1335759 - DNA, 15 bp, Homo sapiens
gttggccaggcgggt

SEQ ID NO: 1335760 - DNA, 15 bp, Homo sapiens
tgttggccaggcggg

SEQ ID NO: 1335761 - DNA, 15 bp, Homo sapiens
gtgttggccaggcgg

SEQ ID NO: 1335762 - DNA, 15 bp, Homo sapiens
cgtgttggccaggcg

SEQ ID NO: 1335763 - DNA, 15 bp, Homo sapiens
gccgtgttggccagg

SEQ ID NO: 1335764 - DNA, 15 bp, Homo sapiens
cgccgtgttggccag

SEQ ID NO: 1335765 - DNA, 15 bp, Homo sapiens
tcgccgtgttggcca

SEQ ID NO: 1335766 - DNA, 15 bp, Homo sapiens
ttcgccgtgttggcc

SEQ ID NO: 1335767 - DNA, 15 bp, Homo sapiens
tttcgccgtgttggc

SEQ ID NO: 1335768 - DNA, 15 bp, Homo sapiens
gtttcgccgtgttgg

SEQ ID NO: 1335769 - DNA, 15 bp, Homo sapiens
ggtttcgccgtgttg

SEQ ID NO: 1335770 - DNA, 15 bp, Homo sapiens
gggtttcgccgtgtt

SEQ ID NO: 1335771 - DNA, 15 bp, Homo sapiens
agggtttcgccgtgt

SEQ ID NO: 1335772 - DNA, 15 bp, Homo sapiens
cagggtttcgccgtg

SEQ ID NO: 1335773 - DNA, 15 bp, Homo sapiens
acagggtttcgccgt

SEQ ID NO: 1335774 - DNA, 15 bp, Homo sapiens
gacagggtttcgccg

SEQ ID NO: 1335775 - DNA, 15 bp, Homo sapiens
agacagggtttcgcc

SEQ ID NO: 1335776 - DNA, 15 bp, Homo sapiens
gagacagggtttcgc

SEQ ID NO: 1335777 - DNA, 15 bp, Homo sapiens
agagacagggtttcg

SEQ ID NO: 1335778 - DNA, 15 bp, Homo sapiens
ggctaattttcatat

SEQ ID NO: 1335779 - DNA, 15 bp, Homo sapiens
cggctaattttcata

SEQ ID NO: 1335780 - DNA, 15 bp, Homo sapiens
ccggctaattttcat

SEQ ID NO: 1335781 - DNA, 15 bp, Homo sapiens
cccggctaattttca

SEQ ID NO: 1335782 - DNA, 15 bp, Homo sapiens
gcccggctaattttc

SEQ ID NO: 1335783 - DNA, 15 bp, Homo sapiens
gtgccaccatgcccg

SEQ ID NO: 1335784 - DNA, 15 bp, Homo sapiens
ggtgtgtgccaccat

SEQ ID NO: 1335785 - DNA, 15 bp, Homo sapiens
aggtgtgtgccacca

SEQ ID NO: 1335786 - DNA, 15 bp, Homo sapiens
caggtgtgtgccacc

SEQ ID NO: 1335787 - DNA, 15 bp, Homo sapiens
acaggtgtgtgccac

SEQ ID NO: 1335788 - DNA, 15 bp, Homo sapiens
tacaggtgtgtgcca

SEQ ID NO: 1335789 - DNA, 15 bp, Homo sapiens
ctacaggtgtgtgcc

SEQ ID NO: 1335790 - DNA, 15 bp, Homo sapiens
actacaggtgtgtgc

SEQ ID NO: 1335791 - DNA, 15 bp, Homo sapiens
gactacaggtgtgtg

SEQ ID NO: 1335792 - DNA, 15 bp, Homo sapiens
ggactacaggtgtgt

SEQ ID NO: 1335793 - DNA, 15 bp, Homo sapiens
caatagctgggacta

SEQ ID NO: 1335794 - DNA, 15 bp, Homo sapiens
ccaatagctgggact

SEQ ID NO: 1335795 - DNA, 15 bp, Homo sapiens
cccaatagctgggac

SEQ ID NO: 1335796 - DNA, 15 bp, Homo sapiens
ccccaatagctggga

SEQ ID NO: 1335797 - DNA, 15 bp, Homo sapiens
tccccaatagctggg

SEQ ID NO: 1335798 - DNA, 15 bp, Homo sapiens
ctccccaatagctgg

SEQ ID NO: 1335799 - DNA, 15 bp, Homo sapiens
cctccccaatagctg

SEQ ID NO: 1335800 - DNA, 15 bp, Homo sapiens
gcctccccaatagct

SEQ ID NO: 1335801 - DNA, 15 bp, Homo sapiens
agcctccccaatagc

SEQ ID NO: 1335802 - DNA, 15 bp, Homo sapiens
cagcctccccaatag

SEQ ID NO: 1335803 - DNA, 15 bp, Homo sapiens
tcagcctccccaata

SEQ ID NO: 1335804 - DNA, 15 bp, Homo sapiens
ctcagcctccccaat

SEQ ID NO: 1335805 - DNA, 15 bp, Homo sapiens
cctcagcctccccaa

SEQ ID NO: 1335806 - DNA, 15 bp, Homo sapiens
acctcagcctcccca

SEQ ID NO: 1335807 - DNA, 15 bp, Homo sapiens
cacctcagcctcccc

SEQ ID NO: 1335808 - DNA, 15 bp, Homo sapiens
acaatcttggctcac

SEQ ID NO: 1335809 - DNA, 15 bp, Homo sapiens
cacaatcttggctca

SEQ ID NO: 1335810 - DNA, 15 bp, Homo sapiens
gcacaatcttggctc

SEQ ID NO: 1335811 - DNA, 15 bp, Homo sapiens
ggcacaatcttggct

SEQ ID NO: 1335812 - DNA, 15 bp, Homo sapiens
tggcacaatcttggc

SEQ ID NO: 1335813 - DNA, 15 bp, Homo sapiens
gtggcacaatcttgg

SEQ ID NO: 1335814 - DNA, 15 bp, Homo sapiens
agtggcacaatcttg

SEQ ID NO: 1335815 - DNA, 15 bp, Homo sapiens
cagtggcacaatctt

SEQ ID NO: 1335816 - DNA, 15 bp, Homo sapiens
ggagtctctctctgt

SEQ ID NO: 1335817 - DNA, 15 bp, Homo sapiens
tggagtctctctctg

SEQ ID NO: 1335818 - DNA, 15 bp, Homo sapiens
atggagtctctctct

SEQ ID NO: 1335819 - DNA, 15 bp, Homo sapiens
gatggagtctctctc

SEQ ID NO: 1335820 - DNA, 15 bp, Homo sapiens
agatggagtctctct

SEQ ID NO: 1335821 - DNA, 15 bp, Homo sapiens
gagatggagtctctc

SEQ ID NO: 1335822 - DNA, 15 bp, Homo sapiens
aattttttttgagat

SEQ ID NO: 1335823 - DNA, 15 bp, Homo sapiens
taaattttttttgag

SEQ ID NO: 1335824 - DNA, 15 bp, Homo sapiens
ttaaattttttttga

SEQ ID NO: 1335825 - DNA, 15 bp, Homo sapiens
attaaattttttttg

SEQ ID NO: 1335826 - DNA, 15 bp, Homo sapiens
aattaaatttttttt

SEQ ID NO: 1335827 - DNA, 15 bp, Homo sapiens
taattaaattttttt

SEQ ID NO: 1335828 - DNA, 15 bp, Homo sapiens
ttaattaaatttttt

SEQ ID NO: 1335829 - DNA, 15 bp, Homo sapiens
attaattaaattttt

SEQ ID NO: 1335830 - DNA, 15 bp, Homo sapiens
tattaattaaatttt

SEQ ID NO: 1335831 - DNA, 15 bp, Homo sapiens
ttattaattaaattt

SEQ ID NO: 1335832 - DNA, 15 bp, Homo sapiens
tttattaattaaatt

SEQ ID NO: 1335833 - DNA, 15 bp, Homo sapiens
ttttattaattaaat

SEQ ID NO: 1335834 - DNA, 15 bp, Homo sapiens
attttattaattaaa

SEQ ID NO: 1335835 - DNA, 15 bp, Homo sapiens
tattttattaattaa

SEQ ID NO: 1335836 - DNA, 15 bp, Homo sapiens
ttattttattaatta

SEQ ID NO: 1335837 - DNA, 15 bp, Homo sapiens
tttattttattaatt

SEQ ID NO: 1335838 - DNA, 15 bp, Homo sapiens
ttttattttattaat

SEQ ID NO: 1335839 - DNA, 15 bp, Homo sapiens
attttattttattaa

SEQ ID NO: 1335840 - DNA, 15 bp, Homo sapiens
tattttattttatta

SEQ ID NO: 1335841 - DNA, 15 bp, Homo sapiens
attattttattttat

SEQ ID NO: 1335842 - DNA, 15 bp, Homo sapiens
tattattttatttta

SEQ ID NO: 1335843 - DNA, 15 bp, Homo sapiens
ttattattttatttt

SEQ ID NO: 1335844 - DNA, 15 bp, Homo sapiens
attattattttattt

SEQ ID NO: 1335845 - DNA, 15 bp, Homo sapiens
tattattattttatt

SEQ ID NO: 1335846 - DNA, 15 bp, Homo sapiens
ttattattattttat

SEQ ID NO: 1335847 - DNA, 15 bp, Homo sapiens
tttattattatttta

SEQ ID NO: 1335848 - DNA, 15 bp, Homo sapiens
ctttattattatttt

SEQ ID NO: 1335849 - DNA, 15 bp, Homo sapiens
cctttattattattt

SEQ ID NO: 1335850 - DNA, 15 bp, Homo sapiens
ccctttattattatt

SEQ ID NO: 1335851 - DNA, 15 bp, Homo sapiens
tccctttattattat

SEQ ID NO: 1335852 - DNA, 15 bp, Homo sapiens
atccctttattatta

SEQ ID NO: 1335853 - DNA, 15 bp, Homo sapiens
tatccctttattatt

SEQ ID NO: 1335854 - DNA, 15 bp, Homo sapiens
atatccctttattat

SEQ ID NO: 1335855 - DNA, 15 bp, Homo sapiens
aatatccctttatta

SEQ ID NO: 1335856 - DNA, 15 bp, Homo sapiens
aaatatccctttatt

SEQ ID NO: 1335857 - DNA, 15 bp, Homo sapiens
taaatatccctttat

SEQ ID NO: 1335858 - DNA, 15 bp, Homo sapiens
ataaatatcccttta

SEQ ID NO: 1335859 - DNA, 15 bp, Homo sapiens
aataaatatcccttt

SEQ ID NO: 1335860 - DNA, 15 bp, Homo sapiens
taataaatatccctt

SEQ ID NO: 1335861 - DNA, 15 bp, Homo sapiens
ttaataaatatccct

SEQ ID NO: 1335862 - DNA, 15 bp, Homo sapiens
tttaataaatatccc

SEQ ID NO: 1335863 - DNA, 15 bp, Homo sapiens
atttaataaatatcc

SEQ ID NO: 1335864 - DNA, 15 bp, Homo sapiens
tatttaataaatatc

SEQ ID NO: 1335865 - DNA, 15 bp, Homo sapiens
ttatttaataaatat

SEQ ID NO: 1335866 - DNA, 15 bp, Homo sapiens
cttatttaataaata

SEQ ID NO: 1335867 - DNA, 15 bp, Homo sapiens
tcttatttaataaat

SEQ ID NO: 1335868 - DNA, 15 bp, Homo sapiens
ttcttatttaataaa

SEQ ID NO: 1335869 - DNA, 15 bp, Homo sapiens
tttcttatttaataa

SEQ ID NO: 1335870 - DNA, 15 bp, Homo sapiens
ctttcttatttaata

SEQ ID NO: 1335871 - DNA, 15 bp, Homo sapiens
cctttcttatttaat

SEQ ID NO: 1335872 - DNA, 15 bp, Homo sapiens
tcctttcttatttaa

SEQ ID NO: 1335873 - DNA, 15 bp, Homo sapiens
gtcctttcttattta

SEQ ID NO: 1335874 - DNA, 15 bp, Homo sapiens
tgtcctttcttattt

SEQ ID NO: 1335875 - DNA, 15 bp, Homo sapiens
ttgtcctttcttatt

SEQ ID NO: 1335876 - DNA, 15 bp, Homo sapiens
attgtcctttcttat

SEQ ID NO: 1335877 - DNA, 15 bp, Homo sapiens
tattgtcctttctta

SEQ ID NO: 1335878 - DNA, 15 bp, Homo sapiens
ttattgtcctttctt

SEQ ID NO: 1335879 - DNA, 15 bp, Homo sapiens
attattgtcctttct

SEQ ID NO: 1335880 - DNA, 15 bp, Homo sapiens
cattattgtcctttc

SEQ ID NO: 1335881 - DNA, 15 bp, Homo sapiens
gcattattgtccttt

SEQ ID NO: 1335882 - DNA, 15 bp, Homo sapiens
tgcattattgtcctt

SEQ ID NO: 1335883 - DNA, 15 bp, Homo sapiens
gtgcattattgtcct

SEQ ID NO: 1335884 - DNA, 15 bp, Homo sapiens
tgtgcattattgtcc

SEQ ID NO: 1335885 - DNA, 15 bp, Homo sapiens
gtgtgcattattgtc

SEQ ID NO: 1335886 - DNA, 15 bp, Homo sapiens
tgtgtgcattattgt

SEQ ID NO: 1335887 - DNA, 15 bp, Homo sapiens
atgtgtgcattattg

SEQ ID NO: 1335888 - DNA, 15 bp, Homo sapiens
aatgtgtgcattatt

SEQ ID NO: 1335889 - DNA, 15 bp, Homo sapiens
taatgtgtgcattat

SEQ ID NO: 1335890 - DNA, 15 bp, Homo sapiens
gtaatgtgtgcatta

SEQ ID NO: 1335891 - DNA, 15 bp, Homo sapiens
agtaatgtgtgcatt

SEQ ID NO: 1335892 - DNA, 15 bp, Homo sapiens
cagtaatgtgtgcat

SEQ ID NO: 1335893 - DNA, 15 bp, Homo sapiens
acagtaatgtgtgca

SEQ ID NO: 1335894 - DNA, 15 bp, Homo sapiens
cacagtaatgtgtgc

SEQ ID NO: 1335895 - DNA, 15 bp, Homo sapiens
gcacagtaatgtgtg

SEQ ID NO: 1335896 - DNA, 15 bp, Homo sapiens
tgcacagtaatgtgt

SEQ ID NO: 1335897 - DNA, 15 bp, Homo sapiens
ttgcacagtaatgtg

SEQ ID NO: 1335898 - DNA, 15 bp, Homo sapiens
gttgcacagtaatgt

SEQ ID NO: 1335899 - DNA, 15 bp, Homo sapiens
agttgcacagtaatg

SEQ ID NO: 1335900 - DNA, 15 bp, Homo sapiens
aagttgcacagtaat

SEQ ID NO: 1335901 - DNA, 15 bp, Homo sapiens
caagttgcacagtaa

SEQ ID NO: 1335902 - DNA, 15 bp, Homo sapiens
gcaagttgcacagta

SEQ ID NO: 1335903 - DNA, 15 bp, Homo sapiens
agcaagttgcacagt

SEQ ID NO: 1335904 - DNA, 15 bp, Homo sapiens
aagcaagttgcacag

SEQ ID NO: 1335905 - DNA, 15 bp, Homo sapiens
aaagcaagttgcaca

SEQ ID NO: 1335906 - DNA, 15 bp, Homo sapiens
aaaagcaagttgcac

SEQ ID NO: 1335907 - DNA, 15 bp, Homo sapiens
aaaaagcaagttgca

SEQ ID NO: 1335908 - DNA, 15 bp, Homo sapiens
aaaaaagcaagttgc

SEQ ID NO: 1335909 - DNA, 15 bp, Homo sapiens
gaaaaaagcaagttg

SEQ ID NO: 1335910 - DNA, 15 bp, Homo sapiens
tgaaaaaagcaagtt

SEQ ID NO: 1335911 - DNA, 15 bp, Homo sapiens
gtgaaaaaagcaagt

SEQ ID NO: 1335912 - DNA, 15 bp, Homo sapiens
agtgaaaaaagcaag

SEQ ID NO: 1335913 - DNA, 15 bp, Homo sapiens
gagtgaaaaaagcaa

SEQ ID NO: 1335914 - DNA, 15 bp, Homo sapiens
tgagtgaaaaaagca

SEQ ID NO: 1335915 - DNA, 15 bp, Homo sapiens
gtgagtgaaaaaagc

SEQ ID NO: 1335916 - DNA, 15 bp, Homo sapiens
tgtgagtgaaaaaag

SEQ ID NO: 1335917 - DNA, 15 bp, Homo sapiens
ctgtgagtgaaaaaa

SEQ ID NO: 1335918 - DNA, 15 bp, Homo sapiens
actgtgagtgaaaaa

SEQ ID NO: 1335919 - DNA, 15 bp, Homo sapiens
cactgtgagtgaaaa

SEQ ID NO: 1335920 - DNA, 15 bp, Homo sapiens
acactgtgagtgaaa

SEQ ID NO: 1335921 - DNA, 15 bp, Homo sapiens
aacactgtgagtgaa

SEQ ID NO: 1335922 - DNA, 15 bp, Homo sapiens
aaacactgtgagtga

SEQ ID NO: 1335923 - DNA, 15 bp, Homo sapiens
gaaacactgtgagtg

SEQ ID NO: 1335924 - DNA, 15 bp, Homo sapiens
tgaaacactgtgagt

SEQ ID NO: 1335925 - DNA, 15 bp, Homo sapiens
gtgaaacactgtgag

SEQ ID NO: 1335926 - DNA, 15 bp, Homo sapiens
tgtgaaacactgtga

SEQ ID NO: 1335927 - DNA, 15 bp, Homo sapiens
gtgtgaaacactgtg

SEQ ID NO: 1335928 - DNA, 15 bp, Homo sapiens
tgtgtgaaacactgt

SEQ ID NO: 1335929 - DNA, 15 bp, Homo sapiens
gtgtgtgaaacactg

SEQ ID NO: 1335930 - DNA, 15 bp, Homo sapiens
tgtgtgtgaaacact

SEQ ID NO: 1335931 - DNA, 15 bp, Homo sapiens
gtgtgtgtgaaacac

SEQ ID NO: 1335932 - DNA, 15 bp, Homo sapiens
agtgtgtgtgaaaca

SEQ ID NO: 1335933 - DNA, 15 bp, Homo sapiens
gagtgtgtgtgaaac

SEQ ID NO: 1335934 - DNA, 15 bp, Homo sapiens
ggagtgtgtgtgaaa

SEQ ID NO: 1335935 - DNA, 15 bp, Homo sapiens
aggagtgtgtgtgaa

SEQ ID NO: 1335936 - DNA, 15 bp, Homo sapiens
gaggagtgtgtgtga

SEQ ID NO: 1335937 - DNA, 15 bp, Homo sapiens
tgaggagtgtgtgtg

SEQ ID NO: 1335938 - DNA, 15 bp, Homo sapiens
ttgaggagtgtgtgt

SEQ ID NO: 1335939 - DNA, 15 bp, Homo sapiens
gttgaggagtgtgtg

SEQ ID NO: 1335940 - DNA, 15 bp, Homo sapiens
tgttgaggagtgtgt

SEQ ID NO: 1335941 - DNA, 15 bp, Homo sapiens
ttgttgaggagtgtg

SEQ ID NO: 1335942 - DNA, 15 bp, Homo sapiens
gttgttgaggagtgt

SEQ ID NO: 1335943 - DNA, 15 bp, Homo sapiens
cgttgttgaggagtg

SEQ ID NO: 1335944 - DNA, 15 bp, Homo sapiens
tcgttgttgaggagt

SEQ ID NO: 1335945 - DNA, 15 bp, Homo sapiens
gtcgttgttgaggag

SEQ ID NO: 1335946 - DNA, 15 bp, Homo sapiens
tgtcgttgttgagga

SEQ ID NO: 1335947 - DNA, 15 bp, Homo sapiens
ctgtcgttgttgagg

SEQ ID NO: 1335948 - DNA, 15 bp, Homo sapiens
actgtcgttgttgag

SEQ ID NO: 1335949 - DNA, 15 bp, Homo sapiens
aactgtcgttgttga

SEQ ID NO: 1335950 - DNA, 15 bp, Homo sapiens
taactgtcgttgttg

SEQ ID NO: 1335951 - DNA, 15 bp, Homo sapiens
gtaactgtcgttgtt

SEQ ID NO: 1335952 - DNA, 15 bp, Homo sapiens
tgtaactgtcgttgt

SEQ ID NO: 1335953 - DNA, 15 bp, Homo sapiens
ttgtaactgtcgttg

SEQ ID NO: 1335954 - DNA, 15 bp, Homo sapiens
tttgtaactgtcgtt

SEQ ID NO: 1335955 - DNA, 15 bp, Homo sapiens
gtttgtaactgtcgt

SEQ ID NO: 1335956 - DNA, 15 bp, Homo sapiens
ggtttgtaactgtcg

SEQ ID NO: 1335957 - DNA, 15 bp, Homo sapiens
gggtttgtaactgtc

SEQ ID NO: 1335958 - DNA, 15 bp, Homo sapiens
agggtttgtaactgt

SEQ ID NO: 1335959 - DNA, 15 bp, Homo sapiens
aagggtttgtaactg

SEQ ID NO: 1335960 - DNA, 15 bp, Homo sapiens
aaagggtttgtaact

SEQ ID NO: 1335961 - DNA, 15 bp, Homo sapiens
aaaagggtttgtaac

SEQ ID NO: 1335962 - DNA, 15 bp, Homo sapiens
taaaagggtttgtaa

SEQ ID NO: 1335963 - DNA, 15 bp, Homo sapiens
ataaaagggtttgta

SEQ ID NO: 1335964 - DNA, 15 bp, Homo sapiens
aataaaagggtttgt

SEQ ID NO: 1335965 - DNA, 15 bp, Homo sapiens
aaataaaagggtttg

SEQ ID NO: 1335966 - DNA, 15 bp, Homo sapiens
aaaataaaagggttt

SEQ ID NO: 1335967 - DNA, 15 bp, Homo sapiens
aaaaataaaagggtt

SEQ ID NO: 1335968 - DNA, 15 bp, Homo sapiens
aaaaaataaaagggt

SEQ ID NO: 1335969 - DNA, 15 bp, Homo sapiens
gaaaaaataaaaggg

SEQ ID NO: 1335970 - DNA, 15 bp, Homo sapiens
tgaaaaaataaaagg

SEQ ID NO: 1335971 - DNA, 15 bp, Homo sapiens
atgaaaaaataaaag

SEQ ID NO: 1335972 - DNA, 15 bp, Homo sapiens
aatgaaaaaataaaa

SEQ ID NO: 1335973 - DNA, 15 bp, Homo sapiens
aaatgaaaaaataaa

SEQ ID NO: 1335974 - DNA, 15 bp, Homo sapiens
aaaaatgaaaaaata

SEQ ID NO: 1335975 - DNA, 15 bp, Homo sapiens
aaaaaatgaaaaaat

SEQ ID NO: 1335976 - DNA, 15 bp, Homo sapiens
taaaaaatgaaaaaa

SEQ ID NO: 1335977 - DNA, 15 bp, Homo sapiens
ataaaaaatgaaaaa

SEQ ID NO: 1335978 - DNA, 15 bp, Homo sapiens
aataaaaaatgaaaa

SEQ ID NO: 1335979 - DNA, 15 bp, Homo sapiens
aaataaaaaatgaaa

SEQ ID NO: 1335980 - DNA, 15 bp, Homo sapiens
aaaataaaaaatgaa

SEQ ID NO: 1335981 - DNA, 15 bp, Homo sapiens
aaaaataaaaaatga

SEQ ID NO: 1335982 - DNA, 15 bp, Homo sapiens
aaaaaataaaaaatg

SEQ ID NO: 1335983 - DNA, 15 bp, Homo sapiens
ataaaaaaataaaaa

SEQ ID NO: 1335984 - DNA, 15 bp, Homo sapiens
aataaaaaaataaaa

SEQ ID NO: 1335985 - DNA, 15 bp, Homo sapiens
aaataaaaaaataaa

SEQ ID NO: 1335986 - DNA, 15 bp, Homo sapiens
aaaataaaaaaataa

SEQ ID NO: 1335987 - DNA, 15 bp, Homo sapiens
aaaaataaaaaaata

SEQ ID NO: 1335988 - DNA, 15 bp, Homo sapiens
aaaaaataaaaaaat

SEQ ID NO: 1335989 - DNA, 15 bp, Homo sapiens
aaaaaaataaaaaaa

SEQ ID NO: 1335990 - DNA, 15 bp, Homo sapiens
caaaaaaaataaaaa

SEQ ID NO: 1335991 - DNA, 15 bp, Homo sapiens
tcaaaaaaaataaaa

SEQ ID NO: 1335992 - DNA, 15 bp, Homo sapiens
ctcaaaaaaaataaa

SEQ ID NO: 1335993 - DNA, 15 bp, Homo sapiens
gtctcaaaaaaaata

SEQ ID NO: 1335994 - DNA, 15 bp, Homo sapiens
tgtctcaaaaaaaat

SEQ ID NO: 1335995 - DNA, 15 bp, Homo sapiens
tcctgggcaacagag

SEQ ID NO: 1335996 - DNA, 15 bp, Homo sapiens
atcctgggcaacaga

SEQ ID NO: 1335997 - DNA, 15 bp, Homo sapiens
catcctgggcaacag

SEQ ID NO: 1335998 - DNA, 15 bp, Homo sapiens
cccaagatcgcgcca

SEQ ID NO: 1335999 - DNA, 15 bp, Homo sapiens
acccaagatcgcgcc

SEQ ID NO: 1336000 - DNA, 15 bp, Homo sapiens
gacccaagatcgcgc

SEQ ID NO: 1336001 - DNA, 15 bp, Homo sapiens
tgacccaagatcgcg

SEQ ID NO: 1336002 - DNA, 15 bp, Homo sapiens
gtgacccaagatcgc

SEQ ID NO: 1336003 - DNA, 15 bp, Homo sapiens
agtgacccaagatcg

SEQ ID NO: 1336004 - DNA, 15 bp, Homo sapiens
cagtgacccaagatc

SEQ ID NO: 1336005 - DNA, 15 bp, Homo sapiens
gcagtgacccaagat

SEQ ID NO: 1336006 - DNA, 15 bp, Homo sapiens
tgcagtgacccaaga

SEQ ID NO: 1336007 - DNA, 15 bp, Homo sapiens
ttgcagtgacccaag

SEQ ID NO: 1336008 - DNA, 15 bp, Homo sapiens
gttgcagtgacccaa

SEQ ID NO: 1336009 - DNA, 15 bp, Homo sapiens
ggttgcagtgaccca

SEQ ID NO: 1336010 - DNA, 15 bp, Homo sapiens
aggttgcagtgaccc

SEQ ID NO: 1336011 - DNA, 15 bp, Homo sapiens
gaggttgcagtgacc

SEQ ID NO: 1336012 - DNA, 15 bp, Homo sapiens
ggaggttgcagtgac

SEQ ID NO: 1336013 - DNA, 15 bp, Homo sapiens
tgcttgaacccggga

SEQ ID NO: 1336014 - DNA, 15 bp, Homo sapiens
ttgcttgaacccggg

SEQ ID NO: 1336015 - DNA, 15 bp, Homo sapiens
attgcttgaacccgg

SEQ ID NO: 1336016 - DNA, 15 bp, Homo sapiens
aggctcctgtagtcc

SEQ ID NO: 1336017 - DNA, 15 bp, Homo sapiens
taggctcctgtagtc

SEQ ID NO: 1336018 - DNA, 15 bp, Homo sapiens
gtaggctcctgtagt

SEQ ID NO: 1336019 - DNA, 15 bp, Homo sapiens
ggtaggctcctgtag

SEQ ID NO: 1336020 - DNA, 15 bp, Homo sapiens
tggtaggctcctgta

SEQ ID NO: 1336021 - DNA, 15 bp, Homo sapiens
gtggtaggctcctgt

SEQ ID NO: 1336022 - DNA, 15 bp, Homo sapiens
ggtggtaggctcctg

SEQ ID NO: 1336023 - DNA, 15 bp, Homo sapiens
tggtggtaggctcct

SEQ ID NO: 1336024 - DNA, 15 bp, Homo sapiens
gtggtggtaggctcc

SEQ ID NO: 1336025 - DNA, 15 bp, Homo sapiens
cgtggtggtaggctc

SEQ ID NO: 1336026 - DNA, 15 bp, Homo sapiens
gcgtggtggtaggct

SEQ ID NO: 1336027 - DNA, 15 bp, Homo sapiens
ggcgtggtggtaggc

SEQ ID NO: 1336028 - DNA, 15 bp, Homo sapiens
gggcgtggtggtagg

SEQ ID NO: 1336029 - DNA, 15 bp, Homo sapiens
cgggcgtggtggtag

SEQ ID NO: 1336030 - DNA, 15 bp, Homo sapiens
caaaaaaattagccg

SEQ ID NO: 1336031 - DNA, 15 bp, Homo sapiens
ccgtctctattaaaa

SEQ ID NO: 1336032 - DNA, 15 bp, Homo sapiens
cccgtctctattaaa

SEQ ID NO: 1336033 - DNA, 15 bp, Homo sapiens
ccccgtctctattaa

SEQ ID NO: 1336034 - DNA, 15 bp, Homo sapiens
accccgtctctatta

SEQ ID NO: 1336035 - DNA, 15 bp, Homo sapiens
aaccccgtctctatt

SEQ ID NO: 1336036 - DNA, 15 bp, Homo sapiens
aaaccccgtctctat

SEQ ID NO: 1336037 - DNA, 15 bp, Homo sapiens
actaacacagtgaaa

SEQ ID NO: 1336038 - DNA, 15 bp, Homo sapiens
gactaacacagtgaa

SEQ ID NO: 1336039 - DNA, 15 bp, Homo sapiens
tgactaacacagtga

SEQ ID NO: 1336040 - DNA, 15 bp, Homo sapiens
ctgactaacacagtg

SEQ ID NO: 1336041 - DNA, 15 bp, Homo sapiens
cctgactaacacagt

SEQ ID NO: 1336042 - DNA, 15 bp, Homo sapiens
tcctgactaacacag

SEQ ID NO: 1336043 - DNA, 15 bp, Homo sapiens
atcctgactaacaca

SEQ ID NO: 1336044 - DNA, 15 bp, Homo sapiens
catcctgactaacac

SEQ ID NO: 1336045 - DNA, 15 bp, Homo sapiens
ccatcctgactaaca

SEQ ID NO: 1336046 - DNA, 15 bp, Homo sapiens
accatcctgactaac

SEQ ID NO: 1336047 - DNA, 15 bp, Homo sapiens
gaccatcctgactaa

SEQ ID NO: 1336048 - DNA, 15 bp, Homo sapiens
agaccatcctgacta

SEQ ID NO: 1336049 - DNA, 15 bp, Homo sapiens
aagaccatcctgact

SEQ ID NO: 1336050 - DNA, 15 bp, Homo sapiens
caagaccatcctgac

SEQ ID NO: 1336051 - DNA, 15 bp, Homo sapiens
tcaagaccatcctga

SEQ ID NO: 1336052 - DNA, 15 bp, Homo sapiens
cgggaggctgaggcg

SEQ ID NO: 1336053 - DNA, 15 bp, Homo sapiens
ttcgggaggctgagg

SEQ ID NO: 1336054 - DNA, 15 bp, Homo sapiens
cttcgggaggctgag

SEQ ID NO: 1336055 - DNA, 15 bp, Homo sapiens
acttcgggaggctga

SEQ ID NO: 1336056 - DNA, 15 bp, Homo sapiens
cacttcgggaggctg

SEQ ID NO: 1336057 - DNA, 15 bp, Homo sapiens
gcacttcgggaggct

SEQ ID NO: 1336058 - DNA, 15 bp, Homo sapiens
ggcagtggctcacac

SEQ ID NO: 1336059 - DNA, 15 bp, Homo sapiens
gggcagtggctcaca

SEQ ID NO: 1336060 - DNA, 15 bp, Homo sapiens
ggggcagtggctcac

SEQ ID NO: 1336061 - DNA, 15 bp, Homo sapiens
gggggcagtggctca

SEQ ID NO: 1336062 - DNA, 15 bp, Homo sapiens
cgggggcagtggctc

SEQ ID NO: 1336063 - DNA, 15 bp, Homo sapiens
ccgggggcagtggct

SEQ ID NO: 1336064 - DNA, 15 bp, Homo sapiens
gccgggggcagtggc

SEQ ID NO: 1336065 - DNA, 15 bp, Homo sapiens
ggccgggggcagtgg

SEQ ID NO: 1336066 - DNA, 15 bp, Homo sapiens
aggccgggggcagtg

SEQ ID NO: 1336067 - DNA, 15 bp, Homo sapiens
taggccgggggcagt

SEQ ID NO: 1336068 - DNA, 15 bp, Homo sapiens
ttaggccgggggcag

SEQ ID NO: 1336069 - DNA, 15 bp, Homo sapiens
attaggccgggggca

SEQ ID NO: 1336070 - DNA, 15 bp, Homo sapiens
aattaggccgggggc

SEQ ID NO: 1336071 - DNA, 15 bp, Homo sapiens
aaattaggccggggg

SEQ ID NO: 1336072 - DNA, 15 bp, Homo sapiens
aaaattaggccgggg

SEQ ID NO: 1336073 - DNA, 15 bp, Homo sapiens
aaaaattaggccggg

SEQ ID NO: 1336074 - DNA, 15 bp, Homo sapiens
caaaaattaggccgg

SEQ ID NO: 1336075 - DNA, 15 bp, Homo sapiens
acaaaaattaggccg

SEQ ID NO: 1336076 - DNA, 15 bp, Homo sapiens
tacaaaaattaggcc

SEQ ID NO: 1336077 - DNA, 15 bp, Homo sapiens
cccaacatggagaaa

SEQ ID NO: 1336078 - DNA, 15 bp, Homo sapiens
gcccaacatggagaa

SEQ ID NO: 1336079 - DNA, 15 bp, Homo sapiens
tgcccaacatggaga

SEQ ID NO: 1336080 - DNA, 15 bp, Homo sapiens
ctgcccaacatggag

SEQ ID NO: 1336081 - DNA, 15 bp, Homo sapiens
cctgcccaacatgga

SEQ ID NO: 1336082 - DNA, 15 bp, Homo sapiens
agcctgcccaacatg

SEQ ID NO: 1336083 - DNA, 15 bp, Homo sapiens
cagcctgcccaacat

SEQ ID NO: 1336084 - DNA, 15 bp, Homo sapiens
ccagcctgcccaaca

SEQ ID NO: 1336085 - DNA, 15 bp, Homo sapiens
accagcctgcccaac

SEQ ID NO: 1336086 - DNA, 15 bp, Homo sapiens
gaccagcctgcccaa

SEQ ID NO: 1336087 - DNA, 15 bp, Homo sapiens
agaccagcctgccca

SEQ ID NO: 1336088 - DNA, 15 bp, Homo sapiens
gagaccagcctgccc

SEQ ID NO: 1336089 - DNA, 15 bp, Homo sapiens
tgagaccagcctgcc

SEQ ID NO: 1336090 - DNA, 15 bp, Homo sapiens
ttgagaccagcctgc

SEQ ID NO: 1336091 - DNA, 15 bp, Homo sapiens
cagagtttgagacca

SEQ ID NO: 1336092 - DNA, 15 bp, Homo sapiens
tcagagtttgagacc

SEQ ID NO: 1336093 - DNA, 15 bp, Homo sapiens
gtcagagtttgagac

SEQ ID NO: 1336094 - DNA, 15 bp, Homo sapiens
ggtcagagtttgaga

SEQ ID NO: 1336095 - DNA, 15 bp, Homo sapiens
aggtcagagtttgag

SEQ ID NO: 1336096 - DNA, 15 bp, Homo sapiens
gaggtcagagtttga

SEQ ID NO: 1336097 - DNA, 15 bp, Homo sapiens
tgaggtcagagtttg

SEQ ID NO: 1336098 - DNA, 15 bp, Homo sapiens
ttgaggtcagagttt

SEQ ID NO: 1336099 - DNA, 15 bp, Homo sapiens
cttgaggtcagagtt

SEQ ID NO: 1336100 - DNA, 15 bp, Homo sapiens
acttgaggtcagagt

SEQ ID NO: 1336101 - DNA, 15 bp, Homo sapiens
cacttgaggtcagag

SEQ ID NO: 1336102 - DNA, 15 bp, Homo sapiens
tcacttgaggtcaga

SEQ ID NO: 1336103 - DNA, 15 bp, Homo sapiens
cgatcacttgaggtc

SEQ ID NO: 1336104 - DNA, 15 bp, Homo sapiens
tcgatcacttgaggt

SEQ ID NO: 1336105 - DNA, 15 bp, Homo sapiens
gtcgatcacttgagg

SEQ ID NO: 1336106 - DNA, 15 bp, Homo sapiens
ggtcgatcacttgag

SEQ ID NO: 1336107 - DNA, 15 bp, Homo sapiens
aggtcgatcacttga

SEQ ID NO: 1336108 - DNA, 15 bp, Homo sapiens
caggtcgatcacttg

SEQ ID NO: 1336109 - DNA, 15 bp, Homo sapiens
gcaggtcgatcactt

SEQ ID NO: 1336110 - DNA, 15 bp, Homo sapiens
agcaggtcgatcact

SEQ ID NO: 1336111 - DNA, 15 bp, Homo sapiens
aagcaggtcgatcac

SEQ ID NO: 1336112 - DNA, 15 bp, Homo sapiens
gaagcaggtcgatca

SEQ ID NO: 1336113 - DNA, 15 bp, Homo sapiens
agaagcaggtcgatc

SEQ ID NO: 1336114 - DNA, 15 bp, Homo sapiens
cagaagcaggtcgat

SEQ ID NO: 1336115 - DNA, 15 bp, Homo sapiens
gcagaagcaggtcga

SEQ ID NO: 1336116 - DNA, 15 bp, Homo sapiens
ggcagaagcaggtcg

SEQ ID NO: 1336117 - DNA, 15 bp, Homo sapiens
aggcagaagcaggtc

SEQ ID NO: 1336118 - DNA, 15 bp, Homo sapiens
gaggcagaagcaggt

SEQ ID NO: 1336119 - DNA, 15 bp, Homo sapiens
gagcattttgggagg

SEQ ID NO: 1336120 - DNA, 15 bp, Homo sapiens
cgagcattttgggag

SEQ ID NO: 1336121 - DNA, 15 bp, Homo sapiens
ccgagcattttggga

SEQ ID NO: 1336122 - DNA, 15 bp, Homo sapiens
tccgagcattttggg

SEQ ID NO: 1336123 - DNA, 15 bp, Homo sapiens
atccgagcattttgg

SEQ ID NO: 1336124 - DNA, 15 bp, Homo sapiens
aatccgagcattttg

SEQ ID NO: 1336125 - DNA, 15 bp, Homo sapiens
taatccgagcatttt

SEQ ID NO: 1336126 - DNA, 15 bp, Homo sapiens
ataatccgagcattt

SEQ ID NO: 1336127 - DNA, 15 bp, Homo sapiens
tataatccgagcatt

SEQ ID NO: 1336128 - DNA, 15 bp, Homo sapiens
atataatccgagcat

SEQ ID NO: 1336129 - DNA, 15 bp, Homo sapiens
tatataatccgagca

SEQ ID NO: 1336130 - DNA, 15 bp, Homo sapiens
gtatataatccgagc

SEQ ID NO: 1336131 - DNA, 15 bp, Homo sapiens
cgtatataatccgag

SEQ ID NO: 1336132 - DNA, 15 bp, Homo sapiens
acgtatataatccga

SEQ ID NO: 1336133 - DNA, 15 bp, Homo sapiens
tacgtatataatccg

SEQ ID NO: 1336134 - DNA, 15 bp, Homo sapiens
atacgtatataatcc

SEQ ID NO: 1336135 - DNA, 15 bp, Homo sapiens
tatacgtatataatc

SEQ ID NO: 1336136 - DNA, 15 bp, Homo sapiens
ttatacgtatataat

SEQ ID NO: 1336137 - DNA, 15 bp, Homo sapiens
attatacgtatataa

SEQ ID NO: 1336138 - DNA, 15 bp, Homo sapiens
aattatacgtatata

SEQ ID NO: 1336139 - DNA, 15 bp, Homo sapiens
aaattatacgtatat

SEQ ID NO: 1336140 - DNA, 15 bp, Homo sapiens
taaattatacgtata

SEQ ID NO: 1336141 - DNA, 15 bp, Homo sapiens
ttaaattatacgtat

SEQ ID NO: 1336142 - DNA, 15 bp, Homo sapiens
tttaaattatacgta

SEQ ID NO: 1336143 - DNA, 15 bp, Homo sapiens
atttaaattatacgt

SEQ ID NO: 1336144 - DNA, 15 bp, Homo sapiens
tatttaaattatacg

SEQ ID NO: 1336145 - DNA, 15 bp, Homo sapiens
ttatttaaattatac

SEQ ID NO: 1336146 - DNA, 15 bp, Homo sapiens
tttatttaaattata

SEQ ID NO: 1336147 - DNA, 15 bp, Homo sapiens
atttatttaaattat

SEQ ID NO: 1336148 - DNA, 15 bp, Homo sapiens
catttatttaaatta

SEQ ID NO: 1336149 - DNA, 15 bp, Homo sapiens
acatttatttaaatt

SEQ ID NO: 1336150 - DNA, 15 bp, Homo sapiens
aacatttatttaaat

SEQ ID NO: 1336151 - DNA, 15 bp, Homo sapiens
aaacatttatttaaa

SEQ ID NO: 1336152 - DNA, 15 bp, Homo sapiens
gaaacatttatttaa

SEQ ID NO: 1336153 - DNA, 15 bp, Homo sapiens
ggaaacatttattta

SEQ ID NO: 1336154 - DNA, 15 bp, Homo sapiens
tggaaacatttattt

SEQ ID NO: 1336155 - DNA, 15 bp, Homo sapiens
ctggaaacatttatt

SEQ ID NO: 1336156 - DNA, 15 bp, Homo sapiens
tctggaaacatttat

SEQ ID NO: 1336157 - DNA, 15 bp, Homo sapiens
atctggaaacattta

SEQ ID NO: 1336158 - DNA, 15 bp, Homo sapiens
aatctggaaacattt

SEQ ID NO: 1336159 - DNA, 15 bp, Homo sapiens
taatctggaaacatt

SEQ ID NO: 1336160 - DNA, 15 bp, Homo sapiens
gtaatctggaaacat

SEQ ID NO: 1336161 - DNA, 15 bp, Homo sapiens
agtaatctggaaaca

SEQ ID NO: 1336162 - DNA, 15 bp, Homo sapiens
aagtaatctggaaac

SEQ ID NO: 1336163 - DNA, 15 bp, Homo sapiens
aaagtaatctggaaa

SEQ ID NO: 1336164 - DNA, 15 bp, Homo sapiens
gaaagtaatctggaa

SEQ ID NO: 1336165 - DNA, 15 bp, Homo sapiens
ggaaagtaatctgga

SEQ ID NO: 1336166 - DNA, 15 bp, Homo sapiens
tggaaagtaatctgg

SEQ ID NO: 1336167 - DNA, 15 bp, Homo sapiens
ttggaaagtaatctg

SEQ ID NO: 1336168 - DNA, 15 bp, Homo sapiens
gttggaaagtaatct

SEQ ID NO: 1336169 - DNA, 15 bp, Homo sapiens
tgttggaaagtaatc

SEQ ID NO: 1336170 - DNA, 15 bp, Homo sapiens
atgttggaaagtaat

SEQ ID NO: 1336171 - DNA, 15 bp, Homo sapiens
aatgttggaaagtaa

SEQ ID NO: 1336172 - DNA, 15 bp, Homo sapiens
taatgttggaaagta

SEQ ID NO: 1336173 - DNA, 15 bp, Homo sapiens
ataatgttggaaagt

SEQ ID NO: 1336174 - DNA, 15 bp, Homo sapiens
cataatgttggaaag

SEQ ID NO: 1336175 - DNA, 15 bp, Homo sapiens
acataatgttggaaa

SEQ ID NO: 1336176 - DNA, 15 bp, Homo sapiens
gacataatgttggaa

SEQ ID NO: 1336177 - DNA, 15 bp, Homo sapiens
tgacataatgttgga

SEQ ID NO: 1336178 - DNA, 15 bp, Homo sapiens
ttgacataatgttgg

SEQ ID NO: 1336179 - DNA, 15 bp, Homo sapiens
gttgacataatgttg

SEQ ID NO: 1336180 - DNA, 15 bp, Homo sapiens
tgttgacataatgtt

SEQ ID NO: 1336181 - DNA, 15 bp, Homo sapiens
ttgttgacataatgt

SEQ ID NO: 1336182 - DNA, 15 bp, Homo sapiens
attgttgacataatg

SEQ ID NO: 1336183 - DNA, 15 bp, Homo sapiens
cattgttgacataat

SEQ ID NO: 1336184 - DNA, 15 bp, Homo sapiens
acattgttgacataa

SEQ ID NO: 1336185 - DNA, 15 bp, Homo sapiens
tacattgttgacata

SEQ ID NO: 1336186 - DNA, 15 bp, Homo sapiens
atacattgttgacat

SEQ ID NO: 1336187 - DNA, 15 bp, Homo sapiens
gatacattgttgaca

SEQ ID NO: 1336188 - DNA, 15 bp, Homo sapiens
tgatacattgttgac

SEQ ID NO: 1336189 - DNA, 15 bp, Homo sapiens
ctgatacattgttga

SEQ ID NO: 1336190 - DNA, 15 bp, Homo sapiens
actgatacattgttg

SEQ ID NO: 1336191 - DNA, 15 bp, Homo sapiens
aactgatacattgtt

SEQ ID NO: 1336192 - DNA, 15 bp, Homo sapiens
aaactgatacattgt

SEQ ID NO: 1336193 - DNA, 15 bp, Homo sapiens
gaaactgatacattg

SEQ ID NO: 1336194 - DNA, 15 bp, Homo sapiens
agaaactgatacatt

SEQ ID NO: 1336195 - DNA, 15 bp, Homo sapiens
gagaaactgatacat

SEQ ID NO: 1336196 - DNA, 15 bp, Homo sapiens
ggagaaactgataca

SEQ ID NO: 1336197 - DNA, 15 bp, Homo sapiens
tggagaaactgatac

SEQ ID NO: 1336198 - DNA, 15 bp, Homo sapiens
atggagaaactgata

SEQ ID NO: 1336199 - DNA, 15 bp, Homo sapiens
tatggagaaactgat

SEQ ID NO: 1336200 - DNA, 15 bp, Homo sapiens
atatggagaaactga

SEQ ID NO: 1336201 - DNA, 15 bp, Homo sapiens
aatatggagaaactg

SEQ ID NO: 1336202 - DNA, 15 bp, Homo sapiens
gaatatggagaaact

SEQ ID NO: 1336203 - DNA, 15 bp, Homo sapiens
agaatatggagaaac

SEQ ID NO: 1336204 - DNA, 15 bp, Homo sapiens
cagaatatggagaaa

SEQ ID NO: 1336205 - DNA, 15 bp, Homo sapiens
gcagaatatggagaa

SEQ ID NO: 1336206 - DNA, 15 bp, Homo sapiens
agcagaatatggaga

SEQ ID NO: 1336207 - DNA, 15 bp, Homo sapiens
aagcagaatatggag

SEQ ID NO: 1336208 - DNA, 15 bp, Homo sapiens
taagcagaatatgga

SEQ ID NO: 1336209 - DNA, 15 bp, Homo sapiens
ctaagcagaatatgg

SEQ ID NO: 1336210 - DNA, 15 bp, Homo sapiens
gctaagcagaatatg

SEQ ID NO: 1336211 - DNA, 15 bp, Homo sapiens
tgctaagcagaatat

SEQ ID NO: 1336212 - DNA, 15 bp, Homo sapiens
ttgctaagcagaata

SEQ ID NO: 1336213 - DNA, 15 bp, Homo sapiens
gttgctaagcagaat

SEQ ID NO: 1336214 - DNA, 15 bp, Homo sapiens
tgttgctaagcagaa

SEQ ID NO: 1336215 - DNA, 15 bp, Homo sapiens
ctgttgctaagcaga

SEQ ID NO: 1336216 - DNA, 15 bp, Homo sapiens
tctgttgctaagcag

SEQ ID NO: 1336217 - DNA, 15 bp, Homo sapiens
gtctgttgctaagca

SEQ ID NO: 1336218 - DNA, 15 bp, Homo sapiens
tgtctgttgctaagc

SEQ ID NO: 1336219 - DNA, 15 bp, Homo sapiens
ctgtctgttgctaag

SEQ ID NO: 1336220 - DNA, 15 bp, Homo sapiens
actgtctgttgctaa

SEQ ID NO: 1336221 - DNA, 15 bp, Homo sapiens
cactgtctgttgcta

SEQ ID NO: 1336222 - DNA, 15 bp, Homo sapiens
tcactgtctgttgct

SEQ ID NO: 1336223 - DNA, 15 bp, Homo sapiens
gtcactgtctgttgc

SEQ ID NO: 1336224 - DNA, 15 bp, Homo sapiens
tgtcactgtctgttg

SEQ ID NO: 1336225 - DNA, 15 bp, Homo sapiens
ttgtcactgtctgtt

SEQ ID NO: 1336226 - DNA, 15 bp, Homo sapiens
attgtcactgtctgt

SEQ ID NO: 1336227 - DNA, 15 bp, Homo sapiens
tattgtcactgtctg

SEQ ID NO: 1336228 - DNA, 15 bp, Homo sapiens
ttattgtcactgtct

SEQ ID NO: 1336229 - DNA, 15 bp, Homo sapiens
tttattgtcactgtc

SEQ ID NO: 1336230 - DNA, 15 bp, Homo sapiens
ttttattgtcactgt

SEQ ID NO: 1336231 - DNA, 15 bp, Homo sapiens
tttttattgtcactg

SEQ ID NO: 1336232 - DNA, 15 bp, Homo sapiens
gtttttattgtcact

SEQ ID NO: 1336233 - DNA, 15 bp, Homo sapiens
agtttttattgtcac

SEQ ID NO: 1336234 - DNA, 15 bp, Homo sapiens
aagtttttattgtca

SEQ ID NO: 1336235 - DNA, 15 bp, Homo sapiens
aaagtttttattgtc

SEQ ID NO: 1336236 - DNA, 15 bp, Homo sapiens
aaaagtttttattgt

SEQ ID NO: 1336237 - DNA, 15 bp, Homo sapiens
aaaaagtttttattg

SEQ ID NO: 1336238 - DNA, 15 bp, Homo sapiens
caaaaggaaaaaaaa

SEQ ID NO: 1336239 - DNA, 15 bp, Homo sapiens
gcaaaaggaaaaaaa

SEQ ID NO: 1336240 - DNA, 15 bp, Homo sapiens
ggcaaaaggaaaaaa

SEQ ID NO: 1336241 - DNA, 15 bp, Homo sapiens
aggcaaaaggaaaaa

SEQ ID NO: 1336242 - DNA, 15 bp, Homo sapiens
taggcaaaaggaaaa

SEQ ID NO: 1336243 - DNA, 15 bp, Homo sapiens
ataggcaaaaggaaa

SEQ ID NO: 1336244 - DNA, 15 bp, Homo sapiens
aataggcaaaaggaa

SEQ ID NO: 1336245 - DNA, 15 bp, Homo sapiens
aaataggcaaaagga

SEQ ID NO: 1336246 - DNA, 15 bp, Homo sapiens
caaataggcaaaagg

SEQ ID NO: 1336247 - DNA, 15 bp, Homo sapiens
tcaaataggcaaaag

SEQ ID NO: 1336248 - DNA, 15 bp, Homo sapiens
ctcaaataggcaaaa

SEQ ID NO: 1336249 - DNA, 15 bp, Homo sapiens
cctcaaataggcaaa

SEQ ID NO: 1336250 - DNA, 15 bp, Homo sapiens
ccctcaaataggcaa

SEQ ID NO: 1336251 - DNA, 15 bp, Homo sapiens
cccctcaaataggca

SEQ ID NO: 1336252 - DNA, 15 bp, Homo sapiens
acccctcaaataggc

SEQ ID NO: 1336253 - DNA, 15 bp, Homo sapiens
cacccctcaaatagg

SEQ ID NO: 1336254 - DNA, 15 bp, Homo sapiens
tcacccctcaaatag

SEQ ID NO: 1336255 - DNA, 15 bp, Homo sapiens
ttcacccctcaaata

SEQ ID NO: 1336256 - DNA, 15 bp, Homo sapiens
tttcacccctcaaat

SEQ ID NO: 1336257 - DNA, 15 bp, Homo sapiens
ttttcacccctcaaa

SEQ ID NO: 1336258 - DNA, 15 bp, Homo sapiens
cttttcacccctcaa

SEQ ID NO: 1336259 - DNA, 15 bp, Homo sapiens
acttttcacccctca

SEQ ID NO: 1336260 - DNA, 15 bp, Homo sapiens
tacttttcacccctc

SEQ ID NO: 1336261 - DNA, 15 bp, Homo sapiens
ttacttttcacccct

SEQ ID NO: 1336262 - DNA, 15 bp, Homo sapiens
attacttttcacccc

SEQ ID NO: 1336263 - DNA, 15 bp, Homo sapiens
tattacttttcaccc

SEQ ID NO: 1336264 - DNA, 15 bp, Homo sapiens
gtattacttttcacc

SEQ ID NO: 1336265 - DNA, 15 bp, Homo sapiens
ggtattacttttcac

SEQ ID NO: 1336266 - DNA, 15 bp, Homo sapiens
aggtattacttttca

SEQ ID NO: 1336267 - DNA, 15 bp, Homo sapiens
aaggtattacttttc

SEQ ID NO: 1336268 - DNA, 15 bp, Homo sapiens
caaggtattactttt

SEQ ID NO: 1336269 - DNA, 15 bp, Homo sapiens
ccaaggtattacttt

SEQ ID NO: 1336270 - DNA, 15 bp, Homo sapiens
accaaggtattactt

SEQ ID NO: 1336271 - DNA, 15 bp, Homo sapiens
aaccaaggtattact

SEQ ID NO: 1336272 - DNA, 15 bp, Homo sapiens
aaaccaaggtattac

SEQ ID NO: 1336273 - DNA, 15 bp, Homo sapiens
aaaaccaaggtatta

SEQ ID NO: 1336274 - DNA, 15 bp, Homo sapiens
aaaaaccaaggtatt

SEQ ID NO: 1336275 - DNA, 15 bp, Homo sapiens
aaaaaaccaaggtat

SEQ ID NO: 1336276 - DNA, 15 bp, Homo sapiens
caaaaaaccaaggta

SEQ ID NO: 1336277 - DNA, 15 bp, Homo sapiens
acaaaaaaccaaggt

SEQ ID NO: 1336278 - DNA, 15 bp, Homo sapiens
aacaaaaaaccaagg

SEQ ID NO: 1336279 - DNA, 15 bp, Homo sapiens
caacaaaaaaccaag

SEQ ID NO: 1336280 - DNA, 15 bp, Homo sapiens
acaacaaaaaaccaa

SEQ ID NO: 1336281 - DNA, 15 bp, Homo sapiens
aacaacaaaaaacca

SEQ ID NO: 1336282 - DNA, 15 bp, Homo sapiens
aaaaacaaacaacaa

SEQ ID NO: 1336283 - DNA, 15 bp, Homo sapiens
aaaaaaacaaacaac

SEQ ID NO: 1336284 - DNA, 15 bp, Homo sapiens
caaaaaaaaaaacaa

SEQ ID NO: 1336285 - DNA, 15 bp, Homo sapiens
ccaaaaaaaaaaaca

SEQ ID NO: 1336286 - DNA, 15 bp, Homo sapiens
accaaaaaaaaaaac

SEQ ID NO: 1336287 - DNA, 15 bp, Homo sapiens
caccaaaaaaaaaaa

SEQ ID NO: 1336288 - DNA, 15 bp, Homo sapiens
tcaccaaaaaaaaaa

SEQ ID NO: 1336289 - DNA, 15 bp, Homo sapiens
ctcaccaaaaaaaaa

SEQ ID NO: 1336290 - DNA, 15 bp, Homo sapiens
tctcaccaaaaaaaa

SEQ ID NO: 1336291 - DNA, 15 bp, Homo sapiens
atctcaccaaaaaaa

SEQ ID NO: 1336292 - DNA, 15 bp, Homo sapiens
catctcaccaaaaaa

SEQ ID NO: 1336293 - DNA, 15 bp, Homo sapiens
ccatctcaccaaaaa

SEQ ID NO: 1336294 - DNA, 15 bp, Homo sapiens
tccatctcaccaaaa

SEQ ID NO: 1336295 - DNA, 15 bp, Homo sapiens
ttccatctcaccaaa

SEQ ID NO: 1336296 - DNA, 15 bp, Homo sapiens
attccatctcaccaa

SEQ ID NO: 1336297 - DNA, 15 bp, Homo sapiens
gattccatctcacca

SEQ ID NO: 1336298 - DNA, 15 bp, Homo sapiens
agattccatctcacc

SEQ ID NO: 1336299 - DNA, 15 bp, Homo sapiens
gagattccatctcac

SEQ ID NO: 1336300 - DNA, 15 bp, Homo sapiens
tgagattccatctca

SEQ ID NO: 1336301 - DNA, 15 bp, Homo sapiens
gtgagattccatctc

SEQ ID NO: 1336302 - DNA, 15 bp, Homo sapiens
agtgagattccatct

SEQ ID NO: 1336303 - DNA, 15 bp, Homo sapiens
gagtgagattccatc

SEQ ID NO: 1336304 - DNA, 15 bp, Homo sapiens
agagtgagattccat

SEQ ID NO: 1336305 - DNA, 15 bp, Homo sapiens
cagagtgagattcca

SEQ ID NO: 1336306 - DNA, 15 bp, Homo sapiens
acagagtgagattcc

SEQ ID NO: 1336307 - DNA, 15 bp, Homo sapiens
gacagagtgagattc

SEQ ID NO: 1336308 - DNA, 15 bp, Homo sapiens
agacagagtgagatt

SEQ ID NO: 1336309 - DNA, 15 bp, Homo sapiens
gagacagagtgagat

SEQ ID NO: 1336310 - DNA, 15 bp, Homo sapiens
tgagacagagtgaga

SEQ ID NO: 1336311 - DNA, 15 bp, Homo sapiens
atgagacagagtgag

SEQ ID NO: 1336312 - DNA, 15 bp, Homo sapiens
catgagacagagtga

SEQ ID NO: 1336313 - DNA, 15 bp, Homo sapiens
tcatgagacagagtg

SEQ ID NO: 1336314 - DNA, 15 bp, Homo sapiens
atcatgagacagagt

SEQ ID NO: 1336315 - DNA, 15 bp, Homo sapiens
gatcatgagacagag

SEQ ID NO: 1336316 - DNA, 15 bp, Homo sapiens
agatcatgagacaga

SEQ ID NO: 1336317 - DNA, 15 bp, Homo sapiens
aagatcatgagacag

SEQ ID NO: 1336318 - DNA, 15 bp, Homo sapiens
caagatcatgagaca

SEQ ID NO: 1336319 - DNA, 15 bp, Homo sapiens
gcaagatcatgagac

SEQ ID NO: 1336320 - DNA, 15 bp, Homo sapiens
cgcaagatcatgaga

SEQ ID NO: 1336321 - DNA, 15 bp, Homo sapiens
tcgcaagatcatgag

SEQ ID NO: 1336322 - DNA, 15 bp, Homo sapiens
atcgcaagatcatga

SEQ ID NO: 1336323 - DNA, 15 bp, Homo sapiens
gatcgcaagatcatg

SEQ ID NO: 1336324 - DNA, 15 bp, Homo sapiens
agatcgcaagatcat

SEQ ID NO: 1336325 - DNA, 15 bp, Homo sapiens
aagatcgcaagatca

SEQ ID NO: 1336326 - DNA, 15 bp, Homo sapiens
caagatcgcaagatc

SEQ ID NO: 1336327 - DNA, 15 bp, Homo sapiens
ccaagatcgcaagat

SEQ ID NO: 1336328 - DNA, 15 bp, Homo sapiens
gccaagatcgcaaga

SEQ ID NO: 1336329 - DNA, 15 bp, Homo sapiens
agccaagatcgcaag

SEQ ID NO: 1336330 - DNA, 15 bp, Homo sapiens
gagccaagatcgcaa

SEQ ID NO: 1336331 - DNA, 15 bp, Homo sapiens
agcagaggctgcagt

SEQ ID NO: 1336332 - DNA, 15 bp, Homo sapiens
aagcagaggctgcag

SEQ ID NO: 1336333 - DNA, 15 bp, Homo sapiens
gaagcagaggctgca

SEQ ID NO: 1336334 - DNA, 15 bp, Homo sapiens
ggaagcagaggctgc

SEQ ID NO: 1336335 - DNA, 15 bp, Homo sapiens
aggaagcagaggctg

SEQ ID NO: 1336336 - DNA, 15 bp, Homo sapiens
caggaagcagaggct

SEQ ID NO: 1336337 - DNA, 15 bp, Homo sapiens
acaggaagcagaggc

SEQ ID NO: 1336338 - DNA, 15 bp, Homo sapiens
cacaggaagcagagg

SEQ ID NO: 1336339 - DNA, 15 bp, Homo sapiens
acacaggaagcagag

SEQ ID NO: 1336340 - DNA, 15 bp, Homo sapiens
aacacaggaagcaga

SEQ ID NO: 1336341 - DNA, 15 bp, Homo sapiens
gaacacaggaagcag

SEQ ID NO: 1336342 - DNA, 15 bp, Homo sapiens
tgaacacaggaagca

SEQ ID NO: 1336343 - DNA, 15 bp, Homo sapiens
ctgaacacaggaagc

SEQ ID NO: 1336344 - DNA, 15 bp, Homo sapiens
gctgaacacaggaag

SEQ ID NO: 1336345 - DNA, 15 bp, Homo sapiens
cgctgaacacaggaa

SEQ ID NO: 1336346 - DNA, 15 bp, Homo sapiens
tcgctgaacacagga

SEQ ID NO: 1336347 - DNA, 15 bp, Homo sapiens
atcgctgaacacagg

SEQ ID NO: 1336348 - DNA, 15 bp, Homo sapiens
aatcgctgaacacag

SEQ ID NO: 1336349 - DNA, 15 bp, Homo sapiens
caatcgctgaacaca

SEQ ID NO: 1336350 - DNA, 15 bp, Homo sapiens
gcaatcgctgaacac

SEQ ID NO: 1336351 - DNA, 15 bp, Homo sapiens
ggcaatcgctgaaca

SEQ ID NO: 1336352 - DNA, 15 bp, Homo sapiens
aggcaatcgctgaac

SEQ ID NO: 1336353 - DNA, 15 bp, Homo sapiens
aaggcaatcgctgaa

SEQ ID NO: 1336354 - DNA, 15 bp, Homo sapiens
caaggcaatcgctga

SEQ ID NO: 1336355 - DNA, 15 bp, Homo sapiens
gcaaggcaatcgctg

SEQ ID NO: 1336356 - DNA, 15 bp, Homo sapiens
ggcaaggcaatcgct

SEQ ID NO: 1336357 - DNA, 15 bp, Homo sapiens
aggcaaggcaatcgc

SEQ ID NO: 1336358 - DNA, 15 bp, Homo sapiens
gaggcaaggcaatcg

SEQ ID NO: 1336359 - DNA, 15 bp, Homo sapiens
tgaggcaaggcaatc

SEQ ID NO: 1336360 - DNA, 15 bp, Homo sapiens
ctgaggcaaggcaat

SEQ ID NO: 1336361 - DNA, 15 bp, Homo sapiens
gctgaggcaaggcaa

SEQ ID NO: 1336362 - DNA, 15 bp, Homo sapiens
ggctgaggcaaggca

SEQ ID NO: 1336363 - DNA, 15 bp, Homo sapiens
aggctgaggcaaggc

SEQ ID NO: 1336364 - DNA, 15 bp, Homo sapiens
gaggctgaggcaagg

SEQ ID NO: 1336365 - DNA, 15 bp, Homo sapiens
gatcccagctactca

SEQ ID NO: 1336366 - DNA, 15 bp, Homo sapiens
tgatcccagctactc

SEQ ID NO: 1336367 - DNA, 15 bp, Homo sapiens
gtgatcccagctact

SEQ ID NO: 1336368 - DNA, 15 bp, Homo sapiens
tgtgatcccagctac

SEQ ID NO: 1336369 - DNA, 15 bp, Homo sapiens
ctgtgatcccagcta

SEQ ID NO: 1336370 - DNA, 15 bp, Homo sapiens
tctgtgatcccagct

SEQ ID NO: 1336371 - DNA, 15 bp, Homo sapiens
gtctgtgatcccagc

SEQ ID NO: 1336372 - DNA, 15 bp, Homo sapiens
ggtctgtgatcccag

SEQ ID NO: 1336373 - DNA, 15 bp, Homo sapiens
aggtctgtgatccca

SEQ ID NO: 1336374 - DNA, 15 bp, Homo sapiens
caggtctgtgatccc

SEQ ID NO: 1336375 - DNA, 15 bp, Homo sapiens
acaggtctgtgatcc

SEQ ID NO: 1336376 - DNA, 15 bp, Homo sapiens
cacaggtctgtgatc

SEQ ID NO: 1336377 - DNA, 15 bp, Homo sapiens
gcacaggtctgtgat

SEQ ID NO: 1336378 - DNA, 15 bp, Homo sapiens
ggcacaggtctgtga

SEQ ID NO: 1336379 - DNA, 15 bp, Homo sapiens
tggcacaggtctgtg

SEQ ID NO: 1336380 - DNA, 15 bp, Homo sapiens
gtggcacaggtctgt

SEQ ID NO: 1336381 - DNA, 15 bp, Homo sapiens
ggtggcacaggtctg

SEQ ID NO: 1336382 - DNA, 15 bp, Homo sapiens
tggtggcacaggtct

SEQ ID NO: 1336383 - DNA, 15 bp, Homo sapiens
gtggtggcacaggtc

SEQ ID NO: 1336384 - DNA, 15 bp, Homo sapiens
tgtggtggcacaggt

SEQ ID NO: 1336385 - DNA, 15 bp, Homo sapiens
gtgtggtggcacagg

SEQ ID NO: 1336386 - DNA, 15 bp, Homo sapiens
ggtgtggtggcacag

SEQ ID NO: 1336387 - DNA, 15 bp, Homo sapiens
ctaaaaattagccag

SEQ ID NO: 1336388 - DNA, 15 bp, Homo sapiens
actaaaaattagcca

SEQ ID NO: 1336389 - DNA, 15 bp, Homo sapiens
tactaaaaattagcc

SEQ ID NO: 1336390 - DNA, 15 bp, Homo sapiens
ctactaaaaattagc

SEQ ID NO: 1336391 - DNA, 15 bp, Homo sapiens
tctactaaaaattag

SEQ ID NO: 1336392 - DNA, 15 bp, Homo sapiens
ctctactaaaaatta

SEQ ID NO: 1336393 - DNA, 15 bp, Homo sapiens
tgtgaaaccctgtct

SEQ ID NO: 1336394 - DNA, 15 bp, Homo sapiens
ttgtgaaaccctgtc

SEQ ID NO: 1336395 - DNA, 15 bp, Homo sapiens
attgtgaaaccctgt

SEQ ID NO: 1336396 - DNA, 15 bp, Homo sapiens
tattgtgaaaccctg

SEQ ID NO: 1336397 - DNA, 15 bp, Homo sapiens
atattgtgaaaccct

SEQ ID NO: 1336398 - DNA, 15 bp, Homo sapiens
aatattgtgaaaccc

SEQ ID NO: 1336399 - DNA, 15 bp, Homo sapiens
caatattgtgaaacc

SEQ ID NO: 1336400 - DNA, 15 bp, Homo sapiens
ccaatattgtgaaac

SEQ ID NO: 1336401 - DNA, 15 bp, Homo sapiens
gccaatattgtgaaa

SEQ ID NO: 1336402 - DNA, 15 bp, Homo sapiens
ggccaatattgtgaa

SEQ ID NO: 1336403 - DNA, 15 bp, Homo sapiens
tggccaatattgtga

SEQ ID NO: 1336404 - DNA, 15 bp, Homo sapiens
ctggccaatattgtg

SEQ ID NO: 1336405 - DNA, 15 bp, Homo sapiens
cctggccaatattgt

SEQ ID NO: 1336406 - DNA, 15 bp, Homo sapiens
gcctggccaatattg

SEQ ID NO: 1336407 - DNA, 15 bp, Homo sapiens
agcctggccaatatt

SEQ ID NO: 1336408 - DNA, 15 bp, Homo sapiens
acagtttgagaccag

SEQ ID NO: 1336409 - DNA, 15 bp, Homo sapiens
aacagtttgagacca

SEQ ID NO: 1336410 - DNA, 15 bp, Homo sapiens
caacagtttgagacc

SEQ ID NO: 1336411 - DNA, 15 bp, Homo sapiens
tcaacagtttgagac

SEQ ID NO: 1336412 - DNA, 15 bp, Homo sapiens
gtcaacagtttgaga

SEQ ID NO: 1336413 - DNA, 15 bp, Homo sapiens
ggtcaacagtttgag

SEQ ID NO: 1336414 - DNA, 15 bp, Homo sapiens
aggtcaacagtttga

SEQ ID NO: 1336415 - DNA, 15 bp, Homo sapiens
gaggtcaacagtttg

SEQ ID NO: 1336416 - DNA, 15 bp, Homo sapiens
ggaggtcaacagttt

SEQ ID NO: 1336417 - DNA, 15 bp, Homo sapiens
aggaggtcaacagtt

SEQ ID NO: 1336418 - DNA, 15 bp, Homo sapiens
caggaggtcaacagt

SEQ ID NO: 1336419 - DNA, 15 bp, Homo sapiens
gcaggaggtcaacag

SEQ ID NO: 1336420 - DNA, 15 bp, Homo sapiens
ggcaggaggtcaaca

SEQ ID NO: 1336421 - DNA, 15 bp, Homo sapiens
aggcaggaggtcaac

SEQ ID NO: 1336422 - DNA, 15 bp, Homo sapiens
gaggcaggaggtcaa

SEQ ID NO: 1336423 - DNA, 15 bp, Homo sapiens
tgaggcaggaggtca

SEQ ID NO: 1336424 - DNA, 15 bp, Homo sapiens
ctgaggcaggaggtc

SEQ ID NO: 1336425 - DNA, 15 bp, Homo sapiens
gctgaggcaggaggt

SEQ ID NO: 1336426 - DNA, 15 bp, Homo sapiens
agtggtggctcacac

SEQ ID NO: 1336427 - DNA, 15 bp, Homo sapiens
gagtggtggctcaca

SEQ ID NO: 1336428 - DNA, 15 bp, Homo sapiens
ggagtggtggctcac

SEQ ID NO: 1336429 - DNA, 15 bp, Homo sapiens
gggagtggtggctca

SEQ ID NO: 1336430 - DNA, 15 bp, Homo sapiens
accgggagtggtggc

SEQ ID NO: 1336431 - DNA, 15 bp, Homo sapiens
gaccgggagtggtgg

SEQ ID NO: 1336432 - DNA, 15 bp, Homo sapiens
tgaccgggagtggtg

SEQ ID NO: 1336433 - DNA, 15 bp, Homo sapiens
atgaccgggagtggt

SEQ ID NO: 1336434 - DNA, 15 bp, Homo sapiens
catgaccgggagtgg

SEQ ID NO: 1336435 - DNA, 15 bp, Homo sapiens
acatgaccgggagtg

SEQ ID NO: 1336436 - DNA, 15 bp, Homo sapiens
aacatgaccgggagt

SEQ ID NO: 1336437 - DNA, 15 bp, Homo sapiens
aaacatgaccgggag

SEQ ID NO: 1336438 - DNA, 15 bp, Homo sapiens
aaaacatgaccggga

SEQ ID NO: 1336439 - DNA, 15 bp, Homo sapiens
taaaacatgaccggg

SEQ ID NO: 1336440 - DNA, 15 bp, Homo sapiens
ttaaaacatgaccgg

SEQ ID NO: 1336441 - DNA, 15 bp, Homo sapiens
attaaaacatgaccg

SEQ ID NO: 1336442 - DNA, 15 bp, Homo sapiens
cattaaaacatgacc

SEQ ID NO: 1336443 - DNA, 15 bp, Homo sapiens
acattaaaacatgac

SEQ ID NO: 1336444 - DNA, 15 bp, Homo sapiens
aacattaaaacatga

SEQ ID NO: 1336445 - DNA, 15 bp, Homo sapiens
taacattaaaacatg

SEQ ID NO: 1336446 - DNA, 15 bp, Homo sapiens
ataacattaaaacat

SEQ ID NO: 1336447 - DNA, 15 bp, Homo sapiens
aataacattaaaaca

SEQ ID NO: 1336448 - DNA, 15 bp, Homo sapiens
aaataacattaaaac

SEQ ID NO: 1336449 - DNA, 15 bp, Homo sapiens
aaaataacattaaaa

SEQ ID NO: 1336450 - DNA, 15 bp, Homo sapiens
taaaataacattaaa

SEQ ID NO: 1336451 - DNA, 15 bp, Homo sapiens
ataaaataacattaa

SEQ ID NO: 1336452 - DNA, 15 bp, Homo sapiens
aataaaataacatta

SEQ ID NO: 1336453 - DNA, 15 bp, Homo sapiens
aaataaaataacatt

SEQ ID NO: 1336454 - DNA, 15 bp, Homo sapiens
aaaataaaataacat

SEQ ID NO: 1336455 - DNA, 15 bp, Homo sapiens
taaaataaaataaca

SEQ ID NO: 1336456 - DNA, 15 bp, Homo sapiens
ataaaataaaataac

SEQ ID NO: 1336457 - DNA, 15 bp, Homo sapiens
caaaaataaaataaa

SEQ ID NO: 1336458 - DNA, 15 bp, Homo sapiens
tcaaaaataaaataa

SEQ ID NO: 1336459 - DNA, 15 bp, Homo sapiens
ctcaaaaataaaata

SEQ ID NO: 1336460 - DNA, 15 bp, Homo sapiens
tctcaaaaataaaat

SEQ ID NO: 1336461 - DNA, 15 bp, Homo sapiens
gacctgggaggtgga

SEQ ID NO: 1336462 - DNA, 15 bp, Homo sapiens
ggacctgggaggtgg

SEQ ID NO: 1336463 - DNA, 15 bp, Homo sapiens
tggacctgggaggtg

SEQ ID NO: 1336464 - DNA, 15 bp, Homo sapiens
ttggacctgggaggt

SEQ ID NO: 1336465 - DNA, 15 bp, Homo sapiens
cttggacctgggagg

SEQ ID NO: 1336466 - DNA, 15 bp, Homo sapiens
acttggacctgggag

SEQ ID NO: 1336467 - DNA, 15 bp, Homo sapiens
cacttggacctggga

SEQ ID NO: 1336468 - DNA, 15 bp, Homo sapiens
tcacttggacctggg

SEQ ID NO: 1336469 - DNA, 15 bp, Homo sapiens
atcacttggacctgg

SEQ ID NO: 1336470 - DNA, 15 bp, Homo sapiens
aatcacttggacctg

SEQ ID NO: 1336471 - DNA, 15 bp, Homo sapiens
gaatcacttggacct

SEQ ID NO: 1336472 - DNA, 15 bp, Homo sapiens
agaatcacttggacc

SEQ ID NO: 1336473 - DNA, 15 bp, Homo sapiens
gagaatcacttggac

SEQ ID NO: 1336474 - DNA, 15 bp, Homo sapiens
cgagaatcacttgga

SEQ ID NO: 1336475 - DNA, 15 bp, Homo sapiens
acgagaatcacttgg

SEQ ID NO: 1336476 - DNA, 15 bp, Homo sapiens
aacgagaatcacttg

SEQ ID NO: 1336477 - DNA, 15 bp, Homo sapiens
gaacgagaatcactt

SEQ ID NO: 1336478 - DNA, 15 bp, Homo sapiens
ggaacgagaatcact

SEQ ID NO: 1336479 - DNA, 15 bp, Homo sapiens
aggaacgagaatcac

SEQ ID NO: 1336480 - DNA, 15 bp, Homo sapiens
gaggaacgagaatca

SEQ ID NO: 1336481 - DNA, 15 bp, Homo sapiens
tgaggaacgagaatc

SEQ ID NO: 1336482 - DNA, 15 bp, Homo sapiens
ctgaggaacgagaat

SEQ ID NO: 1336483 - DNA, 15 bp, Homo sapiens
gctgaggaacgagaa

SEQ ID NO: 1336484 - DNA, 15 bp, Homo sapiens
ggctgaggaacgaga

SEQ ID NO: 1336485 - DNA, 15 bp, Homo sapiens
aggctgaggaacgag

SEQ ID NO: 1336486 - DNA, 15 bp, Homo sapiens
gaggctgaggaacga

SEQ ID NO: 1336487 - DNA, 15 bp, Homo sapiens
ggaggctgaggaacg

SEQ ID NO: 1336488 - DNA, 15 bp, Homo sapiens
gggaggctgaggaac

SEQ ID NO: 1336489 - DNA, 15 bp, Homo sapiens
tctgtaatctcagct

SEQ ID NO: 1336490 - DNA, 15 bp, Homo sapiens
gtctgtaatctcagc

SEQ ID NO: 1336491 - DNA, 15 bp, Homo sapiens
cgtctgtaatctcag

SEQ ID NO: 1336492 - DNA, 15 bp, Homo sapiens
acgtctgtaatctca

SEQ ID NO: 1336493 - DNA, 15 bp, Homo sapiens
cacgtctgtaatctc

SEQ ID NO: 1336494 - DNA, 15 bp, Homo sapiens
gcacgtctgtaatct

SEQ ID NO: 1336495 - DNA, 15 bp, Homo sapiens
tgcacgtctgtaatc

SEQ ID NO: 1336496 - DNA, 15 bp, Homo sapiens
gtgcacgtctgtaat

SEQ ID NO: 1336497 - DNA, 15 bp, Homo sapiens
ggtgcacgtctgtaa

SEQ ID NO: 1336498 - DNA, 15 bp, Homo sapiens
tggtgcacgtctgta

SEQ ID NO: 1336499 - DNA, 15 bp, Homo sapiens
gtggtgcacgtctgt

SEQ ID NO: 1336500 - DNA, 15 bp, Homo sapiens
ggtggtgcacgtctg

SEQ ID NO: 1336501 - DNA, 15 bp, Homo sapiens
tggtggtgcacgtct

SEQ ID NO: 1336502 - DNA, 15 bp, Homo sapiens
atggtggtgcacgtc

SEQ ID NO: 1336503 - DNA, 15 bp, Homo sapiens
catggtggtgcacgt

SEQ ID NO: 1336504 - DNA, 15 bp, Homo sapiens
gcatggtggtgcacg

SEQ ID NO: 1336505 - DNA, 15 bp, Homo sapiens
ggcatggtggtgcac

SEQ ID NO: 1336506 - DNA, 15 bp, Homo sapiens
taattagccaggcat

SEQ ID NO: 1336507 - DNA, 15 bp, Homo sapiens
ataattagccaggca

SEQ ID NO: 1336508 - DNA, 15 bp, Homo sapiens
gataattagccaggc

SEQ ID NO: 1336509 - DNA, 15 bp, Homo sapiens
cgataattagccagg

SEQ ID NO: 1336510 - DNA, 15 bp, Homo sapiens
acgataattagccag

SEQ ID NO: 1336511 - DNA, 15 bp, Homo sapiens
tacgataattagcca

SEQ ID NO: 1336512 - DNA, 15 bp, Homo sapiens
atacgataattagcc

SEQ ID NO: 1336513 - DNA, 15 bp, Homo sapiens
tatacgataattagc

SEQ ID NO: 1336514 - DNA, 15 bp, Homo sapiens
atatacgataattag

SEQ ID NO: 1336515 - DNA, 15 bp, Homo sapiens
aatatacgataatta

SEQ ID NO: 1336516 - DNA, 15 bp, Homo sapiens
aaatatacgataatt

SEQ ID NO: 1336517 - DNA, 15 bp, Homo sapiens
aaaatatacgataat

SEQ ID NO: 1336518 - DNA, 15 bp, Homo sapiens
aaaaatatacgataa

SEQ ID NO: 1336519 - DNA, 15 bp, Homo sapiens
taaaaatatacgata

SEQ ID NO: 1336520 - DNA, 15 bp, Homo sapiens
ctaaaaatatacgat

SEQ ID NO: 1336521 - DNA, 15 bp, Homo sapiens
actaaaaatatacga

SEQ ID NO: 1336522 - DNA, 15 bp, Homo sapiens
tactaaaaatatacg

SEQ ID NO: 1336523 - DNA, 15 bp, Homo sapiens
ctactaaaaatatac

SEQ ID NO: 1336524 - DNA, 15 bp, Homo sapiens
aaatggtgaaacccc

SEQ ID NO: 1336525 - DNA, 15 bp, Homo sapiens
gagttcgaaaccagc

SEQ ID NO: 1336526 - DNA, 15 bp, Homo sapiens
ggagttcgaaaccag

SEQ ID NO: 1336527 - DNA, 15 bp, Homo sapiens
aggagttcgaaacca

SEQ ID NO: 1336528 - DNA, 15 bp, Homo sapiens
caggagttcgaaacc

SEQ ID NO: 1336529 - DNA, 15 bp, Homo sapiens
tcaggagttcgaaac

SEQ ID NO: 1336530 - DNA, 15 bp, Homo sapiens
gtcaggagttcgaaa

SEQ ID NO: 1336531 - DNA, 15 bp, Homo sapiens
cgtcaggagttcgaa

SEQ ID NO: 1336532 - DNA, 15 bp, Homo sapiens
acgtcaggagttcga

SEQ ID NO: 1336533 - DNA, 15 bp, Homo sapiens
gacgtcaggagttcg

SEQ ID NO: 1336534 - DNA, 15 bp, Homo sapiens
ttgacgtcaggagtt

SEQ ID NO: 1336535 - DNA, 15 bp, Homo sapiens
cttgacgtcaggagt

SEQ ID NO: 1336536 - DNA, 15 bp, Homo sapiens
acttgacgtcaggag

SEQ ID NO: 1336537 - DNA, 15 bp, Homo sapiens
cacttgacgtcagga

SEQ ID NO: 1336538 - DNA, 15 bp, Homo sapiens
tcacttgacgtcagg

SEQ ID NO: 1336539 - DNA, 15 bp, Homo sapiens
atcacttgacgtcag

SEQ ID NO: 1336540 - DNA, 15 bp, Homo sapiens
gatcacttgacgtca

SEQ ID NO: 1336541 - DNA, 15 bp, Homo sapiens
agatcacttgacgtc

SEQ ID NO: 1336542 - DNA, 15 bp, Homo sapiens
cagatcacttgacgt

SEQ ID NO: 1336543 - DNA, 15 bp, Homo sapiens
gcagatcacttgacg

SEQ ID NO: 1336544 - DNA, 15 bp, Homo sapiens
ggcagatcacttgac

SEQ ID NO: 1336545 - DNA, 15 bp, Homo sapiens
tgtgggcagatcact

SEQ ID NO: 1336546 - DNA, 15 bp, Homo sapiens
atgtgggcagatcac

SEQ ID NO: 1336547 - DNA, 15 bp, Homo sapiens
aatgtgggcagatca

SEQ ID NO: 1336548 - DNA, 15 bp, Homo sapiens
caatgtgggcagatc

SEQ ID NO: 1336549 - DNA, 15 bp, Homo sapiens
ccaatgtgggcagat

SEQ ID NO: 1336550 - DNA, 15 bp, Homo sapiens
gccaatgtgggcaga

SEQ ID NO: 1336551 - DNA, 15 bp, Homo sapiens
ggccaatgtgggcag

SEQ ID NO: 1336552 - DNA, 15 bp, Homo sapiens
aggccaatgtgggca

SEQ ID NO: 1336553 - DNA, 15 bp, Homo sapiens
tactttgggaggcca

SEQ ID NO: 1336554 - DNA, 15 bp, Homo sapiens
gctagtactttggga

SEQ ID NO: 1336555 - DNA, 15 bp, Homo sapiens
tgctagtactttggg

SEQ ID NO: 1336556 - DNA, 15 bp, Homo sapiens
atgctagtactttgg

SEQ ID NO: 1336557 - DNA, 15 bp, Homo sapiens
aatgctagtactttg

SEQ ID NO: 1336558 - DNA, 15 bp, Homo sapiens
taatgctagtacttt

SEQ ID NO: 1336559 - DNA, 15 bp, Homo sapiens
gtaatgctagtactt

SEQ ID NO: 1336560 - DNA, 15 bp, Homo sapiens
tgtaatgctagtact

SEQ ID NO: 1336561 - DNA, 15 bp, Homo sapiens
ctgtaatgctagtac

SEQ ID NO: 1336562 - DNA, 15 bp, Homo sapiens
cctgtaatgctagta

SEQ ID NO: 1336563 - DNA, 15 bp, Homo sapiens
gcctgtaatgctagt

SEQ ID NO: 1336564 - DNA, 15 bp, Homo sapiens
tgcctgtaatgctag

SEQ ID NO: 1336565 - DNA, 15 bp, Homo sapiens
atgcctgtaatgcta

SEQ ID NO: 1336566 - DNA, 15 bp, Homo sapiens
catgcctgtaatgct

SEQ ID NO: 1336567 - DNA, 15 bp, Homo sapiens
tcatgcctgtaatgc

SEQ ID NO: 1336568 - DNA, 15 bp, Homo sapiens
gtcatgcctgtaatg

SEQ ID NO: 1336569 - DNA, 15 bp, Homo sapiens
agtcatgcctgtaat

SEQ ID NO: 1336570 - DNA, 15 bp, Homo sapiens
cagtcatgcctgtaa

SEQ ID NO: 1336571 - DNA, 15 bp, Homo sapiens
tcagtcatgcctgta

SEQ ID NO: 1336572 - DNA, 15 bp, Homo sapiens
gtcagtcatgcctgt

SEQ ID NO: 1336573 - DNA, 15 bp, Homo sapiens
ggtcagtcatgcctg

SEQ ID NO: 1336574 - DNA, 15 bp, Homo sapiens
cggtcagtcatgcct

SEQ ID NO: 1336575 - DNA, 15 bp, Homo sapiens
gcggtcagtcatgcc

SEQ ID NO: 1336576 - DNA, 15 bp, Homo sapiens
tgcggtcagtcatgc

SEQ ID NO: 1336577 - DNA, 15 bp, Homo sapiens
gtgcggtcagtcatg

SEQ ID NO: 1336578 - DNA, 15 bp, Homo sapiens
ggtgcggtcagtcat

SEQ ID NO: 1336579 - DNA, 15 bp, Homo sapiens
gggtgcggtcagtca

SEQ ID NO: 1336580 - DNA, 15 bp, Homo sapiens
cgggtgcggtcagtc

SEQ ID NO: 1336581 - DNA, 15 bp, Homo sapiens
ccgggtgcggtcagt

SEQ ID NO: 1336582 - DNA, 15 bp, Homo sapiens
tccgggtgcggtcag

SEQ ID NO: 1336583 - DNA, 15 bp, Homo sapiens
atccgggtgcggtca

SEQ ID NO: 1336584 - DNA, 15 bp, Homo sapiens
catccgggtgcggtc

SEQ ID NO: 1336585 - DNA, 15 bp, Homo sapiens
acatccgggtgcggt

SEQ ID NO: 1336586 - DNA, 15 bp, Homo sapiens
aacatccgggtgcgg

SEQ ID NO: 1336587 - DNA, 15 bp, Homo sapiens
taacatccgggtgcg

SEQ ID NO: 1336588 - DNA, 15 bp, Homo sapiens
gtaacatccgggtgc

SEQ ID NO: 1336589 - DNA, 15 bp, Homo sapiens
agtaacatccgggtg

SEQ ID NO: 1336590 - DNA, 15 bp, Homo sapiens
aagtaacatccgggt

SEQ ID NO: 1336591 - DNA, 15 bp, Homo sapiens
aaagtaacatccggg

SEQ ID NO: 1336592 - DNA, 15 bp, Homo sapiens
taaagtaacatccgg

SEQ ID NO: 1336593 - DNA, 15 bp, Homo sapiens
ataaagtaacatccg

SEQ ID NO: 1336594 - DNA, 15 bp, Homo sapiens
aataaagtaacatcc

SEQ ID NO: 1336595 - DNA, 15 bp, Homo sapiens
aaataaagtaacatc

SEQ ID NO: 1336596 - DNA, 15 bp, Homo sapiens
taaataaagtaacat

SEQ ID NO: 1336597 - DNA, 15 bp, Homo sapiens
ataaataaagtaaca

SEQ ID NO: 1336598 - DNA, 15 bp, Homo sapiens
aataaataaagtaac

SEQ ID NO: 1336599 - DNA, 15 bp, Homo sapiens
aaataaataaagtaa

SEQ ID NO: 1336600 - DNA, 15 bp, Homo sapiens
aaaataaataaagta

SEQ ID NO: 1336601 - DNA, 15 bp, Homo sapiens
aaaaataaataaagt

SEQ ID NO: 1336602 - DNA, 15 bp, Homo sapiens
aaaaaataaataaag

SEQ ID NO: 1336603 - DNA, 15 bp, Homo sapiens
caaaaaaaataaata

SEQ ID NO: 1336604 - DNA, 15 bp, Homo sapiens
tcaaaaaaaataaat

SEQ ID NO: 1336605 - DNA, 15 bp, Homo sapiens
atctcaaaaaaaata

SEQ ID NO: 1336606 - DNA, 15 bp, Homo sapiens
catctcaaaaaaaat

SEQ ID NO: 1336607 - DNA, 15 bp, Homo sapiens
gcactgcactccagc

SEQ ID NO: 1336608 - DNA, 15 bp, Homo sapiens
cgcactgcactccag

SEQ ID NO: 1336609 - DNA, 15 bp, Homo sapiens
acgcactgcactcca

SEQ ID NO: 1336610 - DNA, 15 bp, Homo sapiens
cacgcactgcactcc

SEQ ID NO: 1336611 - DNA, 15 bp, Homo sapiens
tcacgcactgcactc

SEQ ID NO: 1336612 - DNA, 15 bp, Homo sapiens
atcacgcactgcact

SEQ ID NO: 1336613 - DNA, 15 bp, Homo sapiens
gatcacgcactgcac

SEQ ID NO: 1336614 - DNA, 15 bp, Homo sapiens
agatcacgcactgca

SEQ ID NO: 1336615 - DNA, 15 bp, Homo sapiens
aagatcacgcactgc

SEQ ID NO: 1336616 - DNA, 15 bp, Homo sapiens
caagatcacgcactg

SEQ ID NO: 1336617 - DNA, 15 bp, Homo sapiens
ccaagatcacgcact

SEQ ID NO: 1336618 - DNA, 15 bp, Homo sapiens
gccaagatcacgcac

SEQ ID NO: 1336619 - DNA, 15 bp, Homo sapiens
agccaagatcacgca

SEQ ID NO: 1336620 - DNA, 15 bp, Homo sapiens
aggaggcagagcttg

SEQ ID NO: 1336621 - DNA, 15 bp, Homo sapiens
caggaggcagagctt

SEQ ID NO: 1336622 - DNA, 15 bp, Homo sapiens
ccaggaggcagagct

SEQ ID NO: 1336623 - DNA, 15 bp, Homo sapiens
cccaggaggcagagc

SEQ ID NO: 1336624 - DNA, 15 bp, Homo sapiens
aaacccaggaggcag

SEQ ID NO: 1336625 - DNA, 15 bp, Homo sapiens
gaaacccaggaggca

SEQ ID NO: 1336626 - DNA, 15 bp, Homo sapiens
ggaaacccaggaggc

SEQ ID NO: 1336627 - DNA, 15 bp, Homo sapiens
cggaaacccaggagg

SEQ ID NO: 1336628 - DNA, 15 bp, Homo sapiens
gcggaaacccaggag

SEQ ID NO: 1336629 - DNA, 15 bp, Homo sapiens
ggcggaaacccagga

SEQ ID NO: 1336630 - DNA, 15 bp, Homo sapiens
tggcggaaacccagg

SEQ ID NO: 1336631 - DNA, 15 bp, Homo sapiens
atggcggaaacccag

SEQ ID NO: 1336632 - DNA, 15 bp, Homo sapiens
aatggcggaaaccca

SEQ ID NO: 1336633 - DNA, 15 bp, Homo sapiens
gaatggcggaaaccc

SEQ ID NO: 1336634 - DNA, 15 bp, Homo sapiens
agaatggcggaaacc

SEQ ID NO: 1336635 - DNA, 15 bp, Homo sapiens
aagaatggcggaaac

SEQ ID NO: 1336636 - DNA, 15 bp, Homo sapiens
gaagaatggcggaaa

SEQ ID NO: 1336637 - DNA, 15 bp, Homo sapiens
agaagaatggcggaa

SEQ ID NO: 1336638 - DNA, 15 bp, Homo sapiens
cagaagaatggcgga

SEQ ID NO: 1336639 - DNA, 15 bp, Homo sapiens
gcagaagaatggcgg

SEQ ID NO: 1336640 - DNA, 15 bp, Homo sapiens
ggcagaagaatggcg

SEQ ID NO: 1336641 - DNA, 15 bp, Homo sapiens
aggcagaagaatggc

SEQ ID NO: 1336642 - DNA, 15 bp, Homo sapiens
gaggcagaagaatgg

SEQ ID NO: 1336643 - DNA, 15 bp, Homo sapiens
tgaggcagaagaatg

SEQ ID NO: 1336644 - DNA, 15 bp, Homo sapiens
ccagttactcgggag

SEQ ID NO: 1336645 - DNA, 15 bp, Homo sapiens
cccagttactcggga

SEQ ID NO: 1336646 - DNA, 15 bp, Homo sapiens
tcccagttactcggg

SEQ ID NO: 1336647 - DNA, 15 bp, Homo sapiens
gtcccagttactcgg

SEQ ID NO: 1336648 - DNA, 15 bp, Homo sapiens
agtcccagttactcg

SEQ ID NO: 1336649 - DNA, 15 bp, Homo sapiens
ccccgtctccactaa

SEQ ID NO: 1336650 - DNA, 15 bp, Homo sapiens
accccgtctccacta

SEQ ID NO: 1336651 - DNA, 15 bp, Homo sapiens
aaccccgtctccact

SEQ ID NO: 1336652 - DNA, 15 bp, Homo sapiens
aaaccccgtctccac

SEQ ID NO: 1336653 - DNA, 15 bp, Homo sapiens
gaaaccccgtctcca

SEQ ID NO: 1336654 - DNA, 15 bp, Homo sapiens
tgaaaccccgtctcc

SEQ ID NO: 1336655 - DNA, 15 bp, Homo sapiens
tgaggtcaggagatt

SEQ ID NO: 1336656 - DNA, 15 bp, Homo sapiens
cgggcagatcatgag

SEQ ID NO: 1336657 - DNA, 15 bp, Homo sapiens
gcgggcagatcatga

SEQ ID NO: 1336658 - DNA, 15 bp, Homo sapiens
ggcgggcagatcatg

SEQ ID NO: 1336659 - DNA, 15 bp, Homo sapiens
aggcgggcagatcat

SEQ ID NO: 1336660 - DNA, 15 bp, Homo sapiens
acggctgggcgcagt

SEQ ID NO: 1336661 - DNA, 15 bp, Homo sapiens
tacggctgggcgcag

SEQ ID NO: 1336662 - DNA, 15 bp, Homo sapiens
atacggctgggcgca

SEQ ID NO: 1336663 - DNA, 15 bp, Homo sapiens
aatacggctgggcgc

SEQ ID NO: 1336664 - DNA, 15 bp, Homo sapiens
aaatacggctgggcg

SEQ ID NO: 1336665 - DNA, 15 bp, Homo sapiens
aaaatacggctgggc

SEQ ID NO: 1336666 - DNA, 15 bp, Homo sapiens
taaaatacggctggg

SEQ ID NO: 1336667 - DNA, 15 bp, Homo sapiens
ataaaatacggctgg

SEQ ID NO: 1336668 - DNA, 15 bp, Homo sapiens
aataaaatacggctg

SEQ ID NO: 1336669 - DNA, 15 bp, Homo sapiens
aaataaaatacggct

SEQ ID NO: 1336670 - DNA, 15 bp, Homo sapiens
aaaataaaatacggc

SEQ ID NO: 1336671 - DNA, 15 bp, Homo sapiens
aaaaataaaatacgg

SEQ ID NO: 1336672 - DNA, 15 bp, Homo sapiens
aaaaaataaaatacg

SEQ ID NO: 1336673 - DNA, 15 bp, Homo sapiens
aaaaaaataaaatac

SEQ ID NO: 1336674 - DNA, 15 bp, Homo sapiens
caaaaaaataaaata

SEQ ID NO: 1336675 - DNA, 15 bp, Homo sapiens
tcaaaaaaataaaat

SEQ ID NO: 1336676 - DNA, 15 bp, Homo sapiens
actcaaaaaaataaa

SEQ ID NO: 1336677 - DNA, 15 bp, Homo sapiens
aactcaaaaaaataa

SEQ ID NO: 1336678 - DNA, 15 bp, Homo sapiens
taactcaaaaaaata

SEQ ID NO: 1336679 - DNA, 15 bp, Homo sapiens
ctaactcaaaaaaat

SEQ ID NO: 1336680 - DNA, 15 bp, Homo sapiens
cctaactcaaaaaaa

SEQ ID NO: 1336681 - DNA, 15 bp, Homo sapiens
ccctaactcaaaaaa

SEQ ID NO: 1336682 - DNA, 15 bp, Homo sapiens
accctaactcaaaaa

SEQ ID NO: 1336683 - DNA, 15 bp, Homo sapiens
gaccctaactcaaaa

SEQ ID NO: 1336684 - DNA, 15 bp, Homo sapiens
agaccctaactcaaa

SEQ ID NO: 1336685 - DNA, 15 bp, Homo sapiens
aagaccctaactcaa

SEQ ID NO: 1336686 - DNA, 15 bp, Homo sapiens
caagaccctaactca

SEQ ID NO: 1336687 - DNA, 15 bp, Homo sapiens
gcaagaccctaactc

SEQ ID NO: 1336688 - DNA, 15 bp, Homo sapiens
agcaagaccctaact

SEQ ID NO: 1336689 - DNA, 15 bp, Homo sapiens
cagcaagaccctaac

SEQ ID NO: 1336690 - DNA, 15 bp, Homo sapiens
acagcaagaccctaa

SEQ ID NO: 1336691 - DNA, 15 bp, Homo sapiens
cacagcaagacccta

SEQ ID NO: 1336692 - DNA, 15 bp, Homo sapiens
acacagcaagaccct

SEQ ID NO: 1336693 - DNA, 15 bp, Homo sapiens
aacacagcaagaccc

SEQ ID NO: 1336694 - DNA, 15 bp, Homo sapiens
caacacagcaagacc

SEQ ID NO: 1336695 - DNA, 15 bp, Homo sapiens
acctgggcaacacag

SEQ ID NO: 1336696 - DNA, 15 bp, Homo sapiens
aacctgggcaacaca

SEQ ID NO: 1336697 - DNA, 15 bp, Homo sapiens
caacctgggcaacac

SEQ ID NO: 1336698 - DNA, 15 bp, Homo sapiens
ctccaacctgggcaa

SEQ ID NO: 1336699 - DNA, 15 bp, Homo sapiens
actccaacctgggca

SEQ ID NO: 1336700 - DNA, 15 bp, Homo sapiens
agccactgcactcca

SEQ ID NO: 1336701 - DNA, 15 bp, Homo sapiens
tagccactgcactcc

SEQ ID NO: 1336702 - DNA, 15 bp, Homo sapiens
ctagccactgcactc

SEQ ID NO: 1336703 - DNA, 15 bp, Homo sapiens
tctagccactgcact

SEQ ID NO: 1336704 - DNA, 15 bp, Homo sapiens
gtctagccactgcac

SEQ ID NO: 1336705 - DNA, 15 bp, Homo sapiens
ggtctagccactgca

SEQ ID NO: 1336706 - DNA, 15 bp, Homo sapiens
cggtctagccactgc

SEQ ID NO: 1336707 - DNA, 15 bp, Homo sapiens
acggtctagccactg

SEQ ID NO: 1336708 - DNA, 15 bp, Homo sapiens
cacggtctagccact

SEQ ID NO: 1336709 - DNA, 15 bp, Homo sapiens
ccacggtctagccac

SEQ ID NO: 1336710 - DNA, 15 bp, Homo sapiens
gccacggtctagcca

SEQ ID NO: 1336711 - DNA, 15 bp, Homo sapiens
agccacggtctagcc

SEQ ID NO: 1336712 - DNA, 15 bp, Homo sapiens
gagccacggtctagc

SEQ ID NO: 1336713 - DNA, 15 bp, Homo sapiens
tgagccacggtctag

SEQ ID NO: 1336714 - DNA, 15 bp, Homo sapiens
gtgagccacggtcta

SEQ ID NO: 1336715 - DNA, 15 bp, Homo sapiens
agtgagccacggtct

SEQ ID NO: 1336716 - DNA, 15 bp, Homo sapiens
cagtgagccacggtc

SEQ ID NO: 1336717 - DNA, 15 bp, Homo sapiens
gcagtgagccacggt

SEQ ID NO: 1336718 - DNA, 15 bp, Homo sapiens
tgcagtgagccacgg

SEQ ID NO: 1336719 - DNA, 15 bp, Homo sapiens
ctgcagtgagccacg

SEQ ID NO: 1336720 - DNA, 15 bp, Homo sapiens
gctgcagtgagccac

SEQ ID NO: 1336721 - DNA, 15 bp, Homo sapiens
aaggtcgaggctgca

SEQ ID NO: 1336722 - DNA, 15 bp, Homo sapiens
gaaggtcgaggctgc

SEQ ID NO: 1336723 - DNA, 15 bp, Homo sapiens
tgaaggtcgaggctg

SEQ ID NO: 1336724 - DNA, 15 bp, Homo sapiens
ctgaaggtcgaggct

SEQ ID NO: 1336725 - DNA, 15 bp, Homo sapiens
cctgaaggtcgaggc

SEQ ID NO: 1336726 - DNA, 15 bp, Homo sapiens
gcctgaaggtcgagg

SEQ ID NO: 1336727 - DNA, 15 bp, Homo sapiens
agcctgaaggtcgag

SEQ ID NO: 1336728 - DNA, 15 bp, Homo sapiens
gagcctgaaggtcga

SEQ ID NO: 1336729 - DNA, 15 bp, Homo sapiens
tgagcctgaaggtcg

SEQ ID NO: 1336730 - DNA, 15 bp, Homo sapiens
ttgagcctgaaggtc

SEQ ID NO: 1336731 - DNA, 15 bp, Homo sapiens
tttgagcctgaaggt

SEQ ID NO: 1336732 - DNA, 15 bp, Homo sapiens
gtttgagcctgaagg

SEQ ID NO: 1336733 - DNA, 15 bp, Homo sapiens
tgtttgagcctgaag

SEQ ID NO: 1336734 - DNA, 15 bp, Homo sapiens
ctgtttgagcctgaa

SEQ ID NO: 1336735 - DNA, 15 bp, Homo sapiens
actgtttgagcctga

SEQ ID NO: 1336736 - DNA, 15 bp, Homo sapiens
gactgtttgagcctg

SEQ ID NO: 1336737 - DNA, 15 bp, Homo sapiens
ggactgtttgagcct

SEQ ID NO: 1336738 - DNA, 15 bp, Homo sapiens
aggactgtttgagcc

SEQ ID NO: 1336739 - DNA, 15 bp, Homo sapiens
gaggactgtttgagc

SEQ ID NO: 1336740 - DNA, 15 bp, Homo sapiens
ggaggactgtttgag

SEQ ID NO: 1336741 - DNA, 15 bp, Homo sapiens
aggaggactgtttga

SEQ ID NO: 1336742 - DNA, 15 bp, Homo sapiens
caggaggactgtttg

SEQ ID NO: 1336743 - DNA, 15 bp, Homo sapiens
gcaggaggactgttt

SEQ ID NO: 1336744 - DNA, 15 bp, Homo sapiens
ggcaggaggactgtt

SEQ ID NO: 1336745 - DNA, 15 bp, Homo sapiens
aggcaggaggactgt

SEQ ID NO: 1336746 - DNA, 15 bp, Homo sapiens
gaggcaggaggactg

SEQ ID NO: 1336747 - DNA, 15 bp, Homo sapiens
tgaggcaggaggact

SEQ ID NO: 1336748 - DNA, 15 bp, Homo sapiens
gagctacttgggagg

SEQ ID NO: 1336749 - DNA, 15 bp, Homo sapiens
cgagctacttgggag

SEQ ID NO: 1336750 - DNA, 15 bp, Homo sapiens
ccgagctacttggga

SEQ ID NO: 1336751 - DNA, 15 bp, Homo sapiens
tccgagctacttggg

SEQ ID NO: 1336752 - DNA, 15 bp, Homo sapiens
gtccgagctacttgg

SEQ ID NO: 1336753 - DNA, 15 bp, Homo sapiens
agtccgagctacttg

SEQ ID NO: 1336754 - DNA, 15 bp, Homo sapiens
tagtccgagctactt

SEQ ID NO: 1336755 - DNA, 15 bp, Homo sapiens
gtagtccgagctact

SEQ ID NO: 1336756 - DNA, 15 bp, Homo sapiens
tgtagtccgagctac

SEQ ID NO: 1336757 - DNA, 15 bp, Homo sapiens
ctgtagtccgagcta

SEQ ID NO: 1336758 - DNA, 15 bp, Homo sapiens
cctgtagtccgagct

SEQ ID NO: 1336759 - DNA, 15 bp, Homo sapiens
gcctgtagtccgagc

SEQ ID NO: 1336760 - DNA, 15 bp, Homo sapiens
cgcctgtagtccgag

SEQ ID NO: 1336761 - DNA, 15 bp, Homo sapiens
gcgcctgtagtccga

SEQ ID NO: 1336762 - DNA, 15 bp, Homo sapiens
tgcgcctgtagtccg

SEQ ID NO: 1336763 - DNA, 15 bp, Homo sapiens
ttgcgcctgtagtcc

SEQ ID NO: 1336764 - DNA, 15 bp, Homo sapiens
tttgcgcctgtagtc

SEQ ID NO: 1336765 - DNA, 15 bp, Homo sapiens
ctttgcgcctgtagt

SEQ ID NO: 1336766 - DNA, 15 bp, Homo sapiens
gctttgcgcctgtag

SEQ ID NO: 1336767 - DNA, 15 bp, Homo sapiens
tgctttgcgcctgta

SEQ ID NO: 1336768 - DNA, 15 bp, Homo sapiens
ctgctttgcgcctgt

SEQ ID NO: 1336769 - DNA, 15 bp, Homo sapiens
cctgctttgcgcctg

SEQ ID NO: 1336770 - DNA, 15 bp, Homo sapiens
tcctgctttgcgcct

SEQ ID NO: 1336771 - DNA, 15 bp, Homo sapiens
atcctgctttgcgcc

SEQ ID NO: 1336772 - DNA, 15 bp, Homo sapiens
catcctgctttgcgc

SEQ ID NO: 1336773 - DNA, 15 bp, Homo sapiens
gcatcctgctttgcg

SEQ ID NO: 1336774 - DNA, 15 bp, Homo sapiens
agcatcctgctttgc

SEQ ID NO: 1336775 - DNA, 15 bp, Homo sapiens
cagcatcctgctttg

SEQ ID NO: 1336776 - DNA, 15 bp, Homo sapiens
ccagcatcctgcttt

SEQ ID NO: 1336777 - DNA, 15 bp, Homo sapiens
tccagcatcctgctt

SEQ ID NO: 1336778 - DNA, 15 bp, Homo sapiens
gtccagcatcctgct

SEQ ID NO: 1336779 - DNA, 15 bp, Homo sapiens
agtccagcatcctgc

SEQ ID NO: 1336780 - DNA, 15 bp, Homo sapiens
tagtccagcatcctg

SEQ ID NO: 1336781 - DNA, 15 bp, Homo sapiens
ttagtccagcatcct

SEQ ID NO: 1336782 - DNA, 15 bp, Homo sapiens
attagtccagcatcc

SEQ ID NO: 1336783 - DNA, 15 bp, Homo sapiens
aattagtccagcatc

SEQ ID NO: 1336784 - DNA, 15 bp, Homo sapiens
aaattagtccagcat

SEQ ID NO: 1336785 - DNA, 15 bp, Homo sapiens
aaaattagtccagca

SEQ ID NO: 1336786 - DNA, 15 bp, Homo sapiens
aaaaattagtccagc

SEQ ID NO: 1336787 - DNA, 15 bp, Homo sapiens
taaaaattagtccag

SEQ ID NO: 1336788 - DNA, 15 bp, Homo sapiens
ttaaaaattagtcca

SEQ ID NO: 1336789 - DNA, 15 bp, Homo sapiens
tttaaaaattagtcc

SEQ ID NO: 1336790 - DNA, 15 bp, Homo sapiens
ctttaaaaattagtc

SEQ ID NO: 1336791 - DNA, 15 bp, Homo sapiens
cctttaaaaattagt

SEQ ID NO: 1336792 - DNA, 15 bp, Homo sapiens
acctttaaaaattag

SEQ ID NO: 1336793 - DNA, 15 bp, Homo sapiens
aacctttaaaaatta

SEQ ID NO: 1336794 - DNA, 15 bp, Homo sapiens
aaacctttaaaaatt

SEQ ID NO: 1336795 - DNA, 15 bp, Homo sapiens
aaaacctttaaaaat

SEQ ID NO: 1336796 - DNA, 15 bp, Homo sapiens
caaaacctttaaaaa

SEQ ID NO: 1336797 - DNA, 15 bp, Homo sapiens
ccaaaacctttaaaa

SEQ ID NO: 1336798 - DNA, 15 bp, Homo sapiens
tccaaaacctttaaa

SEQ ID NO: 1336799 - DNA, 15 bp, Homo sapiens
ctccaaaacctttaa

SEQ ID NO: 1336800 - DNA, 15 bp, Homo sapiens
tctccaaaaccttta

SEQ ID NO: 1336801 - DNA, 15 bp, Homo sapiens
ctctccaaaaccttt

SEQ ID NO: 1336802 - DNA, 15 bp, Homo sapiens
tctctccaaaacctt

SEQ ID NO: 1336803 - DNA, 15 bp, Homo sapiens
atctctccaaaacct

SEQ ID NO: 1336804 - DNA, 15 bp, Homo sapiens
catctctccaaaacc

SEQ ID NO: 1336805 - DNA, 15 bp, Homo sapiens
tcatctctccaaaac

SEQ ID NO: 1336806 - DNA, 15 bp, Homo sapiens
ctcatctctccaaaa

SEQ ID NO: 1336807 - DNA, 15 bp, Homo sapiens
cctcatctctccaaa

SEQ ID NO: 1336808 - DNA, 15 bp, Homo sapiens
acctcatctctccaa

SEQ ID NO: 1336809 - DNA, 15 bp, Homo sapiens
gacctcatctctcca

SEQ ID NO: 1336810 - DNA, 15 bp, Homo sapiens
agacctcatctctcc

SEQ ID NO: 1336811 - DNA, 15 bp, Homo sapiens
cagtgagacctcatc

SEQ ID NO: 1336812 - DNA, 15 bp, Homo sapiens
acagtgagacctcat

SEQ ID NO: 1336813 - DNA, 15 bp, Homo sapiens
cacagtgagacctca

SEQ ID NO: 1336814 - DNA, 15 bp, Homo sapiens
acacagtgagacctc

SEQ ID NO: 1336815 - DNA, 15 bp, Homo sapiens
cacacagtgagacct

SEQ ID NO: 1336816 - DNA, 15 bp, Homo sapiens
ccacacagtgagacc

SEQ ID NO: 1336817 - DNA, 15 bp, Homo sapiens
gccacacagtgagac

SEQ ID NO: 1336818 - DNA, 15 bp, Homo sapiens
ggccacacagtgaga

SEQ ID NO: 1336819 - DNA, 15 bp, Homo sapiens
gggccacacagtgag

SEQ ID NO: 1336820 - DNA, 15 bp, Homo sapiens
tgggccacacagtga

SEQ ID NO: 1336821 - DNA, 15 bp, Homo sapiens
ctgggccacacagtg

SEQ ID NO: 1336822 - DNA, 15 bp, Homo sapiens
cctgggccacacagt

SEQ ID NO: 1336823 - DNA, 15 bp, Homo sapiens
gcctgggccacacag

SEQ ID NO: 1336824 - DNA, 15 bp, Homo sapiens
agcctgggccacaca

SEQ ID NO: 1336825 - DNA, 15 bp, Homo sapiens
cagcctgggccacac

SEQ ID NO: 1336826 - DNA, 15 bp, Homo sapiens
tcagcctgggccaca

SEQ ID NO: 1336827 - DNA, 15 bp, Homo sapiens
atcagcctgggccac

SEQ ID NO: 1336828 - DNA, 15 bp, Homo sapiens
gatcagcctgggcca

SEQ ID NO: 1336829 - DNA, 15 bp, Homo sapiens
agatcagcctgggcc

SEQ ID NO: 1336830 - DNA, 15 bp, Homo sapiens
gagatcagcctgggc

SEQ ID NO: 1336831 - DNA, 15 bp, Homo sapiens
tgagatcagcctggg

SEQ ID NO: 1336832 - DNA, 15 bp, Homo sapiens
tttgagatcagcctg

SEQ ID NO: 1336833 - DNA, 15 bp, Homo sapiens
atttgagatcagcct

SEQ ID NO: 1336834 - DNA, 15 bp, Homo sapiens
aatttgagatcagcc

SEQ ID NO: 1336835 - DNA, 15 bp, Homo sapiens
gaatttgagatcagc

SEQ ID NO: 1336836 - DNA, 15 bp, Homo sapiens
agaatttgagatcag

SEQ ID NO: 1336837 - DNA, 15 bp, Homo sapiens
aagaatttgagatca

SEQ ID NO: 1336838 - DNA, 15 bp, Homo sapiens
caagaatttgagatc

SEQ ID NO: 1336839 - DNA, 15 bp, Homo sapiens
ccaagaatttgagat

SEQ ID NO: 1336840 - DNA, 15 bp, Homo sapiens
accaagaatttgaga

SEQ ID NO: 1336841 - DNA, 15 bp, Homo sapiens
gaccaagaatttgag

SEQ ID NO: 1336842 - DNA, 15 bp, Homo sapiens
agaccaagaatttga

SEQ ID NO: 1336843 - DNA, 15 bp, Homo sapiens
gagaccaagaatttg

SEQ ID NO: 1336844 - DNA, 15 bp, Homo sapiens
tgagaccaagaattt

SEQ ID NO: 1336845 - DNA, 15 bp, Homo sapiens
ttgagaccaagaatt

SEQ ID NO: 1336846 - DNA, 15 bp, Homo sapiens
cttgagaccaagaat

SEQ ID NO: 1336847 - DNA, 15 bp, Homo sapiens
gcttgagaccaagaa

SEQ ID NO: 1336848 - DNA, 15 bp, Homo sapiens
ggcttgagaccaaga

SEQ ID NO: 1336849 - DNA, 15 bp, Homo sapiens
tggcttgagaccaag

SEQ ID NO: 1336850 - DNA, 15 bp, Homo sapiens
atggcttgagaccaa

SEQ ID NO: 1336851 - DNA, 15 bp, Homo sapiens
gatggcttgagacca

SEQ ID NO: 1336852 - DNA, 15 bp, Homo sapiens
ggatggcttgagacc

SEQ ID NO: 1336853 - DNA, 15 bp, Homo sapiens
aggatggcttgagac

SEQ ID NO: 1336854 - DNA, 15 bp, Homo sapiens
aaggatggcttgaga

SEQ ID NO: 1336855 - DNA, 15 bp, Homo sapiens
gaaggatggcttgag

SEQ ID NO: 1336856 - DNA, 15 bp, Homo sapiens
ggaaggatggcttga

SEQ ID NO: 1336857 - DNA, 15 bp, Homo sapiens
tggaaggatggcttg

SEQ ID NO: 1336858 - DNA, 15 bp, Homo sapiens
gtggaaggatggctt

SEQ ID NO: 1336859 - DNA, 15 bp, Homo sapiens
ggtggaaggatggct

SEQ ID NO: 1336860 - DNA, 15 bp, Homo sapiens
aggtggaaggatggc

SEQ ID NO: 1336861 - DNA, 15 bp, Homo sapiens
gaggtggaaggatgg

SEQ ID NO: 1336862 - DNA, 15 bp, Homo sapiens
tgaggtggaaggatg

SEQ ID NO: 1336863 - DNA, 15 bp, Homo sapiens
agctgaggtggaagg

SEQ ID NO: 1336864 - DNA, 15 bp, Homo sapiens
aagctgaggtggaag

SEQ ID NO: 1336865 - DNA, 15 bp, Homo sapiens
gaagctgaggtggaa

SEQ ID NO: 1336866 - DNA, 15 bp, Homo sapiens
ggaagctgaggtgga

SEQ ID NO: 1336867 - DNA, 15 bp, Homo sapiens
aggaagctgaggtgg

SEQ ID NO: 1336868 - DNA, 15 bp, Homo sapiens
taggaagctgaggtg

SEQ ID NO: 1336869 - DNA, 15 bp, Homo sapiens
ttaggaagctgaggt

SEQ ID NO: 1336870 - DNA, 15 bp, Homo sapiens
tttaggaagctgagg

SEQ ID NO: 1336871 - DNA, 15 bp, Homo sapiens
ctttaggaagctgag

SEQ ID NO: 1336872 - DNA, 15 bp, Homo sapiens
actttaggaagctga

SEQ ID NO: 1336873 - DNA, 15 bp, Homo sapiens
cactttaggaagctg

SEQ ID NO: 1336874 - DNA, 15 bp, Homo sapiens
gcactttaggaagct

SEQ ID NO: 1336875 - DNA, 15 bp, Homo sapiens
agcactttaggaagc

SEQ ID NO: 1336876 - DNA, 15 bp, Homo sapiens
cagcactttaggaag

SEQ ID NO: 1336877 - DNA, 15 bp, Homo sapiens
ccagcactttaggaa

SEQ ID NO: 1336878 - DNA, 15 bp, Homo sapiens
atacctataatccca

SEQ ID NO: 1336879 - DNA, 15 bp, Homo sapiens
catacctataatccc

SEQ ID NO: 1336880 - DNA, 15 bp, Homo sapiens
tcatacctataatcc

SEQ ID NO: 1336881 - DNA, 15 bp, Homo sapiens
ctcatacctataatc

SEQ ID NO: 1336882 - DNA, 15 bp, Homo sapiens
gctcatacctataat

SEQ ID NO: 1336883 - DNA, 15 bp, Homo sapiens
ggctcatacctataa

SEQ ID NO: 1336884 - DNA, 15 bp, Homo sapiens
tggctcatacctata

SEQ ID NO: 1336885 - DNA, 15 bp, Homo sapiens
atggctcatacctat

SEQ ID NO: 1336886 - DNA, 15 bp, Homo sapiens
aatggctcataccta

SEQ ID NO: 1336887 - DNA, 15 bp, Homo sapiens
caatggctcatacct

SEQ ID NO: 1336888 - DNA, 15 bp, Homo sapiens
acaatggctcatacc

SEQ ID NO: 1336889 - DNA, 15 bp, Homo sapiens
tacaatggctcatac

SEQ ID NO: 1336890 - DNA, 15 bp, Homo sapiens
gtacaatggctcata

SEQ ID NO: 1336891 - DNA, 15 bp, Homo sapiens
agtacaatggctcat

SEQ ID NO: 1336892 - DNA, 15 bp, Homo sapiens
aagtacaatggctca

SEQ ID NO: 1336893 - DNA, 15 bp, Homo sapiens
caagtacaatggctc

SEQ ID NO: 1336894 - DNA, 15 bp, Homo sapiens
ccaagtacaatggct

SEQ ID NO: 1336895 - DNA, 15 bp, Homo sapiens
gccaagtacaatggc

SEQ ID NO: 1336896 - DNA, 15 bp, Homo sapiens
agccaagtacaatgg

SEQ ID NO: 1336897 - DNA, 15 bp, Homo sapiens
tagccaagtacaatg

SEQ ID NO: 1336898 - DNA, 15 bp, Homo sapiens
ctagccaagtacaat

SEQ ID NO: 1336899 - DNA, 15 bp, Homo sapiens
cctagccaagtacaa

SEQ ID NO: 1336900 - DNA, 15 bp, Homo sapiens
tcctagccaagtaca

SEQ ID NO: 1336901 - DNA, 15 bp, Homo sapiens
gtcctagccaagtac

SEQ ID NO: 1336902 - DNA, 15 bp, Homo sapiens
tgtcctagccaagta

SEQ ID NO: 1336903 - DNA, 15 bp, Homo sapiens
atgtcctagccaagt

SEQ ID NO: 1336904 - DNA, 15 bp, Homo sapiens
aatgtcctagccaag

SEQ ID NO: 1336905 - DNA, 15 bp, Homo sapiens
aaatgtcctagccaa

SEQ ID NO: 1336906 - DNA, 15 bp, Homo sapiens
aaaatgtcctagcca

SEQ ID NO: 1336907 - DNA, 15 bp, Homo sapiens
aaaaatgtcctagcc

SEQ ID NO: 1336908 - DNA, 15 bp, Homo sapiens
aaaaaatgtcctagc

SEQ ID NO: 1336909 - DNA, 15 bp, Homo sapiens
gaaaaaatgtcctag

SEQ ID NO: 1336910 - DNA, 15 bp, Homo sapiens
tgaaaaaatgtccta

SEQ ID NO: 1336911 - DNA, 15 bp, Homo sapiens
gtgaaaaaatgtcct

SEQ ID NO: 1336912 - DNA, 15 bp, Homo sapiens
agtgaaaaaatgtcc

SEQ ID NO: 1336913 - DNA, 15 bp, Homo sapiens
tagtgaaaaaatgtc

SEQ ID NO: 1336914 - DNA, 15 bp, Homo sapiens
gtagtgaaaaaatgt

SEQ ID NO: 1336915 - DNA, 15 bp, Homo sapiens
cgtagtgaaaaaatg

SEQ ID NO: 1336916 - DNA, 15 bp, Homo sapiens
acgtagtgaaaaaat

SEQ ID NO: 1336917 - DNA, 15 bp, Homo sapiens
tacgtagtgaaaaaa

SEQ ID NO: 1336918 - DNA, 15 bp, Homo sapiens
atacgtagtgaaaaa

SEQ ID NO: 1336919 - DNA, 15 bp, Homo sapiens
gatacgtagtgaaaa

SEQ ID NO: 1336920 - DNA, 15 bp, Homo sapiens
ggatacgtagtgaaa

SEQ ID NO: 1336921 - DNA, 15 bp, Homo sapiens
gggatacgtagtgaa

SEQ ID NO: 1336922 - DNA, 15 bp, Homo sapiens
agggatacgtagtga

SEQ ID NO: 1336923 - DNA, 15 bp, Homo sapiens
cagggatacgtagtg

SEQ ID NO: 1336924 - DNA, 15 bp, Homo sapiens
tcagggatacgtagt

SEQ ID NO: 1336925 - DNA, 15 bp, Homo sapiens
gtcagggatacgtag

SEQ ID NO: 1336926 - DNA, 15 bp, Homo sapiens
agtcagggatacgta

SEQ ID NO: 1336927 - DNA, 15 bp, Homo sapiens
tagtcagggatacgt

SEQ ID NO: 1336928 - DNA, 15 bp, Homo sapiens
gtagtcagggatacg

SEQ ID NO: 1336929 - DNA, 15 bp, Homo sapiens
agtagtcagggatac

SEQ ID NO: 1336930 - DNA, 15 bp, Homo sapiens
tagtagtcagggata

SEQ ID NO: 1336931 - DNA, 15 bp, Homo sapiens
ttagtagtcagggat

SEQ ID NO: 1336932 - DNA, 15 bp, Homo sapiens
attagtagtcaggga

SEQ ID NO: 1336933 - DNA, 15 bp, Homo sapiens
tattagtagtcaggg

SEQ ID NO: 1336934 - DNA, 15 bp, Homo sapiens
ctattagtagtcagg

SEQ ID NO: 1336935 - DNA, 15 bp, Homo sapiens
cctattagtagtcag

SEQ ID NO: 1336936 - DNA, 15 bp, Homo sapiens
acctattagtagtca

SEQ ID NO: 1336937 - DNA, 15 bp, Homo sapiens
aacctattagtagtc

SEQ ID NO: 1336938 - DNA, 15 bp, Homo sapiens
aaacctattagtagt

SEQ ID NO: 1336939 - DNA, 15 bp, Homo sapiens
caaacctattagtag

SEQ ID NO: 1336940 - DNA, 15 bp, Homo sapiens
tcaaacctattagta

SEQ ID NO: 1336941 - DNA, 15 bp, Homo sapiens
ctcaaacctattagt

SEQ ID NO: 1336942 - DNA, 15 bp, Homo sapiens
gctcaaacctattag

SEQ ID NO: 1336943 - DNA, 15 bp, Homo sapiens
tgctcaaacctatta

SEQ ID NO: 1336944 - DNA, 15 bp, Homo sapiens
atgctcaaacctatt

SEQ ID NO: 1336945 - DNA, 15 bp, Homo sapiens
tatgctcaaacctat

SEQ ID NO: 1336946 - DNA, 15 bp, Homo sapiens
atatgctcaaaccta

SEQ ID NO: 1336947 - DNA, 15 bp, Homo sapiens
aatatgctcaaacct

SEQ ID NO: 1336948 - DNA, 15 bp, Homo sapiens
aaatatgctcaaacc

SEQ ID NO: 1336949 - DNA, 15 bp, Homo sapiens
aaaatatgctcaaac

SEQ ID NO: 1336950 - DNA, 15 bp, Homo sapiens
taaaatatgctcaaa

SEQ ID NO: 1336951 - DNA, 15 bp, Homo sapiens
ttaaaatatgctcaa

SEQ ID NO: 1336952 - DNA, 15 bp, Homo sapiens
tttaaaatatgctca

SEQ ID NO: 1336953 - DNA, 15 bp, Homo sapiens
atttaaaatatgctc

SEQ ID NO: 1336954 - DNA, 15 bp, Homo sapiens
aatttaaaatatgct

SEQ ID NO: 1336955 - DNA, 15 bp, Homo sapiens
aaatttaaaatatgc

SEQ ID NO: 1336956 - DNA, 15 bp, Homo sapiens
aaaatttaaaatatg

SEQ ID NO: 1336957 - DNA, 15 bp, Homo sapiens
aaaaatttaaaatat

SEQ ID NO: 1336958 - DNA, 15 bp, Homo sapiens
ataaaaatttaaaat

SEQ ID NO: 1336959 - DNA, 15 bp, Homo sapiens
tataaaaatttaaaa

SEQ ID NO: 1336960 - DNA, 15 bp, Homo sapiens
atataaaaatttaaa

SEQ ID NO: 1336961 - DNA, 15 bp, Homo sapiens
aatataaaaatttaa

SEQ ID NO: 1336962 - DNA, 15 bp, Homo sapiens
caatataaaaattta

SEQ ID NO: 1336963 - DNA, 15 bp, Homo sapiens
acaatataaaaattt

SEQ ID NO: 1336964 - DNA, 15 bp, Homo sapiens
gacaatataaaaatt

SEQ ID NO: 1336965 - DNA, 15 bp, Homo sapiens
tgacaatataaaaat

SEQ ID NO: 1336966 - DNA, 15 bp, Homo sapiens
ttgacaatataaaaa

SEQ ID NO: 1336967 - DNA, 15 bp, Homo sapiens
tttgacaatataaaa

SEQ ID NO: 1336968 - DNA, 15 bp, Homo sapiens
atttgacaatataaa

SEQ ID NO: 1336969 - DNA, 15 bp, Homo sapiens
tatttgacaatataa

SEQ ID NO: 1336970 - DNA, 15 bp, Homo sapiens
atatttgacaatata

SEQ ID NO: 1336971 - DNA, 15 bp, Homo sapiens
aatatttgacaatat

SEQ ID NO: 1336972 - DNA, 15 bp, Homo sapiens
aaatatttgacaata

SEQ ID NO: 1336973 - DNA, 15 bp, Homo sapiens
aaaatatttgacaat

SEQ ID NO: 1336974 - DNA, 15 bp, Homo sapiens
aaaaatatttgacaa

SEQ ID NO: 1336975 - DNA, 15 bp, Homo sapiens
taaaaatatttgaca

SEQ ID NO: 1336976 - DNA, 15 bp, Homo sapiens
ataaaaatatttgac

SEQ ID NO: 1336977 - DNA, 15 bp, Homo sapiens
gataaaaatatttga

SEQ ID NO: 1336978 - DNA, 15 bp, Homo sapiens
tgataaaaatatttg

SEQ ID NO: 1336979 - DNA, 15 bp, Homo sapiens
atgataaaaatattt

SEQ ID NO: 1336980 - DNA, 15 bp, Homo sapiens
aatgataaaaatatt

SEQ ID NO: 1336981 - DNA, 15 bp, Homo sapiens
aaatgataaaaatat

SEQ ID NO: 1336982 - DNA, 15 bp, Homo sapiens
taaatgataaaaata

SEQ ID NO: 1336983 - DNA, 15 bp, Homo sapiens
ttaaatgataaaaat

SEQ ID NO: 1336984 - DNA, 15 bp, Homo sapiens
tttaaatgataaaaa

SEQ ID NO: 1336985 - DNA, 15 bp, Homo sapiens
ttttaaatgataaaa

SEQ ID NO: 1336986 - DNA, 15 bp, Homo sapiens
tttttaaatgataaa

SEQ ID NO: 1336987 - DNA, 15 bp, Homo sapiens
ttttttaaatgataa

SEQ ID NO: 1336988 - DNA, 15 bp, Homo sapiens
attttttaaatgata

SEQ ID NO: 1336989 - DNA, 15 bp, Homo sapiens
cattttttaaatgat

SEQ ID NO: 1336990 - DNA, 15 bp, Homo sapiens
ccattttttaaatga

SEQ ID NO: 1336991 - DNA, 15 bp, Homo sapiens
gccattttttaaatg

SEQ ID NO: 1336992 - DNA, 15 bp, Homo sapiens
agccattttttaaat

SEQ ID NO: 1336993 - DNA, 15 bp, Homo sapiens
gagccattttttaaa

SEQ ID NO: 1336994 - DNA, 15 bp, Homo sapiens
ggagccattttttaa

SEQ ID NO: 1336995 - DNA, 15 bp, Homo sapiens
aggagccatttttta

SEQ ID NO: 1336996 - DNA, 15 bp, Homo sapiens
caggagccatttttt

SEQ ID NO: 1336997 - DNA, 15 bp, Homo sapiens
gcaggagccattttt

SEQ ID NO: 1336998 - DNA, 15 bp, Homo sapiens
ggcaggagccatttt

SEQ ID NO: 1336999 - DNA, 15 bp, Homo sapiens
aggcaggagccattt

SEQ ID NO: 1337000 - DNA, 15 bp, Homo sapiens
aaggcaggagccatt

SEQ ID NO: 1337001 - DNA, 15 bp, Homo sapiens
caaggcaggagccat

SEQ ID NO: 1337002 - DNA, 15 bp, Homo sapiens
gcaaggcaggagcca

SEQ ID NO: 1337003 - DNA, 15 bp, Homo sapiens
agcaaggcaggagcc

SEQ ID NO: 1337004 - DNA, 15 bp, Homo sapiens
tagcaaggcaggagc

SEQ ID NO: 1337005 - DNA, 15 bp, Homo sapiens
ttagcaaggcaggag

SEQ ID NO: 1337006 - DNA, 15 bp, Homo sapiens
tttagcaaggcagga

SEQ ID NO: 1337007 - DNA, 15 bp, Homo sapiens
ttttagcaaggcagg

SEQ ID NO: 1337008 - DNA, 15 bp, Homo sapiens
tttttagcaaggcag

SEQ ID NO: 1337009 - DNA, 15 bp, Homo sapiens
ctttttagcaaggca

SEQ ID NO: 1337010 - DNA, 15 bp, Homo sapiens
actttttagcaaggc

SEQ ID NO: 1337011 - DNA, 15 bp, Homo sapiens
aactttttagcaagg

SEQ ID NO: 1337012 - DNA, 15 bp, Homo sapiens
gaactttttagcaag

SEQ ID NO: 1337013 - DNA, 15 bp, Homo sapiens
agaactttttagcaa

SEQ ID NO: 1337014 - DNA, 15 bp, Homo sapiens
aagaactttttagca

SEQ ID NO: 1337015 - DNA, 15 bp, Homo sapiens
aaagaactttttagc

SEQ ID NO: 1337016 - DNA, 15 bp, Homo sapiens
gaaagaactttttag

SEQ ID NO: 1337017 - DNA, 15 bp, Homo sapiens
agaaagaacttttta

SEQ ID NO: 1337018 - DNA, 15 bp, Homo sapiens
aagaaagaacttttt

SEQ ID NO: 1337019 - DNA, 15 bp, Homo sapiens
caagaaagaactttt

SEQ ID NO: 1337020 - DNA, 15 bp, Homo sapiens
tcaagaaagaacttt

SEQ ID NO: 1337021 - DNA, 15 bp, Homo sapiens
atcaagaaagaactt

SEQ ID NO: 1337022 - DNA, 15 bp, Homo sapiens
gatcaagaaagaact

SEQ ID NO: 1337023 - DNA, 15 bp, Homo sapiens
ggatcaagaaagaac

SEQ ID NO: 1337024 - DNA, 15 bp, Homo sapiens
tggatcaagaaagaa

SEQ ID NO: 1337025 - DNA, 15 bp, Homo sapiens
ttggatcaagaaaga

SEQ ID NO: 1337026 - DNA, 15 bp, Homo sapiens
tttggatcaagaaag

SEQ ID NO: 1337027 - DNA, 15 bp, Homo sapiens
ctttggatcaagaaa

SEQ ID NO: 1337028 - DNA, 15 bp, Homo sapiens
actttggatcaagaa

SEQ ID NO: 1337029 - DNA, 15 bp, Homo sapiens
aactttggatcaaga

SEQ ID NO: 1337030 - DNA, 15 bp, Homo sapiens
taactttggatcaag

SEQ ID NO: 1337031 - DNA, 15 bp, Homo sapiens
ataactttggatcaa

SEQ ID NO: 1337032 - DNA, 15 bp, Homo sapiens
tataactttggatca

SEQ ID NO: 1337033 - DNA, 15 bp, Homo sapiens
ttataactttggatc

SEQ ID NO: 1337034 - DNA, 15 bp, Homo sapiens
tttataactttggat

SEQ ID NO: 1337035 - DNA, 15 bp, Homo sapiens
atttataactttgga

SEQ ID NO: 1337036 - DNA, 15 bp, Homo sapiens
tatttataactttgg

SEQ ID NO: 1337037 - DNA, 15 bp, Homo sapiens
atatttataactttg

SEQ ID NO: 1337038 - DNA, 15 bp, Homo sapiens
aatatttataacttt

SEQ ID NO: 1337039 - DNA, 15 bp, Homo sapiens
gaatatttataactt

SEQ ID NO: 1337040 - DNA, 15 bp, Homo sapiens
agaatatttataact

SEQ ID NO: 1337041 - DNA, 15 bp, Homo sapiens
tagaatatttataac

SEQ ID NO: 1337042 - DNA, 15 bp, Homo sapiens
ttagaatatttataa

SEQ ID NO: 1337043 - DNA, 15 bp, Homo sapiens
tttagaatatttata

SEQ ID NO: 1337044 - DNA, 15 bp, Homo sapiens
ttttagaatatttat

SEQ ID NO: 1337045 - DNA, 15 bp, Homo sapiens
attttagaatattta

SEQ ID NO: 1337046 - DNA, 15 bp, Homo sapiens
cattttagaatattt

SEQ ID NO: 1337047 - DNA, 15 bp, Homo sapiens
acattttagaatatt

SEQ ID NO: 1337048 - DNA, 15 bp, Homo sapiens
gacattttagaatat

SEQ ID NO: 1337049 - DNA, 15 bp, Homo sapiens
tgacattttagaata

SEQ ID NO: 1337050 - DNA, 15 bp, Homo sapiens
atgacattttagaat

SEQ ID NO: 1337051 - DNA, 15 bp, Homo sapiens
tatgacattttagaa

SEQ ID NO: 1337052 - DNA, 15 bp, Homo sapiens
atatgacattttaga

SEQ ID NO: 1337053 - DNA, 15 bp, Homo sapiens
aatatgacattttag

SEQ ID NO: 1337054 - DNA, 15 bp, Homo sapiens
aaatatgacatttta

SEQ ID NO: 1337055 - DNA, 15 bp, Homo sapiens
aaaatatgacatttt

SEQ ID NO: 1337056 - DNA, 15 bp, Homo sapiens
aaaaatatgacattt

SEQ ID NO: 1337057 - DNA, 15 bp, Homo sapiens
taaaaatatgacatt

SEQ ID NO: 1337058 - DNA, 15 bp, Homo sapiens
ataaaaatatgacat

SEQ ID NO: 1337059 - DNA, 15 bp, Homo sapiens
aataaaaatatgaca

SEQ ID NO: 1337060 - DNA, 15 bp, Homo sapiens
aaataaaaatatgac

SEQ ID NO: 1337061 - DNA, 15 bp, Homo sapiens
aaaataaaaatatga

SEQ ID NO: 1337062 - DNA, 15 bp, Homo sapiens
aaaaataaaaatatg

SEQ ID NO: 1337063 - DNA, 15 bp, Homo sapiens
caaaaataaaaatat

SEQ ID NO: 1337064 - DNA, 15 bp, Homo sapiens
acaaaaataaaaata

SEQ ID NO: 1337065 - DNA, 15 bp, Homo sapiens
tacaaaaataaaaat

SEQ ID NO: 1337066 - DNA, 15 bp, Homo sapiens
atacaaaaataaaaa

SEQ ID NO: 1337067 - DNA, 15 bp, Homo sapiens
aatacaaaaataaaa

SEQ ID NO: 1337068 - DNA, 15 bp, Homo sapiens
aaatacaaaaataaa

SEQ ID NO: 1337069 - DNA, 15 bp, Homo sapiens
gaaaaaatacaaaaa

SEQ ID NO: 1337070 - DNA, 15 bp, Homo sapiens
tgaaaaaatacaaaa

SEQ ID NO: 1337071 - DNA, 15 bp, Homo sapiens
atgaaaaaatacaaa

SEQ ID NO: 1337072 - DNA, 15 bp, Homo sapiens
aatgaaaaaatacaa

SEQ ID NO: 1337073 - DNA, 15 bp, Homo sapiens
aaatgaaaaaataca

SEQ ID NO: 1337074 - DNA, 15 bp, Homo sapiens
taaatgaaaaaatac

SEQ ID NO: 1337075 - DNA, 15 bp, Homo sapiens
ctaaatgaaaaaata

SEQ ID NO: 1337076 - DNA, 15 bp, Homo sapiens
tctaaatgaaaaaat

SEQ ID NO: 1337077 - DNA, 15 bp, Homo sapiens
atctaaatgaaaaaa

SEQ ID NO: 1337078 - DNA, 15 bp, Homo sapiens
gatctaaatgaaaaa

SEQ ID NO: 1337079 - DNA, 15 bp, Homo sapiens
agatctaaatgaaaa

SEQ ID NO: 1337080 - DNA, 15 bp, Homo sapiens
aagatctaaatgaaa

SEQ ID NO: 1337081 - DNA, 15 bp, Homo sapiens
gaagatctaaatgaa

SEQ ID NO: 1337082 - DNA, 15 bp, Homo sapiens
tgaagatctaaatga

SEQ ID NO: 1337083 - DNA, 15 bp, Homo sapiens
ttgaagatctaaatg

SEQ ID NO: 1337084 - DNA, 15 bp, Homo sapiens
attgaagatctaaat

SEQ ID NO: 1337085 - DNA, 15 bp, Homo sapiens
gattgaagatctaaa

SEQ ID NO: 1337086 - DNA, 15 bp, Homo sapiens
ggattgaagatctaa

SEQ ID NO: 1337087 - DNA, 15 bp, Homo sapiens
tggattgaagatcta

SEQ ID NO: 1337088 - DNA, 15 bp, Homo sapiens
atggattgaagatct

SEQ ID NO: 1337089 - DNA, 15 bp, Homo sapiens
gatggattgaagatc

SEQ ID NO: 1337090 - DNA, 15 bp, Homo sapiens
agatggattgaagat

SEQ ID NO: 1337091 - DNA, 15 bp, Homo sapiens
cagatggattgaaga

SEQ ID NO: 1337092 - DNA, 15 bp, Homo sapiens
ccagatggattgaag

SEQ ID NO: 1337093 - DNA, 15 bp, Homo sapiens
tccagatggattgaa

SEQ ID NO: 1337094 - DNA, 15 bp, Homo sapiens
ttccagatggattga

SEQ ID NO: 1337095 - DNA, 15 bp, Homo sapiens
attccagatggattg

SEQ ID NO: 1337096 - DNA, 15 bp, Homo sapiens
aattccagatggatt

SEQ ID NO: 1337097 - DNA, 15 bp, Homo sapiens
aaattccagatggat

SEQ ID NO: 1337098 - DNA, 15 bp, Homo sapiens
aaaattccagatgga

SEQ ID NO: 1337099 - DNA, 15 bp, Homo sapiens
aaaaattccagatgg

SEQ ID NO: 1337100 - DNA, 15 bp, Homo sapiens
taaaaattccagatg

SEQ ID NO: 1337101 - DNA, 15 bp, Homo sapiens
ttaaaaattccagat

SEQ ID NO: 1337102 - DNA, 15 bp, Homo sapiens
attaaaaattccaga

SEQ ID NO: 1337103 - DNA, 15 bp, Homo sapiens
aattaaaaattccag

SEQ ID NO: 1337104 - DNA, 15 bp, Homo sapiens
aaattaaaaattcca

SEQ ID NO: 1337105 - DNA, 15 bp, Homo sapiens
aaaattaaaaattcc

SEQ ID NO: 1337106 - DNA, 15 bp, Homo sapiens
aaaaattaaaaattc

SEQ ID NO: 1337107 - DNA, 15 bp, Homo sapiens
aaaaaattaaaaatt

SEQ ID NO: 1337108 - DNA, 15 bp, Homo sapiens
taaaaaattaaaaat

SEQ ID NO: 1337109 - DNA, 15 bp, Homo sapiens
ataaaaaattaaaaa

SEQ ID NO: 1337110 - DNA, 15 bp, Homo sapiens
tataaaaaattaaaa

SEQ ID NO: 1337111 - DNA, 15 bp, Homo sapiens
atataaaaaattaaa

SEQ ID NO: 1337112 - DNA, 15 bp, Homo sapiens
aatataaaaaattaa

SEQ ID NO: 1337113 - DNA, 15 bp, Homo sapiens
aaatataaaaaatta

SEQ ID NO: 1337114 - DNA, 15 bp, Homo sapiens
aaaatataaaaaatt

SEQ ID NO: 1337115 - DNA, 15 bp, Homo sapiens
aaaaatataaaaaat

SEQ ID NO: 1337116 - DNA, 15 bp, Homo sapiens
caaaaatataaaaaa

SEQ ID NO: 1337117 - DNA, 15 bp, Homo sapiens
tcaaaaatataaaaa

SEQ ID NO: 1337118 - DNA, 15 bp, Homo sapiens
ctcaaaaatataaaa

SEQ ID NO: 1337119 - DNA, 15 bp, Homo sapiens
tctcaaaaatataaa

SEQ ID NO: 1337120 - DNA, 15 bp, Homo sapiens
atctcaaaaatataa

SEQ ID NO: 1337121 - DNA, 15 bp, Homo sapiens
catctcaaaaatata

SEQ ID NO: 1337122 - DNA, 15 bp, Homo sapiens
tcatctcaaaaatat

SEQ ID NO: 1337123 - DNA, 15 bp, Homo sapiens
ttcatctcaaaaata

SEQ ID NO: 1337124 - DNA, 15 bp, Homo sapiens
cttcatctcaaaaat

SEQ ID NO: 1337125 - DNA, 15 bp, Homo sapiens
acttcatctcaaaaa

SEQ ID NO: 1337126 - DNA, 15 bp, Homo sapiens
aacttcatctcaaaa

SEQ ID NO: 1337127 - DNA, 15 bp, Homo sapiens
aaacttcatctcaaa

SEQ ID NO: 1337128 - DNA, 15 bp, Homo sapiens
aaaacttcatctcaa

SEQ ID NO: 1337129 - DNA, 15 bp, Homo sapiens
caaaacttcatctca

SEQ ID NO: 1337130 - DNA, 15 bp, Homo sapiens
gcaaaacttcatctc

SEQ ID NO: 1337131 - DNA, 15 bp, Homo sapiens
agcaaaacttcatct

SEQ ID NO: 1337132 - DNA, 15 bp, Homo sapiens
gagcaaaacttcatc

SEQ ID NO: 1337133 - DNA, 15 bp, Homo sapiens
agagcaaaacttcat

SEQ ID NO: 1337134 - DNA, 15 bp, Homo sapiens
aagagcaaaacttca

SEQ ID NO: 1337135 - DNA, 15 bp, Homo sapiens
caagagcaaaacttc

SEQ ID NO: 1337136 - DNA, 15 bp, Homo sapiens
acaagagcaaaactt

SEQ ID NO: 1337137 - DNA, 15 bp, Homo sapiens
agggcaacaagagca

SEQ ID NO: 1337138 - DNA, 15 bp, Homo sapiens
cagggcaacaagagc

SEQ ID NO: 1337139 - DNA, 15 bp, Homo sapiens
ccagggcaacaagag

SEQ ID NO: 1337140 - DNA, 15 bp, Homo sapiens
gccagggcaacaaga

SEQ ID NO: 1337141 - DNA, 15 bp, Homo sapiens
agccagggcaacaag

SEQ ID NO: 1337142 - DNA, 15 bp, Homo sapiens
cagccagggcaacaa

SEQ ID NO: 1337143 - DNA, 15 bp, Homo sapiens
tccagccagggcaac

SEQ ID NO: 1337144 - DNA, 15 bp, Homo sapiens
ctccagccagggcaa

SEQ ID NO: 1337145 - DNA, 15 bp, Homo sapiens
actccagccagggca

SEQ ID NO: 1337146 - DNA, 15 bp, Homo sapiens
cactccagccagggc

SEQ ID NO: 1337147 - DNA, 15 bp, Homo sapiens
ttgcactccagccag

SEQ ID NO: 1337148 - DNA, 15 bp, Homo sapiens
attgcactccagcca

SEQ ID NO: 1337149 - DNA, 15 bp, Homo sapiens
gattgcaccattgca

SEQ ID NO: 1337150 - DNA, 15 bp, Homo sapiens
agattgcaccattgc

SEQ ID NO: 1337151 - DNA, 15 bp, Homo sapiens
attgcagtgagccga

SEQ ID NO: 1337152 - DNA, 15 bp, Homo sapiens
gattgcagtgagccg

SEQ ID NO: 1337153 - DNA, 15 bp, Homo sapiens
agattgcagtgagcc

SEQ ID NO: 1337154 - DNA, 15 bp, Homo sapiens
gaggagaattgcttg

SEQ ID NO: 1337155 - DNA, 15 bp, Homo sapiens
ggaggagaattgctt

SEQ ID NO: 1337156 - DNA, 15 bp, Homo sapiens
gggaggagaattgct

SEQ ID NO: 1337157 - DNA, 15 bp, Homo sapiens
agggaggagaattgc

SEQ ID NO: 1337158 - DNA, 15 bp, Homo sapiens
gagggaggagaattg

SEQ ID NO: 1337159 - DNA, 15 bp, Homo sapiens
tgagggaggagaatt

SEQ ID NO: 1337160 - DNA, 15 bp, Homo sapiens
ctgagggaggagaat

SEQ ID NO: 1337161 - DNA, 15 bp, Homo sapiens
gctgagggaggagaa

SEQ ID NO: 1337162 - DNA, 15 bp, Homo sapiens
ggctgagggaggaga

SEQ ID NO: 1337163 - DNA, 15 bp, Homo sapiens
actacttgggaggct

SEQ ID NO: 1337164 - DNA, 15 bp, Homo sapiens
aactacttgggaggc

SEQ ID NO: 1337165 - DNA, 15 bp, Homo sapiens
caactacttgggagg

SEQ ID NO: 1337166 - DNA, 15 bp, Homo sapiens
ccaactacttgggag

SEQ ID NO: 1337167 - DNA, 15 bp, Homo sapiens
cccaactacttggga

SEQ ID NO: 1337168 - DNA, 15 bp, Homo sapiens
tcccaactacttggg

SEQ ID NO: 1337169 - DNA, 15 bp, Homo sapiens
atcccaactacttgg

SEQ ID NO: 1337170 - DNA, 15 bp, Homo sapiens
aatcccaactacttg

SEQ ID NO: 1337171 - DNA, 15 bp, Homo sapiens
taatcccaactactt

SEQ ID NO: 1337172 - DNA, 15 bp, Homo sapiens
ttcctgtaatcccaa

SEQ ID NO: 1337173 - DNA, 15 bp, Homo sapiens
acattcctgtaatcc

SEQ ID NO: 1337174 - DNA, 15 bp, Homo sapiens
cacattcctgtaatc

SEQ ID NO: 1337175 - DNA, 15 bp, Homo sapiens
gcacattcctgtaat

SEQ ID NO: 1337176 - DNA, 15 bp, Homo sapiens
ggcacattcctgtaa

SEQ ID NO: 1337177 - DNA, 15 bp, Homo sapiens
tggcacattcctgta

SEQ ID NO: 1337178 - DNA, 15 bp, Homo sapiens
gtggcacattcctgt

SEQ ID NO: 1337179 - DNA, 15 bp, Homo sapiens
ggtggcacattcctg

SEQ ID NO: 1337180 - DNA, 15 bp, Homo sapiens
tggtggcacattcct

SEQ ID NO: 1337181 - DNA, 15 bp, Homo sapiens
gtggtggcacattcc

SEQ ID NO: 1337182 - DNA, 15 bp, Homo sapiens
tgtggtggcacattc

SEQ ID NO: 1337183 - DNA, 15 bp, Homo sapiens
gtgtggtggcacatt

SEQ ID NO: 1337184 - DNA, 15 bp, Homo sapiens
taaattagccaggtg

SEQ ID NO: 1337185 - DNA, 15 bp, Homo sapiens
ataaattagccaggt

SEQ ID NO: 1337186 - DNA, 15 bp, Homo sapiens
aataaattagccagg

SEQ ID NO: 1337187 - DNA, 15 bp, Homo sapiens
aaataaattagccag

SEQ ID NO: 1337188 - DNA, 15 bp, Homo sapiens
aaaataaattagcca

SEQ ID NO: 1337189 - DNA, 15 bp, Homo sapiens
aaaaataaattagcc

SEQ ID NO: 1337190 - DNA, 15 bp, Homo sapiens
aaaaaataaattagc

SEQ ID NO: 1337191 - DNA, 15 bp, Homo sapiens
taaaaaataaattag

SEQ ID NO: 1337192 - DNA, 15 bp, Homo sapiens
ctaaaaaataaatta

SEQ ID NO: 1337193 - DNA, 15 bp, Homo sapiens
actaaaaaataaatt

SEQ ID NO: 1337194 - DNA, 15 bp, Homo sapiens
tactaaaaaataaat

SEQ ID NO: 1337195 - DNA, 15 bp, Homo sapiens
ctactaaaaaataaa

SEQ ID NO: 1337196 - DNA, 15 bp, Homo sapiens
tctactaaaaaataa

SEQ ID NO: 1337197 - DNA, 15 bp, Homo sapiens
actctactaaaaaat

SEQ ID NO: 1337198 - DNA, 15 bp, Homo sapiens
gactctactaaaaaa

SEQ ID NO: 1337199 - DNA, 15 bp, Homo sapiens
tgactctactaaaaa

SEQ ID NO: 1337200 - DNA, 15 bp, Homo sapiens
ctgactctactaaaa

SEQ ID NO: 1337201 - DNA, 15 bp, Homo sapiens
actgactctactaaa

SEQ ID NO: 1337202 - DNA, 15 bp, Homo sapiens
tactgactctactaa

SEQ ID NO: 1337203 - DNA, 15 bp, Homo sapiens
ctactgactctacta

SEQ ID NO: 1337204 - DNA, 15 bp, Homo sapiens
actactgactctact

SEQ ID NO: 1337205 - DNA, 15 bp, Homo sapiens
tactactgactctac

SEQ ID NO: 1337206 - DNA, 15 bp, Homo sapiens
ctactactgactcta

SEQ ID NO: 1337207 - DNA, 15 bp, Homo sapiens
actactactgactct

SEQ ID NO: 1337208 - DNA, 15 bp, Homo sapiens
aactactactgactc

SEQ ID NO: 1337209 - DNA, 15 bp, Homo sapiens
aaactactactgact

SEQ ID NO: 1337210 - DNA, 15 bp, Homo sapiens
caaactactactgac

SEQ ID NO: 1337211 - DNA, 15 bp, Homo sapiens
acaaactactactga

SEQ ID NO: 1337212 - DNA, 15 bp, Homo sapiens
gacaaactactactg

SEQ ID NO: 1337213 - DNA, 15 bp, Homo sapiens
ggacaaactactact

SEQ ID NO: 1337214 - DNA, 15 bp, Homo sapiens
tggacaaactactac

SEQ ID NO: 1337215 - DNA, 15 bp, Homo sapiens
atggacaaactacta

SEQ ID NO: 1337216 - DNA, 15 bp, Homo sapiens
catggacaaactact

SEQ ID NO: 1337217 - DNA, 15 bp, Homo sapiens
acatggacaaactac

SEQ ID NO: 1337218 - DNA, 15 bp, Homo sapiens
aacatggacaaacta

SEQ ID NO: 1337219 - DNA, 15 bp, Homo sapiens
caacatggacaaact

SEQ ID NO: 1337220 - DNA, 15 bp, Homo sapiens
ccaacatggacaaac

SEQ ID NO: 1337221 - DNA, 15 bp, Homo sapiens
gccaacatggacaaa

SEQ ID NO: 1337222 - DNA, 15 bp, Homo sapiens
ggccaacatggacaa

SEQ ID NO: 1337223 - DNA, 15 bp, Homo sapiens
tggccaacatggaca

SEQ ID NO: 1337224 - DNA, 15 bp, Homo sapiens
ctggccaacatggac

SEQ ID NO: 1337225 - DNA, 15 bp, Homo sapiens
tcgggagttcaagac

SEQ ID NO: 1337226 - DNA, 15 bp, Homo sapiens
gtcgggagttcaaga

SEQ ID NO: 1337227 - DNA, 15 bp, Homo sapiens
agtcgggagttcaag

SEQ ID NO: 1337228 - DNA, 15 bp, Homo sapiens
aagtcgggagttcaa

SEQ ID NO: 1337229 - DNA, 15 bp, Homo sapiens
gaagtcgggagttca

SEQ ID NO: 1337230 - DNA, 15 bp, Homo sapiens
tgaagtcgggagttc

SEQ ID NO: 1337231 - DNA, 15 bp, Homo sapiens
ctgaagtcgggagtt

SEQ ID NO: 1337232 - DNA, 15 bp, Homo sapiens
cctgaagtcgggagt

SEQ ID NO: 1337233 - DNA, 15 bp, Homo sapiens
acctgaagtcgggag

SEQ ID NO: 1337234 - DNA, 15 bp, Homo sapiens
cacctgaagtcggga

SEQ ID NO: 1337235 - DNA, 15 bp, Homo sapiens
tcacctgaagtcggg

SEQ ID NO: 1337236 - DNA, 15 bp, Homo sapiens
atcacctgaagtcgg

SEQ ID NO: 1337237 - DNA, 15 bp, Homo sapiens
gatcacctgaagtcg

SEQ ID NO: 1337238 - DNA, 15 bp, Homo sapiens
agatcacctgaagtc

SEQ ID NO: 1337239 - DNA, 15 bp, Homo sapiens
cagatcacctgaagt

SEQ ID NO: 1337240 - DNA, 15 bp, Homo sapiens
gcagatcacctgaag

SEQ ID NO: 1337241 - DNA, 15 bp, Homo sapiens
ggcagatcacctgaa

SEQ ID NO: 1337242 - DNA, 15 bp, Homo sapiens
ggggcagatcacctg

SEQ ID NO: 1337243 - DNA, 15 bp, Homo sapiens
gggggcagatcacct

SEQ ID NO: 1337244 - DNA, 15 bp, Homo sapiens
ggggggcagatcacc

SEQ ID NO: 1337245 - DNA, 15 bp, Homo sapiens
gggggggcagatcac

SEQ ID NO: 1337246 - DNA, 15 bp, Homo sapiens
agggggggcagatca

SEQ ID NO: 1337247 - DNA, 15 bp, Homo sapiens
gagggggggcagatc

SEQ ID NO: 1337248 - DNA, 15 bp, Homo sapiens
tgagggggggcagat

SEQ ID NO: 1337249 - DNA, 15 bp, Homo sapiens
ctgagggggggcaga

SEQ ID NO: 1337250 - DNA, 15 bp, Homo sapiens
gctgagggggggcag

SEQ ID NO: 1337251 - DNA, 15 bp, Homo sapiens
ggctgagggggggca

SEQ ID NO: 1337252 - DNA, 15 bp, Homo sapiens
aggctgagggggggc

SEQ ID NO: 1337253 - DNA, 15 bp, Homo sapiens
gaggctgaggggggg

SEQ ID NO: 1337254 - DNA, 15 bp, Homo sapiens
gcggtggctcactcc

SEQ ID NO: 1337255 - DNA, 15 bp, Homo sapiens
cgcggtggctcactc

SEQ ID NO: 1337256 - DNA, 15 bp, Homo sapiens
gcgcggtggctcact

SEQ ID NO: 1337257 - DNA, 15 bp, Homo sapiens
agccaggcgcggtgg

SEQ ID NO: 1337258 - DNA, 15 bp, Homo sapiens
cagccaggcgcggtg

SEQ ID NO: 1337259 - DNA, 15 bp, Homo sapiens
ccagccaggcgcggt

SEQ ID NO: 1337260 - DNA, 15 bp, Homo sapiens
tccagccaggcgcgg

SEQ ID NO: 1337261 - DNA, 15 bp, Homo sapiens
ttccagccaggcgcg

SEQ ID NO: 1337262 - DNA, 15 bp, Homo sapiens
attccagccaggcgc

SEQ ID NO: 1337263 - DNA, 15 bp, Homo sapiens
aattccagccaggcg

SEQ ID NO: 1337264 - DNA, 15 bp, Homo sapiens
aaattccagccaggc

SEQ ID NO: 1337265 - DNA, 15 bp, Homo sapiens
taaattccagccagg

SEQ ID NO: 1337266 - DNA, 15 bp, Homo sapiens
ataaattccagccag

SEQ ID NO: 1337267 - DNA, 15 bp, Homo sapiens
aataaattccagcca

SEQ ID NO: 1337268 - DNA, 15 bp, Homo sapiens
aaataaattccagcc

SEQ ID NO: 1337269 - DNA, 15 bp, Homo sapiens
aaaataaattccagc

SEQ ID NO: 1337270 - DNA, 15 bp, Homo sapiens
gaaaataaattccag

SEQ ID NO: 1337271 - DNA, 15 bp, Homo sapiens
cgaaaataaattcca

SEQ ID NO: 1337272 - DNA, 15 bp, Homo sapiens
acgaaaataaattcc

SEQ ID NO: 1337273 - DNA, 15 bp, Homo sapiens
tacgaaaataaattc

SEQ ID NO: 1337274 - DNA, 15 bp, Homo sapiens
atacgaaaataaatt

SEQ ID NO: 1337275 - DNA, 15 bp, Homo sapiens
tatacgaaaataaat

SEQ ID NO: 1337276 - DNA, 15 bp, Homo sapiens
atatacgaaaataaa

SEQ ID NO: 1337277 - DNA, 15 bp, Homo sapiens
aatatacgaaaataa

SEQ ID NO: 1337278 - DNA, 15 bp, Homo sapiens
caatatacgaaaata

SEQ ID NO: 1337279 - DNA, 15 bp, Homo sapiens
acaatatacgaaaat

SEQ ID NO: 1337280 - DNA, 15 bp, Homo sapiens
cacaatatacgaaaa

SEQ ID NO: 1337281 - DNA, 15 bp, Homo sapiens
acacaatatacgaaa

SEQ ID NO: 1337282 - DNA, 15 bp, Homo sapiens
cacacaatatacgaa

SEQ ID NO: 1337283 - DNA, 15 bp, Homo sapiens
tcacacaatatacga

SEQ ID NO: 1337284 - DNA, 15 bp, Homo sapiens
ttcacacaatatacg

SEQ ID NO: 1337285 - DNA, 15 bp, Homo sapiens
cttcacacaatatac

SEQ ID NO: 1337286 - DNA, 15 bp, Homo sapiens
acttcacacaatata

SEQ ID NO: 1337287 - DNA, 15 bp, Homo sapiens
tacttcacacaatat

SEQ ID NO: 1337288 - DNA, 15 bp, Homo sapiens
ctacttcacacaata

SEQ ID NO: 1337289 - DNA, 15 bp, Homo sapiens
cctacttcacacaat

SEQ ID NO: 1337290 - DNA, 15 bp, Homo sapiens
ccctacttcacacaa

SEQ ID NO: 1337291 - DNA, 15 bp, Homo sapiens
tccctacttcacaca

SEQ ID NO: 1337292 - DNA, 15 bp, Homo sapiens
atccctacttcacac

SEQ ID NO: 1337293 - DNA, 15 bp, Homo sapiens
aatccctacttcaca

SEQ ID NO: 1337294 - DNA, 15 bp, Homo sapiens
aaatccctacttcac

SEQ ID NO: 1337295 - DNA, 15 bp, Homo sapiens
gaaatccctacttca

SEQ ID NO: 1337296 - DNA, 15 bp, Homo sapiens
ggaaatccctacttc

SEQ ID NO: 1337297 - DNA, 15 bp, Homo sapiens
tggaaatccctactt

SEQ ID NO: 1337298 - DNA, 15 bp, Homo sapiens
atggaaatccctact

SEQ ID NO: 1337299 - DNA, 15 bp, Homo sapiens
aatggaaatccctac

SEQ ID NO: 1337300 - DNA, 15 bp, Homo sapiens
acaaatggaaatccc

SEQ ID NO: 1337301 - DNA, 15 bp, Homo sapiens
cacaaatggaaatcc

SEQ ID NO: 1337302 - DNA, 15 bp, Homo sapiens
acacaaatggaaatc

SEQ ID NO: 1337303 - DNA, 15 bp, Homo sapiens
aacacaaatggaaat

SEQ ID NO: 1337304 - DNA, 15 bp, Homo sapiens
aaacacaaatggaaa

SEQ ID NO: 1337305 - DNA, 15 bp, Homo sapiens
aaaacacaaatggaa

SEQ ID NO: 1337306 - DNA, 15 bp, Homo sapiens
aaaaacacaaatgga

SEQ ID NO: 1337307 - DNA, 15 bp, Homo sapiens
gaaaaacacaaatgg

SEQ ID NO: 1337308 - DNA, 15 bp, Homo sapiens
ctgaaaaacacaaat

SEQ ID NO: 1337309 - DNA, 15 bp, Homo sapiens
actgaaaaacacaaa

SEQ ID NO: 1337310 - DNA, 15 bp, Homo sapiens
aactgaaaaacacaa

SEQ ID NO: 1337311 - DNA, 15 bp, Homo sapiens
aaactgaaaaacaca

SEQ ID NO: 1337312 - DNA, 15 bp, Homo sapiens
aaaactgaaaaacac

SEQ ID NO: 1337313 - DNA, 15 bp, Homo sapiens
caaaactgaaaaaca

SEQ ID NO: 1337314 - DNA, 15 bp, Homo sapiens
tcaaaactgaaaaac

SEQ ID NO: 1337315 - DNA, 15 bp, Homo sapiens
gtcaaaactgaaaaa

SEQ ID NO: 1337316 - DNA, 15 bp, Homo sapiens
tgtcaaaactgaaaa

SEQ ID NO: 1337317 - DNA, 15 bp, Homo sapiens
ttgtcaaaactgaaa

SEQ ID NO: 1337318 - DNA, 15 bp, Homo sapiens
attgtcaaaactgaa

SEQ ID NO: 1337319 - DNA, 15 bp, Homo sapiens
tattgtcaaaactga

SEQ ID NO: 1337320 - DNA, 15 bp, Homo sapiens
ttattgtcaaaactg

SEQ ID NO: 1337321 - DNA, 15 bp, Homo sapiens
gttattgtcaaaact

SEQ ID NO: 1337322 - DNA, 15 bp, Homo sapiens
tgttattgtcaaaac

SEQ ID NO: 1337323 - DNA, 15 bp, Homo sapiens
atgttattgtcaaaa

SEQ ID NO: 1337324 - DNA, 15 bp, Homo sapiens
aatgttattgtcaaa

SEQ ID NO: 1337325 - DNA, 15 bp, Homo sapiens
aaatgttattgtcaa

SEQ ID NO: 1337326 - DNA, 15 bp, Homo sapiens
aaaatgttattgtca

SEQ ID NO: 1337327 - DNA, 15 bp, Homo sapiens
taaaatgttattgtc

SEQ ID NO: 1337328 - DNA, 15 bp, Homo sapiens
ataaaatgttattgt

SEQ ID NO: 1337329 - DNA, 15 bp, Homo sapiens
aataaaatgttattg

SEQ ID NO: 1337330 - DNA, 15 bp, Homo sapiens
taataaaatgttatt

SEQ ID NO: 1337331 - DNA, 15 bp, Homo sapiens
ctaataaaatgttat

SEQ ID NO: 1337332 - DNA, 15 bp, Homo sapiens
actaataaaatgtta

SEQ ID NO: 1337333 - DNA, 15 bp, Homo sapiens
tactaataaaatgtt

SEQ ID NO: 1337334 - DNA, 15 bp, Homo sapiens
gtactaataaaatgt

SEQ ID NO: 1337335 - DNA, 15 bp, Homo sapiens
tgtactaataaaatg

SEQ ID NO: 1337336 - DNA, 15 bp, Homo sapiens
ttgtactaataaaat

SEQ ID NO: 1337337 - DNA, 15 bp, Homo sapiens
tttgtactaataaaa

SEQ ID NO: 1337338 - DNA, 15 bp, Homo sapiens
ttttgtactaataaa

SEQ ID NO: 1337339 - DNA, 15 bp, Homo sapiens
cttttgtactaataa

SEQ ID NO: 1337340 - DNA, 15 bp, Homo sapiens
tcttttgtactaata

SEQ ID NO: 1337341 - DNA, 15 bp, Homo sapiens
ctcttttgtactaat

SEQ ID NO: 1337342 - DNA, 15 bp, Homo sapiens
actcttttgtactaa

SEQ ID NO: 1337343 - DNA, 15 bp, Homo sapiens
aactcttttgtacta

SEQ ID NO: 1337344 - DNA, 15 bp, Homo sapiens
caactcttttgtact

SEQ ID NO: 1337345 - DNA, 15 bp, Homo sapiens
tcaactcttttgtac

SEQ ID NO: 1337346 - DNA, 15 bp, Homo sapiens
atcaactcttttgta

SEQ ID NO: 1337347 - DNA, 15 bp, Homo sapiens
tatcaactcttttgt

SEQ ID NO: 1337348 - DNA, 15 bp, Homo sapiens
gtatcaactcttttg

SEQ ID NO: 1337349 - DNA, 15 bp, Homo sapiens
agtatcaactctttt

SEQ ID NO: 1337350 - DNA, 15 bp, Homo sapiens
tagtatcaactcttt

SEQ ID NO: 1337351 - DNA, 15 bp, Homo sapiens
ttagtatcaactctt

SEQ ID NO: 1337352 - DNA, 15 bp, Homo sapiens
gttagtatcaactct

SEQ ID NO: 1337353 - DNA, 15 bp, Homo sapiens
agttagtatcaactc

SEQ ID NO: 1337354 - DNA, 15 bp, Homo sapiens
gagttagtatcaact

SEQ ID NO: 1337355 - DNA, 15 bp, Homo sapiens
ggagttagtatcaac

SEQ ID NO: 1337356 - DNA, 15 bp, Homo sapiens
gggagttagtatcaa

SEQ ID NO: 1337357 - DNA, 15 bp, Homo sapiens
agggagttagtatca

SEQ ID NO: 1337358 - DNA, 15 bp, Homo sapiens
aagggagttagtatc

SEQ ID NO: 1337359 - DNA, 15 bp, Homo sapiens
taagggagttagtat

SEQ ID NO: 1337360 - DNA, 15 bp, Homo sapiens
gtaagggagttagta

SEQ ID NO: 1337361 - DNA, 15 bp, Homo sapiens
agtaagggagttagt

SEQ ID NO: 1337362 - DNA, 15 bp, Homo sapiens
tagtaagggagttag

SEQ ID NO: 1337363 - DNA, 15 bp, Homo sapiens
ttagtaagggagtta

SEQ ID NO: 1337364 - DNA, 15 bp, Homo sapiens
attagtaagggagtt

SEQ ID NO: 1337365 - DNA, 15 bp, Homo sapiens
aattagtaagggagt

SEQ ID NO: 1337366 - DNA, 15 bp, Homo sapiens
caattagtaagggag

SEQ ID NO: 1337367 - DNA, 15 bp, Homo sapiens
acaattagtaaggga

SEQ ID NO: 1337368 - DNA, 15 bp, Homo sapiens
tacaattagtaaggg

SEQ ID NO: 1337369 - DNA, 15 bp, Homo sapiens
ctacaattagtaagg

SEQ ID NO: 1337370 - DNA, 15 bp, Homo sapiens
actacaattagtaag

SEQ ID NO: 1337371 - DNA, 15 bp, Homo sapiens
gactacaattagtaa

SEQ ID NO: 1337372 - DNA, 15 bp, Homo sapiens
tgactacaattagta

SEQ ID NO: 1337373 - DNA, 15 bp, Homo sapiens
gtgactacaattagt

SEQ ID NO: 1337374 - DNA, 15 bp, Homo sapiens
tgtgactacaattag

SEQ ID NO: 1337375 - DNA, 15 bp, Homo sapiens
atgtgactacaatta

SEQ ID NO: 1337376 - DNA, 15 bp, Homo sapiens
catgtgactacaatt

SEQ ID NO: 1337377 - DNA, 15 bp, Homo sapiens
tcatgtgactacaat

SEQ ID NO: 1337378 - DNA, 15 bp, Homo sapiens
ctcatgtgactacaa

SEQ ID NO: 1337379 - DNA, 15 bp, Homo sapiens
tctcatgtgactaca

SEQ ID NO: 1337380 - DNA, 15 bp, Homo sapiens
gtctcatgtgactac

SEQ ID NO: 1337381 - DNA, 15 bp, Homo sapiens
agtctcatgtgacta

SEQ ID NO: 1337382 - DNA, 15 bp, Homo sapiens
cagtctcatgtgact

SEQ ID NO: 1337383 - DNA, 15 bp, Homo sapiens
tcagtctcatgtgac

SEQ ID NO: 1337384 - DNA, 15 bp, Homo sapiens
atcagtctcatgtga

SEQ ID NO: 1337385 - DNA, 15 bp, Homo sapiens
tatcagtctcatgtg

SEQ ID NO: 1337386 - DNA, 15 bp, Homo sapiens
atatcagtctcatgt

SEQ ID NO: 1337387 - DNA, 15 bp, Homo sapiens
gatatcagtctcatg

SEQ ID NO: 1337388 - DNA, 15 bp, Homo sapiens
tgatatcagtctcat

SEQ ID NO: 1337389 - DNA, 15 bp, Homo sapiens
ctgatatcagtctca

SEQ ID NO: 1337390 - DNA, 15 bp, Homo sapiens
tctgatatcagtctc

SEQ ID NO: 1337391 - DNA, 15 bp, Homo sapiens
ctctgatatcagtct

SEQ ID NO: 1337392 - DNA, 15 bp, Homo sapiens
gctctgatatcagtc

SEQ ID NO: 1337393 - DNA, 15 bp, Homo sapiens
agctctgatatcagt

SEQ ID NO: 1337394 - DNA, 15 bp, Homo sapiens
tagctctgatatcag

SEQ ID NO: 1337395 - DNA, 15 bp, Homo sapiens
atagctctgatatca

SEQ ID NO: 1337396 - DNA, 15 bp, Homo sapiens
aatagctctgatatc

SEQ ID NO: 1337397 - DNA, 15 bp, Homo sapiens
taatagctctgatat

SEQ ID NO: 1337398 - DNA, 15 bp, Homo sapiens
ctaatagctctgata

SEQ ID NO: 1337399 - DNA, 15 bp, Homo sapiens
cctaatagctctgat

SEQ ID NO: 1337400 - DNA, 15 bp, Homo sapiens
gcctaatagctctga

SEQ ID NO: 1337401 - DNA, 15 bp, Homo sapiens
ggcctaatagctctg

SEQ ID NO: 1337402 - DNA, 15 bp, Homo sapiens
tggcctaatagctct

SEQ ID NO: 1337403 - DNA, 15 bp, Homo sapiens
ttggcctaatagctc

SEQ ID NO: 1337404 - DNA, 15 bp, Homo sapiens
attggcctaatagct

SEQ ID NO: 1337405 - DNA, 15 bp, Homo sapiens
aattggcctaatagc

SEQ ID NO: 1337406 - DNA, 15 bp, Homo sapiens
aaattggcctaatag

SEQ ID NO: 1337407 - DNA, 15 bp, Homo sapiens
taaattggcctaata

SEQ ID NO: 1337408 - DNA, 15 bp, Homo sapiens
ataaattggcctaat

SEQ ID NO: 1337409 - DNA, 15 bp, Homo sapiens
aataaattggcctaa

SEQ ID NO: 1337410 - DNA, 15 bp, Homo sapiens
aaataaattggccta

SEQ ID NO: 1337411 - DNA, 15 bp, Homo sapiens
aaaataaattggcct

SEQ ID NO: 1337412 - DNA, 15 bp, Homo sapiens
aaaaataaattggcc

SEQ ID NO: 1337413 - DNA, 15 bp, Homo sapiens
aaaaaataaattggc

SEQ ID NO: 1337414 - DNA, 15 bp, Homo sapiens
aaaaaaataaattgg

SEQ ID NO: 1337415 - DNA, 15 bp, Homo sapiens
taaaaaaataaattg

SEQ ID NO: 1337416 - DNA, 15 bp, Homo sapiens
ataaaaaaataaatt

SEQ ID NO: 1337417 - DNA, 15 bp, Homo sapiens
aataaaaaaataaat

SEQ ID NO: 1337418 - DNA, 15 bp, Homo sapiens
taaataaaaaaataa

SEQ ID NO: 1337419 - DNA, 15 bp, Homo sapiens
ataaataaaaaaata

SEQ ID NO: 1337420 - DNA, 15 bp, Homo sapiens
aataaataaaaaaat

SEQ ID NO: 1337421 - DNA, 15 bp, Homo sapiens
gaataaataaaaaaa

SEQ ID NO: 1337422 - DNA, 15 bp, Homo sapiens
tgaataaataaaaaa

SEQ ID NO: 1337423 - DNA, 15 bp, Homo sapiens
atgaataaataaaaa

SEQ ID NO: 1337424 - DNA, 15 bp, Homo sapiens
aatgaataaataaaa

SEQ ID NO: 1337425 - DNA, 15 bp, Homo sapiens
aaatgaataaataaa

SEQ ID NO: 1337426 - DNA, 15 bp, Homo sapiens
aaaatgaataaataa

SEQ ID NO: 1337427 - DNA, 15 bp, Homo sapiens
aaaaatgaataaata

SEQ ID NO: 1337428 - DNA, 15 bp, Homo sapiens
aaaaaatgaataaat

SEQ ID NO: 1337429 - DNA, 15 bp, Homo sapiens
taaaaaatgaataaa

SEQ ID NO: 1337430 - DNA, 15 bp, Homo sapiens
ataaaaaatgaataa

SEQ ID NO: 1337431 - DNA, 15 bp, Homo sapiens
aataaaaaatgaata

SEQ ID NO: 1337432 - DNA, 15 bp, Homo sapiens
aaataaaaaatgaat

SEQ ID NO: 1337433 - DNA, 15 bp, Homo sapiens
taaataaaaaatgaa

SEQ ID NO: 1337434 - DNA, 15 bp, Homo sapiens
ataaataaaaaatga

SEQ ID NO: 1337435 - DNA, 15 bp, Homo sapiens
aataaataaaaaatg

SEQ ID NO: 1337436 - DNA, 15 bp, Homo sapiens
gaataaataaaaaat

SEQ ID NO: 1337437 - DNA, 15 bp, Homo sapiens
agaataaataaaaaa

SEQ ID NO: 1337438 - DNA, 15 bp, Homo sapiens
aagaataaataaaaa

SEQ ID NO: 1337439 - DNA, 15 bp, Homo sapiens
taagaataaataaaa

SEQ ID NO: 1337440 - DNA, 15 bp, Homo sapiens
ataagaataaataaa

SEQ ID NO: 1337441 - DNA, 15 bp, Homo sapiens
aataagaataaataa

SEQ ID NO: 1337442 - DNA, 15 bp, Homo sapiens
aaataagaataaata

SEQ ID NO: 1337443 - DNA, 15 bp, Homo sapiens
aaaataagaataaat

SEQ ID NO: 1337444 - DNA, 15 bp, Homo sapiens
aaaaataagaataaa

SEQ ID NO: 1337445 - DNA, 15 bp, Homo sapiens
taaaaataagaataa

SEQ ID NO: 1337446 - DNA, 15 bp, Homo sapiens
ataaaaataagaata

SEQ ID NO: 1337447 - DNA, 15 bp, Homo sapiens
aataaaaataagaat

SEQ ID NO: 1337448 - DNA, 15 bp, Homo sapiens
aaataaaaataagaa

SEQ ID NO: 1337449 - DNA, 15 bp, Homo sapiens
aaaataaaaataaga

SEQ ID NO: 1337450 - DNA, 15 bp, Homo sapiens
aaaaataaaaataag

SEQ ID NO: 1337451 - DNA, 15 bp, Homo sapiens
aaaaaaaataaaaat

SEQ ID NO: 1337452 - DNA, 15 bp, Homo sapiens
gcaaaaaaaataaaa

SEQ ID NO: 1337453 - DNA, 15 bp, Homo sapiens
cgcaaaaaaaataaa

SEQ ID NO: 1337454 - DNA, 15 bp, Homo sapiens
tcgcaaaaaaaataa

SEQ ID NO: 1337455 - DNA, 15 bp, Homo sapiens
atcgcaaaaaaaata

SEQ ID NO: 1337456 - DNA, 15 bp, Homo sapiens
catcgcaaaaaaaat

SEQ ID NO: 1337457 - DNA, 15 bp, Homo sapiens
ccatcgcaaaaaaaa

SEQ ID NO: 1337458 - DNA, 15 bp, Homo sapiens
tccatcgcaaaaaaa

SEQ ID NO: 1337459 - DNA, 15 bp, Homo sapiens
ctccatcgcaaaaaa

SEQ ID NO: 1337460 - DNA, 15 bp, Homo sapiens
actccatcgcaaaaa

SEQ ID NO: 1337461 - DNA, 15 bp, Homo sapiens
gactccatcgcaaaa

SEQ ID NO: 1337462 - DNA, 15 bp, Homo sapiens
agactccatcgcaaa

SEQ ID NO: 1337463 - DNA, 15 bp, Homo sapiens
gagactccatcgcaa

SEQ ID NO: 1337464 - DNA, 15 bp, Homo sapiens
tgagactccatcgca

SEQ ID NO: 1337465 - DNA, 15 bp, Homo sapiens
gtgagactccatcgc

SEQ ID NO: 1337466 - DNA, 15 bp, Homo sapiens
agtgagactccatcg

SEQ ID NO: 1337467 - DNA, 15 bp, Homo sapiens
ggcctgggcgacaga

SEQ ID NO: 1337468 - DNA, 15 bp, Homo sapiens
tggcctgggcgacag

SEQ ID NO: 1337469 - DNA, 15 bp, Homo sapiens
ctggcctgggcgaca

SEQ ID NO: 1337470 - DNA, 15 bp, Homo sapiens
tctggcctgggcgac

SEQ ID NO: 1337471 - DNA, 15 bp, Homo sapiens
ctctggcctgggcga

SEQ ID NO: 1337472 - DNA, 15 bp, Homo sapiens
actctggcctgggcg

SEQ ID NO: 1337473 - DNA, 15 bp, Homo sapiens
cgccactgcactctg

SEQ ID NO: 1337474 - DNA, 15 bp, Homo sapiens
ggatcgcgccactgc

SEQ ID NO: 1337475 - DNA, 15 bp, Homo sapiens
gggatcgcgccactg

SEQ ID NO: 1337476 - DNA, 15 bp, Homo sapiens
cgggatcgcgccact

SEQ ID NO: 1337477 - DNA, 15 bp, Homo sapiens
ccgggatcgcgccac

SEQ ID NO: 1337478 - DNA, 15 bp, Homo sapiens
gccgggatcgcgcca

SEQ ID NO: 1337479 - DNA, 15 bp, Homo sapiens
agccgggatcgcgcc

SEQ ID NO: 1337480 - DNA, 15 bp, Homo sapiens
gagccgggatcgcgc

SEQ ID NO: 1337481 - DNA, 15 bp, Homo sapiens
tgagccgggatcgcg

SEQ ID NO: 1337482 - DNA, 15 bp, Homo sapiens
gtgagccgggatcgc

SEQ ID NO: 1337483 - DNA, 15 bp, Homo sapiens
agtgagccgggatcg

SEQ ID NO: 1337484 - DNA, 15 bp, Homo sapiens
cagtgagccgggatc

SEQ ID NO: 1337485 - DNA, 15 bp, Homo sapiens
gcagtgagccgggat

SEQ ID NO: 1337486 - DNA, 15 bp, Homo sapiens
tgcagtgagccggga

SEQ ID NO: 1337487 - DNA, 15 bp, Homo sapiens
ttgcagtgagccggg

SEQ ID NO: 1337488 - DNA, 15 bp, Homo sapiens
cttgcagtgagccgg

SEQ ID NO: 1337489 - DNA, 15 bp, Homo sapiens
aggaggcggagcttg

SEQ ID NO: 1337490 - DNA, 15 bp, Homo sapiens
caggaggcggagctt

SEQ ID NO: 1337491 - DNA, 15 bp, Homo sapiens
ccaggaggcggagct

SEQ ID NO: 1337492 - DNA, 15 bp, Homo sapiens
cccaggaggcggagc

SEQ ID NO: 1337493 - DNA, 15 bp, Homo sapiens
gtgaacccaggaggc

SEQ ID NO: 1337494 - DNA, 15 bp, Homo sapiens
gcgtgaacccaggag

SEQ ID NO: 1337495 - DNA, 15 bp, Homo sapiens
ggcgtgaacccagga

SEQ ID NO: 1337496 - DNA, 15 bp, Homo sapiens
tggcgtgaacccagg

SEQ ID NO: 1337497 - DNA, 15 bp, Homo sapiens
atggcgtgaacccag

SEQ ID NO: 1337498 - DNA, 15 bp, Homo sapiens
aatggcgtgaaccca

SEQ ID NO: 1337499 - DNA, 15 bp, Homo sapiens
gctactcgggaggtt

SEQ ID NO: 1337500 - DNA, 15 bp, Homo sapiens
cgggtgtggtggcgg

SEQ ID NO: 1337501 - DNA, 15 bp, Homo sapiens
gtctactaaaaatac

SEQ ID NO: 1337502 - DNA, 15 bp, Homo sapiens
tgtctactaaaaata

SEQ ID NO: 1337503 - DNA, 15 bp, Homo sapiens
gtgtctactaaaaat

SEQ ID NO: 1337504 - DNA, 15 bp, Homo sapiens
cgtgtctactaaaaa

SEQ ID NO: 1337505 - DNA, 15 bp, Homo sapiens
ccgtgtctactaaaa

SEQ ID NO: 1337506 - DNA, 15 bp, Homo sapiens
cccgtgtctactaaa

SEQ ID NO: 1337507 - DNA, 15 bp, Homo sapiens
ccccgtgtctactaa

SEQ ID NO: 1337508 - DNA, 15 bp, Homo sapiens
accccgtgtctacta

SEQ ID NO: 1337509 - DNA, 15 bp, Homo sapiens
aaccccgtgtctact

SEQ ID NO: 1337510 - DNA, 15 bp, Homo sapiens
aaaccccgtgtctac

SEQ ID NO: 1337511 - DNA, 15 bp, Homo sapiens
gaaaccccgtgtcta

SEQ ID NO: 1337512 - DNA, 15 bp, Homo sapiens
tgaaaccccgtgtct

SEQ ID NO: 1337513 - DNA, 15 bp, Homo sapiens
gtgaaaccccgtgtc

SEQ ID NO: 1337514 - DNA, 15 bp, Homo sapiens
ggtgaaaccccgtgt

SEQ ID NO: 1337515 - DNA, 15 bp, Homo sapiens
cggtgaaaccccgtg

SEQ ID NO: 1337516 - DNA, 15 bp, Homo sapiens
tcgaggcgggtggat

SEQ ID NO: 1337517 - DNA, 15 bp, Homo sapiens
gtcgaggcgggtgga

SEQ ID NO: 1337518 - DNA, 15 bp, Homo sapiens
ggtcgaggcgggtgg

SEQ ID NO: 1337519 - DNA, 15 bp, Homo sapiens
aggtcgaggcgggtg

SEQ ID NO: 1337520 - DNA, 15 bp, Homo sapiens
gaggtcgaggcgggt

SEQ ID NO: 1337521 - DNA, 15 bp, Homo sapiens
ggaggtcgaggcggg

SEQ ID NO: 1337522 - DNA, 15 bp, Homo sapiens
gggaggtcgaggcgg

SEQ ID NO: 1337523 - DNA, 15 bp, Homo sapiens
tgggaggtcgaggcg

SEQ ID NO: 1337524 - DNA, 15 bp, Homo sapiens
ttgggaggtcgaggc

SEQ ID NO: 1337525 - DNA, 15 bp, Homo sapiens
tttgggaggtcgagg

SEQ ID NO: 1337526 - DNA, 15 bp, Homo sapiens
ctttgggaggtcgag

SEQ ID NO: 1337527 - DNA, 15 bp, Homo sapiens
actttgggaggtcga

SEQ ID NO: 1337528 - DNA, 15 bp, Homo sapiens
acggtggctgacgcc

SEQ ID NO: 1337529 - DNA, 15 bp, Homo sapiens
cacggtggctgacgc

SEQ ID NO: 1337530 - DNA, 15 bp, Homo sapiens
gcacggtggctgacg

SEQ ID NO: 1337531 - DNA, 15 bp, Homo sapiens
agcacggtggctgac

SEQ ID NO: 1337532 - DNA, 15 bp, Homo sapiens
aagcacggtggctga

SEQ ID NO: 1337533 - DNA, 15 bp, Homo sapiens
caagcacggtggctg

SEQ ID NO: 1337534 - DNA, 15 bp, Homo sapiens
ccaagcacggtggct

SEQ ID NO: 1337535 - DNA, 15 bp, Homo sapiens
gccaagcacggtggc

SEQ ID NO: 1337536 - DNA, 15 bp, Homo sapiens
tgccaagcacggtgg

SEQ ID NO: 1337537 - DNA, 15 bp, Homo sapiens
ctgccaagcacggtg

SEQ ID NO: 1337538 - DNA, 15 bp, Homo sapiens
cctgccaagcacggt

SEQ ID NO: 1337539 - DNA, 15 bp, Homo sapiens
gcctgccaagcacgg

SEQ ID NO: 1337540 - DNA, 15 bp, Homo sapiens
ggcctgccaagcacg

SEQ ID NO: 1337541 - DNA, 15 bp, Homo sapiens
tggcctgccaagcac

SEQ ID NO: 1337542 - DNA, 15 bp, Homo sapiens
ttggcctgccaagca

SEQ ID NO: 1337543 - DNA, 15 bp, Homo sapiens
attggcctgccaagc

SEQ ID NO: 1337544 - DNA, 15 bp, Homo sapiens
aattggcctgccaag

SEQ ID NO: 1337545 - DNA, 15 bp, Homo sapiens
aaattggcctgccaa

SEQ ID NO: 1337546 - DNA, 15 bp, Homo sapiens
taaattggcctgcca

SEQ ID NO: 1337547 - DNA, 15 bp, Homo sapiens
ataaattggcctgcc

SEQ ID NO: 1337548 - DNA, 15 bp, Homo sapiens
aataaattggcctgc

SEQ ID NO: 1337549 - DNA, 15 bp, Homo sapiens
taataaattggcctg

SEQ ID NO: 1337550 - DNA, 15 bp, Homo sapiens
ttaataaattggcct

SEQ ID NO: 1337551 - DNA, 15 bp, Homo sapiens
gttaataaattggcc

SEQ ID NO: 1337552 - DNA, 15 bp, Homo sapiens
agttaataaattggc

SEQ ID NO: 1337553 - DNA, 15 bp, Homo sapiens
aagttaataaattgg

SEQ ID NO: 1337554 - DNA, 15 bp, Homo sapiens
taagttaataaattg

SEQ ID NO: 1337555 - DNA, 15 bp, Homo sapiens
ctaagttaataaatt

SEQ ID NO: 1337556 - DNA, 15 bp, Homo sapiens
cctaagttaataaat

SEQ ID NO: 1337557 - DNA, 15 bp, Homo sapiens
tcctaagttaataaa

SEQ ID NO: 1337558 - DNA, 15 bp, Homo sapiens
ctcctaagttaataa

SEQ ID NO: 1337559 - DNA, 15 bp, Homo sapiens
tctcctaagttaata

SEQ ID NO: 1337560 - DNA, 15 bp, Homo sapiens
ttctcctaagttaat

SEQ ID NO: 1337561 - DNA, 15 bp, Homo sapiens
attctcctaagttaa

SEQ ID NO: 1337562 - DNA, 15 bp, Homo sapiens
tattctcctaagtta

SEQ ID NO: 1337563 - DNA, 15 bp, Homo sapiens
ctattctcctaagtt

SEQ ID NO: 1337564 - DNA, 15 bp, Homo sapiens
tctattctcctaagt

SEQ ID NO: 1337565 - DNA, 15 bp, Homo sapiens
ttctattctcctaag

SEQ ID NO: 1337566 - DNA, 15 bp, Homo sapiens
gttctattctcctaa

SEQ ID NO: 1337567 - DNA, 15 bp, Homo sapiens
agttctattctccta

SEQ ID NO: 1337568 - DNA, 15 bp, Homo sapiens
tagttctattctcct

SEQ ID NO: 1337569 - DNA, 15 bp, Homo sapiens
gtagttctattctcc

SEQ ID NO: 1337570 - DNA, 15 bp, Homo sapiens
agtagttctattctc

SEQ ID NO: 1337571 - DNA, 15 bp, Homo sapiens
tagtagttctattct

SEQ ID NO: 1337572 - DNA, 15 bp, Homo sapiens
ttagtagttctattc

SEQ ID NO: 1337573 - DNA, 15 bp, Homo sapiens
cttagtagttctatt

SEQ ID NO: 1337574 - DNA, 15 bp, Homo sapiens
acttagtagttctat

SEQ ID NO: 1337575 - DNA, 15 bp, Homo sapiens
gacttagtagttcta

SEQ ID NO: 1337576 - DNA, 15 bp, Homo sapiens
tgacttagtagttct

SEQ ID NO: 1337577 - DNA, 15 bp, Homo sapiens
ctgacttagtagttc

SEQ ID NO: 1337578 - DNA, 15 bp, Homo sapiens
gctgacttagtagtt

SEQ ID NO: 1337579 - DNA, 15 bp, Homo sapiens
ggctgacttagtagt

SEQ ID NO: 1337580 - DNA, 15 bp, Homo sapiens
tggctgacttagtag

SEQ ID NO: 1337581 - DNA, 15 bp, Homo sapiens
ctggctgacttagta

SEQ ID NO: 1337582 - DNA, 15 bp, Homo sapiens
tctggctgacttagt

SEQ ID NO: 1337583 - DNA, 15 bp, Homo sapiens
ttctggctgacttag

SEQ ID NO: 1337584 - DNA, 15 bp, Homo sapiens
attctggctgactta

SEQ ID NO: 1337585 - DNA, 15 bp, Homo sapiens
tattctggctgactt

SEQ ID NO: 1337586 - DNA, 15 bp, Homo sapiens
atattctggctgact

SEQ ID NO: 1337587 - DNA, 15 bp, Homo sapiens
aatattctggctgac

SEQ ID NO: 1337588 - DNA, 15 bp, Homo sapiens
taatattctggctga

SEQ ID NO: 1337589 - DNA, 15 bp, Homo sapiens
ttaatattctggctg

SEQ ID NO: 1337590 - DNA, 15 bp, Homo sapiens
attaatattctggct

SEQ ID NO: 1337591 - DNA, 15 bp, Homo sapiens
cattaatattctggc

SEQ ID NO: 1337592 - DNA, 15 bp, Homo sapiens
acattaatattctgg

SEQ ID NO: 1337593 - DNA, 15 bp, Homo sapiens
aacattaatattctg

SEQ ID NO: 1337594 - DNA, 15 bp, Homo sapiens
gaacattaatattct

SEQ ID NO: 1337595 - DNA, 15 bp, Homo sapiens
agaacattaatattc

SEQ ID NO: 1337596 - DNA, 15 bp, Homo sapiens
aagaacattaatatt

SEQ ID NO: 1337597 - DNA, 15 bp, Homo sapiens
aaagaacattaatat

SEQ ID NO: 1337598 - DNA, 15 bp, Homo sapiens
aaaagaacattaata

SEQ ID NO: 1337599 - DNA, 15 bp, Homo sapiens
aaaaagaacattaat

SEQ ID NO: 1337600 - DNA, 15 bp, Homo sapiens
aaaaaagaacattaa

SEQ ID NO: 1337601 - DNA, 15 bp, Homo sapiens
aaaaaaagaacatta

SEQ ID NO: 1337602 - DNA, 15 bp, Homo sapiens
aaaaaaaagaacatt

SEQ ID NO: 1337603 - DNA, 15 bp, Homo sapiens
aaaaaaaaagaacat

SEQ ID NO: 1337604 - DNA, 15 bp, Homo sapiens
aaaaaaaaaaagaac

SEQ ID NO: 1337605 - DNA, 15 bp, Homo sapiens
aactctgtctcaaaa

SEQ ID NO: 1337606 - DNA, 15 bp, Homo sapiens
aaactctgtctcaaa

SEQ ID NO: 1337607 - DNA, 15 bp, Homo sapiens
aagagtgaaactctg

SEQ ID NO: 1337608 - DNA, 15 bp, Homo sapiens
caagagtgaaactct

SEQ ID NO: 1337609 - DNA, 15 bp, Homo sapiens
agtgccattgcactc

SEQ ID NO: 1337610 - DNA, 15 bp, Homo sapiens
cagtgccattgcact

SEQ ID NO: 1337611 - DNA, 15 bp, Homo sapiens
acagtgccattgcac

SEQ ID NO: 1337612 - DNA, 15 bp, Homo sapiens
gacagtgccattgca

SEQ ID NO: 1337613 - DNA, 15 bp, Homo sapiens
agacagtgccattgc

SEQ ID NO: 1337614 - DNA, 15 bp, Homo sapiens
gagacagtgccattg

SEQ ID NO: 1337615 - DNA, 15 bp, Homo sapiens
tgagacagtgccatt

SEQ ID NO: 1337616 - DNA, 15 bp, Homo sapiens
ctgagacagtgccat

SEQ ID NO: 1337617 - DNA, 15 bp, Homo sapiens
cctgagacagtgcca

SEQ ID NO: 1337618 - DNA, 15 bp, Homo sapiens
acctgagacagtgcc

SEQ ID NO: 1337619 - DNA, 15 bp, Homo sapiens
gacctgagacagtgc

SEQ ID NO: 1337620 - DNA, 15 bp, Homo sapiens
tgacctgagacagtg

SEQ ID NO: 1337621 - DNA, 15 bp, Homo sapiens
gtgacctgagacagt

SEQ ID NO: 1337622 - DNA, 15 bp, Homo sapiens
tggcctgccttagcc

SEQ ID NO: 1337623 - DNA, 15 bp, Homo sapiens
ctggcctgccttagc

SEQ ID NO: 1337624 - DNA, 15 bp, Homo sapiens
cctggcctgccttag

SEQ ID NO: 1337625 - DNA, 15 bp, Homo sapiens
acctggcctgcctta

SEQ ID NO: 1337626 - DNA, 15 bp, Homo sapiens
cacctggcctgcctt

SEQ ID NO: 1337627 - DNA, 15 bp, Homo sapiens
acacctggcctgcct

SEQ ID NO: 1337628 - DNA, 15 bp, Homo sapiens
tacacctggcctgcc

SEQ ID NO: 1337629 - DNA, 15 bp, Homo sapiens
gtacacctggcctgc

SEQ ID NO: 1337630 - DNA, 15 bp, Homo sapiens
tgtacacctggcctg

SEQ ID NO: 1337631 - DNA, 15 bp, Homo sapiens
gtgtacacctggcct

SEQ ID NO: 1337632 - DNA, 15 bp, Homo sapiens
agtgtacacctggcc

SEQ ID NO: 1337633 - DNA, 15 bp, Homo sapiens
aagtgtacacctggc

SEQ ID NO: 1337634 - DNA, 15 bp, Homo sapiens
gaagtgtacacctgg

SEQ ID NO: 1337635 - DNA, 15 bp, Homo sapiens
tgaagtgtacacctg

SEQ ID NO: 1337636 - DNA, 15 bp, Homo sapiens
ctgaagtgtacacct

SEQ ID NO: 1337637 - DNA, 15 bp, Homo sapiens
cctgaagtgtacacc

SEQ ID NO: 1337638 - DNA, 15 bp, Homo sapiens
tcctgaagtgtacac

SEQ ID NO: 1337639 - DNA, 15 bp, Homo sapiens
ttcctgaagtgtaca

SEQ ID NO: 1337640 - DNA, 15 bp, Homo sapiens
cttcctgaagtgtac

SEQ ID NO: 1337641 - DNA, 15 bp, Homo sapiens
tcttcctgaagtgta

SEQ ID NO: 1337642 - DNA, 15 bp, Homo sapiens
gtcttcctgaagtgt

SEQ ID NO: 1337643 - DNA, 15 bp, Homo sapiens
cgtcttcctgaagtg

SEQ ID NO: 1337644 - DNA, 15 bp, Homo sapiens
acgtcttcctgaagt

SEQ ID NO: 1337645 - DNA, 15 bp, Homo sapiens
cacgtcttcctgaag

SEQ ID NO: 1337646 - DNA, 15 bp, Homo sapiens
ccacgtcttcctgaa

SEQ ID NO: 1337647 - DNA, 15 bp, Homo sapiens
tccacgtcttcctga

SEQ ID NO: 1337648 - DNA, 15 bp, Homo sapiens
ttccacgtcttcctg

SEQ ID NO: 1337649 - DNA, 15 bp, Homo sapiens
tttccacgtcttcct

SEQ ID NO: 1337650 - DNA, 15 bp, Homo sapiens
atttccacgtcttcc

SEQ ID NO: 1337651 - DNA, 15 bp, Homo sapiens
aatttccacgtcttc

SEQ ID NO: 1337652 - DNA, 15 bp, Homo sapiens
gaatttccacgtctt

SEQ ID NO: 1337653 - DNA, 15 bp, Homo sapiens
ggaatttccacgtct

SEQ ID NO: 1337654 - DNA, 15 bp, Homo sapiens
gggaatttccacgtc

SEQ ID NO: 1337655 - DNA, 15 bp, Homo sapiens
tgggaatttccacgt

SEQ ID NO: 1337656 - DNA, 15 bp, Homo sapiens
ctgggaatttccacg

SEQ ID NO: 1337657 - DNA, 15 bp, Homo sapiens
cctgggaatttccac

SEQ ID NO: 1337658 - DNA, 15 bp, Homo sapiens
ccctgggaatttcca

SEQ ID NO: 1337659 - DNA, 15 bp, Homo sapiens
gccctgggaatttcc

SEQ ID NO: 1337660 - DNA, 15 bp, Homo sapiens
cgccctgggaatttc

SEQ ID NO: 1337661 - DNA, 15 bp, Homo sapiens
ccgccctgggaattt

SEQ ID NO: 1337662 - DNA, 15 bp, Homo sapiens
tccgccctgggaatt

SEQ ID NO: 1337663 - DNA, 15 bp, Homo sapiens
gtccgccctgggaat

SEQ ID NO: 1337664 - DNA, 15 bp, Homo sapiens
ggtccgccctgggaa

SEQ ID NO: 1337665 - DNA, 15 bp, Homo sapiens
tggtccgccctggga

SEQ ID NO: 1337666 - DNA, 15 bp, Homo sapiens
ttggtccgccctggg

SEQ ID NO: 1337667 - DNA, 15 bp, Homo sapiens
tttggtccgccctgg

SEQ ID NO: 1337668 - DNA, 15 bp, Homo sapiens
ttttggtccgccctg

SEQ ID NO: 1337669 - DNA, 15 bp, Homo sapiens
gttttggtccgccct

SEQ ID NO: 1337670 - DNA, 15 bp, Homo sapiens
agttttggtccgccc

SEQ ID NO: 1337671 - DNA, 15 bp, Homo sapiens
aagttttggtccgcc

SEQ ID NO: 1337672 - DNA, 15 bp, Homo sapiens
caagttttggtccgc

SEQ ID NO: 1337673 - DNA, 15 bp, Homo sapiens
tcaagttttggtccg

SEQ ID NO: 1337674 - DNA, 15 bp, Homo sapiens
ctcaagttttggtcc

SEQ ID NO: 1337675 - DNA, 15 bp, Homo sapiens
gctcaagttttggtc

SEQ ID NO: 1337676 - DNA, 15 bp, Homo sapiens
agctcaagttttggt

SEQ ID NO: 1337677 - DNA, 15 bp, Homo sapiens
cagctcaagttttgg

SEQ ID NO: 1337678 - DNA, 15 bp, Homo sapiens
acagctcaagttttg

SEQ ID NO: 1337679 - DNA, 15 bp, Homo sapiens
aacagctcaagtttt

SEQ ID NO: 1337680 - DNA, 15 bp, Homo sapiens
gaacagctcaagttt

SEQ ID NO: 1337681 - DNA, 15 bp, Homo sapiens
ggaacagctcaagtt

SEQ ID NO: 1337682 - DNA, 15 bp, Homo sapiens
cggaacagctcaagt

SEQ ID NO: 1337683 - DNA, 15 bp, Homo sapiens
ccggaacagctcaag

SEQ ID NO: 1337684 - DNA, 15 bp, Homo sapiens
gccggaacagctcaa

SEQ ID NO: 1337685 - DNA, 15 bp, Homo sapiens
cgccggaacagctca

SEQ ID NO: 1337686 - DNA, 15 bp, Homo sapiens
ccgccggaacagctc

SEQ ID NO: 1337687 - DNA, 15 bp, Homo sapiens
accgccggaacagct

SEQ ID NO: 1337688 - DNA, 15 bp, Homo sapiens
taccgccggaacagc

SEQ ID NO: 1337689 - DNA, 15 bp, Homo sapiens
ctaccgccggaacag

SEQ ID NO: 1337690 - DNA, 15 bp, Homo sapiens
actaccgccggaaca

SEQ ID NO: 1337691 - DNA, 15 bp, Homo sapiens
cactaccgccggaac

SEQ ID NO: 1337692 - DNA, 15 bp, Homo sapiens
tcactaccgccggaa

SEQ ID NO: 1337693 - DNA, 15 bp, Homo sapiens
atcactaccgccgga

SEQ ID NO: 1337694 - DNA, 15 bp, Homo sapiens
aatcactaccgccgg

SEQ ID NO: 1337695 - DNA, 15 bp, Homo sapiens
aaatcactaccgccg

SEQ ID NO: 1337696 - DNA, 15 bp, Homo sapiens
caaatcactaccgcc

SEQ ID NO: 1337697 - DNA, 15 bp, Homo sapiens
tcaaatcactaccgc

SEQ ID NO: 1337698 - DNA, 15 bp, Homo sapiens
ctcaaatcactaccg

SEQ ID NO: 1337699 - DNA, 15 bp, Homo sapiens
cctcaaatcactacc

SEQ ID NO: 1337700 - DNA, 15 bp, Homo sapiens
acctcaaatcactac

SEQ ID NO: 1337701 - DNA, 15 bp, Homo sapiens
gacctcaaatcacta

SEQ ID NO: 1337702 - DNA, 15 bp, Homo sapiens
tgacctcaaatcact

SEQ ID NO: 1337703 - DNA, 15 bp, Homo sapiens
ctgacctcaaatcac

SEQ ID NO: 1337704 - DNA, 15 bp, Homo sapiens
actgacctcaaatca

SEQ ID NO: 1337705 - DNA, 15 bp, Homo sapiens
aactgacctcaaatc

SEQ ID NO: 1337706 - DNA, 15 bp, Homo sapiens
aaactgacctcaaat

SEQ ID NO: 1337707 - DNA, 15 bp, Homo sapiens
caaactgacctcaaa

SEQ ID NO: 1337708 - DNA, 15 bp, Homo sapiens
tcaaactgacctcaa

SEQ ID NO: 1337709 - DNA, 15 bp, Homo sapiens
ttcaaactgacctca

SEQ ID NO: 1337710 - DNA, 15 bp, Homo sapiens
tttcaaactgacctc

SEQ ID NO: 1337711 - DNA, 15 bp, Homo sapiens
ctttcaaactgacct

SEQ ID NO: 1337712 - DNA, 15 bp, Homo sapiens
tctttcaaactgacc

SEQ ID NO: 1337713 - DNA, 15 bp, Homo sapiens
ctctttcaaactgac

SEQ ID NO: 1337714 - DNA, 15 bp, Homo sapiens
tctctttcaaactga

SEQ ID NO: 1337715 - DNA, 15 bp, Homo sapiens
ttctctttcaaactg

SEQ ID NO: 1337716 - DNA, 15 bp, Homo sapiens
cttctctttcaaact

SEQ ID NO: 1337717 - DNA, 15 bp, Homo sapiens
acttctctttcaaac

SEQ ID NO: 1337718 - DNA, 15 bp, Homo sapiens
aacttctctttcaaa

SEQ ID NO: 1337719 - DNA, 15 bp, Homo sapiens
caacttctctttcaa

SEQ ID NO: 1337720 - DNA, 15 bp, Homo sapiens
tcaacttctctttca

SEQ ID NO: 1337721 - DNA, 15 bp, Homo sapiens
ctcaacttctctttc

SEQ ID NO: 1337722 - DNA, 15 bp, Homo sapiens
tctcaacttctcttt

SEQ ID NO: 1337723 - DNA, 15 bp, Homo sapiens
ttctcaacttctctt

SEQ ID NO: 1337724 - DNA, 15 bp, Homo sapiens
tttctcaacttctct

SEQ ID NO: 1337725 - DNA, 15 bp, Homo sapiens
ctttctcaacttctc

SEQ ID NO: 1337726 - DNA, 15 bp, Homo sapiens
gctttctcaacttct

SEQ ID NO: 1337727 - DNA, 15 bp, Homo sapiens
cgctttctcaacttc

SEQ ID NO: 1337728 - DNA, 15 bp, Homo sapiens
ccgctttctcaactt

SEQ ID NO: 1337729 - DNA, 15 bp, Homo sapiens
gccgctttctcaact

SEQ ID NO: 1337730 - DNA, 15 bp, Homo sapiens
ggccgctttctcaac

SEQ ID NO: 1337731 - DNA, 15 bp, Homo sapiens
cggccgctttctcaa

SEQ ID NO: 1337732 - DNA, 15 bp, Homo sapiens
tcggccgctttctca

SEQ ID NO: 1337733 - DNA, 15 bp, Homo sapiens
ctcggccgctttctc

SEQ ID NO: 1337734 - DNA, 15 bp, Homo sapiens
cctcggccgctttct

SEQ ID NO: 1337735 - DNA, 15 bp, Homo sapiens
ccctcggccgctttc

SEQ ID NO: 1337736 - DNA, 15 bp, Homo sapiens
cccctcggccgcttt

SEQ ID NO: 1337737 - DNA, 15 bp, Homo sapiens
gcccctcggccgctt

SEQ ID NO: 1337738 - DNA, 15 bp, Homo sapiens
cgcccctcggccgct

SEQ ID NO: 1337739 - DNA, 15 bp, Homo sapiens
tcgcccctcggccgc

SEQ ID NO: 1337740 - DNA, 15 bp, Homo sapiens
ttcgcccctcggccg

SEQ ID NO: 1337741 - DNA, 15 bp, Homo sapiens
attcgcccctcggcc

SEQ ID NO: 1337742 - DNA, 15 bp, Homo sapiens
aattcgcccctcggc

SEQ ID NO: 1337743 - DNA, 15 bp, Homo sapiens
aaattcgcccctcgg

SEQ ID NO: 1337744 - DNA, 15 bp, Homo sapiens
caaattcgcccctcg

SEQ ID NO: 1337745 - DNA, 15 bp, Homo sapiens
ccaaattcgcccctc

SEQ ID NO: 1337746 - DNA, 15 bp, Homo sapiens
gccaaattcgcccct

SEQ ID NO: 1337747 - DNA, 15 bp, Homo sapiens
agccaaattcgcccc

SEQ ID NO: 1337748 - DNA, 15 bp, Homo sapiens
cagccaaattcgccc

SEQ ID NO: 1337749 - DNA, 15 bp, Homo sapiens
gcagccaaattcgcc

SEQ ID NO: 1337750 - DNA, 15 bp, Homo sapiens
tgcagccaaattcgc

SEQ ID NO: 1337751 - DNA, 15 bp, Homo sapiens
gtgcagccaaattcg

SEQ ID NO: 1337752 - DNA, 15 bp, Homo sapiens
agtgcagccaaattc

SEQ ID NO: 1337753 - DNA, 15 bp, Homo sapiens
tagtgcagccaaatt

SEQ ID NO: 1337754 - DNA, 15 bp, Homo sapiens
gtagtgcagccaaat

SEQ ID NO: 1337755 - DNA, 15 bp, Homo sapiens
tgtagtgcagccaaa

SEQ ID NO: 1337756 - DNA, 15 bp, Homo sapiens
gtgtagtgcagccaa

SEQ ID NO: 1337757 - DNA, 15 bp, Homo sapiens
cgtgtagtgcagcca

SEQ ID NO: 1337758 - DNA, 15 bp, Homo sapiens
gcgtgtagtgcagcc

SEQ ID NO: 1337759 - DNA, 15 bp, Homo sapiens
agcgtgtagtgcagc

SEQ ID NO: 1337760 - DNA, 15 bp, Homo sapiens
gagcgtgtagtgcag

SEQ ID NO: 1337761 - DNA, 15 bp, Homo sapiens
cgagcgtgtagtgca

SEQ ID NO: 1337762 - DNA, 15 bp, Homo sapiens
gcgagcgtgtagtgc

SEQ ID NO: 1337763 - DNA, 15 bp, Homo sapiens
ggcgagcgtgtagtg

SEQ ID NO: 1337764 - DNA, 15 bp, Homo sapiens
tggcgagcgtgtagt

SEQ ID NO: 1337765 - DNA, 15 bp, Homo sapiens
gtggcgagcgtgtag

SEQ ID NO: 1337766 - DNA, 15 bp, Homo sapiens
tgtggcgagcgtgta

SEQ ID NO: 1337767 - DNA, 15 bp, Homo sapiens
ttgtggcgagcgtgt

SEQ ID NO: 1337768 - DNA, 15 bp, Homo sapiens
tttgtggcgagcgtg

SEQ ID NO: 1337769 - DNA, 15 bp, Homo sapiens
ctttgtggcgagcgt

SEQ ID NO: 1337770 - DNA, 15 bp, Homo sapiens
tctttgtggcgagcg

SEQ ID NO: 1337771 - DNA, 15 bp, Homo sapiens
ctctttgtggcgagc

SEQ ID NO: 1337772 - DNA, 15 bp, Homo sapiens
cctctttgtggcgag

SEQ ID NO: 1337773 - DNA, 15 bp, Homo sapiens
tcctctttgtggcga

SEQ ID NO: 1337774 - DNA, 15 bp, Homo sapiens
ttcctctttgtggcg

SEQ ID NO: 1337775 - DNA, 15 bp, Homo sapiens
cttcctctttgtggc

SEQ ID NO: 1337776 - DNA, 15 bp, Homo sapiens
ccttcctctttgtgg

SEQ ID NO: 1337777 - DNA, 15 bp, Homo sapiens
cccttcctctttgtg

SEQ ID NO: 1337778 - DNA, 15 bp, Homo sapiens
gcccttcctctttgt

SEQ ID NO: 1337779 - DNA, 15 bp, Homo sapiens
ggcccttcctctttg

SEQ ID NO: 1337780 - DNA, 15 bp, Homo sapiens
cggcccttcctcttt

SEQ ID NO: 1337781 - DNA, 15 bp, Homo sapiens
gcggcccttcctctt

SEQ ID NO: 1337782 - DNA, 15 bp, Homo sapiens
ggcggcccttcctct

SEQ ID NO: 1337783 - DNA, 15 bp, Homo sapiens
cggcggcccttcctc

SEQ ID NO: 1337784 - DNA, 15 bp, Homo sapiens
ccggcggcccttcct

SEQ ID NO: 1337785 - DNA, 15 bp, Homo sapiens
gccggcggcccttcc

SEQ ID NO: 1337786 - DNA, 15 bp, Homo sapiens
ggccggcggcccttc

SEQ ID NO: 1337787 - DNA, 15 bp, Homo sapiens
cggccggcggccctt

SEQ ID NO: 1337788 - DNA, 15 bp, Homo sapiens
gcggccggcggccct

SEQ ID NO: 1337789 - DNA, 15 bp, Homo sapiens
ggcggccggcggccc

SEQ ID NO: 1337790 - DNA, 15 bp, Homo sapiens
cggcggccggcggcc

SEQ ID NO: 1337791 - DNA, 15 bp, Homo sapiens
ccggcggccggcggc

SEQ ID NO: 1337792 - DNA, 15 bp, Homo sapiens
cccggcggccggcgg

SEQ ID NO: 1337793 - DNA, 15 bp, Homo sapiens
ccccggcggccggcg

SEQ ID NO: 1337794 - DNA, 15 bp, Homo sapiens
gccccggcggccggc

SEQ ID NO: 1337795 - DNA, 15 bp, Homo sapiens
ggccccggcggccgg

SEQ ID NO: 1337796 - DNA, 15 bp, Homo sapiens
cggccccggcggccg

SEQ ID NO: 1337797 - DNA, 15 bp, Homo sapiens
tcggccccggcggcc

SEQ ID NO: 1337798 - DNA, 15 bp, Homo sapiens
ctcggccccggcggc

SEQ ID NO: 1337799 - DNA, 15 bp, Homo sapiens
actcggccccggcgg

SEQ ID NO: 1337800 - DNA, 15 bp, Homo sapiens
cactcggccccggcg

SEQ ID NO: 1337801 - DNA, 15 bp, Homo sapiens
gcactcggccccggc

SEQ ID NO: 1337802 - DNA, 15 bp, Homo sapiens
cgcactcggccccgg

SEQ ID NO: 1337803 - DNA, 15 bp, Homo sapiens
gcgcactcggccccg

SEQ ID NO: 1337804 - DNA, 15 bp, Homo sapiens
agcgcactcggcccc

SEQ ID NO: 1337805 - DNA, 15 bp, Homo sapiens
aagcgcactcggccc

SEQ ID NO: 1337806 - DNA, 15 bp, Homo sapiens
gaagcgcactcggcc

SEQ ID NO: 1337807 - DNA, 15 bp, Homo sapiens
ggaagcgcactcggc

SEQ ID NO: 1337808 - DNA, 15 bp, Homo sapiens
tggaagcgcactcgg

SEQ ID NO: 1337809 - DNA, 15 bp, Homo sapiens
ctggaagcgcactcg

SEQ ID NO: 1337810 - DNA, 15 bp, Homo sapiens
gctggaagcgcactc

SEQ ID NO: 1337811 - DNA, 15 bp, Homo sapiens
ggctggaagcgcact

SEQ ID NO: 1337812 - DNA, 15 bp, Homo sapiens
gggctggaagcgcac

SEQ ID NO: 1337813 - DNA, 15 bp, Homo sapiens
tgggctggaagcgca

SEQ ID NO: 1337814 - DNA, 15 bp, Homo sapiens
ctgggctggaagcgc

SEQ ID NO: 1337815 - DNA, 15 bp, Homo sapiens
cctgggctggaagcg

SEQ ID NO: 1337816 - DNA, 15 bp, Homo sapiens
gcctgggctggaagc

SEQ ID NO: 1337817 - DNA, 15 bp, Homo sapiens
cgcctgggctggaag

SEQ ID NO: 1337818 - DNA, 15 bp, Homo sapiens
ccgcctgggctggaa

SEQ ID NO: 1337819 - DNA, 15 bp, Homo sapiens
tccgcctgggctgga

SEQ ID NO: 1337820 - DNA, 15 bp, Homo sapiens
ctccgcctgggctgg

SEQ ID NO: 1337821 - DNA, 15 bp, Homo sapiens
gctccgcctgggctg

SEQ ID NO: 1337822 - DNA, 15 bp, Homo sapiens
cgctccgcctgggct

SEQ ID NO: 1337823 - DNA, 15 bp, Homo sapiens
ccgctccgcctgggc

SEQ ID NO: 1337824 - DNA, 15 bp, Homo sapiens
accgctccgcctggg

SEQ ID NO: 1337825 - DNA, 15 bp, Homo sapiens
taccgctccgcctgg

SEQ ID NO: 1337826 - DNA, 15 bp, Homo sapiens
ctaccgctccgcctg

SEQ ID NO: 1337827 - DNA, 15 bp, Homo sapiens
tctaccgctccgcct

SEQ ID NO: 1337828 - DNA, 15 bp, Homo sapiens
gtctaccgctccgcc

SEQ ID NO: 1337829 - DNA, 15 bp, Homo sapiens
cgtctaccgctccgc

SEQ ID NO: 1337830 - DNA, 15 bp, Homo sapiens
gcgtctaccgctccg

SEQ ID NO: 1337831 - DNA, 15 bp, Homo sapiens
tgcgtctaccgctcc

SEQ ID NO: 1337832 - DNA, 15 bp, Homo sapiens
ttgcgtctaccgctc

SEQ ID NO: 1337833 - DNA, 15 bp, Homo sapiens
gttgcgtctaccgct

SEQ ID NO: 1337834 - DNA, 15 bp, Homo sapiens
tgttgcgtctaccgc

SEQ ID NO: 1337835 - DNA, 15 bp, Homo sapiens
ctgttgcgtctaccg

SEQ ID NO: 1337836 - DNA, 15 bp, Homo sapiens
gctgttgcgtctacc

SEQ ID NO: 1337837 - DNA, 15 bp, Homo sapiens
ggctgttgcgtctac

SEQ ID NO: 1337838 - DNA, 15 bp, Homo sapiens
aggctgttgcgtcta

SEQ ID NO: 1337839 - DNA, 15 bp, Homo sapiens
gaggctgttgcgtct

SEQ ID NO: 1337840 - DNA, 15 bp, Homo sapiens
ggaggctgttgcgtc

SEQ ID NO: 1337841 - DNA, 15 bp, Homo sapiens
cggaggctgttgcgt

SEQ ID NO: 1337842 - DNA, 15 bp, Homo sapiens
gcggaggctgttgcg

SEQ ID NO: 1337843 - DNA, 15 bp, Homo sapiens
ggcggaggctgttgc

SEQ ID NO: 1337844 - DNA, 15 bp, Homo sapiens
gggcggaggctgttg

SEQ ID NO: 1337845 - DNA, 15 bp, Homo sapiens
cgggcggaggctgtt

SEQ ID NO: 1337846 - DNA, 15 bp, Homo sapiens
gcgggcggaggctgt

SEQ ID NO: 1337847 - DNA, 15 bp, Homo sapiens
ggcgggcggaggctg

SEQ ID NO: 1337848 - DNA, 15 bp, Homo sapiens
tggcgggcggaggct

SEQ ID NO: 1337849 - DNA, 15 bp, Homo sapiens
gtggcgggcggaggc

SEQ ID NO: 1337850 - DNA, 15 bp, Homo sapiens
cgtggcgggcggagg

SEQ ID NO: 1337851 - DNA, 15 bp, Homo sapiens
acgtggcgggcggag

SEQ ID NO: 1337852 - DNA, 15 bp, Homo sapiens
cacgtggcgggcgga

SEQ ID NO: 1337853 - DNA, 15 bp, Homo sapiens
tcacgtggcgggcgg

SEQ ID NO: 1337854 - DNA, 15 bp, Homo sapiens
gtcacgtggcgggcg

SEQ ID NO: 1337855 - DNA, 15 bp, Homo sapiens
ggtcacgtggcgggc

SEQ ID NO: 1337856 - DNA, 15 bp, Homo sapiens
gggtcacgtggcggg

SEQ ID NO: 1337857 - DNA, 15 bp, Homo sapiens
cgggtcacgtggcgg

SEQ ID NO: 1337858 - DNA, 15 bp, Homo sapiens
acgggtcacgtggcg

SEQ ID NO: 1337859 - DNA, 15 bp, Homo sapiens
tacgggtcacgtggc

SEQ ID NO: 1337860 - DNA, 15 bp, Homo sapiens
ctacgggtcacgtgg

SEQ ID NO: 1337861 - DNA, 15 bp, Homo sapiens
actacgggtcacgtg

SEQ ID NO: 1337862 - DNA, 15 bp, Homo sapiens
cactacgggtcacgt

SEQ ID NO: 1337863 - DNA, 15 bp, Homo sapiens
acactacgggtcacg

SEQ ID NO: 1337864 - DNA, 15 bp, Homo sapiens
aacactacgggtcac

SEQ ID NO: 1337865 - DNA, 15 bp, Homo sapiens
caacactacgggtca

SEQ ID NO: 1337866 - DNA, 15 bp, Homo sapiens
acaacactacgggtc

SEQ ID NO: 1337867 - DNA, 15 bp, Homo sapiens
cacaacactacgggt

SEQ ID NO: 1337868 - DNA, 15 bp, Homo sapiens
ccacaacactacggg

SEQ ID NO: 1337869 - DNA, 15 bp, Homo sapiens
accacaacactacgg

SEQ ID NO: 1337870 - DNA, 15 bp, Homo sapiens
gaccacaacactacg

SEQ ID NO: 1337871 - DNA, 15 bp, Homo sapiens
agaccacaacactac

SEQ ID NO: 1337872 - DNA, 15 bp, Homo sapiens
cagaccacaacacta

SEQ ID NO: 1337873 - DNA, 15 bp, Homo sapiens
ccagaccacaacact

SEQ ID NO: 1337874 - DNA, 15 bp, Homo sapiens
gccagaccacaacac

SEQ ID NO: 1337875 - DNA, 15 bp, Homo sapiens
ggccagaccacaaca

SEQ ID NO: 1337876 - DNA, 15 bp, Homo sapiens
gggccagaccacaac

SEQ ID NO: 1337877 - DNA, 15 bp, Homo sapiens
cgggccagaccacaa

SEQ ID NO: 1337878 - DNA, 15 bp, Homo sapiens
gcgggccagaccaca

SEQ ID NO: 1337879 - DNA, 15 bp, Homo sapiens
cgcgggccagaccac

SEQ ID NO: 1337880 - DNA, 15 bp, Homo sapiens
acgcgggccagacca

SEQ ID NO: 1337881 - DNA, 15 bp, Homo sapiens
cacgcgggccagacc

SEQ ID NO: 1337882 - DNA, 15 bp, Homo sapiens
ccacgcgggccagac

SEQ ID NO: 1337883 - DNA, 15 bp, Homo sapiens
cccacgcgggccaga

SEQ ID NO: 1337884 - DNA, 15 bp, Homo sapiens
acccacgcgggccag

SEQ ID NO: 1337885 - DNA, 15 bp, Homo sapiens
cacccacgcgggcca

SEQ ID NO: 1337886 - DNA, 15 bp, Homo sapiens
ccacccacgcgggcc

SEQ ID NO: 1337887 - DNA, 15 bp, Homo sapiens
gccacccacgcgggc

SEQ ID NO: 1337888 - DNA, 15 bp, Homo sapiens
cgccacccacgcggg

SEQ ID NO: 1337889 - DNA, 15 bp, Homo sapiens
ccgccacccacgcgg

SEQ ID NO: 1337890 - DNA, 15 bp, Homo sapiens
cccgccacccacgcg

SEQ ID NO: 1337891 - DNA, 15 bp, Homo sapiens
tcccgccacccacgc

SEQ ID NO: 1337892 - DNA, 15 bp, Homo sapiens
ctcccgccacccacg

SEQ ID NO: 1337893 - DNA, 15 bp, Homo sapiens
gctcccgccacccac

SEQ ID NO: 1337894 - DNA, 15 bp, Homo sapiens
cgctcccgccaccca

SEQ ID NO: 1337895 - DNA, 15 bp, Homo sapiens
gcgctcccgccaccc

SEQ ID NO: 1337896 - DNA, 15 bp, Homo sapiens
ggcgctcccgccacc

SEQ ID NO: 1337897 - DNA, 15 bp, Homo sapiens
cggcgctcccgccac

SEQ ID NO: 1337898 - DNA, 15 bp, Homo sapiens
tcggcgctcccgcca

SEQ ID NO: 1337899 - DNA, 15 bp, Homo sapiens
ctcggcgctcccgcc

SEQ ID NO: 1337900 - DNA, 15 bp, Homo sapiens
tctcggcgctcccgc

SEQ ID NO: 1337901 - DNA, 15 bp, Homo sapiens
ctctcggcgctcccg

SEQ ID NO: 1337902 - DNA, 15 bp, Homo sapiens
cctctcggcgctccc

SEQ ID NO: 1337903 - DNA, 15 bp, Homo sapiens
ccctctcggcgctcc

SEQ ID NO: 1337904 - DNA, 15 bp, Homo sapiens
gccctctcggcgctc

SEQ ID NO: 1337905 - DNA, 15 bp, Homo sapiens
cgccctctcggcgct

SEQ ID NO: 1337906 - DNA, 15 bp, Homo sapiens
ccgccctctcggcgc

SEQ ID NO: 1337907 - DNA, 15 bp, Homo sapiens
cccgccctctcggcg

SEQ ID NO: 1337908 - DNA, 15 bp, Homo sapiens
ccccgccctctcggc

SEQ ID NO: 1337909 - DNA, 15 bp, Homo sapiens
cccccgccctctcgg

SEQ ID NO: 1337910 - DNA, 15 bp, Homo sapiens
gcccccgccctctcg

SEQ ID NO: 1337911 - DNA, 15 bp, Homo sapiens
cgcccccgccctctc

SEQ ID NO: 1337912 - DNA, 15 bp, Homo sapiens
ccgcccccgccctct

SEQ ID NO: 1337913 - DNA, 15 bp, Homo sapiens
gccgcccccgccctc

SEQ ID NO: 1337914 - DNA, 15 bp, Homo sapiens
cgccgcccccgccct

SEQ ID NO: 1337915 - DNA, 15 bp, Homo sapiens
tcgccgcccccgccc

SEQ ID NO: 1337916 - DNA, 15 bp, Homo sapiens
atcgccgcccccgcc

SEQ ID NO: 1337917 - DNA, 15 bp, Homo sapiens
catcgccgcccccgc

SEQ ID NO: 1337918 - DNA, 15 bp, Homo sapiens
ccatcgccgcccccg

SEQ ID NO: 1337919 - DNA, 15 bp, Homo sapiens
cccatcgccgccccc

SEQ ID NO: 1337920 - DNA, 15 bp, Homo sapiens
ccccatcgccgcccc

SEQ ID NO: 1337921 - DNA, 15 bp, Homo sapiens
gccccatcgccgccc

SEQ ID NO: 1337922 - DNA, 15 bp, Homo sapiens
cgccccatcgccgcc

SEQ ID NO: 1337923 - DNA, 15 bp, Homo sapiens
ccgccccatcgccgc

SEQ ID NO: 1337924 - DNA, 15 bp, Homo sapiens
cccgccccatcgccg

SEQ ID NO: 1337925 - DNA, 15 bp, Homo sapiens
acccgccccatcgcc

SEQ ID NO: 1337926 - DNA, 15 bp, Homo sapiens
gacccgccccatcgc

SEQ ID NO: 1337927 - DNA, 15 bp, Homo sapiens
tgacccgccccatcg

SEQ ID NO: 1337928 - DNA, 15 bp, Homo sapiens
gtgacccgccccatc

SEQ ID NO: 1337929 - DNA, 15 bp, Homo sapiens
cgtgacccgccccat

SEQ ID NO: 1337930 - DNA, 15 bp, Homo sapiens
acgtgacccgcccca

SEQ ID NO: 1337931 - DNA, 15 bp, Homo sapiens
cacgtgacccgcccc

SEQ ID NO: 1337932 - DNA, 15 bp, Homo sapiens
cagaaaagatagccg

SEQ ID NO: 1337933 - DNA, 15 bp, Homo sapiens
acagaaaagatagcc

SEQ ID NO: 1337934 - DNA, 15 bp, Homo sapiens
aacagaaaagatagc

SEQ ID NO: 1337935 - DNA, 15 bp, Homo sapiens
aaacagaaaagatag

SEQ ID NO: 1337936 - DNA, 15 bp, Homo sapiens
aaaacagaaaagata

SEQ ID NO: 1337937 - DNA, 15 bp, Homo sapiens
aaaaacagaaaagat

SEQ ID NO: 1337938 - DNA, 15 bp, Homo sapiens
aaaaaacagaaaaga

SEQ ID NO: 1337939 - DNA, 15 bp, Homo sapiens
taaaaaacagaaaag

SEQ ID NO: 1337940 - DNA, 15 bp, Homo sapiens
ttaaaaaacagaaaa

SEQ ID NO: 1337941 - DNA, 15 bp, Homo sapiens
cttaaaaaacagaaa

SEQ ID NO: 1337942 - DNA, 15 bp, Homo sapiens
acttaaaaaacagaa

SEQ ID NO: 1337943 - DNA, 15 bp, Homo sapiens
tacttaaaaaacaga

SEQ ID NO: 1337944 - DNA, 15 bp, Homo sapiens
ctacttaaaaaacag

SEQ ID NO: 1337945 - DNA, 15 bp, Homo sapiens
tctacttaaaaaaca

SEQ ID NO: 1337946 - DNA, 15 bp, Homo sapiens
gtctacttaaaaaac

SEQ ID NO: 1337947 - DNA, 15 bp, Homo sapiens
agtctacttaaaaaa

SEQ ID NO: 1337948 - DNA, 15 bp, Homo sapiens
aagtctacttaaaaa

SEQ ID NO: 1337949 - DNA, 15 bp, Homo sapiens
taagtctacttaaaa

SEQ ID NO: 1337950 - DNA, 15 bp, Homo sapiens
ttaagtctacttaaa

SEQ ID NO: 1337951 - DNA, 15 bp, Homo sapiens
aattaagtctactta

SEQ ID NO: 1337952 - DNA, 15 bp, Homo sapiens
aaattaagtctactt

SEQ ID NO: 1337953 - DNA, 15 bp, Homo sapiens
taaattaagtctact

SEQ ID NO: 1337954 - DNA, 15 bp, Homo sapiens
ataaattaagtctac

SEQ ID NO: 1337955 - DNA, 15 bp, Homo sapiens
aataaattaagtcta

SEQ ID NO: 1337956 - DNA, 15 bp, Homo sapiens
aaataaattaagtct

SEQ ID NO: 1337957 - DNA, 15 bp, Homo sapiens
aaaataaattaagtc

SEQ ID NO: 1337958 - DNA, 15 bp, Homo sapiens
aaaaataaattaagt

SEQ ID NO: 1337959 - DNA, 15 bp, Homo sapiens
taaaaataaattaag

SEQ ID NO: 1337960 - DNA, 15 bp, Homo sapiens
ctaaaaataaattaa

SEQ ID NO: 1337961 - DNA, 15 bp, Homo sapiens
tctaaaaataaatta

SEQ ID NO: 1337962 - DNA, 15 bp, Homo sapiens
atctaaaaataaatt

SEQ ID NO: 1337963 - DNA, 15 bp, Homo sapiens
aatctaaaaataaat

SEQ ID NO: 1337964 - DNA, 15 bp, Homo sapiens
aaatctaaaaataaa

SEQ ID NO: 1337965 - DNA, 15 bp, Homo sapiens
aaaatctaaaaataa

SEQ ID NO: 1337966 - DNA, 15 bp, Homo sapiens
caaaatctaaaaata

SEQ ID NO: 1337967 - DNA, 15 bp, Homo sapiens
ccaaaatctaaaaat

SEQ ID NO: 1337968 - DNA, 15 bp, Homo sapiens
gccaaaatctaaaaa

SEQ ID NO: 1337969 - DNA, 15 bp, Homo sapiens
agccaaaatctaaaa

SEQ ID NO: 1337970 - DNA, 15 bp, Homo sapiens
cagccaaaatctaaa

SEQ ID NO: 1337971 - DNA, 15 bp, Homo sapiens
tcagccaaaatctaa

SEQ ID NO: 1337972 - DNA, 15 bp, Homo sapiens
ttcagccaaaatcta

SEQ ID NO: 1337973 - DNA, 15 bp, Homo sapiens
tttcagccaaaatct

SEQ ID NO: 1337974 - DNA, 15 bp, Homo sapiens
gtttcagccaaaatc

SEQ ID NO: 1337975 - DNA, 15 bp, Homo sapiens
agtttcagccaaaat

SEQ ID NO: 1337976 - DNA, 15 bp, Homo sapiens
cagtttcagccaaaa

SEQ ID NO: 1337977 - DNA, 15 bp, Homo sapiens
tcagtttcagccaaa

SEQ ID NO: 1337978 - DNA, 15 bp, Homo sapiens
ctcagtttcagccaa

SEQ ID NO: 1337979 - DNA, 15 bp, Homo sapiens
actcagtttcagcca

SEQ ID NO: 1337980 - DNA, 15 bp, Homo sapiens
cactcagtttcagcc

SEQ ID NO: 1337981 - DNA, 15 bp, Homo sapiens
tcactcagtttcagc

SEQ ID NO: 1337982 - DNA, 15 bp, Homo sapiens
ctcactcagtttcag

SEQ ID NO: 1337983 - DNA, 15 bp, Homo sapiens
gctcactcagtttca

SEQ ID NO: 1337984 - DNA, 15 bp, Homo sapiens
tgctcactcagtttc

SEQ ID NO: 1337985 - DNA, 15 bp, Homo sapiens
ctgctcactcagttt

SEQ ID NO: 1337986 - DNA, 15 bp, Homo sapiens
tctgctcactcagtt

SEQ ID NO: 1337987 - DNA, 15 bp, Homo sapiens
ttctgctcactcagt

SEQ ID NO: 1337988 - DNA, 15 bp, Homo sapiens
attctgctcactcag

SEQ ID NO: 1337989 - DNA, 15 bp, Homo sapiens
aattctgctcactca

SEQ ID NO: 1337990 - DNA, 15 bp, Homo sapiens
gaattctgctcactc

SEQ ID NO: 1337991 - DNA, 15 bp, Homo sapiens
ggaattctgctcact

SEQ ID NO: 1337992 - DNA, 15 bp, Homo sapiens
aggaattctgctcac

SEQ ID NO: 1337993 - DNA, 15 bp, Homo sapiens
taggaattctgctca

SEQ ID NO: 1337994 - DNA, 15 bp, Homo sapiens
ttaggaattctgctc

SEQ ID NO: 1337995 - DNA, 15 bp, Homo sapiens
tttaggaattctgct

SEQ ID NO: 1337996 - DNA, 15 bp, Homo sapiens
ctttaggaattctgc

SEQ ID NO: 1337997 - DNA, 15 bp, Homo sapiens
tctttaggaattctg

SEQ ID NO: 1337998 - DNA, 15 bp, Homo sapiens
atctttaggaattct

SEQ ID NO: 1337999 - DNA, 15 bp, Homo sapiens
catctttaggaattc

SEQ ID NO: 1338000 - DNA, 15 bp, Homo sapiens
tcatctttaggaatt

SEQ ID NO: 1338001 - DNA, 15 bp, Homo sapiens
ttcatctttaggaat

SEQ ID NO: 1338002 - DNA, 15 bp, Homo sapiens
cttcatctttaggaa

SEQ ID NO: 1338003 - DNA, 15 bp, Homo sapiens
tcttcatctttagga

SEQ ID NO: 1338004 - DNA, 15 bp, Homo sapiens
ttcttcatctttagg

SEQ ID NO: 1338005 - DNA, 15 bp, Homo sapiens
tttcttcatctttag

SEQ ID NO: 1338006 - DNA, 15 bp, Homo sapiens
gtttcttcatcttta

SEQ ID NO: 1338007 - DNA, 15 bp, Homo sapiens
agtttcttcatcttt

SEQ ID NO: 1338008 - DNA, 15 bp, Homo sapiens
cagtttcttcatctt

SEQ ID NO: 1338009 - DNA, 15 bp, Homo sapiens
acagtttcttcatct

SEQ ID NO: 1338010 - DNA, 15 bp, Homo sapiens
aacagtttcttcatc

SEQ ID NO: 1338011 - DNA, 15 bp, Homo sapiens
gaacagtttcttcat

SEQ ID NO: 1338012 - DNA, 15 bp, Homo sapiens
ggaacagtttcttca

SEQ ID NO: 1338013 - DNA, 15 bp, Homo sapiens
tggaacagtttcttc

SEQ ID NO: 1338014 - DNA, 15 bp, Homo sapiens
attggaacagtttct

SEQ ID NO: 1338015 - DNA, 15 bp, Homo sapiens
cattggaacagtttc

SEQ ID NO: 1338016 - DNA, 15 bp, Homo sapiens
tcattggaacagttt

SEQ ID NO: 1338017 - DNA, 15 bp, Homo sapiens
ttcattggaacagtt

SEQ ID NO: 1338018 - DNA, 15 bp, Homo sapiens
gttcattggaacagt

SEQ ID NO: 1338019 - DNA, 15 bp, Homo sapiens
tgttcattggaacag

SEQ ID NO: 1338020 - DNA, 15 bp, Homo sapiens
ctgttcattggaaca

SEQ ID NO: 1338021 - DNA, 15 bp, Homo sapiens
actgttcattggaac

SEQ ID NO: 1338022 - DNA, 15 bp, Homo sapiens
cactgttcattggaa

SEQ ID NO: 1338023 - DNA, 15 bp, Homo sapiens
gcactgttcattgga

SEQ ID NO: 1338024 - DNA, 15 bp, Homo sapiens
tgcactgttcattgg

SEQ ID NO: 1338025 - DNA, 15 bp, Homo sapiens
ttgcactgttcattg

SEQ ID NO: 1338026 - DNA, 15 bp, Homo sapiens
cttgcactgttcatt

SEQ ID NO: 1338027 - DNA, 15 bp, Homo sapiens
gcttgcactgttcat

SEQ ID NO: 1338028 - DNA, 15 bp, Homo sapiens
agcttgcactgttca

SEQ ID NO: 1338029 - DNA, 15 bp, Homo sapiens
cagcttgcactgttc

SEQ ID NO: 1338030 - DNA, 15 bp, Homo sapiens
tcagcttgcactgtt

SEQ ID NO: 1338031 - DNA, 15 bp, Homo sapiens
gtcagcttgcactgt

SEQ ID NO: 1338032 - DNA, 15 bp, Homo sapiens
ggtcagcttgcactg

SEQ ID NO: 1338033 - DNA, 15 bp, Homo sapiens
gggtcagcttgcact

SEQ ID NO: 1338034 - DNA, 15 bp, Homo sapiens
ggggtcagcttgcac

SEQ ID NO: 1338035 - DNA, 15 bp, Homo sapiens
tggggtcagcttgca

SEQ ID NO: 1338036 - DNA, 15 bp, Homo sapiens
atggggtcagcttgc

SEQ ID NO: 1338037 - DNA, 15 bp, Homo sapiens
tatggggtcagcttg

SEQ ID NO: 1338038 - DNA, 15 bp, Homo sapiens
ctatggggtcagctt

SEQ ID NO: 1338039 - DNA, 15 bp, Homo sapiens
cctatggggtcagct

SEQ ID NO: 1338040 - DNA, 15 bp, Homo sapiens
gcctatggggtcagc

SEQ ID NO: 1338041 - DNA, 15 bp, Homo sapiens
tgcctatggggtcag

SEQ ID NO: 1338042 - DNA, 15 bp, Homo sapiens
atgcctatggggtca

SEQ ID NO: 1338043 - DNA, 15 bp, Homo sapiens
catgcctatggggtc

SEQ ID NO: 1338044 - DNA, 15 bp, Homo sapiens
gcatgcctatggggt

SEQ ID NO: 1338045 - DNA, 15 bp, Homo sapiens
agcatgcctatgggg

SEQ ID NO: 1338046 - DNA, 15 bp, Homo sapiens
aagcatgcctatggg

SEQ ID NO: 1338047 - DNA, 15 bp, Homo sapiens
aaagcatgcctatgg

SEQ ID NO: 1338048 - DNA, 15 bp, Homo sapiens
taaagcatgcctatg

SEQ ID NO: 1338049 - DNA, 15 bp, Homo sapiens
gtaaagcatgcctat

SEQ ID NO: 1338050 - DNA, 15 bp, Homo sapiens
tgtaaagcatgccta

SEQ ID NO: 1338051 - DNA, 15 bp, Homo sapiens
gtgtaaagcatgcct

SEQ ID NO: 1338052 - DNA, 15 bp, Homo sapiens
tgtgtaaagcatgcc

SEQ ID NO: 1338053 - DNA, 15 bp, Homo sapiens
gtgtgtaaagcatgc

SEQ ID NO: 1338054 - DNA, 15 bp, Homo sapiens
cgtgtgtaaagcatg

SEQ ID NO: 1338055 - DNA, 15 bp, Homo sapiens
gcgtgtgtaaagcat

SEQ ID NO: 1338056 - DNA, 15 bp, Homo sapiens
ggcgtgtgtaaagca

SEQ ID NO: 1338057 - DNA, 15 bp, Homo sapiens
cggcgtgtgtaaagc

SEQ ID NO: 1338058 - DNA, 15 bp, Homo sapiens
acggcgtgtgtaaag

SEQ ID NO: 1338059 - DNA, 15 bp, Homo sapiens
cacggcgtgtgtaaa

SEQ ID NO: 1338060 - DNA, 15 bp, Homo sapiens
acacggcgtgtgtaa

SEQ ID NO: 1338061 - DNA, 15 bp, Homo sapiens
tacacggcgtgtgta

SEQ ID NO: 1338062 - DNA, 15 bp, Homo sapiens
ttacacggcgtgtgt

SEQ ID NO: 1338063 - DNA, 15 bp, Homo sapiens
tttacacggcgtgtg

SEQ ID NO: 1338064 - DNA, 15 bp, Homo sapiens
atttacacggcgtgt

SEQ ID NO: 1338065 - DNA, 15 bp, Homo sapiens
catttacacggcgtg

SEQ ID NO: 1338066 - DNA, 15 bp, Homo sapiens
acatttacacggcgt

SEQ ID NO: 1338067 - DNA, 15 bp, Homo sapiens
aacatttacacggcg

SEQ ID NO: 1338068 - DNA, 15 bp, Homo sapiens
taacatttacacggc

SEQ ID NO: 1338069 - DNA, 15 bp, Homo sapiens
ttaacatttacacgg

SEQ ID NO: 1338070 - DNA, 15 bp, Homo sapiens
tttaacatttacacg

SEQ ID NO: 1338071 - DNA, 15 bp, Homo sapiens
atttaacatttacac

SEQ ID NO: 1338072 - DNA, 15 bp, Homo sapiens
catttaacatttaca

SEQ ID NO: 1338073 - DNA, 15 bp, Homo sapiens
gcatttaacatttac

SEQ ID NO: 1338074 - DNA, 15 bp, Homo sapiens
agcatttaacattta

SEQ ID NO: 1338075 - DNA, 15 bp, Homo sapiens
cagcatttaacattt

SEQ ID NO: 1338076 - DNA, 15 bp, Homo sapiens
acagcatttaacatt

SEQ ID NO: 1338077 - DNA, 15 bp, Homo sapiens
tacagcatttaacat

SEQ ID NO: 1338078 - DNA, 15 bp, Homo sapiens
gtacagcatttaaca

SEQ ID NO: 1338079 - DNA, 15 bp, Homo sapiens
agtacagcatttaac

SEQ ID NO: 1338080 - DNA, 15 bp, Homo sapiens
gagtacagcatttaa

SEQ ID NO: 1338081 - DNA, 15 bp, Homo sapiens
cgagtacagcattta

SEQ ID NO: 1338082 - DNA, 15 bp, Homo sapiens
tcgagtacagcattt

SEQ ID NO: 1338083 - DNA, 15 bp, Homo sapiens
atcgagtacagcatt

SEQ ID NO: 1338084 - DNA, 15 bp, Homo sapiens
catcgagtacagcat

SEQ ID NO: 1338085 - DNA, 15 bp, Homo sapiens
tcatcgagtacagca

SEQ ID NO: 1338086 - DNA, 15 bp, Homo sapiens
ttcatcgagtacagc

SEQ ID NO: 1338087 - DNA, 15 bp, Homo sapiens
tttcatcgagtacag

SEQ ID NO: 1338088 - DNA, 15 bp, Homo sapiens
ttttcatcgagtaca

SEQ ID NO: 1338089 - DNA, 15 bp, Homo sapiens
attttcatcgagtac

SEQ ID NO: 1338090 - DNA, 15 bp, Homo sapiens
cattttcatcgagta

SEQ ID NO: 1338091 - DNA, 15 bp, Homo sapiens
tcattttcatcgagt

SEQ ID NO: 1338092 - DNA, 15 bp, Homo sapiens
atcattttcatcgag

SEQ ID NO: 1338093 - DNA, 15 bp, Homo sapiens
aatcattttcatcga

SEQ ID NO: 1338094 - DNA, 15 bp, Homo sapiens
caatcattttcatcg

SEQ ID NO: 1338095 - DNA, 15 bp, Homo sapiens
gcaatcattttcatc

SEQ ID NO: 1338096 - DNA, 15 bp, Homo sapiens
agcaatcattttcat

SEQ ID NO: 1338097 - DNA, 15 bp, Homo sapiens
gagcaatcattttca

SEQ ID NO: 1338098 - DNA, 15 bp, Homo sapiens
agagcaatcattttc

SEQ ID NO: 1338099 - DNA, 15 bp, Homo sapiens
tagagcaatcatttt

SEQ ID NO: 1338100 - DNA, 15 bp, Homo sapiens
atagagcaatcattt

SEQ ID NO: 1338101 - DNA, 15 bp, Homo sapiens
tatagagcaatcatt

SEQ ID NO: 1338102 - DNA, 15 bp, Homo sapiens
ttatagagcaatcat

SEQ ID NO: 1338103 - DNA, 15 bp, Homo sapiens
gttatagagcaatca

SEQ ID NO: 1338104 - DNA, 15 bp, Homo sapiens
ggttatagagcaatc

SEQ ID NO: 1338105 - DNA, 15 bp, Homo sapiens
cggttatagagcaat

SEQ ID NO: 1338106 - DNA, 15 bp, Homo sapiens
acggttatagagcaa

SEQ ID NO: 1338107 - DNA, 15 bp, Homo sapiens
aacggttatagagca

SEQ ID NO: 1338108 - DNA, 15 bp, Homo sapiens
gaacggttatagagc

SEQ ID NO: 1338109 - DNA, 15 bp, Homo sapiens
tgaacggttatagag

SEQ ID NO: 1338110 - DNA, 15 bp, Homo sapiens
atgaacggttataga

SEQ ID NO: 1338111 - DNA, 15 bp, Homo sapiens
tatgaacggttatag

SEQ ID NO: 1338112 - DNA, 15 bp, Homo sapiens
gtatgaacggttata

SEQ ID NO: 1338113 - DNA, 15 bp, Homo sapiens
tgtatgaacggttat

SEQ ID NO: 1338114 - DNA, 15 bp, Homo sapiens
atgtatgaacggtta

SEQ ID NO: 1338115 - DNA, 15 bp, Homo sapiens
aatgtatgaacggtt

SEQ ID NO: 1338116 - DNA, 15 bp, Homo sapiens
aaatgtatgaacggt

SEQ ID NO: 1338117 - DNA, 15 bp, Homo sapiens
aaaatgtatgaacgg

SEQ ID NO: 1338118 - DNA, 15 bp, Homo sapiens
taaaatgtatgaacg

SEQ ID NO: 1338119 - DNA, 15 bp, Homo sapiens
ctaaaatgtatgaac

SEQ ID NO: 1338120 - DNA, 15 bp, Homo sapiens
cctaaaatgtatgaa

SEQ ID NO: 1338121 - DNA, 15 bp, Homo sapiens
acctaaaatgtatga

SEQ ID NO: 1338122 - DNA, 15 bp, Homo sapiens
cacctaaaatgtatg

SEQ ID NO: 1338123 - DNA, 15 bp, Homo sapiens
gcacctaaaatgtat

SEQ ID NO: 1338124 - DNA, 15 bp, Homo sapiens
tgcacctaaaatgta

SEQ ID NO: 1338125 - DNA, 15 bp, Homo sapiens
atgcacctaaaatgt

SEQ ID NO: 1338126 - DNA, 15 bp, Homo sapiens
catgcacctaaaatg

SEQ ID NO: 1338127 - DNA, 15 bp, Homo sapiens
acatgcacctaaaat

SEQ ID NO: 1338128 - DNA, 15 bp, Homo sapiens
aacatgcacctaaaa

SEQ ID NO: 1338129 - DNA, 15 bp, Homo sapiens
caacatgcacctaaa

SEQ ID NO: 1338130 - DNA, 15 bp, Homo sapiens
acaacatgcacctaa

SEQ ID NO: 1338131 - DNA, 15 bp, Homo sapiens
aacaacatgcaccta

SEQ ID NO: 1338132 - DNA, 15 bp, Homo sapiens
aaacaacatgcacct

SEQ ID NO: 1338133 - DNA, 15 bp, Homo sapiens
aaaacaacatgcacc

SEQ ID NO: 1338134 - DNA, 15 bp, Homo sapiens
caaaacaacatgcac

SEQ ID NO: 1338135 - DNA, 15 bp, Homo sapiens
tcaaaacaacatgca

SEQ ID NO: 1338136 - DNA, 15 bp, Homo sapiens
atcaaaacaacatgc

SEQ ID NO: 1338137 - DNA, 15 bp, Homo sapiens
tatcaaaacaacatg

SEQ ID NO: 1338138 - DNA, 15 bp, Homo sapiens
ctatcaaaacaacat

SEQ ID NO: 1338139 - DNA, 15 bp, Homo sapiens
gctatcaaaacaaca

SEQ ID NO: 1338140 - DNA, 15 bp, Homo sapiens
ggctatcaaaacaac

SEQ ID NO: 1338141 - DNA, 15 bp, Homo sapiens
aggctatcaaaacaa

SEQ ID NO: 1338142 - DNA, 15 bp, Homo sapiens
aaggctatcaaaaca

SEQ ID NO: 1338143 - DNA, 15 bp, Homo sapiens
caaggctatcaaaac

SEQ ID NO: 1338144 - DNA, 15 bp, Homo sapiens
tcaaggctatcaaaa

SEQ ID NO: 1338145 - DNA, 15 bp, Homo sapiens
gtcaaggctatcaaa

SEQ ID NO: 1338146 - DNA, 15 bp, Homo sapiens
agtcaaggctatcaa

SEQ ID NO: 1338147 - DNA, 15 bp, Homo sapiens
cagtcaaggctatca

SEQ ID NO: 1338148 - DNA, 15 bp, Homo sapiens
tcagtcaaggctatc

SEQ ID NO: 1338149 - DNA, 15 bp, Homo sapiens
gtcagtcaaggctat

SEQ ID NO: 1338150 - DNA, 15 bp, Homo sapiens
agtcagtcaaggcta

SEQ ID NO: 1338151 - DNA, 15 bp, Homo sapiens
aagtcagtcaaggct

SEQ ID NO: 1338152 - DNA, 15 bp, Homo sapiens
caagtcagtcaaggc

SEQ ID NO: 1338153 - DNA, 15 bp, Homo sapiens
ccaagtcagtcaagg

SEQ ID NO: 1338154 - DNA, 15 bp, Homo sapiens
accaagtcagtcaag

SEQ ID NO: 1338155 - DNA, 15 bp, Homo sapiens
aaccaagtcagtcaa

SEQ ID NO: 1338156 - DNA, 15 bp, Homo sapiens
aaaccaagtcagtca

SEQ ID NO: 1338157 - DNA, 15 bp, Homo sapiens
gaaaccaagtcagtc

SEQ ID NO: 1338158 - DNA, 15 bp, Homo sapiens
agaaaccaagtcagt

SEQ ID NO: 1338159 - DNA, 15 bp, Homo sapiens
aagaaaccaagtcag

SEQ ID NO: 1338160 - DNA, 15 bp, Homo sapiens
aaagaaaccaagtca

SEQ ID NO: 1338161 - DNA, 15 bp, Homo sapiens
aaaagaaaccaagtc

SEQ ID NO: 1338162 - DNA, 15 bp, Homo sapiens
caaaagaaaccaagt

SEQ ID NO: 1338163 - DNA, 15 bp, Homo sapiens
gcaaaagaaaccaag

SEQ ID NO: 1338164 - DNA, 15 bp, Homo sapiens
tgcaaaagaaaccaa

SEQ ID NO: 1338165 - DNA, 15 bp, Homo sapiens
ctgcaaaagaaacca

SEQ ID NO: 1338166 - DNA, 15 bp, Homo sapiens
tctgcaaaagaaacc

SEQ ID NO: 1338167 - DNA, 15 bp, Homo sapiens
atctgcaaaagaaac

SEQ ID NO: 1338168 - DNA, 15 bp, Homo sapiens
tatctgcaaaagaaa

SEQ ID NO: 1338169 - DNA, 15 bp, Homo sapiens
ttatctgcaaaagaa

SEQ ID NO: 1338170 - DNA, 15 bp, Homo sapiens
gttatctgcaaaaga

SEQ ID NO: 1338171 - DNA, 15 bp, Homo sapiens
ggttatctgcaaaag

SEQ ID NO: 1338172 - DNA, 15 bp, Homo sapiens
aggttatctgcaaaa

SEQ ID NO: 1338173 - DNA, 15 bp, Homo sapiens
aaggttatctgcaaa

SEQ ID NO: 1338174 - DNA, 15 bp, Homo sapiens
gaaggttatctgcaa

SEQ ID NO: 1338175 - DNA, 15 bp, Homo sapiens
agaaggttatctgca

SEQ ID NO: 1338176 - DNA, 15 bp, Homo sapiens
cagaaggttatctgc

SEQ ID NO: 1338177 - DNA, 15 bp, Homo sapiens
acagaaggttatctg

SEQ ID NO: 1338178 - DNA, 15 bp, Homo sapiens
aacagaaggttatct

SEQ ID NO: 1338179 - DNA, 15 bp, Homo sapiens
gaacagaaggttatc

SEQ ID NO: 1338180 - DNA, 15 bp, Homo sapiens
cgaacagaaggttat

SEQ ID NO: 1338181 - DNA, 15 bp, Homo sapiens
ccgaacagaaggtta

SEQ ID NO: 1338182 - DNA, 15 bp, Homo sapiens
accgaacagaaggtt

SEQ ID NO: 1338183 - DNA, 15 bp, Homo sapiens
caccgaacagaaggt

SEQ ID NO: 1338184 - DNA, 15 bp, Homo sapiens
tcaccgaacagaagg

SEQ ID NO: 1338185 - DNA, 15 bp, Homo sapiens
atcaccgaacagaag

SEQ ID NO: 1338186 - DNA, 15 bp, Homo sapiens
catcaccgaacagaa

SEQ ID NO: 1338187 - DNA, 15 bp, Homo sapiens
tcatcaccgaacaga

SEQ ID NO: 1338188 - DNA, 15 bp, Homo sapiens
ttcatcaccgaacag

SEQ ID NO: 1338189 - DNA, 15 bp, Homo sapiens
tttcatcaccgaaca

SEQ ID NO: 1338190 - DNA, 15 bp, Homo sapiens
atttcatcaccgaac

SEQ ID NO: 1338191 - DNA, 15 bp, Homo sapiens
aatttcatcaccgaa

SEQ ID NO: 1338192 - DNA, 15 bp, Homo sapiens
taatttcatcaccga

SEQ ID NO: 1338193 - DNA, 15 bp, Homo sapiens
ataatttcatcaccg

SEQ ID NO: 1338194 - DNA, 15 bp, Homo sapiens
gataatttcatcacc

SEQ ID NO: 1338195 - DNA, 15 bp, Homo sapiens
tgataatttcatcac

SEQ ID NO: 1338196 - DNA, 15 bp, Homo sapiens
gtgataatttcatca

SEQ ID NO: 1338197 - DNA, 15 bp, Homo sapiens
agtgataatttcatc

SEQ ID NO: 1338198 - DNA, 15 bp, Homo sapiens
tagtgataatttcat

SEQ ID NO: 1338199 - DNA, 15 bp, Homo sapiens
ttagtgataatttca

SEQ ID NO: 1338200 - DNA, 15 bp, Homo sapiens
attagtgataatttc

SEQ ID NO: 1338201 - DNA, 15 bp, Homo sapiens
cattagtgataattt

SEQ ID NO: 1338202 - DNA, 15 bp, Homo sapiens
ccattagtgataatt

SEQ ID NO: 1338203 - DNA, 15 bp, Homo sapiens
accattagtgataat

SEQ ID NO: 1338204 - DNA, 15 bp, Homo sapiens
aaccattagtgataa

SEQ ID NO: 1338205 - DNA, 15 bp, Homo sapiens
aaaccattagtgata

SEQ ID NO: 1338206 - DNA, 15 bp, Homo sapiens
aaaaccattagtgat

SEQ ID NO: 1338207 - DNA, 15 bp, Homo sapiens
gaaaaccattagtga

SEQ ID NO: 1338208 - DNA, 15 bp, Homo sapiens
tgaaaaccattagtg

SEQ ID NO: 1338209 - DNA, 15 bp, Homo sapiens
atgaaaaccattagt

SEQ ID NO: 1338210 - DNA, 15 bp, Homo sapiens
aatgaaaaccattag

SEQ ID NO: 1338211 - DNA, 15 bp, Homo sapiens
gaatgaaaaccatta

SEQ ID NO: 1338212 - DNA, 15 bp, Homo sapiens
ggaatgaaaaccatt

SEQ ID NO: 1338213 - DNA, 15 bp, Homo sapiens
aggaatgaaaaccat

SEQ ID NO: 1338214 - DNA, 15 bp, Homo sapiens
caggaatgaaaacca

SEQ ID NO: 1338215 - DNA, 15 bp, Homo sapiens
acaggaatgaaaacc

SEQ ID NO: 1338216 - DNA, 15 bp, Homo sapiens
cacaggaatgaaaac

SEQ ID NO: 1338217 - DNA, 15 bp, Homo sapiens
tcacaggaatgaaaa

SEQ ID NO: 1338218 - DNA, 15 bp, Homo sapiens
ttcacaggaatgaaa

SEQ ID NO: 1338219 - DNA, 15 bp, Homo sapiens
tttcacaggaatgaa

SEQ ID NO: 1338220 - DNA, 15 bp, Homo sapiens
ctttcacaggaatga

SEQ ID NO: 1338221 - DNA, 15 bp, Homo sapiens
actttcacaggaatg

SEQ ID NO: 1338222 - DNA, 15 bp, Homo sapiens
cactttcacaggaat

SEQ ID NO: 1338223 - DNA, 15 bp, Homo sapiens
tcactttcacaggaa

SEQ ID NO: 1338224 - DNA, 15 bp, Homo sapiens
atcactttcacagga

SEQ ID NO: 1338225 - DNA, 15 bp, Homo sapiens
catcactttcacagg

SEQ ID NO: 1338226 - DNA, 15 bp, Homo sapiens
tcatcactttcacag

SEQ ID NO: 1338227 - DNA, 15 bp, Homo sapiens
ctcatcactttcaca

SEQ ID NO: 1338228 - DNA, 15 bp, Homo sapiens
cctcatcactttcac

SEQ ID NO: 1338229 - DNA, 15 bp, Homo sapiens
tcctcatcactttca

SEQ ID NO: 1338230 - DNA, 15 bp, Homo sapiens
ctcctcatcactttc

SEQ ID NO: 1338231 - DNA, 15 bp, Homo sapiens
cctcctcatcacttt

SEQ ID NO: 1338232 - DNA, 15 bp, Homo sapiens
tcctcctcatcactt

SEQ ID NO: 1338233 - DNA, 15 bp, Homo sapiens
atcctcctcatcact

SEQ ID NO: 1338234 - DNA, 15 bp, Homo sapiens
tatcctcctcatcac

SEQ ID NO: 1338235 - DNA, 15 bp, Homo sapiens
ctatcctcctcatca

SEQ ID NO: 1338236 - DNA, 15 bp, Homo sapiens
tctatcctcctcatc

SEQ ID NO: 1338237 - DNA, 15 bp, Homo sapiens
ctctatcctcctcat

SEQ ID NO: 1338238 - DNA, 15 bp, Homo sapiens
gctctatcctcctca

SEQ ID NO: 1338239 - DNA, 15 bp, Homo sapiens
ggctctatcctcctc

SEQ ID NO: 1338240 - DNA, 15 bp, Homo sapiens
aggctctatcctcct

SEQ ID NO: 1338241 - DNA, 15 bp, Homo sapiens
gaggctctatcctcc

SEQ ID NO: 1338242 - DNA, 15 bp, Homo sapiens
tgaggctctatcctc

SEQ ID NO: 1338243 - DNA, 15 bp, Homo sapiens
gtgaggctctatcct

SEQ ID NO: 1338244 - DNA, 15 bp, Homo sapiens
tgtgaggctctatcc

SEQ ID NO: 1338245 - DNA, 15 bp, Homo sapiens
atgtgaggctctatc

SEQ ID NO: 1338246 - DNA, 15 bp, Homo sapiens
catgtgaggctctat

SEQ ID NO: 1338247 - DNA, 15 bp, Homo sapiens
gcatgtgaggctcta

SEQ ID NO: 1338248 - DNA, 15 bp, Homo sapiens
tgcatgtgaggctct

SEQ ID NO: 1338249 - DNA, 15 bp, Homo sapiens
ttgcatgtgaggctc

SEQ ID NO: 1338250 - DNA, 15 bp, Homo sapiens
cttgcatgtgaggct

SEQ ID NO: 1338251 - DNA, 15 bp, Homo sapiens
gcttgcatgtgaggc

SEQ ID NO: 1338252 - DNA, 15 bp, Homo sapiens
agcttgcatgtgagg

SEQ ID NO: 1338253 - DNA, 15 bp, Homo sapiens
gagcttgcatgtgag

SEQ ID NO: 1338254 - DNA, 15 bp, Homo sapiens
agagcttgcatgtga

SEQ ID NO: 1338255 - DNA, 15 bp, Homo sapiens
tagagcttgcatgtg

SEQ ID NO: 1338256 - DNA, 15 bp, Homo sapiens
ctagagcttgcatgt

SEQ ID NO: 1338257 - DNA, 15 bp, Homo sapiens
actagagcttgcatg

SEQ ID NO: 1338258 - DNA, 15 bp, Homo sapiens
cactagagcttgcat

SEQ ID NO: 1338259 - DNA, 15 bp, Homo sapiens
tcactagagcttgca

SEQ ID NO: 1338260 - DNA, 15 bp, Homo sapiens
gtcactagagcttgc

SEQ ID NO: 1338261 - DNA, 15 bp, Homo sapiens
agtcactagagcttg

SEQ ID NO: 1338262 - DNA, 15 bp, Homo sapiens
cagtcactagagctt

SEQ ID NO: 1338263 - DNA, 15 bp, Homo sapiens
ccagtcactagagct

SEQ ID NO: 1338264 - DNA, 15 bp, Homo sapiens
tccagtcactagagc

SEQ ID NO: 1338265 - DNA, 15 bp, Homo sapiens
gtccagtcactagag

SEQ ID NO: 1338266 - DNA, 15 bp, Homo sapiens
agtccagtcactaga

SEQ ID NO: 1338267 - DNA, 15 bp, Homo sapiens
gagtccagtcactag

SEQ ID NO: 1338268 - DNA, 15 bp, Homo sapiens
ggagtccagtcacta

SEQ ID NO: 1338269 - DNA, 15 bp, Homo sapiens
tggagtccagtcact

SEQ ID NO: 1338270 - DNA, 15 bp, Homo sapiens
ttggagtccagtcac

SEQ ID NO: 1338271 - DNA, 15 bp, Homo sapiens
cttggagtccagtca

SEQ ID NO: 1338272 - DNA, 15 bp, Homo sapiens
ccttggagtccagtc

SEQ ID NO: 1338273 - DNA, 15 bp, Homo sapiens
gccttggagtccagt

SEQ ID NO: 1338274 - DNA, 15 bp, Homo sapiens
ggccttggagtccag

SEQ ID NO: 1338275 - DNA, 15 bp, Homo sapiens
tggccttggagtcca

SEQ ID NO: 1338276 - DNA, 15 bp, Homo sapiens
gtggccttggagtcc

SEQ ID NO: 1338277 - DNA, 15 bp, Homo sapiens
cgtggccttggagtc

SEQ ID NO: 1338278 - DNA, 15 bp, Homo sapiens
ccgtggccttggagt

SEQ ID NO: 1338279 - DNA, 15 bp, Homo sapiens
tccgtggccttggag

SEQ ID NO: 1338280 - DNA, 15 bp, Homo sapiens
atccgtggccttgga

SEQ ID NO: 1338281 - DNA, 15 bp, Homo sapiens
tatccgtggccttgg

SEQ ID NO: 1338282 - DNA, 15 bp, Homo sapiens
ctatccgtggccttg

SEQ ID NO: 1338283 - DNA, 15 bp, Homo sapiens
cctatccgtggcctt

SEQ ID NO: 1338284 - DNA, 15 bp, Homo sapiens
acctatccgtggcct

SEQ ID NO: 1338285 - DNA, 15 bp, Homo sapiens
tacctatccgtggcc

SEQ ID NO: 1338286 - DNA, 15 bp, Homo sapiens
atacctatccgtggc

SEQ ID NO: 1338287 - DNA, 15 bp, Homo sapiens
catacctatccgtgg

SEQ ID NO: 1338288 - DNA, 15 bp, Homo sapiens
ccatacctatccgtg

SEQ ID NO: 1338289 - DNA, 15 bp, Homo sapiens
gccatacctatccgt

SEQ ID NO: 1338290 - DNA, 15 bp, Homo sapiens
agccatacctatccg

SEQ ID NO: 1338291 - DNA, 15 bp, Homo sapiens
gagccatacctatcc

SEQ ID NO: 1338292 - DNA, 15 bp, Homo sapiens
tgagccatacctatc

SEQ ID NO: 1338293 - DNA, 15 bp, Homo sapiens
ctgagccatacctat

SEQ ID NO: 1338294 - DNA, 15 bp, Homo sapiens
tctgagccataccta

SEQ ID NO: 1338295 - DNA, 15 bp, Homo sapiens
ctctgagccatacct

SEQ ID NO: 1338296 - DNA, 15 bp, Homo sapiens
gctctgagccatacc

SEQ ID NO: 1338297 - DNA, 15 bp, Homo sapiens
agctctgagccatac

SEQ ID NO: 1338298 - DNA, 15 bp, Homo sapiens
cagctctgagccata

SEQ ID NO: 1338299 - DNA, 15 bp, Homo sapiens
aacagctctgagcca

SEQ ID NO: 1338300 - DNA, 15 bp, Homo sapiens
taacagctctgagcc

SEQ ID NO: 1338301 - DNA, 15 bp, Homo sapiens
ttaacagctctgagc

SEQ ID NO: 1338302 - DNA, 15 bp, Homo sapiens
attaacagctctgag

SEQ ID NO: 1338303 - DNA, 15 bp, Homo sapiens
aattaacagctctga

SEQ ID NO: 1338304 - DNA, 15 bp, Homo sapiens
aaattaacagctctg

SEQ ID NO: 1338305 - DNA, 15 bp, Homo sapiens
aaaattaacagctct

SEQ ID NO: 1338306 - DNA, 15 bp, Homo sapiens
taaaattaacagctc

SEQ ID NO: 1338307 - DNA, 15 bp, Homo sapiens
ctaaaattaacagct

SEQ ID NO: 1338308 - DNA, 15 bp, Homo sapiens
tctaaaattaacagc

SEQ ID NO: 1338309 - DNA, 15 bp, Homo sapiens
ctctaaaattaacag

SEQ ID NO: 1338310 - DNA, 15 bp, Homo sapiens
tctctaaaattaaca

SEQ ID NO: 1338311 - DNA, 15 bp, Homo sapiens
ctctctaaaattaac

SEQ ID NO: 1338312 - DNA, 15 bp, Homo sapiens
actctctaaaattaa

SEQ ID NO: 1338313 - DNA, 15 bp, Homo sapiens
tactctctaaaatta

SEQ ID NO: 1338314 - DNA, 15 bp, Homo sapiens
ttactctctaaaatt

SEQ ID NO: 1338315 - DNA, 15 bp, Homo sapiens
tttactctctaaaat

SEQ ID NO: 1338316 - DNA, 15 bp, Homo sapiens
atttactctctaaaa

SEQ ID NO: 1338317 - DNA, 15 bp, Homo sapiens
catttactctctaaa

SEQ ID NO: 1338318 - DNA, 15 bp, Homo sapiens
acatttactctctaa

SEQ ID NO: 1338319 - DNA, 15 bp, Homo sapiens
tacatttactctcta

SEQ ID NO: 1338320 - DNA, 15 bp, Homo sapiens
gtacatttactctct

SEQ ID NO: 1338321 - DNA, 15 bp, Homo sapiens
cgtacatttactctc

SEQ ID NO: 1338322 - DNA, 15 bp, Homo sapiens
ccgtacatttactct

SEQ ID NO: 1338323 - DNA, 15 bp, Homo sapiens
accgtacatttactc

SEQ ID NO: 1338324 - DNA, 15 bp, Homo sapiens
aaccgtacatttact

SEQ ID NO: 1338325 - DNA, 15 bp, Homo sapiens
aaaccgtacatttac

SEQ ID NO: 1338326 - DNA, 15 bp, Homo sapiens
aaaaccgtacattta

SEQ ID NO: 1338327 - DNA, 15 bp, Homo sapiens
aaaaaccgtacattt

SEQ ID NO: 1338328 - DNA, 15 bp, Homo sapiens
caaaaaccgtacatt

SEQ ID NO: 1338329 - DNA, 15 bp, Homo sapiens
ccaaaaaccgtacat

SEQ ID NO: 1338330 - DNA, 15 bp, Homo sapiens
accaaaaaccgtaca

SEQ ID NO: 1338331 - DNA, 15 bp, Homo sapiens
aaccaaaaaccgtac

SEQ ID NO: 1338332 - DNA, 15 bp, Homo sapiens
aaaccaaaaaccgta

SEQ ID NO: 1338333 - DNA, 15 bp, Homo sapiens
caaaccaaaaaccgt

SEQ ID NO: 1338334 - DNA, 15 bp, Homo sapiens
acaaaccaaaaaccg

SEQ ID NO: 1338335 - DNA, 15 bp, Homo sapiens
aacaaaccaaaaacc

SEQ ID NO: 1338336 - DNA, 15 bp, Homo sapiens
aaacaaaccaaaaac

SEQ ID NO: 1338337 - DNA, 15 bp, Homo sapiens
caaacaaaccaaaaa

SEQ ID NO: 1338338 - DNA, 15 bp, Homo sapiens
acaaacaaaccaaaa

SEQ ID NO: 1338339 - DNA, 15 bp, Homo sapiens
aacaaacaaaccaaa

SEQ ID NO: 1338340 - DNA, 15 bp, Homo sapiens
aaacaaacaaaccaa

SEQ ID NO: 1338341 - DNA, 15 bp, Homo sapiens
aaaacaaacaaacca

SEQ ID NO: 1338342 - DNA, 15 bp, Homo sapiens
caaaacaaacaaacc

SEQ ID NO: 1338343 - DNA, 15 bp, Homo sapiens
tctgtctcaaaacaa

SEQ ID NO: 1338344 - DNA, 15 bp, Homo sapiens
ctctgtctcaaaaca

SEQ ID NO: 1338345 - DNA, 15 bp, Homo sapiens
actctgtctcaaaac

SEQ ID NO: 1338346 - DNA, 15 bp, Homo sapiens
cgaaactctgtctca

SEQ ID NO: 1338347 - DNA, 15 bp, Homo sapiens
gcgaaactctgtctc

SEQ ID NO: 1338348 - DNA, 15 bp, Homo sapiens
agcgaaactctgtct

SEQ ID NO: 1338349 - DNA, 15 bp, Homo sapiens
gagcgaaactctgtc

SEQ ID NO: 1338350 - DNA, 15 bp, Homo sapiens
agagcgaaactctgt

SEQ ID NO: 1338351 - DNA, 15 bp, Homo sapiens
aagagcgaaactctg

SEQ ID NO: 1338352 - DNA, 15 bp, Homo sapiens
caagagcgaaactct

SEQ ID NO: 1338353 - DNA, 15 bp, Homo sapiens
cgcaacaagagcgaa

SEQ ID NO: 1338354 - DNA, 15 bp, Homo sapiens
ccgcaacaagagcga

SEQ ID NO: 1338355 - DNA, 15 bp, Homo sapiens
tccgcaacaagagcg

SEQ ID NO: 1338356 - DNA, 15 bp, Homo sapiens
ctccgcaacaagagc

SEQ ID NO: 1338357 - DNA, 15 bp, Homo sapiens
cctccgcaacaagag

SEQ ID NO: 1338358 - DNA, 15 bp, Homo sapiens
gcctccgcaacaaga

SEQ ID NO: 1338359 - DNA, 15 bp, Homo sapiens
agcctccgcaacaag

SEQ ID NO: 1338360 - DNA, 15 bp, Homo sapiens
cagcctccgcaacaa

SEQ ID NO: 1338361 - DNA, 15 bp, Homo sapiens
ccagcctccgcaaca

SEQ ID NO: 1338362 - DNA, 15 bp, Homo sapiens
tccagcctccgcaac

SEQ ID NO: 1338363 - DNA, 15 bp, Homo sapiens
ctccagcctccgcaa

SEQ ID NO: 1338364 - DNA, 15 bp, Homo sapiens
actccagcctccgca

SEQ ID NO: 1338365 - DNA, 15 bp, Homo sapiens
cactccagcctccgc

SEQ ID NO: 1338366 - DNA, 15 bp, Homo sapiens
gcactccagcctccg

SEQ ID NO: 1338367 - DNA, 15 bp, Homo sapiens
tgcactccagcctcc

SEQ ID NO: 1338368 - DNA, 15 bp, Homo sapiens
acggtgagccgagat

SEQ ID NO: 1338369 - DNA, 15 bp, Homo sapiens
tacggtgagccgaga

SEQ ID NO: 1338370 - DNA, 15 bp, Homo sapiens
gtacggtgagccgag

SEQ ID NO: 1338371 - DNA, 15 bp, Homo sapiens
ggtacggtgagccga

SEQ ID NO: 1338372 - DNA, 15 bp, Homo sapiens
gggtacggtgagccg

SEQ ID NO: 1338373 - DNA, 15 bp, Homo sapiens
agggtacggtgagcc

SEQ ID NO: 1338374 - DNA, 15 bp, Homo sapiens
gagggtacggtgagc

SEQ ID NO: 1338375 - DNA, 15 bp, Homo sapiens
ggagggtacggtgag

SEQ ID NO: 1338376 - DNA, 15 bp, Homo sapiens
cggagggtacggtga

SEQ ID NO: 1338377 - DNA, 15 bp, Homo sapiens
gcggagggtacggtg

SEQ ID NO: 1338378 - DNA, 15 bp, Homo sapiens
ggcggagggtacggt

SEQ ID NO: 1338379 - DNA, 15 bp, Homo sapiens
aggcggagggtacgg

SEQ ID NO: 1338380 - DNA, 15 bp, Homo sapiens
aaggcggagggtacg

SEQ ID NO: 1338381 - DNA, 15 bp, Homo sapiens
gaaggcggagggtac

SEQ ID NO: 1338382 - DNA, 15 bp, Homo sapiens
ggaaggcggagggta

SEQ ID NO: 1338383 - DNA, 15 bp, Homo sapiens
tggaaggcggagggt

SEQ ID NO: 1338384 - DNA, 15 bp, Homo sapiens
ctggaaggcggaggg

SEQ ID NO: 1338385 - DNA, 15 bp, Homo sapiens
cctggaaggcggagg

SEQ ID NO: 1338386 - DNA, 15 bp, Homo sapiens
acctggaaggcggag

SEQ ID NO: 1338387 - DNA, 15 bp, Homo sapiens
aacctggaaggcgga

SEQ ID NO: 1338388 - DNA, 15 bp, Homo sapiens
gaacctggaaggcgg

SEQ ID NO: 1338389 - DNA, 15 bp, Homo sapiens
tgaacctggaaggcg

SEQ ID NO: 1338390 - DNA, 15 bp, Homo sapiens
cgcttgaacctggaa

SEQ ID NO: 1338391 - DNA, 15 bp, Homo sapiens
tcgcttgaacctgga

SEQ ID NO: 1338392 - DNA, 15 bp, Homo sapiens
gctggggaggctgag

SEQ ID NO: 1338393 - DNA, 15 bp, Homo sapiens
tgctggggaggctga

SEQ ID NO: 1338394 - DNA, 15 bp, Homo sapiens
ctgctggggaggctg

SEQ ID NO: 1338395 - DNA, 15 bp, Homo sapiens
gctgctggggaggct

SEQ ID NO: 1338396 - DNA, 15 bp, Homo sapiens
agctgctggggaggc

SEQ ID NO: 1338397 - DNA, 15 bp, Homo sapiens
cagctgctggggagg

SEQ ID NO: 1338398 - DNA, 15 bp, Homo sapiens
ccagctgctggggag

SEQ ID NO: 1338399 - DNA, 15 bp, Homo sapiens
cccagctgctgggga

SEQ ID NO: 1338400 - DNA, 15 bp, Homo sapiens
tcccagctgctgggg

SEQ ID NO: 1338401 - DNA, 15 bp, Homo sapiens
atcccagctgctggg

SEQ ID NO: 1338402 - DNA, 15 bp, Homo sapiens
aatcccagctgctgg

SEQ ID NO: 1338403 - DNA, 15 bp, Homo sapiens
taatcccagctgctg

SEQ ID NO: 1338404 - DNA, 15 bp, Homo sapiens
atgtaatcccagctg

SEQ ID NO: 1338405 - DNA, 15 bp, Homo sapiens
catgtaatcccagct

SEQ ID NO: 1338406 - DNA, 15 bp, Homo sapiens
gcatgtaatcccagc

SEQ ID NO: 1338407 - DNA, 15 bp, Homo sapiens
tgcatgtaatcccag

SEQ ID NO: 1338408 - DNA, 15 bp, Homo sapiens
atgcatgtaatccca

SEQ ID NO: 1338409 - DNA, 15 bp, Homo sapiens
tatgcatgtaatccc

SEQ ID NO: 1338410 - DNA, 15 bp, Homo sapiens
atatgcatgtaatcc

SEQ ID NO: 1338411 - DNA, 15 bp, Homo sapiens
catatgcatgtaatc

SEQ ID NO: 1338412 - DNA, 15 bp, Homo sapiens
gcatatgcatgtaat

SEQ ID NO: 1338413 - DNA, 15 bp, Homo sapiens
ggcatatgcatgtaa

SEQ ID NO: 1338414 - DNA, 15 bp, Homo sapiens
tggcatatgcatgta

SEQ ID NO: 1338415 - DNA, 15 bp, Homo sapiens
gtggcatatgcatgt

SEQ ID NO: 1338416 - DNA, 15 bp, Homo sapiens
agtggcatatgcatg

SEQ ID NO: 1338417 - DNA, 15 bp, Homo sapiens
tagtggcatatgcat

SEQ ID NO: 1338418 - DNA, 15 bp, Homo sapiens
gtagtggcatatgca

SEQ ID NO: 1338419 - DNA, 15 bp, Homo sapiens
cgtagtggcatatgc

SEQ ID NO: 1338420 - DNA, 15 bp, Homo sapiens
gcgtagtggcatatg

SEQ ID NO: 1338421 - DNA, 15 bp, Homo sapiens
ggcgtagtggcatat

SEQ ID NO: 1338422 - DNA, 15 bp, Homo sapiens
gggcgtagtggcata

SEQ ID NO: 1338423 - DNA, 15 bp, Homo sapiens
cgggcgtagtggcat

SEQ ID NO: 1338424 - DNA, 15 bp, Homo sapiens
ccgggcgtagtggca

SEQ ID NO: 1338425 - DNA, 15 bp, Homo sapiens
tcaaaattagccggg

SEQ ID NO: 1338426 - DNA, 15 bp, Homo sapiens
ttcaaaattagccgg

SEQ ID NO: 1338427 - DNA, 15 bp, Homo sapiens
attcaaaattagccg

SEQ ID NO: 1338428 - DNA, 15 bp, Homo sapiens
aattcaaaattagcc

SEQ ID NO: 1338429 - DNA, 15 bp, Homo sapiens
aaattcaaaattagc

SEQ ID NO: 1338430 - DNA, 15 bp, Homo sapiens
aaaattcaaaattag

SEQ ID NO: 1338431 - DNA, 15 bp, Homo sapiens
aaaaattcaaaatta

SEQ ID NO: 1338432 - DNA, 15 bp, Homo sapiens
taaaaattcaaaatt

SEQ ID NO: 1338433 - DNA, 15 bp, Homo sapiens
ctaaaaattcaaaat

SEQ ID NO: 1338434 - DNA, 15 bp, Homo sapiens
ggtcgggagttcaag

SEQ ID NO: 1338435 - DNA, 15 bp, Homo sapiens
aggtcgggagttcaa

SEQ ID NO: 1338436 - DNA, 15 bp, Homo sapiens
gaggtcgggagttca

SEQ ID NO: 1338437 - DNA, 15 bp, Homo sapiens
acggatcacctgagg

SEQ ID NO: 1338438 - DNA, 15 bp, Homo sapiens
gacggatcacctgag

SEQ ID NO: 1338439 - DNA, 15 bp, Homo sapiens
ggacggatcacctga

SEQ ID NO: 1338440 - DNA, 15 bp, Homo sapiens
cggacggatcacctg

SEQ ID NO: 1338441 - DNA, 15 bp, Homo sapiens
gcggacggatcacct

SEQ ID NO: 1338442 - DNA, 15 bp, Homo sapiens
ggcggacggatcacc

SEQ ID NO: 1338443 - DNA, 15 bp, Homo sapiens
caggcggacggatca

SEQ ID NO: 1338444 - DNA, 15 bp, Homo sapiens
ccaggcggacggatc

SEQ ID NO: 1338445 - DNA, 15 bp, Homo sapiens
cccaggcggacggat

SEQ ID NO: 1338446 - DNA, 15 bp, Homo sapiens
gcccaggcggacgga

SEQ ID NO: 1338447 - DNA, 15 bp, Homo sapiens
ggcccaggcggacgg

SEQ ID NO: 1338448 - DNA, 15 bp, Homo sapiens
aggcccaggcggacg

SEQ ID NO: 1338449 - DNA, 15 bp, Homo sapiens
gaggcccaggcggac

SEQ ID NO: 1338450 - DNA, 15 bp, Homo sapiens
ggaggcccaggcgga

SEQ ID NO: 1338451 - DNA, 15 bp, Homo sapiens
aggtggcacatgcct

SEQ ID NO: 1338452 - DNA, 15 bp, Homo sapiens
aaggtggcacatgcc

SEQ ID NO: 1338453 - DNA, 15 bp, Homo sapiens
caaggtggcacatgc

SEQ ID NO: 1338454 - DNA, 15 bp, Homo sapiens
gcaaggtggcacatg

SEQ ID NO: 1338455 - DNA, 15 bp, Homo sapiens
ggcaaggtggcacat

SEQ ID NO: 1338456 - DNA, 15 bp, Homo sapiens
gggcaaggtggcaca

SEQ ID NO: 1338457 - DNA, 15 bp, Homo sapiens
ggggcaaggtggcac

SEQ ID NO: 1338458 - DNA, 15 bp, Homo sapiens
tggggcaaggtggca

SEQ ID NO: 1338459 - DNA, 15 bp, Homo sapiens
gtggggcaaggtggc

SEQ ID NO: 1338460 - DNA, 15 bp, Homo sapiens
ggtggggcaaggtgg

SEQ ID NO: 1338461 - DNA, 15 bp, Homo sapiens
aggtggggcaaggtg

SEQ ID NO: 1338462 - DNA, 15 bp, Homo sapiens
gaggtggggcaaggt

SEQ ID NO: 1338463 - DNA, 15 bp, Homo sapiens
tgaggtggggcaagg

SEQ ID NO: 1338464 - DNA, 15 bp, Homo sapiens
gtgaggtggggcaag

SEQ ID NO: 1338465 - DNA, 15 bp, Homo sapiens
agtgaggtggggcaa

SEQ ID NO: 1338466 - DNA, 15 bp, Homo sapiens
aagtgaggtggggca

SEQ ID NO: 1338467 - DNA, 15 bp, Homo sapiens
caagtgaggtggggc

SEQ ID NO: 1338468 - DNA, 15 bp, Homo sapiens
acaagtgaggtgggg

SEQ ID NO: 1338469 - DNA, 15 bp, Homo sapiens
gacaagtgaggtggg

SEQ ID NO: 1338470 - DNA, 15 bp, Homo sapiens
ggacaagtgaggtgg

SEQ ID NO: 1338471 - DNA, 15 bp, Homo sapiens
gggacaagtgaggtg

SEQ ID NO: 1338472 - DNA, 15 bp, Homo sapiens
ggggacaagtgaggt

SEQ ID NO: 1338473 - DNA, 15 bp, Homo sapiens
aggggacaagtgagg

SEQ ID NO: 1338474 - DNA, 15 bp, Homo sapiens
aaggggacaagtgag

SEQ ID NO: 1338475 - DNA, 15 bp, Homo sapiens
aaaggggacaagtga

SEQ ID NO: 1338476 - DNA, 15 bp, Homo sapiens
aaaaggggacaagtg

SEQ ID NO: 1338477 - DNA, 15 bp, Homo sapiens
aaaaaggggacaagt

SEQ ID NO: 1338478 - DNA, 15 bp, Homo sapiens
caaaaaggggacaag

SEQ ID NO: 1338479 - DNA, 15 bp, Homo sapiens
acaaaaaggggacaa

SEQ ID NO: 1338480 - DNA, 15 bp, Homo sapiens
acacaaaaaggggac

SEQ ID NO: 1338481 - DNA, 15 bp, Homo sapiens
tacacaaaaagggga

SEQ ID NO: 1338482 - DNA, 15 bp, Homo sapiens
ctacacaaaaagggg

SEQ ID NO: 1338483 - DNA, 15 bp, Homo sapiens
actacacaaaaaggg

SEQ ID NO: 1338484 - DNA, 15 bp, Homo sapiens
cactacacaaaaagg

SEQ ID NO: 1338485 - DNA, 15 bp, Homo sapiens
acactacacaaaaag

SEQ ID NO: 1338486 - DNA, 15 bp, Homo sapiens
aacactacacaaaaa

SEQ ID NO: 1338487 - DNA, 15 bp, Homo sapiens
gaacactacacaaaa

SEQ ID NO: 1338488 - DNA, 15 bp, Homo sapiens
agaacactacacaaa

SEQ ID NO: 1338489 - DNA, 15 bp, Homo sapiens
aagaacactacacaa

SEQ ID NO: 1338490 - DNA, 15 bp, Homo sapiens
gaagaacactacaca

SEQ ID NO: 1338491 - DNA, 15 bp, Homo sapiens
tgaagaacactacac

SEQ ID NO: 1338492 - DNA, 15 bp, Homo sapiens
atgaagaacactaca

SEQ ID NO: 1338493 - DNA, 15 bp, Homo sapiens
gatgaagaacactac

SEQ ID NO: 1338494 - DNA, 15 bp, Homo sapiens
ggatgaagaacacta

SEQ ID NO: 1338495 - DNA, 15 bp, Homo sapiens
cggatgaagaacact

SEQ ID NO: 1338496 - DNA, 15 bp, Homo sapiens
ccggatgaagaacac

SEQ ID NO: 1338497 - DNA, 15 bp, Homo sapiens
accggatgaagaaca

SEQ ID NO: 1338498 - DNA, 15 bp, Homo sapiens
aaccggatgaagaac

SEQ ID NO: 1338499 - DNA, 15 bp, Homo sapiens
taaccggatgaagaa

SEQ ID NO: 1338500 - DNA, 15 bp, Homo sapiens
ctaaccggatgaaga

SEQ ID NO: 1338501 - DNA, 15 bp, Homo sapiens
tctaaccggatgaag

SEQ ID NO: 1338502 - DNA, 15 bp, Homo sapiens
ttctaaccggatgaa

SEQ ID NO: 1338503 - DNA, 15 bp, Homo sapiens
attctaaccggatga

SEQ ID NO: 1338504 - DNA, 15 bp, Homo sapiens
tattctaaccggatg

SEQ ID NO: 1338505 - DNA, 15 bp, Homo sapiens
atattctaaccggat

SEQ ID NO: 1338506 - DNA, 15 bp, Homo sapiens
gatattctaaccgga

SEQ ID NO: 1338507 - DNA, 15 bp, Homo sapiens
agatattctaaccgg

SEQ ID NO: 1338508 - DNA, 15 bp, Homo sapiens
aagatattctaaccg

SEQ ID NO: 1338509 - DNA, 15 bp, Homo sapiens
gaagatattctaacc

SEQ ID NO: 1338510 - DNA, 15 bp, Homo sapiens
ggaagatattctaac

SEQ ID NO: 1338511 - DNA, 15 bp, Homo sapiens
aggaagatattctaa

SEQ ID NO: 1338512 - DNA, 15 bp, Homo sapiens
gaggaagatattcta

SEQ ID NO: 1338513 - DNA, 15 bp, Homo sapiens
ggaggaagatattct

SEQ ID NO: 1338514 - DNA, 15 bp, Homo sapiens
gggaggaagatattc

SEQ ID NO: 1338515 - DNA, 15 bp, Homo sapiens
agggaggaagatatt

SEQ ID NO: 1338516 - DNA, 15 bp, Homo sapiens
gagggaggaagatat

SEQ ID NO: 1338517 - DNA, 15 bp, Homo sapiens
tgagggaggaagata

SEQ ID NO: 1338518 - DNA, 15 bp, Homo sapiens
gtgagggaggaagat

SEQ ID NO: 1338519 - DNA, 15 bp, Homo sapiens
agtgagggaggaaga

SEQ ID NO: 1338520 - DNA, 15 bp, Homo sapiens
aagtgagggaggaag

SEQ ID NO: 1338521 - DNA, 15 bp, Homo sapiens
gaagtgagggaggaa

SEQ ID NO: 1338522 - DNA, 15 bp, Homo sapiens
tgaagtgagggagga

SEQ ID NO: 1338523 - DNA, 15 bp, Homo sapiens
atgaagtgagggagg

SEQ ID NO: 1338524 - DNA, 15 bp, Homo sapiens
tatgaagtgagggag

SEQ ID NO: 1338525 - DNA, 15 bp, Homo sapiens
atatgaagtgaggga

SEQ ID NO: 1338526 - DNA, 15 bp, Homo sapiens
aatatgaagtgaggg

SEQ ID NO: 1338527 - DNA, 15 bp, Homo sapiens
gaatatgaagtgagg

SEQ ID NO: 1338528 - DNA, 15 bp, Homo sapiens
ggaatatgaagtgag

SEQ ID NO: 1338529 - DNA, 15 bp, Homo sapiens
aggaatatgaagtga

SEQ ID NO: 1338530 - DNA, 15 bp, Homo sapiens
aaggaatatgaagtg

SEQ ID NO: 1338531 - DNA, 15 bp, Homo sapiens
caaggaatatgaagt

SEQ ID NO: 1338532 - DNA, 15 bp, Homo sapiens
acaaggaatatgaag

SEQ ID NO: 1338533 - DNA, 15 bp, Homo sapiens
aacaaggaatatgaa

SEQ ID NO: 1338534 - DNA, 15 bp, Homo sapiens
aaacaaggaatatga

SEQ ID NO: 1338535 - DNA, 15 bp, Homo sapiens
aaaacaaggaatatg

SEQ ID NO: 1338536 - DNA, 15 bp, Homo sapiens
aaaaacaaggaatat

SEQ ID NO: 1338537 - DNA, 15 bp, Homo sapiens
aaaaaacaaggaata

SEQ ID NO: 1338538 - DNA, 15 bp, Homo sapiens
gaaaaaacaaggaat

SEQ ID NO: 1338539 - DNA, 15 bp, Homo sapiens
tgaaaaaacaaggaa

SEQ ID NO: 1338540 - DNA, 15 bp, Homo sapiens
gtgaaaaaacaagga

SEQ ID NO: 1338541 - DNA, 15 bp, Homo sapiens
agtgaaaaaacaagg

SEQ ID NO: 1338542 - DNA, 15 bp, Homo sapiens
aagtgaaaaaacaag

SEQ ID NO: 1338543 - DNA, 15 bp, Homo sapiens
aaagtgaaaaaacaa

SEQ ID NO: 1338544 - DNA, 15 bp, Homo sapiens
taaagtgaaaaaaca

SEQ ID NO: 1338545 - DNA, 15 bp, Homo sapiens
ataaagtgaaaaaac

SEQ ID NO: 1338546 - DNA, 15 bp, Homo sapiens
aataaagtgaaaaaa

SEQ ID NO: 1338547 - DNA, 15 bp, Homo sapiens
caataaagtgaaaaa

SEQ ID NO: 1338548 - DNA, 15 bp, Homo sapiens
acaataaagtgaaaa

SEQ ID NO: 1338549 - DNA, 15 bp, Homo sapiens
tacaataaagtgaaa

SEQ ID NO: 1338550 - DNA, 15 bp, Homo sapiens
gtacaataaagtgaa

SEQ ID NO: 1338551 - DNA, 15 bp, Homo sapiens
tgtacaataaagtga

SEQ ID NO: 1338552 - DNA, 15 bp, Homo sapiens
gtgtacaataaagtg

SEQ ID NO: 1338553 - DNA, 15 bp, Homo sapiens
agtgtacaataaagt

SEQ ID NO: 1338554 - DNA, 15 bp, Homo sapiens
aagtgtacaataaag

SEQ ID NO: 1338555 - DNA, 15 bp, Homo sapiens
taagtgtacaataaa

SEQ ID NO: 1338556 - DNA, 15 bp, Homo sapiens
gtaagtgtacaataa

SEQ ID NO: 1338557 - DNA, 15 bp, Homo sapiens
ggtaagtgtacaata

SEQ ID NO: 1338558 - DNA, 15 bp, Homo sapiens
tggtaagtgtacaat

SEQ ID NO: 1338559 - DNA, 15 bp, Homo sapiens
gtggtaagtgtacaa

SEQ ID NO: 1338560 - DNA, 15 bp, Homo sapiens
agtggtaagtgtaca

SEQ ID NO: 1338561 - DNA, 15 bp, Homo sapiens
aagtggtaagtgtac

SEQ ID NO: 1338562 - DNA, 15 bp, Homo sapiens
gaagtggtaagtgta

SEQ ID NO: 1338563 - DNA, 15 bp, Homo sapiens
agaagtggtaagtgt

SEQ ID NO: 1338564 - DNA, 15 bp, Homo sapiens
aagaagtggtaagtg

SEQ ID NO: 1338565 - DNA, 15 bp, Homo sapiens
caagaagtggtaagt

SEQ ID NO: 1338566 - DNA, 15 bp, Homo sapiens
tcaagaagtggtaag

SEQ ID NO: 1338567 - DNA, 15 bp, Homo sapiens
ttcaagaagtggtaa

SEQ ID NO: 1338568 - DNA, 15 bp, Homo sapiens
tttcaagaagtggta

SEQ ID NO: 1338569 - DNA, 15 bp, Homo sapiens
ttttcaagaagtggt

SEQ ID NO: 1338570 - DNA, 15 bp, Homo sapiens
cttttcaagaagtgg

SEQ ID NO: 1338571 - DNA, 15 bp, Homo sapiens
gcttttcaagaagtg

SEQ ID NO: 1338572 - DNA, 15 bp, Homo sapiens
agcttttcaagaagt

SEQ ID NO: 1338573 - DNA, 15 bp, Homo sapiens
gagcttttcaagaag

SEQ ID NO: 1338574 - DNA, 15 bp, Homo sapiens
agagcttttcaagaa

SEQ ID NO: 1338575 - DNA, 15 bp, Homo sapiens
cagagcttttcaaga

SEQ ID NO: 1338576 - DNA, 15 bp, Homo sapiens
acagagcttttcaag

SEQ ID NO: 1338577 - DNA, 15 bp, Homo sapiens
tacagagcttttcaa

SEQ ID NO: 1338578 - DNA, 15 bp, Homo sapiens
atacagagcttttca

SEQ ID NO: 1338579 - DNA, 15 bp, Homo sapiens
gatacagagcttttc

SEQ ID NO: 1338580 - DNA, 15 bp, Homo sapiens
agatacagagctttt

SEQ ID NO: 1338581 - DNA, 15 bp, Homo sapiens
aagatacagagcttt

SEQ ID NO: 1338582 - DNA, 15 bp, Homo sapiens
taagatacagagctt

SEQ ID NO: 1338583 - DNA, 15 bp, Homo sapiens
gtaagatacagagct

SEQ ID NO: 1338584 - DNA, 15 bp, Homo sapiens
agtaagatacagagc

SEQ ID NO: 1338585 - DNA, 15 bp, Homo sapiens
aagtaagatacagag

SEQ ID NO: 1338586 - DNA, 15 bp, Homo sapiens
aaagtaagatacaga

SEQ ID NO: 1338587 - DNA, 15 bp, Homo sapiens
aaaagtaagatacag

SEQ ID NO: 1338588 - DNA, 15 bp, Homo sapiens
aaaaagtaagataca

SEQ ID NO: 1338589 - DNA, 15 bp, Homo sapiens
taaaaagtaagatac

SEQ ID NO: 1338590 - DNA, 15 bp, Homo sapiens
ttaaaaagtaagata

SEQ ID NO: 1338591 - DNA, 15 bp, Homo sapiens
tttaaaaagtaagat

SEQ ID NO: 1338592 - DNA, 15 bp, Homo sapiens
atttaaaaagtaaga

SEQ ID NO: 1338593 - DNA, 15 bp, Homo sapiens
aatttaaaaagtaag

SEQ ID NO: 1338594 - DNA, 15 bp, Homo sapiens
acaatttaaaaagta

SEQ ID NO: 1338595 - DNA, 15 bp, Homo sapiens
cacaatttaaaaagt

SEQ ID NO: 1338596 - DNA, 15 bp, Homo sapiens
acacaatttaaaaag

SEQ ID NO: 1338597 - DNA, 15 bp, Homo sapiens
aacacaatttaaaaa

SEQ ID NO: 1338598 - DNA, 15 bp, Homo sapiens
caacacaatttaaaa

SEQ ID NO: 1338599 - DNA, 15 bp, Homo sapiens
acaacacaatttaaa

SEQ ID NO: 1338600 - DNA, 15 bp, Homo sapiens
aacaacacaatttaa

SEQ ID NO: 1338601 - DNA, 15 bp, Homo sapiens
aaacaacacaattta

SEQ ID NO: 1338602 - DNA, 15 bp, Homo sapiens
gaaacaacacaattt

SEQ ID NO: 1338603 - DNA, 15 bp, Homo sapiens
ggaaacaacacaatt

SEQ ID NO: 1338604 - DNA, 15 bp, Homo sapiens
aggaaacaacacaat

SEQ ID NO: 1338605 - DNA, 15 bp, Homo sapiens
caggaaacaacacaa

SEQ ID NO: 1338606 - DNA, 15 bp, Homo sapiens
ccaggaaacaacaca

SEQ ID NO: 1338607 - DNA, 15 bp, Homo sapiens
accaggaaacaacac

SEQ ID NO: 1338608 - DNA, 15 bp, Homo sapiens
gaccaggaaacaaca

SEQ ID NO: 1338609 - DNA, 15 bp, Homo sapiens
agaccaggaaacaac

SEQ ID NO: 1338610 - DNA, 15 bp, Homo sapiens
tagaccaggaaacaa

SEQ ID NO: 1338611 - DNA, 15 bp, Homo sapiens
ctagaccaggaaaca

SEQ ID NO: 1338612 - DNA, 15 bp, Homo sapiens
tctagaccaggaaac

SEQ ID NO: 1338613 - DNA, 15 bp, Homo sapiens
ttctagaccaggaaa

SEQ ID NO: 1338614 - DNA, 15 bp, Homo sapiens
attctagaccaggaa

SEQ ID NO: 1338615 - DNA, 15 bp, Homo sapiens
tattctagaccagga

SEQ ID NO: 1338616 - DNA, 15 bp, Homo sapiens
atattctagaccagg

SEQ ID NO: 1338617 - DNA, 15 bp, Homo sapiens
tatattctagaccag

SEQ ID NO: 1338618 - DNA, 15 bp, Homo sapiens
ttatattctagacca

SEQ ID NO: 1338619 - DNA, 15 bp, Homo sapiens
cttatattctagacc

SEQ ID NO: 1338620 - DNA, 15 bp, Homo sapiens
acttatattctagac

SEQ ID NO: 1338621 - DNA, 15 bp, Homo sapiens
aacttatattctaga

SEQ ID NO: 1338622 - DNA, 15 bp, Homo sapiens
gaacttatattctag

SEQ ID NO: 1338623 - DNA, 15 bp, Homo sapiens
agaacttatattcta

SEQ ID NO: 1338624 - DNA, 15 bp, Homo sapiens
tagaacttatattct

SEQ ID NO: 1338625 - DNA, 15 bp, Homo sapiens
gtagaacttatattc

SEQ ID NO: 1338626 - DNA, 15 bp, Homo sapiens
cgtagaacttatatt

SEQ ID NO: 1338627 - DNA, 15 bp, Homo sapiens
ccgtagaacttatat

SEQ ID NO: 1338628 - DNA, 15 bp, Homo sapiens
cccgtagaacttata

SEQ ID NO: 1338629 - DNA, 15 bp, Homo sapiens
tcccgtagaacttat

SEQ ID NO: 1338630 - DNA, 15 bp, Homo sapiens
ctcccgtagaactta

SEQ ID NO: 1338631 - DNA, 15 bp, Homo sapiens
gctcccgtagaactt

SEQ ID NO: 1338632 - DNA, 15 bp, Homo sapiens
tgctcccgtagaact

SEQ ID NO: 1338633 - DNA, 15 bp, Homo sapiens
ctgctcccgtagaac

SEQ ID NO: 1338634 - DNA, 15 bp, Homo sapiens
cctgctcccgtagaa

SEQ ID NO: 1338635 - DNA, 15 bp, Homo sapiens
tcctgctcccgtaga

SEQ ID NO: 1338636 - DNA, 15 bp, Homo sapiens
ttcctgctcccgtag

SEQ ID NO: 1338637 - DNA, 15 bp, Homo sapiens
attcctgctcccgta

SEQ ID NO: 1338638 - DNA, 15 bp, Homo sapiens
aattcctgctcccgt

SEQ ID NO: 1338639 - DNA, 15 bp, Homo sapiens
aaattcctgctcccg

SEQ ID NO: 1338640 - DNA, 15 bp, Homo sapiens
aaaattcctgctccc

SEQ ID NO: 1338641 - DNA, 15 bp, Homo sapiens
aaaaattcctgctcc

SEQ ID NO: 1338642 - DNA, 15 bp, Homo sapiens
caaaaattcctgctc

SEQ ID NO: 1338643 - DNA, 15 bp, Homo sapiens
tcaaaaattcctgct

SEQ ID NO: 1338644 - DNA, 15 bp, Homo sapiens
gtcaaaaattcctgc

SEQ ID NO: 1338645 - DNA, 15 bp, Homo sapiens
agtcaaaaattcctg

SEQ ID NO: 1338646 - DNA, 15 bp, Homo sapiens
cagtcaaaaattcct

SEQ ID NO: 1338647 - DNA, 15 bp, Homo sapiens
tcagtcaaaaattcc

SEQ ID NO: 1338648 - DNA, 15 bp, Homo sapiens
gtcagtcaaaaattc

SEQ ID NO: 1338649 - DNA, 15 bp, Homo sapiens
agtcagtcaaaaatt

SEQ ID NO: 1338650 - DNA, 15 bp, Homo sapiens
aagtcagtcaaaaat

SEQ ID NO: 1338651 - DNA, 15 bp, Homo sapiens
caagtcagtcaaaaa

SEQ ID NO: 1338652 - DNA, 15 bp, Homo sapiens
acaagtcagtcaaaa

SEQ ID NO: 1338653 - DNA, 15 bp, Homo sapiens
tacaagtcagtcaaa

SEQ ID NO: 1338654 - DNA, 15 bp, Homo sapiens
atacaagtcagtcaa

SEQ ID NO: 1338655 - DNA, 15 bp, Homo sapiens
tatacaagtcagtca

SEQ ID NO: 1338656 - DNA, 15 bp, Homo sapiens
gtatacaagtcagtc

SEQ ID NO: 1338657 - DNA, 15 bp, Homo sapiens
agtatacaagtcagt

SEQ ID NO: 1338658 - DNA, 15 bp, Homo sapiens
gagtatacaagtcag

SEQ ID NO: 1338659 - DNA, 15 bp, Homo sapiens
ggagtatacaagtca

SEQ ID NO: 1338660 - DNA, 15 bp, Homo sapiens
aggagtatacaagtc

SEQ ID NO: 1338661 - DNA, 15 bp, Homo sapiens
caggagtatacaagt

SEQ ID NO: 1338662 - DNA, 15 bp, Homo sapiens
acaggagtatacaag

SEQ ID NO: 1338663 - DNA, 15 bp, Homo sapiens
gacaggagtatacaa

SEQ ID NO: 1338664 - DNA, 15 bp, Homo sapiens
agacaggagtataca

SEQ ID NO: 1338665 - DNA, 15 bp, Homo sapiens
aagacaggagtatac

SEQ ID NO: 1338666 - DNA, 15 bp, Homo sapiens
aaagacaggagtata

SEQ ID NO: 1338667 - DNA, 15 bp, Homo sapiens
aaaagacaggagtat

SEQ ID NO: 1338668 - DNA, 15 bp, Homo sapiens
gaaaagacaggagta

SEQ ID NO: 1338669 - DNA, 15 bp, Homo sapiens
tgaaaagacaggagt

SEQ ID NO: 1338670 - DNA, 15 bp, Homo sapiens
ctgaaaagacaggag

SEQ ID NO: 1338671 - DNA, 15 bp, Homo sapiens
actgaaaagacagga

SEQ ID NO: 1338672 - DNA, 15 bp, Homo sapiens
cactgaaaagacagg

SEQ ID NO: 1338673 - DNA, 15 bp, Homo sapiens
gcactgaaaagacag

SEQ ID NO: 1338674 - DNA, 15 bp, Homo sapiens
ggcactgaaaagaca

SEQ ID NO: 1338675 - DNA, 15 bp, Homo sapiens
aggcactgaaaagac

SEQ ID NO: 1338676 - DNA, 15 bp, Homo sapiens
taggcactgaaaaga

SEQ ID NO: 1338677 - DNA, 15 bp, Homo sapiens
ttaggcactgaaaag

SEQ ID NO: 1338678 - DNA, 15 bp, Homo sapiens
tttaggcactgaaaa

SEQ ID NO: 1338679 - DNA, 15 bp, Homo sapiens
ttttaggcactgaaa

SEQ ID NO: 1338680 - DNA, 15 bp, Homo sapiens
tttttaggcactgaa

SEQ ID NO: 1338681 - DNA, 15 bp, Homo sapiens
ttttttaggcactga

SEQ ID NO: 1338682 - DNA, 15 bp, Homo sapiens
cttttttaggcactg

SEQ ID NO: 1338683 - DNA, 15 bp, Homo sapiens
acttttttaggcact

SEQ ID NO: 1338684 - DNA, 15 bp, Homo sapiens
cacttttttaggcac

SEQ ID NO: 1338685 - DNA, 15 bp, Homo sapiens
gcacttttttaggca

SEQ ID NO: 1338686 - DNA, 15 bp, Homo sapiens
ggcacttttttaggc

SEQ ID NO: 1338687 - DNA, 15 bp, Homo sapiens
aggcacttttttagg

SEQ ID NO: 1338688 - DNA, 15 bp, Homo sapiens
caggcacttttttag

SEQ ID NO: 1338689 - DNA, 15 bp, Homo sapiens
ccaggcactttttta

SEQ ID NO: 1338690 - DNA, 15 bp, Homo sapiens
gccaggcactttttt

SEQ ID NO: 1338691 - DNA, 15 bp, Homo sapiens
tgccaggcacttttt

SEQ ID NO: 1338692 - DNA, 15 bp, Homo sapiens
gtgccaggcactttt

SEQ ID NO: 1338693 - DNA, 15 bp, Homo sapiens
tgtgccaggcacttt

SEQ ID NO: 1338694 - DNA, 15 bp, Homo sapiens
atgtgccaggcactt

SEQ ID NO: 1338695 - DNA, 15 bp, Homo sapiens
aactatgtgccaggc

SEQ ID NO: 1338696 - DNA, 15 bp, Homo sapiens
aaactatgtgccagg

SEQ ID NO: 1338697 - DNA, 15 bp, Homo sapiens
caaactatgtgccag

SEQ ID NO: 1338698 - DNA, 15 bp, Homo sapiens
acaaactatgtgcca

SEQ ID NO: 1338699 - DNA, 15 bp, Homo sapiens
cacaaactatgtgcc

SEQ ID NO: 1338700 - DNA, 15 bp, Homo sapiens
gcacaaactatgtgc

SEQ ID NO: 1338701 - DNA, 15 bp, Homo sapiens
agcacaaactatgtg

SEQ ID NO: 1338702 - DNA, 15 bp, Homo sapiens
gagcacaaactatgt

SEQ ID NO: 1338703 - DNA, 15 bp, Homo sapiens
tgagcacaaactatg

SEQ ID NO: 1338704 - DNA, 15 bp, Homo sapiens
ttgagcacaaactat

SEQ ID NO: 1338705 - DNA, 15 bp, Homo sapiens
attgagcacaaacta

SEQ ID NO: 1338706 - DNA, 15 bp, Homo sapiens
tattgagcacaaact

SEQ ID NO: 1338707 - DNA, 15 bp, Homo sapiens
ttattgagcacaaac

SEQ ID NO: 1338708 - DNA, 15 bp, Homo sapiens
tttattgagcacaaa

SEQ ID NO: 1338709 - DNA, 15 bp, Homo sapiens
atttattgagcacaa

SEQ ID NO: 1338710 - DNA, 15 bp, Homo sapiens
tatttattgagcaca

SEQ ID NO: 1338711 - DNA, 15 bp, Homo sapiens
atatttattgagcac

SEQ ID NO: 1338712 - DNA, 15 bp, Homo sapiens
aatatttattgagca

SEQ ID NO: 1338713 - DNA, 15 bp, Homo sapiens
aaatatttattgagc

SEQ ID NO: 1338714 - DNA, 15 bp, Homo sapiens
taaatatttattgag

SEQ ID NO: 1338715 - DNA, 15 bp, Homo sapiens
ttaaatatttattga

SEQ ID NO: 1338716 - DNA, 15 bp, Homo sapiens
attaaatatttattg

SEQ ID NO: 1338717 - DNA, 15 bp, Homo sapiens
tattaaatatttatt

SEQ ID NO: 1338718 - DNA, 15 bp, Homo sapiens
ttattaaatatttat

SEQ ID NO: 1338719 - DNA, 15 bp, Homo sapiens
tttattaaatattta

SEQ ID NO: 1338720 - DNA, 15 bp, Homo sapiens
atttattaaatattt

SEQ ID NO: 1338721 - DNA, 15 bp, Homo sapiens
tatttattaaatatt

SEQ ID NO: 1338722 - DNA, 15 bp, Homo sapiens
atatttattaaatat

SEQ ID NO: 1338723 - DNA, 15 bp, Homo sapiens
catatttattaaata

SEQ ID NO: 1338724 - DNA, 15 bp, Homo sapiens
acatatttattaaat

SEQ ID NO: 1338725 - DNA, 15 bp, Homo sapiens
cacatatttattaaa

SEQ ID NO: 1338726 - DNA, 15 bp, Homo sapiens
tcacatatttattaa

SEQ ID NO: 1338727 - DNA, 15 bp, Homo sapiens
ttcacatatttatta

SEQ ID NO: 1338728 - DNA, 15 bp, Homo sapiens
attcacatatttatt

SEQ ID NO: 1338729 - DNA, 15 bp, Homo sapiens
cattcacatatttat

SEQ ID NO: 1338730 - DNA, 15 bp, Homo sapiens
tcattcacatattta

SEQ ID NO: 1338731 - DNA, 15 bp, Homo sapiens
ttcattcacatattt

SEQ ID NO: 1338732 - DNA, 15 bp, Homo sapiens
tttcattcacatatt

SEQ ID NO: 1338733 - DNA, 15 bp, Homo sapiens
atttcattcacatat

SEQ ID NO: 1338734 - DNA, 15 bp, Homo sapiens
catttcattcacata

SEQ ID NO: 1338735 - DNA, 15 bp, Homo sapiens
ccatttcattcacat

SEQ ID NO: 1338736 - DNA, 15 bp, Homo sapiens
cccatttcattcaca

SEQ ID NO: 1338737 - DNA, 15 bp, Homo sapiens
tcccatttcattcac

SEQ ID NO: 1338738 - DNA, 15 bp, Homo sapiens
ttcccatttcattca

SEQ ID NO: 1338739 - DNA, 15 bp, Homo sapiens
tttcccatttcattc

SEQ ID NO: 1338740 - DNA, 15 bp, Homo sapiens
ctttcccatttcatt

SEQ ID NO: 1338741 - DNA, 15 bp, Homo sapiens
actttcccatttcat

SEQ ID NO: 1338742 - DNA, 15 bp, Homo sapiens
tactttcccatttca

SEQ ID NO: 1338743 - DNA, 15 bp, Homo sapiens
atactttcccatttc

SEQ ID NO: 1338744 - DNA, 15 bp, Homo sapiens
aatactttcccattt

SEQ ID NO: 1338745 - DNA, 15 bp, Homo sapiens
aaatactttcccatt

SEQ ID NO: 1338746 - DNA, 15 bp, Homo sapiens
gaaatactttcccat

SEQ ID NO: 1338747 - DNA, 15 bp, Homo sapiens
cgaaatactttccca

SEQ ID NO: 1338748 - DNA, 15 bp, Homo sapiens
tcgaaatactttccc

SEQ ID NO: 1338749 - DNA, 15 bp, Homo sapiens
atcgaaatactttcc

SEQ ID NO: 1338750 - DNA, 15 bp, Homo sapiens
catcgaaatactttc

SEQ ID NO: 1338751 - DNA, 15 bp, Homo sapiens
acatcgaaatacttt

SEQ ID NO: 1338752 - DNA, 15 bp, Homo sapiens
tacatcgaaatactt

SEQ ID NO: 1338753 - DNA, 15 bp, Homo sapiens
ctacatcgaaatact

SEQ ID NO: 1338754 - DNA, 15 bp, Homo sapiens
tctacatcgaaatac

SEQ ID NO: 1338755 - DNA, 15 bp, Homo sapiens
ttctacatcgaaata

SEQ ID NO: 1338756 - DNA, 15 bp, Homo sapiens
tttctacatcgaaat

SEQ ID NO: 1338757 - DNA, 15 bp, Homo sapiens
ctttctacatcgaaa

SEQ ID NO: 1338758 - DNA, 15 bp, Homo sapiens
gctttctacatcgaa

SEQ ID NO: 1338759 - DNA, 15 bp, Homo sapiens
tgctttctacatcga

SEQ ID NO: 1338760 - DNA, 15 bp, Homo sapiens
atgctttctacatcg

SEQ ID NO: 1338761 - DNA, 15 bp, Homo sapiens
aatgctttctacatc

SEQ ID NO: 1338762 - DNA, 15 bp, Homo sapiens
taatgctttctacat

SEQ ID NO: 1338763 - DNA, 15 bp, Homo sapiens
ataatgctttctaca

SEQ ID NO: 1338764 - DNA, 15 bp, Homo sapiens
gataatgctttctac

SEQ ID NO: 1338765 - DNA, 15 bp, Homo sapiens
tgataatgctttcta

SEQ ID NO: 1338766 - DNA, 15 bp, Homo sapiens
ctgataatgctttct

SEQ ID NO: 1338767 - DNA, 15 bp, Homo sapiens
actgataatgctttc

SEQ ID NO: 1338768 - DNA, 15 bp, Homo sapiens
aactgataatgcttt

SEQ ID NO: 1338769 - DNA, 15 bp, Homo sapiens
aaactgataatgctt

SEQ ID NO: 1338770 - DNA, 15 bp, Homo sapiens
aaaactgataatgct

SEQ ID NO: 1338771 - DNA, 15 bp, Homo sapiens
aaaaactgataatgc

SEQ ID NO: 1338772 - DNA, 15 bp, Homo sapiens
aaaaaactgataatg

SEQ ID NO: 1338773 - DNA, 15 bp, Homo sapiens
taaaaaactgataat

SEQ ID NO: 1338774 - DNA, 15 bp, Homo sapiens
ataaaaaactgataa

SEQ ID NO: 1338775 - DNA, 15 bp, Homo sapiens
tataaaaaactgata

SEQ ID NO: 1338776 - DNA, 15 bp, Homo sapiens
gtataaaaaactgat

SEQ ID NO: 1338777 - DNA, 15 bp, Homo sapiens
ggtataaaaaactga

SEQ ID NO: 1338778 - DNA, 15 bp, Homo sapiens
tggtataaaaaactg

SEQ ID NO: 1338779 - DNA, 15 bp, Homo sapiens
ttggtataaaaaact

SEQ ID NO: 1338780 - DNA, 15 bp, Homo sapiens
tttggtataaaaaac

SEQ ID NO: 1338781 - DNA, 15 bp, Homo sapiens
ctttggtataaaaaa

SEQ ID NO: 1338782 - DNA, 15 bp, Homo sapiens
cctttggtataaaaa

SEQ ID NO: 1338783 - DNA, 15 bp, Homo sapiens
acctttggtataaaa

SEQ ID NO: 1338784 - DNA, 15 bp, Homo sapiens
tacctttggtataaa

SEQ ID NO: 1338785 - DNA, 15 bp, Homo sapiens
atacctttggtataa

SEQ ID NO: 1338786 - DNA, 15 bp, Homo sapiens
tatacctttggtata

SEQ ID NO: 1338787 - DNA, 15 bp, Homo sapiens
ttatacctttggtat

SEQ ID NO: 1338788 - DNA, 15 bp, Homo sapiens
gttatacctttggta

SEQ ID NO: 1338789 - DNA, 15 bp, Homo sapiens
ggttatacctttggt

SEQ ID NO: 1338790 - DNA, 15 bp, Homo sapiens
tggttatacctttgg

SEQ ID NO: 1338791 - DNA, 15 bp, Homo sapiens
atggttatacctttg

SEQ ID NO: 1338792 - DNA, 15 bp, Homo sapiens
gatggttataccttt

SEQ ID NO: 1338793 - DNA, 15 bp, Homo sapiens
agatggttatacctt

SEQ ID NO: 1338794 - DNA, 15 bp, Homo sapiens
aagatggttatacct

SEQ ID NO: 1338795 - DNA, 15 bp, Homo sapiens
caagatggttatacc

SEQ ID NO: 1338796 - DNA, 15 bp, Homo sapiens
tcaagatggttatac

SEQ ID NO: 1338797 - DNA, 15 bp, Homo sapiens
ttcaagatggttata

SEQ ID NO: 1338798 - DNA, 15 bp, Homo sapiens
tttcaagatggttat

SEQ ID NO: 1338799 - DNA, 15 bp, Homo sapiens
ctttcaagatggtta

SEQ ID NO: 1338800 - DNA, 15 bp, Homo sapiens
actttcaagatggtt

SEQ ID NO: 1338801 - DNA, 15 bp, Homo sapiens
cactttcaagatggt

SEQ ID NO: 1338802 - DNA, 15 bp, Homo sapiens
ccactttcaagatgg

SEQ ID NO: 1338803 - DNA, 15 bp, Homo sapiens
tccactttcaagatg

SEQ ID NO: 1338804 - DNA, 15 bp, Homo sapiens
atccactttcaagat

SEQ ID NO: 1338805 - DNA, 15 bp, Homo sapiens
gatccactttcaaga

SEQ ID NO: 1338806 - DNA, 15 bp, Homo sapiens
agatccactttcaag

SEQ ID NO: 1338807 - DNA, 15 bp, Homo sapiens
aagatccactttcaa

SEQ ID NO: 1338808 - DNA, 15 bp, Homo sapiens
aaagatccactttca

SEQ ID NO: 1338809 - DNA, 15 bp, Homo sapiens
aaaagatccactttc

SEQ ID NO: 1338810 - DNA, 15 bp, Homo sapiens
aaaaagatccacttt

SEQ ID NO: 1338811 - DNA, 15 bp, Homo sapiens
caaaaagatccactt

SEQ ID NO: 1338812 - DNA, 15 bp, Homo sapiens
acaaaaagatccact

SEQ ID NO: 1338813 - DNA, 15 bp, Homo sapiens
cacaaaaagatccac

SEQ ID NO: 1338814 - DNA, 15 bp, Homo sapiens
acacaaaaagatcca

SEQ ID NO: 1338815 - DNA, 15 bp, Homo sapiens
aacacaaaaagatcc

SEQ ID NO: 1338816 - DNA, 15 bp, Homo sapiens
gaacacaaaaagatc

SEQ ID NO: 1338817 - DNA, 15 bp, Homo sapiens
agaacacaaaaagat

SEQ ID NO: 1338818 - DNA, 15 bp, Homo sapiens
gagaacacaaaaaga

SEQ ID NO: 1338819 - DNA, 15 bp, Homo sapiens
tgagaacacaaaaag

SEQ ID NO: 1338820 - DNA, 15 bp, Homo sapiens
gtgagaacacaaaaa

SEQ ID NO: 1338821 - DNA, 15 bp, Homo sapiens
agtgagaacacaaaa

SEQ ID NO: 1338822 - DNA, 15 bp, Homo sapiens
gagtgagaacacaaa

SEQ ID NO: 1338823 - DNA, 15 bp, Homo sapiens
agagtgagaacacaa

SEQ ID NO: 1338824 - DNA, 15 bp, Homo sapiens
aagagtgagaacaca

SEQ ID NO: 1338825 - DNA, 15 bp, Homo sapiens
taagagtgagaacac

SEQ ID NO: 1338826 - DNA, 15 bp, Homo sapiens
gtaagagtgagaaca

SEQ ID NO: 1338827 - DNA, 15 bp, Homo sapiens
tgtaagagtgagaac

SEQ ID NO: 1338828 - DNA, 15 bp, Homo sapiens
ttgtaagagtgagaa

SEQ ID NO: 1338829 - DNA, 15 bp, Homo sapiens
tttgtaagagtgaga

SEQ ID NO: 1338830 - DNA, 15 bp, Homo sapiens
atttgtaagagtgag

SEQ ID NO: 1338831 - DNA, 15 bp, Homo sapiens
catttgtaagagtga

SEQ ID NO: 1338832 - DNA, 15 bp, Homo sapiens
ccatttgtaagagtg

SEQ ID NO: 1338833 - DNA, 15 bp, Homo sapiens
gccatttgtaagagt

SEQ ID NO: 1338834 - DNA, 15 bp, Homo sapiens
agccatttgtaagag

SEQ ID NO: 1338835 - DNA, 15 bp, Homo sapiens
aagccatttgtaaga

SEQ ID NO: 1338836 - DNA, 15 bp, Homo sapiens
caagccatttgtaag

SEQ ID NO: 1338837 - DNA, 15 bp, Homo sapiens
tcaagccatttgtaa

SEQ ID NO: 1338838 - DNA, 15 bp, Homo sapiens
atcaagccatttgta

SEQ ID NO: 1338839 - DNA, 15 bp, Homo sapiens
aatcaagccatttgt

SEQ ID NO: 1338840 - DNA, 15 bp, Homo sapiens
taatcaagccatttg

SEQ ID NO: 1338841 - DNA, 15 bp, Homo sapiens
ataatcaagccattt

SEQ ID NO: 1338842 - DNA, 15 bp, Homo sapiens
aataatcaagccatt

SEQ ID NO: 1338843 - DNA, 15 bp, Homo sapiens
aaataatcaagccat

SEQ ID NO: 1338844 - DNA, 15 bp, Homo sapiens
taaataatcaagcca

SEQ ID NO: 1338845 - DNA, 15 bp, Homo sapiens
ttaaataatcaagcc

SEQ ID NO: 1338846 - DNA, 15 bp, Homo sapiens
tttaaataatcaagc

SEQ ID NO: 1338847 - DNA, 15 bp, Homo sapiens
gtttaaataatcaag

SEQ ID NO: 1338848 - DNA, 15 bp, Homo sapiens
tgtttaaataatcaa

SEQ ID NO: 1338849 - DNA, 15 bp, Homo sapiens
atgtttaaataatca

SEQ ID NO: 1338850 - DNA, 15 bp, Homo sapiens
tatgtttaaataatc

SEQ ID NO: 1338851 - DNA, 15 bp, Homo sapiens
ctatgtttaaataat

SEQ ID NO: 1338852 - DNA, 15 bp, Homo sapiens
actatgtttaaataa

SEQ ID NO: 1338853 - DNA, 15 bp, Homo sapiens
cactatgtttaaata

SEQ ID NO: 1338854 - DNA, 15 bp, Homo sapiens
tcactatgtttaaat

SEQ ID NO: 1338855 - DNA, 15 bp, Homo sapiens
ttcactatgtttaaa

SEQ ID NO: 1338856 - DNA, 15 bp, Homo sapiens
cttcactatgtttaa

SEQ ID NO: 1338857 - DNA, 15 bp, Homo sapiens
tcttcactatgttta

SEQ ID NO: 1338858 - DNA, 15 bp, Homo sapiens
atcttcactatgttt

SEQ ID NO: 1338859 - DNA, 15 bp, Homo sapiens
gatcttcactatgtt

SEQ ID NO: 1338860 - DNA, 15 bp, Homo sapiens
tgatcttcactatgt

SEQ ID NO: 1338861 - DNA, 15 bp, Homo sapiens
ctgatcttcactatg

SEQ ID NO: 1338862 - DNA, 15 bp, Homo sapiens
actgatcttcactat

SEQ ID NO: 1338863 - DNA, 15 bp, Homo sapiens
aactgatcttcacta

SEQ ID NO: 1338864 - DNA, 15 bp, Homo sapiens
aaactgatcttcact

SEQ ID NO: 1338865 - DNA, 15 bp, Homo sapiens
gaaactgatcttcac

SEQ ID NO: 1338866 - DNA, 15 bp, Homo sapiens
agaaactgatcttca

SEQ ID NO: 1338867 - DNA, 15 bp, Homo sapiens
gagaaactgatcttc

SEQ ID NO: 1338868 - DNA, 15 bp, Homo sapiens
agagaaactgatctt

SEQ ID NO: 1338869 - DNA, 15 bp, Homo sapiens
aagagaaactgatct

SEQ ID NO: 1338870 - DNA, 15 bp, Homo sapiens
aaagagaaactgatc

SEQ ID NO: 1338871 - DNA, 15 bp, Homo sapiens
caaagagaaactgat

SEQ ID NO: 1338872 - DNA, 15 bp, Homo sapiens
ccaaagagaaactga

SEQ ID NO: 1338873 - DNA, 15 bp, Homo sapiens
accaaagagaaactg

SEQ ID NO: 1338874 - DNA, 15 bp, Homo sapiens
caccaaagagaaact

SEQ ID NO: 1338875 - DNA, 15 bp, Homo sapiens
acaccaaagagaaac

SEQ ID NO: 1338876 - DNA, 15 bp, Homo sapiens
gacaccaaagagaaa

SEQ ID NO: 1338877 - DNA, 15 bp, Homo sapiens
agacaccaaagagaa

SEQ ID NO: 1338878 - DNA, 15 bp, Homo sapiens
cagacaccaaagaga

SEQ ID NO: 1338879 - DNA, 15 bp, Homo sapiens
acagacaccaaagag

SEQ ID NO: 1338880 - DNA, 15 bp, Homo sapiens
tacagacaccaaaga

SEQ ID NO: 1338881 - DNA, 15 bp, Homo sapiens
ttacagacaccaaag

SEQ ID NO: 1338882 - DNA, 15 bp, Homo sapiens
attacagacaccaaa

SEQ ID NO: 1338883 - DNA, 15 bp, Homo sapiens
aattacagacaccaa

SEQ ID NO: 1338884 - DNA, 15 bp, Homo sapiens
aaattacagacacca

SEQ ID NO: 1338885 - DNA, 15 bp, Homo sapiens
taaattacagacacc

SEQ ID NO: 1338886 - DNA, 15 bp, Homo sapiens
ataaattacagacac

SEQ ID NO: 1338887 - DNA, 15 bp, Homo sapiens
aataaattacagaca

SEQ ID NO: 1338888 - DNA, 15 bp, Homo sapiens
aaataaattacagac

SEQ ID NO: 1338889 - DNA, 15 bp, Homo sapiens
taaataaattacaga

SEQ ID NO: 1338890 - DNA, 15 bp, Homo sapiens
ataaataaattacag

SEQ ID NO: 1338891 - DNA, 15 bp, Homo sapiens
aataaataaattaca

SEQ ID NO: 1338892 - DNA, 15 bp, Homo sapiens
aaataaataaattac

SEQ ID NO: 1338893 - DNA, 15 bp, Homo sapiens
taaataaataaatta

SEQ ID NO: 1338894 - DNA, 15 bp, Homo sapiens
ataaataaataaatt

SEQ ID NO: 1338895 - DNA, 15 bp, Homo sapiens
acaaaaataaataaa

SEQ ID NO: 1338896 - DNA, 15 bp, Homo sapiens
aacaaaaataaataa

SEQ ID NO: 1338897 - DNA, 15 bp, Homo sapiens
aaacaaaaataaata

SEQ ID NO: 1338898 - DNA, 15 bp, Homo sapiens
aaaacaaaaataaat

SEQ ID NO: 1338899 - DNA, 15 bp, Homo sapiens
gaaaacaaaaataaa

SEQ ID NO: 1338900 - DNA, 15 bp, Homo sapiens
agaaaacaaaaataa

SEQ ID NO: 1338901 - DNA, 15 bp, Homo sapiens
gagaaaacaaaaata

SEQ ID NO: 1338902 - DNA, 15 bp, Homo sapiens
tgagaaaacaaaaat

SEQ ID NO: 1338903 - DNA, 15 bp, Homo sapiens
ttgagaaaacaaaaa

SEQ ID NO: 1338904 - DNA, 15 bp, Homo sapiens
cttgagaaaacaaaa

SEQ ID NO: 1338905 - DNA, 15 bp, Homo sapiens
gcttgagaaaacaaa

SEQ ID NO: 1338906 - DNA, 15 bp, Homo sapiens
ggcttgagaaaacaa

SEQ ID NO: 1338907 - DNA, 15 bp, Homo sapiens
aggcttgagaaaaca

SEQ ID NO: 1338908 - DNA, 15 bp, Homo sapiens
taggcttgagaaaac

SEQ ID NO: 1338909 - DNA, 15 bp, Homo sapiens
ctaggcttgagaaaa

SEQ ID NO: 1338910 - DNA, 15 bp, Homo sapiens
cctaggcttgagaaa

SEQ ID NO: 1338911 - DNA, 15 bp, Homo sapiens
ccctaggcttgagaa

SEQ ID NO: 1338912 - DNA, 15 bp, Homo sapiens
tccctaggcttgaga

SEQ ID NO: 1338913 - DNA, 15 bp, Homo sapiens
ctccctaggcttgag

SEQ ID NO: 1338914 - DNA, 15 bp, Homo sapiens
gctccctaggcttga

SEQ ID NO: 1338915 - DNA, 15 bp, Homo sapiens
agctccctaggcttg

SEQ ID NO: 1338916 - DNA, 15 bp, Homo sapiens
cagctccctaggctt

SEQ ID NO: 1338917 - DNA, 15 bp, Homo sapiens
ccagctccctaggct

SEQ ID NO: 1338918 - DNA, 15 bp, Homo sapiens
accagctccctaggc

SEQ ID NO: 1338919 - DNA, 15 bp, Homo sapiens
aaccagctccctagg

SEQ ID NO: 1338920 - DNA, 15 bp, Homo sapiens
aaaccagctccctag

SEQ ID NO: 1338921 - DNA, 15 bp, Homo sapiens
caaaccagctcccta

SEQ ID NO: 1338922 - DNA, 15 bp, Homo sapiens
tcaaaccagctccct

SEQ ID NO: 1338923 - DNA, 15 bp, Homo sapiens
ctcaaaccagctccc

SEQ ID NO: 1338924 - DNA, 15 bp, Homo sapiens
gctcaaaccagctcc

SEQ ID NO: 1338925 - DNA, 15 bp, Homo sapiens
tgctcaaaccagctc

SEQ ID NO: 1338926 - DNA, 15 bp, Homo sapiens
ttgctcaaaccagct

SEQ ID NO: 1338927 - DNA, 15 bp, Homo sapiens
attgctcaaaccagc

SEQ ID NO: 1338928 - DNA, 15 bp, Homo sapiens
gattgctcaaaccag

SEQ ID NO: 1338929 - DNA, 15 bp, Homo sapiens
agattgctcaaacca

SEQ ID NO: 1338930 - DNA, 15 bp, Homo sapiens
gagattgctcaaacc

SEQ ID NO: 1338931 - DNA, 15 bp, Homo sapiens
tgagattgctcaaac

SEQ ID NO: 1338932 - DNA, 15 bp, Homo sapiens
ctgagattgctcaaa

SEQ ID NO: 1338933 - DNA, 15 bp, Homo sapiens
cctgagattgctcaa

SEQ ID NO: 1338934 - DNA, 15 bp, Homo sapiens
ccctgagattgctca

SEQ ID NO: 1338935 - DNA, 15 bp, Homo sapiens
accctgagattgctc

SEQ ID NO: 1338936 - DNA, 15 bp, Homo sapiens
taccctgagattgct

SEQ ID NO: 1338937 - DNA, 15 bp, Homo sapiens
ttaccctgagattgc

SEQ ID NO: 1338938 - DNA, 15 bp, Homo sapiens
tttaccctgagattg

SEQ ID NO: 1338939 - DNA, 15 bp, Homo sapiens
ttttaccctgagatt

SEQ ID NO: 1338940 - DNA, 15 bp, Homo sapiens
cttttaccctgagat

SEQ ID NO: 1338941 - DNA, 15 bp, Homo sapiens
tcttttaccctgaga

SEQ ID NO: 1338942 - DNA, 15 bp, Homo sapiens
ttcttttaccctgag

SEQ ID NO: 1338943 - DNA, 15 bp, Homo sapiens
tttcttttaccctga

SEQ ID NO: 1338944 - DNA, 15 bp, Homo sapiens
ttttcttttaccctg

SEQ ID NO: 1338945 - DNA, 15 bp, Homo sapiens
attttcttttaccct

SEQ ID NO: 1338946 - DNA, 15 bp, Homo sapiens
cattttcttttaccc

SEQ ID NO: 1338947 - DNA, 15 bp, Homo sapiens
tcattttcttttacc

SEQ ID NO: 1338948 - DNA, 15 bp, Homo sapiens
atcattttcttttac

SEQ ID NO: 1338949 - DNA, 15 bp, Homo sapiens
aatcattttctttta

SEQ ID NO: 1338950 - DNA, 15 bp, Homo sapiens
taatcattttctttt

SEQ ID NO: 1338951 - DNA, 15 bp, Homo sapiens
ctaatcattttcttt

SEQ ID NO: 1338952 - DNA, 15 bp, Homo sapiens
actaatcattttctt

SEQ ID NO: 1338953 - DNA, 15 bp, Homo sapiens
aactaatcattttct

SEQ ID NO: 1338954 - DNA, 15 bp, Homo sapiens
gaactaatcattttc

SEQ ID NO: 1338955 - DNA, 15 bp, Homo sapiens
agaactaatcatttt

SEQ ID NO: 1338956 - DNA, 15 bp, Homo sapiens
gagaactaatcattt

SEQ ID NO: 1338957 - DNA, 15 bp, Homo sapiens
tgagaactaatcatt

SEQ ID NO: 1338958 - DNA, 15 bp, Homo sapiens
ctgagaactaatcat

SEQ ID NO: 1338959 - DNA, 15 bp, Homo sapiens
tctgagaactaatca

SEQ ID NO: 1338960 - DNA, 15 bp, Homo sapiens
ttctgagaactaatc

SEQ ID NO: 1338961 - DNA, 15 bp, Homo sapiens
gttctgagaactaat

SEQ ID NO: 1338962 - DNA, 15 bp, Homo sapiens
tgttctgagaactaa

SEQ ID NO: 1338963 - DNA, 15 bp, Homo sapiens
atgttctgagaacta

SEQ ID NO: 1338964 - DNA, 15 bp, Homo sapiens
gatgttctgagaact

SEQ ID NO: 1338965 - DNA, 15 bp, Homo sapiens
tgatgttctgagaac

SEQ ID NO: 1338966 - DNA, 15 bp, Homo sapiens
ttgatgttctgagaa

SEQ ID NO: 1338967 - DNA, 15 bp, Homo sapiens
gttgatgttctgaga

SEQ ID NO: 1338968 - DNA, 15 bp, Homo sapiens
tgttgatgttctgag

SEQ ID NO: 1338969 - DNA, 15 bp, Homo sapiens
atgttgatgttctga

SEQ ID NO: 1338970 - DNA, 15 bp, Homo sapiens
aatgttgatgttctg

SEQ ID NO: 1338971 - DNA, 15 bp, Homo sapiens
caatgttgatgttct

SEQ ID NO: 1338972 - DNA, 15 bp, Homo sapiens
acaatgttgatgttc

SEQ ID NO: 1338973 - DNA, 15 bp, Homo sapiens
tacaatgttgatgtt

SEQ ID NO: 1338974 - DNA, 15 bp, Homo sapiens
atacaatgttgatgt

SEQ ID NO: 1338975 - DNA, 15 bp, Homo sapiens
catacaatgttgatg

SEQ ID NO: 1338976 - DNA, 15 bp, Homo sapiens
acatacaatgttgat

SEQ ID NO: 1338977 - DNA, 15 bp, Homo sapiens
tacatacaatgttga

SEQ ID NO: 1338978 - DNA, 15 bp, Homo sapiens
atacatacaatgttg

SEQ ID NO: 1338979 - DNA, 15 bp, Homo sapiens
aatacatacaatgtt

SEQ ID NO: 1338980 - DNA, 15 bp, Homo sapiens
taatacatacaatgt

SEQ ID NO: 1338981 - DNA, 15 bp, Homo sapiens
ataatacatacaatg

SEQ ID NO: 1338982 - DNA, 15 bp, Homo sapiens
gataatacatacaat

SEQ ID NO: 1338983 - DNA, 15 bp, Homo sapiens
agataatacatacaa

SEQ ID NO: 1338984 - DNA, 15 bp, Homo sapiens
aagataatacataca

SEQ ID NO: 1338985 - DNA, 15 bp, Homo sapiens
caagataatacatac

SEQ ID NO: 1338986 - DNA, 15 bp, Homo sapiens
ccaagataatacata

SEQ ID NO: 1338987 - DNA, 15 bp, Homo sapiens
tccaagataatacat

SEQ ID NO: 1338988 - DNA, 15 bp, Homo sapiens
ttccaagataataca

SEQ ID NO: 1338989 - DNA, 15 bp, Homo sapiens
cttccaagataatac

SEQ ID NO: 1338990 - DNA, 15 bp, Homo sapiens
tcttccaagataata

SEQ ID NO: 1338991 - DNA, 15 bp, Homo sapiens
atcttccaagataat

SEQ ID NO: 1338992 - DNA, 15 bp, Homo sapiens
catcttccaagataa

SEQ ID NO: 1338993 - DNA, 15 bp, Homo sapiens
ccatcttccaagata

SEQ ID NO: 1338994 - DNA, 15 bp, Homo sapiens
cccatcttccaagat

SEQ ID NO: 1338995 - DNA, 15 bp, Homo sapiens
acccatcttccaaga

SEQ ID NO: 1338996 - DNA, 15 bp, Homo sapiens
aacccatcttccaag

SEQ ID NO: 1338997 - DNA, 15 bp, Homo sapiens
taacccatcttccaa

SEQ ID NO: 1338998 - DNA, 15 bp, Homo sapiens
ttaacccatcttcca

SEQ ID NO: 1338999 - DNA, 15 bp, Homo sapiens
cttaacccatcttcc

SEQ ID NO: 1339000 - DNA, 15 bp, Homo sapiens
tcttaacccatcttc

SEQ ID NO: 1339001 - DNA, 15 bp, Homo sapiens
atcttaacccatctt

SEQ ID NO: 1339002 - DNA, 15 bp, Homo sapiens
gatcttaacccatct

SEQ ID NO: 1339003 - DNA, 15 bp, Homo sapiens
tgatcttaacccatc

SEQ ID NO: 1339004 - DNA, 15 bp, Homo sapiens
ttgatcttaacccat

SEQ ID NO: 1339005 - DNA, 15 bp, Homo sapiens
tttgatcttaaccca

SEQ ID NO: 1339006 - DNA, 15 bp, Homo sapiens
atttgatcttaaccc

SEQ ID NO: 1339007 - DNA, 15 bp, Homo sapiens
aatttgatcttaacc

SEQ ID NO: 1339008 - DNA, 15 bp, Homo sapiens
caatttgatcttaac

SEQ ID NO: 1339009 - DNA, 15 bp, Homo sapiens
tcaatttgatcttaa

SEQ ID NO: 1339010 - DNA, 15 bp, Homo sapiens
ttcaatttgatctta

SEQ ID NO: 1339011 - DNA, 15 bp, Homo sapiens
tttcaatttgatctt

SEQ ID NO: 1339012 - DNA, 15 bp, Homo sapiens
ttttcaatttgatct

SEQ ID NO: 1339013 - DNA, 15 bp, Homo sapiens
tttttcaatttgatc

SEQ ID NO: 1339014 - DNA, 15 bp, Homo sapiens
atttttcaatttgat

SEQ ID NO: 1339015 - DNA, 15 bp, Homo sapiens
aatttttcaatttga

SEQ ID NO: 1339016 - DNA, 15 bp, Homo sapiens
taatttttcaatttg

SEQ ID NO: 1339017 - DNA, 15 bp, Homo sapiens
gtaatttttcaattt

SEQ ID NO: 1339018 - DNA, 15 bp, Homo sapiens
ggtaatttttcaatt

SEQ ID NO: 1339019 - DNA, 15 bp, Homo sapiens
cggtaatttttcaat

SEQ ID NO: 1339020 - DNA, 15 bp, Homo sapiens
ccggtaatttttcaa

SEQ ID NO: 1339021 - DNA, 15 bp, Homo sapiens
tccggtaatttttca

SEQ ID NO: 1339022 - DNA, 15 bp, Homo sapiens
ttccggtaatttttc

SEQ ID NO: 1339023 - DNA, 15 bp, Homo sapiens
tttccggtaattttt

SEQ ID NO: 1339024 - DNA, 15 bp, Homo sapiens
ttttccggtaatttt

SEQ ID NO: 1339025 - DNA, 15 bp, Homo sapiens
tttttccggtaattt

SEQ ID NO: 1339026 - DNA, 15 bp, Homo sapiens
ttttttccggtaatt

SEQ ID NO: 1339027 - DNA, 15 bp, Homo sapiens
tttttttccggtaat

SEQ ID NO: 1339028 - DNA, 15 bp, Homo sapiens
atttttttccggtaa

SEQ ID NO: 1339029 - DNA, 15 bp, Homo sapiens
aatttttttccggta

SEQ ID NO: 1339030 - DNA, 15 bp, Homo sapiens
taatttttttccggt

SEQ ID NO: 1339031 - DNA, 15 bp, Homo sapiens
ttaatttttttccgg

SEQ ID NO: 1339032 - DNA, 15 bp, Homo sapiens
cttaatttttttccg

SEQ ID NO: 1339033 - DNA, 15 bp, Homo sapiens
tcttaatttttttcc

SEQ ID NO: 1339034 - DNA, 15 bp, Homo sapiens
atcttaatttttttc

SEQ ID NO: 1339035 - DNA, 15 bp, Homo sapiens
catcttaattttttt

SEQ ID NO: 1339036 - DNA, 15 bp, Homo sapiens
ccatcttaatttttt

SEQ ID NO: 1339037 - DNA, 15 bp, Homo sapiens
gccatcttaattttt

SEQ ID NO: 1339038 - DNA, 15 bp, Homo sapiens
tgccatcttaatttt

SEQ ID NO: 1339039 - DNA, 15 bp, Homo sapiens
ctgccatcttaattt

SEQ ID NO: 1339040 - DNA, 15 bp, Homo sapiens
actgccatcttaatt

SEQ ID NO: 1339041 - DNA, 15 bp, Homo sapiens
aactgccatcttaat

SEQ ID NO: 1339042 - DNA, 15 bp, Homo sapiens
taactgccatcttaa

SEQ ID NO: 1339043 - DNA, 15 bp, Homo sapiens
ataactgccatctta

SEQ ID NO: 1339044 - DNA, 15 bp, Homo sapiens
cataactgccatctt

SEQ ID NO: 1339045 - DNA, 15 bp, Homo sapiens
acataactgccatct

SEQ ID NO: 1339046 - DNA, 15 bp, Homo sapiens
tacataactgccatc

SEQ ID NO: 1339047 - DNA, 15 bp, Homo sapiens
atacataactgccat

SEQ ID NO: 1339048 - DNA, 15 bp, Homo sapiens
tatacataactgcca

SEQ ID NO: 1339049 - DNA, 15 bp, Homo sapiens
ctatacataactgcc

SEQ ID NO: 1339050 - DNA, 15 bp, Homo sapiens
tctatacataactgc

SEQ ID NO: 1339051 - DNA, 15 bp, Homo sapiens
atctatacataactg

SEQ ID NO: 1339052 - DNA, 15 bp, Homo sapiens
aatctatacataact

SEQ ID NO: 1339053 - DNA, 15 bp, Homo sapiens
aaatctatacataac

SEQ ID NO: 1339054 - DNA, 15 bp, Homo sapiens
aaaatctatacataa

SEQ ID NO: 1339055 - DNA, 15 bp, Homo sapiens
gaaaatctatacata

SEQ ID NO: 1339056 - DNA, 15 bp, Homo sapiens
tgaaaatctatacat

SEQ ID NO: 1339057 - DNA, 15 bp, Homo sapiens
atgaaaatctataca

SEQ ID NO: 1339058 - DNA, 15 bp, Homo sapiens
aatgaaaatctatac

SEQ ID NO: 1339059 - DNA, 15 bp, Homo sapiens
aaatgaaaatctata

SEQ ID NO: 1339060 - DNA, 15 bp, Homo sapiens
gaaatgaaaatctat

SEQ ID NO: 1339061 - DNA, 15 bp, Homo sapiens
agaaatgaaaatcta

SEQ ID NO: 1339062 - DNA, 15 bp, Homo sapiens
aagaaatgaaaatct

SEQ ID NO: 1339063 - DNA, 15 bp, Homo sapiens
aaagaaatgaaaatc

SEQ ID NO: 1339064 - DNA, 15 bp, Homo sapiens
aaaagaaatgaaaat

SEQ ID NO: 1339065 - DNA, 15 bp, Homo sapiens
aaaaagaaatgaaaa

SEQ ID NO: 1339066 - DNA, 15 bp, Homo sapiens
gaaaaagaaatgaaa

SEQ ID NO: 1339067 - DNA, 15 bp, Homo sapiens
ggaaaaagaaatgaa

SEQ ID NO: 1339068 - DNA, 15 bp, Homo sapiens
aggaaaaagaaatga

SEQ ID NO: 1339069 - DNA, 15 bp, Homo sapiens
caggaaaaagaaatg

SEQ ID NO: 1339070 - DNA, 15 bp, Homo sapiens
acaggaaaaagaaat

SEQ ID NO: 1339071 - DNA, 15 bp, Homo sapiens
cacaggaaaaagaaa

SEQ ID NO: 1339072 - DNA, 15 bp, Homo sapiens
acacaggaaaaagaa

SEQ ID NO: 1339073 - DNA, 15 bp, Homo sapiens
cacacaggaaaaaga

SEQ ID NO: 1339074 - DNA, 15 bp, Homo sapiens
ccacacaggaaaaag

SEQ ID NO: 1339075 - DNA, 15 bp, Homo sapiens
accacacaggaaaaa

SEQ ID NO: 1339076 - DNA, 15 bp, Homo sapiens
aaccacacaggaaaa

SEQ ID NO: 1339077 - DNA, 15 bp, Homo sapiens
aaaccacacaggaaa

SEQ ID NO: 1339078 - DNA, 15 bp, Homo sapiens
aaaaccacacaggaa

SEQ ID NO: 1339079 - DNA, 15 bp, Homo sapiens
taaaaccacacagga

SEQ ID NO: 1339080 - DNA, 15 bp, Homo sapiens
ttaaaaccacacagg

SEQ ID NO: 1339081 - DNA, 15 bp, Homo sapiens
attaaaaccacacag

SEQ ID NO: 1339082 - DNA, 15 bp, Homo sapiens
cattaaaaccacaca

SEQ ID NO: 1339083 - DNA, 15 bp, Homo sapiens
tcattaaaaccacac

SEQ ID NO: 1339084 - DNA, 15 bp, Homo sapiens
atcattaaaaccaca

SEQ ID NO: 1339085 - DNA, 15 bp, Homo sapiens
tatcattaaaaccac

SEQ ID NO: 1339086 - DNA, 15 bp, Homo sapiens
ttatcattaaaacca

SEQ ID NO: 1339087 - DNA, 15 bp, Homo sapiens
cttatcattaaaacc

SEQ ID NO: 1339088 - DNA, 15 bp, Homo sapiens
acttatcattaaaac

SEQ ID NO: 1339089 - DNA, 15 bp, Homo sapiens
tacttatcattaaaa

SEQ ID NO: 1339090 - DNA, 15 bp, Homo sapiens
ctacttatcattaaa

SEQ ID NO: 1339091 - DNA, 15 bp, Homo sapiens
actacttatcattaa

SEQ ID NO: 1339092 - DNA, 15 bp, Homo sapiens
tactacttatcatta

SEQ ID NO: 1339093 - DNA, 15 bp, Homo sapiens
gtactacttatcatt

SEQ ID NO: 1339094 - DNA, 15 bp, Homo sapiens
tgtactacttatcat

SEQ ID NO: 1339095 - DNA, 15 bp, Homo sapiens
ctgtactacttatca

SEQ ID NO: 1339096 - DNA, 15 bp, Homo sapiens
cctgtactacttatc

SEQ ID NO: 1339097 - DNA, 15 bp, Homo sapiens
gcctgtactacttat

SEQ ID NO: 1339098 - DNA, 15 bp, Homo sapiens
agcctgtactactta

SEQ ID NO: 1339099 - DNA, 15 bp, Homo sapiens
aagcctgtactactt

SEQ ID NO: 1339100 - DNA, 15 bp, Homo sapiens
aaagcctgtactact

SEQ ID NO: 1339101 - DNA, 15 bp, Homo sapiens
aaaagcctgtactac

SEQ ID NO: 1339102 - DNA, 15 bp, Homo sapiens
taaaagcctgtacta

SEQ ID NO: 1339103 - DNA, 15 bp, Homo sapiens
ctaaaagcctgtact

SEQ ID NO: 1339104 - DNA, 15 bp, Homo sapiens
cctaaaagcctgtac

SEQ ID NO: 1339105 - DNA, 15 bp, Homo sapiens
tcctaaaagcctgta

SEQ ID NO: 1339106 - DNA, 15 bp, Homo sapiens
gtcctaaaagcctgt

SEQ ID NO: 1339107 - DNA, 15 bp, Homo sapiens
agtcctaaaagcctg

SEQ ID NO: 1339108 - DNA, 15 bp, Homo sapiens
cagtcctaaaagcct

SEQ ID NO: 1339109 - DNA, 15 bp, Homo sapiens
ccagtcctaaaagcc

SEQ ID NO: 1339110 - DNA, 15 bp, Homo sapiens
accagtcctaaaagc

SEQ ID NO: 1339111 - DNA, 15 bp, Homo sapiens
taccagtcctaaaag

SEQ ID NO: 1339112 - DNA, 15 bp, Homo sapiens
gtaccagtcctaaaa

SEQ ID NO: 1339113 - DNA, 15 bp, Homo sapiens
cgtaccagtcctaaa

SEQ ID NO: 1339114 - DNA, 15 bp, Homo sapiens
tcgtaccagtcctaa

SEQ ID NO: 1339115 - DNA, 15 bp, Homo sapiens
atcgtaccagtccta

SEQ ID NO: 1339116 - DNA, 15 bp, Homo sapiens
aatcgtaccagtcct

SEQ ID NO: 1339117 - DNA, 15 bp, Homo sapiens
aaatcgtaccagtcc

SEQ ID NO: 1339118 - DNA, 15 bp, Homo sapiens
aaaatcgtaccagtc

SEQ ID NO: 1339119 - DNA, 15 bp, Homo sapiens
aaaaatcgtaccagt

SEQ ID NO: 1339120 - DNA, 15 bp, Homo sapiens
gaaaaatcgtaccag

SEQ ID NO: 1339121 - DNA, 15 bp, Homo sapiens
agaaaaatcgtacca

SEQ ID NO: 1339122 - DNA, 15 bp, Homo sapiens
tagaaaaatcgtacc

SEQ ID NO: 1339123 - DNA, 15 bp, Homo sapiens
atagaaaaatcgtac

SEQ ID NO: 1339124 - DNA, 15 bp, Homo sapiens
catagaaaaatcgta

SEQ ID NO: 1339125 - DNA, 15 bp, Homo sapiens
acatagaaaaatcgt

SEQ ID NO: 1339126 - DNA, 15 bp, Homo sapiens
gacatagaaaaatcg

SEQ ID NO: 1339127 - DNA, 15 bp, Homo sapiens
cgacatagaaaaatc

SEQ ID NO: 1339128 - DNA, 15 bp, Homo sapiens
acgacatagaaaaat

SEQ ID NO: 1339129 - DNA, 15 bp, Homo sapiens
tacgacatagaaaaa

SEQ ID NO: 1339130 - DNA, 15 bp, Homo sapiens
ctacgacatagaaaa

SEQ ID NO: 1339131 - DNA, 15 bp, Homo sapiens
tctacgacatagaaa

SEQ ID NO: 1339132 - DNA, 15 bp, Homo sapiens
ttctacgacatagaa

SEQ ID NO: 1339133 - DNA, 15 bp, Homo sapiens
gttctacgacataga

SEQ ID NO: 1339134 - DNA, 15 bp, Homo sapiens
ggttctacgacatag

SEQ ID NO: 1339135 - DNA, 15 bp, Homo sapiens
gggttctacgacata

SEQ ID NO: 1339136 - DNA, 15 bp, Homo sapiens
agggttctacgacat

SEQ ID NO: 1339137 - DNA, 15 bp, Homo sapiens
aagggttctacgaca

SEQ ID NO: 1339138 - DNA, 15 bp, Homo sapiens
aaagggttctacgac

SEQ ID NO: 1339139 - DNA, 15 bp, Homo sapiens
aaaagggttctacga

SEQ ID NO: 1339140 - DNA, 15 bp, Homo sapiens
caaaagggttctacg

SEQ ID NO: 1339141 - DNA, 15 bp, Homo sapiens
acaaaagggttctac

SEQ ID NO: 1339142 - DNA, 15 bp, Homo sapiens
tacaaaagggttcta

SEQ ID NO: 1339143 - DNA, 15 bp, Homo sapiens
ttacaaaagggttct

SEQ ID NO: 1339144 - DNA, 15 bp, Homo sapiens
tttacaaaagggttc

SEQ ID NO: 1339145 - DNA, 15 bp, Homo sapiens
atttacaaaagggtt

SEQ ID NO: 1339146 - DNA, 15 bp, Homo sapiens
tatttacaaaagggt

SEQ ID NO: 1339147 - DNA, 15 bp, Homo sapiens
gtatttacaaaaggg

SEQ ID NO: 1339148 - DNA, 15 bp, Homo sapiens
agtatttacaaaagg

SEQ ID NO: 1339149 - DNA, 15 bp, Homo sapiens
aagtatttacaaaag

SEQ ID NO: 1339150 - DNA, 15 bp, Homo sapiens
aaagtatttacaaaa

SEQ ID NO: 1339151 - DNA, 15 bp, Homo sapiens
aaaagtatttacaaa

SEQ ID NO: 1339152 - DNA, 15 bp, Homo sapiens
caaaagtatttacaa

SEQ ID NO: 1339153 - DNA, 15 bp, Homo sapiens
ccaaaagtatttaca

SEQ ID NO: 1339154 - DNA, 15 bp, Homo sapiens
accaaaagtatttac

SEQ ID NO: 1339155 - DNA, 15 bp, Homo sapiens
taccaaaagtattta

SEQ ID NO: 1339156 - DNA, 15 bp, Homo sapiens
ataccaaaagtattt

SEQ ID NO: 1339157 - DNA, 15 bp, Homo sapiens
aataccaaaagtatt

SEQ ID NO: 1339158 - DNA, 15 bp, Homo sapiens
taataccaaaagtat

SEQ ID NO: 1339159 - DNA, 15 bp, Homo sapiens
ataataccaaaagta

SEQ ID NO: 1339160 - DNA, 15 bp, Homo sapiens
cataataccaaaagt

SEQ ID NO: 1339161 - DNA, 15 bp, Homo sapiens
ccataataccaaaag

SEQ ID NO: 1339162 - DNA, 15 bp, Homo sapiens
accataataccaaaa

SEQ ID NO: 1339163 - DNA, 15 bp, Homo sapiens
caccataataccaaa

SEQ ID NO: 1339164 - DNA, 15 bp, Homo sapiens
acaccataataccaa

SEQ ID NO: 1339165 - DNA, 15 bp, Homo sapiens
cacaccataatacca

SEQ ID NO: 1339166 - DNA, 15 bp, Homo sapiens
acacaccataatacc

SEQ ID NO: 1339167 - DNA, 15 bp, Homo sapiens
cacacaccataatac

SEQ ID NO: 1339168 - DNA, 15 bp, Homo sapiens
acacacaccataata

SEQ ID NO: 1339169 - DNA, 15 bp, Homo sapiens
aacacacaccataat

SEQ ID NO: 1339170 - DNA, 15 bp, Homo sapiens
aaacacacaccataa

SEQ ID NO: 1339171 - DNA, 15 bp, Homo sapiens
gaaacacacaccata

SEQ ID NO: 1339172 - DNA, 15 bp, Homo sapiens
tctagaaacacacac

SEQ ID NO: 1339173 - DNA, 15 bp, Homo sapiens
atctagaaacacaca

SEQ ID NO: 1339174 - DNA, 15 bp, Homo sapiens
tatctagaaacacac

SEQ ID NO: 1339175 - DNA, 15 bp, Homo sapiens
atatctagaaacaca

SEQ ID NO: 1339176 - DNA, 15 bp, Homo sapiens
aatatctagaaacac

SEQ ID NO: 1339177 - DNA, 15 bp, Homo sapiens
taatatctagaaaca

SEQ ID NO: 1339178 - DNA, 15 bp, Homo sapiens
ttaatatctagaaac

SEQ ID NO: 1339179 - DNA, 15 bp, Homo sapiens
gttaatatctagaaa

SEQ ID NO: 1339180 - DNA, 15 bp, Homo sapiens
ggttaatatctagaa

SEQ ID NO: 1339181 - DNA, 15 bp, Homo sapiens
tggttaatatctaga

SEQ ID NO: 1339182 - DNA, 15 bp, Homo sapiens
atggttaatatctag

SEQ ID NO: 1339183 - DNA, 15 bp, Homo sapiens
tatggttaatatcta

SEQ ID NO: 1339184 - DNA, 15 bp, Homo sapiens
ttatggttaatatct

SEQ ID NO: 1339185 - DNA, 15 bp, Homo sapiens
cttatggttaatatc

SEQ ID NO: 1339186 - DNA, 15 bp, Homo sapiens
tcttatggttaatat

SEQ ID NO: 1339187 - DNA, 15 bp, Homo sapiens
ttcttatggttaata

SEQ ID NO: 1339188 - DNA, 15 bp, Homo sapiens
gttcttatggttaat

SEQ ID NO: 1339189 - DNA, 15 bp, Homo sapiens
agttcttatggttaa

SEQ ID NO: 1339190 - DNA, 15 bp, Homo sapiens
aagttcttatggtta

SEQ ID NO: 1339191 - DNA, 15 bp, Homo sapiens
taagttcttatggtt

SEQ ID NO: 1339192 - DNA, 15 bp, Homo sapiens
ttaagttcttatggt

SEQ ID NO: 1339193 - DNA, 15 bp, Homo sapiens
attaagttcttatgg

SEQ ID NO: 1339194 - DNA, 15 bp, Homo sapiens
aattaagttcttatg

SEQ ID NO: 1339195 - DNA, 15 bp, Homo sapiens
gaattaagttcttat

SEQ ID NO: 1339196 - DNA, 15 bp, Homo sapiens
agaattaagttctta

SEQ ID NO: 1339197 - DNA, 15 bp, Homo sapiens
cagaattaagttctt

SEQ ID NO: 1339198 - DNA, 15 bp, Homo sapiens
ccagaattaagttct

SEQ ID NO: 1339199 - DNA, 15 bp, Homo sapiens
accagaattaagttc

SEQ ID NO: 1339200 - DNA, 15 bp, Homo sapiens
aaccagaattaagtt

SEQ ID NO: 1339201 - DNA, 15 bp, Homo sapiens
caaccagaattaagt

SEQ ID NO: 1339202 - DNA, 15 bp, Homo sapiens
acaaccagaattaag

SEQ ID NO: 1339203 - DNA, 15 bp, Homo sapiens
aacaaccagaattaa

SEQ ID NO: 1339204 - DNA, 15 bp, Homo sapiens
taacaaccagaatta

SEQ ID NO: 1339205 - DNA, 15 bp, Homo sapiens
ttaacaaccagaatt

SEQ ID NO: 1339206 - DNA, 15 bp, Homo sapiens
attaacaaccagaat

SEQ ID NO: 1339207 - DNA, 15 bp, Homo sapiens
aattaacaaccagaa

SEQ ID NO: 1339208 - DNA, 15 bp, Homo sapiens
taattaacaaccaga

SEQ ID NO: 1339209 - DNA, 15 bp, Homo sapiens
ttaattaacaaccag

SEQ ID NO: 1339210 - DNA, 15 bp, Homo sapiens
attaattaacaacca

SEQ ID NO: 1339211 - DNA, 15 bp, Homo sapiens
aattaattaacaacc

SEQ ID NO: 1339212 - DNA, 15 bp, Homo sapiens
taattaattaacaac

SEQ ID NO: 1339213 - DNA, 15 bp, Homo sapiens
ctaattaattaacaa

SEQ ID NO: 1339214 - DNA, 15 bp, Homo sapiens
tctaattaattaaca

SEQ ID NO: 1339215 - DNA, 15 bp, Homo sapiens
gtctaattaattaac

SEQ ID NO: 1339216 - DNA, 15 bp, Homo sapiens
agtctaattaattaa

SEQ ID NO: 1339217 - DNA, 15 bp, Homo sapiens
gagtctaattaatta

SEQ ID NO: 1339218 - DNA, 15 bp, Homo sapiens
agagtctaattaatt

SEQ ID NO: 1339219 - DNA, 15 bp, Homo sapiens
aagagtctaattaat

SEQ ID NO: 1339220 - DNA, 15 bp, Homo sapiens
caagagtctaattaa

SEQ ID NO: 1339221 - DNA, 15 bp, Homo sapiens
tcaagagtctaatta

SEQ ID NO: 1339222 - DNA, 15 bp, Homo sapiens
ttcaagagtctaatt

SEQ ID NO: 1339223 - DNA, 15 bp, Homo sapiens
tttcaagagtctaat

SEQ ID NO: 1339224 - DNA, 15 bp, Homo sapiens
atttcaagagtctaa

SEQ ID NO: 1339225 - DNA, 15 bp, Homo sapiens
tatttcaagagtcta

SEQ ID NO: 1339226 - DNA, 15 bp, Homo sapiens
atatttcaagagtct

SEQ ID NO: 1339227 - DNA, 15 bp, Homo sapiens
tatatttcaagagtc

SEQ ID NO: 1339228 - DNA, 15 bp, Homo sapiens
atatatttcaagagt

SEQ ID NO: 1339229 - DNA, 15 bp, Homo sapiens
tatatatttcaagag

SEQ ID NO: 1339230 - DNA, 15 bp, Homo sapiens
gtatatatttcaaga

SEQ ID NO: 1339231 - DNA, 15 bp, Homo sapiens
agtatatatttcaag

SEQ ID NO: 1339232 - DNA, 15 bp, Homo sapiens
aagtatatatttcaa

SEQ ID NO: 1339233 - DNA, 15 bp, Homo sapiens
taagtatatatttca

SEQ ID NO: 1339234 - DNA, 15 bp, Homo sapiens
gtaagtatatatttc

SEQ ID NO: 1339235 - DNA, 15 bp, Homo sapiens
tgtaagtatatattt

SEQ ID NO: 1339236 - DNA, 15 bp, Homo sapiens
ctgtaagtatatatt

SEQ ID NO: 1339237 - DNA, 15 bp, Homo sapiens
gctgtaagtatatat

SEQ ID NO: 1339238 - DNA, 15 bp, Homo sapiens
agctgtaagtatata

SEQ ID NO: 1339239 - DNA, 15 bp, Homo sapiens
cagctgtaagtatat

SEQ ID NO: 1339240 - DNA, 15 bp, Homo sapiens
tcagctgtaagtata

SEQ ID NO: 1339241 - DNA, 15 bp, Homo sapiens
ttcagctgtaagtat

SEQ ID NO: 1339242 - DNA, 15 bp, Homo sapiens
cttcagctgtaagta

SEQ ID NO: 1339243 - DNA, 15 bp, Homo sapiens
ccttcagctgtaagt

SEQ ID NO: 1339244 - DNA, 15 bp, Homo sapiens
cccttcagctgtaag

SEQ ID NO: 1339245 - DNA, 15 bp, Homo sapiens
ccccttcagctgtaa

SEQ ID NO: 1339246 - DNA, 15 bp, Homo sapiens
cccccttcagctgta

SEQ ID NO: 1339247 - DNA, 15 bp, Homo sapiens
acccccttcagctgt

SEQ ID NO: 1339248 - DNA, 15 bp, Homo sapiens
gacccccttcagctg

SEQ ID NO: 1339249 - DNA, 15 bp, Homo sapiens
agacccccttcagct

SEQ ID NO: 1339250 - DNA, 15 bp, Homo sapiens
aagacccccttcagc

SEQ ID NO: 1339251 - DNA, 15 bp, Homo sapiens
gaagacccccttcag

SEQ ID NO: 1339252 - DNA, 15 bp, Homo sapiens
ggaagacccccttca

SEQ ID NO: 1339253 - DNA, 15 bp, Homo sapiens
gggaagacccccttc

SEQ ID NO: 1339254 - DNA, 15 bp, Homo sapiens
tgggaagaccccctt

SEQ ID NO: 1339255 - DNA, 15 bp, Homo sapiens
ttgggaagaccccct

SEQ ID NO: 1339256 - DNA, 15 bp, Homo sapiens
gttgggaagaccccc

SEQ ID NO: 1339257 - DNA, 15 bp, Homo sapiens
agttgggaagacccc

SEQ ID NO: 1339258 - DNA, 15 bp, Homo sapiens
gagttgggaagaccc

SEQ ID NO: 1339259 - DNA, 15 bp, Homo sapiens
agagttgggaagacc

SEQ ID NO: 1339260 - DNA, 15 bp, Homo sapiens
aagagttgggaagac

SEQ ID NO: 1339261 - DNA, 15 bp, Homo sapiens
gaagagttgggaaga

SEQ ID NO: 1339262 - DNA, 15 bp, Homo sapiens
tgaagagttgggaag

SEQ ID NO: 1339263 - DNA, 15 bp, Homo sapiens
atgaagagttgggaa

SEQ ID NO: 1339264 - DNA, 15 bp, Homo sapiens
aatgaagagttggga

SEQ ID NO: 1339265 - DNA, 15 bp, Homo sapiens
taatgaagagttggg

SEQ ID NO: 1339266 - DNA, 15 bp, Homo sapiens
ctaatgaagagttgg

SEQ ID NO: 1339267 - DNA, 15 bp, Homo sapiens
tctaatgaagagttg

SEQ ID NO: 1339268 - DNA, 15 bp, Homo sapiens
atctaatgaagagtt

SEQ ID NO: 1339269 - DNA, 15 bp, Homo sapiens
gatctaatgaagagt

SEQ ID NO: 1339270 - DNA, 15 bp, Homo sapiens
agatctaatgaagag

SEQ ID NO: 1339271 - DNA, 15 bp, Homo sapiens
aagatctaatgaaga

SEQ ID NO: 1339272 - DNA, 15 bp, Homo sapiens
gaagatctaatgaag

SEQ ID NO: 1339273 - DNA, 15 bp, Homo sapiens
ggaagatctaatgaa

SEQ ID NO: 1339274 - DNA, 15 bp, Homo sapiens
aggaagatctaatga

SEQ ID NO: 1339275 - DNA, 15 bp, Homo sapiens
taggaagatctaatg

SEQ ID NO: 1339276 - DNA, 15 bp, Homo sapiens
ttaggaagatctaat

SEQ ID NO: 1339277 - DNA, 15 bp, Homo sapiens
attaggaagatctaa

SEQ ID NO: 1339278 - DNA, 15 bp, Homo sapiens
gattaggaagatcta

SEQ ID NO: 1339279 - DNA, 15 bp, Homo sapiens
agattaggaagatct

SEQ ID NO: 1339280 - DNA, 15 bp, Homo sapiens
gagattaggaagatc

SEQ ID NO: 1339281 - DNA, 15 bp, Homo sapiens
tgagattaggaagat

SEQ ID NO: 1339282 - DNA, 15 bp, Homo sapiens
atgagattaggaaga

SEQ ID NO: 1339283 - DNA, 15 bp, Homo sapiens
aatgagattaggaag

SEQ ID NO: 1339284 - DNA, 15 bp, Homo sapiens
caatgagattaggaa

SEQ ID NO: 1339285 - DNA, 15 bp, Homo sapiens
ccaatgagattagga

SEQ ID NO: 1339286 - DNA, 15 bp, Homo sapiens
cccaatgagattagg

SEQ ID NO: 1339287 - DNA, 15 bp, Homo sapiens
tcccaatgagattag

SEQ ID NO: 1339288 - DNA, 15 bp, Homo sapiens
atcccaatgagatta

SEQ ID NO: 1339289 - DNA, 15 bp, Homo sapiens
tatcccaatgagatt

SEQ ID NO: 1339290 - DNA, 15 bp, Homo sapiens
atatcccaatgagat

SEQ ID NO: 1339291 - DNA, 15 bp, Homo sapiens
tatatcccaatgaga

SEQ ID NO: 1339292 - DNA, 15 bp, Homo sapiens
ctatatcccaatgag

SEQ ID NO: 1339293 - DNA, 15 bp, Homo sapiens
gctatatcccaatga

SEQ ID NO: 1339294 - DNA, 15 bp, Homo sapiens
tgctatatcccaatg

SEQ ID NO: 1339295 - DNA, 15 bp, Homo sapiens
atgctatatcccaat

SEQ ID NO: 1339296 - DNA, 15 bp, Homo sapiens
aatgctatatcccaa

SEQ ID NO: 1339297 - DNA, 15 bp, Homo sapiens
taatgctatatccca

SEQ ID NO: 1339298 - DNA, 15 bp, Homo sapiens
ttaatgctatatccc

SEQ ID NO: 1339299 - DNA, 15 bp, Homo sapiens
attaatgctatatcc

SEQ ID NO: 1339300 - DNA, 15 bp, Homo sapiens
aattaatgctatatc

SEQ ID NO: 1339301 - DNA, 15 bp, Homo sapiens
gaattaatgctatat

SEQ ID NO: 1339302 - DNA, 15 bp, Homo sapiens
agaattaatgctata

SEQ ID NO: 1339303 - DNA, 15 bp, Homo sapiens
cagaattaatgctat

SEQ ID NO: 1339304 - DNA, 15 bp, Homo sapiens
tcagaattaatgcta

SEQ ID NO: 1339305 - DNA, 15 bp, Homo sapiens
ctcagaattaatgct

SEQ ID NO: 1339306 - DNA, 15 bp, Homo sapiens
actcagaattaatgc

SEQ ID NO: 1339307 - DNA, 15 bp, Homo sapiens
cactcagaattaatg

SEQ ID NO: 1339308 - DNA, 15 bp, Homo sapiens
acactcagaattaat

SEQ ID NO: 1339309 - DNA, 15 bp, Homo sapiens
tacactcagaattaa

SEQ ID NO: 1339310 - DNA, 15 bp, Homo sapiens
gtacactcagaatta

SEQ ID NO: 1339311 - DNA, 15 bp, Homo sapiens
ggtacactcagaatt

SEQ ID NO: 1339312 - DNA, 15 bp, Homo sapiens
cggtacactcagaat

SEQ ID NO: 1339313 - DNA, 15 bp, Homo sapiens
tcggtacactcagaa

SEQ ID NO: 1339314 - DNA, 15 bp, Homo sapiens
ctcggtacactcaga

SEQ ID NO: 1339315 - DNA, 15 bp, Homo sapiens
tctcggtacactcag

SEQ ID NO: 1339316 - DNA, 15 bp, Homo sapiens
ttctcggtacactca

SEQ ID NO: 1339317 - DNA, 15 bp, Homo sapiens
attctcggtacactc

SEQ ID NO: 1339318 - DNA, 15 bp, Homo sapiens
cattctcggtacact

SEQ ID NO: 1339319 - DNA, 15 bp, Homo sapiens
tcattctcggtacac

SEQ ID NO: 1339320 - DNA, 15 bp, Homo sapiens
ttcattctcggtaca

SEQ ID NO: 1339321 - DNA, 15 bp, Homo sapiens
tttcattctcggtac

SEQ ID NO: 1339322 - DNA, 15 bp, Homo sapiens
atttcattctcggta

SEQ ID NO: 1339323 - DNA, 15 bp, Homo sapiens
tatttcattctcggt

SEQ ID NO: 1339324 - DNA, 15 bp, Homo sapiens
gtatttcattctcgg

SEQ ID NO: 1339325 - DNA, 15 bp, Homo sapiens
ggtatttcattctcg

SEQ ID NO: 1339326 - DNA, 15 bp, Homo sapiens
tggtatttcattctc

SEQ ID NO: 1339327 - DNA, 15 bp, Homo sapiens
atggtatttcattct

SEQ ID NO: 1339328 - DNA, 15 bp, Homo sapiens
aatggtatttcattc

SEQ ID NO: 1339329 - DNA, 15 bp, Homo sapiens
taatggtatttcatt

SEQ ID NO: 1339330 - DNA, 15 bp, Homo sapiens
ttaatggtatttcat

SEQ ID NO: 1339331 - DNA, 15 bp, Homo sapiens
tttaatggtatttca

SEQ ID NO: 1339332 - DNA, 15 bp, Homo sapiens
atttaatggtatttc

SEQ ID NO: 1339333 - DNA, 15 bp, Homo sapiens
aatttaatggtattt

SEQ ID NO: 1339334 - DNA, 15 bp, Homo sapiens
caatttaatggtatt

SEQ ID NO: 1339335 - DNA, 15 bp, Homo sapiens
gcaatttaatggtat

SEQ ID NO: 1339336 - DNA, 15 bp, Homo sapiens
tgcaatttaatggta

SEQ ID NO: 1339337 - DNA, 15 bp, Homo sapiens
atgcaatttaatggt

SEQ ID NO: 1339338 - DNA, 15 bp, Homo sapiens
aatgcaatttaatgg

SEQ ID NO: 1339339 - DNA, 15 bp, Homo sapiens
aaatgcaatttaatg

SEQ ID NO: 1339340 - DNA, 15 bp, Homo sapiens
aaaatgcaatttaat

SEQ ID NO: 1339341 - DNA, 15 bp, Homo sapiens
gaaaatgcaatttaa

SEQ ID NO: 1339342 - DNA, 15 bp, Homo sapiens
agaaaatgcaattta

SEQ ID NO: 1339343 - DNA, 15 bp, Homo sapiens
aagaaaatgcaattt

SEQ ID NO: 1339344 - DNA, 15 bp, Homo sapiens
taagaaaatgcaatt

SEQ ID NO: 1339345 - DNA, 15 bp, Homo sapiens
gtaagaaaatgcaat

SEQ ID NO: 1339346 - DNA, 15 bp, Homo sapiens
agtaagaaaatgcaa

SEQ ID NO: 1339347 - DNA, 15 bp, Homo sapiens
aagtaagaaaatgca

SEQ ID NO: 1339348 - DNA, 15 bp, Homo sapiens
aaagtaagaaaatgc

SEQ ID NO: 1339349 - DNA, 15 bp, Homo sapiens
caaagtaagaaaatg

SEQ ID NO: 1339350 - DNA, 15 bp, Homo sapiens
gcaaagtaagaaaat

SEQ ID NO: 1339351 - DNA, 15 bp, Homo sapiens
tgcaaagtaagaaaa

SEQ ID NO: 1339352 - DNA, 15 bp, Homo sapiens
ttgcaaagtaagaaa

SEQ ID NO: 1339353 - DNA, 15 bp, Homo sapiens
tttgcaaagtaagaa

SEQ ID NO: 1339354 - DNA, 15 bp, Homo sapiens
ttttgcaaagtaaga

SEQ ID NO: 1339355 - DNA, 15 bp, Homo sapiens
tttttgcaaagtaag

SEQ ID NO: 1339356 - DNA, 15 bp, Homo sapiens
ttttttgcaaagtaa

SEQ ID NO: 1339357 - DNA, 15 bp, Homo sapiens
gttttttgcaaagta

SEQ ID NO: 1339358 - DNA, 15 bp, Homo sapiens
ggttttttgcaaagt

SEQ ID NO: 1339359 - DNA, 15 bp, Homo sapiens
gggttttttgcaaag

SEQ ID NO: 1339360 - DNA, 15 bp, Homo sapiens
agggttttttgcaaa

SEQ ID NO: 1339361 - DNA, 15 bp, Homo sapiens
gagggttttttgcaa

SEQ ID NO: 1339362 - DNA, 15 bp, Homo sapiens
tgagggttttttgca

SEQ ID NO: 1339363 - DNA, 15 bp, Homo sapiens
gtgagggttttttgc

SEQ ID NO: 1339364 - DNA, 15 bp, Homo sapiens
tgtgagggttttttg

SEQ ID NO: 1339365 - DNA, 15 bp, Homo sapiens
ctgtgagggtttttt

SEQ ID NO: 1339366 - DNA, 15 bp, Homo sapiens
tctgtgagggttttt

SEQ ID NO: 1339367 - DNA, 15 bp, Homo sapiens
ttctgtgagggtttt

SEQ ID NO: 1339368 - DNA, 15 bp, Homo sapiens
attctgtgagggttt

SEQ ID NO: 1339369 - DNA, 15 bp, Homo sapiens
cattctgtgagggtt

SEQ ID NO: 1339370 - DNA, 15 bp, Homo sapiens
gcattctgtgagggt

SEQ ID NO: 1339371 - DNA, 15 bp, Homo sapiens
agcattctgtgaggg

SEQ ID NO: 1339372 - DNA, 15 bp, Homo sapiens
tagcattctgtgagg

SEQ ID NO: 1339373 - DNA, 15 bp, Homo sapiens
ttagcattctgtgag

SEQ ID NO: 1339374 - DNA, 15 bp, Homo sapiens
gttagcattctgtga

SEQ ID NO: 1339375 - DNA, 15 bp, Homo sapiens
agttagcattctgtg

SEQ ID NO: 1339376 - DNA, 15 bp, Homo sapiens
gagttagcattctgt

SEQ ID NO: 1339377 - DNA, 15 bp, Homo sapiens
tgagttagcattctg

SEQ ID NO: 1339378 - DNA, 15 bp, Homo sapiens
atgagttagcattct

SEQ ID NO: 1339379 - DNA, 15 bp, Homo sapiens
aatgagttagcattc

SEQ ID NO: 1339380 - DNA, 15 bp, Homo sapiens
taatgagttagcatt

SEQ ID NO: 1339381 - DNA, 15 bp, Homo sapiens
gtaatgagttagcat

SEQ ID NO: 1339382 - DNA, 15 bp, Homo sapiens
agtaatgagttagca

SEQ ID NO: 1339383 - DNA, 15 bp, Homo sapiens
aagtaatgagttagc

SEQ ID NO: 1339384 - DNA, 15 bp, Homo sapiens
gaagtaatgagttag

SEQ ID NO: 1339385 - DNA, 15 bp, Homo sapiens
tgaagtaatgagtta

SEQ ID NO: 1339386 - DNA, 15 bp, Homo sapiens
ctgaagtaatgagtt

SEQ ID NO: 1339387 - DNA, 15 bp, Homo sapiens
tctgaagtaatgagt

SEQ ID NO: 1339388 - DNA, 15 bp, Homo sapiens
ttctgaagtaatgag

SEQ ID NO: 1339389 - DNA, 15 bp, Homo sapiens
tttctgaagtaatga

SEQ ID NO: 1339390 - DNA, 15 bp, Homo sapiens
ttttctgaagtaatg

SEQ ID NO: 1339391 - DNA, 15 bp, Homo sapiens
attttctgaagtaat

SEQ ID NO: 1339392 - DNA, 15 bp, Homo sapiens
tattttctgaagtaa

SEQ ID NO: 1339393 - DNA, 15 bp, Homo sapiens
ttattttctgaagta

SEQ ID NO: 1339394 - DNA, 15 bp, Homo sapiens
tttattttctgaagt

SEQ ID NO: 1339395 - DNA, 15 bp, Homo sapiens
atttattttctgaag

SEQ ID NO: 1339396 - DNA, 15 bp, Homo sapiens
catttattttctgaa

SEQ ID NO: 1339397 - DNA, 15 bp, Homo sapiens
tcatttattttctga

SEQ ID NO: 1339398 - DNA, 15 bp, Homo sapiens
ctcatttattttctg

SEQ ID NO: 1339399 - DNA, 15 bp, Homo sapiens
tctcatttattttct

SEQ ID NO: 1339400 - DNA, 15 bp, Homo sapiens
atctcatttattttc

SEQ ID NO: 1339401 - DNA, 15 bp, Homo sapiens
aatctcatttatttt

SEQ ID NO: 1339402 - DNA, 15 bp, Homo sapiens
aaatctcatttattt

SEQ ID NO: 1339403 - DNA, 15 bp, Homo sapiens
aaaatctcatttatt

SEQ ID NO: 1339404 - DNA, 15 bp, Homo sapiens
caaaatctcatttat

SEQ ID NO: 1339405 - DNA, 15 bp, Homo sapiens
tcaaaatctcattta

SEQ ID NO: 1339406 - DNA, 15 bp, Homo sapiens
ttcaaaatctcattt

SEQ ID NO: 1339407 - DNA, 15 bp, Homo sapiens
attcaaaatctcatt

SEQ ID NO: 1339408 - DNA, 15 bp, Homo sapiens
aattcaaaatctcat

SEQ ID NO: 1339409 - DNA, 15 bp, Homo sapiens
taattcaaaatctca

SEQ ID NO: 1339410 - DNA, 15 bp, Homo sapiens
gtaattcaaaatctc

SEQ ID NO: 1339411 - DNA, 15 bp, Homo sapiens
agtaattcaaaatct

SEQ ID NO: 1339412 - DNA, 15 bp, Homo sapiens
aagtaattcaaaatc

SEQ ID NO: 1339413 - DNA, 15 bp, Homo sapiens
caagtaattcaaaat

SEQ ID NO: 1339414 - DNA, 15 bp, Homo sapiens
tcaagtaattcaaaa

SEQ ID NO: 1339415 - DNA, 15 bp, Homo sapiens
atcaagtaattcaaa

SEQ ID NO: 1339416 - DNA, 15 bp, Homo sapiens
tatcaagtaattcaa

SEQ ID NO: 1339417 - DNA, 15 bp, Homo sapiens
ttatcaagtaattca

SEQ ID NO: 1339418 - DNA, 15 bp, Homo sapiens
cttatcaagtaattc

SEQ ID NO: 1339419 - DNA, 15 bp, Homo sapiens
acttatcaagtaatt

SEQ ID NO: 1339420 - DNA, 15 bp, Homo sapiens
aacttatcaagtaat

SEQ ID NO: 1339421 - DNA, 15 bp, Homo sapiens
caacttatcaagtaa

SEQ ID NO: 1339422 - DNA, 15 bp, Homo sapiens
tcaacttatcaagta

SEQ ID NO: 1339423 - DNA, 15 bp, Homo sapiens
gtcaacttatcaagt

SEQ ID NO: 1339424 - DNA, 15 bp, Homo sapiens
agtcaacttatcaag

SEQ ID NO: 1339425 - DNA, 15 bp, Homo sapiens
aagtcaacttatcaa

SEQ ID NO: 1339426 - DNA, 15 bp, Homo sapiens
aaagtcaacttatca

SEQ ID NO: 1339427 - DNA, 15 bp, Homo sapiens
taaagtcaacttatc

SEQ ID NO: 1339428 - DNA, 15 bp, Homo sapiens
ttaaagtcaacttat

SEQ ID NO: 1339429 - DNA, 15 bp, Homo sapiens
cttaaagtcaactta

SEQ ID NO: 1339430 - DNA, 15 bp, Homo sapiens
gcttaaagtcaactt

SEQ ID NO: 1339431 - DNA, 15 bp, Homo sapiens
ggcttaaagtcaact

SEQ ID NO: 1339432 - DNA, 15 bp, Homo sapiens
aggcttaaagtcaac

SEQ ID NO: 1339433 - DNA, 15 bp, Homo sapiens
aaggcttaaagtcaa

SEQ ID NO: 1339434 - DNA, 15 bp, Homo sapiens
aaaggcttaaagtca

SEQ ID NO: 1339435 - DNA, 15 bp, Homo sapiens
aaaaggcttaaagtc

SEQ ID NO: 1339436 - DNA, 15 bp, Homo sapiens
gaaaaggcttaaagt

SEQ ID NO: 1339437 - DNA, 15 bp, Homo sapiens
ggaaaaggcttaaag

SEQ ID NO: 1339438 - DNA, 15 bp, Homo sapiens
gggaaaaggcttaaa

SEQ ID NO: 1339439 - DNA, 15 bp, Homo sapiens
ggggaaaaggcttaa

SEQ ID NO: 1339440 - DNA, 15 bp, Homo sapiens
gggggaaaaggctta

SEQ ID NO: 1339441 - DNA, 15 bp, Homo sapiens
agggggaaaaggctt

SEQ ID NO: 1339442 - DNA, 15 bp, Homo sapiens
aagggggaaaaggct

SEQ ID NO: 1339443 - DNA, 15 bp, Homo sapiens
taagggggaaaaggc

SEQ ID NO: 1339444 - DNA, 15 bp, Homo sapiens
ataagggggaaaagg

SEQ ID NO: 1339445 - DNA, 15 bp, Homo sapiens
aataagggggaaaag

SEQ ID NO: 1339446 - DNA, 15 bp, Homo sapiens
caataagggggaaaa

SEQ ID NO: 1339447 - DNA, 15 bp, Homo sapiens
acaataagggggaaa

SEQ ID NO: 1339448 - DNA, 15 bp, Homo sapiens
tacaataagggggaa

SEQ ID NO: 1339449 - DNA, 15 bp, Homo sapiens
ctacaataaggggga

SEQ ID NO: 1339450 - DNA, 15 bp, Homo sapiens
cctacaataaggggg

SEQ ID NO: 1339451 - DNA, 15 bp, Homo sapiens
acctacaataagggg

SEQ ID NO: 1339452 - DNA, 15 bp, Homo sapiens
gacctacaataaggg

SEQ ID NO: 1339453 - DNA, 15 bp, Homo sapiens
ggacctacaataagg

SEQ ID NO: 1339454 - DNA, 15 bp, Homo sapiens
tggacctacaataag

SEQ ID NO: 1339455 - DNA, 15 bp, Homo sapiens
atggacctacaataa

SEQ ID NO: 1339456 - DNA, 15 bp, Homo sapiens
tatggacctacaata

SEQ ID NO: 1339457 - DNA, 15 bp, Homo sapiens
atatggacctacaat

SEQ ID NO: 1339458 - DNA, 15 bp, Homo sapiens
tatatggacctacaa

SEQ ID NO: 1339459 - DNA, 15 bp, Homo sapiens
gtatatggacctaca

SEQ ID NO: 1339460 - DNA, 15 bp, Homo sapiens
agtatatggacctac

SEQ ID NO: 1339461 - DNA, 15 bp, Homo sapiens
aagtatatggaccta

SEQ ID NO: 1339462 - DNA, 15 bp, Homo sapiens
aaagtatatggacct

SEQ ID NO: 1339463 - DNA, 15 bp, Homo sapiens
aaaagtatatggacc

SEQ ID NO: 1339464 - DNA, 15 bp, Homo sapiens
caaaagtatatggac

SEQ ID NO: 1339465 - DNA, 15 bp, Homo sapiens
acaaaagtatatgga

SEQ ID NO: 1339466 - DNA, 15 bp, Homo sapiens
aacaaaagtatatgg

SEQ ID NO: 1339467 - DNA, 15 bp, Homo sapiens
gaacaaaagtatatg

SEQ ID NO: 1339468 - DNA, 15 bp, Homo sapiens
tgaacaaaagtatat

SEQ ID NO: 1339469 - DNA, 15 bp, Homo sapiens
ctgaacaaaagtata

SEQ ID NO: 1339470 - DNA, 15 bp, Homo sapiens
gctgaacaaaagtat

SEQ ID NO: 1339471 - DNA, 15 bp, Homo sapiens
tgctgaacaaaagta

SEQ ID NO: 1339472 - DNA, 15 bp, Homo sapiens
ttgctgaacaaaagt

SEQ ID NO: 1339473 - DNA, 15 bp, Homo sapiens
gttgctgaacaaaag

SEQ ID NO: 1339474 - DNA, 15 bp, Homo sapiens
tgttgctgaacaaaa

SEQ ID NO: 1339475 - DNA, 15 bp, Homo sapiens
atgttgctgaacaaa

SEQ ID NO: 1339476 - DNA, 15 bp, Homo sapiens
gatgttgctgaacaa

SEQ ID NO: 1339477 - DNA, 15 bp, Homo sapiens
agatgttgctgaaca

SEQ ID NO: 1339478 - DNA, 15 bp, Homo sapiens
aagatgttgctgaac

SEQ ID NO: 1339479 - DNA, 15 bp, Homo sapiens
taagatgttgctgaa

SEQ ID NO: 1339480 - DNA, 15 bp, Homo sapiens
ataagatgttgctga

SEQ ID NO: 1339481 - DNA, 15 bp, Homo sapiens
cataagatgttgctg

SEQ ID NO: 1339482 - DNA, 15 bp, Homo sapiens
tcataagatgttgct

SEQ ID NO: 1339483 - DNA, 15 bp, Homo sapiens
atcataagatgttgc

SEQ ID NO: 1339484 - DNA, 15 bp, Homo sapiens
aatcataagatgttg

SEQ ID NO: 1339485 - DNA, 15 bp, Homo sapiens
caatcataagatgtt

SEQ ID NO: 1339486 - DNA, 15 bp, Homo sapiens
ccaatcataagatgt

SEQ ID NO: 1339487 - DNA, 15 bp, Homo sapiens
gccaatcataagatg

SEQ ID NO: 1339488 - DNA, 15 bp, Homo sapiens
tgccaatcataagat

SEQ ID NO: 1339489 - DNA, 15 bp, Homo sapiens
gtgccaatcataaga

SEQ ID NO: 1339490 - DNA, 15 bp, Homo sapiens
tgtgccaatcataag

SEQ ID NO: 1339491 - DNA, 15 bp, Homo sapiens
ctgtgccaatcataa

SEQ ID NO: 1339492 - DNA, 15 bp, Homo sapiens
tctgtgccaatcata

SEQ ID NO: 1339493 - DNA, 15 bp, Homo sapiens
atctgtgccaatcat

SEQ ID NO: 1339494 - DNA, 15 bp, Homo sapiens
gatctgtgccaatca

SEQ ID NO: 1339495 - DNA, 15 bp, Homo sapiens
ggatctgtgccaatc

SEQ ID NO: 1339496 - DNA, 15 bp, Homo sapiens
aggatctgtgccaat

SEQ ID NO: 1339497 - DNA, 15 bp, Homo sapiens
gaggatctgtgccaa

SEQ ID NO: 1339498 - DNA, 15 bp, Homo sapiens
cgaggatctgtgcca

SEQ ID NO: 1339499 - DNA, 15 bp, Homo sapiens
tcgaggatctgtgcc

SEQ ID NO: 1339500 - DNA, 15 bp, Homo sapiens
ttcgaggatctgtgc

SEQ ID NO: 1339501 - DNA, 15 bp, Homo sapiens
gttcgaggatctgtg

SEQ ID NO: 1339502 - DNA, 15 bp, Homo sapiens
tgttcgaggatctgt

SEQ ID NO: 1339503 - DNA, 15 bp, Homo sapiens
ttgttcgaggatctg

SEQ ID NO: 1339504 - DNA, 15 bp, Homo sapiens
attgttcgaggatct

SEQ ID NO: 1339505 - DNA, 15 bp, Homo sapiens
aattgttcgaggatc

SEQ ID NO: 1339506 - DNA, 15 bp, Homo sapiens
gaattgttcgaggat

SEQ ID NO: 1339507 - DNA, 15 bp, Homo sapiens
agaattgttcgagga

SEQ ID NO: 1339508 - DNA, 15 bp, Homo sapiens
aagaattgttcgagg

SEQ ID NO: 1339509 - DNA, 15 bp, Homo sapiens
taagaattgttcgag

SEQ ID NO: 1339510 - DNA, 15 bp, Homo sapiens
ttaagaattgttcga

SEQ ID NO: 1339511 - DNA, 15 bp, Homo sapiens
tttaagaattgttcg

SEQ ID NO: 1339512 - DNA, 15 bp, Homo sapiens
ctttaagaattgttc

SEQ ID NO: 1339513 - DNA, 15 bp, Homo sapiens
tctttaagaattgtt

SEQ ID NO: 1339514 - DNA, 15 bp, Homo sapiens
atctttaagaattgt

SEQ ID NO: 1339515 - DNA, 15 bp, Homo sapiens
aatctttaagaattg

SEQ ID NO: 1339516 - DNA, 15 bp, Homo sapiens
aaatctttaagaatt

SEQ ID NO: 1339517 - DNA, 15 bp, Homo sapiens
taaatctttaagaat

SEQ ID NO: 1339518 - DNA, 15 bp, Homo sapiens
ataaatctttaagaa

SEQ ID NO: 1339519 - DNA, 15 bp, Homo sapiens
aataaatctttaaga

SEQ ID NO: 1339520 - DNA, 15 bp, Homo sapiens
caataaatctttaag

SEQ ID NO: 1339521 - DNA, 15 bp, Homo sapiens
gcaataaatctttaa

SEQ ID NO: 1339522 - DNA, 15 bp, Homo sapiens
ggcaataaatcttta

SEQ ID NO: 1339523 - DNA, 15 bp, Homo sapiens
cggcaataaatcttt

SEQ ID NO: 1339524 - DNA, 15 bp, Homo sapiens
ccggcaataaatctt

SEQ ID NO: 1339525 - DNA, 15 bp, Homo sapiens
tccggcaataaatct

SEQ ID NO: 1339526 - DNA, 15 bp, Homo sapiens
ttccggcaataaatc

SEQ ID NO: 1339527 - DNA, 15 bp, Homo sapiens
tttccggcaataaat

SEQ ID NO: 1339528 - DNA, 15 bp, Homo sapiens
gtttccggcaataaa

SEQ ID NO: 1339529 - DNA, 15 bp, Homo sapiens
tgtttccggcaataa

SEQ ID NO: 1339530 - DNA, 15 bp, Homo sapiens
ttgtttccggcaata

SEQ ID NO: 1339531 - DNA, 15 bp, Homo sapiens
attgtttccggcaat

SEQ ID NO: 1339532 - DNA, 15 bp, Homo sapiens
tattgtttccggcaa

SEQ ID NO: 1339533 - DNA, 15 bp, Homo sapiens
gtattgtttccggca

SEQ ID NO: 1339534 - DNA, 15 bp, Homo sapiens
ggtattgtttccggc

SEQ ID NO: 1339535 - DNA, 15 bp, Homo sapiens
aggtattgtttccgg

SEQ ID NO: 1339536 - DNA, 15 bp, Homo sapiens
gaggtattgtttccg

SEQ ID NO: 1339537 - DNA, 15 bp, Homo sapiens
ggaggtattgtttcc

SEQ ID NO: 1339538 - DNA, 15 bp, Homo sapiens
tggaggtattgtttc

SEQ ID NO: 1339539 - DNA, 15 bp, Homo sapiens
gtggaggtattgttt

SEQ ID NO: 1339540 - DNA, 15 bp, Homo sapiens
ggtggaggtattgtt

SEQ ID NO: 1339541 - DNA, 15 bp, Homo sapiens
aggtggaggtattgt

SEQ ID NO: 1339542 - DNA, 15 bp, Homo sapiens
ggtcttggatctttt

SEQ ID NO: 1339543 - DNA, 15 bp, Homo sapiens
tggtcttggatcttt

SEQ ID NO: 1339544 - DNA, 15 bp, Homo sapiens
atggtcttggatctt

SEQ ID NO: 1339545 - DNA, 15 bp, Homo sapiens
aatggtcttggatct

SEQ ID NO: 1339546 - DNA, 15 bp, Homo sapiens
gaatggtcttggatc

SEQ ID NO: 1339547 - DNA, 15 bp, Homo sapiens
agaatggtcttggat

SEQ ID NO: 1339548 - DNA, 15 bp, Homo sapiens
aagaatggtcttgga

SEQ ID NO: 1339549 - DNA, 15 bp, Homo sapiens
gaagaatggtcttgg

SEQ ID NO: 1339550 - DNA, 15 bp, Homo sapiens
tgaagaatggtcttg

SEQ ID NO: 1339551 - DNA, 15 bp, Homo sapiens
ttgaagaatggtctt

SEQ ID NO: 1339552 - DNA, 15 bp, Homo sapiens
cttgaagaatggtct

SEQ ID NO: 1339553 - DNA, 15 bp, Homo sapiens
acttgaagaatggtc

SEQ ID NO: 1339554 - DNA, 15 bp, Homo sapiens
aacttgaagaatggt

SEQ ID NO: 1339555 - DNA, 15 bp, Homo sapiens
aaacttgaagaatgg

SEQ ID NO: 1339556 - DNA, 15 bp, Homo sapiens
caaacttgaagaatg

SEQ ID NO: 1339557 - DNA, 15 bp, Homo sapiens
gcaaacttgaagaat

SEQ ID NO: 1339558 - DNA, 15 bp, Homo sapiens
tgcaaacttgaagaa

SEQ ID NO: 1339559 - DNA, 15 bp, Homo sapiens
ttgcaaacttgaaga

SEQ ID NO: 1339560 - DNA, 15 bp, Homo sapiens
tttgcaaacttgaag

SEQ ID NO: 1339561 - DNA, 15 bp, Homo sapiens
ctttgcaaacttgaa

SEQ ID NO: 1339562 - DNA, 15 bp, Homo sapiens
cctttgcaaacttga

SEQ ID NO: 1339563 - DNA, 15 bp, Homo sapiens
acctttgcaaacttg

SEQ ID NO: 1339564 - DNA, 15 bp, Homo sapiens
tacctttgcaaactt

SEQ ID NO: 1339565 - DNA, 15 bp, Homo sapiens
gtacctttgcaaact

SEQ ID NO: 1339566 - DNA, 15 bp, Homo sapiens
agtacctttgcaaac

SEQ ID NO: 1339567 - DNA, 15 bp, Homo sapiens
tagtacctttgcaaa

SEQ ID NO: 1339568 - DNA, 15 bp, Homo sapiens
atagtacctttgcaa

SEQ ID NO: 1339569 - DNA, 15 bp, Homo sapiens
catagtacctttgca

SEQ ID NO: 1339570 - DNA, 15 bp, Homo sapiens
tcatagtacctttgc

SEQ ID NO: 1339571 - DNA, 15 bp, Homo sapiens
ttcatagtacctttg

SEQ ID NO: 1339572 - DNA, 15 bp, Homo sapiens
gttcatagtaccttt

SEQ ID NO: 1339573 - DNA, 15 bp, Homo sapiens
agttcatagtacctt

SEQ ID NO: 1339574 - DNA, 15 bp, Homo sapiens
gagttcatagtacct

SEQ ID NO: 1339575 - DNA, 15 bp, Homo sapiens
agagttcatagtacc

SEQ ID NO: 1339576 - DNA, 15 bp, Homo sapiens
aagagttcatagtac

SEQ ID NO: 1339577 - DNA, 15 bp, Homo sapiens
gaagagttcatagta

SEQ ID NO: 1339578 - DNA, 15 bp, Homo sapiens
agaagagttcatagt

SEQ ID NO: 1339579 - DNA, 15 bp, Homo sapiens
cagaagagttcatag

SEQ ID NO: 1339580 - DNA, 15 bp, Homo sapiens
ccagaagagttcata

SEQ ID NO: 1339581 - DNA, 15 bp, Homo sapiens
accagaagagttcat

SEQ ID NO: 1339582 - DNA, 15 bp, Homo sapiens
aaccagaagagttca

SEQ ID NO: 1339583 - DNA, 15 bp, Homo sapiens
caaccagaagagttc

SEQ ID NO: 1339584 - DNA, 15 bp, Homo sapiens
acaaccagaagagtt

SEQ ID NO: 1339585 - DNA, 15 bp, Homo sapiens
aacaaccagaagagt

SEQ ID NO: 1339586 - DNA, 15 bp, Homo sapiens
aaacaaccagaagag

SEQ ID NO: 1339587 - DNA, 15 bp, Homo sapiens
gaaacaaccagaaga

SEQ ID NO: 1339588 - DNA, 15 bp, Homo sapiens
agaaacaaccagaag

SEQ ID NO: 1339589 - DNA, 15 bp, Homo sapiens
aagaaacaaccagaa

SEQ ID NO: 1339590 - DNA, 15 bp, Homo sapiens
aaagaaacaaccaga

SEQ ID NO: 1339591 - DNA, 15 bp, Homo sapiens
caaagaaacaaccag

SEQ ID NO: 1339592 - DNA, 15 bp, Homo sapiens
ccaaagaaacaacca

SEQ ID NO: 1339593 - DNA, 15 bp, Homo sapiens
gccaaagaaacaacc

SEQ ID NO: 1339594 - DNA, 15 bp, Homo sapiens
ggccaaagaaacaac

SEQ ID NO: 1339595 - DNA, 15 bp, Homo sapiens
aggccaaagaaacaa

SEQ ID NO: 1339596 - DNA, 15 bp, Homo sapiens
aaggccaaagaaaca

SEQ ID NO: 1339597 - DNA, 15 bp, Homo sapiens
gaaggccaaagaaac

SEQ ID NO: 1339598 - DNA, 15 bp, Homo sapiens
agaaggccaaagaaa

SEQ ID NO: 1339599 - DNA, 15 bp, Homo sapiens
gagaaggccaaagaa

SEQ ID NO: 1339600 - DNA, 15 bp, Homo sapiens
agagaaggccaaaga

SEQ ID NO: 1339601 - DNA, 15 bp, Homo sapiens
gagagaaggccaaag

SEQ ID NO: 1339602 - DNA, 15 bp, Homo sapiens
tgagagaaggccaaa

SEQ ID NO: 1339603 - DNA, 15 bp, Homo sapiens
atgagagaaggccaa

SEQ ID NO: 1339604 - DNA, 15 bp, Homo sapiens
catgagagaaggcca

SEQ ID NO: 1339605 - DNA, 15 bp, Homo sapiens
tcatgagagaaggcc

SEQ ID NO: 1339606 - DNA, 15 bp, Homo sapiens
ttcatgagagaaggc

SEQ ID NO: 1339607 - DNA, 15 bp, Homo sapiens
tttcatgagagaagg

SEQ ID NO: 1339608 - DNA, 15 bp, Homo sapiens
ttttcatgagagaag

SEQ ID NO: 1339609 - DNA, 15 bp, Homo sapiens
tttttcatgagagaa

SEQ ID NO: 1339610 - DNA, 15 bp, Homo sapiens
ctttttcatgagaga

SEQ ID NO: 1339611 - DNA, 15 bp, Homo sapiens
actttttcatgagag

SEQ ID NO: 1339612 - DNA, 15 bp, Homo sapiens
tactttttcatgaga

SEQ ID NO: 1339613 - DNA, 15 bp, Homo sapiens
atactttttcatgag

SEQ ID NO: 1339614 - DNA, 15 bp, Homo sapiens
aatactttttcatga

SEQ ID NO: 1339615 - DNA, 15 bp, Homo sapiens
aaatactttttcatg

SEQ ID NO: 1339616 - DNA, 15 bp, Homo sapiens
aaaatactttttcat

SEQ ID NO: 1339617 - DNA, 15 bp, Homo sapiens
caaaatactttttca

SEQ ID NO: 1339618 - DNA, 15 bp, Homo sapiens
acaaaatactttttc

SEQ ID NO: 1339619 - DNA, 15 bp, Homo sapiens
aacaaaatacttttt

SEQ ID NO: 1339620 - DNA, 15 bp, Homo sapiens
gaacaaaatactttt

SEQ ID NO: 1339621 - DNA, 15 bp, Homo sapiens
tgaacaaaatacttt

SEQ ID NO: 1339622 - DNA, 15 bp, Homo sapiens
gtgaacaaaatactt

SEQ ID NO: 1339623 - DNA, 15 bp, Homo sapiens
tgtgaacaaaatact

SEQ ID NO: 1339624 - DNA, 15 bp, Homo sapiens
atgtgaacaaaatac

SEQ ID NO: 1339625 - DNA, 15 bp, Homo sapiens
tatgtgaacaaaata

SEQ ID NO: 1339626 - DNA, 15 bp, Homo sapiens
gtatgtgaacaaaat

SEQ ID NO: 1339627 - DNA, 15 bp, Homo sapiens
tgtatgtgaacaaaa

SEQ ID NO: 1339628 - DNA, 15 bp, Homo sapiens
ctgtatgtgaacaaa

SEQ ID NO: 1339629 - DNA, 15 bp, Homo sapiens
gctgtatgtgaacaa

SEQ ID NO: 1339630 - DNA, 15 bp, Homo sapiens
ggctgtatgtgaaca

SEQ ID NO: 1339631 - DNA, 15 bp, Homo sapiens
tggctgtatgtgaac

SEQ ID NO: 1339632 - DNA, 15 bp, Homo sapiens
gtggctgtatgtgaa

SEQ ID NO: 1339633 - DNA, 15 bp, Homo sapiens
ggtggctgtatgtga

SEQ ID NO: 1339634 - DNA, 15 bp, Homo sapiens
aggtggctgtatgtg

SEQ ID NO: 1339635 - DNA, 15 bp, Homo sapiens
aaggtggctgtatgt

SEQ ID NO: 1339636 - DNA, 15 bp, Homo sapiens
taaggtggctgtatg

SEQ ID NO: 1339637 - DNA, 15 bp, Homo sapiens
ttaaggtggctgtat

SEQ ID NO: 1339638 - DNA, 15 bp, Homo sapiens
cttaaggtggctgta

SEQ ID NO: 1339639 - DNA, 15 bp, Homo sapiens
ccttaaggtggctgt

SEQ ID NO: 1339640 - DNA, 15 bp, Homo sapiens
accttaaggtggctg

SEQ ID NO: 1339641 - DNA, 15 bp, Homo sapiens
aaccttaaggtggct

SEQ ID NO: 1339642 - DNA, 15 bp, Homo sapiens
taaccttaaggtggc

SEQ ID NO: 1339643 - DNA, 15 bp, Homo sapiens
ataaccttaaggtgg

SEQ ID NO: 1339644 - DNA, 15 bp, Homo sapiens
gataaccttaaggtg

SEQ ID NO: 1339645 - DNA, 15 bp, Homo sapiens
cgataaccttaaggt

SEQ ID NO: 1339646 - DNA, 15 bp, Homo sapiens
acgataaccttaagg

SEQ ID NO: 1339647 - DNA, 15 bp, Homo sapiens
aacgataaccttaag

SEQ ID NO: 1339648 - DNA, 15 bp, Homo sapiens
gaacgataaccttaa

SEQ ID NO: 1339649 - DNA, 15 bp, Homo sapiens
tgaacgataacctta

SEQ ID NO: 1339650 - DNA, 15 bp, Homo sapiens
atgaacgataacctt

SEQ ID NO: 1339651 - DNA, 15 bp, Homo sapiens
aatgaacgataacct

SEQ ID NO: 1339652 - DNA, 15 bp, Homo sapiens
caatgaacgataacc

SEQ ID NO: 1339653 - DNA, 15 bp, Homo sapiens
acaatgaacgataac

SEQ ID NO: 1339654 - DNA, 15 bp, Homo sapiens
aacaatgaacgataa

SEQ ID NO: 1339655 - DNA, 15 bp, Homo sapiens
aaacaatgaacgata

SEQ ID NO: 1339656 - DNA, 15 bp, Homo sapiens
taaacaatgaacgat

SEQ ID NO: 1339657 - DNA, 15 bp, Homo sapiens
ctaaacaatgaacga

SEQ ID NO: 1339658 - DNA, 15 bp, Homo sapiens
actaaacaatgaacg

SEQ ID NO: 1339659 - DNA, 15 bp, Homo sapiens
tactaaacaatgaac

SEQ ID NO: 1339660 - DNA, 15 bp, Homo sapiens
ttactaaacaatgaa

SEQ ID NO: 1339661 - DNA, 15 bp, Homo sapiens
tttactaaacaatga

SEQ ID NO: 1339662 - DNA, 15 bp, Homo sapiens
ctttactaaacaatg

SEQ ID NO: 1339663 - DNA, 15 bp, Homo sapiens
actttactaaacaat

SEQ ID NO: 1339664 - DNA, 15 bp, Homo sapiens
cactttactaaacaa

SEQ ID NO: 1339665 - DNA, 15 bp, Homo sapiens
tcactttactaaaca

SEQ ID NO: 1339666 - DNA, 15 bp, Homo sapiens
ttcactttactaaac

SEQ ID NO: 1339667 - DNA, 15 bp, Homo sapiens
attcactttactaaa

SEQ ID NO: 1339668 - DNA, 15 bp, Homo sapiens
cattcactttactaa

SEQ ID NO: 1339669 - DNA, 15 bp, Homo sapiens
gcattcactttacta

SEQ ID NO: 1339670 - DNA, 15 bp, Homo sapiens
agcattcactttact

SEQ ID NO: 1339671 - DNA, 15 bp, Homo sapiens
cagcattcactttac

SEQ ID NO: 1339672 - DNA, 15 bp, Homo sapiens
gcagcattcacttta

SEQ ID NO: 1339673 - DNA, 15 bp, Homo sapiens
agcagcattcacttt

SEQ ID NO: 1339674 - DNA, 15 bp, Homo sapiens
tagcagcattcactt

SEQ ID NO: 1339675 - DNA, 15 bp, Homo sapiens
gtagcagcattcact

SEQ ID NO: 1339676 - DNA, 15 bp, Homo sapiens
agtagcagcattcac

SEQ ID NO: 1339677 - DNA, 15 bp, Homo sapiens
cagtagcagcattca

SEQ ID NO: 1339678 - DNA, 15 bp, Homo sapiens
acagtagcagcattc

SEQ ID NO: 1339679 - DNA, 15 bp, Homo sapiens
cacagtagcagcatt

SEQ ID NO: 1339680 - DNA, 15 bp, Homo sapiens
ccacagtagcagcat

SEQ ID NO: 1339681 - DNA, 15 bp, Homo sapiens
gccacagtagcagca

SEQ ID NO: 1339682 - DNA, 15 bp, Homo sapiens
cgccacagtagcagc

SEQ ID NO: 1339683 - DNA, 15 bp, Homo sapiens
ccgccacagtagcag

SEQ ID NO: 1339684 - DNA, 15 bp, Homo sapiens
tccgccacagtagca

SEQ ID NO: 1339685 - DNA, 15 bp, Homo sapiens
ctccgccacagtagc

SEQ ID NO: 1339686 - DNA, 15 bp, Homo sapiens
actccgccacagtag

SEQ ID NO: 1339687 - DNA, 15 bp, Homo sapiens
tactccgccacagta

SEQ ID NO: 1339688 - DNA, 15 bp, Homo sapiens
ttactccgccacagt

SEQ ID NO: 1339689 - DNA, 15 bp, Homo sapiens
cttactccgccacag

SEQ ID NO: 1339690 - DNA, 15 bp, Homo sapiens
tcttactccgccaca

SEQ ID NO: 1339691 - DNA, 15 bp, Homo sapiens
atcttactccgccac

SEQ ID NO: 1339692 - DNA, 15 bp, Homo sapiens
gatcttactccgcca

SEQ ID NO: 1339693 - DNA, 15 bp, Homo sapiens
tgatcttactccgcc

SEQ ID NO: 1339694 - DNA, 15 bp, Homo sapiens
gtgatcttactccgc

SEQ ID NO: 1339695 - DNA, 15 bp, Homo sapiens
agtgatcttactccg

SEQ ID NO: 1339696 - DNA, 15 bp, Homo sapiens
gagtgatcttactcc

SEQ ID NO: 1339697 - DNA, 15 bp, Homo sapiens
tgagtgatcttactc

SEQ ID NO: 1339698 - DNA, 15 bp, Homo sapiens
atgagtgatcttact

SEQ ID NO: 1339699 - DNA, 15 bp, Homo sapiens
aatgagtgatcttac

SEQ ID NO: 1339700 - DNA, 15 bp, Homo sapiens
taatgagtgatctta

SEQ ID NO: 1339701 - DNA, 15 bp, Homo sapiens
ataatgagtgatctt

SEQ ID NO: 1339702 - DNA, 15 bp, Homo sapiens
cataatgagtgatct

SEQ ID NO: 1339703 - DNA, 15 bp, Homo sapiens
ccataatgagtgatc

SEQ ID NO: 1339704 - DNA, 15 bp, Homo sapiens
gccataatgagtgat

SEQ ID NO: 1339705 - DNA, 15 bp, Homo sapiens
agccataatgagtga

SEQ ID NO: 1339706 - DNA, 15 bp, Homo sapiens
tagccataatgagtg

SEQ ID NO: 1339707 - DNA, 15 bp, Homo sapiens
ctagccataatgagt

SEQ ID NO: 1339708 - DNA, 15 bp, Homo sapiens
tctagccataatgag

SEQ ID NO: 1339709 - DNA, 15 bp, Homo sapiens
ttctagccataatga

SEQ ID NO: 1339710 - DNA, 15 bp, Homo sapiens
attctagccataatg

SEQ ID NO: 1339711 - DNA, 15 bp, Homo sapiens
aattctagccataat

SEQ ID NO: 1339712 - DNA, 15 bp, Homo sapiens
gaattctagccataa

SEQ ID NO: 1339713 - DNA, 15 bp, Homo sapiens
ggaattctagccata

SEQ ID NO: 1339714 - DNA, 15 bp, Homo sapiens
aggaattctagccat

SEQ ID NO: 1339715 - DNA, 15 bp, Homo sapiens
aaggaattctagcca

SEQ ID NO: 1339716 - DNA, 15 bp, Homo sapiens
aaaggaattctagcc

SEQ ID NO: 1339717 - DNA, 15 bp, Homo sapiens
taaaggaattctagc

SEQ ID NO: 1339718 - DNA, 15 bp, Homo sapiens
ataaaggaattctag

SEQ ID NO: 1339719 - DNA, 15 bp, Homo sapiens
aataaaggaattcta

SEQ ID NO: 1339720 - DNA, 15 bp, Homo sapiens
gaataaaggaattct

SEQ ID NO: 1339721 - DNA, 15 bp, Homo sapiens
ggaataaaggaattc

SEQ ID NO: 1339722 - DNA, 15 bp, Homo sapiens
aggaataaaggaatt

SEQ ID NO: 1339723 - DNA, 15 bp, Homo sapiens
taggaataaaggaat

SEQ ID NO: 1339724 - DNA, 15 bp, Homo sapiens
ctaggaataaaggaa

SEQ ID NO: 1339725 - DNA, 15 bp, Homo sapiens
tctaggaataaagga

SEQ ID NO: 1339726 - DNA, 15 bp, Homo sapiens
ctctaggaataaagg

SEQ ID NO: 1339727 - DNA, 15 bp, Homo sapiens
cctctaggaataaag

SEQ ID NO: 1339728 - DNA, 15 bp, Homo sapiens
tcctctaggaataaa

SEQ ID NO: 1339729 - DNA, 15 bp, Homo sapiens
ctcctctaggaataa

SEQ ID NO: 1339730 - DNA, 15 bp, Homo sapiens
cctcctctaggaata

SEQ ID NO: 1339731 - DNA, 15 bp, Homo sapiens
tcctcctctaggaat

SEQ ID NO: 1339732 - DNA, 15 bp, Homo sapiens
gtcctcctctaggaa

SEQ ID NO: 1339733 - DNA, 15 bp, Homo sapiens
agtcctcctctagga

SEQ ID NO: 1339734 - DNA, 15 bp, Homo sapiens
tagtcctcctctagg

SEQ ID NO: 1339735 - DNA, 15 bp, Homo sapiens
atagtcctcctctag

SEQ ID NO: 1339736 - DNA, 15 bp, Homo sapiens
aatagtcctcctcta

SEQ ID NO: 1339737 - DNA, 15 bp, Homo sapiens
taatagtcctcctct

SEQ ID NO: 1339738 - DNA, 15 bp, Homo sapiens
ataatagtcctcctc

SEQ ID NO: 1339739 - DNA, 15 bp, Homo sapiens
gataatagtcctcct

SEQ ID NO: 1339740 - DNA, 15 bp, Homo sapiens
agataatagtcctcc

SEQ ID NO: 1339741 - DNA, 15 bp, Homo sapiens
tagataatagtcctc

SEQ ID NO: 1339742 - DNA, 15 bp, Homo sapiens
gtagataatagtcct

SEQ ID NO: 1339743 - DNA, 15 bp, Homo sapiens
agtagataatagtcc

SEQ ID NO: 1339744 - DNA, 15 bp, Homo sapiens
aagtagataatagtc

SEQ ID NO: 1339745 - DNA, 15 bp, Homo sapiens
gaagtagataatagt

SEQ ID NO: 1339746 - DNA, 15 bp, Homo sapiens
tgaagtagataatag

SEQ ID NO: 1339747 - DNA, 15 bp, Homo sapiens
atgaagtagataata

SEQ ID NO: 1339748 - DNA, 15 bp, Homo sapiens
aatgaagtagataat

SEQ ID NO: 1339749 - DNA, 15 bp, Homo sapiens
aaatgaagtagataa

SEQ ID NO: 1339750 - DNA, 15 bp, Homo sapiens
aaaatgaagtagata

SEQ ID NO: 1339751 - DNA, 15 bp, Homo sapiens
taaaatgaagtagat

SEQ ID NO: 1339752 - DNA, 15 bp, Homo sapiens
ctaaaatgaagtaga

SEQ ID NO: 1339753 - DNA, 15 bp, Homo sapiens
cctaaaatgaagtag

SEQ ID NO: 1339754 - DNA, 15 bp, Homo sapiens
tcctaaaatgaagta

SEQ ID NO: 1339755 - DNA, 15 bp, Homo sapiens
ctcctaaaatgaagt

SEQ ID NO: 1339756 - DNA, 15 bp, Homo sapiens
actcctaaaatgaag

SEQ ID NO: 1339757 - DNA, 15 bp, Homo sapiens
cactcctaaaatgaa

SEQ ID NO: 1339758 - DNA, 15 bp, Homo sapiens
tcactcctaaaatga

SEQ ID NO: 1339759 - DNA, 15 bp, Homo sapiens
ctcactcctaaaatg

SEQ ID NO: 1339760 - DNA, 15 bp, Homo sapiens
gctcactcctaaaat

SEQ ID NO: 1339761 - DNA, 15 bp, Homo sapiens
agctcactcctaaaa

SEQ ID NO: 1339762 - DNA, 15 bp, Homo sapiens
aagctcactcctaaa

SEQ ID NO: 1339763 - DNA, 15 bp, Homo sapiens
taagctcactcctaa

SEQ ID NO: 1339764 - DNA, 15 bp, Homo sapiens
ataagctcactccta

SEQ ID NO: 1339765 - DNA, 15 bp, Homo sapiens
aataagctcactcct

SEQ ID NO: 1339766 - DNA, 15 bp, Homo sapiens
aaataagctcactcc

SEQ ID NO: 1339767 - DNA, 15 bp, Homo sapiens
aaaataagctcactc

SEQ ID NO: 1339768 - DNA, 15 bp, Homo sapiens
gaaaataagctcact

SEQ ID NO: 1339769 - DNA, 15 bp, Homo sapiens
tgaaaataagctcac

SEQ ID NO: 1339770 - DNA, 15 bp, Homo sapiens
ttgaaaataagctca

SEQ ID NO: 1339771 - DNA, 15 bp, Homo sapiens
tttgaaaataagctc

SEQ ID NO: 1339772 - DNA, 15 bp, Homo sapiens
ctttgaaaataagct

SEQ ID NO: 1339773 - DNA, 15 bp, Homo sapiens
tctttgaaaataagc

SEQ ID NO: 1339774 - DNA, 15 bp, Homo sapiens
ctctttgaaaataag

SEQ ID NO: 1339775 - DNA, 15 bp, Homo sapiens
tctctttgaaaataa

SEQ ID NO: 1339776 - DNA, 15 bp, Homo sapiens
atctctttgaaaata

SEQ ID NO: 1339777 - DNA, 15 bp, Homo sapiens
tatctctttgaaaat

SEQ ID NO: 1339778 - DNA, 15 bp, Homo sapiens
ctatctctttgaaaa

SEQ ID NO: 1339779 - DNA, 15 bp, Homo sapiens
actatctctttgaaa

SEQ ID NO: 1339780 - DNA, 15 bp, Homo sapiens
aactatctctttgaa

SEQ ID NO: 1339781 - DNA, 15 bp, Homo sapiens
gaactatctctttga

SEQ ID NO: 1339782 - DNA, 15 bp, Homo sapiens
tgaactatctctttg

SEQ ID NO: 1339783 - DNA, 15 bp, Homo sapiens
atgaactatctcttt

SEQ ID NO: 1339784 - DNA, 15 bp, Homo sapiens
tatgaactatctctt

SEQ ID NO: 1339785 - DNA, 15 bp, Homo sapiens
atatgaactatctct

SEQ ID NO: 1339786 - DNA, 15 bp, Homo sapiens
aatatgaactatctc

SEQ ID NO: 1339787 - DNA, 15 bp, Homo sapiens
aaatatgaactatct

SEQ ID NO: 1339788 - DNA, 15 bp, Homo sapiens
aaaatatgaactatc

SEQ ID NO: 1339789 - DNA, 15 bp, Homo sapiens
aaaaatatgaactat

SEQ ID NO: 1339790 - DNA, 15 bp, Homo sapiens
taaaaatatgaacta

SEQ ID NO: 1339791 - DNA, 15 bp, Homo sapiens
ttaaaaatatgaact

SEQ ID NO: 1339792 - DNA, 15 bp, Homo sapiens
tttaaaaatatgaac

SEQ ID NO: 1339793 - DNA, 15 bp, Homo sapiens
ttttaaaaatatgaa

SEQ ID NO: 1339794 - DNA, 15 bp, Homo sapiens
attttaaaaatatga

SEQ ID NO: 1339795 - DNA, 15 bp, Homo sapiens
aattttaaaaatatg

SEQ ID NO: 1339796 - DNA, 15 bp, Homo sapiens
aaattttaaaaatat

SEQ ID NO: 1339797 - DNA, 15 bp, Homo sapiens
caaattttaaaaata

SEQ ID NO: 1339798 - DNA, 15 bp, Homo sapiens
gcaaattttaaaaat

SEQ ID NO: 1339799 - DNA, 15 bp, Homo sapiens
tgcaaattttaaaaa

SEQ ID NO: 1339800 - DNA, 15 bp, Homo sapiens
gtgcaaattttaaaa

SEQ ID NO: 1339801 - DNA, 15 bp, Homo sapiens
agtgcaaattttaaa

SEQ ID NO: 1339802 - DNA, 15 bp, Homo sapiens
cagtgcaaattttaa

SEQ ID NO: 1339803 - DNA, 15 bp, Homo sapiens
gcagtgcaaatttta

SEQ ID NO: 1339804 - DNA, 15 bp, Homo sapiens
tgcagtgcaaatttt

SEQ ID NO: 1339805 - DNA, 15 bp, Homo sapiens
ctgcagtgcaaattt

SEQ ID NO: 1339806 - DNA, 15 bp, Homo sapiens
gctgcagtgcaaatt

SEQ ID NO: 1339807 - DNA, 15 bp, Homo sapiens
cgctgcagtgcaaat

SEQ ID NO: 1339808 - DNA, 15 bp, Homo sapiens
tcgctgcagtgcaaa

SEQ ID NO: 1339809 - DNA, 15 bp, Homo sapiens
atcgctgcagtgcaa

SEQ ID NO: 1339810 - DNA, 15 bp, Homo sapiens
catcgctgcagtgca

SEQ ID NO: 1339811 - DNA, 15 bp, Homo sapiens
ccatcgctgcagtgc

SEQ ID NO: 1339812 - DNA, 15 bp, Homo sapiens
accatcgctgcagtg

SEQ ID NO: 1339813 - DNA, 15 bp, Homo sapiens
gaccatcgctgcagt

SEQ ID NO: 1339814 - DNA, 15 bp, Homo sapiens
cgaccatcgctgcag

SEQ ID NO: 1339815 - DNA, 15 bp, Homo sapiens
acgaccatcgctgca

SEQ ID NO: 1339816 - DNA, 15 bp, Homo sapiens
aacgaccatcgctgc

SEQ ID NO: 1339817 - DNA, 15 bp, Homo sapiens
taacgaccatcgctg

SEQ ID NO: 1339818 - DNA, 15 bp, Homo sapiens
ataacgaccatcgct

SEQ ID NO: 1339819 - DNA, 15 bp, Homo sapiens
aataacgaccatcgc

SEQ ID NO: 1339820 - DNA, 15 bp, Homo sapiens
gaataacgaccatcg

SEQ ID NO: 1339821 - DNA, 15 bp, Homo sapiens
agaataacgaccatc

SEQ ID NO: 1339822 - DNA, 15 bp, Homo sapiens
cagaataacgaccat

SEQ ID NO: 1339823 - DNA, 15 bp, Homo sapiens
gcagaataacgacca

SEQ ID NO: 1339824 - DNA, 15 bp, Homo sapiens
ggcagaataacgacc

SEQ ID NO: 1339825 - DNA, 15 bp, Homo sapiens
aggcagaataacgac

SEQ ID NO: 1339826 - DNA, 15 bp, Homo sapiens
caggcagaataacga

SEQ ID NO: 1339827 - DNA, 15 bp, Homo sapiens
ccaggcagaataacg

SEQ ID NO: 1339828 - DNA, 15 bp, Homo sapiens
cccaggcagaataac

SEQ ID NO: 1339829 - DNA, 15 bp, Homo sapiens
gcccaggcagaataa

SEQ ID NO: 1339830 - DNA, 15 bp, Homo sapiens
agcccaggcagaata

SEQ ID NO: 1339831 - DNA, 15 bp, Homo sapiens
aagcccaggcagaat

SEQ ID NO: 1339832 - DNA, 15 bp, Homo sapiens
aaagcccaggcagaa

SEQ ID NO: 1339833 - DNA, 15 bp, Homo sapiens
aaaagcccaggcaga

SEQ ID NO: 1339834 - DNA, 15 bp, Homo sapiens
aaaaagcccaggcag

SEQ ID NO: 1339835 - DNA, 15 bp, Homo sapiens
aaaaaagcccaggca

SEQ ID NO: 1339836 - DNA, 15 bp, Homo sapiens
taaaaaagcccaggc

SEQ ID NO: 1339837 - DNA, 15 bp, Homo sapiens
ttaaaaaagcccagg

SEQ ID NO: 1339838 - DNA, 15 bp, Homo sapiens
cttaaaaaagcccag

SEQ ID NO: 1339839 - DNA, 15 bp, Homo sapiens
tcttaaaaaagccca

SEQ ID NO: 1339840 - DNA, 15 bp, Homo sapiens
ctcttaaaaaagccc

SEQ ID NO: 1339841 - DNA, 15 bp, Homo sapiens
cctcttaaaaaagcc

SEQ ID NO: 1339842 - DNA, 15 bp, Homo sapiens
acctcttaaaaaagc

SEQ ID NO: 1339843 - DNA, 15 bp, Homo sapiens
aacctcttaaaaaag

SEQ ID NO: 1339844 - DNA, 15 bp, Homo sapiens
aaacctcttaaaaaa

SEQ ID NO: 1339845 - DNA, 15 bp, Homo sapiens
caaacctcttaaaaa

SEQ ID NO: 1339846 - DNA, 15 bp, Homo sapiens
gcaaacctcttaaaa

SEQ ID NO: 1339847 - DNA, 15 bp, Homo sapiens
tgcaaacctcttaaa

SEQ ID NO: 1339848 - DNA, 15 bp, Homo sapiens
gtgcaaacctcttaa

SEQ ID NO: 1339849 - DNA, 15 bp, Homo sapiens
tgtgcaaacctctta

SEQ ID NO: 1339850 - DNA, 15 bp, Homo sapiens
gtgtgcaaacctctt

SEQ ID NO: 1339851 - DNA, 15 bp, Homo sapiens
ggtgtgcaaacctct

SEQ ID NO: 1339852 - DNA, 15 bp, Homo sapiens
tggtgtgcaaacctc

SEQ ID NO: 1339853 - DNA, 15 bp, Homo sapiens
atggtgtgcaaacct

SEQ ID NO: 1339854 - DNA, 15 bp, Homo sapiens
tatggtgtgcaaacc

SEQ ID NO: 1339855 - DNA, 15 bp, Homo sapiens
atatggtgtgcaaac

SEQ ID NO: 1339856 - DNA, 15 bp, Homo sapiens
ttatatggtgtgcaa

SEQ ID NO: 1339857 - DNA, 15 bp, Homo sapiens
tttatatggtgtgca

SEQ ID NO: 1339858 - DNA, 15 bp, Homo sapiens
ttttatatggtgtgc

SEQ ID NO: 1339859 - DNA, 15 bp, Homo sapiens
cttttatatggtgtg

SEQ ID NO: 1339860 - DNA, 15 bp, Homo sapiens
acttttatatggtgt

SEQ ID NO: 1339861 - DNA, 15 bp, Homo sapiens
tacttttatatggtg

SEQ ID NO: 1339862 - DNA, 15 bp, Homo sapiens
ttacttttatatggt

SEQ ID NO: 1339863 - DNA, 15 bp, Homo sapiens
gttacttttatatgg

SEQ ID NO: 1339864 - DNA, 15 bp, Homo sapiens
tgttacttttatatg

SEQ ID NO: 1339865 - DNA, 15 bp, Homo sapiens
atgttacttttatat

SEQ ID NO: 1339866 - DNA, 15 bp, Homo sapiens
tatgttacttttata

SEQ ID NO: 1339867 - DNA, 15 bp, Homo sapiens
ttatgttacttttat

SEQ ID NO: 1339868 - DNA, 15 bp, Homo sapiens
gttatgttactttta

SEQ ID NO: 1339869 - DNA, 15 bp, Homo sapiens
agttatgttactttt

SEQ ID NO: 1339870 - DNA, 15 bp, Homo sapiens
aagttatgttacttt

SEQ ID NO: 1339871 - DNA, 15 bp, Homo sapiens
caagttatgttactt

SEQ ID NO: 1339872 - DNA, 15 bp, Homo sapiens
acaagttatgttact

SEQ ID NO: 1339873 - DNA, 15 bp, Homo sapiens
cacaagttatgttac

SEQ ID NO: 1339874 - DNA, 15 bp, Homo sapiens
tcacaagttatgtta

SEQ ID NO: 1339875 - DNA, 15 bp, Homo sapiens
atcacaagttatgtt

SEQ ID NO: 1339876 - DNA, 15 bp, Homo sapiens
aatcacaagttatgt

SEQ ID NO: 1339877 - DNA, 15 bp, Homo sapiens
aaatcacaagttatg

SEQ ID NO: 1339878 - DNA, 15 bp, Homo sapiens
aaaatcacaagttat

SEQ ID NO: 1339879 - DNA, 15 bp, Homo sapiens
aaaaatcacaagtta

SEQ ID NO: 1339880 - DNA, 15 bp, Homo sapiens
taaaaatcacaagtt

SEQ ID NO: 1339881 - DNA, 15 bp, Homo sapiens
ttaaaaatcacaagt

SEQ ID NO: 1339882 - DNA, 15 bp, Homo sapiens
attaaaaatcacaag

SEQ ID NO: 1339883 - DNA, 15 bp, Homo sapiens
tattaaaaatcacaa

SEQ ID NO: 1339884 - DNA, 15 bp, Homo sapiens
atattaaaaatcaca

SEQ ID NO: 1339885 - DNA, 15 bp, Homo sapiens
aatattaaaaatcac

SEQ ID NO: 1339886 - DNA, 15 bp, Homo sapiens
aaatattaaaaatca

SEQ ID NO: 1339887 - DNA, 15 bp, Homo sapiens
aaaatattaaaaatc

SEQ ID NO: 1339888 - DNA, 15 bp, Homo sapiens
taaaatattaaaaat

SEQ ID NO: 1339889 - DNA, 15 bp, Homo sapiens
ataaaatattaaaaa

SEQ ID NO: 1339890 - DNA, 15 bp, Homo sapiens
aataaaatattaaaa

SEQ ID NO: 1339891 - DNA, 15 bp, Homo sapiens
taataaaatattaaa

SEQ ID NO: 1339892 - DNA, 15 bp, Homo sapiens
ctaataaaatattaa

SEQ ID NO: 1339893 - DNA, 15 bp, Homo sapiens
tctaataaaatatta

SEQ ID NO: 1339894 - DNA, 15 bp, Homo sapiens
ctctaataaaatatt

SEQ ID NO: 1339895 - DNA, 15 bp, Homo sapiens
tctctaataaaatat

SEQ ID NO: 1339896 - DNA, 15 bp, Homo sapiens
atctctaataaaata

SEQ ID NO: 1339897 - DNA, 15 bp, Homo sapiens
aatctctaataaaat

SEQ ID NO: 1339898 - DNA, 15 bp, Homo sapiens
caatctctaataaaa

SEQ ID NO: 1339899 - DNA, 15 bp, Homo sapiens
acaatctctaataaa

SEQ ID NO: 1339900 - DNA, 15 bp, Homo sapiens
tacaatctctaataa

SEQ ID NO: 1339901 - DNA, 15 bp, Homo sapiens
ttacaatctctaata

SEQ ID NO: 1339902 - DNA, 15 bp, Homo sapiens
tttacaatctctaat

SEQ ID NO: 1339903 - DNA, 15 bp, Homo sapiens
ctttacaatctctaa

SEQ ID NO: 1339904 - DNA, 15 bp, Homo sapiens
cctttacaatctcta

SEQ ID NO: 1339905 - DNA, 15 bp, Homo sapiens
acctttacaatctct

SEQ ID NO: 1339906 - DNA, 15 bp, Homo sapiens
aacctttacaatctc

SEQ ID NO: 1339907 - DNA, 15 bp, Homo sapiens
taacctttacaatct

SEQ ID NO: 1339908 - DNA, 15 bp, Homo sapiens
ataacctttacaatc

SEQ ID NO: 1339909 - DNA, 15 bp, Homo sapiens
tataacctttacaat

SEQ ID NO: 1339910 - DNA, 15 bp, Homo sapiens
ttataacctttacaa

SEQ ID NO: 1339911 - DNA, 15 bp, Homo sapiens
gttataacctttaca

SEQ ID NO: 1339912 - DNA, 15 bp, Homo sapiens
tgttataacctttac

SEQ ID NO: 1339913 - DNA, 15 bp, Homo sapiens
atgttataaccttta

SEQ ID NO: 1339914 - DNA, 15 bp, Homo sapiens
gatgttataaccttt

SEQ ID NO: 1339915 - DNA, 15 bp, Homo sapiens
tgatgttataacctt

SEQ ID NO: 1339916 - DNA, 15 bp, Homo sapiens
gtgatgttataacct

SEQ ID NO: 1339917 - DNA, 15 bp, Homo sapiens
agtgatgttataacc

SEQ ID NO: 1339918 - DNA, 15 bp, Homo sapiens
aagtgatgttataac

SEQ ID NO: 1339919 - DNA, 15 bp, Homo sapiens
aaagtgatgttataa

SEQ ID NO: 1339920 - DNA, 15 bp, Homo sapiens
caaagtgatgttata

SEQ ID NO: 1339921 - DNA, 15 bp, Homo sapiens
ccaaagtgatgttat

SEQ ID NO: 1339922 - DNA, 15 bp, Homo sapiens
accaaagtgatgtta

SEQ ID NO: 1339923 - DNA, 15 bp, Homo sapiens
caccaaagtgatgtt

SEQ ID NO: 1339924 - DNA, 15 bp, Homo sapiens
acaccaaagtgatgt

SEQ ID NO: 1339925 - DNA, 15 bp, Homo sapiens
aacaccaaagtgatg

SEQ ID NO: 1339926 - DNA, 15 bp, Homo sapiens
aaacaccaaagtgat

SEQ ID NO: 1339927 - DNA, 15 bp, Homo sapiens
gaaacaccaaagtga

SEQ ID NO: 1339928 - DNA, 15 bp, Homo sapiens
cgaaacaccaaagtg

SEQ ID NO: 1339929 - DNA, 15 bp, Homo sapiens
acgaaacaccaaagt

SEQ ID NO: 1339930 - DNA, 15 bp, Homo sapiens
tacgaaacaccaaag

SEQ ID NO: 1339931 - DNA, 15 bp, Homo sapiens
ctacgaaacaccaaa

SEQ ID NO: 1339932 - DNA, 15 bp, Homo sapiens
actacgaaacaccaa

SEQ ID NO: 1339933 - DNA, 15 bp, Homo sapiens
gactacgaaacacca

SEQ ID NO: 1339934 - DNA, 15 bp, Homo sapiens
tgactacgaaacacc

SEQ ID NO: 1339935 - DNA, 15 bp, Homo sapiens
ttgactacgaaacac

SEQ ID NO: 1339936 - DNA, 15 bp, Homo sapiens
cttgactacgaaaca

SEQ ID NO: 1339937 - DNA, 15 bp, Homo sapiens
acttgactacgaaac

SEQ ID NO: 1339938 - DNA, 15 bp, Homo sapiens
aacttgactacgaaa

SEQ ID NO: 1339939 - DNA, 15 bp, Homo sapiens
aaacttgactacgaa

SEQ ID NO: 1339940 - DNA, 15 bp, Homo sapiens
aaaacttgactacga

SEQ ID NO: 1339941 - DNA, 15 bp, Homo sapiens
taaaacttgactacg

SEQ ID NO: 1339942 - DNA, 15 bp, Homo sapiens
ttaaaacttgactac

SEQ ID NO: 1339943 - DNA, 15 bp, Homo sapiens
gttaaaacttgacta

SEQ ID NO: 1339944 - DNA, 15 bp, Homo sapiens
tgttaaaacttgact

SEQ ID NO: 1339945 - DNA, 15 bp, Homo sapiens
atgttaaaacttgac

SEQ ID NO: 1339946 - DNA, 15 bp, Homo sapiens
tatgttaaaacttga

SEQ ID NO: 1339947 - DNA, 15 bp, Homo sapiens
ttatgttaaaacttg

SEQ ID NO: 1339948 - DNA, 15 bp, Homo sapiens
cttatgttaaaactt

SEQ ID NO: 1339949 - DNA, 15 bp, Homo sapiens
ccttatgttaaaact

SEQ ID NO: 1339950 - DNA, 15 bp, Homo sapiens
tccttatgttaaaac

SEQ ID NO: 1339951 - DNA, 15 bp, Homo sapiens
atccttatgttaaaa

SEQ ID NO: 1339952 - DNA, 15 bp, Homo sapiens
catccttatgttaaa

SEQ ID NO: 1339953 - DNA, 15 bp, Homo sapiens
acatccttatgttaa

SEQ ID NO: 1339954 - DNA, 15 bp, Homo sapiens
cacatccttatgtta

SEQ ID NO: 1339955 - DNA, 15 bp, Homo sapiens
gcacatccttatgtt

SEQ ID NO: 1339956 - DNA, 15 bp, Homo sapiens
ggcacatccttatgt

SEQ ID NO: 1339957 - DNA, 15 bp, Homo sapiens
aggcacatccttatg

SEQ ID NO: 1339958 - DNA, 15 bp, Homo sapiens
caggcacatccttat

SEQ ID NO: 1339959 - DNA, 15 bp, Homo sapiens
tcaggcacatcctta

SEQ ID NO: 1339960 - DNA, 15 bp, Homo sapiens
ttcaggcacatcctt

SEQ ID NO: 1339961 - DNA, 15 bp, Homo sapiens
tttcaggcacatcct

SEQ ID NO: 1339962 - DNA, 15 bp, Homo sapiens
ttttcaggcacatcc

SEQ ID NO: 1339963 - DNA, 15 bp, Homo sapiens
tttttcaggcacatc

SEQ ID NO: 1339964 - DNA, 15 bp, Homo sapiens
atttttcaggcacat

SEQ ID NO: 1339965 - DNA, 15 bp, Homo sapiens
gatttttcaggcaca

SEQ ID NO: 1339966 - DNA, 15 bp, Homo sapiens
tgatttttcaggcac

SEQ ID NO: 1339967 - DNA, 15 bp, Homo sapiens
atgatttttcaggca

SEQ ID NO: 1339968 - DNA, 15 bp, Homo sapiens
aatgatttttcaggc

SEQ ID NO: 1339969 - DNA, 15 bp, Homo sapiens
aaatgatttttcagg

SEQ ID NO: 1339970 - DNA, 15 bp, Homo sapiens
caaatgatttttcag

SEQ ID NO: 1339971 - DNA, 15 bp, Homo sapiens
acaaatgatttttca

SEQ ID NO: 1339972 - DNA, 15 bp, Homo sapiens
tacaaatgatttttc

SEQ ID NO: 1339973 - DNA, 15 bp, Homo sapiens
ttacaaatgattttt

SEQ ID NO: 1339974 - DNA, 15 bp, Homo sapiens
attacaaatgatttt

SEQ ID NO: 1339975 - DNA, 15 bp, Homo sapiens
aattacaaatgattt

SEQ ID NO: 1339976 - DNA, 15 bp, Homo sapiens
taattacaaatgatt

SEQ ID NO: 1339977 - DNA, 15 bp, Homo sapiens
ctaattacaaatgat

SEQ ID NO: 1339978 - DNA, 15 bp, Homo sapiens
tctaattacaaatga

SEQ ID NO: 1339979 - DNA, 15 bp, Homo sapiens
ctctaattacaaatg

SEQ ID NO: 1339980 - DNA, 15 bp, Homo sapiens
tctctaattacaaat

SEQ ID NO: 1339981 - DNA, 15 bp, Homo sapiens
ttctctaattacaaa

SEQ ID NO: 1339982 - DNA, 15 bp, Homo sapiens
attctctaattacaa

SEQ ID NO: 1339983 - DNA, 15 bp, Homo sapiens
cattctctaattaca

SEQ ID NO: 1339984 - DNA, 15 bp, Homo sapiens
ccattctctaattac

SEQ ID NO: 1339985 - DNA, 15 bp, Homo sapiens
cccattctctaatta

SEQ ID NO: 1339986 - DNA, 15 bp, Homo sapiens
tcccattctctaatt

SEQ ID NO: 1339987 - DNA, 15 bp, Homo sapiens
ttcccattctctaat

SEQ ID NO: 1339988 - DNA, 15 bp, Homo sapiens
cttcccattctctaa

SEQ ID NO: 1339989 - DNA, 15 bp, Homo sapiens
tcttcccattctcta

SEQ ID NO: 1339990 - DNA, 15 bp, Homo sapiens
atcttcccattctct

SEQ ID NO: 1339991 - DNA, 15 bp, Homo sapiens
aatcttcccattctc

SEQ ID NO: 1339992 - DNA, 15 bp, Homo sapiens
gaatcttcccattct

SEQ ID NO: 1339993 - DNA, 15 bp, Homo sapiens
agaatcttcccattc

SEQ ID NO: 1339994 - DNA, 15 bp, Homo sapiens
aagaatcttcccatt

SEQ ID NO: 1339995 - DNA, 15 bp, Homo sapiens
caagaatcttcccat

SEQ ID NO: 1339996 - DNA, 15 bp, Homo sapiens
ccaagaatcttccca

SEQ ID NO: 1339997 - DNA, 15 bp, Homo sapiens
cccaagaatcttccc

SEQ ID NO: 1339998 - DNA, 15 bp, Homo sapiens
acccaagaatcttcc

SEQ ID NO: 1339999 - DNA, 15 bp, Homo sapiens
aacccaagaatcttc

SEQ ID NO: 1340000 - DNA, 15 bp, Homo sapiens
caacccaagaatctt

SEQ ID NO: 1340001 - DNA, 15 bp, Homo sapiens
gcaacccaagaatct

SEQ ID NO: 1340002 - DNA, 15 bp, Homo sapiens
tgcaacccaagaatc

SEQ ID NO: 1340003 - DNA, 15 bp, Homo sapiens
atgcaacccaagaat

SEQ ID NO: 1340004 - DNA, 15 bp, Homo sapiens
aatgcaacccaagaa

SEQ ID NO: 1340005 - DNA, 15 bp, Homo sapiens
aaatgcaacccaaga

SEQ ID NO: 1340006 - DNA, 15 bp, Homo sapiens
aaaatgcaacccaag

SEQ ID NO: 1340007 - DNA, 15 bp, Homo sapiens
aaaaatgcaacccaa

SEQ ID NO: 1340008 - DNA, 15 bp, Homo sapiens
caaaaatgcaaccca

SEQ ID NO: 1340009 - DNA, 15 bp, Homo sapiens
acaaaaatgcaaccc

SEQ ID NO: 1340010 - DNA, 15 bp, Homo sapiens
gacaaaaatgcaacc

SEQ ID NO: 1340011 - DNA, 15 bp, Homo sapiens
tgacaaaaatgcaac

SEQ ID NO: 1340012 - DNA, 15 bp, Homo sapiens
ctgacaaaaatgcaa

SEQ ID NO: 1340013 - DNA, 15 bp, Homo sapiens
gctgacaaaaatgca

SEQ ID NO: 1340014 - DNA, 15 bp, Homo sapiens
tgctgacaaaaatgc

SEQ ID NO: 1340015 - DNA, 15 bp, Homo sapiens
ttgctgacaaaaatg

SEQ ID NO: 1340016 - DNA, 15 bp, Homo sapiens
tttgctgacaaaaat

SEQ ID NO: 1340017 - DNA, 15 bp, Homo sapiens
atttgctgacaaaaa

SEQ ID NO: 1340018 - DNA, 15 bp, Homo sapiens
aatttgctgacaaaa

SEQ ID NO: 1340019 - DNA, 15 bp, Homo sapiens
caatttgctgacaaa

SEQ ID NO: 1340020 - DNA, 15 bp, Homo sapiens
gcaatttgctgacaa

SEQ ID NO: 1340021 - DNA, 15 bp, Homo sapiens
tgcaatttgctgaca

SEQ ID NO: 1340022 - DNA, 15 bp, Homo sapiens
ctgcaatttgctgac

SEQ ID NO: 1340023 - DNA, 15 bp, Homo sapiens
tctgcaatttgctga

SEQ ID NO: 1340024 - DNA, 15 bp, Homo sapiens
ctctgcaatttgctg

SEQ ID NO: 1340025 - DNA, 15 bp, Homo sapiens
cctctgcaatttgct

SEQ ID NO: 1340026 - DNA, 15 bp, Homo sapiens
tcctctgcaatttgc

SEQ ID NO: 1340027 - DNA, 15 bp, Homo sapiens
atcctctgcaatttg

SEQ ID NO: 1340028 - DNA, 15 bp, Homo sapiens
gatcctctgcaattt

SEQ ID NO: 1340029 - DNA, 15 bp, Homo sapiens
tgatcctctgcaatt

SEQ ID NO: 1340030 - DNA, 15 bp, Homo sapiens
atgatcctctgcaat

SEQ ID NO: 1340031 - DNA, 15 bp, Homo sapiens
aatgatcctctgcaa

SEQ ID NO: 1340032 - DNA, 15 bp, Homo sapiens
taatgatcctctgca

SEQ ID NO: 1340033 - DNA, 15 bp, Homo sapiens
ataatgatcctctgc

SEQ ID NO: 1340034 - DNA, 15 bp, Homo sapiens
aataatgatcctctg

SEQ ID NO: 1340035 - DNA, 15 bp, Homo sapiens
gaataatgatcctct

SEQ ID NO: 1340036 - DNA, 15 bp, Homo sapiens
agaataatgatcctc

SEQ ID NO: 1340037 - DNA, 15 bp, Homo sapiens
cagaataatgatcct

SEQ ID NO: 1340038 - DNA, 15 bp, Homo sapiens
gcagaataatgatcc

SEQ ID NO: 1340039 - DNA, 15 bp, Homo sapiens
agcagaataatgatc

SEQ ID NO: 1340040 - DNA, 15 bp, Homo sapiens
gagcagaataatgat

SEQ ID NO: 1340041 - DNA, 15 bp, Homo sapiens
agagcagaataatga

SEQ ID NO: 1340042 - DNA, 15 bp, Homo sapiens
tagagcagaataatg

SEQ ID NO: 1340043 - DNA, 15 bp, Homo sapiens
ctagagcagaataat

SEQ ID NO: 1340044 - DNA, 15 bp, Homo sapiens
tctagagcagaataa

SEQ ID NO: 1340045 - DNA, 15 bp, Homo sapiens
ctctagagcagaata

SEQ ID NO: 1340046 - DNA, 15 bp, Homo sapiens
actctagagcagaat

SEQ ID NO: 1340047 - DNA, 15 bp, Homo sapiens
aactctagagcagaa

SEQ ID NO: 1340048 - DNA, 15 bp, Homo sapiens
caactctagagcaga

SEQ ID NO: 1340049 - DNA, 15 bp, Homo sapiens
gcaactctagagcag

SEQ ID NO: 1340050 - DNA, 15 bp, Homo sapiens
tgcaactctagagca

SEQ ID NO: 1340051 - DNA, 15 bp, Homo sapiens
gtgcaactctagagc

SEQ ID NO: 1340052 - DNA, 15 bp, Homo sapiens
ggtgcaactctagag

SEQ ID NO: 1340053 - DNA, 15 bp, Homo sapiens
cggtgcaactctaga

SEQ ID NO: 1340054 - DNA, 15 bp, Homo sapiens
acggtgcaactctag

SEQ ID NO: 1340055 - DNA, 15 bp, Homo sapiens
gacggtgcaactcta

SEQ ID NO: 1340056 - DNA, 15 bp, Homo sapiens
ggacggtgcaactct

SEQ ID NO: 1340057 - DNA, 15 bp, Homo sapiens
tggacggtgcaactc

SEQ ID NO: 1340058 - DNA, 15 bp, Homo sapiens
ctggacggtgcaact

SEQ ID NO: 1340059 - DNA, 15 bp, Homo sapiens
actggacggtgcaac

SEQ ID NO: 1340060 - DNA, 15 bp, Homo sapiens
aactggacggtgcaa

SEQ ID NO: 1340061 - DNA, 15 bp, Homo sapiens
gaactggacggtgca

SEQ ID NO: 1340062 - DNA, 15 bp, Homo sapiens
tgaactggacggtgc

SEQ ID NO: 1340063 - DNA, 15 bp, Homo sapiens
ctgaactggacggtg

SEQ ID NO: 1340064 - DNA, 15 bp, Homo sapiens
tctgaactggacggt

SEQ ID NO: 1340065 - DNA, 15 bp, Homo sapiens
ttctgaactggacgg

SEQ ID NO: 1340066 - DNA, 15 bp, Homo sapiens
cttctgaactggacg

SEQ ID NO: 1340067 - DNA, 15 bp, Homo sapiens
gcttctgaactggac

SEQ ID NO: 1340068 - DNA, 15 bp, Homo sapiens
ggcttctgaactgga

SEQ ID NO: 1340069 - DNA, 15 bp, Homo sapiens
tggcttctgaactgg

SEQ ID NO: 1340070 - DNA, 15 bp, Homo sapiens
gtggcttctgaactg

SEQ ID NO: 1340071 - DNA, 15 bp, Homo sapiens
agtggcttctgaact

SEQ ID NO: 1340072 - DNA, 15 bp, Homo sapiens
tagtggcttctgaac

SEQ ID NO: 1340073 - DNA, 15 bp, Homo sapiens
ctagtggcttctgaa

SEQ ID NO: 1340074 - DNA, 15 bp, Homo sapiens
gctagtggcttctga

SEQ ID NO: 1340075 - DNA, 15 bp, Homo sapiens
ggctagtggcttctg

SEQ ID NO: 1340076 - DNA, 15 bp, Homo sapiens
tggctagtggcttct

SEQ ID NO: 1340077 - DNA, 15 bp, Homo sapiens
gtggctagtggcttc

SEQ ID NO: 1340078 - DNA, 15 bp, Homo sapiens
tgtggctagtggctt

SEQ ID NO: 1340079 - DNA, 15 bp, Homo sapiens
catgtggctagtggc

SEQ ID NO: 1340080 - DNA, 15 bp, Homo sapiens
acatgtggctagtgg

SEQ ID NO: 1340081 - DNA, 15 bp, Homo sapiens
cacatgtggctagtg

SEQ ID NO: 1340082 - DNA, 15 bp, Homo sapiens
ccacatgtggctagt

SEQ ID NO: 1340083 - DNA, 15 bp, Homo sapiens
gccacatgtggctag

SEQ ID NO: 1340084 - DNA, 15 bp, Homo sapiens
agccacatgtggcta

SEQ ID NO: 1340085 - DNA, 15 bp, Homo sapiens
cagccacatgtggct

SEQ ID NO: 1340086 - DNA, 15 bp, Homo sapiens
acagccacatgtggc

SEQ ID NO: 1340087 - DNA, 15 bp, Homo sapiens
aacagccacatgtgg

SEQ ID NO: 1340088 - DNA, 15 bp, Homo sapiens
caacagccacatgtg

SEQ ID NO: 1340089 - DNA, 15 bp, Homo sapiens
tcaacagccacatgt

SEQ ID NO: 1340090 - DNA, 15 bp, Homo sapiens
ctcaacagccacatg

SEQ ID NO: 1340091 - DNA, 15 bp, Homo sapiens
actcaacagccacat

SEQ ID NO: 1340092 - DNA, 15 bp, Homo sapiens
tactcaacagccaca

SEQ ID NO: 1340093 - DNA, 15 bp, Homo sapiens
gtactcaacagccac

SEQ ID NO: 1340094 - DNA, 15 bp, Homo sapiens
agtactcaacagcca

SEQ ID NO: 1340095 - DNA, 15 bp, Homo sapiens
aagtactcaacagcc

SEQ ID NO: 1340096 - DNA, 15 bp, Homo sapiens
caagtactcaacagc

SEQ ID NO: 1340097 - DNA, 15 bp, Homo sapiens
tcaagtactcaacag

SEQ ID NO: 1340098 - DNA, 15 bp, Homo sapiens
ttcaagtactcaaca

SEQ ID NO: 1340099 - DNA, 15 bp, Homo sapiens
tttcaagtactcaac

SEQ ID NO: 1340100 - DNA, 15 bp, Homo sapiens
atttcaagtactcaa

SEQ ID NO: 1340101 - DNA, 15 bp, Homo sapiens
catttcaagtactca

SEQ ID NO: 1340102 - DNA, 15 bp, Homo sapiens
acatttcaagtactc

SEQ ID NO: 1340103 - DNA, 15 bp, Homo sapiens
tacatttcaagtact

SEQ ID NO: 1340104 - DNA, 15 bp, Homo sapiens
atacatttcaagtac

SEQ ID NO: 1340105 - DNA, 15 bp, Homo sapiens
aatacatttcaagta

SEQ ID NO: 1340106 - DNA, 15 bp, Homo sapiens
caatacatttcaagt

SEQ ID NO: 1340107 - DNA, 15 bp, Homo sapiens
tcaatacatttcaag

SEQ ID NO: 1340108 - DNA, 15 bp, Homo sapiens
atcaatacatttcaa

SEQ ID NO: 1340109 - DNA, 15 bp, Homo sapiens
tatcaatacatttca

SEQ ID NO: 1340110 - DNA, 15 bp, Homo sapiens
atatcaatacatttc

SEQ ID NO: 1340111 - DNA, 15 bp, Homo sapiens
catatcaatacattt

SEQ ID NO: 1340112 - DNA, 15 bp, Homo sapiens
acatatcaatacatt

SEQ ID NO: 1340113 - DNA, 15 bp, Homo sapiens
cacatatcaatacat

SEQ ID NO: 1340114 - DNA, 15 bp, Homo sapiens
gcacatatcaataca

SEQ ID NO: 1340115 - DNA, 15 bp, Homo sapiens
tgcacatatcaatac

SEQ ID NO: 1340116 - DNA, 15 bp, Homo sapiens
ttgcacatatcaata

SEQ ID NO: 1340117 - DNA, 15 bp, Homo sapiens
attgcacatatcaat

SEQ ID NO: 1340118 - DNA, 15 bp, Homo sapiens
tattgcacatatcaa

SEQ ID NO: 1340119 - DNA, 15 bp, Homo sapiens
ttattgcacatatca

SEQ ID NO: 1340120 - DNA, 15 bp, Homo sapiens
cttattgcacatatc

SEQ ID NO: 1340121 - DNA, 15 bp, Homo sapiens
acttattgcacatat

SEQ ID NO: 1340122 - DNA, 15 bp, Homo sapiens
cacttattgcacata

SEQ ID NO: 1340123 - DNA, 15 bp, Homo sapiens
acacttattgcacat

SEQ ID NO: 1340124 - DNA, 15 bp, Homo sapiens
tacacttattgcaca

SEQ ID NO: 1340125 - DNA, 15 bp, Homo sapiens
ctacacttattgcac

SEQ ID NO: 1340126 - DNA, 15 bp, Homo sapiens
tctacacttattgca

SEQ ID NO: 1340127 - DNA, 15 bp, Homo sapiens
ttctacacttattgc

SEQ ID NO: 1340128 - DNA, 15 bp, Homo sapiens
cttctacacttattg

SEQ ID NO: 1340129 - DNA, 15 bp, Homo sapiens
tcttctacacttatt

SEQ ID NO: 1340130 - DNA, 15 bp, Homo sapiens
gtcttctacacttat

SEQ ID NO: 1340131 - DNA, 15 bp, Homo sapiens
tgtcttctacactta

SEQ ID NO: 1340132 - DNA, 15 bp, Homo sapiens
atgtcttctacactt

SEQ ID NO: 1340133 - DNA, 15 bp, Homo sapiens
tatgtcttctacact

SEQ ID NO: 1340134 - DNA, 15 bp, Homo sapiens
atatgtcttctacac

SEQ ID NO: 1340135 - DNA, 15 bp, Homo sapiens
aatatgtcttctaca

SEQ ID NO: 1340136 - DNA, 15 bp, Homo sapiens
caatatgtcttctac

SEQ ID NO: 1340137 - DNA, 15 bp, Homo sapiens
ccaatatgtcttcta

SEQ ID NO: 1340138 - DNA, 15 bp, Homo sapiens
tccaatatgtcttct

SEQ ID NO: 1340139 - DNA, 15 bp, Homo sapiens
atccaatatgtcttc

SEQ ID NO: 1340140 - DNA, 15 bp, Homo sapiens
aatccaatatgtctt

SEQ ID NO: 1340141 - DNA, 15 bp, Homo sapiens
aaatccaatatgtct

SEQ ID NO: 1340142 - DNA, 15 bp, Homo sapiens
aaaatccaatatgtc

SEQ ID NO: 1340143 - DNA, 15 bp, Homo sapiens
taaaatccaatatgt

SEQ ID NO: 1340144 - DNA, 15 bp, Homo sapiens
ctaaaatccaatatg

SEQ ID NO: 1340145 - DNA, 15 bp, Homo sapiens
tctaaaatccaatat

SEQ ID NO: 1340146 - DNA, 15 bp, Homo sapiens
ctctaaaatccaata

SEQ ID NO: 1340147 - DNA, 15 bp, Homo sapiens
tctctaaaatccaat

SEQ ID NO: 1340148 - DNA, 15 bp, Homo sapiens
atctctaaaatccaa

SEQ ID NO: 1340149 - DNA, 15 bp, Homo sapiens
gatctctaaaatcca

SEQ ID NO: 1340150 - DNA, 15 bp, Homo sapiens
ggatctctaaaatcc

SEQ ID NO: 1340151 - DNA, 15 bp, Homo sapiens
tggatctctaaaatc

SEQ ID NO: 1340152 - DNA, 15 bp, Homo sapiens
ctggatctctaaaat

SEQ ID NO: 1340153 - DNA, 15 bp, Homo sapiens
actggatctctaaaa

SEQ ID NO: 1340154 - DNA, 15 bp, Homo sapiens
tactggatctctaaa

SEQ ID NO: 1340155 - DNA, 15 bp, Homo sapiens
atactggatctctaa

SEQ ID NO: 1340156 - DNA, 15 bp, Homo sapiens
catactggatctcta

SEQ ID NO: 1340157 - DNA, 15 bp, Homo sapiens
ccatactggatctct

SEQ ID NO: 1340158 - DNA, 15 bp, Homo sapiens
tccatactggatctc

SEQ ID NO: 1340159 - DNA, 15 bp, Homo sapiens
ttccatactggatct

SEQ ID NO: 1340160 - DNA, 15 bp, Homo sapiens
tttccatactggatc

SEQ ID NO: 1340161 - DNA, 15 bp, Homo sapiens
ttttccatactggat

SEQ ID NO: 1340162 - DNA, 15 bp, Homo sapiens
attttccatactgga

SEQ ID NO: 1340163 - DNA, 15 bp, Homo sapiens
tattttccatactgg

SEQ ID NO: 1340164 - DNA, 15 bp, Homo sapiens
gtattttccatactg

SEQ ID NO: 1340165 - DNA, 15 bp, Homo sapiens
tgtattttccatact

SEQ ID NO: 1340166 - DNA, 15 bp, Homo sapiens
ttgtattttccatac

SEQ ID NO: 1340167 - DNA, 15 bp, Homo sapiens
tttgtattttccata

SEQ ID NO: 1340168 - DNA, 15 bp, Homo sapiens
ctttgtattttccat

SEQ ID NO: 1340169 - DNA, 15 bp, Homo sapiens
actttgtattttcca

SEQ ID NO: 1340170 - DNA, 15 bp, Homo sapiens
tactttgtattttcc

SEQ ID NO: 1340171 - DNA, 15 bp, Homo sapiens
atactttgtattttc

SEQ ID NO: 1340172 - DNA, 15 bp, Homo sapiens
aatactttgtatttt

SEQ ID NO: 1340173 - DNA, 15 bp, Homo sapiens
aaatactttgtattt

SEQ ID NO: 1340174 - DNA, 15 bp, Homo sapiens
gaaatactttgtatt

SEQ ID NO: 1340175 - DNA, 15 bp, Homo sapiens
tgaaatactttgtat

SEQ ID NO: 1340176 - DNA, 15 bp, Homo sapiens
atgaaatactttgta

SEQ ID NO: 1340177 - DNA, 15 bp, Homo sapiens
aatgaaatactttgt

SEQ ID NO: 1340178 - DNA, 15 bp, Homo sapiens
taatgaaatactttg

SEQ ID NO: 1340179 - DNA, 15 bp, Homo sapiens
ctaatgaaatacttt

SEQ ID NO: 1340180 - DNA, 15 bp, Homo sapiens
actaatgaaatactt

SEQ ID NO: 1340181 - DNA, 15 bp, Homo sapiens
aactaatgaaatact

SEQ ID NO: 1340182 - DNA, 15 bp, Homo sapiens
aaactaatgaaatac

SEQ ID NO: 1340183 - DNA, 15 bp, Homo sapiens
aaaactaatgaaata

SEQ ID NO: 1340184 - DNA, 15 bp, Homo sapiens
taaaactaatgaaat

SEQ ID NO: 1340185 - DNA, 15 bp, Homo sapiens
ataaaactaatgaaa

SEQ ID NO: 1340186 - DNA, 15 bp, Homo sapiens
aataaaactaatgaa

SEQ ID NO: 1340187 - DNA, 15 bp, Homo sapiens
gaataaaactaatga

SEQ ID NO: 1340188 - DNA, 15 bp, Homo sapiens
tgaataaaactaatg

SEQ ID NO: 1340189 - DNA, 15 bp, Homo sapiens
atgaataaaactaat

SEQ ID NO: 1340190 - DNA, 15 bp, Homo sapiens
gatgaataaaactaa

SEQ ID NO: 1340191 - DNA, 15 bp, Homo sapiens
tgatgaataaaacta

SEQ ID NO: 1340192 - DNA, 15 bp, Homo sapiens
ttgatgaataaaact

SEQ ID NO: 1340193 - DNA, 15 bp, Homo sapiens
tttgatgaataaaac

SEQ ID NO: 1340194 - DNA, 15 bp, Homo sapiens
atttgatgaataaaa

SEQ ID NO: 1340195 - DNA, 15 bp, Homo sapiens
tatttgatgaataaa

SEQ ID NO: 1340196 - DNA, 15 bp, Homo sapiens
atatttgatgaataa

SEQ ID NO: 1340197 - DNA, 15 bp, Homo sapiens
aatatttgatgaata

SEQ ID NO: 1340198 - DNA, 15 bp, Homo sapiens
taatatttgatgaat

SEQ ID NO: 1340199 - DNA, 15 bp, Homo sapiens
ttaatatttgatgaa

SEQ ID NO: 1340200 - DNA, 15 bp, Homo sapiens
tttaatatttgatga

SEQ ID NO: 1340201 - DNA, 15 bp, Homo sapiens
gtttaatatttgatg

SEQ ID NO: 1340202 - DNA, 15 bp, Homo sapiens
tgtttaatatttgat

SEQ ID NO: 1340203 - DNA, 15 bp, Homo sapiens
ttgtttaatatttga

SEQ ID NO: 1340204 - DNA, 15 bp, Homo sapiens
tttgtttaatatttg

SEQ ID NO: 1340205 - DNA, 15 bp, Homo sapiens
atttgtttaatattt

SEQ ID NO: 1340206 - DNA, 15 bp, Homo sapiens
tatttgtttaatatt

SEQ ID NO: 1340207 - DNA, 15 bp, Homo sapiens
atatttgtttaatat

SEQ ID NO: 1340208 - DNA, 15 bp, Homo sapiens
aatatttgtttaata

SEQ ID NO: 1340209 - DNA, 15 bp, Homo sapiens
caatatttgtttaat

SEQ ID NO: 1340210 - DNA, 15 bp, Homo sapiens
ccaatatttgtttaa

SEQ ID NO: 1340211 - DNA, 15 bp, Homo sapiens
accaatatttgttta

SEQ ID NO: 1340212 - DNA, 15 bp, Homo sapiens
aaccaatatttgttt

SEQ ID NO: 1340213 - DNA, 15 bp, Homo sapiens
aaaccaatatttgtt

SEQ ID NO: 1340214 - DNA, 15 bp, Homo sapiens
aaaaccaatatttgt

SEQ ID NO: 1340215 - DNA, 15 bp, Homo sapiens
aaaaaccaatatttg

SEQ ID NO: 1340216 - DNA, 15 bp, Homo sapiens
taaaaaccaatattt

SEQ ID NO: 1340217 - DNA, 15 bp, Homo sapiens
ataaaaaccaatatt

SEQ ID NO: 1340218 - DNA, 15 bp, Homo sapiens
tataaaaaccaatat

SEQ ID NO: 1340219 - DNA, 15 bp, Homo sapiens
atataaaaaccaata

SEQ ID NO: 1340220 - DNA, 15 bp, Homo sapiens
catataaaaaccaat

SEQ ID NO: 1340221 - DNA, 15 bp, Homo sapiens
ccatataaaaaccaa

SEQ ID NO: 1340222 - DNA, 15 bp, Homo sapiens
tccatataaaaacca

SEQ ID NO: 1340223 - DNA, 15 bp, Homo sapiens
ttccatataaaaacc

SEQ ID NO: 1340224 - DNA, 15 bp, Homo sapiens
tttccatataaaaac

SEQ ID NO: 1340225 - DNA, 15 bp, Homo sapiens
ttttccatataaaaa

SEQ ID NO: 1340226 - DNA, 15 bp, Homo sapiens
tttttccatataaaa

SEQ ID NO: 1340227 - DNA, 15 bp, Homo sapiens
ttttttccatataaa

SEQ ID NO: 1340228 - DNA, 15 bp, Homo sapiens
attttttccatataa

SEQ ID NO: 1340229 - DNA, 15 bp, Homo sapiens
tattttttccatata

SEQ ID NO: 1340230 - DNA, 15 bp, Homo sapiens
gtattttttccatat

SEQ ID NO: 1340231 - DNA, 15 bp, Homo sapiens
agtattttttccata

SEQ ID NO: 1340232 - DNA, 15 bp, Homo sapiens
aagtattttttccat

SEQ ID NO: 1340233 - DNA, 15 bp, Homo sapiens
taagtattttttcca

SEQ ID NO: 1340234 - DNA, 15 bp, Homo sapiens
ttaagtattttttcc

SEQ ID NO: 1340235 - DNA, 15 bp, Homo sapiens
tttaagtattttttc

SEQ ID NO: 1340236 - DNA, 15 bp, Homo sapiens
ttttaagtatttttt

SEQ ID NO: 1340237 - DNA, 15 bp, Homo sapiens
attttaagtattttt

SEQ ID NO: 1340238 - DNA, 15 bp, Homo sapiens
aattttaagtatttt

SEQ ID NO: 1340239 - DNA, 15 bp, Homo sapiens
taattttaagtattt

SEQ ID NO: 1340240 - DNA, 15 bp, Homo sapiens
ttaattttaagtatt

SEQ ID NO: 1340241 - DNA, 15 bp, Homo sapiens
attaattttaagtat

SEQ ID NO: 1340242 - DNA, 15 bp, Homo sapiens
aattaattttaagta

SEQ ID NO: 1340243 - DNA, 15 bp, Homo sapiens
aaattaattttaagt

SEQ ID NO: 1340244 - DNA, 15 bp, Homo sapiens
caaaattaattttaa

SEQ ID NO: 1340245 - DNA, 15 bp, Homo sapiens
tcaaaattaatttta

SEQ ID NO: 1340246 - DNA, 15 bp, Homo sapiens
ttcaaaattaatttt

SEQ ID NO: 1340247 - DNA, 15 bp, Homo sapiens
attcaaaattaattt

SEQ ID NO: 1340248 - DNA, 15 bp, Homo sapiens
aattcaaaattaatt

SEQ ID NO: 1340249 - DNA, 15 bp, Homo sapiens
gaattcaaaattaat

SEQ ID NO: 1340250 - DNA, 15 bp, Homo sapiens
agaattcaaaattaa

SEQ ID NO: 1340251 - DNA, 15 bp, Homo sapiens
aagaattcaaaatta

SEQ ID NO: 1340252 - DNA, 15 bp, Homo sapiens
aaagaattcaaaatt

SEQ ID NO: 1340253 - DNA, 15 bp, Homo sapiens
aaaagaattcaaaat

SEQ ID NO: 1340254 - DNA, 15 bp, Homo sapiens
caaaagaattcaaaa

SEQ ID NO: 1340255 - DNA, 15 bp, Homo sapiens
tcaaaagaattcaaa

SEQ ID NO: 1340256 - DNA, 15 bp, Homo sapiens
ttcaaaagaattcaa

SEQ ID NO: 1340257 - DNA, 15 bp, Homo sapiens
tttcaaaagaattca

SEQ ID NO: 1340258 - DNA, 15 bp, Homo sapiens
atttcaaaagaattc

SEQ ID NO: 1340259 - DNA, 15 bp, Homo sapiens
tatttcaaaagaatt

SEQ ID NO: 1340260 - DNA, 15 bp, Homo sapiens
gtatttcaaaagaat

SEQ ID NO: 1340261 - DNA, 15 bp, Homo sapiens
agtatttcaaaagaa

SEQ ID NO: 1340262 - DNA, 15 bp, Homo sapiens
aagtatttcaaaaga

SEQ ID NO: 1340263 - DNA, 15 bp, Homo sapiens
aaagtatttcaaaag

SEQ ID NO: 1340264 - DNA, 15 bp, Homo sapiens
aaaagtatttcaaaa

SEQ ID NO: 1340265 - DNA, 15 bp, Homo sapiens
caaaagtatttcaaa

SEQ ID NO: 1340266 - DNA, 15 bp, Homo sapiens
tcaaaagtatttcaa

SEQ ID NO: 1340267 - DNA, 15 bp, Homo sapiens
atcaaaagtatttca

SEQ ID NO: 1340268 - DNA, 15 bp, Homo sapiens
tatcaaaagtatttc

SEQ ID NO: 1340269 - DNA, 15 bp, Homo sapiens
atatcaaaagtattt

SEQ ID NO: 1340270 - DNA, 15 bp, Homo sapiens
aatatcaaaagtatt

SEQ ID NO: 1340271 - DNA, 15 bp, Homo sapiens
caatatcaaaagtat

SEQ ID NO: 1340272 - DNA, 15 bp, Homo sapiens
ccaatatcaaaagta

SEQ ID NO: 1340273 - DNA, 15 bp, Homo sapiens
cccaatatcaaaagt

SEQ ID NO: 1340274 - DNA, 15 bp, Homo sapiens
acccaatatcaaaag

SEQ ID NO: 1340275 - DNA, 15 bp, Homo sapiens
aacccaatatcaaaa

SEQ ID NO: 1340276 - DNA, 15 bp, Homo sapiens
taacccaatatcaaa

SEQ ID NO: 1340277 - DNA, 15 bp, Homo sapiens
ttaacccaatatcaa

SEQ ID NO: 1340278 - DNA, 15 bp, Homo sapiens
tttaacccaatatca

SEQ ID NO: 1340279 - DNA, 15 bp, Homo sapiens
atttaacccaatatc

SEQ ID NO: 1340280 - DNA, 15 bp, Homo sapiens
tatttaacccaatat

SEQ ID NO: 1340281 - DNA, 15 bp, Homo sapiens
ttatttaacccaata

SEQ ID NO: 1340282 - DNA, 15 bp, Homo sapiens
tttatttaacccaat

SEQ ID NO: 1340283 - DNA, 15 bp, Homo sapiens
ttttatttaacccaa

SEQ ID NO: 1340284 - DNA, 15 bp, Homo sapiens
attttatttaaccca

SEQ ID NO: 1340285 - DNA, 15 bp, Homo sapiens
cattttatttaaccc

SEQ ID NO: 1340286 - DNA, 15 bp, Homo sapiens
acattttatttaacc

SEQ ID NO: 1340287 - DNA, 15 bp, Homo sapiens
tacattttatttaac

SEQ ID NO: 1340288 - DNA, 15 bp, Homo sapiens
atacattttatttaa

SEQ ID NO: 1340289 - DNA, 15 bp, Homo sapiens
aatacattttattta

SEQ ID NO: 1340290 - DNA, 15 bp, Homo sapiens
aaatacattttattt

SEQ ID NO: 1340291 - DNA, 15 bp, Homo sapiens
aaaatacattttatt

SEQ ID NO: 1340292 - DNA, 15 bp, Homo sapiens
caaaatacattttat

SEQ ID NO: 1340293 - DNA, 15 bp, Homo sapiens
ccaaaatacatttta

SEQ ID NO: 1340294 - DNA, 15 bp, Homo sapiens
cccaaaatacatttt

SEQ ID NO: 1340295 - DNA, 15 bp, Homo sapiens
gcccaaaatacattt

SEQ ID NO: 1340296 - DNA, 15 bp, Homo sapiens
agcccaaaatacatt

SEQ ID NO: 1340297 - DNA, 15 bp, Homo sapiens
cagcccaaaatacat

SEQ ID NO: 1340298 - DNA, 15 bp, Homo sapiens
acagcccaaaataca

SEQ ID NO: 1340299 - DNA, 15 bp, Homo sapiens
cacagcccaaaatac

SEQ ID NO: 1340300 - DNA, 15 bp, Homo sapiens
gcacagcccaaaata

SEQ ID NO: 1340301 - DNA, 15 bp, Homo sapiens
cgcacagcccaaaat

SEQ ID NO: 1340302 - DNA, 15 bp, Homo sapiens
acgcacagcccaaaa

SEQ ID NO: 1340303 - DNA, 15 bp, Homo sapiens
cacgcacagcccaaa

SEQ ID NO: 1340304 - DNA, 15 bp, Homo sapiens
acacgcacagcccaa

SEQ ID NO: 1340305 - DNA, 15 bp, Homo sapiens
aacacgcacagccca

SEQ ID NO: 1340306 - DNA, 15 bp, Homo sapiens
caacacgcacagccc

SEQ ID NO: 1340307 - DNA, 15 bp, Homo sapiens
gcaacacgcacagcc

SEQ ID NO: 1340308 - DNA, 15 bp, Homo sapiens
ggcaacacgcacagc

SEQ ID NO: 1340309 - DNA, 15 bp, Homo sapiens
aggcaacacgcacag

SEQ ID NO: 1340310 - DNA, 15 bp, Homo sapiens
gaggcaacacgcaca

SEQ ID NO: 1340311 - DNA, 15 bp, Homo sapiens
tgaggcaacacgcac

SEQ ID NO: 1340312 - DNA, 15 bp, Homo sapiens
atgaggcaacacgca

SEQ ID NO: 1340313 - DNA, 15 bp, Homo sapiens
catgaggcaacacgc

SEQ ID NO: 1340314 - DNA, 15 bp, Homo sapiens
gcatgaggcaacacg

SEQ ID NO: 1340315 - DNA, 15 bp, Homo sapiens
ggcatgaggcaacac

SEQ ID NO: 1340316 - DNA, 15 bp, Homo sapiens
aggcatgaggcaaca

SEQ ID NO: 1340317 - DNA, 15 bp, Homo sapiens
caggcatgaggcaac

SEQ ID NO: 1340318 - DNA, 15 bp, Homo sapiens
acaggcatgaggcaa

SEQ ID NO: 1340319 - DNA, 15 bp, Homo sapiens
aaattacaggcatga

SEQ ID NO: 1340320 - DNA, 15 bp, Homo sapiens
gaaattacaggcatg

SEQ ID NO: 1340321 - DNA, 15 bp, Homo sapiens
tgaaattacaggcat

SEQ ID NO: 1340322 - DNA, 15 bp, Homo sapiens
ctgaaattacaggca

SEQ ID NO: 1340323 - DNA, 15 bp, Homo sapiens
gctgaaattacaggc

SEQ ID NO: 1340324 - DNA, 15 bp, Homo sapiens
tgctgaaattacagg

SEQ ID NO: 1340325 - DNA, 15 bp, Homo sapiens
gtgctgaaattacag

SEQ ID NO: 1340326 - DNA, 15 bp, Homo sapiens
agtgctgaaattaca

SEQ ID NO: 1340327 - DNA, 15 bp, Homo sapiens
aagtgctgaaattac

SEQ ID NO: 1340328 - DNA, 15 bp, Homo sapiens
aaagtgctgaaatta

SEQ ID NO: 1340329 - DNA, 15 bp, Homo sapiens
caaagtgctgaaatt

SEQ ID NO: 1340330 - DNA, 15 bp, Homo sapiens
ccaaagtgctgaaat

SEQ ID NO: 1340331 - DNA, 15 bp, Homo sapiens
cccaaagtgctgaaa

SEQ ID NO: 1340332 - DNA, 15 bp, Homo sapiens
tcccaaagtgctgaa

SEQ ID NO: 1340333 - DNA, 15 bp, Homo sapiens
tgggctcaactgatc

SEQ ID NO: 1340334 - DNA, 15 bp, Homo sapiens
ctgggctcaactgat

SEQ ID NO: 1340335 - DNA, 15 bp, Homo sapiens
cctgggctcaactga

SEQ ID NO: 1340336 - DNA, 15 bp, Homo sapiens
tcctgggctcaactg

SEQ ID NO: 1340337 - DNA, 15 bp, Homo sapiens
ctcaggctggtctca

SEQ ID NO: 1340338 - DNA, 15 bp, Homo sapiens
gctcaggctggtctc

SEQ ID NO: 1340339 - DNA, 15 bp, Homo sapiens
tgctcaggctggtct

SEQ ID NO: 1340340 - DNA, 15 bp, Homo sapiens
ttgctcaggctggtc

SEQ ID NO: 1340341 - DNA, 15 bp, Homo sapiens
gttgctcaggctggt

SEQ ID NO: 1340342 - DNA, 15 bp, Homo sapiens
atgttgctcaggctg

SEQ ID NO: 1340343 - DNA, 15 bp, Homo sapiens
tatgttgctcaggct

SEQ ID NO: 1340344 - DNA, 15 bp, Homo sapiens
ttatgttgctcaggc

SEQ ID NO: 1340345 - DNA, 15 bp, Homo sapiens
attatgttgctcagg

SEQ ID NO: 1340346 - DNA, 15 bp, Homo sapiens
cattatgttgctcag

SEQ ID NO: 1340347 - DNA, 15 bp, Homo sapiens
tcattatgttgctca

SEQ ID NO: 1340348 - DNA, 15 bp, Homo sapiens
ctcattatgttgctc

SEQ ID NO: 1340349 - DNA, 15 bp, Homo sapiens
tctcattatgttgct

SEQ ID NO: 1340350 - DNA, 15 bp, Homo sapiens
gtctcattatgttgc

SEQ ID NO: 1340351 - DNA, 15 bp, Homo sapiens
agtctcattatgttg

SEQ ID NO: 1340352 - DNA, 15 bp, Homo sapiens
gagtctcattatgtt

SEQ ID NO: 1340353 - DNA, 15 bp, Homo sapiens
ggagtctcattatgt

SEQ ID NO: 1340354 - DNA, 15 bp, Homo sapiens
tggagtctcattatg

SEQ ID NO: 1340355 - DNA, 15 bp, Homo sapiens
atggagtctcattat

SEQ ID NO: 1340356 - DNA, 15 bp, Homo sapiens
gatggagtctcatta

SEQ ID NO: 1340357 - DNA, 15 bp, Homo sapiens
agatggagtctcatt

SEQ ID NO: 1340358 - DNA, 15 bp, Homo sapiens
gagatggagtctcat

SEQ ID NO: 1340359 - DNA, 15 bp, Homo sapiens
agagatggagtctca

SEQ ID NO: 1340360 - DNA, 15 bp, Homo sapiens
tagagatggagtctc

SEQ ID NO: 1340361 - DNA, 15 bp, Homo sapiens
gtagagatggagtct

SEQ ID NO: 1340362 - DNA, 15 bp, Homo sapiens
tgtagagatggagtc

SEQ ID NO: 1340363 - DNA, 15 bp, Homo sapiens
ttgtagagatggagt

SEQ ID NO: 1340364 - DNA, 15 bp, Homo sapiens
tttgtagagatggag

SEQ ID NO: 1340365 - DNA, 15 bp, Homo sapiens
ttttgtagagatgga

SEQ ID NO: 1340366 - DNA, 15 bp, Homo sapiens
attttgtagagatgg

SEQ ID NO: 1340367 - DNA, 15 bp, Homo sapiens
tattttgtagagatg

SEQ ID NO: 1340368 - DNA, 15 bp, Homo sapiens
ttattttgtagagat

SEQ ID NO: 1340369 - DNA, 15 bp, Homo sapiens
tttattttgtagaga

SEQ ID NO: 1340370 - DNA, 15 bp, Homo sapiens
atttattttgtagag

SEQ ID NO: 1340371 - DNA, 15 bp, Homo sapiens
tatttattttgtaga

SEQ ID NO: 1340372 - DNA, 15 bp, Homo sapiens
ttatttattttgtag

SEQ ID NO: 1340373 - DNA, 15 bp, Homo sapiens
attatttattttgta

SEQ ID NO: 1340374 - DNA, 15 bp, Homo sapiens
tattatttattttgt

SEQ ID NO: 1340375 - DNA, 15 bp, Homo sapiens
ttattatttattttg

SEQ ID NO: 1340376 - DNA, 15 bp, Homo sapiens
tttattatttatttt

SEQ ID NO: 1340377 - DNA, 15 bp, Homo sapiens
ttttattatttattt

SEQ ID NO: 1340378 - DNA, 15 bp, Homo sapiens
attttattatttatt

SEQ ID NO: 1340379 - DNA, 15 bp, Homo sapiens
aattttattatttat

SEQ ID NO: 1340380 - DNA, 15 bp, Homo sapiens
aaattttattattta

SEQ ID NO: 1340381 - DNA, 15 bp, Homo sapiens
caaattttattattt

SEQ ID NO: 1340382 - DNA, 15 bp, Homo sapiens
gcaaattttattatt

SEQ ID NO: 1340383 - DNA, 15 bp, Homo sapiens
agcaaattttattat

SEQ ID NO: 1340384 - DNA, 15 bp, Homo sapiens
cagcaaattttatta

SEQ ID NO: 1340385 - DNA, 15 bp, Homo sapiens
tcagcaaattttatt

SEQ ID NO: 1340386 - DNA, 15 bp, Homo sapiens
ctcagcaaattttat

SEQ ID NO: 1340387 - DNA, 15 bp, Homo sapiens
gctcagcaaatttta

SEQ ID NO: 1340388 - DNA, 15 bp, Homo sapiens
tgctcagcaaatttt

SEQ ID NO: 1340389 - DNA, 15 bp, Homo sapiens
atgctcagcaaattt

SEQ ID NO: 1340390 - DNA, 15 bp, Homo sapiens
catgctcagcaaatt

SEQ ID NO: 1340391 - DNA, 15 bp, Homo sapiens
ccatgctcagcaaat

SEQ ID NO: 1340392 - DNA, 15 bp, Homo sapiens
accatgctcagcaaa

SEQ ID NO: 1340393 - DNA, 15 bp, Homo sapiens
caccatgctcagcaa

SEQ ID NO: 1340394 - DNA, 15 bp, Homo sapiens
ccaccatgctcagca

SEQ ID NO: 1340395 - DNA, 15 bp, Homo sapiens
accaccatgctcagc

SEQ ID NO: 1340396 - DNA, 15 bp, Homo sapiens
caccaccatgctcag

SEQ ID NO: 1340397 - DNA, 15 bp, Homo sapiens
acaccaccatgctca

SEQ ID NO: 1340398 - DNA, 15 bp, Homo sapiens
cacaccaccatgctc

SEQ ID NO: 1340399 - DNA, 15 bp, Homo sapiens
gcacaccaccatgct

SEQ ID NO: 1340400 - DNA, 15 bp, Homo sapiens
tgcacaccaccatgc

SEQ ID NO: 1340401 - DNA, 15 bp, Homo sapiens
gtgcacaccaccatg

SEQ ID NO: 1340402 - DNA, 15 bp, Homo sapiens
ggtgcacaccaccat

SEQ ID NO: 1340403 - DNA, 15 bp, Homo sapiens
tctacaggtgcacac

SEQ ID NO: 1340404 - DNA, 15 bp, Homo sapiens
gtctacaggtgcaca

SEQ ID NO: 1340405 - DNA, 15 bp, Homo sapiens
ggtctacaggtgcac

SEQ ID NO: 1340406 - DNA, 15 bp, Homo sapiens
gggtctacaggtgca

SEQ ID NO: 1340407 - DNA, 15 bp, Homo sapiens
tgggtctacaggtgc

SEQ ID NO: 1340408 - DNA, 15 bp, Homo sapiens
atgggtctacaggtg

SEQ ID NO: 1340409 - DNA, 15 bp, Homo sapiens
gatgggtctacaggt

SEQ ID NO: 1340410 - DNA, 15 bp, Homo sapiens
ggatgggtctacagg

SEQ ID NO: 1340411 - DNA, 15 bp, Homo sapiens
tggatgggtctacag

SEQ ID NO: 1340412 - DNA, 15 bp, Homo sapiens
gtggatgggtctaca

SEQ ID NO: 1340413 - DNA, 15 bp, Homo sapiens
agtggatgggtctac

SEQ ID NO: 1340414 - DNA, 15 bp, Homo sapiens
gagtggatgggtcta

SEQ ID NO: 1340415 - DNA, 15 bp, Homo sapiens
tgagtggatgggtct

SEQ ID NO: 1340416 - DNA, 15 bp, Homo sapiens
ctgagtggatgggtc

SEQ ID NO: 1340417 - DNA, 15 bp, Homo sapiens
actgagtggatgggt

SEQ ID NO: 1340418 - DNA, 15 bp, Homo sapiens
tactgagtggatggg

SEQ ID NO: 1340419 - DNA, 15 bp, Homo sapiens
ctactgagtggatgg

SEQ ID NO: 1340420 - DNA, 15 bp, Homo sapiens
actactgagtggatg

SEQ ID NO: 1340421 - DNA, 15 bp, Homo sapiens
gactactgagtggat

SEQ ID NO: 1340422 - DNA, 15 bp, Homo sapiens
agactactgagtgga

SEQ ID NO: 1340423 - DNA, 15 bp, Homo sapiens
cagactactgagtgg

SEQ ID NO: 1340424 - DNA, 15 bp, Homo sapiens
tcagactactgagtg

SEQ ID NO: 1340425 - DNA, 15 bp, Homo sapiens
ctcagactactgagt

SEQ ID NO: 1340426 - DNA, 15 bp, Homo sapiens
cctcagactactgag

SEQ ID NO: 1340427 - DNA, 15 bp, Homo sapiens
acctcagactactga

SEQ ID NO: 1340428 - DNA, 15 bp, Homo sapiens
cacctcagactactg

SEQ ID NO: 1340429 - DNA, 15 bp, Homo sapiens
ccacctcagactact

SEQ ID NO: 1340430 - DNA, 15 bp, Homo sapiens
cccacctcagactac

SEQ ID NO: 1340431 - DNA, 15 bp, Homo sapiens
tcccacctcagacta

SEQ ID NO: 1340432 - DNA, 15 bp, Homo sapiens
ttcccacctcagact

SEQ ID NO: 1340433 - DNA, 15 bp, Homo sapiens
cttcccacctcagac

SEQ ID NO: 1340434 - DNA, 15 bp, Homo sapiens
tcttcccacctcaga

SEQ ID NO: 1340435 - DNA, 15 bp, Homo sapiens
atcttcccacctcag

SEQ ID NO: 1340436 - DNA, 15 bp, Homo sapiens
gatcttcccacctca

SEQ ID NO: 1340437 - DNA, 15 bp, Homo sapiens
ggatcttcccacctc

SEQ ID NO: 1340438 - DNA, 15 bp, Homo sapiens
gggatcttcccacct

SEQ ID NO: 1340439 - DNA, 15 bp, Homo sapiens
agggatcttcccacc

SEQ ID NO: 1340440 - DNA, 15 bp, Homo sapiens
aagggatcttcccac

SEQ ID NO: 1340441 - DNA, 15 bp, Homo sapiens
caagggatcttccca

SEQ ID NO: 1340442 - DNA, 15 bp, Homo sapiens
tcaagggatcttccc

SEQ ID NO: 1340443 - DNA, 15 bp, Homo sapiens
ctcaagggatcttcc

SEQ ID NO: 1340444 - DNA, 15 bp, Homo sapiens
gctcaagggatcttc

SEQ ID NO: 1340445 - DNA, 15 bp, Homo sapiens
agctcaagggatctt

SEQ ID NO: 1340446 - DNA, 15 bp, Homo sapiens
gagctcaagggatct

SEQ ID NO: 1340447 - DNA, 15 bp, Homo sapiens
tgagctcaagggatc

SEQ ID NO: 1340448 - DNA, 15 bp, Homo sapiens
ctgagctcaagggat

SEQ ID NO: 1340449 - DNA, 15 bp, Homo sapiens
cctgagctcaaggga

SEQ ID NO: 1340450 - DNA, 15 bp, Homo sapiens
tcctgagctcaaggg

SEQ ID NO: 1340451 - DNA, 15 bp, Homo sapiens
ctcctgagctcaagg

SEQ ID NO: 1340452 - DNA, 15 bp, Homo sapiens
gctcctgagctcaag

SEQ ID NO: 1340453 - DNA, 15 bp, Homo sapiens
agctcctgagctcaa

SEQ ID NO: 1340454 - DNA, 15 bp, Homo sapiens
gagctcctgagctca

SEQ ID NO: 1340455 - DNA, 15 bp, Homo sapiens
tgagctcctgagctc

SEQ ID NO: 1340456 - DNA, 15 bp, Homo sapiens
ttgagctcctgagct

SEQ ID NO: 1340457 - DNA, 15 bp, Homo sapiens
cttgagctcctgagc

SEQ ID NO: 1340458 - DNA, 15 bp, Homo sapiens
tcttgagctcctgag

SEQ ID NO: 1340459 - DNA, 15 bp, Homo sapiens
gtcttgagctcctga

SEQ ID NO: 1340460 - DNA, 15 bp, Homo sapiens
agtcttgagctcctg

SEQ ID NO: 1340461 - DNA, 15 bp, Homo sapiens
cagtcttgagctcct

SEQ ID NO: 1340462 - DNA, 15 bp, Homo sapiens
tcagtcttgagctcc

SEQ ID NO: 1340463 - DNA, 15 bp, Homo sapiens
ctcagtcttgagctc

SEQ ID NO: 1340464 - DNA, 15 bp, Homo sapiens
actcagtcttgagct

SEQ ID NO: 1340465 - DNA, 15 bp, Homo sapiens
cactcagtcttgagc

SEQ ID NO: 1340466 - DNA, 15 bp, Homo sapiens
tcactcagtcttgag

SEQ ID NO: 1340467 - DNA, 15 bp, Homo sapiens
ttcactcagtcttga

SEQ ID NO: 1340468 - DNA, 15 bp, Homo sapiens
gttcactcagtcttg

SEQ ID NO: 1340469 - DNA, 15 bp, Homo sapiens
ggttcactcagtctt

SEQ ID NO: 1340470 - DNA, 15 bp, Homo sapiens
tggttcactcagtct

SEQ ID NO: 1340471 - DNA, 15 bp, Homo sapiens
atggttcactcagtc

SEQ ID NO: 1340472 - DNA, 15 bp, Homo sapiens
catggttcactcagt

SEQ ID NO: 1340473 - DNA, 15 bp, Homo sapiens
tcatggttcactcag

SEQ ID NO: 1340474 - DNA, 15 bp, Homo sapiens
atcatggttcactca

SEQ ID NO: 1340475 - DNA, 15 bp, Homo sapiens
gatcatggttcactc

SEQ ID NO: 1340476 - DNA, 15 bp, Homo sapiens
agatcatggttcact

SEQ ID NO: 1340477 - DNA, 15 bp, Homo sapiens
cagatcatggttcac

SEQ ID NO: 1340478 - DNA, 15 bp, Homo sapiens
gcagatcatggttca

SEQ ID NO: 1340479 - DNA, 15 bp, Homo sapiens
ggcagatcatggttc

SEQ ID NO: 1340480 - DNA, 15 bp, Homo sapiens
tggcagatcatggtt

SEQ ID NO: 1340481 - DNA, 15 bp, Homo sapiens
atggcagatcatggt

SEQ ID NO: 1340482 - DNA, 15 bp, Homo sapiens
aatggcagatcatgg

SEQ ID NO: 1340483 - DNA, 15 bp, Homo sapiens
caatggcagatcatg

SEQ ID NO: 1340484 - DNA, 15 bp, Homo sapiens
gcaatggcagatcat

SEQ ID NO: 1340485 - DNA, 15 bp, Homo sapiens
tgcaatggcagatca

SEQ ID NO: 1340486 - DNA, 15 bp, Homo sapiens
gtgcaatggcagatc

SEQ ID NO: 1340487 - DNA, 15 bp, Homo sapiens
agtgcaatggcagat

SEQ ID NO: 1340488 - DNA, 15 bp, Homo sapiens
gagtgcaatggcaga

SEQ ID NO: 1340489 - DNA, 15 bp, Homo sapiens
gtggagtgcaatggc

SEQ ID NO: 1340490 - DNA, 15 bp, Homo sapiens
ggtggagtgcaatgg

SEQ ID NO: 1340491 - DNA, 15 bp, Homo sapiens
gggtggagtgcaatg

SEQ ID NO: 1340492 - DNA, 15 bp, Homo sapiens
agggtggagtgcaat

SEQ ID NO: 1340493 - DNA, 15 bp, Homo sapiens
cagggtggagtgcaa

SEQ ID NO: 1340494 - DNA, 15 bp, Homo sapiens
actcttgctctgttg

SEQ ID NO: 1340495 - DNA, 15 bp, Homo sapiens
cactcttgctctgtt

SEQ ID NO: 1340496 - DNA, 15 bp, Homo sapiens
acactcttgctctgt

SEQ ID NO: 1340497 - DNA, 15 bp, Homo sapiens
aacactcttgctctg

SEQ ID NO: 1340498 - DNA, 15 bp, Homo sapiens
aaacactcttgctct

SEQ ID NO: 1340499 - DNA, 15 bp, Homo sapiens
gaaacactcttgctc

SEQ ID NO: 1340500 - DNA, 15 bp, Homo sapiens
ggaaacactcttgct

SEQ ID NO: 1340501 - DNA, 15 bp, Homo sapiens
tggaaacactcttgc

SEQ ID NO: 1340502 - DNA, 15 bp, Homo sapiens
ttggaaacactcttg

SEQ ID NO: 1340503 - DNA, 15 bp, Homo sapiens
tttggaaacactctt

SEQ ID NO: 1340504 - DNA, 15 bp, Homo sapiens
ttttggaaacactct

SEQ ID NO: 1340505 - DNA, 15 bp, Homo sapiens
attttggaaacactc

SEQ ID NO: 1340506 - DNA, 15 bp, Homo sapiens
tattttggaaacact

SEQ ID NO: 1340507 - DNA, 15 bp, Homo sapiens
atattttggaaacac

SEQ ID NO: 1340508 - DNA, 15 bp, Homo sapiens
tatattttggaaaca

SEQ ID NO: 1340509 - DNA, 15 bp, Homo sapiens
atatattttggaaac

SEQ ID NO: 1340510 - DNA, 15 bp, Homo sapiens
catatattttggaaa

SEQ ID NO: 1340511 - DNA, 15 bp, Homo sapiens
acatatattttggaa

SEQ ID NO: 1340512 - DNA, 15 bp, Homo sapiens
tacatatattttgga

SEQ ID NO: 1340513 - DNA, 15 bp, Homo sapiens
atacatatattttgg

SEQ ID NO: 1340514 - DNA, 15 bp, Homo sapiens
catacatatattttg

SEQ ID NO: 1340515 - DNA, 15 bp, Homo sapiens
acatacatatatttt

SEQ ID NO: 1340516 - DNA, 15 bp, Homo sapiens
aacatacatatattt

SEQ ID NO: 1340517 - DNA, 15 bp, Homo sapiens
aaacatacatatatt

SEQ ID NO: 1340518 - DNA, 15 bp, Homo sapiens
aaaacatacatatat

SEQ ID NO: 1340519 - DNA, 15 bp, Homo sapiens
aaaaacatacatata

SEQ ID NO: 1340520 - DNA, 15 bp, Homo sapiens
aaaaaacatacatat

SEQ ID NO: 1340521 - DNA, 15 bp, Homo sapiens
caaaaaacatacata

SEQ ID NO: 1340522 - DNA, 15 bp, Homo sapiens
tcaaaaaacatacat

SEQ ID NO: 1340523 - DNA, 15 bp, Homo sapiens
ttcaaaaaacataca

SEQ ID NO: 1340524 - DNA, 15 bp, Homo sapiens
cttcaaaaaacatac

SEQ ID NO: 1340525 - DNA, 15 bp, Homo sapiens
acttcaaaaaacata

SEQ ID NO: 1340526 - DNA, 15 bp, Homo sapiens
aacttcaaaaaacat

SEQ ID NO: 1340527 - DNA, 15 bp, Homo sapiens
aaacttcaaaaaaca

SEQ ID NO: 1340528 - DNA, 15 bp, Homo sapiens
taaacttcaaaaaac

SEQ ID NO: 1340529 - DNA, 15 bp, Homo sapiens
gtaaacttcaaaaaa

SEQ ID NO: 1340530 - DNA, 15 bp, Homo sapiens
agtaaacttcaaaaa

SEQ ID NO: 1340531 - DNA, 15 bp, Homo sapiens
aagtaaacttcaaaa

SEQ ID NO: 1340532 - DNA, 15 bp, Homo sapiens
aaagtaaacttcaaa

SEQ ID NO: 1340533 - DNA, 15 bp, Homo sapiens
aaaagtaaacttcaa

SEQ ID NO: 1340534 - DNA, 15 bp, Homo sapiens
aaaaagtaaacttca

SEQ ID NO: 1340535 - DNA, 15 bp, Homo sapiens
aaaaaagtaaacttc

SEQ ID NO: 1340536 - DNA, 15 bp, Homo sapiens
aaaaaaagtaaactt

SEQ ID NO: 1340537 - DNA, 15 bp, Homo sapiens
aaaaaaaagtaaact

SEQ ID NO: 1340538 - DNA, 15 bp, Homo sapiens
aaaaaaaaagtaaac

SEQ ID NO: 1340539 - DNA, 15 bp, Homo sapiens
gaaaaaaaaaaaaag

SEQ ID NO: 1340540 - DNA, 15 bp, Homo sapiens
tcaaaaaaagaaaaa

SEQ ID NO: 1340541 - DNA, 15 bp, Homo sapiens
ctcaaaaaaagaaaa

SEQ ID NO: 1340542 - DNA, 15 bp, Homo sapiens
tctcaaaaaaagaaa

SEQ ID NO: 1340543 - DNA, 15 bp, Homo sapiens
ttctcaaaaaaagaa

SEQ ID NO: 1340544 - DNA, 15 bp, Homo sapiens
cttctcaaaaaaaga

SEQ ID NO: 1340545 - DNA, 15 bp, Homo sapiens
acttctcaaaaaaag

SEQ ID NO: 1340546 - DNA, 15 bp, Homo sapiens
tacttctcaaaaaaa

SEQ ID NO: 1340547 - DNA, 15 bp, Homo sapiens
ctacttctcaaaaaa

SEQ ID NO: 1340548 - DNA, 15 bp, Homo sapiens
actacttctcaaaaa

SEQ ID NO: 1340549 - DNA, 15 bp, Homo sapiens
gactacttctcaaaa

SEQ ID NO: 1340550 - DNA, 15 bp, Homo sapiens
agactacttctcaaa

SEQ ID NO: 1340551 - DNA, 15 bp, Homo sapiens
aagactacttctcaa

SEQ ID NO: 1340552 - DNA, 15 bp, Homo sapiens
gaagactacttctca

SEQ ID NO: 1340553 - DNA, 15 bp, Homo sapiens
ggaagactacttctc

SEQ ID NO: 1340554 - DNA, 15 bp, Homo sapiens
aggaagactacttct

SEQ ID NO: 1340555 - DNA, 15 bp, Homo sapiens
aaggaagactacttc

SEQ ID NO: 1340556 - DNA, 15 bp, Homo sapiens
aaaggaagactactt

SEQ ID NO: 1340557 - DNA, 15 bp, Homo sapiens
caaaggaagactact

SEQ ID NO: 1340558 - DNA, 15 bp, Homo sapiens
acaaaggaagactac

SEQ ID NO: 1340559 - DNA, 15 bp, Homo sapiens
gacaaaggaagacta

SEQ ID NO: 1340560 - DNA, 15 bp, Homo sapiens
ggacaaaggaagact

SEQ ID NO: 1340561 - DNA, 15 bp, Homo sapiens
gggacaaaggaagac

SEQ ID NO: 1340562 - DNA, 15 bp, Homo sapiens
ggggacaaaggaaga

SEQ ID NO: 1340563 - DNA, 15 bp, Homo sapiens
gggggacaaaggaag

SEQ ID NO: 1340564 - DNA, 15 bp, Homo sapiens
tgggggacaaaggaa

SEQ ID NO: 1340565 - DNA, 15 bp, Homo sapiens
ctgggggacaaagga

SEQ ID NO: 1340566 - DNA, 15 bp, Homo sapiens
cctgggggacaaagg

SEQ ID NO: 1340567 - DNA, 15 bp, Homo sapiens
cagcctgggggacaa

SEQ ID NO: 1340568 - DNA, 15 bp, Homo sapiens
catgccattgcactc

SEQ ID NO: 1340569 - DNA, 15 bp, Homo sapiens
tcatgccattgcact

SEQ ID NO: 1340570 - DNA, 15 bp, Homo sapiens
atcatgccattgcac

SEQ ID NO: 1340571 - DNA, 15 bp, Homo sapiens
tatgagccaagatca

SEQ ID NO: 1340572 - DNA, 15 bp, Homo sapiens
ctatgagccaagatc

SEQ ID NO: 1340573 - DNA, 15 bp, Homo sapiens
gctatgagccaagat

SEQ ID NO: 1340574 - DNA, 15 bp, Homo sapiens
tgctatgagccaaga

SEQ ID NO: 1340575 - DNA, 15 bp, Homo sapiens
ttgctatgagccaag

SEQ ID NO: 1340576 - DNA, 15 bp, Homo sapiens
gttgctatgagccaa

SEQ ID NO: 1340577 - DNA, 15 bp, Homo sapiens
ggttgctatgagcca

SEQ ID NO: 1340578 - DNA, 15 bp, Homo sapiens
aggttgctatgagcc

SEQ ID NO: 1340579 - DNA, 15 bp, Homo sapiens
gaggttgctatgagc

SEQ ID NO: 1340580 - DNA, 15 bp, Homo sapiens
agaggttgctatgag

SEQ ID NO: 1340581 - DNA, 15 bp, Homo sapiens
cagaggttgctatga

SEQ ID NO: 1340582 - DNA, 15 bp, Homo sapiens
gcagaggttgctatg

SEQ ID NO: 1340583 - DNA, 15 bp, Homo sapiens
ggcagaggttgctat

SEQ ID NO: 1340584 - DNA, 15 bp, Homo sapiens
aggcagaggttgcta

SEQ ID NO: 1340585 - DNA, 15 bp, Homo sapiens
tgctgaggcaggaga

SEQ ID NO: 1340586 - DNA, 15 bp, Homo sapiens
atgctgaggcaggag

SEQ ID NO: 1340587 - DNA, 15 bp, Homo sapiens
gatgctgaggcagga

SEQ ID NO: 1340588 - DNA, 15 bp, Homo sapiens
ggatgctgaggcagg

SEQ ID NO: 1340589 - DNA, 15 bp, Homo sapiens
aggatgctgaggcag

SEQ ID NO: 1340590 - DNA, 15 bp, Homo sapiens
caggatgctgaggca

SEQ ID NO: 1340591 - DNA, 15 bp, Homo sapiens
tcaggatgctgaggc

SEQ ID NO: 1340592 - DNA, 15 bp, Homo sapiens
ctcaggatgctgagg

SEQ ID NO: 1340593 - DNA, 15 bp, Homo sapiens
actcaggatgctgag

SEQ ID NO: 1340594 - DNA, 15 bp, Homo sapiens
tactcaggatgctga

SEQ ID NO: 1340595 - DNA, 15 bp, Homo sapiens
ctactcaggatgctg

SEQ ID NO: 1340596 - DNA, 15 bp, Homo sapiens
gctactcaggatgct

SEQ ID NO: 1340597 - DNA, 15 bp, Homo sapiens
agctactcaggatgc

SEQ ID NO: 1340598 - DNA, 15 bp, Homo sapiens
cagctactcaggatg

SEQ ID NO: 1340599 - DNA, 15 bp, Homo sapiens
ccagctactcaggat

SEQ ID NO: 1340600 - DNA, 15 bp, Homo sapiens
agcgggcgcctgtaa

SEQ ID NO: 1340601 - DNA, 15 bp, Homo sapiens
tagcgggcgcctgta

SEQ ID NO: 1340602 - DNA, 15 bp, Homo sapiens
gtagcgggcgcctgt

SEQ ID NO: 1340603 - DNA, 15 bp, Homo sapiens
ggtagcgggcgcctg

SEQ ID NO: 1340604 - DNA, 15 bp, Homo sapiens
tggtagcgggcgcct

SEQ ID NO: 1340605 - DNA, 15 bp, Homo sapiens
atggtagcgggcgcc

SEQ ID NO: 1340606 - DNA, 15 bp, Homo sapiens
catggtagcgggcgc

SEQ ID NO: 1340607 - DNA, 15 bp, Homo sapiens
gcatggtagcgggcg

SEQ ID NO: 1340608 - DNA, 15 bp, Homo sapiens
ggcatggtagcgggc

SEQ ID NO: 1340609 - DNA, 15 bp, Homo sapiens
gggcatggtagcggg

SEQ ID NO: 1340610 - DNA, 15 bp, Homo sapiens
tgggcatggtagcgg

SEQ ID NO: 1340611 - DNA, 15 bp, Homo sapiens
ctgggcatggtagcg

SEQ ID NO: 1340612 - DNA, 15 bp, Homo sapiens
gctgggcatggtagc

SEQ ID NO: 1340613 - DNA, 15 bp, Homo sapiens
gaaattagctgggca

SEQ ID NO: 1340614 - DNA, 15 bp, Homo sapiens
cagaaattagctggg

SEQ ID NO: 1340615 - DNA, 15 bp, Homo sapiens
acagaaattagctgg

SEQ ID NO: 1340616 - DNA, 15 bp, Homo sapiens
tacagaaattagctg

SEQ ID NO: 1340617 - DNA, 15 bp, Homo sapiens
atacagaaattagct

SEQ ID NO: 1340618 - DNA, 15 bp, Homo sapiens
aatacagaaattagc

SEQ ID NO: 1340619 - DNA, 15 bp, Homo sapiens
aaatacagaaattag

SEQ ID NO: 1340620 - DNA, 15 bp, Homo sapiens
aaaatacagaaatta

SEQ ID NO: 1340621 - DNA, 15 bp, Homo sapiens
aaaaatacagaaatt

SEQ ID NO: 1340622 - DNA, 15 bp, Homo sapiens
taaaaatacagaaat

SEQ ID NO: 1340623 - DNA, 15 bp, Homo sapiens
ctaaaaatacagaaa

SEQ ID NO: 1340624 - DNA, 15 bp, Homo sapiens
actaaaaatacagaa

SEQ ID NO: 1340625 - DNA, 15 bp, Homo sapiens
tactaaaaatacaga

SEQ ID NO: 1340626 - DNA, 15 bp, Homo sapiens
ctactaaaaatacag

SEQ ID NO: 1340627 - DNA, 15 bp, Homo sapiens
ctggtgaaaccctgt

SEQ ID NO: 1340628 - DNA, 15 bp, Homo sapiens
cctggtgaaaccctg

SEQ ID NO: 1340629 - DNA, 15 bp, Homo sapiens
acctggtgaaaccct

SEQ ID NO: 1340630 - DNA, 15 bp, Homo sapiens
caacctggtgaaacc

SEQ ID NO: 1340631 - DNA, 15 bp, Homo sapiens
ccaacctggtgaaac

SEQ ID NO: 1340632 - DNA, 15 bp, Homo sapiens
gccaacctggtgaaa

SEQ ID NO: 1340633 - DNA, 15 bp, Homo sapiens
ggccaacctggtgaa

SEQ ID NO: 1340634 - DNA, 15 bp, Homo sapiens
tggccaacctggtga

SEQ ID NO: 1340635 - DNA, 15 bp, Homo sapiens
ctggccaacctggtg

SEQ ID NO: 1340636 - DNA, 15 bp, Homo sapiens
cctggccaacctggt

SEQ ID NO: 1340637 - DNA, 15 bp, Homo sapiens
gcctggccaacctgg

SEQ ID NO: 1340638 - DNA, 15 bp, Homo sapiens
agcctggccaacctg

SEQ ID NO: 1340639 - DNA, 15 bp, Homo sapiens
cagcctggccaacct

SEQ ID NO: 1340640 - DNA, 15 bp, Homo sapiens
ccagcctggccaacc

SEQ ID NO: 1340641 - DNA, 15 bp, Homo sapiens
agtcaggagttcaac

SEQ ID NO: 1340642 - DNA, 15 bp, Homo sapiens
aagtcaggagttcaa

SEQ ID NO: 1340643 - DNA, 15 bp, Homo sapiens
gaagtcaggagttca

SEQ ID NO: 1340644 - DNA, 15 bp, Homo sapiens
tggatcacctgaagt

SEQ ID NO: 1340645 - DNA, 15 bp, Homo sapiens
gtggatcacctgaag

SEQ ID NO: 1340646 - DNA, 15 bp, Homo sapiens
ggtggatcacctgaa

SEQ ID NO: 1340647 - DNA, 15 bp, Homo sapiens
gaggagggtggatca

SEQ ID NO: 1340648 - DNA, 15 bp, Homo sapiens
cgaggagggtggatc

SEQ ID NO: 1340649 - DNA, 15 bp, Homo sapiens
ccgaggagggtggat

SEQ ID NO: 1340650 - DNA, 15 bp, Homo sapiens
gccgaggagggtgga

SEQ ID NO: 1340651 - DNA, 15 bp, Homo sapiens
ggccgaggagggtgg

SEQ ID NO: 1340652 - DNA, 15 bp, Homo sapiens
aggccgaggagggtg

SEQ ID NO: 1340653 - DNA, 15 bp, Homo sapiens
gaggccgaggagggt

SEQ ID NO: 1340654 - DNA, 15 bp, Homo sapiens
ggaggccgaggaggg

SEQ ID NO: 1340655 - DNA, 15 bp, Homo sapiens
gggaggccgaggagg

SEQ ID NO: 1340656 - DNA, 15 bp, Homo sapiens
tgggaggccgaggag

SEQ ID NO: 1340657 - DNA, 15 bp, Homo sapiens
ttgggaggccgagga

SEQ ID NO: 1340658 - DNA, 15 bp, Homo sapiens
cttgggaggccgagg

SEQ ID NO: 1340659 - DNA, 15 bp, Homo sapiens
ccttgggaggccgag

SEQ ID NO: 1340660 - DNA, 15 bp, Homo sapiens
gccttgggaggccga

SEQ ID NO: 1340661 - DNA, 15 bp, Homo sapiens
agccttgggaggccg

SEQ ID NO: 1340662 - DNA, 15 bp, Homo sapiens
gagccttgggaggcc

SEQ ID NO: 1340663 - DNA, 15 bp, Homo sapiens
agagccttgggaggc

SEQ ID NO: 1340664 - DNA, 15 bp, Homo sapiens
cagagccttgggagg

SEQ ID NO: 1340665 - DNA, 15 bp, Homo sapiens
ccagagccttgggag

SEQ ID NO: 1340666 - DNA, 15 bp, Homo sapiens
cccagagccttggga

SEQ ID NO: 1340667 - DNA, 15 bp, Homo sapiens
tcccagagccttggg

SEQ ID NO: 1340668 - DNA, 15 bp, Homo sapiens
atcccagagccttgg

SEQ ID NO: 1340669 - DNA, 15 bp, Homo sapiens
aatcccagagccttg

SEQ ID NO: 1340670 - DNA, 15 bp, Homo sapiens
taatcccagagcctt

SEQ ID NO: 1340671 - DNA, 15 bp, Homo sapiens
ataatcccagagcct

SEQ ID NO: 1340672 - DNA, 15 bp, Homo sapiens
tataatcccagagcc

SEQ ID NO: 1340673 - DNA, 15 bp, Homo sapiens
actggccaggcgcgg

SEQ ID NO: 1340674 - DNA, 15 bp, Homo sapiens
aactggccaggcgcg

SEQ ID NO: 1340675 - DNA, 15 bp, Homo sapiens
aaactggccaggcgc

SEQ ID NO: 1340676 - DNA, 15 bp, Homo sapiens
aaaactggccaggcg

SEQ ID NO: 1340677 - DNA, 15 bp, Homo sapiens
gaaaactggccaggc

SEQ ID NO: 1340678 - DNA, 15 bp, Homo sapiens
tgaaaactggccagg

SEQ ID NO: 1340679 - DNA, 15 bp, Homo sapiens
gtgaaaactggccag

SEQ ID NO: 1340680 - DNA, 15 bp, Homo sapiens
ggtgaaaactggcca

SEQ ID NO: 1340681 - DNA, 15 bp, Homo sapiens
aggtgaaaactggcc

SEQ ID NO: 1340682 - DNA, 15 bp, Homo sapiens
aaggtgaaaactggc

SEQ ID NO: 1340683 - DNA, 15 bp, Homo sapiens
taaggtgaaaactgg

SEQ ID NO: 1340684 - DNA, 15 bp, Homo sapiens
ttaaggtgaaaactg

SEQ ID NO: 1340685 - DNA, 15 bp, Homo sapiens
attaaggtgaaaact

SEQ ID NO: 1340686 - DNA, 15 bp, Homo sapiens
cattaaggtgaaaac

SEQ ID NO: 1340687 - DNA, 15 bp, Homo sapiens
acattaaggtgaaaa

SEQ ID NO: 1340688 - DNA, 15 bp, Homo sapiens
cacattaaggtgaaa

SEQ ID NO: 1340689 - DNA, 15 bp, Homo sapiens
ccacattaaggtgaa

SEQ ID NO: 1340690 - DNA, 15 bp, Homo sapiens
accacattaaggtga

SEQ ID NO: 1340691 - DNA, 15 bp, Homo sapiens
aaccacattaaggtg

SEQ ID NO: 1340692 - DNA, 15 bp, Homo sapiens
taaccacattaaggt

SEQ ID NO: 1340693 - DNA, 15 bp, Homo sapiens
gtaaccacattaagg

SEQ ID NO: 1340694 - DNA, 15 bp, Homo sapiens
agtaaccacattaag

SEQ ID NO: 1340695 - DNA, 15 bp, Homo sapiens
tagtaaccacattaa

SEQ ID NO: 1340696 - DNA, 15 bp, Homo sapiens
ttagtaaccacatta

SEQ ID NO: 1340697 - DNA, 15 bp, Homo sapiens
tttagtaaccacatt

SEQ ID NO: 1340698 - DNA, 15 bp, Homo sapiens
gtttagtaaccacat

SEQ ID NO: 1340699 - DNA, 15 bp, Homo sapiens
tgtttagtaaccaca

SEQ ID NO: 1340700 - DNA, 15 bp, Homo sapiens
ttgtttagtaaccac

SEQ ID NO: 1340701 - DNA, 15 bp, Homo sapiens
attgtttagtaacca

SEQ ID NO: 1340702 - DNA, 15 bp, Homo sapiens
aattgtttagtaacc

SEQ ID NO: 1340703 - DNA, 15 bp, Homo sapiens
aaattgtttagtaac

SEQ ID NO: 1340704 - DNA, 15 bp, Homo sapiens
taaattgtttagtaa

SEQ ID NO: 1340705 - DNA, 15 bp, Homo sapiens
ttaaattgtttagta

SEQ ID NO: 1340706 - DNA, 15 bp, Homo sapiens
tttaaattgtttagt

SEQ ID NO: 1340707 - DNA, 15 bp, Homo sapiens
ctttaaattgtttag

SEQ ID NO: 1340708 - DNA, 15 bp, Homo sapiens
actttaaattgttta

SEQ ID NO: 1340709 - DNA, 15 bp, Homo sapiens
aactttaaattgttt

SEQ ID NO: 1340710 - DNA, 15 bp, Homo sapiens
taactttaaattgtt

SEQ ID NO: 1340711 - DNA, 15 bp, Homo sapiens
ataactttaaattgt

SEQ ID NO: 1340712 - DNA, 15 bp, Homo sapiens
tataactttaaattg

SEQ ID NO: 1340713 - DNA, 15 bp, Homo sapiens
atataactttaaatt

SEQ ID NO: 1340714 - DNA, 15 bp, Homo sapiens
catataactttaaat

SEQ ID NO: 1340715 - DNA, 15 bp, Homo sapiens
acatataactttaaa

SEQ ID NO: 1340716 - DNA, 15 bp, Homo sapiens
tacatataactttaa

SEQ ID NO: 1340717 - DNA, 15 bp, Homo sapiens
atacatataacttta

SEQ ID NO: 1340718 - DNA, 15 bp, Homo sapiens
catacatataacttt

SEQ ID NO: 1340719 - DNA, 15 bp, Homo sapiens
acatacatataactt

SEQ ID NO: 1340720 - DNA, 15 bp, Homo sapiens
gacatacatataact

SEQ ID NO: 1340721 - DNA, 15 bp, Homo sapiens
agacatacatataac

SEQ ID NO: 1340722 - DNA, 15 bp, Homo sapiens
gagacatacatataa

SEQ ID NO: 1340723 - DNA, 15 bp, Homo sapiens
tgagacatacatata

SEQ ID NO: 1340724 - DNA, 15 bp, Homo sapiens
gtgagacatacatat

SEQ ID NO: 1340725 - DNA, 15 bp, Homo sapiens
tgtgagacatacata

SEQ ID NO: 1340726 - DNA, 15 bp, Homo sapiens
atgtgagacatacat

SEQ ID NO: 1340727 - DNA, 15 bp, Homo sapiens
aatgtgagacataca

SEQ ID NO: 1340728 - DNA, 15 bp, Homo sapiens
taatgtgagacatac

SEQ ID NO: 1340729 - DNA, 15 bp, Homo sapiens
ataatgtgagacata

SEQ ID NO: 1340730 - DNA, 15 bp, Homo sapiens
cataatgtgagacat

SEQ ID NO: 1340731 - DNA, 15 bp, Homo sapiens
acataatgtgagaca

SEQ ID NO: 1340732 - DNA, 15 bp, Homo sapiens
tacataatgtgagac

SEQ ID NO: 1340733 - DNA, 15 bp, Homo sapiens
gtacataatgtgaga

SEQ ID NO: 1340734 - DNA, 15 bp, Homo sapiens
ggtacataatgtgag

SEQ ID NO: 1340735 - DNA, 15 bp, Homo sapiens
aggtacataatgtga

SEQ ID NO: 1340736 - DNA, 15 bp, Homo sapiens
taggtacataatgtg

SEQ ID NO: 1340737 - DNA, 15 bp, Homo sapiens
ataggtacataatgt

SEQ ID NO: 1340738 - DNA, 15 bp, Homo sapiens
aataggtacataatg

SEQ ID NO: 1340739 - DNA, 15 bp, Homo sapiens
caataggtacataat

SEQ ID NO: 1340740 - DNA, 15 bp, Homo sapiens
acaataggtacataa

SEQ ID NO: 1340741 - DNA, 15 bp, Homo sapiens
tacaataggtacata

SEQ ID NO: 1340742 - DNA, 15 bp, Homo sapiens
gtacaataggtacat

SEQ ID NO: 1340743 - DNA, 15 bp, Homo sapiens
tgtacaataggtaca

SEQ ID NO: 1340744 - DNA, 15 bp, Homo sapiens
ctgtacaataggtac

SEQ ID NO: 1340745 - DNA, 15 bp, Homo sapiens
gctgtacaataggta

SEQ ID NO: 1340746 - DNA, 15 bp, Homo sapiens
agctgtacaataggt

SEQ ID NO: 1340747 - DNA, 15 bp, Homo sapiens
gagctgtacaatagg

SEQ ID NO: 1340748 - DNA, 15 bp, Homo sapiens
agagctgtacaatag

SEQ ID NO: 1340749 - DNA, 15 bp, Homo sapiens
cagagctgtacaata

SEQ ID NO: 1340750 - DNA, 15 bp, Homo sapiens
gcagagctgtacaat

SEQ ID NO: 1340751 - DNA, 15 bp, Homo sapiens
agcagagctgtacaa

SEQ ID NO: 1340752 - DNA, 15 bp, Homo sapiens
aagcagagctgtaca

SEQ ID NO: 1340753 - DNA, 15 bp, Homo sapiens
aaagcagagctgtac

SEQ ID NO: 1340754 - DNA, 15 bp, Homo sapiens
taaagcagagctgta

SEQ ID NO: 1340755 - DNA, 15 bp, Homo sapiens
ctaaagcagagctgt

SEQ ID NO: 1340756 - DNA, 15 bp, Homo sapiens
gctaaagcagagctg

SEQ ID NO: 1340757 - DNA, 15 bp, Homo sapiens
tgctaaagcagagct

SEQ ID NO: 1340758 - DNA, 15 bp, Homo sapiens
atgctaaagcagagc

SEQ ID NO: 1340759 - DNA, 15 bp, Homo sapiens
tatgctaaagcagag

SEQ ID NO: 1340760 - DNA, 15 bp, Homo sapiens
ctatgctaaagcaga

SEQ ID NO: 1340761 - DNA, 15 bp, Homo sapiens
tctatgctaaagcag

SEQ ID NO: 1340762 - DNA, 15 bp, Homo sapiens
ttctatgctaaagca

SEQ ID NO: 1340763 - DNA, 15 bp, Homo sapiens
tttctatgctaaagc

SEQ ID NO: 1340764 - DNA, 15 bp, Homo sapiens
ctttctatgctaaag

SEQ ID NO: 1340765 - DNA, 15 bp, Homo sapiens
actttctatgctaaa

SEQ ID NO: 1340766 - DNA, 15 bp, Homo sapiens
aactttctatgctaa

SEQ ID NO: 1340767 - DNA, 15 bp, Homo sapiens
aaactttctatgcta

SEQ ID NO: 1340768 - DNA, 15 bp, Homo sapiens
taaactttctatgct

SEQ ID NO: 1340769 - DNA, 15 bp, Homo sapiens
ttaaactttctatgc

SEQ ID NO: 1340770 - DNA, 15 bp, Homo sapiens
attaaactttctatg

SEQ ID NO: 1340771 - DNA, 15 bp, Homo sapiens
tattaaactttctat

SEQ ID NO: 1340772 - DNA, 15 bp, Homo sapiens
ttattaaactttcta

SEQ ID NO: 1340773 - DNA, 15 bp, Homo sapiens
attattaaactttct

SEQ ID NO: 1340774 - DNA, 15 bp, Homo sapiens
cattattaaactttc

SEQ ID NO: 1340775 - DNA, 15 bp, Homo sapiens
gcattattaaacttt

SEQ ID NO: 1340776 - DNA, 15 bp, Homo sapiens
tgcattattaaactt

SEQ ID NO: 1340777 - DNA, 15 bp, Homo sapiens
atgcattattaaact

SEQ ID NO: 1340778 - DNA, 15 bp, Homo sapiens
aatgcattattaaac

SEQ ID NO: 1340779 - DNA, 15 bp, Homo sapiens
taatgcattattaaa

SEQ ID NO: 1340780 - DNA, 15 bp, Homo sapiens
gtaatgcattattaa

SEQ ID NO: 1340781 - DNA, 15 bp, Homo sapiens
tgtaatgcattatta

SEQ ID NO: 1340782 - DNA, 15 bp, Homo sapiens
gtgtaatgcattatt

SEQ ID NO: 1340783 - DNA, 15 bp, Homo sapiens
ggtgtaatgcattat

SEQ ID NO: 1340784 - DNA, 15 bp, Homo sapiens
tggtgtaatgcatta

SEQ ID NO: 1340785 - DNA, 15 bp, Homo sapiens
atggtgtaatgcatt

SEQ ID NO: 1340786 - DNA, 15 bp, Homo sapiens
aatggtgtaatgcat

SEQ ID NO: 1340787 - DNA, 15 bp, Homo sapiens
gaatggtgtaatgca

SEQ ID NO: 1340788 - DNA, 15 bp, Homo sapiens
agaatggtgtaatgc

SEQ ID NO: 1340789 - DNA, 15 bp, Homo sapiens
gagaatggtgtaatg

SEQ ID NO: 1340790 - DNA, 15 bp, Homo sapiens
tgagaatggtgtaat

SEQ ID NO: 1340791 - DNA, 15 bp, Homo sapiens
ttgagaatggtgtaa

SEQ ID NO: 1340792 - DNA, 15 bp, Homo sapiens
cttgagaatggtgta

SEQ ID NO: 1340793 - DNA, 15 bp, Homo sapiens
tcttgagaatggtgt

SEQ ID NO: 1340794 - DNA, 15 bp, Homo sapiens
ctcttgagaatggtg

SEQ ID NO: 1340795 - DNA, 15 bp, Homo sapiens
tctcttgagaatggt

SEQ ID NO: 1340796 - DNA, 15 bp, Homo sapiens
atctcttgagaatgg

SEQ ID NO: 1340797 - DNA, 15 bp, Homo sapiens
aatctcttgagaatg

SEQ ID NO: 1340798 - DNA, 15 bp, Homo sapiens
caatctcttgagaat

SEQ ID NO: 1340799 - DNA, 15 bp, Homo sapiens
tcaatctcttgagaa

SEQ ID NO: 1340800 - DNA, 15 bp, Homo sapiens
ctcaatctcttgaga

SEQ ID NO: 1340801 - DNA, 15 bp, Homo sapiens
actcaatctcttgag

SEQ ID NO: 1340802 - DNA, 15 bp, Homo sapiens
gactcaatctcttga

SEQ ID NO: 1340803 - DNA, 15 bp, Homo sapiens
tgactcaatctcttg

SEQ ID NO: 1340804 - DNA, 15 bp, Homo sapiens
atgactcaatctctt

SEQ ID NO: 1340805 - DNA, 15 bp, Homo sapiens
aatgactcaatctct

SEQ ID NO: 1340806 - DNA, 15 bp, Homo sapiens
taatgactcaatctc

SEQ ID NO: 1340807 - DNA, 15 bp, Homo sapiens
ctaatgactcaatct

SEQ ID NO: 1340808 - DNA, 15 bp, Homo sapiens
tctaatgactcaatc

SEQ ID NO: 1340809 - DNA, 15 bp, Homo sapiens
ttctaatgactcaat

SEQ ID NO: 1340810 - DNA, 15 bp, Homo sapiens
tttctaatgactcaa

SEQ ID NO: 1340811 - DNA, 15 bp, Homo sapiens
ttttctaatgactca

SEQ ID NO: 1340812 - DNA, 15 bp, Homo sapiens
gttttctaatgactc

SEQ ID NO: 1340813 - DNA, 15 bp, Homo sapiens
agttttctaatgact

SEQ ID NO: 1340814 - DNA, 15 bp, Homo sapiens
cagttttctaatgac

SEQ ID NO: 1340815 - DNA, 15 bp, Homo sapiens
acagttttctaatga

SEQ ID NO: 1340816 - DNA, 15 bp, Homo sapiens
aacagttttctaatg

SEQ ID NO: 1340817 - DNA, 15 bp, Homo sapiens
aaacagttttctaat

SEQ ID NO: 1340818 - DNA, 15 bp, Homo sapiens
aaaacagttttctaa

SEQ ID NO: 1340819 - DNA, 15 bp, Homo sapiens
gaaaacagttttcta

SEQ ID NO: 1340820 - DNA, 15 bp, Homo sapiens
agaaaacagttttct

SEQ ID NO: 1340821 - DNA, 15 bp, Homo sapiens
aagaaaacagttttc

SEQ ID NO: 1340822 - DNA, 15 bp, Homo sapiens
aaagaaaacagtttt

SEQ ID NO: 1340823 - DNA, 15 bp, Homo sapiens
gaaagaaaacagttt

SEQ ID NO: 1340824 - DNA, 15 bp, Homo sapiens
ggaaagaaaacagtt

SEQ ID NO: 1340825 - DNA, 15 bp, Homo sapiens
aggaaagaaaacagt

SEQ ID NO: 1340826 - DNA, 15 bp, Homo sapiens
caggaaagaaaacag

SEQ ID NO: 1340827 - DNA, 15 bp, Homo sapiens
acaggaaagaaaaca

SEQ ID NO: 1340828 - DNA, 15 bp, Homo sapiens
tacaggaaagaaaac

SEQ ID NO: 1340829 - DNA, 15 bp, Homo sapiens
atacaggaaagaaaa

SEQ ID NO: 1340830 - DNA, 15 bp, Homo sapiens
aatacaggaaagaaa

SEQ ID NO: 1340831 - DNA, 15 bp, Homo sapiens
aaatacaggaaagaa

SEQ ID NO: 1340832 - DNA, 15 bp, Homo sapiens
gaaatacaggaaaga

SEQ ID NO: 1340833 - DNA, 15 bp, Homo sapiens
tgaaatacaggaaag

SEQ ID NO: 1340834 - DNA, 15 bp, Homo sapiens
ctgaaatacaggaaa

SEQ ID NO: 1340835 - DNA, 15 bp, Homo sapiens
actgaaatacaggaa

SEQ ID NO: 1340836 - DNA, 15 bp, Homo sapiens
gactgaaatacagga

SEQ ID NO: 1340837 - DNA, 15 bp, Homo sapiens
agactgaaatacagg

SEQ ID NO: 1340838 - DNA, 15 bp, Homo sapiens
aagactgaaatacag

SEQ ID NO: 1340839 - DNA, 15 bp, Homo sapiens
aaagactgaaataca

SEQ ID NO: 1340840 - DNA, 15 bp, Homo sapiens
aaaagactgaaatac

SEQ ID NO: 1340841 - DNA, 15 bp, Homo sapiens
caaaagactgaaata

SEQ ID NO: 1340842 - DNA, 15 bp, Homo sapiens
ccaaaagactgaaat

SEQ ID NO: 1340843 - DNA, 15 bp, Homo sapiens
tccaaaagactgaaa

SEQ ID NO: 1340844 - DNA, 15 bp, Homo sapiens
ttccaaaagactgaa

SEQ ID NO: 1340845 - DNA, 15 bp, Homo sapiens
tttccaaaagactga

SEQ ID NO: 1340846 - DNA, 15 bp, Homo sapiens
ctttccaaaagactg

SEQ ID NO: 1340847 - DNA, 15 bp, Homo sapiens
tctttccaaaagact

SEQ ID NO: 1340848 - DNA, 15 bp, Homo sapiens
ttctttccaaaagac

SEQ ID NO: 1340849 - DNA, 15 bp, Homo sapiens
tttctttccaaaaga

SEQ ID NO: 1340850 - DNA, 15 bp, Homo sapiens
atttctttccaaaag

SEQ ID NO: 1340851 - DNA, 15 bp, Homo sapiens
aatttctttccaaaa

SEQ ID NO: 1340852 - DNA, 15 bp, Homo sapiens
taatttctttccaaa

SEQ ID NO: 1340853 - DNA, 15 bp, Homo sapiens
gtaatttctttccaa

SEQ ID NO: 1340854 - DNA, 15 bp, Homo sapiens
tgtaatttctttcca

SEQ ID NO: 1340855 - DNA, 15 bp, Homo sapiens
ttgtaatttctttcc

SEQ ID NO: 1340856 - DNA, 15 bp, Homo sapiens
tttgtaatttctttc

SEQ ID NO: 1340857 - DNA, 15 bp, Homo sapiens
ttttgtaatttcttt

SEQ ID NO: 1340858 - DNA, 15 bp, Homo sapiens
attttgtaatttctt

SEQ ID NO: 1340859 - DNA, 15 bp, Homo sapiens
aattttgtaatttct

SEQ ID NO: 1340860 - DNA, 15 bp, Homo sapiens
aaattttgtaatttc

SEQ ID NO: 1340861 - DNA, 15 bp, Homo sapiens
caaattttgtaattt

SEQ ID NO: 1340862 - DNA, 15 bp, Homo sapiens
acaaattttgtaatt

SEQ ID NO: 1340863 - DNA, 15 bp, Homo sapiens
aacaaattttgtaat

SEQ ID NO: 1340864 - DNA, 15 bp, Homo sapiens
taacaaattttgtaa

SEQ ID NO: 1340865 - DNA, 15 bp, Homo sapiens
ataacaaattttgta

SEQ ID NO: 1340866 - DNA, 15 bp, Homo sapiens
aataacaaattttgt

SEQ ID NO: 1340867 - DNA, 15 bp, Homo sapiens
caataacaaattttg

SEQ ID NO: 1340868 - DNA, 15 bp, Homo sapiens
acaataacaaatttt

SEQ ID NO: 1340869 - DNA, 15 bp, Homo sapiens
aacaataacaaattt

SEQ ID NO: 1340870 - DNA, 15 bp, Homo sapiens
taacaataacaaatt

SEQ ID NO: 1340871 - DNA, 15 bp, Homo sapiens
ttaacaataacaaat

SEQ ID NO: 1340872 - DNA, 15 bp, Homo sapiens
tttaacaataacaaa

SEQ ID NO: 1340873 - DNA, 15 bp, Homo sapiens
gtttaacaataacaa

SEQ ID NO: 1340874 - DNA, 15 bp, Homo sapiens
agtttaacaataaca

SEQ ID NO: 1340875 - DNA, 15 bp, Homo sapiens
aagtttaacaataac

SEQ ID NO: 1340876 - DNA, 15 bp, Homo sapiens
caagtttaacaataa

SEQ ID NO: 1340877 - DNA, 15 bp, Homo sapiens
ccaagtttaacaata

SEQ ID NO: 1340878 - DNA, 15 bp, Homo sapiens
tccaagtttaacaat

SEQ ID NO: 1340879 - DNA, 15 bp, Homo sapiens
ctccaagtttaacaa

SEQ ID NO: 1340880 - DNA, 15 bp, Homo sapiens
cctccaagtttaaca

SEQ ID NO: 1340881 - DNA, 15 bp, Homo sapiens
acctccaagtttaac

SEQ ID NO: 1340882 - DNA, 15 bp, Homo sapiens
tacctccaagtttaa

SEQ ID NO: 1340883 - DNA, 15 bp, Homo sapiens
atacctccaagttta

SEQ ID NO: 1340884 - DNA, 15 bp, Homo sapiens
tatacctccaagttt

SEQ ID NO: 1340885 - DNA, 15 bp, Homo sapiens
atatacctccaagtt

SEQ ID NO: 1340886 - DNA, 15 bp, Homo sapiens
tatatacctccaagt

SEQ ID NO: 1340887 - DNA, 15 bp, Homo sapiens
atatatacctccaag

SEQ ID NO: 1340888 - DNA, 15 bp, Homo sapiens
tatatatacctccaa

SEQ ID NO: 1340889 - DNA, 15 bp, Homo sapiens
atatatatacctcca

SEQ ID NO: 1340890 - DNA, 15 bp, Homo sapiens
aatatatatacctcc

SEQ ID NO: 1340891 - DNA, 15 bp, Homo sapiens
aaatatatatacctc

SEQ ID NO: 1340892 - DNA, 15 bp, Homo sapiens
caaatatatatacct

SEQ ID NO: 1340893 - DNA, 15 bp, Homo sapiens
tcaaatatatatacc

SEQ ID NO: 1340894 - DNA, 15 bp, Homo sapiens
ttcaaatatatatac

SEQ ID NO: 1340895 - DNA, 15 bp, Homo sapiens
tttcaaatatatata

SEQ ID NO: 1340896 - DNA, 15 bp, Homo sapiens
ctttcaaatatatat

SEQ ID NO: 1340897 - DNA, 15 bp, Homo sapiens
tctttcaaatatata

SEQ ID NO: 1340898 - DNA, 15 bp, Homo sapiens
ctctttcaaatatat

SEQ ID NO: 1340899 - DNA, 15 bp, Homo sapiens
actctttcaaatata

SEQ ID NO: 1340900 - DNA, 15 bp, Homo sapiens
gactctttcaaatat

SEQ ID NO: 1340901 - DNA, 15 bp, Homo sapiens
tgactctttcaaata

SEQ ID NO: 1340902 - DNA, 15 bp, Homo sapiens
atgactctttcaaat

SEQ ID NO: 1340903 - DNA, 15 bp, Homo sapiens
aatgactctttcaaa

SEQ ID NO: 1340904 - DNA, 15 bp, Homo sapiens
aaatgactctttcaa

SEQ ID NO: 1340905 - DNA, 15 bp, Homo sapiens
aaaatgactctttca

SEQ ID NO: 1340906 - DNA, 15 bp, Homo sapiens
taaaatgactctttc

SEQ ID NO: 1340907 - DNA, 15 bp, Homo sapiens
ataaaatgactcttt

SEQ ID NO: 1340908 - DNA, 15 bp, Homo sapiens
aataaaatgactctt

SEQ ID NO: 1340909 - DNA, 15 bp, Homo sapiens
aaataaaatgactct

SEQ ID NO: 1340910 - DNA, 15 bp, Homo sapiens
aaaataaaatgactc

SEQ ID NO: 1340911 - DNA, 15 bp, Homo sapiens
taaaataaaatgact

SEQ ID NO: 1340912 - DNA, 15 bp, Homo sapiens
ataaaataaaatgac

SEQ ID NO: 1340913 - DNA, 15 bp, Homo sapiens
ttaaagtaaaataaa

SEQ ID NO: 1340914 - DNA, 15 bp, Homo sapiens
cttaaagtaaaataa

SEQ ID NO: 1340915 - DNA, 15 bp, Homo sapiens
acttaaagtaaaata

SEQ ID NO: 1340916 - DNA, 15 bp, Homo sapiens
cacttaaagtaaaat

SEQ ID NO: 1340917 - DNA, 15 bp, Homo sapiens
gcacttaaagtaaaa

SEQ ID NO: 1340918 - DNA, 15 bp, Homo sapiens
ggcacttaaagtaaa

SEQ ID NO: 1340919 - DNA, 15 bp, Homo sapiens
cggcacttaaagtaa

SEQ ID NO: 1340920 - DNA, 15 bp, Homo sapiens
ccggcacttaaagta

SEQ ID NO: 1340921 - DNA, 15 bp, Homo sapiens
cccggcacttaaagt

SEQ ID NO: 1340922 - DNA, 15 bp, Homo sapiens
tcccggcacttaaag

SEQ ID NO: 1340923 - DNA, 15 bp, Homo sapiens
atcccggcacttaaa

SEQ ID NO: 1340924 - DNA, 15 bp, Homo sapiens
tatcccggcacttaa

SEQ ID NO: 1340925 - DNA, 15 bp, Homo sapiens
gtatcccggcactta

SEQ ID NO: 1340926 - DNA, 15 bp, Homo sapiens
tgtatcccggcactt

SEQ ID NO: 1340927 - DNA, 15 bp, Homo sapiens
atgtatcccggcact

SEQ ID NO: 1340928 - DNA, 15 bp, Homo sapiens
catgtatcccggcac

SEQ ID NO: 1340929 - DNA, 15 bp, Homo sapiens
acatgtatcccggca

SEQ ID NO: 1340930 - DNA, 15 bp, Homo sapiens
cacatgtatcccggc

SEQ ID NO: 1340931 - DNA, 15 bp, Homo sapiens
gcacatgtatcccgg

SEQ ID NO: 1340932 - DNA, 15 bp, Homo sapiens
tgcacatgtatcccg

SEQ ID NO: 1340933 - DNA, 15 bp, Homo sapiens
ctgcacatgtatccc

SEQ ID NO: 1340934 - DNA, 15 bp, Homo sapiens
tctgcacatgtatcc

SEQ ID NO: 1340935 - DNA, 15 bp, Homo sapiens
ttctgcacatgtatc

SEQ ID NO: 1340936 - DNA, 15 bp, Homo sapiens
attctgcacatgtat

SEQ ID NO: 1340937 - DNA, 15 bp, Homo sapiens
cattctgcacatgta

SEQ ID NO: 1340938 - DNA, 15 bp, Homo sapiens
gcattctgcacatgt

SEQ ID NO: 1340939 - DNA, 15 bp, Homo sapiens
cgcattctgcacatg

SEQ ID NO: 1340940 - DNA, 15 bp, Homo sapiens
gcgcattctgcacat

SEQ ID NO: 1340941 - DNA, 15 bp, Homo sapiens
tgcgcattctgcaca

SEQ ID NO: 1340942 - DNA, 15 bp, Homo sapiens
ctgcgcattctgcac

SEQ ID NO: 1340943 - DNA, 15 bp, Homo sapiens
tctgcgcattctgca

SEQ ID NO: 1340944 - DNA, 15 bp, Homo sapiens
atctgcgcattctgc

SEQ ID NO: 1340945 - DNA, 15 bp, Homo sapiens
aatctgcgcattctg

SEQ ID NO: 1340946 - DNA, 15 bp, Homo sapiens
aaatctgcgcattct

SEQ ID NO: 1340947 - DNA, 15 bp, Homo sapiens
caaatctgcgcattc

SEQ ID NO: 1340948 - DNA, 15 bp, Homo sapiens
acaaatctgcgcatt

SEQ ID NO: 1340949 - DNA, 15 bp, Homo sapiens
aacaaatctgcgcat

SEQ ID NO: 1340950 - DNA, 15 bp, Homo sapiens
taacaaatctgcgca

SEQ ID NO: 1340951 - DNA, 15 bp, Homo sapiens
ttaacaaatctgcgc

SEQ ID NO: 1340952 - DNA, 15 bp, Homo sapiens
gttaacaaatctgcg

SEQ ID NO: 1340953 - DNA, 15 bp, Homo sapiens
tgttaacaaatctgc

SEQ ID NO: 1340954 - DNA, 15 bp, Homo sapiens
atgttaacaaatctg

SEQ ID NO: 1340955 - DNA, 15 bp, Homo sapiens
tatgttaacaaatct

SEQ ID NO: 1340956 - DNA, 15 bp, Homo sapiens
ctatgttaacaaatc

SEQ ID NO: 1340957 - DNA, 15 bp, Homo sapiens
cctatgttaacaaat

SEQ ID NO: 1340958 - DNA, 15 bp, Homo sapiens
acctatgttaacaaa

SEQ ID NO: 1340959 - DNA, 15 bp, Homo sapiens
tacctatgttaacaa

SEQ ID NO: 1340960 - DNA, 15 bp, Homo sapiens
atacctatgttaaca

SEQ ID NO: 1340961 - DNA, 15 bp, Homo sapiens
tatacctatgttaac

SEQ ID NO: 1340962 - DNA, 15 bp, Homo sapiens
gtatacctatgttaa

SEQ ID NO: 1340963 - DNA, 15 bp, Homo sapiens
tgtatacctatgtta

SEQ ID NO: 1340964 - DNA, 15 bp, Homo sapiens
atgtatacctatgtt

SEQ ID NO: 1340965 - DNA, 15 bp, Homo sapiens
acatgtatacctatg

SEQ ID NO: 1340966 - DNA, 15 bp, Homo sapiens
cacatgtatacctat

SEQ ID NO: 1340967 - DNA, 15 bp, Homo sapiens
gcacatgtataccta

SEQ ID NO: 1340968 - DNA, 15 bp, Homo sapiens
ggcacatgtatacct

SEQ ID NO: 1340969 - DNA, 15 bp, Homo sapiens
tggcacatgtatacc

SEQ ID NO: 1340970 - DNA, 15 bp, Homo sapiens
atggcacatgtatac

SEQ ID NO: 1340971 - DNA, 15 bp, Homo sapiens
catggcacatgtata

SEQ ID NO: 1340972 - DNA, 15 bp, Homo sapiens
ccatggcacatgtat

SEQ ID NO: 1340973 - DNA, 15 bp, Homo sapiens
accatggcacatgta

SEQ ID NO: 1340974 - DNA, 15 bp, Homo sapiens
caccatggcacatgt

SEQ ID NO: 1340975 - DNA, 15 bp, Homo sapiens
ccaccatggcacatg

SEQ ID NO: 1340976 - DNA, 15 bp, Homo sapiens
accaccatggcacat

SEQ ID NO: 1340977 - DNA, 15 bp, Homo sapiens
aaccaccatggcaca

SEQ ID NO: 1340978 - DNA, 15 bp, Homo sapiens
aaaccaccatggcac

SEQ ID NO: 1340979 - DNA, 15 bp, Homo sapiens
caaaccaccatggca

SEQ ID NO: 1340980 - DNA, 15 bp, Homo sapiens
atgcagcaaaccacc

SEQ ID NO: 1340981 - DNA, 15 bp, Homo sapiens
gatgcagcaaaccac

SEQ ID NO: 1340982 - DNA, 15 bp, Homo sapiens
agatgcagcaaacca

SEQ ID NO: 1340983 - DNA, 15 bp, Homo sapiens
tagatgcagcaaacc

SEQ ID NO: 1340984 - DNA, 15 bp, Homo sapiens
atagatgcagcaaac

SEQ ID NO: 1340985 - DNA, 15 bp, Homo sapiens
gatagatgcagcaaa

SEQ ID NO: 1340986 - DNA, 15 bp, Homo sapiens
tgatagatgcagcaa

SEQ ID NO: 1340987 - DNA, 15 bp, Homo sapiens
ttgatagatgcagca

SEQ ID NO: 1340988 - DNA, 15 bp, Homo sapiens
gttgatagatgcagc

SEQ ID NO: 1340989 - DNA, 15 bp, Homo sapiens
ggttgatagatgcag

SEQ ID NO: 1340990 - DNA, 15 bp, Homo sapiens
aggttgatagatgca

SEQ ID NO: 1340991 - DNA, 15 bp, Homo sapiens
caggttgatagatgc

SEQ ID NO: 1340992 - DNA, 15 bp, Homo sapiens
acaggttgatagatg

SEQ ID NO: 1340993 - DNA, 15 bp, Homo sapiens
gacaggttgatagat

SEQ ID NO: 1340994 - DNA, 15 bp, Homo sapiens
tgacaggttgataga

SEQ ID NO: 1340995 - DNA, 15 bp, Homo sapiens
atgacaggttgatag

SEQ ID NO: 1340996 - DNA, 15 bp, Homo sapiens
gatgacaggttgata

SEQ ID NO: 1340997 - DNA, 15 bp, Homo sapiens
agatgacaggttgat

SEQ ID NO: 1340998 - DNA, 15 bp, Homo sapiens
tagatgacaggttga

SEQ ID NO: 1340999 - DNA, 15 bp, Homo sapiens
ctagatgacaggttg

SEQ ID NO: 1341000 - DNA, 15 bp, Homo sapiens
cctagatgacaggtt

SEQ ID NO: 1341001 - DNA, 15 bp, Homo sapiens
acctagatgacaggt

SEQ ID NO: 1341002 - DNA, 15 bp, Homo sapiens
aacctagatgacagg

SEQ ID NO: 1341003 - DNA, 15 bp, Homo sapiens
caacctagatgacag

SEQ ID NO: 1341004 - DNA, 15 bp, Homo sapiens
acaacctagatgaca

SEQ ID NO: 1341005 - DNA, 15 bp, Homo sapiens
tacaacctagatgac

SEQ ID NO: 1341006 - DNA, 15 bp, Homo sapiens
ttacaacctagatga

SEQ ID NO: 1341007 - DNA, 15 bp, Homo sapiens
cttacaacctagatg

SEQ ID NO: 1341008 - DNA, 15 bp, Homo sapiens
gcttacaacctagat

SEQ ID NO: 1341009 - DNA, 15 bp, Homo sapiens
ggcttacaacctaga

SEQ ID NO: 1341010 - DNA, 15 bp, Homo sapiens
gggcttacaacctag

SEQ ID NO: 1341011 - DNA, 15 bp, Homo sapiens
ggggcttacaaccta

SEQ ID NO: 1341012 - DNA, 15 bp, Homo sapiens
tggggcttacaacct

SEQ ID NO: 1341013 - DNA, 15 bp, Homo sapiens
gtggggcttacaacc

SEQ ID NO: 1341014 - DNA, 15 bp, Homo sapiens
tgtggggcttacaac

SEQ ID NO: 1341015 - DNA, 15 bp, Homo sapiens
atgtggggcttacaa

SEQ ID NO: 1341016 - DNA, 15 bp, Homo sapiens
aatgtggggcttaca

SEQ ID NO: 1341017 - DNA, 15 bp, Homo sapiens
gaatgtggggcttac

SEQ ID NO: 1341018 - DNA, 15 bp, Homo sapiens
tgaatgtggggctta

SEQ ID NO: 1341019 - DNA, 15 bp, Homo sapiens
atgaatgtggggctt

SEQ ID NO: 1341020 - DNA, 15 bp, Homo sapiens
aatgaatgtggggct

SEQ ID NO: 1341021 - DNA, 15 bp, Homo sapiens
taatgaatgtggggc

SEQ ID NO: 1341022 - DNA, 15 bp, Homo sapiens
ctaatgaatgtgggg

SEQ ID NO: 1341023 - DNA, 15 bp, Homo sapiens
cctaatgaatgtggg

SEQ ID NO: 1341024 - DNA, 15 bp, Homo sapiens
acctaatgaatgtgg

SEQ ID NO: 1341025 - DNA, 15 bp, Homo sapiens
tacctaatgaatgtg

SEQ ID NO: 1341026 - DNA, 15 bp, Homo sapiens
atacctaatgaatgt

SEQ ID NO: 1341027 - DNA, 15 bp, Homo sapiens
aatacctaatgaatg

SEQ ID NO: 1341028 - DNA, 15 bp, Homo sapiens
aaatacctaatgaat

SEQ ID NO: 1341029 - DNA, 15 bp, Homo sapiens
caaatacctaatgaa

SEQ ID NO: 1341030 - DNA, 15 bp, Homo sapiens
acaaatacctaatga

SEQ ID NO: 1341031 - DNA, 15 bp, Homo sapiens
gacaaatacctaatg

SEQ ID NO: 1341032 - DNA, 15 bp, Homo sapiens
ggacaaatacctaat

SEQ ID NO: 1341033 - DNA, 15 bp, Homo sapiens
aggacaaatacctaa

SEQ ID NO: 1341034 - DNA, 15 bp, Homo sapiens
taggacaaataccta

SEQ ID NO: 1341035 - DNA, 15 bp, Homo sapiens
ttaggacaaatacct

SEQ ID NO: 1341036 - DNA, 15 bp, Homo sapiens
attaggacaaatacc

SEQ ID NO: 1341037 - DNA, 15 bp, Homo sapiens
cattaggacaaatac

SEQ ID NO: 1341038 - DNA, 15 bp, Homo sapiens
aagcattaggacaaa

SEQ ID NO: 1341039 - DNA, 15 bp, Homo sapiens
aaagcattaggacaa

SEQ ID NO: 1341040 - DNA, 15 bp, Homo sapiens
aaaagcattaggaca

SEQ ID NO: 1341041 - DNA, 15 bp, Homo sapiens
gaaaagcattaggac

SEQ ID NO: 1341042 - DNA, 15 bp, Homo sapiens
ggaaaagcattagga

SEQ ID NO: 1341043 - DNA, 15 bp, Homo sapiens
tggaaaagcattagg

SEQ ID NO: 1341044 - DNA, 15 bp, Homo sapiens
gtggaaaagcattag

SEQ ID NO: 1341045 - DNA, 15 bp, Homo sapiens
ggtggaaaagcatta

SEQ ID NO: 1341046 - DNA, 15 bp, Homo sapiens
gggtggaaaagcatt

SEQ ID NO: 1341047 - DNA, 15 bp, Homo sapiens
ggggtggaaaagcat

SEQ ID NO: 1341048 - DNA, 15 bp, Homo sapiens
aggggtggaaaagca

SEQ ID NO: 1341049 - DNA, 15 bp, Homo sapiens
aaggggtggaaaagc

SEQ ID NO: 1341050 - DNA, 15 bp, Homo sapiens
caaggggtggaaaag

SEQ ID NO: 1341051 - DNA, 15 bp, Homo sapiens
gcaaggggtggaaaa

SEQ ID NO: 1341052 - DNA, 15 bp, Homo sapiens
ggcaaggggtggaaa

SEQ ID NO: 1341053 - DNA, 15 bp, Homo sapiens
gggcaaggggtggaa

SEQ ID NO: 1341054 - DNA, 15 bp, Homo sapiens
ggggcaaggggtgga

SEQ ID NO: 1341055 - DNA, 15 bp, Homo sapiens
gggggcaaggggtgg

SEQ ID NO: 1341056 - DNA, 15 bp, Homo sapiens
ggggggcaaggggtg

SEQ ID NO: 1341057 - DNA, 15 bp, Homo sapiens
tggggggcaaggggt

SEQ ID NO: 1341058 - DNA, 15 bp, Homo sapiens
gtggggggcaagggg

SEQ ID NO: 1341059 - DNA, 15 bp, Homo sapiens
ggtggggggcaaggg

SEQ ID NO: 1341060 - DNA, 15 bp, Homo sapiens
aggtggggggcaagg

SEQ ID NO: 1341061 - DNA, 15 bp, Homo sapiens
gaggtggggggcaag

SEQ ID NO: 1341062 - DNA, 15 bp, Homo sapiens
ggaggtggggggcaa

SEQ ID NO: 1341063 - DNA, 15 bp, Homo sapiens
aggaggtggggggca

SEQ ID NO: 1341064 - DNA, 15 bp, Homo sapiens
caggaggtggggggc

SEQ ID NO: 1341065 - DNA, 15 bp, Homo sapiens
tcaggaggtgggggg

SEQ ID NO: 1341066 - DNA, 15 bp, Homo sapiens
gtcaggaggtggggg

SEQ ID NO: 1341067 - DNA, 15 bp, Homo sapiens
tgtcaggaggtgggg

SEQ ID NO: 1341068 - DNA, 15 bp, Homo sapiens
ctgtcaggaggtggg

SEQ ID NO: 1341069 - DNA, 15 bp, Homo sapiens
cctgtcaggaggtgg

SEQ ID NO: 1341070 - DNA, 15 bp, Homo sapiens
gcctgtcaggaggtg

SEQ ID NO: 1341071 - DNA, 15 bp, Homo sapiens
ggcctgtcaggaggt

SEQ ID NO: 1341072 - DNA, 15 bp, Homo sapiens
aggcctgtcaggagg

SEQ ID NO: 1341073 - DNA, 15 bp, Homo sapiens
gaggcctgtcaggag

SEQ ID NO: 1341074 - DNA, 15 bp, Homo sapiens
agaggcctgtcagga

SEQ ID NO: 1341075 - DNA, 15 bp, Homo sapiens
cagaggcctgtcagg

SEQ ID NO: 1341076 - DNA, 15 bp, Homo sapiens
acagaggcctgtcag

SEQ ID NO: 1341077 - DNA, 15 bp, Homo sapiens
cacagaggcctgtca

SEQ ID NO: 1341078 - DNA, 15 bp, Homo sapiens
acacagaggcctgtc

SEQ ID NO: 1341079 - DNA, 15 bp, Homo sapiens
cacacagaggcctgt

SEQ ID NO: 1341080 - DNA, 15 bp, Homo sapiens
acacacagaggcctg

SEQ ID NO: 1341081 - DNA, 15 bp, Homo sapiens
cacacacagaggcct

SEQ ID NO: 1341082 - DNA, 15 bp, Homo sapiens
ccacacacagaggcc

SEQ ID NO: 1341083 - DNA, 15 bp, Homo sapiens
accacacacagaggc

SEQ ID NO: 1341084 - DNA, 15 bp, Homo sapiens
caccacacacagagg

SEQ ID NO: 1341085 - DNA, 15 bp, Homo sapiens
acaccacacacagag

SEQ ID NO: 1341086 - DNA, 15 bp, Homo sapiens
aacaccacacacaga

SEQ ID NO: 1341087 - DNA, 15 bp, Homo sapiens
gaacaccacacacag

SEQ ID NO: 1341088 - DNA, 15 bp, Homo sapiens
ggaacaccacacaca

SEQ ID NO: 1341089 - DNA, 15 bp, Homo sapiens
gggaacaccacacac

SEQ ID NO: 1341090 - DNA, 15 bp, Homo sapiens
ggggaacaccacaca

SEQ ID NO: 1341091 - DNA, 15 bp, Homo sapiens
tggggaacaccacac

SEQ ID NO: 1341092 - DNA, 15 bp, Homo sapiens
gtggggaacaccaca

SEQ ID NO: 1341093 - DNA, 15 bp, Homo sapiens
ggtggggaacaccac

SEQ ID NO: 1341094 - DNA, 15 bp, Homo sapiens
gggtggggaacacca

SEQ ID NO: 1341095 - DNA, 15 bp, Homo sapiens
agggtggggaacacc

SEQ ID NO: 1341096 - DNA, 15 bp, Homo sapiens
cagggtggggaacac

SEQ ID NO: 1341097 - DNA, 15 bp, Homo sapiens
acagggtggggaaca

SEQ ID NO: 1341098 - DNA, 15 bp, Homo sapiens
cacagggtggggaac

SEQ ID NO: 1341099 - DNA, 15 bp, Homo sapiens
acacagggtggggaa

SEQ ID NO: 1341100 - DNA, 15 bp, Homo sapiens
gacacagggtgggga

SEQ ID NO: 1341101 - DNA, 15 bp, Homo sapiens
ggacacagggtgggg

SEQ ID NO: 1341102 - DNA, 15 bp, Homo sapiens
tggacacagggtggg

SEQ ID NO: 1341103 - DNA, 15 bp, Homo sapiens
atggacacagggtgg

SEQ ID NO: 1341104 - DNA, 15 bp, Homo sapiens
catggacacagggtg

SEQ ID NO: 1341105 - DNA, 15 bp, Homo sapiens
acatggacacagggt

SEQ ID NO: 1341106 - DNA, 15 bp, Homo sapiens
cacatggacacaggg

SEQ ID NO: 1341107 - DNA, 15 bp, Homo sapiens
aagaacacatggaca

SEQ ID NO: 1341108 - DNA, 15 bp, Homo sapiens
taagaacacatggac

SEQ ID NO: 1341109 - DNA, 15 bp, Homo sapiens
ataagaacacatgga

SEQ ID NO: 1341110 - DNA, 15 bp, Homo sapiens
aataagaacacatgg

SEQ ID NO: 1341111 - DNA, 15 bp, Homo sapiens
caataagaacacatg

SEQ ID NO: 1341112 - DNA, 15 bp, Homo sapiens
acaataagaacacat

SEQ ID NO: 1341113 - DNA, 15 bp, Homo sapiens
aacaataagaacaca

SEQ ID NO: 1341114 - DNA, 15 bp, Homo sapiens
gaacaataagaacac

SEQ ID NO: 1341115 - DNA, 15 bp, Homo sapiens
tgaacaataagaaca

SEQ ID NO: 1341116 - DNA, 15 bp, Homo sapiens
ttgaacaataagaac

SEQ ID NO: 1341117 - DNA, 15 bp, Homo sapiens
gttgaacaataagaa

SEQ ID NO: 1341118 - DNA, 15 bp, Homo sapiens
agttgaacaataaga

SEQ ID NO: 1341119 - DNA, 15 bp, Homo sapiens
gagttgaacaataag

SEQ ID NO: 1341120 - DNA, 15 bp, Homo sapiens
agagttgaacaataa

SEQ ID NO: 1341121 - DNA, 15 bp, Homo sapiens
gagagttgaacaata

SEQ ID NO: 1341122 - DNA, 15 bp, Homo sapiens
tgagagttgaacaat

SEQ ID NO: 1341123 - DNA, 15 bp, Homo sapiens
gtgagagttgaacaa

SEQ ID NO: 1341124 - DNA, 15 bp, Homo sapiens
agtgagagttgaaca

SEQ ID NO: 1341125 - DNA, 15 bp, Homo sapiens
aagtgagagttgaac

SEQ ID NO: 1341126 - DNA, 15 bp, Homo sapiens
taagtgagagttgaa

SEQ ID NO: 1341127 - DNA, 15 bp, Homo sapiens
ataagtgagagttga

SEQ ID NO: 1341128 - DNA, 15 bp, Homo sapiens
cataagtgagagttg

SEQ ID NO: 1341129 - DNA, 15 bp, Homo sapiens
tcataagtgagagtt

SEQ ID NO: 1341130 - DNA, 15 bp, Homo sapiens
ctcataagtgagagt

SEQ ID NO: 1341131 - DNA, 15 bp, Homo sapiens
actcataagtgagag

SEQ ID NO: 1341132 - DNA, 15 bp, Homo sapiens
cactcataagtgaga

SEQ ID NO: 1341133 - DNA, 15 bp, Homo sapiens
tcactcataagtgag

SEQ ID NO: 1341134 - DNA, 15 bp, Homo sapiens
ctcactcataagtga

SEQ ID NO: 1341135 - DNA, 15 bp, Homo sapiens
cctcactcataagtg

SEQ ID NO: 1341136 - DNA, 15 bp, Homo sapiens
tcctcactcataagt

SEQ ID NO: 1341137 - DNA, 15 bp, Homo sapiens
gtcctcactcataag

SEQ ID NO: 1341138 - DNA, 15 bp, Homo sapiens
tgtcctcactcataa

SEQ ID NO: 1341139 - DNA, 15 bp, Homo sapiens
atgtcctcactcata

SEQ ID NO: 1341140 - DNA, 15 bp, Homo sapiens
catgtcctcactcat

SEQ ID NO: 1341141 - DNA, 15 bp, Homo sapiens
acatgtcctcactca

SEQ ID NO: 1341142 - DNA, 15 bp, Homo sapiens
cacatgtcctcactc

SEQ ID NO: 1341143 - DNA, 15 bp, Homo sapiens
ccacatgtcctcact

SEQ ID NO: 1341144 - DNA, 15 bp, Homo sapiens
accacatgtcctcac

SEQ ID NO: 1341145 - DNA, 15 bp, Homo sapiens
caccacatgtcctca

SEQ ID NO: 1341146 - DNA, 15 bp, Homo sapiens
acaccacatgtcctc

SEQ ID NO: 1341147 - DNA, 15 bp, Homo sapiens
aacaccacatgtcct

SEQ ID NO: 1341148 - DNA, 15 bp, Homo sapiens
aaacaccacatgtcc

SEQ ID NO: 1341149 - DNA, 15 bp, Homo sapiens
caaacaccacatgtc

SEQ ID NO: 1341150 - DNA, 15 bp, Homo sapiens
ccaaacaccacatgt

SEQ ID NO: 1341151 - DNA, 15 bp, Homo sapiens
accaaacaccacatg

SEQ ID NO: 1341152 - DNA, 15 bp, Homo sapiens
aaccaaacaccacat

SEQ ID NO: 1341153 - DNA, 15 bp, Homo sapiens
aaaccaaacaccaca

SEQ ID NO: 1341154 - DNA, 15 bp, Homo sapiens
aaaaccaaacaccac

SEQ ID NO: 1341155 - DNA, 15 bp, Homo sapiens
gaaaaccaaacacca

SEQ ID NO: 1341156 - DNA, 15 bp, Homo sapiens
agaaaaccaaacacc

SEQ ID NO: 1341157 - DNA, 15 bp, Homo sapiens
cagaaaaccaaacac

SEQ ID NO: 1341158 - DNA, 15 bp, Homo sapiens
acagaaaaccaaaca

SEQ ID NO: 1341159 - DNA, 15 bp, Homo sapiens
agaacagaaaaccaa

SEQ ID NO: 1341160 - DNA, 15 bp, Homo sapiens
aagaacagaaaacca

SEQ ID NO: 1341161 - DNA, 15 bp, Homo sapiens
caagaacagaaaacc

SEQ ID NO: 1341162 - DNA, 15 bp, Homo sapiens
acaagaacagaaaac

SEQ ID NO: 1341163 - DNA, 15 bp, Homo sapiens
cacaagaacagaaaa

SEQ ID NO: 1341164 - DNA, 15 bp, Homo sapiens
acacaagaacagaaa

SEQ ID NO: 1341165 - DNA, 15 bp, Homo sapiens
aacacaagaacagaa

SEQ ID NO: 1341166 - DNA, 15 bp, Homo sapiens
taacacaagaacaga

SEQ ID NO: 1341167 - DNA, 15 bp, Homo sapiens
ctaacacaagaacag

SEQ ID NO: 1341168 - DNA, 15 bp, Homo sapiens
actaacacaagaaca

SEQ ID NO: 1341169 - DNA, 15 bp, Homo sapiens
aactaacacaagaac

SEQ ID NO: 1341170 - DNA, 15 bp, Homo sapiens
aaactaacacaagaa

SEQ ID NO: 1341171 - DNA, 15 bp, Homo sapiens
caaactaacacaaga

SEQ ID NO: 1341172 - DNA, 15 bp, Homo sapiens
gcaaactaacacaag

SEQ ID NO: 1341173 - DNA, 15 bp, Homo sapiens
agcaaactaacacaa

SEQ ID NO: 1341174 - DNA, 15 bp, Homo sapiens
ctcagcaaactaaca

SEQ ID NO: 1341175 - DNA, 15 bp, Homo sapiens
cctcagcaaactaac

SEQ ID NO: 1341176 - DNA, 15 bp, Homo sapiens
tcctcagcaaactaa

SEQ ID NO: 1341177 - DNA, 15 bp, Homo sapiens
atcctcagcaaacta

SEQ ID NO: 1341178 - DNA, 15 bp, Homo sapiens
catcctcagcaaact

SEQ ID NO: 1341179 - DNA, 15 bp, Homo sapiens
tcatcctcagcaaac

SEQ ID NO: 1341180 - DNA, 15 bp, Homo sapiens
atcatcctcagcaaa

SEQ ID NO: 1341181 - DNA, 15 bp, Homo sapiens
catcatcctcagcaa

SEQ ID NO: 1341182 - DNA, 15 bp, Homo sapiens
ccatcatcctcagca

SEQ ID NO: 1341183 - DNA, 15 bp, Homo sapiens
gccatcatcctcagc

SEQ ID NO: 1341184 - DNA, 15 bp, Homo sapiens
agccatcatcctcag

SEQ ID NO: 1341185 - DNA, 15 bp, Homo sapiens
aagccatcatcctca

SEQ ID NO: 1341186 - DNA, 15 bp, Homo sapiens
gaagccatcatcctc

SEQ ID NO: 1341187 - DNA, 15 bp, Homo sapiens
ggaagccatcatcct

SEQ ID NO: 1341188 - DNA, 15 bp, Homo sapiens
tggaagccatcatcc

SEQ ID NO: 1341189 - DNA, 15 bp, Homo sapiens
ctggaagccatcatc

SEQ ID NO: 1341190 - DNA, 15 bp, Homo sapiens
gctggaagccatcat

SEQ ID NO: 1341191 - DNA, 15 bp, Homo sapiens
cgctggaagccatca

SEQ ID NO: 1341192 - DNA, 15 bp, Homo sapiens
tcgctggaagccatc

SEQ ID NO: 1341193 - DNA, 15 bp, Homo sapiens
ttcgctggaagccat

SEQ ID NO: 1341194 - DNA, 15 bp, Homo sapiens
cttcgctggaagcca

SEQ ID NO: 1341195 - DNA, 15 bp, Homo sapiens
ccttcgctggaagcc

SEQ ID NO: 1341196 - DNA, 15 bp, Homo sapiens
tccttcgctggaagc

SEQ ID NO: 1341197 - DNA, 15 bp, Homo sapiens
ctccttcgctggaag

SEQ ID NO: 1341198 - DNA, 15 bp, Homo sapiens
actccttcgctggaa

SEQ ID NO: 1341199 - DNA, 15 bp, Homo sapiens
gactccttcgctgga

SEQ ID NO: 1341200 - DNA, 15 bp, Homo sapiens
agactccttcgctgg

SEQ ID NO: 1341201 - DNA, 15 bp, Homo sapiens
aagactccttcgctg

SEQ ID NO: 1341202 - DNA, 15 bp, Homo sapiens
caagactccttcgct

SEQ ID NO: 1341203 - DNA, 15 bp, Homo sapiens
acaagactccttcgc

SEQ ID NO: 1341204 - DNA, 15 bp, Homo sapiens
tacaagactccttcg

SEQ ID NO: 1341205 - DNA, 15 bp, Homo sapiens
atacaagactccttc

SEQ ID NO: 1341206 - DNA, 15 bp, Homo sapiens
aatacaagactcctt

SEQ ID NO: 1341207 - DNA, 15 bp, Homo sapiens
taatacaagactcct

SEQ ID NO: 1341208 - DNA, 15 bp, Homo sapiens
ctaatacaagactcc

SEQ ID NO: 1341209 - DNA, 15 bp, Homo sapiens
actaatacaagactc

SEQ ID NO: 1341210 - DNA, 15 bp, Homo sapiens
cactaatacaagact

SEQ ID NO: 1341211 - DNA, 15 bp, Homo sapiens
ccactaatacaagac

SEQ ID NO: 1341212 - DNA, 15 bp, Homo sapiens
gccactaatacaaga

SEQ ID NO: 1341213 - DNA, 15 bp, Homo sapiens
agccactaatacaag

SEQ ID NO: 1341214 - DNA, 15 bp, Homo sapiens
aagccactaatacaa

SEQ ID NO: 1341215 - DNA, 15 bp, Homo sapiens
aaagccactaataca

SEQ ID NO: 1341216 - DNA, 15 bp, Homo sapiens
aaaagccactaatac

SEQ ID NO: 1341217 - DNA, 15 bp, Homo sapiens
aaaaagccactaata

SEQ ID NO: 1341218 - DNA, 15 bp, Homo sapiens
gaaaaagccactaat

SEQ ID NO: 1341219 - DNA, 15 bp, Homo sapiens
ggaaaaagccactaa

SEQ ID NO: 1341220 - DNA, 15 bp, Homo sapiens
gggaaaaagccacta

SEQ ID NO: 1341221 - DNA, 15 bp, Homo sapiens
ggggaaaaagccact

SEQ ID NO: 1341222 - DNA, 15 bp, Homo sapiens
tggggaaaaagccac

SEQ ID NO: 1341223 - DNA, 15 bp, Homo sapiens
gtggggaaaaagcca

SEQ ID NO: 1341224 - DNA, 15 bp, Homo sapiens
ggtggggaaaaagcc

SEQ ID NO: 1341225 - DNA, 15 bp, Homo sapiens
aggtggggaaaaagc

SEQ ID NO: 1341226 - DNA, 15 bp, Homo sapiens
taggtggggaaaaag

SEQ ID NO: 1341227 - DNA, 15 bp, Homo sapiens
ttaggtggggaaaaa

SEQ ID NO: 1341228 - DNA, 15 bp, Homo sapiens
attaggtggggaaaa

SEQ ID NO: 1341229 - DNA, 15 bp, Homo sapiens
gattaggtggggaaa

SEQ ID NO: 1341230 - DNA, 15 bp, Homo sapiens
cgattaggtggggaa

SEQ ID NO: 1341231 - DNA, 15 bp, Homo sapiens
acgattaggtgggga

SEQ ID NO: 1341232 - DNA, 15 bp, Homo sapiens
aacgattaggtgggg

SEQ ID NO: 1341233 - DNA, 15 bp, Homo sapiens
taacgattaggtggg

SEQ ID NO: 1341234 - DNA, 15 bp, Homo sapiens
ctaacgattaggtgg

SEQ ID NO: 1341235 - DNA, 15 bp, Homo sapiens
tctaacgattaggtg

SEQ ID NO: 1341236 - DNA, 15 bp, Homo sapiens
ttctaacgattaggt

SEQ ID NO: 1341237 - DNA, 15 bp, Homo sapiens
cttctaacgattagg

SEQ ID NO: 1341238 - DNA, 15 bp, Homo sapiens
acttctaacgattag

SEQ ID NO: 1341239 - DNA, 15 bp, Homo sapiens
aacttctaacgatta

SEQ ID NO: 1341240 - DNA, 15 bp, Homo sapiens
caacttctaacgatt

SEQ ID NO: 1341241 - DNA, 15 bp, Homo sapiens
acaacttctaacgat

SEQ ID NO: 1341242 - DNA, 15 bp, Homo sapiens
cacaacttctaacga

SEQ ID NO: 1341243 - DNA, 15 bp, Homo sapiens
tcacaacttctaacg

SEQ ID NO: 1341244 - DNA, 15 bp, Homo sapiens
ttcacaacttctaac

SEQ ID NO: 1341245 - DNA, 15 bp, Homo sapiens
attcacaacttctaa

SEQ ID NO: 1341246 - DNA, 15 bp, Homo sapiens
tattcacaacttcta

SEQ ID NO: 1341247 - DNA, 15 bp, Homo sapiens
ctattcacaacttct

SEQ ID NO: 1341248 - DNA, 15 bp, Homo sapiens
cctattcacaacttc

SEQ ID NO: 1341249 - DNA, 15 bp, Homo sapiens
ccctattcacaactt

SEQ ID NO: 1341250 - DNA, 15 bp, Homo sapiens
tccctattcacaact

SEQ ID NO: 1341251 - DNA, 15 bp, Homo sapiens
gtccctattcacaac

SEQ ID NO: 1341252 - DNA, 15 bp, Homo sapiens
agtccctattcacaa

SEQ ID NO: 1341253 - DNA, 15 bp, Homo sapiens
aagtccctattcaca

SEQ ID NO: 1341254 - DNA, 15 bp, Homo sapiens
gaagtccctattcac

SEQ ID NO: 1341255 - DNA, 15 bp, Homo sapiens
agaagtccctattca

SEQ ID NO: 1341256 - DNA, 15 bp, Homo sapiens
aagaagtccctattc

SEQ ID NO: 1341257 - DNA, 15 bp, Homo sapiens
aaagaagtccctatt

SEQ ID NO: 1341258 - DNA, 15 bp, Homo sapiens
taaagaagtccctat

SEQ ID NO: 1341259 - DNA, 15 bp, Homo sapiens
ttaaagaagtcccta

SEQ ID NO: 1341260 - DNA, 15 bp, Homo sapiens
attaaagaagtccct

SEQ ID NO: 1341261 - DNA, 15 bp, Homo sapiens
cattaaagaagtccc

SEQ ID NO: 1341262 - DNA, 15 bp, Homo sapiens
tcattaaagaagtcc

SEQ ID NO: 1341263 - DNA, 15 bp, Homo sapiens
ttcattaaagaagtc

SEQ ID NO: 1341264 - DNA, 15 bp, Homo sapiens
attcattaaagaagt

SEQ ID NO: 1341265 - DNA, 15 bp, Homo sapiens
gattcattaaagaag

SEQ ID NO: 1341266 - DNA, 15 bp, Homo sapiens
ggattcattaaagaa

SEQ ID NO: 1341267 - DNA, 15 bp, Homo sapiens
tggattcattaaaga

SEQ ID NO: 1341268 - DNA, 15 bp, Homo sapiens
ctggattcattaaag

SEQ ID NO: 1341269 - DNA, 15 bp, Homo sapiens
tctggattcattaaa

SEQ ID NO: 1341270 - DNA, 15 bp, Homo sapiens
ttctggattcattaa

SEQ ID NO: 1341271 - DNA, 15 bp, Homo sapiens
cttctggattcatta

SEQ ID NO: 1341272 - DNA, 15 bp, Homo sapiens
acttctggattcatt

SEQ ID NO: 1341273 - DNA, 15 bp, Homo sapiens
aacttctggattcat

SEQ ID NO: 1341274 - DNA, 15 bp, Homo sapiens
taacttctggattca

SEQ ID NO: 1341275 - DNA, 15 bp, Homo sapiens
ttaacttctggattc

SEQ ID NO: 1341276 - DNA, 15 bp, Homo sapiens
attaacttctggatt

SEQ ID NO: 1341277 - DNA, 15 bp, Homo sapiens
cattaacttctggat

SEQ ID NO: 1341278 - DNA, 15 bp, Homo sapiens
tcattaacttctgga

SEQ ID NO: 1341279 - DNA, 15 bp, Homo sapiens
ttcattaacttctgg

SEQ ID NO: 1341280 - DNA, 15 bp, Homo sapiens
gttcattaacttctg

SEQ ID NO: 1341281 - DNA, 15 bp, Homo sapiens
ggttcattaacttct

SEQ ID NO: 1341282 - DNA, 15 bp, Homo sapiens
aggttcattaacttc

SEQ ID NO: 1341283 - DNA, 15 bp, Homo sapiens
taggttcattaactt

SEQ ID NO: 1341284 - DNA, 15 bp, Homo sapiens
ctaggttcattaact

SEQ ID NO: 1341285 - DNA, 15 bp, Homo sapiens
gctaggttcattaac

SEQ ID NO: 1341286 - DNA, 15 bp, Homo sapiens
agctaggttcattaa

SEQ ID NO: 1341287 - DNA, 15 bp, Homo sapiens
aagctaggttcatta

SEQ ID NO: 1341288 - DNA, 15 bp, Homo sapiens
aaagctaggttcatt

SEQ ID NO: 1341289 - DNA, 15 bp, Homo sapiens
aaaagctaggttcat

SEQ ID NO: 1341290 - DNA, 15 bp, Homo sapiens
aaaaagctaggttca

SEQ ID NO: 1341291 - DNA, 15 bp, Homo sapiens
aaaaaagctaggttc

SEQ ID NO: 1341292 - DNA, 15 bp, Homo sapiens
aaaaaaagctaggtt

SEQ ID NO: 1341293 - DNA, 15 bp, Homo sapiens
aaaaaaaagctaggt

SEQ ID NO: 1341294 - DNA, 15 bp, Homo sapiens
aaaaaaaaagctagg

SEQ ID NO: 1341295 - DNA, 15 bp, Homo sapiens
aaaaaaaaaagctag

SEQ ID NO: 1341296 - DNA, 15 bp, Homo sapiens
aaaaaaaaaaagcta

SEQ ID NO: 1341297 - DNA, 15 bp, Homo sapiens
tccaaaaaaaaaaaa

SEQ ID NO: 1341298 - DNA, 15 bp, Homo sapiens
ctccaaaaaaaaaaa

SEQ ID NO: 1341299 - DNA, 15 bp, Homo sapiens
tctccaaaaaaaaaa

SEQ ID NO: 1341300 - DNA, 15 bp, Homo sapiens
gtctccaaaaaaaaa

SEQ ID NO: 1341301 - DNA, 15 bp, Homo sapiens
cgtctccaaaaaaaa

SEQ ID NO: 1341302 - DNA, 15 bp, Homo sapiens
ccgtctccaaaaaaa

SEQ ID NO: 1341303 - DNA, 15 bp, Homo sapiens
ctccgtctccaaaaa

SEQ ID NO: 1341304 - DNA, 15 bp, Homo sapiens
actccgtctccaaaa

SEQ ID NO: 1341305 - DNA, 15 bp, Homo sapiens
gactccgtctccaaa

SEQ ID NO: 1341306 - DNA, 15 bp, Homo sapiens
agactccgtctccaa

SEQ ID NO: 1341307 - DNA, 15 bp, Homo sapiens
cagactccgtctcca

SEQ ID NO: 1341308 - DNA, 15 bp, Homo sapiens
ccagactccgtctcc

SEQ ID NO: 1341309 - DNA, 15 bp, Homo sapiens
gccagactccgtctc

SEQ ID NO: 1341310 - DNA, 15 bp, Homo sapiens
agccagactccgtct

SEQ ID NO: 1341311 - DNA, 15 bp, Homo sapiens
gagccagactccgtc

SEQ ID NO: 1341312 - DNA, 15 bp, Homo sapiens
agagccagactccgt

SEQ ID NO: 1341313 - DNA, 15 bp, Homo sapiens
cagagccagactccg

SEQ ID NO: 1341314 - DNA, 15 bp, Homo sapiens
acagagccagactcc

SEQ ID NO: 1341315 - DNA, 15 bp, Homo sapiens
aacagagccagactc

SEQ ID NO: 1341316 - DNA, 15 bp, Homo sapiens
aaacagagccagact

SEQ ID NO: 1341317 - DNA, 15 bp, Homo sapiens
gaaacagagccagac

SEQ ID NO: 1341318 - DNA, 15 bp, Homo sapiens
ggaaacagagccaga

SEQ ID NO: 1341319 - DNA, 15 bp, Homo sapiens
gggaaacagagccag

SEQ ID NO: 1341320 - DNA, 15 bp, Homo sapiens
tgggaaacagagcca

SEQ ID NO: 1341321 - DNA, 15 bp, Homo sapiens
ctgggaaacagagcc

SEQ ID NO: 1341322 - DNA, 15 bp, Homo sapiens
cctgggaaacagagc

SEQ ID NO: 1341323 - DNA, 15 bp, Homo sapiens
gcctgggaaacagag

SEQ ID NO: 1341324 - DNA, 15 bp, Homo sapiens
agcctgggaaacaga

SEQ ID NO: 1341325 - DNA, 15 bp, Homo sapiens
cagcctgggaaacag

SEQ ID NO: 1341326 - DNA, 15 bp, Homo sapiens
ccagcctgggaaaca

SEQ ID NO: 1341327 - DNA, 15 bp, Homo sapiens
tccagcctgggaaac

SEQ ID NO: 1341328 - DNA, 15 bp, Homo sapiens
accactacactccag

SEQ ID NO: 1341329 - DNA, 15 bp, Homo sapiens
caccactacactcca

SEQ ID NO: 1341330 - DNA, 15 bp, Homo sapiens
acaccactacactcc

SEQ ID NO: 1341331 - DNA, 15 bp, Homo sapiens
cacaccactacactc

SEQ ID NO: 1341332 - DNA, 15 bp, Homo sapiens
tcacaccactacact

SEQ ID NO: 1341333 - DNA, 15 bp, Homo sapiens
atcacaccactacac

SEQ ID NO: 1341334 - DNA, 15 bp, Homo sapiens
gatcacaccactaca

SEQ ID NO: 1341335 - DNA, 15 bp, Homo sapiens
agatcacaccactac

SEQ ID NO: 1341336 - DNA, 15 bp, Homo sapiens
gagatcacaccacta

SEQ ID NO: 1341337 - DNA, 15 bp, Homo sapiens
agagatcacaccact

SEQ ID NO: 1341338 - DNA, 15 bp, Homo sapiens
cagagatcacaccac

SEQ ID NO: 1341339 - DNA, 15 bp, Homo sapiens
gcagagatcacacca

SEQ ID NO: 1341340 - DNA, 15 bp, Homo sapiens
agcagagatcacacc

SEQ ID NO: 1341341 - DNA, 15 bp, Homo sapiens
gagcagagatcacac

SEQ ID NO: 1341342 - DNA, 15 bp, Homo sapiens
tgagcagagatcaca

SEQ ID NO: 1341343 - DNA, 15 bp, Homo sapiens
gtgagcagagatcac

SEQ ID NO: 1341344 - DNA, 15 bp, Homo sapiens
ggtgagcagagatca

SEQ ID NO: 1341345 - DNA, 15 bp, Homo sapiens
tggtgagcagagatc

SEQ ID NO: 1341346 - DNA, 15 bp, Homo sapiens
atggtgagcagagat

SEQ ID NO: 1341347 - DNA, 15 bp, Homo sapiens
tatggtgagcagaga

SEQ ID NO: 1341348 - DNA, 15 bp, Homo sapiens
gtatggtgagcagag

SEQ ID NO: 1341349 - DNA, 15 bp, Homo sapiens
tgtatggtgagcaga

SEQ ID NO: 1341350 - DNA, 15 bp, Homo sapiens
ttgtatggtgagcag

SEQ ID NO: 1341351 - DNA, 15 bp, Homo sapiens
gttgtatggtgagca

SEQ ID NO: 1341352 - DNA, 15 bp, Homo sapiens
ggttgtatggtgagc

SEQ ID NO: 1341353 - DNA, 15 bp, Homo sapiens
aggttgtatggtgag

SEQ ID NO: 1341354 - DNA, 15 bp, Homo sapiens
gaggttgtatggtga

SEQ ID NO: 1341355 - DNA, 15 bp, Homo sapiens
ggaggttgtatggtg

SEQ ID NO: 1341356 - DNA, 15 bp, Homo sapiens
tggaggttgtatggt

SEQ ID NO: 1341357 - DNA, 15 bp, Homo sapiens
gtggaggttgtatgg

SEQ ID NO: 1341358 - DNA, 15 bp, Homo sapiens
agtggaggttgtatg

SEQ ID NO: 1341359 - DNA, 15 bp, Homo sapiens
aagtggaggttgtat

SEQ ID NO: 1341360 - DNA, 15 bp, Homo sapiens
gaagtggaggttgta

SEQ ID NO: 1341361 - DNA, 15 bp, Homo sapiens
ggaagtggaggttgt

SEQ ID NO: 1341362 - DNA, 15 bp, Homo sapiens
tcgggaagtggaggt

SEQ ID NO: 1341363 - DNA, 15 bp, Homo sapiens
ctcgggaagtggagg

SEQ ID NO: 1341364 - DNA, 15 bp, Homo sapiens
actcgggaagtggag

SEQ ID NO: 1341365 - DNA, 15 bp, Homo sapiens
aactcgggaagtgga

SEQ ID NO: 1341366 - DNA, 15 bp, Homo sapiens
gaactcgggaagtgg

SEQ ID NO: 1341367 - DNA, 15 bp, Homo sapiens
tgaactcgggaagtg

SEQ ID NO: 1341368 - DNA, 15 bp, Homo sapiens
ttgaactcgggaagt

SEQ ID NO: 1341369 - DNA, 15 bp, Homo sapiens
cttgaactcgggaag

SEQ ID NO: 1341370 - DNA, 15 bp, Homo sapiens
tcttgaactcgggaa

SEQ ID NO: 1341371 - DNA, 15 bp, Homo sapiens
ctcttgaactcggga

SEQ ID NO: 1341372 - DNA, 15 bp, Homo sapiens
tctcttgaactcggg

SEQ ID NO: 1341373 - DNA, 15 bp, Homo sapiens
atctcttgaactcgg

SEQ ID NO: 1341374 - DNA, 15 bp, Homo sapiens
aatctcttgaactcg

SEQ ID NO: 1341375 - DNA, 15 bp, Homo sapiens
gaatctcttgaactc

SEQ ID NO: 1341376 - DNA, 15 bp, Homo sapiens
agaatctcttgaact

SEQ ID NO: 1341377 - DNA, 15 bp, Homo sapiens
gagaatctcttgaac

SEQ ID NO: 1341378 - DNA, 15 bp, Homo sapiens
ggaaggctgaggcag

SEQ ID NO: 1341379 - DNA, 15 bp, Homo sapiens
cggaaggctgaggca

SEQ ID NO: 1341380 - DNA, 15 bp, Homo sapiens
tcggaaggctgaggc

SEQ ID NO: 1341381 - DNA, 15 bp, Homo sapiens
ctcggaaggctgagg

SEQ ID NO: 1341382 - DNA, 15 bp, Homo sapiens
actcggaaggctgag

SEQ ID NO: 1341383 - DNA, 15 bp, Homo sapiens
aactcggaaggctga

SEQ ID NO: 1341384 - DNA, 15 bp, Homo sapiens
caactcggaaggctg

SEQ ID NO: 1341385 - DNA, 15 bp, Homo sapiens
acaactcggaaggct

SEQ ID NO: 1341386 - DNA, 15 bp, Homo sapiens
aacaactcggaaggc

SEQ ID NO: 1341387 - DNA, 15 bp, Homo sapiens
caacaactcggaagg

SEQ ID NO: 1341388 - DNA, 15 bp, Homo sapiens
ccaacaactcggaag

SEQ ID NO: 1341389 - DNA, 15 bp, Homo sapiens
cccaacaactcggaa

SEQ ID NO: 1341390 - DNA, 15 bp, Homo sapiens
tcccaacaactcgga

SEQ ID NO: 1341391 - DNA, 15 bp, Homo sapiens
gtcccaacaactcgg

SEQ ID NO: 1341392 - DNA, 15 bp, Homo sapiens
agtcccaacaactcg

SEQ ID NO: 1341393 - DNA, 15 bp, Homo sapiens
tagtcccaacaactc

SEQ ID NO: 1341394 - DNA, 15 bp, Homo sapiens
gtagtcccaacaact

SEQ ID NO: 1341395 - DNA, 15 bp, Homo sapiens
tgtagtcccaacaac

SEQ ID NO: 1341396 - DNA, 15 bp, Homo sapiens
ctgtagtcccaacaa

SEQ ID NO: 1341397 - DNA, 15 bp, Homo sapiens
cctgtagtcccaaca

SEQ ID NO: 1341398 - DNA, 15 bp, Homo sapiens
gcctgtagtcccaac

SEQ ID NO: 1341399 - DNA, 15 bp, Homo sapiens
cgcctgtagtcccaa

SEQ ID NO: 1341400 - DNA, 15 bp, Homo sapiens
acgcgcctgtagtcc

SEQ ID NO: 1341401 - DNA, 15 bp, Homo sapiens
cacgcgcctgtagtc

SEQ ID NO: 1341402 - DNA, 15 bp, Homo sapiens
gcacgcgcctgtagt

SEQ ID NO: 1341403 - DNA, 15 bp, Homo sapiens
agcacgcgcctgtag

SEQ ID NO: 1341404 - DNA, 15 bp, Homo sapiens
cagcacgcgcctgta

SEQ ID NO: 1341405 - DNA, 15 bp, Homo sapiens
gcagcacgcgcctgt

SEQ ID NO: 1341406 - DNA, 15 bp, Homo sapiens
ggcagcacgcgcctg

SEQ ID NO: 1341407 - DNA, 15 bp, Homo sapiens
tggcagcacgcgcct

SEQ ID NO: 1341408 - DNA, 15 bp, Homo sapiens
atggcagcacgcgcc

SEQ ID NO: 1341409 - DNA, 15 bp, Homo sapiens
catggcagcacgcgc

SEQ ID NO: 1341410 - DNA, 15 bp, Homo sapiens
gcatggcagcacgcg

SEQ ID NO: 1341411 - DNA, 15 bp, Homo sapiens
ggcatggcagcacgc

SEQ ID NO: 1341412 - DNA, 15 bp, Homo sapiens
aggcatggcagcacg

SEQ ID NO: 1341413 - DNA, 15 bp, Homo sapiens
caggcatggcagcac

SEQ ID NO: 1341414 - DNA, 15 bp, Homo sapiens
ccaggcatggcagca

SEQ ID NO: 1341415 - DNA, 15 bp, Homo sapiens
gccaggcatggcagc

SEQ ID NO: 1341416 - DNA, 15 bp, Homo sapiens
agccaggcatggcag

SEQ ID NO: 1341417 - DNA, 15 bp, Homo sapiens
tagccaggcatggca

SEQ ID NO: 1341418 - DNA, 15 bp, Homo sapiens
ttagccaggcatggc

SEQ ID NO: 1341419 - DNA, 15 bp, Homo sapiens
tccccgtctctacca

SEQ ID NO: 1341420 - DNA, 15 bp, Homo sapiens
atccccgtctctacc

SEQ ID NO: 1341421 - DNA, 15 bp, Homo sapiens
aatccccgtctctac

SEQ ID NO: 1341422 - DNA, 15 bp, Homo sapiens
gaatccccgtctcta

SEQ ID NO: 1341423 - DNA, 15 bp, Homo sapiens
tgaatccccgtctct

SEQ ID NO: 1341424 - DNA, 15 bp, Homo sapiens
gtgaatccccgtctc

SEQ ID NO: 1341425 - DNA, 15 bp, Homo sapiens
agtgaatccccgtct

SEQ ID NO: 1341426 - DNA, 15 bp, Homo sapiens
tagtgaatccccgtc

SEQ ID NO: 1341427 - DNA, 15 bp, Homo sapiens
atagtgaatccccgt

SEQ ID NO: 1341428 - DNA, 15 bp, Homo sapiens
catagtgaatccccg

SEQ ID NO: 1341429 - DNA, 15 bp, Homo sapiens
acatagtgaatcccc

SEQ ID NO: 1341430 - DNA, 15 bp, Homo sapiens
aacatagtgaatccc

SEQ ID NO: 1341431 - DNA, 15 bp, Homo sapiens
caacatagtgaatcc

SEQ ID NO: 1341432 - DNA, 15 bp, Homo sapiens
ccaacatagtgaatc

SEQ ID NO: 1341433 - DNA, 15 bp, Homo sapiens
gccaacatagtgaat

SEQ ID NO: 1341434 - DNA, 15 bp, Homo sapiens
acctggccaacatag

SEQ ID NO: 1341435 - DNA, 15 bp, Homo sapiens
aacctggccaacata

SEQ ID NO: 1341436 - DNA, 15 bp, Homo sapiens
caacctggccaacat

SEQ ID NO: 1341437 - DNA, 15 bp, Homo sapiens
ccaacctggccaaca

SEQ ID NO: 1341438 - DNA, 15 bp, Homo sapiens
accaacctggccaac

SEQ ID NO: 1341439 - DNA, 15 bp, Homo sapiens
gaccaacctggccaa

SEQ ID NO: 1341440 - DNA, 15 bp, Homo sapiens
agaccaacctggcca

SEQ ID NO: 1341441 - DNA, 15 bp, Homo sapiens
aagaccaacctggcc

SEQ ID NO: 1341442 - DNA, 15 bp, Homo sapiens
caagaccaacctggc

SEQ ID NO: 1341443 - DNA, 15 bp, Homo sapiens
tcaagaccaacctgg

SEQ ID NO: 1341444 - DNA, 15 bp, Homo sapiens
ttcaagaccaacctg

SEQ ID NO: 1341445 - DNA, 15 bp, Homo sapiens
gttcaagaccaacct

SEQ ID NO: 1341446 - DNA, 15 bp, Homo sapiens
agttcaagaccaacc

SEQ ID NO: 1341447 - DNA, 15 bp, Homo sapiens
ccacaaggtcaggag

SEQ ID NO: 1341448 - DNA, 15 bp, Homo sapiens
accacaaggtcagga

SEQ ID NO: 1341449 - DNA, 15 bp, Homo sapiens
gaccacaaggtcagg

SEQ ID NO: 1341450 - DNA, 15 bp, Homo sapiens
ggaccacaaggtcag

SEQ ID NO: 1341451 - DNA, 15 bp, Homo sapiens
cggaccacaaggtca

SEQ ID NO: 1341452 - DNA, 15 bp, Homo sapiens
gcggaccacaaggtc

SEQ ID NO: 1341453 - DNA, 15 bp, Homo sapiens
ggcggaccacaaggt

SEQ ID NO: 1341454 - DNA, 15 bp, Homo sapiens
gggcggaccacaagg

SEQ ID NO: 1341455 - DNA, 15 bp, Homo sapiens
tgggcggaccacaag

SEQ ID NO: 1341456 - DNA, 15 bp, Homo sapiens
atgggcggaccacaa

SEQ ID NO: 1341457 - DNA, 15 bp, Homo sapiens
gatgggcggaccaca

SEQ ID NO: 1341458 - DNA, 15 bp, Homo sapiens
agatgggcggaccac

SEQ ID NO: 1341459 - DNA, 15 bp, Homo sapiens
gagatgggcggacca

SEQ ID NO: 1341460 - DNA, 15 bp, Homo sapiens
tgagatgggcggacc

SEQ ID NO: 1341461 - DNA, 15 bp, Homo sapiens
ctgagatgggcggac

SEQ ID NO: 1341462 - DNA, 15 bp, Homo sapiens
gctgagatgggcgga

SEQ ID NO: 1341463 - DNA, 15 bp, Homo sapiens
ggctgagatgggcgg

SEQ ID NO: 1341464 - DNA, 15 bp, Homo sapiens
aggctgagatgggcg

SEQ ID NO: 1341465 - DNA, 15 bp, Homo sapiens
gcacctgtaatccca

SEQ ID NO: 1341466 - DNA, 15 bp, Homo sapiens
cgcacctgtaatccc

SEQ ID NO: 1341467 - DNA, 15 bp, Homo sapiens
tcgcacctgtaatcc

SEQ ID NO: 1341468 - DNA, 15 bp, Homo sapiens
ctcgcacctgtaatc

SEQ ID NO: 1341469 - DNA, 15 bp, Homo sapiens
cctcgcacctgtaat

SEQ ID NO: 1341470 - DNA, 15 bp, Homo sapiens
gcctcgcacctgtaa

SEQ ID NO: 1341471 - DNA, 15 bp, Homo sapiens
tgcctcgcacctgta

SEQ ID NO: 1341472 - DNA, 15 bp, Homo sapiens
gtgcctcgcacctgt

SEQ ID NO: 1341473 - DNA, 15 bp, Homo sapiens
ggtgcctcgcacctg

SEQ ID NO: 1341474 - DNA, 15 bp, Homo sapiens
cggtgcctcgcacct

SEQ ID NO: 1341475 - DNA, 15 bp, Homo sapiens
gcggtgcctcgcacc

SEQ ID NO: 1341476 - DNA, 15 bp, Homo sapiens
cgcggtgcctcgcac

SEQ ID NO: 1341477 - DNA, 15 bp, Homo sapiens
gcgcggtgcctcgca

SEQ ID NO: 1341478 - DNA, 15 bp, Homo sapiens
ggcgcggtgcctcgc

SEQ ID NO: 1341479 - DNA, 15 bp, Homo sapiens
gggcgcggtgcctcg

SEQ ID NO: 1341480 - DNA, 15 bp, Homo sapiens
ggggcgcggtgcctc

SEQ ID NO: 1341481 - DNA, 15 bp, Homo sapiens
cggggcgcggtgcct

SEQ ID NO: 1341482 - DNA, 15 bp, Homo sapiens
gcggggcgcggtgcc

SEQ ID NO: 1341483 - DNA, 15 bp, Homo sapiens
cgcggggcgcggtgc

SEQ ID NO: 1341484 - DNA, 15 bp, Homo sapiens
gcgcggggcgcggtg

SEQ ID NO: 1341485 - DNA, 15 bp, Homo sapiens
ggcgcggggcgcggt

SEQ ID NO: 1341486 - DNA, 15 bp, Homo sapiens
agggcgcggggcgcg

SEQ ID NO: 1341487 - DNA, 15 bp, Homo sapiens
cagggcgcggggcgc

SEQ ID NO: 1341488 - DNA, 15 bp, Homo sapiens
gcagggcgcggggcg

SEQ ID NO: 1341489 - DNA, 15 bp, Homo sapiens
ggcagggcgcggggc

SEQ ID NO: 1341490 - DNA, 15 bp, Homo sapiens
cggcagggcgcgggg

SEQ ID NO: 1341491 - DNA, 15 bp, Homo sapiens
tcggcagggcgcggg

SEQ ID NO: 1341492 - DNA, 15 bp, Homo sapiens
atcggcagggcgcgg

SEQ ID NO: 1341493 - DNA, 15 bp, Homo sapiens
catcggcagggcgcg

SEQ ID NO: 1341494 - DNA, 15 bp, Homo sapiens
tcatcggcagggcgc

SEQ ID NO: 1341495 - DNA, 15 bp, Homo sapiens
ttcatcggcagggcg

SEQ ID NO: 1341496 - DNA, 15 bp, Homo sapiens
gttcatcggcagggc

SEQ ID NO: 1341497 - DNA, 15 bp, Homo sapiens
ggttcatcggcaggg

SEQ ID NO: 1341498 - DNA, 15 bp, Homo sapiens
aggttcatcggcagg

SEQ ID NO: 1341499 - DNA, 15 bp, Homo sapiens
taggttcatcggcag

SEQ ID NO: 1341500 - DNA, 15 bp, Homo sapiens
ttaggttcatcggca

SEQ ID NO: 1341501 - DNA, 15 bp, Homo sapiens
tttaggttcatcggc

SEQ ID NO: 1341502 - DNA, 15 bp, Homo sapiens
atttaggttcatcgg

SEQ ID NO: 1341503 - DNA, 15 bp, Homo sapiens
aatttaggttcatcg

SEQ ID NO: 1341504 - DNA, 15 bp, Homo sapiens
aaatttaggttcatc

SEQ ID NO: 1341505 - DNA, 15 bp, Homo sapiens
aaaatttaggttcat

SEQ ID NO: 1341506 - DNA, 15 bp, Homo sapiens
taaaatttaggttca

SEQ ID NO: 1341507 - DNA, 15 bp, Homo sapiens
ttaaaatttaggttc

SEQ ID NO: 1341508 - DNA, 15 bp, Homo sapiens
gttaaaatttaggtt

SEQ ID NO: 1341509 - DNA, 15 bp, Homo sapiens
agttaaaatttaggt

SEQ ID NO: 1341510 - DNA, 15 bp, Homo sapiens
tagttaaaatttagg

SEQ ID NO: 1341511 - DNA, 15 bp, Homo sapiens
ttagttaaaatttag

SEQ ID NO: 1341512 - DNA, 15 bp, Homo sapiens
tttagttaaaattta

SEQ ID NO: 1341513 - DNA, 15 bp, Homo sapiens
gtttagttaaaattt

SEQ ID NO: 1341514 - DNA, 15 bp, Homo sapiens
tgtttagttaaaatt

SEQ ID NO: 1341515 - DNA, 15 bp, Homo sapiens
ctgtttagttaaaat

SEQ ID NO: 1341516 - DNA, 15 bp, Homo sapiens
actgtttagttaaaa

SEQ ID NO: 1341517 - DNA, 15 bp, Homo sapiens
cactgtttagttaaa

SEQ ID NO: 1341518 - DNA, 15 bp, Homo sapiens
ccactgtttagttaa

SEQ ID NO: 1341519 - DNA, 15 bp, Homo sapiens
gccactgtttagtta

SEQ ID NO: 1341520 - DNA, 15 bp, Homo sapiens
ggccactgtttagtt

SEQ ID NO: 1341521 - DNA, 15 bp, Homo sapiens
aggccactgtttagt

SEQ ID NO: 1341522 - DNA, 15 bp, Homo sapiens
aaggccactgtttag

SEQ ID NO: 1341523 - DNA, 15 bp, Homo sapiens
taaggccactgttta

SEQ ID NO: 1341524 - DNA, 15 bp, Homo sapiens
ataaggccactgttt

SEQ ID NO: 1341525 - DNA, 15 bp, Homo sapiens
gataaggccactgtt

SEQ ID NO: 1341526 - DNA, 15 bp, Homo sapiens
agataaggccactgt

SEQ ID NO: 1341527 - DNA, 15 bp, Homo sapiens
tagataaggccactg

SEQ ID NO: 1341528 - DNA, 15 bp, Homo sapiens
gtagataaggccact

SEQ ID NO: 1341529 - DNA, 15 bp, Homo sapiens
agtagataaggccac

SEQ ID NO: 1341530 - DNA, 15 bp, Homo sapiens
aagtagataaggcca

SEQ ID NO: 1341531 - DNA, 15 bp, Homo sapiens
aaagtagataaggcc

SEQ ID NO: 1341532 - DNA, 15 bp, Homo sapiens
gaaagtagataaggc

SEQ ID NO: 1341533 - DNA, 15 bp, Homo sapiens
tgaaagtagataagg

SEQ ID NO: 1341534 - DNA, 15 bp, Homo sapiens
ctgaaagtagataag

SEQ ID NO: 1341535 - DNA, 15 bp, Homo sapiens
tctgaaagtagataa

SEQ ID NO: 1341536 - DNA, 15 bp, Homo sapiens
gtctgaaagtagata

SEQ ID NO: 1341537 - DNA, 15 bp, Homo sapiens
ggtctgaaagtagat

SEQ ID NO: 1341538 - DNA, 15 bp, Homo sapiens
tggtctgaaagtaga

SEQ ID NO: 1341539 - DNA, 15 bp, Homo sapiens
atggtctgaaagtag

SEQ ID NO: 1341540 - DNA, 15 bp, Homo sapiens
catggtctgaaagta

SEQ ID NO: 1341541 - DNA, 15 bp, Homo sapiens
acatggtctgaaagt

SEQ ID NO: 1341542 - DNA, 15 bp, Homo sapiens
cacatggtctgaaag

SEQ ID NO: 1341543 - DNA, 15 bp, Homo sapiens
ccacatggtctgaaa

SEQ ID NO: 1341544 - DNA, 15 bp, Homo sapiens
accacatggtctgaa

SEQ ID NO: 1341545 - DNA, 15 bp, Homo sapiens
taccacatggtctga

SEQ ID NO: 1341546 - DNA, 15 bp, Homo sapiens
ataccacatggtctg

SEQ ID NO: 1341547 - DNA, 15 bp, Homo sapiens
tataccacatggtct

SEQ ID NO: 1341548 - DNA, 15 bp, Homo sapiens
atataccacatggtc

SEQ ID NO: 1341549 - DNA, 15 bp, Homo sapiens
aatataccacatggt

SEQ ID NO: 1341550 - DNA, 15 bp, Homo sapiens
aaatataccacatgg

SEQ ID NO: 1341551 - DNA, 15 bp, Homo sapiens
taaatataccacatg

SEQ ID NO: 1341552 - DNA, 15 bp, Homo sapiens
gtaaatataccacat

SEQ ID NO: 1341553 - DNA, 15 bp, Homo sapiens
tgtaaatataccaca

SEQ ID NO: 1341554 - DNA, 15 bp, Homo sapiens
atgtaaatataccac

SEQ ID NO: 1341555 - DNA, 15 bp, Homo sapiens
catgtaaatatacca

SEQ ID NO: 1341556 - DNA, 15 bp, Homo sapiens
tcatgtaaatatacc

SEQ ID NO: 1341557 - DNA, 15 bp, Homo sapiens
gtcatgtaaatatac

SEQ ID NO: 1341558 - DNA, 15 bp, Homo sapiens
agtcatgtaaatata

SEQ ID NO: 1341559 - DNA, 15 bp, Homo sapiens
tagtcatgtaaatat

SEQ ID NO: 1341560 - DNA, 15 bp, Homo sapiens
gtagtcatgtaaata

SEQ ID NO: 1341561 - DNA, 15 bp, Homo sapiens
tgtagtcatgtaaat

SEQ ID NO: 1341562 - DNA, 15 bp, Homo sapiens
ctgtagtcatgtaaa

SEQ ID NO: 1341563 - DNA, 15 bp, Homo sapiens
cctgtagtcatgtaa

SEQ ID NO: 1341564 - DNA, 15 bp, Homo sapiens
tcctgtagtcatgta

SEQ ID NO: 1341565 - DNA, 15 bp, Homo sapiens
ctcctgtagtcatgt

SEQ ID NO: 1341566 - DNA, 15 bp, Homo sapiens
tctcctgtagtcatg

SEQ ID NO: 1341567 - DNA, 15 bp, Homo sapiens
ttctcctgtagtcat

SEQ ID NO: 1341568 - DNA, 15 bp, Homo sapiens
cttctcctgtagtca

SEQ ID NO: 1341569 - DNA, 15 bp, Homo sapiens
gcttctcctgtagtc

SEQ ID NO: 1341570 - DNA, 15 bp, Homo sapiens
agcttctcctgtagt

SEQ ID NO: 1341571 - DNA, 15 bp, Homo sapiens
aagcttctcctgtag

SEQ ID NO: 1341572 - DNA, 15 bp, Homo sapiens
aaagcttctcctgta

SEQ ID NO: 1341573 - DNA, 15 bp, Homo sapiens
caaagcttctcctgt

SEQ ID NO: 1341574 - DNA, 15 bp, Homo sapiens
gcaaagcttctcctg

SEQ ID NO: 1341575 - DNA, 15 bp, Homo sapiens
agcaaagcttctcct

SEQ ID NO: 1341576 - DNA, 15 bp, Homo sapiens
tagcaaagcttctcc

SEQ ID NO: 1341577 - DNA, 15 bp, Homo sapiens
ttagcaaagcttctc

SEQ ID NO: 1341578 - DNA, 15 bp, Homo sapiens
attagcaaagcttct

SEQ ID NO: 1341579 - DNA, 15 bp, Homo sapiens
aattagcaaagcttc

SEQ ID NO: 1341580 - DNA, 15 bp, Homo sapiens
gaattagcaaagctt

SEQ ID NO: 1341581 - DNA, 15 bp, Homo sapiens
tgaattagcaaagct

SEQ ID NO: 1341582 - DNA, 15 bp, Homo sapiens
ctgaattagcaaagc

SEQ ID NO: 1341583 - DNA, 15 bp, Homo sapiens
tctgaattagcaaag

SEQ ID NO: 1341584 - DNA, 15 bp, Homo sapiens
ttctgaattagcaaa

SEQ ID NO: 1341585 - DNA, 15 bp, Homo sapiens
attctgaattagcaa

SEQ ID NO: 1341586 - DNA, 15 bp, Homo sapiens
tattctgaattagca

SEQ ID NO: 1341587 - DNA, 15 bp, Homo sapiens
ttattctgaattagc

SEQ ID NO: 1341588 - DNA, 15 bp, Homo sapiens
tttattctgaattag

SEQ ID NO: 1341589 - DNA, 15 bp, Homo sapiens
atttattctgaatta

SEQ ID NO: 1341590 - DNA, 15 bp, Homo sapiens
aatttattctgaatt

SEQ ID NO: 1341591 - DNA, 15 bp, Homo sapiens
taatttattctgaat

SEQ ID NO: 1341592 - DNA, 15 bp, Homo sapiens
ataatttattctgaa

SEQ ID NO: 1341593 - DNA, 15 bp, Homo sapiens
cataatttattctga

SEQ ID NO: 1341594 - DNA, 15 bp, Homo sapiens
acataatttattctg

SEQ ID NO: 1341595 - DNA, 15 bp, Homo sapiens
aacataatttattct

SEQ ID NO: 1341596 - DNA, 15 bp, Homo sapiens
taacataatttattc

SEQ ID NO: 1341597 - DNA, 15 bp, Homo sapiens
gtaacataatttatt

SEQ ID NO: 1341598 - DNA, 15 bp, Homo sapiens
agtaacataatttat

SEQ ID NO: 1341599 - DNA, 15 bp, Homo sapiens
aagtaacataattta

SEQ ID NO: 1341600 - DNA, 15 bp, Homo sapiens
taagtaacataattt

SEQ ID NO: 1341601 - DNA, 15 bp, Homo sapiens
ttaagtaacataatt

SEQ ID NO: 1341602 - DNA, 15 bp, Homo sapiens
tttaagtaacataat

SEQ ID NO: 1341603 - DNA, 15 bp, Homo sapiens
atttaagtaacataa

SEQ ID NO: 1341604 - DNA, 15 bp, Homo sapiens
aatttaagtaacata

SEQ ID NO: 1341605 - DNA, 15 bp, Homo sapiens
caatttaagtaacat

SEQ ID NO: 1341606 - DNA, 15 bp, Homo sapiens
ccaatttaagtaaca

SEQ ID NO: 1341607 - DNA, 15 bp, Homo sapiens
gccaatttaagtaac

SEQ ID NO: 1341608 - DNA, 15 bp, Homo sapiens
cgccaatttaagtaa

SEQ ID NO: 1341609 - DNA, 15 bp, Homo sapiens
tcgccaatttaagta

SEQ ID NO: 1341610 - DNA, 15 bp, Homo sapiens
gtcgccaatttaagt

SEQ ID NO: 1341611 - DNA, 15 bp, Homo sapiens
agtcgccaatttaag

SEQ ID NO: 1341612 - DNA, 15 bp, Homo sapiens
cagtcgccaatttaa

SEQ ID NO: 1341613 - DNA, 15 bp, Homo sapiens
acagtcgccaattta

SEQ ID NO: 1341614 - DNA, 15 bp, Homo sapiens
gacagtcgccaattt

SEQ ID NO: 1341615 - DNA, 15 bp, Homo sapiens
agacagtcgccaatt

SEQ ID NO: 1341616 - DNA, 15 bp, Homo sapiens
aagacagtcgccaat

SEQ ID NO: 1341617 - DNA, 15 bp, Homo sapiens
aaagacagtcgccaa

SEQ ID NO: 1341618 - DNA, 15 bp, Homo sapiens
taaagacagtcgcca

SEQ ID NO: 1341619 - DNA, 15 bp, Homo sapiens
ttaaagacagtcgcc

SEQ ID NO: 1341620 - DNA, 15 bp, Homo sapiens
tttaaagacagtcgc

SEQ ID NO: 1341621 - DNA, 15 bp, Homo sapiens
ttttaaagacagtcg

SEQ ID NO: 1341622 - DNA, 15 bp, Homo sapiens
tttttaaagacagtc

SEQ ID NO: 1341623 - DNA, 15 bp, Homo sapiens
ttttttaaagacagt

SEQ ID NO: 1341624 - DNA, 15 bp, Homo sapiens
tttttttaaagacag

SEQ ID NO: 1341625 - DNA, 15 bp, Homo sapiens
ttttttttaaagaca

SEQ ID NO: 1341626 - DNA, 15 bp, Homo sapiens
tttttttttaaagac

SEQ ID NO: 1341627 - DNA, 15 bp, Homo sapiens
ctttttttttaaaga

SEQ ID NO: 1341628 - DNA, 15 bp, Homo sapiens
actttttttttaaag

SEQ ID NO: 1341629 - DNA, 15 bp, Homo sapiens
cactttttttttaaa

SEQ ID NO: 1341630 - DNA, 15 bp, Homo sapiens
tcactttttttttaa

SEQ ID NO: 1341631 - DNA, 15 bp, Homo sapiens
atcacttttttttta

SEQ ID NO: 1341632 - DNA, 15 bp, Homo sapiens
aatcacttttttttt

SEQ ID NO: 1341633 - DNA, 15 bp, Homo sapiens
aaatcactttttttt

SEQ ID NO: 1341634 - DNA, 15 bp, Homo sapiens
aaaatcacttttttt

SEQ ID NO: 1341635 - DNA, 15 bp, Homo sapiens
aaaaatcactttttt

SEQ ID NO: 1341636 - DNA, 15 bp, Homo sapiens
aaaaaatcacttttt

SEQ ID NO: 1341637 - DNA, 15 bp, Homo sapiens
caaaaaatcactttt

SEQ ID NO: 1341638 - DNA, 15 bp, Homo sapiens
ccaaaaaatcacttt

SEQ ID NO: 1341639 - DNA, 15 bp, Homo sapiens
tccaaaaaatcactt

SEQ ID NO: 1341640 - DNA, 15 bp, Homo sapiens
atccaaaaaatcact

SEQ ID NO: 1341641 - DNA, 15 bp, Homo sapiens
catccaaaaaatcac

SEQ ID NO: 1341642 - DNA, 15 bp, Homo sapiens
gcatccaaaaaatca

SEQ ID NO: 1341643 - DNA, 15 bp, Homo sapiens
tgcatccaaaaaatc

SEQ ID NO: 1341644 - DNA, 15 bp, Homo sapiens
ctgcatccaaaaaat

SEQ ID NO: 1341645 - DNA, 15 bp, Homo sapiens
actgcatccaaaaaa

SEQ ID NO: 1341646 - DNA, 15 bp, Homo sapiens
tactgcatccaaaaa

SEQ ID NO: 1341647 - DNA, 15 bp, Homo sapiens
ctactgcatccaaaa

SEQ ID NO: 1341648 - DNA, 15 bp, Homo sapiens
gctactgcatccaaa

SEQ ID NO: 1341649 - DNA, 15 bp, Homo sapiens
agctactgcatccaa

SEQ ID NO: 1341650 - DNA, 15 bp, Homo sapiens
gagctactgcatcca

SEQ ID NO: 1341651 - DNA, 15 bp, Homo sapiens
cgagctactgcatcc

SEQ ID NO: 1341652 - DNA, 15 bp, Homo sapiens
acgagctactgcatc

SEQ ID NO: 1341653 - DNA, 15 bp, Homo sapiens
cacgagctactgcat

SEQ ID NO: 1341654 - DNA, 15 bp, Homo sapiens
gcacgagctactgca

SEQ ID NO: 1341655 - DNA, 15 bp, Homo sapiens
ggcacgagctactgc

SEQ ID NO: 1341656 - DNA, 15 bp, Homo sapiens
aggcacgagctactg

SEQ ID NO: 1341657 - DNA, 15 bp, Homo sapiens
taggcacgagctact

SEQ ID NO: 1341658 - DNA, 15 bp, Homo sapiens
ataggcacgagctac

SEQ ID NO: 1341659 - DNA, 15 bp, Homo sapiens
tataggcacgagcta

SEQ ID NO: 1341660 - DNA, 15 bp, Homo sapiens
ttataggcacgagct

SEQ ID NO: 1341661 - DNA, 15 bp, Homo sapiens
gcactgggattatag

SEQ ID NO: 1341662 - DNA, 15 bp, Homo sapiens
agcactgggattata

SEQ ID NO: 1341663 - DNA, 15 bp, Homo sapiens
aagcactgggattat

SEQ ID NO: 1341664 - DNA, 15 bp, Homo sapiens
ttcccaaagcactgg

SEQ ID NO: 1341665 - DNA, 15 bp, Homo sapiens
cttcccaaagcactg

SEQ ID NO: 1341666 - DNA, 15 bp, Homo sapiens
gcttcccaaagcact

SEQ ID NO: 1341667 - DNA, 15 bp, Homo sapiens
agcttcccaaagcac

SEQ ID NO: 1341668 - DNA, 15 bp, Homo sapiens
cagcttcccaaagca

SEQ ID NO: 1341669 - DNA, 15 bp, Homo sapiens
tcagcttcccaaagc

SEQ ID NO: 1341670 - DNA, 15 bp, Homo sapiens
tctcagcttcccaaa

SEQ ID NO: 1341671 - DNA, 15 bp, Homo sapiens
atctcagcttcccaa

SEQ ID NO: 1341672 - DNA, 15 bp, Homo sapiens
tatctcagcttccca

SEQ ID NO: 1341673 - DNA, 15 bp, Homo sapiens
ctatctcagcttccc

SEQ ID NO: 1341674 - DNA, 15 bp, Homo sapiens
cctatctcagcttcc

SEQ ID NO: 1341675 - DNA, 15 bp, Homo sapiens
tcctatctcagcttc

SEQ ID NO: 1341676 - DNA, 15 bp, Homo sapiens
ttcctatctcagctt

SEQ ID NO: 1341677 - DNA, 15 bp, Homo sapiens
cttcctatctcagct

SEQ ID NO: 1341678 - DNA, 15 bp, Homo sapiens
tcttcctatctcagc

SEQ ID NO: 1341679 - DNA, 15 bp, Homo sapiens
atcttcctatctcag

SEQ ID NO: 1341680 - DNA, 15 bp, Homo sapiens
gatcttcctatctca

SEQ ID NO: 1341681 - DNA, 15 bp, Homo sapiens
agatcttcctatctc

SEQ ID NO: 1341682 - DNA, 15 bp, Homo sapiens
gagatcttcctatct

SEQ ID NO: 1341683 - DNA, 15 bp, Homo sapiens
agagatcttcctatc

SEQ ID NO: 1341684 - DNA, 15 bp, Homo sapiens
aagagatcttcctat

SEQ ID NO: 1341685 - DNA, 15 bp, Homo sapiens
caagagatcttccta

SEQ ID NO: 1341686 - DNA, 15 bp, Homo sapiens
tcaagagatcttcct

SEQ ID NO: 1341687 - DNA, 15 bp, Homo sapiens
ttcaagagatcttcc

SEQ ID NO: 1341688 - DNA, 15 bp, Homo sapiens
gttcaagagatcttc

SEQ ID NO: 1341689 - DNA, 15 bp, Homo sapiens
agttcaagagatctt

SEQ ID NO: 1341690 - DNA, 15 bp, Homo sapiens
gagttcaagagatct

SEQ ID NO: 1341691 - DNA, 15 bp, Homo sapiens
ggagttcaagagatc

SEQ ID NO: 1341692 - DNA, 15 bp, Homo sapiens
cggagttcaagagat

SEQ ID NO: 1341693 - DNA, 15 bp, Homo sapiens
ccggagttcaagaga

SEQ ID NO: 1341694 - DNA, 15 bp, Homo sapiens
tccggagttcaagag

SEQ ID NO: 1341695 - DNA, 15 bp, Homo sapiens
ctccggagttcaaga

SEQ ID NO: 1341696 - DNA, 15 bp, Homo sapiens
actccggagttcaag

SEQ ID NO: 1341697 - DNA, 15 bp, Homo sapiens
aactccggagttcaa

SEQ ID NO: 1341698 - DNA, 15 bp, Homo sapiens
aaactccggagttca

SEQ ID NO: 1341699 - DNA, 15 bp, Homo sapiens
caaactccggagttc

SEQ ID NO: 1341700 - DNA, 15 bp, Homo sapiens
tcaaactccggagtt

SEQ ID NO: 1341701 - DNA, 15 bp, Homo sapiens
ctcaaactccggagt

SEQ ID NO: 1341702 - DNA, 15 bp, Homo sapiens
tctcaaactccggag

SEQ ID NO: 1341703 - DNA, 15 bp, Homo sapiens
gtctcaaactccgga

SEQ ID NO: 1341704 - DNA, 15 bp, Homo sapiens
ggtctcaaactccgg

SEQ ID NO: 1341705 - DNA, 15 bp, Homo sapiens
tggtctcaaactccg

SEQ ID NO: 1341706 - DNA, 15 bp, Homo sapiens
cgcaggctggtctca

SEQ ID NO: 1341707 - DNA, 15 bp, Homo sapiens
gcgcaggctggtctc

SEQ ID NO: 1341708 - DNA, 15 bp, Homo sapiens
tgcgcaggctggtct

SEQ ID NO: 1341709 - DNA, 15 bp, Homo sapiens
ttgcgcaggctggtc

SEQ ID NO: 1341710 - DNA, 15 bp, Homo sapiens
gttgcgcaggctggt

SEQ ID NO: 1341711 - DNA, 15 bp, Homo sapiens
tgttgcgcaggctgg

SEQ ID NO: 1341712 - DNA, 15 bp, Homo sapiens
gtgttgcgcaggctg

SEQ ID NO: 1341713 - DNA, 15 bp, Homo sapiens
tgtgttgcgcaggct

SEQ ID NO: 1341714 - DNA, 15 bp, Homo sapiens
ctgtgttgcgcaggc

SEQ ID NO: 1341715 - DNA, 15 bp, Homo sapiens
actgtgttgcgcagg

SEQ ID NO: 1341716 - DNA, 15 bp, Homo sapiens
cactgtgttgcgcag

SEQ ID NO: 1341717 - DNA, 15 bp, Homo sapiens
tcactgtgttgcgca

SEQ ID NO: 1341718 - DNA, 15 bp, Homo sapiens
ctcactgtgttgcgc

SEQ ID NO: 1341719 - DNA, 15 bp, Homo sapiens
tctcactgtgttgcg

SEQ ID NO: 1341720 - DNA, 15 bp, Homo sapiens
ggtctcactgtgttg

SEQ ID NO: 1341721 - DNA, 15 bp, Homo sapiens
gggtctcactgtgtt

SEQ ID NO: 1341722 - DNA, 15 bp, Homo sapiens
agggtctcactgtgt

SEQ ID NO: 1341723 - DNA, 15 bp, Homo sapiens
tagggtctcactgtg

SEQ ID NO: 1341724 - DNA, 15 bp, Homo sapiens
ttagggtctcactgt

SEQ ID NO: 1341725 - DNA, 15 bp, Homo sapiens
attagggtctcactg

SEQ ID NO: 1341726 - DNA, 15 bp, Homo sapiens
gattagggtctcact

SEQ ID NO: 1341727 - DNA, 15 bp, Homo sapiens
tgattagggtctcac

SEQ ID NO: 1341728 - DNA, 15 bp, Homo sapiens
gtgattagggtctca

SEQ ID NO: 1341729 - DNA, 15 bp, Homo sapiens
agtgattagggtctc

SEQ ID NO: 1341730 - DNA, 15 bp, Homo sapiens
tagtgattagggtct

SEQ ID NO: 1341731 - DNA, 15 bp, Homo sapiens
gtagtgattagggtc

SEQ ID NO: 1341732 - DNA, 15 bp, Homo sapiens
tgtagtgattagggt

SEQ ID NO: 1341733 - DNA, 15 bp, Homo sapiens
gtgtagtgattaggg

SEQ ID NO: 1341734 - DNA, 15 bp, Homo sapiens
ggtgtagtgattagg

SEQ ID NO: 1341735 - DNA, 15 bp, Homo sapiens
gggtgtagtgattag

SEQ ID NO: 1341736 - DNA, 15 bp, Homo sapiens
ggggtgtagtgatta

SEQ ID NO: 1341737 - DNA, 15 bp, Homo sapiens
aggggtgtagtgatt

SEQ ID NO: 1341738 - DNA, 15 bp, Homo sapiens
gaggggtgtagtgat

SEQ ID NO: 1341739 - DNA, 15 bp, Homo sapiens
ggaggggtgtagtga

SEQ ID NO: 1341740 - DNA, 15 bp, Homo sapiens
tggaggggtgtagtg

SEQ ID NO: 1341741 - DNA, 15 bp, Homo sapiens
gtggaggggtgtagt

SEQ ID NO: 1341742 - DNA, 15 bp, Homo sapiens
ggtggaggggtgtag

SEQ ID NO: 1341743 - DNA, 15 bp, Homo sapiens
gggtggaggggtgta

SEQ ID NO: 1341744 - DNA, 15 bp, Homo sapiens
ggggtggaggggtgt

SEQ ID NO: 1341745 - DNA, 15 bp, Homo sapiens
tggggtggaggggtg

SEQ ID NO: 1341746 - DNA, 15 bp, Homo sapiens
atggggtggaggggt

SEQ ID NO: 1341747 - DNA, 15 bp, Homo sapiens
catggggtggagggg

SEQ ID NO: 1341748 - DNA, 15 bp, Homo sapiens
acatggggtggaggg

SEQ ID NO: 1341749 - DNA, 15 bp, Homo sapiens
tacatggggtggagg

SEQ ID NO: 1341750 - DNA, 15 bp, Homo sapiens
ttacatggggtggag

SEQ ID NO: 1341751 - DNA, 15 bp, Homo sapiens
gttacatggggtgga

SEQ ID NO: 1341752 - DNA, 15 bp, Homo sapiens
agttacatggggtgg

SEQ ID NO: 1341753 - DNA, 15 bp, Homo sapiens
aagttacatggggtg

SEQ ID NO: 1341754 - DNA, 15 bp, Homo sapiens
aaagttacatggggt

SEQ ID NO: 1341755 - DNA, 15 bp, Homo sapiens
aaaagttacatgggg

SEQ ID NO: 1341756 - DNA, 15 bp, Homo sapiens
caaaagttacatggg

SEQ ID NO: 1341757 - DNA, 15 bp, Homo sapiens
acaaaagttacatgg

SEQ ID NO: 1341758 - DNA, 15 bp, Homo sapiens
aacaaaagttacatg

SEQ ID NO: 1341759 - DNA, 15 bp, Homo sapiens
aaacaaaagttacat

SEQ ID NO: 1341760 - DNA, 15 bp, Homo sapiens
aaaacaaaagttaca

SEQ ID NO: 1341761 - DNA, 15 bp, Homo sapiens
taaaacaaaagttac

SEQ ID NO: 1341762 - DNA, 15 bp, Homo sapiens
ataaaacaaaagtta

SEQ ID NO: 1341763 - DNA, 15 bp, Homo sapiens
gataaaacaaaagtt

SEQ ID NO: 1341764 - DNA, 15 bp, Homo sapiens
ggataaaacaaaagt

SEQ ID NO: 1341765 - DNA, 15 bp, Homo sapiens
tggataaaacaaaag

SEQ ID NO: 1341766 - DNA, 15 bp, Homo sapiens
ctggataaaacaaaa

SEQ ID NO: 1341767 - DNA, 15 bp, Homo sapiens
cctggataaaacaaa

SEQ ID NO: 1341768 - DNA, 15 bp, Homo sapiens
acctggataaaacaa

SEQ ID NO: 1341769 - DNA, 15 bp, Homo sapiens
aacctggataaaaca

SEQ ID NO: 1341770 - DNA, 15 bp, Homo sapiens
caacctggataaaac

SEQ ID NO: 1341771 - DNA, 15 bp, Homo sapiens
acaacctggataaaa

SEQ ID NO: 1341772 - DNA, 15 bp, Homo sapiens
cacaacctggataaa

SEQ ID NO: 1341773 - DNA, 15 bp, Homo sapiens
ccacaacctggataa

SEQ ID NO: 1341774 - DNA, 15 bp, Homo sapiens
accacaacctggata

SEQ ID NO: 1341775 - DNA, 15 bp, Homo sapiens
taccacaacctggat

SEQ ID NO: 1341776 - DNA, 15 bp, Homo sapiens
ataccacaacctgga

SEQ ID NO: 1341777 - DNA, 15 bp, Homo sapiens
tataccacaacctgg

SEQ ID NO: 1341778 - DNA, 15 bp, Homo sapiens
atataccacaacctg

SEQ ID NO: 1341779 - DNA, 15 bp, Homo sapiens
aatataccacaacct

SEQ ID NO: 1341780 - DNA, 15 bp, Homo sapiens
taatataccacaacc

SEQ ID NO: 1341781 - DNA, 15 bp, Homo sapiens
ttaatataccacaac

SEQ ID NO: 1341782 - DNA, 15 bp, Homo sapiens
tttaatataccacaa

SEQ ID NO: 1341783 - DNA, 15 bp, Homo sapiens
atttaatataccaca

SEQ ID NO: 1341784 - DNA, 15 bp, Homo sapiens
catttaatataccac

SEQ ID NO: 1341785 - DNA, 15 bp, Homo sapiens
ccatttaatatacca

SEQ ID NO: 1341786 - DNA, 15 bp, Homo sapiens
cccatttaatatacc

SEQ ID NO: 1341787 - DNA, 15 bp, Homo sapiens
gcccatttaatatac

SEQ ID NO: 1341788 - DNA, 15 bp, Homo sapiens
tgcccatttaatata

SEQ ID NO: 1341789 - DNA, 15 bp, Homo sapiens
atgcccatttaatat

SEQ ID NO: 1341790 - DNA, 15 bp, Homo sapiens
aatgcccatttaata

SEQ ID NO: 1341791 - DNA, 15 bp, Homo sapiens
taatgcccatttaat

SEQ ID NO: 1341792 - DNA, 15 bp, Homo sapiens
ctaatgcccatttaa

SEQ ID NO: 1341793 - DNA, 15 bp, Homo sapiens
actaatgcccattta

SEQ ID NO: 1341794 - DNA, 15 bp, Homo sapiens
cactaatgcccattt

SEQ ID NO: 1341795 - DNA, 15 bp, Homo sapiens
acactaatgcccatt

SEQ ID NO: 1341796 - DNA, 15 bp, Homo sapiens
tacactaatgcccat

SEQ ID NO: 1341797 - DNA, 15 bp, Homo sapiens
ttacactaatgccca

SEQ ID NO: 1341798 - DNA, 15 bp, Homo sapiens
tttacactaatgccc

SEQ ID NO: 1341799 - DNA, 15 bp, Homo sapiens
ctttacactaatgcc

SEQ ID NO: 1341800 - DNA, 15 bp, Homo sapiens
actttacactaatgc

SEQ ID NO: 1341801 - DNA, 15 bp, Homo sapiens
cactttacactaatg

SEQ ID NO: 1341802 - DNA, 15 bp, Homo sapiens
ccactttacactaat

SEQ ID NO: 1341803 - DNA, 15 bp, Homo sapiens
cccactttacactaa

SEQ ID NO: 1341804 - DNA, 15 bp, Homo sapiens
tcccactttacacta

SEQ ID NO: 1341805 - DNA, 15 bp, Homo sapiens
ttcccactttacact

SEQ ID NO: 1341806 - DNA, 15 bp, Homo sapiens
tttcccactttacac

SEQ ID NO: 1341807 - DNA, 15 bp, Homo sapiens
ttttcccactttaca

SEQ ID NO: 1341808 - DNA, 15 bp, Homo sapiens
attttcccactttac

SEQ ID NO: 1341809 - DNA, 15 bp, Homo sapiens
aattttcccacttta

SEQ ID NO: 1341810 - DNA, 15 bp, Homo sapiens
taattttcccacttt

SEQ ID NO: 1341811 - DNA, 15 bp, Homo sapiens
ataattttcccactt

SEQ ID NO: 1341812 - DNA, 15 bp, Homo sapiens
tataattttcccact

SEQ ID NO: 1341813 - DNA, 15 bp, Homo sapiens
atataattttcccac

SEQ ID NO: 1341814 - DNA, 15 bp, Homo sapiens
aatataattttccca

SEQ ID NO: 1341815 - DNA, 15 bp, Homo sapiens
taatataattttccc

SEQ ID NO: 1341816 - DNA, 15 bp, Homo sapiens
ttaatataattttcc

SEQ ID NO: 1341817 - DNA, 15 bp, Homo sapiens
attaatataattttc

SEQ ID NO: 1341818 - DNA, 15 bp, Homo sapiens
aattaatataatttt

SEQ ID NO: 1341819 - DNA, 15 bp, Homo sapiens
gaattaatataattt

SEQ ID NO: 1341820 - DNA, 15 bp, Homo sapiens
agaattaatataatt

SEQ ID NO: 1341821 - DNA, 15 bp, Homo sapiens
aagaattaatataat

SEQ ID NO: 1341822 - DNA, 15 bp, Homo sapiens
caagaattaatataa

SEQ ID NO: 1341823 - DNA, 15 bp, Homo sapiens
tcaagaattaatata

SEQ ID NO: 1341824 - DNA, 15 bp, Homo sapiens
ttcaagaattaatat

SEQ ID NO: 1341825 - DNA, 15 bp, Homo sapiens
attcaagaattaata

SEQ ID NO: 1341826 - DNA, 15 bp, Homo sapiens
tattcaagaattaat

SEQ ID NO: 1341827 - DNA, 15 bp, Homo sapiens
atattcaagaattaa

SEQ ID NO: 1341828 - DNA, 15 bp, Homo sapiens
catattcaagaatta

SEQ ID NO: 1341829 - DNA, 15 bp, Homo sapiens
tcatattcaagaatt

SEQ ID NO: 1341830 - DNA, 15 bp, Homo sapiens
atcatattcaagaat

SEQ ID NO: 1341831 - DNA, 15 bp, Homo sapiens
aatcatattcaagaa

SEQ ID NO: 1341832 - DNA, 15 bp, Homo sapiens
taatcatattcaaga

SEQ ID NO: 1341833 - DNA, 15 bp, Homo sapiens
gtaatcatattcaag

SEQ ID NO: 1341834 - DNA, 15 bp, Homo sapiens
agtaatcatattcaa

SEQ ID NO: 1341835 - DNA, 15 bp, Homo sapiens
tagtaatcatattca

SEQ ID NO: 1341836 - DNA, 15 bp, Homo sapiens
ttagtaatcatattc

SEQ ID NO: 1341837 - DNA, 15 bp, Homo sapiens
tttagtaatcatatt

SEQ ID NO: 1341838 - DNA, 15 bp, Homo sapiens
gtttagtaatcatat

SEQ ID NO: 1341839 - DNA, 15 bp, Homo sapiens
agtttagtaatcata

SEQ ID NO: 1341840 - DNA, 15 bp, Homo sapiens
cagtttagtaatcat

SEQ ID NO: 1341841 - DNA, 15 bp, Homo sapiens
tcagtttagtaatca

SEQ ID NO: 1341842 - DNA, 15 bp, Homo sapiens
ttcagtttagtaatc

SEQ ID NO: 1341843 - DNA, 15 bp, Homo sapiens
attcagtttagtaat

SEQ ID NO: 1341844 - DNA, 15 bp, Homo sapiens
aattcagtttagtaa

SEQ ID NO: 1341845 - DNA, 15 bp, Homo sapiens
aaattcagtttagta

SEQ ID NO: 1341846 - DNA, 15 bp, Homo sapiens
caaattcagtttagt

SEQ ID NO: 1341847 - DNA, 15 bp, Homo sapiens
tcaaattcagtttag

SEQ ID NO: 1341848 - DNA, 15 bp, Homo sapiens
ttcaaattcagttta

SEQ ID NO: 1341849 - DNA, 15 bp, Homo sapiens
tttcaaattcagttt

SEQ ID NO: 1341850 - DNA, 15 bp, Homo sapiens
ttttcaaattcagtt

SEQ ID NO: 1341851 - DNA, 15 bp, Homo sapiens
cttttcaaattcagt

SEQ ID NO: 1341852 - DNA, 15 bp, Homo sapiens
acttttcaaattcag

SEQ ID NO: 1341853 - DNA, 15 bp, Homo sapiens
aacttttcaaattca

SEQ ID NO: 1341854 - DNA, 15 bp, Homo sapiens
aaacttttcaaattc

SEQ ID NO: 1341855 - DNA, 15 bp, Homo sapiens
aaaacttttcaaatt

SEQ ID NO: 1341856 - DNA, 15 bp, Homo sapiens
gaaaacttttcaaat

SEQ ID NO: 1341857 - DNA, 15 bp, Homo sapiens
tgaaaacttttcaaa

SEQ ID NO: 1341858 - DNA, 15 bp, Homo sapiens
ctgaaaacttttcaa

SEQ ID NO: 1341859 - DNA, 15 bp, Homo sapiens
cctgaaaacttttca

SEQ ID NO: 1341860 - DNA, 15 bp, Homo sapiens
gcctgaaaacttttc

SEQ ID NO: 1341861 - DNA, 15 bp, Homo sapiens
agcctgaaaactttt

SEQ ID NO: 1341862 - DNA, 15 bp, Homo sapiens
tagcctgaaaacttt

SEQ ID NO: 1341863 - DNA, 15 bp, Homo sapiens
atagcctgaaaactt

SEQ ID NO: 1341864 - DNA, 15 bp, Homo sapiens
gatagcctgaaaact

SEQ ID NO: 1341865 - DNA, 15 bp, Homo sapiens
tgatagcctgaaaac

SEQ ID NO: 1341866 - DNA, 15 bp, Homo sapiens
ttgatagcctgaaaa

SEQ ID NO: 1341867 - DNA, 15 bp, Homo sapiens
cttgatagcctgaaa

SEQ ID NO: 1341868 - DNA, 15 bp, Homo sapiens
tcttgatagcctgaa

SEQ ID NO: 1341869 - DNA, 15 bp, Homo sapiens
ctcttgatagcctga

SEQ ID NO: 1341870 - DNA, 15 bp, Homo sapiens
tctcttgatagcctg

SEQ ID NO: 1341871 - DNA, 15 bp, Homo sapiens
ttctcttgatagcct

SEQ ID NO: 1341872 - DNA, 15 bp, Homo sapiens
attctcttgatagcc

SEQ ID NO: 1341873 - DNA, 15 bp, Homo sapiens
aattctcttgatagc

SEQ ID NO: 1341874 - DNA, 15 bp, Homo sapiens
aaattctcttgatag

SEQ ID NO: 1341875 - DNA, 15 bp, Homo sapiens
aaaattctcttgata

SEQ ID NO: 1341876 - DNA, 15 bp, Homo sapiens
aaaaattctcttgat

SEQ ID NO: 1341877 - DNA, 15 bp, Homo sapiens
taaaaattctcttga

SEQ ID NO: 1341878 - DNA, 15 bp, Homo sapiens
ttaaaaattctcttg

SEQ ID NO: 1341879 - DNA, 15 bp, Homo sapiens
gttaaaaattctctt

SEQ ID NO: 1341880 - DNA, 15 bp, Homo sapiens
agttaaaaattctct

SEQ ID NO: 1341881 - DNA, 15 bp, Homo sapiens
aagttaaaaattctc

SEQ ID NO: 1341882 - DNA, 15 bp, Homo sapiens
taagttaaaaattct

SEQ ID NO: 1341883 - DNA, 15 bp, Homo sapiens
ttaagttaaaaattc

SEQ ID NO: 1341884 - DNA, 15 bp, Homo sapiens
tttaagttaaaaatt

SEQ ID NO: 1341885 - DNA, 15 bp, Homo sapiens
ttttaagttaaaaat

SEQ ID NO: 1341886 - DNA, 15 bp, Homo sapiens
gttttaagttaaaaa

SEQ ID NO: 1341887 - DNA, 15 bp, Homo sapiens
agttttaagttaaaa

SEQ ID NO: 1341888 - DNA, 15 bp, Homo sapiens
aagttttaagttaaa

SEQ ID NO: 1341889 - DNA, 15 bp, Homo sapiens
taagttttaagttaa

SEQ ID NO: 1341890 - DNA, 15 bp, Homo sapiens
ataagttttaagtta

SEQ ID NO: 1341891 - DNA, 15 bp, Homo sapiens
tataagttttaagtt

SEQ ID NO: 1341892 - DNA, 15 bp, Homo sapiens
atataagttttaagt

SEQ ID NO: 1341893 - DNA, 15 bp, Homo sapiens
tatataagttttaag

SEQ ID NO: 1341894 - DNA, 15 bp, Homo sapiens
ttatataagttttaa

SEQ ID NO: 1341895 - DNA, 15 bp, Homo sapiens
attatataagtttta

SEQ ID NO: 1341896 - DNA, 15 bp, Homo sapiens
aattatataagtttt

SEQ ID NO: 1341897 - DNA, 15 bp, Homo sapiens
aaattatataagttt

SEQ ID NO: 1341898 - DNA, 15 bp, Homo sapiens
caaattatataagtt

SEQ ID NO: 1341899 - DNA, 15 bp, Homo sapiens
tcaaattatataagt

SEQ ID NO: 1341900 - DNA, 15 bp, Homo sapiens
ttcaaattatataag

SEQ ID NO: 1341901 - DNA, 15 bp, Homo sapiens
gttcaaattatataa

SEQ ID NO: 1341902 - DNA, 15 bp, Homo sapiens
agttcaaattatata

SEQ ID NO: 1341903 - DNA, 15 bp, Homo sapiens
aagttcaaattatat

SEQ ID NO: 1341904 - DNA, 15 bp, Homo sapiens
aaagttcaaattata

SEQ ID NO: 1341905 - DNA, 15 bp, Homo sapiens
aaaagttcaaattat

SEQ ID NO: 1341906 - DNA, 15 bp, Homo sapiens
aaaaagttcaaatta

SEQ ID NO: 1341907 - DNA, 15 bp, Homo sapiens
taaaaagttcaaatt

SEQ ID NO: 1341908 - DNA, 15 bp, Homo sapiens
gtaaaaagttcaaat

SEQ ID NO: 1341909 - DNA, 15 bp, Homo sapiens
agtaaaaagttcaaa

SEQ ID NO: 1341910 - DNA, 15 bp, Homo sapiens
aagtaaaaagttcaa

SEQ ID NO: 1341911 - DNA, 15 bp, Homo sapiens
gaagtaaaaagttca

SEQ ID NO: 1341912 - DNA, 15 bp, Homo sapiens
tgaagtaaaaagttc

SEQ ID NO: 1341913 - DNA, 15 bp, Homo sapiens
atgaagtaaaaagtt

SEQ ID NO: 1341914 - DNA, 15 bp, Homo sapiens
tatgaagtaaaaagt

SEQ ID NO: 1341915 - DNA, 15 bp, Homo sapiens
atatgaagtaaaaag

SEQ ID NO: 1341916 - DNA, 15 bp, Homo sapiens
tatatgaagtaaaaa

SEQ ID NO: 1341917 - DNA, 15 bp, Homo sapiens
atatatgaagtaaaa

SEQ ID NO: 1341918 - DNA, 15 bp, Homo sapiens
gatatatgaagtaaa

SEQ ID NO: 1341919 - DNA, 15 bp, Homo sapiens
ggatatatgaagtaa

SEQ ID NO: 1341920 - DNA, 15 bp, Homo sapiens
cggatatatgaagta

SEQ ID NO: 1341921 - DNA, 15 bp, Homo sapiens
acggatatatgaagt

SEQ ID NO: 1341922 - DNA, 15 bp, Homo sapiens
tacggatatatgaag

SEQ ID NO: 1341923 - DNA, 15 bp, Homo sapiens
ttacggatatatgaa

SEQ ID NO: 1341924 - DNA, 15 bp, Homo sapiens
attacggatatatga

SEQ ID NO: 1341925 - DNA, 15 bp, Homo sapiens
cattacggatatatg

SEQ ID NO: 1341926 - DNA, 15 bp, Homo sapiens
tcattacggatatat

SEQ ID NO: 1341927 - DNA, 15 bp, Homo sapiens
atcattacggatata

SEQ ID NO: 1341928 - DNA, 15 bp, Homo sapiens
catcattacggatat

SEQ ID NO: 1341929 - DNA, 15 bp, Homo sapiens
tcatcattacggata

SEQ ID NO: 1341930 - DNA, 15 bp, Homo sapiens
atcatcattacggat

SEQ ID NO: 1341931 - DNA, 15 bp, Homo sapiens
catcatcattacgga

SEQ ID NO: 1341932 - DNA, 15 bp, Homo sapiens
ccatcatcattacgg

SEQ ID NO: 1341933 - DNA, 15 bp, Homo sapiens
accatcatcattacg

SEQ ID NO: 1341934 - DNA, 15 bp, Homo sapiens
gaccatcatcattac

SEQ ID NO: 1341935 - DNA, 15 bp, Homo sapiens
tgaccatcatcatta

SEQ ID NO: 1341936 - DNA, 15 bp, Homo sapiens
atgaccatcatcatt

SEQ ID NO: 1341937 - DNA, 15 bp, Homo sapiens
gatgaccatcatcat

SEQ ID NO: 1341938 - DNA, 15 bp, Homo sapiens
agatgaccatcatca

SEQ ID NO: 1341939 - DNA, 15 bp, Homo sapiens
tagatgaccatcatc

SEQ ID NO: 1341940 - DNA, 15 bp, Homo sapiens
atagatgaccatcat

SEQ ID NO: 1341941 - DNA, 15 bp, Homo sapiens
tatagatgaccatca

SEQ ID NO: 1341942 - DNA, 15 bp, Homo sapiens
atatagatgaccatc

SEQ ID NO: 1341943 - DNA, 15 bp, Homo sapiens
gatatagatgaccat

SEQ ID NO: 1341944 - DNA, 15 bp, Homo sapiens
agatatagatgacca

SEQ ID NO: 1341945 - DNA, 15 bp, Homo sapiens
tagatatagatgacc

SEQ ID NO: 1341946 - DNA, 15 bp, Homo sapiens
ctagatatagatgac

SEQ ID NO: 1341947 - DNA, 15 bp, Homo sapiens
gctagatatagatga

SEQ ID NO: 1341948 - DNA, 15 bp, Homo sapiens
agctagatatagatg

SEQ ID NO: 1341949 - DNA, 15 bp, Homo sapiens
aagctagatatagat

SEQ ID NO: 1341950 - DNA, 15 bp, Homo sapiens
aaagctagatataga

SEQ ID NO: 1341951 - DNA, 15 bp, Homo sapiens
aaaagctagatatag

SEQ ID NO: 1341952 - DNA, 15 bp, Homo sapiens
taaaagctagatata

SEQ ID NO: 1341953 - DNA, 15 bp, Homo sapiens
ctaaaagctagatat

SEQ ID NO: 1341954 - DNA, 15 bp, Homo sapiens
tctaaaagctagata

SEQ ID NO: 1341955 - DNA, 15 bp, Homo sapiens
ctctaaaagctagat

SEQ ID NO: 1341956 - DNA, 15 bp, Homo sapiens
gctctaaaagctaga

SEQ ID NO: 1341957 - DNA, 15 bp, Homo sapiens
tgctctaaaagctag

SEQ ID NO: 1341958 - DNA, 15 bp, Homo sapiens
ctgctctaaaagcta

SEQ ID NO: 1341959 - DNA, 15 bp, Homo sapiens
tctgctctaaaagct

SEQ ID NO: 1341960 - DNA, 15 bp, Homo sapiens
gtctgctctaaaagc

SEQ ID NO: 1341961 - DNA, 15 bp, Homo sapiens
tgtctgctctaaaag

SEQ ID NO: 1341962 - DNA, 15 bp, Homo sapiens
ttgtctgctctaaaa

SEQ ID NO: 1341963 - DNA, 15 bp, Homo sapiens
gttgtctgctctaaa

SEQ ID NO: 1341964 - DNA, 15 bp, Homo sapiens
agttgtctgctctaa

SEQ ID NO: 1341965 - DNA, 15 bp, Homo sapiens
cagttgtctgctcta

SEQ ID NO: 1341966 - DNA, 15 bp, Homo sapiens
ccagttgtctgctct

SEQ ID NO: 1341967 - DNA, 15 bp, Homo sapiens
accagttgtctgctc

SEQ ID NO: 1341968 - DNA, 15 bp, Homo sapiens
aaccagttgtctgct

SEQ ID NO: 1341969 - DNA, 15 bp, Homo sapiens
gaaccagttgtctgc

SEQ ID NO: 1341970 - DNA, 15 bp, Homo sapiens
tgaaccagttgtctg

SEQ ID NO: 1341971 - DNA, 15 bp, Homo sapiens
atgaaccagttgtct

SEQ ID NO: 1341972 - DNA, 15 bp, Homo sapiens
tatgaaccagttgtc

SEQ ID NO: 1341973 - DNA, 15 bp, Homo sapiens
gtatgaaccagttgt

SEQ ID NO: 1341974 - DNA, 15 bp, Homo sapiens
ggtatgaaccagttg

SEQ ID NO: 1341975 - DNA, 15 bp, Homo sapiens
aggtatgaaccagtt

SEQ ID NO: 1341976 - DNA, 15 bp, Homo sapiens
caggtatgaaccagt

SEQ ID NO: 1341977 - DNA, 15 bp, Homo sapiens
ccaggtatgaaccag

SEQ ID NO: 1341978 - DNA, 15 bp, Homo sapiens
tccaggtatgaacca

SEQ ID NO: 1341979 - DNA, 15 bp, Homo sapiens
atccaggtatgaacc

SEQ ID NO: 1341980 - DNA, 15 bp, Homo sapiens
aatccaggtatgaac

SEQ ID NO: 1341981 - DNA, 15 bp, Homo sapiens
taatccaggtatgaa

SEQ ID NO: 1341982 - DNA, 15 bp, Homo sapiens
ttaatccaggtatga

SEQ ID NO: 1341983 - DNA, 15 bp, Homo sapiens
tttaatccaggtatg

SEQ ID NO: 1341984 - DNA, 15 bp, Homo sapiens
atttaatccaggtat

SEQ ID NO: 1341985 - DNA, 15 bp, Homo sapiens
tatttaatccaggta

SEQ ID NO: 1341986 - DNA, 15 bp, Homo sapiens
ttatttaatccaggt

SEQ ID NO: 1341987 - DNA, 15 bp, Homo sapiens
tttatttaatccagg

SEQ ID NO: 1341988 - DNA, 15 bp, Homo sapiens
atttatttaatccag

SEQ ID NO: 1341989 - DNA, 15 bp, Homo sapiens
tatttatttaatcca

SEQ ID NO: 1341990 - DNA, 15 bp, Homo sapiens
ttatttatttaatcc

SEQ ID NO: 1341991 - DNA, 15 bp, Homo sapiens
attatttatttaatc

SEQ ID NO: 1341992 - DNA, 15 bp, Homo sapiens
cattatttatttaat

SEQ ID NO: 1341993 - DNA, 15 bp, Homo sapiens
acattatttatttaa

SEQ ID NO: 1341994 - DNA, 15 bp, Homo sapiens
tacattatttattta

SEQ ID NO: 1341995 - DNA, 15 bp, Homo sapiens
ttacattatttattt

SEQ ID NO: 1341996 - DNA, 15 bp, Homo sapiens
tttacattatttatt

SEQ ID NO: 1341997 - DNA, 15 bp, Homo sapiens
actttacattattta

SEQ ID NO: 1341998 - DNA, 15 bp, Homo sapiens
aactttacattattt

SEQ ID NO: 1341999 - DNA, 15 bp, Homo sapiens
taactttacattatt

SEQ ID NO: 1342000 - DNA, 15 bp, Homo sapiens
ataactttacattat

SEQ ID NO: 1342001 - DNA, 15 bp, Homo sapiens
aataactttacatta

SEQ ID NO: 1342002 - DNA, 15 bp, Homo sapiens
aaataactttacatt

SEQ ID NO: 1342003 - DNA, 15 bp, Homo sapiens
aaaataactttacat

SEQ ID NO: 1342004 - DNA, 15 bp, Homo sapiens
aaaaataactttaca

SEQ ID NO: 1342005 - DNA, 15 bp, Homo sapiens
aaaaaataactttac

SEQ ID NO: 1342006 - DNA, 15 bp, Homo sapiens
caaaaaataacttta

SEQ ID NO: 1342007 - DNA, 15 bp, Homo sapiens
acaaaaaataacttt

SEQ ID NO: 1342008 - DNA, 15 bp, Homo sapiens
aacaaaaaataactt

SEQ ID NO: 1342009 - DNA, 15 bp, Homo sapiens
taacaaaaaataact

SEQ ID NO: 1342010 - DNA, 15 bp, Homo sapiens
ttaacaaaaaataac

SEQ ID NO: 1342011 - DNA, 15 bp, Homo sapiens
attaacaaaaaataa

SEQ ID NO: 1342012 - DNA, 15 bp, Homo sapiens
aattaacaaaaaata

SEQ ID NO: 1342013 - DNA, 15 bp, Homo sapiens
taattaacaaaaaat

SEQ ID NO: 1342014 - DNA, 15 bp, Homo sapiens
ataattaacaaaaaa

SEQ ID NO: 1342015 - DNA, 15 bp, Homo sapiens
cataattaacaaaaa

SEQ ID NO: 1342016 - DNA, 15 bp, Homo sapiens
ccataattaacaaaa

SEQ ID NO: 1342017 - DNA, 15 bp, Homo sapiens
tccataattaacaaa

SEQ ID NO: 1342018 - DNA, 15 bp, Homo sapiens
atccataattaacaa

SEQ ID NO: 1342019 - DNA, 15 bp, Homo sapiens
aatccataattaaca

SEQ ID NO: 1342020 - DNA, 15 bp, Homo sapiens
taatccataattaac

SEQ ID NO: 1342021 - DNA, 15 bp, Homo sapiens
ctaatccataattaa

SEQ ID NO: 1342022 - DNA, 15 bp, Homo sapiens
actaatccataatta

SEQ ID NO: 1342023 - DNA, 15 bp, Homo sapiens
cactaatccataatt

SEQ ID NO: 1342024 - DNA, 15 bp, Homo sapiens
tcactaatccataat

SEQ ID NO: 1342025 - DNA, 15 bp, Homo sapiens
ttcactaatccataa

SEQ ID NO: 1342026 - DNA, 15 bp, Homo sapiens
cttcactaatccata

SEQ ID NO: 1342027 - DNA, 15 bp, Homo sapiens
tcttcactaatccat

SEQ ID NO: 1342028 - DNA, 15 bp, Homo sapiens
atcttcactaatcca

SEQ ID NO: 1342029 - DNA, 15 bp, Homo sapiens
aatcttcactaatcc

SEQ ID NO: 1342030 - DNA, 15 bp, Homo sapiens
aaatcttcactaatc

SEQ ID NO: 1342031 - DNA, 15 bp, Homo sapiens
taaatcttcactaat

SEQ ID NO: 1342032 - DNA, 15 bp, Homo sapiens
gtaaatcttcactaa

SEQ ID NO: 1342033 - DNA, 15 bp, Homo sapiens
agtaaatcttcacta

SEQ ID NO: 1342034 - DNA, 15 bp, Homo sapiens
cagtaaatcttcact

SEQ ID NO: 1342035 - DNA, 15 bp, Homo sapiens
acagtaaatcttcac

SEQ ID NO: 1342036 - DNA, 15 bp, Homo sapiens
aacagtaaatcttca

SEQ ID NO: 1342037 - DNA, 15 bp, Homo sapiens
aaacagtaaatcttc

SEQ ID NO: 1342038 - DNA, 15 bp, Homo sapiens
aaaacagtaaatctt

SEQ ID NO: 1342039 - DNA, 15 bp, Homo sapiens
taaaacagtaaatct

SEQ ID NO: 1342040 - DNA, 15 bp, Homo sapiens
ttaaaacagtaaatc

SEQ ID NO: 1342041 - DNA, 15 bp, Homo sapiens
gttaaaacagtaaat

SEQ ID NO: 1342042 - DNA, 15 bp, Homo sapiens
ggttaaaacagtaaa

SEQ ID NO: 1342043 - DNA, 15 bp, Homo sapiens
aggttaaaacagtaa

SEQ ID NO: 1342044 - DNA, 15 bp, Homo sapiens
taggttaaaacagta

SEQ ID NO: 1342045 - DNA, 15 bp, Homo sapiens
gtaggttaaaacagt

SEQ ID NO: 1342046 - DNA, 15 bp, Homo sapiens
agtaggttaaaacag

SEQ ID NO: 1342047 - DNA, 15 bp, Homo sapiens
gagtaggttaaaaca

SEQ ID NO: 1342048 - DNA, 15 bp, Homo sapiens
ggagtaggttaaaac

SEQ ID NO: 1342049 - DNA, 15 bp, Homo sapiens
aggagtaggttaaaa

SEQ ID NO: 1342050 - DNA, 15 bp, Homo sapiens
caggagtaggttaaa

SEQ ID NO: 1342051 - DNA, 15 bp, Homo sapiens
gcaggagtaggttaa

SEQ ID NO: 1342052 - DNA, 15 bp, Homo sapiens
agcaggagtaggtta

SEQ ID NO: 1342053 - DNA, 15 bp, Homo sapiens
tagcaggagtaggtt

SEQ ID NO: 1342054 - DNA, 15 bp, Homo sapiens
ctagcaggagtaggt

SEQ ID NO: 1342055 - DNA, 15 bp, Homo sapiens
actagcaggagtagg

SEQ ID NO: 1342056 - DNA, 15 bp, Homo sapiens
cactagcaggagtag

SEQ ID NO: 1342057 - DNA, 15 bp, Homo sapiens
ccactagcaggagta

SEQ ID NO: 1342058 - DNA, 15 bp, Homo sapiens
gccactagcaggagt

SEQ ID NO: 1342059 - DNA, 15 bp, Homo sapiens
tgccactagcaggag

SEQ ID NO: 1342060 - DNA, 15 bp, Homo sapiens
gtgccactagcagga

SEQ ID NO: 1342061 - DNA, 15 bp, Homo sapiens
agtgccactagcagg

SEQ ID NO: 1342062 - DNA, 15 bp, Homo sapiens
tagtgccactagcag

SEQ ID NO: 1342063 - DNA, 15 bp, Homo sapiens
gtagtgccactagca

SEQ ID NO: 1342064 - DNA, 15 bp, Homo sapiens
agtagtgccactagc

SEQ ID NO: 1342065 - DNA, 15 bp, Homo sapiens
cagtagtgccactag

SEQ ID NO: 1342066 - DNA, 15 bp, Homo sapiens
gcagtagtgccacta

SEQ ID NO: 1342067 - DNA, 15 bp, Homo sapiens
tgcagtagtgccact

SEQ ID NO: 1342068 - DNA, 15 bp, Homo sapiens
atgcagtagtgccac

SEQ ID NO: 1342069 - DNA, 15 bp, Homo sapiens
catgcagtagtgcca

SEQ ID NO: 1342070 - DNA, 15 bp, Homo sapiens
ccatgcagtagtgcc

SEQ ID NO: 1342071 - DNA, 15 bp, Homo sapiens
accatgcagtagtgc

SEQ ID NO: 1342072 - DNA, 15 bp, Homo sapiens
aaccatgcagtagtg

SEQ ID NO: 1342073 - DNA, 15 bp, Homo sapiens
aaaccatgcagtagt

SEQ ID NO: 1342074 - DNA, 15 bp, Homo sapiens
aaaaccatgcagtag

SEQ ID NO: 1342075 - DNA, 15 bp, Homo sapiens
caaaaccatgcagta

SEQ ID NO: 1342076 - DNA, 15 bp, Homo sapiens
tcaaaaccatgcagt

SEQ ID NO: 1342077 - DNA, 15 bp, Homo sapiens
ttcaaaaccatgcag

SEQ ID NO: 1342078 - DNA, 15 bp, Homo sapiens
cttcaaaaccatgca

SEQ ID NO: 1342079 - DNA, 15 bp, Homo sapiens
tcttcaaaaccatgc

SEQ ID NO: 1342080 - DNA, 15 bp, Homo sapiens
gtcttcaaaaccatg

SEQ ID NO: 1342081 - DNA, 15 bp, Homo sapiens
ggtcttcaaaaccat

SEQ ID NO: 1342082 - DNA, 15 bp, Homo sapiens
tggtcttcaaaacca

SEQ ID NO: 1342083 - DNA, 15 bp, Homo sapiens
ctggtcttcaaaacc

SEQ ID NO: 1342084 - DNA, 15 bp, Homo sapiens
actggtcttcaaaac

SEQ ID NO: 1342085 - DNA, 15 bp, Homo sapiens
cactggtcttcaaaa

SEQ ID NO: 1342086 - DNA, 15 bp, Homo sapiens
tcactggtcttcaaa

SEQ ID NO: 1342087 - DNA, 15 bp, Homo sapiens
ttcactggtcttcaa

SEQ ID NO: 1342088 - DNA, 15 bp, Homo sapiens
cttcactggtcttca

SEQ ID NO: 1342089 - DNA, 15 bp, Homo sapiens
acttcactggtcttc

SEQ ID NO: 1342090 - DNA, 15 bp, Homo sapiens
tacttcactggtctt

SEQ ID NO: 1342091 - DNA, 15 bp, Homo sapiens
atacttcactggtct

SEQ ID NO: 1342092 - DNA, 15 bp, Homo sapiens
catacttcactggtc

SEQ ID NO: 1342093 - DNA, 15 bp, Homo sapiens
tcatacttcactggt

SEQ ID NO: 1342094 - DNA, 15 bp, Homo sapiens
gtcatacttcactgg

SEQ ID NO: 1342095 - DNA, 15 bp, Homo sapiens
agtcatacttcactg

SEQ ID NO: 1342096 - DNA, 15 bp, Homo sapiens
aagtcatacttcact

SEQ ID NO: 1342097 - DNA, 15 bp, Homo sapiens
taagtcatacttcac

SEQ ID NO: 1342098 - DNA, 15 bp, Homo sapiens
ttaagtcatacttca

SEQ ID NO: 1342099 - DNA, 15 bp, Homo sapiens
tttaagtcatacttc

SEQ ID NO: 1342100 - DNA, 15 bp, Homo sapiens
ctttaagtcatactt

SEQ ID NO: 1342101 - DNA, 15 bp, Homo sapiens
cctttaagtcatact

SEQ ID NO: 1342102 - DNA, 15 bp, Homo sapiens
acctttaagtcatac

SEQ ID NO: 1342103 - DNA, 15 bp, Homo sapiens
aacctttaagtcata

SEQ ID NO: 1342104 - DNA, 15 bp, Homo sapiens
aaacctttaagtcat

SEQ ID NO: 1342105 - DNA, 15 bp, Homo sapiens
gaaacctttaagtca

SEQ ID NO: 1342106 - DNA, 15 bp, Homo sapiens
agaaacctttaagtc

SEQ ID NO: 1342107 - DNA, 15 bp, Homo sapiens
aagaaacctttaagt

SEQ ID NO: 1342108 - DNA, 15 bp, Homo sapiens
caagaaacctttaag

SEQ ID NO: 1342109 - DNA, 15 bp, Homo sapiens
tcaagaaacctttaa

SEQ ID NO: 1342110 - DNA, 15 bp, Homo sapiens
ttcaagaaaccttta

SEQ ID NO: 1342111 - DNA, 15 bp, Homo sapiens
attcaagaaaccttt

SEQ ID NO: 1342112 - DNA, 15 bp, Homo sapiens
aattcaagaaacctt

SEQ ID NO: 1342113 - DNA, 15 bp, Homo sapiens
caattcaagaaacct

SEQ ID NO: 1342114 - DNA, 15 bp, Homo sapiens
ccaattcaagaaacc

SEQ ID NO: 1342115 - DNA, 15 bp, Homo sapiens
tccaattcaagaaac

SEQ ID NO: 1342116 - DNA, 15 bp, Homo sapiens
ctccaattcaagaaa

SEQ ID NO: 1342117 - DNA, 15 bp, Homo sapiens
gctccaattcaagaa

SEQ ID NO: 1342118 - DNA, 15 bp, Homo sapiens
agctccaattcaaga

SEQ ID NO: 1342119 - DNA, 15 bp, Homo sapiens
tagctccaattcaag

SEQ ID NO: 1342120 - DNA, 15 bp, Homo sapiens
ctagctccaattcaa

SEQ ID NO: 1342121 - DNA, 15 bp, Homo sapiens
cctagctccaattca

SEQ ID NO: 1342122 - DNA, 15 bp, Homo sapiens
tcctagctccaattc

SEQ ID NO: 1342123 - DNA, 15 bp, Homo sapiens
gtcctagctccaatt

SEQ ID NO: 1342124 - DNA, 15 bp, Homo sapiens
tgtcctagctccaat

SEQ ID NO: 1342125 - DNA, 15 bp, Homo sapiens
gtgtcctagctccaa

SEQ ID NO: 1342126 - DNA, 15 bp, Homo sapiens
agtgtcctagctcca

SEQ ID NO: 1342127 - DNA, 15 bp, Homo sapiens
cagtgtcctagctcc

SEQ ID NO: 1342128 - DNA, 15 bp, Homo sapiens
ccagtgtcctagctc

SEQ ID NO: 1342129 - DNA, 15 bp, Homo sapiens
gccagtgtcctagct

SEQ ID NO: 1342130 - DNA, 15 bp, Homo sapiens
tgccagtgtcctagc

SEQ ID NO: 1342131 - DNA, 15 bp, Homo sapiens
atgccagtgtcctag

SEQ ID NO: 1342132 - DNA, 15 bp, Homo sapiens
aatgccagtgtccta

SEQ ID NO: 1342133 - DNA, 15 bp, Homo sapiens
aaatgccagtgtcct

SEQ ID NO: 1342134 - DNA, 15 bp, Homo sapiens
taaatgccagtgtcc

SEQ ID NO: 1342135 - DNA, 15 bp, Homo sapiens
ataaatgccagtgtc

SEQ ID NO: 1342136 - DNA, 15 bp, Homo sapiens
tataaatgccagtgt

SEQ ID NO: 1342137 - DNA, 15 bp, Homo sapiens
ttataaatgccagtg

SEQ ID NO: 1342138 - DNA, 15 bp, Homo sapiens
tttataaatgccagt

SEQ ID NO: 1342139 - DNA, 15 bp, Homo sapiens
ttttataaatgccag

SEQ ID NO: 1342140 - DNA, 15 bp, Homo sapiens
attttataaatgcca

SEQ ID NO: 1342141 - DNA, 15 bp, Homo sapiens
gattttataaatgcc

SEQ ID NO: 1342142 - DNA, 15 bp, Homo sapiens
agattttataaatgc

SEQ ID NO: 1342143 - DNA, 15 bp, Homo sapiens
gagattttataaatg

SEQ ID NO: 1342144 - DNA, 15 bp, Homo sapiens
ggagattttataaat

SEQ ID NO: 1342145 - DNA, 15 bp, Homo sapiens
tggagattttataaa

SEQ ID NO: 1342146 - DNA, 15 bp, Homo sapiens
gtggagattttataa

SEQ ID NO: 1342147 - DNA, 15 bp, Homo sapiens
cgtggagattttata

SEQ ID NO: 1342148 - DNA, 15 bp, Homo sapiens
acgtggagattttat

SEQ ID NO: 1342149 - DNA, 15 bp, Homo sapiens
tacgtggagatttta

SEQ ID NO: 1342150 - DNA, 15 bp, Homo sapiens
ctacgtggagatttt

SEQ ID NO: 1342151 - DNA, 15 bp, Homo sapiens
gctacgtggagattt

SEQ ID NO: 1342152 - DNA, 15 bp, Homo sapiens
cgctacgtggagatt

SEQ ID NO: 1342153 - DNA, 15 bp, Homo sapiens
gcgctacgtggagat

SEQ ID NO: 1342154 - DNA, 15 bp, Homo sapiens
tgcgctacgtggaga

SEQ ID NO: 1342155 - DNA, 15 bp, Homo sapiens
ctgcgctacgtggag

SEQ ID NO: 1342156 - DNA, 15 bp, Homo sapiens
tctgcgctacgtgga

SEQ ID NO: 1342157 - DNA, 15 bp, Homo sapiens
gtctgcgctacgtgg

SEQ ID NO: 1342158 - DNA, 15 bp, Homo sapiens
tgtctgcgctacgtg

SEQ ID NO: 1342159 - DNA, 15 bp, Homo sapiens
atgtctgcgctacgt

SEQ ID NO: 1342160 - DNA, 15 bp, Homo sapiens
aatgtctgcgctacg

SEQ ID NO: 1342161 - DNA, 15 bp, Homo sapiens
caatgtctgcgctac

SEQ ID NO: 1342162 - DNA, 15 bp, Homo sapiens
tcaatgtctgcgcta

SEQ ID NO: 1342163 - DNA, 15 bp, Homo sapiens
gtcaatgtctgcgct

SEQ ID NO: 1342164 - DNA, 15 bp, Homo sapiens
tgtcaatgtctgcgc

SEQ ID NO: 1342165 - DNA, 15 bp, Homo sapiens
gtgtcaatgtctgcg

SEQ ID NO: 1342166 - DNA, 15 bp, Homo sapiens
agtgtcaatgtctgc

SEQ ID NO: 1342167 - DNA, 15 bp, Homo sapiens
tagtgtcaatgtctg

SEQ ID NO: 1342168 - DNA, 15 bp, Homo sapiens
atagtgtcaatgtct

SEQ ID NO: 1342169 - DNA, 15 bp, Homo sapiens
gatagtgtcaatgtc

SEQ ID NO: 1342170 - DNA, 15 bp, Homo sapiens
tgatagtgtcaatgt

SEQ ID NO: 1342171 - DNA, 15 bp, Homo sapiens
ctgatagtgtcaatg

SEQ ID NO: 1342172 - DNA, 15 bp, Homo sapiens
tctgatagtgtcaat

SEQ ID NO: 1342173 - DNA, 15 bp, Homo sapiens
ttctgatagtgtcaa

SEQ ID NO: 1342174 - DNA, 15 bp, Homo sapiens
cttctgatagtgtca

SEQ ID NO: 1342175 - DNA, 15 bp, Homo sapiens
tcttctgatagtgtc

SEQ ID NO: 1342176 - DNA, 15 bp, Homo sapiens
gtcttctgatagtgt

SEQ ID NO: 1342177 - DNA, 15 bp, Homo sapiens
ggtcttctgatagtg

SEQ ID NO: 1342178 - DNA, 15 bp, Homo sapiens
tggtcttctgatagt

SEQ ID NO: 1342179 - DNA, 15 bp, Homo sapiens
ctggtcttctgatag

SEQ ID NO: 1342180 - DNA, 15 bp, Homo sapiens
gctggtcttctgata

SEQ ID NO: 1342181 - DNA, 15 bp, Homo sapiens
tgctggtcttctgat

SEQ ID NO: 1342182 - DNA, 15 bp, Homo sapiens
ttgctggtcttctga

SEQ ID NO: 1342183 - DNA, 15 bp, Homo sapiens
cttgctggtcttctg

SEQ ID NO: 1342184 - DNA, 15 bp, Homo sapiens
acttgctggtcttct

SEQ ID NO: 1342185 - DNA, 15 bp, Homo sapiens
tacttgctggtcttc

SEQ ID NO: 1342186 - DNA, 15 bp, Homo sapiens
ttacttgctggtctt

SEQ ID NO: 1342187 - DNA, 15 bp, Homo sapiens
gttacttgctggtct

SEQ ID NO: 1342188 - DNA, 15 bp, Homo sapiens
agttacttgctggtc

SEQ ID NO: 1342189 - DNA, 15 bp, Homo sapiens
tagttacttgctggt

SEQ ID NO: 1342190 - DNA, 15 bp, Homo sapiens
ctagttacttgctgg

SEQ ID NO: 1342191 - DNA, 15 bp, Homo sapiens
tctagttacttgctg

SEQ ID NO: 1342192 - DNA, 15 bp, Homo sapiens
ttctagttacttgct

SEQ ID NO: 1342193 - DNA, 15 bp, Homo sapiens
cttctagttacttgc

SEQ ID NO: 1342194 - DNA, 15 bp, Homo sapiens
acttctagttacttg

SEQ ID NO: 1342195 - DNA, 15 bp, Homo sapiens
aacttctagttactt

SEQ ID NO: 1342196 - DNA, 15 bp, Homo sapiens
taacttctagttact

SEQ ID NO: 1342197 - DNA, 15 bp, Homo sapiens
gtaacttctagttac

SEQ ID NO: 1342198 - DNA, 15 bp, Homo sapiens
agtaacttctagtta

SEQ ID NO: 1342199 - DNA, 15 bp, Homo sapiens
aagtaacttctagtt

SEQ ID NO: 1342200 - DNA, 15 bp, Homo sapiens
aaagtaacttctagt

SEQ ID NO: 1342201 - DNA, 15 bp, Homo sapiens
caaagtaacttctag

SEQ ID NO: 1342202 - DNA, 15 bp, Homo sapiens
tcaaagtaacttcta

SEQ ID NO: 1342203 - DNA, 15 bp, Homo sapiens
atcaaagtaacttct

SEQ ID NO: 1342204 - DNA, 15 bp, Homo sapiens
gatcaaagtaacttc

SEQ ID NO: 1342205 - DNA, 15 bp, Homo sapiens
agatcaaagtaactt

SEQ ID NO: 1342206 - DNA, 15 bp, Homo sapiens
aagatcaaagtaact

SEQ ID NO: 1342207 - DNA, 15 bp, Homo sapiens
taagatcaaagtaac

SEQ ID NO: 1342208 - DNA, 15 bp, Homo sapiens
ttaagatcaaagtaa

SEQ ID NO: 1342209 - DNA, 15 bp, Homo sapiens
tttaagatcaaagta

SEQ ID NO: 1342210 - DNA, 15 bp, Homo sapiens
atttaagatcaaagt

SEQ ID NO: 1342211 - DNA, 15 bp, Homo sapiens
gatttaagatcaaag

SEQ ID NO: 1342212 - DNA, 15 bp, Homo sapiens
tgatttaagatcaaa

SEQ ID NO: 1342213 - DNA, 15 bp, Homo sapiens
ttgatttaagatcaa

SEQ ID NO: 1342214 - DNA, 15 bp, Homo sapiens
gttgatttaagatca

SEQ ID NO: 1342215 - DNA, 15 bp, Homo sapiens
agttgatttaagatc

SEQ ID NO: 1342216 - DNA, 15 bp, Homo sapiens
tagttgatttaagat

SEQ ID NO: 1342217 - DNA, 15 bp, Homo sapiens
gtagttgatttaaga

SEQ ID NO: 1342218 - DNA, 15 bp, Homo sapiens
tgtagttgatttaag

SEQ ID NO: 1342219 - DNA, 15 bp, Homo sapiens
ttgtagttgatttaa

SEQ ID NO: 1342220 - DNA, 15 bp, Homo sapiens
tttgtagttgattta

SEQ ID NO: 1342221 - DNA, 15 bp, Homo sapiens
ttttgtagttgattt

SEQ ID NO: 1342222 - DNA, 15 bp, Homo sapiens
tttttgtagttgatt

SEQ ID NO: 1342223 - DNA, 15 bp, Homo sapiens
ttttttgtagttgat

SEQ ID NO: 1342224 - DNA, 15 bp, Homo sapiens
gttttttgtagttga

SEQ ID NO: 1342225 - DNA, 15 bp, Homo sapiens
agttttttgtagttg

SEQ ID NO: 1342226 - DNA, 15 bp, Homo sapiens
aagttttttgtagtt

SEQ ID NO: 1342227 - DNA, 15 bp, Homo sapiens
caagttttttgtagt

SEQ ID NO: 1342228 - DNA, 15 bp, Homo sapiens
tcaagttttttgtag

SEQ ID NO: 1342229 - DNA, 15 bp, Homo sapiens
gtcaagttttttgta

SEQ ID NO: 1342230 - DNA, 15 bp, Homo sapiens
agtcaagttttttgt

SEQ ID NO: 1342231 - DNA, 15 bp, Homo sapiens
gagtcaagttttttg

SEQ ID NO: 1342232 - DNA, 15 bp, Homo sapiens
tgagtcaagtttttt

SEQ ID NO: 1342233 - DNA, 15 bp, Homo sapiens
gtgagtcaagttttt

SEQ ID NO: 1342234 - DNA, 15 bp, Homo sapiens
agtgagtcaagtttt

SEQ ID NO: 1342235 - DNA, 15 bp, Homo sapiens
tagtgagtcaagttt

SEQ ID NO: 1342236 - DNA, 15 bp, Homo sapiens
ctagtgagtcaagtt

SEQ ID NO: 1342237 - DNA, 15 bp, Homo sapiens
actagtgagtcaagt

SEQ ID NO: 1342238 - DNA, 15 bp, Homo sapiens
aactagtgagtcaag

SEQ ID NO: 1342239 - DNA, 15 bp, Homo sapiens
taactagtgagtcaa

SEQ ID NO: 1342240 - DNA, 15 bp, Homo sapiens
ataactagtgagtca

SEQ ID NO: 1342241 - DNA, 15 bp, Homo sapiens
cataactagtgagtc

SEQ ID NO: 1342242 - DNA, 15 bp, Homo sapiens
ccataactagtgagt

SEQ ID NO: 1342243 - DNA, 15 bp, Homo sapiens
tccataactagtgag

SEQ ID NO: 1342244 - DNA, 15 bp, Homo sapiens
ctccataactagtga

SEQ ID NO: 1342245 - DNA, 15 bp, Homo sapiens
tctccataactagtg

SEQ ID NO: 1342246 - DNA, 15 bp, Homo sapiens
ttctccataactagt

SEQ ID NO: 1342247 - DNA, 15 bp, Homo sapiens
attctccataactag

SEQ ID NO: 1342248 - DNA, 15 bp, Homo sapiens
tattctccataacta

SEQ ID NO: 1342249 - DNA, 15 bp, Homo sapiens
gtattctccataact

SEQ ID NO: 1342250 - DNA, 15 bp, Homo sapiens
tgtattctccataac

SEQ ID NO: 1342251 - DNA, 15 bp, Homo sapiens
atgtattctccataa

SEQ ID NO: 1342252 - DNA, 15 bp, Homo sapiens
aatgtattctccata

SEQ ID NO: 1342253 - DNA, 15 bp, Homo sapiens
aaatgtattctccat

SEQ ID NO: 1342254 - DNA, 15 bp, Homo sapiens
aaaatgtattctcca

SEQ ID NO: 1342255 - DNA, 15 bp, Homo sapiens
aaaaatgtattctcc

SEQ ID NO: 1342256 - DNA, 15 bp, Homo sapiens
aaaaaatgtattctc

SEQ ID NO: 1342257 - DNA, 15 bp, Homo sapiens
taaaaaatgtattct

SEQ ID NO: 1342258 - DNA, 15 bp, Homo sapiens
ataaaaaatgtattc

SEQ ID NO: 1342259 - DNA, 15 bp, Homo sapiens
aataaaaaatgtatt

SEQ ID NO: 1342260 - DNA, 15 bp, Homo sapiens
caataaaaaatgtat

SEQ ID NO: 1342261 - DNA, 15 bp, Homo sapiens
acaataaaaaatgta

SEQ ID NO: 1342262 - DNA, 15 bp, Homo sapiens
aacaataaaaaatgt

SEQ ID NO: 1342263 - DNA, 15 bp, Homo sapiens
tttaacaataaaaaa

SEQ ID NO: 1342264 - DNA, 15 bp, Homo sapiens
gtttaacaataaaaa

SEQ ID NO: 1342265 - DNA, 15 bp, Homo sapiens
agtttaacaataaaa

SEQ ID NO: 1342266 - DNA, 15 bp, Homo sapiens
cagtttaacaataaa

SEQ ID NO: 1342267 - DNA, 15 bp, Homo sapiens
tcagtttaacaataa

SEQ ID NO: 1342268 - DNA, 15 bp, Homo sapiens
ttcagtttaacaata

SEQ ID NO: 1342269 - DNA, 15 bp, Homo sapiens
tttcagtttaacaat

SEQ ID NO: 1342270 - DNA, 15 bp, Homo sapiens
ttttcagtttaacaa

SEQ ID NO: 1342271 - DNA, 15 bp, Homo sapiens
tttttcagtttaaca

SEQ ID NO: 1342272 - DNA, 15 bp, Homo sapiens
ttttttcagtttaac

SEQ ID NO: 1342273 - DNA, 15 bp, Homo sapiens
tttttttcagtttaa

SEQ ID NO: 1342274 - DNA, 15 bp, Homo sapiens
ttttttttcagttta

SEQ ID NO: 1342275 - DNA, 15 bp, Homo sapiens
attttttttcagttt

SEQ ID NO: 1342276 - DNA, 15 bp, Homo sapiens
aattttttttcagtt

SEQ ID NO: 1342277 - DNA, 15 bp, Homo sapiens
gaattttttttcagt

SEQ ID NO: 1342278 - DNA, 15 bp, Homo sapiens
tgaattttttttcag

SEQ ID NO: 1342279 - DNA, 15 bp, Homo sapiens
ctgaattttttttca

SEQ ID NO: 1342280 - DNA, 15 bp, Homo sapiens
gactgaatttttttt

SEQ ID NO: 1342281 - DNA, 15 bp, Homo sapiens
tgactgaattttttt

SEQ ID NO: 1342282 - DNA, 15 bp, Homo sapiens
gtgactgaatttttt

SEQ ID NO: 1342283 - DNA, 15 bp, Homo sapiens
agtgactgaattttt

SEQ ID NO: 1342284 - DNA, 15 bp, Homo sapiens
aagtgactgaatttt

SEQ ID NO: 1342285 - DNA, 15 bp, Homo sapiens
taagtgactgaattt

SEQ ID NO: 1342286 - DNA, 15 bp, Homo sapiens
ataagtgactgaatt

SEQ ID NO: 1342287 - DNA, 15 bp, Homo sapiens
tataagtgactgaat

SEQ ID NO: 1342288 - DNA, 15 bp, Homo sapiens
ttataagtgactgaa

SEQ ID NO: 1342289 - DNA, 15 bp, Homo sapiens
cttataagtgactga

SEQ ID NO: 1342290 - DNA, 15 bp, Homo sapiens
ccttataagtgactg

SEQ ID NO: 1342291 - DNA, 15 bp, Homo sapiens
accttataagtgact

SEQ ID NO: 1342292 - DNA, 15 bp, Homo sapiens
caccttataagtgac

SEQ ID NO: 1342293 - DNA, 15 bp, Homo sapiens
acaccttataagtga

SEQ ID NO: 1342294 - DNA, 15 bp, Homo sapiens
tacaccttataagtg

SEQ ID NO: 1342295 - DNA, 15 bp, Homo sapiens
ctacaccttataagt

SEQ ID NO: 1342296 - DNA, 15 bp, Homo sapiens
gctacaccttataag

SEQ ID NO: 1342297 - DNA, 15 bp, Homo sapiens
ggctacaccttataa

SEQ ID NO: 1342298 - DNA, 15 bp, Homo sapiens
aggctacaccttata

SEQ ID NO: 1342299 - DNA, 15 bp, Homo sapiens
gaggctacaccttat

SEQ ID NO: 1342300 - DNA, 15 bp, Homo sapiens
agaggctacacctta

SEQ ID NO: 1342301 - DNA, 15 bp, Homo sapiens
aagaggctacacctt

SEQ ID NO: 1342302 - DNA, 15 bp, Homo sapiens
gaagaggctacacct

SEQ ID NO: 1342303 - DNA, 15 bp, Homo sapiens
agaagaggctacacc

SEQ ID NO: 1342304 - DNA, 15 bp, Homo sapiens
tagaagaggctacac

SEQ ID NO: 1342305 - DNA, 15 bp, Homo sapiens
ttagaagaggctaca

SEQ ID NO: 1342306 - DNA, 15 bp, Homo sapiens
attagaagaggctac

SEQ ID NO: 1342307 - DNA, 15 bp, Homo sapiens
gattagaagaggcta

SEQ ID NO: 1342308 - DNA, 15 bp, Homo sapiens
ggattagaagaggct

SEQ ID NO: 1342309 - DNA, 15 bp, Homo sapiens
aggattagaagaggc

SEQ ID NO: 1342310 - DNA, 15 bp, Homo sapiens
caggattagaagagg

SEQ ID NO: 1342311 - DNA, 15 bp, Homo sapiens
acaggattagaagag

SEQ ID NO: 1342312 - DNA, 15 bp, Homo sapiens
aacaggattagaaga

SEQ ID NO: 1342313 - DNA, 15 bp, Homo sapiens
aaacaggattagaag

SEQ ID NO: 1342314 - DNA, 15 bp, Homo sapiens
taaacaggattagaa

SEQ ID NO: 1342315 - DNA, 15 bp, Homo sapiens
ataaacaggattaga

SEQ ID NO: 1342316 - DNA, 15 bp, Homo sapiens
tataaacaggattag

SEQ ID NO: 1342317 - DNA, 15 bp, Homo sapiens
atataaacaggatta

SEQ ID NO: 1342318 - DNA, 15 bp, Homo sapiens
tatataaacaggatt

SEQ ID NO: 1342319 - DNA, 15 bp, Homo sapiens
ttatataaacaggat

SEQ ID NO: 1342320 - DNA, 15 bp, Homo sapiens
tttatataaacagga

SEQ ID NO: 1342321 - DNA, 15 bp, Homo sapiens
atttatataaacagg

SEQ ID NO: 1342322 - DNA, 15 bp, Homo sapiens
aatttatataaacag

SEQ ID NO: 1342323 - DNA, 15 bp, Homo sapiens
aaatttatataaaca

SEQ ID NO: 1342324 - DNA, 15 bp, Homo sapiens
taaatttatataaac

SEQ ID NO: 1342325 - DNA, 15 bp, Homo sapiens
ataaatttatataaa

SEQ ID NO: 1342326 - DNA, 15 bp, Homo sapiens
aataaatttatataa

SEQ ID NO: 1342327 - DNA, 15 bp, Homo sapiens
aaataaatttatata

SEQ ID NO: 1342328 - DNA, 15 bp, Homo sapiens
taaataaatttatat

SEQ ID NO: 1342329 - DNA, 15 bp, Homo sapiens
ataaataaatttata

SEQ ID NO: 1342330 - DNA, 15 bp, Homo sapiens
aataaataaatttat

SEQ ID NO: 1342331 - DNA, 15 bp, Homo sapiens
taataaataaattta

SEQ ID NO: 1342332 - DNA, 15 bp, Homo sapiens
ataataaataaattt

SEQ ID NO: 1342333 - DNA, 15 bp, Homo sapiens
aataataaataaatt

SEQ ID NO: 1342334 - DNA, 15 bp, Homo sapiens
taataataaataaat

SEQ ID NO: 1342335 - DNA, 15 bp, Homo sapiens
ataataataaataaa

SEQ ID NO: 1342336 - DNA, 15 bp, Homo sapiens
aataataataaataa

SEQ ID NO: 1342337 - DNA, 15 bp, Homo sapiens
taataataataaata

SEQ ID NO: 1342338 - DNA, 15 bp, Homo sapiens
ataataataataaat

SEQ ID NO: 1342339 - DNA, 15 bp, Homo sapiens
atctcaaaaaataat

SEQ ID NO: 1342340 - DNA, 15 bp, Homo sapiens
acagcctggcaacag

SEQ ID NO: 1342341 - DNA, 15 bp, Homo sapiens
tacagcctggcaaca

SEQ ID NO: 1342342 - DNA, 15 bp, Homo sapiens
ctacagcctggcaac

SEQ ID NO: 1342343 - DNA, 15 bp, Homo sapiens
actacagcctggcaa

SEQ ID NO: 1342344 - DNA, 15 bp, Homo sapiens
cactacagcctggca

SEQ ID NO: 1342345 - DNA, 15 bp, Homo sapiens
gcactacagcctggc

SEQ ID NO: 1342346 - DNA, 15 bp, Homo sapiens
tgcactacagcctgg

SEQ ID NO: 1342347 - DNA, 15 bp, Homo sapiens
atgcactacagcctg

SEQ ID NO: 1342348 - DNA, 15 bp, Homo sapiens
aatgcactacagcct

SEQ ID NO: 1342349 - DNA, 15 bp, Homo sapiens
caatgcactacagcc

SEQ ID NO: 1342350 - DNA, 15 bp, Homo sapiens
ccaatgcactacagc

SEQ ID NO: 1342351 - DNA, 15 bp, Homo sapiens
gccaatgcactacag

SEQ ID NO: 1342352 - DNA, 15 bp, Homo sapiens
cgccaatgcactaca

SEQ ID NO: 1342353 - DNA, 15 bp, Homo sapiens
gcgccaatgcactac

SEQ ID NO: 1342354 - DNA, 15 bp, Homo sapiens
cgcgccaatgcacta

SEQ ID NO: 1342355 - DNA, 15 bp, Homo sapiens
tcgcgccaatgcact

SEQ ID NO: 1342356 - DNA, 15 bp, Homo sapiens
atcgcgccaatgcac

SEQ ID NO: 1342357 - DNA, 15 bp, Homo sapiens
gatcgcgccaatgca

SEQ ID NO: 1342358 - DNA, 15 bp, Homo sapiens
agatcgcgccaatgc

SEQ ID NO: 1342359 - DNA, 15 bp, Homo sapiens
gagatcgcgccaatg

SEQ ID NO: 1342360 - DNA, 15 bp, Homo sapiens
cgagatcgcgccaat

SEQ ID NO: 1342361 - DNA, 15 bp, Homo sapiens
ccgagatcgcgccaa

SEQ ID NO: 1342362 - DNA, 15 bp, Homo sapiens
tggaggatgcagtga

SEQ ID NO: 1342363 - DNA, 15 bp, Homo sapiens
gtggaggatgcagtg

SEQ ID NO: 1342364 - DNA, 15 bp, Homo sapiens
ggtggaggatgcagt

SEQ ID NO: 1342365 - DNA, 15 bp, Homo sapiens
aggtggaggatgcag

SEQ ID NO: 1342366 - DNA, 15 bp, Homo sapiens
gaggtggaggatgca

SEQ ID NO: 1342367 - DNA, 15 bp, Homo sapiens
ggaggtggaggatgc

SEQ ID NO: 1342368 - DNA, 15 bp, Homo sapiens
gggaggtggaggatg

SEQ ID NO: 1342369 - DNA, 15 bp, Homo sapiens
cgggaggtggaggat

SEQ ID NO: 1342370 - DNA, 15 bp, Homo sapiens
ccgggaggtggagga

SEQ ID NO: 1342371 - DNA, 15 bp, Homo sapiens
cgtgcctgtagtccc

SEQ ID NO: 1342372 - DNA, 15 bp, Homo sapiens
acgtgcctgtagtcc

SEQ ID NO: 1342373 - DNA, 15 bp, Homo sapiens
cacgtgcctgtagtc

SEQ ID NO: 1342374 - DNA, 15 bp, Homo sapiens
gcacgtgcctgtagt

SEQ ID NO: 1342375 - DNA, 15 bp, Homo sapiens
ggcacgtgcctgtag

SEQ ID NO: 1342376 - DNA, 15 bp, Homo sapiens
tggcacgtgcctgta

SEQ ID NO: 1342377 - DNA, 15 bp, Homo sapiens
atggcacgtgcctgt

SEQ ID NO: 1342378 - DNA, 15 bp, Homo sapiens
gatggcacgtgcctg

SEQ ID NO: 1342379 - DNA, 15 bp, Homo sapiens
tgatggcacgtgcct

SEQ ID NO: 1342380 - DNA, 15 bp, Homo sapiens
gtgatggcacgtgcc

SEQ ID NO: 1342381 - DNA, 15 bp, Homo sapiens
cgtgatggcacgtgc

SEQ ID NO: 1342382 - DNA, 15 bp, Homo sapiens
tcgtgatggcacgtg

SEQ ID NO: 1342383 - DNA, 15 bp, Homo sapiens
atcgtgatggcacgt

SEQ ID NO: 1342384 - DNA, 15 bp, Homo sapiens
gatcgtgatggcacg

SEQ ID NO: 1342385 - DNA, 15 bp, Homo sapiens
tgatcgtgatggcac

SEQ ID NO: 1342386 - DNA, 15 bp, Homo sapiens
ctgatcgtgatggca

SEQ ID NO: 1342387 - DNA, 15 bp, Homo sapiens
gctgatcgtgatggc

SEQ ID NO: 1342388 - DNA, 15 bp, Homo sapiens
tgctgatcgtgatgg

SEQ ID NO: 1342389 - DNA, 15 bp, Homo sapiens
gtgctgatcgtgatg

SEQ ID NO: 1342390 - DNA, 15 bp, Homo sapiens
agtgctgatcgtgat

SEQ ID NO: 1342391 - DNA, 15 bp, Homo sapiens
aagtgctgatcgtga

SEQ ID NO: 1342392 - DNA, 15 bp, Homo sapiens
aaagtgctgatcgtg

SEQ ID NO: 1342393 - DNA, 15 bp, Homo sapiens
aaaagtgctgatcgt

SEQ ID NO: 1342394 - DNA, 15 bp, Homo sapiens
taaaagtgctgatcg

SEQ ID NO: 1342395 - DNA, 15 bp, Homo sapiens
ctaaaagtgctgatc

SEQ ID NO: 1342396 - DNA, 15 bp, Homo sapiens
actaaaagtgctgat

SEQ ID NO: 1342397 - DNA, 15 bp, Homo sapiens
tactaaaagtgctga

SEQ ID NO: 1342398 - DNA, 15 bp, Homo sapiens
ctactaaaagtgctg

SEQ ID NO: 1342399 - DNA, 15 bp, Homo sapiens
tctactaaaagtgct

SEQ ID NO: 1342400 - DNA, 15 bp, Homo sapiens
ctctactaaaagtgc

SEQ ID NO: 1342401 - DNA, 15 bp, Homo sapiens
tctctactaaaagtg

SEQ ID NO: 1342402 - DNA, 15 bp, Homo sapiens
tgccaacatggtgaa

SEQ ID NO: 1342403 - DNA, 15 bp, Homo sapiens
ttgccaacatggtga

SEQ ID NO: 1342404 - DNA, 15 bp, Homo sapiens
cttgccaacatggtg

SEQ ID NO: 1342405 - DNA, 15 bp, Homo sapiens
ccttgccaacatggt

SEQ ID NO: 1342406 - DNA, 15 bp, Homo sapiens
tccttgccaacatgg

SEQ ID NO: 1342407 - DNA, 15 bp, Homo sapiens
gtccttgccaacatg

SEQ ID NO: 1342408 - DNA, 15 bp, Homo sapiens
cgtccttgccaacat

SEQ ID NO: 1342409 - DNA, 15 bp, Homo sapiens
acgtccttgccaaca

SEQ ID NO: 1342410 - DNA, 15 bp, Homo sapiens
cacgtccttgccaac

SEQ ID NO: 1342411 - DNA, 15 bp, Homo sapiens
acacgtccttgccaa

SEQ ID NO: 1342412 - DNA, 15 bp, Homo sapiens
gacacgtccttgcca

SEQ ID NO: 1342413 - DNA, 15 bp, Homo sapiens
agacacgtccttgcc

SEQ ID NO: 1342414 - DNA, 15 bp, Homo sapiens
gagacacgtccttgc

SEQ ID NO: 1342415 - DNA, 15 bp, Homo sapiens
cgagacacgtccttg

SEQ ID NO: 1342416 - DNA, 15 bp, Homo sapiens
acgagacacgtcctt

SEQ ID NO: 1342417 - DNA, 15 bp, Homo sapiens
gacgagacacgtcct

SEQ ID NO: 1342418 - DNA, 15 bp, Homo sapiens
cgacgagacacgtcc

SEQ ID NO: 1342419 - DNA, 15 bp, Homo sapiens
acgacgagacacgtc

SEQ ID NO: 1342420 - DNA, 15 bp, Homo sapiens
cacgacgagacacgt

SEQ ID NO: 1342421 - DNA, 15 bp, Homo sapiens
tcacgacgagacacg

SEQ ID NO: 1342422 - DNA, 15 bp, Homo sapiens
gtcacgacgagacac

SEQ ID NO: 1342423 - DNA, 15 bp, Homo sapiens
ggtcacgacgagaca

SEQ ID NO: 1342424 - DNA, 15 bp, Homo sapiens
aggtcacgacgagac

SEQ ID NO: 1342425 - DNA, 15 bp, Homo sapiens
gaggtcacgacgaga

SEQ ID NO: 1342426 - DNA, 15 bp, Homo sapiens
cgaggtcacgacgag

SEQ ID NO: 1342427 - DNA, 15 bp, Homo sapiens
acgaggtcacgacga

SEQ ID NO: 1342428 - DNA, 15 bp, Homo sapiens
cacgaggtcacgacg

SEQ ID NO: 1342429 - DNA, 15 bp, Homo sapiens
tcacgaggtcacgac

SEQ ID NO: 1342430 - DNA, 15 bp, Homo sapiens
atcacgaggtcacga

SEQ ID NO: 1342431 - DNA, 15 bp, Homo sapiens
gatcacgaggtcacg

SEQ ID NO: 1342432 - DNA, 15 bp, Homo sapiens
ggatcacgaggtcac

SEQ ID NO: 1342433 - DNA, 15 bp, Homo sapiens
acgggcggatcacga

SEQ ID NO: 1342434 - DNA, 15 bp, Homo sapiens
aacgggcggatcacg

SEQ ID NO: 1342435 - DNA, 15 bp, Homo sapiens
aaacgggcggatcac

SEQ ID NO: 1342436 - DNA, 15 bp, Homo sapiens
gaaacgggcggatca

SEQ ID NO: 1342437 - DNA, 15 bp, Homo sapiens
tgaaacgggcggatc

SEQ ID NO: 1342438 - DNA, 15 bp, Homo sapiens
ctgaaacgggcggat

SEQ ID NO: 1342439 - DNA, 15 bp, Homo sapiens
gctgaaacgggcgga

SEQ ID NO: 1342440 - DNA, 15 bp, Homo sapiens
ggctgaaacgggcgg

SEQ ID NO: 1342441 - DNA, 15 bp, Homo sapiens
aggctgaaacgggcg

SEQ ID NO: 1342442 - DNA, 15 bp, Homo sapiens
gaggctgaaacgggc

SEQ ID NO: 1342443 - DNA, 15 bp, Homo sapiens
ggaggctgaaacggg

SEQ ID NO: 1342444 - DNA, 15 bp, Homo sapiens
gggaggctgaaacgg

SEQ ID NO: 1342445 - DNA, 15 bp, Homo sapiens
tgggaggctgaaacg

SEQ ID NO: 1342446 - DNA, 15 bp, Homo sapiens
ttgggaggctgaaac

SEQ ID NO: 1342447 - DNA, 15 bp, Homo sapiens
tttgggaggctgaaa

SEQ ID NO: 1342448 - DNA, 15 bp, Homo sapiens
tgtggctcacacctg

SEQ ID NO: 1342449 - DNA, 15 bp, Homo sapiens
ttgtggctcacacct

SEQ ID NO: 1342450 - DNA, 15 bp, Homo sapiens
attgtggctcacacc

SEQ ID NO: 1342451 - DNA, 15 bp, Homo sapiens
cattgtggctcacac

SEQ ID NO: 1342452 - DNA, 15 bp, Homo sapiens
acattgtggctcaca

SEQ ID NO: 1342453 - DNA, 15 bp, Homo sapiens
gacattgtggctcac

SEQ ID NO: 1342454 - DNA, 15 bp, Homo sapiens
ggacattgtggctca

SEQ ID NO: 1342455 - DNA, 15 bp, Homo sapiens
tggacattgtggctc

SEQ ID NO: 1342456 - DNA, 15 bp, Homo sapiens
ctggacattgtggct

SEQ ID NO: 1342457 - DNA, 15 bp, Homo sapiens
gctggacattgtggc

SEQ ID NO: 1342458 - DNA, 15 bp, Homo sapiens
agctggacattgtgg

SEQ ID NO: 1342459 - DNA, 15 bp, Homo sapiens
cagctggacattgtg

SEQ ID NO: 1342460 - DNA, 15 bp, Homo sapiens
tcagctggacattgt

SEQ ID NO: 1342461 - DNA, 15 bp, Homo sapiens
atcagctggacattg

SEQ ID NO: 1342462 - DNA, 15 bp, Homo sapiens
tatcagctggacatt

SEQ ID NO: 1342463 - DNA, 15 bp, Homo sapiens
ttatcagctggacat

SEQ ID NO: 1342464 - DNA, 15 bp, Homo sapiens
tttatcagctggaca

SEQ ID NO: 1342465 - DNA, 15 bp, Homo sapiens
atttatcagctggac

SEQ ID NO: 1342466 - DNA, 15 bp, Homo sapiens
aatttatcagctgga

SEQ ID NO: 1342467 - DNA, 15 bp, Homo sapiens
aaatttatcagctgg

SEQ ID NO: 1342468 - DNA, 15 bp, Homo sapiens
taaatttatcagctg

SEQ ID NO: 1342469 - DNA, 15 bp, Homo sapiens
ttaaatttatcagct

SEQ ID NO: 1342470 - DNA, 15 bp, Homo sapiens
attaaatttatcagc

SEQ ID NO: 1342471 - DNA, 15 bp, Homo sapiens
aattaaatttatcag

SEQ ID NO: 1342472 - DNA, 15 bp, Homo sapiens
aaattaaatttatca

SEQ ID NO: 1342473 - DNA, 15 bp, Homo sapiens
aaaattaaatttatc

SEQ ID NO: 1342474 - DNA, 15 bp, Homo sapiens
caaaattaaatttat

SEQ ID NO: 1342475 - DNA, 15 bp, Homo sapiens
gcaaaattaaattta

SEQ ID NO: 1342476 - DNA, 15 bp, Homo sapiens
agcaaaattaaattt

SEQ ID NO: 1342477 - DNA, 15 bp, Homo sapiens
aagcaaaattaaatt

SEQ ID NO: 1342478 - DNA, 15 bp, Homo sapiens
aaagcaaaattaaat

SEQ ID NO: 1342479 - DNA, 15 bp, Homo sapiens
aaaagcaaaattaaa

SEQ ID NO: 1342480 - DNA, 15 bp, Homo sapiens
gaaaagcaaaattaa

SEQ ID NO: 1342481 - DNA, 15 bp, Homo sapiens
agaaaagcaaaatta

SEQ ID NO: 1342482 - DNA, 15 bp, Homo sapiens
cagaaaagcaaaatt

SEQ ID NO: 1342483 - DNA, 15 bp, Homo sapiens
tcagaaaagcaaaat

SEQ ID NO: 1342484 - DNA, 15 bp, Homo sapiens
ctcagaaaagcaaaa

SEQ ID NO: 1342485 - DNA, 15 bp, Homo sapiens
actcagaaaagcaaa

SEQ ID NO: 1342486 - DNA, 15 bp, Homo sapiens
aactcagaaaagcaa

SEQ ID NO: 1342487 - DNA, 15 bp, Homo sapiens
aaactcagaaaagca

SEQ ID NO: 1342488 - DNA, 15 bp, Homo sapiens
aaaactcagaaaagc

SEQ ID NO: 1342489 - DNA, 15 bp, Homo sapiens
gaaaactcagaaaag

SEQ ID NO: 1342490 - DNA, 15 bp, Homo sapiens
tgaaaactcagaaaa

SEQ ID NO: 1342491 - DNA, 15 bp, Homo sapiens
atgaaaactcagaaa

SEQ ID NO: 1342492 - DNA, 15 bp, Homo sapiens
aatgaaaactcagaa

SEQ ID NO: 1342493 - DNA, 15 bp, Homo sapiens
aaatgaaaactcaga

SEQ ID NO: 1342494 - DNA, 15 bp, Homo sapiens
taaatgaaaactcag

SEQ ID NO: 1342495 - DNA, 15 bp, Homo sapiens
ataaatgaaaactca

SEQ ID NO: 1342496 - DNA, 15 bp, Homo sapiens
cataaatgaaaactc

SEQ ID NO: 1342497 - DNA, 15 bp, Homo sapiens
ccataaatgaaaact

SEQ ID NO: 1342498 - DNA, 15 bp, Homo sapiens
accataaatgaaaac

SEQ ID NO: 1342499 - DNA, 15 bp, Homo sapiens
taccataaatgaaaa

SEQ ID NO: 1342500 - DNA, 15 bp, Homo sapiens
ttaccataaatgaaa

SEQ ID NO: 1342501 - DNA, 15 bp, Homo sapiens
attaccataaatgaa

SEQ ID NO: 1342502 - DNA, 15 bp, Homo sapiens
cattaccataaatga

SEQ ID NO: 1342503 - DNA, 15 bp, Homo sapiens
ccattaccataaatg

SEQ ID NO: 1342504 - DNA, 15 bp, Homo sapiens
accattaccataaat

SEQ ID NO: 1342505 - DNA, 15 bp, Homo sapiens
aaccattaccataaa

SEQ ID NO: 1342506 - DNA, 15 bp, Homo sapiens
taaccattaccataa

SEQ ID NO: 1342507 - DNA, 15 bp, Homo sapiens
ttaaccattaccata

SEQ ID NO: 1342508 - DNA, 15 bp, Homo sapiens
tttaaccattaccat

SEQ ID NO: 1342509 - DNA, 15 bp, Homo sapiens
atttaaccattacca

SEQ ID NO: 1342510 - DNA, 15 bp, Homo sapiens
gatttaaccattacc

SEQ ID NO: 1342511 - DNA, 15 bp, Homo sapiens
tgatttaaccattac

SEQ ID NO: 1342512 - DNA, 15 bp, Homo sapiens
ctgatttaaccatta

SEQ ID NO: 1342513 - DNA, 15 bp, Homo sapiens
gctgatttaaccatt

SEQ ID NO: 1342514 - DNA, 15 bp, Homo sapiens
agctgatttaaccat

SEQ ID NO: 1342515 - DNA, 15 bp, Homo sapiens
tagctgatttaacca

SEQ ID NO: 1342516 - DNA, 15 bp, Homo sapiens
ctagctgatttaacc

SEQ ID NO: 1342517 - DNA, 15 bp, Homo sapiens
cctagctgatttaac

SEQ ID NO: 1342518 - DNA, 15 bp, Homo sapiens
gcctagctgatttaa

SEQ ID NO: 1342519 - DNA, 15 bp, Homo sapiens
agcctagctgattta

SEQ ID NO: 1342520 - DNA, 15 bp, Homo sapiens
aagcctagctgattt

SEQ ID NO: 1342521 - DNA, 15 bp, Homo sapiens
aaagcctagctgatt

SEQ ID NO: 1342522 - DNA, 15 bp, Homo sapiens
taaagcctagctgat

SEQ ID NO: 1342523 - DNA, 15 bp, Homo sapiens
gtaaagcctagctga

SEQ ID NO: 1342524 - DNA, 15 bp, Homo sapiens
tgtaaagcctagctg

SEQ ID NO: 1342525 - DNA, 15 bp, Homo sapiens
ctgtaaagcctagct

SEQ ID NO: 1342526 - DNA, 15 bp, Homo sapiens
actgtaaagcctagc

SEQ ID NO: 1342527 - DNA, 15 bp, Homo sapiens
aactgtaaagcctag

SEQ ID NO: 1342528 - DNA, 15 bp, Homo sapiens
caactgtaaagccta

SEQ ID NO: 1342529 - DNA, 15 bp, Homo sapiens
acaactgtaaagcct

SEQ ID NO: 1342530 - DNA, 15 bp, Homo sapiens
aacaactgtaaagcc

SEQ ID NO: 1342531 - DNA, 15 bp, Homo sapiens
taacaactgtaaagc

SEQ ID NO: 1342532 - DNA, 15 bp, Homo sapiens
gtaacaactgtaaag

SEQ ID NO: 1342533 - DNA, 15 bp, Homo sapiens
agtaacaactgtaaa

SEQ ID NO: 1342534 - DNA, 15 bp, Homo sapiens
gagtaacaactgtaa

SEQ ID NO: 1342535 - DNA, 15 bp, Homo sapiens
tgagtaacaactgta

SEQ ID NO: 1342536 - DNA, 15 bp, Homo sapiens
gtgagtaacaactgt

SEQ ID NO: 1342537 - DNA, 15 bp, Homo sapiens
tgtgagtaacaactg

SEQ ID NO: 1342538 - DNA, 15 bp, Homo sapiens
atgtgagtaacaact

SEQ ID NO: 1342539 - DNA, 15 bp, Homo sapiens
tatgtgagtaacaac

SEQ ID NO: 1342540 - DNA, 15 bp, Homo sapiens
atatgtgagtaacaa

SEQ ID NO: 1342541 - DNA, 15 bp, Homo sapiens
tatatgtgagtaaca

SEQ ID NO: 1342542 - DNA, 15 bp, Homo sapiens
ttatatgtgagtaac

SEQ ID NO: 1342543 - DNA, 15 bp, Homo sapiens
attatatgtgagtaa

SEQ ID NO: 1342544 - DNA, 15 bp, Homo sapiens
aattatatgtgagta

SEQ ID NO: 1342545 - DNA, 15 bp, Homo sapiens
gaattatatgtgagt

SEQ ID NO: 1342546 - DNA, 15 bp, Homo sapiens
agaattatatgtgag

SEQ ID NO: 1342547 - DNA, 15 bp, Homo sapiens
aagaattatatgtga

SEQ ID NO: 1342548 - DNA, 15 bp, Homo sapiens
aaagaattatatgtg

SEQ ID NO: 1342549 - DNA, 15 bp, Homo sapiens
caaagaattatatgt

SEQ ID NO: 1342550 - DNA, 15 bp, Homo sapiens
acaaagaattatatg

SEQ ID NO: 1342551 - DNA, 15 bp, Homo sapiens
gacaaagaattatat

SEQ ID NO: 1342552 - DNA, 15 bp, Homo sapiens
ggacaaagaattata

SEQ ID NO: 1342553 - DNA, 15 bp, Homo sapiens
tggacaaagaattat

SEQ ID NO: 1342554 - DNA, 15 bp, Homo sapiens
atggacaaagaatta

SEQ ID NO: 1342555 - DNA, 15 bp, Homo sapiens
gatggacaaagaatt

SEQ ID NO: 1342556 - DNA, 15 bp, Homo sapiens
ggatggacaaagaat

SEQ ID NO: 1342557 - DNA, 15 bp, Homo sapiens
aggatggacaaagaa

SEQ ID NO: 1342558 - DNA, 15 bp, Homo sapiens
aaggatggacaaaga

SEQ ID NO: 1342559 - DNA, 15 bp, Homo sapiens
aaaggatggacaaag

SEQ ID NO: 1342560 - DNA, 15 bp, Homo sapiens
taaaggatggacaaa

SEQ ID NO: 1342561 - DNA, 15 bp, Homo sapiens
ttaaaggatggacaa

SEQ ID NO: 1342562 - DNA, 15 bp, Homo sapiens
attaaaggatggaca

SEQ ID NO: 1342563 - DNA, 15 bp, Homo sapiens
aattaaaggatggac

SEQ ID NO: 1342564 - DNA, 15 bp, Homo sapiens
gaattaaaggatgga

SEQ ID NO: 1342565 - DNA, 15 bp, Homo sapiens
agaattaaaggatgg

SEQ ID NO: 1342566 - DNA, 15 bp, Homo sapiens
gagaattaaaggatg

SEQ ID NO: 1342567 - DNA, 15 bp, Homo sapiens
tgagaattaaaggat

SEQ ID NO: 1342568 - DNA, 15 bp, Homo sapiens
gtgagaattaaagga

SEQ ID NO: 1342569 - DNA, 15 bp, Homo sapiens
tgtgagaattaaagg

SEQ ID NO: 1342570 - DNA, 15 bp, Homo sapiens
atgtgagaattaaag

SEQ ID NO: 1342571 - DNA, 15 bp, Homo sapiens
aatgtgagaattaaa

SEQ ID NO: 1342572 - DNA, 15 bp, Homo sapiens
caatgtgagaattaa

SEQ ID NO: 1342573 - DNA, 15 bp, Homo sapiens
ccaatgtgagaatta

SEQ ID NO: 1342574 - DNA, 15 bp, Homo sapiens
cccaatgtgagaatt

SEQ ID NO: 1342575 - DNA, 15 bp, Homo sapiens
tcccaatgtgagaat

SEQ ID NO: 1342576 - DNA, 15 bp, Homo sapiens
ttcccaatgtgagaa

SEQ ID NO: 1342577 - DNA, 15 bp, Homo sapiens
gttcccaatgtgaga

SEQ ID NO: 1342578 - DNA, 15 bp, Homo sapiens
agttcccaatgtgag

SEQ ID NO: 1342579 - DNA, 15 bp, Homo sapiens
cagttcccaatgtga

SEQ ID NO: 1342580 - DNA, 15 bp, Homo sapiens
tcagttcccaatgtg

SEQ ID NO: 1342581 - DNA, 15 bp, Homo sapiens
gtcagttcccaatgt

SEQ ID NO: 1342582 - DNA, 15 bp, Homo sapiens
agtcagttcccaatg

SEQ ID NO: 1342583 - DNA, 15 bp, Homo sapiens
tagtcagttcccaat

SEQ ID NO: 1342584 - DNA, 15 bp, Homo sapiens
ttagtcagttcccaa

SEQ ID NO: 1342585 - DNA, 15 bp, Homo sapiens
tttagtcagttccca

SEQ ID NO: 1342586 - DNA, 15 bp, Homo sapiens
ttttagtcagttccc

SEQ ID NO: 1342587 - DNA, 15 bp, Homo sapiens
tttttagtcagttcc

SEQ ID NO: 1342588 - DNA, 15 bp, Homo sapiens
ttttttagtcagttc

SEQ ID NO: 1342589 - DNA, 15 bp, Homo sapiens
tttttttagtcagtt

SEQ ID NO: 1342590 - DNA, 15 bp, Homo sapiens
ctttttttagtcagt

SEQ ID NO: 1342591 - DNA, 15 bp, Homo sapiens
tctttttttagtcag

SEQ ID NO: 1342592 - DNA, 15 bp, Homo sapiens
ttctttttttagtca

SEQ ID NO: 1342593 - DNA, 15 bp, Homo sapiens
tttctttttttagtc

SEQ ID NO: 1342594 - DNA, 15 bp, Homo sapiens
ctttctttttttagt

SEQ ID NO: 1342595 - DNA, 15 bp, Homo sapiens
gctttctttttttag

SEQ ID NO: 1342596 - DNA, 15 bp, Homo sapiens
agctttcttttttta

SEQ ID NO: 1342597 - DNA, 15 bp, Homo sapiens
aagctttcttttttt

SEQ ID NO: 1342598 - DNA, 15 bp, Homo sapiens
gaagctttctttttt

SEQ ID NO: 1342599 - DNA, 15 bp, Homo sapiens
ggaagctttcttttt

SEQ ID NO: 1342600 - DNA, 15 bp, Homo sapiens
tggaagctttctttt

SEQ ID NO: 1342601 - DNA, 15 bp, Homo sapiens
ctggaagctttcttt

SEQ ID NO: 1342602 - DNA, 15 bp, Homo sapiens
actggaagctttctt

SEQ ID NO: 1342603 - DNA, 15 bp, Homo sapiens
gactggaagctttct

SEQ ID NO: 1342604 - DNA, 15 bp, Homo sapiens
agactggaagctttc

SEQ ID NO: 1342605 - DNA, 15 bp, Homo sapiens
cagactggaagcttt

SEQ ID NO: 1342606 - DNA, 15 bp, Homo sapiens
ccagactggaagctt

SEQ ID NO: 1342607 - DNA, 15 bp, Homo sapiens
cccagactggaagct

SEQ ID NO: 1342608 - DNA, 15 bp, Homo sapiens
gcccagactggaagc

SEQ ID NO: 1342609 - DNA, 15 bp, Homo sapiens
tgcccagactggaag

SEQ ID NO: 1342610 - DNA, 15 bp, Homo sapiens
gtgcccagactggaa

SEQ ID NO: 1342611 - DNA, 15 bp, Homo sapiens
tgtgcccagactgga

SEQ ID NO: 1342612 - DNA, 15 bp, Homo sapiens
ctgtgcccagactgg

SEQ ID NO: 1342613 - DNA, 15 bp, Homo sapiens
actgtgcccagactg

SEQ ID NO: 1342614 - DNA, 15 bp, Homo sapiens
cactgtgcccagact

SEQ ID NO: 1342615 - DNA, 15 bp, Homo sapiens
ccactgtgcccagac

SEQ ID NO: 1342616 - DNA, 15 bp, Homo sapiens
gccactgtgcccaga

SEQ ID NO: 1342617 - DNA, 15 bp, Homo sapiens
gctgtgttggccagg

SEQ ID NO: 1342618 - DNA, 15 bp, Homo sapiens
tgctgtgttggccag

SEQ ID NO: 1342619 - DNA, 15 bp, Homo sapiens
ttgctgtgttggcca

SEQ ID NO: 1342620 - DNA, 15 bp, Homo sapiens
attgctgtgttggcc

SEQ ID NO: 1342621 - DNA, 15 bp, Homo sapiens
tattgctgtgttggc

SEQ ID NO: 1342622 - DNA, 15 bp, Homo sapiens
gtattgctgtgttgg

SEQ ID NO: 1342623 - DNA, 15 bp, Homo sapiens
ggtattgctgtgttg

SEQ ID NO: 1342624 - DNA, 15 bp, Homo sapiens
gggtattgctgtgtt

SEQ ID NO: 1342625 - DNA, 15 bp, Homo sapiens
ggggtattgctgtgt

SEQ ID NO: 1342626 - DNA, 15 bp, Homo sapiens
cggggtattgctgtg

SEQ ID NO: 1342627 - DNA, 15 bp, Homo sapiens
acggggtattgctgt

SEQ ID NO: 1342628 - DNA, 15 bp, Homo sapiens
gacggggtattgctg

SEQ ID NO: 1342629 - DNA, 15 bp, Homo sapiens
agacggggtattgct

SEQ ID NO: 1342630 - DNA, 15 bp, Homo sapiens
gagacggggtattgc

SEQ ID NO: 1342631 - DNA, 15 bp, Homo sapiens
agagacggggtattg

SEQ ID NO: 1342632 - DNA, 15 bp, Homo sapiens
tagagacggggtatt

SEQ ID NO: 1342633 - DNA, 15 bp, Homo sapiens
ttagagacggggtat

SEQ ID NO: 1342634 - DNA, 15 bp, Homo sapiens
attagagacggggta

SEQ ID NO: 1342635 - DNA, 15 bp, Homo sapiens
tattagagacggggt

SEQ ID NO: 1342636 - DNA, 15 bp, Homo sapiens
ttattagagacgggg

SEQ ID NO: 1342637 - DNA, 15 bp, Homo sapiens
tttattagagacggg

SEQ ID NO: 1342638 - DNA, 15 bp, Homo sapiens
ttttattagagacgg

SEQ ID NO: 1342639 - DNA, 15 bp, Homo sapiens
tttttattagagacg

SEQ ID NO: 1342640 - DNA, 15 bp, Homo sapiens
ttttttattagagac

SEQ ID NO: 1342641 - DNA, 15 bp, Homo sapiens
attttttattagaga

SEQ ID NO: 1342642 - DNA, 15 bp, Homo sapiens
tattttttattagag

SEQ ID NO: 1342643 - DNA, 15 bp, Homo sapiens
gtattttttattaga

SEQ ID NO: 1342644 - DNA, 15 bp, Homo sapiens
tgtattttttattag

SEQ ID NO: 1342645 - DNA, 15 bp, Homo sapiens
ttgtattttttatta

SEQ ID NO: 1342646 - DNA, 15 bp, Homo sapiens
tttgtattttttatt

SEQ ID NO: 1342647 - DNA, 15 bp, Homo sapiens
ttttgtattttttat

SEQ ID NO: 1342648 - DNA, 15 bp, Homo sapiens
gatttttgtattttt

SEQ ID NO: 1342649 - DNA, 15 bp, Homo sapiens
tgatttttgtatttt

SEQ ID NO: 1342650 - DNA, 15 bp, Homo sapiens
ctgatttttgtattt

SEQ ID NO: 1342651 - DNA, 15 bp, Homo sapiens
gctgatttttgtatt

SEQ ID NO: 1342652 - DNA, 15 bp, Homo sapiens
ggctgatttttgtat

SEQ ID NO: 1342653 - DNA, 15 bp, Homo sapiens
tggctgatttttgta

SEQ ID NO: 1342654 - DNA, 15 bp, Homo sapiens
ctggctgatttttgt

SEQ ID NO: 1342655 - DNA, 15 bp, Homo sapiens
cctggctgatttttg

SEQ ID NO: 1342656 - DNA, 15 bp, Homo sapiens
gcctggctgattttt

SEQ ID NO: 1342657 - DNA, 15 bp, Homo sapiens
agcctggctgatttt

SEQ ID NO: 1342658 - DNA, 15 bp, Homo sapiens
aagcctggctgattt

SEQ ID NO: 1342659 - DNA, 15 bp, Homo sapiens
caagcctggctgatt

SEQ ID NO: 1342660 - DNA, 15 bp, Homo sapiens
ccaagcctggctgat

SEQ ID NO: 1342661 - DNA, 15 bp, Homo sapiens
cccaagcctggctga

SEQ ID NO: 1342662 - DNA, 15 bp, Homo sapiens
acccaagcctggctg

SEQ ID NO: 1342663 - DNA, 15 bp, Homo sapiens
cacccaagcctggct

SEQ ID NO: 1342664 - DNA, 15 bp, Homo sapiens
ccacccaagcctggc

SEQ ID NO: 1342665 - DNA, 15 bp, Homo sapiens
gccacccaagcctgg

SEQ ID NO: 1342666 - DNA, 15 bp, Homo sapiens
cgccacccaagcctg

SEQ ID NO: 1342667 - DNA, 15 bp, Homo sapiens
ccgccacccaagcct

SEQ ID NO: 1342668 - DNA, 15 bp, Homo sapiens
cccgccacccaagcc

SEQ ID NO: 1342669 - DNA, 15 bp, Homo sapiens
gcccgccacccaagc

SEQ ID NO: 1342670 - DNA, 15 bp, Homo sapiens
cgcccgccacccaag

SEQ ID NO: 1342671 - DNA, 15 bp, Homo sapiens
gcgcccgccacccaa

SEQ ID NO: 1342672 - DNA, 15 bp, Homo sapiens
ggcgcccgccaccca

SEQ ID NO: 1342673 - DNA, 15 bp, Homo sapiens
aggcgcccgccaccc

SEQ ID NO: 1342674 - DNA, 15 bp, Homo sapiens
gacaggcgcccgcca

SEQ ID NO: 1342675 - DNA, 15 bp, Homo sapiens
cgacaggcgcccgcc

SEQ ID NO: 1342676 - DNA, 15 bp, Homo sapiens
acgacaggcgcccgc

SEQ ID NO: 1342677 - DNA, 15 bp, Homo sapiens
gacgacaggcgcccg

SEQ ID NO: 1342678 - DNA, 15 bp, Homo sapiens
ggacgacaggcgccc

SEQ ID NO: 1342679 - DNA, 15 bp, Homo sapiens
gggacgacaggcgcc

SEQ ID NO: 1342680 - DNA, 15 bp, Homo sapiens
tgggacgacaggcgc

SEQ ID NO: 1342681 - DNA, 15 bp, Homo sapiens
ctgggacgacaggcg

SEQ ID NO: 1342682 - DNA, 15 bp, Homo sapiens
gctgggacgacaggc

SEQ ID NO: 1342683 - DNA, 15 bp, Homo sapiens
agctgggacgacagg

SEQ ID NO: 1342684 - DNA, 15 bp, Homo sapiens
tagctgggacgacag

SEQ ID NO: 1342685 - DNA, 15 bp, Homo sapiens
gtagctgggacgaca

SEQ ID NO: 1342686 - DNA, 15 bp, Homo sapiens
cgtagctgggacgac

SEQ ID NO: 1342687 - DNA, 15 bp, Homo sapiens
gcgtagctgggacga

SEQ ID NO: 1342688 - DNA, 15 bp, Homo sapiens
tgcgtagctgggacg

SEQ ID NO: 1342689 - DNA, 15 bp, Homo sapiens
ctgcgtagctgggac

SEQ ID NO: 1342690 - DNA, 15 bp, Homo sapiens
cctgcgtagctggga

SEQ ID NO: 1342691 - DNA, 15 bp, Homo sapiens
tcctgcgtagctggg

SEQ ID NO: 1342692 - DNA, 15 bp, Homo sapiens
ctcctgcgtagctgg

SEQ ID NO: 1342693 - DNA, 15 bp, Homo sapiens
cctcctgcgtagctg

SEQ ID NO: 1342694 - DNA, 15 bp, Homo sapiens
gcctcctgcgtagct

SEQ ID NO: 1342695 - DNA, 15 bp, Homo sapiens
agcctcctgcgtagc

SEQ ID NO: 1342696 - DNA, 15 bp, Homo sapiens
cagcctcctgcgtag

SEQ ID NO: 1342697 - DNA, 15 bp, Homo sapiens
tcagcctcctgcgta

SEQ ID NO: 1342698 - DNA, 15 bp, Homo sapiens
ctcagcctcctgcgt

SEQ ID NO: 1342699 - DNA, 15 bp, Homo sapiens
tctcagcctcctgcg

SEQ ID NO: 1342700 - DNA, 15 bp, Homo sapiens
gtctcagcctcctgc

SEQ ID NO: 1342701 - DNA, 15 bp, Homo sapiens
cgtctcagcctcctg

SEQ ID NO: 1342702 - DNA, 15 bp, Homo sapiens
ccgtctcagcctcct

SEQ ID NO: 1342703 - DNA, 15 bp, Homo sapiens
cccgtctcagcctcc

SEQ ID NO: 1342704 - DNA, 15 bp, Homo sapiens
ccccgtctcagcctc

SEQ ID NO: 1342705 - DNA, 15 bp, Homo sapiens
tccccgtctcagcct

SEQ ID NO: 1342706 - DNA, 15 bp, Homo sapiens
ctccccgtctcagcc

SEQ ID NO: 1342707 - DNA, 15 bp, Homo sapiens
tctccccgtctcagc

SEQ ID NO: 1342708 - DNA, 15 bp, Homo sapiens
ttctccccgtctcag

SEQ ID NO: 1342709 - DNA, 15 bp, Homo sapiens
attctccccgtctca

SEQ ID NO: 1342710 - DNA, 15 bp, Homo sapiens
aattctccccgtctc

SEQ ID NO: 1342711 - DNA, 15 bp, Homo sapiens
caattctccccgtct

SEQ ID NO: 1342712 - DNA, 15 bp, Homo sapiens
gcaattctccccgtc

SEQ ID NO: 1342713 - DNA, 15 bp, Homo sapiens
agcaattctccccgt

SEQ ID NO: 1342714 - DNA, 15 bp, Homo sapiens
aagcaattctccccg

SEQ ID NO: 1342715 - DNA, 15 bp, Homo sapiens
caagcaattctcccc

SEQ ID NO: 1342716 - DNA, 15 bp, Homo sapiens
cttcaagcaattctc

SEQ ID NO: 1342717 - DNA, 15 bp, Homo sapiens
gcttcaagcaattct

SEQ ID NO: 1342718 - DNA, 15 bp, Homo sapiens
ggcttcaagcaattc

SEQ ID NO: 1342719 - DNA, 15 bp, Homo sapiens
tggcttcaagcaatt

SEQ ID NO: 1342720 - DNA, 15 bp, Homo sapiens
ctggcttcaagcaat

SEQ ID NO: 1342721 - DNA, 15 bp, Homo sapiens
cctggcttcaagcaa

SEQ ID NO: 1342722 - DNA, 15 bp, Homo sapiens
tcctggcttcaagca

SEQ ID NO: 1342723 - DNA, 15 bp, Homo sapiens
ctcctggcttcaagc

SEQ ID NO: 1342724 - DNA, 15 bp, Homo sapiens
cctcctggcttcaag

SEQ ID NO: 1342725 - DNA, 15 bp, Homo sapiens
acctcctggcttcaa

SEQ ID NO: 1342726 - DNA, 15 bp, Homo sapiens
cacctcctggcttca

SEQ ID NO: 1342727 - DNA, 15 bp, Homo sapiens
ccacctcctggcttc

SEQ ID NO: 1342728 - DNA, 15 bp, Homo sapiens
tccacctcctggctt

SEQ ID NO: 1342729 - DNA, 15 bp, Homo sapiens
ctccacctcctggct

SEQ ID NO: 1342730 - DNA, 15 bp, Homo sapiens
cctccacctcctggc

SEQ ID NO: 1342731 - DNA, 15 bp, Homo sapiens
ttcggctcactgcaa

SEQ ID NO: 1342732 - DNA, 15 bp, Homo sapiens
tttcggctcactgca

SEQ ID NO: 1342733 - DNA, 15 bp, Homo sapiens
ctttcggctcactgc

SEQ ID NO: 1342734 - DNA, 15 bp, Homo sapiens
gctttcggctcactg

SEQ ID NO: 1342735 - DNA, 15 bp, Homo sapiens
cgctttcggctcact

SEQ ID NO: 1342736 - DNA, 15 bp, Homo sapiens
gcgctttcggctcac

SEQ ID NO: 1342737 - DNA, 15 bp, Homo sapiens
agcgctttcggctca

SEQ ID NO: 1342738 - DNA, 15 bp, Homo sapiens
aagcgctttcggctc

SEQ ID NO: 1342739 - DNA, 15 bp, Homo sapiens
taagcgctttcggct

SEQ ID NO: 1342740 - DNA, 15 bp, Homo sapiens
ttaagcgctttcggc

SEQ ID NO: 1342741 - DNA, 15 bp, Homo sapiens
cttaagcgctttcgg

SEQ ID NO: 1342742 - DNA, 15 bp, Homo sapiens
ccttaagcgctttcg

SEQ ID NO: 1342743 - DNA, 15 bp, Homo sapiens
tccttaagcgctttc

SEQ ID NO: 1342744 - DNA, 15 bp, Homo sapiens
ctccttaagcgcttt

SEQ ID NO: 1342745 - DNA, 15 bp, Homo sapiens
tctccttaagcgctt

SEQ ID NO: 1342746 - DNA, 15 bp, Homo sapiens
ttctccttaagcgct

SEQ ID NO: 1342747 - DNA, 15 bp, Homo sapiens
tttctccttaagcgc

SEQ ID NO: 1342748 - DNA, 15 bp, Homo sapiens
atttctccttaagcg

SEQ ID NO: 1342749 - DNA, 15 bp, Homo sapiens
tatttctccttaagc

SEQ ID NO: 1342750 - DNA, 15 bp, Homo sapiens
ttatttctccttaag

SEQ ID NO: 1342751 - DNA, 15 bp, Homo sapiens
cttatttctccttaa

SEQ ID NO: 1342752 - DNA, 15 bp, Homo sapiens
acttatttctcctta

SEQ ID NO: 1342753 - DNA, 15 bp, Homo sapiens
tacttatttctcctt

SEQ ID NO: 1342754 - DNA, 15 bp, Homo sapiens
ttacttatttctcct

SEQ ID NO: 1342755 - DNA, 15 bp, Homo sapiens
cttacttatttctcc

SEQ ID NO: 1342756 - DNA, 15 bp, Homo sapiens
ccttacttatttctc

SEQ ID NO: 1342757 - DNA, 15 bp, Homo sapiens
tccttacttatttct

SEQ ID NO: 1342758 - DNA, 15 bp, Homo sapiens
gtccttacttatttc

SEQ ID NO: 1342759 - DNA, 15 bp, Homo sapiens
tgtccttacttattt

SEQ ID NO: 1342760 - DNA, 15 bp, Homo sapiens
ttgtccttacttatt

SEQ ID NO: 1342761 - DNA, 15 bp, Homo sapiens
tttgtccttacttat

SEQ ID NO: 1342762 - DNA, 15 bp, Homo sapiens
ctttgtccttactta

SEQ ID NO: 1342763 - DNA, 15 bp, Homo sapiens
tctttgtccttactt

SEQ ID NO: 1342764 - DNA, 15 bp, Homo sapiens
ctctttgtccttact

SEQ ID NO: 1342765 - DNA, 15 bp, Homo sapiens
actctttgtccttac

SEQ ID NO: 1342766 - DNA, 15 bp, Homo sapiens
cactctttgtcctta

SEQ ID NO: 1342767 - DNA, 15 bp, Homo sapiens
gcactctttgtcctt

SEQ ID NO: 1342768 - DNA, 15 bp, Homo sapiens
tgcactctttgtcct

SEQ ID NO: 1342769 - DNA, 15 bp, Homo sapiens
ctgcactctttgtcc

SEQ ID NO: 1342770 - DNA, 15 bp, Homo sapiens
cctgcactctttgtc

SEQ ID NO: 1342771 - DNA, 15 bp, Homo sapiens
tcctgcactctttgt

SEQ ID NO: 1342772 - DNA, 15 bp, Homo sapiens
atcctgcactctttg

SEQ ID NO: 1342773 - DNA, 15 bp, Homo sapiens
tatcctgcactcttt

SEQ ID NO: 1342774 - DNA, 15 bp, Homo sapiens
ctatcctgcactctt

SEQ ID NO: 1342775 - DNA, 15 bp, Homo sapiens
actatcctgcactct

SEQ ID NO: 1342776 - DNA, 15 bp, Homo sapiens
tactatcctgcactc

SEQ ID NO: 1342777 - DNA, 15 bp, Homo sapiens
atactatcctgcact

SEQ ID NO: 1342778 - DNA, 15 bp, Homo sapiens
gatactatcctgcac

SEQ ID NO: 1342779 - DNA, 15 bp, Homo sapiens
ggatactatcctgca

SEQ ID NO: 1342780 - DNA, 15 bp, Homo sapiens
aggatactatcctgc

SEQ ID NO: 1342781 - DNA, 15 bp, Homo sapiens
caggatactatcctg

SEQ ID NO: 1342782 - DNA, 15 bp, Homo sapiens
tcaggatactatcct

SEQ ID NO: 1342783 - DNA, 15 bp, Homo sapiens
gtcaggatactatcc

SEQ ID NO: 1342784 - DNA, 15 bp, Homo sapiens
tgtcaggatactatc

SEQ ID NO: 1342785 - DNA, 15 bp, Homo sapiens
gtgtcaggatactat

SEQ ID NO: 1342786 - DNA, 15 bp, Homo sapiens
cgtgtcaggatacta

SEQ ID NO: 1342787 - DNA, 15 bp, Homo sapiens
ccgtgtcaggatact

SEQ ID NO: 1342788 - DNA, 15 bp, Homo sapiens
tccgtgtcaggatac

SEQ ID NO: 1342789 - DNA, 15 bp, Homo sapiens
ctccgtgtcaggata

SEQ ID NO: 1342790 - DNA, 15 bp, Homo sapiens
cctccgtgtcaggat

SEQ ID NO: 1342791 - DNA, 15 bp, Homo sapiens
tcctccgtgtcagga

SEQ ID NO: 1342792 - DNA, 15 bp, Homo sapiens
atcctccgtgtcagg

SEQ ID NO: 1342793 - DNA, 15 bp, Homo sapiens
catcctccgtgtcag

SEQ ID NO: 1342794 - DNA, 15 bp, Homo sapiens
ccatcctccgtgtca

SEQ ID NO: 1342795 - DNA, 15 bp, Homo sapiens
cccatcctccgtgtc

SEQ ID NO: 1342796 - DNA, 15 bp, Homo sapiens
ccccatcctccgtgt

SEQ ID NO: 1342797 - DNA, 15 bp, Homo sapiens
tccccatcctccgtg

SEQ ID NO: 1342798 - DNA, 15 bp, Homo sapiens
ctccccatcctccgt

SEQ ID NO: 1342799 - DNA, 15 bp, Homo sapiens
cctccccatcctccg

SEQ ID NO: 1342800 - DNA, 15 bp, Homo sapiens
ccctccccatcctcc

SEQ ID NO: 1342801 - DNA, 15 bp, Homo sapiens
accctccccatcctc

SEQ ID NO: 1342802 - DNA, 15 bp, Homo sapiens
taccctccccatcct

SEQ ID NO: 1342803 - DNA, 15 bp, Homo sapiens
ataccctccccatcc

SEQ ID NO: 1342804 - DNA, 15 bp, Homo sapiens
cataccctccccatc

SEQ ID NO: 1342805 - DNA, 15 bp, Homo sapiens
acataccctccccat

SEQ ID NO: 1342806 - DNA, 15 bp, Homo sapiens
tacataccctcccca

SEQ ID NO: 1342807 - DNA, 15 bp, Homo sapiens
ttacataccctcccc

SEQ ID NO: 1342808 - DNA, 15 bp, Homo sapiens
tttacataccctccc

SEQ ID NO: 1342809 - DNA, 15 bp, Homo sapiens
atttacataccctcc

SEQ ID NO: 1342810 - DNA, 15 bp, Homo sapiens
tatttacataccctc

SEQ ID NO: 1342811 - DNA, 15 bp, Homo sapiens
atatttacataccct

SEQ ID NO: 1342812 - DNA, 15 bp, Homo sapiens
aatatttacataccc

SEQ ID NO: 1342813 - DNA, 15 bp, Homo sapiens
caatatttacatacc

SEQ ID NO: 1342814 - DNA, 15 bp, Homo sapiens
acaatatttacatac

SEQ ID NO: 1342815 - DNA, 15 bp, Homo sapiens
gacaatatttacata

SEQ ID NO: 1342816 - DNA, 15 bp, Homo sapiens
cgacaatatttacat

SEQ ID NO: 1342817 - DNA, 15 bp, Homo sapiens
tcgacaatatttaca

SEQ ID NO: 1342818 - DNA, 15 bp, Homo sapiens
atcgacaatatttac

SEQ ID NO: 1342819 - DNA, 15 bp, Homo sapiens
tatcgacaatattta

SEQ ID NO: 1342820 - DNA, 15 bp, Homo sapiens
atatcgacaatattt

SEQ ID NO: 1342821 - DNA, 15 bp, Homo sapiens
aatatcgacaatatt

SEQ ID NO: 1342822 - DNA, 15 bp, Homo sapiens
aaatatcgacaatat

SEQ ID NO: 1342823 - DNA, 15 bp, Homo sapiens
aaaatatcgacaata

SEQ ID NO: 1342824 - DNA, 15 bp, Homo sapiens
taaaatatcgacaat

SEQ ID NO: 1342825 - DNA, 15 bp, Homo sapiens
gtaaaatatcgacaa

SEQ ID NO: 1342826 - DNA, 15 bp, Homo sapiens
agtaaaatatcgaca

SEQ ID NO: 1342827 - DNA, 15 bp, Homo sapiens
cagtaaaatatcgac

SEQ ID NO: 1342828 - DNA, 15 bp, Homo sapiens
tcagtaaaatatcga

SEQ ID NO: 1342829 - DNA, 15 bp, Homo sapiens
ttcagtaaaatatcg

SEQ ID NO: 1342830 - DNA, 15 bp, Homo sapiens
attcagtaaaatatc

SEQ ID NO: 1342831 - DNA, 15 bp, Homo sapiens
aattcagtaaaatat

SEQ ID NO: 1342832 - DNA, 15 bp, Homo sapiens
aaattcagtaaaata

SEQ ID NO: 1342833 - DNA, 15 bp, Homo sapiens
gaaattcagtaaaat

SEQ ID NO: 1342834 - DNA, 15 bp, Homo sapiens
agaaattcagtaaaa

SEQ ID NO: 1342835 - DNA, 15 bp, Homo sapiens
tagaaattcagtaaa

SEQ ID NO: 1342836 - DNA, 15 bp, Homo sapiens
ttagaaattcagtaa

SEQ ID NO: 1342837 - DNA, 15 bp, Homo sapiens
tttagaaattcagta

SEQ ID NO: 1342838 - DNA, 15 bp, Homo sapiens
atttagaaattcagt

SEQ ID NO: 1342839 - DNA, 15 bp, Homo sapiens
tatttagaaattcag

SEQ ID NO: 1342840 - DNA, 15 bp, Homo sapiens
atatttagaaattca

SEQ ID NO: 1342841 - DNA, 15 bp, Homo sapiens
aatatttagaaattc

SEQ ID NO: 1342842 - DNA, 15 bp, Homo sapiens
taatatttagaaatt

SEQ ID NO: 1342843 - DNA, 15 bp, Homo sapiens
gtaatatttagaaat

SEQ ID NO: 1342844 - DNA, 15 bp, Homo sapiens
tgtaatatttagaaa

SEQ ID NO: 1342845 - DNA, 15 bp, Homo sapiens
ttgtaatatttagaa

SEQ ID NO: 1342846 - DNA, 15 bp, Homo sapiens
cttgtaatatttaga

SEQ ID NO: 1342847 - DNA, 15 bp, Homo sapiens
tcttgtaatatttag

SEQ ID NO: 1342848 - DNA, 15 bp, Homo sapiens
ttcttgtaatattta

SEQ ID NO: 1342849 - DNA, 15 bp, Homo sapiens
attcttgtaatattt

SEQ ID NO: 1342850 - DNA, 15 bp, Homo sapiens
tattcttgtaatatt

SEQ ID NO: 1342851 - DNA, 15 bp, Homo sapiens
ctattcttgtaatat

SEQ ID NO: 1342852 - DNA, 15 bp, Homo sapiens
tctattcttgtaata

SEQ ID NO: 1342853 - DNA, 15 bp, Homo sapiens
ttctattcttgtaat

SEQ ID NO: 1342854 - DNA, 15 bp, Homo sapiens
attctattcttgtaa

SEQ ID NO: 1342855 - DNA, 15 bp, Homo sapiens
tattctattcttgta

SEQ ID NO: 1342856 - DNA, 15 bp, Homo sapiens
atattctattcttgt

SEQ ID NO: 1342857 - DNA, 15 bp, Homo sapiens
aatattctattcttg

SEQ ID NO: 1342858 - DNA, 15 bp, Homo sapiens
gaatattctattctt

SEQ ID NO: 1342859 - DNA, 15 bp, Homo sapiens
tgaatattctattct

SEQ ID NO: 1342860 - DNA, 15 bp, Homo sapiens
atgaatattctattc

SEQ ID NO: 1342861 - DNA, 15 bp, Homo sapiens
tatgaatattctatt

SEQ ID NO: 1342862 - DNA, 15 bp, Homo sapiens
ctatgaatattctat

SEQ ID NO: 1342863 - DNA, 15 bp, Homo sapiens
cctatgaatattcta

SEQ ID NO: 1342864 - DNA, 15 bp, Homo sapiens
tcctatgaatattct

SEQ ID NO: 1342865 - DNA, 15 bp, Homo sapiens
atcctatgaatattc

SEQ ID NO: 1342866 - DNA, 15 bp, Homo sapiens
tatcctatgaatatt

SEQ ID NO: 1342867 - DNA, 15 bp, Homo sapiens
ttatcctatgaatat

SEQ ID NO: 1342868 - DNA, 15 bp, Homo sapiens
gttatcctatgaata

SEQ ID NO: 1342869 - DNA, 15 bp, Homo sapiens
ggttatcctatgaat

SEQ ID NO: 1342870 - DNA, 15 bp, Homo sapiens
aggttatcctatgaa

SEQ ID NO: 1342871 - DNA, 15 bp, Homo sapiens
taggttatcctatga

SEQ ID NO: 1342872 - DNA, 15 bp, Homo sapiens
ttaggttatcctatg

SEQ ID NO: 1342873 - DNA, 15 bp, Homo sapiens
cttaggttatcctat

SEQ ID NO: 1342874 - DNA, 15 bp, Homo sapiens
gcttaggttatccta

SEQ ID NO: 1342875 - DNA, 15 bp, Homo sapiens
agcttaggttatcct

SEQ ID NO: 1342876 - DNA, 15 bp, Homo sapiens
aagcttaggttatcc

SEQ ID NO: 1342877 - DNA, 15 bp, Homo sapiens
aaagcttaggttatc

SEQ ID NO: 1342878 - DNA, 15 bp, Homo sapiens
aaaagcttaggttat

SEQ ID NO: 1342879 - DNA, 15 bp, Homo sapiens
gaaaagcttaggtta

SEQ ID NO: 1342880 - DNA, 15 bp, Homo sapiens
agaaaagcttaggtt

SEQ ID NO: 1342881 - DNA, 15 bp, Homo sapiens
cagaaaagcttaggt

SEQ ID NO: 1342882 - DNA, 15 bp, Homo sapiens
acagaaaagcttagg

SEQ ID NO: 1342883 - DNA, 15 bp, Homo sapiens
cacagaaaagcttag

SEQ ID NO: 1342884 - DNA, 15 bp, Homo sapiens
tcacagaaaagctta

SEQ ID NO: 1342885 - DNA, 15 bp, Homo sapiens
ctcacagaaaagctt

SEQ ID NO: 1342886 - DNA, 15 bp, Homo sapiens
actcacagaaaagct

SEQ ID NO: 1342887 - DNA, 15 bp, Homo sapiens
gactcacagaaaagc

SEQ ID NO: 1342888 - DNA, 15 bp, Homo sapiens
tgactcacagaaaag

SEQ ID NO: 1342889 - DNA, 15 bp, Homo sapiens
ctgactcacagaaaa

SEQ ID NO: 1342890 - DNA, 15 bp, Homo sapiens
actgactcacagaaa

SEQ ID NO: 1342891 - DNA, 15 bp, Homo sapiens
cactgactcacagaa

SEQ ID NO: 1342892 - DNA, 15 bp, Homo sapiens
acactgactcacaga

SEQ ID NO: 1342893 - DNA, 15 bp, Homo sapiens
tacactgactcacag

SEQ ID NO: 1342894 - DNA, 15 bp, Homo sapiens
gtacactgactcaca

SEQ ID NO: 1342895 - DNA, 15 bp, Homo sapiens
agtacactgactcac

SEQ ID NO: 1342896 - DNA, 15 bp, Homo sapiens
tagtacactgactca

SEQ ID NO: 1342897 - DNA, 15 bp, Homo sapiens
ctagtacactgactc

SEQ ID NO: 1342898 - DNA, 15 bp, Homo sapiens
cctagtacactgact

SEQ ID NO: 1342899 - DNA, 15 bp, Homo sapiens
gcctagtacactgac

SEQ ID NO: 1342900 - DNA, 15 bp, Homo sapiens
tgcctagtacactga

SEQ ID NO: 1342901 - DNA, 15 bp, Homo sapiens
ctgcctagtacactg

SEQ ID NO: 1342902 - DNA, 15 bp, Homo sapiens
tctgcctagtacact

SEQ ID NO: 1342903 - DNA, 15 bp, Homo sapiens
ttctgcctagtacac

SEQ ID NO: 1342904 - DNA, 15 bp, Homo sapiens
tttctgcctagtaca

SEQ ID NO: 1342905 - DNA, 15 bp, Homo sapiens
ctttctgcctagtac

SEQ ID NO: 1342906 - DNA, 15 bp, Homo sapiens
actttctgcctagta

SEQ ID NO: 1342907 - DNA, 15 bp, Homo sapiens
aactttctgcctagt

SEQ ID NO: 1342908 - DNA, 15 bp, Homo sapiens
gaactttctgcctag

SEQ ID NO: 1342909 - DNA, 15 bp, Homo sapiens
tgaactttctgccta

SEQ ID NO: 1342910 - DNA, 15 bp, Homo sapiens
gtgaactttctgcct

SEQ ID NO: 1342911 - DNA, 15 bp, Homo sapiens
agtgaactttctgcc

SEQ ID NO: 1342912 - DNA, 15 bp, Homo sapiens
tagtgaactttctgc

SEQ ID NO: 1342913 - DNA, 15 bp, Homo sapiens
ttagtgaactttctg

SEQ ID NO: 1342914 - DNA, 15 bp, Homo sapiens
tttagtgaactttct

SEQ ID NO: 1342915 - DNA, 15 bp, Homo sapiens
ctttagtgaactttc

SEQ ID NO: 1342916 - DNA, 15 bp, Homo sapiens
actttagtgaacttt

SEQ ID NO: 1342917 - DNA, 15 bp, Homo sapiens
cactttagtgaactt

SEQ ID NO: 1342918 - DNA, 15 bp, Homo sapiens
ccactttagtgaact

SEQ ID NO: 1342919 - DNA, 15 bp, Homo sapiens
accactttagtgaac

SEQ ID NO: 1342920 - DNA, 15 bp, Homo sapiens
aaccactttagtgaa

SEQ ID NO: 1342921 - DNA, 15 bp, Homo sapiens
aaaccactttagtga

SEQ ID NO: 1342922 - DNA, 15 bp, Homo sapiens
taaaccactttagtg

SEQ ID NO: 1342923 - DNA, 15 bp, Homo sapiens
ataaaccactttagt

SEQ ID NO: 1342924 - DNA, 15 bp, Homo sapiens
cataaaccactttag

SEQ ID NO: 1342925 - DNA, 15 bp, Homo sapiens
tcataaaccacttta

SEQ ID NO: 1342926 - DNA, 15 bp, Homo sapiens
atcataaaccacttt

SEQ ID NO: 1342927 - DNA, 15 bp, Homo sapiens
aatcataaaccactt

SEQ ID NO: 1342928 - DNA, 15 bp, Homo sapiens
aaatcataaaccact

SEQ ID NO: 1342929 - DNA, 15 bp, Homo sapiens
aaaatcataaaccac

SEQ ID NO: 1342930 - DNA, 15 bp, Homo sapiens
aaaaatcataaacca

SEQ ID NO: 1342931 - DNA, 15 bp, Homo sapiens
caaaaatcataaacc

SEQ ID NO: 1342932 - DNA, 15 bp, Homo sapiens
gcaaaaatcataaac

SEQ ID NO: 1342933 - DNA, 15 bp, Homo sapiens
agcaaaaatcataaa

SEQ ID NO: 1342934 - DNA, 15 bp, Homo sapiens
tagcaaaaatcataa

SEQ ID NO: 1342935 - DNA, 15 bp, Homo sapiens
gtagcaaaaatcata

SEQ ID NO: 1342936 - DNA, 15 bp, Homo sapiens
agtagcaaaaatcat

SEQ ID NO: 1342937 - DNA, 15 bp, Homo sapiens
aagtagcaaaaatca

SEQ ID NO: 1342938 - DNA, 15 bp, Homo sapiens
taagtagcaaaaatc

SEQ ID NO: 1342939 - DNA, 15 bp, Homo sapiens
ataagtagcaaaaat

SEQ ID NO: 1342940 - DNA, 15 bp, Homo sapiens
cataagtagcaaaaa

SEQ ID NO: 1342941 - DNA, 15 bp, Homo sapiens
tcataagtagcaaaa

SEQ ID NO: 1342942 - DNA, 15 bp, Homo sapiens
ctcataagtagcaaa

SEQ ID NO: 1342943 - DNA, 15 bp, Homo sapiens
tctcataagtagcaa

SEQ ID NO: 1342944 - DNA, 15 bp, Homo sapiens
ttctcataagtagca

SEQ ID NO: 1342945 - DNA, 15 bp, Homo sapiens
tttctcataagtagc

SEQ ID NO: 1342946 - DNA, 15 bp, Homo sapiens
ttttctcataagtag

SEQ ID NO: 1342947 - DNA, 15 bp, Homo sapiens
gttttctcataagta

SEQ ID NO: 1342948 - DNA, 15 bp, Homo sapiens
tgttttctcataagt

SEQ ID NO: 1342949 - DNA, 15 bp, Homo sapiens
atgttttctcataag

SEQ ID NO: 1342950 - DNA, 15 bp, Homo sapiens
aatgttttctcataa

SEQ ID NO: 1342951 - DNA, 15 bp, Homo sapiens
taatgttttctcata

SEQ ID NO: 1342952 - DNA, 15 bp, Homo sapiens
ttaatgttttctcat

SEQ ID NO: 1342953 - DNA, 15 bp, Homo sapiens
tttaatgttttctca

SEQ ID NO: 1342954 - DNA, 15 bp, Homo sapiens
ttttaatgttttctc

SEQ ID NO: 1342955 - DNA, 15 bp, Homo sapiens
tttttaatgttttct

SEQ ID NO: 1342956 - DNA, 15 bp, Homo sapiens
atttttaatgttttc

SEQ ID NO: 1342957 - DNA, 15 bp, Homo sapiens
catttttaatgtttt

SEQ ID NO: 1342958 - DNA, 15 bp, Homo sapiens
tcatttttaatgttt

SEQ ID NO: 1342959 - DNA, 15 bp, Homo sapiens
ttcatttttaatgtt

SEQ ID NO: 1342960 - DNA, 15 bp, Homo sapiens
cttcatttttaatgt

SEQ ID NO: 1342961 - DNA, 15 bp, Homo sapiens
gcttcatttttaatg

SEQ ID NO: 1342962 - DNA, 15 bp, Homo sapiens
ggcttcatttttaat

SEQ ID NO: 1342963 - DNA, 15 bp, Homo sapiens
tggcttcatttttaa

SEQ ID NO: 1342964 - DNA, 15 bp, Homo sapiens
atggcttcattttta

SEQ ID NO: 1342965 - DNA, 15 bp, Homo sapiens
catggcttcattttt

SEQ ID NO: 1342966 - DNA, 15 bp, Homo sapiens
tcatggcttcatttt

SEQ ID NO: 1342967 - DNA, 15 bp, Homo sapiens
ttcatggcttcattt

SEQ ID NO: 1342968 - DNA, 15 bp, Homo sapiens
tttcatggcttcatt

SEQ ID NO: 1342969 - DNA, 15 bp, Homo sapiens
ttttcatggcttcat

SEQ ID NO: 1342970 - DNA, 15 bp, Homo sapiens
cttttcatggcttca

SEQ ID NO: 1342971 - DNA, 15 bp, Homo sapiens
ccttttcatggcttc

SEQ ID NO: 1342972 - DNA, 15 bp, Homo sapiens
tccttttcatggctt

SEQ ID NO: 1342973 - DNA, 15 bp, Homo sapiens
ttccttttcatggct

SEQ ID NO: 1342974 - DNA, 15 bp, Homo sapiens
tttccttttcatggc

SEQ ID NO: 1342975 - DNA, 15 bp, Homo sapiens
atttccttttcatgg

SEQ ID NO: 1342976 - DNA, 15 bp, Homo sapiens
tatttccttttcatg

SEQ ID NO: 1342977 - DNA, 15 bp, Homo sapiens
atatttccttttcat

SEQ ID NO: 1342978 - DNA, 15 bp, Homo sapiens
aatatttccttttca

SEQ ID NO: 1342979 - DNA, 15 bp, Homo sapiens
caatatttccttttc

SEQ ID NO: 1342980 - DNA, 15 bp, Homo sapiens
ccaatatttcctttt

SEQ ID NO: 1342981 - DNA, 15 bp, Homo sapiens
accaatatttccttt

SEQ ID NO: 1342982 - DNA, 15 bp, Homo sapiens
caccaatatttcctt

SEQ ID NO: 1342983 - DNA, 15 bp, Homo sapiens
tcaccaatatttcct

SEQ ID NO: 1342984 - DNA, 15 bp, Homo sapiens
ttcaccaatatttcc

SEQ ID NO: 1342985 - DNA, 15 bp, Homo sapiens
tttcaccaatatttc

SEQ ID NO: 1342986 - DNA, 15 bp, Homo sapiens
atttcaccaatattt

SEQ ID NO: 1342987 - DNA, 15 bp, Homo sapiens
aatttcaccaatatt

SEQ ID NO: 1342988 - DNA, 15 bp, Homo sapiens
aaatttcaccaatat

SEQ ID NO: 1342989 - DNA, 15 bp, Homo sapiens
taaatttcaccaata

SEQ ID NO: 1342990 - DNA, 15 bp, Homo sapiens
ctaaatttcaccaat

SEQ ID NO: 1342991 - DNA, 15 bp, Homo sapiens
tctaaatttcaccaa

SEQ ID NO: 1342992 - DNA, 15 bp, Homo sapiens
atctaaatttcacca

SEQ ID NO: 1342993 - DNA, 15 bp, Homo sapiens
tatctaaatttcacc

SEQ ID NO: 1342994 - DNA, 15 bp, Homo sapiens
gtatctaaatttcac

SEQ ID NO: 1342995 - DNA, 15 bp, Homo sapiens
agtatctaaatttca

SEQ ID NO: 1342996 - DNA, 15 bp, Homo sapiens
aagtatctaaatttc

SEQ ID NO: 1342997 - DNA, 15 bp, Homo sapiens
gaagtatctaaattt

SEQ ID NO: 1342998 - DNA, 15 bp, Homo sapiens
tgaagtatctaaatt

SEQ ID NO: 1342999 - DNA, 15 bp, Homo sapiens
ctgaagtatctaaat

SEQ ID NO: 1343000 - DNA, 15 bp, Homo sapiens
tctgaagtatctaaa

SEQ ID NO: 1343001 - DNA, 15 bp, Homo sapiens
ttctgaagtatctaa

SEQ ID NO: 1343002 - DNA, 15 bp, Homo sapiens
cttctgaagtatcta

SEQ ID NO: 1343003 - DNA, 15 bp, Homo sapiens
ccttctgaagtatct

SEQ ID NO: 1343004 - DNA, 15 bp, Homo sapiens
tccttctgaagtatc

SEQ ID NO: 1343005 - DNA, 15 bp, Homo sapiens
ttccttctgaagtat

SEQ ID NO: 1343006 - DNA, 15 bp, Homo sapiens
tttccttctgaagta

SEQ ID NO: 1343007 - DNA, 15 bp, Homo sapiens
ctttccttctgaagt

SEQ ID NO: 1343008 - DNA, 15 bp, Homo sapiens
tctttccttctgaag

SEQ ID NO: 1343009 - DNA, 15 bp, Homo sapiens
ctctttccttctgaa

SEQ ID NO: 1343010 - DNA, 15 bp, Homo sapiens
tctctttccttctga

SEQ ID NO: 1343011 - DNA, 15 bp, Homo sapiens
ctctctttccttctg

SEQ ID NO: 1343012 - DNA, 15 bp, Homo sapiens
tctctctttccttct

SEQ ID NO: 1343013 - DNA, 15 bp, Homo sapiens
gtctctctttccttc

SEQ ID NO: 1343014 - DNA, 15 bp, Homo sapiens
agtctctctttcctt

SEQ ID NO: 1343015 - DNA, 15 bp, Homo sapiens
aagtctctctttcct

SEQ ID NO: 1343016 - DNA, 15 bp, Homo sapiens
aaagtctctctttcc

SEQ ID NO: 1343017 - DNA, 15 bp, Homo sapiens
gaaagtctctctttc

SEQ ID NO: 1343018 - DNA, 15 bp, Homo sapiens
agaaagtctctcttt

SEQ ID NO: 1343019 - DNA, 15 bp, Homo sapiens
aagaaagtctctctt

SEQ ID NO: 1343020 - DNA, 15 bp, Homo sapiens
aaagaaagtctctct

SEQ ID NO: 1343021 - DNA, 15 bp, Homo sapiens
aaaagaaagtctctc

SEQ ID NO: 1343022 - DNA, 15 bp, Homo sapiens
aaaaagaaagtctct

SEQ ID NO: 1343023 - DNA, 15 bp, Homo sapiens
aaaaaagaaagtctc

SEQ ID NO: 1343024 - DNA, 15 bp, Homo sapiens
aaaaaaagaaagtct

SEQ ID NO: 1343025 - DNA, 15 bp, Homo sapiens
aaaaaaaagaaagtc

SEQ ID NO: 1343026 - DNA, 15 bp, Homo sapiens
caaaaaaaaaagaaa

SEQ ID NO: 1343027 - DNA, 15 bp, Homo sapiens
ccaaaaaaaaaagaa

SEQ ID NO: 1343028 - DNA, 15 bp, Homo sapiens
tccaaaaaaaaaaga

SEQ ID NO: 1343029 - DNA, 15 bp, Homo sapiens
ttccaaaaaaaaaag

SEQ ID NO: 1343030 - DNA, 15 bp, Homo sapiens
tttccaaaaaaaaaa

SEQ ID NO: 1343031 - DNA, 15 bp, Homo sapiens
ctttccaaaaaaaaa

SEQ ID NO: 1343032 - DNA, 15 bp, Homo sapiens
tctttccaaaaaaaa

SEQ ID NO: 1343033 - DNA, 15 bp, Homo sapiens
ttctttccaaaaaaa

SEQ ID NO: 1343034 - DNA, 15 bp, Homo sapiens
attctttccaaaaaa

SEQ ID NO: 1343035 - DNA, 15 bp, Homo sapiens
aattctttccaaaaa

SEQ ID NO: 1343036 - DNA, 15 bp, Homo sapiens
aaattctttccaaaa

SEQ ID NO: 1343037 - DNA, 15 bp, Homo sapiens
gaaattctttccaaa

SEQ ID NO: 1343038 - DNA, 15 bp, Homo sapiens
agaaattctttccaa

SEQ ID NO: 1343039 - DNA, 15 bp, Homo sapiens
tagaaattctttcca

SEQ ID NO: 1343040 - DNA, 15 bp, Homo sapiens
atagaaattctttcc

SEQ ID NO: 1343041 - DNA, 15 bp, Homo sapiens
tatagaaattctttc

SEQ ID NO: 1343042 - DNA, 15 bp, Homo sapiens
gtatagaaattcttt

SEQ ID NO: 1343043 - DNA, 15 bp, Homo sapiens
ggtatagaaattctt

SEQ ID NO: 1343044 - DNA, 15 bp, Homo sapiens
tggtatagaaattct

SEQ ID NO: 1343045 - DNA, 15 bp, Homo sapiens
atggtatagaaattc

SEQ ID NO: 1343046 - DNA, 15 bp, Homo sapiens
gatggtatagaaatt

SEQ ID NO: 1343047 - DNA, 15 bp, Homo sapiens
agatggtatagaaat

SEQ ID NO: 1343048 - DNA, 15 bp, Homo sapiens
tagatggtatagaaa

SEQ ID NO: 1343049 - DNA, 15 bp, Homo sapiens
atagatggtatagaa

SEQ ID NO: 1343050 - DNA, 15 bp, Homo sapiens
aatagatggtataga

SEQ ID NO: 1343051 - DNA, 15 bp, Homo sapiens
taatagatggtatag

SEQ ID NO: 1343052 - DNA, 15 bp, Homo sapiens
ataatagatggtata

SEQ ID NO: 1343053 - DNA, 15 bp, Homo sapiens
tataatagatggtat

SEQ ID NO: 1343054 - DNA, 15 bp, Homo sapiens
atataatagatggta

SEQ ID NO: 1343055 - DNA, 15 bp, Homo sapiens
gatataatagatggt

SEQ ID NO: 1343056 - DNA, 15 bp, Homo sapiens
tgatataatagatgg

SEQ ID NO: 1343057 - DNA, 15 bp, Homo sapiens
atgatataatagatg

SEQ ID NO: 1343058 - DNA, 15 bp, Homo sapiens
aatgatataatagat

SEQ ID NO: 1343059 - DNA, 15 bp, Homo sapiens
caatgatataataga

SEQ ID NO: 1343060 - DNA, 15 bp, Homo sapiens
tcaatgatataatag

SEQ ID NO: 1343061 - DNA, 15 bp, Homo sapiens
atcaatgatataata

SEQ ID NO: 1343062 - DNA, 15 bp, Homo sapiens
aatcaatgatataat

SEQ ID NO: 1343063 - DNA, 15 bp, Homo sapiens
caatcaatgatataa

SEQ ID NO: 1343064 - DNA, 15 bp, Homo sapiens
acaatcaatgatata

SEQ ID NO: 1343065 - DNA, 15 bp, Homo sapiens
tacaatcaatgatat

SEQ ID NO: 1343066 - DNA, 15 bp, Homo sapiens
atacaatcaatgata

SEQ ID NO: 1343067 - DNA, 15 bp, Homo sapiens
catacaatcaatgat

SEQ ID NO: 1343068 - DNA, 15 bp, Homo sapiens
acatacaatcaatga

SEQ ID NO: 1343069 - DNA, 15 bp, Homo sapiens
cacatacaatcaatg

SEQ ID NO: 1343070 - DNA, 15 bp, Homo sapiens
tcacatacaatcaat

SEQ ID NO: 1343071 - DNA, 15 bp, Homo sapiens
atcacatacaatcaa

SEQ ID NO: 1343072 - DNA, 15 bp, Homo sapiens
aatcacatacaatca

SEQ ID NO: 1343073 - DNA, 15 bp, Homo sapiens
taatcacatacaatc

SEQ ID NO: 1343074 - DNA, 15 bp, Homo sapiens
ataatcacatacaat

SEQ ID NO: 1343075 - DNA, 15 bp, Homo sapiens
aataatcacatacaa

SEQ ID NO: 1343076 - DNA, 15 bp, Homo sapiens
caataatcacataca

SEQ ID NO: 1343077 - DNA, 15 bp, Homo sapiens
tcaataatcacatac

SEQ ID NO: 1343078 - DNA, 15 bp, Homo sapiens
ctcaataatcacata

SEQ ID NO: 1343079 - DNA, 15 bp, Homo sapiens
tctcaataatcacat

SEQ ID NO: 1343080 - DNA, 15 bp, Homo sapiens
ttctcaataatcaca

SEQ ID NO: 1343081 - DNA, 15 bp, Homo sapiens
attctcaataatcac

SEQ ID NO: 1343082 - DNA, 15 bp, Homo sapiens
aattctcaataatca

SEQ ID NO: 1343083 - DNA, 15 bp, Homo sapiens
taattctcaataatc

SEQ ID NO: 1343084 - DNA, 15 bp, Homo sapiens
ttaattctcaataat

SEQ ID NO: 1343085 - DNA, 15 bp, Homo sapiens
gttaattctcaataa

SEQ ID NO: 1343086 - DNA, 15 bp, Homo sapiens
agttaattctcaata

SEQ ID NO: 1343087 - DNA, 15 bp, Homo sapiens
aagttaattctcaat

SEQ ID NO: 1343088 - DNA, 15 bp, Homo sapiens
caagttaattctcaa

SEQ ID NO: 1343089 - DNA, 15 bp, Homo sapiens
acaagttaattctca

SEQ ID NO: 1343090 - DNA, 15 bp, Homo sapiens
aacaagttaattctc

SEQ ID NO: 1343091 - DNA, 15 bp, Homo sapiens
aaacaagttaattct

SEQ ID NO: 1343092 - DNA, 15 bp, Homo sapiens
aaaacaagttaattc

SEQ ID NO: 1343093 - DNA, 15 bp, Homo sapiens
aaaaacaagttaatt

SEQ ID NO: 1343094 - DNA, 15 bp, Homo sapiens
aaaaaacaagttaat

SEQ ID NO: 1343095 - DNA, 15 bp, Homo sapiens
aaaaaaacaagttaa

SEQ ID NO: 1343096 - DNA, 15 bp, Homo sapiens
aaaaaaaacaagtta

SEQ ID NO: 1343097 - DNA, 15 bp, Homo sapiens
aaaaaaaaacaagtt

SEQ ID NO: 1343098 - DNA, 15 bp, Homo sapiens
aaaaaaaaaacaagt

SEQ ID NO: 1343099 - DNA, 15 bp, Homo sapiens
aaaaaaaaaaacaag

SEQ ID NO: 1343100 - DNA, 15 bp, Homo sapiens
aacaaaaaaaaaaaa

SEQ ID NO: 1343101 - DNA, 15 bp, Homo sapiens
caaaaaaaaaaaaca

SEQ ID NO: 1343102 - DNA, 15 bp, Homo sapiens
tcaaaaaaaaaaaac

SEQ ID NO: 1343103 - DNA, 15 bp, Homo sapiens
aactgtctcaaaaaa

SEQ ID NO: 1343104 - DNA, 15 bp, Homo sapiens
aaactgtctcaaaaa

SEQ ID NO: 1343105 - DNA, 15 bp, Homo sapiens
aaaactgtctcaaaa

SEQ ID NO: 1343106 - DNA, 15 bp, Homo sapiens
caaaactgtctcaaa

SEQ ID NO: 1343107 - DNA, 15 bp, Homo sapiens
gcaaaactgtctcaa

SEQ ID NO: 1343108 - DNA, 15 bp, Homo sapiens
agcaaaactgtctca

SEQ ID NO: 1343109 - DNA, 15 bp, Homo sapiens
gagcaaaactgtctc

SEQ ID NO: 1343110 - DNA, 15 bp, Homo sapiens
agagcaaaactgtct

SEQ ID NO: 1343111 - DNA, 15 bp, Homo sapiens
aagagcaaaactgtc

SEQ ID NO: 1343112 - DNA, 15 bp, Homo sapiens
caagagcaaaactgt

SEQ ID NO: 1343113 - DNA, 15 bp, Homo sapiens
acaagagcaaaactg

SEQ ID NO: 1343114 - DNA, 15 bp, Homo sapiens
gacaagagcaaaact

SEQ ID NO: 1343115 - DNA, 15 bp, Homo sapiens
tgacaagagcaaaac

SEQ ID NO: 1343116 - DNA, 15 bp, Homo sapiens
gtgacaagagcaaaa

SEQ ID NO: 1343117 - DNA, 15 bp, Homo sapiens
ggtgacaagagcaaa

SEQ ID NO: 1343118 - DNA, 15 bp, Homo sapiens
gggtgacaagagcaa

SEQ ID NO: 1343119 - DNA, 15 bp, Homo sapiens
tgggtgacaagagca

SEQ ID NO: 1343120 - DNA, 15 bp, Homo sapiens
ggcactccagcctgg

SEQ ID NO: 1343121 - DNA, 15 bp, Homo sapiens
cggcactccagcctg

SEQ ID NO: 1343122 - DNA, 15 bp, Homo sapiens
acggcactccagcct

SEQ ID NO: 1343123 - DNA, 15 bp, Homo sapiens
cacggcactccagcc

SEQ ID NO: 1343124 - DNA, 15 bp, Homo sapiens
ccacggcactccagc

SEQ ID NO: 1343125 - DNA, 15 bp, Homo sapiens
accacggcactccag

SEQ ID NO: 1343126 - DNA, 15 bp, Homo sapiens
caccacggcactcca

SEQ ID NO: 1343127 - DNA, 15 bp, Homo sapiens
tcaccacggcactcc

SEQ ID NO: 1343128 - DNA, 15 bp, Homo sapiens
ctcaccacggcactc

SEQ ID NO: 1343129 - DNA, 15 bp, Homo sapiens
tctcaccacggcact

SEQ ID NO: 1343130 - DNA, 15 bp, Homo sapiens
atctcaccacggcac

SEQ ID NO: 1343131 - DNA, 15 bp, Homo sapiens
gatctcaccacggca

SEQ ID NO: 1343132 - DNA, 15 bp, Homo sapiens
agatctcaccacggc

SEQ ID NO: 1343133 - DNA, 15 bp, Homo sapiens
gagatctcaccacgg

SEQ ID NO: 1343134 - DNA, 15 bp, Homo sapiens
cgagatctcaccacg

SEQ ID NO: 1343135 - DNA, 15 bp, Homo sapiens
ccgagatctcaccac

SEQ ID NO: 1343136 - DNA, 15 bp, Homo sapiens
gccgagatctcacca

SEQ ID NO: 1343137 - DNA, 15 bp, Homo sapiens
agccgagatctcacc

SEQ ID NO: 1343138 - DNA, 15 bp, Homo sapiens
gagccgagatctcac

SEQ ID NO: 1343139 - DNA, 15 bp, Homo sapiens
tgagccgagatctca

SEQ ID NO: 1343140 - DNA, 15 bp, Homo sapiens
gtgagccgagatctc

SEQ ID NO: 1343141 - DNA, 15 bp, Homo sapiens
agtgagccgagatct

SEQ ID NO: 1343142 - DNA, 15 bp, Homo sapiens
aaggttgtagtgagc

SEQ ID NO: 1343143 - DNA, 15 bp, Homo sapiens
gaaggttgtagtgag

SEQ ID NO: 1343144 - DNA, 15 bp, Homo sapiens
tgaaggttgtagtga

SEQ ID NO: 1343145 - DNA, 15 bp, Homo sapiens
gtgaaggttgtagtg

SEQ ID NO: 1343146 - DNA, 15 bp, Homo sapiens
ggtgaaggttgtagt

SEQ ID NO: 1343147 - DNA, 15 bp, Homo sapiens
aggtgaaggttgtag

SEQ ID NO: 1343148 - DNA, 15 bp, Homo sapiens
gaggtgaaggttgta

SEQ ID NO: 1343149 - DNA, 15 bp, Homo sapiens
ggaggtgaaggttgt

SEQ ID NO: 1343150 - DNA, 15 bp, Homo sapiens
gggaggtgaaggttg

SEQ ID NO: 1343151 - DNA, 15 bp, Homo sapiens
cgggaggtgaaggtt

SEQ ID NO: 1343152 - DNA, 15 bp, Homo sapiens
tcgggaggtgaaggt

SEQ ID NO: 1343153 - DNA, 15 bp, Homo sapiens
ctcgggaggtgaagg

SEQ ID NO: 1343154 - DNA, 15 bp, Homo sapiens
actcgggaggtgaag

SEQ ID NO: 1343155 - DNA, 15 bp, Homo sapiens
aactcgggaggtgaa

SEQ ID NO: 1343156 - DNA, 15 bp, Homo sapiens
gaactcgggaggtga

SEQ ID NO: 1343157 - DNA, 15 bp, Homo sapiens
tgaactcgggaggtg

SEQ ID NO: 1343158 - DNA, 15 bp, Homo sapiens
ttgaactcgggaggt

SEQ ID NO: 1343159 - DNA, 15 bp, Homo sapiens
cagaattgcttgaac

SEQ ID NO: 1343160 - DNA, 15 bp, Homo sapiens
gcagaattgcttgaa

SEQ ID NO: 1343161 - DNA, 15 bp, Homo sapiens
agcagaattgcttga

SEQ ID NO: 1343162 - DNA, 15 bp, Homo sapiens
cagcagaattgcttg

SEQ ID NO: 1343163 - DNA, 15 bp, Homo sapiens
gcagcagaattgctt

SEQ ID NO: 1343164 - DNA, 15 bp, Homo sapiens
ggcagcagaattgct

SEQ ID NO: 1343165 - DNA, 15 bp, Homo sapiens
aggcagcagaattgc

SEQ ID NO: 1343166 - DNA, 15 bp, Homo sapiens
gaggcagcagaattg

SEQ ID NO: 1343167 - DNA, 15 bp, Homo sapiens
tgaggcagcagaatt

SEQ ID NO: 1343168 - DNA, 15 bp, Homo sapiens
ctgaggcagcagaat

SEQ ID NO: 1343169 - DNA, 15 bp, Homo sapiens
actgaggcagcagaa

SEQ ID NO: 1343170 - DNA, 15 bp, Homo sapiens
gactgaggcagcaga

SEQ ID NO: 1343171 - DNA, 15 bp, Homo sapiens
agactgaggcagcag

SEQ ID NO: 1343172 - DNA, 15 bp, Homo sapiens
tagactgaggcagca

SEQ ID NO: 1343173 - DNA, 15 bp, Homo sapiens
gtagactgaggcagc

SEQ ID NO: 1343174 - DNA, 15 bp, Homo sapiens
agtagactgaggcag

SEQ ID NO: 1343175 - DNA, 15 bp, Homo sapiens
cagtagactgaggca

SEQ ID NO: 1343176 - DNA, 15 bp, Homo sapiens
tcagtagactgaggc

SEQ ID NO: 1343177 - DNA, 15 bp, Homo sapiens
ctcagtagactgagg

SEQ ID NO: 1343178 - DNA, 15 bp, Homo sapiens
actcagtagactgag

SEQ ID NO: 1343179 - DNA, 15 bp, Homo sapiens
tactcagtagactga

SEQ ID NO: 1343180 - DNA, 15 bp, Homo sapiens
ctactcagtagactg

SEQ ID NO: 1343181 - DNA, 15 bp, Homo sapiens
gctactcagtagact

SEQ ID NO: 1343182 - DNA, 15 bp, Homo sapiens
agctactcagtagac

SEQ ID NO: 1343183 - DNA, 15 bp, Homo sapiens
cagctactcagtaga

SEQ ID NO: 1343184 - DNA, 15 bp, Homo sapiens
ccagctactcagtag

SEQ ID NO: 1343185 - DNA, 15 bp, Homo sapiens
cccagctactcagta

SEQ ID NO: 1343186 - DNA, 15 bp, Homo sapiens
tcccagctactcagt

SEQ ID NO: 1343187 - DNA, 15 bp, Homo sapiens
ggcacctgtaatccc

SEQ ID NO: 1343188 - DNA, 15 bp, Homo sapiens
tgggcacctgtaatc

SEQ ID NO: 1343189 - DNA, 15 bp, Homo sapiens
atgggcacctgtaat

SEQ ID NO: 1343190 - DNA, 15 bp, Homo sapiens
gatgggcacctgtaa

SEQ ID NO: 1343191 - DNA, 15 bp, Homo sapiens
tgatgggcacctgta

SEQ ID NO: 1343192 - DNA, 15 bp, Homo sapiens
gtgatgggcacctgt

SEQ ID NO: 1343193 - DNA, 15 bp, Homo sapiens
ggtgatgggcacctg

SEQ ID NO: 1343194 - DNA, 15 bp, Homo sapiens
tggtgatgggcacct

SEQ ID NO: 1343195 - DNA, 15 bp, Homo sapiens
gtggtgatgggcacc

SEQ ID NO: 1343196 - DNA, 15 bp, Homo sapiens
cgtggtgatgggcac

SEQ ID NO: 1343197 - DNA, 15 bp, Homo sapiens
gcgtggtgatgggca

SEQ ID NO: 1343198 - DNA, 15 bp, Homo sapiens
ggcgtggtgatgggc

SEQ ID NO: 1343199 - DNA, 15 bp, Homo sapiens
gggcgtggtgatggg

SEQ ID NO: 1343200 - DNA, 15 bp, Homo sapiens
tgggcgtggtgatgg

SEQ ID NO: 1343201 - DNA, 15 bp, Homo sapiens
ctgggcgtggtgatg

SEQ ID NO: 1343202 - DNA, 15 bp, Homo sapiens
gctgggcgtggtgat

SEQ ID NO: 1343203 - DNA, 15 bp, Homo sapiens
agctgggcgtggtga

SEQ ID NO: 1343204 - DNA, 15 bp, Homo sapiens
gaaaaattagctggg

SEQ ID NO: 1343205 - DNA, 15 bp, Homo sapiens
agaaaaattagctgg

SEQ ID NO: 1343206 - DNA, 15 bp, Homo sapiens
tagaaaaattagctg

SEQ ID NO: 1343207 - DNA, 15 bp, Homo sapiens
ttagaaaaattagct

SEQ ID NO: 1343208 - DNA, 15 bp, Homo sapiens
attagaaaaattagc

SEQ ID NO: 1343209 - DNA, 15 bp, Homo sapiens
aattagaaaaattag

SEQ ID NO: 1343210 - DNA, 15 bp, Homo sapiens
aaattagaaaaatta

SEQ ID NO: 1343211 - DNA, 15 bp, Homo sapiens
aaaattagaaaaatt

SEQ ID NO: 1343212 - DNA, 15 bp, Homo sapiens
taaaattagaaaaat

SEQ ID NO: 1343213 - DNA, 15 bp, Homo sapiens
ctaaaattagaaaaa

SEQ ID NO: 1343214 - DNA, 15 bp, Homo sapiens
actaaaattagaaaa

SEQ ID NO: 1343215 - DNA, 15 bp, Homo sapiens
ctactaaaattagaa

SEQ ID NO: 1343216 - DNA, 15 bp, Homo sapiens
tctactaaaattaga

SEQ ID NO: 1343217 - DNA, 15 bp, Homo sapiens
ctctactaaaattag

SEQ ID NO: 1343218 - DNA, 15 bp, Homo sapiens
tctctactaaaatta

SEQ ID NO: 1343219 - DNA, 15 bp, Homo sapiens
gtctctactaaaatt

SEQ ID NO: 1343220 - DNA, 15 bp, Homo sapiens
cgtctctactaaaat

SEQ ID NO: 1343221 - DNA, 15 bp, Homo sapiens
taggcgggcggatca

SEQ ID NO: 1343222 - DNA, 15 bp, Homo sapiens
ctaggcgggcggatc

SEQ ID NO: 1343223 - DNA, 15 bp, Homo sapiens
cctaggcgggcggat

SEQ ID NO: 1343224 - DNA, 15 bp, Homo sapiens
gcctaggcgggcgga

SEQ ID NO: 1343225 - DNA, 15 bp, Homo sapiens
ggcctaggcgggcgg

SEQ ID NO: 1343226 - DNA, 15 bp, Homo sapiens
tggcctaggcgggcg

SEQ ID NO: 1343227 - DNA, 15 bp, Homo sapiens
ttggcctaggcgggc

SEQ ID NO: 1343228 - DNA, 15 bp, Homo sapiens
tttggcctaggcggg

SEQ ID NO: 1343229 - DNA, 15 bp, Homo sapiens
ctttggcctaggcgg

SEQ ID NO: 1343230 - DNA, 15 bp, Homo sapiens
actttggcctaggcg

SEQ ID NO: 1343231 - DNA, 15 bp, Homo sapiens
cactttggcctaggc

SEQ ID NO: 1343232 - DNA, 15 bp, Homo sapiens
gcactttggcctagg

SEQ ID NO: 1343233 - DNA, 15 bp, Homo sapiens
agcactttggcctag

SEQ ID NO: 1343234 - DNA, 15 bp, Homo sapiens
cagcactttggccta

SEQ ID NO: 1343235 - DNA, 15 bp, Homo sapiens
ccagcactttggcct

SEQ ID NO: 1343236 - DNA, 15 bp, Homo sapiens
cccagcactttggcc

SEQ ID NO: 1343237 - DNA, 15 bp, Homo sapiens
tcccagcactttggc

SEQ ID NO: 1343238 - DNA, 15 bp, Homo sapiens
actcacgcctgtaat

SEQ ID NO: 1343239 - DNA, 15 bp, Homo sapiens
gactcacgcctgtaa

SEQ ID NO: 1343240 - DNA, 15 bp, Homo sapiens
agactcacgcctgta

SEQ ID NO: 1343241 - DNA, 15 bp, Homo sapiens
gagactcacgcctgt

SEQ ID NO: 1343242 - DNA, 15 bp, Homo sapiens
ggagactcacgcctg

SEQ ID NO: 1343243 - DNA, 15 bp, Homo sapiens
gggagactcacgcct

SEQ ID NO: 1343244 - DNA, 15 bp, Homo sapiens
tgggagactcacgcc

SEQ ID NO: 1343245 - DNA, 15 bp, Homo sapiens
gtgggagactcacgc

SEQ ID NO: 1343246 - DNA, 15 bp, Homo sapiens
cgtgggagactcacg

SEQ ID NO: 1343247 - DNA, 15 bp, Homo sapiens
gcgtgggagactcac

SEQ ID NO: 1343248 - DNA, 15 bp, Homo sapiens
ggcgtgggagactca

SEQ ID NO: 1343249 - DNA, 15 bp, Homo sapiens
gggcgtgggagactc

SEQ ID NO: 1343250 - DNA, 15 bp, Homo sapiens
tgggcgtgggagact

SEQ ID NO: 1343251 - DNA, 15 bp, Homo sapiens
ctgggcgtgggagac

SEQ ID NO: 1343252 - DNA, 15 bp, Homo sapiens
gctgggcgtgggaga

SEQ ID NO: 1343253 - DNA, 15 bp, Homo sapiens
ggctgggcgtgggag

SEQ ID NO: 1343254 - DNA, 15 bp, Homo sapiens
gggctgggcgtggga

SEQ ID NO: 1343255 - DNA, 15 bp, Homo sapiens
agggctgggcgtggg

SEQ ID NO: 1343256 - DNA, 15 bp, Homo sapiens
taagggctgggcgtg

SEQ ID NO: 1343257 - DNA, 15 bp, Homo sapiens
ttaagggctgggcgt

SEQ ID NO: 1343258 - DNA, 15 bp, Homo sapiens
tttaagggctgggcg

SEQ ID NO: 1343259 - DNA, 15 bp, Homo sapiens
atttaagggctgggc

SEQ ID NO: 1343260 - DNA, 15 bp, Homo sapiens
aatttaagggctggg

SEQ ID NO: 1343261 - DNA, 15 bp, Homo sapiens
aaatttaagggctgg

SEQ ID NO: 1343262 - DNA, 15 bp, Homo sapiens
gaaatttaagggctg

SEQ ID NO: 1343263 - DNA, 15 bp, Homo sapiens
tgaaatttaagggct

SEQ ID NO: 1343264 - DNA, 15 bp, Homo sapiens
atgaaatttaagggc

SEQ ID NO: 1343265 - DNA, 15 bp, Homo sapiens
aatgaaatttaaggg

SEQ ID NO: 1343266 - DNA, 15 bp, Homo sapiens
aaatgaaatttaagg

SEQ ID NO: 1343267 - DNA, 15 bp, Homo sapiens
taaatgaaatttaag

SEQ ID NO: 1343268 - DNA, 15 bp, Homo sapiens
ctaaatgaaatttaa

SEQ ID NO: 1343269 - DNA, 15 bp, Homo sapiens
tctaaatgaaattta

SEQ ID NO: 1343270 - DNA, 15 bp, Homo sapiens
gtctaaatgaaattt

SEQ ID NO: 1343271 - DNA, 15 bp, Homo sapiens
agtctaaatgaaatt

SEQ ID NO: 1343272 - DNA, 15 bp, Homo sapiens
cagtctaaatgaaat

SEQ ID NO: 1343273 - DNA, 15 bp, Homo sapiens
ccagtctaaatgaaa

SEQ ID NO: 1343274 - DNA, 15 bp, Homo sapiens
tccagtctaaatgaa

SEQ ID NO: 1343275 - DNA, 15 bp, Homo sapiens
ttccagtctaaatga

SEQ ID NO: 1343276 - DNA, 15 bp, Homo sapiens
tttccagtctaaatg

SEQ ID NO: 1343277 - DNA, 15 bp, Homo sapiens
atttccagtctaaat

SEQ ID NO: 1343278 - DNA, 15 bp, Homo sapiens
aatttccagtctaaa

SEQ ID NO: 1343279 - DNA, 15 bp, Homo sapiens
aaatttccagtctaa

SEQ ID NO: 1343280 - DNA, 15 bp, Homo sapiens
gaaatttccagtcta

SEQ ID NO: 1343281 - DNA, 15 bp, Homo sapiens
tgaaatttccagtct

SEQ ID NO: 1343282 - DNA, 15 bp, Homo sapiens
ttgaaatttccagtc

SEQ ID NO: 1343283 - DNA, 15 bp, Homo sapiens
cttgaaatttccagt

SEQ ID NO: 1343284 - DNA, 15 bp, Homo sapiens
acttgaaatttccag

SEQ ID NO: 1343285 - DNA, 15 bp, Homo sapiens
tacttgaaatttcca

SEQ ID NO: 1343286 - DNA, 15 bp, Homo sapiens
ttacttgaaatttcc

SEQ ID NO: 1343287 - DNA, 15 bp, Homo sapiens
attacttgaaatttc

SEQ ID NO: 1343288 - DNA, 15 bp, Homo sapiens
cattacttgaaattt

SEQ ID NO: 1343289 - DNA, 15 bp, Homo sapiens
ccattacttgaaatt

SEQ ID NO: 1343290 - DNA, 15 bp, Homo sapiens
tccattacttgaaat

SEQ ID NO: 1343291 - DNA, 15 bp, Homo sapiens
ctccattacttgaaa

SEQ ID NO: 1343292 - DNA, 15 bp, Homo sapiens
tctccattacttgaa

SEQ ID NO: 1343293 - DNA, 15 bp, Homo sapiens
ctctccattacttga

SEQ ID NO: 1343294 - DNA, 15 bp, Homo sapiens
cctctccattacttg

SEQ ID NO: 1343295 - DNA, 15 bp, Homo sapiens
acctctccattactt

SEQ ID NO: 1343296 - DNA, 15 bp, Homo sapiens
cacctctccattact

SEQ ID NO: 1343297 - DNA, 15 bp, Homo sapiens
acacctctccattac

SEQ ID NO: 1343298 - DNA, 15 bp, Homo sapiens
cacacctctccatta

SEQ ID NO: 1343299 - DNA, 15 bp, Homo sapiens
acacacctctccatt

SEQ ID NO: 1343300 - DNA, 15 bp, Homo sapiens
aacacacctctccat

SEQ ID NO: 1343301 - DNA, 15 bp, Homo sapiens
taacacacctctcca

SEQ ID NO: 1343302 - DNA, 15 bp, Homo sapiens
ttaacacacctctcc

SEQ ID NO: 1343303 - DNA, 15 bp, Homo sapiens
cttaacacacctctc

SEQ ID NO: 1343304 - DNA, 15 bp, Homo sapiens
ccttaacacacctct

SEQ ID NO: 1343305 - DNA, 15 bp, Homo sapiens
tccttaacacacctc

SEQ ID NO: 1343306 - DNA, 15 bp, Homo sapiens
ttccttaacacacct

SEQ ID NO: 1343307 - DNA, 15 bp, Homo sapiens
cttccttaacacacc

SEQ ID NO: 1343308 - DNA, 15 bp, Homo sapiens
acttccttaacacac

SEQ ID NO: 1343309 - DNA, 15 bp, Homo sapiens
aacttccttaacaca

SEQ ID NO: 1343310 - DNA, 15 bp, Homo sapiens
taacttccttaacac

SEQ ID NO: 1343311 - DNA, 15 bp, Homo sapiens
ataacttccttaaca

SEQ ID NO: 1343312 - DNA, 15 bp, Homo sapiens
aataacttccttaac

SEQ ID NO: 1343313 - DNA, 15 bp, Homo sapiens
caataacttccttaa

SEQ ID NO: 1343314 - DNA, 15 bp, Homo sapiens
gcaataacttcctta

SEQ ID NO: 1343315 - DNA, 15 bp, Homo sapiens
agcaataacttcctt

SEQ ID NO: 1343316 - DNA, 15 bp, Homo sapiens
gagcaataacttcct

SEQ ID NO: 1343317 - DNA, 15 bp, Homo sapiens
agagcaataacttcc

SEQ ID NO: 1343318 - DNA, 15 bp, Homo sapiens
cagagcaataacttc

SEQ ID NO: 1343319 - DNA, 15 bp, Homo sapiens
acagagcaataactt

SEQ ID NO: 1343320 - DNA, 15 bp, Homo sapiens
aacagagcaataact

SEQ ID NO: 1343321 - DNA, 15 bp, Homo sapiens
taacagagcaataac

SEQ ID NO: 1343322 - DNA, 15 bp, Homo sapiens
ctaacagagcaataa

SEQ ID NO: 1343323 - DNA, 15 bp, Homo sapiens
tctaacagagcaata

SEQ ID NO: 1343324 - DNA, 15 bp, Homo sapiens
ctctaacagagcaat

SEQ ID NO: 1343325 - DNA, 15 bp, Homo sapiens
gctctaacagagcaa

SEQ ID NO: 1343326 - DNA, 15 bp, Homo sapiens
tgctctaacagagca

SEQ ID NO: 1343327 - DNA, 15 bp, Homo sapiens
ctgctctaacagagc

SEQ ID NO: 1343328 - DNA, 15 bp, Homo sapiens
actgctctaacagag

SEQ ID NO: 1343329 - DNA, 15 bp, Homo sapiens
aactgctctaacaga

SEQ ID NO: 1343330 - DNA, 15 bp, Homo sapiens
aaactgctctaacag

SEQ ID NO: 1343331 - DNA, 15 bp, Homo sapiens
gaaactgctctaaca

SEQ ID NO: 1343332 - DNA, 15 bp, Homo sapiens
agaaactgctctaac

SEQ ID NO: 1343333 - DNA, 15 bp, Homo sapiens
aagaaactgctctaa

SEQ ID NO: 1343334 - DNA, 15 bp, Homo sapiens
taagaaactgctcta

SEQ ID NO: 1343335 - DNA, 15 bp, Homo sapiens
ttaagaaactgctct

SEQ ID NO: 1343336 - DNA, 15 bp, Homo sapiens
tttaagaaactgctc

SEQ ID NO: 1343337 - DNA, 15 bp, Homo sapiens
atttaagaaactgct

SEQ ID NO: 1343338 - DNA, 15 bp, Homo sapiens
aatttaagaaactgc

SEQ ID NO: 1343339 - DNA, 15 bp, Homo sapiens
aaatttaagaaactg

SEQ ID NO: 1343340 - DNA, 15 bp, Homo sapiens
caaatttaagaaact

SEQ ID NO: 1343341 - DNA, 15 bp, Homo sapiens
ccaaatttaagaaac

SEQ ID NO: 1343342 - DNA, 15 bp, Homo sapiens
gccaaatttaagaaa

SEQ ID NO: 1343343 - DNA, 15 bp, Homo sapiens
tgccaaatttaagaa

SEQ ID NO: 1343344 - DNA, 15 bp, Homo sapiens
gtgccaaatttaaga

SEQ ID NO: 1343345 - DNA, 15 bp, Homo sapiens
agtgccaaatttaag

SEQ ID NO: 1343346 - DNA, 15 bp, Homo sapiens
tagtgccaaatttaa

SEQ ID NO: 1343347 - DNA, 15 bp, Homo sapiens
atagtgccaaattta

SEQ ID NO: 1343348 - DNA, 15 bp, Homo sapiens
aatagtgccaaattt

SEQ ID NO: 1343349 - DNA, 15 bp, Homo sapiens
caatagtgccaaatt

SEQ ID NO: 1343350 - DNA, 15 bp, Homo sapiens
tcaatagtgccaaat

SEQ ID NO: 1343351 - DNA, 15 bp, Homo sapiens
gtcaatagtgccaaa

SEQ ID NO: 1343352 - DNA, 15 bp, Homo sapiens
tgtcaatagtgccaa

SEQ ID NO: 1343353 - DNA, 15 bp, Homo sapiens
atgtcaatagtgcca

SEQ ID NO: 1343354 - DNA, 15 bp, Homo sapiens
aatgtcaatagtgcc

SEQ ID NO: 1343355 - DNA, 15 bp, Homo sapiens
aaatgtcaatagtgc

SEQ ID NO: 1343356 - DNA, 15 bp, Homo sapiens
aaaatgtcaatagtg

SEQ ID NO: 1343357 - DNA, 15 bp, Homo sapiens
caaaatgtcaatagt

SEQ ID NO: 1343358 - DNA, 15 bp, Homo sapiens
ccaaaatgtcaatag

SEQ ID NO: 1343359 - DNA, 15 bp, Homo sapiens
cccaaaatgtcaata

SEQ ID NO: 1343360 - DNA, 15 bp, Homo sapiens
gcccaaaatgtcaat

SEQ ID NO: 1343361 - DNA, 15 bp, Homo sapiens
agcccaaaatgtcaa

SEQ ID NO: 1343362 - DNA, 15 bp, Homo sapiens
cagcccaaaatgtca

SEQ ID NO: 1343363 - DNA, 15 bp, Homo sapiens
ccagcccaaaatgtc

SEQ ID NO: 1343364 - DNA, 15 bp, Homo sapiens
tccagcccaaaatgt

SEQ ID NO: 1343365 - DNA, 15 bp, Homo sapiens
atccagcccaaaatg

SEQ ID NO: 1343366 - DNA, 15 bp, Homo sapiens
aatccagcccaaaat

SEQ ID NO: 1343367 - DNA, 15 bp, Homo sapiens
aaatccagcccaaaa

SEQ ID NO: 1343368 - DNA, 15 bp, Homo sapiens
aaaatccagcccaaa

SEQ ID NO: 1343369 - DNA, 15 bp, Homo sapiens
aaaaatccagcccaa

SEQ ID NO: 1343370 - DNA, 15 bp, Homo sapiens
gaaaaatccagccca

SEQ ID NO: 1343371 - DNA, 15 bp, Homo sapiens
agaaaaatccagccc

SEQ ID NO: 1343372 - DNA, 15 bp, Homo sapiens
aagaaaaatccagcc

SEQ ID NO: 1343373 - DNA, 15 bp, Homo sapiens
aaagaaaaatccagc

SEQ ID NO: 1343374 - DNA, 15 bp, Homo sapiens
aaaagaaaaatccag

SEQ ID NO: 1343375 - DNA, 15 bp, Homo sapiens
aaaaagaaaaatcca

SEQ ID NO: 1343376 - DNA, 15 bp, Homo sapiens
caaaaagaaaaatcc

SEQ ID NO: 1343377 - DNA, 15 bp, Homo sapiens
acaaaaagaaaaatc

SEQ ID NO: 1343378 - DNA, 15 bp, Homo sapiens
aacaaaaagaaaaat

SEQ ID NO: 1343379 - DNA, 15 bp, Homo sapiens
aaacaaaaagaaaaa

SEQ ID NO: 1343380 - DNA, 15 bp, Homo sapiens
gaaacaaaaagaaaa

SEQ ID NO: 1343381 - DNA, 15 bp, Homo sapiens
agaaacaaaaagaaa

SEQ ID NO: 1343382 - DNA, 15 bp, Homo sapiens
cagaaacaaaaagaa

SEQ ID NO: 1343383 - DNA, 15 bp, Homo sapiens
tcagaaacaaaaaga

SEQ ID NO: 1343384 - DNA, 15 bp, Homo sapiens
ctcagaaacaaaaag

SEQ ID NO: 1343385 - DNA, 15 bp, Homo sapiens
tctcagaaacaaaaa

SEQ ID NO: 1343386 - DNA, 15 bp, Homo sapiens
atctcagaaacaaaa

SEQ ID NO: 1343387 - DNA, 15 bp, Homo sapiens
tatctcagaaacaaa

SEQ ID NO: 1343388 - DNA, 15 bp, Homo sapiens
ctatctcagaaacaa

SEQ ID NO: 1343389 - DNA, 15 bp, Homo sapiens
actatctcagaaaca

SEQ ID NO: 1343390 - DNA, 15 bp, Homo sapiens
aactatctcagaaac

SEQ ID NO: 1343391 - DNA, 15 bp, Homo sapiens
aaactatctcagaaa

SEQ ID NO: 1343392 - DNA, 15 bp, Homo sapiens
gaaactatctcagaa

SEQ ID NO: 1343393 - DNA, 15 bp, Homo sapiens
tgaaactatctcaga

SEQ ID NO: 1343394 - DNA, 15 bp, Homo sapiens
gtgaaactatctcag

SEQ ID NO: 1343395 - DNA, 15 bp, Homo sapiens
agtgaaactatctca

SEQ ID NO: 1343396 - DNA, 15 bp, Homo sapiens
gagtgaaactatctc

SEQ ID NO: 1343397 - DNA, 15 bp, Homo sapiens
agagtgaaactatct

SEQ ID NO: 1343398 - DNA, 15 bp, Homo sapiens
cagagtgaaactatc

SEQ ID NO: 1343399 - DNA, 15 bp, Homo sapiens
acagagtgaaactat

SEQ ID NO: 1343400 - DNA, 15 bp, Homo sapiens
gacagagtgaaacta

SEQ ID NO: 1343401 - DNA, 15 bp, Homo sapiens
cgacagagtgaaact

SEQ ID NO: 1343402 - DNA, 15 bp, Homo sapiens
tcgacagagtgaaac

SEQ ID NO: 1343403 - DNA, 15 bp, Homo sapiens
ctcgacagagtgaaa

SEQ ID NO: 1343404 - DNA, 15 bp, Homo sapiens
gctcgacagagtgaa

SEQ ID NO: 1343405 - DNA, 15 bp, Homo sapiens
ggctcgacagagtga

SEQ ID NO: 1343406 - DNA, 15 bp, Homo sapiens
tggctcgacagagtg

SEQ ID NO: 1343407 - DNA, 15 bp, Homo sapiens
atggctcgacagagt

SEQ ID NO: 1343408 - DNA, 15 bp, Homo sapiens
gatggctcgacagag

SEQ ID NO: 1343409 - DNA, 15 bp, Homo sapiens
tgatggctcgacaga

SEQ ID NO: 1343410 - DNA, 15 bp, Homo sapiens
gtgatggctcgacag

SEQ ID NO: 1343411 - DNA, 15 bp, Homo sapiens
tgtgatggctcgaca

SEQ ID NO: 1343412 - DNA, 15 bp, Homo sapiens
ctgtgatggctcgac

SEQ ID NO: 1343413 - DNA, 15 bp, Homo sapiens
gctgtgatggctcga

SEQ ID NO: 1343414 - DNA, 15 bp, Homo sapiens
agctgtgatggctcg

SEQ ID NO: 1343415 - DNA, 15 bp, Homo sapiens
gagctgtgatggctc

SEQ ID NO: 1343416 - DNA, 15 bp, Homo sapiens
cgagctgtgatggct

SEQ ID NO: 1343417 - DNA, 15 bp, Homo sapiens
acgagctgtgatggc

SEQ ID NO: 1343418 - DNA, 15 bp, Homo sapiens
aacgagctgtgatgg

SEQ ID NO: 1343419 - DNA, 15 bp, Homo sapiens
caacgagctgtgatg

SEQ ID NO: 1343420 - DNA, 15 bp, Homo sapiens
gcaacgagctgtgat

SEQ ID NO: 1343421 - DNA, 15 bp, Homo sapiens
tgcaacgagctgtga

SEQ ID NO: 1343422 - DNA, 15 bp, Homo sapiens
ctgcaacgagctgtg

SEQ ID NO: 1343423 - DNA, 15 bp, Homo sapiens
gctgcaacgagctgt

SEQ ID NO: 1343424 - DNA, 15 bp, Homo sapiens
ggctgcaacgagctg

SEQ ID NO: 1343425 - DNA, 15 bp, Homo sapiens
aggctgcaacgagct

SEQ ID NO: 1343426 - DNA, 15 bp, Homo sapiens
aaggctgcaacgagc

SEQ ID NO: 1343427 - DNA, 15 bp, Homo sapiens
caaggctgcaacgag

SEQ ID NO: 1343428 - DNA, 15 bp, Homo sapiens
tcaaggctgcaacga

SEQ ID NO: 1343429 - DNA, 15 bp, Homo sapiens
ttcaaggctgcaacg

SEQ ID NO: 1343430 - DNA, 15 bp, Homo sapiens
gttcaaggctgcaac

SEQ ID NO: 1343431 - DNA, 15 bp, Homo sapiens
agttcaaggctgcaa

SEQ ID NO: 1343432 - DNA, 15 bp, Homo sapiens
ggagcccaggagttc

SEQ ID NO: 1343433 - DNA, 15 bp, Homo sapiens
aggagcccaggagtt

SEQ ID NO: 1343434 - DNA, 15 bp, Homo sapiens
aaggagcccaggagt

SEQ ID NO: 1343435 - DNA, 15 bp, Homo sapiens
caaggagcccaggag

SEQ ID NO: 1343436 - DNA, 15 bp, Homo sapiens
tcaaggagcccagga

SEQ ID NO: 1343437 - DNA, 15 bp, Homo sapiens
ttcaaggagcccagg

SEQ ID NO: 1343438 - DNA, 15 bp, Homo sapiens
gttcaaggagcccag

SEQ ID NO: 1343439 - DNA, 15 bp, Homo sapiens
tgttcaaggagccca

SEQ ID NO: 1343440 - DNA, 15 bp, Homo sapiens
ctgttcaaggagccc

SEQ ID NO: 1343441 - DNA, 15 bp, Homo sapiens
cctgttcaaggagcc

SEQ ID NO: 1343442 - DNA, 15 bp, Homo sapiens
tcctgttcaaggagc

SEQ ID NO: 1343443 - DNA, 15 bp, Homo sapiens
ctcctgttcaaggag

SEQ ID NO: 1343444 - DNA, 15 bp, Homo sapiens
cctcctgttcaagga

SEQ ID NO: 1343445 - DNA, 15 bp, Homo sapiens
gcctcctgttcaagg

SEQ ID NO: 1343446 - DNA, 15 bp, Homo sapiens
agcctcctgttcaag

SEQ ID NO: 1343447 - DNA, 15 bp, Homo sapiens
gagcctcctgttcaa

SEQ ID NO: 1343448 - DNA, 15 bp, Homo sapiens
ggagcctcctgttca

SEQ ID NO: 1343449 - DNA, 15 bp, Homo sapiens
aggagcctcctgttc

SEQ ID NO: 1343450 - DNA, 15 bp, Homo sapiens
caggagcctcctgtt

SEQ ID NO: 1343451 - DNA, 15 bp, Homo sapiens
gcaggagcctcctgt

SEQ ID NO: 1343452 - DNA, 15 bp, Homo sapiens
ggcaggagcctcctg

SEQ ID NO: 1343453 - DNA, 15 bp, Homo sapiens
aggcaggagcctcct

SEQ ID NO: 1343454 - DNA, 15 bp, Homo sapiens
caggcaggagcctcc

SEQ ID NO: 1343455 - DNA, 15 bp, Homo sapiens
tcaggcaggagcctc

SEQ ID NO: 1343456 - DNA, 15 bp, Homo sapiens
ctcaggcaggagcct

SEQ ID NO: 1343457 - DNA, 15 bp, Homo sapiens
gctcaggcaggagcc

SEQ ID NO: 1343458 - DNA, 15 bp, Homo sapiens
ggctcaggcaggagc

SEQ ID NO: 1343459 - DNA, 15 bp, Homo sapiens
gaggctcaggcagga

SEQ ID NO: 1343460 - DNA, 15 bp, Homo sapiens
ggaggctcaggcagg

SEQ ID NO: 1343461 - DNA, 15 bp, Homo sapiens
aggaggctcaggcag

SEQ ID NO: 1343462 - DNA, 15 bp, Homo sapiens
caggaggctcaggca

SEQ ID NO: 1343463 - DNA, 15 bp, Homo sapiens
tcaggaggctcaggc

SEQ ID NO: 1343464 - DNA, 15 bp, Homo sapiens
ctcaggaggctcagg

SEQ ID NO: 1343465 - DNA, 15 bp, Homo sapiens
actcaggaggctcag

SEQ ID NO: 1343466 - DNA, 15 bp, Homo sapiens
tactcaggaggctca

SEQ ID NO: 1343467 - DNA, 15 bp, Homo sapiens
ctactcaggaggctc

SEQ ID NO: 1343468 - DNA, 15 bp, Homo sapiens
ggtctcagctactca

SEQ ID NO: 1343469 - DNA, 15 bp, Homo sapiens
tggtctcagctactc

SEQ ID NO: 1343470 - DNA, 15 bp, Homo sapiens
atggtctcagctact

SEQ ID NO: 1343471 - DNA, 15 bp, Homo sapiens
tatggtctcagctac

SEQ ID NO: 1343472 - DNA, 15 bp, Homo sapiens
ctatggtctcagcta

SEQ ID NO: 1343473 - DNA, 15 bp, Homo sapiens
cctatggtctcagct

SEQ ID NO: 1343474 - DNA, 15 bp, Homo sapiens
gcctatggtctcagc

SEQ ID NO: 1343475 - DNA, 15 bp, Homo sapiens
tgcctatggtctcag

SEQ ID NO: 1343476 - DNA, 15 bp, Homo sapiens
gtgcctatggtctca

SEQ ID NO: 1343477 - DNA, 15 bp, Homo sapiens
cgtgcctatggtctc

SEQ ID NO: 1343478 - DNA, 15 bp, Homo sapiens
acgtgcctatggtct

SEQ ID NO: 1343479 - DNA, 15 bp, Homo sapiens
tacgtgcctatggtc

SEQ ID NO: 1343480 - DNA, 15 bp, Homo sapiens
gtacgtgcctatggt

SEQ ID NO: 1343481 - DNA, 15 bp, Homo sapiens
ggtacgtgcctatgg

SEQ ID NO: 1343482 - DNA, 15 bp, Homo sapiens
tggtacgtgcctatg

SEQ ID NO: 1343483 - DNA, 15 bp, Homo sapiens
atggtacgtgcctat

SEQ ID NO: 1343484 - DNA, 15 bp, Homo sapiens
tatggtacgtgccta

SEQ ID NO: 1343485 - DNA, 15 bp, Homo sapiens
atatggtacgtgcct

SEQ ID NO: 1343486 - DNA, 15 bp, Homo sapiens
tatatggtacgtgcc

SEQ ID NO: 1343487 - DNA, 15 bp, Homo sapiens
gtatatggtacgtgc

SEQ ID NO: 1343488 - DNA, 15 bp, Homo sapiens
ggtatatggtacgtg

SEQ ID NO: 1343489 - DNA, 15 bp, Homo sapiens
aggtatatggtacgt

SEQ ID NO: 1343490 - DNA, 15 bp, Homo sapiens
taggtatatggtacg

SEQ ID NO: 1343491 - DNA, 15 bp, Homo sapiens
ctaggtatatggtac

SEQ ID NO: 1343492 - DNA, 15 bp, Homo sapiens
gctaggtatatggta

SEQ ID NO: 1343493 - DNA, 15 bp, Homo sapiens
agctaggtatatggt

SEQ ID NO: 1343494 - DNA, 15 bp, Homo sapiens
tagctaggtatatgg

SEQ ID NO: 1343495 - DNA, 15 bp, Homo sapiens
ttagctaggtatatg

SEQ ID NO: 1343496 - DNA, 15 bp, Homo sapiens
tttagctaggtatat

SEQ ID NO: 1343497 - DNA, 15 bp, Homo sapiens
atttagctaggtata

SEQ ID NO: 1343498 - DNA, 15 bp, Homo sapiens
catttagctaggtat

SEQ ID NO: 1343499 - DNA, 15 bp, Homo sapiens
acatttagctaggta

SEQ ID NO: 1343500 - DNA, 15 bp, Homo sapiens
cacatttagctaggt

SEQ ID NO: 1343501 - DNA, 15 bp, Homo sapiens
acacatttagctagg

SEQ ID NO: 1343502 - DNA, 15 bp, Homo sapiens
aacacatttagctag

SEQ ID NO: 1343503 - DNA, 15 bp, Homo sapiens
aaacacatttagcta

SEQ ID NO: 1343504 - DNA, 15 bp, Homo sapiens
caaaaacacatttag

SEQ ID NO: 1343505 - DNA, 15 bp, Homo sapiens
tcaaaaacacattta

SEQ ID NO: 1343506 - DNA, 15 bp, Homo sapiens
gtcaaaaacacattt

SEQ ID NO: 1343507 - DNA, 15 bp, Homo sapiens
agtcaaaaacacatt

SEQ ID NO: 1343508 - DNA, 15 bp, Homo sapiens
aagtcaaaaacacat

SEQ ID NO: 1343509 - DNA, 15 bp, Homo sapiens
aaagtcaaaaacaca

SEQ ID NO: 1343510 - DNA, 15 bp, Homo sapiens
gaaagtcaaaaacac

SEQ ID NO: 1343511 - DNA, 15 bp, Homo sapiens
agaaagtcaaaaaca

SEQ ID NO: 1343512 - DNA, 15 bp, Homo sapiens
aagaaagtcaaaaac

SEQ ID NO: 1343513 - DNA, 15 bp, Homo sapiens
aaagaaagtcaaaaa

SEQ ID NO: 1343514 - DNA, 15 bp, Homo sapiens
aaaagaaagtcaaaa

SEQ ID NO: 1343515 - DNA, 15 bp, Homo sapiens
aaaaagaaagtcaaa

SEQ ID NO: 1343516 - DNA, 15 bp, Homo sapiens
aaaaaagaaagtcaa

SEQ ID NO: 1343517 - DNA, 15 bp, Homo sapiens
gaaaaaagaaagtca

SEQ ID NO: 1343518 - DNA, 15 bp, Homo sapiens
agaaaaaagaaagtc

SEQ ID NO: 1343519 - DNA, 15 bp, Homo sapiens
aagaaaaaagaaagt

SEQ ID NO: 1343520 - DNA, 15 bp, Homo sapiens
caaagaaaaaagaaa

SEQ ID NO: 1343521 - DNA, 15 bp, Homo sapiens
acaaagaaaaaagaa

SEQ ID NO: 1343522 - DNA, 15 bp, Homo sapiens
tacaaagaaaaaaga

SEQ ID NO: 1343523 - DNA, 15 bp, Homo sapiens
ctacaaagaaaaaag

SEQ ID NO: 1343524 - DNA, 15 bp, Homo sapiens
tctacaaagaaaaaa

SEQ ID NO: 1343525 - DNA, 15 bp, Homo sapiens
ctctacaaagaaaaa

SEQ ID NO: 1343526 - DNA, 15 bp, Homo sapiens
actctacaaagaaaa

SEQ ID NO: 1343527 - DNA, 15 bp, Homo sapiens
gactctacaaagaaa

SEQ ID NO: 1343528 - DNA, 15 bp, Homo sapiens
tgactctacaaagaa

SEQ ID NO: 1343529 - DNA, 15 bp, Homo sapiens
ttgactctacaaaga

SEQ ID NO: 1343530 - DNA, 15 bp, Homo sapiens
cttgactctacaaag

SEQ ID NO: 1343531 - DNA, 15 bp, Homo sapiens
acttgactctacaaa

SEQ ID NO: 1343532 - DNA, 15 bp, Homo sapiens
aacttgactctacaa

SEQ ID NO: 1343533 - DNA, 15 bp, Homo sapiens
gaacttgactctaca

SEQ ID NO: 1343534 - DNA, 15 bp, Homo sapiens
agaacttgactctac

SEQ ID NO: 1343535 - DNA, 15 bp, Homo sapiens
gagaacttgactcta

SEQ ID NO: 1343536 - DNA, 15 bp, Homo sapiens
tgagaacttgactct

SEQ ID NO: 1343537 - DNA, 15 bp, Homo sapiens
gtgagaacttgactc

SEQ ID NO: 1343538 - DNA, 15 bp, Homo sapiens
agtgagaacttgact

SEQ ID NO: 1343539 - DNA, 15 bp, Homo sapiens
tagtgagaacttgac

SEQ ID NO: 1343540 - DNA, 15 bp, Homo sapiens
atagtgagaacttga

SEQ ID NO: 1343541 - DNA, 15 bp, Homo sapiens
catagtgagaacttg

SEQ ID NO: 1343542 - DNA, 15 bp, Homo sapiens
acatagtgagaactt

SEQ ID NO: 1343543 - DNA, 15 bp, Homo sapiens
aacatagtgagaact

SEQ ID NO: 1343544 - DNA, 15 bp, Homo sapiens
caacatagtgagaac

SEQ ID NO: 1343545 - DNA, 15 bp, Homo sapiens
acaacatagtgagaa

SEQ ID NO: 1343546 - DNA, 15 bp, Homo sapiens
gacaacatagtgaga

SEQ ID NO: 1343547 - DNA, 15 bp, Homo sapiens
ggacaacatagtgag

SEQ ID NO: 1343548 - DNA, 15 bp, Homo sapiens
tggacaacatagtga

SEQ ID NO: 1343549 - DNA, 15 bp, Homo sapiens
ctggacaacatagtg

SEQ ID NO: 1343550 - DNA, 15 bp, Homo sapiens
cctggacaacatagt

SEQ ID NO: 1343551 - DNA, 15 bp, Homo sapiens
gcctggacaacatag

SEQ ID NO: 1343552 - DNA, 15 bp, Homo sapiens
agcctggacaacata

SEQ ID NO: 1343553 - DNA, 15 bp, Homo sapiens
cagcctggacaacat

SEQ ID NO: 1343554 - DNA, 15 bp, Homo sapiens
accagcctggacaac

SEQ ID NO: 1343555 - DNA, 15 bp, Homo sapiens
gaccagcctggacaa

SEQ ID NO: 1343556 - DNA, 15 bp, Homo sapiens
agaccagcctggaca

SEQ ID NO: 1343557 - DNA, 15 bp, Homo sapiens
aagaccagcctggac

SEQ ID NO: 1343558 - DNA, 15 bp, Homo sapiens
caagaccagcctgga

SEQ ID NO: 1343559 - DNA, 15 bp, Homo sapiens
tttcaagaccagcct

SEQ ID NO: 1343560 - DNA, 15 bp, Homo sapiens
atttcaagaccagcc

SEQ ID NO: 1343561 - DNA, 15 bp, Homo sapiens
gatttcaagaccagc

SEQ ID NO: 1343562 - DNA, 15 bp, Homo sapiens
ggatttcaagaccag

SEQ ID NO: 1343563 - DNA, 15 bp, Homo sapiens
aggatttcaagacca

SEQ ID NO: 1343564 - DNA, 15 bp, Homo sapiens
caggatttcaagacc

SEQ ID NO: 1343565 - DNA, 15 bp, Homo sapiens
ccaggatttcaagac

SEQ ID NO: 1343566 - DNA, 15 bp, Homo sapiens
cccaggatttcaaga

SEQ ID NO: 1343567 - DNA, 15 bp, Homo sapiens
acccaggatttcaag

SEQ ID NO: 1343568 - DNA, 15 bp, Homo sapiens
aacccaggatttcaa

SEQ ID NO: 1343569 - DNA, 15 bp, Homo sapiens
gaacccaggatttca

SEQ ID NO: 1343570 - DNA, 15 bp, Homo sapiens
ggaacccaggatttc

SEQ ID NO: 1343571 - DNA, 15 bp, Homo sapiens
tggaacccaggattt

SEQ ID NO: 1343572 - DNA, 15 bp, Homo sapiens
ctggaacccaggatt

SEQ ID NO: 1343573 - DNA, 15 bp, Homo sapiens
gctggaacccaggat

SEQ ID NO: 1343574 - DNA, 15 bp, Homo sapiens
tgctggaacccagga

SEQ ID NO: 1343575 - DNA, 15 bp, Homo sapiens
ttgctggaacccagg

SEQ ID NO: 1343576 - DNA, 15 bp, Homo sapiens
attgctggaacccag

SEQ ID NO: 1343577 - DNA, 15 bp, Homo sapiens
aattgctggaaccca

SEQ ID NO: 1343578 - DNA, 15 bp, Homo sapiens
agcaggagaattgct

SEQ ID NO: 1343579 - DNA, 15 bp, Homo sapiens
aagcaggagaattgc

SEQ ID NO: 1343580 - DNA, 15 bp, Homo sapiens
taagcaggagaattg

SEQ ID NO: 1343581 - DNA, 15 bp, Homo sapiens
ctaagcaggagaatt

SEQ ID NO: 1343582 - DNA, 15 bp, Homo sapiens
gctaagcaggagaat

SEQ ID NO: 1343583 - DNA, 15 bp, Homo sapiens
ggctaagcaggagaa

SEQ ID NO: 1343584 - DNA, 15 bp, Homo sapiens
aggctaagcaggaga

SEQ ID NO: 1343585 - DNA, 15 bp, Homo sapiens
aaggctaagcaggag

SEQ ID NO: 1343586 - DNA, 15 bp, Homo sapiens
taaggctaagcagga

SEQ ID NO: 1343587 - DNA, 15 bp, Homo sapiens
gtaaggctaagcagg

SEQ ID NO: 1343588 - DNA, 15 bp, Homo sapiens
tgtaaggctaagcag

SEQ ID NO: 1343589 - DNA, 15 bp, Homo sapiens
ctgtaaggctaagca

SEQ ID NO: 1343590 - DNA, 15 bp, Homo sapiens
tctgtaaggctaagc

SEQ ID NO: 1343591 - DNA, 15 bp, Homo sapiens
ctctgtaaggctaag

SEQ ID NO: 1343592 - DNA, 15 bp, Homo sapiens
actctgtaaggctaa

SEQ ID NO: 1343593 - DNA, 15 bp, Homo sapiens
cactctgtaaggcta

SEQ ID NO: 1343594 - DNA, 15 bp, Homo sapiens
acactctgtaaggct

SEQ ID NO: 1343595 - DNA, 15 bp, Homo sapiens
gacactctgtaaggc

SEQ ID NO: 1343596 - DNA, 15 bp, Homo sapiens
cgacactctgtaagg

SEQ ID NO: 1343597 - DNA, 15 bp, Homo sapiens
ccgacactctgtaag

SEQ ID NO: 1343598 - DNA, 15 bp, Homo sapiens
cccgacactctgtaa

SEQ ID NO: 1343599 - DNA, 15 bp, Homo sapiens
tcccgacactctgta

SEQ ID NO: 1343600 - DNA, 15 bp, Homo sapiens
atcccgacactctgt

SEQ ID NO: 1343601 - DNA, 15 bp, Homo sapiens
aatcccgacactctg

SEQ ID NO: 1343602 - DNA, 15 bp, Homo sapiens
caatcccgacactct

SEQ ID NO: 1343603 - DNA, 15 bp, Homo sapiens
acaatcccgacactc

SEQ ID NO: 1343604 - DNA, 15 bp, Homo sapiens
tacaatcccgacact

SEQ ID NO: 1343605 - DNA, 15 bp, Homo sapiens
ctacaatcccgacac

SEQ ID NO: 1343606 - DNA, 15 bp, Homo sapiens
cctacaatcccgaca

SEQ ID NO: 1343607 - DNA, 15 bp, Homo sapiens
gcctacaatcccgac

SEQ ID NO: 1343608 - DNA, 15 bp, Homo sapiens
tgcctacaatcccga

SEQ ID NO: 1343609 - DNA, 15 bp, Homo sapiens
atgcctacaatcccg

SEQ ID NO: 1343610 - DNA, 15 bp, Homo sapiens
tatgcctacaatccc

SEQ ID NO: 1343611 - DNA, 15 bp, Homo sapiens
ctatgcctacaatcc

SEQ ID NO: 1343612 - DNA, 15 bp, Homo sapiens
cctatgcctacaatc

SEQ ID NO: 1343613 - DNA, 15 bp, Homo sapiens
gcctatgcctacaat

SEQ ID NO: 1343614 - DNA, 15 bp, Homo sapiens
ggcctatgcctacaa

SEQ ID NO: 1343615 - DNA, 15 bp, Homo sapiens
tggcctatgcctaca

SEQ ID NO: 1343616 - DNA, 15 bp, Homo sapiens
gtggcctatgcctac

SEQ ID NO: 1343617 - DNA, 15 bp, Homo sapiens
agtggcctatgccta

SEQ ID NO: 1343618 - DNA, 15 bp, Homo sapiens
cagtggcctatgcct

SEQ ID NO: 1343619 - DNA, 15 bp, Homo sapiens
gcagtggcctatgcc

SEQ ID NO: 1343620 - DNA, 15 bp, Homo sapiens
tgcagtggcctatgc

SEQ ID NO: 1343621 - DNA, 15 bp, Homo sapiens
gtgcagtggcctatg

SEQ ID NO: 1343622 - DNA, 15 bp, Homo sapiens
ggtgcagtggcctat

SEQ ID NO: 1343623 - DNA, 15 bp, Homo sapiens
gggtgcagtggccta

SEQ ID NO: 1343624 - DNA, 15 bp, Homo sapiens
cgggtgcagtggcct

SEQ ID NO: 1343625 - DNA, 15 bp, Homo sapiens
ccgggtgcagtggcc

SEQ ID NO: 1343626 - DNA, 15 bp, Homo sapiens
aggccgggtgcagtg

SEQ ID NO: 1343627 - DNA, 15 bp, Homo sapiens
aaggccgggtgcagt

SEQ ID NO: 1343628 - DNA, 15 bp, Homo sapiens
caaggccgggtgcag

SEQ ID NO: 1343629 - DNA, 15 bp, Homo sapiens
ccaaggccgggtgca

SEQ ID NO: 1343630 - DNA, 15 bp, Homo sapiens
cccaaggccgggtgc

SEQ ID NO: 1343631 - DNA, 15 bp, Homo sapiens
gcccaaggccgggtg

SEQ ID NO: 1343632 - DNA, 15 bp, Homo sapiens
agcccaaggccgggt

SEQ ID NO: 1343633 - DNA, 15 bp, Homo sapiens
cagcccaaggccggg

SEQ ID NO: 1343634 - DNA, 15 bp, Homo sapiens
tcagcccaaggccgg

SEQ ID NO: 1343635 - DNA, 15 bp, Homo sapiens
atcagcccaaggccg

SEQ ID NO: 1343636 - DNA, 15 bp, Homo sapiens
tatcagcccaaggcc

SEQ ID NO: 1343637 - DNA, 15 bp, Homo sapiens
atatcagcccaaggc

SEQ ID NO: 1343638 - DNA, 15 bp, Homo sapiens
aatatcagcccaagg

SEQ ID NO: 1343639 - DNA, 15 bp, Homo sapiens
aaatatcagcccaag

SEQ ID NO: 1343640 - DNA, 15 bp, Homo sapiens
taaatatcagcccaa

SEQ ID NO: 1343641 - DNA, 15 bp, Homo sapiens
ataaatatcagccca

SEQ ID NO: 1343642 - DNA, 15 bp, Homo sapiens
aataaatatcagccc

SEQ ID NO: 1343643 - DNA, 15 bp, Homo sapiens
aaataaatatcagcc

SEQ ID NO: 1343644 - DNA, 15 bp, Homo sapiens
caaataaatatcagc

SEQ ID NO: 1343645 - DNA, 15 bp, Homo sapiens
gcaaataaatatcag

SEQ ID NO: 1343646 - DNA, 15 bp, Homo sapiens
agcaaataaatatca

SEQ ID NO: 1343647 - DNA, 15 bp, Homo sapiens
tagcaaataaatatc

SEQ ID NO: 1343648 - DNA, 15 bp, Homo sapiens
atagcaaataaatat

SEQ ID NO: 1343649 - DNA, 15 bp, Homo sapiens
catagcaaataaata

SEQ ID NO: 1343650 - DNA, 15 bp, Homo sapiens
ccatagcaaataaat

SEQ ID NO: 1343651 - DNA, 15 bp, Homo sapiens
cccatagcaaataaa

SEQ ID NO: 1343652 - DNA, 15 bp, Homo sapiens
ccccatagcaaataa

SEQ ID NO: 1343653 - DNA, 15 bp, Homo sapiens
tccccatagcaaata

SEQ ID NO: 1343654 - DNA, 15 bp, Homo sapiens
ttccccatagcaaat

SEQ ID NO: 1343655 - DNA, 15 bp, Homo sapiens
gttccccatagcaaa

SEQ ID NO: 1343656 - DNA, 15 bp, Homo sapiens
agttccccatagcaa

SEQ ID NO: 1343657 - DNA, 15 bp, Homo sapiens
aagttccccatagca

SEQ ID NO: 1343658 - DNA, 15 bp, Homo sapiens
aaagttccccatagc

SEQ ID NO: 1343659 - DNA, 15 bp, Homo sapiens
gaaagttccccatag

SEQ ID NO: 1343660 - DNA, 15 bp, Homo sapiens
ggaaagttccccata

SEQ ID NO: 1343661 - DNA, 15 bp, Homo sapiens
aggaaagttccccat

SEQ ID NO: 1343662 - DNA, 15 bp, Homo sapiens
caggaaagttcccca

SEQ ID NO: 1343663 - DNA, 15 bp, Homo sapiens
acaggaaagttcccc

SEQ ID NO: 1343664 - DNA, 15 bp, Homo sapiens
cacaggaaagttccc

SEQ ID NO: 1343665 - DNA, 15 bp, Homo sapiens
gcacaggaaagttcc

SEQ ID NO: 1343666 - DNA, 15 bp, Homo sapiens
cgcacaggaaagttc

SEQ ID NO: 1343667 - DNA, 15 bp, Homo sapiens
acgcacaggaaagtt

SEQ ID NO: 1343668 - DNA, 15 bp, Homo sapiens
aacgcacaggaaagt

SEQ ID NO: 1343669 - DNA, 15 bp, Homo sapiens
caacgcacaggaaag

SEQ ID NO: 1343670 - DNA, 15 bp, Homo sapiens
acaacgcacaggaaa

SEQ ID NO: 1343671 - DNA, 15 bp, Homo sapiens
tacaacgcacaggaa

SEQ ID NO: 1343672 - DNA, 15 bp, Homo sapiens
ctacaacgcacagga

SEQ ID NO: 1343673 - DNA, 15 bp, Homo sapiens
cctacaacgcacagg

SEQ ID NO: 1343674 - DNA, 15 bp, Homo sapiens
tcctacaacgcacag

SEQ ID NO: 1343675 - DNA, 15 bp, Homo sapiens
atcctacaacgcaca

SEQ ID NO: 1343676 - DNA, 15 bp, Homo sapiens
catcctacaacgcac

SEQ ID NO: 1343677 - DNA, 15 bp, Homo sapiens
acatcctacaacgca

SEQ ID NO: 1343678 - DNA, 15 bp, Homo sapiens
aacatcctacaacgc

SEQ ID NO: 1343679 - DNA, 15 bp, Homo sapiens
aaacatcctacaacg

SEQ ID NO: 1343680 - DNA, 15 bp, Homo sapiens
caaacatcctacaac

SEQ ID NO: 1343681 - DNA, 15 bp, Homo sapiens
ccaaacatcctacaa

SEQ ID NO: 1343682 - DNA, 15 bp, Homo sapiens
gccaaacatcctaca

SEQ ID NO: 1343683 - DNA, 15 bp, Homo sapiens
tgccaaacatcctac

SEQ ID NO: 1343684 - DNA, 15 bp, Homo sapiens
ttgccaaacatccta

SEQ ID NO: 1343685 - DNA, 15 bp, Homo sapiens
attgccaaacatcct

SEQ ID NO: 1343686 - DNA, 15 bp, Homo sapiens
cattgccaaacatcc

SEQ ID NO: 1343687 - DNA, 15 bp, Homo sapiens
acattgccaaacatc

SEQ ID NO: 1343688 - DNA, 15 bp, Homo sapiens
gacattgccaaacat

SEQ ID NO: 1343689 - DNA, 15 bp, Homo sapiens
ggacattgccaaaca

SEQ ID NO: 1343690 - DNA, 15 bp, Homo sapiens
gggacattgccaaac

SEQ ID NO: 1343691 - DNA, 15 bp, Homo sapiens
agggacattgccaaa

SEQ ID NO: 1343692 - DNA, 15 bp, Homo sapiens
cagggacattgccaa

SEQ ID NO: 1343693 - DNA, 15 bp, Homo sapiens
ccagggacattgcca

SEQ ID NO: 1343694 - DNA, 15 bp, Homo sapiens
gccagggacattgcc

SEQ ID NO: 1343695 - DNA, 15 bp, Homo sapiens
ggccagggacattgc

SEQ ID NO: 1343696 - DNA, 15 bp, Homo sapiens
cggccagggacattg

SEQ ID NO: 1343697 - DNA, 15 bp, Homo sapiens
ccggccagggacatt

SEQ ID NO: 1343698 - DNA, 15 bp, Homo sapiens
gccggccagggacat

SEQ ID NO: 1343699 - DNA, 15 bp, Homo sapiens
ggccggccagggaca

SEQ ID NO: 1343700 - DNA, 15 bp, Homo sapiens
tggccggccagggac

SEQ ID NO: 1343701 - DNA, 15 bp, Homo sapiens
ctggccggccaggga

SEQ ID NO: 1343702 - DNA, 15 bp, Homo sapiens
cctggccggccaggg

SEQ ID NO: 1343703 - DNA, 15 bp, Homo sapiens
acctggccggccagg

SEQ ID NO: 1343704 - DNA, 15 bp, Homo sapiens
cacctggccggccag

SEQ ID NO: 1343705 - DNA, 15 bp, Homo sapiens
gcacctggccggcca

SEQ ID NO: 1343706 - DNA, 15 bp, Homo sapiens
tgcacctggccggcc

SEQ ID NO: 1343707 - DNA, 15 bp, Homo sapiens
ctgcacctggccggc

SEQ ID NO: 1343708 - DNA, 15 bp, Homo sapiens
gctgcacctggccgg

SEQ ID NO: 1343709 - DNA, 15 bp, Homo sapiens
cgctgcacctggccg

SEQ ID NO: 1343710 - DNA, 15 bp, Homo sapiens
ccgctgcacctggcc

SEQ ID NO: 1343711 - DNA, 15 bp, Homo sapiens
gccgctgcacctggc

SEQ ID NO: 1343712 - DNA, 15 bp, Homo sapiens
agccgctgcacctgg

SEQ ID NO: 1343713 - DNA, 15 bp, Homo sapiens
gagccgctgcacctg

SEQ ID NO: 1343714 - DNA, 15 bp, Homo sapiens
tgagccgctgcacct

SEQ ID NO: 1343715 - DNA, 15 bp, Homo sapiens
gtgagccgctgcacc

SEQ ID NO: 1343716 - DNA, 15 bp, Homo sapiens
tgtgagccgctgcac

SEQ ID NO: 1343717 - DNA, 15 bp, Homo sapiens
gtgtgagccgctgca

SEQ ID NO: 1343718 - DNA, 15 bp, Homo sapiens
ggtgtgagccgctgc

SEQ ID NO: 1343719 - DNA, 15 bp, Homo sapiens
aggtgtgagccgctg

SEQ ID NO: 1343720 - DNA, 15 bp, Homo sapiens
caggtgtgagccgct

SEQ ID NO: 1343721 - DNA, 15 bp, Homo sapiens
acaggtgtgagccgc

SEQ ID NO: 1343722 - DNA, 15 bp, Homo sapiens
tacaggtgtgagccg

SEQ ID NO: 1343723 - DNA, 15 bp, Homo sapiens
gcccacctcagcctc

SEQ ID NO: 1343724 - DNA, 15 bp, Homo sapiens
cgcccacctcagcct

SEQ ID NO: 1343725 - DNA, 15 bp, Homo sapiens
ccgcccacctcagcc

SEQ ID NO: 1343726 - DNA, 15 bp, Homo sapiens
tccgcccacctcagc

SEQ ID NO: 1343727 - DNA, 15 bp, Homo sapiens
atccgcccacctcag

SEQ ID NO: 1343728 - DNA, 15 bp, Homo sapiens
gatccgcccacctca

SEQ ID NO: 1343729 - DNA, 15 bp, Homo sapiens
tgatccgcccacctc

SEQ ID NO: 1343730 - DNA, 15 bp, Homo sapiens
agtgatccgcccacc

SEQ ID NO: 1343731 - DNA, 15 bp, Homo sapiens
aagtgatccgcccac

SEQ ID NO: 1343732 - DNA, 15 bp, Homo sapiens
caagtgatccgccca

SEQ ID NO: 1343733 - DNA, 15 bp, Homo sapiens
agcctcaagtgatcc

SEQ ID NO: 1343734 - DNA, 15 bp, Homo sapiens
cagcctcaagtgatc

SEQ ID NO: 1343735 - DNA, 15 bp, Homo sapiens
ccagcctcaagtgat

SEQ ID NO: 1343736 - DNA, 15 bp, Homo sapiens
cccagcctcaagtga

SEQ ID NO: 1343737 - DNA, 15 bp, Homo sapiens
tcccagcctcaagtg

SEQ ID NO: 1343738 - DNA, 15 bp, Homo sapiens
ctcccagcctcaagt

SEQ ID NO: 1343739 - DNA, 15 bp, Homo sapiens
actcccagcctcaag

SEQ ID NO: 1343740 - DNA, 15 bp, Homo sapiens
aactcccagcctcaa

SEQ ID NO: 1343741 - DNA, 15 bp, Homo sapiens
gaactcccagcctca

SEQ ID NO: 1343742 - DNA, 15 bp, Homo sapiens
tgaactcccagcctc

SEQ ID NO: 1343743 - DNA, 15 bp, Homo sapiens
ctgaactcccagcct

SEQ ID NO: 1343744 - DNA, 15 bp, Homo sapiens
tctgaactcccagcc

SEQ ID NO: 1343745 - DNA, 15 bp, Homo sapiens
ttctgaactcccagc

SEQ ID NO: 1343746 - DNA, 15 bp, Homo sapiens
cttctgaactcccag

SEQ ID NO: 1343747 - DNA, 15 bp, Homo sapiens
tcttctgaactccca

SEQ ID NO: 1343748 - DNA, 15 bp, Homo sapiens
ctcttctgaactccc

SEQ ID NO: 1343749 - DNA, 15 bp, Homo sapiens
tctcttctgaactcc

SEQ ID NO: 1343750 - DNA, 15 bp, Homo sapiens
gtctcttctgaactc

SEQ ID NO: 1343751 - DNA, 15 bp, Homo sapiens
ggtctcttctgaact

SEQ ID NO: 1343752 - DNA, 15 bp, Homo sapiens
tggtctcttctgaac

SEQ ID NO: 1343753 - DNA, 15 bp, Homo sapiens
ctggtctcttctgaa

SEQ ID NO: 1343754 - DNA, 15 bp, Homo sapiens
gctggtctcttctga

SEQ ID NO: 1343755 - DNA, 15 bp, Homo sapiens
ggctggtctcttctg

SEQ ID NO: 1343756 - DNA, 15 bp, Homo sapiens
tggctggtctcttct

SEQ ID NO: 1343757 - DNA, 15 bp, Homo sapiens
ttggctggtctcttc

SEQ ID NO: 1343758 - DNA, 15 bp, Homo sapiens
gttggctggtctctt

SEQ ID NO: 1343759 - DNA, 15 bp, Homo sapiens
tgttggctggtctct

SEQ ID NO: 1343760 - DNA, 15 bp, Homo sapiens
atgttggctggtctc

SEQ ID NO: 1343761 - DNA, 15 bp, Homo sapiens
catgttggctggtct

SEQ ID NO: 1343762 - DNA, 15 bp, Homo sapiens
ccatgttggctggtc

SEQ ID NO: 1343763 - DNA, 15 bp, Homo sapiens
accatgttggctggt

SEQ ID NO: 1343764 - DNA, 15 bp, Homo sapiens
caccatgttggctgg

SEQ ID NO: 1343765 - DNA, 15 bp, Homo sapiens
tcaccatgttggctg

SEQ ID NO: 1343766 - DNA, 15 bp, Homo sapiens
ttcaccatgttggct

SEQ ID NO: 1343767 - DNA, 15 bp, Homo sapiens
gtgtgtcaccacacc

SEQ ID NO: 1343768 - DNA, 15 bp, Homo sapiens
tgtgtgtcaccacac

SEQ ID NO: 1343769 - DNA, 15 bp, Homo sapiens
atgtgtgtcaccaca

SEQ ID NO: 1343770 - DNA, 15 bp, Homo sapiens
catgtgtgtcaccac

SEQ ID NO: 1343771 - DNA, 15 bp, Homo sapiens
tcatgtgtgtcacca

SEQ ID NO: 1343772 - DNA, 15 bp, Homo sapiens
ctcatgtgtgtcacc

SEQ ID NO: 1343773 - DNA, 15 bp, Homo sapiens
tctcatgtgtgtcac

SEQ ID NO: 1343774 - DNA, 15 bp, Homo sapiens
ttctcatgtgtgtca

SEQ ID NO: 1343775 - DNA, 15 bp, Homo sapiens
attctcatgtgtgtc

SEQ ID NO: 1343776 - DNA, 15 bp, Homo sapiens
gattctcatgtgtgt

SEQ ID NO: 1343777 - DNA, 15 bp, Homo sapiens
tgattctcatgtgtg

SEQ ID NO: 1343778 - DNA, 15 bp, Homo sapiens
gtgattctcatgtgt

SEQ ID NO: 1343779 - DNA, 15 bp, Homo sapiens
agtgattctcatgtg

SEQ ID NO: 1343780 - DNA, 15 bp, Homo sapiens
aagtgattctcatgt

SEQ ID NO: 1343781 - DNA, 15 bp, Homo sapiens
cctcctgagttcaag

SEQ ID NO: 1343782 - DNA, 15 bp, Homo sapiens
agcctcctgagttca

SEQ ID NO: 1343783 - DNA, 15 bp, Homo sapiens
cagcctcctgagttc

SEQ ID NO: 1343784 - DNA, 15 bp, Homo sapiens
tcagcctcctgagtt

SEQ ID NO: 1343785 - DNA, 15 bp, Homo sapiens
actcagcctcctgag

SEQ ID NO: 1343786 - DNA, 15 bp, Homo sapiens
aactcagcctcctga

SEQ ID NO: 1343787 - DNA, 15 bp, Homo sapiens
aaactcagcctcctg

SEQ ID NO: 1343788 - DNA, 15 bp, Homo sapiens
caaactcagcctcct

SEQ ID NO: 1343789 - DNA, 15 bp, Homo sapiens
gcaaactcagcctcc

SEQ ID NO: 1343790 - DNA, 15 bp, Homo sapiens
ggcaaactcagcctc

SEQ ID NO: 1343791 - DNA, 15 bp, Homo sapiens
cggcaaactcagcct

SEQ ID NO: 1343792 - DNA, 15 bp, Homo sapiens
acggcaaactcagcc

SEQ ID NO: 1343793 - DNA, 15 bp, Homo sapiens
cacggcaaactcagc

SEQ ID NO: 1343794 - DNA, 15 bp, Homo sapiens
tcacggcaaactcag

SEQ ID NO: 1343795 - DNA, 15 bp, Homo sapiens
ctcacggcaaactca

SEQ ID NO: 1343796 - DNA, 15 bp, Homo sapiens
gctcacggcaaactc

SEQ ID NO: 1343797 - DNA, 15 bp, Homo sapiens
agctcacggcaaact

SEQ ID NO: 1343798 - DNA, 15 bp, Homo sapiens
cagctcacggcaaac

SEQ ID NO: 1343799 - DNA, 15 bp, Homo sapiens
tcagctcacggcaaa

SEQ ID NO: 1343800 - DNA, 15 bp, Homo sapiens
cgatctcagctcacg

SEQ ID NO: 1343801 - DNA, 15 bp, Homo sapiens
agcgcgatctcagct

SEQ ID NO: 1343802 - DNA, 15 bp, Homo sapiens
cagcgcgatctcagc

SEQ ID NO: 1343803 - DNA, 15 bp, Homo sapiens
gcagcgcgatctcag

SEQ ID NO: 1343804 - DNA, 15 bp, Homo sapiens
agcagcgcgatctca

SEQ ID NO: 1343805 - DNA, 15 bp, Homo sapiens
cagcagcgcgatctc

SEQ ID NO: 1343806 - DNA, 15 bp, Homo sapiens
acagcagcgcgatct

SEQ ID NO: 1343807 - DNA, 15 bp, Homo sapiens
tacagcagcgcgatc

SEQ ID NO: 1343808 - DNA, 15 bp, Homo sapiens
gtacagcagcgcgat

SEQ ID NO: 1343809 - DNA, 15 bp, Homo sapiens
agtacagcagcgcga

SEQ ID NO: 1343810 - DNA, 15 bp, Homo sapiens
gagtacagcagcgcg

SEQ ID NO: 1343811 - DNA, 15 bp, Homo sapiens
ggagtacagcagcgc

SEQ ID NO: 1343812 - DNA, 15 bp, Homo sapiens
tggagtacagcagcg

SEQ ID NO: 1343813 - DNA, 15 bp, Homo sapiens
ctggagtacagcagc

SEQ ID NO: 1343814 - DNA, 15 bp, Homo sapiens
gctggagtacagcag

SEQ ID NO: 1343815 - DNA, 15 bp, Homo sapiens
ggctggagtacagca

SEQ ID NO: 1343816 - DNA, 15 bp, Homo sapiens
aggctggagtacagc

SEQ ID NO: 1343817 - DNA, 15 bp, Homo sapiens
gctttgtcacccagg

SEQ ID NO: 1343818 - DNA, 15 bp, Homo sapiens
tgctttgtcacccag

SEQ ID NO: 1343819 - DNA, 15 bp, Homo sapiens
ttgctttgtcaccca

SEQ ID NO: 1343820 - DNA, 15 bp, Homo sapiens
cttgctttgtcaccc

SEQ ID NO: 1343821 - DNA, 15 bp, Homo sapiens
tcttgctttgtcacc

SEQ ID NO: 1343822 - DNA, 15 bp, Homo sapiens
ttcttgctttgtcac

SEQ ID NO: 1343823 - DNA, 15 bp, Homo sapiens
attcttgctttgtca

SEQ ID NO: 1343824 - DNA, 15 bp, Homo sapiens
gattcttgctttgtc

SEQ ID NO: 1343825 - DNA, 15 bp, Homo sapiens
agattcttgctttgt

SEQ ID NO: 1343826 - DNA, 15 bp, Homo sapiens
cagattcttgctttg

SEQ ID NO: 1343827 - DNA, 15 bp, Homo sapiens
acagattcttgcttt

SEQ ID NO: 1343828 - DNA, 15 bp, Homo sapiens
gacagattcttgctt

SEQ ID NO: 1343829 - DNA, 15 bp, Homo sapiens
agacagattcttgct

SEQ ID NO: 1343830 - DNA, 15 bp, Homo sapiens
gagacagattcttgc

SEQ ID NO: 1343831 - DNA, 15 bp, Homo sapiens
tgagacagattcttg

SEQ ID NO: 1343832 - DNA, 15 bp, Homo sapiens
ttgagacagattctt

SEQ ID NO: 1343833 - DNA, 15 bp, Homo sapiens
tttgagacagattct

SEQ ID NO: 1343834 - DNA, 15 bp, Homo sapiens
ttttgagacagattc

SEQ ID NO: 1343835 - DNA, 15 bp, Homo sapiens
cgaattttttttttt

SEQ ID NO: 1343836 - DNA, 15 bp, Homo sapiens
gcgaatttttttttt

SEQ ID NO: 1343837 - DNA, 15 bp, Homo sapiens
agcgaattttttttt

SEQ ID NO: 1343838 - DNA, 15 bp, Homo sapiens
cagcgaatttttttt

SEQ ID NO: 1343839 - DNA, 15 bp, Homo sapiens
ccagcgaattttttt

SEQ ID NO: 1343840 - DNA, 15 bp, Homo sapiens
accagcgaatttttt

SEQ ID NO: 1343841 - DNA, 15 bp, Homo sapiens
gaccagcgaattttt

SEQ ID NO: 1343842 - DNA, 15 bp, Homo sapiens
agaccagcgaatttt

SEQ ID NO: 1343843 - DNA, 15 bp, Homo sapiens
gagaccagcgaattt

SEQ ID NO: 1343844 - DNA, 15 bp, Homo sapiens
ggagaccagcgaatt

SEQ ID NO: 1343845 - DNA, 15 bp, Homo sapiens
tggagaccagcgaat

SEQ ID NO: 1343846 - DNA, 15 bp, Homo sapiens
gtggagaccagcgaa

SEQ ID NO: 1343847 - DNA, 15 bp, Homo sapiens
ggtggagaccagcga

SEQ ID NO: 1343848 - DNA, 15 bp, Homo sapiens
aggtggagaccagcg

SEQ ID NO: 1343849 - DNA, 15 bp, Homo sapiens
taggtggagaccagc

SEQ ID NO: 1343850 - DNA, 15 bp, Homo sapiens
gtaggtggagaccag

SEQ ID NO: 1343851 - DNA, 15 bp, Homo sapiens
cgtaggtggagacca

SEQ ID NO: 1343852 - DNA, 15 bp, Homo sapiens
acgtaggtggagacc

SEQ ID NO: 1343853 - DNA, 15 bp, Homo sapiens
aacgtaggtggagac

SEQ ID NO: 1343854 - DNA, 15 bp, Homo sapiens
aaacgtaggtggaga

SEQ ID NO: 1343855 - DNA, 15 bp, Homo sapiens
caaacgtaggtggag

SEQ ID NO: 1343856 - DNA, 15 bp, Homo sapiens
acaaacgtaggtgga

SEQ ID NO: 1343857 - DNA, 15 bp, Homo sapiens
tacaaacgtaggtgg

SEQ ID NO: 1343858 - DNA, 15 bp, Homo sapiens
atacaaacgtaggtg

SEQ ID NO: 1343859 - DNA, 15 bp, Homo sapiens
gatacaaacgtaggt

SEQ ID NO: 1343860 - DNA, 15 bp, Homo sapiens
ggatacaaacgtagg

SEQ ID NO: 1343861 - DNA, 15 bp, Homo sapiens
gggatacaaacgtag

SEQ ID NO: 1343862 - DNA, 15 bp, Homo sapiens
ggggatacaaacgta

SEQ ID NO: 1343863 - DNA, 15 bp, Homo sapiens
tggggatacaaacgt

SEQ ID NO: 1343864 - DNA, 15 bp, Homo sapiens
gtggggatacaaacg

SEQ ID NO: 1343865 - DNA, 15 bp, Homo sapiens
ggtggggatacaaac

SEQ ID NO: 1343866 - DNA, 15 bp, Homo sapiens
gggtggggatacaaa

SEQ ID NO: 1343867 - DNA, 15 bp, Homo sapiens
ggggtggggatacaa

SEQ ID NO: 1343868 - DNA, 15 bp, Homo sapiens
tggggtggggataca

SEQ ID NO: 1343869 - DNA, 15 bp, Homo sapiens
ttggggtggggatac

SEQ ID NO: 1343870 - DNA, 15 bp, Homo sapiens
cttggggtggggata

SEQ ID NO: 1343871 - DNA, 15 bp, Homo sapiens
acttggggtggggat

SEQ ID NO: 1343872 - DNA, 15 bp, Homo sapiens
gacttggggtgggga

SEQ ID NO: 1343873 - DNA, 15 bp, Homo sapiens
ggacttggggtgggg

SEQ ID NO: 1343874 - DNA, 15 bp, Homo sapiens
aggacttggggtggg

SEQ ID NO: 1343875 - DNA, 15 bp, Homo sapiens
caggacttggggtgg

SEQ ID NO: 1343876 - DNA, 15 bp, Homo sapiens
tcaggacttggggtg

SEQ ID NO: 1343877 - DNA, 15 bp, Homo sapiens
gtcaggacttggggt

SEQ ID NO: 1343878 - DNA, 15 bp, Homo sapiens
tgtcaggacttgggg

SEQ ID NO: 1343879 - DNA, 15 bp, Homo sapiens
ttgtcaggacttggg

SEQ ID NO: 1343880 - DNA, 15 bp, Homo sapiens
attgtcaggacttgg

SEQ ID NO: 1343881 - DNA, 15 bp, Homo sapiens
tattgtcaggacttg

SEQ ID NO: 1343882 - DNA, 15 bp, Homo sapiens
ttattgtcaggactt

SEQ ID NO: 1343883 - DNA, 15 bp, Homo sapiens
tttattgtcaggact

SEQ ID NO: 1343884 - DNA, 15 bp, Homo sapiens
ttttattgtcaggac

SEQ ID NO: 1343885 - DNA, 15 bp, Homo sapiens
tttttattgtcagga

SEQ ID NO: 1343886 - DNA, 15 bp, Homo sapiens
ttttttattgtcagg

SEQ ID NO: 1343887 - DNA, 15 bp, Homo sapiens
attttttattgtcag

SEQ ID NO: 1343888 - DNA, 15 bp, Homo sapiens
cattttttattgtca

SEQ ID NO: 1343889 - DNA, 15 bp, Homo sapiens
acattttttattgtc

SEQ ID NO: 1343890 - DNA, 15 bp, Homo sapiens
gacattttttattgt

SEQ ID NO: 1343891 - DNA, 15 bp, Homo sapiens
agacattttttattg

SEQ ID NO: 1343892 - DNA, 15 bp, Homo sapiens
aagacattttttatt

SEQ ID NO: 1343893 - DNA, 15 bp, Homo sapiens
gaagacattttttat

SEQ ID NO: 1343894 - DNA, 15 bp, Homo sapiens
tgaagacatttttta

SEQ ID NO: 1343895 - DNA, 15 bp, Homo sapiens
ttgaagacatttttt

SEQ ID NO: 1343896 - DNA, 15 bp, Homo sapiens
tttgaagacattttt

SEQ ID NO: 1343897 - DNA, 15 bp, Homo sapiens
ttttgaagacatttt

SEQ ID NO: 1343898 - DNA, 15 bp, Homo sapiens
attttgaagacattt

SEQ ID NO: 1343899 - DNA, 15 bp, Homo sapiens
cattttgaagacatt

SEQ ID NO: 1343900 - DNA, 15 bp, Homo sapiens
acattttgaagacat

SEQ ID NO: 1343901 - DNA, 15 bp, Homo sapiens
aacattttgaagaca

SEQ ID NO: 1343902 - DNA, 15 bp, Homo sapiens
gaacattttgaagac

SEQ ID NO: 1343903 - DNA, 15 bp, Homo sapiens
ggaacattttgaaga

SEQ ID NO: 1343904 - DNA, 15 bp, Homo sapiens
aggaacattttgaag

SEQ ID NO: 1343905 - DNA, 15 bp, Homo sapiens
aaggaacattttgaa

SEQ ID NO: 1343906 - DNA, 15 bp, Homo sapiens
caaggaacattttga

SEQ ID NO: 1343907 - DNA, 15 bp, Homo sapiens
gcaaggaacattttg

SEQ ID NO: 1343908 - DNA, 15 bp, Homo sapiens
tgcaaggaacatttt

SEQ ID NO: 1343909 - DNA, 15 bp, Homo sapiens
ttgcaaggaacattt

SEQ ID NO: 1343910 - DNA, 15 bp, Homo sapiens
tttgcaaggaacatt

SEQ ID NO: 1343911 - DNA, 15 bp, Homo sapiens
ttttgcaaggaacat

SEQ ID NO: 1343912 - DNA, 15 bp, Homo sapiens
attttgcaaggaaca

SEQ ID NO: 1343913 - DNA, 15 bp, Homo sapiens
aattttgcaaggaac

SEQ ID NO: 1343914 - DNA, 15 bp, Homo sapiens
caattttgcaaggaa

SEQ ID NO: 1343915 - DNA, 15 bp, Homo sapiens
gcaattttgcaagga

SEQ ID NO: 1343916 - DNA, 15 bp, Homo sapiens
agcaattttgcaagg

SEQ ID NO: 1343917 - DNA, 15 bp, Homo sapiens
gagcaattttgcaag

SEQ ID NO: 1343918 - DNA, 15 bp, Homo sapiens
tgagcaattttgcaa

SEQ ID NO: 1343919 - DNA, 15 bp, Homo sapiens
atgagcaattttgca

SEQ ID NO: 1343920 - DNA, 15 bp, Homo sapiens
aatgagcaattttgc

SEQ ID NO: 1343921 - DNA, 15 bp, Homo sapiens
caatgagcaattttg

SEQ ID NO: 1343922 - DNA, 15 bp, Homo sapiens
tcaatgagcaatttt

SEQ ID NO: 1343923 - DNA, 15 bp, Homo sapiens
ctcaatgagcaattt

SEQ ID NO: 1343924 - DNA, 15 bp, Homo sapiens
cctcaatgagcaatt

SEQ ID NO: 1343925 - DNA, 15 bp, Homo sapiens
gcctcaatgagcaat

SEQ ID NO: 1343926 - DNA, 15 bp, Homo sapiens
agcctcaatgagcaa

SEQ ID NO: 1343927 - DNA, 15 bp, Homo sapiens
tagcctcaatgagca

SEQ ID NO: 1343928 - DNA, 15 bp, Homo sapiens
ttagcctcaatgagc

SEQ ID NO: 1343929 - DNA, 15 bp, Homo sapiens
gttagcctcaatgag

SEQ ID NO: 1343930 - DNA, 15 bp, Homo sapiens
agttagcctcaatga

SEQ ID NO: 1343931 - DNA, 15 bp, Homo sapiens
cagttagcctcaatg

SEQ ID NO: 1343932 - DNA, 15 bp, Homo sapiens
tcagttagcctcaat

SEQ ID NO: 1343933 - DNA, 15 bp, Homo sapiens
ctcagttagcctcaa

SEQ ID NO: 1343934 - DNA, 15 bp, Homo sapiens
cctcagttagcctca

SEQ ID NO: 1343935 - DNA, 15 bp, Homo sapiens
acctcagttagcctc

SEQ ID NO: 1343936 - DNA, 15 bp, Homo sapiens
cacctcagttagcct

SEQ ID NO: 1343937 - DNA, 15 bp, Homo sapiens
ccacctcagttagcc

SEQ ID NO: 1343938 - DNA, 15 bp, Homo sapiens
gccacctcagttagc

SEQ ID NO: 1343939 - DNA, 15 bp, Homo sapiens
agccacctcagttag

SEQ ID NO: 1343940 - DNA, 15 bp, Homo sapiens
gagccacctcagtta

SEQ ID NO: 1343941 - DNA, 15 bp, Homo sapiens
tgagccacctcagtt

SEQ ID NO: 1343942 - DNA, 15 bp, Homo sapiens
gtgagccacctcagt

SEQ ID NO: 1343943 - DNA, 15 bp, Homo sapiens
tgtgagccacctcag

SEQ ID NO: 1343944 - DNA, 15 bp, Homo sapiens
ttgtgagccacctca

SEQ ID NO: 1343945 - DNA, 15 bp, Homo sapiens
gttgtgagccacctc

SEQ ID NO: 1343946 - DNA, 15 bp, Homo sapiens
agttgtgagccacct

SEQ ID NO: 1343947 - DNA, 15 bp, Homo sapiens
aagttgtgagccacc

SEQ ID NO: 1343948 - DNA, 15 bp, Homo sapiens
aaagttgtgagccac

SEQ ID NO: 1343949 - DNA, 15 bp, Homo sapiens
taaagttgtgagcca

SEQ ID NO: 1343950 - DNA, 15 bp, Homo sapiens
ttaaagttgtgagcc

SEQ ID NO: 1343951 - DNA, 15 bp, Homo sapiens
attaaagttgtgagc

SEQ ID NO: 1343952 - DNA, 15 bp, Homo sapiens
gattaaagttgtgag

SEQ ID NO: 1343953 - DNA, 15 bp, Homo sapiens
ggattaaagttgtga

SEQ ID NO: 1343954 - DNA, 15 bp, Homo sapiens
gggattaaagttgtg

SEQ ID NO: 1343955 - DNA, 15 bp, Homo sapiens
tgggattaaagttgt

SEQ ID NO: 1343956 - DNA, 15 bp, Homo sapiens
ctgggattaaagttg

SEQ ID NO: 1343957 - DNA, 15 bp, Homo sapiens
gctgggattaaagtt

SEQ ID NO: 1343958 - DNA, 15 bp, Homo sapiens
ggctgggattaaagt

SEQ ID NO: 1343959 - DNA, 15 bp, Homo sapiens
gggctgggattaaag

SEQ ID NO: 1343960 - DNA, 15 bp, Homo sapiens
agggctgggattaaa

SEQ ID NO: 1343961 - DNA, 15 bp, Homo sapiens
aagggctgggattaa

SEQ ID NO: 1343962 - DNA, 15 bp, Homo sapiens
tccaaagggctggga

SEQ ID NO: 1343963 - DNA, 15 bp, Homo sapiens
ttccaaagggctggg

SEQ ID NO: 1343964 - DNA, 15 bp, Homo sapiens
cttccaaagggctgg

SEQ ID NO: 1343965 - DNA, 15 bp, Homo sapiens
ccttccaaagggctg

SEQ ID NO: 1343966 - DNA, 15 bp, Homo sapiens
gccttccaaagggct

SEQ ID NO: 1343967 - DNA, 15 bp, Homo sapiens
agccttccaaagggc

SEQ ID NO: 1343968 - DNA, 15 bp, Homo sapiens
cagccttccaaaggg

SEQ ID NO: 1343969 - DNA, 15 bp, Homo sapiens
tcagccttccaaagg

SEQ ID NO: 1343970 - DNA, 15 bp, Homo sapiens
ctcagccttccaaag

SEQ ID NO: 1343971 - DNA, 15 bp, Homo sapiens
cctcagccttccaaa

SEQ ID NO: 1343972 - DNA, 15 bp, Homo sapiens
gcctcagccttccaa

SEQ ID NO: 1343973 - DNA, 15 bp, Homo sapiens
agcctcagccttcca

SEQ ID NO: 1343974 - DNA, 15 bp, Homo sapiens
cagcctcagccttcc

SEQ ID NO: 1343975 - DNA, 15 bp, Homo sapiens
ccagcctcagccttc

SEQ ID NO: 1343976 - DNA, 15 bp, Homo sapiens
gccagcctcagcctt

SEQ ID NO: 1343977 - DNA, 15 bp, Homo sapiens
tgccagcctcagcct

SEQ ID NO: 1343978 - DNA, 15 bp, Homo sapiens
ctgccagcctcagcc

SEQ ID NO: 1343979 - DNA, 15 bp, Homo sapiens
tctgccagcctcagc

SEQ ID NO: 1343980 - DNA, 15 bp, Homo sapiens
atctgccagcctcag

SEQ ID NO: 1343981 - DNA, 15 bp, Homo sapiens
gatctgccagcctca

SEQ ID NO: 1343982 - DNA, 15 bp, Homo sapiens
tgatctgccagcctc

SEQ ID NO: 1343983 - DNA, 15 bp, Homo sapiens
gtgatctgccagcct

SEQ ID NO: 1343984 - DNA, 15 bp, Homo sapiens
agtgatctgccagcc

SEQ ID NO: 1343985 - DNA, 15 bp, Homo sapiens
aagtgatctgccagc

SEQ ID NO: 1343986 - DNA, 15 bp, Homo sapiens
taagtgatctgccag

SEQ ID NO: 1343987 - DNA, 15 bp, Homo sapiens
ttaagtgatctgcca

SEQ ID NO: 1343988 - DNA, 15 bp, Homo sapiens
cttaagtgatctgcc

SEQ ID NO: 1343989 - DNA, 15 bp, Homo sapiens
gcttaagtgatctgc

SEQ ID NO: 1343990 - DNA, 15 bp, Homo sapiens
ggcttaagtgatctg

SEQ ID NO: 1343991 - DNA, 15 bp, Homo sapiens
gggcttaagtgatct

SEQ ID NO: 1343992 - DNA, 15 bp, Homo sapiens
tgggcttaagtgatc

SEQ ID NO: 1343993 - DNA, 15 bp, Homo sapiens
ctgggcttaagtgat

SEQ ID NO: 1343994 - DNA, 15 bp, Homo sapiens
cctgggcttaagtga

SEQ ID NO: 1343995 - DNA, 15 bp, Homo sapiens
acctgggcttaagtg

SEQ ID NO: 1343996 - DNA, 15 bp, Homo sapiens
cacctgggcttaagt

SEQ ID NO: 1343997 - DNA, 15 bp, Homo sapiens
tcacctgggcttaag

SEQ ID NO: 1343998 - DNA, 15 bp, Homo sapiens
gtcacctgggcttaa

SEQ ID NO: 1343999 - DNA, 15 bp, Homo sapiens
agtcacctgggctta

SEQ ID NO: 1344000 - DNA, 15 bp, Homo sapiens
cagtcacctgggctt

SEQ ID NO: 1344001 - DNA, 15 bp, Homo sapiens
ccagtcacctgggct

SEQ ID NO: 1344002 - DNA, 15 bp, Homo sapiens
gccagtcacctgggc

SEQ ID NO: 1344003 - DNA, 15 bp, Homo sapiens
ggccagtcacctggg

SEQ ID NO: 1344004 - DNA, 15 bp, Homo sapiens
gggccagtcacctgg

SEQ ID NO: 1344005 - DNA, 15 bp, Homo sapiens
agggccagtcacctg

SEQ ID NO: 1344006 - DNA, 15 bp, Homo sapiens
cagggccagtcacct

SEQ ID NO: 1344007 - DNA, 15 bp, Homo sapiens
ccagggccagtcacc

SEQ ID NO: 1344008 - DNA, 15 bp, Homo sapiens
gccagggccagtcac

SEQ ID NO: 1344009 - DNA, 15 bp, Homo sapiens
ggccagggccagtca

SEQ ID NO: 1344010 - DNA, 15 bp, Homo sapiens
tggccagggccagtc

SEQ ID NO: 1344011 - DNA, 15 bp, Homo sapiens
ttggccagggccagt

SEQ ID NO: 1344012 - DNA, 15 bp, Homo sapiens
gttggccagggccag

SEQ ID NO: 1344013 - DNA, 15 bp, Homo sapiens
agttggccagggcca

SEQ ID NO: 1344014 - DNA, 15 bp, Homo sapiens
aagttggccagggcc

SEQ ID NO: 1344015 - DNA, 15 bp, Homo sapiens
caagttggccagggc

SEQ ID NO: 1344016 - DNA, 15 bp, Homo sapiens
ccaagttggccaggg

SEQ ID NO: 1344017 - DNA, 15 bp, Homo sapiens
gccaagttggccagg

SEQ ID NO: 1344018 - DNA, 15 bp, Homo sapiens
tgccaagttggccag

SEQ ID NO: 1344019 - DNA, 15 bp, Homo sapiens
ttgccaagttggcca

SEQ ID NO: 1344020 - DNA, 15 bp, Homo sapiens
tttgccaagttggcc

SEQ ID NO: 1344021 - DNA, 15 bp, Homo sapiens
ttttgccaagttggc

SEQ ID NO: 1344022 - DNA, 15 bp, Homo sapiens
gttttgccaagttgg

SEQ ID NO: 1344023 - DNA, 15 bp, Homo sapiens
ggttttgccaagttg

SEQ ID NO: 1344024 - DNA, 15 bp, Homo sapiens
gggttttgccaagtt

SEQ ID NO: 1344025 - DNA, 15 bp, Homo sapiens
agggttttgccaagt

SEQ ID NO: 1344026 - DNA, 15 bp, Homo sapiens
cagggttttgccaag

SEQ ID NO: 1344027 - DNA, 15 bp, Homo sapiens
acagggttttgccaa

SEQ ID NO: 1344028 - DNA, 15 bp, Homo sapiens
cttagtagagacagg

SEQ ID NO: 1344029 - DNA, 15 bp, Homo sapiens
tcttagtagagacag

SEQ ID NO: 1344030 - DNA, 15 bp, Homo sapiens
ttcttagtagagaca

SEQ ID NO: 1344031 - DNA, 15 bp, Homo sapiens
attcttagtagagac

SEQ ID NO: 1344032 - DNA, 15 bp, Homo sapiens
tattcttagtagaga

SEQ ID NO: 1344033 - DNA, 15 bp, Homo sapiens
gtattcttagtagag

SEQ ID NO: 1344034 - DNA, 15 bp, Homo sapiens
tgtattcttagtaga

SEQ ID NO: 1344035 - DNA, 15 bp, Homo sapiens
ttgtattcttagtag

SEQ ID NO: 1344036 - DNA, 15 bp, Homo sapiens
tttgtattcttagta

SEQ ID NO: 1344037 - DNA, 15 bp, Homo sapiens
ttttgtattcttagt

SEQ ID NO: 1344038 - DNA, 15 bp, Homo sapiens
tttttgtattcttag

SEQ ID NO: 1344039 - DNA, 15 bp, Homo sapiens
ttttttgtattctta

SEQ ID NO: 1344040 - DNA, 15 bp, Homo sapiens
attttttgtattctt

SEQ ID NO: 1344041 - DNA, 15 bp, Homo sapiens
tattttttgtattct

SEQ ID NO: 1344042 - DNA, 15 bp, Homo sapiens
gctattttttgtatt

SEQ ID NO: 1344043 - DNA, 15 bp, Homo sapiens
ggctattttttgtat

SEQ ID NO: 1344044 - DNA, 15 bp, Homo sapiens
tggctattttttgta

SEQ ID NO: 1344045 - DNA, 15 bp, Homo sapiens
ctggctattttttgt

SEQ ID NO: 1344046 - DNA, 15 bp, Homo sapiens
tctggctattttttg

SEQ ID NO: 1344047 - DNA, 15 bp, Homo sapiens
gtctggctatttttt

SEQ ID NO: 1344048 - DNA, 15 bp, Homo sapiens
cgtctggctattttt

SEQ ID NO: 1344049 - DNA, 15 bp, Homo sapiens
acgtctggctatttt

SEQ ID NO: 1344050 - DNA, 15 bp, Homo sapiens
cacgtctggctattt

SEQ ID NO: 1344051 - DNA, 15 bp, Homo sapiens
ccacgtctggctatt

SEQ ID NO: 1344052 - DNA, 15 bp, Homo sapiens
accacgtctggctat

SEQ ID NO: 1344053 - DNA, 15 bp, Homo sapiens
caccacgtctggcta

SEQ ID NO: 1344054 - DNA, 15 bp, Homo sapiens
ccaccacgtctggct

SEQ ID NO: 1344055 - DNA, 15 bp, Homo sapiens
accaccacgtctggc

SEQ ID NO: 1344056 - DNA, 15 bp, Homo sapiens
caccaccacgtctgg

SEQ ID NO: 1344057 - DNA, 15 bp, Homo sapiens
gcaccaccacgtctg

SEQ ID NO: 1344058 - DNA, 15 bp, Homo sapiens
tgcaccaccacgtct

SEQ ID NO: 1344059 - DNA, 15 bp, Homo sapiens
gtgcaccaccacgtc

SEQ ID NO: 1344060 - DNA, 15 bp, Homo sapiens
tgtgcaccaccacgt

SEQ ID NO: 1344061 - DNA, 15 bp, Homo sapiens
gtgtgcaccaccacg

SEQ ID NO: 1344062 - DNA, 15 bp, Homo sapiens
ttacaggtgtgcacc

SEQ ID NO: 1344063 - DNA, 15 bp, Homo sapiens
attacaggtgtgcac

SEQ ID NO: 1344064 - DNA, 15 bp, Homo sapiens
aattacaggtgtgca

SEQ ID NO: 1344065 - DNA, 15 bp, Homo sapiens
gaattacaggtgtgc

SEQ ID NO: 1344066 - DNA, 15 bp, Homo sapiens
gctgcctcagcctcc

SEQ ID NO: 1344067 - DNA, 15 bp, Homo sapiens
tgctgcctcagcctc

SEQ ID NO: 1344068 - DNA, 15 bp, Homo sapiens
ctgctgcctcagcct

SEQ ID NO: 1344069 - DNA, 15 bp, Homo sapiens
gattctgctgcctca

SEQ ID NO: 1344070 - DNA, 15 bp, Homo sapiens
tgattctgctgcctc

SEQ ID NO: 1344071 - DNA, 15 bp, Homo sapiens
gtgattctgctgcct

SEQ ID NO: 1344072 - DNA, 15 bp, Homo sapiens
agtgattctgctgcc

SEQ ID NO: 1344073 - DNA, 15 bp, Homo sapiens
aagtgattctgctgc

SEQ ID NO: 1344074 - DNA, 15 bp, Homo sapiens
caagtgattctgctg

SEQ ID NO: 1344075 - DNA, 15 bp, Homo sapiens
tcaagtgattctgct

SEQ ID NO: 1344076 - DNA, 15 bp, Homo sapiens
ttcaagtgattctgc

SEQ ID NO: 1344077 - DNA, 15 bp, Homo sapiens
gttcaagtgattctg

SEQ ID NO: 1344078 - DNA, 15 bp, Homo sapiens
gagtggtgcgatctc

SEQ ID NO: 1344079 - DNA, 15 bp, Homo sapiens
agagtggtgcgatct

SEQ ID NO: 1344080 - DNA, 15 bp, Homo sapiens
tagagtggtgcgatc

SEQ ID NO: 1344081 - DNA, 15 bp, Homo sapiens
gtagagtggtgcgat

SEQ ID NO: 1344082 - DNA, 15 bp, Homo sapiens
agtagagtggtgcga

SEQ ID NO: 1344083 - DNA, 15 bp, Homo sapiens
gagtagagtggtgcg

SEQ ID NO: 1344084 - DNA, 15 bp, Homo sapiens
ggagtagagtggtgc

SEQ ID NO: 1344085 - DNA, 15 bp, Homo sapiens
tggagtagagtggtg

SEQ ID NO: 1344086 - DNA, 15 bp, Homo sapiens
ctggagtagagtggt

SEQ ID NO: 1344087 - DNA, 15 bp, Homo sapiens
gctggagtagagtgg

SEQ ID NO: 1344088 - DNA, 15 bp, Homo sapiens
ggctggagtagagtg

SEQ ID NO: 1344089 - DNA, 15 bp, Homo sapiens
aggctggagtagagt

SEQ ID NO: 1344090 - DNA, 15 bp, Homo sapiens
caggctggagtagag

SEQ ID NO: 1344091 - DNA, 15 bp, Homo sapiens
tcaggctggagtaga

SEQ ID NO: 1344092 - DNA, 15 bp, Homo sapiens
atcaggctggagtag

SEQ ID NO: 1344093 - DNA, 15 bp, Homo sapiens
aatcaggctggagta

SEQ ID NO: 1344094 - DNA, 15 bp, Homo sapiens
caatcaggctggagt

SEQ ID NO: 1344095 - DNA, 15 bp, Homo sapiens
tcaatcaggctggag

SEQ ID NO: 1344096 - DNA, 15 bp, Homo sapiens
gtcaatcaggctgga

SEQ ID NO: 1344097 - DNA, 15 bp, Homo sapiens
tgtcaatcaggctgg

SEQ ID NO: 1344098 - DNA, 15 bp, Homo sapiens
ctgtcaatcaggctg

SEQ ID NO: 1344099 - DNA, 15 bp, Homo sapiens
tctgtcaatcaggct

SEQ ID NO: 1344100 - DNA, 15 bp, Homo sapiens
ctctgtcaatcaggc

SEQ ID NO: 1344101 - DNA, 15 bp, Homo sapiens
actctgtcaatcagg

SEQ ID NO: 1344102 - DNA, 15 bp, Homo sapiens
cactctgtcaatcag

SEQ ID NO: 1344103 - DNA, 15 bp, Homo sapiens
tcactctgtcaatca

SEQ ID NO: 1344104 - DNA, 15 bp, Homo sapiens
ctcactctgtcaatc

SEQ ID NO: 1344105 - DNA, 15 bp, Homo sapiens
tctcactctgtcaat

SEQ ID NO: 1344106 - DNA, 15 bp, Homo sapiens
gtctcactctgtcaa

SEQ ID NO: 1344107 - DNA, 15 bp, Homo sapiens
gtaatttcttttttt

SEQ ID NO: 1344108 - DNA, 15 bp, Homo sapiens
agtaatttctttttt

SEQ ID NO: 1344109 - DNA, 15 bp, Homo sapiens
gagtaatttcttttt

SEQ ID NO: 1344110 - DNA, 15 bp, Homo sapiens
agagtaatttctttt

SEQ ID NO: 1344111 - DNA, 15 bp, Homo sapiens
gagagtaatttcttt

SEQ ID NO: 1344112 - DNA, 15 bp, Homo sapiens
cagagagtaatttct

SEQ ID NO: 1344113 - DNA, 15 bp, Homo sapiens
tcagagagtaatttc

SEQ ID NO: 1344114 - DNA, 15 bp, Homo sapiens
ctcagagagtaattt

SEQ ID NO: 1344115 - DNA, 15 bp, Homo sapiens
gctcagagagtaatt

SEQ ID NO: 1344116 - DNA, 15 bp, Homo sapiens
tgctcagagagtaat

SEQ ID NO: 1344117 - DNA, 15 bp, Homo sapiens
gtgctcagagagtaa

SEQ ID NO: 1344118 - DNA, 15 bp, Homo sapiens
ggtgctcagagagta

SEQ ID NO: 1344119 - DNA, 15 bp, Homo sapiens
tggtgctcagagagt

SEQ ID NO: 1344120 - DNA, 15 bp, Homo sapiens
ctggtgctcagagag

SEQ ID NO: 1344121 - DNA, 15 bp, Homo sapiens
actggtgctcagaga

SEQ ID NO: 1344122 - DNA, 15 bp, Homo sapiens
cactggtgctcagag

SEQ ID NO: 1344123 - DNA, 15 bp, Homo sapiens
acactggtgctcaga

SEQ ID NO: 1344124 - DNA, 15 bp, Homo sapiens
cacactggtgctcag

SEQ ID NO: 1344125 - DNA, 15 bp, Homo sapiens
acacactggtgctca

SEQ ID NO: 1344126 - DNA, 15 bp, Homo sapiens
aacacactggtgctc

SEQ ID NO: 1344127 - DNA, 15 bp, Homo sapiens
taacacactggtgct

SEQ ID NO: 1344128 - DNA, 15 bp, Homo sapiens
gtaacacactggtgc

SEQ ID NO: 1344129 - DNA, 15 bp, Homo sapiens
tgtaacacactggtg

SEQ ID NO: 1344130 - DNA, 15 bp, Homo sapiens
ctgtaacacactggt

SEQ ID NO: 1344131 - DNA, 15 bp, Homo sapiens
actgtaacacactgg

SEQ ID NO: 1344132 - DNA, 15 bp, Homo sapiens
cactgtaacacactg

SEQ ID NO: 1344133 - DNA, 15 bp, Homo sapiens
acactgtaacacact

SEQ ID NO: 1344134 - DNA, 15 bp, Homo sapiens
cacactgtaacacac

SEQ ID NO: 1344135 - DNA, 15 bp, Homo sapiens
gcacactgtaacaca

SEQ ID NO: 1344136 - DNA, 15 bp, Homo sapiens
agcacactgtaacac

SEQ ID NO: 1344137 - DNA, 15 bp, Homo sapiens
aagcacactgtaaca

SEQ ID NO: 1344138 - DNA, 15 bp, Homo sapiens
taagcacactgtaac

SEQ ID NO: 1344139 - DNA, 15 bp, Homo sapiens
ctaagcacactgtaa

SEQ ID NO: 1344140 - DNA, 15 bp, Homo sapiens
gctaagcacactgta

SEQ ID NO: 1344141 - DNA, 15 bp, Homo sapiens
agctaagcacactgt

SEQ ID NO: 1344142 - DNA, 15 bp, Homo sapiens
cagctaagcacactg

SEQ ID NO: 1344143 - DNA, 15 bp, Homo sapiens
acagctaagcacact

SEQ ID NO: 1344144 - DNA, 15 bp, Homo sapiens
cacagctaagcacac

SEQ ID NO: 1344145 - DNA, 15 bp, Homo sapiens
ccacagctaagcaca

SEQ ID NO: 1344146 - DNA, 15 bp, Homo sapiens
accacagctaagcac

SEQ ID NO: 1344147 - DNA, 15 bp, Homo sapiens
taccacagctaagca

SEQ ID NO: 1344148 - DNA, 15 bp, Homo sapiens
gtaccacagctaagc

SEQ ID NO: 1344149 - DNA, 15 bp, Homo sapiens
ggtaccacagctaag

SEQ ID NO: 1344150 - DNA, 15 bp, Homo sapiens
tggtaccacagctaa

SEQ ID NO: 1344151 - DNA, 15 bp, Homo sapiens
gtggtaccacagcta

SEQ ID NO: 1344152 - DNA, 15 bp, Homo sapiens
agtggtaccacagct

SEQ ID NO: 1344153 - DNA, 15 bp, Homo sapiens
aagtggtaccacagc

SEQ ID NO: 1344154 - DNA, 15 bp, Homo sapiens
aaagtggtaccacag

SEQ ID NO: 1344155 - DNA, 15 bp, Homo sapiens
caaagtggtaccaca

SEQ ID NO: 1344156 - DNA, 15 bp, Homo sapiens
ccaaagtggtaccac

SEQ ID NO: 1344157 - DNA, 15 bp, Homo sapiens
tccaaagtggtacca

SEQ ID NO: 1344158 - DNA, 15 bp, Homo sapiens
atccaaagtggtacc

SEQ ID NO: 1344159 - DNA, 15 bp, Homo sapiens
aatccaaagtggtac

SEQ ID NO: 1344160 - DNA, 15 bp, Homo sapiens
gaatccaaagtggta

SEQ ID NO: 1344161 - DNA, 15 bp, Homo sapiens
agaatccaaagtggt

SEQ ID NO: 1344162 - DNA, 15 bp, Homo sapiens
aagaatccaaagtgg

SEQ ID NO: 1344163 - DNA, 15 bp, Homo sapiens
aaagaatccaaagtg

SEQ ID NO: 1344164 - DNA, 15 bp, Homo sapiens
gaaagaatccaaagt

SEQ ID NO: 1344165 - DNA, 15 bp, Homo sapiens
tgaaagaatccaaag

SEQ ID NO: 1344166 - DNA, 15 bp, Homo sapiens
gtgaaagaatccaaa

SEQ ID NO: 1344167 - DNA, 15 bp, Homo sapiens
tgtgaaagaatccaa

SEQ ID NO: 1344168 - DNA, 15 bp, Homo sapiens
gtgtgaaagaatcca

SEQ ID NO: 1344169 - DNA, 15 bp, Homo sapiens
tgtgtgaaagaatcc

SEQ ID NO: 1344170 - DNA, 15 bp, Homo sapiens
ttgtgtgaaagaatc

SEQ ID NO: 1344171 - DNA, 15 bp, Homo sapiens
cttgtgtgaaagaat

SEQ ID NO: 1344172 - DNA, 15 bp, Homo sapiens
tcttgtgtgaaagaa

SEQ ID NO: 1344173 - DNA, 15 bp, Homo sapiens
ttcttgtgtgaaaga

SEQ ID NO: 1344174 - DNA, 15 bp, Homo sapiens
gttcttgtgtgaaag

SEQ ID NO: 1344175 - DNA, 15 bp, Homo sapiens
tgttcttgtgtgaaa

SEQ ID NO: 1344176 - DNA, 15 bp, Homo sapiens
ctgttcttgtgtgaa

SEQ ID NO: 1344177 - DNA, 15 bp, Homo sapiens
actgttcttgtgtga

SEQ ID NO: 1344178 - DNA, 15 bp, Homo sapiens
aactgttcttgtgtg

SEQ ID NO: 1344179 - DNA, 15 bp, Homo sapiens
taactgttcttgtgt

SEQ ID NO: 1344180 - DNA, 15 bp, Homo sapiens
ttaactgttcttgtg

SEQ ID NO: 1344181 - DNA, 15 bp, Homo sapiens
cttaactgttcttgt

SEQ ID NO: 1344182 - DNA, 15 bp, Homo sapiens
ccttaactgttcttg

SEQ ID NO: 1344183 - DNA, 15 bp, Homo sapiens
gccttaactgttctt

SEQ ID NO: 1344184 - DNA, 15 bp, Homo sapiens
ggccttaactgttct

SEQ ID NO: 1344185 - DNA, 15 bp, Homo sapiens
tggccttaactgttc

SEQ ID NO: 1344186 - DNA, 15 bp, Homo sapiens
ctggccttaactgtt

SEQ ID NO: 1344187 - DNA, 15 bp, Homo sapiens
actggccttaactgt

SEQ ID NO: 1344188 - DNA, 15 bp, Homo sapiens
aactggccttaactg

SEQ ID NO: 1344189 - DNA, 15 bp, Homo sapiens
aaactggccttaact

SEQ ID NO: 1344190 - DNA, 15 bp, Homo sapiens
aaaactggccttaac

SEQ ID NO: 1344191 - DNA, 15 bp, Homo sapiens
taaaactggccttaa

SEQ ID NO: 1344192 - DNA, 15 bp, Homo sapiens
ttaaaactggcctta

SEQ ID NO: 1344193 - DNA, 15 bp, Homo sapiens
tttaaaactggcctt

SEQ ID NO: 1344194 - DNA, 15 bp, Homo sapiens
ctttaaaactggcct

SEQ ID NO: 1344195 - DNA, 15 bp, Homo sapiens
gctttaaaactggcc

SEQ ID NO: 1344196 - DNA, 15 bp, Homo sapiens
agctttaaaactggc

SEQ ID NO: 1344197 - DNA, 15 bp, Homo sapiens
cagctttaaaactgg

SEQ ID NO: 1344198 - DNA, 15 bp, Homo sapiens
acagctttaaaactg

SEQ ID NO: 1344199 - DNA, 15 bp, Homo sapiens
cacagctttaaaact

SEQ ID NO: 1344200 - DNA, 15 bp, Homo sapiens
ccacagctttaaaac

SEQ ID NO: 1344201 - DNA, 15 bp, Homo sapiens
cccacagctttaaaa

SEQ ID NO: 1344202 - DNA, 15 bp, Homo sapiens
ccccacagctttaaa

SEQ ID NO: 1344203 - DNA, 15 bp, Homo sapiens
gccccacagctttaa

SEQ ID NO: 1344204 - DNA, 15 bp, Homo sapiens
ggccccacagcttta

SEQ ID NO: 1344205 - DNA, 15 bp, Homo sapiens
tggccccacagcttt

SEQ ID NO: 1344206 - DNA, 15 bp, Homo sapiens
atggccccacagctt

SEQ ID NO: 1344207 - DNA, 15 bp, Homo sapiens
aatggccccacagct

SEQ ID NO: 1344208 - DNA, 15 bp, Homo sapiens
aaatggccccacagc

SEQ ID NO: 1344209 - DNA, 15 bp, Homo sapiens
gaaatggccccacag

SEQ ID NO: 1344210 - DNA, 15 bp, Homo sapiens
agaaatggccccaca

SEQ ID NO: 1344211 - DNA, 15 bp, Homo sapiens
cagaaatggccccac

SEQ ID NO: 1344212 - DNA, 15 bp, Homo sapiens
tcagaaatggcccca

SEQ ID NO: 1344213 - DNA, 15 bp, Homo sapiens
ttcagaaatggcccc

SEQ ID NO: 1344214 - DNA, 15 bp, Homo sapiens
gttcagaaatggccc

SEQ ID NO: 1344215 - DNA, 15 bp, Homo sapiens
agttcagaaatggcc

SEQ ID NO: 1344216 - DNA, 15 bp, Homo sapiens
cagttcagaaatggc

SEQ ID NO: 1344217 - DNA, 15 bp, Homo sapiens
acagttcagaaatgg

SEQ ID NO: 1344218 - DNA, 15 bp, Homo sapiens
tacagttcagaaatg

SEQ ID NO: 1344219 - DNA, 15 bp, Homo sapiens
atacagttcagaaat

SEQ ID NO: 1344220 - DNA, 15 bp, Homo sapiens
aatacagttcagaaa

SEQ ID NO: 1344221 - DNA, 15 bp, Homo sapiens
aaatacagttcagaa

SEQ ID NO: 1344222 - DNA, 15 bp, Homo sapiens
aaaatacagttcaga

SEQ ID NO: 1344223 - DNA, 15 bp, Homo sapiens
caaaatacagttcag

SEQ ID NO: 1344224 - DNA, 15 bp, Homo sapiens
acaaaatacagttca

SEQ ID NO: 1344225 - DNA, 15 bp, Homo sapiens
aacaaaatacagttc

SEQ ID NO: 1344226 - DNA, 15 bp, Homo sapiens
aaacaaaatacagtt

SEQ ID NO: 1344227 - DNA, 15 bp, Homo sapiens
aaaacaaaatacagt

SEQ ID NO: 1344228 - DNA, 15 bp, Homo sapiens
aaaaacaaaatacag

SEQ ID NO: 1344229 - DNA, 15 bp, Homo sapiens
aaaaaacaaaataca

SEQ ID NO: 1344230 - DNA, 15 bp, Homo sapiens
aaaaaaacaaaatac

SEQ ID NO: 1344231 - DNA, 15 bp, Homo sapiens
atctccaaaaaaaaa

SEQ ID NO: 1344232 - DNA, 15 bp, Homo sapiens
catctccaaaaaaaa

SEQ ID NO: 1344233 - DNA, 15 bp, Homo sapiens
tcatctccaaaaaaa

SEQ ID NO: 1344234 - DNA, 15 bp, Homo sapiens
ttcatctccaaaaaa

SEQ ID NO: 1344235 - DNA, 15 bp, Homo sapiens
cttcatctccaaaaa

SEQ ID NO: 1344236 - DNA, 15 bp, Homo sapiens
acttcatctccaaaa

SEQ ID NO: 1344237 - DNA, 15 bp, Homo sapiens
aacttcatctccaaa

SEQ ID NO: 1344238 - DNA, 15 bp, Homo sapiens
aaacttcatctccaa

SEQ ID NO: 1344239 - DNA, 15 bp, Homo sapiens
gaaacttcatctcca

SEQ ID NO: 1344240 - DNA, 15 bp, Homo sapiens
tgaaacttcatctcc

SEQ ID NO: 1344241 - DNA, 15 bp, Homo sapiens
gtgaaacttcatctc

SEQ ID NO: 1344242 - DNA, 15 bp, Homo sapiens
agtgaaacttcatct

SEQ ID NO: 1344243 - DNA, 15 bp, Homo sapiens
gagtgaaacttcatc

SEQ ID NO: 1344244 - DNA, 15 bp, Homo sapiens
agagtgaaacttcat

SEQ ID NO: 1344245 - DNA, 15 bp, Homo sapiens
aagagtgaaacttca

SEQ ID NO: 1344246 - DNA, 15 bp, Homo sapiens
caagagtgaaacttc

SEQ ID NO: 1344247 - DNA, 15 bp, Homo sapiens
acaagagtgaaactt

SEQ ID NO: 1344248 - DNA, 15 bp, Homo sapiens
agcaacaagagtgaa

SEQ ID NO: 1344249 - DNA, 15 bp, Homo sapiens
gagcaacaagagtga

SEQ ID NO: 1344250 - DNA, 15 bp, Homo sapiens
tgagcaacaagagtg

SEQ ID NO: 1344251 - DNA, 15 bp, Homo sapiens
ctgagcaacaagagt

SEQ ID NO: 1344252 - DNA, 15 bp, Homo sapiens
cgcactccagcctga

SEQ ID NO: 1344253 - DNA, 15 bp, Homo sapiens
tcgcactccagcctg

SEQ ID NO: 1344254 - DNA, 15 bp, Homo sapiens
atcgcactccagcct

SEQ ID NO: 1344255 - DNA, 15 bp, Homo sapiens
catcgcactccagcc

SEQ ID NO: 1344256 - DNA, 15 bp, Homo sapiens
ccatcgcactccagc

SEQ ID NO: 1344257 - DNA, 15 bp, Homo sapiens
accatcgcactccag

SEQ ID NO: 1344258 - DNA, 15 bp, Homo sapiens
caccatcgcactcca

SEQ ID NO: 1344259 - DNA, 15 bp, Homo sapiens
acaccatcgcactcc

SEQ ID NO: 1344260 - DNA, 15 bp, Homo sapiens
cacaccatcgcactc

SEQ ID NO: 1344261 - DNA, 15 bp, Homo sapiens
tcacaccatcgcact

SEQ ID NO: 1344262 - DNA, 15 bp, Homo sapiens
atcacaccatcgcac

SEQ ID NO: 1344263 - DNA, 15 bp, Homo sapiens
gatcacaccatcgca

SEQ ID NO: 1344264 - DNA, 15 bp, Homo sapiens
agatcacaccatcgc

SEQ ID NO: 1344265 - DNA, 15 bp, Homo sapiens
gagatcacaccatcg

SEQ ID NO: 1344266 - DNA, 15 bp, Homo sapiens
cgagatcacaccatc

SEQ ID NO: 1344267 - DNA, 15 bp, Homo sapiens
ccgagatcacaccat

SEQ ID NO: 1344268 - DNA, 15 bp, Homo sapiens
aagtgagccgagatc

SEQ ID NO: 1344269 - DNA, 15 bp, Homo sapiens
caagtgagccgagat

SEQ ID NO: 1344270 - DNA, 15 bp, Homo sapiens
gcaagtgagccgaga

SEQ ID NO: 1344271 - DNA, 15 bp, Homo sapiens
tgcaagtgagccgag

SEQ ID NO: 1344272 - DNA, 15 bp, Homo sapiens
ttgcaagtgagccga

SEQ ID NO: 1344273 - DNA, 15 bp, Homo sapiens
gttgcaagtgagccg

SEQ ID NO: 1344274 - DNA, 15 bp, Homo sapiens
ggttgcaagtgagcc

SEQ ID NO: 1344275 - DNA, 15 bp, Homo sapiens
aggttgcaagtgagc

SEQ ID NO: 1344276 - DNA, 15 bp, Homo sapiens
gaggttgcaagtgag

SEQ ID NO: 1344277 - DNA, 15 bp, Homo sapiens
ggaggttgcaagtga

SEQ ID NO: 1344278 - DNA, 15 bp, Homo sapiens
cggaggttgcaagtg

SEQ ID NO: 1344279 - DNA, 15 bp, Homo sapiens
gcggaggttgcaagt

SEQ ID NO: 1344280 - DNA, 15 bp, Homo sapiens
ggcggaggttgcaag

SEQ ID NO: 1344281 - DNA, 15 bp, Homo sapiens
gattgcttgaacctg

SEQ ID NO: 1344282 - DNA, 15 bp, Homo sapiens
agattgcttgaacct

SEQ ID NO: 1344283 - DNA, 15 bp, Homo sapiens
gagattgcttgaacc

SEQ ID NO: 1344284 - DNA, 15 bp, Homo sapiens
ggagattgcttgaac

SEQ ID NO: 1344285 - DNA, 15 bp, Homo sapiens
aggagattgcttgaa

SEQ ID NO: 1344286 - DNA, 15 bp, Homo sapiens
caggagattgcttga

SEQ ID NO: 1344287 - DNA, 15 bp, Homo sapiens
gcaggagattgcttg

SEQ ID NO: 1344288 - DNA, 15 bp, Homo sapiens
ggcaggagattgctt

SEQ ID NO: 1344289 - DNA, 15 bp, Homo sapiens
aggcaggagattgct

SEQ ID NO: 1344290 - DNA, 15 bp, Homo sapiens
aaggcaggagattgc

SEQ ID NO: 1344291 - DNA, 15 bp, Homo sapiens
taaggcaggagattg

SEQ ID NO: 1344292 - DNA, 15 bp, Homo sapiens
ctaaggcaggagatt

SEQ ID NO: 1344293 - DNA, 15 bp, Homo sapiens
gctaaggcaggagat

SEQ ID NO: 1344294 - DNA, 15 bp, Homo sapiens
agaggctaaggcagg

SEQ ID NO: 1344295 - DNA, 15 bp, Homo sapiens
aagaggctaaggcag

SEQ ID NO: 1344296 - DNA, 15 bp, Homo sapiens
caagaggctaaggca

SEQ ID NO: 1344297 - DNA, 15 bp, Homo sapiens
tcaagaggctaaggc

SEQ ID NO: 1344298 - DNA, 15 bp, Homo sapiens
ctcaagaggctaagg

SEQ ID NO: 1344299 - DNA, 15 bp, Homo sapiens
actcaagaggctaag

SEQ ID NO: 1344300 - DNA, 15 bp, Homo sapiens
tactcaagaggctaa

SEQ ID NO: 1344301 - DNA, 15 bp, Homo sapiens
ctactcaagaggcta

SEQ ID NO: 1344302 - DNA, 15 bp, Homo sapiens
tctactcaagaggct

SEQ ID NO: 1344303 - DNA, 15 bp, Homo sapiens
gtctactcaagaggc

SEQ ID NO: 1344304 - DNA, 15 bp, Homo sapiens
agtctactcaagagg

SEQ ID NO: 1344305 - DNA, 15 bp, Homo sapiens
aagtctactcaagag

SEQ ID NO: 1344306 - DNA, 15 bp, Homo sapiens
caagtctactcaaga

SEQ ID NO: 1344307 - DNA, 15 bp, Homo sapiens
tcaagtctactcaag

SEQ ID NO: 1344308 - DNA, 15 bp, Homo sapiens
atcaagtctactcaa

SEQ ID NO: 1344309 - DNA, 15 bp, Homo sapiens
aatcaagtctactca

SEQ ID NO: 1344310 - DNA, 15 bp, Homo sapiens
taatcaagtctactc

SEQ ID NO: 1344311 - DNA, 15 bp, Homo sapiens
ataatcaagtctact

SEQ ID NO: 1344312 - DNA, 15 bp, Homo sapiens
cataatcaagtctac

SEQ ID NO: 1344313 - DNA, 15 bp, Homo sapiens
ccataatcaagtcta

SEQ ID NO: 1344314 - DNA, 15 bp, Homo sapiens
cccataatcaagtct

SEQ ID NO: 1344315 - DNA, 15 bp, Homo sapiens
tcccataatcaagtc

SEQ ID NO: 1344316 - DNA, 15 bp, Homo sapiens
atcccataatcaagt

SEQ ID NO: 1344317 - DNA, 15 bp, Homo sapiens
gatcccataatcaag

SEQ ID NO: 1344318 - DNA, 15 bp, Homo sapiens
agatcccataatcaa

SEQ ID NO: 1344319 - DNA, 15 bp, Homo sapiens
aagatcccataatca

SEQ ID NO: 1344320 - DNA, 15 bp, Homo sapiens
caagatcccataatc

SEQ ID NO: 1344321 - DNA, 15 bp, Homo sapiens
ccaagatcccataat

SEQ ID NO: 1344322 - DNA, 15 bp, Homo sapiens
gccaagatcccataa

SEQ ID NO: 1344323 - DNA, 15 bp, Homo sapiens
agccaagatcccata

SEQ ID NO: 1344324 - DNA, 15 bp, Homo sapiens
gagccaagatcccat

SEQ ID NO: 1344325 - DNA, 15 bp, Homo sapiens
tgagccaagatccca

SEQ ID NO: 1344326 - DNA, 15 bp, Homo sapiens
gtgagccaagatccc

SEQ ID NO: 1344327 - DNA, 15 bp, Homo sapiens
agcagaggttgcagt

SEQ ID NO: 1344328 - DNA, 15 bp, Homo sapiens
aagcagaggttgcag

SEQ ID NO: 1344329 - DNA, 15 bp, Homo sapiens
gaagcagaggttgca

SEQ ID NO: 1344330 - DNA, 15 bp, Homo sapiens
ggaagcagaggttgc

SEQ ID NO: 1344331 - DNA, 15 bp, Homo sapiens
gggaagcagaggttg

SEQ ID NO: 1344332 - DNA, 15 bp, Homo sapiens
tgggaagcagaggtt

SEQ ID NO: 1344333 - DNA, 15 bp, Homo sapiens
ctgggaagcagaggt

SEQ ID NO: 1344334 - DNA, 15 bp, Homo sapiens
cctgggaagcagagg

SEQ ID NO: 1344335 - DNA, 15 bp, Homo sapiens
acctgggaagcagag

SEQ ID NO: 1344336 - DNA, 15 bp, Homo sapiens
aacctgggaagcaga

SEQ ID NO: 1344337 - DNA, 15 bp, Homo sapiens
gaacctgggaagcag

SEQ ID NO: 1344338 - DNA, 15 bp, Homo sapiens
tgaacctgggaagca

SEQ ID NO: 1344339 - DNA, 15 bp, Homo sapiens
tttgaacctgggaag

SEQ ID NO: 1344340 - DNA, 15 bp, Homo sapiens
gtttgaacctgggaa

SEQ ID NO: 1344341 - DNA, 15 bp, Homo sapiens
tgtttgaacctggga

SEQ ID NO: 1344342 - DNA, 15 bp, Homo sapiens
ctgtttgaacctggg

SEQ ID NO: 1344343 - DNA, 15 bp, Homo sapiens
actgtttgaacctgg

SEQ ID NO: 1344344 - DNA, 15 bp, Homo sapiens
aactgtttgaacctg

SEQ ID NO: 1344345 - DNA, 15 bp, Homo sapiens
gaactgtttgaacct

SEQ ID NO: 1344346 - DNA, 15 bp, Homo sapiens
agaactgtttgaacc

SEQ ID NO: 1344347 - DNA, 15 bp, Homo sapiens
cagaactgtttgaac

SEQ ID NO: 1344348 - DNA, 15 bp, Homo sapiens
gcagaactgtttgaa

SEQ ID NO: 1344349 - DNA, 15 bp, Homo sapiens
ggcagaactgtttga

SEQ ID NO: 1344350 - DNA, 15 bp, Homo sapiens
aggcagaactgtttg

SEQ ID NO: 1344351 - DNA, 15 bp, Homo sapiens
aaggcagaactgttt

SEQ ID NO: 1344352 - DNA, 15 bp, Homo sapiens
taaggcagaactgtt

SEQ ID NO: 1344353 - DNA, 15 bp, Homo sapiens
ctaaggcagaactgt

SEQ ID NO: 1344354 - DNA, 15 bp, Homo sapiens
gctaaggcagaactg

SEQ ID NO: 1344355 - DNA, 15 bp, Homo sapiens
ggctaaggcagaact

SEQ ID NO: 1344356 - DNA, 15 bp, Homo sapiens
aggctaaggcagaac

SEQ ID NO: 1344357 - DNA, 15 bp, Homo sapiens
caggctaaggcagaa

SEQ ID NO: 1344358 - DNA, 15 bp, Homo sapiens
gcaggctaaggcaga

SEQ ID NO: 1344359 - DNA, 15 bp, Homo sapiens
agcaggctaaggcag

SEQ ID NO: 1344360 - DNA, 15 bp, Homo sapiens
cagcaggctaaggca

SEQ ID NO: 1344361 - DNA, 15 bp, Homo sapiens
tcagcaggctaaggc

SEQ ID NO: 1344362 - DNA, 15 bp, Homo sapiens
ctcagcaggctaagg

SEQ ID NO: 1344363 - DNA, 15 bp, Homo sapiens
actcagcaggctaag

SEQ ID NO: 1344364 - DNA, 15 bp, Homo sapiens
tactcagcaggctaa

SEQ ID NO: 1344365 - DNA, 15 bp, Homo sapiens
ctactcagcaggcta

SEQ ID NO: 1344366 - DNA, 15 bp, Homo sapiens
gcgggcacctgtaat

SEQ ID NO: 1344367 - DNA, 15 bp, Homo sapiens
ggcgggcacctgtaa

SEQ ID NO: 1344368 - DNA, 15 bp, Homo sapiens
atggtggcgggcacc

SEQ ID NO: 1344369 - DNA, 15 bp, Homo sapiens
catggtggcgggcac

SEQ ID NO: 1344370 - DNA, 15 bp, Homo sapiens
gcatggtggcgggca

SEQ ID NO: 1344371 - DNA, 15 bp, Homo sapiens
agcatggtggcgggc

SEQ ID NO: 1344372 - DNA, 15 bp, Homo sapiens
aagcatggtggcggg

SEQ ID NO: 1344373 - DNA, 15 bp, Homo sapiens
caagcatggtggcgg

SEQ ID NO: 1344374 - DNA, 15 bp, Homo sapiens
ccaagcatggtggcg

SEQ ID NO: 1344375 - DNA, 15 bp, Homo sapiens
gccaagcatggtggc

SEQ ID NO: 1344376 - DNA, 15 bp, Homo sapiens
agccaagcatggtgg

SEQ ID NO: 1344377 - DNA, 15 bp, Homo sapiens
tagccaagcatggtg

SEQ ID NO: 1344378 - DNA, 15 bp, Homo sapiens
ttagccaagcatggt

SEQ ID NO: 1344379 - DNA, 15 bp, Homo sapiens
attagccaagcatgg

SEQ ID NO: 1344380 - DNA, 15 bp, Homo sapiens
caaaattagccaagc

SEQ ID NO: 1344381 - DNA, 15 bp, Homo sapiens
acaaaattagccaag

SEQ ID NO: 1344382 - DNA, 15 bp, Homo sapiens
tacaaaattagccaa

SEQ ID NO: 1344383 - DNA, 15 bp, Homo sapiens
aagagttcgagacca

SEQ ID NO: 1344384 - DNA, 15 bp, Homo sapiens
caagagttcgagacc

SEQ ID NO: 1344385 - DNA, 15 bp, Homo sapiens
tcaagagttcgagac

SEQ ID NO: 1344386 - DNA, 15 bp, Homo sapiens
gtcaagagttcgaga

SEQ ID NO: 1344387 - DNA, 15 bp, Homo sapiens
ggtcaagagttcgag

SEQ ID NO: 1344388 - DNA, 15 bp, Homo sapiens
aggtcaagagttcga

SEQ ID NO: 1344389 - DNA, 15 bp, Homo sapiens
aaggtcaagagttcg

SEQ ID NO: 1344390 - DNA, 15 bp, Homo sapiens
caaggtcaagagttc

SEQ ID NO: 1344391 - DNA, 15 bp, Homo sapiens
acaaggtcaagagtt

SEQ ID NO: 1344392 - DNA, 15 bp, Homo sapiens
cacaaggtcaagagt

SEQ ID NO: 1344393 - DNA, 15 bp, Homo sapiens
atcacaaggtcaaga

SEQ ID NO: 1344394 - DNA, 15 bp, Homo sapiens
aatcacaaggtcaag

SEQ ID NO: 1344395 - DNA, 15 bp, Homo sapiens
gaatcacaaggtcaa

SEQ ID NO: 1344396 - DNA, 15 bp, Homo sapiens
tgaatcacaaggtca

SEQ ID NO: 1344397 - DNA, 15 bp, Homo sapiens
gtgaatcacaaggtc

SEQ ID NO: 1344398 - DNA, 15 bp, Homo sapiens
ggtgaatcacaaggt

SEQ ID NO: 1344399 - DNA, 15 bp, Homo sapiens
gggtgaatcacaagg

SEQ ID NO: 1344400 - DNA, 15 bp, Homo sapiens
tgggtgaatcacaag

SEQ ID NO: 1344401 - DNA, 15 bp, Homo sapiens
gtgggtgaatcacaa

SEQ ID NO: 1344402 - DNA, 15 bp, Homo sapiens
ggtgggtgaatcaca

SEQ ID NO: 1344403 - DNA, 15 bp, Homo sapiens
aggtgggtgaatcac

SEQ ID NO: 1344404 - DNA, 15 bp, Homo sapiens
gaggtgggtgaatca

SEQ ID NO: 1344405 - DNA, 15 bp, Homo sapiens
agaggtgggtgaatc

SEQ ID NO: 1344406 - DNA, 15 bp, Homo sapiens
cagaggtgggtgaat

SEQ ID NO: 1344407 - DNA, 15 bp, Homo sapiens
gcagaggtgggtgaa

SEQ ID NO: 1344408 - DNA, 15 bp, Homo sapiens
ggcagaggtgggtga

SEQ ID NO: 1344409 - DNA, 15 bp, Homo sapiens
tgggaggcagaggtg

SEQ ID NO: 1344410 - DNA, 15 bp, Homo sapiens
accagcactttggga

SEQ ID NO: 1344411 - DNA, 15 bp, Homo sapiens
taccagcactttggg

SEQ ID NO: 1344412 - DNA, 15 bp, Homo sapiens
ataccagcactttgg

SEQ ID NO: 1344413 - DNA, 15 bp, Homo sapiens
gtaataccagcactt

SEQ ID NO: 1344414 - DNA, 15 bp, Homo sapiens
tgtaataccagcact

SEQ ID NO: 1344415 - DNA, 15 bp, Homo sapiens
ctgtaataccagcac

SEQ ID NO: 1344416 - DNA, 15 bp, Homo sapiens
cctgtaataccagca

SEQ ID NO: 1344417 - DNA, 15 bp, Homo sapiens
atgcctgtaatacca

SEQ ID NO: 1344418 - DNA, 15 bp, Homo sapiens
catgcctgtaatacc

SEQ ID NO: 1344419 - DNA, 15 bp, Homo sapiens
tcatgcctgtaatac

SEQ ID NO: 1344420 - DNA, 15 bp, Homo sapiens
ctcatgcctgtaata

SEQ ID NO: 1344421 - DNA, 15 bp, Homo sapiens
taggcacagtggctc

SEQ ID NO: 1344422 - DNA, 15 bp, Homo sapiens
ggctaggcacagtgg

SEQ ID NO: 1344423 - DNA, 15 bp, Homo sapiens
tggctaggcacagtg

SEQ ID NO: 1344424 - DNA, 15 bp, Homo sapiens
ttggctaggcacagt

SEQ ID NO: 1344425 - DNA, 15 bp, Homo sapiens
attggctaggcacag

SEQ ID NO: 1344426 - DNA, 15 bp, Homo sapiens
aattggctaggcaca

SEQ ID NO: 1344427 - DNA, 15 bp, Homo sapiens
aaattggctaggcac

SEQ ID NO: 1344428 - DNA, 15 bp, Homo sapiens
aaaattggctaggca

SEQ ID NO: 1344429 - DNA, 15 bp, Homo sapiens
aaaaattggctaggc

SEQ ID NO: 1344430 - DNA, 15 bp, Homo sapiens
aaaaaattggctagg

SEQ ID NO: 1344431 - DNA, 15 bp, Homo sapiens
caaaaaattggctag

SEQ ID NO: 1344432 - DNA, 15 bp, Homo sapiens
tcaaaaaattggcta

SEQ ID NO: 1344433 - DNA, 15 bp, Homo sapiens
ttcaaaaaattggct

SEQ ID NO: 1344434 - DNA, 15 bp, Homo sapiens
attcaaaaaattggc

SEQ ID NO: 1344435 - DNA, 15 bp, Homo sapiens
aattcaaaaaattgg

SEQ ID NO: 1344436 - DNA, 15 bp, Homo sapiens
aaattcaaaaaattg

SEQ ID NO: 1344437 - DNA, 15 bp, Homo sapiens
aaaattcaaaaaatt

SEQ ID NO: 1344438 - DNA, 15 bp, Homo sapiens
aaaaattcaaaaaat

SEQ ID NO: 1344439 - DNA, 15 bp, Homo sapiens
taaaaattcaaaaaa

SEQ ID NO: 1344440 - DNA, 15 bp, Homo sapiens
atgatgaaaccccat

SEQ ID NO: 1344441 - DNA, 15 bp, Homo sapiens
catgatgaaacccca

SEQ ID NO: 1344442 - DNA, 15 bp, Homo sapiens
gtggccaacatgatg

SEQ ID NO: 1344443 - DNA, 15 bp, Homo sapiens
cgtggccaacatgat

SEQ ID NO: 1344444 - DNA, 15 bp, Homo sapiens
gcgtggccaacatga

SEQ ID NO: 1344445 - DNA, 15 bp, Homo sapiens
cgagaccagcgtggc

SEQ ID NO: 1344446 - DNA, 15 bp, Homo sapiens
tcgagaccagcgtgg

SEQ ID NO: 1344447 - DNA, 15 bp, Homo sapiens
ttcgagaccagcgtg

SEQ ID NO: 1344448 - DNA, 15 bp, Homo sapiens
gttcgagaccagcgt

SEQ ID NO: 1344449 - DNA, 15 bp, Homo sapiens
agttcgagaccagcg

SEQ ID NO: 1344450 - DNA, 15 bp, Homo sapiens
aaggtgggtggatca

SEQ ID NO: 1344451 - DNA, 15 bp, Homo sapiens
caaggtgggtggatc

SEQ ID NO: 1344452 - DNA, 15 bp, Homo sapiens
ccaaggtgggtggat

SEQ ID NO: 1344453 - DNA, 15 bp, Homo sapiens
gccaaggtgggtgga

SEQ ID NO: 1344454 - DNA, 15 bp, Homo sapiens
ggccaaggtgggtgg

SEQ ID NO: 1344455 - DNA, 15 bp, Homo sapiens
aggccaaggtgggtg

SEQ ID NO: 1344456 - DNA, 15 bp, Homo sapiens
taggaggccaaggtg

SEQ ID NO: 1344457 - DNA, 15 bp, Homo sapiens
ttaggaggccaaggt

SEQ ID NO: 1344458 - DNA, 15 bp, Homo sapiens
aactttaggaggcca

SEQ ID NO: 1344459 - DNA, 15 bp, Homo sapiens
gaactttaggaggcc

SEQ ID NO: 1344460 - DNA, 15 bp, Homo sapiens
agaactttaggaggc

SEQ ID NO: 1344461 - DNA, 15 bp, Homo sapiens
cagaactttaggagg

SEQ ID NO: 1344462 - DNA, 15 bp, Homo sapiens
ccagaactttaggag

SEQ ID NO: 1344463 - DNA, 15 bp, Homo sapiens
cccagaactttagga

SEQ ID NO: 1344464 - DNA, 15 bp, Homo sapiens
tcccagaactttagg

SEQ ID NO: 1344465 - DNA, 15 bp, Homo sapiens
atcccagaactttag

SEQ ID NO: 1344466 - DNA, 15 bp, Homo sapiens
aatcccagaacttta

SEQ ID NO: 1344467 - DNA, 15 bp, Homo sapiens
aagtggctcacgcct

SEQ ID NO: 1344468 - DNA, 15 bp, Homo sapiens
gaagtggctcacgcc

SEQ ID NO: 1344469 - DNA, 15 bp, Homo sapiens
cgaagtggctcacgc

SEQ ID NO: 1344470 - DNA, 15 bp, Homo sapiens
gcgaagtggctcacg

SEQ ID NO: 1344471 - DNA, 15 bp, Homo sapiens
ggcgaagtggctcac

SEQ ID NO: 1344472 - DNA, 15 bp, Homo sapiens
gggcgaagtggctca

SEQ ID NO: 1344473 - DNA, 15 bp, Homo sapiens
tgggcgaagtggctc

SEQ ID NO: 1344474 - DNA, 15 bp, Homo sapiens
ctgggcgaagtggct

SEQ ID NO: 1344475 - DNA, 15 bp, Homo sapiens
gctgggcgaagtggc

SEQ ID NO: 1344476 - DNA, 15 bp, Homo sapiens
ggctgggcgaagtgg

SEQ ID NO: 1344477 - DNA, 15 bp, Homo sapiens
aggctgggcgaagtg

SEQ ID NO: 1344478 - DNA, 15 bp, Homo sapiens
caggctgggcgaagt

SEQ ID NO: 1344479 - DNA, 15 bp, Homo sapiens
gcaggctgggcgaag

SEQ ID NO: 1344480 - DNA, 15 bp, Homo sapiens
tgcaggctgggcgaa

SEQ ID NO: 1344481 - DNA, 15 bp, Homo sapiens
gtgcaggctgggcga

SEQ ID NO: 1344482 - DNA, 15 bp, Homo sapiens
agtgcaggctgggcg

SEQ ID NO: 1344483 - DNA, 15 bp, Homo sapiens
cagtgcaggctgggc

SEQ ID NO: 1344484 - DNA, 15 bp, Homo sapiens
acagtgcaggctggg

SEQ ID NO: 1344485 - DNA, 15 bp, Homo sapiens
cacagtgcaggctgg

SEQ ID NO: 1344486 - DNA, 15 bp, Homo sapiens
acacagtgcaggctg

SEQ ID NO: 1344487 - DNA, 15 bp, Homo sapiens
aacacagtgcaggct

SEQ ID NO: 1344488 - DNA, 15 bp, Homo sapiens
gaacacagtgcaggc

SEQ ID NO: 1344489 - DNA, 15 bp, Homo sapiens
agaacacagtgcagg

SEQ ID NO: 1344490 - DNA, 15 bp, Homo sapiens
aagaacacagtgcag

SEQ ID NO: 1344491 - DNA, 15 bp, Homo sapiens
taagaacacagtgca

SEQ ID NO: 1344492 - DNA, 15 bp, Homo sapiens
ataagaacacagtgc

SEQ ID NO: 1344493 - DNA, 15 bp, Homo sapiens
gataagaacacagtg

SEQ ID NO: 1344494 - DNA, 15 bp, Homo sapiens
ggataagaacacagt

SEQ ID NO: 1344495 - DNA, 15 bp, Homo sapiens
aggataagaacacag

SEQ ID NO: 1344496 - DNA, 15 bp, Homo sapiens
caggataagaacaca

SEQ ID NO: 1344497 - DNA, 15 bp, Homo sapiens
gcaggataagaacac

SEQ ID NO: 1344498 - DNA, 15 bp, Homo sapiens
tgcaggataagaaca

SEQ ID NO: 1344499 - DNA, 15 bp, Homo sapiens
atgcaggataagaac

SEQ ID NO: 1344500 - DNA, 15 bp, Homo sapiens
tatgcaggataagaa

SEQ ID NO: 1344501 - DNA, 15 bp, Homo sapiens
ttatgcaggataaga

SEQ ID NO: 1344502 - DNA, 15 bp, Homo sapiens
attatgcaggataag

SEQ ID NO: 1344503 - DNA, 15 bp, Homo sapiens
cattatgcaggataa

SEQ ID NO: 1344504 - DNA, 15 bp, Homo sapiens
tcattatgcaggata

SEQ ID NO: 1344505 - DNA, 15 bp, Homo sapiens
gtcattatgcaggat

SEQ ID NO: 1344506 - DNA, 15 bp, Homo sapiens
agtcattatgcagga

SEQ ID NO: 1344507 - DNA, 15 bp, Homo sapiens
aagtcattatgcagg

SEQ ID NO: 1344508 - DNA, 15 bp, Homo sapiens
taagtcattatgcag

SEQ ID NO: 1344509 - DNA, 15 bp, Homo sapiens
ttaagtcattatgca

SEQ ID NO: 1344510 - DNA, 15 bp, Homo sapiens
tttaagtcattatgc

SEQ ID NO: 1344511 - DNA, 15 bp, Homo sapiens
atttaagtcattatg

SEQ ID NO: 1344512 - DNA, 15 bp, Homo sapiens
aatttaagtcattat

SEQ ID NO: 1344513 - DNA, 15 bp, Homo sapiens
caatttaagtcatta

SEQ ID NO: 1344514 - DNA, 15 bp, Homo sapiens
tcaatttaagtcatt

SEQ ID NO: 1344515 - DNA, 15 bp, Homo sapiens
atcaatttaagtcat

SEQ ID NO: 1344516 - DNA, 15 bp, Homo sapiens
tatcaatttaagtca

SEQ ID NO: 1344517 - DNA, 15 bp, Homo sapiens
ttatcaatttaagtc

SEQ ID NO: 1344518 - DNA, 15 bp, Homo sapiens
attatcaatttaagt

SEQ ID NO: 1344519 - DNA, 15 bp, Homo sapiens
tattatcaatttaag

SEQ ID NO: 1344520 - DNA, 15 bp, Homo sapiens
ttattatcaatttaa

SEQ ID NO: 1344521 - DNA, 15 bp, Homo sapiens
cttattatcaattta

SEQ ID NO: 1344522 - DNA, 15 bp, Homo sapiens
acttattatcaattt

SEQ ID NO: 1344523 - DNA, 15 bp, Homo sapiens
aacttattatcaatt

SEQ ID NO: 1344524 - DNA, 15 bp, Homo sapiens
caacttattatcaat

SEQ ID NO: 1344525 - DNA, 15 bp, Homo sapiens
acaacttattatcaa

SEQ ID NO: 1344526 - DNA, 15 bp, Homo sapiens
cacaacttattatca

SEQ ID NO: 1344527 - DNA, 15 bp, Homo sapiens
ccacaacttattatc

SEQ ID NO: 1344528 - DNA, 15 bp, Homo sapiens
accacaacttattat

SEQ ID NO: 1344529 - DNA, 15 bp, Homo sapiens
gaccacaacttatta

SEQ ID NO: 1344530 - DNA, 15 bp, Homo sapiens
tgaccacaacttatt

SEQ ID NO: 1344531 - DNA, 15 bp, Homo sapiens
atgaccacaacttat

SEQ ID NO: 1344532 - DNA, 15 bp, Homo sapiens
catgaccacaactta

SEQ ID NO: 1344533 - DNA, 15 bp, Homo sapiens
ccatgaccacaactt

SEQ ID NO: 1344534 - DNA, 15 bp, Homo sapiens
accatgaccacaact

SEQ ID NO: 1344535 - DNA, 15 bp, Homo sapiens
aaccatgaccacaac

SEQ ID NO: 1344536 - DNA, 15 bp, Homo sapiens
gaaccatgaccacaa

SEQ ID NO: 1344537 - DNA, 15 bp, Homo sapiens
agaaccatgaccaca

SEQ ID NO: 1344538 - DNA, 15 bp, Homo sapiens
gagaaccatgaccac

SEQ ID NO: 1344539 - DNA, 15 bp, Homo sapiens
tgagaaccatgacca

SEQ ID NO: 1344540 - DNA, 15 bp, Homo sapiens
ctgagaaccatgacc

SEQ ID NO: 1344541 - DNA, 15 bp, Homo sapiens
tctgagaaccatgac

SEQ ID NO: 1344542 - DNA, 15 bp, Homo sapiens
ttctgagaaccatga

SEQ ID NO: 1344543 - DNA, 15 bp, Homo sapiens
tttctgagaaccatg

SEQ ID NO: 1344544 - DNA, 15 bp, Homo sapiens
gtttctgagaaccat

SEQ ID NO: 1344545 - DNA, 15 bp, Homo sapiens
ggtttctgagaacca

SEQ ID NO: 1344546 - DNA, 15 bp, Homo sapiens
aggtttctgagaacc

SEQ ID NO: 1344547 - DNA, 15 bp, Homo sapiens
taggtttctgagaac

SEQ ID NO: 1344548 - DNA, 15 bp, Homo sapiens
ttaggtttctgagaa

SEQ ID NO: 1344549 - DNA, 15 bp, Homo sapiens
tttaggtttctgaga

SEQ ID NO: 1344550 - DNA, 15 bp, Homo sapiens
ttttaggtttctgag

SEQ ID NO: 1344551 - DNA, 15 bp, Homo sapiens
attttaggtttctga

SEQ ID NO: 1344552 - DNA, 15 bp, Homo sapiens
tattttaggtttctg

SEQ ID NO: 1344553 - DNA, 15 bp, Homo sapiens
ttattttaggtttct

SEQ ID NO: 1344554 - DNA, 15 bp, Homo sapiens
attattttaggtttc

SEQ ID NO: 1344555 - DNA, 15 bp, Homo sapiens
aattattttaggttt

SEQ ID NO: 1344556 - DNA, 15 bp, Homo sapiens
gaattattttaggtt

SEQ ID NO: 1344557 - DNA, 15 bp, Homo sapiens
tgaattattttaggt

SEQ ID NO: 1344558 - DNA, 15 bp, Homo sapiens
gtgaattattttagg

SEQ ID NO: 1344559 - DNA, 15 bp, Homo sapiens
agtgaattattttag

SEQ ID NO: 1344560 - DNA, 15 bp, Homo sapiens
cagtgaattatttta

SEQ ID NO: 1344561 - DNA, 15 bp, Homo sapiens
tcagtgaattatttt

SEQ ID NO: 1344562 - DNA, 15 bp, Homo sapiens
atcagtgaattattt

SEQ ID NO: 1344563 - DNA, 15 bp, Homo sapiens
catcagtgaattatt

SEQ ID NO: 1344564 - DNA, 15 bp, Homo sapiens
acatcagtgaattat

SEQ ID NO: 1344565 - DNA, 15 bp, Homo sapiens
aacatcagtgaatta

SEQ ID NO: 1344566 - DNA, 15 bp, Homo sapiens
taacatcagtgaatt

SEQ ID NO: 1344567 - DNA, 15 bp, Homo sapiens
ttaacatcagtgaat

SEQ ID NO: 1344568 - DNA, 15 bp, Homo sapiens
attaacatcagtgaa

SEQ ID NO: 1344569 - DNA, 15 bp, Homo sapiens
tattaacatcagtga

SEQ ID NO: 1344570 - DNA, 15 bp, Homo sapiens
ttattaacatcagtg

SEQ ID NO: 1344571 - DNA, 15 bp, Homo sapiens
tttattaacatcagt

SEQ ID NO: 1344572 - DNA, 15 bp, Homo sapiens
ttttattaacatcag

SEQ ID NO: 1344573 - DNA, 15 bp, Homo sapiens
tttttattaacatca

SEQ ID NO: 1344574 - DNA, 15 bp, Homo sapiens
atttttattaacatc

SEQ ID NO: 1344575 - DNA, 15 bp, Homo sapiens
catttttattaacat

SEQ ID NO: 1344576 - DNA, 15 bp, Homo sapiens
tcatttttattaaca

SEQ ID NO: 1344577 - DNA, 15 bp, Homo sapiens
ctcatttttattaac

SEQ ID NO: 1344578 - DNA, 15 bp, Homo sapiens
actcatttttattaa

SEQ ID NO: 1344579 - DNA, 15 bp, Homo sapiens
cactcatttttatta

SEQ ID NO: 1344580 - DNA, 15 bp, Homo sapiens
ccactcatttttatt

SEQ ID NO: 1344581 - DNA, 15 bp, Homo sapiens
accactcatttttat

SEQ ID NO: 1344582 - DNA, 15 bp, Homo sapiens
aaccactcattttta

SEQ ID NO: 1344583 - DNA, 15 bp, Homo sapiens
caaccactcattttt

SEQ ID NO: 1344584 - DNA, 15 bp, Homo sapiens
acaaccactcatttt

SEQ ID NO: 1344585 - DNA, 15 bp, Homo sapiens
tacaaccactcattt

SEQ ID NO: 1344586 - DNA, 15 bp, Homo sapiens
atacaaccactcatt

SEQ ID NO: 1344587 - DNA, 15 bp, Homo sapiens
aatacaaccactcat

SEQ ID NO: 1344588 - DNA, 15 bp, Homo sapiens
aaatacaaccactca

SEQ ID NO: 1344589 - DNA, 15 bp, Homo sapiens
taaatacaaccactc

SEQ ID NO: 1344590 - DNA, 15 bp, Homo sapiens
ctaaatacaaccact

SEQ ID NO: 1344591 - DNA, 15 bp, Homo sapiens
tctaaatacaaccac

SEQ ID NO: 1344592 - DNA, 15 bp, Homo sapiens
ctctaaatacaacca

SEQ ID NO: 1344593 - DNA, 15 bp, Homo sapiens
actctaaatacaacc

SEQ ID NO: 1344594 - DNA, 15 bp, Homo sapiens
gactctaaatacaac

SEQ ID NO: 1344595 - DNA, 15 bp, Homo sapiens
tgactctaaatacaa

SEQ ID NO: 1344596 - DNA, 15 bp, Homo sapiens
ttgactctaaataca

SEQ ID NO: 1344597 - DNA, 15 bp, Homo sapiens
cttgactctaaatac

SEQ ID NO: 1344598 - DNA, 15 bp, Homo sapiens
ccttgactctaaata

SEQ ID NO: 1344599 - DNA, 15 bp, Homo sapiens
gccttgactctaaat

SEQ ID NO: 1344600 - DNA, 15 bp, Homo sapiens
cgccttgactctaaa

SEQ ID NO: 1344601 - DNA, 15 bp, Homo sapiens
tcgccttgactctaa

SEQ ID NO: 1344602 - DNA, 15 bp, Homo sapiens
ttcgccttgactcta

SEQ ID NO: 1344603 - DNA, 15 bp, Homo sapiens
tttcgccttgactct

SEQ ID NO: 1344604 - DNA, 15 bp, Homo sapiens
gtttcgccttgactc

SEQ ID NO: 1344605 - DNA, 15 bp, Homo sapiens
agtttcgccttgact

SEQ ID NO: 1344606 - DNA, 15 bp, Homo sapiens
cagtttcgccttgac

SEQ ID NO: 1344607 - DNA, 15 bp, Homo sapiens
tcagtttcgccttga

SEQ ID NO: 1344608 - DNA, 15 bp, Homo sapiens
ttcagtttcgccttg

SEQ ID NO: 1344609 - DNA, 15 bp, Homo sapiens
attcagtttcgcctt

SEQ ID NO: 1344610 - DNA, 15 bp, Homo sapiens
aattcagtttcgcct

SEQ ID NO: 1344611 - DNA, 15 bp, Homo sapiens
taattcagtttcgcc

SEQ ID NO: 1344612 - DNA, 15 bp, Homo sapiens
ctaattcagtttcgc

SEQ ID NO: 1344613 - DNA, 15 bp, Homo sapiens
cctaattcagtttcg

SEQ ID NO: 1344614 - DNA, 15 bp, Homo sapiens
tcctaattcagtttc

SEQ ID NO: 1344615 - DNA, 15 bp, Homo sapiens
atcctaattcagttt

SEQ ID NO: 1344616 - DNA, 15 bp, Homo sapiens
catcctaattcagtt

SEQ ID NO: 1344617 - DNA, 15 bp, Homo sapiens
acatcctaattcagt

SEQ ID NO: 1344618 - DNA, 15 bp, Homo sapiens
tacatcctaattcag

SEQ ID NO: 1344619 - DNA, 15 bp, Homo sapiens
atacatcctaattca

SEQ ID NO: 1344620 - DNA, 15 bp, Homo sapiens
tatacatcctaattc

SEQ ID NO: 1344621 - DNA, 15 bp, Homo sapiens
ttatacatcctaatt

SEQ ID NO: 1344622 - DNA, 15 bp, Homo sapiens
tttatacatcctaat

SEQ ID NO: 1344623 - DNA, 15 bp, Homo sapiens
ttttatacatcctaa

SEQ ID NO: 1344624 - DNA, 15 bp, Homo sapiens
attttatacatccta

SEQ ID NO: 1344625 - DNA, 15 bp, Homo sapiens
tattttatacatcct

SEQ ID NO: 1344626 - DNA, 15 bp, Homo sapiens
ttattttatacatcc

SEQ ID NO: 1344627 - DNA, 15 bp, Homo sapiens
gttattttatacatc

SEQ ID NO: 1344628 - DNA, 15 bp, Homo sapiens
agttattttatacat

SEQ ID NO: 1344629 - DNA, 15 bp, Homo sapiens
aagttattttataca

SEQ ID NO: 1344630 - DNA, 15 bp, Homo sapiens
aaagttattttatac

SEQ ID NO: 1344631 - DNA, 15 bp, Homo sapiens
aaaagttattttata

SEQ ID NO: 1344632 - DNA, 15 bp, Homo sapiens
aaaaagttattttat

SEQ ID NO: 1344633 - DNA, 15 bp, Homo sapiens
aaaaaagttatttta

SEQ ID NO: 1344634 - DNA, 15 bp, Homo sapiens
aaaaaaagttatttt

SEQ ID NO: 1344635 - DNA, 15 bp, Homo sapiens
aaaaaaaagttattt

SEQ ID NO: 1344636 - DNA, 15 bp, Homo sapiens
aaaaaaaaagttatt

SEQ ID NO: 1344637 - DNA, 15 bp, Homo sapiens
aaaaaaaaaagttat

SEQ ID NO: 1344638 - DNA, 15 bp, Homo sapiens
aaaaaaaaaaagtta

SEQ ID NO: 1344639 - DNA, 15 bp, Homo sapiens
cctacttaaaaaaaa

SEQ ID NO: 1344640 - DNA, 15 bp, Homo sapiens
tcctacttaaaaaaa

SEQ ID NO: 1344641 - DNA, 15 bp, Homo sapiens
gtcctacttaaaaaa

SEQ ID NO: 1344642 - DNA, 15 bp, Homo sapiens
agtcctacttaaaaa

SEQ ID NO: 1344643 - DNA, 15 bp, Homo sapiens
cagtcctacttaaaa

SEQ ID NO: 1344644 - DNA, 15 bp, Homo sapiens
acagtcctacttaaa

SEQ ID NO: 1344645 - DNA, 15 bp, Homo sapiens
aacagtcctacttaa

SEQ ID NO: 1344646 - DNA, 15 bp, Homo sapiens
caacagtcctactta

SEQ ID NO: 1344647 - DNA, 15 bp, Homo sapiens
acaacagtcctactt

SEQ ID NO: 1344648 - DNA, 15 bp, Homo sapiens
aacaacagtcctact

SEQ ID NO: 1344649 - DNA, 15 bp, Homo sapiens
gaacaacagtcctac

SEQ ID NO: 1344650 - DNA, 15 bp, Homo sapiens
cgaacaacagtccta

SEQ ID NO: 1344651 - DNA, 15 bp, Homo sapiens
ccgaacaacagtcct

SEQ ID NO: 1344652 - DNA, 15 bp, Homo sapiens
gccgaacaacagtcc

SEQ ID NO: 1344653 - DNA, 15 bp, Homo sapiens
agccgaacaacagtc

SEQ ID NO: 1344654 - DNA, 15 bp, Homo sapiens
cagccgaacaacagt

SEQ ID NO: 1344655 - DNA, 15 bp, Homo sapiens
ccagccgaacaacag

SEQ ID NO: 1344656 - DNA, 15 bp, Homo sapiens
cccagccgaacaaca

SEQ ID NO: 1344657 - DNA, 15 bp, Homo sapiens
gcccagccgaacaac

SEQ ID NO: 1344658 - DNA, 15 bp, Homo sapiens
cgcccagccgaacaa

SEQ ID NO: 1344659 - DNA, 15 bp, Homo sapiens
acgcccagccgaaca

SEQ ID NO: 1344660 - DNA, 15 bp, Homo sapiens
cacgcccagccgaac

SEQ ID NO: 1344661 - DNA, 15 bp, Homo sapiens
ccacgcccagccgaa

SEQ ID NO: 1344662 - DNA, 15 bp, Homo sapiens
accacgcccagccga

SEQ ID NO: 1344663 - DNA, 15 bp, Homo sapiens
caccacgcccagccg

SEQ ID NO: 1344664 - DNA, 15 bp, Homo sapiens
gtggcctcccaaagt

SEQ ID NO: 1344665 - DNA, 15 bp, Homo sapiens
tgtggcctcccaaag

SEQ ID NO: 1344666 - DNA, 15 bp, Homo sapiens
ctgtggcctcccaaa

SEQ ID NO: 1344667 - DNA, 15 bp, Homo sapiens
gctgtggcctcccaa

SEQ ID NO: 1344668 - DNA, 15 bp, Homo sapiens
cgctgtggcctccca

SEQ ID NO: 1344669 - DNA, 15 bp, Homo sapiens
ccgctgtggcctccc

SEQ ID NO: 1344670 - DNA, 15 bp, Homo sapiens
cccgctgtggcctcc

SEQ ID NO: 1344671 - DNA, 15 bp, Homo sapiens
gcccgctgtggcctc

SEQ ID NO: 1344672 - DNA, 15 bp, Homo sapiens
cgcccgctgtggcct

SEQ ID NO: 1344673 - DNA, 15 bp, Homo sapiens
ccgcccgctgtggcc

SEQ ID NO: 1344674 - DNA, 15 bp, Homo sapiens
accgcccgctgtggc

SEQ ID NO: 1344675 - DNA, 15 bp, Homo sapiens
gaccgcccgctgtgg

SEQ ID NO: 1344676 - DNA, 15 bp, Homo sapiens
tgaccgcccgctgtg

SEQ ID NO: 1344677 - DNA, 15 bp, Homo sapiens
ttgaccgcccgctgt

SEQ ID NO: 1344678 - DNA, 15 bp, Homo sapiens
tttgaccgcccgctg

SEQ ID NO: 1344679 - DNA, 15 bp, Homo sapiens
ttttgaccgcccgct

SEQ ID NO: 1344680 - DNA, 15 bp, Homo sapiens
cttttgaccgcccgc

SEQ ID NO: 1344681 - DNA, 15 bp, Homo sapiens
acttttgaccgcccg

SEQ ID NO: 1344682 - DNA, 15 bp, Homo sapiens
aacttttgaccgccc

SEQ ID NO: 1344683 - DNA, 15 bp, Homo sapiens
aaacttttgaccgcc

SEQ ID NO: 1344684 - DNA, 15 bp, Homo sapiens
caaacttttgaccgc

SEQ ID NO: 1344685 - DNA, 15 bp, Homo sapiens
tcaaacttttgaccg

SEQ ID NO: 1344686 - DNA, 15 bp, Homo sapiens
tctaatttttgtatt

SEQ ID NO: 1344687 - DNA, 15 bp, Homo sapiens
atctaatttttgtat

SEQ ID NO: 1344688 - DNA, 15 bp, Homo sapiens
catctaatttttgta

SEQ ID NO: 1344689 - DNA, 15 bp, Homo sapiens
ccatctaatttttgt

SEQ ID NO: 1344690 - DNA, 15 bp, Homo sapiens
tccatctaatttttg

SEQ ID NO: 1344691 - DNA, 15 bp, Homo sapiens
atccatctaattttt

SEQ ID NO: 1344692 - DNA, 15 bp, Homo sapiens
catccatctaatttt

SEQ ID NO: 1344693 - DNA, 15 bp, Homo sapiens
acatccatctaattt

SEQ ID NO: 1344694 - DNA, 15 bp, Homo sapiens
cacatccatctaatt

SEQ ID NO: 1344695 - DNA, 15 bp, Homo sapiens
ccacatccatctaat

SEQ ID NO: 1344696 - DNA, 15 bp, Homo sapiens
accacatccatctaa

SEQ ID NO: 1344697 - DNA, 15 bp, Homo sapiens
caccacatccatcta

SEQ ID NO: 1344698 - DNA, 15 bp, Homo sapiens
ccaccacatccatct

SEQ ID NO: 1344699 - DNA, 15 bp, Homo sapiens
gccaccacatccatc

SEQ ID NO: 1344700 - DNA, 15 bp, Homo sapiens
cgccaccacatccat

SEQ ID NO: 1344701 - DNA, 15 bp, Homo sapiens
gcgccaccacatcca

SEQ ID NO: 1344702 - DNA, 15 bp, Homo sapiens
tgcgccaccacatcc

SEQ ID NO: 1344703 - DNA, 15 bp, Homo sapiens
atgcgccaccacatc

SEQ ID NO: 1344704 - DNA, 15 bp, Homo sapiens
catgcgccaccacat

SEQ ID NO: 1344705 - DNA, 15 bp, Homo sapiens
gcatgcgccaccaca

SEQ ID NO: 1344706 - DNA, 15 bp, Homo sapiens
agcatgcgccaccac

SEQ ID NO: 1344707 - DNA, 15 bp, Homo sapiens
cagcatgcgccacca

SEQ ID NO: 1344708 - DNA, 15 bp, Homo sapiens
acagcatgcgccacc

SEQ ID NO: 1344709 - DNA, 15 bp, Homo sapiens
tacagcatgcgccac

SEQ ID NO: 1344710 - DNA, 15 bp, Homo sapiens
ttacagcatgcgcca

SEQ ID NO: 1344711 - DNA, 15 bp, Homo sapiens
attacagcatgcgcc

SEQ ID NO: 1344712 - DNA, 15 bp, Homo sapiens
gattacagcatgcgc

SEQ ID NO: 1344713 - DNA, 15 bp, Homo sapiens
ggattacagcatgcg

SEQ ID NO: 1344714 - DNA, 15 bp, Homo sapiens
gggattacagcatgc

SEQ ID NO: 1344715 - DNA, 15 bp, Homo sapiens
tgggattacagcatg

SEQ ID NO: 1344716 - DNA, 15 bp, Homo sapiens
ctgggattacagcat

SEQ ID NO: 1344717 - DNA, 15 bp, Homo sapiens
gctgggattacagca

SEQ ID NO: 1344718 - DNA, 15 bp, Homo sapiens
tgattctcctgcttc

SEQ ID NO: 1344719 - DNA, 15 bp, Homo sapiens
catctcagctcactg

SEQ ID NO: 1344720 - DNA, 15 bp, Homo sapiens
ccatctcagctcact

SEQ ID NO: 1344721 - DNA, 15 bp, Homo sapiens
gccatctcagctcac

SEQ ID NO: 1344722 - DNA, 15 bp, Homo sapiens
gtggtgccatctcag

SEQ ID NO: 1344723 - DNA, 15 bp, Homo sapiens
agtggtgccatctca

SEQ ID NO: 1344724 - DNA, 15 bp, Homo sapiens
cagtggtgccatctc

SEQ ID NO: 1344725 - DNA, 15 bp, Homo sapiens
ctcgcccaggctgga

SEQ ID NO: 1344726 - DNA, 15 bp, Homo sapiens
tctcgcccaggctgg

SEQ ID NO: 1344727 - DNA, 15 bp, Homo sapiens
ctctcgcccaggctg

SEQ ID NO: 1344728 - DNA, 15 bp, Homo sapiens
tctctcgcccaggct

SEQ ID NO: 1344729 - DNA, 15 bp, Homo sapiens
ctctctcgcccaggc

SEQ ID NO: 1344730 - DNA, 15 bp, Homo sapiens
actctctcgcccagg

SEQ ID NO: 1344731 - DNA, 15 bp, Homo sapiens
cactctctcgcccag

SEQ ID NO: 1344732 - DNA, 15 bp, Homo sapiens
tcactctctcgccca

SEQ ID NO: 1344733 - DNA, 15 bp, Homo sapiens
ctcactctctcgccc

SEQ ID NO: 1344734 - DNA, 15 bp, Homo sapiens
tctcactctctcgcc

SEQ ID NO: 1344735 - DNA, 15 bp, Homo sapiens
gtctcactctctcgc

SEQ ID NO: 1344736 - DNA, 15 bp, Homo sapiens
agtctcactctctcg

SEQ ID NO: 1344737 - DNA, 15 bp, Homo sapiens
gagtctcactctctc

SEQ ID NO: 1344738 - DNA, 15 bp, Homo sapiens
agagtctcactctct

SEQ ID NO: 1344739 - DNA, 15 bp, Homo sapiens
cagagtctcactctc

SEQ ID NO: 1344740 - DNA, 15 bp, Homo sapiens
tttctttttttttct

SEQ ID NO: 1344741 - DNA, 15 bp, Homo sapiens
ttttctttttttttc

SEQ ID NO: 1344742 - DNA, 15 bp, Homo sapiens
gtcccttttcttttt

SEQ ID NO: 1344743 - DNA, 15 bp, Homo sapiens
agtcccttttctttt

SEQ ID NO: 1344744 - DNA, 15 bp, Homo sapiens
tagtcccttttcttt

SEQ ID NO: 1344745 - DNA, 15 bp, Homo sapiens
atagtcccttttctt

SEQ ID NO: 1344746 - DNA, 15 bp, Homo sapiens
tatagtcccttttct

SEQ ID NO: 1344747 - DNA, 15 bp, Homo sapiens
gtatagtcccttttc

SEQ ID NO: 1344748 - DNA, 15 bp, Homo sapiens
agtatagtccctttt

SEQ ID NO: 1344749 - DNA, 15 bp, Homo sapiens
tagtatagtcccttt

SEQ ID NO: 1344750 - DNA, 15 bp, Homo sapiens
atagtatagtccctt

SEQ ID NO: 1344751 - DNA, 15 bp, Homo sapiens
catagtatagtccct

SEQ ID NO: 1344752 - DNA, 15 bp, Homo sapiens
acatagtatagtccc

SEQ ID NO: 1344753 - DNA, 15 bp, Homo sapiens
aacatagtatagtcc

SEQ ID NO: 1344754 - DNA, 15 bp, Homo sapiens
gaacatagtatagtc

SEQ ID NO: 1344755 - DNA, 15 bp, Homo sapiens
cgaacatagtatagt

SEQ ID NO: 1344756 - DNA, 15 bp, Homo sapiens
tcgaacatagtatag

SEQ ID NO: 1344757 - DNA, 15 bp, Homo sapiens
ttcgaacatagtata

SEQ ID NO: 1344758 - DNA, 15 bp, Homo sapiens
cttcgaacatagtat

SEQ ID NO: 1344759 - DNA, 15 bp, Homo sapiens
tcttcgaacatagta

SEQ ID NO: 1344760 - DNA, 15 bp, Homo sapiens
ctcttcgaacatagt

SEQ ID NO: 1344761 - DNA, 15 bp, Homo sapiens
actcttcgaacatag

SEQ ID NO: 1344762 - DNA, 15 bp, Homo sapiens
cactcttcgaacata

SEQ ID NO: 1344763 - DNA, 15 bp, Homo sapiens
acactcttcgaacat

SEQ ID NO: 1344764 - DNA, 15 bp, Homo sapiens
tacactcttcgaaca

SEQ ID NO: 1344765 - DNA, 15 bp, Homo sapiens
ctacactcttcgaac

SEQ ID NO: 1344766 - DNA, 15 bp, Homo sapiens
actacactcttcgaa

SEQ ID NO: 1344767 - DNA, 15 bp, Homo sapiens
aactacactcttcga

SEQ ID NO: 1344768 - DNA, 15 bp, Homo sapiens
aaactacactcttcg

SEQ ID NO: 1344769 - DNA, 15 bp, Homo sapiens
gaaactacactcttc

SEQ ID NO: 1344770 - DNA, 15 bp, Homo sapiens
agaaactacactctt

SEQ ID NO: 1344771 - DNA, 15 bp, Homo sapiens
cagaaactacactct

SEQ ID NO: 1344772 - DNA, 15 bp, Homo sapiens
acagaaactacactc

SEQ ID NO: 1344773 - DNA, 15 bp, Homo sapiens
gacagaaactacact

SEQ ID NO: 1344774 - DNA, 15 bp, Homo sapiens
ggacagaaactacac

SEQ ID NO: 1344775 - DNA, 15 bp, Homo sapiens
gggacagaaactaca

SEQ ID NO: 1344776 - DNA, 15 bp, Homo sapiens
tgggacagaaactac

SEQ ID NO: 1344777 - DNA, 15 bp, Homo sapiens
atgggacagaaacta

SEQ ID NO: 1344778 - DNA, 15 bp, Homo sapiens
tatgggacagaaact

SEQ ID NO: 1344779 - DNA, 15 bp, Homo sapiens
gtatgggacagaaac

SEQ ID NO: 1344780 - DNA, 15 bp, Homo sapiens
agtatgggacagaaa

SEQ ID NO: 1344781 - DNA, 15 bp, Homo sapiens
cagtatgggacagaa

SEQ ID NO: 1344782 - DNA, 15 bp, Homo sapiens
tcagtatgggacaga

SEQ ID NO: 1344783 - DNA, 15 bp, Homo sapiens
ttcagtatgggacag

SEQ ID NO: 1344784 - DNA, 15 bp, Homo sapiens
attcagtatgggaca

SEQ ID NO: 1344785 - DNA, 15 bp, Homo sapiens
aattcagtatgggac

SEQ ID NO: 1344786 - DNA, 15 bp, Homo sapiens
gaattcagtatggga

SEQ ID NO: 1344787 - DNA, 15 bp, Homo sapiens
tgaattcagtatggg

SEQ ID NO: 1344788 - DNA, 15 bp, Homo sapiens
gtgaattcagtatgg

SEQ ID NO: 1344789 - DNA, 15 bp, Homo sapiens
agtgaattcagtatg

SEQ ID NO: 1344790 - DNA, 15 bp, Homo sapiens
cagtgaattcagtat

SEQ ID NO: 1344791 - DNA, 15 bp, Homo sapiens
acagtgaattcagta

SEQ ID NO: 1344792 - DNA, 15 bp, Homo sapiens
aacagtgaattcagt

SEQ ID NO: 1344793 - DNA, 15 bp, Homo sapiens
gaacagtgaattcag

SEQ ID NO: 1344794 - DNA, 15 bp, Homo sapiens
agaacagtgaattca

SEQ ID NO: 1344795 - DNA, 15 bp, Homo sapiens
aagaacagtgaattc

SEQ ID NO: 1344796 - DNA, 15 bp, Homo sapiens
aaagaacagtgaatt

SEQ ID NO: 1344797 - DNA, 15 bp, Homo sapiens
gaaagaacagtgaat

SEQ ID NO: 1344798 - DNA, 15 bp, Homo sapiens
ggaaagaacagtgaa

SEQ ID NO: 1344799 - DNA, 15 bp, Homo sapiens
gggaaagaacagtga

SEQ ID NO: 1344800 - DNA, 15 bp, Homo sapiens
agggaaagaacagtg

SEQ ID NO: 1344801 - DNA, 15 bp, Homo sapiens
tagggaaagaacagt

SEQ ID NO: 1344802 - DNA, 15 bp, Homo sapiens
ctagggaaagaacag

SEQ ID NO: 1344803 - DNA, 15 bp, Homo sapiens
actagggaaagaaca

SEQ ID NO: 1344804 - DNA, 15 bp, Homo sapiens
cactagggaaagaac

SEQ ID NO: 1344805 - DNA, 15 bp, Homo sapiens
tcactagggaaagaa

SEQ ID NO: 1344806 - DNA, 15 bp, Homo sapiens
atcactagggaaaga

SEQ ID NO: 1344807 - DNA, 15 bp, Homo sapiens
aatcactagggaaag

SEQ ID NO: 1344808 - DNA, 15 bp, Homo sapiens
taatcactagggaaa

SEQ ID NO: 1344809 - DNA, 15 bp, Homo sapiens
ttaatcactagggaa

SEQ ID NO: 1344810 - DNA, 15 bp, Homo sapiens
tttaatcactaggga

SEQ ID NO: 1344811 - DNA, 15 bp, Homo sapiens
ttttaatcactaggg

SEQ ID NO: 1344812 - DNA, 15 bp, Homo sapiens
attttaatcactagg

SEQ ID NO: 1344813 - DNA, 15 bp, Homo sapiens
tattttaatcactag

SEQ ID NO: 1344814 - DNA, 15 bp, Homo sapiens
gtattttaatcacta

SEQ ID NO: 1344815 - DNA, 15 bp, Homo sapiens
tgtattttaatcact

SEQ ID NO: 1344816 - DNA, 15 bp, Homo sapiens
ttgtattttaatcac

SEQ ID NO: 1344817 - DNA, 15 bp, Homo sapiens
cttgtattttaatca

SEQ ID NO: 1344818 - DNA, 15 bp, Homo sapiens
tcttgtattttaatc

SEQ ID NO: 1344819 - DNA, 15 bp, Homo sapiens
ttcttgtattttaat

SEQ ID NO: 1344820 - DNA, 15 bp, Homo sapiens
tttcttgtattttaa

SEQ ID NO: 1344821 - DNA, 15 bp, Homo sapiens
ttttcttgtatttta

SEQ ID NO: 1344822 - DNA, 15 bp, Homo sapiens
cttttcttgtatttt

SEQ ID NO: 1344823 - DNA, 15 bp, Homo sapiens
ccttttcttgtattt

SEQ ID NO: 1344824 - DNA, 15 bp, Homo sapiens
accttttcttgtatt

SEQ ID NO: 1344825 - DNA, 15 bp, Homo sapiens
taccttttcttgtat

SEQ ID NO: 1344826 - DNA, 15 bp, Homo sapiens
ctaccttttcttgta

SEQ ID NO: 1344827 - DNA, 15 bp, Homo sapiens
tctaccttttcttgt

SEQ ID NO: 1344828 - DNA, 15 bp, Homo sapiens
ctctaccttttcttg

SEQ ID NO: 1344829 - DNA, 15 bp, Homo sapiens
cctctaccttttctt

SEQ ID NO: 1344830 - DNA, 15 bp, Homo sapiens
ccctctaccttttct

SEQ ID NO: 1344831 - DNA, 15 bp, Homo sapiens
tccctctaccttttc

SEQ ID NO: 1344832 - DNA, 15 bp, Homo sapiens
ctccctctacctttt

SEQ ID NO: 1344833 - DNA, 15 bp, Homo sapiens
tctccctctaccttt

SEQ ID NO: 1344834 - DNA, 15 bp, Homo sapiens
ttctccctctacctt

SEQ ID NO: 1344835 - DNA, 15 bp, Homo sapiens
tttctccctctacct

SEQ ID NO: 1344836 - DNA, 15 bp, Homo sapiens
gtttctccctctacc

SEQ ID NO: 1344837 - DNA, 15 bp, Homo sapiens
tgtttctccctctac

SEQ ID NO: 1344838 - DNA, 15 bp, Homo sapiens
gtgtttctccctcta

SEQ ID NO: 1344839 - DNA, 15 bp, Homo sapiens
cgtgtttctccctct

SEQ ID NO: 1344840 - DNA, 15 bp, Homo sapiens
tcgtgtttctccctc

SEQ ID NO: 1344841 - DNA, 15 bp, Homo sapiens
ttcgtgtttctccct

SEQ ID NO: 1344842 - DNA, 15 bp, Homo sapiens
gttcgtgtttctccc

SEQ ID NO: 1344843 - DNA, 15 bp, Homo sapiens
agttcgtgtttctcc

SEQ ID NO: 1344844 - DNA, 15 bp, Homo sapiens
cagttcgtgtttctc

SEQ ID NO: 1344845 - DNA, 15 bp, Homo sapiens
tcagttcgtgtttct

SEQ ID NO: 1344846 - DNA, 15 bp, Homo sapiens
ttcagttcgtgtttc

SEQ ID NO: 1344847 - DNA, 15 bp, Homo sapiens
attcagttcgtgttt

SEQ ID NO: 1344848 - DNA, 15 bp, Homo sapiens
aattcagttcgtgtt

SEQ ID NO: 1344849 - DNA, 15 bp, Homo sapiens
aaattcagttcgtgt

SEQ ID NO: 1344850 - DNA, 15 bp, Homo sapiens
aaaattcagttcgtg

SEQ ID NO: 1344851 - DNA, 15 bp, Homo sapiens
taaaattcagttcgt

SEQ ID NO: 1344852 - DNA, 15 bp, Homo sapiens
ataaaattcagttcg

SEQ ID NO: 1344853 - DNA, 15 bp, Homo sapiens
cataaaattcagttc

SEQ ID NO: 1344854 - DNA, 15 bp, Homo sapiens
tcataaaattcagtt

SEQ ID NO: 1344855 - DNA, 15 bp, Homo sapiens
ttcataaaattcagt

SEQ ID NO: 1344856 - DNA, 15 bp, Homo sapiens
gttcataaaattcag

SEQ ID NO: 1344857 - DNA, 15 bp, Homo sapiens
agttcataaaattca

SEQ ID NO: 1344858 - DNA, 15 bp, Homo sapiens
aagttcataaaattc

SEQ ID NO: 1344859 - DNA, 15 bp, Homo sapiens
taagttcataaaatt

SEQ ID NO: 1344860 - DNA, 15 bp, Homo sapiens
ttaagttcataaaat

SEQ ID NO: 1344861 - DNA, 15 bp, Homo sapiens
attaagttcataaaa

SEQ ID NO: 1344862 - DNA, 15 bp, Homo sapiens
aattaagttcataaa

SEQ ID NO: 1344863 - DNA, 15 bp, Homo sapiens
gaattaagttcataa

SEQ ID NO: 1344864 - DNA, 15 bp, Homo sapiens
ggaattaagttcata

SEQ ID NO: 1344865 - DNA, 15 bp, Homo sapiens
tggaattaagttcat

SEQ ID NO: 1344866 - DNA, 15 bp, Homo sapiens
ttggaattaagttca

SEQ ID NO: 1344867 - DNA, 15 bp, Homo sapiens
cttggaattaagttc

SEQ ID NO: 1344868 - DNA, 15 bp, Homo sapiens
tcttggaattaagtt

SEQ ID NO: 1344869 - DNA, 15 bp, Homo sapiens
ttcttggaattaagt

SEQ ID NO: 1344870 - DNA, 15 bp, Homo sapiens
attcttggaattaag

SEQ ID NO: 1344871 - DNA, 15 bp, Homo sapiens
cattcttggaattaa

SEQ ID NO: 1344872 - DNA, 15 bp, Homo sapiens
acattcttggaatta

SEQ ID NO: 1344873 - DNA, 15 bp, Homo sapiens
tacattcttggaatt

SEQ ID NO: 1344874 - DNA, 15 bp, Homo sapiens
atacattcttggaat

SEQ ID NO: 1344875 - DNA, 15 bp, Homo sapiens
aatacattcttggaa

SEQ ID NO: 1344876 - DNA, 15 bp, Homo sapiens
aaatacattcttgga

SEQ ID NO: 1344877 - DNA, 15 bp, Homo sapiens
aaaatacattcttgg

SEQ ID NO: 1344878 - DNA, 15 bp, Homo sapiens
aaaaatacattcttg

SEQ ID NO: 1344879 - DNA, 15 bp, Homo sapiens
taaaaatacattctt

SEQ ID NO: 1344880 - DNA, 15 bp, Homo sapiens
gtaaaaatacattct

SEQ ID NO: 1344881 - DNA, 15 bp, Homo sapiens
tgtaaaaatacattc

SEQ ID NO: 1344882 - DNA, 15 bp, Homo sapiens
atgtaaaaatacatt

SEQ ID NO: 1344883 - DNA, 15 bp, Homo sapiens
aatgtaaaaatacat

SEQ ID NO: 1344884 - DNA, 15 bp, Homo sapiens
aaatgtaaaaataca

SEQ ID NO: 1344885 - DNA, 15 bp, Homo sapiens
caaatgtaaaaatac

SEQ ID NO: 1344886 - DNA, 15 bp, Homo sapiens
acaaatgtaaaaata

SEQ ID NO: 1344887 - DNA, 15 bp, Homo sapiens
aacaaatgtaaaaat

SEQ ID NO: 1344888 - DNA, 15 bp, Homo sapiens
gaacaaatgtaaaaa

SEQ ID NO: 1344889 - DNA, 15 bp, Homo sapiens
tgaacaaatgtaaaa

SEQ ID NO: 1344890 - DNA, 15 bp, Homo sapiens
ttgaacaaatgtaaa

SEQ ID NO: 1344891 - DNA, 15 bp, Homo sapiens
tttgaacaaatgtaa

SEQ ID NO: 1344892 - DNA, 15 bp, Homo sapiens
ttttgaacaaatgta

SEQ ID NO: 1344893 - DNA, 15 bp, Homo sapiens
tttttgaacaaatgt

SEQ ID NO: 1344894 - DNA, 15 bp, Homo sapiens
ttttttgaacaaatg

SEQ ID NO: 1344895 - DNA, 15 bp, Homo sapiens
attttttgaacaaat

SEQ ID NO: 1344896 - DNA, 15 bp, Homo sapiens
aattttttgaacaaa

SEQ ID NO: 1344897 - DNA, 15 bp, Homo sapiens
taattttttgaacaa

SEQ ID NO: 1344898 - DNA, 15 bp, Homo sapiens
ataattttttgaaca

SEQ ID NO: 1344899 - DNA, 15 bp, Homo sapiens
aataattttttgaac

SEQ ID NO: 1344900 - DNA, 15 bp, Homo sapiens
taataattttttgaa

SEQ ID NO: 1344901 - DNA, 15 bp, Homo sapiens
gtaataattttttga

SEQ ID NO: 1344902 - DNA, 15 bp, Homo sapiens
agtaataattttttg

SEQ ID NO: 1344903 - DNA, 15 bp, Homo sapiens
aagtaataatttttt

SEQ ID NO: 1344904 - DNA, 15 bp, Homo sapiens
aaagtaataattttt

SEQ ID NO: 1344905 - DNA, 15 bp, Homo sapiens
taaagtaataatttt

SEQ ID NO: 1344906 - DNA, 15 bp, Homo sapiens
ataaagtaataattt

SEQ ID NO: 1344907 - DNA, 15 bp, Homo sapiens
aataaagtaataatt

SEQ ID NO: 1344908 - DNA, 15 bp, Homo sapiens
caataaagtaataat

SEQ ID NO: 1344909 - DNA, 15 bp, Homo sapiens
tcaataaagtaataa

SEQ ID NO: 1344910 - DNA, 15 bp, Homo sapiens
atcaataaagtaata

SEQ ID NO: 1344911 - DNA, 15 bp, Homo sapiens
tatcaataaagtaat

SEQ ID NO: 1344912 - DNA, 15 bp, Homo sapiens
ttatcaataaagtaa

SEQ ID NO: 1344913 - DNA, 15 bp, Homo sapiens
attatcaataaagta

SEQ ID NO: 1344914 - DNA, 15 bp, Homo sapiens
tattatcaataaagt

SEQ ID NO: 1344915 - DNA, 15 bp, Homo sapiens
atattatcaataaag

SEQ ID NO: 1344916 - DNA, 15 bp, Homo sapiens
catattatcaataaa

SEQ ID NO: 1344917 - DNA, 15 bp, Homo sapiens
gcatattatcaataa

SEQ ID NO: 1344918 - DNA, 15 bp, Homo sapiens
tgcatattatcaata

SEQ ID NO: 1344919 - DNA, 15 bp, Homo sapiens
ttgcatattatcaat

SEQ ID NO: 1344920 - DNA, 15 bp, Homo sapiens
tttgcatattatcaa

SEQ ID NO: 1344921 - DNA, 15 bp, Homo sapiens
gtttgcatattatca

SEQ ID NO: 1344922 - DNA, 15 bp, Homo sapiens
tgtttgcatattatc

SEQ ID NO: 1344923 - DNA, 15 bp, Homo sapiens
atgtttgcatattat

SEQ ID NO: 1344924 - DNA, 15 bp, Homo sapiens
ggtatgtttgcatat

SEQ ID NO: 1344925 - DNA, 15 bp, Homo sapiens
tggtatgtttgcata

SEQ ID NO: 1344926 - DNA, 15 bp, Homo sapiens
ctggtatgtttgcat

SEQ ID NO: 1344927 - DNA, 15 bp, Homo sapiens
tctggtatgtttgca

SEQ ID NO: 1344928 - DNA, 15 bp, Homo sapiens
atctggtatgtttgc

SEQ ID NO: 1344929 - DNA, 15 bp, Homo sapiens
aatctggtatgtttg

SEQ ID NO: 1344930 - DNA, 15 bp, Homo sapiens
taatctggtatgttt

SEQ ID NO: 1344931 - DNA, 15 bp, Homo sapiens
cataatctggtatgt

SEQ ID NO: 1344932 - DNA, 15 bp, Homo sapiens
acataatctggtatg

SEQ ID NO: 1344933 - DNA, 15 bp, Homo sapiens
tacataatctggtat

SEQ ID NO: 1344934 - DNA, 15 bp, Homo sapiens
atacataatctggta

SEQ ID NO: 1344935 - DNA, 15 bp, Homo sapiens
aatacataatctggt

SEQ ID NO: 1344936 - DNA, 15 bp, Homo sapiens
taatacataatctgg

SEQ ID NO: 1344937 - DNA, 15 bp, Homo sapiens
ttaatacataatctg

SEQ ID NO: 1344938 - DNA, 15 bp, Homo sapiens
attaatacataatct

SEQ ID NO: 1344939 - DNA, 15 bp, Homo sapiens
tattaatacataatc

SEQ ID NO: 1344940 - DNA, 15 bp, Homo sapiens
ctattaatacataat

SEQ ID NO: 1344941 - DNA, 15 bp, Homo sapiens
actattaatacataa

SEQ ID NO: 1344942 - DNA, 15 bp, Homo sapiens
aactattaatacata

SEQ ID NO: 1344943 - DNA, 15 bp, Homo sapiens
taactattaatacat

SEQ ID NO: 1344944 - DNA, 15 bp, Homo sapiens
ttaactattaataca

SEQ ID NO: 1344945 - DNA, 15 bp, Homo sapiens
tttaactattaatac

SEQ ID NO: 1344946 - DNA, 15 bp, Homo sapiens
ttttaactattaata

SEQ ID NO: 1344947 - DNA, 15 bp, Homo sapiens
tttttaactattaat

SEQ ID NO: 1344948 - DNA, 15 bp, Homo sapiens
atttttaactattaa

SEQ ID NO: 1344949 - DNA, 15 bp, Homo sapiens
aatttttaactatta

SEQ ID NO: 1344950 - DNA, 15 bp, Homo sapiens
aaatttttaactatt

SEQ ID NO: 1344951 - DNA, 15 bp, Homo sapiens
caaatttttaactat

SEQ ID NO: 1344952 - DNA, 15 bp, Homo sapiens
tcaaatttttaacta

SEQ ID NO: 1344953 - DNA, 15 bp, Homo sapiens
ctcaaatttttaact

SEQ ID NO: 1344954 - DNA, 15 bp, Homo sapiens
actcaaatttttaac

SEQ ID NO: 1344955 - DNA, 15 bp, Homo sapiens
aactcaaatttttaa

SEQ ID NO: 1344956 - DNA, 15 bp, Homo sapiens
gaactcaaattttta

SEQ ID NO: 1344957 - DNA, 15 bp, Homo sapiens
agaactcaaattttt

SEQ ID NO: 1344958 - DNA, 15 bp, Homo sapiens
tagaactcaaatttt

SEQ ID NO: 1344959 - DNA, 15 bp, Homo sapiens
ctagaactcaaattt

SEQ ID NO: 1344960 - DNA, 15 bp, Homo sapiens
tctagaactcaaatt

SEQ ID NO: 1344961 - DNA, 15 bp, Homo sapiens
ttctagaactcaaat

SEQ ID NO: 1344962 - DNA, 15 bp, Homo sapiens
gttctagaactcaaa

SEQ ID NO: 1344963 - DNA, 15 bp, Homo sapiens
tgttctagaactcaa

SEQ ID NO: 1344964 - DNA, 15 bp, Homo sapiens
ttgttctagaactca

SEQ ID NO: 1344965 - DNA, 15 bp, Homo sapiens
cttgttctagaactc

SEQ ID NO: 1344966 - DNA, 15 bp, Homo sapiens
gcttgttctagaact

SEQ ID NO: 1344967 - DNA, 15 bp, Homo sapiens
agcttgttctagaac

SEQ ID NO: 1344968 - DNA, 15 bp, Homo sapiens
aagcttgttctagaa

SEQ ID NO: 1344969 - DNA, 15 bp, Homo sapiens
taagcttgttctaga

SEQ ID NO: 1344970 - DNA, 15 bp, Homo sapiens
ataagcttgttctag

SEQ ID NO: 1344971 - DNA, 15 bp, Homo sapiens
aataagcttgttcta

SEQ ID NO: 1344972 - DNA, 15 bp, Homo sapiens
taataagcttgttct

SEQ ID NO: 1344973 - DNA, 15 bp, Homo sapiens
ttaataagcttgttc

SEQ ID NO: 1344974 - DNA, 15 bp, Homo sapiens
tttaataagcttgtt

SEQ ID NO: 1344975 - DNA, 15 bp, Homo sapiens
ttttaataagcttgt

SEQ ID NO: 1344976 - DNA, 15 bp, Homo sapiens
tttttaataagcttg

SEQ ID NO: 1344977 - DNA, 15 bp, Homo sapiens
atttttaataagctt

SEQ ID NO: 1344978 - DNA, 15 bp, Homo sapiens
gatttttaataagct

SEQ ID NO: 1344979 - DNA, 15 bp, Homo sapiens
tgatttttaataagc

SEQ ID NO: 1344980 - DNA, 15 bp, Homo sapiens
ttgatttttaataag

SEQ ID NO: 1344981 - DNA, 15 bp, Homo sapiens
gttgatttttaataa

SEQ ID NO: 1344982 - DNA, 15 bp, Homo sapiens
cgttgatttttaata

SEQ ID NO: 1344983 - DNA, 15 bp, Homo sapiens
acgttgatttttaat

SEQ ID NO: 1344984 - DNA, 15 bp, Homo sapiens
gacgttgatttttaa

SEQ ID NO: 1344985 - DNA, 15 bp, Homo sapiens
tgacgttgattttta

SEQ ID NO: 1344986 - DNA, 15 bp, Homo sapiens
ctgacgttgattttt

SEQ ID NO: 1344987 - DNA, 15 bp, Homo sapiens
actgacgttgatttt

SEQ ID NO: 1344988 - DNA, 15 bp, Homo sapiens
tactgacgttgattt

SEQ ID NO: 1344989 - DNA, 15 bp, Homo sapiens
ttactgacgttgatt

SEQ ID NO: 1344990 - DNA, 15 bp, Homo sapiens
tttactgacgttgat

SEQ ID NO: 1344991 - DNA, 15 bp, Homo sapiens
ttttactgacgttga

SEQ ID NO: 1344992 - DNA, 15 bp, Homo sapiens
tttttactgacgttg

SEQ ID NO: 1344993 - DNA, 15 bp, Homo sapiens
ctttttactgacgtt

SEQ ID NO: 1344994 - DNA, 15 bp, Homo sapiens
tctttttactgacgt

SEQ ID NO: 1344995 - DNA, 15 bp, Homo sapiens
ttctttttactgacg

SEQ ID NO: 1344996 - DNA, 15 bp, Homo sapiens
tttctttttactgac

SEQ ID NO: 1344997 - DNA, 15 bp, Homo sapiens
ttttctttttactga

SEQ ID NO: 1344998 - DNA, 15 bp, Homo sapiens
attttctttttactg

SEQ ID NO: 1344999 - DNA, 15 bp, Homo sapiens
tattttctttttact

SEQ ID NO: 1345000 - DNA, 15 bp, Homo sapiens
ctattttctttttac

SEQ ID NO: 1345001 - DNA, 15 bp, Homo sapiens
tctattttcttttta

SEQ ID NO: 1345002 - DNA, 15 bp, Homo sapiens
atctattttcttttt

SEQ ID NO: 1345003 - DNA, 15 bp, Homo sapiens
catctattttctttt

SEQ ID NO: 1345004 - DNA, 15 bp, Homo sapiens
ccatctattttcttt

SEQ ID NO: 1345005 - DNA, 15 bp, Homo sapiens
accatctattttctt

SEQ ID NO: 1345006 - DNA, 15 bp, Homo sapiens
taccatctattttct

SEQ ID NO: 1345007 - DNA, 15 bp, Homo sapiens
ctaccatctattttc

SEQ ID NO: 1345008 - DNA, 15 bp, Homo sapiens
actaccatctatttt

SEQ ID NO: 1345009 - DNA, 15 bp, Homo sapiens
gactaccatctattt

SEQ ID NO: 1345010 - DNA, 15 bp, Homo sapiens
tgactaccatctatt

SEQ ID NO: 1345011 - DNA, 15 bp, Homo sapiens
gtgactaccatctat

SEQ ID NO: 1345012 - DNA, 15 bp, Homo sapiens
tgtgactaccatcta

SEQ ID NO: 1345013 - DNA, 15 bp, Homo sapiens
ctgtgactaccatct

SEQ ID NO: 1345014 - DNA, 15 bp, Homo sapiens
actgtgactaccatc

SEQ ID NO: 1345015 - DNA, 15 bp, Homo sapiens
cactgtgactaccat

SEQ ID NO: 1345016 - DNA, 15 bp, Homo sapiens
gcactgtgactacca

SEQ ID NO: 1345017 - DNA, 15 bp, Homo sapiens
ggcactgtgactacc

SEQ ID NO: 1345018 - DNA, 15 bp, Homo sapiens
tggcactgtgactac

SEQ ID NO: 1345019 - DNA, 15 bp, Homo sapiens
atggcactgtgacta

SEQ ID NO: 1345020 - DNA, 15 bp, Homo sapiens
aatggcactgtgact

SEQ ID NO: 1345021 - DNA, 15 bp, Homo sapiens
gaatggcactgtgac

SEQ ID NO: 1345022 - DNA, 15 bp, Homo sapiens
tgaatggcactgtga

SEQ ID NO: 1345023 - DNA, 15 bp, Homo sapiens
atgaatggcactgtg

SEQ ID NO: 1345024 - DNA, 15 bp, Homo sapiens
gatgaatggcactgt

SEQ ID NO: 1345025 - DNA, 15 bp, Homo sapiens
agatgaatggcactg

SEQ ID NO: 1345026 - DNA, 15 bp, Homo sapiens
cagatgaatggcact

SEQ ID NO: 1345027 - DNA, 15 bp, Homo sapiens
tcagatgaatggcac

SEQ ID NO: 1345028 - DNA, 15 bp, Homo sapiens
ttcagatgaatggca

SEQ ID NO: 1345029 - DNA, 15 bp, Homo sapiens
tttcagatgaatggc

SEQ ID NO: 1345030 - DNA, 15 bp, Homo sapiens
ttttcagatgaatgg

SEQ ID NO: 1345031 - DNA, 15 bp, Homo sapiens
attttcagatgaatg

SEQ ID NO: 1345032 - DNA, 15 bp, Homo sapiens
tattttcagatgaat

SEQ ID NO: 1345033 - DNA, 15 bp, Homo sapiens
ttattttcagatgaa

SEQ ID NO: 1345034 - DNA, 15 bp, Homo sapiens
attattttcagatga

SEQ ID NO: 1345035 - DNA, 15 bp, Homo sapiens
cattattttcagatg

SEQ ID NO: 1345036 - DNA, 15 bp, Homo sapiens
acattattttcagat

SEQ ID NO: 1345037 - DNA, 15 bp, Homo sapiens
aacattattttcaga

SEQ ID NO: 1345038 - DNA, 15 bp, Homo sapiens
aaacattattttcag

SEQ ID NO: 1345039 - DNA, 15 bp, Homo sapiens
aaaacattattttca

SEQ ID NO: 1345040 - DNA, 15 bp, Homo sapiens
taaaacattattttc

SEQ ID NO: 1345041 - DNA, 15 bp, Homo sapiens
ttaaaacattatttt

SEQ ID NO: 1345042 - DNA, 15 bp, Homo sapiens
attaaaacattattt

SEQ ID NO: 1345043 - DNA, 15 bp, Homo sapiens
tattaaaacattatt

SEQ ID NO: 1345044 - DNA, 15 bp, Homo sapiens
gtattaaaacattat

SEQ ID NO: 1345045 - DNA, 15 bp, Homo sapiens
agtattaaaacatta

SEQ ID NO: 1345046 - DNA, 15 bp, Homo sapiens
gagtattaaaacatt

SEQ ID NO: 1345047 - DNA, 15 bp, Homo sapiens
tgagtattaaaacat

SEQ ID NO: 1345048 - DNA, 15 bp, Homo sapiens
ttgagtattaaaaca

SEQ ID NO: 1345049 - DNA, 15 bp, Homo sapiens
gttgagtattaaaac

SEQ ID NO: 1345050 - DNA, 15 bp, Homo sapiens
tgttgagtattaaaa

SEQ ID NO: 1345051 - DNA, 15 bp, Homo sapiens
atgttgagtattaaa

SEQ ID NO: 1345052 - DNA, 15 bp, Homo sapiens
catgttgagtattaa

SEQ ID NO: 1345053 - DNA, 15 bp, Homo sapiens
acatgttgagtatta

SEQ ID NO: 1345054 - DNA, 15 bp, Homo sapiens
tacatgttgagtatt

SEQ ID NO: 1345055 - DNA, 15 bp, Homo sapiens
atacatgttgagtat

SEQ ID NO: 1345056 - DNA, 15 bp, Homo sapiens
tatacatgttgagta

SEQ ID NO: 1345057 - DNA, 15 bp, Homo sapiens
atatacatgttgagt

SEQ ID NO: 1345058 - DNA, 15 bp, Homo sapiens
catatacatgttgag

SEQ ID NO: 1345059 - DNA, 15 bp, Homo sapiens
ccatatacatgttga

SEQ ID NO: 1345060 - DNA, 15 bp, Homo sapiens
tccatatacatgttg

SEQ ID NO: 1345061 - DNA, 15 bp, Homo sapiens
atccatatacatgtt

SEQ ID NO: 1345062 - DNA, 15 bp, Homo sapiens
aatccatatacatgt

SEQ ID NO: 1345063 - DNA, 15 bp, Homo sapiens
taatccatatacatg

SEQ ID NO: 1345064 - DNA, 15 bp, Homo sapiens
ataatccatatacat

SEQ ID NO: 1345065 - DNA, 15 bp, Homo sapiens
tataatccatataca

SEQ ID NO: 1345066 - DNA, 15 bp, Homo sapiens
atataatccatatac

SEQ ID NO: 1345067 - DNA, 15 bp, Homo sapiens
tatataatccatata

SEQ ID NO: 1345068 - DNA, 15 bp, Homo sapiens
atatataatccatat

SEQ ID NO: 1345069 - DNA, 15 bp, Homo sapiens
gatatataatccata

SEQ ID NO: 1345070 - DNA, 15 bp, Homo sapiens
agatatataatccat

SEQ ID NO: 1345071 - DNA, 15 bp, Homo sapiens
tagatatataatcca

SEQ ID NO: 1345072 - DNA, 15 bp, Homo sapiens
atagatatataatcc

SEQ ID NO: 1345073 - DNA, 15 bp, Homo sapiens
tatagatatataatc

SEQ ID NO: 1345074 - DNA, 15 bp, Homo sapiens
gtatagatatataat

SEQ ID NO: 1345075 - DNA, 15 bp, Homo sapiens
cgtatagatatataa

SEQ ID NO: 1345076 - DNA, 15 bp, Homo sapiens
acgtatagatatata

SEQ ID NO: 1345077 - DNA, 15 bp, Homo sapiens
aacgtatagatatat

SEQ ID NO: 1345078 - DNA, 15 bp, Homo sapiens
aaacgtatagatata

SEQ ID NO: 1345079 - DNA, 15 bp, Homo sapiens
taaacgtatagatat

SEQ ID NO: 1345080 - DNA, 15 bp, Homo sapiens
ataaacgtatagata

SEQ ID NO: 1345081 - DNA, 15 bp, Homo sapiens
tataaacgtatagat

SEQ ID NO: 1345082 - DNA, 15 bp, Homo sapiens
ctataaacgtataga

SEQ ID NO: 1345083 - DNA, 15 bp, Homo sapiens
actataaacgtatag

SEQ ID NO: 1345084 - DNA, 15 bp, Homo sapiens
tactataaacgtata

SEQ ID NO: 1345085 - DNA, 15 bp, Homo sapiens
atactataaacgtat

SEQ ID NO: 1345086 - DNA, 15 bp, Homo sapiens
aatactataaacgta

SEQ ID NO: 1345087 - DNA, 15 bp, Homo sapiens
caatactataaacgt

SEQ ID NO: 1345088 - DNA, 15 bp, Homo sapiens
acaatactataaacg

SEQ ID NO: 1345089 - DNA, 15 bp, Homo sapiens
tacaatactataaac

SEQ ID NO: 1345090 - DNA, 15 bp, Homo sapiens
ctacaatactataaa

SEQ ID NO: 1345091 - DNA, 15 bp, Homo sapiens
gctacaatactataa

SEQ ID NO: 1345092 - DNA, 15 bp, Homo sapiens
agctacaatactata

SEQ ID NO: 1345093 - DNA, 15 bp, Homo sapiens
cagctacaatactat

SEQ ID NO: 1345094 - DNA, 15 bp, Homo sapiens
ccagctacaatacta

SEQ ID NO: 1345095 - DNA, 15 bp, Homo sapiens
tccagctacaatact

SEQ ID NO: 1345096 - DNA, 15 bp, Homo sapiens
atccagctacaatac

SEQ ID NO: 1345097 - DNA, 15 bp, Homo sapiens
aatccagctacaata

SEQ ID NO: 1345098 - DNA, 15 bp, Homo sapiens
aaatccagctacaat

SEQ ID NO: 1345099 - DNA, 15 bp, Homo sapiens
taaatccagctacaa

SEQ ID NO: 1345100 - DNA, 15 bp, Homo sapiens
ataaatccagctaca

SEQ ID NO: 1345101 - DNA, 15 bp, Homo sapiens
cataaatccagctac

SEQ ID NO: 1345102 - DNA, 15 bp, Homo sapiens
acataaatccagcta

SEQ ID NO: 1345103 - DNA, 15 bp, Homo sapiens
aacataaatccagct

SEQ ID NO: 1345104 - DNA, 15 bp, Homo sapiens
taacataaatccagc

SEQ ID NO: 1345105 - DNA, 15 bp, Homo sapiens
gtaacataaatccag

SEQ ID NO: 1345106 - DNA, 15 bp, Homo sapiens
tgtaacataaatcca

SEQ ID NO: 1345107 - DNA, 15 bp, Homo sapiens
atgtaacataaatcc

SEQ ID NO: 1345108 - DNA, 15 bp, Homo sapiens
aatgtaacataaatc

SEQ ID NO: 1345109 - DNA, 15 bp, Homo sapiens
aaatgtaacataaat

SEQ ID NO: 1345110 - DNA, 15 bp, Homo sapiens
aaaatgtaacataaa

SEQ ID NO: 1345111 - DNA, 15 bp, Homo sapiens
aaaaatgtaacataa

SEQ ID NO: 1345112 - DNA, 15 bp, Homo sapiens
taaaaatgtaacata

SEQ ID NO: 1345113 - DNA, 15 bp, Homo sapiens
ctaaaaatgtaacat

SEQ ID NO: 1345114 - DNA, 15 bp, Homo sapiens
gctaaaaatgtaaca

SEQ ID NO: 1345115 - DNA, 15 bp, Homo sapiens
tgctaaaaatgtaac

SEQ ID NO: 1345116 - DNA, 15 bp, Homo sapiens
atgctaaaaatgtaa

SEQ ID NO: 1345117 - DNA, 15 bp, Homo sapiens
tatgctaaaaatgta

SEQ ID NO: 1345118 - DNA, 15 bp, Homo sapiens
ttatgctaaaaatgt

SEQ ID NO: 1345119 - DNA, 15 bp, Homo sapiens
tttatgctaaaaatg

SEQ ID NO: 1345120 - DNA, 15 bp, Homo sapiens
ttttatgctaaaaat

SEQ ID NO: 1345121 - DNA, 15 bp, Homo sapiens
attttatgctaaaaa

SEQ ID NO: 1345122 - DNA, 15 bp, Homo sapiens
aattttatgctaaaa

SEQ ID NO: 1345123 - DNA, 15 bp, Homo sapiens
aaattttatgctaaa

SEQ ID NO: 1345124 - DNA, 15 bp, Homo sapiens
caaattttatgctaa

SEQ ID NO: 1345125 - DNA, 15 bp, Homo sapiens
ccaaattttatgcta

SEQ ID NO: 1345126 - DNA, 15 bp, Homo sapiens
gccaaattttatgct

SEQ ID NO: 1345127 - DNA, 15 bp, Homo sapiens
agccaaattttatgc

SEQ ID NO: 1345128 - DNA, 15 bp, Homo sapiens
aagccaaattttatg

SEQ ID NO: 1345129 - DNA, 15 bp, Homo sapiens
aaagccaaattttat

SEQ ID NO: 1345130 - DNA, 15 bp, Homo sapiens
aaaagccaaatttta

SEQ ID NO: 1345131 - DNA, 15 bp, Homo sapiens
caaaagccaaatttt

SEQ ID NO: 1345132 - DNA, 15 bp, Homo sapiens
gcaaaagccaaattt

SEQ ID NO: 1345133 - DNA, 15 bp, Homo sapiens
agcaaaagccaaatt

SEQ ID NO: 1345134 - DNA, 15 bp, Homo sapiens
cagcaaaagccaaat

SEQ ID NO: 1345135 - DNA, 15 bp, Homo sapiens
ccagcaaaagccaaa

SEQ ID NO: 1345136 - DNA, 15 bp, Homo sapiens
cccagcaaaagccaa

SEQ ID NO: 1345137 - DNA, 15 bp, Homo sapiens
gcccagcaaaagcca

SEQ ID NO: 1345138 - DNA, 15 bp, Homo sapiens
ggcccagcaaaagcc

SEQ ID NO: 1345139 - DNA, 15 bp, Homo sapiens
gggcccagcaaaagc

SEQ ID NO: 1345140 - DNA, 15 bp, Homo sapiens
tgggcccagcaaaag

SEQ ID NO: 1345141 - DNA, 15 bp, Homo sapiens
ctgggcccagcaaaa

SEQ ID NO: 1345142 - DNA, 15 bp, Homo sapiens
actgggcccagcaaa

SEQ ID NO: 1345143 - DNA, 15 bp, Homo sapiens
cactgggcccagcaa

SEQ ID NO: 1345144 - DNA, 15 bp, Homo sapiens
ccactgggcccagca

SEQ ID NO: 1345145 - DNA, 15 bp, Homo sapiens
gccactgggcccagc

SEQ ID NO: 1345146 - DNA, 15 bp, Homo sapiens
agccactgggcccag

SEQ ID NO: 1345147 - DNA, 15 bp, Homo sapiens
aagccactgggccca

SEQ ID NO: 1345148 - DNA, 15 bp, Homo sapiens
caagccactgggccc

SEQ ID NO: 1345149 - DNA, 15 bp, Homo sapiens
gcaagccactgggcc

SEQ ID NO: 1345150 - DNA, 15 bp, Homo sapiens
cgcaagccactgggc

SEQ ID NO: 1345151 - DNA, 15 bp, Homo sapiens
tcgcaagccactggg

SEQ ID NO: 1345152 - DNA, 15 bp, Homo sapiens
gtcgcaagccactgg

SEQ ID NO: 1345153 - DNA, 15 bp, Homo sapiens
agtcgcaagccactg

SEQ ID NO: 1345154 - DNA, 15 bp, Homo sapiens
cagtcgcaagccact

SEQ ID NO: 1345155 - DNA, 15 bp, Homo sapiens
acagtcgcaagccac

SEQ ID NO: 1345156 - DNA, 15 bp, Homo sapiens
tacagtcgcaagcca

SEQ ID NO: 1345157 - DNA, 15 bp, Homo sapiens
ctacagtcgcaagcc

SEQ ID NO: 1345158 - DNA, 15 bp, Homo sapiens
actacagtcgcaagc

SEQ ID NO: 1345159 - DNA, 15 bp, Homo sapiens
gactacagtcgcaag

SEQ ID NO: 1345160 - DNA, 15 bp, Homo sapiens
ggactacagtcgcaa

SEQ ID NO: 1345161 - DNA, 15 bp, Homo sapiens
gggactacagtcgca

SEQ ID NO: 1345162 - DNA, 15 bp, Homo sapiens
tgggactacagtcgc

SEQ ID NO: 1345163 - DNA, 15 bp, Homo sapiens
ctgggactacagtcg

SEQ ID NO: 1345164 - DNA, 15 bp, Homo sapiens
gctgggactacagtc

SEQ ID NO: 1345165 - DNA, 15 bp, Homo sapiens
tgctgggactacagt

SEQ ID NO: 1345166 - DNA, 15 bp, Homo sapiens
ttgctgggactacag

SEQ ID NO: 1345167 - DNA, 15 bp, Homo sapiens
gttgctgggactaca

SEQ ID NO: 1345168 - DNA, 15 bp, Homo sapiens
agttgctgggactac

SEQ ID NO: 1345169 - DNA, 15 bp, Homo sapiens
gagttgctgggacta

SEQ ID NO: 1345170 - DNA, 15 bp, Homo sapiens
tgagttgctgggact

SEQ ID NO: 1345171 - DNA, 15 bp, Homo sapiens
ctgagttgctgggac

SEQ ID NO: 1345172 - DNA, 15 bp, Homo sapiens
cctgagttgctggga

SEQ ID NO: 1345173 - DNA, 15 bp, Homo sapiens
tcctgagttgctggg

SEQ ID NO: 1345174 - DNA, 15 bp, Homo sapiens
ctcctgagttgctgg

SEQ ID NO: 1345175 - DNA, 15 bp, Homo sapiens
cctcctgagttgctg

SEQ ID NO: 1345176 - DNA, 15 bp, Homo sapiens
ccctcctgagttgct

SEQ ID NO: 1345177 - DNA, 15 bp, Homo sapiens
accctcctgagttgc

SEQ ID NO: 1345178 - DNA, 15 bp, Homo sapiens
taccctcctgagttg

SEQ ID NO: 1345179 - DNA, 15 bp, Homo sapiens
ttaccctcctgagtt

SEQ ID NO: 1345180 - DNA, 15 bp, Homo sapiens
cttaccctcctgagt

SEQ ID NO: 1345181 - DNA, 15 bp, Homo sapiens
ccttaccctcctgag

SEQ ID NO: 1345182 - DNA, 15 bp, Homo sapiens
accttaccctcctga

SEQ ID NO: 1345183 - DNA, 15 bp, Homo sapiens
caccttaccctcctg

SEQ ID NO: 1345184 - DNA, 15 bp, Homo sapiens
ccaccttaccctcct

SEQ ID NO: 1345185 - DNA, 15 bp, Homo sapiens
cccaccttaccctcc

SEQ ID NO: 1345186 - DNA, 15 bp, Homo sapiens
tcccaccttaccctc

SEQ ID NO: 1345187 - DNA, 15 bp, Homo sapiens
ctcccaccttaccct

SEQ ID NO: 1345188 - DNA, 15 bp, Homo sapiens
cctcccaccttaccc

SEQ ID NO: 1345189 - DNA, 15 bp, Homo sapiens
tcctcccaccttacc

SEQ ID NO: 1345190 - DNA, 15 bp, Homo sapiens
atcctcccaccttac

SEQ ID NO: 1345191 - DNA, 15 bp, Homo sapiens
aatcctcccacctta

SEQ ID NO: 1345192 - DNA, 15 bp, Homo sapiens
caatcctcccacctt

SEQ ID NO: 1345193 - DNA, 15 bp, Homo sapiens
ttcaagcaatcctcc

SEQ ID NO: 1345194 - DNA, 15 bp, Homo sapiens
tggttcaagcaatcc

SEQ ID NO: 1345195 - DNA, 15 bp, Homo sapiens
ttggttcaagcaatc

SEQ ID NO: 1345196 - DNA, 15 bp, Homo sapiens
tttggttcaagcaat

SEQ ID NO: 1345197 - DNA, 15 bp, Homo sapiens
ctttggttcaagcaa

SEQ ID NO: 1345198 - DNA, 15 bp, Homo sapiens
tctttggttcaagca

SEQ ID NO: 1345199 - DNA, 15 bp, Homo sapiens
ctctttggttcaagc

SEQ ID NO: 1345200 - DNA, 15 bp, Homo sapiens
actctttggttcaag

SEQ ID NO: 1345201 - DNA, 15 bp, Homo sapiens
aactctttggttcaa

SEQ ID NO: 1345202 - DNA, 15 bp, Homo sapiens
aaactctttggttca

SEQ ID NO: 1345203 - DNA, 15 bp, Homo sapiens
caaactctttggttc

SEQ ID NO: 1345204 - DNA, 15 bp, Homo sapiens
tcaaactctttggtt

SEQ ID NO: 1345205 - DNA, 15 bp, Homo sapiens
ctcaaactctttggt

SEQ ID NO: 1345206 - DNA, 15 bp, Homo sapiens
cctcaaactctttgg

SEQ ID NO: 1345207 - DNA, 15 bp, Homo sapiens
gcctcaaactctttg

SEQ ID NO: 1345208 - DNA, 15 bp, Homo sapiens
agcctcaaactcttt

SEQ ID NO: 1345209 - DNA, 15 bp, Homo sapiens
cagcctcaaactctt

SEQ ID NO: 1345210 - DNA, 15 bp, Homo sapiens
aggtcacagctcact

SEQ ID NO: 1345211 - DNA, 15 bp, Homo sapiens
gaggtcacagctcac

SEQ ID NO: 1345212 - DNA, 15 bp, Homo sapiens
tgaggtcacagctca

SEQ ID NO: 1345213 - DNA, 15 bp, Homo sapiens
gtgaggtcacagctc

SEQ ID NO: 1345214 - DNA, 15 bp, Homo sapiens
ggtgaggtcacagct

SEQ ID NO: 1345215 - DNA, 15 bp, Homo sapiens
aggtgaggtcacagc

SEQ ID NO: 1345216 - DNA, 15 bp, Homo sapiens
gaggtgaggtcacag

SEQ ID NO: 1345217 - DNA, 15 bp, Homo sapiens
agaggtgaggtcaca

SEQ ID NO: 1345218 - DNA, 15 bp, Homo sapiens
cagaggtgaggtcac

SEQ ID NO: 1345219 - DNA, 15 bp, Homo sapiens
gcagaggtgaggtca

SEQ ID NO: 1345220 - DNA, 15 bp, Homo sapiens
tgcagaggtgaggtc

SEQ ID NO: 1345221 - DNA, 15 bp, Homo sapiens
gtgcagaggtgaggt

SEQ ID NO: 1345222 - DNA, 15 bp, Homo sapiens
tgtgcagaggtgagg

SEQ ID NO: 1345223 - DNA, 15 bp, Homo sapiens
gtgtgcagaggtgag

SEQ ID NO: 1345224 - DNA, 15 bp, Homo sapiens
ggtgtgcagaggtga

SEQ ID NO: 1345225 - DNA, 15 bp, Homo sapiens
tggtgtgcagaggtg

SEQ ID NO: 1345226 - DNA, 15 bp, Homo sapiens
ctggtgtgcagaggt

SEQ ID NO: 1345227 - DNA, 15 bp, Homo sapiens
gctggtgtgcagagg

SEQ ID NO: 1345228 - DNA, 15 bp, Homo sapiens
ggctggtgtgcagag

SEQ ID NO: 1345229 - DNA, 15 bp, Homo sapiens
aggctggtgtgcaga

SEQ ID NO: 1345230 - DNA, 15 bp, Homo sapiens
ctcaggctggtgtgc

SEQ ID NO: 1345231 - DNA, 15 bp, Homo sapiens
actcaggctggtgtg

SEQ ID NO: 1345232 - DNA, 15 bp, Homo sapiens
cactcaggctggtgt

SEQ ID NO: 1345233 - DNA, 15 bp, Homo sapiens
tcactcaggctggtg

SEQ ID NO: 1345234 - DNA, 15 bp, Homo sapiens
gtcactcaggctggt

SEQ ID NO: 1345235 - DNA, 15 bp, Homo sapiens
tctgtcactcaggct

SEQ ID NO: 1345236 - DNA, 15 bp, Homo sapiens
gctctgtcactcagg

SEQ ID NO: 1345237 - DNA, 15 bp, Homo sapiens
tgctctgtcactcag

SEQ ID NO: 1345238 - DNA, 15 bp, Homo sapiens
ttgctctgtcactca

SEQ ID NO: 1345239 - DNA, 15 bp, Homo sapiens
cttgctctgtcactc

SEQ ID NO: 1345240 - DNA, 15 bp, Homo sapiens
tcttgctctgtcact

SEQ ID NO: 1345241 - DNA, 15 bp, Homo sapiens
tgggtcttgctctgt

SEQ ID NO: 1345242 - DNA, 15 bp, Homo sapiens
atgggtcttgctctg

SEQ ID NO: 1345243 - DNA, 15 bp, Homo sapiens
gatgggtcttgctct

SEQ ID NO: 1345244 - DNA, 15 bp, Homo sapiens
ggatgggtcttgctc

SEQ ID NO: 1345245 - DNA, 15 bp, Homo sapiens
gggatgggtcttgct

SEQ ID NO: 1345246 - DNA, 15 bp, Homo sapiens
agggatgggtcttgc

SEQ ID NO: 1345247 - DNA, 15 bp, Homo sapiens
cagggatgggtcttg

SEQ ID NO: 1345248 - DNA, 15 bp, Homo sapiens
tcagggatgggtctt

SEQ ID NO: 1345249 - DNA, 15 bp, Homo sapiens
ttcagggatgggtct

SEQ ID NO: 1345250 - DNA, 15 bp, Homo sapiens
tttcagggatgggtc

SEQ ID NO: 1345251 - DNA, 15 bp, Homo sapiens
ttttcagggatgggt

SEQ ID NO: 1345252 - DNA, 15 bp, Homo sapiens
cttttcagggatggg

SEQ ID NO: 1345253 - DNA, 15 bp, Homo sapiens
tcttttcagggatgg

SEQ ID NO: 1345254 - DNA, 15 bp, Homo sapiens
ttcttttcagggatg

SEQ ID NO: 1345255 - DNA, 15 bp, Homo sapiens
tttcttttcagggat

SEQ ID NO: 1345256 - DNA, 15 bp, Homo sapiens
ttttcttttcaggga

SEQ ID NO: 1345257 - DNA, 15 bp, Homo sapiens
tttttcttttcaggg

SEQ ID NO: 1345258 - DNA, 15 bp, Homo sapiens
ttttttcttttcagg

SEQ ID NO: 1345259 - DNA, 15 bp, Homo sapiens
gttttttcttttcag

SEQ ID NO: 1345260 - DNA, 15 bp, Homo sapiens
agttttttcttttca

SEQ ID NO: 1345261 - DNA, 15 bp, Homo sapiens
aagttttttcttttc

SEQ ID NO: 1345262 - DNA, 15 bp, Homo sapiens
caagttttttctttt

SEQ ID NO: 1345263 - DNA, 15 bp, Homo sapiens
ccaagttttttcttt

SEQ ID NO: 1345264 - DNA, 15 bp, Homo sapiens
gccaagttttttctt

SEQ ID NO: 1345265 - DNA, 15 bp, Homo sapiens
agccaagttttttct

SEQ ID NO: 1345266 - DNA, 15 bp, Homo sapiens
cagccaagttttttc

SEQ ID NO: 1345267 - DNA, 15 bp, Homo sapiens
acagccaagtttttt

SEQ ID NO: 1345268 - DNA, 15 bp, Homo sapiens
aacagccaagttttt

SEQ ID NO: 1345269 - DNA, 15 bp, Homo sapiens
aaacagccaagtttt

SEQ ID NO: 1345270 - DNA, 15 bp, Homo sapiens
aaaacagccaagttt

SEQ ID NO: 1345271 - DNA, 15 bp, Homo sapiens
taaaacagccaagtt

SEQ ID NO: 1345272 - DNA, 15 bp, Homo sapiens
gtaaaacagccaagt

SEQ ID NO: 1345273 - DNA, 15 bp, Homo sapiens
agtaaaacagccaag

SEQ ID NO: 1345274 - DNA, 15 bp, Homo sapiens
aagtaaaacagccaa

SEQ ID NO: 1345275 - DNA, 15 bp, Homo sapiens
aaagtaaaacagcca

SEQ ID NO: 1345276 - DNA, 15 bp, Homo sapiens
caaagtaaaacagcc

SEQ ID NO: 1345277 - DNA, 15 bp, Homo sapiens
gcaaagtaaaacagc

SEQ ID NO: 1345278 - DNA, 15 bp, Homo sapiens
agcaaagtaaaacag

SEQ ID NO: 1345279 - DNA, 15 bp, Homo sapiens
aagcaaagtaaaaca

SEQ ID NO: 1345280 - DNA, 15 bp, Homo sapiens
aaagcaaagtaaaac

SEQ ID NO: 1345281 - DNA, 15 bp, Homo sapiens
gaaagcaaagtaaaa

SEQ ID NO: 1345282 - DNA, 15 bp, Homo sapiens
tgaaagcaaagtaaa

SEQ ID NO: 1345283 - DNA, 15 bp, Homo sapiens
ttgaaagcaaagtaa

SEQ ID NO: 1345284 - DNA, 15 bp, Homo sapiens
attgaaagcaaagta

SEQ ID NO: 1345285 - DNA, 15 bp, Homo sapiens
aattgaaagcaaagt

SEQ ID NO: 1345286 - DNA, 15 bp, Homo sapiens
aaattgaaagcaaag

SEQ ID NO: 1345287 - DNA, 15 bp, Homo sapiens
caaattgaaagcaaa

SEQ ID NO: 1345288 - DNA, 15 bp, Homo sapiens
acaaattgaaagcaa

SEQ ID NO: 1345289 - DNA, 15 bp, Homo sapiens
tacaaattgaaagca

SEQ ID NO: 1345290 - DNA, 15 bp, Homo sapiens
ctacaaattgaaagc

SEQ ID NO: 1345291 - DNA, 15 bp, Homo sapiens
actacaaattgaaag

SEQ ID NO: 1345292 - DNA, 15 bp, Homo sapiens
tactacaaattgaaa

SEQ ID NO: 1345293 - DNA, 15 bp, Homo sapiens
atactacaaattgaa

SEQ ID NO: 1345294 - DNA, 15 bp, Homo sapiens
tatactacaaattga

SEQ ID NO: 1345295 - DNA, 15 bp, Homo sapiens
atatactacaaattg

SEQ ID NO: 1345296 - DNA, 15 bp, Homo sapiens
aatatactacaaatt

SEQ ID NO: 1345297 - DNA, 15 bp, Homo sapiens
gaatatactacaaat

SEQ ID NO: 1345298 - DNA, 15 bp, Homo sapiens
agaatatactacaaa

SEQ ID NO: 1345299 - DNA, 15 bp, Homo sapiens
tagaatatactacaa

SEQ ID NO: 1345300 - DNA, 15 bp, Homo sapiens
gtagaatatactaca

SEQ ID NO: 1345301 - DNA, 15 bp, Homo sapiens
agtagaatatactac

SEQ ID NO: 1345302 - DNA, 15 bp, Homo sapiens
aagtagaatatacta

SEQ ID NO: 1345303 - DNA, 15 bp, Homo sapiens
taagtagaatatact

SEQ ID NO: 1345304 - DNA, 15 bp, Homo sapiens
ttaagtagaatatac

SEQ ID NO: 1345305 - DNA, 15 bp, Homo sapiens
attaagtagaatata

SEQ ID NO: 1345306 - DNA, 15 bp, Homo sapiens
tattaagtagaatat

SEQ ID NO: 1345307 - DNA, 15 bp, Homo sapiens
atattaagtagaata

SEQ ID NO: 1345308 - DNA, 15 bp, Homo sapiens
tatattaagtagaat

SEQ ID NO: 1345309 - DNA, 15 bp, Homo sapiens
ttatattaagtagaa

SEQ ID NO: 1345310 - DNA, 15 bp, Homo sapiens
attatattaagtaga

SEQ ID NO: 1345311 - DNA, 15 bp, Homo sapiens
tattatattaagtag

SEQ ID NO: 1345312 - DNA, 15 bp, Homo sapiens
ttattatattaagta

SEQ ID NO: 1345313 - DNA, 15 bp, Homo sapiens
tttattatattaagt

SEQ ID NO: 1345314 - DNA, 15 bp, Homo sapiens
gtttattatattaag

SEQ ID NO: 1345315 - DNA, 15 bp, Homo sapiens
agtttattatattaa

SEQ ID NO: 1345316 - DNA, 15 bp, Homo sapiens
aagtttattatatta

SEQ ID NO: 1345317 - DNA, 15 bp, Homo sapiens
taagtttattatatt

SEQ ID NO: 1345318 - DNA, 15 bp, Homo sapiens
gtaagtttattatat

SEQ ID NO: 1345319 - DNA, 15 bp, Homo sapiens
agtaagtttattata

SEQ ID NO: 1345320 - DNA, 15 bp, Homo sapiens
aagtaagtttattat

SEQ ID NO: 1345321 - DNA, 15 bp, Homo sapiens
aaagtaagtttatta

SEQ ID NO: 1345322 - DNA, 15 bp, Homo sapiens
gaaagtaagtttatt

SEQ ID NO: 1345323 - DNA, 15 bp, Homo sapiens
agaaagtaagtttat

SEQ ID NO: 1345324 - DNA, 15 bp, Homo sapiens
cagaaagtaagttta

SEQ ID NO: 1345325 - DNA, 15 bp, Homo sapiens
acagaaagtaagttt

SEQ ID NO: 1345326 - DNA, 15 bp, Homo sapiens
cacagaaagtaagtt

SEQ ID NO: 1345327 - DNA, 15 bp, Homo sapiens
tcacagaaagtaagt

SEQ ID NO: 1345328 - DNA, 15 bp, Homo sapiens
ctcacagaaagtaag

SEQ ID NO: 1345329 - DNA, 15 bp, Homo sapiens
cctcacagaaagtaa

SEQ ID NO: 1345330 - DNA, 15 bp, Homo sapiens
acctcacagaaagta

SEQ ID NO: 1345331 - DNA, 15 bp, Homo sapiens
cacctcacagaaagt

SEQ ID NO: 1345332 - DNA, 15 bp, Homo sapiens
gcacctcacagaaag

SEQ ID NO: 1345333 - DNA, 15 bp, Homo sapiens
agcacctcacagaaa

SEQ ID NO: 1345334 - DNA, 15 bp, Homo sapiens
aagcacctcacagaa

SEQ ID NO: 1345335 - DNA, 15 bp, Homo sapiens
caagcacctcacaga

SEQ ID NO: 1345336 - DNA, 15 bp, Homo sapiens
tcaagcacctcacag

SEQ ID NO: 1345337 - DNA, 15 bp, Homo sapiens
ttcaagcacctcaca

SEQ ID NO: 1345338 - DNA, 15 bp, Homo sapiens
attcaagcacctcac

SEQ ID NO: 1345339 - DNA, 15 bp, Homo sapiens
tattcaagcacctca

SEQ ID NO: 1345340 - DNA, 15 bp, Homo sapiens
gtattcaagcacctc

SEQ ID NO: 1345341 - DNA, 15 bp, Homo sapiens
agtattcaagcacct

SEQ ID NO: 1345342 - DNA, 15 bp, Homo sapiens
aagtattcaagcacc

SEQ ID NO: 1345343 - DNA, 15 bp, Homo sapiens
aaagtattcaagcac

SEQ ID NO: 1345344 - DNA, 15 bp, Homo sapiens
aaaagtattcaagca

SEQ ID NO: 1345345 - DNA, 15 bp, Homo sapiens
aaaaagtattcaagc

SEQ ID NO: 1345346 - DNA, 15 bp, Homo sapiens
taaaaagtattcaag

SEQ ID NO: 1345347 - DNA, 15 bp, Homo sapiens
ttaaaaagtattcaa

SEQ ID NO: 1345348 - DNA, 15 bp, Homo sapiens
attaaaaagtattca

SEQ ID NO: 1345349 - DNA, 15 bp, Homo sapiens
cattaaaaagtattc

SEQ ID NO: 1345350 - DNA, 15 bp, Homo sapiens
ccattaaaaagtatt

SEQ ID NO: 1345351 - DNA, 15 bp, Homo sapiens
accattaaaaagtat

SEQ ID NO: 1345352 - DNA, 15 bp, Homo sapiens
aaccattaaaaagta

SEQ ID NO: 1345353 - DNA, 15 bp, Homo sapiens
taaccattaaaaagt

SEQ ID NO: 1345354 - DNA, 15 bp, Homo sapiens
ataaccattaaaaag

SEQ ID NO: 1345355 - DNA, 15 bp, Homo sapiens
aataaccattaaaaa

SEQ ID NO: 1345356 - DNA, 15 bp, Homo sapiens
aaataaccattaaaa

SEQ ID NO: 1345357 - DNA, 15 bp, Homo sapiens
taaataaccattaaa

SEQ ID NO: 1345358 - DNA, 15 bp, Homo sapiens
ataaataaccattaa

SEQ ID NO: 1345359 - DNA, 15 bp, Homo sapiens
cataaataaccatta

SEQ ID NO: 1345360 - DNA, 15 bp, Homo sapiens
tcataaataaccatt

SEQ ID NO: 1345361 - DNA, 15 bp, Homo sapiens
ttcataaataaccat

SEQ ID NO: 1345362 - DNA, 15 bp, Homo sapiens
cttcataaataacca

SEQ ID NO: 1345363 - DNA, 15 bp, Homo sapiens
acttcataaataacc

SEQ ID NO: 1345364 - DNA, 15 bp, Homo sapiens
cacttcataaataac

SEQ ID NO: 1345365 - DNA, 15 bp, Homo sapiens
ccacttcataaataa

SEQ ID NO: 1345366 - DNA, 15 bp, Homo sapiens
accacttcataaata

SEQ ID NO: 1345367 - DNA, 15 bp, Homo sapiens
caccacttcataaat

SEQ ID NO: 1345368 - DNA, 15 bp, Homo sapiens
tcaccacttcataaa

SEQ ID NO: 1345369 - DNA, 15 bp, Homo sapiens
ttcaccacttcataa

SEQ ID NO: 1345370 - DNA, 15 bp, Homo sapiens
gttcaccacttcata

SEQ ID NO: 1345371 - DNA, 15 bp, Homo sapiens
agttcaccacttcat

SEQ ID NO: 1345372 - DNA, 15 bp, Homo sapiens
cagttcaccacttca

SEQ ID NO: 1345373 - DNA, 15 bp, Homo sapiens
acagttcaccacttc

SEQ ID NO: 1345374 - DNA, 15 bp, Homo sapiens
tacagttcaccactt

SEQ ID NO: 1345375 - DNA, 15 bp, Homo sapiens
ttacagttcaccact

SEQ ID NO: 1345376 - DNA, 15 bp, Homo sapiens
attacagttcaccac

SEQ ID NO: 1345377 - DNA, 15 bp, Homo sapiens
aattacagttcacca

SEQ ID NO: 1345378 - DNA, 15 bp, Homo sapiens
gaattacagttcacc

SEQ ID NO: 1345379 - DNA, 15 bp, Homo sapiens
agaattacagttcac

SEQ ID NO: 1345380 - DNA, 15 bp, Homo sapiens
cagaattacagttca

SEQ ID NO: 1345381 - DNA, 15 bp, Homo sapiens
acagaattacagttc

SEQ ID NO: 1345382 - DNA, 15 bp, Homo sapiens
tacagaattacagtt

SEQ ID NO: 1345383 - DNA, 15 bp, Homo sapiens
atacagaattacagt

SEQ ID NO: 1345384 - DNA, 15 bp, Homo sapiens
aatacagaattacag

SEQ ID NO: 1345385 - DNA, 15 bp, Homo sapiens
aaatacagaattaca

SEQ ID NO: 1345386 - DNA, 15 bp, Homo sapiens
caaatacagaattac

SEQ ID NO: 1345387 - DNA, 15 bp, Homo sapiens
acaaatacagaatta

SEQ ID NO: 1345388 - DNA, 15 bp, Homo sapiens
tacaaatacagaatt

SEQ ID NO: 1345389 - DNA, 15 bp, Homo sapiens
gtacaaatacagaat

SEQ ID NO: 1345390 - DNA, 15 bp, Homo sapiens
tgtacaaatacagaa

SEQ ID NO: 1345391 - DNA, 15 bp, Homo sapiens
atgtacaaatacaga

SEQ ID NO: 1345392 - DNA, 15 bp, Homo sapiens
aatgtacaaatacag

SEQ ID NO: 1345393 - DNA, 15 bp, Homo sapiens
aaatgtacaaataca

SEQ ID NO: 1345394 - DNA, 15 bp, Homo sapiens
caaatgtacaaatac

SEQ ID NO: 1345395 - DNA, 15 bp, Homo sapiens
ccaaatgtacaaata

SEQ ID NO: 1345396 - DNA, 15 bp, Homo sapiens
tccaaatgtacaaat

SEQ ID NO: 1345397 - DNA, 15 bp, Homo sapiens
atccaaatgtacaaa

SEQ ID NO: 1345398 - DNA, 15 bp, Homo sapiens
catccaaatgtacaa

SEQ ID NO: 1345399 - DNA, 15 bp, Homo sapiens
acatccaaatgtaca

SEQ ID NO: 1345400 - DNA, 15 bp, Homo sapiens
tacatccaaatgtac

SEQ ID NO: 1345401 - DNA, 15 bp, Homo sapiens
gtacatccaaatgta

SEQ ID NO: 1345402 - DNA, 15 bp, Homo sapiens
tgtacatccaaatgt

SEQ ID NO: 1345403 - DNA, 15 bp, Homo sapiens
ttgtacatccaaatg

SEQ ID NO: 1345404 - DNA, 15 bp, Homo sapiens
tttgtacatccaaat

SEQ ID NO: 1345405 - DNA, 15 bp, Homo sapiens
atttgtacatccaaa

SEQ ID NO: 1345406 - DNA, 15 bp, Homo sapiens
tatttgtacatccaa

SEQ ID NO: 1345407 - DNA, 15 bp, Homo sapiens
ctatttgtacatcca

SEQ ID NO: 1345408 - DNA, 15 bp, Homo sapiens
actatttgtacatcc

SEQ ID NO: 1345409 - DNA, 15 bp, Homo sapiens
cactatttgtacatc

SEQ ID NO: 1345410 - DNA, 15 bp, Homo sapiens
acactatttgtacat

SEQ ID NO: 1345411 - DNA, 15 bp, Homo sapiens
aacactatttgtaca

SEQ ID NO: 1345412 - DNA, 15 bp, Homo sapiens
caacactatttgtac

SEQ ID NO: 1345413 - DNA, 15 bp, Homo sapiens
gcaacactatttgta

SEQ ID NO: 1345414 - DNA, 15 bp, Homo sapiens
agcaacactatttgt

SEQ ID NO: 1345415 - DNA, 15 bp, Homo sapiens
tagcaacactatttg

SEQ ID NO: 1345416 - DNA, 15 bp, Homo sapiens
gtagcaacactattt

SEQ ID NO: 1345417 - DNA, 15 bp, Homo sapiens
tgtagcaacactatt

SEQ ID NO: 1345418 - DNA, 15 bp, Homo sapiens
ctgtagcaacactat

SEQ ID NO: 1345419 - DNA, 15 bp, Homo sapiens
actgtagcaacacta

SEQ ID NO: 1345420 - DNA, 15 bp, Homo sapiens
aactgtagcaacact

SEQ ID NO: 1345421 - DNA, 15 bp, Homo sapiens
caactgtagcaacac

SEQ ID NO: 1345422 - DNA, 15 bp, Homo sapiens
acaactgtagcaaca

SEQ ID NO: 1345423 - DNA, 15 bp, Homo sapiens
gacaactgtagcaac

SEQ ID NO: 1345424 - DNA, 15 bp, Homo sapiens
ggacaactgtagcaa

SEQ ID NO: 1345425 - DNA, 15 bp, Homo sapiens
aggacaactgtagca

SEQ ID NO: 1345426 - DNA, 15 bp, Homo sapiens
aaggacaactgtagc

SEQ ID NO: 1345427 - DNA, 15 bp, Homo sapiens
aaaggacaactgtag

SEQ ID NO: 1345428 - DNA, 15 bp, Homo sapiens
aaaaggacaactgta

SEQ ID NO: 1345429 - DNA, 15 bp, Homo sapiens
aaaaaggacaactgt

SEQ ID NO: 1345430 - DNA, 15 bp, Homo sapiens
aaaaaaggacaactg

SEQ ID NO: 1345431 - DNA, 15 bp, Homo sapiens
caaaaaaggacaact

SEQ ID NO: 1345432 - DNA, 15 bp, Homo sapiens
ccaaaaaaggacaac

SEQ ID NO: 1345433 - DNA, 15 bp, Homo sapiens
accaaaaaaggacaa

SEQ ID NO: 1345434 - DNA, 15 bp, Homo sapiens
taccaaaaaaggaca

SEQ ID NO: 1345435 - DNA, 15 bp, Homo sapiens
ataccaaaaaaggac

SEQ ID NO: 1345436 - DNA, 15 bp, Homo sapiens
cataccaaaaaagga

SEQ ID NO: 1345437 - DNA, 15 bp, Homo sapiens
acataccaaaaaagg

SEQ ID NO: 1345438 - DNA, 15 bp, Homo sapiens
gacataccaaaaaag

SEQ ID NO: 1345439 - DNA, 15 bp, Homo sapiens
agacataccaaaaaa

SEQ ID NO: 1345440 - DNA, 15 bp, Homo sapiens
gagacataccaaaaa

SEQ ID NO: 1345441 - DNA, 15 bp, Homo sapiens
ggagacataccaaaa

SEQ ID NO: 1345442 - DNA, 15 bp, Homo sapiens
tggagacataccaaa

SEQ ID NO: 1345443 - DNA, 15 bp, Homo sapiens
ctggagacataccaa

SEQ ID NO: 1345444 - DNA, 15 bp, Homo sapiens
actggagacatacca

SEQ ID NO: 1345445 - DNA, 15 bp, Homo sapiens
cactggagacatacc

SEQ ID NO: 1345446 - DNA, 15 bp, Homo sapiens
acactggagacatac

SEQ ID NO: 1345447 - DNA, 15 bp, Homo sapiens
aacactggagacata

SEQ ID NO: 1345448 - DNA, 15 bp, Homo sapiens
gaacactggagacat

SEQ ID NO: 1345449 - DNA, 15 bp, Homo sapiens
agaacactggagaca

SEQ ID NO: 1345450 - DNA, 15 bp, Homo sapiens
aagaacactggagac

SEQ ID NO: 1345451 - DNA, 15 bp, Homo sapiens
taagaacactggaga

SEQ ID NO: 1345452 - DNA, 15 bp, Homo sapiens
ctaagaacactggag

SEQ ID NO: 1345453 - DNA, 15 bp, Homo sapiens
cctaagaacactgga

SEQ ID NO: 1345454 - DNA, 15 bp, Homo sapiens
tcctaagaacactgg

SEQ ID NO: 1345455 - DNA, 15 bp, Homo sapiens
atcctaagaacactg

SEQ ID NO: 1345456 - DNA, 15 bp, Homo sapiens
tatcctaagaacact

SEQ ID NO: 1345457 - DNA, 15 bp, Homo sapiens
ttatcctaagaacac

SEQ ID NO: 1345458 - DNA, 15 bp, Homo sapiens
tttatcctaagaaca

SEQ ID NO: 1345459 - DNA, 15 bp, Homo sapiens
atttatcctaagaac

SEQ ID NO: 1345460 - DNA, 15 bp, Homo sapiens
aatttatcctaagaa

SEQ ID NO: 1345461 - DNA, 15 bp, Homo sapiens
gaatttatcctaaga

SEQ ID NO: 1345462 - DNA, 15 bp, Homo sapiens
ggaatttatcctaag

SEQ ID NO: 1345463 - DNA, 15 bp, Homo sapiens
aggaatttatcctaa

SEQ ID NO: 1345464 - DNA, 15 bp, Homo sapiens
caggaatttatccta

SEQ ID NO: 1345465 - DNA, 15 bp, Homo sapiens
tcaggaatttatcct

SEQ ID NO: 1345466 - DNA, 15 bp, Homo sapiens
ttcaggaatttatcc

SEQ ID NO: 1345467 - DNA, 15 bp, Homo sapiens
tttcaggaatttatc

SEQ ID NO: 1345468 - DNA, 15 bp, Homo sapiens
ctttcaggaatttat

SEQ ID NO: 1345469 - DNA, 15 bp, Homo sapiens
actttcaggaattta

SEQ ID NO: 1345470 - DNA, 15 bp, Homo sapiens
cactttcaggaattt

SEQ ID NO: 1345471 - DNA, 15 bp, Homo sapiens
tcactttcaggaatt

SEQ ID NO: 1345472 - DNA, 15 bp, Homo sapiens
ttcactttcaggaat

SEQ ID NO: 1345473 - DNA, 15 bp, Homo sapiens
attcactttcaggaa

SEQ ID NO: 1345474 - DNA, 15 bp, Homo sapiens
aattcactttcagga

SEQ ID NO: 1345475 - DNA, 15 bp, Homo sapiens
aaattcactttcagg

SEQ ID NO: 1345476 - DNA, 15 bp, Homo sapiens
gaaattcactttcag

SEQ ID NO: 1345477 - DNA, 15 bp, Homo sapiens
tgaaattcactttca

SEQ ID NO: 1345478 - DNA, 15 bp, Homo sapiens
ctgaaattcactttc

SEQ ID NO: 1345479 - DNA, 15 bp, Homo sapiens
actgaaattcacttt

SEQ ID NO: 1345480 - DNA, 15 bp, Homo sapiens
aactgaaattcactt

SEQ ID NO: 1345481 - DNA, 15 bp, Homo sapiens
aaactgaaattcact

SEQ ID NO: 1345482 - DNA, 15 bp, Homo sapiens
aaaactgaaattcac

SEQ ID NO: 1345483 - DNA, 15 bp, Homo sapiens
caaaactgaaattca

SEQ ID NO: 1345484 - DNA, 15 bp, Homo sapiens
tcaaaactgaaattc

SEQ ID NO: 1345485 - DNA, 15 bp, Homo sapiens
ttcaaaactgaaatt

SEQ ID NO: 1345486 - DNA, 15 bp, Homo sapiens
attcaaaactgaaat

SEQ ID NO: 1345487 - DNA, 15 bp, Homo sapiens
aattcaaaactgaaa

SEQ ID NO: 1345488 - DNA, 15 bp, Homo sapiens
aaattcaaaactgaa

SEQ ID NO: 1345489 - DNA, 15 bp, Homo sapiens
gaaattcaaaactga

SEQ ID NO: 1345490 - DNA, 15 bp, Homo sapiens
tgaaattcaaaactg

SEQ ID NO: 1345491 - DNA, 15 bp, Homo sapiens
ctgaaattcaaaact

SEQ ID NO: 1345492 - DNA, 15 bp, Homo sapiens
tctgaaattcaaaac

SEQ ID NO: 1345493 - DNA, 15 bp, Homo sapiens
ctctgaaattcaaaa

SEQ ID NO: 1345494 - DNA, 15 bp, Homo sapiens
tctctgaaattcaaa

SEQ ID NO: 1345495 - DNA, 15 bp, Homo sapiens
ttctctgaaattcaa

SEQ ID NO: 1345496 - DNA, 15 bp, Homo sapiens
tttctctgaaattca

SEQ ID NO: 1345497 - DNA, 15 bp, Homo sapiens
gtttctctgaaattc

SEQ ID NO: 1345498 - DNA, 15 bp, Homo sapiens
tgtttctctgaaatt

SEQ ID NO: 1345499 - DNA, 15 bp, Homo sapiens
atgtttctctgaaat

SEQ ID NO: 1345500 - DNA, 15 bp, Homo sapiens
catgtttctctgaaa

SEQ ID NO: 1345501 - DNA, 15 bp, Homo sapiens
acatgtttctctgaa

SEQ ID NO: 1345502 - DNA, 15 bp, Homo sapiens
gacatgtttctctga

SEQ ID NO: 1345503 - DNA, 15 bp, Homo sapiens
tgacatgtttctctg

SEQ ID NO: 1345504 - DNA, 15 bp, Homo sapiens
ttgacatgtttctct

SEQ ID NO: 1345505 - DNA, 15 bp, Homo sapiens
tttgacatgtttctc

SEQ ID NO: 1345506 - DNA, 15 bp, Homo sapiens
ctttgacatgtttct

SEQ ID NO: 1345507 - DNA, 15 bp, Homo sapiens
actttgacatgtttc

SEQ ID NO: 1345508 - DNA, 15 bp, Homo sapiens
aactttgacatgttt

SEQ ID NO: 1345509 - DNA, 15 bp, Homo sapiens
gaactttgacatgtt

SEQ ID NO: 1345510 - DNA, 15 bp, Homo sapiens
agaactttgacatgt

SEQ ID NO: 1345511 - DNA, 15 bp, Homo sapiens
aagaactttgacatg

SEQ ID NO: 1345512 - DNA, 15 bp, Homo sapiens
gaagaactttgacat

SEQ ID NO: 1345513 - DNA, 15 bp, Homo sapiens
agaagaactttgaca

SEQ ID NO: 1345514 - DNA, 15 bp, Homo sapiens
aagaagaactttgac

SEQ ID NO: 1345515 - DNA, 15 bp, Homo sapiens
aaagaagaactttga

SEQ ID NO: 1345516 - DNA, 15 bp, Homo sapiens
taaagaagaactttg

SEQ ID NO: 1345517 - DNA, 15 bp, Homo sapiens
ttaaagaagaacttt

SEQ ID NO: 1345518 - DNA, 15 bp, Homo sapiens
cttaaagaagaactt

SEQ ID NO: 1345519 - DNA, 15 bp, Homo sapiens
gcttaaagaagaact

SEQ ID NO: 1345520 - DNA, 15 bp, Homo sapiens
ggcttaaagaagaac

SEQ ID NO: 1345521 - DNA, 15 bp, Homo sapiens
aggcttaaagaagaa

SEQ ID NO: 1345522 - DNA, 15 bp, Homo sapiens
aaaggcttaaagaag

SEQ ID NO: 1345523 - DNA, 15 bp, Homo sapiens
taaaggcttaaagaa

SEQ ID NO: 1345524 - DNA, 15 bp, Homo sapiens
ttaaaggcttaaaga

SEQ ID NO: 1345525 - DNA, 15 bp, Homo sapiens
cttaaaggcttaaag

SEQ ID NO: 1345526 - DNA, 15 bp, Homo sapiens
acttaaaggcttaaa

SEQ ID NO: 1345527 - DNA, 15 bp, Homo sapiens
gacttaaaggcttaa

SEQ ID NO: 1345528 - DNA, 15 bp, Homo sapiens
agacttaaaggctta

SEQ ID NO: 1345529 - DNA, 15 bp, Homo sapiens
gagacttaaaggctt

SEQ ID NO: 1345530 - DNA, 15 bp, Homo sapiens
ggagacttaaaggct

SEQ ID NO: 1345531 - DNA, 15 bp, Homo sapiens
aggagacttaaaggc

SEQ ID NO: 1345532 - DNA, 15 bp, Homo sapiens
caggagacttaaagg

SEQ ID NO: 1345533 - DNA, 15 bp, Homo sapiens
tcaggagacttaaag

SEQ ID NO: 1345534 - DNA, 15 bp, Homo sapiens
atcaggagacttaaa

SEQ ID NO: 1345535 - DNA, 15 bp, Homo sapiens
tatcaggagacttaa

SEQ ID NO: 1345536 - DNA, 15 bp, Homo sapiens
atatcaggagactta

SEQ ID NO: 1345537 - DNA, 15 bp, Homo sapiens
catatcaggagactt

SEQ ID NO: 1345538 - DNA, 15 bp, Homo sapiens
acatatcaggagact

SEQ ID NO: 1345539 - DNA, 15 bp, Homo sapiens
aacatatcaggagac

SEQ ID NO: 1345540 - DNA, 15 bp, Homo sapiens
aaacatatcaggaga

SEQ ID NO: 1345541 - DNA, 15 bp, Homo sapiens
aaaacatatcaggag

SEQ ID NO: 1345542 - DNA, 15 bp, Homo sapiens
caaaacatatcagga

SEQ ID NO: 1345543 - DNA, 15 bp, Homo sapiens
acaaaacatatcagg

SEQ ID NO: 1345544 - DNA, 15 bp, Homo sapiens
gacaaaacatatcag

SEQ ID NO: 1345545 - DNA, 15 bp, Homo sapiens
cgacaaaacatatca

SEQ ID NO: 1345546 - DNA, 15 bp, Homo sapiens
acgacaaaacatatc

SEQ ID NO: 1345547 - DNA, 15 bp, Homo sapiens
tacgacaaaacatat

SEQ ID NO: 1345548 - DNA, 15 bp, Homo sapiens
atacgacaaaacata

SEQ ID NO: 1345549 - DNA, 15 bp, Homo sapiens
aatacgacaaaacat

SEQ ID NO: 1345550 - DNA, 15 bp, Homo sapiens
caatacgacaaaaca

SEQ ID NO: 1345551 - DNA, 15 bp, Homo sapiens
gcaatacgacaaaac

SEQ ID NO: 1345552 - DNA, 15 bp, Homo sapiens
tgcaatacgacaaaa

SEQ ID NO: 1345553 - DNA, 15 bp, Homo sapiens
ctgcaatacgacaaa

SEQ ID NO: 1345554 - DNA, 15 bp, Homo sapiens
gctgcaatacgacaa

SEQ ID NO: 1345555 - DNA, 15 bp, Homo sapiens
agctgcaatacgaca

SEQ ID NO: 1345556 - DNA, 15 bp, Homo sapiens
aagctgcaatacgac

SEQ ID NO: 1345557 - DNA, 15 bp, Homo sapiens
caagctgcaatacga

SEQ ID NO: 1345558 - DNA, 15 bp, Homo sapiens
ccaagctgcaatacg

SEQ ID NO: 1345559 - DNA, 15 bp, Homo sapiens
tccaagctgcaatac

SEQ ID NO: 1345560 - DNA, 15 bp, Homo sapiens
ttccaagctgcaata

SEQ ID NO: 1345561 - DNA, 15 bp, Homo sapiens
tttccaagctgcaat

SEQ ID NO: 1345562 - DNA, 15 bp, Homo sapiens
ctttccaagctgcaa

SEQ ID NO: 1345563 - DNA, 15 bp, Homo sapiens
cctttccaagctgca

SEQ ID NO: 1345564 - DNA, 15 bp, Homo sapiens
acctttccaagctgc

SEQ ID NO: 1345565 - DNA, 15 bp, Homo sapiens
aacctttccaagctg

SEQ ID NO: 1345566 - DNA, 15 bp, Homo sapiens
caacctttccaagct

SEQ ID NO: 1345567 - DNA, 15 bp, Homo sapiens
tcaacctttccaagc

SEQ ID NO: 1345568 - DNA, 15 bp, Homo sapiens
ttcaacctttccaag

SEQ ID NO: 1345569 - DNA, 15 bp, Homo sapiens
tttcaacctttccaa

SEQ ID NO: 1345570 - DNA, 15 bp, Homo sapiens
atttcaacctttcca

SEQ ID NO: 1345571 - DNA, 15 bp, Homo sapiens
tatttcaacctttcc

SEQ ID NO: 1345572 - DNA, 15 bp, Homo sapiens
ttatttcaacctttc

SEQ ID NO: 1345573 - DNA, 15 bp, Homo sapiens
tttatttcaaccttt

SEQ ID NO: 1345574 - DNA, 15 bp, Homo sapiens
ttttatttcaacctt

SEQ ID NO: 1345575 - DNA, 15 bp, Homo sapiens
attttatttcaacct

SEQ ID NO: 1345576 - DNA, 15 bp, Homo sapiens
gattttatttcaacc

SEQ ID NO: 1345577 - DNA, 15 bp, Homo sapiens
ggattttatttcaac

SEQ ID NO: 1345578 - DNA, 15 bp, Homo sapiens
aggattttatttcaa

SEQ ID NO: 1345579 - DNA, 15 bp, Homo sapiens
gaggattttatttca

SEQ ID NO: 1345580 - DNA, 15 bp, Homo sapiens
agaggattttatttc

SEQ ID NO: 1345581 - DNA, 15 bp, Homo sapiens
tagaggattttattt

SEQ ID NO: 1345582 - DNA, 15 bp, Homo sapiens
atagaggattttatt

SEQ ID NO: 1345583 - DNA, 15 bp, Homo sapiens
aatagaggattttat

SEQ ID NO: 1345584 - DNA, 15 bp, Homo sapiens
taatagaggatttta

SEQ ID NO: 1345585 - DNA, 15 bp, Homo sapiens
ctaatagaggatttt

SEQ ID NO: 1345586 - DNA, 15 bp, Homo sapiens
cctaatagaggattt

SEQ ID NO: 1345587 - DNA, 15 bp, Homo sapiens
ccctaatagaggatt

SEQ ID NO: 1345588 - DNA, 15 bp, Homo sapiens
gccctaatagaggat

SEQ ID NO: 1345589 - DNA, 15 bp, Homo sapiens
agccctaatagagga

SEQ ID NO: 1345590 - DNA, 15 bp, Homo sapiens
cagccctaatagagg

SEQ ID NO: 1345591 - DNA, 15 bp, Homo sapiens
ccagccctaatagag

SEQ ID NO: 1345592 - DNA, 15 bp, Homo sapiens
cccagccctaataga

SEQ ID NO: 1345593 - DNA, 15 bp, Homo sapiens
acccagccctaatag

SEQ ID NO: 1345594 - DNA, 15 bp, Homo sapiens
cacccagccctaata

SEQ ID NO: 1345595 - DNA, 15 bp, Homo sapiens
gcacccagccctaat

SEQ ID NO: 1345596 - DNA, 15 bp, Homo sapiens
tgcacccagccctaa

SEQ ID NO: 1345597 - DNA, 15 bp, Homo sapiens
ctgcacccagcccta

SEQ ID NO: 1345598 - DNA, 15 bp, Homo sapiens
actgcacccagccct

SEQ ID NO: 1345599 - DNA, 15 bp, Homo sapiens
cactgcacccagccc

SEQ ID NO: 1345600 - DNA, 15 bp, Homo sapiens
ccactgcacccagcc

SEQ ID NO: 1345601 - DNA, 15 bp, Homo sapiens
gccactgcacccagc

SEQ ID NO: 1345602 - DNA, 15 bp, Homo sapiens
agccactgcacccag

SEQ ID NO: 1345603 - DNA, 15 bp, Homo sapiens
cggattacaggcatg

SEQ ID NO: 1345604 - DNA, 15 bp, Homo sapiens
tcggattacaggcat

SEQ ID NO: 1345605 - DNA, 15 bp, Homo sapiens
ctcggattacaggca

SEQ ID NO: 1345606 - DNA, 15 bp, Homo sapiens
gctcggattacaggc

SEQ ID NO: 1345607 - DNA, 15 bp, Homo sapiens
tgctcggattacagg

SEQ ID NO: 1345608 - DNA, 15 bp, Homo sapiens
gtgctcggattacag

SEQ ID NO: 1345609 - DNA, 15 bp, Homo sapiens
agtgctcggattaca

SEQ ID NO: 1345610 - DNA, 15 bp, Homo sapiens
aagtgctcggattac

SEQ ID NO: 1345611 - DNA, 15 bp, Homo sapiens
aaagtgctcggatta

SEQ ID NO: 1345612 - DNA, 15 bp, Homo sapiens
caaagtgctcggatt

SEQ ID NO: 1345613 - DNA, 15 bp, Homo sapiens
ccaaagtgctcggat

SEQ ID NO: 1345614 - DNA, 15 bp, Homo sapiens
cccaaagtgctcgga

SEQ ID NO: 1345615 - DNA, 15 bp, Homo sapiens
tcccaaagtgctcgg

SEQ ID NO: 1345616 - DNA, 15 bp, Homo sapiens
atcccaaagtgctcg

SEQ ID NO: 1345617 - DNA, 15 bp, Homo sapiens
aatcccaaagtgctc

SEQ ID NO: 1345618 - DNA, 15 bp, Homo sapiens
aaatcccaaagtgct

SEQ ID NO: 1345619 - DNA, 15 bp, Homo sapiens
taaatcccaaagtgc

SEQ ID NO: 1345620 - DNA, 15 bp, Homo sapiens
ctaaatcccaaagtg

SEQ ID NO: 1345621 - DNA, 15 bp, Homo sapiens
gctaaatcccaaagt

SEQ ID NO: 1345622 - DNA, 15 bp, Homo sapiens
agctaaatcccaaag

SEQ ID NO: 1345623 - DNA, 15 bp, Homo sapiens
cagctaaatcccaaa

SEQ ID NO: 1345624 - DNA, 15 bp, Homo sapiens
tcagctaaatcccaa

SEQ ID NO: 1345625 - DNA, 15 bp, Homo sapiens
atcagctaaatccca

SEQ ID NO: 1345626 - DNA, 15 bp, Homo sapiens
aatcagctaaatccc

SEQ ID NO: 1345627 - DNA, 15 bp, Homo sapiens
aaatcagctaaatcc

SEQ ID NO: 1345628 - DNA, 15 bp, Homo sapiens
caaatcagctaaatc

SEQ ID NO: 1345629 - DNA, 15 bp, Homo sapiens
ccaaatcagctaaat

SEQ ID NO: 1345630 - DNA, 15 bp, Homo sapiens
gccaaatcagctaaa

SEQ ID NO: 1345631 - DNA, 15 bp, Homo sapiens
agccaaatcagctaa

SEQ ID NO: 1345632 - DNA, 15 bp, Homo sapiens
cagccaaatcagcta

SEQ ID NO: 1345633 - DNA, 15 bp, Homo sapiens
tcagccaaatcagct

SEQ ID NO: 1345634 - DNA, 15 bp, Homo sapiens
atcagccaaatcagc

SEQ ID NO: 1345635 - DNA, 15 bp, Homo sapiens
aatcagccaaatcag

SEQ ID NO: 1345636 - DNA, 15 bp, Homo sapiens
aaatcagccaaatca

SEQ ID NO: 1345637 - DNA, 15 bp, Homo sapiens
taaatcagccaaatc

SEQ ID NO: 1345638 - DNA, 15 bp, Homo sapiens
ataaatcagccaaat

SEQ ID NO: 1345639 - DNA, 15 bp, Homo sapiens
gataaatcagccaaa

SEQ ID NO: 1345640 - DNA, 15 bp, Homo sapiens
tgataaatcagccaa

SEQ ID NO: 1345641 - DNA, 15 bp, Homo sapiens
atgataaatcagcca

SEQ ID NO: 1345642 - DNA, 15 bp, Homo sapiens
catgataaatcagcc

SEQ ID NO: 1345643 - DNA, 15 bp, Homo sapiens
gcatgataaatcagc

SEQ ID NO: 1345644 - DNA, 15 bp, Homo sapiens
ggcatgataaatcag

SEQ ID NO: 1345645 - DNA, 15 bp, Homo sapiens
tggcatgataaatca

SEQ ID NO: 1345646 - DNA, 15 bp, Homo sapiens
gtggcatgataaatc

SEQ ID NO: 1345647 - DNA, 15 bp, Homo sapiens
agtggcatgataaat

SEQ ID NO: 1345648 - DNA, 15 bp, Homo sapiens
cagtggcatgataaa

SEQ ID NO: 1345649 - DNA, 15 bp, Homo sapiens
ggcagtggcatgata

SEQ ID NO: 1345650 - DNA, 15 bp, Homo sapiens
tggcagtggcatgat

SEQ ID NO: 1345651 - DNA, 15 bp, Homo sapiens
gtggcagtggcatga

SEQ ID NO: 1345652 - DNA, 15 bp, Homo sapiens
ggtggcagtggcatg

SEQ ID NO: 1345653 - DNA, 15 bp, Homo sapiens
aggtggcagtggcat

SEQ ID NO: 1345654 - DNA, 15 bp, Homo sapiens
caggtggcagtggca

SEQ ID NO: 1345655 - DNA, 15 bp, Homo sapiens
acaggtggcagtggc

SEQ ID NO: 1345656 - DNA, 15 bp, Homo sapiens
tacaggtggcagtgg

SEQ ID NO: 1345657 - DNA, 15 bp, Homo sapiens
atacaggtggcagtg

SEQ ID NO: 1345658 - DNA, 15 bp, Homo sapiens
gatacaggtggcagt

SEQ ID NO: 1345659 - DNA, 15 bp, Homo sapiens
ggatacaggtggcag

SEQ ID NO: 1345660 - DNA, 15 bp, Homo sapiens
tggatacaggtggca

SEQ ID NO: 1345661 - DNA, 15 bp, Homo sapiens
gtggatacaggtggc

SEQ ID NO: 1345662 - DNA, 15 bp, Homo sapiens
ggtggatacaggtgg

SEQ ID NO: 1345663 - DNA, 15 bp, Homo sapiens
gggtggatacaggtg

SEQ ID NO: 1345664 - DNA, 15 bp, Homo sapiens
tgggtggatacaggt

SEQ ID NO: 1345665 - DNA, 15 bp, Homo sapiens
ttgggtggatacagg

SEQ ID NO: 1345666 - DNA, 15 bp, Homo sapiens
tttgggtggatacag

SEQ ID NO: 1345667 - DNA, 15 bp, Homo sapiens
ttttgggtggataca

SEQ ID NO: 1345668 - DNA, 15 bp, Homo sapiens
attttgggtggatac

SEQ ID NO: 1345669 - DNA, 15 bp, Homo sapiens
gattttgggtggata

SEQ ID NO: 1345670 - DNA, 15 bp, Homo sapiens
ggattttgggtggat

SEQ ID NO: 1345671 - DNA, 15 bp, Homo sapiens
tggattttgggtgga

SEQ ID NO: 1345672 - DNA, 15 bp, Homo sapiens
gtggattttgggtgg

SEQ ID NO: 1345673 - DNA, 15 bp, Homo sapiens
tgtggattttgggtg

SEQ ID NO: 1345674 - DNA, 15 bp, Homo sapiens
ttgtggattttgggt

SEQ ID NO: 1345675 - DNA, 15 bp, Homo sapiens
tttgtggattttggg

SEQ ID NO: 1345676 - DNA, 15 bp, Homo sapiens
ttttgtggattttgg

SEQ ID NO: 1345677 - DNA, 15 bp, Homo sapiens
tttttgtggattttg

SEQ ID NO: 1345678 - DNA, 15 bp, Homo sapiens
gtttttgtggatttt

SEQ ID NO: 1345679 - DNA, 15 bp, Homo sapiens
ggtttttgtggattt

SEQ ID NO: 1345680 - DNA, 15 bp, Homo sapiens
gggtttttgtggatt

SEQ ID NO: 1345681 - DNA, 15 bp, Homo sapiens
ggggtttttgtggat

SEQ ID NO: 1345682 - DNA, 15 bp, Homo sapiens
tggggtttttgtgga

SEQ ID NO: 1345683 - DNA, 15 bp, Homo sapiens
ctggggtttttgtgg

SEQ ID NO: 1345684 - DNA, 15 bp, Homo sapiens
cctggggtttttgtg

SEQ ID NO: 1345685 - DNA, 15 bp, Homo sapiens
tcctggggtttttgt

SEQ ID NO: 1345686 - DNA, 15 bp, Homo sapiens
atcctggggtttttg

SEQ ID NO: 1345687 - DNA, 15 bp, Homo sapiens
tatcctggggttttt

SEQ ID NO: 1345688 - DNA, 15 bp, Homo sapiens
gtatcctggggtttt

SEQ ID NO: 1345689 - DNA, 15 bp, Homo sapiens
tgtatcctggggttt

SEQ ID NO: 1345690 - DNA, 15 bp, Homo sapiens
atgtatcctggggtt

SEQ ID NO: 1345691 - DNA, 15 bp, Homo sapiens
aatgtatcctggggt

SEQ ID NO: 1345692 - DNA, 15 bp, Homo sapiens
gaatgtatcctgggg

SEQ ID NO: 1345693 - DNA, 15 bp, Homo sapiens
agaatgtatcctggg

SEQ ID NO: 1345694 - DNA, 15 bp, Homo sapiens
aagaatgtatcctgg

SEQ ID NO: 1345695 - DNA, 15 bp, Homo sapiens
taagaatgtatcctg

SEQ ID NO: 1345696 - DNA, 15 bp, Homo sapiens
ctaagaatgtatcct

SEQ ID NO: 1345697 - DNA, 15 bp, Homo sapiens
gctaagaatgtatcc

SEQ ID NO: 1345698 - DNA, 15 bp, Homo sapiens
tgctaagaatgtatc

SEQ ID NO: 1345699 - DNA, 15 bp, Homo sapiens
atgctaagaatgtat

SEQ ID NO: 1345700 - DNA, 15 bp, Homo sapiens
aatgctaagaatgta

SEQ ID NO: 1345701 - DNA, 15 bp, Homo sapiens
taatgctaagaatgt

SEQ ID NO: 1345702 - DNA, 15 bp, Homo sapiens
ttaatgctaagaatg

SEQ ID NO: 1345703 - DNA, 15 bp, Homo sapiens
tttaatgctaagaat

SEQ ID NO: 1345704 - DNA, 15 bp, Homo sapiens
ttttaatgctaagaa

SEQ ID NO: 1345705 - DNA, 15 bp, Homo sapiens
tttttaatgctaaga

SEQ ID NO: 1345706 - DNA, 15 bp, Homo sapiens
ttttttaatgctaag

SEQ ID NO: 1345707 - DNA, 15 bp, Homo sapiens
tttttttaatgctaa

SEQ ID NO: 1345708 - DNA, 15 bp, Homo sapiens
ttttttttaatgcta

SEQ ID NO: 1345709 - DNA, 15 bp, Homo sapiens
tttttttttaatgct

SEQ ID NO: 1345710 - DNA, 15 bp, Homo sapiens
ctttttttttaatgc

SEQ ID NO: 1345711 - DNA, 15 bp, Homo sapiens
actttttttttaatg

SEQ ID NO: 1345712 - DNA, 15 bp, Homo sapiens
aactttttttttaat

SEQ ID NO: 1345713 - DNA, 15 bp, Homo sapiens
taactttttttttaa

SEQ ID NO: 1345714 - DNA, 15 bp, Homo sapiens
ataacttttttttta

SEQ ID NO: 1345715 - DNA, 15 bp, Homo sapiens
tataacttttttttt

SEQ ID NO: 1345716 - DNA, 15 bp, Homo sapiens
atataactttttttt

SEQ ID NO: 1345717 - DNA, 15 bp, Homo sapiens
tatataacttttttt

SEQ ID NO: 1345718 - DNA, 15 bp, Homo sapiens
ttatataactttttt

SEQ ID NO: 1345719 - DNA, 15 bp, Homo sapiens
tttatataacttttt

SEQ ID NO: 1345720 - DNA, 15 bp, Homo sapiens
atttatataactttt

SEQ ID NO: 1345721 - DNA, 15 bp, Homo sapiens
tatttatataacttt

SEQ ID NO: 1345722 - DNA, 15 bp, Homo sapiens
atatttatataactt

SEQ ID NO: 1345723 - DNA, 15 bp, Homo sapiens
tatatttatataact

SEQ ID NO: 1345724 - DNA, 15 bp, Homo sapiens
atatatttatataac

SEQ ID NO: 1345725 - DNA, 15 bp, Homo sapiens
tatatatttatataa

SEQ ID NO: 1345726 - DNA, 15 bp, Homo sapiens
ttatatatatttata

SEQ ID NO: 1345727 - DNA, 15 bp, Homo sapiens
attatatatatttat

SEQ ID NO: 1345728 - DNA, 15 bp, Homo sapiens
ataattatatatatt

SEQ ID NO: 1345729 - DNA, 15 bp, Homo sapiens
tataattatatatat

SEQ ID NO: 1345730 - DNA, 15 bp, Homo sapiens
atataattatatata

SEQ ID NO: 1345731 - DNA, 15 bp, Homo sapiens
tatataattatatat

SEQ ID NO: 1345732 - DNA, 15 bp, Homo sapiens
atatataattatata

SEQ ID NO: 1345733 - DNA, 15 bp, Homo sapiens
tatatataattatat

SEQ ID NO: 1345734 - DNA, 15 bp, Homo sapiens
atatatataattata

SEQ ID NO: 1345735 - DNA, 15 bp, Homo sapiens
tatatatataattat

SEQ ID NO: 1345736 - DNA, 15 bp, Homo sapiens
atatatatataatta

SEQ ID NO: 1345737 - DNA, 15 bp, Homo sapiens
aatatatatataatt

SEQ ID NO: 1345738 - DNA, 15 bp, Homo sapiens
aaatatatatataat

SEQ ID NO: 1345739 - DNA, 15 bp, Homo sapiens
caaatatatatataa

SEQ ID NO: 1345740 - DNA, 15 bp, Homo sapiens
tcaaatatatatata

SEQ ID NO: 1345741 - DNA, 15 bp, Homo sapiens
ctcaaatatatatat

SEQ ID NO: 1345742 - DNA, 15 bp, Homo sapiens
tctcaaatatatata

SEQ ID NO: 1345743 - DNA, 15 bp, Homo sapiens
gtctcaaatatatat

SEQ ID NO: 1345744 - DNA, 15 bp, Homo sapiens
tgtctcaaatatata

SEQ ID NO: 1345745 - DNA, 15 bp, Homo sapiens
ctgtctcaaatatat

SEQ ID NO: 1345746 - DNA, 15 bp, Homo sapiens
cctgtctcaaatata

SEQ ID NO: 1345747 - DNA, 15 bp, Homo sapiens
ccctgtctcaaatat

SEQ ID NO: 1345748 - DNA, 15 bp, Homo sapiens
gccctgtctcaaata

SEQ ID NO: 1345749 - DNA, 15 bp, Homo sapiens
ggccctgtctcaaat

SEQ ID NO: 1345750 - DNA, 15 bp, Homo sapiens
aggccctgtctcaaa

SEQ ID NO: 1345751 - DNA, 15 bp, Homo sapiens
caggccctgtctcaa

SEQ ID NO: 1345752 - DNA, 15 bp, Homo sapiens
acaggccctgtctca

SEQ ID NO: 1345753 - DNA, 15 bp, Homo sapiens
gacaggccctgtctc

SEQ ID NO: 1345754 - DNA, 15 bp, Homo sapiens
agacaggccctgtct

SEQ ID NO: 1345755 - DNA, 15 bp, Homo sapiens
gagacaggccctgtc

SEQ ID NO: 1345756 - DNA, 15 bp, Homo sapiens
agagacaggccctgt

SEQ ID NO: 1345757 - DNA, 15 bp, Homo sapiens
cagagacaggccctg

SEQ ID NO: 1345758 - DNA, 15 bp, Homo sapiens
tcagagacaggccct

SEQ ID NO: 1345759 - DNA, 15 bp, Homo sapiens
atcagagacaggccc

SEQ ID NO: 1345760 - DNA, 15 bp, Homo sapiens
tatcagagacaggcc

SEQ ID NO: 1345761 - DNA, 15 bp, Homo sapiens
gtatcagagacaggc

SEQ ID NO: 1345762 - DNA, 15 bp, Homo sapiens
ggtatcagagacagg

SEQ ID NO: 1345763 - DNA, 15 bp, Homo sapiens
gggtatcagagacag

SEQ ID NO: 1345764 - DNA, 15 bp, Homo sapiens
tgggtatcagagaca

SEQ ID NO: 1345765 - DNA, 15 bp, Homo sapiens
ctgggtatcagagac

SEQ ID NO: 1345766 - DNA, 15 bp, Homo sapiens
tctgggtatcagaga

SEQ ID NO: 1345767 - DNA, 15 bp, Homo sapiens
gtctgggtatcagag

SEQ ID NO: 1345768 - DNA, 15 bp, Homo sapiens
cgtctgggtatcaga

SEQ ID NO: 1345769 - DNA, 15 bp, Homo sapiens
acgtctgggtatcag

SEQ ID NO: 1345770 - DNA, 15 bp, Homo sapiens
cacgtctgggtatca

SEQ ID NO: 1345771 - DNA, 15 bp, Homo sapiens
acacgtctgggtatc

SEQ ID NO: 1345772 - DNA, 15 bp, Homo sapiens
cacacgtctgggtat

SEQ ID NO: 1345773 - DNA, 15 bp, Homo sapiens
gcacacgtctgggta

SEQ ID NO: 1345774 - DNA, 15 bp, Homo sapiens
tgcacacgtctgggt

SEQ ID NO: 1345775 - DNA, 15 bp, Homo sapiens
ctgcacacgtctggg

SEQ ID NO: 1345776 - DNA, 15 bp, Homo sapiens
actgcacacgtctgg

SEQ ID NO: 1345777 - DNA, 15 bp, Homo sapiens
tactgcacacgtctg

SEQ ID NO: 1345778 - DNA, 15 bp, Homo sapiens
atactgcacacgtct

SEQ ID NO: 1345779 - DNA, 15 bp, Homo sapiens
gatactgcacacgtc

SEQ ID NO: 1345780 - DNA, 15 bp, Homo sapiens
agatactgcacacgt

SEQ ID NO: 1345781 - DNA, 15 bp, Homo sapiens
aagatactgcacacg

SEQ ID NO: 1345782 - DNA, 15 bp, Homo sapiens
aaagatactgcacac

SEQ ID NO: 1345783 - DNA, 15 bp, Homo sapiens
gaaagatactgcaca

SEQ ID NO: 1345784 - DNA, 15 bp, Homo sapiens
tgaaagatactgcac

SEQ ID NO: 1345785 - DNA, 15 bp, Homo sapiens
ttgaaagatactgca

SEQ ID NO: 1345786 - DNA, 15 bp, Homo sapiens
tttgaaagatactgc

SEQ ID NO: 1345787 - DNA, 15 bp, Homo sapiens
ttttgaaagatactg

SEQ ID NO: 1345788 - DNA, 15 bp, Homo sapiens
tttttgaaagatact

SEQ ID NO: 1345789 - DNA, 15 bp, Homo sapiens
atttttgaaagatac

SEQ ID NO: 1345790 - DNA, 15 bp, Homo sapiens
gatttttgaaagata

SEQ ID NO: 1345791 - DNA, 15 bp, Homo sapiens
tgatttttgaaagat

SEQ ID NO: 1345792 - DNA, 15 bp, Homo sapiens
atgatttttgaaaga

SEQ ID NO: 1345793 - DNA, 15 bp, Homo sapiens
tatgatttttgaaag

SEQ ID NO: 1345794 - DNA, 15 bp, Homo sapiens
atatgatttttgaaa

SEQ ID NO: 1345795 - DNA, 15 bp, Homo sapiens
tatatgatttttgaa

SEQ ID NO: 1345796 - DNA, 15 bp, Homo sapiens
atatatgatttttga

SEQ ID NO: 1345797 - DNA, 15 bp, Homo sapiens
gatatatgatttttg

SEQ ID NO: 1345798 - DNA, 15 bp, Homo sapiens
agatatatgattttt

SEQ ID NO: 1345799 - DNA, 15 bp, Homo sapiens
tagatatatgatttt

SEQ ID NO: 1345800 - DNA, 15 bp, Homo sapiens
atagatatatgattt

SEQ ID NO: 1345801 - DNA, 15 bp, Homo sapiens
tatagatatatgatt

SEQ ID NO: 1345802 - DNA, 15 bp, Homo sapiens
atatagatatatgat

SEQ ID NO: 1345803 - DNA, 15 bp, Homo sapiens
tatatagatatatga

SEQ ID NO: 1345804 - DNA, 15 bp, Homo sapiens
atatatagatatatg

SEQ ID NO: 1345805 - DNA, 15 bp, Homo sapiens
ctatatatagatata

SEQ ID NO: 1345806 - DNA, 15 bp, Homo sapiens
actatatatagatat

SEQ ID NO: 1345807 - DNA, 15 bp, Homo sapiens
aactatatatagata

SEQ ID NO: 1345808 - DNA, 15 bp, Homo sapiens
aaactatatatagat

SEQ ID NO: 1345809 - DNA, 15 bp, Homo sapiens
caaactatatataga

SEQ ID NO: 1345810 - DNA, 15 bp, Homo sapiens
gcaaactatatatag

SEQ ID NO: 1345811 - DNA, 15 bp, Homo sapiens
ggcaaactatatata

SEQ ID NO: 1345812 - DNA, 15 bp, Homo sapiens
gggcaaactatatat

SEQ ID NO: 1345813 - DNA, 15 bp, Homo sapiens
ggggcaaactatata

SEQ ID NO: 1345814 - DNA, 15 bp, Homo sapiens
aggggcaaactatat

SEQ ID NO: 1345815 - DNA, 15 bp, Homo sapiens
aaggggcaaactata

SEQ ID NO: 1345816 - DNA, 15 bp, Homo sapiens
gaaggggcaaactat

SEQ ID NO: 1345817 - DNA, 15 bp, Homo sapiens
aggaaggggcaaact

SEQ ID NO: 1345818 - DNA, 15 bp, Homo sapiens
aaggaaggggcaaac

SEQ ID NO: 1345819 - DNA, 15 bp, Homo sapiens
gaaggaaggggcaaa

SEQ ID NO: 1345820 - DNA, 15 bp, Homo sapiens
tgaaggaaggggcaa

SEQ ID NO: 1345821 - DNA, 15 bp, Homo sapiens
ctgaaggaaggggca

SEQ ID NO: 1345822 - DNA, 15 bp, Homo sapiens
actgaaggaaggggc

SEQ ID NO: 1345823 - DNA, 15 bp, Homo sapiens
gactgaaggaagggg

SEQ ID NO: 1345824 - DNA, 15 bp, Homo sapiens
agactgaaggaaggg

SEQ ID NO: 1345825 - DNA, 15 bp, Homo sapiens
aagactgaaggaagg

SEQ ID NO: 1345826 - DNA, 15 bp, Homo sapiens
aaagactgaaggaag

SEQ ID NO: 1345827 - DNA, 15 bp, Homo sapiens
caaagactgaaggaa

SEQ ID NO: 1345828 - DNA, 15 bp, Homo sapiens
gcaaagactgaagga

SEQ ID NO: 1345829 - DNA, 15 bp, Homo sapiens
agcaaagactgaagg

SEQ ID NO: 1345830 - DNA, 15 bp, Homo sapiens
cagcaaagactgaag

SEQ ID NO: 1345831 - DNA, 15 bp, Homo sapiens
gcagcaaagactgaa

SEQ ID NO: 1345832 - DNA, 15 bp, Homo sapiens
ggcagcaaagactga

SEQ ID NO: 1345833 - DNA, 15 bp, Homo sapiens
gggcagcaaagactg

SEQ ID NO: 1345834 - DNA, 15 bp, Homo sapiens
ggggcagcaaagact

SEQ ID NO: 1345835 - DNA, 15 bp, Homo sapiens
aggggcagcaaagac

SEQ ID NO: 1345836 - DNA, 15 bp, Homo sapiens
taggggcagcaaaga

SEQ ID NO: 1345837 - DNA, 15 bp, Homo sapiens
ttaggggcagcaaag

SEQ ID NO: 1345838 - DNA, 15 bp, Homo sapiens
attaggggcagcaaa

SEQ ID NO: 1345839 - DNA, 15 bp, Homo sapiens
tattaggggcagcaa

SEQ ID NO: 1345840 - DNA, 15 bp, Homo sapiens
atattaggggcagca

SEQ ID NO: 1345841 - DNA, 15 bp, Homo sapiens
gatattaggggcagc

SEQ ID NO: 1345842 - DNA, 15 bp, Homo sapiens
agatattaggggcag

SEQ ID NO: 1345843 - DNA, 15 bp, Homo sapiens
cagatattaggggca

SEQ ID NO: 1345844 - DNA, 15 bp, Homo sapiens
acagatattaggggc

SEQ ID NO: 1345845 - DNA, 15 bp, Homo sapiens
gacagatattagggg

SEQ ID NO: 1345846 - DNA, 15 bp, Homo sapiens
ggacagatattaggg

SEQ ID NO: 1345847 - DNA, 15 bp, Homo sapiens
aggacagatattagg

SEQ ID NO: 1345848 - DNA, 15 bp, Homo sapiens
aaggacagatattag

SEQ ID NO: 1345849 - DNA, 15 bp, Homo sapiens
taaggacagatatta

SEQ ID NO: 1345850 - DNA, 15 bp, Homo sapiens
ttaaggacagatatt

SEQ ID NO: 1345851 - DNA, 15 bp, Homo sapiens
attaaggacagatat

SEQ ID NO: 1345852 - DNA, 15 bp, Homo sapiens
cattaaggacagata

SEQ ID NO: 1345853 - DNA, 15 bp, Homo sapiens
ccattaaggacagat

SEQ ID NO: 1345854 - DNA, 15 bp, Homo sapiens
accattaaggacaga

SEQ ID NO: 1345855 - DNA, 15 bp, Homo sapiens
aaccattaaggacag

SEQ ID NO: 1345856 - DNA, 15 bp, Homo sapiens
taaccattaaggaca

SEQ ID NO: 1345857 - DNA, 15 bp, Homo sapiens
gtaaccattaaggac

SEQ ID NO: 1345858 - DNA, 15 bp, Homo sapiens
ggtaaccattaagga

SEQ ID NO: 1345859 - DNA, 15 bp, Homo sapiens
tggtaaccattaagg

SEQ ID NO: 1345860 - DNA, 15 bp, Homo sapiens
atggtaaccattaag

SEQ ID NO: 1345861 - DNA, 15 bp, Homo sapiens
catggtaaccattaa

SEQ ID NO: 1345862 - DNA, 15 bp, Homo sapiens
ccatggtaaccatta

SEQ ID NO: 1345863 - DNA, 15 bp, Homo sapiens
accatggtaaccatt

SEQ ID NO: 1345864 - DNA, 15 bp, Homo sapiens
caccatggtaaccat

SEQ ID NO: 1345865 - DNA, 15 bp, Homo sapiens
tcaccatggtaacca

SEQ ID NO: 1345866 - DNA, 15 bp, Homo sapiens
ttcaccatggtaacc

SEQ ID NO: 1345867 - DNA, 15 bp, Homo sapiens
tttcaccatggtaac

SEQ ID NO: 1345868 - DNA, 15 bp, Homo sapiens
gtttcaccatggtaa

SEQ ID NO: 1345869 - DNA, 15 bp, Homo sapiens
agtttcaccatggta

SEQ ID NO: 1345870 - DNA, 15 bp, Homo sapiens
gagtttcaccatggt

SEQ ID NO: 1345871 - DNA, 15 bp, Homo sapiens
agagtttcaccatgg

SEQ ID NO: 1345872 - DNA, 15 bp, Homo sapiens
aagagtttcaccatg

SEQ ID NO: 1345873 - DNA, 15 bp, Homo sapiens
caagagtttcaccat

SEQ ID NO: 1345874 - DNA, 15 bp, Homo sapiens
ccaagagtttcacca

SEQ ID NO: 1345875 - DNA, 15 bp, Homo sapiens
tccaagagtttcacc

SEQ ID NO: 1345876 - DNA, 15 bp, Homo sapiens
ttccaagagtttcac

SEQ ID NO: 1345877 - DNA, 15 bp, Homo sapiens
tttccaagagtttca

SEQ ID NO: 1345878 - DNA, 15 bp, Homo sapiens
atttccaagagtttc

SEQ ID NO: 1345879 - DNA, 15 bp, Homo sapiens
gatttccaagagttt

SEQ ID NO: 1345880 - DNA, 15 bp, Homo sapiens
tgatttccaagagtt

SEQ ID NO: 1345881 - DNA, 15 bp, Homo sapiens
atgatttccaagagt

SEQ ID NO: 1345882 - DNA, 15 bp, Homo sapiens
aatgatttccaagag

SEQ ID NO: 1345883 - DNA, 15 bp, Homo sapiens
gaatgatttccaaga

SEQ ID NO: 1345884 - DNA, 15 bp, Homo sapiens
tgaatgatttccaag

SEQ ID NO: 1345885 - DNA, 15 bp, Homo sapiens
ctgaatgatttccaa

SEQ ID NO: 1345886 - DNA, 15 bp, Homo sapiens
cctgaatgatttcca

SEQ ID NO: 1345887 - DNA, 15 bp, Homo sapiens
ccctgaatgatttcc

SEQ ID NO: 1345888 - DNA, 15 bp, Homo sapiens
cccctgaatgatttc

SEQ ID NO: 1345889 - DNA, 15 bp, Homo sapiens
ccccctgaatgattt

SEQ ID NO: 1345890 - DNA, 15 bp, Homo sapiens
tccccctgaatgatt

SEQ ID NO: 1345891 - DNA, 15 bp, Homo sapiens
ttccccctgaatgat

SEQ ID NO: 1345892 - DNA, 15 bp, Homo sapiens
tttccccctgaatga

SEQ ID NO: 1345893 - DNA, 15 bp, Homo sapiens
ttttccccctgaatg

SEQ ID NO: 1345894 - DNA, 15 bp, Homo sapiens
tttttccccctgaat

SEQ ID NO: 1345895 - DNA, 15 bp, Homo sapiens
ttttttccccctgaa

SEQ ID NO: 1345896 - DNA, 15 bp, Homo sapiens
tttttttccccctga

SEQ ID NO: 1345897 - DNA, 15 bp, Homo sapiens
ttttttttccccctg

SEQ ID NO: 1345898 - DNA, 15 bp, Homo sapiens
attttttttccccct

SEQ ID NO: 1345899 - DNA, 15 bp, Homo sapiens
aattttttttccccc

SEQ ID NO: 1345900 - DNA, 15 bp, Homo sapiens
aaattttttttcccc

SEQ ID NO: 1345901 - DNA, 15 bp, Homo sapiens
caaattttttttccc

SEQ ID NO: 1345902 - DNA, 15 bp, Homo sapiens
acaaattttttttcc

SEQ ID NO: 1345903 - DNA, 15 bp, Homo sapiens
cacaaattttttttc

SEQ ID NO: 1345904 - DNA, 15 bp, Homo sapiens
acacaaatttttttt

SEQ ID NO: 1345905 - DNA, 15 bp, Homo sapiens
aacacaaattttttt

SEQ ID NO: 1345906 - DNA, 15 bp, Homo sapiens
caacacaaatttttt

SEQ ID NO: 1345907 - DNA, 15 bp, Homo sapiens
ccaacacaaattttt

SEQ ID NO: 1345908 - DNA, 15 bp, Homo sapiens
cccaacacaaatttt

SEQ ID NO: 1345909 - DNA, 15 bp, Homo sapiens
tcccaacacaaattt

SEQ ID NO: 1345910 - DNA, 15 bp, Homo sapiens
atcccaacacaaatt

SEQ ID NO: 1345911 - DNA, 15 bp, Homo sapiens
tatcccaacacaaat

SEQ ID NO: 1345912 - DNA, 15 bp, Homo sapiens
ctatcccaacacaaa

SEQ ID NO: 1345913 - DNA, 15 bp, Homo sapiens
cctatcccaacacaa

SEQ ID NO: 1345914 - DNA, 15 bp, Homo sapiens
ccctatcccaacaca

SEQ ID NO: 1345915 - DNA, 15 bp, Homo sapiens
cccctatcccaacac

SEQ ID NO: 1345916 - DNA, 15 bp, Homo sapiens
tcccctatcccaaca

SEQ ID NO: 1345917 - DNA, 15 bp, Homo sapiens
ctcccctatcccaac

SEQ ID NO: 1345918 - DNA, 15 bp, Homo sapiens
cctcccctatcccaa

SEQ ID NO: 1345919 - DNA, 15 bp, Homo sapiens
ccctcccctatccca

SEQ ID NO: 1345920 - DNA, 15 bp, Homo sapiens
tccctcccctatccc

SEQ ID NO: 1345921 - DNA, 15 bp, Homo sapiens
atccctcccctatcc

SEQ ID NO: 1345922 - DNA, 15 bp, Homo sapiens
catccctcccctatc

SEQ ID NO: 1345923 - DNA, 15 bp, Homo sapiens
acatccctcccctat

SEQ ID NO: 1345924 - DNA, 15 bp, Homo sapiens
gacatccctccccta

SEQ ID NO: 1345925 - DNA, 15 bp, Homo sapiens
tgacatccctcccct

SEQ ID NO: 1345926 - DNA, 15 bp, Homo sapiens
ctgacatccctcccc

SEQ ID NO: 1345927 - DNA, 15 bp, Homo sapiens
gctgacatccctccc

SEQ ID NO: 1345928 - DNA, 15 bp, Homo sapiens
tgctgacatccctcc

SEQ ID NO: 1345929 - DNA, 15 bp, Homo sapiens
atgctgacatccctc

SEQ ID NO: 1345930 - DNA, 15 bp, Homo sapiens
tatgctgacatccct

SEQ ID NO: 1345931 - DNA, 15 bp, Homo sapiens
ttatgctgacatccc

SEQ ID NO: 1345932 - DNA, 15 bp, Homo sapiens
cttatgctgacatcc

SEQ ID NO: 1345933 - DNA, 15 bp, Homo sapiens
acttatgctgacatc

SEQ ID NO: 1345934 - DNA, 15 bp, Homo sapiens
aacttatgctgacat

SEQ ID NO: 1345935 - DNA, 15 bp, Homo sapiens
aaacttatgctgaca

SEQ ID NO: 1345936 - DNA, 15 bp, Homo sapiens
aaaacttatgctgac

SEQ ID NO: 1345937 - DNA, 15 bp, Homo sapiens
aaaaacttatgctga

SEQ ID NO: 1345938 - DNA, 15 bp, Homo sapiens
taaaaacttatgctg

SEQ ID NO: 1345939 - DNA, 15 bp, Homo sapiens
ttaaaaacttatgct

SEQ ID NO: 1345940 - DNA, 15 bp, Homo sapiens
attaaaaacttatgc

SEQ ID NO: 1345941 - DNA, 15 bp, Homo sapiens
tattaaaaacttatg

SEQ ID NO: 1345942 - DNA, 15 bp, Homo sapiens
gtattaaaaacttat

SEQ ID NO: 1345943 - DNA, 15 bp, Homo sapiens
agtattaaaaactta

SEQ ID NO: 1345944 - DNA, 15 bp, Homo sapiens
aagtattaaaaactt

SEQ ID NO: 1345945 - DNA, 15 bp, Homo sapiens
caagtattaaaaact

SEQ ID NO: 1345946 - DNA, 15 bp, Homo sapiens
tcaagtattaaaaac

SEQ ID NO: 1345947 - DNA, 15 bp, Homo sapiens
atcaagtattaaaaa

SEQ ID NO: 1345948 - DNA, 15 bp, Homo sapiens
tatcaagtattaaaa

SEQ ID NO: 1345949 - DNA, 15 bp, Homo sapiens
ttatcaagtattaaa

SEQ ID NO: 1345950 - DNA, 15 bp, Homo sapiens
tttatcaagtattaa

SEQ ID NO: 1345951 - DNA, 15 bp, Homo sapiens
atttatcaagtatta

SEQ ID NO: 1345952 - DNA, 15 bp, Homo sapiens
catttatcaagtatt

SEQ ID NO: 1345953 - DNA, 15 bp, Homo sapiens
tcatttatcaagtat

SEQ ID NO: 1345954 - DNA, 15 bp, Homo sapiens
atcatttatcaagta

SEQ ID NO: 1345955 - DNA, 15 bp, Homo sapiens
aatcatttatcaagt

SEQ ID NO: 1345956 - DNA, 15 bp, Homo sapiens
caatcatttatcaag

SEQ ID NO: 1345957 - DNA, 15 bp, Homo sapiens
gcaatcatttatcaa

SEQ ID NO: 1345958 - DNA, 15 bp, Homo sapiens
ggcaatcatttatca

SEQ ID NO: 1345959 - DNA, 15 bp, Homo sapiens
tggcaatcatttatc

SEQ ID NO: 1345960 - DNA, 15 bp, Homo sapiens
ttggcaatcatttat

SEQ ID NO: 1345961 - DNA, 15 bp, Homo sapiens
gttggcaatcattta

SEQ ID NO: 1345962 - DNA, 15 bp, Homo sapiens
tgttggcaatcattt

SEQ ID NO: 1345963 - DNA, 15 bp, Homo sapiens
ctgttggcaatcatt

SEQ ID NO: 1345964 - DNA, 15 bp, Homo sapiens
tctgttggcaatcat

SEQ ID NO: 1345965 - DNA, 15 bp, Homo sapiens
ttctgttggcaatca

SEQ ID NO: 1345966 - DNA, 15 bp, Homo sapiens
attctgttggcaatc

SEQ ID NO: 1345967 - DNA, 15 bp, Homo sapiens
gattctgttggcaat

SEQ ID NO: 1345968 - DNA, 15 bp, Homo sapiens
tgattctgttggcaa

SEQ ID NO: 1345969 - DNA, 15 bp, Homo sapiens
ttgattctgttggca

SEQ ID NO: 1345970 - DNA, 15 bp, Homo sapiens
tttgattctgttggc

SEQ ID NO: 1345971 - DNA, 15 bp, Homo sapiens
ttttgattctgttgg

SEQ ID NO: 1345972 - DNA, 15 bp, Homo sapiens
tttttgattctgttg

SEQ ID NO: 1345973 - DNA, 15 bp, Homo sapiens
gtttttgattctgtt

SEQ ID NO: 1345974 - DNA, 15 bp, Homo sapiens
tgtttttgattctgt

SEQ ID NO: 1345975 - DNA, 15 bp, Homo sapiens
gtgtttttgattctg

SEQ ID NO: 1345976 - DNA, 15 bp, Homo sapiens
ggtgtttttgattct

SEQ ID NO: 1345977 - DNA, 15 bp, Homo sapiens
aggtgtttttgattc

SEQ ID NO: 1345978 - DNA, 15 bp, Homo sapiens
aaggtgtttttgatt

SEQ ID NO: 1345979 - DNA, 15 bp, Homo sapiens
caaggtgtttttgat

SEQ ID NO: 1345980 - DNA, 15 bp, Homo sapiens
acaaggtgtttttga

SEQ ID NO: 1345981 - DNA, 15 bp, Homo sapiens
aacaaggtgtttttg

SEQ ID NO: 1345982 - DNA, 15 bp, Homo sapiens
aaacaaggtgttttt

SEQ ID NO: 1345983 - DNA, 15 bp, Homo sapiens
aaaacaaggtgtttt

SEQ ID NO: 1345984 - DNA, 15 bp, Homo sapiens
gaaaacaaggtgttt

SEQ ID NO: 1345985 - DNA, 15 bp, Homo sapiens
agaaaacaaggtgtt

SEQ ID NO: 1345986 - DNA, 15 bp, Homo sapiens
tagaaaacaaggtgt

SEQ ID NO: 1345987 - DNA, 15 bp, Homo sapiens
atagaaaacaaggtg

SEQ ID NO: 1345988 - DNA, 15 bp, Homo sapiens
gatagaaaacaaggt

SEQ ID NO: 1345989 - DNA, 15 bp, Homo sapiens
agatagaaaacaagg

SEQ ID NO: 1345990 - DNA, 15 bp, Homo sapiens
aagatagaaaacaag

SEQ ID NO: 1345991 - DNA, 15 bp, Homo sapiens
aaagatagaaaacaa

SEQ ID NO: 1345992 - DNA, 15 bp, Homo sapiens
aaaagatagaaaaca

SEQ ID NO: 1345993 - DNA, 15 bp, Homo sapiens
aaaaagatagaaaac

SEQ ID NO: 1345994 - DNA, 15 bp, Homo sapiens
gaaaaaagatagaaa

SEQ ID NO: 1345995 - DNA, 15 bp, Homo sapiens
tgaaaaaagatagaa

SEQ ID NO: 1345996 - DNA, 15 bp, Homo sapiens
gtgaaaaaagataga

SEQ ID NO: 1345997 - DNA, 15 bp, Homo sapiens
ggtgaaaaaagatag

SEQ ID NO: 1345998 - DNA, 15 bp, Homo sapiens
tggtgaaaaaagata

SEQ ID NO: 1345999 - DNA, 15 bp, Homo sapiens
atggtgaaaaaagat

SEQ ID NO: 1346000 - DNA, 15 bp, Homo sapiens
tatggtgaaaaaaga

SEQ ID NO: 1346001 - DNA, 15 bp, Homo sapiens
atatggtgaaaaaag

SEQ ID NO: 1346002 - DNA, 15 bp, Homo sapiens
tatatggtgaaaaaa

SEQ ID NO: 1346003 - DNA, 15 bp, Homo sapiens
ttatatggtgaaaaa

SEQ ID NO: 1346004 - DNA, 15 bp, Homo sapiens
attatatggtgaaaa

SEQ ID NO: 1346005 - DNA, 15 bp, Homo sapiens
tattatatggtgaaa

SEQ ID NO: 1346006 - DNA, 15 bp, Homo sapiens
atattatatggtgaa

SEQ ID NO: 1346007 - DNA, 15 bp, Homo sapiens
aatattatatggtga

SEQ ID NO: 1346008 - DNA, 15 bp, Homo sapiens
gaatattatatggtg

SEQ ID NO: 1346009 - DNA, 15 bp, Homo sapiens
agaatattatatggt

SEQ ID NO: 1346010 - DNA, 15 bp, Homo sapiens
aagaatattatatgg

SEQ ID NO: 1346011 - DNA, 15 bp, Homo sapiens
caagaatattatatg

SEQ ID NO: 1346012 - DNA, 15 bp, Homo sapiens
tcaagaatattatat

SEQ ID NO: 1346013 - DNA, 15 bp, Homo sapiens
ctcaagaatattata

SEQ ID NO: 1346014 - DNA, 15 bp, Homo sapiens
tctcaagaatattat

SEQ ID NO: 1346015 - DNA, 15 bp, Homo sapiens
ttctcaagaatatta

SEQ ID NO: 1346016 - DNA, 15 bp, Homo sapiens
attctcaagaatatt

SEQ ID NO: 1346017 - DNA, 15 bp, Homo sapiens
tattctcaagaatat

SEQ ID NO: 1346018 - DNA, 15 bp, Homo sapiens
ttattctcaagaata

SEQ ID NO: 1346019 - DNA, 15 bp, Homo sapiens
attattctcaagaat

SEQ ID NO: 1346020 - DNA, 15 bp, Homo sapiens
aattattctcaagaa

SEQ ID NO: 1346021 - DNA, 15 bp, Homo sapiens
aaattattctcaaga

SEQ ID NO: 1346022 - DNA, 15 bp, Homo sapiens
gaaattattctcaag

SEQ ID NO: 1346023 - DNA, 15 bp, Homo sapiens
cgaaattattctcaa

SEQ ID NO: 1346024 - DNA, 15 bp, Homo sapiens
acgaaattattctca

SEQ ID NO: 1346025 - DNA, 15 bp, Homo sapiens
tacgaaattattctc

SEQ ID NO: 1346026 - DNA, 15 bp, Homo sapiens
ttacgaaattattct

SEQ ID NO: 1346027 - DNA, 15 bp, Homo sapiens
gttacgaaattattc

SEQ ID NO: 1346028 - DNA, 15 bp, Homo sapiens
tgttacgaaattatt

SEQ ID NO: 1346029 - DNA, 15 bp, Homo sapiens
ctgttacgaaattat

SEQ ID NO: 1346030 - DNA, 15 bp, Homo sapiens
gctgttacgaaatta

SEQ ID NO: 1346031 - DNA, 15 bp, Homo sapiens
tgctgttacgaaatt

SEQ ID NO: 1346032 - DNA, 15 bp, Homo sapiens
gtgctgttacgaaat

SEQ ID NO: 1346033 - DNA, 15 bp, Homo sapiens
agtgctgttacgaaa

SEQ ID NO: 1346034 - DNA, 15 bp, Homo sapiens
aagtgctgttacgaa

SEQ ID NO: 1346035 - DNA, 15 bp, Homo sapiens
taagtgctgttacga

SEQ ID NO: 1346036 - DNA, 15 bp, Homo sapiens
ttaagtgctgttacg

SEQ ID NO: 1346037 - DNA, 15 bp, Homo sapiens
gttaagtgctgttac

SEQ ID NO: 1346038 - DNA, 15 bp, Homo sapiens
tgttaagtgctgtta

SEQ ID NO: 1346039 - DNA, 15 bp, Homo sapiens
ctgttaagtgctgtt

SEQ ID NO: 1346040 - DNA, 15 bp, Homo sapiens
tctgttaagtgctgt

SEQ ID NO: 1346041 - DNA, 15 bp, Homo sapiens
atctgttaagtgctg

SEQ ID NO: 1346042 - DNA, 15 bp, Homo sapiens
tatctgttaagtgct

SEQ ID NO: 1346043 - DNA, 15 bp, Homo sapiens
atatctgttaagtgc

SEQ ID NO: 1346044 - DNA, 15 bp, Homo sapiens
tatatctgttaagtg

SEQ ID NO: 1346045 - DNA, 15 bp, Homo sapiens
gtatatctgttaagt

SEQ ID NO: 1346046 - DNA, 15 bp, Homo sapiens
ggtatatctgttaag

SEQ ID NO: 1346047 - DNA, 15 bp, Homo sapiens
aggtatatctgttaa

SEQ ID NO: 1346048 - DNA, 15 bp, Homo sapiens
aaggtatatctgtta

SEQ ID NO: 1346049 - DNA, 15 bp, Homo sapiens
taaggtatatctgtt

SEQ ID NO: 1346050 - DNA, 15 bp, Homo sapiens
ataaggtatatctgt

SEQ ID NO: 1346051 - DNA, 15 bp, Homo sapiens
aataaggtatatctg

SEQ ID NO: 1346052 - DNA, 15 bp, Homo sapiens
aaataaggtatatct

SEQ ID NO: 1346053 - DNA, 15 bp, Homo sapiens
aaaataaggtatatc

SEQ ID NO: 1346054 - DNA, 15 bp, Homo sapiens
aaaaataaggtatat

SEQ ID NO: 1346055 - DNA, 15 bp, Homo sapiens
gaaaaataaggtata

SEQ ID NO: 1346056 - DNA, 15 bp, Homo sapiens
tgaaaaataaggtat

SEQ ID NO: 1346057 - DNA, 15 bp, Homo sapiens
ttgaaaaataaggta

SEQ ID NO: 1346058 - DNA, 15 bp, Homo sapiens
tttgaaaaataaggt

SEQ ID NO: 1346059 - DNA, 15 bp, Homo sapiens
ctttgaaaaataagg

SEQ ID NO: 1346060 - DNA, 15 bp, Homo sapiens
tctttgaaaaataag

SEQ ID NO: 1346061 - DNA, 15 bp, Homo sapiens
ttctttgaaaaataa

SEQ ID NO: 1346062 - DNA, 15 bp, Homo sapiens
cttctttgaaaaata

SEQ ID NO: 1346063 - DNA, 15 bp, Homo sapiens
ccttctttgaaaaat

SEQ ID NO: 1346064 - DNA, 15 bp, Homo sapiens
gccttctttgaaaaa

SEQ ID NO: 1346065 - DNA, 15 bp, Homo sapiens
agccttctttgaaaa

SEQ ID NO: 1346066 - DNA, 15 bp, Homo sapiens
cagccttctttgaaa

SEQ ID NO: 1346067 - DNA, 15 bp, Homo sapiens
acagccttctttgaa

SEQ ID NO: 1346068 - DNA, 15 bp, Homo sapiens
cacagccttctttga

SEQ ID NO: 1346069 - DNA, 15 bp, Homo sapiens
acacagccttctttg

SEQ ID NO: 1346070 - DNA, 15 bp, Homo sapiens
tacacagccttcttt

SEQ ID NO: 1346071 - DNA, 15 bp, Homo sapiens
ctacacagccttctt

SEQ ID NO: 1346072 - DNA, 15 bp, Homo sapiens
gctacacagccttct

SEQ ID NO: 1346073 - DNA, 15 bp, Homo sapiens
tgctacacagccttc

SEQ ID NO: 1346074 - DNA, 15 bp, Homo sapiens
atgctacacagcctt

SEQ ID NO: 1346075 - DNA, 15 bp, Homo sapiens
aatgctacacagcct

SEQ ID NO: 1346076 - DNA, 15 bp, Homo sapiens
gaatgctacacagcc

SEQ ID NO: 1346077 - DNA, 15 bp, Homo sapiens
agaatgctacacagc

SEQ ID NO: 1346078 - DNA, 15 bp, Homo sapiens
tagaatgctacacag

SEQ ID NO: 1346079 - DNA, 15 bp, Homo sapiens
atagaatgctacaca

SEQ ID NO: 1346080 - DNA, 15 bp, Homo sapiens
aatagaatgctacac

SEQ ID NO: 1346081 - DNA, 15 bp, Homo sapiens
aaatagaatgctaca

SEQ ID NO: 1346082 - DNA, 15 bp, Homo sapiens
aaaatagaatgctac

SEQ ID NO: 1346083 - DNA, 15 bp, Homo sapiens
taaaatagaatgcta

SEQ ID NO: 1346084 - DNA, 15 bp, Homo sapiens
ttaaaatagaatgct

SEQ ID NO: 1346085 - DNA, 15 bp, Homo sapiens
tttaaaatagaatgc

SEQ ID NO: 1346086 - DNA, 15 bp, Homo sapiens
ctttaaaatagaatg

SEQ ID NO: 1346087 - DNA, 15 bp, Homo sapiens
actttaaaatagaat

SEQ ID NO: 1346088 - DNA, 15 bp, Homo sapiens
aactttaaaatagaa

SEQ ID NO: 1346089 - DNA, 15 bp, Homo sapiens
caactttaaaataga

SEQ ID NO: 1346090 - DNA, 15 bp, Homo sapiens
acaactttaaaatag

SEQ ID NO: 1346091 - DNA, 15 bp, Homo sapiens
aacaactttaaaata

SEQ ID NO: 1346092 - DNA, 15 bp, Homo sapiens
aaacaactttaaaat

SEQ ID NO: 1346093 - DNA, 15 bp, Homo sapiens
gaaacaactttaaaa

SEQ ID NO: 1346094 - DNA, 15 bp, Homo sapiens
tgaaacaactttaaa

SEQ ID NO: 1346095 - DNA, 15 bp, Homo sapiens
gtgaaacaactttaa

SEQ ID NO: 1346096 - DNA, 15 bp, Homo sapiens
tgtgaaacaacttta

SEQ ID NO: 1346097 - DNA, 15 bp, Homo sapiens
ctgtgaaacaacttt

SEQ ID NO: 1346098 - DNA, 15 bp, Homo sapiens
actgtgaaacaactt

SEQ ID NO: 1346099 - DNA, 15 bp, Homo sapiens
tactgtgaaacaact

SEQ ID NO: 1346100 - DNA, 15 bp, Homo sapiens
atactgtgaaacaac

SEQ ID NO: 1346101 - DNA, 15 bp, Homo sapiens
tatactgtgaaacaa

SEQ ID NO: 1346102 - DNA, 15 bp, Homo sapiens
atatactgtgaaaca

SEQ ID NO: 1346103 - DNA, 15 bp, Homo sapiens
catatactgtgaaac

SEQ ID NO: 1346104 - DNA, 15 bp, Homo sapiens
tcatatactgtgaaa

SEQ ID NO: 1346105 - DNA, 15 bp, Homo sapiens
ctcatatactgtgaa

SEQ ID NO: 1346106 - DNA, 15 bp, Homo sapiens
actcatatactgtga

SEQ ID NO: 1346107 - DNA, 15 bp, Homo sapiens
gactcatatactgtg

SEQ ID NO: 1346108 - DNA, 15 bp, Homo sapiens
agactcatatactgt

SEQ ID NO: 1346109 - DNA, 15 bp, Homo sapiens
gagactcatatactg

SEQ ID NO: 1346110 - DNA, 15 bp, Homo sapiens
ggagactcatatact

SEQ ID NO: 1346111 - DNA, 15 bp, Homo sapiens
aggagactcatatac

SEQ ID NO: 1346112 - DNA, 15 bp, Homo sapiens
taggagactcatata

SEQ ID NO: 1346113 - DNA, 15 bp, Homo sapiens
ataggagactcatat

SEQ ID NO: 1346114 - DNA, 15 bp, Homo sapiens
aataggagactcata

SEQ ID NO: 1346115 - DNA, 15 bp, Homo sapiens
caataggagactcat

SEQ ID NO: 1346116 - DNA, 15 bp, Homo sapiens
tcaataggagactca

SEQ ID NO: 1346117 - DNA, 15 bp, Homo sapiens
atcaataggagactc

SEQ ID NO: 1346118 - DNA, 15 bp, Homo sapiens
tatcaataggagact

SEQ ID NO: 1346119 - DNA, 15 bp, Homo sapiens
ctatcaataggagac

SEQ ID NO: 1346120 - DNA, 15 bp, Homo sapiens
cctatcaataggaga

SEQ ID NO: 1346121 - DNA, 15 bp, Homo sapiens
acctatcaataggag

SEQ ID NO: 1346122 - DNA, 15 bp, Homo sapiens
tacctatcaatagga

SEQ ID NO: 1346123 - DNA, 15 bp, Homo sapiens
atacctatcaatagg

SEQ ID NO: 1346124 - DNA, 15 bp, Homo sapiens
gatacctatcaatag

SEQ ID NO: 1346125 - DNA, 15 bp, Homo sapiens
agatacctatcaata

SEQ ID NO: 1346126 - DNA, 15 bp, Homo sapiens
cagatacctatcaat

SEQ ID NO: 1346127 - DNA, 15 bp, Homo sapiens
gcagatacctatcaa

SEQ ID NO: 1346128 - DNA, 15 bp, Homo sapiens
tgcagatacctatca

SEQ ID NO: 1346129 - DNA, 15 bp, Homo sapiens
atgcagatacctatc

SEQ ID NO: 1346130 - DNA, 15 bp, Homo sapiens
aatgcagatacctat

SEQ ID NO: 1346131 - DNA, 15 bp, Homo sapiens
aaatgcagataccta

SEQ ID NO: 1346132 - DNA, 15 bp, Homo sapiens
aaaatgcagatacct

SEQ ID NO: 1346133 - DNA, 15 bp, Homo sapiens
aaaaatgcagatacc

SEQ ID NO: 1346134 - DNA, 15 bp, Homo sapiens
caaaaatgcagatac

SEQ ID NO: 1346135 - DNA, 15 bp, Homo sapiens
acaaaaatgcagata

SEQ ID NO: 1346136 - DNA, 15 bp, Homo sapiens
gacaaaaatgcagat

SEQ ID NO: 1346137 - DNA, 15 bp, Homo sapiens
agacaaaaatgcaga

SEQ ID NO: 1346138 - DNA, 15 bp, Homo sapiens
aagacaaaaatgcag

SEQ ID NO: 1346139 - DNA, 15 bp, Homo sapiens
aaagacaaaaatgca

SEQ ID NO: 1346140 - DNA, 15 bp, Homo sapiens
aaaagacaaaaatgc

SEQ ID NO: 1346141 - DNA, 15 bp, Homo sapiens
aaaaagacaaaaatg

SEQ ID NO: 1346142 - DNA, 15 bp, Homo sapiens
caaaaagacaaaaat

SEQ ID NO: 1346143 - DNA, 15 bp, Homo sapiens
tcaaaaagacaaaaa

SEQ ID NO: 1346144 - DNA, 15 bp, Homo sapiens
atcaaaaagacaaaa

SEQ ID NO: 1346145 - DNA, 15 bp, Homo sapiens
gatcaaaaagacaaa

SEQ ID NO: 1346146 - DNA, 15 bp, Homo sapiens
agatcaaaaagacaa

SEQ ID NO: 1346147 - DNA, 15 bp, Homo sapiens
tagatcaaaaagaca

SEQ ID NO: 1346148 - DNA, 15 bp, Homo sapiens
ctagatcaaaaagac

SEQ ID NO: 1346149 - DNA, 15 bp, Homo sapiens
cctagatcaaaaaga

SEQ ID NO: 1346150 - DNA, 15 bp, Homo sapiens
ccctagatcaaaaag

SEQ ID NO: 1346151 - DNA, 15 bp, Homo sapiens
accctagatcaaaaa

SEQ ID NO: 1346152 - DNA, 15 bp, Homo sapiens
aaccctagatcaaaa

SEQ ID NO: 1346153 - DNA, 15 bp, Homo sapiens
caaccctagatcaaa

SEQ ID NO: 1346154 - DNA, 15 bp, Homo sapiens
acaaccctagatcaa

SEQ ID NO: 1346155 - DNA, 15 bp, Homo sapiens
aacaaccctagatca

SEQ ID NO: 1346156 - DNA, 15 bp, Homo sapiens
aaacaaccctagatc

SEQ ID NO: 1346157 - DNA, 15 bp, Homo sapiens
aaaacaaccctagat

SEQ ID NO: 1346158 - DNA, 15 bp, Homo sapiens
aaaaacaaccctaga

SEQ ID NO: 1346159 - DNA, 15 bp, Homo sapiens
taaaaacaaccctag

SEQ ID NO: 1346160 - DNA, 15 bp, Homo sapiens
ttaaaaacaacccta

SEQ ID NO: 1346161 - DNA, 15 bp, Homo sapiens
cttaaaaacaaccct

SEQ ID NO: 1346162 - DNA, 15 bp, Homo sapiens
ccttaaaaacaaccc

SEQ ID NO: 1346163 - DNA, 15 bp, Homo sapiens
gccttaaaaacaacc

SEQ ID NO: 1346164 - DNA, 15 bp, Homo sapiens
tgccttaaaaacaac

SEQ ID NO: 1346165 - DNA, 15 bp, Homo sapiens
ctgccttaaaaacaa

SEQ ID NO: 1346166 - DNA, 15 bp, Homo sapiens
actgccttaaaaaca

SEQ ID NO: 1346167 - DNA, 15 bp, Homo sapiens
aactgccttaaaaac

SEQ ID NO: 1346168 - DNA, 15 bp, Homo sapiens
aaactgccttaaaaa

SEQ ID NO: 1346169 - DNA, 15 bp, Homo sapiens
taaactgccttaaaa

SEQ ID NO: 1346170 - DNA, 15 bp, Homo sapiens
ttaaactgccttaaa

SEQ ID NO: 1346171 - DNA, 15 bp, Homo sapiens
tttaaactgccttaa

SEQ ID NO: 1346172 - DNA, 15 bp, Homo sapiens
ttttaaactgcctta

SEQ ID NO: 1346173 - DNA, 15 bp, Homo sapiens
tttttaaactgcctt

SEQ ID NO: 1346174 - DNA, 15 bp, Homo sapiens
gtttttaaactgcct

SEQ ID NO: 1346175 - DNA, 15 bp, Homo sapiens
agtttttaaactgcc

SEQ ID NO: 1346176 - DNA, 15 bp, Homo sapiens
tagtttttaaactgc

SEQ ID NO: 1346177 - DNA, 15 bp, Homo sapiens
atagtttttaaactg

SEQ ID NO: 1346178 - DNA, 15 bp, Homo sapiens
tatagtttttaaact

SEQ ID NO: 1346179 - DNA, 15 bp, Homo sapiens
ctatagtttttaaac

SEQ ID NO: 1346180 - DNA, 15 bp, Homo sapiens
actatagtttttaaa

SEQ ID NO: 1346181 - DNA, 15 bp, Homo sapiens
tactatagtttttaa

SEQ ID NO: 1346182 - DNA, 15 bp, Homo sapiens
ttactatagttttta

SEQ ID NO: 1346183 - DNA, 15 bp, Homo sapiens
cttactatagttttt

SEQ ID NO: 1346184 - DNA, 15 bp, Homo sapiens
acttactatagtttt

SEQ ID NO: 1346185 - DNA, 15 bp, Homo sapiens
tacttactatagttt

SEQ ID NO: 1346186 - DNA, 15 bp, Homo sapiens
ttacttactatagtt

SEQ ID NO: 1346187 - DNA, 15 bp, Homo sapiens
tttacttactatagt

SEQ ID NO: 1346188 - DNA, 15 bp, Homo sapiens
ttttacttactatag

SEQ ID NO: 1346189 - DNA, 15 bp, Homo sapiens
cttttacttactata

SEQ ID NO: 1346190 - DNA, 15 bp, Homo sapiens
tcttttacttactat

SEQ ID NO: 1346191 - DNA, 15 bp, Homo sapiens
ctcttttacttacta

SEQ ID NO: 1346192 - DNA, 15 bp, Homo sapiens
cctcttttacttact

SEQ ID NO: 1346193 - DNA, 15 bp, Homo sapiens
gcctcttttacttac

SEQ ID NO: 1346194 - DNA, 15 bp, Homo sapiens
ggcctcttttactta

SEQ ID NO: 1346195 - DNA, 15 bp, Homo sapiens
tggcctcttttactt

SEQ ID NO: 1346196 - DNA, 15 bp, Homo sapiens
ctggcctcttttact

SEQ ID NO: 1346197 - DNA, 15 bp, Homo sapiens
cctggcctcttttac

SEQ ID NO: 1346198 - DNA, 15 bp, Homo sapiens
acctggcctctttta

SEQ ID NO: 1346199 - DNA, 15 bp, Homo sapiens
cacctggcctctttt

SEQ ID NO: 1346200 - DNA, 15 bp, Homo sapiens
gcacctggcctcttt

SEQ ID NO: 1346201 - DNA, 15 bp, Homo sapiens
cgcacctggcctctt

SEQ ID NO: 1346202 - DNA, 15 bp, Homo sapiens
ccgcacctggcctct

SEQ ID NO: 1346203 - DNA, 15 bp, Homo sapiens
accgcacctggcctc

SEQ ID NO: 1346204 - DNA, 15 bp, Homo sapiens
caccgcacctggcct

SEQ ID NO: 1346205 - DNA, 15 bp, Homo sapiens
tttacaggtgtgagc

SEQ ID NO: 1346206 - DNA, 15 bp, Homo sapiens
gtttacaggtgtgag

SEQ ID NO: 1346207 - DNA, 15 bp, Homo sapiens
ggtttacaggtgtga

SEQ ID NO: 1346208 - DNA, 15 bp, Homo sapiens
gggtttacaggtgtg

SEQ ID NO: 1346209 - DNA, 15 bp, Homo sapiens
tgggtttacaggtgt

SEQ ID NO: 1346210 - DNA, 15 bp, Homo sapiens
ctgggtttacaggtg

SEQ ID NO: 1346211 - DNA, 15 bp, Homo sapiens
gctgggtttacaggt

SEQ ID NO: 1346212 - DNA, 15 bp, Homo sapiens
tgctgggtttacagg

SEQ ID NO: 1346213 - DNA, 15 bp, Homo sapiens
gtgctgggtttacag

SEQ ID NO: 1346214 - DNA, 15 bp, Homo sapiens
agtgctgggtttaca

SEQ ID NO: 1346215 - DNA, 15 bp, Homo sapiens
aagtgctgggtttac

SEQ ID NO: 1346216 - DNA, 15 bp, Homo sapiens
aaagtgctgggttta

SEQ ID NO: 1346217 - DNA, 15 bp, Homo sapiens
caaagtgctgggttt

SEQ ID NO: 1346218 - DNA, 15 bp, Homo sapiens
ccaaagtgctgggtt

SEQ ID NO: 1346219 - DNA, 15 bp, Homo sapiens
cccaaagtgctgggt

SEQ ID NO: 1346220 - DNA, 15 bp, Homo sapiens
tacctcaagtgatcc

SEQ ID NO: 1346221 - DNA, 15 bp, Homo sapiens
ctacctcaagtgatc

SEQ ID NO: 1346222 - DNA, 15 bp, Homo sapiens
cctacctcaagtgat

SEQ ID NO: 1346223 - DNA, 15 bp, Homo sapiens
tcctacctcaagtga

SEQ ID NO: 1346224 - DNA, 15 bp, Homo sapiens
ctcctacctcaagtg

SEQ ID NO: 1346225 - DNA, 15 bp, Homo sapiens
actcctacctcaagt

SEQ ID NO: 1346226 - DNA, 15 bp, Homo sapiens
aactcctacctcaag

SEQ ID NO: 1346227 - DNA, 15 bp, Homo sapiens
aaactcctacctcaa

SEQ ID NO: 1346228 - DNA, 15 bp, Homo sapiens
caaactcctacctca

SEQ ID NO: 1346229 - DNA, 15 bp, Homo sapiens
tcaaactcctacctc

SEQ ID NO: 1346230 - DNA, 15 bp, Homo sapiens
ctcaaactcctacct

SEQ ID NO: 1346231 - DNA, 15 bp, Homo sapiens
tctcaaactcctacc

SEQ ID NO: 1346232 - DNA, 15 bp, Homo sapiens
gtctcaaactcctac

SEQ ID NO: 1346233 - DNA, 15 bp, Homo sapiens
ccatgtttgccaggc

SEQ ID NO: 1346234 - DNA, 15 bp, Homo sapiens
accatgtttgccagg

SEQ ID NO: 1346235 - DNA, 15 bp, Homo sapiens
caccatgtttgccag

SEQ ID NO: 1346236 - DNA, 15 bp, Homo sapiens
tcaccatgtttgcca

SEQ ID NO: 1346237 - DNA, 15 bp, Homo sapiens
ttcaccatgtttgcc

SEQ ID NO: 1346238 - DNA, 15 bp, Homo sapiens
tttcaccatgtttgc

SEQ ID NO: 1346239 - DNA, 15 bp, Homo sapiens
gtttcaccatgtttg

SEQ ID NO: 1346240 - DNA, 15 bp, Homo sapiens
ggtttcaccatgttt

SEQ ID NO: 1346241 - DNA, 15 bp, Homo sapiens
aagggtttcaccatg

SEQ ID NO: 1346242 - DNA, 15 bp, Homo sapiens
gaagggtttcaccat

SEQ ID NO: 1346243 - DNA, 15 bp, Homo sapiens
agaagggtttcacca

SEQ ID NO: 1346244 - DNA, 15 bp, Homo sapiens
gagaagggtttcacc

SEQ ID NO: 1346245 - DNA, 15 bp, Homo sapiens
agagaagggtttcac

SEQ ID NO: 1346246 - DNA, 15 bp, Homo sapiens
tagagaagggtttca

SEQ ID NO: 1346247 - DNA, 15 bp, Homo sapiens
gtagagaagggtttc

SEQ ID NO: 1346248 - DNA, 15 bp, Homo sapiens
agtagagaagggttt

SEQ ID NO: 1346249 - DNA, 15 bp, Homo sapiens
tagtagagaagggtt

SEQ ID NO: 1346250 - DNA, 15 bp, Homo sapiens
ttagtagagaagggt

SEQ ID NO: 1346251 - DNA, 15 bp, Homo sapiens
gccggctaatttttt

SEQ ID NO: 1346252 - DNA, 15 bp, Homo sapiens
ggccggctaattttt

SEQ ID NO: 1346253 - DNA, 15 bp, Homo sapiens
cggccggctaatttt

SEQ ID NO: 1346254 - DNA, 15 bp, Homo sapiens
acggccggctaattt

SEQ ID NO: 1346255 - DNA, 15 bp, Homo sapiens
cacggccggctaatt

SEQ ID NO: 1346256 - DNA, 15 bp, Homo sapiens
ccacggccggctaat

SEQ ID NO: 1346257 - DNA, 15 bp, Homo sapiens
accacggccggctaa

SEQ ID NO: 1346258 - DNA, 15 bp, Homo sapiens
caccacggccggcta

SEQ ID NO: 1346259 - DNA, 15 bp, Homo sapiens
ccaccacggccggct

SEQ ID NO: 1346260 - DNA, 15 bp, Homo sapiens
gccaccacggccggc

SEQ ID NO: 1346261 - DNA, 15 bp, Homo sapiens
tgccaccacggccgg

SEQ ID NO: 1346262 - DNA, 15 bp, Homo sapiens
ttgccaccacggccg

SEQ ID NO: 1346263 - DNA, 15 bp, Homo sapiens
cttgccaccacggcc

SEQ ID NO: 1346264 - DNA, 15 bp, Homo sapiens
gcttgccaccacggc

SEQ ID NO: 1346265 - DNA, 15 bp, Homo sapiens
cgcttgccaccacgg

SEQ ID NO: 1346266 - DNA, 15 bp, Homo sapiens
gcgcttgccaccacg

SEQ ID NO: 1346267 - DNA, 15 bp, Homo sapiens
ggcgcttgccaccac

SEQ ID NO: 1346268 - DNA, 15 bp, Homo sapiens
aggcgcttgccacca

SEQ ID NO: 1346269 - DNA, 15 bp, Homo sapiens
caggcgcttgccacc

SEQ ID NO: 1346270 - DNA, 15 bp, Homo sapiens
acaggcgcttgccac

SEQ ID NO: 1346271 - DNA, 15 bp, Homo sapiens
tacaggcgcttgcca

SEQ ID NO: 1346272 - DNA, 15 bp, Homo sapiens
ctacaggcgcttgcc

SEQ ID NO: 1346273 - DNA, 15 bp, Homo sapiens
actacaggcgcttgc

SEQ ID NO: 1346274 - DNA, 15 bp, Homo sapiens
gactacaggcgcttg

SEQ ID NO: 1346275 - DNA, 15 bp, Homo sapiens
ggactacaggcgctt

SEQ ID NO: 1346276 - DNA, 15 bp, Homo sapiens
gggactacaggcgct

SEQ ID NO: 1346277 - DNA, 15 bp, Homo sapiens
acagctgggactaca

SEQ ID NO: 1346278 - DNA, 15 bp, Homo sapiens
aacagctgggactac

SEQ ID NO: 1346279 - DNA, 15 bp, Homo sapiens
gaacagctgggacta

SEQ ID NO: 1346280 - DNA, 15 bp, Homo sapiens
cgaacagctgggact

SEQ ID NO: 1346281 - DNA, 15 bp, Homo sapiens
ccgaacagctgggac

SEQ ID NO: 1346282 - DNA, 15 bp, Homo sapiens
tccgaacagctggga

SEQ ID NO: 1346283 - DNA, 15 bp, Homo sapiens
ttccgaacagctggg

SEQ ID NO: 1346284 - DNA, 15 bp, Homo sapiens
cttccgaacagctgg

SEQ ID NO: 1346285 - DNA, 15 bp, Homo sapiens
ccttccgaacagctg

SEQ ID NO: 1346286 - DNA, 15 bp, Homo sapiens
gccttccgaacagct

SEQ ID NO: 1346287 - DNA, 15 bp, Homo sapiens
agccttccgaacagc

SEQ ID NO: 1346288 - DNA, 15 bp, Homo sapiens
cagccttccgaacag

SEQ ID NO: 1346289 - DNA, 15 bp, Homo sapiens
tcagccttccgaaca

SEQ ID NO: 1346290 - DNA, 15 bp, Homo sapiens
ctcagccttccgaac

SEQ ID NO: 1346291 - DNA, 15 bp, Homo sapiens
cctcagccttccgaa

SEQ ID NO: 1346292 - DNA, 15 bp, Homo sapiens
ccctcagccttccga

SEQ ID NO: 1346293 - DNA, 15 bp, Homo sapiens
tccctcagccttccg

SEQ ID NO: 1346294 - DNA, 15 bp, Homo sapiens
ctccctcagccttcc

SEQ ID NO: 1346295 - DNA, 15 bp, Homo sapiens
cctccctcagccttc

SEQ ID NO: 1346296 - DNA, 15 bp, Homo sapiens
tcctccctcagcctt

SEQ ID NO: 1346297 - DNA, 15 bp, Homo sapiens
ctcctccctcagcct

SEQ ID NO: 1346298 - DNA, 15 bp, Homo sapiens
tctcctccctcagcc

SEQ ID NO: 1346299 - DNA, 15 bp, Homo sapiens
ttctcctccctcagc

SEQ ID NO: 1346300 - DNA, 15 bp, Homo sapiens
attctcctccctcag

SEQ ID NO: 1346301 - DNA, 15 bp, Homo sapiens
gattctcctccctca

SEQ ID NO: 1346302 - DNA, 15 bp, Homo sapiens
cgattctcctccctc

SEQ ID NO: 1346303 - DNA, 15 bp, Homo sapiens
gcgattctcctccct

SEQ ID NO: 1346304 - DNA, 15 bp, Homo sapiens
agcgattctcctccc

SEQ ID NO: 1346305 - DNA, 15 bp, Homo sapiens
aagcgattctcctcc

SEQ ID NO: 1346306 - DNA, 15 bp, Homo sapiens
caagcgattctcctc

SEQ ID NO: 1346307 - DNA, 15 bp, Homo sapiens
tcccgagttcaagcg

SEQ ID NO: 1346308 - DNA, 15 bp, Homo sapiens
ctcccgagttcaagc

SEQ ID NO: 1346309 - DNA, 15 bp, Homo sapiens
cctcccgagttcaag

SEQ ID NO: 1346310 - DNA, 15 bp, Homo sapiens
gcctcccgagttcaa

SEQ ID NO: 1346311 - DNA, 15 bp, Homo sapiens
tctccgcctcccgag

SEQ ID NO: 1346312 - DNA, 15 bp, Homo sapiens
atctccgcctcccga

SEQ ID NO: 1346313 - DNA, 15 bp, Homo sapiens
aatctccgcctcccg

SEQ ID NO: 1346314 - DNA, 15 bp, Homo sapiens
caatctccgcctccc

SEQ ID NO: 1346315 - DNA, 15 bp, Homo sapiens
attggctcactgcaa

SEQ ID NO: 1346316 - DNA, 15 bp, Homo sapiens
tattggctcactgca

SEQ ID NO: 1346317 - DNA, 15 bp, Homo sapiens
ttattggctcactgc

SEQ ID NO: 1346318 - DNA, 15 bp, Homo sapiens
attattggctcactg

SEQ ID NO: 1346319 - DNA, 15 bp, Homo sapiens
tattattggctcact

SEQ ID NO: 1346320 - DNA, 15 bp, Homo sapiens
atattattggctcac

SEQ ID NO: 1346321 - DNA, 15 bp, Homo sapiens
catattattggctca

SEQ ID NO: 1346322 - DNA, 15 bp, Homo sapiens
gcatattattggctc

SEQ ID NO: 1346323 - DNA, 15 bp, Homo sapiens
agcatattattggct

SEQ ID NO: 1346324 - DNA, 15 bp, Homo sapiens
cagcatattattggc

SEQ ID NO: 1346325 - DNA, 15 bp, Homo sapiens
gcagcatattattgg

SEQ ID NO: 1346326 - DNA, 15 bp, Homo sapiens
agcagcatattattg

SEQ ID NO: 1346327 - DNA, 15 bp, Homo sapiens
cagcagcatattatt

SEQ ID NO: 1346328 - DNA, 15 bp, Homo sapiens
acagcagcatattat

SEQ ID NO: 1346329 - DNA, 15 bp, Homo sapiens
tacagcagcatatta

SEQ ID NO: 1346330 - DNA, 15 bp, Homo sapiens
gtacagcagcatatt

SEQ ID NO: 1346331 - DNA, 15 bp, Homo sapiens
agtacagcagcatat

SEQ ID NO: 1346332 - DNA, 15 bp, Homo sapiens
gagtacagcagcata

SEQ ID NO: 1346333 - DNA, 15 bp, Homo sapiens
ggagtacagcagcat

SEQ ID NO: 1346334 - DNA, 15 bp, Homo sapiens
tggagtacagcagca

SEQ ID NO: 1346335 - DNA, 15 bp, Homo sapiens
tagagtctcgctctg

SEQ ID NO: 1346336 - DNA, 15 bp, Homo sapiens
atagagtctcgctct

SEQ ID NO: 1346337 - DNA, 15 bp, Homo sapiens
gatagagtctcgctc

SEQ ID NO: 1346338 - DNA, 15 bp, Homo sapiens
agatagagtctcgct

SEQ ID NO: 1346339 - DNA, 15 bp, Homo sapiens
gagatagagtctcgc

SEQ ID NO: 1346340 - DNA, 15 bp, Homo sapiens
tgagatagagtctcg

SEQ ID NO: 1346341 - DNA, 15 bp, Homo sapiens
ttgagatagagtctc

SEQ ID NO: 1346342 - DNA, 15 bp, Homo sapiens
atttttgagatagag

SEQ ID NO: 1346343 - DNA, 15 bp, Homo sapiens
tatttttgagataga

SEQ ID NO: 1346344 - DNA, 15 bp, Homo sapiens
ttatttttgagatag

SEQ ID NO: 1346345 - DNA, 15 bp, Homo sapiens
tttatttttgagata

SEQ ID NO: 1346346 - DNA, 15 bp, Homo sapiens
gtatttatttttgag

SEQ ID NO: 1346347 - DNA, 15 bp, Homo sapiens
tgtatttatttttga

SEQ ID NO: 1346348 - DNA, 15 bp, Homo sapiens
ttgtatttatttttg

SEQ ID NO: 1346349 - DNA, 15 bp, Homo sapiens
attgtatttattttt

SEQ ID NO: 1346350 - DNA, 15 bp, Homo sapiens
aattgtatttatttt

SEQ ID NO: 1346351 - DNA, 15 bp, Homo sapiens
aaattgtatttattt

SEQ ID NO: 1346352 - DNA, 15 bp, Homo sapiens
aaaattgtatttatt

SEQ ID NO: 1346353 - DNA, 15 bp, Homo sapiens
taaaattgtatttat

SEQ ID NO: 1346354 - DNA, 15 bp, Homo sapiens
ttaaaattgtattta

SEQ ID NO: 1346355 - DNA, 15 bp, Homo sapiens
tttaaaattgtattt

SEQ ID NO: 1346356 - DNA, 15 bp, Homo sapiens
atttaaaattgtatt

SEQ ID NO: 1346357 - DNA, 15 bp, Homo sapiens
tatttaaaattgtat

SEQ ID NO: 1346358 - DNA, 15 bp, Homo sapiens
ttatttaaaattgta

SEQ ID NO: 1346359 - DNA, 15 bp, Homo sapiens
tttatttaaaattgt

SEQ ID NO: 1346360 - DNA, 15 bp, Homo sapiens
ttttatttaaaattg

SEQ ID NO: 1346361 - DNA, 15 bp, Homo sapiens
attttatttaaaatt

SEQ ID NO: 1346362 - DNA, 15 bp, Homo sapiens
aattttatttaaaat

SEQ ID NO: 1346363 - DNA, 15 bp, Homo sapiens
taattttatttaaaa

SEQ ID NO: 1346364 - DNA, 15 bp, Homo sapiens
ataattttatttaaa

SEQ ID NO: 1346365 - DNA, 15 bp, Homo sapiens
tataattttatttaa

SEQ ID NO: 1346366 - DNA, 15 bp, Homo sapiens
ttataattttattta

SEQ ID NO: 1346367 - DNA, 15 bp, Homo sapiens
tttataattttattt

SEQ ID NO: 1346368 - DNA, 15 bp, Homo sapiens
ttttataattttatt

SEQ ID NO: 1346369 - DNA, 15 bp, Homo sapiens
tttttataattttat

SEQ ID NO: 1346370 - DNA, 15 bp, Homo sapiens
atttttataatttta

SEQ ID NO: 1346371 - DNA, 15 bp, Homo sapiens
tatttttataatttt

SEQ ID NO: 1346372 - DNA, 15 bp, Homo sapiens
ttatttttataattt

SEQ ID NO: 1346373 - DNA, 15 bp, Homo sapiens
tttatttttataatt

SEQ ID NO: 1346374 - DNA, 15 bp, Homo sapiens
ctttatttttataat

SEQ ID NO: 1346375 - DNA, 15 bp, Homo sapiens
gctttatttttataa

SEQ ID NO: 1346376 - DNA, 15 bp, Homo sapiens
tgctttatttttata

SEQ ID NO: 1346377 - DNA, 15 bp, Homo sapiens
ctgctttatttttat

SEQ ID NO: 1346378 - DNA, 15 bp, Homo sapiens
gctgctttattttta

SEQ ID NO: 1346379 - DNA, 15 bp, Homo sapiens
tgctgctttattttt

SEQ ID NO: 1346380 - DNA, 15 bp, Homo sapiens
gtgctgctttatttt

SEQ ID NO: 1346381 - DNA, 15 bp, Homo sapiens
ggtgctgctttattt

SEQ ID NO: 1346382 - DNA, 15 bp, Homo sapiens
gggtgctgctttatt

SEQ ID NO: 1346383 - DNA, 15 bp, Homo sapiens
tgggtgctgctttat

SEQ ID NO: 1346384 - DNA, 15 bp, Homo sapiens
ctgggtgctgcttta

SEQ ID NO: 1346385 - DNA, 15 bp, Homo sapiens
gctgggtgctgcttt

SEQ ID NO: 1346386 - DNA, 15 bp, Homo sapiens
agctgggtgctgctt

SEQ ID NO: 1346387 - DNA, 15 bp, Homo sapiens
aagctgggtgctgct

SEQ ID NO: 1346388 - DNA, 15 bp, Homo sapiens
aaagctgggtgctgc

SEQ ID NO: 1346389 - DNA, 15 bp, Homo sapiens
taaagctgggtgctg

SEQ ID NO: 1346390 - DNA, 15 bp, Homo sapiens
ataaagctgggtgct

SEQ ID NO: 1346391 - DNA, 15 bp, Homo sapiens
aataaagctgggtgc

SEQ ID NO: 1346392 - DNA, 15 bp, Homo sapiens
aaataaagctgggtg

SEQ ID NO: 1346393 - DNA, 15 bp, Homo sapiens
aaaataaagctgggt

SEQ ID NO: 1346394 - DNA, 15 bp, Homo sapiens
aaaaataaagctggg

SEQ ID NO: 1346395 - DNA, 15 bp, Homo sapiens
aaaaaataaagctgg

SEQ ID NO: 1346396 - DNA, 15 bp, Homo sapiens
taaaaaataaagctg

SEQ ID NO: 1346397 - DNA, 15 bp, Homo sapiens
ataaaaaataaagct

SEQ ID NO: 1346398 - DNA, 15 bp, Homo sapiens
aataaaaaataaagc

SEQ ID NO: 1346399 - DNA, 15 bp, Homo sapiens
taaataaaaaataaa

SEQ ID NO: 1346400 - DNA, 15 bp, Homo sapiens
ataaataaaaaataa

SEQ ID NO: 1346401 - DNA, 15 bp, Homo sapiens
aataaataaaaaata

SEQ ID NO: 1346402 - DNA, 15 bp, Homo sapiens
aaataaataaaaaat

SEQ ID NO: 1346403 - DNA, 15 bp, Homo sapiens
taaataaataaaaaa

SEQ ID NO: 1346404 - DNA, 15 bp, Homo sapiens
cgactctgtctcaaa

SEQ ID NO: 1346405 - DNA, 15 bp, Homo sapiens
gcgactctgtctcaa

SEQ ID NO: 1346406 - DNA, 15 bp, Homo sapiens
tgcgactctgtctca

SEQ ID NO: 1346407 - DNA, 15 bp, Homo sapiens
atgcgactctgtctc

SEQ ID NO: 1346408 - DNA, 15 bp, Homo sapiens
aatgcgactctgtct

SEQ ID NO: 1346409 - DNA, 15 bp, Homo sapiens
gaatgcgactctgtc

SEQ ID NO: 1346410 - DNA, 15 bp, Homo sapiens
agaatgcgactctgt

SEQ ID NO: 1346411 - DNA, 15 bp, Homo sapiens
cagaatgcgactctg

SEQ ID NO: 1346412 - DNA, 15 bp, Homo sapiens
acagaatgcgactct

SEQ ID NO: 1346413 - DNA, 15 bp, Homo sapiens
gacagaatgcgactc

SEQ ID NO: 1346414 - DNA, 15 bp, Homo sapiens
cgacagaatgcgact

SEQ ID NO: 1346415 - DNA, 15 bp, Homo sapiens
gcgacagaatgcgac

SEQ ID NO: 1346416 - DNA, 15 bp, Homo sapiens
agcgacagaatgcga

SEQ ID NO: 1346417 - DNA, 15 bp, Homo sapiens
gagcgacagaatgcg

SEQ ID NO: 1346418 - DNA, 15 bp, Homo sapiens
tgagcgacagaatgc

SEQ ID NO: 1346419 - DNA, 15 bp, Homo sapiens
ttgagcgacagaatg

SEQ ID NO: 1346420 - DNA, 15 bp, Homo sapiens
cttgagcgacagaat

SEQ ID NO: 1346421 - DNA, 15 bp, Homo sapiens
acttgagcgacagaa

SEQ ID NO: 1346422 - DNA, 15 bp, Homo sapiens
aacttgagcgacaga

SEQ ID NO: 1346423 - DNA, 15 bp, Homo sapiens
caacttgagcgacag

SEQ ID NO: 1346424 - DNA, 15 bp, Homo sapiens
ccaacttgagcgaca

SEQ ID NO: 1346425 - DNA, 15 bp, Homo sapiens
tccaacttgagcgac

SEQ ID NO: 1346426 - DNA, 15 bp, Homo sapiens
ctccaacttgagcga

SEQ ID NO: 1346427 - DNA, 15 bp, Homo sapiens
actccaacttgagcg

SEQ ID NO: 1346428 - DNA, 15 bp, Homo sapiens
cactccaacttgagc

SEQ ID NO: 1346429 - DNA, 15 bp, Homo sapiens
gcactccaacttgag

SEQ ID NO: 1346430 - DNA, 15 bp, Homo sapiens
tgcactccaacttga

SEQ ID NO: 1346431 - DNA, 15 bp, Homo sapiens
ctgcactccaacttg

SEQ ID NO: 1346432 - DNA, 15 bp, Homo sapiens
actgcactccaactt

SEQ ID NO: 1346433 - DNA, 15 bp, Homo sapiens
cactgcactccaact

SEQ ID NO: 1346434 - DNA, 15 bp, Homo sapiens
cagtgagccaagatg

SEQ ID NO: 1346435 - DNA, 15 bp, Homo sapiens
cgggagaatcacttg

SEQ ID NO: 1346436 - DNA, 15 bp, Homo sapiens
gcgggagaatcactt

SEQ ID NO: 1346437 - DNA, 15 bp, Homo sapiens
agcgggagaatcact

SEQ ID NO: 1346438 - DNA, 15 bp, Homo sapiens
aagcgggagaatcac

SEQ ID NO: 1346439 - DNA, 15 bp, Homo sapiens
gaagcgggagaatca

SEQ ID NO: 1346440 - DNA, 15 bp, Homo sapiens
tgaagcgggagaatc

SEQ ID NO: 1346441 - DNA, 15 bp, Homo sapiens
ctgaagcgggagaat

SEQ ID NO: 1346442 - DNA, 15 bp, Homo sapiens
gctgaagcgggagaa

SEQ ID NO: 1346443 - DNA, 15 bp, Homo sapiens
ctgggaggctgaagc

SEQ ID NO: 1346444 - DNA, 15 bp, Homo sapiens
cctgggaggctgaag

SEQ ID NO: 1346445 - DNA, 15 bp, Homo sapiens
acctgggaggctgaa

SEQ ID NO: 1346446 - DNA, 15 bp, Homo sapiens
gctacctgggaggct

SEQ ID NO: 1346447 - DNA, 15 bp, Homo sapiens
agctacctgggaggc

SEQ ID NO: 1346448 - DNA, 15 bp, Homo sapiens
cagctacctgggagg

SEQ ID NO: 1346449 - DNA, 15 bp, Homo sapiens
tcagctacctgggag

SEQ ID NO: 1346450 - DNA, 15 bp, Homo sapiens
ctcagctacctggga

SEQ ID NO: 1346451 - DNA, 15 bp, Homo sapiens
tctcagctacctggg

SEQ ID NO: 1346452 - DNA, 15 bp, Homo sapiens
atctcagctacctgg

SEQ ID NO: 1346453 - DNA, 15 bp, Homo sapiens
aatctcagctacctg

SEQ ID NO: 1346454 - DNA, 15 bp, Homo sapiens
taatctcagctacct

SEQ ID NO: 1346455 - DNA, 15 bp, Homo sapiens
acacacctgtaatct

SEQ ID NO: 1346456 - DNA, 15 bp, Homo sapiens
cgtggtggcacacac

SEQ ID NO: 1346457 - DNA, 15 bp, Homo sapiens
gcgtggtggcacaca

SEQ ID NO: 1346458 - DNA, 15 bp, Homo sapiens
caaattagctgggcg

SEQ ID NO: 1346459 - DNA, 15 bp, Homo sapiens
acaaattagctgggc

SEQ ID NO: 1346460 - DNA, 15 bp, Homo sapiens
tacaaattagctggg

SEQ ID NO: 1346461 - DNA, 15 bp, Homo sapiens
atacaaattagctgg

SEQ ID NO: 1346462 - DNA, 15 bp, Homo sapiens
aatacaaattagctg

SEQ ID NO: 1346463 - DNA, 15 bp, Homo sapiens
aaatacaaattagct

SEQ ID NO: 1346464 - DNA, 15 bp, Homo sapiens
aaaatacaaattagc

SEQ ID NO: 1346465 - DNA, 15 bp, Homo sapiens
taaaaatacaaatta

SEQ ID NO: 1346466 - DNA, 15 bp, Homo sapiens
ctaaaaatacaaatt

SEQ ID NO: 1346467 - DNA, 15 bp, Homo sapiens
cccccatctctacta

SEQ ID NO: 1346468 - DNA, 15 bp, Homo sapiens
acccccatctctact

SEQ ID NO: 1346469 - DNA, 15 bp, Homo sapiens
aacccccatctctac

SEQ ID NO: 1346470 - DNA, 15 bp, Homo sapiens
aaacccccatctcta

SEQ ID NO: 1346471 - DNA, 15 bp, Homo sapiens
gaaacccccatctct

SEQ ID NO: 1346472 - DNA, 15 bp, Homo sapiens
tgaaacccccatctc

SEQ ID NO: 1346473 - DNA, 15 bp, Homo sapiens
gtgaaacccccatct

SEQ ID NO: 1346474 - DNA, 15 bp, Homo sapiens
ggtgaaacccccatc

SEQ ID NO: 1346475 - DNA, 15 bp, Homo sapiens
tggtgaaacccccat

SEQ ID NO: 1346476 - DNA, 15 bp, Homo sapiens
atggtgaaaccccca

SEQ ID NO: 1346477 - DNA, 15 bp, Homo sapiens
catggtgaaaccccc

SEQ ID NO: 1346478 - DNA, 15 bp, Homo sapiens
aaacatggtgaaacc

SEQ ID NO: 1346479 - DNA, 15 bp, Homo sapiens
caaacatggtgaaac

SEQ ID NO: 1346480 - DNA, 15 bp, Homo sapiens
gcaaacatggtgaaa

SEQ ID NO: 1346481 - DNA, 15 bp, Homo sapiens
ggcaaacatggtgaa

SEQ ID NO: 1346482 - DNA, 15 bp, Homo sapiens
tggcaaacatggtga

SEQ ID NO: 1346483 - DNA, 15 bp, Homo sapiens
ctggcaaacatggtg

SEQ ID NO: 1346484 - DNA, 15 bp, Homo sapiens
cctggcaaacatggt

SEQ ID NO: 1346485 - DNA, 15 bp, Homo sapiens
gcctggcaaacatgg

SEQ ID NO: 1346486 - DNA, 15 bp, Homo sapiens
agcctggcaaacatg

SEQ ID NO: 1346487 - DNA, 15 bp, Homo sapiens
cagcctggcaaacat

SEQ ID NO: 1346488 - DNA, 15 bp, Homo sapiens
ccagcctggcaaaca

SEQ ID NO: 1346489 - DNA, 15 bp, Homo sapiens
accagcctggcaaac

SEQ ID NO: 1346490 - DNA, 15 bp, Homo sapiens
gaccagcctggcaaa

SEQ ID NO: 1346491 - DNA, 15 bp, Homo sapiens
agaccagcctggcaa

SEQ ID NO: 1346492 - DNA, 15 bp, Homo sapiens
aagaccagcctggca

SEQ ID NO: 1346493 - DNA, 15 bp, Homo sapiens
taggagttcaagacc

SEQ ID NO: 1346494 - DNA, 15 bp, Homo sapiens
ttaggagttcaagac

SEQ ID NO: 1346495 - DNA, 15 bp, Homo sapiens
gttaggagttcaaga

SEQ ID NO: 1346496 - DNA, 15 bp, Homo sapiens
ggttaggagttcaag

SEQ ID NO: 1346497 - DNA, 15 bp, Homo sapiens
aggttaggagttcaa

SEQ ID NO: 1346498 - DNA, 15 bp, Homo sapiens
gaggttaggagttca

SEQ ID NO: 1346499 - DNA, 15 bp, Homo sapiens
acccagcactttggg

SEQ ID NO: 1346500 - DNA, 15 bp, Homo sapiens
aacccagcactttgg

SEQ ID NO: 1346501 - DNA, 15 bp, Homo sapiens
aaacccagcactttg

SEQ ID NO: 1346502 - DNA, 15 bp, Homo sapiens
taaacccagcacttt

SEQ ID NO: 1346503 - DNA, 15 bp, Homo sapiens
ataaacccagcactt

SEQ ID NO: 1346504 - DNA, 15 bp, Homo sapiens
tataaacccagcact

SEQ ID NO: 1346505 - DNA, 15 bp, Homo sapiens
ctataaacccagcac

SEQ ID NO: 1346506 - DNA, 15 bp, Homo sapiens
cctataaacccagca

SEQ ID NO: 1346507 - DNA, 15 bp, Homo sapiens
acctataaacccagc

SEQ ID NO: 1346508 - DNA, 15 bp, Homo sapiens
cacctataaacccag

SEQ ID NO: 1346509 - DNA, 15 bp, Homo sapiens
acacctataaaccca

SEQ ID NO: 1346510 - DNA, 15 bp, Homo sapiens
cacacctataaaccc

SEQ ID NO: 1346511 - DNA, 15 bp, Homo sapiens
tcacacctataaacc

SEQ ID NO: 1346512 - DNA, 15 bp, Homo sapiens
ctcacacctataaac

SEQ ID NO: 1346513 - DNA, 15 bp, Homo sapiens
gctcacacctataaa

SEQ ID NO: 1346514 - DNA, 15 bp, Homo sapiens
cggctcacacctata

SEQ ID NO: 1346515 - DNA, 15 bp, Homo sapiens
gcggctcacacctat

SEQ ID NO: 1346516 - DNA, 15 bp, Homo sapiens
ggcggctcacaccta

SEQ ID NO: 1346517 - DNA, 15 bp, Homo sapiens
cggcggctcacacct

SEQ ID NO: 1346518 - DNA, 15 bp, Homo sapiens
gcggcggctcacacc

SEQ ID NO: 1346519 - DNA, 15 bp, Homo sapiens
cgcggcggctcacac

SEQ ID NO: 1346520 - DNA, 15 bp, Homo sapiens
gcgcggcggctcaca

SEQ ID NO: 1346521 - DNA, 15 bp, Homo sapiens
agcgcggcggctcac

SEQ ID NO: 1346522 - DNA, 15 bp, Homo sapiens
aagcgcggcggctca

SEQ ID NO: 1346523 - DNA, 15 bp, Homo sapiens
caagcgcggcggctc

SEQ ID NO: 1346524 - DNA, 15 bp, Homo sapiens
ccaagcgcggcggct

SEQ ID NO: 1346525 - DNA, 15 bp, Homo sapiens
gccaagcgcggcggc

SEQ ID NO: 1346526 - DNA, 15 bp, Homo sapiens
agccaagcgcggcgg

SEQ ID NO: 1346527 - DNA, 15 bp, Homo sapiens
gagccaagcgcggcg

SEQ ID NO: 1346528 - DNA, 15 bp, Homo sapiens
tgagccaagcgcggc

SEQ ID NO: 1346529 - DNA, 15 bp, Homo sapiens
ttgagccaagcgcgg

SEQ ID NO: 1346530 - DNA, 15 bp, Homo sapiens
gttgagccaagcgcg

SEQ ID NO: 1346531 - DNA, 15 bp, Homo sapiens
tgttgagccaagcgc

SEQ ID NO: 1346532 - DNA, 15 bp, Homo sapiens
atgttgagccaagcg

SEQ ID NO: 1346533 - DNA, 15 bp, Homo sapiens
gatgttgagccaagc

SEQ ID NO: 1346534 - DNA, 15 bp, Homo sapiens
agatgttgagccaag

SEQ ID NO: 1346535 - DNA, 15 bp, Homo sapiens
aagatgttgagccaa

SEQ ID NO: 1346536 - DNA, 15 bp, Homo sapiens
taagatgttgagcca

SEQ ID NO: 1346537 - DNA, 15 bp, Homo sapiens
ataagatgttgagcc

SEQ ID NO: 1346538 - DNA, 15 bp, Homo sapiens
aataagatgttgagc

SEQ ID NO: 1346539 - DNA, 15 bp, Homo sapiens
caataagatgttgag

SEQ ID NO: 1346540 - DNA, 15 bp, Homo sapiens
acaataagatgttga

SEQ ID NO: 1346541 - DNA, 15 bp, Homo sapiens
aacaataagatgttg

SEQ ID NO: 1346542 - DNA, 15 bp, Homo sapiens
aaacaataagatgtt

SEQ ID NO: 1346543 - DNA, 15 bp, Homo sapiens
caaacaataagatgt

SEQ ID NO: 1346544 - DNA, 15 bp, Homo sapiens
tcaaacaataagatg

SEQ ID NO: 1346545 - DNA, 15 bp, Homo sapiens
ctcaaacaataagat

SEQ ID NO: 1346546 - DNA, 15 bp, Homo sapiens
tctcaaacaataaga

SEQ ID NO: 1346547 - DNA, 15 bp, Homo sapiens
gtctcaaacaataag

SEQ ID NO: 1346548 - DNA, 15 bp, Homo sapiens
cgtctcaaacaataa

SEQ ID NO: 1346549 - DNA, 15 bp, Homo sapiens
ccgtctcaaacaata

SEQ ID NO: 1346550 - DNA, 15 bp, Homo sapiens
cccgtctcaaacaat

SEQ ID NO: 1346551 - DNA, 15 bp, Homo sapiens
ccccgtctcaaacaa

SEQ ID NO: 1346552 - DNA, 15 bp, Homo sapiens
accccgtctcaaaca

SEQ ID NO: 1346553 - DNA, 15 bp, Homo sapiens
gaccccgtctcaaac

SEQ ID NO: 1346554 - DNA, 15 bp, Homo sapiens
ggagaccccgtctca

SEQ ID NO: 1346555 - DNA, 15 bp, Homo sapiens
aggagaccccgtctc

SEQ ID NO: 1346556 - DNA, 15 bp, Homo sapiens
aaggagaccccgtct

SEQ ID NO: 1346557 - DNA, 15 bp, Homo sapiens
gaaggagaccccgtc

SEQ ID NO: 1346558 - DNA, 15 bp, Homo sapiens
agaaggagaccccgt

SEQ ID NO: 1346559 - DNA, 15 bp, Homo sapiens
cagaaggagaccccg

SEQ ID NO: 1346560 - DNA, 15 bp, Homo sapiens
acagaaggagacccc

SEQ ID NO: 1346561 - DNA, 15 bp, Homo sapiens
aacagaaggagaccc

SEQ ID NO: 1346562 - DNA, 15 bp, Homo sapiens
taacagaaggagacc

SEQ ID NO: 1346563 - DNA, 15 bp, Homo sapiens
ataacagaaggagac

SEQ ID NO: 1346564 - DNA, 15 bp, Homo sapiens
gataacagaaggaga

SEQ ID NO: 1346565 - DNA, 15 bp, Homo sapiens
ggataacagaaggag

SEQ ID NO: 1346566 - DNA, 15 bp, Homo sapiens
tggataacagaagga

SEQ ID NO: 1346567 - DNA, 15 bp, Homo sapiens
ttggataacagaagg

SEQ ID NO: 1346568 - DNA, 15 bp, Homo sapiens
cttggataacagaag

SEQ ID NO: 1346569 - DNA, 15 bp, Homo sapiens
gcttggataacagaa

SEQ ID NO: 1346570 - DNA, 15 bp, Homo sapiens
agcttggataacaga

SEQ ID NO: 1346571 - DNA, 15 bp, Homo sapiens
cagcttggataacag

SEQ ID NO: 1346572 - DNA, 15 bp, Homo sapiens
ccagcttggataaca

SEQ ID NO: 1346573 - DNA, 15 bp, Homo sapiens
tccagcttggataac

SEQ ID NO: 1346574 - DNA, 15 bp, Homo sapiens
ctccagcttggataa

SEQ ID NO: 1346575 - DNA, 15 bp, Homo sapiens
actccagcttggata

SEQ ID NO: 1346576 - DNA, 15 bp, Homo sapiens
cactccagcttggat

SEQ ID NO: 1346577 - DNA, 15 bp, Homo sapiens
acactccagcttgga

SEQ ID NO: 1346578 - DNA, 15 bp, Homo sapiens
tacactccagcttgg

SEQ ID NO: 1346579 - DNA, 15 bp, Homo sapiens
ctacactccagcttg

SEQ ID NO: 1346580 - DNA, 15 bp, Homo sapiens
actacactccagctt

SEQ ID NO: 1346581 - DNA, 15 bp, Homo sapiens
tactacactccagct

SEQ ID NO: 1346582 - DNA, 15 bp, Homo sapiens
actactacactccag

SEQ ID NO: 1346583 - DNA, 15 bp, Homo sapiens
cactactacactcca

SEQ ID NO: 1346584 - DNA, 15 bp, Homo sapiens
acactactacactcc

SEQ ID NO: 1346585 - DNA, 15 bp, Homo sapiens
cacactactacactc

SEQ ID NO: 1346586 - DNA, 15 bp, Homo sapiens
tcacactactacact

SEQ ID NO: 1346587 - DNA, 15 bp, Homo sapiens
atcacactactacac

SEQ ID NO: 1346588 - DNA, 15 bp, Homo sapiens
gatcacactactaca

SEQ ID NO: 1346589 - DNA, 15 bp, Homo sapiens
agatcacactactac

SEQ ID NO: 1346590 - DNA, 15 bp, Homo sapiens
aagatcacactacta

SEQ ID NO: 1346591 - DNA, 15 bp, Homo sapiens
taagatcacactact

SEQ ID NO: 1346592 - DNA, 15 bp, Homo sapiens
gtaagatcacactac

SEQ ID NO: 1346593 - DNA, 15 bp, Homo sapiens
tgtaagatcacacta

SEQ ID NO: 1346594 - DNA, 15 bp, Homo sapiens
ctgtaagatcacact

SEQ ID NO: 1346595 - DNA, 15 bp, Homo sapiens
gctgtaagatcacac

SEQ ID NO: 1346596 - DNA, 15 bp, Homo sapiens
agctgtaagatcaca

SEQ ID NO: 1346597 - DNA, 15 bp, Homo sapiens
gagctgtaagatcac

SEQ ID NO: 1346598 - DNA, 15 bp, Homo sapiens
tgagctgtaagatca

SEQ ID NO: 1346599 - DNA, 15 bp, Homo sapiens
gtgagctgtaagatc

SEQ ID NO: 1346600 - DNA, 15 bp, Homo sapiens
agtgagctgtaagat

SEQ ID NO: 1346601 - DNA, 15 bp, Homo sapiens
cagtgagctgtaaga

SEQ ID NO: 1346602 - DNA, 15 bp, Homo sapiens
gcagtgagctgtaag

SEQ ID NO: 1346603 - DNA, 15 bp, Homo sapiens
tgcagtgagctgtaa

SEQ ID NO: 1346604 - DNA, 15 bp, Homo sapiens
ctgcagtgagctgta

SEQ ID NO: 1346605 - DNA, 15 bp, Homo sapiens
agagttggaggctgc

SEQ ID NO: 1346606 - DNA, 15 bp, Homo sapiens
aagagttggaggctg

SEQ ID NO: 1346607 - DNA, 15 bp, Homo sapiens
caagagttggaggct

SEQ ID NO: 1346608 - DNA, 15 bp, Homo sapiens
ccaagagttggaggc

SEQ ID NO: 1346609 - DNA, 15 bp, Homo sapiens
cccaagagttggagg

SEQ ID NO: 1346610 - DNA, 15 bp, Homo sapiens
gcccaagagttggag

SEQ ID NO: 1346611 - DNA, 15 bp, Homo sapiens
agcccaagagttgga

SEQ ID NO: 1346612 - DNA, 15 bp, Homo sapiens
gagcccaagagttgg

SEQ ID NO: 1346613 - DNA, 15 bp, Homo sapiens
tgagcccaagagttg

SEQ ID NO: 1346614 - DNA, 15 bp, Homo sapiens
tttgagcccaagagt

SEQ ID NO: 1346615 - DNA, 15 bp, Homo sapiens
atttgagcccaagag

SEQ ID NO: 1346616 - DNA, 15 bp, Homo sapiens
catttgagcccaaga

SEQ ID NO: 1346617 - DNA, 15 bp, Homo sapiens
tcatttgagcccaag

SEQ ID NO: 1346618 - DNA, 15 bp, Homo sapiens
atcatttgagcccaa

SEQ ID NO: 1346619 - DNA, 15 bp, Homo sapiens
aatcatttgagccca

SEQ ID NO: 1346620 - DNA, 15 bp, Homo sapiens
gaatcatttgagccc

SEQ ID NO: 1346621 - DNA, 15 bp, Homo sapiens
agaatcatttgagcc

SEQ ID NO: 1346622 - DNA, 15 bp, Homo sapiens
gagaatcatttgagc

SEQ ID NO: 1346623 - DNA, 15 bp, Homo sapiens
ggagaatcatttgag

SEQ ID NO: 1346624 - DNA, 15 bp, Homo sapiens
aggagaatcatttga

SEQ ID NO: 1346625 - DNA, 15 bp, Homo sapiens
caggagaatcatttg

SEQ ID NO: 1346626 - DNA, 15 bp, Homo sapiens
acaggagaatcattt

SEQ ID NO: 1346627 - DNA, 15 bp, Homo sapiens
gacaggagaatcatt

SEQ ID NO: 1346628 - DNA, 15 bp, Homo sapiens
agacaggagaatcat

SEQ ID NO: 1346629 - DNA, 15 bp, Homo sapiens
tgggaggctgagaca

SEQ ID NO: 1346630 - DNA, 15 bp, Homo sapiens
gtactagctacttgg

SEQ ID NO: 1346631 - DNA, 15 bp, Homo sapiens
agtactagctacttg

SEQ ID NO: 1346632 - DNA, 15 bp, Homo sapiens
tagtactagctactt

SEQ ID NO: 1346633 - DNA, 15 bp, Homo sapiens
gtagtactagctact

SEQ ID NO: 1346634 - DNA, 15 bp, Homo sapiens
tgtagtactagctac

SEQ ID NO: 1346635 - DNA, 15 bp, Homo sapiens
ctgtagtactagcta

SEQ ID NO: 1346636 - DNA, 15 bp, Homo sapiens
cctgtagtactagct

SEQ ID NO: 1346637 - DNA, 15 bp, Homo sapiens
acctgtagtactagc

SEQ ID NO: 1346638 - DNA, 15 bp, Homo sapiens
cacctgtagtactag

SEQ ID NO: 1346639 - DNA, 15 bp, Homo sapiens
acacctgtagtacta

SEQ ID NO: 1346640 - DNA, 15 bp, Homo sapiens
gcacacctgtagtac

SEQ ID NO: 1346641 - DNA, 15 bp, Homo sapiens
tgcacacctgtagta

SEQ ID NO: 1346642 - DNA, 15 bp, Homo sapiens
ggtggtgcacacctg

SEQ ID NO: 1346643 - DNA, 15 bp, Homo sapiens
atggtggtgcacacc

SEQ ID NO: 1346644 - DNA, 15 bp, Homo sapiens
catggtggtgcacac

SEQ ID NO: 1346645 - DNA, 15 bp, Homo sapiens
gcatggtggtgcaca

SEQ ID NO: 1346646 - DNA, 15 bp, Homo sapiens
agggcatggtggtgc

SEQ ID NO: 1346647 - DNA, 15 bp, Homo sapiens
cagggcatggtggtg

SEQ ID NO: 1346648 - DNA, 15 bp, Homo sapiens
gcagggcatggtggt

SEQ ID NO: 1346649 - DNA, 15 bp, Homo sapiens
agcagggcatggtgg

SEQ ID NO: 1346650 - DNA, 15 bp, Homo sapiens
cagcagggcatggtg

SEQ ID NO: 1346651 - DNA, 15 bp, Homo sapiens
acagcagggcatggt

SEQ ID NO: 1346652 - DNA, 15 bp, Homo sapiens
aacagcagggcatgg

SEQ ID NO: 1346653 - DNA, 15 bp, Homo sapiens
aaacagcagggcatg

SEQ ID NO: 1346654 - DNA, 15 bp, Homo sapiens
gaaacagcagggcat

SEQ ID NO: 1346655 - DNA, 15 bp, Homo sapiens
agaaacagcagggca

SEQ ID NO: 1346656 - DNA, 15 bp, Homo sapiens
aagaaacagcagggc

SEQ ID NO: 1346657 - DNA, 15 bp, Homo sapiens
aaagaaacagcaggg

SEQ ID NO: 1346658 - DNA, 15 bp, Homo sapiens
caaagaaacagcagg

SEQ ID NO: 1346659 - DNA, 15 bp, Homo sapiens
acaaagaaacagcag

SEQ ID NO: 1346660 - DNA, 15 bp, Homo sapiens
aacaaagaaacagca

SEQ ID NO: 1346661 - DNA, 15 bp, Homo sapiens
aaacaaagaaacagc

SEQ ID NO: 1346662 - DNA, 15 bp, Homo sapiens
aaaacaaagaaacag

SEQ ID NO: 1346663 - DNA, 15 bp, Homo sapiens
aaaaacaaagaaaca

SEQ ID NO: 1346664 - DNA, 15 bp, Homo sapiens
aaaaaacaaagaaac

SEQ ID NO: 1346665 - DNA, 15 bp, Homo sapiens
aaaaaaacaaagaaa

SEQ ID NO: 1346666 - DNA, 15 bp, Homo sapiens
aaaaaaaacaaagaa

SEQ ID NO: 1346667 - DNA, 15 bp, Homo sapiens
taaaaaaaacaaaga

SEQ ID NO: 1346668 - DNA, 15 bp, Homo sapiens
ataaaaaaaacaaag

SEQ ID NO: 1346669 - DNA, 15 bp, Homo sapiens
tataaaaaaaacaaa

SEQ ID NO: 1346670 - DNA, 15 bp, Homo sapiens
atataaaaaaaacaa

SEQ ID NO: 1346671 - DNA, 15 bp, Homo sapiens
catataaaaaaaaca

SEQ ID NO: 1346672 - DNA, 15 bp, Homo sapiens
ccatataaaaaaaac

SEQ ID NO: 1346673 - DNA, 15 bp, Homo sapiens
tccatataaaaaaaa

SEQ ID NO: 1346674 - DNA, 15 bp, Homo sapiens
gtccatataaaaaaa

SEQ ID NO: 1346675 - DNA, 15 bp, Homo sapiens
tgtccatataaaaaa

SEQ ID NO: 1346676 - DNA, 15 bp, Homo sapiens
ctgtccatataaaaa

SEQ ID NO: 1346677 - DNA, 15 bp, Homo sapiens
actgtccatataaaa

SEQ ID NO: 1346678 - DNA, 15 bp, Homo sapiens
gactgtccatataaa

SEQ ID NO: 1346679 - DNA, 15 bp, Homo sapiens
agactgtccatataa

SEQ ID NO: 1346680 - DNA, 15 bp, Homo sapiens
aagactgtccatata

SEQ ID NO: 1346681 - DNA, 15 bp, Homo sapiens
caagactgtccatat

SEQ ID NO: 1346682 - DNA, 15 bp, Homo sapiens
gcaagactgtccata

SEQ ID NO: 1346683 - DNA, 15 bp, Homo sapiens
agcaagactgtccat

SEQ ID NO: 1346684 - DNA, 15 bp, Homo sapiens
tagcaagactgtcca

SEQ ID NO: 1346685 - DNA, 15 bp, Homo sapiens
atagcaagactgtcc

SEQ ID NO: 1346686 - DNA, 15 bp, Homo sapiens
catagcaagactgtc

SEQ ID NO: 1346687 - DNA, 15 bp, Homo sapiens
acatagcaagactgt

SEQ ID NO: 1346688 - DNA, 15 bp, Homo sapiens
aacatagcaagactg

SEQ ID NO: 1346689 - DNA, 15 bp, Homo sapiens
caacatagcaagact

SEQ ID NO: 1346690 - DNA, 15 bp, Homo sapiens
ctcaggagtttgaga

SEQ ID NO: 1346691 - DNA, 15 bp, Homo sapiens
gctcaggagtttgag

SEQ ID NO: 1346692 - DNA, 15 bp, Homo sapiens
agctcaggagtttga

SEQ ID NO: 1346693 - DNA, 15 bp, Homo sapiens
gagctcaggagtttg

SEQ ID NO: 1346694 - DNA, 15 bp, Homo sapiens
cgagctcaggagttt

SEQ ID NO: 1346695 - DNA, 15 bp, Homo sapiens
tcgagctcaggagtt

SEQ ID NO: 1346696 - DNA, 15 bp, Homo sapiens
ctcgagctcaggagt

SEQ ID NO: 1346697 - DNA, 15 bp, Homo sapiens
actcgagctcaggag

SEQ ID NO: 1346698 - DNA, 15 bp, Homo sapiens
cactcgagctcagga

SEQ ID NO: 1346699 - DNA, 15 bp, Homo sapiens
tcactcgagctcagg

SEQ ID NO: 1346700 - DNA, 15 bp, Homo sapiens
atcactcgagctcag

SEQ ID NO: 1346701 - DNA, 15 bp, Homo sapiens
aatcactcgagctca

SEQ ID NO: 1346702 - DNA, 15 bp, Homo sapiens
gaatcactcgagctc

SEQ ID NO: 1346703 - DNA, 15 bp, Homo sapiens
agaatcactcgagct

SEQ ID NO: 1346704 - DNA, 15 bp, Homo sapiens
cagaatcactcgagc

SEQ ID NO: 1346705 - DNA, 15 bp, Homo sapiens
gcagaatcactcgag

SEQ ID NO: 1346706 - DNA, 15 bp, Homo sapiens
agcagaatcactcga

SEQ ID NO: 1346707 - DNA, 15 bp, Homo sapiens
cagcagaatcactcg

SEQ ID NO: 1346708 - DNA, 15 bp, Homo sapiens
gcagcagaatcactc

SEQ ID NO: 1346709 - DNA, 15 bp, Homo sapiens
ggcagcagaatcact

SEQ ID NO: 1346710 - DNA, 15 bp, Homo sapiens
aggcagcagaatcac

SEQ ID NO: 1346711 - DNA, 15 bp, Homo sapiens
gaggcagcagaatca

SEQ ID NO: 1346712 - DNA, 15 bp, Homo sapiens
tgaggcagcagaatc

SEQ ID NO: 1346713 - DNA, 15 bp, Homo sapiens
gctgaggcagcagaa

SEQ ID NO: 1346714 - DNA, 15 bp, Homo sapiens
agctgaggcagcaga

SEQ ID NO: 1346715 - DNA, 15 bp, Homo sapiens
tagctgaggcagcag

SEQ ID NO: 1346716 - DNA, 15 bp, Homo sapiens
gtagctgaggcagca

SEQ ID NO: 1346717 - DNA, 15 bp, Homo sapiens
agtagctgaggcagc

SEQ ID NO: 1346718 - DNA, 15 bp, Homo sapiens
gagtagctgaggcag

SEQ ID NO: 1346719 - DNA, 15 bp, Homo sapiens
tgagtagctgaggca

SEQ ID NO: 1346720 - DNA, 15 bp, Homo sapiens
ttgagtagctgaggc

SEQ ID NO: 1346721 - DNA, 15 bp, Homo sapiens
tttgagtagctgagg

SEQ ID NO: 1346722 - DNA, 15 bp, Homo sapiens
ctttgagtagctgag

SEQ ID NO: 1346723 - DNA, 15 bp, Homo sapiens
actttgagtagctga

SEQ ID NO: 1346724 - DNA, 15 bp, Homo sapiens
cactttgagtagctg

SEQ ID NO: 1346725 - DNA, 15 bp, Homo sapiens
gcactttgagtagct

SEQ ID NO: 1346726 - DNA, 15 bp, Homo sapiens
agcactttgagtagc

SEQ ID NO: 1346727 - DNA, 15 bp, Homo sapiens
cagcactttgagtag

SEQ ID NO: 1346728 - DNA, 15 bp, Homo sapiens
ccagcactttgagta

SEQ ID NO: 1346729 - DNA, 15 bp, Homo sapiens
cccagcactttgagt

SEQ ID NO: 1346730 - DNA, 15 bp, Homo sapiens
aacgcctacaatccc

SEQ ID NO: 1346731 - DNA, 15 bp, Homo sapiens
taacgcctacaatcc

SEQ ID NO: 1346732 - DNA, 15 bp, Homo sapiens
ttaacgcctacaatc

SEQ ID NO: 1346733 - DNA, 15 bp, Homo sapiens
gttaacgcctacaat

SEQ ID NO: 1346734 - DNA, 15 bp, Homo sapiens
agttaacgcctacaa

SEQ ID NO: 1346735 - DNA, 15 bp, Homo sapiens
tagttaacgcctaca

SEQ ID NO: 1346736 - DNA, 15 bp, Homo sapiens
atagttaacgcctac

SEQ ID NO: 1346737 - DNA, 15 bp, Homo sapiens
gatagttaacgccta

SEQ ID NO: 1346738 - DNA, 15 bp, Homo sapiens
tgatagttaacgcct

SEQ ID NO: 1346739 - DNA, 15 bp, Homo sapiens
ctgatagttaacgcc

SEQ ID NO: 1346740 - DNA, 15 bp, Homo sapiens
cctgatagttaacgc

SEQ ID NO: 1346741 - DNA, 15 bp, Homo sapiens
acctgatagttaacg

SEQ ID NO: 1346742 - DNA, 15 bp, Homo sapiens
aacctgatagttaac

SEQ ID NO: 1346743 - DNA, 15 bp, Homo sapiens
taacctgatagttaa

SEQ ID NO: 1346744 - DNA, 15 bp, Homo sapiens
ctaacctgatagtta

SEQ ID NO: 1346745 - DNA, 15 bp, Homo sapiens
cctaacctgatagtt

SEQ ID NO: 1346746 - DNA, 15 bp, Homo sapiens
gcctaacctgatagt

SEQ ID NO: 1346747 - DNA, 15 bp, Homo sapiens
ggcctaacctgatag

SEQ ID NO: 1346748 - DNA, 15 bp, Homo sapiens
aggcctaacctgata

SEQ ID NO: 1346749 - DNA, 15 bp, Homo sapiens
caggcctaacctgat

SEQ ID NO: 1346750 - DNA, 15 bp, Homo sapiens
acaggcctaacctga

SEQ ID NO: 1346751 - DNA, 15 bp, Homo sapiens
aacaggcctaacctg

SEQ ID NO: 1346752 - DNA, 15 bp, Homo sapiens
gaacaggcctaacct

SEQ ID NO: 1346753 - DNA, 15 bp, Homo sapiens
agaacaggcctaacc

SEQ ID NO: 1346754 - DNA, 15 bp, Homo sapiens
cagaacaggcctaac

SEQ ID NO: 1346755 - DNA, 15 bp, Homo sapiens
acagaacaggcctaa

SEQ ID NO: 1346756 - DNA, 15 bp, Homo sapiens
aacagaacaggccta

SEQ ID NO: 1346757 - DNA, 15 bp, Homo sapiens
aaacagaacaggcct

SEQ ID NO: 1346758 - DNA, 15 bp, Homo sapiens
aaaacagaacaggcc

SEQ ID NO: 1346759 - DNA, 15 bp, Homo sapiens
aaaaacagaacaggc

SEQ ID NO: 1346760 - DNA, 15 bp, Homo sapiens
taaaaacagaacagg

SEQ ID NO: 1346761 - DNA, 15 bp, Homo sapiens
ataaaaacagaacag

SEQ ID NO: 1346762 - DNA, 15 bp, Homo sapiens
aataaaaacagaaca

SEQ ID NO: 1346763 - DNA, 15 bp, Homo sapiens
taataaaaacagaac

SEQ ID NO: 1346764 - DNA, 15 bp, Homo sapiens
ctaataaaaacagaa

SEQ ID NO: 1346765 - DNA, 15 bp, Homo sapiens
gctaataaaaacaga

SEQ ID NO: 1346766 - DNA, 15 bp, Homo sapiens
cgctaataaaaacag

SEQ ID NO: 1346767 - DNA, 15 bp, Homo sapiens
acgctaataaaaaca

SEQ ID NO: 1346768 - DNA, 15 bp, Homo sapiens
cacgctaataaaaac

SEQ ID NO: 1346769 - DNA, 15 bp, Homo sapiens
ccacgctaataaaaa

SEQ ID NO: 1346770 - DNA, 15 bp, Homo sapiens
tccacgctaataaaa

SEQ ID NO: 1346771 - DNA, 15 bp, Homo sapiens
atccacgctaataaa

SEQ ID NO: 1346772 - DNA, 15 bp, Homo sapiens
catccacgctaataa

SEQ ID NO: 1346773 - DNA, 15 bp, Homo sapiens
tcatccacgctaata

SEQ ID NO: 1346774 - DNA, 15 bp, Homo sapiens
gtcatccacgctaat

SEQ ID NO: 1346775 - DNA, 15 bp, Homo sapiens
agtcatccacgctaa

SEQ ID NO: 1346776 - DNA, 15 bp, Homo sapiens
cagtcatccacgcta

SEQ ID NO: 1346777 - DNA, 15 bp, Homo sapiens
gcagtcatccacgct

SEQ ID NO: 1346778 - DNA, 15 bp, Homo sapiens
agcagtcatccacgc

SEQ ID NO: 1346779 - DNA, 15 bp, Homo sapiens
cagcagtcatccacg

SEQ ID NO: 1346780 - DNA, 15 bp, Homo sapiens
ccagcagtcatccac

SEQ ID NO: 1346781 - DNA, 15 bp, Homo sapiens
accagcagtcatcca

SEQ ID NO: 1346782 - DNA, 15 bp, Homo sapiens
aaccagcagtcatcc

SEQ ID NO: 1346783 - DNA, 15 bp, Homo sapiens
taaccagcagtcatc

SEQ ID NO: 1346784 - DNA, 15 bp, Homo sapiens
gtaaccagcagtcat

SEQ ID NO: 1346785 - DNA, 15 bp, Homo sapiens
agtaaccagcagtca

SEQ ID NO: 1346786 - DNA, 15 bp, Homo sapiens
tagtaaccagcagtc

SEQ ID NO: 1346787 - DNA, 15 bp, Homo sapiens
gtagtaaccagcagt

SEQ ID NO: 1346788 - DNA, 15 bp, Homo sapiens
agtagtaaccagcag

SEQ ID NO: 1346789 - DNA, 15 bp, Homo sapiens
cagtagtaaccagca

SEQ ID NO: 1346790 - DNA, 15 bp, Homo sapiens
ccagtagtaaccagc

SEQ ID NO: 1346791 - DNA, 15 bp, Homo sapiens
gccagtagtaaccag

SEQ ID NO: 1346792 - DNA, 15 bp, Homo sapiens
ggccagtagtaacca

SEQ ID NO: 1346793 - DNA, 15 bp, Homo sapiens
cggccagtagtaacc

SEQ ID NO: 1346794 - DNA, 15 bp, Homo sapiens
acggccagtagtaac

SEQ ID NO: 1346795 - DNA, 15 bp, Homo sapiens
aacggccagtagtaa

SEQ ID NO: 1346796 - DNA, 15 bp, Homo sapiens
aaacggccagtagta

SEQ ID NO: 1346797 - DNA, 15 bp, Homo sapiens
caaacggccagtagt

SEQ ID NO: 1346798 - DNA, 15 bp, Homo sapiens
acaaacggccagtag

SEQ ID NO: 1346799 - DNA, 15 bp, Homo sapiens
tacaaacggccagta

SEQ ID NO: 1346800 - DNA, 15 bp, Homo sapiens
atacaaacggccagt

SEQ ID NO: 1346801 - DNA, 15 bp, Homo sapiens
tatacaaacggccag

SEQ ID NO: 1346802 - DNA, 15 bp, Homo sapiens
atatacaaacggcca

SEQ ID NO: 1346803 - DNA, 15 bp, Homo sapiens
gatatacaaacggcc

SEQ ID NO: 1346804 - DNA, 15 bp, Homo sapiens
ggatatacaaacggc

SEQ ID NO: 1346805 - DNA, 15 bp, Homo sapiens
aggatatacaaacgg

SEQ ID NO: 1346806 - DNA, 15 bp, Homo sapiens
aaggatatacaaacg

SEQ ID NO: 1346807 - DNA, 15 bp, Homo sapiens
caaggatatacaaac

SEQ ID NO: 1346808 - DNA, 15 bp, Homo sapiens
tcaaggatatacaaa

SEQ ID NO: 1346809 - DNA, 15 bp, Homo sapiens
ttcaaggatatacaa

SEQ ID NO: 1346810 - DNA, 15 bp, Homo sapiens
attcaaggatataca

SEQ ID NO: 1346811 - DNA, 15 bp, Homo sapiens
aattcaaggatatac

SEQ ID NO: 1346812 - DNA, 15 bp, Homo sapiens
taattcaaggatata

SEQ ID NO: 1346813 - DNA, 15 bp, Homo sapiens
gtaattcaaggatat

SEQ ID NO: 1346814 - DNA, 15 bp, Homo sapiens
ggtaattcaaggata

SEQ ID NO: 1346815 - DNA, 15 bp, Homo sapiens
aggtaattcaaggat

SEQ ID NO: 1346816 - DNA, 15 bp, Homo sapiens
gaggtaattcaagga

SEQ ID NO: 1346817 - DNA, 15 bp, Homo sapiens
agaggtaattcaagg

SEQ ID NO: 1346818 - DNA, 15 bp, Homo sapiens
aagaggtaattcaag

SEQ ID NO: 1346819 - DNA, 15 bp, Homo sapiens
aaagaggtaattcaa

SEQ ID NO: 1346820 - DNA, 15 bp, Homo sapiens
caaagaggtaattca

SEQ ID NO: 1346821 - DNA, 15 bp, Homo sapiens
acaaagaggtaattc

SEQ ID NO: 1346822 - DNA, 15 bp, Homo sapiens
aacaaagaggtaatt

SEQ ID NO: 1346823 - DNA, 15 bp, Homo sapiens
aaacaaagaggtaat

SEQ ID NO: 1346824 - DNA, 15 bp, Homo sapiens
aaaacaaagaggtaa

SEQ ID NO: 1346825 - DNA, 15 bp, Homo sapiens
aaaaacaaagaggta

SEQ ID NO: 1346826 - DNA, 15 bp, Homo sapiens
taaaaacaaagaggt

SEQ ID NO: 1346827 - DNA, 15 bp, Homo sapiens
ctaaaaacaaagagg

SEQ ID NO: 1346828 - DNA, 15 bp, Homo sapiens
gctaaaaacaaagag

SEQ ID NO: 1346829 - DNA, 15 bp, Homo sapiens
ggctaaaaacaaaga

SEQ ID NO: 1346830 - DNA, 15 bp, Homo sapiens
tggctaaaaacaaag

SEQ ID NO: 1346831 - DNA, 15 bp, Homo sapiens
atggctaaaaacaaa

SEQ ID NO: 1346832 - DNA, 15 bp, Homo sapiens
aatggctaaaaacaa

SEQ ID NO: 1346833 - DNA, 15 bp, Homo sapiens
aaatggctaaaaaca

SEQ ID NO: 1346834 - DNA, 15 bp, Homo sapiens
aaaatggctaaaaac

SEQ ID NO: 1346835 - DNA, 15 bp, Homo sapiens
gaaaaatggctaaaa

SEQ ID NO: 1346836 - DNA, 15 bp, Homo sapiens
agaaaaatggctaaa

SEQ ID NO: 1346837 - DNA, 15 bp, Homo sapiens
gagaaaaatggctaa

SEQ ID NO: 1346838 - DNA, 15 bp, Homo sapiens
ggagaaaaatggcta

SEQ ID NO: 1346839 - DNA, 15 bp, Homo sapiens
tggagaaaaatggct

SEQ ID NO: 1346840 - DNA, 15 bp, Homo sapiens
atggagaaaaatggc

SEQ ID NO: 1346841 - DNA, 15 bp, Homo sapiens
aatggagaaaaatgg

SEQ ID NO: 1346842 - DNA, 15 bp, Homo sapiens
aaatggagaaaaatg

SEQ ID NO: 1346843 - DNA, 15 bp, Homo sapiens
caaatggagaaaaat

SEQ ID NO: 1346844 - DNA, 15 bp, Homo sapiens
ccaaatggagaaaaa

SEQ ID NO: 1346845 - DNA, 15 bp, Homo sapiens
cccaaatggagaaaa

SEQ ID NO: 1346846 - DNA, 15 bp, Homo sapiens
acccaaatggagaaa

SEQ ID NO: 1346847 - DNA, 15 bp, Homo sapiens
cacccaaatggagaa

SEQ ID NO: 1346848 - DNA, 15 bp, Homo sapiens
gcacccaaatggaga

SEQ ID NO: 1346849 - DNA, 15 bp, Homo sapiens
agcacccaaatggag

SEQ ID NO: 1346850 - DNA, 15 bp, Homo sapiens
aagcacccaaatgga

SEQ ID NO: 1346851 - DNA, 15 bp, Homo sapiens
aaagcacccaaatgg

SEQ ID NO: 1346852 - DNA, 15 bp, Homo sapiens
aaaagcacccaaatg

SEQ ID NO: 1346853 - DNA, 15 bp, Homo sapiens
aaaaagcacccaaat

SEQ ID NO: 1346854 - DNA, 15 bp, Homo sapiens
gaaaaagcacccaaa

SEQ ID NO: 1346855 - DNA, 15 bp, Homo sapiens
tgaaaaagcacccaa

SEQ ID NO: 1346856 - DNA, 15 bp, Homo sapiens
gtgaaaaagcaccca

SEQ ID NO: 1346857 - DNA, 15 bp, Homo sapiens
tgtgaaaaagcaccc

SEQ ID NO: 1346858 - DNA, 15 bp, Homo sapiens
ctgtgaaaaagcacc

SEQ ID NO: 1346859 - DNA, 15 bp, Homo sapiens
actgtgaaaaagcac

SEQ ID NO: 1346860 - DNA, 15 bp, Homo sapiens
cactgtgaaaaagca

SEQ ID NO: 1346861 - DNA, 15 bp, Homo sapiens
tcactgtgaaaaagc

SEQ ID NO: 1346862 - DNA, 15 bp, Homo sapiens
gtcactgtgaaaaag

SEQ ID NO: 1346863 - DNA, 15 bp, Homo sapiens
agtcactgtgaaaaa

SEQ ID NO: 1346864 - DNA, 15 bp, Homo sapiens
aagtcactgtgaaaa

SEQ ID NO: 1346865 - DNA, 15 bp, Homo sapiens
gaagtcactgtgaaa

SEQ ID NO: 1346866 - DNA, 15 bp, Homo sapiens
agaagtcactgtgaa

SEQ ID NO: 1346867 - DNA, 15 bp, Homo sapiens
cagaagtcactgtga

SEQ ID NO: 1346868 - DNA, 15 bp, Homo sapiens
ccagaagtcactgtg

SEQ ID NO: 1346869 - DNA, 15 bp, Homo sapiens
cccagaagtcactgt

SEQ ID NO: 1346870 - DNA, 15 bp, Homo sapiens
tcccagaagtcactg

SEQ ID NO: 1346871 - DNA, 15 bp, Homo sapiens
ttcccagaagtcact

SEQ ID NO: 1346872 - DNA, 15 bp, Homo sapiens
attcccagaagtcac

SEQ ID NO: 1346873 - DNA, 15 bp, Homo sapiens
tattcccagaagtca

SEQ ID NO: 1346874 - DNA, 15 bp, Homo sapiens
atattcccagaagtc

SEQ ID NO: 1346875 - DNA, 15 bp, Homo sapiens
aatattcccagaagt

SEQ ID NO: 1346876 - DNA, 15 bp, Homo sapiens
taatattcccagaag

SEQ ID NO: 1346877 - DNA, 15 bp, Homo sapiens
ataatattcccagaa

SEQ ID NO: 1346878 - DNA, 15 bp, Homo sapiens
cataatattcccaga

SEQ ID NO: 1346879 - DNA, 15 bp, Homo sapiens
acataatattcccag

SEQ ID NO: 1346880 - DNA, 15 bp, Homo sapiens
aacataatattccca

SEQ ID NO: 1346881 - DNA, 15 bp, Homo sapiens
gaacataatattccc

SEQ ID NO: 1346882 - DNA, 15 bp, Homo sapiens
agaacataatattcc

SEQ ID NO: 1346883 - DNA, 15 bp, Homo sapiens
aagaacataatattc

SEQ ID NO: 1346884 - DNA, 15 bp, Homo sapiens
aaagaacataatatt

SEQ ID NO: 1346885 - DNA, 15 bp, Homo sapiens
aaaagaacataatat

SEQ ID NO: 1346886 - DNA, 15 bp, Homo sapiens
gaaaagaacataata

SEQ ID NO: 1346887 - DNA, 15 bp, Homo sapiens
agaaaagaacataat

SEQ ID NO: 1346888 - DNA, 15 bp, Homo sapiens
aagaaaagaacataa

SEQ ID NO: 1346889 - DNA, 15 bp, Homo sapiens
aaagaaaagaacata

SEQ ID NO: 1346890 - DNA, 15 bp, Homo sapiens
aaaagaaaagaacat

SEQ ID NO: 1346891 - DNA, 15 bp, Homo sapiens
caaaagaaaagaaca

SEQ ID NO: 1346892 - DNA, 15 bp, Homo sapiens
tcaaaagaaaagaac

SEQ ID NO: 1346893 - DNA, 15 bp, Homo sapiens
atcaaaagaaaagaa

SEQ ID NO: 1346894 - DNA, 15 bp, Homo sapiens
aatcaaaagaaaaga

SEQ ID NO: 1346895 - DNA, 15 bp, Homo sapiens
aaatcaaaagaaaag

SEQ ID NO: 1346896 - DNA, 15 bp, Homo sapiens
taaatcaaaagaaaa

SEQ ID NO: 1346897 - DNA, 15 bp, Homo sapiens
gtaaatcaaaagaaa

SEQ ID NO: 1346898 - DNA, 15 bp, Homo sapiens
ggtaaatcaaaagaa

SEQ ID NO: 1346899 - DNA, 15 bp, Homo sapiens
aggtaaatcaaaaga

SEQ ID NO: 1346900 - DNA, 15 bp, Homo sapiens
aaggtaaatcaaaag

SEQ ID NO: 1346901 - DNA, 15 bp, Homo sapiens
aaaggtaaatcaaaa

SEQ ID NO: 1346902 - DNA, 15 bp, Homo sapiens
gaaaggtaaatcaaa

SEQ ID NO: 1346903 - DNA, 15 bp, Homo sapiens
tgaaaggtaaatcaa

SEQ ID NO: 1346904 - DNA, 15 bp, Homo sapiens
ttgaaaggtaaatca

SEQ ID NO: 1346905 - DNA, 15 bp, Homo sapiens
tttgaaaggtaaatc

SEQ ID NO: 1346906 - DNA, 15 bp, Homo sapiens
atttgaaaggtaaat

SEQ ID NO: 1346907 - DNA, 15 bp, Homo sapiens
aatttgaaaggtaaa

SEQ ID NO: 1346908 - DNA, 15 bp, Homo sapiens
aaatttgaaaggtaa

SEQ ID NO: 1346909 - DNA, 15 bp, Homo sapiens
aaaatttgaaaggta

SEQ ID NO: 1346910 - DNA, 15 bp, Homo sapiens
taaaatttgaaaggt

SEQ ID NO: 1346911 - DNA, 15 bp, Homo sapiens
ataaaatttgaaagg

SEQ ID NO: 1346912 - DNA, 15 bp, Homo sapiens
aataaaatttgaaag

SEQ ID NO: 1346913 - DNA, 15 bp, Homo sapiens
aaataaaatttgaaa

SEQ ID NO: 1346914 - DNA, 15 bp, Homo sapiens
aaaataaaatttgaa

SEQ ID NO: 1346915 - DNA, 15 bp, Homo sapiens
aaaaataaaatttga

SEQ ID NO: 1346916 - DNA, 15 bp, Homo sapiens
taaaaataaaatttg

SEQ ID NO: 1346917 - DNA, 15 bp, Homo sapiens
ataaaaataaaattt

SEQ ID NO: 1346918 - DNA, 15 bp, Homo sapiens
cataaaaataaaatt

SEQ ID NO: 1346919 - DNA, 15 bp, Homo sapiens
ccataaaaataaaat

SEQ ID NO: 1346920 - DNA, 15 bp, Homo sapiens
tccataaaaataaaa

SEQ ID NO: 1346921 - DNA, 15 bp, Homo sapiens
atccataaaaataaa

SEQ ID NO: 1346922 - DNA, 15 bp, Homo sapiens
tatccataaaaataa

SEQ ID NO: 1346923 - DNA, 15 bp, Homo sapiens
atatatccataaaaa

SEQ ID NO: 1346924 - DNA, 15 bp, Homo sapiens
tatatatccataaaa

SEQ ID NO: 1346925 - DNA, 15 bp, Homo sapiens
ttatatatccataaa

SEQ ID NO: 1346926 - DNA, 15 bp, Homo sapiens
attatatatccataa

SEQ ID NO: 1346927 - DNA, 15 bp, Homo sapiens
tattatatatccata

SEQ ID NO: 1346928 - DNA, 15 bp, Homo sapiens
ctattatatatccat

SEQ ID NO: 1346929 - DNA, 15 bp, Homo sapiens
actattatatatcca

SEQ ID NO: 1346930 - DNA, 15 bp, Homo sapiens
aactattatatatcc

SEQ ID NO: 1346931 - DNA, 15 bp, Homo sapiens
caactattatatatc

SEQ ID NO: 1346932 - DNA, 15 bp, Homo sapiens
acaactattatatat

SEQ ID NO: 1346933 - DNA, 15 bp, Homo sapiens
tacaactattatata

SEQ ID NO: 1346934 - DNA, 15 bp, Homo sapiens
gtacaactattatat

SEQ ID NO: 1346935 - DNA, 15 bp, Homo sapiens
cgtacaactattata

SEQ ID NO: 1346936 - DNA, 15 bp, Homo sapiens
acgtacaactattat

SEQ ID NO: 1346937 - DNA, 15 bp, Homo sapiens
cacgtacaactatta

SEQ ID NO: 1346938 - DNA, 15 bp, Homo sapiens
acacgtacaactatt

SEQ ID NO: 1346939 - DNA, 15 bp, Homo sapiens
tacacgtacaactat

SEQ ID NO: 1346940 - DNA, 15 bp, Homo sapiens
gtacacgtacaacta

SEQ ID NO: 1346941 - DNA, 15 bp, Homo sapiens
tgtacacgtacaact

SEQ ID NO: 1346942 - DNA, 15 bp, Homo sapiens
atgtacacgtacaac

SEQ ID NO: 1346943 - DNA, 15 bp, Homo sapiens
aatgtacacgtacaa

SEQ ID NO: 1346944 - DNA, 15 bp, Homo sapiens
taatgtacacgtaca

SEQ ID NO: 1346945 - DNA, 15 bp, Homo sapiens
ataatgtacacgtac

SEQ ID NO: 1346946 - DNA, 15 bp, Homo sapiens
tataatgtacacgta

SEQ ID NO: 1346947 - DNA, 15 bp, Homo sapiens
atataatgtacacgt

SEQ ID NO: 1346948 - DNA, 15 bp, Homo sapiens
tatataatgtacacg

SEQ ID NO: 1346949 - DNA, 15 bp, Homo sapiens
atatataatgtacac

SEQ ID NO: 1346950 - DNA, 15 bp, Homo sapiens
aatatataatgtaca

SEQ ID NO: 1346951 - DNA, 15 bp, Homo sapiens
gaatatataatgtac

SEQ ID NO: 1346952 - DNA, 15 bp, Homo sapiens
agaatatataatgta

SEQ ID NO: 1346953 - DNA, 15 bp, Homo sapiens
aagaatatataatgt

SEQ ID NO: 1346954 - DNA, 15 bp, Homo sapiens
caagaatatataatg

SEQ ID NO: 1346955 - DNA, 15 bp, Homo sapiens
tcaagaatatataat

SEQ ID NO: 1346956 - DNA, 15 bp, Homo sapiens
ttcaagaatatataa

SEQ ID NO: 1346957 - DNA, 15 bp, Homo sapiens
cttcaagaatatata

SEQ ID NO: 1346958 - DNA, 15 bp, Homo sapiens
tcttcaagaatatat

SEQ ID NO: 1346959 - DNA, 15 bp, Homo sapiens
ctcttcaagaatata

SEQ ID NO: 1346960 - DNA, 15 bp, Homo sapiens
actcttcaagaatat

SEQ ID NO: 1346961 - DNA, 15 bp, Homo sapiens
aactcttcaagaata

SEQ ID NO: 1346962 - DNA, 15 bp, Homo sapiens
taactcttcaagaat

SEQ ID NO: 1346963 - DNA, 15 bp, Homo sapiens
ctaactcttcaagaa

SEQ ID NO: 1346964 - DNA, 15 bp, Homo sapiens
cctaactcttcaaga

SEQ ID NO: 1346965 - DNA, 15 bp, Homo sapiens
gcctaactcttcaag

SEQ ID NO: 1346966 - DNA, 15 bp, Homo sapiens
agcctaactcttcaa

SEQ ID NO: 1346967 - DNA, 15 bp, Homo sapiens
aagcctaactcttca

SEQ ID NO: 1346968 - DNA, 15 bp, Homo sapiens
taagcctaactcttc

SEQ ID NO: 1346969 - DNA, 15 bp, Homo sapiens
ataagcctaactctt

SEQ ID NO: 1346970 - DNA, 15 bp, Homo sapiens
aataagcctaactct

SEQ ID NO: 1346971 - DNA, 15 bp, Homo sapiens
caataagcctaactc

SEQ ID NO: 1346972 - DNA, 15 bp, Homo sapiens
ccaataagcctaact

SEQ ID NO: 1346973 - DNA, 15 bp, Homo sapiens
cccaataagcctaac

SEQ ID NO: 1346974 - DNA, 15 bp, Homo sapiens
tcccaataagcctaa

SEQ ID NO: 1346975 - DNA, 15 bp, Homo sapiens
atcccaataagccta

SEQ ID NO: 1346976 - DNA, 15 bp, Homo sapiens
aatcccaataagcct

SEQ ID NO: 1346977 - DNA, 15 bp, Homo sapiens
gaatcccaataagcc

SEQ ID NO: 1346978 - DNA, 15 bp, Homo sapiens
ggaatcccaataagc

SEQ ID NO: 1346979 - DNA, 15 bp, Homo sapiens
tggaatcccaataag

SEQ ID NO: 1346980 - DNA, 15 bp, Homo sapiens
ctggaatcccaataa

SEQ ID NO: 1346981 - DNA, 15 bp, Homo sapiens
gctggaatcccaata

SEQ ID NO: 1346982 - DNA, 15 bp, Homo sapiens
ggctggaatcccaat

SEQ ID NO: 1346983 - DNA, 15 bp, Homo sapiens
aggctggaatcccaa

SEQ ID NO: 1346984 - DNA, 15 bp, Homo sapiens
aaggctggaatccca

SEQ ID NO: 1346985 - DNA, 15 bp, Homo sapiens
aaaggctggaatccc

SEQ ID NO: 1346986 - DNA, 15 bp, Homo sapiens
taaaggctggaatcc

SEQ ID NO: 1346987 - DNA, 15 bp, Homo sapiens
ctaaaggctggaatc

SEQ ID NO: 1346988 - DNA, 15 bp, Homo sapiens
actaaaggctggaat

SEQ ID NO: 1346989 - DNA, 15 bp, Homo sapiens
tactaaaggctggaa

SEQ ID NO: 1346990 - DNA, 15 bp, Homo sapiens
ctactaaaggctgga

SEQ ID NO: 1346991 - DNA, 15 bp, Homo sapiens
actactaaaggctgg

SEQ ID NO: 1346992 - DNA, 15 bp, Homo sapiens
gactactaaaggctg

SEQ ID NO: 1346993 - DNA, 15 bp, Homo sapiens
ggactactaaaggct

SEQ ID NO: 1346994 - DNA, 15 bp, Homo sapiens
gggactactaaaggc

SEQ ID NO: 1346995 - DNA, 15 bp, Homo sapiens
tgggactactaaagg

SEQ ID NO: 1346996 - DNA, 15 bp, Homo sapiens
atgggactactaaag

SEQ ID NO: 1346997 - DNA, 15 bp, Homo sapiens
catgggactactaaa

SEQ ID NO: 1346998 - DNA, 15 bp, Homo sapiens
tcatgggactactaa

SEQ ID NO: 1346999 - DNA, 15 bp, Homo sapiens
ttcatgggactacta

SEQ ID NO: 1347000 - DNA, 15 bp, Homo sapiens
cttcatgggactact

SEQ ID NO: 1347001 - DNA, 15 bp, Homo sapiens
ccttcatgggactac

SEQ ID NO: 1347002 - DNA, 15 bp, Homo sapiens
accttcatgggacta

SEQ ID NO: 1347003 - DNA, 15 bp, Homo sapiens
caccttcatgggact

SEQ ID NO: 1347004 - DNA, 15 bp, Homo sapiens
tcaccttcatgggac

SEQ ID NO: 1347005 - DNA, 15 bp, Homo sapiens
ctcaccttcatggga

SEQ ID NO: 1347006 - DNA, 15 bp, Homo sapiens
gctcaccttcatggg

SEQ ID NO: 1347007 - DNA, 15 bp, Homo sapiens
tgctcaccttcatgg

SEQ ID NO: 1347008 - DNA, 15 bp, Homo sapiens
ttgctcaccttcatg

SEQ ID NO: 1347009 - DNA, 15 bp, Homo sapiens
tttgctcaccttcat

SEQ ID NO: 1347010 - DNA, 15 bp, Homo sapiens
gtttgctcaccttca

SEQ ID NO: 1347011 - DNA, 15 bp, Homo sapiens
agtttgctcaccttc

SEQ ID NO: 1347012 - DNA, 15 bp, Homo sapiens
cagtttgctcacctt

SEQ ID NO: 1347013 - DNA, 15 bp, Homo sapiens
tcagtttgctcacct

SEQ ID NO: 1347014 - DNA, 15 bp, Homo sapiens
ttcagtttgctcacc

SEQ ID NO: 1347015 - DNA, 15 bp, Homo sapiens
tttcagtttgctcac

SEQ ID NO: 1347016 - DNA, 15 bp, Homo sapiens
atttcagtttgctca

SEQ ID NO: 1347017 - DNA, 15 bp, Homo sapiens
catttcagtttgctc

SEQ ID NO: 1347018 - DNA, 15 bp, Homo sapiens
acatttcagtttgct

SEQ ID NO: 1347019 - DNA, 15 bp, Homo sapiens
tacatttcagtttgc

SEQ ID NO: 1347020 - DNA, 15 bp, Homo sapiens
gtacatttcagtttg

SEQ ID NO: 1347021 - DNA, 15 bp, Homo sapiens
agtacatttcagttt

SEQ ID NO: 1347022 - DNA, 15 bp, Homo sapiens
aagtacatttcagtt

SEQ ID NO: 1347023 - DNA, 15 bp, Homo sapiens
taagtacatttcagt

SEQ ID NO: 1347024 - DNA, 15 bp, Homo sapiens
gtaagtacatttcag

SEQ ID NO: 1347025 - DNA, 15 bp, Homo sapiens
agtaagtacatttca

SEQ ID NO: 1347026 - DNA, 15 bp, Homo sapiens
tagtaagtacatttc

SEQ ID NO: 1347027 - DNA, 15 bp, Homo sapiens
ctagtaagtacattt

SEQ ID NO: 1347028 - DNA, 15 bp, Homo sapiens
actagtaagtacatt

SEQ ID NO: 1347029 - DNA, 15 bp, Homo sapiens
gactagtaagtacat

SEQ ID NO: 1347030 - DNA, 15 bp, Homo sapiens
agactagtaagtaca

SEQ ID NO: 1347031 - DNA, 15 bp, Homo sapiens
aagactagtaagtac

SEQ ID NO: 1347032 - DNA, 15 bp, Homo sapiens
taagactagtaagta

SEQ ID NO: 1347033 - DNA, 15 bp, Homo sapiens
ctaagactagtaagt

SEQ ID NO: 1347034 - DNA, 15 bp, Homo sapiens
actaagactagtaag

SEQ ID NO: 1347035 - DNA, 15 bp, Homo sapiens
gactaagactagtaa

SEQ ID NO: 1347036 - DNA, 15 bp, Homo sapiens
tgactaagactagta

SEQ ID NO: 1347037 - DNA, 15 bp, Homo sapiens
atgactaagactagt

SEQ ID NO: 1347038 - DNA, 15 bp, Homo sapiens
aatgactaagactag

SEQ ID NO: 1347039 - DNA, 15 bp, Homo sapiens
aaatgactaagacta

SEQ ID NO: 1347040 - DNA, 15 bp, Homo sapiens
caaatgactaagact

SEQ ID NO: 1347041 - DNA, 15 bp, Homo sapiens
ccaaatgactaagac

SEQ ID NO: 1347042 - DNA, 15 bp, Homo sapiens
accaaatgactaaga

SEQ ID NO: 1347043 - DNA, 15 bp, Homo sapiens
aaccaaatgactaag

SEQ ID NO: 1347044 - DNA, 15 bp, Homo sapiens
gaaccaaatgactaa

SEQ ID NO: 1347045 - DNA, 15 bp, Homo sapiens
cgaaccaaatgacta

SEQ ID NO: 1347046 - DNA, 15 bp, Homo sapiens
acgaaccaaatgact

SEQ ID NO: 1347047 - DNA, 15 bp, Homo sapiens
tacgaaccaaatgac

SEQ ID NO: 1347048 - DNA, 15 bp, Homo sapiens
ttacgaaccaaatga

SEQ ID NO: 1347049 - DNA, 15 bp, Homo sapiens
attacgaaccaaatg

SEQ ID NO: 1347050 - DNA, 15 bp, Homo sapiens
tattacgaaccaaat

SEQ ID NO: 1347051 - DNA, 15 bp, Homo sapiens
atattacgaaccaaa

SEQ ID NO: 1347052 - DNA, 15 bp, Homo sapiens
catattacgaaccaa

SEQ ID NO: 1347053 - DNA, 15 bp, Homo sapiens
acatattacgaacca

SEQ ID NO: 1347054 - DNA, 15 bp, Homo sapiens
tacatattacgaacc

SEQ ID NO: 1347055 - DNA, 15 bp, Homo sapiens
ttacatattacgaac

SEQ ID NO: 1347056 - DNA, 15 bp, Homo sapiens
attacatattacgaa

SEQ ID NO: 1347057 - DNA, 15 bp, Homo sapiens
tattacatattacga

SEQ ID NO: 1347058 - DNA, 15 bp, Homo sapiens
ctattacatattacg

SEQ ID NO: 1347059 - DNA, 15 bp, Homo sapiens
tctattacatattac

SEQ ID NO: 1347060 - DNA, 15 bp, Homo sapiens
ttctattacatatta

SEQ ID NO: 1347061 - DNA, 15 bp, Homo sapiens
tttctattacatatt

SEQ ID NO: 1347062 - DNA, 15 bp, Homo sapiens
atttctattacatat

SEQ ID NO: 1347063 - DNA, 15 bp, Homo sapiens
catttctattacata

SEQ ID NO: 1347064 - DNA, 15 bp, Homo sapiens
ccatttctattacat

SEQ ID NO: 1347065 - DNA, 15 bp, Homo sapiens
accatttctattaca

SEQ ID NO: 1347066 - DNA, 15 bp, Homo sapiens
caccatttctattac

SEQ ID NO: 1347067 - DNA, 15 bp, Homo sapiens
gcaccatttctatta

SEQ ID NO: 1347068 - DNA, 15 bp, Homo sapiens
agcaccatttctatt

SEQ ID NO: 1347069 - DNA, 15 bp, Homo sapiens
aagcaccatttctat

SEQ ID NO: 1347070 - DNA, 15 bp, Homo sapiens
taagcaccatttcta

SEQ ID NO: 1347071 - DNA, 15 bp, Homo sapiens
ataagcaccatttct

SEQ ID NO: 1347072 - DNA, 15 bp, Homo sapiens
gataagcaccatttc

SEQ ID NO: 1347073 - DNA, 15 bp, Homo sapiens
ggataagcaccattt

SEQ ID NO: 1347074 - DNA, 15 bp, Homo sapiens
aggataagcaccatt

SEQ ID NO: 1347075 - DNA, 15 bp, Homo sapiens
taggataagcaccat

SEQ ID NO: 1347076 - DNA, 15 bp, Homo sapiens
ttaggataagcacca

SEQ ID NO: 1347077 - DNA, 15 bp, Homo sapiens
tttaggataagcacc

SEQ ID NO: 1347078 - DNA, 15 bp, Homo sapiens
ttttaggataagcac

SEQ ID NO: 1347079 - DNA, 15 bp, Homo sapiens
cttttaggataagca

SEQ ID NO: 1347080 - DNA, 15 bp, Homo sapiens
tcttttaggataagc

SEQ ID NO: 1347081 - DNA, 15 bp, Homo sapiens
ttcttttaggataag

SEQ ID NO: 1347082 - DNA, 15 bp, Homo sapiens
tttcttttaggataa

SEQ ID NO: 1347083 - DNA, 15 bp, Homo sapiens
ttttcttttaggata

SEQ ID NO: 1347084 - DNA, 15 bp, Homo sapiens
tttttcttttaggat

SEQ ID NO: 1347085 - DNA, 15 bp, Homo sapiens
atttttcttttagga

SEQ ID NO: 1347086 - DNA, 15 bp, Homo sapiens
tatttttcttttagg

SEQ ID NO: 1347087 - DNA, 15 bp, Homo sapiens
ctatttttcttttag

SEQ ID NO: 1347088 - DNA, 15 bp, Homo sapiens
tctatttttctttta

SEQ ID NO: 1347089 - DNA, 15 bp, Homo sapiens
ttctatttttctttt

SEQ ID NO: 1347090 - DNA, 15 bp, Homo sapiens
tttctatttttcttt

SEQ ID NO: 1347091 - DNA, 15 bp, Homo sapiens
ttttctatttttctt

SEQ ID NO: 1347092 - DNA, 15 bp, Homo sapiens
gttttctatttttct

SEQ ID NO: 1347093 - DNA, 15 bp, Homo sapiens
agttttctatttttc

SEQ ID NO: 1347094 - DNA, 15 bp, Homo sapiens
aagttttctattttt

SEQ ID NO: 1347095 - DNA, 15 bp, Homo sapiens
caagttttctatttt

SEQ ID NO: 1347096 - DNA, 15 bp, Homo sapiens
tcaagttttctattt

SEQ ID NO: 1347097 - DNA, 15 bp, Homo sapiens
ctcaagttttctatt

SEQ ID NO: 1347098 - DNA, 15 bp, Homo sapiens
cctcaagttttctat

SEQ ID NO: 1347099 - DNA, 15 bp, Homo sapiens
ccctcaagttttcta

SEQ ID NO: 1347100 - DNA, 15 bp, Homo sapiens
accctcaagttttct

SEQ ID NO: 1347101 - DNA, 15 bp, Homo sapiens
caccctcaagttttc

SEQ ID NO: 1347102 - DNA, 15 bp, Homo sapiens
tcaccctcaagtttt

SEQ ID NO: 1347103 - DNA, 15 bp, Homo sapiens
ttcaccctcaagttt

SEQ ID NO: 1347104 - DNA, 15 bp, Homo sapiens
cttcaccctcaagtt

SEQ ID NO: 1347105 - DNA, 15 bp, Homo sapiens
ccttcaccctcaagt

SEQ ID NO: 1347106 - DNA, 15 bp, Homo sapiens
tccttcaccctcaag

SEQ ID NO: 1347107 - DNA, 15 bp, Homo sapiens
atccttcaccctcaa

SEQ ID NO: 1347108 - DNA, 15 bp, Homo sapiens
gatccttcaccctca

SEQ ID NO: 1347109 - DNA, 15 bp, Homo sapiens
tgatccttcaccctc

SEQ ID NO: 1347110 - DNA, 15 bp, Homo sapiens
ctgatccttcaccct

SEQ ID NO: 1347111 - DNA, 15 bp, Homo sapiens
tctgatccttcaccc

SEQ ID NO: 1347112 - DNA, 15 bp, Homo sapiens
ttctgatccttcacc

SEQ ID NO: 1347113 - DNA, 15 bp, Homo sapiens
tttctgatccttcac

SEQ ID NO: 1347114 - DNA, 15 bp, Homo sapiens
atttctgatccttca

SEQ ID NO: 1347115 - DNA, 15 bp, Homo sapiens
aatttctgatccttc

SEQ ID NO: 1347116 - DNA, 15 bp, Homo sapiens
caatttctgatcctt

SEQ ID NO: 1347117 - DNA, 15 bp, Homo sapiens
tcaatttctgatcct

SEQ ID NO: 1347118 - DNA, 15 bp, Homo sapiens
ttcaatttctgatcc

SEQ ID NO: 1347119 - DNA, 15 bp, Homo sapiens
cttcaatttctgatc

SEQ ID NO: 1347120 - DNA, 15 bp, Homo sapiens
tcttcaatttctgat

SEQ ID NO: 1347121 - DNA, 15 bp, Homo sapiens
gtcttcaatttctga

SEQ ID NO: 1347122 - DNA, 15 bp, Homo sapiens
tgtcttcaatttctg

SEQ ID NO: 1347123 - DNA, 15 bp, Homo sapiens
ctgtcttcaatttct

SEQ ID NO: 1347124 - DNA, 15 bp, Homo sapiens
actgtcttcaatttc

SEQ ID NO: 1347125 - DNA, 15 bp, Homo sapiens
tactgtcttcaattt

SEQ ID NO: 1347126 - DNA, 15 bp, Homo sapiens
ttactgtcttcaatt

SEQ ID NO: 1347127 - DNA, 15 bp, Homo sapiens
tttactgtcttcaat

SEQ ID NO: 1347128 - DNA, 15 bp, Homo sapiens
atttactgtcttcaa

SEQ ID NO: 1347129 - DNA, 15 bp, Homo sapiens
tatttactgtcttca

SEQ ID NO: 1347130 - DNA, 15 bp, Homo sapiens
gtatttactgtcttc

SEQ ID NO: 1347131 - DNA, 15 bp, Homo sapiens
agtatttactgtctt

SEQ ID NO: 1347132 - DNA, 15 bp, Homo sapiens
cagtatttactgtct

SEQ ID NO: 1347133 - DNA, 15 bp, Homo sapiens
gcagtatttactgtc

SEQ ID NO: 1347134 - DNA, 15 bp, Homo sapiens
tgcagtatttactgt

SEQ ID NO: 1347135 - DNA, 15 bp, Homo sapiens
atgcagtatttactg

SEQ ID NO: 1347136 - DNA, 15 bp, Homo sapiens
tatgcagtatttact

SEQ ID NO: 1347137 - DNA, 15 bp, Homo sapiens
ctatgcagtatttac

SEQ ID NO: 1347138 - DNA, 15 bp, Homo sapiens
tctatgcagtattta

SEQ ID NO: 1347139 - DNA, 15 bp, Homo sapiens
ctctatgcagtattt

SEQ ID NO: 1347140 - DNA, 15 bp, Homo sapiens
cctctatgcagtatt

SEQ ID NO: 1347141 - DNA, 15 bp, Homo sapiens
acctctatgcagtat

SEQ ID NO: 1347142 - DNA, 15 bp, Homo sapiens
aacctctatgcagta

SEQ ID NO: 1347143 - DNA, 15 bp, Homo sapiens
aaacctctatgcagt

SEQ ID NO: 1347144 - DNA, 15 bp, Homo sapiens
taaacctctatgcag

SEQ ID NO: 1347145 - DNA, 15 bp, Homo sapiens
ttaaacctctatgca

SEQ ID NO: 1347146 - DNA, 15 bp, Homo sapiens
tttaaacctctatgc

SEQ ID NO: 1347147 - DNA, 15 bp, Homo sapiens
atttaaacctctatg

SEQ ID NO: 1347148 - DNA, 15 bp, Homo sapiens
catttaaacctctat

SEQ ID NO: 1347149 - DNA, 15 bp, Homo sapiens
gcatttaaacctcta

SEQ ID NO: 1347150 - DNA, 15 bp, Homo sapiens
agcatttaaacctct

SEQ ID NO: 1347151 - DNA, 15 bp, Homo sapiens
tagcatttaaacctc

SEQ ID NO: 1347152 - DNA, 15 bp, Homo sapiens
ctagcatttaaacct

SEQ ID NO: 1347153 - DNA, 15 bp, Homo sapiens
cctagcatttaaacc

SEQ ID NO: 1347154 - DNA, 15 bp, Homo sapiens
ccctagcatttaaac

SEQ ID NO: 1347155 - DNA, 15 bp, Homo sapiens
accctagcatttaaa

SEQ ID NO: 1347156 - DNA, 15 bp, Homo sapiens
aaccctagcatttaa

SEQ ID NO: 1347157 - DNA, 15 bp, Homo sapiens
aaaccctagcattta

SEQ ID NO: 1347158 - DNA, 15 bp, Homo sapiens
aaaaccctagcattt

SEQ ID NO: 1347159 - DNA, 15 bp, Homo sapiens
aaaaaccctagcatt

SEQ ID NO: 1347160 - DNA, 15 bp, Homo sapiens
taaaaaccctagcat

SEQ ID NO: 1347161 - DNA, 15 bp, Homo sapiens
ctaaaaaccctagca

SEQ ID NO: 1347162 - DNA, 15 bp, Homo sapiens
cctaaaaaccctagc

SEQ ID NO: 1347163 - DNA, 15 bp, Homo sapiens
acctaaaaaccctag

SEQ ID NO: 1347164 - DNA, 15 bp, Homo sapiens
aacctaaaaacccta

SEQ ID NO: 1347165 - DNA, 15 bp, Homo sapiens
aaacctaaaaaccct

SEQ ID NO: 1347166 - DNA, 15 bp, Homo sapiens
aaaacctaaaaaccc

SEQ ID NO: 1347167 - DNA, 15 bp, Homo sapiens
gaaaacctaaaaacc

SEQ ID NO: 1347168 - DNA, 15 bp, Homo sapiens
agaaaacctaaaaac

SEQ ID NO: 1347169 - DNA, 15 bp, Homo sapiens
aagaaaacctaaaaa

SEQ ID NO: 1347170 - DNA, 15 bp, Homo sapiens
aaagaaaacctaaaa

SEQ ID NO: 1347171 - DNA, 15 bp, Homo sapiens
aaaagaaaacctaaa

SEQ ID NO: 1347172 - DNA, 15 bp, Homo sapiens
aaaaagaaaacctaa

SEQ ID NO: 1347173 - DNA, 15 bp, Homo sapiens
aaaaaagaaaaccta

SEQ ID NO: 1347174 - DNA, 15 bp, Homo sapiens
aaaaaaagaaaacct

SEQ ID NO: 1347175 - DNA, 15 bp, Homo sapiens
aaaaaaaagaaaacc

SEQ ID NO: 1347176 - DNA, 15 bp, Homo sapiens
tcaaaaaaaaaagaa

SEQ ID NO: 1347177 - DNA, 15 bp, Homo sapiens
tatctcaaaaaaaaa

SEQ ID NO: 1347178 - DNA, 15 bp, Homo sapiens
ctatctcaaaaaaaa

SEQ ID NO: 1347179 - DNA, 15 bp, Homo sapiens
actatctcaaaaaaa

SEQ ID NO: 1347180 - DNA, 15 bp, Homo sapiens
gactatctcaaaaaa

SEQ ID NO: 1347181 - DNA, 15 bp, Homo sapiens
agactatctcaaaaa

SEQ ID NO: 1347182 - DNA, 15 bp, Homo sapiens
aagactatctcaaaa

SEQ ID NO: 1347183 - DNA, 15 bp, Homo sapiens
caagactatctcaaa

SEQ ID NO: 1347184 - DNA, 15 bp, Homo sapiens
gcaagactatctcaa

SEQ ID NO: 1347185 - DNA, 15 bp, Homo sapiens
agcaagactatctca

SEQ ID NO: 1347186 - DNA, 15 bp, Homo sapiens
gagcaagactatctc

SEQ ID NO: 1347187 - DNA, 15 bp, Homo sapiens
agagcaagactatct

SEQ ID NO: 1347188 - DNA, 15 bp, Homo sapiens
cagagcaagactatc

SEQ ID NO: 1347189 - DNA, 15 bp, Homo sapiens
tcagagcaagactat

SEQ ID NO: 1347190 - DNA, 15 bp, Homo sapiens
gtcagagcaagacta

SEQ ID NO: 1347191 - DNA, 15 bp, Homo sapiens
tgtcagagcaagact

SEQ ID NO: 1347192 - DNA, 15 bp, Homo sapiens
gtgtcagagcaagac

SEQ ID NO: 1347193 - DNA, 15 bp, Homo sapiens
ggtgtcagagcaaga

SEQ ID NO: 1347194 - DNA, 15 bp, Homo sapiens
gggtgtcagagcaag

SEQ ID NO: 1347195 - DNA, 15 bp, Homo sapiens
tgggtgtcagagcaa

SEQ ID NO: 1347196 - DNA, 15 bp, Homo sapiens
ctgggtgtcagagca

SEQ ID NO: 1347197 - DNA, 15 bp, Homo sapiens
gtccagcctgggtgt

SEQ ID NO: 1347198 - DNA, 15 bp, Homo sapiens
agtccagcctgggtg

SEQ ID NO: 1347199 - DNA, 15 bp, Homo sapiens
cagtccagcctgggt

SEQ ID NO: 1347200 - DNA, 15 bp, Homo sapiens
gcagtccagcctggg

SEQ ID NO: 1347201 - DNA, 15 bp, Homo sapiens
tgcagtccagcctgg

SEQ ID NO: 1347202 - DNA, 15 bp, Homo sapiens
ttgcagtccagcctg

SEQ ID NO: 1347203 - DNA, 15 bp, Homo sapiens
gttgcagtccagcct

SEQ ID NO: 1347204 - DNA, 15 bp, Homo sapiens
ggttgcagtccagcc

SEQ ID NO: 1347205 - DNA, 15 bp, Homo sapiens
aggttgcagtccagc

SEQ ID NO: 1347206 - DNA, 15 bp, Homo sapiens
gaggttgcagtccag

SEQ ID NO: 1347207 - DNA, 15 bp, Homo sapiens
agaggttgcagtcca

SEQ ID NO: 1347208 - DNA, 15 bp, Homo sapiens
cagaggttgcagtcc

SEQ ID NO: 1347209 - DNA, 15 bp, Homo sapiens
acagaggttgcagtc

SEQ ID NO: 1347210 - DNA, 15 bp, Homo sapiens
aacagaggttgcagt

SEQ ID NO: 1347211 - DNA, 15 bp, Homo sapiens
gaacagaggttgcag

SEQ ID NO: 1347212 - DNA, 15 bp, Homo sapiens
ggaacagaggttgca

SEQ ID NO: 1347213 - DNA, 15 bp, Homo sapiens
gggaacagaggttgc

SEQ ID NO: 1347214 - DNA, 15 bp, Homo sapiens
agggaacagaggttg

SEQ ID NO: 1347215 - DNA, 15 bp, Homo sapiens
cagggaacagaggtt

SEQ ID NO: 1347216 - DNA, 15 bp, Homo sapiens
ccagggaacagaggt

SEQ ID NO: 1347217 - DNA, 15 bp, Homo sapiens
gccagggaacagagg

SEQ ID NO: 1347218 - DNA, 15 bp, Homo sapiens
ggccagggaacagag

SEQ ID NO: 1347219 - DNA, 15 bp, Homo sapiens
aggccagggaacaga

SEQ ID NO: 1347220 - DNA, 15 bp, Homo sapiens
gaggccagggaacag

SEQ ID NO: 1347221 - DNA, 15 bp, Homo sapiens
tgaggccagggaaca

SEQ ID NO: 1347222 - DNA, 15 bp, Homo sapiens
ttgaggccagggaac

SEQ ID NO: 1347223 - DNA, 15 bp, Homo sapiens
cttgaggccagggaa

SEQ ID NO: 1347224 - DNA, 15 bp, Homo sapiens
gcttgaggccaggga

SEQ ID NO: 1347225 - DNA, 15 bp, Homo sapiens
cgcttgaggccaggg

SEQ ID NO: 1347226 - DNA, 15 bp, Homo sapiens
aaggtgggaggatcg

SEQ ID NO: 1347227 - DNA, 15 bp, Homo sapiens
taaggtgggaggatc

SEQ ID NO: 1347228 - DNA, 15 bp, Homo sapiens
gtcaggaggctaagg

SEQ ID NO: 1347229 - DNA, 15 bp, Homo sapiens
agtcaggaggctaag

SEQ ID NO: 1347230 - DNA, 15 bp, Homo sapiens
tagtcaggaggctaa

SEQ ID NO: 1347231 - DNA, 15 bp, Homo sapiens
ctagtcaggaggcta

SEQ ID NO: 1347232 - DNA, 15 bp, Homo sapiens
gctagtcaggaggct

SEQ ID NO: 1347233 - DNA, 15 bp, Homo sapiens
agctagtcaggaggc

SEQ ID NO: 1347234 - DNA, 15 bp, Homo sapiens
cagctagtcaggagg

SEQ ID NO: 1347235 - DNA, 15 bp, Homo sapiens
acagctagtcaggag

SEQ ID NO: 1347236 - DNA, 15 bp, Homo sapiens
cacagctagtcagga

SEQ ID NO: 1347237 - DNA, 15 bp, Homo sapiens
tcacagctagtcagg

SEQ ID NO: 1347238 - DNA, 15 bp, Homo sapiens
gtcacagctagtcag

SEQ ID NO: 1347239 - DNA, 15 bp, Homo sapiens
ggtcacagctagtca

SEQ ID NO: 1347240 - DNA, 15 bp, Homo sapiens
tggtcacagctagtc

SEQ ID NO: 1347241 - DNA, 15 bp, Homo sapiens
gtggtcacagctagt

SEQ ID NO: 1347242 - DNA, 15 bp, Homo sapiens
tgtggtcacagctag

SEQ ID NO: 1347243 - DNA, 15 bp, Homo sapiens
ctgtggtcacagcta

SEQ ID NO: 1347244 - DNA, 15 bp, Homo sapiens
tctgtggtcacagct

SEQ ID NO: 1347245 - DNA, 15 bp, Homo sapiens
atctgtggtcacagc

SEQ ID NO: 1347246 - DNA, 15 bp, Homo sapiens
catctgtggtcacag

SEQ ID NO: 1347247 - DNA, 15 bp, Homo sapiens
acatctgtggtcaca

SEQ ID NO: 1347248 - DNA, 15 bp, Homo sapiens
cacatctgtggtcac

SEQ ID NO: 1347249 - DNA, 15 bp, Homo sapiens
gcacatctgtggtca

SEQ ID NO: 1347250 - DNA, 15 bp, Homo sapiens
tgcacatctgtggtc

SEQ ID NO: 1347251 - DNA, 15 bp, Homo sapiens
gtgcacatctgtggt

SEQ ID NO: 1347252 - DNA, 15 bp, Homo sapiens
ggtgcacatctgtgg

SEQ ID NO: 1347253 - DNA, 15 bp, Homo sapiens
tggtgcacatctgtg

SEQ ID NO: 1347254 - DNA, 15 bp, Homo sapiens
gtggtgcacatctgt

SEQ ID NO: 1347255 - DNA, 15 bp, Homo sapiens
ggtggtgcacatctg

SEQ ID NO: 1347256 - DNA, 15 bp, Homo sapiens
tggtggtgcacatct

SEQ ID NO: 1347257 - DNA, 15 bp, Homo sapiens
atggtggtgcacatc

SEQ ID NO: 1347258 - DNA, 15 bp, Homo sapiens
catggtggtgcacat

SEQ ID NO: 1347259 - DNA, 15 bp, Homo sapiens
cgggcatggtggtgc

SEQ ID NO: 1347260 - DNA, 15 bp, Homo sapiens
atagccgggcatggt

SEQ ID NO: 1347261 - DNA, 15 bp, Homo sapiens
aatagccgggcatgg

SEQ ID NO: 1347262 - DNA, 15 bp, Homo sapiens
aaatagccgggcatg

SEQ ID NO: 1347263 - DNA, 15 bp, Homo sapiens
aaaatagccgggcat

SEQ ID NO: 1347264 - DNA, 15 bp, Homo sapiens
aaaaatagccgggca

SEQ ID NO: 1347265 - DNA, 15 bp, Homo sapiens
aaaaaatagccgggc

SEQ ID NO: 1347266 - DNA, 15 bp, Homo sapiens
aaaaaaatagccggg

SEQ ID NO: 1347267 - DNA, 15 bp, Homo sapiens
caaaaaaaaatagcc

SEQ ID NO: 1347268 - DNA, 15 bp, Homo sapiens
acaaaaaaaaatagc

SEQ ID NO: 1347269 - DNA, 15 bp, Homo sapiens
tacaaaaaaaaatag

SEQ ID NO: 1347270 - DNA, 15 bp, Homo sapiens
atacaaaaaaaaata

SEQ ID NO: 1347271 - DNA, 15 bp, Homo sapiens
aatacaaaaaaaaat

SEQ ID NO: 1347272 - DNA, 15 bp, Homo sapiens
cgagaccccatctct

SEQ ID NO: 1347273 - DNA, 15 bp, Homo sapiens
gcgagaccccatctc

SEQ ID NO: 1347274 - DNA, 15 bp, Homo sapiens
ggcgagaccccatct

SEQ ID NO: 1347275 - DNA, 15 bp, Homo sapiens
tggcgagaccccatc

SEQ ID NO: 1347276 - DNA, 15 bp, Homo sapiens
atggcgagaccccat

SEQ ID NO: 1347277 - DNA, 15 bp, Homo sapiens
catggcgagacccca

SEQ ID NO: 1347278 - DNA, 15 bp, Homo sapiens
acatggcgagacccc

SEQ ID NO: 1347279 - DNA, 15 bp, Homo sapiens
gcaacatggcgagac

SEQ ID NO: 1347280 - DNA, 15 bp, Homo sapiens
ggcaacatggcgaga

SEQ ID NO: 1347281 - DNA, 15 bp, Homo sapiens
gggcaacatggcgag

SEQ ID NO: 1347282 - DNA, 15 bp, Homo sapiens
actgggcaacatggc

SEQ ID NO: 1347283 - DNA, 15 bp, Homo sapiens
ggactgggcaacatg

SEQ ID NO: 1347284 - DNA, 15 bp, Homo sapiens
tggactgggcaacat

SEQ ID NO: 1347285 - DNA, 15 bp, Homo sapiens
ctggactgggcaaca

SEQ ID NO: 1347286 - DNA, 15 bp, Homo sapiens
actggactgggcaac

SEQ ID NO: 1347287 - DNA, 15 bp, Homo sapiens
cactggactgggcaa

SEQ ID NO: 1347288 - DNA, 15 bp, Homo sapiens
gcactggactgggca

SEQ ID NO: 1347289 - DNA, 15 bp, Homo sapiens
agcactggactgggc

SEQ ID NO: 1347290 - DNA, 15 bp, Homo sapiens
cagcactggactggg

SEQ ID NO: 1347291 - DNA, 15 bp, Homo sapiens
ccagcactggactgg

SEQ ID NO: 1347292 - DNA, 15 bp, Homo sapiens
tccagcactggactg

SEQ ID NO: 1347293 - DNA, 15 bp, Homo sapiens
atccagcactggact

SEQ ID NO: 1347294 - DNA, 15 bp, Homo sapiens
aatccagcactggac

SEQ ID NO: 1347295 - DNA, 15 bp, Homo sapiens
aaatccagcactgga

SEQ ID NO: 1347296 - DNA, 15 bp, Homo sapiens
aaaatccagcactgg

SEQ ID NO: 1347297 - DNA, 15 bp, Homo sapiens
gaaaatccagcactg

SEQ ID NO: 1347298 - DNA, 15 bp, Homo sapiens
tgaaaatccagcact

SEQ ID NO: 1347299 - DNA, 15 bp, Homo sapiens
atgaaaatccagcac

SEQ ID NO: 1347300 - DNA, 15 bp, Homo sapiens
tatgaaaatccagca

SEQ ID NO: 1347301 - DNA, 15 bp, Homo sapiens
atatgaaaatccagc

SEQ ID NO: 1347302 - DNA, 15 bp, Homo sapiens
gatatgaaaatccag

SEQ ID NO: 1347303 - DNA, 15 bp, Homo sapiens
tgatatgaaaatcca

SEQ ID NO: 1347304 - DNA, 15 bp, Homo sapiens
ttgatatgaaaatcc

SEQ ID NO: 1347305 - DNA, 15 bp, Homo sapiens
tttgatatgaaaatc

SEQ ID NO: 1347306 - DNA, 15 bp, Homo sapiens
ttttgatatgaaaat

SEQ ID NO: 1347307 - DNA, 15 bp, Homo sapiens
gttttgatatgaaaa

SEQ ID NO: 1347308 - DNA, 15 bp, Homo sapiens
tgttttgatatgaaa

SEQ ID NO: 1347309 - DNA, 15 bp, Homo sapiens
ctgttttgatatgaa

SEQ ID NO: 1347310 - DNA, 15 bp, Homo sapiens
cctgttttgatatga

SEQ ID NO: 1347311 - DNA, 15 bp, Homo sapiens
ccctgttttgatatg

SEQ ID NO: 1347312 - DNA, 15 bp, Homo sapiens
gccctgttttgatat

SEQ ID NO: 1347313 - DNA, 15 bp, Homo sapiens
agccctgttttgata

SEQ ID NO: 1347314 - DNA, 15 bp, Homo sapiens
gagccctgttttgat

SEQ ID NO: 1347315 - DNA, 15 bp, Homo sapiens
agagccctgttttga

SEQ ID NO: 1347316 - DNA, 15 bp, Homo sapiens
cagagccctgttttg

SEQ ID NO: 1347317 - DNA, 15 bp, Homo sapiens
gcagagccctgtttt

SEQ ID NO: 1347318 - DNA, 15 bp, Homo sapiens
agcagagccctgttt

SEQ ID NO: 1347319 - DNA, 15 bp, Homo sapiens
tagcagagccctgtt

SEQ ID NO: 1347320 - DNA, 15 bp, Homo sapiens
gtagcagagccctgt

SEQ ID NO: 1347321 - DNA, 15 bp, Homo sapiens
agtagcagagccctg

SEQ ID NO: 1347322 - DNA, 15 bp, Homo sapiens
aagtagcagagccct

SEQ ID NO: 1347323 - DNA, 15 bp, Homo sapiens
taagtagcagagccc

SEQ ID NO: 1347324 - DNA, 15 bp, Homo sapiens
gtaagtagcagagcc

SEQ ID NO: 1347325 - DNA, 15 bp, Homo sapiens
agtaagtagcagagc

SEQ ID NO: 1347326 - DNA, 15 bp, Homo sapiens
aagtaagtagcagag

SEQ ID NO: 1347327 - DNA, 15 bp, Homo sapiens
caagtaagtagcaga

SEQ ID NO: 1347328 - DNA, 15 bp, Homo sapiens
gcaagtaagtagcag

SEQ ID NO: 1347329 - DNA, 15 bp, Homo sapiens
agcaagtaagtagca

SEQ ID NO: 1347330 - DNA, 15 bp, Homo sapiens
gagcaagtaagtagc

SEQ ID NO: 1347331 - DNA, 15 bp, Homo sapiens
agagcaagtaagtag

SEQ ID NO: 1347332 - DNA, 15 bp, Homo sapiens
aagagcaagtaagta

SEQ ID NO: 1347333 - DNA, 15 bp, Homo sapiens
caagagcaagtaagt

SEQ ID NO: 1347334 - DNA, 15 bp, Homo sapiens
acaagagcaagtaag

SEQ ID NO: 1347335 - DNA, 15 bp, Homo sapiens
cacaagagcaagtaa

SEQ ID NO: 1347336 - DNA, 15 bp, Homo sapiens
tcacaagagcaagta

SEQ ID NO: 1347337 - DNA, 15 bp, Homo sapiens
gtcacaagagcaagt

SEQ ID NO: 1347338 - DNA, 15 bp, Homo sapiens
ggtcacaagagcaag

SEQ ID NO: 1347339 - DNA, 15 bp, Homo sapiens
tggtcacaagagcaa

SEQ ID NO: 1347340 - DNA, 15 bp, Homo sapiens
ttggtcacaagagca

SEQ ID NO: 1347341 - DNA, 15 bp, Homo sapiens
tttggtcacaagagc

SEQ ID NO: 1347342 - DNA, 15 bp, Homo sapiens
ttttggtcacaagag

SEQ ID NO: 1347343 - DNA, 15 bp, Homo sapiens
attttggtcacaaga

SEQ ID NO: 1347344 - DNA, 15 bp, Homo sapiens
cattttggtcacaag

SEQ ID NO: 1347345 - DNA, 15 bp, Homo sapiens
ccattttggtcacaa

SEQ ID NO: 1347346 - DNA, 15 bp, Homo sapiens
gccattttggtcaca

SEQ ID NO: 1347347 - DNA, 15 bp, Homo sapiens
tgccattttggtcac

SEQ ID NO: 1347348 - DNA, 15 bp, Homo sapiens
ttgccattttggtca

SEQ ID NO: 1347349 - DNA, 15 bp, Homo sapiens
cttgccattttggtc

SEQ ID NO: 1347350 - DNA, 15 bp, Homo sapiens
acttgccattttggt

SEQ ID NO: 1347351 - DNA, 15 bp, Homo sapiens
aacttgccattttgg

SEQ ID NO: 1347352 - DNA, 15 bp, Homo sapiens
taacttgccattttg

SEQ ID NO: 1347353 - DNA, 15 bp, Homo sapiens
ctaacttgccatttt

SEQ ID NO: 1347354 - DNA, 15 bp, Homo sapiens
cctaacttgccattt

SEQ ID NO: 1347355 - DNA, 15 bp, Homo sapiens
acctaacttgccatt

SEQ ID NO: 1347356 - DNA, 15 bp, Homo sapiens
aacctaacttgccat

SEQ ID NO: 1347357 - DNA, 15 bp, Homo sapiens
aaacctaacttgcca

SEQ ID NO: 1347358 - DNA, 15 bp, Homo sapiens
caaacctaacttgcc

SEQ ID NO: 1347359 - DNA, 15 bp, Homo sapiens
acaaacctaacttgc

SEQ ID NO: 1347360 - DNA, 15 bp, Homo sapiens
aacaaacctaacttg

SEQ ID NO: 1347361 - DNA, 15 bp, Homo sapiens
aaacaaacctaactt

SEQ ID NO: 1347362 - DNA, 15 bp, Homo sapiens
aaaacaaacctaact

SEQ ID NO: 1347363 - DNA, 15 bp, Homo sapiens
caaaacaaacctaac

SEQ ID NO: 1347364 - DNA, 15 bp, Homo sapiens
acaaaacaaacctaa

SEQ ID NO: 1347365 - DNA, 15 bp, Homo sapiens
tacaaaacaaaccta

SEQ ID NO: 1347366 - DNA, 15 bp, Homo sapiens
atacaaaacaaacct

SEQ ID NO: 1347367 - DNA, 15 bp, Homo sapiens
aatacaaaacaaacc

SEQ ID NO: 1347368 - DNA, 15 bp, Homo sapiens
aaatacaaaacaaac

SEQ ID NO: 1347369 - DNA, 15 bp, Homo sapiens
caaatacaaaacaaa

SEQ ID NO: 1347370 - DNA, 15 bp, Homo sapiens
acaaatacaaaacaa

SEQ ID NO: 1347371 - DNA, 15 bp, Homo sapiens
aacaaatacaaaaca

SEQ ID NO: 1347372 - DNA, 15 bp, Homo sapiens
aaacaaatacaaaac

SEQ ID NO: 1347373 - DNA, 15 bp, Homo sapiens
aaaacaaatacaaaa

SEQ ID NO: 1347374 - DNA, 15 bp, Homo sapiens
gaaaacaaatacaaa

SEQ ID NO: 1347375 - DNA, 15 bp, Homo sapiens
tgaaaacaaatacaa

SEQ ID NO: 1347376 - DNA, 15 bp, Homo sapiens
atgaaaacaaataca

SEQ ID NO: 1347377 - DNA, 15 bp, Homo sapiens
gatgaaaacaaatac

SEQ ID NO: 1347378 - DNA, 15 bp, Homo sapiens
agatgaaaacaaata

SEQ ID NO: 1347379 - DNA, 15 bp, Homo sapiens
cagatgaaaacaaat

SEQ ID NO: 1347380 - DNA, 15 bp, Homo sapiens
gcagatgaaaacaaa

SEQ ID NO: 1347381 - DNA, 15 bp, Homo sapiens
tgcagatgaaaacaa

SEQ ID NO: 1347382 - DNA, 15 bp, Homo sapiens
atgcagatgaaaaca

SEQ ID NO: 1347383 - DNA, 15 bp, Homo sapiens
gatgcagatgaaaac

SEQ ID NO: 1347384 - DNA, 15 bp, Homo sapiens
cgatgcagatgaaaa

SEQ ID NO: 1347385 - DNA, 15 bp, Homo sapiens
ccgatgcagatgaaa

SEQ ID NO: 1347386 - DNA, 15 bp, Homo sapiens
cccgatgcagatgaa

SEQ ID NO: 1347387 - DNA, 15 bp, Homo sapiens
ccccgatgcagatga

SEQ ID NO: 1347388 - DNA, 15 bp, Homo sapiens
accccgatgcagatg

SEQ ID NO: 1347389 - DNA, 15 bp, Homo sapiens
taccccgatgcagat

SEQ ID NO: 1347390 - DNA, 15 bp, Homo sapiens
ataccccgatgcaga

SEQ ID NO: 1347391 - DNA, 15 bp, Homo sapiens
tataccccgatgcag

SEQ ID NO: 1347392 - DNA, 15 bp, Homo sapiens
atataccccgatgca

SEQ ID NO: 1347393 - DNA, 15 bp, Homo sapiens
catataccccgatgc

SEQ ID NO: 1347394 - DNA, 15 bp, Homo sapiens
acatataccccgatg

SEQ ID NO: 1347395 - DNA, 15 bp, Homo sapiens
aacatataccccgat

SEQ ID NO: 1347396 - DNA, 15 bp, Homo sapiens
gaacatataccccga

SEQ ID NO: 1347397 - DNA, 15 bp, Homo sapiens
tgaacatataccccg

SEQ ID NO: 1347398 - DNA, 15 bp, Homo sapiens
gtgaacatatacccc

SEQ ID NO: 1347399 - DNA, 15 bp, Homo sapiens
tgtgaacatataccc

SEQ ID NO: 1347400 - DNA, 15 bp, Homo sapiens
ctgtgaacatatacc

SEQ ID NO: 1347401 - DNA, 15 bp, Homo sapiens
gctgtgaacatatac

SEQ ID NO: 1347402 - DNA, 15 bp, Homo sapiens
agctgtgaacatata

SEQ ID NO: 1347403 - DNA, 15 bp, Homo sapiens
cagctgtgaacatat

SEQ ID NO: 1347404 - DNA, 15 bp, Homo sapiens
ccagctgtgaacata

SEQ ID NO: 1347405 - DNA, 15 bp, Homo sapiens
tccagctgtgaacat

SEQ ID NO: 1347406 - DNA, 15 bp, Homo sapiens
atccagctgtgaaca

SEQ ID NO: 1347407 - DNA, 15 bp, Homo sapiens
gatccagctgtgaac

SEQ ID NO: 1347408 - DNA, 15 bp, Homo sapiens
tgatccagctgtgaa

SEQ ID NO: 1347409 - DNA, 15 bp, Homo sapiens
ctgatccagctgtga

SEQ ID NO: 1347410 - DNA, 15 bp, Homo sapiens
gctgatccagctgtg

SEQ ID NO: 1347411 - DNA, 15 bp, Homo sapiens
tgctgatccagctgt

SEQ ID NO: 1347412 - DNA, 15 bp, Homo sapiens
ttgctgatccagctg

SEQ ID NO: 1347413 - DNA, 15 bp, Homo sapiens
tttgctgatccagct

SEQ ID NO: 1347414 - DNA, 15 bp, Homo sapiens
gtttgctgatccagc

SEQ ID NO: 1347415 - DNA, 15 bp, Homo sapiens
agtttgctgatccag

SEQ ID NO: 1347416 - DNA, 15 bp, Homo sapiens
aagtttgctgatcca

SEQ ID NO: 1347417 - DNA, 15 bp, Homo sapiens
aaagtttgctgatcc

SEQ ID NO: 1347418 - DNA, 15 bp, Homo sapiens
gaaagtttgctgatc

SEQ ID NO: 1347419 - DNA, 15 bp, Homo sapiens
agaaagtttgctgat

SEQ ID NO: 1347420 - DNA, 15 bp, Homo sapiens
cagaaagtttgctga

SEQ ID NO: 1347421 - DNA, 15 bp, Homo sapiens
acagaaagtttgctg

SEQ ID NO: 1347422 - DNA, 15 bp, Homo sapiens
tacagaaagtttgct

SEQ ID NO: 1347423 - DNA, 15 bp, Homo sapiens
ctacagaaagtttgc

SEQ ID NO: 1347424 - DNA, 15 bp, Homo sapiens
actacagaaagtttg

SEQ ID NO: 1347425 - DNA, 15 bp, Homo sapiens
tactacagaaagttt

SEQ ID NO: 1347426 - DNA, 15 bp, Homo sapiens
ttactacagaaagtt

SEQ ID NO: 1347427 - DNA, 15 bp, Homo sapiens
cttactacagaaagt

SEQ ID NO: 1347428 - DNA, 15 bp, Homo sapiens
ccttactacagaaag

SEQ ID NO: 1347429 - DNA, 15 bp, Homo sapiens
accttactacagaaa

SEQ ID NO: 1347430 - DNA, 15 bp, Homo sapiens
taccttactacagaa

SEQ ID NO: 1347431 - DNA, 15 bp, Homo sapiens
ctaccttactacaga

SEQ ID NO: 1347432 - DNA, 15 bp, Homo sapiens
cctaccttactacag

SEQ ID NO: 1347433 - DNA, 15 bp, Homo sapiens
ccctaccttactaca

SEQ ID NO: 1347434 - DNA, 15 bp, Homo sapiens
gccctaccttactac

SEQ ID NO: 1347435 - DNA, 15 bp, Homo sapiens
ggccctaccttacta

SEQ ID NO: 1347436 - DNA, 15 bp, Homo sapiens
aggccctaccttact

SEQ ID NO: 1347437 - DNA, 15 bp, Homo sapiens
caggccctaccttac

SEQ ID NO: 1347438 - DNA, 15 bp, Homo sapiens
ccaggccctacctta

SEQ ID NO: 1347439 - DNA, 15 bp, Homo sapiens
accaggccctacctt

SEQ ID NO: 1347440 - DNA, 15 bp, Homo sapiens
taccaggccctacct

SEQ ID NO: 1347441 - DNA, 15 bp, Homo sapiens
ctaccaggccctacc

SEQ ID NO: 1347442 - DNA, 15 bp, Homo sapiens
actaccaggccctac

SEQ ID NO: 1347443 - DNA, 15 bp, Homo sapiens
tactaccaggcccta

SEQ ID NO: 1347444 - DNA, 15 bp, Homo sapiens
ttactaccaggccct

SEQ ID NO: 1347445 - DNA, 15 bp, Homo sapiens
tttactaccaggccc

SEQ ID NO: 1347446 - DNA, 15 bp, Homo sapiens
atttactaccaggcc

SEQ ID NO: 1347447 - DNA, 15 bp, Homo sapiens
tatttactaccaggc

SEQ ID NO: 1347448 - DNA, 15 bp, Homo sapiens
atatttactaccagg

SEQ ID NO: 1347449 - DNA, 15 bp, Homo sapiens
catatttactaccag

SEQ ID NO: 1347450 - DNA, 15 bp, Homo sapiens
acatatttactacca

SEQ ID NO: 1347451 - DNA, 15 bp, Homo sapiens
tacatatttactacc

SEQ ID NO: 1347452 - DNA, 15 bp, Homo sapiens
ctacatatttactac

SEQ ID NO: 1347453 - DNA, 15 bp, Homo sapiens
actacatatttacta

SEQ ID NO: 1347454 - DNA, 15 bp, Homo sapiens
tactacatatttact

SEQ ID NO: 1347455 - DNA, 15 bp, Homo sapiens
atactacatatttac

SEQ ID NO: 1347456 - DNA, 15 bp, Homo sapiens
catactacatattta

SEQ ID NO: 1347457 - DNA, 15 bp, Homo sapiens
gcatactacatattt

SEQ ID NO: 1347458 - DNA, 15 bp, Homo sapiens
agcatactacatatt

SEQ ID NO: 1347459 - DNA, 15 bp, Homo sapiens
aagcatactacatat

SEQ ID NO: 1347460 - DNA, 15 bp, Homo sapiens
aaagcatactacata

SEQ ID NO: 1347461 - DNA, 15 bp, Homo sapiens
caaagcatactacat

SEQ ID NO: 1347462 - DNA, 15 bp, Homo sapiens
gcaaagcatactaca

SEQ ID NO: 1347463 - DNA, 15 bp, Homo sapiens
tgcaaagcatactac

SEQ ID NO: 1347464 - DNA, 15 bp, Homo sapiens
ctgcaaagcatacta

SEQ ID NO: 1347465 - DNA, 15 bp, Homo sapiens
tctgcaaagcatact

SEQ ID NO: 1347466 - DNA, 15 bp, Homo sapiens
gtctgcaaagcatac

SEQ ID NO: 1347467 - DNA, 15 bp, Homo sapiens
agtctgcaaagcata

SEQ ID NO: 1347468 - DNA, 15 bp, Homo sapiens
cagtctgcaaagcat

SEQ ID NO: 1347469 - DNA, 15 bp, Homo sapiens
gcagtctgcaaagca

SEQ ID NO: 1347470 - DNA, 15 bp, Homo sapiens
tgcagtctgcaaagc

SEQ ID NO: 1347471 - DNA, 15 bp, Homo sapiens
atgcagtctgcaaag

SEQ ID NO: 1347472 - DNA, 15 bp, Homo sapiens
tatgcagtctgcaaa

SEQ ID NO: 1347473 - DNA, 15 bp, Homo sapiens
ctatgcagtctgcaa

SEQ ID NO: 1347474 - DNA, 15 bp, Homo sapiens
cctatgcagtctgca

SEQ ID NO: 1347475 - DNA, 15 bp, Homo sapiens
ccctatgcagtctgc

SEQ ID NO: 1347476 - DNA, 15 bp, Homo sapiens
accctatgcagtctg

SEQ ID NO: 1347477 - DNA, 15 bp, Homo sapiens
gaccctatgcagtct

SEQ ID NO: 1347478 - DNA, 15 bp, Homo sapiens
agaccctatgcagtc

SEQ ID NO: 1347479 - DNA, 15 bp, Homo sapiens
gagaccctatgcagt

SEQ ID NO: 1347480 - DNA, 15 bp, Homo sapiens
agagaccctatgcag

SEQ ID NO: 1347481 - DNA, 15 bp, Homo sapiens
cagagaccctatgca

SEQ ID NO: 1347482 - DNA, 15 bp, Homo sapiens
acagagaccctatgc

SEQ ID NO: 1347483 - DNA, 15 bp, Homo sapiens
gacagagaccctatg

SEQ ID NO: 1347484 - DNA, 15 bp, Homo sapiens
tgacagagaccctat

SEQ ID NO: 1347485 - DNA, 15 bp, Homo sapiens
atgacagagacccta

SEQ ID NO: 1347486 - DNA, 15 bp, Homo sapiens
tatgacagagaccct

SEQ ID NO: 1347487 - DNA, 15 bp, Homo sapiens
atatgacagagaccc

SEQ ID NO: 1347488 - DNA, 15 bp, Homo sapiens
catatgacagagacc

SEQ ID NO: 1347489 - DNA, 15 bp, Homo sapiens
acatatgacagagac

SEQ ID NO: 1347490 - DNA, 15 bp, Homo sapiens
aacatatgacagaga

SEQ ID NO: 1347491 - DNA, 15 bp, Homo sapiens
gaacatatgacagag

SEQ ID NO: 1347492 - DNA, 15 bp, Homo sapiens
agaacatatgacaga

SEQ ID NO: 1347493 - DNA, 15 bp, Homo sapiens
aagaacatatgacag

SEQ ID NO: 1347494 - DNA, 15 bp, Homo sapiens
aaagaacatatgaca

SEQ ID NO: 1347495 - DNA, 15 bp, Homo sapiens
caaagaacatatgac

SEQ ID NO: 1347496 - DNA, 15 bp, Homo sapiens
acaaagaacatatga

SEQ ID NO: 1347497 - DNA, 15 bp, Homo sapiens
aacaaagaacatatg

SEQ ID NO: 1347498 - DNA, 15 bp, Homo sapiens
aaacaaagaacatat

SEQ ID NO: 1347499 - DNA, 15 bp, Homo sapiens
aaaacaaagaacata

SEQ ID NO: 1347500 - DNA, 15 bp, Homo sapiens
gaaaacaaagaacat

SEQ ID NO: 1347501 - DNA, 15 bp, Homo sapiens
agaaaacaaagaaca

SEQ ID NO: 1347502 - DNA, 15 bp, Homo sapiens
aagaaaacaaagaac

SEQ ID NO: 1347503 - DNA, 15 bp, Homo sapiens
aaagaaaacaaagaa

SEQ ID NO: 1347504 - DNA, 15 bp, Homo sapiens
taaagaaaacaaaga

SEQ ID NO: 1347505 - DNA, 15 bp, Homo sapiens
gtaaagaaaacaaag

SEQ ID NO: 1347506 - DNA, 15 bp, Homo sapiens
tgtaaagaaaacaaa

SEQ ID NO: 1347507 - DNA, 15 bp, Homo sapiens
ctgtaaagaaaacaa

SEQ ID NO: 1347508 - DNA, 15 bp, Homo sapiens
gctgtaaagaaaaca

SEQ ID NO: 1347509 - DNA, 15 bp, Homo sapiens
ggctgtaaagaaaac

SEQ ID NO: 1347510 - DNA, 15 bp, Homo sapiens
aggctgtaaagaaaa

SEQ ID NO: 1347511 - DNA, 15 bp, Homo sapiens
aaggctgtaaagaaa

SEQ ID NO: 1347512 - DNA, 15 bp, Homo sapiens
caaggctgtaaagaa

SEQ ID NO: 1347513 - DNA, 15 bp, Homo sapiens
tcaaggctgtaaaga

SEQ ID NO: 1347514 - DNA, 15 bp, Homo sapiens
ttcaaggctgtaaag

SEQ ID NO: 1347515 - DNA, 15 bp, Homo sapiens
gttcaaggctgtaaa

SEQ ID NO: 1347516 - DNA, 15 bp, Homo sapiens
tgttcaaggctgtaa

SEQ ID NO: 1347517 - DNA, 15 bp, Homo sapiens
ttgttcaaggctgta

SEQ ID NO: 1347518 - DNA, 15 bp, Homo sapiens
tttgttcaaggctgt

SEQ ID NO: 1347519 - DNA, 15 bp, Homo sapiens
atttgttcaaggctg

SEQ ID NO: 1347520 - DNA, 15 bp, Homo sapiens
aatttgttcaaggct

SEQ ID NO: 1347521 - DNA, 15 bp, Homo sapiens
taatttgttcaaggc

SEQ ID NO: 1347522 - DNA, 15 bp, Homo sapiens
ttaatttgttcaagg

SEQ ID NO: 1347523 - DNA, 15 bp, Homo sapiens
tttaatttgttcaag

SEQ ID NO: 1347524 - DNA, 15 bp, Homo sapiens
ttttaatttgttcaa

SEQ ID NO: 1347525 - DNA, 15 bp, Homo sapiens
tttttaatttgttca

SEQ ID NO: 1347526 - DNA, 15 bp, Homo sapiens
ttttttaatttgttc

SEQ ID NO: 1347527 - DNA, 15 bp, Homo sapiens
gttttttaatttgtt

SEQ ID NO: 1347528 - DNA, 15 bp, Homo sapiens
ggttttttaatttgt

SEQ ID NO: 1347529 - DNA, 15 bp, Homo sapiens
gggttttttaatttg

SEQ ID NO: 1347530 - DNA, 15 bp, Homo sapiens
tgggttttttaattt

SEQ ID NO: 1347531 - DNA, 15 bp, Homo sapiens
ctgggttttttaatt

SEQ ID NO: 1347532 - DNA, 15 bp, Homo sapiens
actgggttttttaat

SEQ ID NO: 1347533 - DNA, 15 bp, Homo sapiens
gactgggttttttaa

SEQ ID NO: 1347534 - DNA, 15 bp, Homo sapiens
agactgggtttttta

SEQ ID NO: 1347535 - DNA, 15 bp, Homo sapiens
aagactgggtttttt

SEQ ID NO: 1347536 - DNA, 15 bp, Homo sapiens
gaagactgggttttt

SEQ ID NO: 1347537 - DNA, 15 bp, Homo sapiens
tgaagactgggtttt

SEQ ID NO: 1347538 - DNA, 15 bp, Homo sapiens
ctgaagactgggttt

SEQ ID NO: 1347539 - DNA, 15 bp, Homo sapiens
gctgaagactgggtt

SEQ ID NO: 1347540 - DNA, 15 bp, Homo sapiens
ggctgaagactgggt

SEQ ID NO: 1347541 - DNA, 15 bp, Homo sapiens
aggctgaagactggg

SEQ ID NO: 1347542 - DNA, 15 bp, Homo sapiens
aaggctgaagactgg

SEQ ID NO: 1347543 - DNA, 15 bp, Homo sapiens
caaggctgaagactg

SEQ ID NO: 1347544 - DNA, 15 bp, Homo sapiens
acaaggctgaagact

SEQ ID NO: 1347545 - DNA, 15 bp, Homo sapiens
gacaaggctgaagac

SEQ ID NO: 1347546 - DNA, 15 bp, Homo sapiens
agacaaggctgaaga

SEQ ID NO: 1347547 - DNA, 15 bp, Homo sapiens
cagacaaggctgaag

SEQ ID NO: 1347548 - DNA, 15 bp, Homo sapiens
acagacaaggctgaa

SEQ ID NO: 1347549 - DNA, 15 bp, Homo sapiens
tacagacaaggctga

SEQ ID NO: 1347550 - DNA, 15 bp, Homo sapiens
ctacagacaaggctg

SEQ ID NO: 1347551 - DNA, 15 bp, Homo sapiens
gctacagacaaggct

SEQ ID NO: 1347552 - DNA, 15 bp, Homo sapiens
tgctacagacaaggc

SEQ ID NO: 1347553 - DNA, 15 bp, Homo sapiens
atgctacagacaagg

SEQ ID NO: 1347554 - DNA, 15 bp, Homo sapiens
tatgctacagacaag

SEQ ID NO: 1347555 - DNA, 15 bp, Homo sapiens
ttatgctacagacaa

SEQ ID NO: 1347556 - DNA, 15 bp, Homo sapiens
attatgctacagaca

SEQ ID NO: 1347557 - DNA, 15 bp, Homo sapiens
tattatgctacagac

SEQ ID NO: 1347558 - DNA, 15 bp, Homo sapiens
ttattatgctacaga

SEQ ID NO: 1347559 - DNA, 15 bp, Homo sapiens
tttattatgctacag

SEQ ID NO: 1347560 - DNA, 15 bp, Homo sapiens
ctttattatgctaca

SEQ ID NO: 1347561 - DNA, 15 bp, Homo sapiens
tctttattatgctac

SEQ ID NO: 1347562 - DNA, 15 bp, Homo sapiens
ctctttattatgcta

SEQ ID NO: 1347563 - DNA, 15 bp, Homo sapiens
cctctttattatgct

SEQ ID NO: 1347564 - DNA, 15 bp, Homo sapiens
tcctctttattatgc

SEQ ID NO: 1347565 - DNA, 15 bp, Homo sapiens
ttcctctttattatg

SEQ ID NO: 1347566 - DNA, 15 bp, Homo sapiens
tttcctctttattat

SEQ ID NO: 1347567 - DNA, 15 bp, Homo sapiens
atttcctctttatta

SEQ ID NO: 1347568 - DNA, 15 bp, Homo sapiens
aatttcctctttatt

SEQ ID NO: 1347569 - DNA, 15 bp, Homo sapiens
taatttcctctttat

SEQ ID NO: 1347570 - DNA, 15 bp, Homo sapiens
ttaatttcctcttta

SEQ ID NO: 1347571 - DNA, 15 bp, Homo sapiens
tttaatttcctcttt

SEQ ID NO: 1347572 - DNA, 15 bp, Homo sapiens
ttttaatttcctctt

SEQ ID NO: 1347573 - DNA, 15 bp, Homo sapiens
cttttaatttcctct

SEQ ID NO: 1347574 - DNA, 15 bp, Homo sapiens
acttttaatttcctc

SEQ ID NO: 1347575 - DNA, 15 bp, Homo sapiens
cacttttaatttcct

SEQ ID NO: 1347576 - DNA, 15 bp, Homo sapiens
gcacttttaatttcc

SEQ ID NO: 1347577 - DNA, 15 bp, Homo sapiens
agcacttttaatttc

SEQ ID NO: 1347578 - DNA, 15 bp, Homo sapiens
aagcacttttaattt

SEQ ID NO: 1347579 - DNA, 15 bp, Homo sapiens
taagcacttttaatt

SEQ ID NO: 1347580 - DNA, 15 bp, Homo sapiens
ataagcacttttaat

SEQ ID NO: 1347581 - DNA, 15 bp, Homo sapiens
cataagcacttttaa

SEQ ID NO: 1347582 - DNA, 15 bp, Homo sapiens
acataagcactttta

SEQ ID NO: 1347583 - DNA, 15 bp, Homo sapiens
aacataagcactttt

SEQ ID NO: 1347584 - DNA, 15 bp, Homo sapiens
taacataagcacttt

SEQ ID NO: 1347585 - DNA, 15 bp, Homo sapiens
ataacataagcactt

SEQ ID NO: 1347586 - DNA, 15 bp, Homo sapiens
tataacataagcact

SEQ ID NO: 1347587 - DNA, 15 bp, Homo sapiens
gtataacataagcac

SEQ ID NO: 1347588 - DNA, 15 bp, Homo sapiens
cgtataacataagca

SEQ ID NO: 1347589 - DNA, 15 bp, Homo sapiens
acgtataacataagc

SEQ ID NO: 1347590 - DNA, 15 bp, Homo sapiens
cacgtataacataag

SEQ ID NO: 1347591 - DNA, 15 bp, Homo sapiens
ccacgtataacataa

SEQ ID NO: 1347592 - DNA, 15 bp, Homo sapiens
accacgtataacata

SEQ ID NO: 1347593 - DNA, 15 bp, Homo sapiens
taccacgtataacat

SEQ ID NO: 1347594 - DNA, 15 bp, Homo sapiens
gtaccacgtataaca

SEQ ID NO: 1347595 - DNA, 15 bp, Homo sapiens
tgtaccacgtataac

SEQ ID NO: 1347596 - DNA, 15 bp, Homo sapiens
atgtaccacgtataa

SEQ ID NO: 1347597 - DNA, 15 bp, Homo sapiens
tatgtaccacgtata

SEQ ID NO: 1347598 - DNA, 15 bp, Homo sapiens
gtatgtaccacgtat

SEQ ID NO: 1347599 - DNA, 15 bp, Homo sapiens
agtatgtaccacgta

SEQ ID NO: 1347600 - DNA, 15 bp, Homo sapiens
tagtatgtaccacgt

SEQ ID NO: 1347601 - DNA, 15 bp, Homo sapiens
ttagtatgtaccacg

SEQ ID NO: 1347602 - DNA, 15 bp, Homo sapiens
tttagtatgtaccac

SEQ ID NO: 1347603 - DNA, 15 bp, Homo sapiens
ttttagtatgtacca

SEQ ID NO: 1347604 - DNA, 15 bp, Homo sapiens
attttagtatgtacc

SEQ ID NO: 1347605 - DNA, 15 bp, Homo sapiens
aattttagtatgtac

SEQ ID NO: 1347606 - DNA, 15 bp, Homo sapiens
aaattttagtatgta

SEQ ID NO: 1347607 - DNA, 15 bp, Homo sapiens
taaattttagtatgt

SEQ ID NO: 1347608 - DNA, 15 bp, Homo sapiens
ataaattttagtatg

SEQ ID NO: 1347609 - DNA, 15 bp, Homo sapiens
aataaattttagtat

SEQ ID NO: 1347610 - DNA, 15 bp, Homo sapiens
taataaattttagta

SEQ ID NO: 1347611 - DNA, 15 bp, Homo sapiens
ttaataaattttagt

SEQ ID NO: 1347612 - DNA, 15 bp, Homo sapiens
cttaataaattttag

SEQ ID NO: 1347613 - DNA, 15 bp, Homo sapiens
acttaataaatttta

SEQ ID NO: 1347614 - DNA, 15 bp, Homo sapiens
cacttaataaatttt

SEQ ID NO: 1347615 - DNA, 15 bp, Homo sapiens
ccacttaataaattt

SEQ ID NO: 1347616 - DNA, 15 bp, Homo sapiens
gccacttaataaatt

SEQ ID NO: 1347617 - DNA, 15 bp, Homo sapiens
cgccacttaataaat

SEQ ID NO: 1347618 - DNA, 15 bp, Homo sapiens
tcgccacttaataaa

SEQ ID NO: 1347619 - DNA, 15 bp, Homo sapiens
gtcgccacttaataa

SEQ ID NO: 1347620 - DNA, 15 bp, Homo sapiens
agtcgccacttaata

SEQ ID NO: 1347621 - DNA, 15 bp, Homo sapiens
cagtcgccacttaat

SEQ ID NO: 1347622 - DNA, 15 bp, Homo sapiens
ccagtcgccacttaa

SEQ ID NO: 1347623 - DNA, 15 bp, Homo sapiens
gccagtcgccactta

SEQ ID NO: 1347624 - DNA, 15 bp, Homo sapiens
tgccagtcgccactt

SEQ ID NO: 1347625 - DNA, 15 bp, Homo sapiens
ctgccagtcgccact

SEQ ID NO: 1347626 - DNA, 15 bp, Homo sapiens
actgccagtcgccac

SEQ ID NO: 1347627 - DNA, 15 bp, Homo sapiens
aactgccagtcgcca

SEQ ID NO: 1347628 - DNA, 15 bp, Homo sapiens
aaactgccagtcgcc

SEQ ID NO: 1347629 - DNA, 15 bp, Homo sapiens
taaactgccagtcgc

SEQ ID NO: 1347630 - DNA, 15 bp, Homo sapiens
ttaaactgccagtcg

SEQ ID NO: 1347631 - DNA, 15 bp, Homo sapiens
gttaaactgccagtc

SEQ ID NO: 1347632 - DNA, 15 bp, Homo sapiens
agttaaactgccagt

SEQ ID NO: 1347633 - DNA, 15 bp, Homo sapiens
tagttaaactgccag

SEQ ID NO: 1347634 - DNA, 15 bp, Homo sapiens
ttagttaaactgcca

SEQ ID NO: 1347635 - DNA, 15 bp, Homo sapiens
attagttaaactgcc

SEQ ID NO: 1347636 - DNA, 15 bp, Homo sapiens
aattagttaaactgc

SEQ ID NO: 1347637 - DNA, 15 bp, Homo sapiens
caattagttaaactg

SEQ ID NO: 1347638 - DNA, 15 bp, Homo sapiens
tcaattagttaaact

SEQ ID NO: 1347639 - DNA, 15 bp, Homo sapiens
gtcaattagttaaac

SEQ ID NO: 1347640 - DNA, 15 bp, Homo sapiens
tgtcaattagttaaa

SEQ ID NO: 1347641 - DNA, 15 bp, Homo sapiens
atgtcaattagttaa

SEQ ID NO: 1347642 - DNA, 15 bp, Homo sapiens
aatgtcaattagtta

SEQ ID NO: 1347643 - DNA, 15 bp, Homo sapiens
gaatgtcaattagtt

SEQ ID NO: 1347644 - DNA, 15 bp, Homo sapiens
agaatgtcaattagt

SEQ ID NO: 1347645 - DNA, 15 bp, Homo sapiens
gagaatgtcaattag

SEQ ID NO: 1347646 - DNA, 15 bp, Homo sapiens
agagaatgtcaatta

SEQ ID NO: 1347647 - DNA, 15 bp, Homo sapiens
aagagaatgtcaatt

SEQ ID NO: 1347648 - DNA, 15 bp, Homo sapiens
caagagaatgtcaat

SEQ ID NO: 1347649 - DNA, 15 bp, Homo sapiens
acaagagaatgtcaa

SEQ ID NO: 1347650 - DNA, 15 bp, Homo sapiens
cacaagagaatgtca

SEQ ID NO: 1347651 - DNA, 15 bp, Homo sapiens
acacaagagaatgtc

SEQ ID NO: 1347652 - DNA, 15 bp, Homo sapiens
aacacaagagaatgt

SEQ ID NO: 1347653 - DNA, 15 bp, Homo sapiens
taacacaagagaatg

SEQ ID NO: 1347654 - DNA, 15 bp, Homo sapiens
ctaacacaagagaat

SEQ ID NO: 1347655 - DNA, 15 bp, Homo sapiens
cctaacacaagagaa

SEQ ID NO: 1347656 - DNA, 15 bp, Homo sapiens
acctaacacaagaga

SEQ ID NO: 1347657 - DNA, 15 bp, Homo sapiens
aacctaacacaagag

SEQ ID NO: 1347658 - DNA, 15 bp, Homo sapiens
taacctaacacaaga

SEQ ID NO: 1347659 - DNA, 15 bp, Homo sapiens
ttaacctaacacaag

SEQ ID NO: 1347660 - DNA, 15 bp, Homo sapiens
attaacctaacacaa

SEQ ID NO: 1347661 - DNA, 15 bp, Homo sapiens
tattaacctaacaca

SEQ ID NO: 1347662 - DNA, 15 bp, Homo sapiens
gtattaacctaacac

SEQ ID NO: 1347663 - DNA, 15 bp, Homo sapiens
tgtattaacctaaca

SEQ ID NO: 1347664 - DNA, 15 bp, Homo sapiens
ctgtattaacctaac

SEQ ID NO: 1347665 - DNA, 15 bp, Homo sapiens
cctgtattaacctaa

SEQ ID NO: 1347666 - DNA, 15 bp, Homo sapiens
ccctgtattaaccta

SEQ ID NO: 1347667 - DNA, 15 bp, Homo sapiens
cccctgtattaacct

SEQ ID NO: 1347668 - DNA, 15 bp, Homo sapiens
acccctgtattaacc

SEQ ID NO: 1347669 - DNA, 15 bp, Homo sapiens
aacccctgtattaac

SEQ ID NO: 1347670 - DNA, 15 bp, Homo sapiens
caacccctgtattaa

SEQ ID NO: 1347671 - DNA, 15 bp, Homo sapiens
ccaacccctgtatta

SEQ ID NO: 1347672 - DNA, 15 bp, Homo sapiens
gccaacccctgtatt

SEQ ID NO: 1347673 - DNA, 15 bp, Homo sapiens
cgccaacccctgtat

SEQ ID NO: 1347674 - DNA, 15 bp, Homo sapiens
acgccaacccctgta

SEQ ID NO: 1347675 - DNA, 15 bp, Homo sapiens
tacgccaacccctgt

SEQ ID NO: 1347676 - DNA, 15 bp, Homo sapiens
gtacgccaacccctg

SEQ ID NO: 1347677 - DNA, 15 bp, Homo sapiens
agtacgccaacccct

SEQ ID NO: 1347678 - DNA, 15 bp, Homo sapiens
tagtacgccaacccc

SEQ ID NO: 1347679 - DNA, 15 bp, Homo sapiens
atagtacgccaaccc

SEQ ID NO: 1347680 - DNA, 15 bp, Homo sapiens
catagtacgccaacc

SEQ ID NO: 1347681 - DNA, 15 bp, Homo sapiens
ccatagtacgccaac

SEQ ID NO: 1347682 - DNA, 15 bp, Homo sapiens
gccatagtacgccaa

SEQ ID NO: 1347683 - DNA, 15 bp, Homo sapiens
ggccatagtacgcca

SEQ ID NO: 1347684 - DNA, 15 bp, Homo sapiens
aggccatagtacgcc

SEQ ID NO: 1347685 - DNA, 15 bp, Homo sapiens
gaggccatagtacgc

SEQ ID NO: 1347686 - DNA, 15 bp, Homo sapiens
tgaggccatagtacg

SEQ ID NO: 1347687 - DNA, 15 bp, Homo sapiens
ctgaggccatagtac

SEQ ID NO: 1347688 - DNA, 15 bp, Homo sapiens
actgaggccatagta

SEQ ID NO: 1347689 - DNA, 15 bp, Homo sapiens
gactgaggccatagt

SEQ ID NO: 1347690 - DNA, 15 bp, Homo sapiens
ggactgaggccatag

SEQ ID NO: 1347691 - DNA, 15 bp, Homo sapiens
tggactgaggccata

SEQ ID NO: 1347692 - DNA, 15 bp, Homo sapiens
ttggactgaggccat

SEQ ID NO: 1347693 - DNA, 15 bp, Homo sapiens
tttggactgaggcca

SEQ ID NO: 1347694 - DNA, 15 bp, Homo sapiens
atttggactgaggcc

SEQ ID NO: 1347695 - DNA, 15 bp, Homo sapiens
catttggactgaggc

SEQ ID NO: 1347696 - DNA, 15 bp, Homo sapiens
acatttggactgagg

SEQ ID NO: 1347697 - DNA, 15 bp, Homo sapiens
cacatttggactgag

SEQ ID NO: 1347698 - DNA, 15 bp, Homo sapiens
ccacatttggactga

SEQ ID NO: 1347699 - DNA, 15 bp, Homo sapiens
gccacatttggactg

SEQ ID NO: 1347700 - DNA, 15 bp, Homo sapiens
ggccacatttggact

SEQ ID NO: 1347701 - DNA, 15 bp, Homo sapiens
gggccacatttggac

SEQ ID NO: 1347702 - DNA, 15 bp, Homo sapiens
tgggccacatttgga

SEQ ID NO: 1347703 - DNA, 15 bp, Homo sapiens
gtgggccacatttgg

SEQ ID NO: 1347704 - DNA, 15 bp, Homo sapiens
agtgggccacatttg

SEQ ID NO: 1347705 - DNA, 15 bp, Homo sapiens
gagtgggccacattt

SEQ ID NO: 1347706 - DNA, 15 bp, Homo sapiens
ggagtgggccacatt

SEQ ID NO: 1347707 - DNA, 15 bp, Homo sapiens
tggagtgggccacat

SEQ ID NO: 1347708 - DNA, 15 bp, Homo sapiens
atggagtgggccaca

SEQ ID NO: 1347709 - DNA, 15 bp, Homo sapiens
catggagtgggccac

SEQ ID NO: 1347710 - DNA, 15 bp, Homo sapiens
acatggagtgggcca

SEQ ID NO: 1347711 - DNA, 15 bp, Homo sapiens
aacatggagtgggcc

SEQ ID NO: 1347712 - DNA, 15 bp, Homo sapiens
aaacatggagtgggc

SEQ ID NO: 1347713 - DNA, 15 bp, Homo sapiens
aaaacatggagtggg

SEQ ID NO: 1347714 - DNA, 15 bp, Homo sapiens
aaaaacatggagtgg

SEQ ID NO: 1347715 - DNA, 15 bp, Homo sapiens
caaaaacatggagtg

SEQ ID NO: 1347716 - DNA, 15 bp, Homo sapiens
acaaaaacatggagt

SEQ ID NO: 1347717 - DNA, 15 bp, Homo sapiens
tacaaaaacatggag

SEQ ID NO: 1347718 - DNA, 15 bp, Homo sapiens
atacaaaaacatgga

SEQ ID NO: 1347719 - DNA, 15 bp, Homo sapiens
tatacaaaaacatgg

SEQ ID NO: 1347720 - DNA, 15 bp, Homo sapiens
ctatacaaaaacatg

SEQ ID NO: 1347721 - DNA, 15 bp, Homo sapiens
cctatacaaaaacat

SEQ ID NO: 1347722 - DNA, 15 bp, Homo sapiens
gcctatacaaaaaca

SEQ ID NO: 1347723 - DNA, 15 bp, Homo sapiens
agcctatacaaaaac

SEQ ID NO: 1347724 - DNA, 15 bp, Homo sapiens
cagcctatacaaaaa

SEQ ID NO: 1347725 - DNA, 15 bp, Homo sapiens
acagcctatacaaaa

SEQ ID NO: 1347726 - DNA, 15 bp, Homo sapiens
cacagcctatacaaa

SEQ ID NO: 1347727 - DNA, 15 bp, Homo sapiens
tcacagcctatacaa

SEQ ID NO: 1347728 - DNA, 15 bp, Homo sapiens
ctcacagcctataca

SEQ ID NO: 1347729 - DNA, 15 bp, Homo sapiens
gctcacagcctatac

SEQ ID NO: 1347730 - DNA, 15 bp, Homo sapiens
agctcacagcctata

SEQ ID NO: 1347731 - DNA, 15 bp, Homo sapiens
tagctcacagcctat

SEQ ID NO: 1347732 - DNA, 15 bp, Homo sapiens
ttagctcacagccta

SEQ ID NO: 1347733 - DNA, 15 bp, Homo sapiens
cttagctcacagcct

SEQ ID NO: 1347734 - DNA, 15 bp, Homo sapiens
gcttagctcacagcc

SEQ ID NO: 1347735 - DNA, 15 bp, Homo sapiens
tgcttagctcacagc

SEQ ID NO: 1347736 - DNA, 15 bp, Homo sapiens
atgcttagctcacag

SEQ ID NO: 1347737 - DNA, 15 bp, Homo sapiens
aatgcttagctcaca

SEQ ID NO: 1347738 - DNA, 15 bp, Homo sapiens
taatgcttagctcac

SEQ ID NO: 1347739 - DNA, 15 bp, Homo sapiens
ttaatgcttagctca

SEQ ID NO: 1347740 - DNA, 15 bp, Homo sapiens
cttaatgcttagctc

SEQ ID NO: 1347741 - DNA, 15 bp, Homo sapiens
gcttaatgcttagct

SEQ ID NO: 1347742 - DNA, 15 bp, Homo sapiens
tgcttaatgcttagc

SEQ ID NO: 1347743 - DNA, 15 bp, Homo sapiens
atgcttaatgcttag

SEQ ID NO: 1347744 - DNA, 15 bp, Homo sapiens
aatgcttaatgctta

SEQ ID NO: 1347745 - DNA, 15 bp, Homo sapiens
taatgcttaatgctt

SEQ ID NO: 1347746 - DNA, 15 bp, Homo sapiens
ttaatgcttaatgct

SEQ ID NO: 1347747 - DNA, 15 bp, Homo sapiens
attaatgcttaatgc

SEQ ID NO: 1347748 - DNA, 15 bp, Homo sapiens
aattaatgcttaatg

SEQ ID NO: 1347749 - DNA, 15 bp, Homo sapiens
aaattaatgcttaat

SEQ ID NO: 1347750 - DNA, 15 bp, Homo sapiens
taaattaatgcttaa

SEQ ID NO: 1347751 - DNA, 15 bp, Homo sapiens
ataaattaatgctta

SEQ ID NO: 1347752 - DNA, 15 bp, Homo sapiens
aataaattaatgctt

SEQ ID NO: 1347753 - DNA, 15 bp, Homo sapiens
taataaattaatgct

SEQ ID NO: 1347754 - DNA, 15 bp, Homo sapiens
gtaataaattaatgc

SEQ ID NO: 1347755 - DNA, 15 bp, Homo sapiens
agtaataaattaatg

SEQ ID NO: 1347756 - DNA, 15 bp, Homo sapiens
aagtaataaattaat

SEQ ID NO: 1347757 - DNA, 15 bp, Homo sapiens
taagtaataaattaa

SEQ ID NO: 1347758 - DNA, 15 bp, Homo sapiens
ttaagtaataaatta

SEQ ID NO: 1347759 - DNA, 15 bp, Homo sapiens
tttaagtaataaatt

SEQ ID NO: 1347760 - DNA, 15 bp, Homo sapiens
atttaagtaataaat

SEQ ID NO: 1347761 - DNA, 15 bp, Homo sapiens
gatttaagtaataaa

SEQ ID NO: 1347762 - DNA, 15 bp, Homo sapiens
tgatttaagtaataa

SEQ ID NO: 1347763 - DNA, 15 bp, Homo sapiens
ttgatttaagtaata

SEQ ID NO: 1347764 - DNA, 15 bp, Homo sapiens
gttgatttaagtaat

SEQ ID NO: 1347765 - DNA, 15 bp, Homo sapiens
tgttgatttaagtaa

SEQ ID NO: 1347766 - DNA, 15 bp, Homo sapiens
ttgttgatttaagta

SEQ ID NO: 1347767 - DNA, 15 bp, Homo sapiens
tttgttgatttaagt

SEQ ID NO: 1347768 - DNA, 15 bp, Homo sapiens
atttgttgatttaag

SEQ ID NO: 1347769 - DNA, 15 bp, Homo sapiens
tatttgttgatttaa

SEQ ID NO: 1347770 - DNA, 15 bp, Homo sapiens
ttatttgttgattta

SEQ ID NO: 1347771 - DNA, 15 bp, Homo sapiens
tttatttgttgattt

SEQ ID NO: 1347772 - DNA, 15 bp, Homo sapiens
ctttatttgttgatt

SEQ ID NO: 1347773 - DNA, 15 bp, Homo sapiens
actttatttgttgat

SEQ ID NO: 1347774 - DNA, 15 bp, Homo sapiens
aactttatttgttga

SEQ ID NO: 1347775 - DNA, 15 bp, Homo sapiens
aaactttatttgttg

SEQ ID NO: 1347776 - DNA, 15 bp, Homo sapiens
taaactttatttgtt

SEQ ID NO: 1347777 - DNA, 15 bp, Homo sapiens
ataaactttatttgt

SEQ ID NO: 1347778 - DNA, 15 bp, Homo sapiens
cataaactttatttg

SEQ ID NO: 1347779 - DNA, 15 bp, Homo sapiens
acataaactttattt

SEQ ID NO: 1347780 - DNA, 15 bp, Homo sapiens
cacataaactttatt

SEQ ID NO: 1347781 - DNA, 15 bp, Homo sapiens
ccacataaactttat

SEQ ID NO: 1347782 - DNA, 15 bp, Homo sapiens
accacataaacttta

SEQ ID NO: 1347783 - DNA, 15 bp, Homo sapiens
caccacataaacttt

SEQ ID NO: 1347784 - DNA, 15 bp, Homo sapiens
acaccacataaactt

SEQ ID NO: 1347785 - DNA, 15 bp, Homo sapiens
tacaccacataaact

SEQ ID NO: 1347786 - DNA, 15 bp, Homo sapiens
gtacaccacataaac

SEQ ID NO: 1347787 - DNA, 15 bp, Homo sapiens
tgtacaccacataaa

SEQ ID NO: 1347788 - DNA, 15 bp, Homo sapiens
ttgtacaccacataa

SEQ ID NO: 1347789 - DNA, 15 bp, Homo sapiens
gttgtacaccacata

SEQ ID NO: 1347790 - DNA, 15 bp, Homo sapiens
tgttgtacaccacat

SEQ ID NO: 1347791 - DNA, 15 bp, Homo sapiens
atgttgtacaccaca

SEQ ID NO: 1347792 - DNA, 15 bp, Homo sapiens
catgttgtacaccac

SEQ ID NO: 1347793 - DNA, 15 bp, Homo sapiens
tcatgttgtacacca

SEQ ID NO: 1347794 - DNA, 15 bp, Homo sapiens
atcatgttgtacacc

SEQ ID NO: 1347795 - DNA, 15 bp, Homo sapiens
catcatgttgtacac

SEQ ID NO: 1347796 - DNA, 15 bp, Homo sapiens
acatcatgttgtaca

SEQ ID NO: 1347797 - DNA, 15 bp, Homo sapiens
aacatcatgttgtac

SEQ ID NO: 1347798 - DNA, 15 bp, Homo sapiens
aaacatcatgttgta

SEQ ID NO: 1347799 - DNA, 15 bp, Homo sapiens
aaaacatcatgttgt

SEQ ID NO: 1347800 - DNA, 15 bp, Homo sapiens
caaaacatcatgttg

SEQ ID NO: 1347801 - DNA, 15 bp, Homo sapiens
tcaaaacatcatgtt

SEQ ID NO: 1347802 - DNA, 15 bp, Homo sapiens
atcaaaacatcatgt

SEQ ID NO: 1347803 - DNA, 15 bp, Homo sapiens
catcaaaacatcatg

SEQ ID NO: 1347804 - DNA, 15 bp, Homo sapiens
acatcaaaacatcat

SEQ ID NO: 1347805 - DNA, 15 bp, Homo sapiens
cacatcaaaacatca

SEQ ID NO: 1347806 - DNA, 15 bp, Homo sapiens
acacatcaaaacatc

SEQ ID NO: 1347807 - DNA, 15 bp, Homo sapiens
cacacatcaaaacat

SEQ ID NO: 1347808 - DNA, 15 bp, Homo sapiens
acacacatcaaaaca

SEQ ID NO: 1347809 - DNA, 15 bp, Homo sapiens
tacacacatcaaaac

SEQ ID NO: 1347810 - DNA, 15 bp, Homo sapiens
gtacacacatcaaaa

SEQ ID NO: 1347811 - DNA, 15 bp, Homo sapiens
tgtacacacatcaaa

SEQ ID NO: 1347812 - DNA, 15 bp, Homo sapiens
atgtacacacatcaa

SEQ ID NO: 1347813 - DNA, 15 bp, Homo sapiens
aatgtacacacatca

SEQ ID NO: 1347814 - DNA, 15 bp, Homo sapiens
taatgtacacacatc

SEQ ID NO: 1347815 - DNA, 15 bp, Homo sapiens
ataatgtacacacat

SEQ ID NO: 1347816 - DNA, 15 bp, Homo sapiens
cataatgtacacaca

SEQ ID NO: 1347817 - DNA, 15 bp, Homo sapiens
ccataatgtacacac

SEQ ID NO: 1347818 - DNA, 15 bp, Homo sapiens
tccataatgtacaca

SEQ ID NO: 1347819 - DNA, 15 bp, Homo sapiens
ttccataatgtacac

SEQ ID NO: 1347820 - DNA, 15 bp, Homo sapiens
attccataatgtaca

SEQ ID NO: 1347821 - DNA, 15 bp, Homo sapiens
cattccataatgtac

SEQ ID NO: 1347822 - DNA, 15 bp, Homo sapiens
ccattccataatgta

SEQ ID NO: 1347823 - DNA, 15 bp, Homo sapiens
gccattccataatgt

SEQ ID NO: 1347824 - DNA, 15 bp, Homo sapiens
agccattccataatg

SEQ ID NO: 1347825 - DNA, 15 bp, Homo sapiens
tagccattccataat

SEQ ID NO: 1347826 - DNA, 15 bp, Homo sapiens
ttagccattccataa

SEQ ID NO: 1347827 - DNA, 15 bp, Homo sapiens
gttagccattccata

SEQ ID NO: 1347828 - DNA, 15 bp, Homo sapiens
agttagccattccat

SEQ ID NO: 1347829 - DNA, 15 bp, Homo sapiens
gagttagccattcca

SEQ ID NO: 1347830 - DNA, 15 bp, Homo sapiens
tgagttagccattcc

SEQ ID NO: 1347831 - DNA, 15 bp, Homo sapiens
ttgagttagccattc

SEQ ID NO: 1347832 - DNA, 15 bp, Homo sapiens
cttgagttagccatt

SEQ ID NO: 1347833 - DNA, 15 bp, Homo sapiens
gcttgagttagccat

SEQ ID NO: 1347834 - DNA, 15 bp, Homo sapiens
agcttgagttagcca

SEQ ID NO: 1347835 - DNA, 15 bp, Homo sapiens
tagcttgagttagcc

SEQ ID NO: 1347836 - DNA, 15 bp, Homo sapiens
ttagcttgagttagc

SEQ ID NO: 1347837 - DNA, 15 bp, Homo sapiens
attagcttgagttag

SEQ ID NO: 1347838 - DNA, 15 bp, Homo sapiens
tattagcttgagtta

SEQ ID NO: 1347839 - DNA, 15 bp, Homo sapiens
atattagcttgagtt

SEQ ID NO: 1347840 - DNA, 15 bp, Homo sapiens
aatattagcttgagt

SEQ ID NO: 1347841 - DNA, 15 bp, Homo sapiens
gaatattagcttgag

SEQ ID NO: 1347842 - DNA, 15 bp, Homo sapiens
tgaatattagcttga

SEQ ID NO: 1347843 - DNA, 15 bp, Homo sapiens
atgaatattagcttg

SEQ ID NO: 1347844 - DNA, 15 bp, Homo sapiens
aatgaatattagctt

SEQ ID NO: 1347845 - DNA, 15 bp, Homo sapiens
taatgaatattagct

SEQ ID NO: 1347846 - DNA, 15 bp, Homo sapiens
gtaatgaatattagc

SEQ ID NO: 1347847 - DNA, 15 bp, Homo sapiens
agtaatgaatattag

SEQ ID NO: 1347848 - DNA, 15 bp, Homo sapiens
aagtaatgaatatta

SEQ ID NO: 1347849 - DNA, 15 bp, Homo sapiens
gaagtaatgaatatt

SEQ ID NO: 1347850 - DNA, 15 bp, Homo sapiens
tgaagtaatgaatat

SEQ ID NO: 1347851 - DNA, 15 bp, Homo sapiens
gtgaagtaatgaata

SEQ ID NO: 1347852 - DNA, 15 bp, Homo sapiens
tgtgaagtaatgaat

SEQ ID NO: 1347853 - DNA, 15 bp, Homo sapiens
atgtgaagtaatgaa

SEQ ID NO: 1347854 - DNA, 15 bp, Homo sapiens
tatgtgaagtaatga

SEQ ID NO: 1347855 - DNA, 15 bp, Homo sapiens
gtatgtgaagtaatg

SEQ ID NO: 1347856 - DNA, 15 bp, Homo sapiens
agtatgtgaagtaat

SEQ ID NO: 1347857 - DNA, 15 bp, Homo sapiens
aagtatgtgaagtaa

SEQ ID NO: 1347858 - DNA, 15 bp, Homo sapiens
aaagtatgtgaagta

SEQ ID NO: 1347859 - DNA, 15 bp, Homo sapiens
aaaagtatgtgaagt

SEQ ID NO: 1347860 - DNA, 15 bp, Homo sapiens
aaaaagtatgtgaag

SEQ ID NO: 1347861 - DNA, 15 bp, Homo sapiens
aaaaaagtatgtgaa

SEQ ID NO: 1347862 - DNA, 15 bp, Homo sapiens
aaaaaaagtatgtga

SEQ ID NO: 1347863 - DNA, 15 bp, Homo sapiens
aaaaaaaagtatgtg

SEQ ID NO: 1347864 - DNA, 15 bp, Homo sapiens
caaaaaaaagtatgt

SEQ ID NO: 1347865 - DNA, 15 bp, Homo sapiens
ccaaaaaaaagtatg

SEQ ID NO: 1347866 - DNA, 15 bp, Homo sapiens
accaaaaaaaagtat

SEQ ID NO: 1347867 - DNA, 15 bp, Homo sapiens
caccaaaaaaaagta

SEQ ID NO: 1347868 - DNA, 15 bp, Homo sapiens
ccaccaaaaaaaagt

SEQ ID NO: 1347869 - DNA, 15 bp, Homo sapiens
accaccaaaaaaaag

SEQ ID NO: 1347870 - DNA, 15 bp, Homo sapiens
caccaccaaaaaaaa

SEQ ID NO: 1347871 - DNA, 15 bp, Homo sapiens
tcaccaccaaaaaaa

SEQ ID NO: 1347872 - DNA, 15 bp, Homo sapiens
ctcaccaccaaaaaa

SEQ ID NO: 1347873 - DNA, 15 bp, Homo sapiens
tctcaccaccaaaaa

SEQ ID NO: 1347874 - DNA, 15 bp, Homo sapiens
ttctcaccaccaaaa

SEQ ID NO: 1347875 - DNA, 15 bp, Homo sapiens
gttctcaccaccaaa

SEQ ID NO: 1347876 - DNA, 15 bp, Homo sapiens
tgttctcaccaccaa

SEQ ID NO: 1347877 - DNA, 15 bp, Homo sapiens
atgttctcaccacca

SEQ ID NO: 1347878 - DNA, 15 bp, Homo sapiens
aatgttctcaccacc

SEQ ID NO: 1347879 - DNA, 15 bp, Homo sapiens
aaatgttctcaccac

SEQ ID NO: 1347880 - DNA, 15 bp, Homo sapiens
taaatgttctcacca

SEQ ID NO: 1347881 - DNA, 15 bp, Homo sapiens
ttaaatgttctcacc

SEQ ID NO: 1347882 - DNA, 15 bp, Homo sapiens
tttaaatgttctcac

SEQ ID NO: 1347883 - DNA, 15 bp, Homo sapiens
ttttaaatgttctca

SEQ ID NO: 1347884 - DNA, 15 bp, Homo sapiens
attttaaatgttctc

SEQ ID NO: 1347885 - DNA, 15 bp, Homo sapiens
cattttaaatgttct

SEQ ID NO: 1347886 - DNA, 15 bp, Homo sapiens
acattttaaatgttc

SEQ ID NO: 1347887 - DNA, 15 bp, Homo sapiens
tacattttaaatgtt

SEQ ID NO: 1347888 - DNA, 15 bp, Homo sapiens
gtacattttaaatgt

SEQ ID NO: 1347889 - DNA, 15 bp, Homo sapiens
agtacattttaaatg

SEQ ID NO: 1347890 - DNA, 15 bp, Homo sapiens
gagtacattttaaat

SEQ ID NO: 1347891 - DNA, 15 bp, Homo sapiens
agagtacattttaaa

SEQ ID NO: 1347892 - DNA, 15 bp, Homo sapiens
aagagtacattttaa

SEQ ID NO: 1347893 - DNA, 15 bp, Homo sapiens
taagagtacatttta

SEQ ID NO: 1347894 - DNA, 15 bp, Homo sapiens
ttaagagtacatttt

SEQ ID NO: 1347895 - DNA, 15 bp, Homo sapiens
attaagagtacattt

SEQ ID NO: 1347896 - DNA, 15 bp, Homo sapiens
tattaagagtacatt

SEQ ID NO: 1347897 - DNA, 15 bp, Homo sapiens
ttattaagagtacat

SEQ ID NO: 1347898 - DNA, 15 bp, Homo sapiens
attattaagagtaca

SEQ ID NO: 1347899 - DNA, 15 bp, Homo sapiens
aattattaagagtac

SEQ ID NO: 1347900 - DNA, 15 bp, Homo sapiens
aaattattaagagta

SEQ ID NO: 1347901 - DNA, 15 bp, Homo sapiens
aaaattattaagagt

SEQ ID NO: 1347902 - DNA, 15 bp, Homo sapiens
gaaaattattaagag

SEQ ID NO: 1347903 - DNA, 15 bp, Homo sapiens
tgaaaattattaaga

SEQ ID NO: 1347904 - DNA, 15 bp, Homo sapiens
ctgaaaattattaag

SEQ ID NO: 1347905 - DNA, 15 bp, Homo sapiens
cctgaaaattattaa

SEQ ID NO: 1347906 - DNA, 15 bp, Homo sapiens
acctgaaaattatta

SEQ ID NO: 1347907 - DNA, 15 bp, Homo sapiens
tacctgaaaattatt

SEQ ID NO: 1347908 - DNA, 15 bp, Homo sapiens
atacctgaaaattat

SEQ ID NO: 1347909 - DNA, 15 bp, Homo sapiens
tatacctgaaaatta

SEQ ID NO: 1347910 - DNA, 15 bp, Homo sapiens
gtatacctgaaaatt

SEQ ID NO: 1347911 - DNA, 15 bp, Homo sapiens
tgtatacctgaaaat

SEQ ID NO: 1347912 - DNA, 15 bp, Homo sapiens
ttgtatacctgaaaa

SEQ ID NO: 1347913 - DNA, 15 bp, Homo sapiens
attgtatacctgaaa

SEQ ID NO: 1347914 - DNA, 15 bp, Homo sapiens
tattgtatacctgaa

SEQ ID NO: 1347915 - DNA, 15 bp, Homo sapiens
atattgtatacctga

SEQ ID NO: 1347916 - DNA, 15 bp, Homo sapiens
aatattgtatacctg

SEQ ID NO: 1347917 - DNA, 15 bp, Homo sapiens
aaatattgtatacct

SEQ ID NO: 1347918 - DNA, 15 bp, Homo sapiens
caaatattgtatacc

SEQ ID NO: 1347919 - DNA, 15 bp, Homo sapiens
acaaatattgtatac

SEQ ID NO: 1347920 - DNA, 15 bp, Homo sapiens
aacaaatattgtata

SEQ ID NO: 1347921 - DNA, 15 bp, Homo sapiens
aaacaaatattgtat

SEQ ID NO: 1347922 - DNA, 15 bp, Homo sapiens
aaaacaaatattgta

SEQ ID NO: 1347923 - DNA, 15 bp, Homo sapiens
aaaaacaaatattgt

SEQ ID NO: 1347924 - DNA, 15 bp, Homo sapiens
caaaaacaaatattg

SEQ ID NO: 1347925 - DNA, 15 bp, Homo sapiens
tcgtctcaaaacaaa

SEQ ID NO: 1347926 - DNA, 15 bp, Homo sapiens
ttcgtctcaaaacaa

SEQ ID NO: 1347927 - DNA, 15 bp, Homo sapiens
cttcgtctcaaaaca

SEQ ID NO: 1347928 - DNA, 15 bp, Homo sapiens
acttcgtctcaaaac

SEQ ID NO: 1347929 - DNA, 15 bp, Homo sapiens
gacttcgtctcaaaa

SEQ ID NO: 1347930 - DNA, 15 bp, Homo sapiens
agacttcgtctcaaa

SEQ ID NO: 1347931 - DNA, 15 bp, Homo sapiens
gagacttcgtctcaa

SEQ ID NO: 1347932 - DNA, 15 bp, Homo sapiens
cgagacttcgtctca

SEQ ID NO: 1347933 - DNA, 15 bp, Homo sapiens
gcgagacttcgtctc

SEQ ID NO: 1347934 - DNA, 15 bp, Homo sapiens
agcgagacttcgtct

SEQ ID NO: 1347935 - DNA, 15 bp, Homo sapiens
gagcgagacttcgtc

SEQ ID NO: 1347936 - DNA, 15 bp, Homo sapiens
agagcgagacttcgt

SEQ ID NO: 1347937 - DNA, 15 bp, Homo sapiens
aagagcgagacttcg

SEQ ID NO: 1347938 - DNA, 15 bp, Homo sapiens
caagagcgagacttc

SEQ ID NO: 1347939 - DNA, 15 bp, Homo sapiens
acaagagcgagactt

SEQ ID NO: 1347940 - DNA, 15 bp, Homo sapiens
ggacaagagcgagac

SEQ ID NO: 1347941 - DNA, 15 bp, Homo sapiens
gggacaagagcgaga

SEQ ID NO: 1347942 - DNA, 15 bp, Homo sapiens
ggggacaagagcgag

SEQ ID NO: 1347943 - DNA, 15 bp, Homo sapiens
tggggacaagagcga

SEQ ID NO: 1347944 - DNA, 15 bp, Homo sapiens
ctggggacaagagcg

SEQ ID NO: 1347945 - DNA, 15 bp, Homo sapiens
cctggggacaagagc

SEQ ID NO: 1347946 - DNA, 15 bp, Homo sapiens
gcctggggacaagag

SEQ ID NO: 1347947 - DNA, 15 bp, Homo sapiens
agcctggggacaaga

SEQ ID NO: 1347948 - DNA, 15 bp, Homo sapiens
cagcctggggacaag

SEQ ID NO: 1347949 - DNA, 15 bp, Homo sapiens
ccagcctggggacaa

SEQ ID NO: 1347950 - DNA, 15 bp, Homo sapiens
tccagcctggggaca

SEQ ID NO: 1347951 - DNA, 15 bp, Homo sapiens
ctccagcctggggac

SEQ ID NO: 1347952 - DNA, 15 bp, Homo sapiens
actccagcctgggga

SEQ ID NO: 1347953 - DNA, 15 bp, Homo sapiens
tacctgggaggcgga

SEQ ID NO: 1347954 - DNA, 15 bp, Homo sapiens
gtacctgggaggcgg

SEQ ID NO: 1347955 - DNA, 15 bp, Homo sapiens
tgtacctgggaggcg

SEQ ID NO: 1347956 - DNA, 15 bp, Homo sapiens
ttgtacctgggaggc

SEQ ID NO: 1347957 - DNA, 15 bp, Homo sapiens
cttgtacctgggagg

SEQ ID NO: 1347958 - DNA, 15 bp, Homo sapiens
gcttgtacctgggag

SEQ ID NO: 1347959 - DNA, 15 bp, Homo sapiens
cgcttgtacctggga

SEQ ID NO: 1347960 - DNA, 15 bp, Homo sapiens
tcgcttgtacctggg

SEQ ID NO: 1347961 - DNA, 15 bp, Homo sapiens
atcgcttgtacctgg

SEQ ID NO: 1347962 - DNA, 15 bp, Homo sapiens
aatcgcttgtacctg

SEQ ID NO: 1347963 - DNA, 15 bp, Homo sapiens
gaatcgcttgtacct

SEQ ID NO: 1347964 - DNA, 15 bp, Homo sapiens
agaatcgcttgtacc

SEQ ID NO: 1347965 - DNA, 15 bp, Homo sapiens
gagaatcgcttgtac

SEQ ID NO: 1347966 - DNA, 15 bp, Homo sapiens
ggagaatcgcttgta

SEQ ID NO: 1347967 - DNA, 15 bp, Homo sapiens
aggagaatcgcttgt

SEQ ID NO: 1347968 - DNA, 15 bp, Homo sapiens
aggcgcctgtaatcc

SEQ ID NO: 1347969 - DNA, 15 bp, Homo sapiens
caggcgcctgtaatc

SEQ ID NO: 1347970 - DNA, 15 bp, Homo sapiens
acaggcgcctgtaat

SEQ ID NO: 1347971 - DNA, 15 bp, Homo sapiens
gacaggcgcctgtaa

SEQ ID NO: 1347972 - DNA, 15 bp, Homo sapiens
agacaggcgcctgta

SEQ ID NO: 1347973 - DNA, 15 bp, Homo sapiens
gagacaggcgcctgt

SEQ ID NO: 1347974 - DNA, 15 bp, Homo sapiens
ggagacaggcgcctg

SEQ ID NO: 1347975 - DNA, 15 bp, Homo sapiens
tggagacaggcgcct

SEQ ID NO: 1347976 - DNA, 15 bp, Homo sapiens
gtggagacaggcgcc

SEQ ID NO: 1347977 - DNA, 15 bp, Homo sapiens
cgtggagacaggcgc

SEQ ID NO: 1347978 - DNA, 15 bp, Homo sapiens
gcgtggagacaggcg

SEQ ID NO: 1347979 - DNA, 15 bp, Homo sapiens
ggcgtggagacaggc

SEQ ID NO: 1347980 - DNA, 15 bp, Homo sapiens
gggcgtggagacagg

SEQ ID NO: 1347981 - DNA, 15 bp, Homo sapiens
cgggcgtggagacag

SEQ ID NO: 1347982 - DNA, 15 bp, Homo sapiens
ccgggcgtggagaca

SEQ ID NO: 1347983 - DNA, 15 bp, Homo sapiens
gccgggcgtggagac

SEQ ID NO: 1347984 - DNA, 15 bp, Homo sapiens
agccgggcgtggaga

SEQ ID NO: 1347985 - DNA, 15 bp, Homo sapiens
tagccgggcgtggag

SEQ ID NO: 1347986 - DNA, 15 bp, Homo sapiens
ctagccgggcgtgga

SEQ ID NO: 1347987 - DNA, 15 bp, Homo sapiens
actagccgggcgtgg

SEQ ID NO: 1347988 - DNA, 15 bp, Homo sapiens
aactagccgggcgtg

SEQ ID NO: 1347989 - DNA, 15 bp, Homo sapiens
taactagccgggcgt

SEQ ID NO: 1347990 - DNA, 15 bp, Homo sapiens
ataactagccgggcg

SEQ ID NO: 1347991 - DNA, 15 bp, Homo sapiens
aataactagccgggc

SEQ ID NO: 1347992 - DNA, 15 bp, Homo sapiens
caataactagccggg

SEQ ID NO: 1347993 - DNA, 15 bp, Homo sapiens
acaataactagccgg

SEQ ID NO: 1347994 - DNA, 15 bp, Homo sapiens
tacaataactagccg

SEQ ID NO: 1347995 - DNA, 15 bp, Homo sapiens
atacaataactagcc

SEQ ID NO: 1347996 - DNA, 15 bp, Homo sapiens
aatacaataactagc

SEQ ID NO: 1347997 - DNA, 15 bp, Homo sapiens
aaatacaataactag

SEQ ID NO: 1347998 - DNA, 15 bp, Homo sapiens
aaaatacaataacta

SEQ ID NO: 1347999 - DNA, 15 bp, Homo sapiens
aaaaatacaataact

SEQ ID NO: 1348000 - DNA, 15 bp, Homo sapiens
taaaaatacaataac

SEQ ID NO: 1348001 - DNA, 15 bp, Homo sapiens
gtctttactaaaaat

SEQ ID NO: 1348002 - DNA, 15 bp, Homo sapiens
tgtctttactaaaaa

SEQ ID NO: 1348003 - DNA, 15 bp, Homo sapiens
tagccgggcgcggtg

SEQ ID NO: 1348004 - DNA, 15 bp, Homo sapiens
gtagccgggcgcggt

SEQ ID NO: 1348005 - DNA, 15 bp, Homo sapiens
tgtagccgggcgcgg

SEQ ID NO: 1348006 - DNA, 15 bp, Homo sapiens
ttgtagccgggcgcg

SEQ ID NO: 1348007 - DNA, 15 bp, Homo sapiens
attgtagccgggcgc

SEQ ID NO: 1348008 - DNA, 15 bp, Homo sapiens
tattgtagccgggcg

SEQ ID NO: 1348009 - DNA, 15 bp, Homo sapiens
atattgtagccgggc

SEQ ID NO: 1348010 - DNA, 15 bp, Homo sapiens
catattgtagccggg

SEQ ID NO: 1348011 - DNA, 15 bp, Homo sapiens
acatattgtagccgg

SEQ ID NO: 1348012 - DNA, 15 bp, Homo sapiens
aacatattgtagccg

SEQ ID NO: 1348013 - DNA, 15 bp, Homo sapiens
gaacatattgtagcc

SEQ ID NO: 1348014 - DNA, 15 bp, Homo sapiens
agaacatattgtagc

SEQ ID NO: 1348015 - DNA, 15 bp, Homo sapiens
aagaacatattgtag

SEQ ID NO: 1348016 - DNA, 15 bp, Homo sapiens
taagaacatattgta

SEQ ID NO: 1348017 - DNA, 15 bp, Homo sapiens
ttaagaacatattgt

SEQ ID NO: 1348018 - DNA, 15 bp, Homo sapiens
attaagaacatattg

SEQ ID NO: 1348019 - DNA, 15 bp, Homo sapiens
aattaagaacatatt

SEQ ID NO: 1348020 - DNA, 15 bp, Homo sapiens
taattaagaacatat

SEQ ID NO: 1348021 - DNA, 15 bp, Homo sapiens
ataattaagaacata

SEQ ID NO: 1348022 - DNA, 15 bp, Homo sapiens
tataattaagaacat

SEQ ID NO: 1348023 - DNA, 15 bp, Homo sapiens
ctataattaagaaca

SEQ ID NO: 1348024 - DNA, 15 bp, Homo sapiens
actataattaagaac

SEQ ID NO: 1348025 - DNA, 15 bp, Homo sapiens
gactataattaagaa

SEQ ID NO: 1348026 - DNA, 15 bp, Homo sapiens
tgactataattaaga

SEQ ID NO: 1348027 - DNA, 15 bp, Homo sapiens
ctgactataattaag

SEQ ID NO: 1348028 - DNA, 15 bp, Homo sapiens
gctgactataattaa

SEQ ID NO: 1348029 - DNA, 15 bp, Homo sapiens
tgctgactataatta

SEQ ID NO: 1348030 - DNA, 15 bp, Homo sapiens
ttgctgactataatt

SEQ ID NO: 1348031 - DNA, 15 bp, Homo sapiens
attgctgactataat

SEQ ID NO: 1348032 - DNA, 15 bp, Homo sapiens
tattgctgactataa

SEQ ID NO: 1348033 - DNA, 15 bp, Homo sapiens
ctattgctgactata

SEQ ID NO: 1348034 - DNA, 15 bp, Homo sapiens
tctattgctgactat

SEQ ID NO: 1348035 - DNA, 15 bp, Homo sapiens
atctattgctgacta

SEQ ID NO: 1348036 - DNA, 15 bp, Homo sapiens
gatctattgctgact

SEQ ID NO: 1348037 - DNA, 15 bp, Homo sapiens
agatctattgctgac

SEQ ID NO: 1348038 - DNA, 15 bp, Homo sapiens
gagatctattgctga

SEQ ID NO: 1348039 - DNA, 15 bp, Homo sapiens
ggagatctattgctg

SEQ ID NO: 1348040 - DNA, 15 bp, Homo sapiens
aggagatctattgct

SEQ ID NO: 1348041 - DNA, 15 bp, Homo sapiens
caggagatctattgc

SEQ ID NO: 1348042 - DNA, 15 bp, Homo sapiens
tcaggagatctattg

SEQ ID NO: 1348043 - DNA, 15 bp, Homo sapiens
ttcaggagatctatt

SEQ ID NO: 1348044 - DNA, 15 bp, Homo sapiens
gttcaggagatctat

SEQ ID NO: 1348045 - DNA, 15 bp, Homo sapiens
agttcaggagatcta

SEQ ID NO: 1348046 - DNA, 15 bp, Homo sapiens
aagttcaggagatct

SEQ ID NO: 1348047 - DNA, 15 bp, Homo sapiens
taagttcaggagatc

SEQ ID NO: 1348048 - DNA, 15 bp, Homo sapiens
ataagttcaggagat

SEQ ID NO: 1348049 - DNA, 15 bp, Homo sapiens
aataagttcaggaga

SEQ ID NO: 1348050 - DNA, 15 bp, Homo sapiens
gaataagttcaggag

SEQ ID NO: 1348051 - DNA, 15 bp, Homo sapiens
agaataagttcagga

SEQ ID NO: 1348052 - DNA, 15 bp, Homo sapiens
aagaataagttcagg

SEQ ID NO: 1348053 - DNA, 15 bp, Homo sapiens
gaagaataagttcag

SEQ ID NO: 1348054 - DNA, 15 bp, Homo sapiens
ggaagaataagttca

SEQ ID NO: 1348055 - DNA, 15 bp, Homo sapiens
gggaagaataagttc

SEQ ID NO: 1348056 - DNA, 15 bp, Homo sapiens
tgggaagaataagtt

SEQ ID NO: 1348057 - DNA, 15 bp, Homo sapiens
ctgggaagaataagt

SEQ ID NO: 1348058 - DNA, 15 bp, Homo sapiens
gctgggaagaataag

SEQ ID NO: 1348059 - DNA, 15 bp, Homo sapiens
cgctgggaagaataa

SEQ ID NO: 1348060 - DNA, 15 bp, Homo sapiens
acgctgggaagaata

SEQ ID NO: 1348061 - DNA, 15 bp, Homo sapiens
gacgctgggaagaat

SEQ ID NO: 1348062 - DNA, 15 bp, Homo sapiens
agacgctgggaagaa

SEQ ID NO: 1348063 - DNA, 15 bp, Homo sapiens
aagacgctgggaaga

SEQ ID NO: 1348064 - DNA, 15 bp, Homo sapiens
gaagacgctgggaag

SEQ ID NO: 1348065 - DNA, 15 bp, Homo sapiens
ggaagacgctgggaa

SEQ ID NO: 1348066 - DNA, 15 bp, Homo sapiens
gggaagacgctggga

SEQ ID NO: 1348067 - DNA, 15 bp, Homo sapiens
tgggaagacgctggg

SEQ ID NO: 1348068 - DNA, 15 bp, Homo sapiens
ttgggaagacgctgg

SEQ ID NO: 1348069 - DNA, 15 bp, Homo sapiens
attgggaagacgctg

SEQ ID NO: 1348070 - DNA, 15 bp, Homo sapiens
gattgggaagacgct

SEQ ID NO: 1348071 - DNA, 15 bp, Homo sapiens
ggattgggaagacgc

SEQ ID NO: 1348072 - DNA, 15 bp, Homo sapiens
gggattgggaagacg

SEQ ID NO: 1348073 - DNA, 15 bp, Homo sapiens
tgggattgggaagac

SEQ ID NO: 1348074 - DNA, 15 bp, Homo sapiens
gtgggattgggaaga

SEQ ID NO: 1348075 - DNA, 15 bp, Homo sapiens
ggtgggattgggaag

SEQ ID NO: 1348076 - DNA, 15 bp, Homo sapiens
aggtgggattgggaa

SEQ ID NO: 1348077 - DNA, 15 bp, Homo sapiens
gaggtgggattggga

SEQ ID NO: 1348078 - DNA, 15 bp, Homo sapiens
ggaggtgggattggg

SEQ ID NO: 1348079 - DNA, 15 bp, Homo sapiens
tggaggtgggattgg

SEQ ID NO: 1348080 - DNA, 15 bp, Homo sapiens
gtggaggtgggattg

SEQ ID NO: 1348081 - DNA, 15 bp, Homo sapiens
ggtggaggtgggatt

SEQ ID NO: 1348082 - DNA, 15 bp, Homo sapiens
gggtggaggtgggat

SEQ ID NO: 1348083 - DNA, 15 bp, Homo sapiens
ggggtggaggtggga

SEQ ID NO: 1348084 - DNA, 15 bp, Homo sapiens
gggggtggaggtggg

SEQ ID NO: 1348085 - DNA, 15 bp, Homo sapiens
agggggtggaggtgg

SEQ ID NO: 1348086 - DNA, 15 bp, Homo sapiens
cagggggtggaggtg

SEQ ID NO: 1348087 - DNA, 15 bp, Homo sapiens
gcagggggtggaggt

SEQ ID NO: 1348088 - DNA, 15 bp, Homo sapiens
agcagggggtggagg

SEQ ID NO: 1348089 - DNA, 15 bp, Homo sapiens
tagcagggggtggag

SEQ ID NO: 1348090 - DNA, 15 bp, Homo sapiens
ttagcagggggtgga

SEQ ID NO: 1348091 - DNA, 15 bp, Homo sapiens
attagcagggggtgg

SEQ ID NO: 1348092 - DNA, 15 bp, Homo sapiens
tattagcagggggtg

SEQ ID NO: 1348093 - DNA, 15 bp, Homo sapiens
ttattagcagggggt

SEQ ID NO: 1348094 - DNA, 15 bp, Homo sapiens
attattagcaggggg

SEQ ID NO: 1348095 - DNA, 15 bp, Homo sapiens
aattattagcagggg

SEQ ID NO: 1348096 - DNA, 15 bp, Homo sapiens
taattattagcaggg

SEQ ID NO: 1348097 - DNA, 15 bp, Homo sapiens
ttaattattagcagg

SEQ ID NO: 1348098 - DNA, 15 bp, Homo sapiens
attaattattagcag

SEQ ID NO: 1348099 - DNA, 15 bp, Homo sapiens
aattaattattagca

SEQ ID NO: 1348100 - DNA, 15 bp, Homo sapiens
aaattaattattagc

SEQ ID NO: 1348101 - DNA, 15 bp, Homo sapiens
aaaattaattattag

SEQ ID NO: 1348102 - DNA, 15 bp, Homo sapiens
taaaattaattatta

SEQ ID NO: 1348103 - DNA, 15 bp, Homo sapiens
ttaaaattaattatt

SEQ ID NO: 1348104 - DNA, 15 bp, Homo sapiens
tttaaaattaattat

SEQ ID NO: 1348105 - DNA, 15 bp, Homo sapiens
atttaaaattaatta

SEQ ID NO: 1348106 - DNA, 15 bp, Homo sapiens
catttaaaattaatt

SEQ ID NO: 1348107 - DNA, 15 bp, Homo sapiens
tcatttaaaattaat

SEQ ID NO: 1348108 - DNA, 15 bp, Homo sapiens
gtcatttaaaattaa

SEQ ID NO: 1348109 - DNA, 15 bp, Homo sapiens
agtcatttaaaatta

SEQ ID NO: 1348110 - DNA, 15 bp, Homo sapiens
cagtcatttaaaatt

SEQ ID NO: 1348111 - DNA, 15 bp, Homo sapiens
ccagtcatttaaaat

SEQ ID NO: 1348112 - DNA, 15 bp, Homo sapiens
cccagtcatttaaaa

SEQ ID NO: 1348113 - DNA, 15 bp, Homo sapiens
ccccagtcatttaaa

SEQ ID NO: 1348114 - DNA, 15 bp, Homo sapiens
tccccagtcatttaa

SEQ ID NO: 1348115 - DNA, 15 bp, Homo sapiens
ttccccagtcattta

SEQ ID NO: 1348116 - DNA, 15 bp, Homo sapiens
tttccccagtcattt

SEQ ID NO: 1348117 - DNA, 15 bp, Homo sapiens
ttttccccagtcatt

SEQ ID NO: 1348118 - DNA, 15 bp, Homo sapiens
tttttccccagtcat

SEQ ID NO: 1348119 - DNA, 15 bp, Homo sapiens
ttttttccccagtca

SEQ ID NO: 1348120 - DNA, 15 bp, Homo sapiens
attttttccccagtc

SEQ ID NO: 1348121 - DNA, 15 bp, Homo sapiens
aattttttccccagt

SEQ ID NO: 1348122 - DNA, 15 bp, Homo sapiens
caattttttccccag

SEQ ID NO: 1348123 - DNA, 15 bp, Homo sapiens
tcaattttttcccca

SEQ ID NO: 1348124 - DNA, 15 bp, Homo sapiens
ttcaattttttcccc

SEQ ID NO: 1348125 - DNA, 15 bp, Homo sapiens
tttcaattttttccc

SEQ ID NO: 1348126 - DNA, 15 bp, Homo sapiens
ctttcaattttttcc

SEQ ID NO: 1348127 - DNA, 15 bp, Homo sapiens
tctttcaattttttc

SEQ ID NO: 1348128 - DNA, 15 bp, Homo sapiens
ttctttcaatttttt

SEQ ID NO: 1348129 - DNA, 15 bp, Homo sapiens
gttctttcaattttt

SEQ ID NO: 1348130 - DNA, 15 bp, Homo sapiens
agttctttcaatttt

SEQ ID NO: 1348131 - DNA, 15 bp, Homo sapiens
cagttctttcaattt

SEQ ID NO: 1348132 - DNA, 15 bp, Homo sapiens
acagttctttcaatt

SEQ ID NO: 1348133 - DNA, 15 bp, Homo sapiens
aacagttctttcaat

SEQ ID NO: 1348134 - DNA, 15 bp, Homo sapiens
aaacagttctttcaa

SEQ ID NO: 1348135 - DNA, 15 bp, Homo sapiens
gaaacagttctttca

SEQ ID NO: 1348136 - DNA, 15 bp, Homo sapiens
tgaaacagttctttc

SEQ ID NO: 1348137 - DNA, 15 bp, Homo sapiens
atgaaacagttcttt

SEQ ID NO: 1348138 - DNA, 15 bp, Homo sapiens
catgaaacagttctt

SEQ ID NO: 1348139 - DNA, 15 bp, Homo sapiens
tcatgaaacagttct

SEQ ID NO: 1348140 - DNA, 15 bp, Homo sapiens
gtcatgaaacagttc

SEQ ID NO: 1348141 - DNA, 15 bp, Homo sapiens
tgtcatgaaacagtt

SEQ ID NO: 1348142 - DNA, 15 bp, Homo sapiens
gtgtcatgaaacagt

SEQ ID NO: 1348143 - DNA, 15 bp, Homo sapiens
agtgtcatgaaacag

SEQ ID NO: 1348144 - DNA, 15 bp, Homo sapiens
aagtgtcatgaaaca

SEQ ID NO: 1348145 - DNA, 15 bp, Homo sapiens
caagtgtcatgaaac

SEQ ID NO: 1348146 - DNA, 15 bp, Homo sapiens
tcaagtgtcatgaaa

SEQ ID NO: 1348147 - DNA, 15 bp, Homo sapiens
ttcaagtgtcatgaa

SEQ ID NO: 1348148 - DNA, 15 bp, Homo sapiens
gttcaagtgtcatga

SEQ ID NO: 1348149 - DNA, 15 bp, Homo sapiens
tgttcaagtgtcatg

SEQ ID NO: 1348150 - DNA, 15 bp, Homo sapiens
atgttcaagtgtcat

SEQ ID NO: 1348151 - DNA, 15 bp, Homo sapiens
aatgttcaagtgtca

SEQ ID NO: 1348152 - DNA, 15 bp, Homo sapiens
taatgttcaagtgtc

SEQ ID NO: 1348153 - DNA, 15 bp, Homo sapiens
ataatgttcaagtgt

SEQ ID NO: 1348154 - DNA, 15 bp, Homo sapiens
tataatgttcaagtg

SEQ ID NO: 1348155 - DNA, 15 bp, Homo sapiens
atataatgttcaagt

SEQ ID NO: 1348156 - DNA, 15 bp, Homo sapiens
tatataatgttcaag

SEQ ID NO: 1348157 - DNA, 15 bp, Homo sapiens
ttatataatgttcaa

SEQ ID NO: 1348158 - DNA, 15 bp, Homo sapiens
tttatataatgttca

SEQ ID NO: 1348159 - DNA, 15 bp, Homo sapiens
ttttatataatgttc

SEQ ID NO: 1348160 - DNA, 15 bp, Homo sapiens
attttatataatgtt

SEQ ID NO: 1348161 - DNA, 15 bp, Homo sapiens
aattttatataatgt

SEQ ID NO: 1348162 - DNA, 15 bp, Homo sapiens
aaattttatataatg

SEQ ID NO: 1348163 - DNA, 15 bp, Homo sapiens
aaaattttatataat

SEQ ID NO: 1348164 - DNA, 15 bp, Homo sapiens
gaaaattttatataa

SEQ ID NO: 1348165 - DNA, 15 bp, Homo sapiens
tgaaaattttatata

SEQ ID NO: 1348166 - DNA, 15 bp, Homo sapiens
atgaaaattttatat

SEQ ID NO: 1348167 - DNA, 15 bp, Homo sapiens
catgaaaattttata

SEQ ID NO: 1348168 - DNA, 15 bp, Homo sapiens
acatgaaaattttat

SEQ ID NO: 1348169 - DNA, 15 bp, Homo sapiens
gacatgaaaatttta

SEQ ID NO: 1348170 - DNA, 15 bp, Homo sapiens
tgacatgaaaatttt

SEQ ID NO: 1348171 - DNA, 15 bp, Homo sapiens
ctgacatgaaaattt

SEQ ID NO: 1348172 - DNA, 15 bp, Homo sapiens
actgacatgaaaatt

SEQ ID NO: 1348173 - DNA, 15 bp, Homo sapiens
cactgacatgaaaat

SEQ ID NO: 1348174 - DNA, 15 bp, Homo sapiens
acactgacatgaaaa

SEQ ID NO: 1348175 - DNA, 15 bp, Homo sapiens
aacactgacatgaaa

SEQ ID NO: 1348176 - DNA, 15 bp, Homo sapiens
gaacactgacatgaa

SEQ ID NO: 1348177 - DNA, 15 bp, Homo sapiens
tgaacactgacatga

SEQ ID NO: 1348178 - DNA, 15 bp, Homo sapiens
atgaacactgacatg

SEQ ID NO: 1348179 - DNA, 15 bp, Homo sapiens
tatgaacactgacat

SEQ ID NO: 1348180 - DNA, 15 bp, Homo sapiens
ttatgaacactgaca

SEQ ID NO: 1348181 - DNA, 15 bp, Homo sapiens
tttatgaacactgac

SEQ ID NO: 1348182 - DNA, 15 bp, Homo sapiens
atttatgaacactga

SEQ ID NO: 1348183 - DNA, 15 bp, Homo sapiens
tatttatgaacactg

SEQ ID NO: 1348184 - DNA, 15 bp, Homo sapiens
gtatttatgaacact

SEQ ID NO: 1348185 - DNA, 15 bp, Homo sapiens
tgtatttatgaacac

SEQ ID NO: 1348186 - DNA, 15 bp, Homo sapiens
ttgtatttatgaaca

SEQ ID NO: 1348187 - DNA, 15 bp, Homo sapiens
tttgtatttatgaac

SEQ ID NO: 1348188 - DNA, 15 bp, Homo sapiens
gtttgtatttatgaa

SEQ ID NO: 1348189 - DNA, 15 bp, Homo sapiens
agtttgtatttatga

SEQ ID NO: 1348190 - DNA, 15 bp, Homo sapiens
aagtttgtatttatg

SEQ ID NO: 1348191 - DNA, 15 bp, Homo sapiens
aaagtttgtatttat

SEQ ID NO: 1348192 - DNA, 15 bp, Homo sapiens
aaaagtttgtattta

SEQ ID NO: 1348193 - DNA, 15 bp, Homo sapiens
taaaagtttgtattt

SEQ ID NO: 1348194 - DNA, 15 bp, Homo sapiens
ataaaagtttgtatt

SEQ ID NO: 1348195 - DNA, 15 bp, Homo sapiens
aataaaagtttgtat

SEQ ID NO: 1348196 - DNA, 15 bp, Homo sapiens
taataaaagtttgta

SEQ ID NO: 1348197 - DNA, 15 bp, Homo sapiens
ctaataaaagtttgt

SEQ ID NO: 1348198 - DNA, 15 bp, Homo sapiens
tctaataaaagtttg

SEQ ID NO: 1348199 - DNA, 15 bp, Homo sapiens
ttctaataaaagttt

SEQ ID NO: 1348200 - DNA, 15 bp, Homo sapiens
gttctaataaaagtt

SEQ ID NO: 1348201 - DNA, 15 bp, Homo sapiens
tgttctaataaaagt

SEQ ID NO: 1348202 - DNA, 15 bp, Homo sapiens
atgttctaataaaag

SEQ ID NO: 1348203 - DNA, 15 bp, Homo sapiens
tatgttctaataaaa

SEQ ID NO: 1348204 - DNA, 15 bp, Homo sapiens
ctatgttctaataaa

SEQ ID NO: 1348205 - DNA, 15 bp, Homo sapiens
gctatgttctaataa

SEQ ID NO: 1348206 - DNA, 15 bp, Homo sapiens
ggctatgttctaata

SEQ ID NO: 1348207 - DNA, 15 bp, Homo sapiens
tggctatgttctaat

SEQ ID NO: 1348208 - DNA, 15 bp, Homo sapiens
atggctatgttctaa

SEQ ID NO: 1348209 - DNA, 15 bp, Homo sapiens
tatggctatgttcta

SEQ ID NO: 1348210 - DNA, 15 bp, Homo sapiens
gtatggctatgttct

SEQ ID NO: 1348211 - DNA, 15 bp, Homo sapiens
agtatggctatgttc

SEQ ID NO: 1348212 - DNA, 15 bp, Homo sapiens
tagtatggctatgtt

SEQ ID NO: 1348213 - DNA, 15 bp, Homo sapiens
atagtatggctatgt

SEQ ID NO: 1348214 - DNA, 15 bp, Homo sapiens
aatagtatggctatg

SEQ ID NO: 1348215 - DNA, 15 bp, Homo sapiens
aaatagtatggctat

SEQ ID NO: 1348216 - DNA, 15 bp, Homo sapiens
taaatagtatggcta

SEQ ID NO: 1348217 - DNA, 15 bp, Homo sapiens
ataaatagtatggct

SEQ ID NO: 1348218 - DNA, 15 bp, Homo sapiens
tataaatagtatggc

SEQ ID NO: 1348219 - DNA, 15 bp, Homo sapiens
atataaatagtatgg

SEQ ID NO: 1348220 - DNA, 15 bp, Homo sapiens
tatataaatagtatg

SEQ ID NO: 1348221 - DNA, 15 bp, Homo sapiens
atatataaatagtat

SEQ ID NO: 1348222 - DNA, 15 bp, Homo sapiens
aatatataaatagta

SEQ ID NO: 1348223 - DNA, 15 bp, Homo sapiens
caatatataaatagt

SEQ ID NO: 1348224 - DNA, 15 bp, Homo sapiens
tcaatatataaatag

SEQ ID NO: 1348225 - DNA, 15 bp, Homo sapiens
ttcaatatataaata

SEQ ID NO: 1348226 - DNA, 15 bp, Homo sapiens
tttcaatatataaat

SEQ ID NO: 1348227 - DNA, 15 bp, Homo sapiens
atttcaatatataaa

SEQ ID NO: 1348228 - DNA, 15 bp, Homo sapiens
tatttcaatatataa

SEQ ID NO: 1348229 - DNA, 15 bp, Homo sapiens
gtatttcaatatata

SEQ ID NO: 1348230 - DNA, 15 bp, Homo sapiens
tgtatttcaatatat

SEQ ID NO: 1348231 - DNA, 15 bp, Homo sapiens
ctgtatttcaatata

SEQ ID NO: 1348232 - DNA, 15 bp, Homo sapiens
actgtatttcaatat

SEQ ID NO: 1348233 - DNA, 15 bp, Homo sapiens
aactgtatttcaata

SEQ ID NO: 1348234 - DNA, 15 bp, Homo sapiens
caactgtatttcaat

SEQ ID NO: 1348235 - DNA, 15 bp, Homo sapiens
tcaactgtatttcaa

SEQ ID NO: 1348236 - DNA, 15 bp, Homo sapiens
ttcaactgtatttca

SEQ ID NO: 1348237 - DNA, 15 bp, Homo sapiens
attcaactgtatttc

SEQ ID NO: 1348238 - DNA, 15 bp, Homo sapiens
aattcaactgtattt

SEQ ID NO: 1348239 - DNA, 15 bp, Homo sapiens
aaattcaactgtatt

SEQ ID NO: 1348240 - DNA, 15 bp, Homo sapiens
caaattcaactgtat

SEQ ID NO: 1348241 - DNA, 15 bp, Homo sapiens
acaaattcaactgta

SEQ ID NO: 1348242 - DNA, 15 bp, Homo sapiens
gacaaattcaactgt

SEQ ID NO: 1348243 - DNA, 15 bp, Homo sapiens
tgacaaattcaactg

SEQ ID NO: 1348244 - DNA, 15 bp, Homo sapiens
atgacaaattcaact

SEQ ID NO: 1348245 - DNA, 15 bp, Homo sapiens
tatgacaaattcaac

SEQ ID NO: 1348246 - DNA, 15 bp, Homo sapiens
atatgacaaattcaa

SEQ ID NO: 1348247 - DNA, 15 bp, Homo sapiens
catatgacaaattca

SEQ ID NO: 1348248 - DNA, 15 bp, Homo sapiens
tcatatgacaaattc

SEQ ID NO: 1348249 - DNA, 15 bp, Homo sapiens
gtcatatgacaaatt

SEQ ID NO: 1348250 - DNA, 15 bp, Homo sapiens
ggtcatatgacaaat

SEQ ID NO: 1348251 - DNA, 15 bp, Homo sapiens
tggtcatatgacaaa

SEQ ID NO: 1348252 - DNA, 15 bp, Homo sapiens
ttggtcatatgacaa

SEQ ID NO: 1348253 - DNA, 15 bp, Homo sapiens
attggtcatatgaca

SEQ ID NO: 1348254 - DNA, 15 bp, Homo sapiens
aattggtcatatgac

SEQ ID NO: 1348255 - DNA, 15 bp, Homo sapiens
aaattggtcatatga

SEQ ID NO: 1348256 - DNA, 15 bp, Homo sapiens
taaattggtcatatg

SEQ ID NO: 1348257 - DNA, 15 bp, Homo sapiens
ataaattggtcatat

SEQ ID NO: 1348258 - DNA, 15 bp, Homo sapiens
aataaattggtcata

SEQ ID NO: 1348259 - DNA, 15 bp, Homo sapiens
taataaattggtcat

SEQ ID NO: 1348260 - DNA, 15 bp, Homo sapiens
ctaataaattggtca

SEQ ID NO: 1348261 - DNA, 15 bp, Homo sapiens
actaataaattggtc

SEQ ID NO: 1348262 - DNA, 15 bp, Homo sapiens
tactaataaattggt

SEQ ID NO: 1348263 - DNA, 15 bp, Homo sapiens
atactaataaattgg

SEQ ID NO: 1348264 - DNA, 15 bp, Homo sapiens
aatactaataaattg

SEQ ID NO: 1348265 - DNA, 15 bp, Homo sapiens
caatactaataaatt

SEQ ID NO: 1348266 - DNA, 15 bp, Homo sapiens
tcaatactaataaat

SEQ ID NO: 1348267 - DNA, 15 bp, Homo sapiens
atcaatactaataaa

SEQ ID NO: 1348268 - DNA, 15 bp, Homo sapiens
aatcaatactaataa

SEQ ID NO: 1348269 - DNA, 15 bp, Homo sapiens
taatcaatactaata

SEQ ID NO: 1348270 - DNA, 15 bp, Homo sapiens
ttaatcaatactaat

SEQ ID NO: 1348271 - DNA, 15 bp, Homo sapiens
cttaatcaatactaa

SEQ ID NO: 1348272 - DNA, 15 bp, Homo sapiens
tcttaatcaatacta

SEQ ID NO: 1348273 - DNA, 15 bp, Homo sapiens
atcttaatcaatact

SEQ ID NO: 1348274 - DNA, 15 bp, Homo sapiens
catcttaatcaatac

SEQ ID NO: 1348275 - DNA, 15 bp, Homo sapiens
acatcttaatcaata

SEQ ID NO: 1348276 - DNA, 15 bp, Homo sapiens
aacatcttaatcaat

SEQ ID NO: 1348277 - DNA, 15 bp, Homo sapiens
caacatcttaatcaa

SEQ ID NO: 1348278 - DNA, 15 bp, Homo sapiens
tcaacatcttaatca

SEQ ID NO: 1348279 - DNA, 15 bp, Homo sapiens
ctcaacatcttaatc

SEQ ID NO: 1348280 - DNA, 15 bp, Homo sapiens
gctcaacatcttaat

SEQ ID NO: 1348281 - DNA, 15 bp, Homo sapiens
tgctcaacatcttaa

SEQ ID NO: 1348282 - DNA, 15 bp, Homo sapiens
ctgctcaacatctta

SEQ ID NO: 1348283 - DNA, 15 bp, Homo sapiens
actgctcaacatctt

SEQ ID NO: 1348284 - DNA, 15 bp, Homo sapiens
aactgctcaacatct

SEQ ID NO: 1348285 - DNA, 15 bp, Homo sapiens
aaactgctcaacatc

SEQ ID NO: 1348286 - DNA, 15 bp, Homo sapiens
taaactgctcaacat

SEQ ID NO: 1348287 - DNA, 15 bp, Homo sapiens
ataaactgctcaaca

SEQ ID NO: 1348288 - DNA, 15 bp, Homo sapiens
aataaactgctcaac

SEQ ID NO: 1348289 - DNA, 15 bp, Homo sapiens
gaataaactgctcaa

SEQ ID NO: 1348290 - DNA, 15 bp, Homo sapiens
tgaataaactgctca

SEQ ID NO: 1348291 - DNA, 15 bp, Homo sapiens
ttgaataaactgctc

SEQ ID NO: 1348292 - DNA, 15 bp, Homo sapiens
cttgaataaactgct

SEQ ID NO: 1348293 - DNA, 15 bp, Homo sapiens
acttgaataaactgc

SEQ ID NO: 1348294 - DNA, 15 bp, Homo sapiens
cacttgaataaactg

SEQ ID NO: 1348295 - DNA, 15 bp, Homo sapiens
acacttgaataaact

SEQ ID NO: 1348296 - DNA, 15 bp, Homo sapiens
cacacttgaataaac

SEQ ID NO: 1348297 - DNA, 15 bp, Homo sapiens
ccacacttgaataaa

SEQ ID NO: 1348298 - DNA, 15 bp, Homo sapiens
accacacttgaataa

SEQ ID NO: 1348299 - DNA, 15 bp, Homo sapiens
aaccacacttgaata

SEQ ID NO: 1348300 - DNA, 15 bp, Homo sapiens
aaaccacacttgaat

SEQ ID NO: 1348301 - DNA, 15 bp, Homo sapiens
aaaaccacacttgaa

SEQ ID NO: 1348302 - DNA, 15 bp, Homo sapiens
caaaaccacacttga

SEQ ID NO: 1348303 - DNA, 15 bp, Homo sapiens
acaaaaccacacttg

SEQ ID NO: 1348304 - DNA, 15 bp, Homo sapiens
cacaaaaccacactt

SEQ ID NO: 1348305 - DNA, 15 bp, Homo sapiens
ccacaaaaccacact

SEQ ID NO: 1348306 - DNA, 15 bp, Homo sapiens
tccacaaaaccacac

SEQ ID NO: 1348307 - DNA, 15 bp, Homo sapiens
ttccacaaaaccaca

SEQ ID NO: 1348308 - DNA, 15 bp, Homo sapiens
attccacaaaaccac

SEQ ID NO: 1348309 - DNA, 15 bp, Homo sapiens
cattccacaaaacca

SEQ ID NO: 1348310 - DNA, 15 bp, Homo sapiens
tcattccacaaaacc

SEQ ID NO: 1348311 - DNA, 15 bp, Homo sapiens
ttcattccacaaaac

SEQ ID NO: 1348312 - DNA, 15 bp, Homo sapiens
ctttcattccacaaa

SEQ ID NO: 1348313 - DNA, 15 bp, Homo sapiens
tctttcattccacaa

SEQ ID NO: 1348314 - DNA, 15 bp, Homo sapiens
ctctttcattccaca

SEQ ID NO: 1348315 - DNA, 15 bp, Homo sapiens
tctctttcattccac

SEQ ID NO: 1348316 - DNA, 15 bp, Homo sapiens
gtctctttcattcca

SEQ ID NO: 1348317 - DNA, 15 bp, Homo sapiens
tgtctctttcattcc

SEQ ID NO: 1348318 - DNA, 15 bp, Homo sapiens
ctgtctctttcattc

SEQ ID NO: 1348319 - DNA, 15 bp, Homo sapiens
cctgtctctttcatt

SEQ ID NO: 1348320 - DNA, 15 bp, Homo sapiens
tcctgtctctttcat

SEQ ID NO: 1348321 - DNA, 15 bp, Homo sapiens
ctcctgtctctttca

SEQ ID NO: 1348322 - DNA, 15 bp, Homo sapiens
cctcctgtctctttc

SEQ ID NO: 1348323 - DNA, 15 bp, Homo sapiens
ccctcctgtctcttt

SEQ ID NO: 1348324 - DNA, 15 bp, Homo sapiens
atccctcctgtctct

SEQ ID NO: 1348325 - DNA, 15 bp, Homo sapiens
aatccctcctgtctc

SEQ ID NO: 1348326 - DNA, 15 bp, Homo sapiens
taatccctcctgtct

SEQ ID NO: 1348327 - DNA, 15 bp, Homo sapiens
ataatccctcctgtc

SEQ ID NO: 1348328 - DNA, 15 bp, Homo sapiens
cataatccctcctgt

SEQ ID NO: 1348329 - DNA, 15 bp, Homo sapiens
tcataatccctcctg

SEQ ID NO: 1348330 - DNA, 15 bp, Homo sapiens
ctcataatccctcct

SEQ ID NO: 1348331 - DNA, 15 bp, Homo sapiens
cctcataatccctcc

SEQ ID NO: 1348332 - DNA, 15 bp, Homo sapiens
tcctcataatccctc

SEQ ID NO: 1348333 - DNA, 15 bp, Homo sapiens
gtcctcataatccct

SEQ ID NO: 1348334 - DNA, 15 bp, Homo sapiens
agtcctcataatccc

SEQ ID NO: 1348335 - DNA, 15 bp, Homo sapiens
gagtcctcataatcc

SEQ ID NO: 1348336 - DNA, 15 bp, Homo sapiens
agagtcctcataatc

SEQ ID NO: 1348337 - DNA, 15 bp, Homo sapiens
gagagtcctcataat

SEQ ID NO: 1348338 - DNA, 15 bp, Homo sapiens
ggagagtcctcataa

SEQ ID NO: 1348339 - DNA, 15 bp, Homo sapiens
aggagagtcctcata

SEQ ID NO: 1348340 - DNA, 15 bp, Homo sapiens
aaggagagtcctcat

SEQ ID NO: 1348341 - DNA, 15 bp, Homo sapiens
taaggagagtcctca

SEQ ID NO: 1348342 - DNA, 15 bp, Homo sapiens
ctaaggagagtcctc

SEQ ID NO: 1348343 - DNA, 15 bp, Homo sapiens
gctaaggagagtcct

SEQ ID NO: 1348344 - DNA, 15 bp, Homo sapiens
tgctaaggagagtcc

SEQ ID NO: 1348345 - DNA, 15 bp, Homo sapiens
ctgctaaggagagtc

SEQ ID NO: 1348346 - DNA, 15 bp, Homo sapiens
cctgctaaggagagt

SEQ ID NO: 1348347 - DNA, 15 bp, Homo sapiens
tcctgctaaggagag

SEQ ID NO: 1348348 - DNA, 15 bp, Homo sapiens
atcctgctaaggaga

SEQ ID NO: 1348349 - DNA, 15 bp, Homo sapiens
aatcctgctaaggag

SEQ ID NO: 1348350 - DNA, 15 bp, Homo sapiens
caatcctgctaagga

SEQ ID NO: 1348351 - DNA, 15 bp, Homo sapiens
tcaatcctgctaagg

SEQ ID NO: 1348352 - DNA, 15 bp, Homo sapiens
atcaatcctgctaag

SEQ ID NO: 1348353 - DNA, 15 bp, Homo sapiens
catcaatcctgctaa

SEQ ID NO: 1348354 - DNA, 15 bp, Homo sapiens
gcatcaatcctgcta

SEQ ID NO: 1348355 - DNA, 15 bp, Homo sapiens
tgcatcaatcctgct

SEQ ID NO: 1348356 - DNA, 15 bp, Homo sapiens
atgcatcaatcctgc

SEQ ID NO: 1348357 - DNA, 15 bp, Homo sapiens
aatgcatcaatcctg

SEQ ID NO: 1348358 - DNA, 15 bp, Homo sapiens
aaatgcatcaatcct

SEQ ID NO: 1348359 - DNA, 15 bp, Homo sapiens
gaaatgcatcaatcc

SEQ ID NO: 1348360 - DNA, 15 bp, Homo sapiens
tgaaatgcatcaatc

SEQ ID NO: 1348361 - DNA, 15 bp, Homo sapiens
gtgaaatgcatcaat

SEQ ID NO: 1348362 - DNA, 15 bp, Homo sapiens
agtgaaatgcatcaa

SEQ ID NO: 1348363 - DNA, 15 bp, Homo sapiens
aagtgaaatgcatca

SEQ ID NO: 1348364 - DNA, 15 bp, Homo sapiens
aaagtgaaatgcatc

SEQ ID NO: 1348365 - DNA, 15 bp, Homo sapiens
aaaagtgaaatgcat

SEQ ID NO: 1348366 - DNA, 15 bp, Homo sapiens
aaaaagtgaaatgca

SEQ ID NO: 1348367 - DNA, 15 bp, Homo sapiens
aaaaaagtgaaatgc

SEQ ID NO: 1348368 - DNA, 15 bp, Homo sapiens
aaaaaaagtgaaatg

SEQ ID NO: 1348369 - DNA, 15 bp, Homo sapiens
caaaaaaagtgaaat

SEQ ID NO: 1348370 - DNA, 15 bp, Homo sapiens
tcaaaaaaagtgaaa

SEQ ID NO: 1348371 - DNA, 15 bp, Homo sapiens
gtcaaaaaaagtgaa

SEQ ID NO: 1348372 - DNA, 15 bp, Homo sapiens
tgtcaaaaaaagtga

SEQ ID NO: 1348373 - DNA, 15 bp, Homo sapiens
ctgtcaaaaaaagtg

SEQ ID NO: 1348374 - DNA, 15 bp, Homo sapiens
cctgtcaaaaaaagt

SEQ ID NO: 1348375 - DNA, 15 bp, Homo sapiens
tcctgtcaaaaaaag

SEQ ID NO: 1348376 - DNA, 15 bp, Homo sapiens
ttcctgtcaaaaaaa

SEQ ID NO: 1348377 - DNA, 15 bp, Homo sapiens
cttcctgtcaaaaaa

SEQ ID NO: 1348378 - DNA, 15 bp, Homo sapiens
ccttcctgtcaaaaa

SEQ ID NO: 1348379 - DNA, 15 bp, Homo sapiens
tccttcctgtcaaaa

SEQ ID NO: 1348380 - DNA, 15 bp, Homo sapiens
ttccttcctgtcaaa

SEQ ID NO: 1348381 - DNA, 15 bp, Homo sapiens
tttccttcctgtcaa

SEQ ID NO: 1348382 - DNA, 15 bp, Homo sapiens
ctttccttcctgtca

SEQ ID NO: 1348383 - DNA, 15 bp, Homo sapiens
actttccttcctgtc

SEQ ID NO: 1348384 - DNA, 15 bp, Homo sapiens
aactttccttcctgt

SEQ ID NO: 1348385 - DNA, 15 bp, Homo sapiens
aaactttccttcctg

SEQ ID NO: 1348386 - DNA, 15 bp, Homo sapiens
taaactttccttcct

SEQ ID NO: 1348387 - DNA, 15 bp, Homo sapiens
ctaaactttccttcc

SEQ ID NO: 1348388 - DNA, 15 bp, Homo sapiens
cctaaactttccttc

SEQ ID NO: 1348389 - DNA, 15 bp, Homo sapiens
acctaaactttcctt

SEQ ID NO: 1348390 - DNA, 15 bp, Homo sapiens
aacctaaactttcct

SEQ ID NO: 1348391 - DNA, 15 bp, Homo sapiens
gaacctaaactttcc

SEQ ID NO: 1348392 - DNA, 15 bp, Homo sapiens
agaacctaaactttc

SEQ ID NO: 1348393 - DNA, 15 bp, Homo sapiens
tagaacctaaacttt

SEQ ID NO: 1348394 - DNA, 15 bp, Homo sapiens
atagaacctaaactt

SEQ ID NO: 1348395 - DNA, 15 bp, Homo sapiens
aatagaacctaaact

SEQ ID NO: 1348396 - DNA, 15 bp, Homo sapiens
aaatagaacctaaac

SEQ ID NO: 1348397 - DNA, 15 bp, Homo sapiens
aaaatagaacctaaa

SEQ ID NO: 1348398 - DNA, 15 bp, Homo sapiens
gaaaatagaacctaa

SEQ ID NO: 1348399 - DNA, 15 bp, Homo sapiens
agaaaatagaaccta

SEQ ID NO: 1348400 - DNA, 15 bp, Homo sapiens
gagaaaatagaacct

SEQ ID NO: 1348401 - DNA, 15 bp, Homo sapiens
tgagaaaatagaacc

SEQ ID NO: 1348402 - DNA, 15 bp, Homo sapiens
ctgagaaaatagaac

SEQ ID NO: 1348403 - DNA, 15 bp, Homo sapiens
gctgagaaaatagaa

SEQ ID NO: 1348404 - DNA, 15 bp, Homo sapiens
tgctgagaaaataga

SEQ ID NO: 1348405 - DNA, 15 bp, Homo sapiens
ttgctgagaaaatag

SEQ ID NO: 1348406 - DNA, 15 bp, Homo sapiens
gttgctgagaaaata

SEQ ID NO: 1348407 - DNA, 15 bp, Homo sapiens
agttgctgagaaaat

SEQ ID NO: 1348408 - DNA, 15 bp, Homo sapiens
gagttgctgagaaaa

SEQ ID NO: 1348409 - DNA, 15 bp, Homo sapiens
agagttgctgagaaa

SEQ ID NO: 1348410 - DNA, 15 bp, Homo sapiens
tagagttgctgagaa

SEQ ID NO: 1348411 - DNA, 15 bp, Homo sapiens
gtagagttgctgaga

SEQ ID NO: 1348412 - DNA, 15 bp, Homo sapiens
agtagagttgctgag

SEQ ID NO: 1348413 - DNA, 15 bp, Homo sapiens
aagtagagttgctga

SEQ ID NO: 1348414 - DNA, 15 bp, Homo sapiens
taagtagagttgctg

SEQ ID NO: 1348415 - DNA, 15 bp, Homo sapiens
ttaagtagagttgct

SEQ ID NO: 1348416 - DNA, 15 bp, Homo sapiens
gttaagtagagttgc

SEQ ID NO: 1348417 - DNA, 15 bp, Homo sapiens
agttaagtagagttg

SEQ ID NO: 1348418 - DNA, 15 bp, Homo sapiens
cagttaagtagagtt

SEQ ID NO: 1348419 - DNA, 15 bp, Homo sapiens
gcagttaagtagagt

SEQ ID NO: 1348420 - DNA, 15 bp, Homo sapiens
ggcagttaagtagag

SEQ ID NO: 1348421 - DNA, 15 bp, Homo sapiens
aggcagttaagtaga

SEQ ID NO: 1348422 - DNA, 15 bp, Homo sapiens
gaggcagttaagtag

SEQ ID NO: 1348423 - DNA, 15 bp, Homo sapiens
ggaggcagttaagta

SEQ ID NO: 1348424 - DNA, 15 bp, Homo sapiens
tggaggcagttaagt

SEQ ID NO: 1348425 - DNA, 15 bp, Homo sapiens
atggaggcagttaag

SEQ ID NO: 1348426 - DNA, 15 bp, Homo sapiens
gatggaggcagttaa

SEQ ID NO: 1348427 - DNA, 15 bp, Homo sapiens
agatggaggcagtta

SEQ ID NO: 1348428 - DNA, 15 bp, Homo sapiens
cagatggaggcagtt

SEQ ID NO: 1348429 - DNA, 15 bp, Homo sapiens
tcagatggaggcagt

SEQ ID NO: 1348430 - DNA, 15 bp, Homo sapiens
ttcagatggaggcag

SEQ ID NO: 1348431 - DNA, 15 bp, Homo sapiens
gttcagatggaggca

SEQ ID NO: 1348432 - DNA, 15 bp, Homo sapiens
agttcagatggaggc

SEQ ID NO: 1348433 - DNA, 15 bp, Homo sapiens
tagttcagatggagg

SEQ ID NO: 1348434 - DNA, 15 bp, Homo sapiens
atagttcagatggag

SEQ ID NO: 1348435 - DNA, 15 bp, Homo sapiens
tatagttcagatgga

SEQ ID NO: 1348436 - DNA, 15 bp, Homo sapiens
atatagttcagatgg

SEQ ID NO: 1348437 - DNA, 15 bp, Homo sapiens
tatatagttcagatg

SEQ ID NO: 1348438 - DNA, 15 bp, Homo sapiens
atatatagttcagat

SEQ ID NO: 1348439 - DNA, 15 bp, Homo sapiens
tatatatagttcaga

SEQ ID NO: 1348440 - DNA, 15 bp, Homo sapiens
ctatatatagttcag

SEQ ID NO: 1348441 - DNA, 15 bp, Homo sapiens
cctatatatagttca

SEQ ID NO: 1348442 - DNA, 15 bp, Homo sapiens
tcctatatatagttc

SEQ ID NO: 1348443 - DNA, 15 bp, Homo sapiens
ctcctatatatagtt

SEQ ID NO: 1348444 - DNA, 15 bp, Homo sapiens
cctcctatatatagt

SEQ ID NO: 1348445 - DNA, 15 bp, Homo sapiens
ccctcctatatatag

SEQ ID NO: 1348446 - DNA, 15 bp, Homo sapiens
cccctcctatatata

SEQ ID NO: 1348447 - DNA, 15 bp, Homo sapiens
ccccctcctatatat

SEQ ID NO: 1348448 - DNA, 15 bp, Homo sapiens
accccctcctatata

SEQ ID NO: 1348449 - DNA, 15 bp, Homo sapiens
caccccctcctatat

SEQ ID NO: 1348450 - DNA, 15 bp, Homo sapiens
ccaccccctcctata

SEQ ID NO: 1348451 - DNA, 15 bp, Homo sapiens
tccaccccctcctat

SEQ ID NO: 1348452 - DNA, 15 bp, Homo sapiens
atccaccccctccta

SEQ ID NO: 1348453 - DNA, 15 bp, Homo sapiens
tatccaccccctcct

SEQ ID NO: 1348454 - DNA, 15 bp, Homo sapiens
atatccaccccctcc

SEQ ID NO: 1348455 - DNA, 15 bp, Homo sapiens
gatatccaccccctc

SEQ ID NO: 1348456 - DNA, 15 bp, Homo sapiens
tgatatccaccccct

SEQ ID NO: 1348457 - DNA, 15 bp, Homo sapiens
ctgatatccaccccc

SEQ ID NO: 1348458 - DNA, 15 bp, Homo sapiens
gctgatatccacccc

SEQ ID NO: 1348459 - DNA, 15 bp, Homo sapiens
tgctgatatccaccc

SEQ ID NO: 1348460 - DNA, 15 bp, Homo sapiens
ttgctgatatccacc

SEQ ID NO: 1348461 - DNA, 15 bp, Homo sapiens
tttgctgatatccac

SEQ ID NO: 1348462 - DNA, 15 bp, Homo sapiens
ctttgctgatatcca

SEQ ID NO: 1348463 - DNA, 15 bp, Homo sapiens
tctttgctgatatcc

SEQ ID NO: 1348464 - DNA, 15 bp, Homo sapiens
atctttgctgatatc

SEQ ID NO: 1348465 - DNA, 15 bp, Homo sapiens
aatctttgctgatat

SEQ ID NO: 1348466 - DNA, 15 bp, Homo sapiens
taatctttgctgata

SEQ ID NO: 1348467 - DNA, 15 bp, Homo sapiens
ttaatctttgctgat

SEQ ID NO: 1348468 - DNA, 15 bp, Homo sapiens
gttaatctttgctga

SEQ ID NO: 1348469 - DNA, 15 bp, Homo sapiens
tgttaatctttgctg

SEQ ID NO: 1348470 - DNA, 15 bp, Homo sapiens
atgttaatctttgct

SEQ ID NO: 1348471 - DNA, 15 bp, Homo sapiens
gatgttaatctttgc

SEQ ID NO: 1348472 - DNA, 15 bp, Homo sapiens
tgatgttaatctttg

SEQ ID NO: 1348473 - DNA, 15 bp, Homo sapiens
ctgatgttaatcttt

SEQ ID NO: 1348474 - DNA, 15 bp, Homo sapiens
actgatgttaatctt

SEQ ID NO: 1348475 - DNA, 15 bp, Homo sapiens
tactgatgttaatct

SEQ ID NO: 1348476 - DNA, 15 bp, Homo sapiens
ttactgatgttaatc

SEQ ID NO: 1348477 - DNA, 15 bp, Homo sapiens
tttactgatgttaat

SEQ ID NO: 1348478 - DNA, 15 bp, Homo sapiens
atttactgatgttaa

SEQ ID NO: 1348479 - DNA, 15 bp, Homo sapiens
aatttactgatgtta

SEQ ID NO: 1348480 - DNA, 15 bp, Homo sapiens
aaatttactgatgtt

SEQ ID NO: 1348481 - DNA, 15 bp, Homo sapiens
aaaatttactgatgt

SEQ ID NO: 1348482 - DNA, 15 bp, Homo sapiens
caaaatttactgatg

SEQ ID NO: 1348483 - DNA, 15 bp, Homo sapiens
tcaaaatttactgat

SEQ ID NO: 1348484 - DNA, 15 bp, Homo sapiens
atcaaaatttactga

SEQ ID NO: 1348485 - DNA, 15 bp, Homo sapiens
catcaaaatttactg

SEQ ID NO: 1348486 - DNA, 15 bp, Homo sapiens
tcatcaaaatttact

SEQ ID NO: 1348487 - DNA, 15 bp, Homo sapiens
ttcatcaaaatttac

SEQ ID NO: 1348488 - DNA, 15 bp, Homo sapiens
attcatcaaaattta

SEQ ID NO: 1348489 - DNA, 15 bp, Homo sapiens
aattcatcaaaattt

SEQ ID NO: 1348490 - DNA, 15 bp, Homo sapiens
gaattcatcaaaatt

SEQ ID NO: 1348491 - DNA, 15 bp, Homo sapiens
agaattcatcaaaat

SEQ ID NO: 1348492 - DNA, 15 bp, Homo sapiens
gagaattcatcaaaa

SEQ ID NO: 1348493 - DNA, 15 bp, Homo sapiens
agagaattcatcaaa

SEQ ID NO: 1348494 - DNA, 15 bp, Homo sapiens
ttagagaattcatca

SEQ ID NO: 1348495 - DNA, 15 bp, Homo sapiens
tttagagaattcatc

SEQ ID NO: 1348496 - DNA, 15 bp, Homo sapiens
ttttagagaattcat

SEQ ID NO: 1348497 - DNA, 15 bp, Homo sapiens
tttttagagaattca

SEQ ID NO: 1348498 - DNA, 15 bp, Homo sapiens
atttttagagaattc

SEQ ID NO: 1348499 - DNA, 15 bp, Homo sapiens
aatttttagagaatt

SEQ ID NO: 1348500 - DNA, 15 bp, Homo sapiens
gaatttttagagaat

SEQ ID NO: 1348501 - DNA, 15 bp, Homo sapiens
agaatttttagagaa

SEQ ID NO: 1348502 - DNA, 15 bp, Homo sapiens
cagaatttttagaga

SEQ ID NO: 1348503 - DNA, 15 bp, Homo sapiens
tcagaatttttagag

SEQ ID NO: 1348504 - DNA, 15 bp, Homo sapiens
atcagaatttttaga

SEQ ID NO: 1348505 - DNA, 15 bp, Homo sapiens
aatcagaatttttag

SEQ ID NO: 1348506 - DNA, 15 bp, Homo sapiens
aaatcagaattttta

SEQ ID NO: 1348507 - DNA, 15 bp, Homo sapiens
aaaatcagaattttt

SEQ ID NO: 1348508 - DNA, 15 bp, Homo sapiens
aaaaatcagaatttt

SEQ ID NO: 1348509 - DNA, 15 bp, Homo sapiens
taaaaatcagaattt

SEQ ID NO: 1348510 - DNA, 15 bp, Homo sapiens
ttaaaaatcagaatt

SEQ ID NO: 1348511 - DNA, 15 bp, Homo sapiens
tttaaaaatcagaat

SEQ ID NO: 1348512 - DNA, 15 bp, Homo sapiens
ctttaaaaatcagaa

SEQ ID NO: 1348513 - DNA, 15 bp, Homo sapiens
tctttaaaaatcaga

SEQ ID NO: 1348514 - DNA, 15 bp, Homo sapiens
ctctttaaaaatcag

SEQ ID NO: 1348515 - DNA, 15 bp, Homo sapiens
cctctttaaaaatca

SEQ ID NO: 1348516 - DNA, 15 bp, Homo sapiens
ccctctttaaaaatc

SEQ ID NO: 1348517 - DNA, 15 bp, Homo sapiens
ttccctctttaaaaa

SEQ ID NO: 1348518 - DNA, 15 bp, Homo sapiens
attccctctttaaaa

SEQ ID NO: 1348519 - DNA, 15 bp, Homo sapiens
aattccctctttaaa

SEQ ID NO: 1348520 - DNA, 15 bp, Homo sapiens
aaattccctctttaa

SEQ ID NO: 1348521 - DNA, 15 bp, Homo sapiens
aaaattccctcttta

SEQ ID NO: 1348522 - DNA, 15 bp, Homo sapiens
caaaattccctcttt

SEQ ID NO: 1348523 - DNA, 15 bp, Homo sapiens
ccaaaattccctctt

SEQ ID NO: 1348524 - DNA, 15 bp, Homo sapiens
gccaaaattccctct

SEQ ID NO: 1348525 - DNA, 15 bp, Homo sapiens
agccaaaattccctc

SEQ ID NO: 1348526 - DNA, 15 bp, Homo sapiens
cagccaaaattccct

SEQ ID NO: 1348527 - DNA, 15 bp, Homo sapiens
ccagccaaaattccc

SEQ ID NO: 1348528 - DNA, 15 bp, Homo sapiens
cccagccaaaattcc

SEQ ID NO: 1348529 - DNA, 15 bp, Homo sapiens
gcccagccaaaattc

SEQ ID NO: 1348530 - DNA, 15 bp, Homo sapiens
tgcccagccaaaatt

SEQ ID NO: 1348531 - DNA, 15 bp, Homo sapiens
gtgcccagccaaaat

SEQ ID NO: 1348532 - DNA, 15 bp, Homo sapiens
tgtgcccagccaaaa

SEQ ID NO: 1348533 - DNA, 15 bp, Homo sapiens
ctgtgcccagccaaa

SEQ ID NO: 1348534 - DNA, 15 bp, Homo sapiens
actgtgcccagccaa

SEQ ID NO: 1348535 - DNA, 15 bp, Homo sapiens
cactgtgcccagcca

SEQ ID NO: 1348536 - DNA, 15 bp, Homo sapiens
ttaggattacaggtg

SEQ ID NO: 1348537 - DNA, 15 bp, Homo sapiens
cttaggattacaggt

SEQ ID NO: 1348538 - DNA, 15 bp, Homo sapiens
gcttaggattacagg

SEQ ID NO: 1348539 - DNA, 15 bp, Homo sapiens
tgcttaggattacag

SEQ ID NO: 1348540 - DNA, 15 bp, Homo sapiens
gtgcttaggattaca

SEQ ID NO: 1348541 - DNA, 15 bp, Homo sapiens
agtgcttaggattac

SEQ ID NO: 1348542 - DNA, 15 bp, Homo sapiens
aagtgcttaggatta

SEQ ID NO: 1348543 - DNA, 15 bp, Homo sapiens
aaagtgcttaggatt

SEQ ID NO: 1348544 - DNA, 15 bp, Homo sapiens
caaagtgcttaggat

SEQ ID NO: 1348545 - DNA, 15 bp, Homo sapiens
ccaaagtgcttagga

SEQ ID NO: 1348546 - DNA, 15 bp, Homo sapiens
cccaaagtgcttagg

SEQ ID NO: 1348547 - DNA, 15 bp, Homo sapiens
tcccaaagtgcttag

SEQ ID NO: 1348548 - DNA, 15 bp, Homo sapiens
ctcccaaagtgctta

SEQ ID NO: 1348549 - DNA, 15 bp, Homo sapiens
cctcccaaagtgctt

SEQ ID NO: 1348550 - DNA, 15 bp, Homo sapiens
acctgccttggcctc

SEQ ID NO: 1348551 - DNA, 15 bp, Homo sapiens
cacctgccttggcct

SEQ ID NO: 1348552 - DNA, 15 bp, Homo sapiens
ttgtttttagtagag

SEQ ID NO: 1348553 - DNA, 15 bp, Homo sapiens
tttgtttttagtaga

SEQ ID NO: 1348554 - DNA, 15 bp, Homo sapiens
atttgtttttagtag

SEQ ID NO: 1348555 - DNA, 15 bp, Homo sapiens
aatttgtttttagta

SEQ ID NO: 1348556 - DNA, 15 bp, Homo sapiens
taatttgtttttagt

SEQ ID NO: 1348557 - DNA, 15 bp, Homo sapiens
ctaatttgtttttag

SEQ ID NO: 1348558 - DNA, 15 bp, Homo sapiens
gctaatttgttttta

SEQ ID NO: 1348559 - DNA, 15 bp, Homo sapiens
agctaatttgttttt

SEQ ID NO: 1348560 - DNA, 15 bp, Homo sapiens
cagctaatttgtttt

SEQ ID NO: 1348561 - DNA, 15 bp, Homo sapiens
tcagctaatttgttt

SEQ ID NO: 1348562 - DNA, 15 bp, Homo sapiens
ttcagctaatttgtt

SEQ ID NO: 1348563 - DNA, 15 bp, Homo sapiens
attcagctaatttgt

SEQ ID NO: 1348564 - DNA, 15 bp, Homo sapiens
cattcagctaatttg

SEQ ID NO: 1348565 - DNA, 15 bp, Homo sapiens
acattcagctaattt

SEQ ID NO: 1348566 - DNA, 15 bp, Homo sapiens
cacattcagctaatt

SEQ ID NO: 1348567 - DNA, 15 bp, Homo sapiens
ccacattcagctaat

SEQ ID NO: 1348568 - DNA, 15 bp, Homo sapiens
accacattcagctaa

SEQ ID NO: 1348569 - DNA, 15 bp, Homo sapiens
caccacattcagcta

SEQ ID NO: 1348570 - DNA, 15 bp, Homo sapiens
ccaccacattcagct

SEQ ID NO: 1348571 - DNA, 15 bp, Homo sapiens
gccaccacattcagc

SEQ ID NO: 1348572 - DNA, 15 bp, Homo sapiens
cgccaccacattcag

SEQ ID NO: 1348573 - DNA, 15 bp, Homo sapiens
gcgccaccacattca

SEQ ID NO: 1348574 - DNA, 15 bp, Homo sapiens
cgcgccaccacattc

SEQ ID NO: 1348575 - DNA, 15 bp, Homo sapiens
gcgcgccaccacatt

SEQ ID NO: 1348576 - DNA, 15 bp, Homo sapiens
tgcgcgccaccacat

SEQ ID NO: 1348577 - DNA, 15 bp, Homo sapiens
gtgcgcgccaccaca

SEQ ID NO: 1348578 - DNA, 15 bp, Homo sapiens
ggtgcgcgccaccac

SEQ ID NO: 1348579 - DNA, 15 bp, Homo sapiens
aggtgcgcgccacca

SEQ ID NO: 1348580 - DNA, 15 bp, Homo sapiens
caggtgcgcgccacc

SEQ ID NO: 1348581 - DNA, 15 bp, Homo sapiens
acaggtgcgcgccac

SEQ ID NO: 1348582 - DNA, 15 bp, Homo sapiens
tacaggtgcgcgcca

SEQ ID NO: 1348583 - DNA, 15 bp, Homo sapiens
ctacaggtgcgcgcc

SEQ ID NO: 1348584 - DNA, 15 bp, Homo sapiens
actacaggtgcgcgc

SEQ ID NO: 1348585 - DNA, 15 bp, Homo sapiens
gactacaggtgcgcg

SEQ ID NO: 1348586 - DNA, 15 bp, Homo sapiens
gagctgggactacag

SEQ ID NO: 1348587 - DNA, 15 bp, Homo sapiens
ggcaattctcccacc

SEQ ID NO: 1348588 - DNA, 15 bp, Homo sapiens
aggcaattctcccac

SEQ ID NO: 1348589 - DNA, 15 bp, Homo sapiens
taggcaattctccca

SEQ ID NO: 1348590 - DNA, 15 bp, Homo sapiens
ttaggcaattctccc

SEQ ID NO: 1348591 - DNA, 15 bp, Homo sapiens
tttaggcaattctcc

SEQ ID NO: 1348592 - DNA, 15 bp, Homo sapiens
gtttaggcaattctc

SEQ ID NO: 1348593 - DNA, 15 bp, Homo sapiens
ggtttaggcaattct

SEQ ID NO: 1348594 - DNA, 15 bp, Homo sapiens
gggtttaggcaattc

SEQ ID NO: 1348595 - DNA, 15 bp, Homo sapiens
tgggtttaggcaatt

SEQ ID NO: 1348596 - DNA, 15 bp, Homo sapiens
ctgggtttaggcaat

SEQ ID NO: 1348597 - DNA, 15 bp, Homo sapiens
cctgggtttaggcaa

SEQ ID NO: 1348598 - DNA, 15 bp, Homo sapiens
tcctgggtttaggca

SEQ ID NO: 1348599 - DNA, 15 bp, Homo sapiens
ctcctgggtttaggc

SEQ ID NO: 1348600 - DNA, 15 bp, Homo sapiens
tctcctgggtttagg

SEQ ID NO: 1348601 - DNA, 15 bp, Homo sapiens
ctctcctgggtttag

SEQ ID NO: 1348602 - DNA, 15 bp, Homo sapiens
cctctcctgggttta

SEQ ID NO: 1348603 - DNA, 15 bp, Homo sapiens
acctctcctgggttt

SEQ ID NO: 1348604 - DNA, 15 bp, Homo sapiens
cacctctcctgggtt

SEQ ID NO: 1348605 - DNA, 15 bp, Homo sapiens
ccacctctcctgggt

SEQ ID NO: 1348606 - DNA, 15 bp, Homo sapiens
tccacctctcctggg

SEQ ID NO: 1348607 - DNA, 15 bp, Homo sapiens
ctccacctctcctgg

SEQ ID NO: 1348608 - DNA, 15 bp, Homo sapiens
cctccacctctcctg

SEQ ID NO: 1348609 - DNA, 15 bp, Homo sapiens
acctccacctctcct

SEQ ID NO: 1348610 - DNA, 15 bp, Homo sapiens
aacctccacctctcc

SEQ ID NO: 1348611 - DNA, 15 bp, Homo sapiens
caacctccacctctc

SEQ ID NO: 1348612 - DNA, 15 bp, Homo sapiens
gcaacctccacctct

SEQ ID NO: 1348613 - DNA, 15 bp, Homo sapiens
atggcacaatctcgg

SEQ ID NO: 1348614 - DNA, 15 bp, Homo sapiens
atggagtgcaatggc

SEQ ID NO: 1348615 - DNA, 15 bp, Homo sapiens
gatggagtgcaatgg

SEQ ID NO: 1348616 - DNA, 15 bp, Homo sapiens
ggatggagtgcaatg

SEQ ID NO: 1348617 - DNA, 15 bp, Homo sapiens
aggatggagtgcaat

SEQ ID NO: 1348618 - DNA, 15 bp, Homo sapiens
caggatggagtgcaa

SEQ ID NO: 1348619 - DNA, 15 bp, Homo sapiens
acccaggatggagtg

SEQ ID NO: 1348620 - DNA, 15 bp, Homo sapiens
cacccaggatggagt

SEQ ID NO: 1348621 - DNA, 15 bp, Homo sapiens
tcacccaggatggag

SEQ ID NO: 1348622 - DNA, 15 bp, Homo sapiens
gtcacccaggatgga

SEQ ID NO: 1348623 - DNA, 15 bp, Homo sapiens
tgtcacccaggatgg

SEQ ID NO: 1348624 - DNA, 15 bp, Homo sapiens
ctgtcacccaggatg

SEQ ID NO: 1348625 - DNA, 15 bp, Homo sapiens
tctgtcacccaggat

SEQ ID NO: 1348626 - DNA, 15 bp, Homo sapiens
ctctgtcacccagga

SEQ ID NO: 1348627 - DNA, 15 bp, Homo sapiens
gagagtctcgctctg

SEQ ID NO: 1348628 - DNA, 15 bp, Homo sapiens
tgagagtctcgctct

SEQ ID NO: 1348629 - DNA, 15 bp, Homo sapiens
ttgagagtctcgctc

SEQ ID NO: 1348630 - DNA, 15 bp, Homo sapiens
tttgagagtctcgct

SEQ ID NO: 1348631 - DNA, 15 bp, Homo sapiens
ttttgagagtctcgc

SEQ ID NO: 1348632 - DNA, 15 bp, Homo sapiens
tttttgagagtctcg

SEQ ID NO: 1348633 - DNA, 15 bp, Homo sapiens
ttttttgagagtctc

SEQ ID NO: 1348634 - DNA, 15 bp, Homo sapiens
tttttttgagagtct

SEQ ID NO: 1348635 - DNA, 15 bp, Homo sapiens
ttttttttgagagtc

SEQ ID NO: 1348636 - DNA, 15 bp, Homo sapiens
tttttttttgagagt

SEQ ID NO: 1348637 - DNA, 15 bp, Homo sapiens
ctttttttttgagag

SEQ ID NO: 1348638 - DNA, 15 bp, Homo sapiens
cctttttttttgaga

SEQ ID NO: 1348639 - DNA, 15 bp, Homo sapiens
acctttttttttgag

SEQ ID NO: 1348640 - DNA, 15 bp, Homo sapiens
cacctttttttttga

SEQ ID NO: 1348641 - DNA, 15 bp, Homo sapiens
ccacctttttttttg

SEQ ID NO: 1348642 - DNA, 15 bp, Homo sapiens
cccaccttttttttt

SEQ ID NO: 1348643 - DNA, 15 bp, Homo sapiens
acccacctttttttt

SEQ ID NO: 1348644 - DNA, 15 bp, Homo sapiens
cacccaccttttttt

SEQ ID NO: 1348645 - DNA, 15 bp, Homo sapiens
acacccacctttttt

SEQ ID NO: 1348646 - DNA, 15 bp, Homo sapiens
cacacccaccttttt

SEQ ID NO: 1348647 - DNA, 15 bp, Homo sapiens
tcacacccacctttt

SEQ ID NO: 1348648 - DNA, 15 bp, Homo sapiens
ttcacacccaccttt

SEQ ID NO: 1348649 - DNA, 15 bp, Homo sapiens
attcacacccacctt

SEQ ID NO: 1348650 - DNA, 15 bp, Homo sapiens
aattcacacccacct

SEQ ID NO: 1348651 - DNA, 15 bp, Homo sapiens
aaattcacacccacc

SEQ ID NO: 1348652 - DNA, 15 bp, Homo sapiens
aaaattcacacccac

SEQ ID NO: 1348653 - DNA, 15 bp, Homo sapiens
caaaattcacaccca

SEQ ID NO: 1348654 - DNA, 15 bp, Homo sapiens
acaaaattcacaccc

SEQ ID NO: 1348655 - DNA, 15 bp, Homo sapiens
aacaaaattcacacc

SEQ ID NO: 1348656 - DNA, 15 bp, Homo sapiens
taacaaaattcacac

SEQ ID NO: 1348657 - DNA, 15 bp, Homo sapiens
ataacaaaattcaca

SEQ ID NO: 1348658 - DNA, 15 bp, Homo sapiens
cataacaaaattcac

SEQ ID NO: 1348659 - DNA, 15 bp, Homo sapiens
acataacaaaattca

SEQ ID NO: 1348660 - DNA, 15 bp, Homo sapiens
aacataacaaaattc

SEQ ID NO: 1348661 - DNA, 15 bp, Homo sapiens
caacataacaaaatt

SEQ ID NO: 1348662 - DNA, 15 bp, Homo sapiens
acaacataacaaaat

SEQ ID NO: 1348663 - DNA, 15 bp, Homo sapiens
cacaacataacaaaa

SEQ ID NO: 1348664 - DNA, 15 bp, Homo sapiens
gcacaacataacaaa

SEQ ID NO: 1348665 - DNA, 15 bp, Homo sapiens
cgcacaacataacaa

SEQ ID NO: 1348666 - DNA, 15 bp, Homo sapiens
ccgcacaacataaca

SEQ ID NO: 1348667 - DNA, 15 bp, Homo sapiens
cccgcacaacataac

SEQ ID NO: 1348668 - DNA, 15 bp, Homo sapiens
gcccgcacaacataa

SEQ ID NO: 1348669 - DNA, 15 bp, Homo sapiens
agcccgcacaacata

SEQ ID NO: 1348670 - DNA, 15 bp, Homo sapiens
cagcccgcacaacat

SEQ ID NO: 1348671 - DNA, 15 bp, Homo sapiens
ccagcccgcacaaca

SEQ ID NO: 1348672 - DNA, 15 bp, Homo sapiens
tccagcccgcacaac

SEQ ID NO: 1348673 - DNA, 15 bp, Homo sapiens
ctccagcccgcacaa

SEQ ID NO: 1348674 - DNA, 15 bp, Homo sapiens
actccagcccgcaca

SEQ ID NO: 1348675 - DNA, 15 bp, Homo sapiens
cactccagcccgcac

SEQ ID NO: 1348676 - DNA, 15 bp, Homo sapiens
acactccagcccgca

SEQ ID NO: 1348677 - DNA, 15 bp, Homo sapiens
tacactccagcccgc

SEQ ID NO: 1348678 - DNA, 15 bp, Homo sapiens
ctacactccagcccg

SEQ ID NO: 1348679 - DNA, 15 bp, Homo sapiens
actacactccagccc

SEQ ID NO: 1348680 - DNA, 15 bp, Homo sapiens
gcactacactccagc

SEQ ID NO: 1348681 - DNA, 15 bp, Homo sapiens
ggcactacactccag

SEQ ID NO: 1348682 - DNA, 15 bp, Homo sapiens
gggcactacactcca

SEQ ID NO: 1348683 - DNA, 15 bp, Homo sapiens
tgggcactacactcc

SEQ ID NO: 1348684 - DNA, 15 bp, Homo sapiens
atgggcactacactc

SEQ ID NO: 1348685 - DNA, 15 bp, Homo sapiens
gatgggcactacact

SEQ ID NO: 1348686 - DNA, 15 bp, Homo sapiens
ggatgggcactacac

SEQ ID NO: 1348687 - DNA, 15 bp, Homo sapiens
tggatgggcactaca

SEQ ID NO: 1348688 - DNA, 15 bp, Homo sapiens
atggatgggcactac

SEQ ID NO: 1348689 - DNA, 15 bp, Homo sapiens
aatggatgggcacta

SEQ ID NO: 1348690 - DNA, 15 bp, Homo sapiens
caatggatgggcact

SEQ ID NO: 1348691 - DNA, 15 bp, Homo sapiens
ccaatggatgggcac

SEQ ID NO: 1348692 - DNA, 15 bp, Homo sapiens
gccaatggatgggca

SEQ ID NO: 1348693 - DNA, 15 bp, Homo sapiens
tgccaatggatgggc

SEQ ID NO: 1348694 - DNA, 15 bp, Homo sapiens
gtgccaatggatggg

SEQ ID NO: 1348695 - DNA, 15 bp, Homo sapiens
cgtgccaatggatgg

SEQ ID NO: 1348696 - DNA, 15 bp, Homo sapiens
tcgtgccaatggatg

SEQ ID NO: 1348697 - DNA, 15 bp, Homo sapiens
atcgtgccaatggat

SEQ ID NO: 1348698 - DNA, 15 bp, Homo sapiens
gatcgtgccaatgga

SEQ ID NO: 1348699 - DNA, 15 bp, Homo sapiens
tgatcgtgccaatgg

SEQ ID NO: 1348700 - DNA, 15 bp, Homo sapiens
atgatcgtgccaatg

SEQ ID NO: 1348701 - DNA, 15 bp, Homo sapiens
tatgatcgtgccaat

SEQ ID NO: 1348702 - DNA, 15 bp, Homo sapiens
ctatgatcgtgccaa

SEQ ID NO: 1348703 - DNA, 15 bp, Homo sapiens
tctatgatcgtgcca

SEQ ID NO: 1348704 - DNA, 15 bp, Homo sapiens
ctctatgatcgtgcc

SEQ ID NO: 1348705 - DNA, 15 bp, Homo sapiens
actctatgatcgtgc

SEQ ID NO: 1348706 - DNA, 15 bp, Homo sapiens
tactctatgatcgtg

SEQ ID NO: 1348707 - DNA, 15 bp, Homo sapiens
gtactctatgatcgt

SEQ ID NO: 1348708 - DNA, 15 bp, Homo sapiens
agtactctatgatcg

SEQ ID NO: 1348709 - DNA, 15 bp, Homo sapiens
tagtactctatgatc

SEQ ID NO: 1348710 - DNA, 15 bp, Homo sapiens
gtagtactctatgat

SEQ ID NO: 1348711 - DNA, 15 bp, Homo sapiens
tgtagtactctatga

SEQ ID NO: 1348712 - DNA, 15 bp, Homo sapiens
ctgtagtactctatg

SEQ ID NO: 1348713 - DNA, 15 bp, Homo sapiens
gctgtagtactctat

SEQ ID NO: 1348714 - DNA, 15 bp, Homo sapiens
agctgtagtactcta

SEQ ID NO: 1348715 - DNA, 15 bp, Homo sapiens
gagctgtagtactct

SEQ ID NO: 1348716 - DNA, 15 bp, Homo sapiens
ggagctgtagtactc

SEQ ID NO: 1348717 - DNA, 15 bp, Homo sapiens
gggagctgtagtact

SEQ ID NO: 1348718 - DNA, 15 bp, Homo sapiens
agggagctgtagtac

SEQ ID NO: 1348719 - DNA, 15 bp, Homo sapiens
tagggagctgtagta

SEQ ID NO: 1348720 - DNA, 15 bp, Homo sapiens
ttagggagctgtagt

SEQ ID NO: 1348721 - DNA, 15 bp, Homo sapiens
gttagggagctgtag

SEQ ID NO: 1348722 - DNA, 15 bp, Homo sapiens
agttagggagctgta

SEQ ID NO: 1348723 - DNA, 15 bp, Homo sapiens
gagttagggagctgt

SEQ ID NO: 1348724 - DNA, 15 bp, Homo sapiens
ggagttagggagctg

SEQ ID NO: 1348725 - DNA, 15 bp, Homo sapiens
gggagttagggagct

SEQ ID NO: 1348726 - DNA, 15 bp, Homo sapiens
tgggagttagggagc

SEQ ID NO: 1348727 - DNA, 15 bp, Homo sapiens
ctgggagttagggag

SEQ ID NO: 1348728 - DNA, 15 bp, Homo sapiens
tctgggagttaggga

SEQ ID NO: 1348729 - DNA, 15 bp, Homo sapiens
gtctgggagttaggg

SEQ ID NO: 1348730 - DNA, 15 bp, Homo sapiens
agtctgggagttagg

SEQ ID NO: 1348731 - DNA, 15 bp, Homo sapiens
gagtctgggagttag

SEQ ID NO: 1348732 - DNA, 15 bp, Homo sapiens
tgagtctgggagtta

SEQ ID NO: 1348733 - DNA, 15 bp, Homo sapiens
ttgagtctgggagtt

SEQ ID NO: 1348734 - DNA, 15 bp, Homo sapiens
cttgagtctgggagt

SEQ ID NO: 1348735 - DNA, 15 bp, Homo sapiens
acttgagtctgggag

SEQ ID NO: 1348736 - DNA, 15 bp, Homo sapiens
cacttgagtctggga

SEQ ID NO: 1348737 - DNA, 15 bp, Homo sapiens
tcacttgagtctggg

SEQ ID NO: 1348738 - DNA, 15 bp, Homo sapiens
atcacttgagtctgg

SEQ ID NO: 1348739 - DNA, 15 bp, Homo sapiens
aatcacttgagtctg

SEQ ID NO: 1348740 - DNA, 15 bp, Homo sapiens
gaatcacttgagtct

SEQ ID NO: 1348741 - DNA, 15 bp, Homo sapiens
agaatcacttgagtc

SEQ ID NO: 1348742 - DNA, 15 bp, Homo sapiens
gagaatcacttgagt

SEQ ID NO: 1348743 - DNA, 15 bp, Homo sapiens
agggagaatcacttg

SEQ ID NO: 1348744 - DNA, 15 bp, Homo sapiens
gagggagaatcactt

SEQ ID NO: 1348745 - DNA, 15 bp, Homo sapiens
ggagggagaatcact

SEQ ID NO: 1348746 - DNA, 15 bp, Homo sapiens
aggagggagaatcac

SEQ ID NO: 1348747 - DNA, 15 bp, Homo sapiens
gaggagggagaatca

SEQ ID NO: 1348748 - DNA, 15 bp, Homo sapiens
agaggagggagaatc

SEQ ID NO: 1348749 - DNA, 15 bp, Homo sapiens
cagaggagggagaat

SEQ ID NO: 1348750 - DNA, 15 bp, Homo sapiens
acagaggagggagaa

SEQ ID NO: 1348751 - DNA, 15 bp, Homo sapiens
gacagaggagggaga

SEQ ID NO: 1348752 - DNA, 15 bp, Homo sapiens
agacagaggagggag

SEQ ID NO: 1348753 - DNA, 15 bp, Homo sapiens
gagacagaggaggga

SEQ ID NO: 1348754 - DNA, 15 bp, Homo sapiens
ggagacagaggaggg

SEQ ID NO: 1348755 - DNA, 15 bp, Homo sapiens
gggagacagaggagg

SEQ ID NO: 1348756 - DNA, 15 bp, Homo sapiens
ggggagacagaggag

SEQ ID NO: 1348757 - DNA, 15 bp, Homo sapiens
tggggagacagagga

SEQ ID NO: 1348758 - DNA, 15 bp, Homo sapiens
ctggggagacagagg

SEQ ID NO: 1348759 - DNA, 15 bp, Homo sapiens
actggggagacagag

SEQ ID NO: 1348760 - DNA, 15 bp, Homo sapiens
tactggggagacaga

SEQ ID NO: 1348761 - DNA, 15 bp, Homo sapiens
ctactggggagacag

SEQ ID NO: 1348762 - DNA, 15 bp, Homo sapiens
gctactggggagaca

SEQ ID NO: 1348763 - DNA, 15 bp, Homo sapiens
tgctactggggagac

SEQ ID NO: 1348764 - DNA, 15 bp, Homo sapiens
ctgctactggggaga

SEQ ID NO: 1348765 - DNA, 15 bp, Homo sapiens
cctgctactggggag

SEQ ID NO: 1348766 - DNA, 15 bp, Homo sapiens
tcctgctactgggga

SEQ ID NO: 1348767 - DNA, 15 bp, Homo sapiens
ttcctgctactgggg

SEQ ID NO: 1348768 - DNA, 15 bp, Homo sapiens
gttcctgctactggg

SEQ ID NO: 1348769 - DNA, 15 bp, Homo sapiens
agttcctgctactgg

SEQ ID NO: 1348770 - DNA, 15 bp, Homo sapiens
tagttcctgctactg

SEQ ID NO: 1348771 - DNA, 15 bp, Homo sapiens
gtagttcctgctact

SEQ ID NO: 1348772 - DNA, 15 bp, Homo sapiens
tgtagttcctgctac

SEQ ID NO: 1348773 - DNA, 15 bp, Homo sapiens
ctgtagttcctgcta

SEQ ID NO: 1348774 - DNA, 15 bp, Homo sapiens
gcctgtagttcctgc

SEQ ID NO: 1348775 - DNA, 15 bp, Homo sapiens
ggcctgtagttcctg

SEQ ID NO: 1348776 - DNA, 15 bp, Homo sapiens
aggcctgtagttcct

SEQ ID NO: 1348777 - DNA, 15 bp, Homo sapiens
caggcctgtagttcc

SEQ ID NO: 1348778 - DNA, 15 bp, Homo sapiens
acaggcctgtagttc

SEQ ID NO: 1348779 - DNA, 15 bp, Homo sapiens
cacaggcctgtagtt

SEQ ID NO: 1348780 - DNA, 15 bp, Homo sapiens
gcacaggcctgtagt

SEQ ID NO: 1348781 - DNA, 15 bp, Homo sapiens
ggcacaggcctgtag

SEQ ID NO: 1348782 - DNA, 15 bp, Homo sapiens
tggcacaggcctgta

SEQ ID NO: 1348783 - DNA, 15 bp, Homo sapiens
gtggcacaggcctgt

SEQ ID NO: 1348784 - DNA, 15 bp, Homo sapiens
ggtggcacaggcctg

SEQ ID NO: 1348785 - DNA, 15 bp, Homo sapiens
tggtggcacaggcct

SEQ ID NO: 1348786 - DNA, 15 bp, Homo sapiens
atggtggcacaggcc

SEQ ID NO: 1348787 - DNA, 15 bp, Homo sapiens
catggtggcacaggc

SEQ ID NO: 1348788 - DNA, 15 bp, Homo sapiens
gcatggtggcacagg

SEQ ID NO: 1348789 - DNA, 15 bp, Homo sapiens
ggcatggtggcacag

SEQ ID NO: 1348790 - DNA, 15 bp, Homo sapiens
aagctgggcatggtg

SEQ ID NO: 1348791 - DNA, 15 bp, Homo sapiens
aaagctgggcatggt

SEQ ID NO: 1348792 - DNA, 15 bp, Homo sapiens
gaaagctgggcatgg

SEQ ID NO: 1348793 - DNA, 15 bp, Homo sapiens
agaaagctgggcatg

SEQ ID NO: 1348794 - DNA, 15 bp, Homo sapiens
aagaaagctgggcat

SEQ ID NO: 1348795 - DNA, 15 bp, Homo sapiens
taagaaagctgggca

SEQ ID NO: 1348796 - DNA, 15 bp, Homo sapiens
ctaagaaagctgggc

SEQ ID NO: 1348797 - DNA, 15 bp, Homo sapiens
actaagaaagctggg

SEQ ID NO: 1348798 - DNA, 15 bp, Homo sapiens
gactaagaaagctgg

SEQ ID NO: 1348799 - DNA, 15 bp, Homo sapiens
agactaagaaagctg

SEQ ID NO: 1348800 - DNA, 15 bp, Homo sapiens
aagactaagaaagct

SEQ ID NO: 1348801 - DNA, 15 bp, Homo sapiens
caagactaagaaagc

SEQ ID NO: 1348802 - DNA, 15 bp, Homo sapiens
tcaagactaagaaag

SEQ ID NO: 1348803 - DNA, 15 bp, Homo sapiens
ctcaagactaagaaa

SEQ ID NO: 1348804 - DNA, 15 bp, Homo sapiens
cctcaagactaagaa

SEQ ID NO: 1348805 - DNA, 15 bp, Homo sapiens
ccctcaagactaaga

SEQ ID NO: 1348806 - DNA, 15 bp, Homo sapiens
tccctcaagactaag

SEQ ID NO: 1348807 - DNA, 15 bp, Homo sapiens
gtccctcaagactaa

SEQ ID NO: 1348808 - DNA, 15 bp, Homo sapiens
agtccctcaagacta

SEQ ID NO: 1348809 - DNA, 15 bp, Homo sapiens
cagtccctcaagact

SEQ ID NO: 1348810 - DNA, 15 bp, Homo sapiens
gcagtccctcaagac

SEQ ID NO: 1348811 - DNA, 15 bp, Homo sapiens
tgcagtccctcaaga

SEQ ID NO: 1348812 - DNA, 15 bp, Homo sapiens
atgcagtccctcaag

SEQ ID NO: 1348813 - DNA, 15 bp, Homo sapiens
aatgcagtccctcaa

SEQ ID NO: 1348814 - DNA, 15 bp, Homo sapiens
aaatgcagtccctca

SEQ ID NO: 1348815 - DNA, 15 bp, Homo sapiens
taaatgcagtccctc

SEQ ID NO: 1348816 - DNA, 15 bp, Homo sapiens
gtaaatgcagtccct

SEQ ID NO: 1348817 - DNA, 15 bp, Homo sapiens
tgtaaatgcagtccc

SEQ ID NO: 1348818 - DNA, 15 bp, Homo sapiens
gtgtaaatgcagtcc

SEQ ID NO: 1348819 - DNA, 15 bp, Homo sapiens
ggtgtaaatgcagtc

SEQ ID NO: 1348820 - DNA, 15 bp, Homo sapiens
aggtgtaaatgcagt

SEQ ID NO: 1348821 - DNA, 15 bp, Homo sapiens
taggtgtaaatgcag

SEQ ID NO: 1348822 - DNA, 15 bp, Homo sapiens
ataggtgtaaatgca

SEQ ID NO: 1348823 - DNA, 15 bp, Homo sapiens
cataggtgtaaatgc

SEQ ID NO: 1348824 - DNA, 15 bp, Homo sapiens
gcataggtgtaaatg

SEQ ID NO: 1348825 - DNA, 15 bp, Homo sapiens
ggcataggtgtaaat

SEQ ID NO: 1348826 - DNA, 15 bp, Homo sapiens
aggcataggtgtaaa

SEQ ID NO: 1348827 - DNA, 15 bp, Homo sapiens
aaggcataggtgtaa

SEQ ID NO: 1348828 - DNA, 15 bp, Homo sapiens
aaaggcataggtgta

SEQ ID NO: 1348829 - DNA, 15 bp, Homo sapiens
aaaaggcataggtgt

SEQ ID NO: 1348830 - DNA, 15 bp, Homo sapiens
taaaaggcataggtg

SEQ ID NO: 1348831 - DNA, 15 bp, Homo sapiens
gtaaaaggcataggt

SEQ ID NO: 1348832 - DNA, 15 bp, Homo sapiens
agtaaaaggcatagg

SEQ ID NO: 1348833 - DNA, 15 bp, Homo sapiens
gagtaaaaggcatag

SEQ ID NO: 1348834 - DNA, 15 bp, Homo sapiens
agagtaaaaggcata

SEQ ID NO: 1348835 - DNA, 15 bp, Homo sapiens
tagagtaaaaggcat

SEQ ID NO: 1348836 - DNA, 15 bp, Homo sapiens
ctagagtaaaaggca

SEQ ID NO: 1348837 - DNA, 15 bp, Homo sapiens
cctagagtaaaaggc

SEQ ID NO: 1348838 - DNA, 15 bp, Homo sapiens
ccctagagtaaaagg

SEQ ID NO: 1348839 - DNA, 15 bp, Homo sapiens
accctagagtaaaag

SEQ ID NO: 1348840 - DNA, 15 bp, Homo sapiens
gaccctagagtaaaa

SEQ ID NO: 1348841 - DNA, 15 bp, Homo sapiens
agaccctagagtaaa

SEQ ID NO: 1348842 - DNA, 15 bp, Homo sapiens
aagaccctagagtaa

SEQ ID NO: 1348843 - DNA, 15 bp, Homo sapiens
aaagaccctagagta

SEQ ID NO: 1348844 - DNA, 15 bp, Homo sapiens
aaaagaccctagagt

SEQ ID NO: 1348845 - DNA, 15 bp, Homo sapiens
taaaagaccctagag

SEQ ID NO: 1348846 - DNA, 15 bp, Homo sapiens
ataaaagaccctaga

SEQ ID NO: 1348847 - DNA, 15 bp, Homo sapiens
aataaaagaccctag

SEQ ID NO: 1348848 - DNA, 15 bp, Homo sapiens
gaataaaagacccta

SEQ ID NO: 1348849 - DNA, 15 bp, Homo sapiens
tgaataaaagaccct

SEQ ID NO: 1348850 - DNA, 15 bp, Homo sapiens
atgaataaaagaccc

SEQ ID NO: 1348851 - DNA, 15 bp, Homo sapiens
tatgaataaaagacc

SEQ ID NO: 1348852 - DNA, 15 bp, Homo sapiens
atatgaataaaagac

SEQ ID NO: 1348853 - DNA, 15 bp, Homo sapiens
aatatgaataaaaga

SEQ ID NO: 1348854 - DNA, 15 bp, Homo sapiens
caatatgaataaaag

SEQ ID NO: 1348855 - DNA, 15 bp, Homo sapiens
gcaatatgaataaaa

SEQ ID NO: 1348856 - DNA, 15 bp, Homo sapiens
agcaatatgaataaa

SEQ ID NO: 1348857 - DNA, 15 bp, Homo sapiens
tagcaatatgaataa

SEQ ID NO: 1348858 - DNA, 15 bp, Homo sapiens
ctagcaatatgaata

SEQ ID NO: 1348859 - DNA, 15 bp, Homo sapiens
tctagcaatatgaat

SEQ ID NO: 1348860 - DNA, 15 bp, Homo sapiens
ttctagcaatatgaa

SEQ ID NO: 1348861 - DNA, 15 bp, Homo sapiens
tttctagcaatatga

SEQ ID NO: 1348862 - DNA, 15 bp, Homo sapiens
atttctagcaatatg

SEQ ID NO: 1348863 - DNA, 15 bp, Homo sapiens
aatttctagcaatat

SEQ ID NO: 1348864 - DNA, 15 bp, Homo sapiens
aaatttctagcaata

SEQ ID NO: 1348865 - DNA, 15 bp, Homo sapiens
caaatttctagcaat

SEQ ID NO: 1348866 - DNA, 15 bp, Homo sapiens
ccaaatttctagcaa

SEQ ID NO: 1348867 - DNA, 15 bp, Homo sapiens
tccaaatttctagca

SEQ ID NO: 1348868 - DNA, 15 bp, Homo sapiens
ctccaaatttctagc

SEQ ID NO: 1348869 - DNA, 15 bp, Homo sapiens
tctccaaatttctag

SEQ ID NO: 1348870 - DNA, 15 bp, Homo sapiens
ttctccaaatttcta

SEQ ID NO: 1348871 - DNA, 15 bp, Homo sapiens
cttctccaaatttct

SEQ ID NO: 1348872 - DNA, 15 bp, Homo sapiens
tcttctccaaatttc

SEQ ID NO: 1348873 - DNA, 15 bp, Homo sapiens
ttcttctccaaattt

SEQ ID NO: 1348874 - DNA, 15 bp, Homo sapiens
tttcttctccaaatt

SEQ ID NO: 1348875 - DNA, 15 bp, Homo sapiens
ctttcttctccaaat

SEQ ID NO: 1348876 - DNA, 15 bp, Homo sapiens
tctttcttctccaaa

SEQ ID NO: 1348877 - DNA, 15 bp, Homo sapiens
ttctttcttctccaa

SEQ ID NO: 1348878 - DNA, 15 bp, Homo sapiens
tttctttcttctcca

SEQ ID NO: 1348879 - DNA, 15 bp, Homo sapiens
ctttctttcttctcc

SEQ ID NO: 1348880 - DNA, 15 bp, Homo sapiens
cctttctttcttctc

SEQ ID NO: 1348881 - DNA, 15 bp, Homo sapiens
gcctttctttcttct

SEQ ID NO: 1348882 - DNA, 15 bp, Homo sapiens
tgcctttctttcttc

SEQ ID NO: 1348883 - DNA, 15 bp, Homo sapiens
atgcctttctttctt

SEQ ID NO: 1348884 - DNA, 15 bp, Homo sapiens
tatgcctttctttct

SEQ ID NO: 1348885 - DNA, 15 bp, Homo sapiens
ttatgcctttctttc

SEQ ID NO: 1348886 - DNA, 15 bp, Homo sapiens
attatgcctttcttt

SEQ ID NO: 1348887 - DNA, 15 bp, Homo sapiens
gattatgcctttctt

SEQ ID NO: 1348888 - DNA, 15 bp, Homo sapiens
agattatgcctttct

SEQ ID NO: 1348889 - DNA, 15 bp, Homo sapiens
gagattatgcctttc

SEQ ID NO: 1348890 - DNA, 15 bp, Homo sapiens
agagattatgccttt

SEQ ID NO: 1348891 - DNA, 15 bp, Homo sapiens
cagagattatgcctt

SEQ ID NO: 1348892 - DNA, 15 bp, Homo sapiens
gcagagattatgcct

SEQ ID NO: 1348893 - DNA, 15 bp, Homo sapiens
tgcagagattatgcc

SEQ ID NO: 1348894 - DNA, 15 bp, Homo sapiens
ctgcagagattatgc

SEQ ID NO: 1348895 - DNA, 15 bp, Homo sapiens
tctgcagagattatg

SEQ ID NO: 1348896 - DNA, 15 bp, Homo sapiens
ttctgcagagattat

SEQ ID NO: 1348897 - DNA, 15 bp, Homo sapiens
tttctgcagagatta

SEQ ID NO: 1348898 - DNA, 15 bp, Homo sapiens
ttttctgcagagatt

SEQ ID NO: 1348899 - DNA, 15 bp, Homo sapiens
cttttctgcagagat

SEQ ID NO: 1348900 - DNA, 15 bp, Homo sapiens
gcttttctgcagaga

SEQ ID NO: 1348901 - DNA, 15 bp, Homo sapiens
ggcttttctgcagag

SEQ ID NO: 1348902 - DNA, 15 bp, Homo sapiens
tggcttttctgcaga

SEQ ID NO: 1348903 - DNA, 15 bp, Homo sapiens
atggcttttctgcag

SEQ ID NO: 1348904 - DNA, 15 bp, Homo sapiens
aatggcttttctgca

SEQ ID NO: 1348905 - DNA, 15 bp, Homo sapiens
taatggcttttctgc

SEQ ID NO: 1348906 - DNA, 15 bp, Homo sapiens
ataatggcttttctg

SEQ ID NO: 1348907 - DNA, 15 bp, Homo sapiens
aataatggcttttct

SEQ ID NO: 1348908 - DNA, 15 bp, Homo sapiens
aaataatggcttttc

SEQ ID NO: 1348909 - DNA, 15 bp, Homo sapiens
gaaataatggctttt

SEQ ID NO: 1348910 - DNA, 15 bp, Homo sapiens
agaaataatggcttt

SEQ ID NO: 1348911 - DNA, 15 bp, Homo sapiens
cagaaataatggctt

SEQ ID NO: 1348912 - DNA, 15 bp, Homo sapiens
gcagaaataatggct

SEQ ID NO: 1348913 - DNA, 15 bp, Homo sapiens
tgcagaaataatggc

SEQ ID NO: 1348914 - DNA, 15 bp, Homo sapiens
ctgcagaaataatgg

SEQ ID NO: 1348915 - DNA, 15 bp, Homo sapiens
tctgcagaaataatg

SEQ ID NO: 1348916 - DNA, 15 bp, Homo sapiens
atctgcagaaataat

SEQ ID NO: 1348917 - DNA, 15 bp, Homo sapiens
tatctgcagaaataa

SEQ ID NO: 1348918 - DNA, 15 bp, Homo sapiens
ctatctgcagaaata

SEQ ID NO: 1348919 - DNA, 15 bp, Homo sapiens
actatctgcagaaat

SEQ ID NO: 1348920 - DNA, 15 bp, Homo sapiens
aactatctgcagaaa

SEQ ID NO: 1348921 - DNA, 15 bp, Homo sapiens
gaactatctgcagaa

SEQ ID NO: 1348922 - DNA, 15 bp, Homo sapiens
aagaactatctgcag

SEQ ID NO: 1348923 - DNA, 15 bp, Homo sapiens
aaagaactatctgca

SEQ ID NO: 1348924 - DNA, 15 bp, Homo sapiens
aaaagaactatctgc

SEQ ID NO: 1348925 - DNA, 15 bp, Homo sapiens
aaaaagaactatctg

SEQ ID NO: 1348926 - DNA, 15 bp, Homo sapiens
aaaaaagaactatct

SEQ ID NO: 1348927 - DNA, 15 bp, Homo sapiens
aaaaaaagaactatc

SEQ ID NO: 1348928 - DNA, 15 bp, Homo sapiens
aaaaaaaagaactat

SEQ ID NO: 1348929 - DNA, 15 bp, Homo sapiens
aaaaaaaaagaacta

SEQ ID NO: 1348930 - DNA, 15 bp, Homo sapiens
aaaaaaaaaagaact

SEQ ID NO: 1348931 - DNA, 15 bp, Homo sapiens
caaaaaaaaaaagaa

SEQ ID NO: 1348932 - DNA, 15 bp, Homo sapiens
tcaaaaaaaaaaaga

SEQ ID NO: 1348933 - DNA, 15 bp, Homo sapiens
ctcaaaaaaaaaaag

SEQ ID NO: 1348934 - DNA, 15 bp, Homo sapiens
aagaaagactccatc

SEQ ID NO: 1348935 - DNA, 15 bp, Homo sapiens
aaagaaagactccat

SEQ ID NO: 1348936 - DNA, 15 bp, Homo sapiens
caaagaaagactcca

SEQ ID NO: 1348937 - DNA, 15 bp, Homo sapiens
acaaagaaagactcc

SEQ ID NO: 1348938 - DNA, 15 bp, Homo sapiens
gacaaagaaagactc

SEQ ID NO: 1348939 - DNA, 15 bp, Homo sapiens
tgacaaagaaagact

SEQ ID NO: 1348940 - DNA, 15 bp, Homo sapiens
gtgacaaagaaagac

SEQ ID NO: 1348941 - DNA, 15 bp, Homo sapiens
ggtgacaaagaaaga

SEQ ID NO: 1348942 - DNA, 15 bp, Homo sapiens
gggtgacaaagaaag

SEQ ID NO: 1348943 - DNA, 15 bp, Homo sapiens
tgggtgacaaagaaa

SEQ ID NO: 1348944 - DNA, 15 bp, Homo sapiens
ctgggtgacaaagaa

SEQ ID NO: 1348945 - DNA, 15 bp, Homo sapiens
cctgggtgacaaaga

SEQ ID NO: 1348946 - DNA, 15 bp, Homo sapiens
tagatcacaccactg

SEQ ID NO: 1348947 - DNA, 15 bp, Homo sapiens
ctagatcacaccact

SEQ ID NO: 1348948 - DNA, 15 bp, Homo sapiens
cctagatcacaccac

SEQ ID NO: 1348949 - DNA, 15 bp, Homo sapiens
gcctagatcacacca

SEQ ID NO: 1348950 - DNA, 15 bp, Homo sapiens
agcctagatcacacc

SEQ ID NO: 1348951 - DNA, 15 bp, Homo sapiens
gagcctagatcacac

SEQ ID NO: 1348952 - DNA, 15 bp, Homo sapiens
tgagcctagatcaca

SEQ ID NO: 1348953 - DNA, 15 bp, Homo sapiens
gtgagcctagatcac

SEQ ID NO: 1348954 - DNA, 15 bp, Homo sapiens
agtgagcctagatca

SEQ ID NO: 1348955 - DNA, 15 bp, Homo sapiens
tagtgagcctagatc

SEQ ID NO: 1348956 - DNA, 15 bp, Homo sapiens
gtagtgagcctagat

SEQ ID NO: 1348957 - DNA, 15 bp, Homo sapiens
tgtagtgagcctaga

SEQ ID NO: 1348958 - DNA, 15 bp, Homo sapiens
ttgtagtgagcctag

SEQ ID NO: 1348959 - DNA, 15 bp, Homo sapiens
cttgtagtgagccta

SEQ ID NO: 1348960 - DNA, 15 bp, Homo sapiens
gcttgtagtgagcct

SEQ ID NO: 1348961 - DNA, 15 bp, Homo sapiens
agcttgtagtgagcc

SEQ ID NO: 1348962 - DNA, 15 bp, Homo sapiens
gagcttgtagtgagc

SEQ ID NO: 1348963 - DNA, 15 bp, Homo sapiens
ggagcttgtagtgag

SEQ ID NO: 1348964 - DNA, 15 bp, Homo sapiens
tggagcttgtagtga

SEQ ID NO: 1348965 - DNA, 15 bp, Homo sapiens
gtggagcttgtagtg

SEQ ID NO: 1348966 - DNA, 15 bp, Homo sapiens
ggtggagcttgtagt

SEQ ID NO: 1348967 - DNA, 15 bp, Homo sapiens
aggtggagcttgtag

SEQ ID NO: 1348968 - DNA, 15 bp, Homo sapiens
gaggtggagcttgta

SEQ ID NO: 1348969 - DNA, 15 bp, Homo sapiens
ggaggtggagcttgt

SEQ ID NO: 1348970 - DNA, 15 bp, Homo sapiens
aaggcaggagaatgg

SEQ ID NO: 1348971 - DNA, 15 bp, Homo sapiens
taaggcaggagaatg

SEQ ID NO: 1348972 - DNA, 15 bp, Homo sapiens
cgggaggctaaggca

SEQ ID NO: 1348973 - DNA, 15 bp, Homo sapiens
tcgggaggctaaggc

SEQ ID NO: 1348974 - DNA, 15 bp, Homo sapiens
ctcgggaggctaagg

SEQ ID NO: 1348975 - DNA, 15 bp, Homo sapiens
actcgggaggctaag

SEQ ID NO: 1348976 - DNA, 15 bp, Homo sapiens
tactcgggaggctaa

SEQ ID NO: 1348977 - DNA, 15 bp, Homo sapiens
ctactcgggaggcta

SEQ ID NO: 1348978 - DNA, 15 bp, Homo sapiens
cactactcgggaggc

SEQ ID NO: 1348979 - DNA, 15 bp, Homo sapiens
ccactactcgggagg

SEQ ID NO: 1348980 - DNA, 15 bp, Homo sapiens
cccactactcgggag

SEQ ID NO: 1348981 - DNA, 15 bp, Homo sapiens
tcccactactcggga

SEQ ID NO: 1348982 - DNA, 15 bp, Homo sapiens
gtcccactactcggg

SEQ ID NO: 1348983 - DNA, 15 bp, Homo sapiens
agtcccactactcgg

SEQ ID NO: 1348984 - DNA, 15 bp, Homo sapiens
tagtcccactactcg

SEQ ID NO: 1348985 - DNA, 15 bp, Homo sapiens
gtagtcccactactc

SEQ ID NO: 1348986 - DNA, 15 bp, Homo sapiens
tgtagtcccactact

SEQ ID NO: 1348987 - DNA, 15 bp, Homo sapiens
ctgtagtcccactac

SEQ ID NO: 1348988 - DNA, 15 bp, Homo sapiens
cctgtagtcccacta

SEQ ID NO: 1348989 - DNA, 15 bp, Homo sapiens
gcctgtagtcccact

SEQ ID NO: 1348990 - DNA, 15 bp, Homo sapiens
tgcctgtagtcccac

SEQ ID NO: 1348991 - DNA, 15 bp, Homo sapiens
gggcatggtggcggg

SEQ ID NO: 1348992 - DNA, 15 bp, Homo sapiens
tgggcatggtggcgg

SEQ ID NO: 1348993 - DNA, 15 bp, Homo sapiens
ctgggcatggtggcg

SEQ ID NO: 1348994 - DNA, 15 bp, Homo sapiens
atacaaaaaaaaatt

SEQ ID NO: 1348995 - DNA, 15 bp, Homo sapiens
aaaaaatacaaaaaa

SEQ ID NO: 1348996 - DNA, 15 bp, Homo sapiens
taagatggtgaaacc

SEQ ID NO: 1348997 - DNA, 15 bp, Homo sapiens
ctaagatggtgaaac

SEQ ID NO: 1348998 - DNA, 15 bp, Homo sapiens
gctaagatggtgaaa

SEQ ID NO: 1348999 - DNA, 15 bp, Homo sapiens
ggctaagatggtgaa

SEQ ID NO: 1349000 - DNA, 15 bp, Homo sapiens
tggctaagatggtga

SEQ ID NO: 1349001 - DNA, 15 bp, Homo sapiens
ctggctaagatggtg

SEQ ID NO: 1349002 - DNA, 15 bp, Homo sapiens
cctggctaagatggt

SEQ ID NO: 1349003 - DNA, 15 bp, Homo sapiens
tcctggctaagatgg

SEQ ID NO: 1349004 - DNA, 15 bp, Homo sapiens
atcctggctaagatg

SEQ ID NO: 1349005 - DNA, 15 bp, Homo sapiens
catcctggctaagat

SEQ ID NO: 1349006 - DNA, 15 bp, Homo sapiens
ccatcctggctaaga

SEQ ID NO: 1349007 - DNA, 15 bp, Homo sapiens
accatcctggctaag

SEQ ID NO: 1349008 - DNA, 15 bp, Homo sapiens
aaggtcagaagatcg

SEQ ID NO: 1349009 - DNA, 15 bp, Homo sapiens
caaggtcagaagatc

SEQ ID NO: 1349010 - DNA, 15 bp, Homo sapiens
acaaggtcagaagat

SEQ ID NO: 1349011 - DNA, 15 bp, Homo sapiens
cacaaggtcagaaga

SEQ ID NO: 1349012 - DNA, 15 bp, Homo sapiens
tcacaaggtcagaag

SEQ ID NO: 1349013 - DNA, 15 bp, Homo sapiens
atcacaaggtcagaa

SEQ ID NO: 1349014 - DNA, 15 bp, Homo sapiens
gatcacaaggtcaga

SEQ ID NO: 1349015 - DNA, 15 bp, Homo sapiens
cggcggatcacaagg

SEQ ID NO: 1349016 - DNA, 15 bp, Homo sapiens
tcggcggatcacaag

SEQ ID NO: 1349017 - DNA, 15 bp, Homo sapiens
gtcggcggatcacaa

SEQ ID NO: 1349018 - DNA, 15 bp, Homo sapiens
ggtcggcggatcaca

SEQ ID NO: 1349019 - DNA, 15 bp, Homo sapiens
aggtcggcggatcac

SEQ ID NO: 1349020 - DNA, 15 bp, Homo sapiens
gaggtcggcggatca

SEQ ID NO: 1349021 - DNA, 15 bp, Homo sapiens
cgaggtcggcggatc

SEQ ID NO: 1349022 - DNA, 15 bp, Homo sapiens
ccgaggtcggcggat

SEQ ID NO: 1349023 - DNA, 15 bp, Homo sapiens
gccgaggtcggcgga

SEQ ID NO: 1349024 - DNA, 15 bp, Homo sapiens
ggccgaggtcggcgg

SEQ ID NO: 1349025 - DNA, 15 bp, Homo sapiens
tggccgaggtcggcg

SEQ ID NO: 1349026 - DNA, 15 bp, Homo sapiens
gtggccgaggtcggc

SEQ ID NO: 1349027 - DNA, 15 bp, Homo sapiens
ggtggccgaggtcgg

SEQ ID NO: 1349028 - DNA, 15 bp, Homo sapiens
gggtggccgaggtcg

SEQ ID NO: 1349029 - DNA, 15 bp, Homo sapiens
tgggtggccgaggtc

SEQ ID NO: 1349030 - DNA, 15 bp, Homo sapiens
ttgggtggccgaggt

SEQ ID NO: 1349031 - DNA, 15 bp, Homo sapiens
tttgggtggccgagg

SEQ ID NO: 1349032 - DNA, 15 bp, Homo sapiens
ctttgggtggccgag

SEQ ID NO: 1349033 - DNA, 15 bp, Homo sapiens
actttgggtggccga

SEQ ID NO: 1349034 - DNA, 15 bp, Homo sapiens
cactttgggtggccg

SEQ ID NO: 1349035 - DNA, 15 bp, Homo sapiens
gcactttgggtggcc

SEQ ID NO: 1349036 - DNA, 15 bp, Homo sapiens
agcactttgggtggc

SEQ ID NO: 1349037 - DNA, 15 bp, Homo sapiens
cagcactttgggtgg

SEQ ID NO: 1349038 - DNA, 15 bp, Homo sapiens
atgtggtggctcatg

SEQ ID NO: 1349039 - DNA, 15 bp, Homo sapiens
gatgtggtggctcat

SEQ ID NO: 1349040 - DNA, 15 bp, Homo sapiens
ggatgtggtggctca

SEQ ID NO: 1349041 - DNA, 15 bp, Homo sapiens
cggatgtggtggctc

SEQ ID NO: 1349042 - DNA, 15 bp, Homo sapiens
ccggatgtggtggct

SEQ ID NO: 1349043 - DNA, 15 bp, Homo sapiens
gccggatgtggtggc

SEQ ID NO: 1349044 - DNA, 15 bp, Homo sapiens
ggccggatgtggtgg

SEQ ID NO: 1349045 - DNA, 15 bp, Homo sapiens
tggccggatgtggtg

SEQ ID NO: 1349046 - DNA, 15 bp, Homo sapiens
ttggccggatgtggt

SEQ ID NO: 1349047 - DNA, 15 bp, Homo sapiens
attggccggatgtgg

SEQ ID NO: 1349048 - DNA, 15 bp, Homo sapiens
aattggccggatgtg

SEQ ID NO: 1349049 - DNA, 15 bp, Homo sapiens
aaattggccggatgt

SEQ ID NO: 1349050 - DNA, 15 bp, Homo sapiens
gaaattggccggatg

SEQ ID NO: 1349051 - DNA, 15 bp, Homo sapiens
agaaattggccggat

SEQ ID NO: 1349052 - DNA, 15 bp, Homo sapiens
cagaaattggccgga

SEQ ID NO: 1349053 - DNA, 15 bp, Homo sapiens
gcagaaattggccgg

SEQ ID NO: 1349054 - DNA, 15 bp, Homo sapiens
cgcagaaattggccg

SEQ ID NO: 1349055 - DNA, 15 bp, Homo sapiens
ccgcagaaattggcc

SEQ ID NO: 1349056 - DNA, 15 bp, Homo sapiens
tccgcagaaattggc

SEQ ID NO: 1349057 - DNA, 15 bp, Homo sapiens
atccgcagaaattgg

SEQ ID NO: 1349058 - DNA, 15 bp, Homo sapiens
tatccgcagaaattg

SEQ ID NO: 1349059 - DNA, 15 bp, Homo sapiens
ctatccgcagaaatt

SEQ ID NO: 1349060 - DNA, 15 bp, Homo sapiens
actatccgcagaaat

SEQ ID NO: 1349061 - DNA, 15 bp, Homo sapiens
aactatccgcagaaa

SEQ ID NO: 1349062 - DNA, 15 bp, Homo sapiens
gaactatccgcagaa

SEQ ID NO: 1349063 - DNA, 15 bp, Homo sapiens
agaactatccgcaga

SEQ ID NO: 1349064 - DNA, 15 bp, Homo sapiens
tagaactatccgcag

SEQ ID NO: 1349065 - DNA, 15 bp, Homo sapiens
ttagaactatccgca

SEQ ID NO: 1349066 - DNA, 15 bp, Homo sapiens
cttagaactatccgc

SEQ ID NO: 1349067 - DNA, 15 bp, Homo sapiens
gcttagaactatccg

SEQ ID NO: 1349068 - DNA, 15 bp, Homo sapiens
agcttagaactatcc

SEQ ID NO: 1349069 - DNA, 15 bp, Homo sapiens
aagcttagaactatc

SEQ ID NO: 1349070 - DNA, 15 bp, Homo sapiens
aaagcttagaactat

SEQ ID NO: 1349071 - DNA, 15 bp, Homo sapiens
taaagcttagaacta

SEQ ID NO: 1349072 - DNA, 15 bp, Homo sapiens
ctaaagcttagaact

SEQ ID NO: 1349073 - DNA, 15 bp, Homo sapiens
actaaagcttagaac

SEQ ID NO: 1349074 - DNA, 15 bp, Homo sapiens
aactaaagcttagaa

SEQ ID NO: 1349075 - DNA, 15 bp, Homo sapiens
aaactaaagcttaga

SEQ ID NO: 1349076 - DNA, 15 bp, Homo sapiens
aaaactaaagcttag

SEQ ID NO: 1349077 - DNA, 15 bp, Homo sapiens
caaaactaaagctta

SEQ ID NO: 1349078 - DNA, 15 bp, Homo sapiens
tcaaaactaaagctt

SEQ ID NO: 1349079 - DNA, 15 bp, Homo sapiens
gtcaaaactaaagct

SEQ ID NO: 1349080 - DNA, 15 bp, Homo sapiens
ggtcaaaactaaagc

SEQ ID NO: 1349081 - DNA, 15 bp, Homo sapiens
tggtcaaaactaaag

SEQ ID NO: 1349082 - DNA, 15 bp, Homo sapiens
gtggtcaaaactaaa

SEQ ID NO: 1349083 - DNA, 15 bp, Homo sapiens
cgtggtcaaaactaa

SEQ ID NO: 1349084 - DNA, 15 bp, Homo sapiens
acgtggtcaaaacta

SEQ ID NO: 1349085 - DNA, 15 bp, Homo sapiens
aacgtggtcaaaact

SEQ ID NO: 1349086 - DNA, 15 bp, Homo sapiens
caacgtggtcaaaac

SEQ ID NO: 1349087 - DNA, 15 bp, Homo sapiens
ccaacgtggtcaaaa

SEQ ID NO: 1349088 - DNA, 15 bp, Homo sapiens
accaacgtggtcaaa

SEQ ID NO: 1349089 - DNA, 15 bp, Homo sapiens
aaccaacgtggtcaa

SEQ ID NO: 1349090 - DNA, 15 bp, Homo sapiens
caaccaacgtggtca

SEQ ID NO: 1349091 - DNA, 15 bp, Homo sapiens
gcaaccaacgtggtc

SEQ ID NO: 1349092 - DNA, 15 bp, Homo sapiens
ggcaaccaacgtggt

SEQ ID NO: 1349093 - DNA, 15 bp, Homo sapiens
aggcaaccaacgtgg

SEQ ID NO: 1349094 - DNA, 15 bp, Homo sapiens
taggcaaccaacgtg

SEQ ID NO: 1349095 - DNA, 15 bp, Homo sapiens
ataggcaaccaacgt

SEQ ID NO: 1349096 - DNA, 15 bp, Homo sapiens
cataggcaaccaacg

SEQ ID NO: 1349097 - DNA, 15 bp, Homo sapiens
ccataggcaaccaac

SEQ ID NO: 1349098 - DNA, 15 bp, Homo sapiens
gccataggcaaccaa

SEQ ID NO: 1349099 - DNA, 15 bp, Homo sapiens
ggccataggcaacca

SEQ ID NO: 1349100 - DNA, 15 bp, Homo sapiens
tggccataggcaacc

SEQ ID NO: 1349101 - DNA, 15 bp, Homo sapiens
ttggccataggcaac

SEQ ID NO: 1349102 - DNA, 15 bp, Homo sapiens
attggccataggcaa

SEQ ID NO: 1349103 - DNA, 15 bp, Homo sapiens
aattggccataggca

SEQ ID NO: 1349104 - DNA, 15 bp, Homo sapiens
gaattggccataggc

SEQ ID NO: 1349105 - DNA, 15 bp, Homo sapiens
ggaattggccatagg

SEQ ID NO: 1349106 - DNA, 15 bp, Homo sapiens
aggaattggccatag

SEQ ID NO: 1349107 - DNA, 15 bp, Homo sapiens
caggaattggccata

SEQ ID NO: 1349108 - DNA, 15 bp, Homo sapiens
ccaggaattggccat

SEQ ID NO: 1349109 - DNA, 15 bp, Homo sapiens
tccaggaattggcca

SEQ ID NO: 1349110 - DNA, 15 bp, Homo sapiens
atccaggaattggcc

SEQ ID NO: 1349111 - DNA, 15 bp, Homo sapiens
aatccaggaattggc

SEQ ID NO: 1349112 - DNA, 15 bp, Homo sapiens
taatccaggaattgg

SEQ ID NO: 1349113 - DNA, 15 bp, Homo sapiens
ataatccaggaattg

SEQ ID NO: 1349114 - DNA, 15 bp, Homo sapiens
aataatccaggaatt

SEQ ID NO: 1349115 - DNA, 15 bp, Homo sapiens
aaataatccaggaat

SEQ ID NO: 1349116 - DNA, 15 bp, Homo sapiens
caaataatccaggaa

SEQ ID NO: 1349117 - DNA, 15 bp, Homo sapiens
gcaaataatccagga

SEQ ID NO: 1349118 - DNA, 15 bp, Homo sapiens
tgcaaataatccagg

SEQ ID NO: 1349119 - DNA, 15 bp, Homo sapiens
atgcaaataatccag

SEQ ID NO: 1349120 - DNA, 15 bp, Homo sapiens
catgcaaataatcca

SEQ ID NO: 1349121 - DNA, 15 bp, Homo sapiens
acatgcaaataatcc

SEQ ID NO: 1349122 - DNA, 15 bp, Homo sapiens
aacatgcaaataatc

SEQ ID NO: 1349123 - DNA, 15 bp, Homo sapiens
aaacatgcaaataat

SEQ ID NO: 1349124 - DNA, 15 bp, Homo sapiens
gaaacatgcaaataa

SEQ ID NO: 1349125 - DNA, 15 bp, Homo sapiens
ggaaacatgcaaata

SEQ ID NO: 1349126 - DNA, 15 bp, Homo sapiens
tggaaacatgcaaat

SEQ ID NO: 1349127 - DNA, 15 bp, Homo sapiens
ctggaaacatgcaaa

SEQ ID NO: 1349128 - DNA, 15 bp, Homo sapiens
tctggaaacatgcaa

SEQ ID NO: 1349129 - DNA, 15 bp, Homo sapiens
gtctggaaacatgca

SEQ ID NO: 1349130 - DNA, 15 bp, Homo sapiens
tgtctggaaacatgc

SEQ ID NO: 1349131 - DNA, 15 bp, Homo sapiens
gtgtctggaaacatg

SEQ ID NO: 1349132 - DNA, 15 bp, Homo sapiens
tgtgtctggaaacat

SEQ ID NO: 1349133 - DNA, 15 bp, Homo sapiens
ctgtgtctggaaaca

SEQ ID NO: 1349134 - DNA, 15 bp, Homo sapiens
gctgtgtctggaaac

SEQ ID NO: 1349135 - DNA, 15 bp, Homo sapiens
agctgtgtctggaaa

SEQ ID NO: 1349136 - DNA, 15 bp, Homo sapiens
tagctgtgtctggaa

SEQ ID NO: 1349137 - DNA, 15 bp, Homo sapiens
atagctgtgtctgga

SEQ ID NO: 1349138 - DNA, 15 bp, Homo sapiens
catagctgtgtctgg

SEQ ID NO: 1349139 - DNA, 15 bp, Homo sapiens
acatagctgtgtctg

SEQ ID NO: 1349140 - DNA, 15 bp, Homo sapiens
cacatagctgtgtct

SEQ ID NO: 1349141 - DNA, 15 bp, Homo sapiens
tcacatagctgtgtc

SEQ ID NO: 1349142 - DNA, 15 bp, Homo sapiens
ttcacatagctgtgt

SEQ ID NO: 1349143 - DNA, 15 bp, Homo sapiens
tttcacatagctgtg

SEQ ID NO: 1349144 - DNA, 15 bp, Homo sapiens
ctttcacatagctgt

SEQ ID NO: 1349145 - DNA, 15 bp, Homo sapiens
gctttcacatagctg

SEQ ID NO: 1349146 - DNA, 15 bp, Homo sapiens
tgctttcacatagct

SEQ ID NO: 1349147 - DNA, 15 bp, Homo sapiens
ctgctttcacatagc

SEQ ID NO: 1349148 - DNA, 15 bp, Homo sapiens
cctgctttcacatag

SEQ ID NO: 1349149 - DNA, 15 bp, Homo sapiens
ccctgctttcacata

SEQ ID NO: 1349150 - DNA, 15 bp, Homo sapiens
accctgctttcacat

SEQ ID NO: 1349151 - DNA, 15 bp, Homo sapiens
aaccctgctttcaca

SEQ ID NO: 1349152 - DNA, 15 bp, Homo sapiens
aaaccctgctttcac

SEQ ID NO: 1349153 - DNA, 15 bp, Homo sapiens
caaaccctgctttca

SEQ ID NO: 1349154 - DNA, 15 bp, Homo sapiens
acaaaccctgctttc

SEQ ID NO: 1349155 - DNA, 15 bp, Homo sapiens
aacaaaccctgcttt

SEQ ID NO: 1349156 - DNA, 15 bp, Homo sapiens
aaacaaaccctgctt

SEQ ID NO: 1349157 - DNA, 15 bp, Homo sapiens
aaaacaaaccctgct

SEQ ID NO: 1349158 - DNA, 15 bp, Homo sapiens
taaaacaaaccctgc

SEQ ID NO: 1349159 - DNA, 15 bp, Homo sapiens
ttaaaacaaaccctg

SEQ ID NO: 1349160 - DNA, 15 bp, Homo sapiens
attaaaacaaaccct

SEQ ID NO: 1349161 - DNA, 15 bp, Homo sapiens
tattaaaacaaaccc

SEQ ID NO: 1349162 - DNA, 15 bp, Homo sapiens
ctattaaaacaaacc

SEQ ID NO: 1349163 - DNA, 15 bp, Homo sapiens
actattaaaacaaac

SEQ ID NO: 1349164 - DNA, 15 bp, Homo sapiens
cactattaaaacaaa

SEQ ID NO: 1349165 - DNA, 15 bp, Homo sapiens
acactattaaaacaa

SEQ ID NO: 1349166 - DNA, 15 bp, Homo sapiens
aacactattaaaaca

SEQ ID NO: 1349167 - DNA, 15 bp, Homo sapiens
aaacactattaaaac

SEQ ID NO: 1349168 - DNA, 15 bp, Homo sapiens
aaaacactattaaaa

SEQ ID NO: 1349169 - DNA, 15 bp, Homo sapiens
caaaacactattaaa

SEQ ID NO: 1349170 - DNA, 15 bp, Homo sapiens
tcaaaacactattaa

SEQ ID NO: 1349171 - DNA, 15 bp, Homo sapiens
ctcaaaacactatta

SEQ ID NO: 1349172 - DNA, 15 bp, Homo sapiens
gctcaaaacactatt

SEQ ID NO: 1349173 - DNA, 15 bp, Homo sapiens
ggctcaaaacactat

SEQ ID NO: 1349174 - DNA, 15 bp, Homo sapiens
aggctcaaaacacta

SEQ ID NO: 1349175 - DNA, 15 bp, Homo sapiens
aaggctcaaaacact

SEQ ID NO: 1349176 - DNA, 15 bp, Homo sapiens
aaaggctcaaaacac

SEQ ID NO: 1349177 - DNA, 15 bp, Homo sapiens
caaaggctcaaaaca

SEQ ID NO: 1349178 - DNA, 15 bp, Homo sapiens
tcaaaggctcaaaac

SEQ ID NO: 1349179 - DNA, 15 bp, Homo sapiens
atcaaaggctcaaaa

SEQ ID NO: 1349180 - DNA, 15 bp, Homo sapiens
aatcaaaggctcaaa

SEQ ID NO: 1349181 - DNA, 15 bp, Homo sapiens
gaatcaaaggctcaa

SEQ ID NO: 1349182 - DNA, 15 bp, Homo sapiens
ggaatcaaaggctca

SEQ ID NO: 1349183 - DNA, 15 bp, Homo sapiens
tggaatcaaaggctc

SEQ ID NO: 1349184 - DNA, 15 bp, Homo sapiens
ctggaatcaaaggct

SEQ ID NO: 1349185 - DNA, 15 bp, Homo sapiens
actggaatcaaaggc

SEQ ID NO: 1349186 - DNA, 15 bp, Homo sapiens
aactggaatcaaagg

SEQ ID NO: 1349187 - DNA, 15 bp, Homo sapiens
gaactggaatcaaag

SEQ ID NO: 1349188 - DNA, 15 bp, Homo sapiens
agaactggaatcaaa

SEQ ID NO: 1349189 - DNA, 15 bp, Homo sapiens
cagaactggaatcaa

SEQ ID NO: 1349190 - DNA, 15 bp, Homo sapiens
gcagaactggaatca

SEQ ID NO: 1349191 - DNA, 15 bp, Homo sapiens
agcagaactggaatc

SEQ ID NO: 1349192 - DNA, 15 bp, Homo sapiens
aagcagaactggaat

SEQ ID NO: 1349193 - DNA, 15 bp, Homo sapiens
gaagcagaactggaa

SEQ ID NO: 1349194 - DNA, 15 bp, Homo sapiens
ggaagcagaactgga

SEQ ID NO: 1349195 - DNA, 15 bp, Homo sapiens
tggaagcagaactgg

SEQ ID NO: 1349196 - DNA, 15 bp, Homo sapiens
gtggaagcagaactg

SEQ ID NO: 1349197 - DNA, 15 bp, Homo sapiens
agtggaagcagaact

SEQ ID NO: 1349198 - DNA, 15 bp, Homo sapiens
gagtggaagcagaac

SEQ ID NO: 1349199 - DNA, 15 bp, Homo sapiens
agagtggaagcagaa

SEQ ID NO: 1349200 - DNA, 15 bp, Homo sapiens
aagagtggaagcaga

SEQ ID NO: 1349201 - DNA, 15 bp, Homo sapiens
caagagtggaagcag

SEQ ID NO: 1349202 - DNA, 15 bp, Homo sapiens
ccaagagtggaagca

SEQ ID NO: 1349203 - DNA, 15 bp, Homo sapiens
accaagagtggaagc

SEQ ID NO: 1349204 - DNA, 15 bp, Homo sapiens
gaccaagagtggaag

SEQ ID NO: 1349205 - DNA, 15 bp, Homo sapiens
agaccaagagtggaa

SEQ ID NO: 1349206 - DNA, 15 bp, Homo sapiens
tagaccaagagtgga

SEQ ID NO: 1349207 - DNA, 15 bp, Homo sapiens
atagaccaagagtgg

SEQ ID NO: 1349208 - DNA, 15 bp, Homo sapiens
tatagaccaagagtg

SEQ ID NO: 1349209 - DNA, 15 bp, Homo sapiens
ttatagaccaagagt

SEQ ID NO: 1349210 - DNA, 15 bp, Homo sapiens
cttatagaccaagag

SEQ ID NO: 1349211 - DNA, 15 bp, Homo sapiens
ccttatagaccaaga

SEQ ID NO: 1349212 - DNA, 15 bp, Homo sapiens
tccttatagaccaag

SEQ ID NO: 1349213 - DNA, 15 bp, Homo sapiens
atccttatagaccaa

SEQ ID NO: 1349214 - DNA, 15 bp, Homo sapiens
gatccttatagacca

SEQ ID NO: 1349215 - DNA, 15 bp, Homo sapiens
ggatccttatagacc

SEQ ID NO: 1349216 - DNA, 15 bp, Homo sapiens
gggatccttatagac

SEQ ID NO: 1349217 - DNA, 15 bp, Homo sapiens
agggatccttataga

SEQ ID NO: 1349218 - DNA, 15 bp, Homo sapiens
tagggatccttatag

SEQ ID NO: 1349219 - DNA, 15 bp, Homo sapiens
atagggatccttata

SEQ ID NO: 1349220 - DNA, 15 bp, Homo sapiens
catagggatccttat

SEQ ID NO: 1349221 - DNA, 15 bp, Homo sapiens
ccatagggatcctta

SEQ ID NO: 1349222 - DNA, 15 bp, Homo sapiens
gccatagggatcctt

SEQ ID NO: 1349223 - DNA, 15 bp, Homo sapiens
tgccatagggatcct

SEQ ID NO: 1349224 - DNA, 15 bp, Homo sapiens
ctgccatagggatcc

SEQ ID NO: 1349225 - DNA, 15 bp, Homo sapiens
gctgccatagggatc

SEQ ID NO: 1349226 - DNA, 15 bp, Homo sapiens
tgctgccatagggat

SEQ ID NO: 1349227 - DNA, 15 bp, Homo sapiens
ttgctgccataggga

SEQ ID NO: 1349228 - DNA, 15 bp, Homo sapiens
gttgctgccataggg

SEQ ID NO: 1349229 - DNA, 15 bp, Homo sapiens
tgttgctgccatagg

SEQ ID NO: 1349230 - DNA, 15 bp, Homo sapiens
ctgttgctgccatag

SEQ ID NO: 1349231 - DNA, 15 bp, Homo sapiens
tctgttgctgccata

SEQ ID NO: 1349232 - DNA, 15 bp, Homo sapiens
ttctgttgctgccat

SEQ ID NO: 1349233 - DNA, 15 bp, Homo sapiens
attctgttgctgcca

SEQ ID NO: 1349234 - DNA, 15 bp, Homo sapiens
cattctgttgctgcc

SEQ ID NO: 1349235 - DNA, 15 bp, Homo sapiens
ccattctgttgctgc

SEQ ID NO: 1349236 - DNA, 15 bp, Homo sapiens
gccattctgttgctg

SEQ ID NO: 1349237 - DNA, 15 bp, Homo sapiens
ggccattctgttgct

SEQ ID NO: 1349238 - DNA, 15 bp, Homo sapiens
gggccattctgttgc

SEQ ID NO: 1349239 - DNA, 15 bp, Homo sapiens
tgggccattctgttg

SEQ ID NO: 1349240 - DNA, 15 bp, Homo sapiens
ctgggccattctgtt

SEQ ID NO: 1349241 - DNA, 15 bp, Homo sapiens
gctgggccattctgt

SEQ ID NO: 1349242 - DNA, 15 bp, Homo sapiens
ggctgggccattctg

SEQ ID NO: 1349243 - DNA, 15 bp, Homo sapiens
gggctgggccattct

SEQ ID NO: 1349244 - DNA, 15 bp, Homo sapiens
agggctgggccattc

SEQ ID NO: 1349245 - DNA, 15 bp, Homo sapiens
gagggctgggccatt

SEQ ID NO: 1349246 - DNA, 15 bp, Homo sapiens
tgagggctgggccat

SEQ ID NO: 1349247 - DNA, 15 bp, Homo sapiens
atgagggctgggcca

SEQ ID NO: 1349248 - DNA, 15 bp, Homo sapiens
catgagggctgggcc

SEQ ID NO: 1349249 - DNA, 15 bp, Homo sapiens
tcatgagggctgggc

SEQ ID NO: 1349250 - DNA, 15 bp, Homo sapiens
atcatgagggctggg

SEQ ID NO: 1349251 - DNA, 15 bp, Homo sapiens
aatcatgagggctgg

SEQ ID NO: 1349252 - DNA, 15 bp, Homo sapiens
caatcatgagggctg

SEQ ID NO: 1349253 - DNA, 15 bp, Homo sapiens
ccaatcatgagggct

SEQ ID NO: 1349254 - DNA, 15 bp, Homo sapiens
accaatcatgagggc

SEQ ID NO: 1349255 - DNA, 15 bp, Homo sapiens
aaccaatcatgaggg

SEQ ID NO: 1349256 - DNA, 15 bp, Homo sapiens
caaccaatcatgagg

SEQ ID NO: 1349257 - DNA, 15 bp, Homo sapiens
gcaaccaatcatgag

SEQ ID NO: 1349258 - DNA, 15 bp, Homo sapiens
agcaaccaatcatga

SEQ ID NO: 1349259 - DNA, 15 bp, Homo sapiens
aagcaaccaatcatg

SEQ ID NO: 1349260 - DNA, 15 bp, Homo sapiens
taagcaaccaatcat

SEQ ID NO: 1349261 - DNA, 15 bp, Homo sapiens
ttaagcaaccaatca

SEQ ID NO: 1349262 - DNA, 15 bp, Homo sapiens
tttaagcaaccaatc

SEQ ID NO: 1349263 - DNA, 15 bp, Homo sapiens
ttttaagcaaccaat

SEQ ID NO: 1349264 - DNA, 15 bp, Homo sapiens
tttttaagcaaccaa

SEQ ID NO: 1349265 - DNA, 15 bp, Homo sapiens
ctttttaagcaacca

SEQ ID NO: 1349266 - DNA, 15 bp, Homo sapiens
cctttttaagcaacc

SEQ ID NO: 1349267 - DNA, 15 bp, Homo sapiens
gcctttttaagcaac

SEQ ID NO: 1349268 - DNA, 15 bp, Homo sapiens
agcctttttaagcaa

SEQ ID NO: 1349269 - DNA, 15 bp, Homo sapiens
aagcctttttaagca

SEQ ID NO: 1349270 - DNA, 15 bp, Homo sapiens
aaagcctttttaagc

SEQ ID NO: 1349271 - DNA, 15 bp, Homo sapiens
taaagcctttttaag

SEQ ID NO: 1349272 - DNA, 15 bp, Homo sapiens
ctaaagcctttttaa

SEQ ID NO: 1349273 - DNA, 15 bp, Homo sapiens
cctaaagccttttta

SEQ ID NO: 1349274 - DNA, 15 bp, Homo sapiens
tcctaaagccttttt

SEQ ID NO: 1349275 - DNA, 15 bp, Homo sapiens
atcctaaagcctttt

SEQ ID NO: 1349276 - DNA, 15 bp, Homo sapiens
tatcctaaagccttt

SEQ ID NO: 1349277 - DNA, 15 bp, Homo sapiens
atatcctaaagcctt

SEQ ID NO: 1349278 - DNA, 15 bp, Homo sapiens
aatatcctaaagcct

SEQ ID NO: 1349279 - DNA, 15 bp, Homo sapiens
gaatatcctaaagcc

SEQ ID NO: 1349280 - DNA, 15 bp, Homo sapiens
tgaatatcctaaagc

SEQ ID NO: 1349281 - DNA, 15 bp, Homo sapiens
ttgaatatcctaaag

SEQ ID NO: 1349282 - DNA, 15 bp, Homo sapiens
tttgaatatcctaaa

SEQ ID NO: 1349283 - DNA, 15 bp, Homo sapiens
gtttgaatatcctaa

SEQ ID NO: 1349284 - DNA, 15 bp, Homo sapiens
agtttgaatatccta

SEQ ID NO: 1349285 - DNA, 15 bp, Homo sapiens
cagtttgaatatcct

SEQ ID NO: 1349286 - DNA, 15 bp, Homo sapiens
ccagtttgaatatcc

SEQ ID NO: 1349287 - DNA, 15 bp, Homo sapiens
cccagtttgaatatc

SEQ ID NO: 1349288 - DNA, 15 bp, Homo sapiens
acccagtttgaatat

SEQ ID NO: 1349289 - DNA, 15 bp, Homo sapiens
cacccagtttgaata

SEQ ID NO: 1349290 - DNA, 15 bp, Homo sapiens
ccacccagtttgaat

SEQ ID NO: 1349291 - DNA, 15 bp, Homo sapiens
gccacccagtttgaa

SEQ ID NO: 1349292 - DNA, 15 bp, Homo sapiens
ggccacccagtttga

SEQ ID NO: 1349293 - DNA, 15 bp, Homo sapiens
aggccacccagtttg

SEQ ID NO: 1349294 - DNA, 15 bp, Homo sapiens
caggccacccagttt

SEQ ID NO: 1349295 - DNA, 15 bp, Homo sapiens
acaggccacccagtt

SEQ ID NO: 1349296 - DNA, 15 bp, Homo sapiens
gacaggccacccagt

SEQ ID NO: 1349297 - DNA, 15 bp, Homo sapiens
agacaggccacccag

SEQ ID NO: 1349298 - DNA, 15 bp, Homo sapiens
aagacaggccaccca

SEQ ID NO: 1349299 - DNA, 15 bp, Homo sapiens
caagacaggccaccc

SEQ ID NO: 1349300 - DNA, 15 bp, Homo sapiens
acaagacaggccacc

SEQ ID NO: 1349301 - DNA, 15 bp, Homo sapiens
aacaagacaggccac

SEQ ID NO: 1349302 - DNA, 15 bp, Homo sapiens
aaacaagacaggcca

SEQ ID NO: 1349303 - DNA, 15 bp, Homo sapiens
caaacaagacaggcc

SEQ ID NO: 1349304 - DNA, 15 bp, Homo sapiens
ccaaacaagacaggc

SEQ ID NO: 1349305 - DNA, 15 bp, Homo sapiens
tccaaacaagacagg

SEQ ID NO: 1349306 - DNA, 15 bp, Homo sapiens
ttccaaacaagacag

SEQ ID NO: 1349307 - DNA, 15 bp, Homo sapiens
attccaaacaagaca

SEQ ID NO: 1349308 - DNA, 15 bp, Homo sapiens
tattccaaacaagac

SEQ ID NO: 1349309 - DNA, 15 bp, Homo sapiens
ctattccaaacaaga

SEQ ID NO: 1349310 - DNA, 15 bp, Homo sapiens
cctattccaaacaag

SEQ ID NO: 1349311 - DNA, 15 bp, Homo sapiens
tcctattccaaacaa

SEQ ID NO: 1349312 - DNA, 15 bp, Homo sapiens
gtcctattccaaaca

SEQ ID NO: 1349313 - DNA, 15 bp, Homo sapiens
agtcctattccaaac

SEQ ID NO: 1349314 - DNA, 15 bp, Homo sapiens
tagtcctattccaaa

SEQ ID NO: 1349315 - DNA, 15 bp, Homo sapiens
ttagtcctattccaa

SEQ ID NO: 1349316 - DNA, 15 bp, Homo sapiens
cttagtcctattcca

SEQ ID NO: 1349317 - DNA, 15 bp, Homo sapiens
gcttagtcctattcc

SEQ ID NO: 1349318 - DNA, 15 bp, Homo sapiens
tgcttagtcctattc

SEQ ID NO: 1349319 - DNA, 15 bp, Homo sapiens
atgcttagtcctatt

SEQ ID NO: 1349320 - DNA, 15 bp, Homo sapiens
catgcttagtcctat

SEQ ID NO: 1349321 - DNA, 15 bp, Homo sapiens
acatgcttagtccta

SEQ ID NO: 1349322 - DNA, 15 bp, Homo sapiens
gacatgcttagtcct

SEQ ID NO: 1349323 - DNA, 15 bp, Homo sapiens
tgacatgcttagtcc

SEQ ID NO: 1349324 - DNA, 15 bp, Homo sapiens
gtgacatgcttagtc

SEQ ID NO: 1349325 - DNA, 15 bp, Homo sapiens
tgtgacatgcttagt

SEQ ID NO: 1349326 - DNA, 15 bp, Homo sapiens
gtgtgacatgcttag

SEQ ID NO: 1349327 - DNA, 15 bp, Homo sapiens
agtgtgacatgctta

SEQ ID NO: 1349328 - DNA, 15 bp, Homo sapiens
aagtgtgacatgctt

SEQ ID NO: 1349329 - DNA, 15 bp, Homo sapiens
aaagtgtgacatgct

SEQ ID NO: 1349330 - DNA, 15 bp, Homo sapiens
gaaagtgtgacatgc

SEQ ID NO: 1349331 - DNA, 15 bp, Homo sapiens
tgaaagtgtgacatg

SEQ ID NO: 1349332 - DNA, 15 bp, Homo sapiens
gtgaaagtgtgacat

SEQ ID NO: 1349333 - DNA, 15 bp, Homo sapiens
ggtgaaagtgtgaca

SEQ ID NO: 1349334 - DNA, 15 bp, Homo sapiens
tggtgaaagtgtgac

SEQ ID NO: 1349335 - DNA, 15 bp, Homo sapiens
atggtgaaagtgtga

SEQ ID NO: 1349336 - DNA, 15 bp, Homo sapiens
catggtgaaagtgtg

SEQ ID NO: 1349337 - DNA, 15 bp, Homo sapiens
ccatggtgaaagtgt

SEQ ID NO: 1349338 - DNA, 15 bp, Homo sapiens
tccatggtgaaagtg

SEQ ID NO: 1349339 - DNA, 15 bp, Homo sapiens
ttccatggtgaaagt

SEQ ID NO: 1349340 - DNA, 15 bp, Homo sapiens
cttccatggtgaaag

SEQ ID NO: 1349341 - DNA, 15 bp, Homo sapiens
tcttccatggtgaaa

SEQ ID NO: 1349342 - DNA, 15 bp, Homo sapiens
ctcttccatggtgaa

SEQ ID NO: 1349343 - DNA, 15 bp, Homo sapiens
actcttccatggtga

SEQ ID NO: 1349344 - DNA, 15 bp, Homo sapiens
aactcttccatggtg

SEQ ID NO: 1349345 - DNA, 15 bp, Homo sapiens
taactcttccatggt

SEQ ID NO: 1349346 - DNA, 15 bp, Homo sapiens
ttaactcttccatgg

SEQ ID NO: 1349347 - DNA, 15 bp, Homo sapiens
attaactcttccatg

SEQ ID NO: 1349348 - DNA, 15 bp, Homo sapiens
gattaactcttccat

SEQ ID NO: 1349349 - DNA, 15 bp, Homo sapiens
ggattaactcttcca

SEQ ID NO: 1349350 - DNA, 15 bp, Homo sapiens
tggattaactcttcc

SEQ ID NO: 1349351 - DNA, 15 bp, Homo sapiens
atggattaactcttc

SEQ ID NO: 1349352 - DNA, 15 bp, Homo sapiens
tatggattaactctt

SEQ ID NO: 1349353 - DNA, 15 bp, Homo sapiens
atatggattaactct

SEQ ID NO: 1349354 - DNA, 15 bp, Homo sapiens
aatatggattaactc

SEQ ID NO: 1349355 - DNA, 15 bp, Homo sapiens
gaatatggattaact

SEQ ID NO: 1349356 - DNA, 15 bp, Homo sapiens
agaatatggattaac

SEQ ID NO: 1349357 - DNA, 15 bp, Homo sapiens
tagaatatggattaa

SEQ ID NO: 1349358 - DNA, 15 bp, Homo sapiens
atagaatatggatta

SEQ ID NO: 1349359 - DNA, 15 bp, Homo sapiens
gatagaatatggatt

SEQ ID NO: 1349360 - DNA, 15 bp, Homo sapiens
agatagaatatggat

SEQ ID NO: 1349361 - DNA, 15 bp, Homo sapiens
cagatagaatatgga

SEQ ID NO: 1349362 - DNA, 15 bp, Homo sapiens
acagatagaatatgg

SEQ ID NO: 1349363 - DNA, 15 bp, Homo sapiens
tacagatagaatatg

SEQ ID NO: 1349364 - DNA, 15 bp, Homo sapiens
ttacagatagaatat

SEQ ID NO: 1349365 - DNA, 15 bp, Homo sapiens
cttacagatagaata

SEQ ID NO: 1349366 - DNA, 15 bp, Homo sapiens
acttacagatagaat

SEQ ID NO: 1349367 - DNA, 15 bp, Homo sapiens
aacttacagatagaa

SEQ ID NO: 1349368 - DNA, 15 bp, Homo sapiens
caacttacagataga

SEQ ID NO: 1349369 - DNA, 15 bp, Homo sapiens
acaacttacagatag

SEQ ID NO: 1349370 - DNA, 15 bp, Homo sapiens
tacaacttacagata

SEQ ID NO: 1349371 - DNA, 15 bp, Homo sapiens
atacaacttacagat

SEQ ID NO: 1349372 - DNA, 15 bp, Homo sapiens
gatacaacttacaga

SEQ ID NO: 1349373 - DNA, 15 bp, Homo sapiens
agatacaacttacag

SEQ ID NO: 1349374 - DNA, 15 bp, Homo sapiens
gagatacaacttaca

SEQ ID NO: 1349375 - DNA, 15 bp, Homo sapiens
ggagatacaacttac

SEQ ID NO: 1349376 - DNA, 15 bp, Homo sapiens
tggagatacaactta

SEQ ID NO: 1349377 - DNA, 15 bp, Homo sapiens
ctggagatacaactt

SEQ ID NO: 1349378 - DNA, 15 bp, Homo sapiens
actggagatacaact

SEQ ID NO: 1349379 - DNA, 15 bp, Homo sapiens
gactggagatacaac

SEQ ID NO: 1349380 - DNA, 15 bp, Homo sapiens
tgactggagatacaa

SEQ ID NO: 1349381 - DNA, 15 bp, Homo sapiens
atgactggagataca

SEQ ID NO: 1349382 - DNA, 15 bp, Homo sapiens
aatgactggagatac

SEQ ID NO: 1349383 - DNA, 15 bp, Homo sapiens
caatgactggagata

SEQ ID NO: 1349384 - DNA, 15 bp, Homo sapiens
ccaatgactggagat

SEQ ID NO: 1349385 - DNA, 15 bp, Homo sapiens
accaatgactggaga

SEQ ID NO: 1349386 - DNA, 15 bp, Homo sapiens
aaccaatgactggag

SEQ ID NO: 1349387 - DNA, 15 bp, Homo sapiens
aaaccaatgactgga

SEQ ID NO: 1349388 - DNA, 15 bp, Homo sapiens
aaaaccaatgactgg

SEQ ID NO: 1349389 - DNA, 15 bp, Homo sapiens
gaaaaccaatgactg

SEQ ID NO: 1349390 - DNA, 15 bp, Homo sapiens
tgaaaaccaatgact

SEQ ID NO: 1349391 - DNA, 15 bp, Homo sapiens
ttgaaaaccaatgac

SEQ ID NO: 1349392 - DNA, 15 bp, Homo sapiens
gttgaaaaccaatga

SEQ ID NO: 1349393 - DNA, 15 bp, Homo sapiens
tgttgaaaaccaatg

SEQ ID NO: 1349394 - DNA, 15 bp, Homo sapiens
ttgttgaaaaccaat

SEQ ID NO: 1349395 - DNA, 15 bp, Homo sapiens
cttgttgaaaaccaa

SEQ ID NO: 1349396 - DNA, 15 bp, Homo sapiens
acttgttgaaaacca

SEQ ID NO: 1349397 - DNA, 15 bp, Homo sapiens
cacttgttgaaaacc

SEQ ID NO: 1349398 - DNA, 15 bp, Homo sapiens
ccacttgttgaaaac

SEQ ID NO: 1349399 - DNA, 15 bp, Homo sapiens
accacttgttgaaaa

SEQ ID NO: 1349400 - DNA, 15 bp, Homo sapiens
gaccacttgttgaaa

SEQ ID NO: 1349401 - DNA, 15 bp, Homo sapiens
ggaccacttgttgaa

SEQ ID NO: 1349402 - DNA, 15 bp, Homo sapiens
aggaccacttgttga

SEQ ID NO: 1349403 - DNA, 15 bp, Homo sapiens
taggaccacttgttg

SEQ ID NO: 1349404 - DNA, 15 bp, Homo sapiens
ataggaccacttgtt

SEQ ID NO: 1349405 - DNA, 15 bp, Homo sapiens
gataggaccacttgt

SEQ ID NO: 1349406 - DNA, 15 bp, Homo sapiens
agataggaccacttg

SEQ ID NO: 1349407 - DNA, 15 bp, Homo sapiens
aagataggaccactt

SEQ ID NO: 1349408 - DNA, 15 bp, Homo sapiens
taagataggaccact

SEQ ID NO: 1349409 - DNA, 15 bp, Homo sapiens
ctaagataggaccac

SEQ ID NO: 1349410 - DNA, 15 bp, Homo sapiens
cctaagataggacca

SEQ ID NO: 1349411 - DNA, 15 bp, Homo sapiens
tcctaagataggacc

SEQ ID NO: 1349412 - DNA, 15 bp, Homo sapiens
ctcctaagataggac

SEQ ID NO: 1349413 - DNA, 15 bp, Homo sapiens
cctcctaagatagga

SEQ ID NO: 1349414 - DNA, 15 bp, Homo sapiens
tcctcctaagatagg

SEQ ID NO: 1349415 - DNA, 15 bp, Homo sapiens
ctcctcctaagatag

SEQ ID NO: 1349416 - DNA, 15 bp, Homo sapiens
actcctcctaagata

SEQ ID NO: 1349417 - DNA, 15 bp, Homo sapiens
cactcctcctaagat

SEQ ID NO: 1349418 - DNA, 15 bp, Homo sapiens
ccactcctcctaaga

SEQ ID NO: 1349419 - DNA, 15 bp, Homo sapiens
accactcctcctaag

SEQ ID NO: 1349420 - DNA, 15 bp, Homo sapiens
taccactcctcctaa

SEQ ID NO: 1349421 - DNA, 15 bp, Homo sapiens
ataccactcctccta

SEQ ID NO: 1349422 - DNA, 15 bp, Homo sapiens
tataccactcctcct

SEQ ID NO: 1349423 - DNA, 15 bp, Homo sapiens
atataccactcctcc

SEQ ID NO: 1349424 - DNA, 15 bp, Homo sapiens
aatataccactcctc

SEQ ID NO: 1349425 - DNA, 15 bp, Homo sapiens
taatataccactcct

SEQ ID NO: 1349426 - DNA, 15 bp, Homo sapiens
ctaatataccactcc

SEQ ID NO: 1349427 - DNA, 15 bp, Homo sapiens
tctaatataccactc

SEQ ID NO: 1349428 - DNA, 15 bp, Homo sapiens
ttctaatataccact

SEQ ID NO: 1349429 - DNA, 15 bp, Homo sapiens
gttctaatataccac

SEQ ID NO: 1349430 - DNA, 15 bp, Homo sapiens
tgttctaatatacca

SEQ ID NO: 1349431 - DNA, 15 bp, Homo sapiens
ctgttctaatatacc

SEQ ID NO: 1349432 - DNA, 15 bp, Homo sapiens
actgttctaatatac

SEQ ID NO: 1349433 - DNA, 15 bp, Homo sapiens
gactgttctaatata

SEQ ID NO: 1349434 - DNA, 15 bp, Homo sapiens
ggactgttctaatat

SEQ ID NO: 1349435 - DNA, 15 bp, Homo sapiens
aggactgttctaata

SEQ ID NO: 1349436 - DNA, 15 bp, Homo sapiens
aaggactgttctaat

SEQ ID NO: 1349437 - DNA, 15 bp, Homo sapiens
gaaggactgttctaa

SEQ ID NO: 1349438 - DNA, 15 bp, Homo sapiens
ggaaggactgttcta

SEQ ID NO: 1349439 - DNA, 15 bp, Homo sapiens
tggaaggactgttct

SEQ ID NO: 1349440 - DNA, 15 bp, Homo sapiens
ctggaaggactgttc

SEQ ID NO: 1349441 - DNA, 15 bp, Homo sapiens
tctggaaggactgtt

SEQ ID NO: 1349442 - DNA, 15 bp, Homo sapiens
ctctggaaggactgt

SEQ ID NO: 1349443 - DNA, 15 bp, Homo sapiens
actctggaaggactg

SEQ ID NO: 1349444 - DNA, 15 bp, Homo sapiens
tactctggaaggact

SEQ ID NO: 1349445 - DNA, 15 bp, Homo sapiens
ttactctggaaggac

SEQ ID NO: 1349446 - DNA, 15 bp, Homo sapiens
attactctggaagga

SEQ ID NO: 1349447 - DNA, 15 bp, Homo sapiens
aattactctggaagg

SEQ ID NO: 1349448 - DNA, 15 bp, Homo sapiens
aaattactctggaag

SEQ ID NO: 1349449 - DNA, 15 bp, Homo sapiens
aaaattactctggaa

SEQ ID NO: 1349450 - DNA, 15 bp, Homo sapiens
aaaaattactctgga

SEQ ID NO: 1349451 - DNA, 15 bp, Homo sapiens
aaaaaattactctgg

SEQ ID NO: 1349452 - DNA, 15 bp, Homo sapiens
aaaaaaattactctg

SEQ ID NO: 1349453 - DNA, 15 bp, Homo sapiens
gaaaaaaattactct

SEQ ID NO: 1349454 - DNA, 15 bp, Homo sapiens
tgaaaaaaattactc

SEQ ID NO: 1349455 - DNA, 15 bp, Homo sapiens
atgaaaaaaattact

SEQ ID NO: 1349456 - DNA, 15 bp, Homo sapiens
aatgaaaaaaattac

SEQ ID NO: 1349457 - DNA, 15 bp, Homo sapiens
taatgaaaaaaatta

SEQ ID NO: 1349458 - DNA, 15 bp, Homo sapiens
ataatgaaaaaaatt

SEQ ID NO: 1349459 - DNA, 15 bp, Homo sapiens
aataatgaaaaaaat

SEQ ID NO: 1349460 - DNA, 15 bp, Homo sapiens
aaataatgaaaaaaa

SEQ ID NO: 1349461 - DNA, 15 bp, Homo sapiens
gaaataatgaaaaaa

SEQ ID NO: 1349462 - DNA, 15 bp, Homo sapiens
tgaaataatgaaaaa

SEQ ID NO: 1349463 - DNA, 15 bp, Homo sapiens
ctgaaataatgaaaa

SEQ ID NO: 1349464 - DNA, 15 bp, Homo sapiens
tctgaaataatgaaa

SEQ ID NO: 1349465 - DNA, 15 bp, Homo sapiens
atctgaaataatgaa

SEQ ID NO: 1349466 - DNA, 15 bp, Homo sapiens
aatctgaaataatga

SEQ ID NO: 1349467 - DNA, 15 bp, Homo sapiens
aaatctgaaataatg

SEQ ID NO: 1349468 - DNA, 15 bp, Homo sapiens
aaaatctgaaataat

SEQ ID NO: 1349469 - DNA, 15 bp, Homo sapiens
aaaaatctgaaataa

SEQ ID NO: 1349470 - DNA, 15 bp, Homo sapiens
aaaaaatctgaaata

SEQ ID NO: 1349471 - DNA, 15 bp, Homo sapiens
taaaaaatctgaaat

SEQ ID NO: 1349472 - DNA, 15 bp, Homo sapiens
ctaaaaaatctgaaa

SEQ ID NO: 1349473 - DNA, 15 bp, Homo sapiens
actaaaaaatctgaa

SEQ ID NO: 1349474 - DNA, 15 bp, Homo sapiens
aactaaaaaatctga

SEQ ID NO: 1349475 - DNA, 15 bp, Homo sapiens
aaactaaaaaatctg

SEQ ID NO: 1349476 - DNA, 15 bp, Homo sapiens
aaaactaaaaaatct

SEQ ID NO: 1349477 - DNA, 15 bp, Homo sapiens
aaaaactaaaaaatc

SEQ ID NO: 1349478 - DNA, 15 bp, Homo sapiens
aaaaaactaaaaaat

SEQ ID NO: 1349479 - DNA, 15 bp, Homo sapiens
aaaaaaactaaaaaa

SEQ ID NO: 1349480 - DNA, 15 bp, Homo sapiens
aaaaaaaactaaaaa

SEQ ID NO: 1349481 - DNA, 15 bp, Homo sapiens
caaaaaaaactaaaa

SEQ ID NO: 1349482 - DNA, 15 bp, Homo sapiens
acaaaaaaaactaaa

SEQ ID NO: 1349483 - DNA, 15 bp, Homo sapiens
aacaaaaaaaactaa

SEQ ID NO: 1349484 - DNA, 15 bp, Homo sapiens
aaacaaaaaaaacta

SEQ ID NO: 1349485 - DNA, 15 bp, Homo sapiens
caaacaaaaaaaact

SEQ ID NO: 1349486 - DNA, 15 bp, Homo sapiens
cctttaaaaaaaaaa

SEQ ID NO: 1349487 - DNA, 15 bp, Homo sapiens
gcctttaaaaaaaaa

SEQ ID NO: 1349488 - DNA, 15 bp, Homo sapiens
agcctttaaaaaaaa

SEQ ID NO: 1349489 - DNA, 15 bp, Homo sapiens
gagcctttaaaaaaa

SEQ ID NO: 1349490 - DNA, 15 bp, Homo sapiens
agagcctttaaaaaa

SEQ ID NO: 1349491 - DNA, 15 bp, Homo sapiens
gagagcctttaaaaa

SEQ ID NO: 1349492 - DNA, 15 bp, Homo sapiens
tgagagcctttaaaa

SEQ ID NO: 1349493 - DNA, 15 bp, Homo sapiens
gtgagagcctttaaa

SEQ ID NO: 1349494 - DNA, 15 bp, Homo sapiens
agtgagagcctttaa

SEQ ID NO: 1349495 - DNA, 15 bp, Homo sapiens
gagtgagagccttta

SEQ ID NO: 1349496 - DNA, 15 bp, Homo sapiens
agagtgagagccttt

SEQ ID NO: 1349497 - DNA, 15 bp, Homo sapiens
cagagtgagagcctt

SEQ ID NO: 1349498 - DNA, 15 bp, Homo sapiens
acagagtgagagcct

SEQ ID NO: 1349499 - DNA, 15 bp, Homo sapiens
tgacagagtgagagc

SEQ ID NO: 1349500 - DNA, 15 bp, Homo sapiens
gtgacagagtgagag

SEQ ID NO: 1349501 - DNA, 15 bp, Homo sapiens
tctccagcctgggtg

SEQ ID NO: 1349502 - DNA, 15 bp, Homo sapiens
ctctccagcctgggt

SEQ ID NO: 1349503 - DNA, 15 bp, Homo sapiens
gctctccagcctggg

SEQ ID NO: 1349504 - DNA, 15 bp, Homo sapiens
tgctctccagcctgg

SEQ ID NO: 1349505 - DNA, 15 bp, Homo sapiens
ctgctctccagcctg

SEQ ID NO: 1349506 - DNA, 15 bp, Homo sapiens
actgctctccagcct

SEQ ID NO: 1349507 - DNA, 15 bp, Homo sapiens
cactgctctccagcc

SEQ ID NO: 1349508 - DNA, 15 bp, Homo sapiens
tcactgctctccagc

SEQ ID NO: 1349509 - DNA, 15 bp, Homo sapiens
atcactgctctccag

SEQ ID NO: 1349510 - DNA, 15 bp, Homo sapiens
tatcactgctctcca

SEQ ID NO: 1349511 - DNA, 15 bp, Homo sapiens
gtatcactgctctcc

SEQ ID NO: 1349512 - DNA, 15 bp, Homo sapiens
cgtatcactgctctc

SEQ ID NO: 1349513 - DNA, 15 bp, Homo sapiens
tcgtatcactgctct

SEQ ID NO: 1349514 - DNA, 15 bp, Homo sapiens
atcgtatcactgctc

SEQ ID NO: 1349515 - DNA, 15 bp, Homo sapiens
gatcgtatcactgct

SEQ ID NO: 1349516 - DNA, 15 bp, Homo sapiens
tgatcgtatcactgc

SEQ ID NO: 1349517 - DNA, 15 bp, Homo sapiens
atgatcgtatcactg

SEQ ID NO: 1349518 - DNA, 15 bp, Homo sapiens
tatgatcgtatcact

SEQ ID NO: 1349519 - DNA, 15 bp, Homo sapiens
ctatgatcgtatcac

SEQ ID NO: 1349520 - DNA, 15 bp, Homo sapiens
gctatgatcgtatca

SEQ ID NO: 1349521 - DNA, 15 bp, Homo sapiens
agctatgatcgtatc

SEQ ID NO: 1349522 - DNA, 15 bp, Homo sapiens
gagctatgatcgtat

SEQ ID NO: 1349523 - DNA, 15 bp, Homo sapiens
tgagctatgatcgta

SEQ ID NO: 1349524 - DNA, 15 bp, Homo sapiens
gtgagctatgatcgt

SEQ ID NO: 1349525 - DNA, 15 bp, Homo sapiens
agtgagctatgatcg

SEQ ID NO: 1349526 - DNA, 15 bp, Homo sapiens
ccagtgagctatgat

SEQ ID NO: 1349527 - DNA, 15 bp, Homo sapiens
tccagtgagctatga

SEQ ID NO: 1349528 - DNA, 15 bp, Homo sapiens
ttccagtgagctatg

SEQ ID NO: 1349529 - DNA, 15 bp, Homo sapiens
gttccagtgagctat

SEQ ID NO: 1349530 - DNA, 15 bp, Homo sapiens
ggttccagtgagcta

SEQ ID NO: 1349531 - DNA, 15 bp, Homo sapiens
aggttccagtgagct

SEQ ID NO: 1349532 - DNA, 15 bp, Homo sapiens
gaggttccagtgagc

SEQ ID NO: 1349533 - DNA, 15 bp, Homo sapiens
agaggttccagtgag

SEQ ID NO: 1349534 - DNA, 15 bp, Homo sapiens
tagaggttccagtga

SEQ ID NO: 1349535 - DNA, 15 bp, Homo sapiens
gtagaggttccagtg

SEQ ID NO: 1349536 - DNA, 15 bp, Homo sapiens
ggtagaggttccagt

SEQ ID NO: 1349537 - DNA, 15 bp, Homo sapiens
aggtagaggttccag

SEQ ID NO: 1349538 - DNA, 15 bp, Homo sapiens
gaggtagaggttcca

SEQ ID NO: 1349539 - DNA, 15 bp, Homo sapiens
ggaggtagaggttcc

SEQ ID NO: 1349540 - DNA, 15 bp, Homo sapiens
gggaggtagaggttc

SEQ ID NO: 1349541 - DNA, 15 bp, Homo sapiens
agggaggtagaggtt

SEQ ID NO: 1349542 - DNA, 15 bp, Homo sapiens
cagggaggtagaggt

SEQ ID NO: 1349543 - DNA, 15 bp, Homo sapiens
ccagggaggtagagg

SEQ ID NO: 1349544 - DNA, 15 bp, Homo sapiens
cccagggaggtagag

SEQ ID NO: 1349545 - DNA, 15 bp, Homo sapiens
gcccagggaggtaga

SEQ ID NO: 1349546 - DNA, 15 bp, Homo sapiens
agcccagggaggtag

SEQ ID NO: 1349547 - DNA, 15 bp, Homo sapiens
gagcccagggaggta

SEQ ID NO: 1349548 - DNA, 15 bp, Homo sapiens
tgagcccagggaggt

SEQ ID NO: 1349549 - DNA, 15 bp, Homo sapiens
ctgagcccagggagg

SEQ ID NO: 1349550 - DNA, 15 bp, Homo sapiens
cctgagcccagggag

SEQ ID NO: 1349551 - DNA, 15 bp, Homo sapiens
acctgagcccaggga

SEQ ID NO: 1349552 - DNA, 15 bp, Homo sapiens
cacctgagcccaggg

SEQ ID NO: 1349553 - DNA, 15 bp, Homo sapiens
tcacctgagcccagg

SEQ ID NO: 1349554 - DNA, 15 bp, Homo sapiens
atcacctgagcccag

SEQ ID NO: 1349555 - DNA, 15 bp, Homo sapiens
gatcacctgagccca

SEQ ID NO: 1349556 - DNA, 15 bp, Homo sapiens
ggatcacctgagccc

SEQ ID NO: 1349557 - DNA, 15 bp, Homo sapiens
aactcagaaggctga

SEQ ID NO: 1349558 - DNA, 15 bp, Homo sapiens
aaactcagaaggctg

SEQ ID NO: 1349559 - DNA, 15 bp, Homo sapiens
gaaactcagaaggct

SEQ ID NO: 1349560 - DNA, 15 bp, Homo sapiens
agaaactcagaaggc

SEQ ID NO: 1349561 - DNA, 15 bp, Homo sapiens
cagaaactcagaagg

SEQ ID NO: 1349562 - DNA, 15 bp, Homo sapiens
ccagaaactcagaag

SEQ ID NO: 1349563 - DNA, 15 bp, Homo sapiens
cccagaaactcagaa

SEQ ID NO: 1349564 - DNA, 15 bp, Homo sapiens
tcccagaaactcaga

SEQ ID NO: 1349565 - DNA, 15 bp, Homo sapiens
gtcccagaaactcag

SEQ ID NO: 1349566 - DNA, 15 bp, Homo sapiens
agtcccagaaactca

SEQ ID NO: 1349567 - DNA, 15 bp, Homo sapiens
tagtcccagaaactc

SEQ ID NO: 1349568 - DNA, 15 bp, Homo sapiens
gtagtcccagaaact

SEQ ID NO: 1349569 - DNA, 15 bp, Homo sapiens
tgtagtcccagaaac

SEQ ID NO: 1349570 - DNA, 15 bp, Homo sapiens
ctgtagtcccagaaa

SEQ ID NO: 1349571 - DNA, 15 bp, Homo sapiens
cctgtagtcccagaa

SEQ ID NO: 1349572 - DNA, 15 bp, Homo sapiens
gcctgtagtcccaga

SEQ ID NO: 1349573 - DNA, 15 bp, Homo sapiens
tcatgcctgtagtcc

SEQ ID NO: 1349574 - DNA, 15 bp, Homo sapiens
ttcatgcctgtagtc

SEQ ID NO: 1349575 - DNA, 15 bp, Homo sapiens
gttcatgcctgtagt

SEQ ID NO: 1349576 - DNA, 15 bp, Homo sapiens
ggttcatgcctgtag

SEQ ID NO: 1349577 - DNA, 15 bp, Homo sapiens
cggttcatgcctgta

SEQ ID NO: 1349578 - DNA, 15 bp, Homo sapiens
acggttcatgcctgt

SEQ ID NO: 1349579 - DNA, 15 bp, Homo sapiens
cacggttcatgcctg

SEQ ID NO: 1349580 - DNA, 15 bp, Homo sapiens
tcacggttcatgcct

SEQ ID NO: 1349581 - DNA, 15 bp, Homo sapiens
ctcacggttcatgcc

SEQ ID NO: 1349582 - DNA, 15 bp, Homo sapiens
cctcacggttcatgc

SEQ ID NO: 1349583 - DNA, 15 bp, Homo sapiens
gcctcacggttcatg

SEQ ID NO: 1349584 - DNA, 15 bp, Homo sapiens
ggcctcacggttcat

SEQ ID NO: 1349585 - DNA, 15 bp, Homo sapiens
gggcctcacggttca

SEQ ID NO: 1349586 - DNA, 15 bp, Homo sapiens
tgggcctcacggttc

SEQ ID NO: 1349587 - DNA, 15 bp, Homo sapiens
ctgggcctcacggtt

SEQ ID NO: 1349588 - DNA, 15 bp, Homo sapiens
gctgggcctcacggt

SEQ ID NO: 1349589 - DNA, 15 bp, Homo sapiens
agctgggcctcacgg

SEQ ID NO: 1349590 - DNA, 15 bp, Homo sapiens
tagctgggcctcacg

SEQ ID NO: 1349591 - DNA, 15 bp, Homo sapiens
ttagctgggcctcac

SEQ ID NO: 1349592 - DNA, 15 bp, Homo sapiens
attagctgggcctca

SEQ ID NO: 1349593 - DNA, 15 bp, Homo sapiens
aattagctgggcctc

SEQ ID NO: 1349594 - DNA, 15 bp, Homo sapiens
aaattagctgggcct

SEQ ID NO: 1349595 - DNA, 15 bp, Homo sapiens
aaaattagctgggcc

SEQ ID NO: 1349596 - DNA, 15 bp, Homo sapiens
tcacaaaaattagct

SEQ ID NO: 1349597 - DNA, 15 bp, Homo sapiens
atcacaaaaattagc

SEQ ID NO: 1349598 - DNA, 15 bp, Homo sapiens
aatcacaaaaattag

SEQ ID NO: 1349599 - DNA, 15 bp, Homo sapiens
aaatcacaaaaatta

SEQ ID NO: 1349600 - DNA, 15 bp, Homo sapiens
aaaatcacaaaaatt

SEQ ID NO: 1349601 - DNA, 15 bp, Homo sapiens
aaaaatcacaaaaat

SEQ ID NO: 1349602 - DNA, 15 bp, Homo sapiens
caaaaatcacaaaaa

SEQ ID NO: 1349603 - DNA, 15 bp, Homo sapiens
acaaaaatcacaaaa

SEQ ID NO: 1349604 - DNA, 15 bp, Homo sapiens
cacaaaaatcacaaa

SEQ ID NO: 1349605 - DNA, 15 bp, Homo sapiens
acacaaaaatcacaa

SEQ ID NO: 1349606 - DNA, 15 bp, Homo sapiens
aacacaaaaatcaca

SEQ ID NO: 1349607 - DNA, 15 bp, Homo sapiens
aaacacaaaaatcac

SEQ ID NO: 1349608 - DNA, 15 bp, Homo sapiens
aaaacacaaaaatca

SEQ ID NO: 1349609 - DNA, 15 bp, Homo sapiens
aaaaacacaaaaatc

SEQ ID NO: 1349610 - DNA, 15 bp, Homo sapiens
aaaaaacacaaaaat

SEQ ID NO: 1349611 - DNA, 15 bp, Homo sapiens
caaaaaacacaaaaa

SEQ ID NO: 1349612 - DNA, 15 bp, Homo sapiens
acaaaaaacacaaaa

SEQ ID NO: 1349613 - DNA, 15 bp, Homo sapiens
tacaaaaaacacaaa

SEQ ID NO: 1349614 - DNA, 15 bp, Homo sapiens
ctacaaaaaacacaa

SEQ ID NO: 1349615 - DNA, 15 bp, Homo sapiens
tctacaaaaaacaca

SEQ ID NO: 1349616 - DNA, 15 bp, Homo sapiens
ctctacaaaaaacac

SEQ ID NO: 1349617 - DNA, 15 bp, Homo sapiens
actctacaaaaaaca

SEQ ID NO: 1349618 - DNA, 15 bp, Homo sapiens
gactctacaaaaaac

SEQ ID NO: 1349619 - DNA, 15 bp, Homo sapiens
tgactctacaaaaaa

SEQ ID NO: 1349620 - DNA, 15 bp, Homo sapiens
ctgactctacaaaaa

SEQ ID NO: 1349621 - DNA, 15 bp, Homo sapiens
cctgactctacaaaa

SEQ ID NO: 1349622 - DNA, 15 bp, Homo sapiens
ccctgactctacaaa

SEQ ID NO: 1349623 - DNA, 15 bp, Homo sapiens
accctgactctacaa

SEQ ID NO: 1349624 - DNA, 15 bp, Homo sapiens
aaccctgactctaca

SEQ ID NO: 1349625 - DNA, 15 bp, Homo sapiens
aaaccctgactctac

SEQ ID NO: 1349626 - DNA, 15 bp, Homo sapiens
gaaaccctgactcta

SEQ ID NO: 1349627 - DNA, 15 bp, Homo sapiens
agaaaccctgactct

SEQ ID NO: 1349628 - DNA, 15 bp, Homo sapiens
gagaaaccctgactc

SEQ ID NO: 1349629 - DNA, 15 bp, Homo sapiens
ggagaaaccctgact

SEQ ID NO: 1349630 - DNA, 15 bp, Homo sapiens
tggagaaaccctgac

SEQ ID NO: 1349631 - DNA, 15 bp, Homo sapiens
atggagaaaccctga

SEQ ID NO: 1349632 - DNA, 15 bp, Homo sapiens
acgagaccagcctgg

SEQ ID NO: 1349633 - DNA, 15 bp, Homo sapiens
tacgagaccagcctg

SEQ ID NO: 1349634 - DNA, 15 bp, Homo sapiens
gtacgagaccagcct

SEQ ID NO: 1349635 - DNA, 15 bp, Homo sapiens
agtacgagaccagcc

SEQ ID NO: 1349636 - DNA, 15 bp, Homo sapiens
gagtacgagaccagc

SEQ ID NO: 1349637 - DNA, 15 bp, Homo sapiens
ggagtacgagaccag

SEQ ID NO: 1349638 - DNA, 15 bp, Homo sapiens
aggagtacgagacca

SEQ ID NO: 1349639 - DNA, 15 bp, Homo sapiens
caggagtacgagacc

SEQ ID NO: 1349640 - DNA, 15 bp, Homo sapiens
ccaggagtacgagac

SEQ ID NO: 1349641 - DNA, 15 bp, Homo sapiens
accaggagtacgaga

SEQ ID NO: 1349642 - DNA, 15 bp, Homo sapiens
gaccaggagtacgag

SEQ ID NO: 1349643 - DNA, 15 bp, Homo sapiens
agaccaggagtacga

SEQ ID NO: 1349644 - DNA, 15 bp, Homo sapiens
gagaccaggagtacg

SEQ ID NO: 1349645 - DNA, 15 bp, Homo sapiens
tgagaccaggagtac

SEQ ID NO: 1349646 - DNA, 15 bp, Homo sapiens
ttgagaccaggagta

SEQ ID NO: 1349647 - DNA, 15 bp, Homo sapiens
acttgagaccaggag

SEQ ID NO: 1349648 - DNA, 15 bp, Homo sapiens
tacttgagaccagga

SEQ ID NO: 1349649 - DNA, 15 bp, Homo sapiens
ttacttgagaccagg

SEQ ID NO: 1349650 - DNA, 15 bp, Homo sapiens
gttacttgagaccag

SEQ ID NO: 1349651 - DNA, 15 bp, Homo sapiens
ggttacttgagacca

SEQ ID NO: 1349652 - DNA, 15 bp, Homo sapiens
aggttacttgagacc

SEQ ID NO: 1349653 - DNA, 15 bp, Homo sapiens
caggttacttgagac

SEQ ID NO: 1349654 - DNA, 15 bp, Homo sapiens
gcaggttacttgaga

SEQ ID NO: 1349655 - DNA, 15 bp, Homo sapiens
ggcaggttacttgag

SEQ ID NO: 1349656 - DNA, 15 bp, Homo sapiens
gggcaggttacttga

SEQ ID NO: 1349657 - DNA, 15 bp, Homo sapiens
cgggcaggttacttg

SEQ ID NO: 1349658 - DNA, 15 bp, Homo sapiens
gcgggcaggttactt

SEQ ID NO: 1349659 - DNA, 15 bp, Homo sapiens
ggcgggcaggttact

SEQ ID NO: 1349660 - DNA, 15 bp, Homo sapiens
aggcgggcaggttac

SEQ ID NO: 1349661 - DNA, 15 bp, Homo sapiens
gaggcgggcaggtta

SEQ ID NO: 1349662 - DNA, 15 bp, Homo sapiens
cgaggcgggcaggtt

SEQ ID NO: 1349663 - DNA, 15 bp, Homo sapiens
ccgaggcgggcaggt

SEQ ID NO: 1349664 - DNA, 15 bp, Homo sapiens
gccgaggcgggcagg

SEQ ID NO: 1349665 - DNA, 15 bp, Homo sapiens
ggccgaggcgggcag

SEQ ID NO: 1349666 - DNA, 15 bp, Homo sapiens
aggccgaggcgggca

SEQ ID NO: 1349667 - DNA, 15 bp, Homo sapiens
aaggccgaggcgggc

SEQ ID NO: 1349668 - DNA, 15 bp, Homo sapiens
gaaggccgaggcggg

SEQ ID NO: 1349669 - DNA, 15 bp, Homo sapiens
ggaaggccgaggcgg

SEQ ID NO: 1349670 - DNA, 15 bp, Homo sapiens
tggaaggccgaggcg

SEQ ID NO: 1349671 - DNA, 15 bp, Homo sapiens
ttggaaggccgaggc

SEQ ID NO: 1349672 - DNA, 15 bp, Homo sapiens
acaggtgtggtggct

SEQ ID NO: 1349673 - DNA, 15 bp, Homo sapiens
tacaggtgtggtggc

SEQ ID NO: 1349674 - DNA, 15 bp, Homo sapiens
gtacaggtgtggtgg

SEQ ID NO: 1349675 - DNA, 15 bp, Homo sapiens
agtacaggtgtggtg

SEQ ID NO: 1349676 - DNA, 15 bp, Homo sapiens
tagtacaggtgtggt

SEQ ID NO: 1349677 - DNA, 15 bp, Homo sapiens
gtagtacaggtgtgg

SEQ ID NO: 1349678 - DNA, 15 bp, Homo sapiens
agtagtacaggtgtg

SEQ ID NO: 1349679 - DNA, 15 bp, Homo sapiens
tagtagtacaggtgt

SEQ ID NO: 1349680 - DNA, 15 bp, Homo sapiens
gtagtagtacaggtg

SEQ ID NO: 1349681 - DNA, 15 bp, Homo sapiens
agtagtagtacaggt

SEQ ID NO: 1349682 - DNA, 15 bp, Homo sapiens
aagtagtagtacagg

SEQ ID NO: 1349683 - DNA, 15 bp, Homo sapiens
aaagtagtagtacag

SEQ ID NO: 1349684 - DNA, 15 bp, Homo sapiens
taaagtagtagtaca

SEQ ID NO: 1349685 - DNA, 15 bp, Homo sapiens
ctaaagtagtagtac

SEQ ID NO: 1349686 - DNA, 15 bp, Homo sapiens
actaaagtagtagta

SEQ ID NO: 1349687 - DNA, 15 bp, Homo sapiens
aactaaagtagtagt

SEQ ID NO: 1349688 - DNA, 15 bp, Homo sapiens
aaactaaagtagtag

SEQ ID NO: 1349689 - DNA, 15 bp, Homo sapiens
caaactaaagtagta

SEQ ID NO: 1349690 - DNA, 15 bp, Homo sapiens
tcaaactaaagtagt

SEQ ID NO: 1349691 - DNA, 15 bp, Homo sapiens
ttcaaactaaagtag

SEQ ID NO: 1349692 - DNA, 15 bp, Homo sapiens
gttcaaactaaagta

SEQ ID NO: 1349693 - DNA, 15 bp, Homo sapiens
tgttcaaactaaagt

SEQ ID NO: 1349694 - DNA, 15 bp, Homo sapiens
gtgttcaaactaaag

SEQ ID NO: 1349695 - DNA, 15 bp, Homo sapiens
agtgttcaaactaaa

SEQ ID NO: 1349696 - DNA, 15 bp, Homo sapiens
tagtgttcaaactaa

SEQ ID NO: 1349697 - DNA, 15 bp, Homo sapiens
atagtgttcaaacta

SEQ ID NO: 1349698 - DNA, 15 bp, Homo sapiens
tatagtgttcaaact

SEQ ID NO: 1349699 - DNA, 15 bp, Homo sapiens
atatagtgttcaaac

SEQ ID NO: 1349700 - DNA, 15 bp, Homo sapiens
aatatagtgttcaaa

SEQ ID NO: 1349701 - DNA, 15 bp, Homo sapiens
aaatatagtgttcaa

SEQ ID NO: 1349702 - DNA, 15 bp, Homo sapiens
taaatatagtgttca

SEQ ID NO: 1349703 - DNA, 15 bp, Homo sapiens
ttaaatatagtgttc

SEQ ID NO: 1349704 - DNA, 15 bp, Homo sapiens
tttaaatatagtgtt

SEQ ID NO: 1349705 - DNA, 15 bp, Homo sapiens
atttaaatatagtgt

SEQ ID NO: 1349706 - DNA, 15 bp, Homo sapiens
gatttaaatatagtg

SEQ ID NO: 1349707 - DNA, 15 bp, Homo sapiens
agatttaaatatagt

SEQ ID NO: 1349708 - DNA, 15 bp, Homo sapiens
tagatttaaatatag

SEQ ID NO: 1349709 - DNA, 15 bp, Homo sapiens
ttagatttaaatata

SEQ ID NO: 1349710 - DNA, 15 bp, Homo sapiens
attagatttaaatat

SEQ ID NO: 1349711 - DNA, 15 bp, Homo sapiens
tattagatttaaata

SEQ ID NO: 1349712 - DNA, 15 bp, Homo sapiens
ttattagatttaaat

SEQ ID NO: 1349713 - DNA, 15 bp, Homo sapiens
attattagatttaaa

SEQ ID NO: 1349714 - DNA, 15 bp, Homo sapiens
aattattagatttaa

SEQ ID NO: 1349715 - DNA, 15 bp, Homo sapiens
gaattattagattta

SEQ ID NO: 1349716 - DNA, 15 bp, Homo sapiens
tgaattattagattt

SEQ ID NO: 1349717 - DNA, 15 bp, Homo sapiens
ctgaattattagatt

SEQ ID NO: 1349718 - DNA, 15 bp, Homo sapiens
tctgaattattagat

SEQ ID NO: 1349719 - DNA, 15 bp, Homo sapiens
gtctgaattattaga

SEQ ID NO: 1349720 - DNA, 15 bp, Homo sapiens
tgtctgaattattag

SEQ ID NO: 1349721 - DNA, 15 bp, Homo sapiens
atgtctgaattatta

SEQ ID NO: 1349722 - DNA, 15 bp, Homo sapiens
catgtctgaattatt

SEQ ID NO: 1349723 - DNA, 15 bp, Homo sapiens
ccatgtctgaattat

SEQ ID NO: 1349724 - DNA, 15 bp, Homo sapiens
gccatgtctgaatta

SEQ ID NO: 1349725 - DNA, 15 bp, Homo sapiens
ggccatgtctgaatt

SEQ ID NO: 1349726 - DNA, 15 bp, Homo sapiens
gggccatgtctgaat

SEQ ID NO: 1349727 - DNA, 15 bp, Homo sapiens
tgggccatgtctgaa

SEQ ID NO: 1349728 - DNA, 15 bp, Homo sapiens
atgggccatgtctga

SEQ ID NO: 1349729 - DNA, 15 bp, Homo sapiens
aatgggccatgtctg

SEQ ID NO: 1349730 - DNA, 15 bp, Homo sapiens
aaatgggccatgtct

SEQ ID NO: 1349731 - DNA, 15 bp, Homo sapiens
gaaatgggccatgtc

SEQ ID NO: 1349732 - DNA, 15 bp, Homo sapiens
tgaaatgggccatgt

SEQ ID NO: 1349733 - DNA, 15 bp, Homo sapiens
atgaaatgggccatg

SEQ ID NO: 1349734 - DNA, 15 bp, Homo sapiens
tatgaaatgggccat

SEQ ID NO: 1349735 - DNA, 15 bp, Homo sapiens
gtatgaaatgggcca

SEQ ID NO: 1349736 - DNA, 15 bp, Homo sapiens
agtatgaaatgggcc

SEQ ID NO: 1349737 - DNA, 15 bp, Homo sapiens
aagtatgaaatgggc

SEQ ID NO: 1349738 - DNA, 15 bp, Homo sapiens
caagtatgaaatggg

SEQ ID NO: 1349739 - DNA, 15 bp, Homo sapiens
tcaagtatgaaatgg

SEQ ID NO: 1349740 - DNA, 15 bp, Homo sapiens
gtcaagtatgaaatg

SEQ ID NO: 1349741 - DNA, 15 bp, Homo sapiens
tgtcaagtatgaaat

SEQ ID NO: 1349742 - DNA, 15 bp, Homo sapiens
ctgtcaagtatgaaa

SEQ ID NO: 1349743 - DNA, 15 bp, Homo sapiens
tctgtcaagtatgaa

SEQ ID NO: 1349744 - DNA, 15 bp, Homo sapiens
ttctgtcaagtatga

SEQ ID NO: 1349745 - DNA, 15 bp, Homo sapiens
tttctgtcaagtatg

SEQ ID NO: 1349746 - DNA, 15 bp, Homo sapiens
ctttctgtcaagtat

SEQ ID NO: 1349747 - DNA, 15 bp, Homo sapiens
actttctgtcaagta

SEQ ID NO: 1349748 - DNA, 15 bp, Homo sapiens
tactttctgtcaagt

SEQ ID NO: 1349749 - DNA, 15 bp, Homo sapiens
atactttctgtcaag

SEQ ID NO: 1349750 - DNA, 15 bp, Homo sapiens
catactttctgtcaa

SEQ ID NO: 1349751 - DNA, 15 bp, Homo sapiens
tcatactttctgtca

SEQ ID NO: 1349752 - DNA, 15 bp, Homo sapiens
ctcatactttctgtc

SEQ ID NO: 1349753 - DNA, 15 bp, Homo sapiens
actcatactttctgt

SEQ ID NO: 1349754 - DNA, 15 bp, Homo sapiens
gactcatactttctg

SEQ ID NO: 1349755 - DNA, 15 bp, Homo sapiens
tgactcatactttct

SEQ ID NO: 1349756 - DNA, 15 bp, Homo sapiens
ttgactcatactttc

SEQ ID NO: 1349757 - DNA, 15 bp, Homo sapiens
tttgactcatacttt

SEQ ID NO: 1349758 - DNA, 15 bp, Homo sapiens
ctttgactcatactt

SEQ ID NO: 1349759 - DNA, 15 bp, Homo sapiens
tctttgactcatact

SEQ ID NO: 1349760 - DNA, 15 bp, Homo sapiens
gtctttgactcatac

SEQ ID NO: 1349761 - DNA, 15 bp, Homo sapiens
agtctttgactcata

SEQ ID NO: 1349762 - DNA, 15 bp, Homo sapiens
gagtctttgactcat

SEQ ID NO: 1349763 - DNA, 15 bp, Homo sapiens
tgagtctttgactca

SEQ ID NO: 1349764 - DNA, 15 bp, Homo sapiens
ttgagtctttgactc

SEQ ID NO: 1349765 - DNA, 15 bp, Homo sapiens
tttgagtctttgact

SEQ ID NO: 1349766 - DNA, 15 bp, Homo sapiens
atttgagtctttgac

SEQ ID NO: 1349767 - DNA, 15 bp, Homo sapiens
gatttgagtctttga

SEQ ID NO: 1349768 - DNA, 15 bp, Homo sapiens
tgatttgagtctttg

SEQ ID NO: 1349769 - DNA, 15 bp, Homo sapiens
atgatttgagtcttt

SEQ ID NO: 1349770 - DNA, 15 bp, Homo sapiens
aatgatttgagtctt

SEQ ID NO: 1349771 - DNA, 15 bp, Homo sapiens
gaatgatttgagtct

SEQ ID NO: 1349772 - DNA, 15 bp, Homo sapiens
tgaatgatttgagtc

SEQ ID NO: 1349773 - DNA, 15 bp, Homo sapiens
ctgaatgatttgagt

SEQ ID NO: 1349774 - DNA, 15 bp, Homo sapiens
tctgaatgatttgag

SEQ ID NO: 1349775 - DNA, 15 bp, Homo sapiens
atctgaatgatttga

SEQ ID NO: 1349776 - DNA, 15 bp, Homo sapiens
aatctgaatgatttg

SEQ ID NO: 1349777 - DNA, 15 bp, Homo sapiens
gaatctgaatgattt

SEQ ID NO: 1349778 - DNA, 15 bp, Homo sapiens
agaatctgaatgatt

SEQ ID NO: 1349779 - DNA, 15 bp, Homo sapiens
gagaatctgaatgat

SEQ ID NO: 1349780 - DNA, 15 bp, Homo sapiens
tgagaatctgaatga

SEQ ID NO: 1349781 - DNA, 15 bp, Homo sapiens
gtgagaatctgaatg

SEQ ID NO: 1349782 - DNA, 15 bp, Homo sapiens
tgtgagaatctgaat

SEQ ID NO: 1349783 - DNA, 15 bp, Homo sapiens
atgtgagaatctgaa

SEQ ID NO: 1349784 - DNA, 15 bp, Homo sapiens
tatgtgagaatctga

SEQ ID NO: 1349785 - DNA, 15 bp, Homo sapiens
atatgtgagaatctg

SEQ ID NO: 1349786 - DNA, 15 bp, Homo sapiens
catatgtgagaatct

SEQ ID NO: 1349787 - DNA, 15 bp, Homo sapiens
acatatgtgagaatc

SEQ ID NO: 1349788 - DNA, 15 bp, Homo sapiens
tacatatgtgagaat

SEQ ID NO: 1349789 - DNA, 15 bp, Homo sapiens
ttacatatgtgagaa

SEQ ID NO: 1349790 - DNA, 15 bp, Homo sapiens
tttacatatgtgaga

SEQ ID NO: 1349791 - DNA, 15 bp, Homo sapiens
ttttacatatgtgag

SEQ ID NO: 1349792 - DNA, 15 bp, Homo sapiens
gttttacatatgtga

SEQ ID NO: 1349793 - DNA, 15 bp, Homo sapiens
cgttttacatatgtg

SEQ ID NO: 1349794 - DNA, 15 bp, Homo sapiens
acgttttacatatgt

SEQ ID NO: 1349795 - DNA, 15 bp, Homo sapiens
tacgttttacatatg

SEQ ID NO: 1349796 - DNA, 15 bp, Homo sapiens
gtacgttttacatat

SEQ ID NO: 1349797 - DNA, 15 bp, Homo sapiens
cgtacgttttacata

SEQ ID NO: 1349798 - DNA, 15 bp, Homo sapiens
gcgtacgttttacat

SEQ ID NO: 1349799 - DNA, 15 bp, Homo sapiens
agcgtacgttttaca

SEQ ID NO: 1349800 - DNA, 15 bp, Homo sapiens
aagcgtacgttttac

SEQ ID NO: 1349801 - DNA, 15 bp, Homo sapiens
caagcgtacgtttta

SEQ ID NO: 1349802 - DNA, 15 bp, Homo sapiens
ccaagcgtacgtttt

SEQ ID NO: 1349803 - DNA, 15 bp, Homo sapiens
gccaagcgtacgttt

SEQ ID NO: 1349804 - DNA, 15 bp, Homo sapiens
ggccaagcgtacgtt

SEQ ID NO: 1349805 - DNA, 15 bp, Homo sapiens
cggccaagcgtacgt

SEQ ID NO: 1349806 - DNA, 15 bp, Homo sapiens
ccggccaagcgtacg

SEQ ID NO: 1349807 - DNA, 15 bp, Homo sapiens
cccggccaagcgtac

SEQ ID NO: 1349808 - DNA, 15 bp, Homo sapiens
acccggccaagcgta

SEQ ID NO: 1349809 - DNA, 15 bp, Homo sapiens
cacccggccaagcgt

SEQ ID NO: 1349810 - DNA, 15 bp, Homo sapiens
gcacccggccaagcg

SEQ ID NO: 1349811 - DNA, 15 bp, Homo sapiens
tgcacccggccaagc

SEQ ID NO: 1349812 - DNA, 15 bp, Homo sapiens
ctgcacccggccaag

SEQ ID NO: 1349813 - DNA, 15 bp, Homo sapiens
actgcacccggccaa

SEQ ID NO: 1349814 - DNA, 15 bp, Homo sapiens
agtggcatgatctca

SEQ ID NO: 1349815 - DNA, 15 bp, Homo sapiens
aagtggcatgatctc

SEQ ID NO: 1349816 - DNA, 15 bp, Homo sapiens
gaagtggcatgatct

SEQ ID NO: 1349817 - DNA, 15 bp, Homo sapiens
tgaagtggcatgatc

SEQ ID NO: 1349818 - DNA, 15 bp, Homo sapiens
gtgaagtggcatgat

SEQ ID NO: 1349819 - DNA, 15 bp, Homo sapiens
agtgaagtggcatga

SEQ ID NO: 1349820 - DNA, 15 bp, Homo sapiens
gagtgaagtggcatg

SEQ ID NO: 1349821 - DNA, 15 bp, Homo sapiens
ggagtgaagtggcat

SEQ ID NO: 1349822 - DNA, 15 bp, Homo sapiens
tggagtgaagtggca

SEQ ID NO: 1349823 - DNA, 15 bp, Homo sapiens
cctggagtgaagtgg

SEQ ID NO: 1349824 - DNA, 15 bp, Homo sapiens
gcctggagtgaagtg

SEQ ID NO: 1349825 - DNA, 15 bp, Homo sapiens
agcctggagtgaagt

SEQ ID NO: 1349826 - DNA, 15 bp, Homo sapiens
cagcctggagtgaag

SEQ ID NO: 1349827 - DNA, 15 bp, Homo sapiens
ccagcctggagtgaa

SEQ ID NO: 1349828 - DNA, 15 bp, Homo sapiens
cccagcctggagtga

SEQ ID NO: 1349829 - DNA, 15 bp, Homo sapiens
tgcccagcctggagt

SEQ ID NO: 1349830 - DNA, 15 bp, Homo sapiens
ttgcccagcctggag

SEQ ID NO: 1349831 - DNA, 15 bp, Homo sapiens
gttgcccagcctgga

SEQ ID NO: 1349832 - DNA, 15 bp, Homo sapiens
tgttgcccagcctgg

SEQ ID NO: 1349833 - DNA, 15 bp, Homo sapiens
ctgttgcccagcctg

SEQ ID NO: 1349834 - DNA, 15 bp, Homo sapiens
tctgttgcccagcct

SEQ ID NO: 1349835 - DNA, 15 bp, Homo sapiens
ttctgttgcccagcc

SEQ ID NO: 1349836 - DNA, 15 bp, Homo sapiens
gttctgttgcccagc

SEQ ID NO: 1349837 - DNA, 15 bp, Homo sapiens
atttatttgagatgg

SEQ ID NO: 1349838 - DNA, 15 bp, Homo sapiens
tatttatttgagatg

SEQ ID NO: 1349839 - DNA, 15 bp, Homo sapiens
ttatttatttgagat

SEQ ID NO: 1349840 - DNA, 15 bp, Homo sapiens
tttatttatttgaga

SEQ ID NO: 1349841 - DNA, 15 bp, Homo sapiens
ttttatttatttgag

SEQ ID NO: 1349842 - DNA, 15 bp, Homo sapiens
cattttatttatttg

SEQ ID NO: 1349843 - DNA, 15 bp, Homo sapiens
ccattttatttattt

SEQ ID NO: 1349844 - DNA, 15 bp, Homo sapiens
tccattttatttatt

SEQ ID NO: 1349845 - DNA, 15 bp, Homo sapiens
ttccattttatttat

SEQ ID NO: 1349846 - DNA, 15 bp, Homo sapiens
attccattttattta

SEQ ID NO: 1349847 - DNA, 15 bp, Homo sapiens
gattccattttattt

SEQ ID NO: 1349848 - DNA, 15 bp, Homo sapiens
tgattccattttatt

SEQ ID NO: 1349849 - DNA, 15 bp, Homo sapiens
atgattccattttat

SEQ ID NO: 1349850 - DNA, 15 bp, Homo sapiens
aatgattccatttta

SEQ ID NO: 1349851 - DNA, 15 bp, Homo sapiens
aaatgattccatttt

SEQ ID NO: 1349852 - DNA, 15 bp, Homo sapiens
aaaatgattccattt

SEQ ID NO: 1349853 - DNA, 15 bp, Homo sapiens
taaaatgattccatt

SEQ ID NO: 1349854 - DNA, 15 bp, Homo sapiens
ataaaatgattccat

SEQ ID NO: 1349855 - DNA, 15 bp, Homo sapiens
aataaaatgattcca

SEQ ID NO: 1349856 - DNA, 15 bp, Homo sapiens
aaataaaatgattcc

SEQ ID NO: 1349857 - DNA, 15 bp, Homo sapiens
caaataaaatgattc

SEQ ID NO: 1349858 - DNA, 15 bp, Homo sapiens
tcaaataaaatgatt

SEQ ID NO: 1349859 - DNA, 15 bp, Homo sapiens
gtcaaataaaatgat

SEQ ID NO: 1349860 - DNA, 15 bp, Homo sapiens
tgtcaaataaaatga

SEQ ID NO: 1349861 - DNA, 15 bp, Homo sapiens
ttgtcaaataaaatg

SEQ ID NO: 1349862 - DNA, 15 bp, Homo sapiens
tttgtcaaataaaat

SEQ ID NO: 1349863 - DNA, 15 bp, Homo sapiens
atttgtcaaataaaa

SEQ ID NO: 1349864 - DNA, 15 bp, Homo sapiens
catttgtcaaataaa

SEQ ID NO: 1349865 - DNA, 15 bp, Homo sapiens
acatttgtcaaataa

SEQ ID NO: 1349866 - DNA, 15 bp, Homo sapiens
gacatttgtcaaata

SEQ ID NO: 1349867 - DNA, 15 bp, Homo sapiens
agacatttgtcaaat

SEQ ID NO: 1349868 - DNA, 15 bp, Homo sapiens
tagacatttgtcaaa

SEQ ID NO: 1349869 - DNA, 15 bp, Homo sapiens
atagacatttgtcaa

SEQ ID NO: 1349870 - DNA, 15 bp, Homo sapiens
aatagacatttgtca

SEQ ID NO: 1349871 - DNA, 15 bp, Homo sapiens
aaatagacatttgtc

SEQ ID NO: 1349872 - DNA, 15 bp, Homo sapiens
aaaatagacatttgt

SEQ ID NO: 1349873 - DNA, 15 bp, Homo sapiens
aaaaatagacatttg

SEQ ID NO: 1349874 - DNA, 15 bp, Homo sapiens
aaaaaatagacattt

SEQ ID NO: 1349875 - DNA, 15 bp, Homo sapiens
aaaaaaatagacatt

SEQ ID NO: 1349876 - DNA, 15 bp, Homo sapiens
caaaaaaaaatagac

SEQ ID NO: 1349877 - DNA, 15 bp, Homo sapiens
tcaaaaaaaaataga

SEQ ID NO: 1349878 - DNA, 15 bp, Homo sapiens
ttcaaaaaaaaatag

SEQ ID NO: 1349879 - DNA, 15 bp, Homo sapiens
tttcaaaaaaaaata

SEQ ID NO: 1349880 - DNA, 15 bp, Homo sapiens
ctttcaaaaaaaaat

SEQ ID NO: 1349881 - DNA, 15 bp, Homo sapiens
cctttcaaaaaaaaa

SEQ ID NO: 1349882 - DNA, 15 bp, Homo sapiens
tcctttcaaaaaaaa

SEQ ID NO: 1349883 - DNA, 15 bp, Homo sapiens
atcctttcaaaaaaa

SEQ ID NO: 1349884 - DNA, 15 bp, Homo sapiens
gatcctttcaaaaaa

SEQ ID NO: 1349885 - DNA, 15 bp, Homo sapiens
tgatcctttcaaaaa

SEQ ID NO: 1349886 - DNA, 15 bp, Homo sapiens
ttgatcctttcaaaa

SEQ ID NO: 1349887 - DNA, 15 bp, Homo sapiens
attgatcctttcaaa

SEQ ID NO: 1349888 - DNA, 15 bp, Homo sapiens
aattgatcctttcaa

SEQ ID NO: 1349889 - DNA, 15 bp, Homo sapiens
gaattgatcctttca

SEQ ID NO: 1349890 - DNA, 15 bp, Homo sapiens
ggaattgatcctttc

SEQ ID NO: 1349891 - DNA, 15 bp, Homo sapiens
gggaattgatccttt

SEQ ID NO: 1349892 - DNA, 15 bp, Homo sapiens
tgggaattgatcctt

SEQ ID NO: 1349893 - DNA, 15 bp, Homo sapiens
atgggaattgatcct

SEQ ID NO: 1349894 - DNA, 15 bp, Homo sapiens
aatgggaattgatcc

SEQ ID NO: 1349895 - DNA, 15 bp, Homo sapiens
aaatgggaattgatc

SEQ ID NO: 1349896 - DNA, 15 bp, Homo sapiens
taaatgggaattgat

SEQ ID NO: 1349897 - DNA, 15 bp, Homo sapiens
ctaaatgggaattga

SEQ ID NO: 1349898 - DNA, 15 bp, Homo sapiens
actaaatgggaattg

SEQ ID NO: 1349899 - DNA, 15 bp, Homo sapiens
cactaaatgggaatt

SEQ ID NO: 1349900 - DNA, 15 bp, Homo sapiens
acactaaatgggaat

SEQ ID NO: 1349901 - DNA, 15 bp, Homo sapiens
tacactaaatgggaa

SEQ ID NO: 1349902 - DNA, 15 bp, Homo sapiens
atacactaaatggga

SEQ ID NO: 1349903 - DNA, 15 bp, Homo sapiens
tatacactaaatggg

SEQ ID NO: 1349904 - DNA, 15 bp, Homo sapiens
atatacactaaatgg

SEQ ID NO: 1349905 - DNA, 15 bp, Homo sapiens
tatatacactaaatg

SEQ ID NO: 1349906 - DNA, 15 bp, Homo sapiens
gtatatacactaaat

SEQ ID NO: 1349907 - DNA, 15 bp, Homo sapiens
tgtatatacactaaa

SEQ ID NO: 1349908 - DNA, 15 bp, Homo sapiens
gtgtatatacactaa

SEQ ID NO: 1349909 - DNA, 15 bp, Homo sapiens
tgtgtatatacacta

SEQ ID NO: 1349910 - DNA, 15 bp, Homo sapiens
gtgtgtatatacact

SEQ ID NO: 1349911 - DNA, 15 bp, Homo sapiens
tgtgtgtatatacac

SEQ ID NO: 1349912 - DNA, 15 bp, Homo sapiens
atgtgtgtatataca

SEQ ID NO: 1349913 - DNA, 15 bp, Homo sapiens
aatgtgtgtatatac

SEQ ID NO: 1349914 - DNA, 15 bp, Homo sapiens
taatgtgtgtatata

SEQ ID NO: 1349915 - DNA, 15 bp, Homo sapiens
ataatgtgtgtatat

SEQ ID NO: 1349916 - DNA, 15 bp, Homo sapiens
cataatgtgtgtata

SEQ ID NO: 1349917 - DNA, 15 bp, Homo sapiens
acataatgtgtgtat

SEQ ID NO: 1349918 - DNA, 15 bp, Homo sapiens
aacataatgtgtgta

SEQ ID NO: 1349919 - DNA, 15 bp, Homo sapiens
aaacataatgtgtgt

SEQ ID NO: 1349920 - DNA, 15 bp, Homo sapiens
aaaacataatgtgtg

SEQ ID NO: 1349921 - DNA, 15 bp, Homo sapiens
aaaaacataatgtgt

SEQ ID NO: 1349922 - DNA, 15 bp, Homo sapiens
gaaaaacataatgtg

SEQ ID NO: 1349923 - DNA, 15 bp, Homo sapiens
ggaaaaacataatgt

SEQ ID NO: 1349924 - DNA, 15 bp, Homo sapiens
aggaaaaacataatg

SEQ ID NO: 1349925 - DNA, 15 bp, Homo sapiens
gaggaaaaacataat

SEQ ID NO: 1349926 - DNA, 15 bp, Homo sapiens
agaggaaaaacataa

SEQ ID NO: 1349927 - DNA, 15 bp, Homo sapiens
aagaggaaaaacata

SEQ ID NO: 1349928 - DNA, 15 bp, Homo sapiens
taagaggaaaaacat

SEQ ID NO: 1349929 - DNA, 15 bp, Homo sapiens
ttaagaggaaaaaca

SEQ ID NO: 1349930 - DNA, 15 bp, Homo sapiens
attaagaggaaaaac

SEQ ID NO: 1349931 - DNA, 15 bp, Homo sapiens
tattaagaggaaaaa

SEQ ID NO: 1349932 - DNA, 15 bp, Homo sapiens
atattaagaggaaaa

SEQ ID NO: 1349933 - DNA, 15 bp, Homo sapiens
tatattaagaggaaa

SEQ ID NO: 1349934 - DNA, 15 bp, Homo sapiens
atatattaagaggaa

SEQ ID NO: 1349935 - DNA, 15 bp, Homo sapiens
catatattaagagga

SEQ ID NO: 1349936 - DNA, 15 bp, Homo sapiens
tcatatattaagagg

SEQ ID NO: 1349937 - DNA, 15 bp, Homo sapiens
atcatatattaagag

SEQ ID NO: 1349938 - DNA, 15 bp, Homo sapiens
catcatatattaaga

SEQ ID NO: 1349939 - DNA, 15 bp, Homo sapiens
ccatcatatattaag

SEQ ID NO: 1349940 - DNA, 15 bp, Homo sapiens
tccatcatatattaa

SEQ ID NO: 1349941 - DNA, 15 bp, Homo sapiens
gctgctgtgagcagt

SEQ ID NO: 1349942 - DNA, 15 bp, Homo sapiens
ggctgctgtgagcag

SEQ ID NO: 1349943 - DNA, 15 bp, Homo sapiens
gggctgctgtgagca

SEQ ID NO: 1349944 - DNA, 15 bp, Homo sapiens
tgggctgctgtgagc

SEQ ID NO: 1349945 - DNA, 15 bp, Homo sapiens
ctgggctgctgtgag

SEQ ID NO: 1349946 - DNA, 15 bp, Homo sapiens
tctgggctgctgtga

SEQ ID NO: 1349947 - DNA, 15 bp, Homo sapiens
atctgggctgctgtg

SEQ ID NO: 1349948 - DNA, 15 bp, Homo sapiens
gatctgggctgctgt

SEQ ID NO: 1349949 - DNA, 15 bp, Homo sapiens
ggatctgggctgctg

SEQ ID NO: 1349950 - DNA, 15 bp, Homo sapiens
aggatctgggctgct

SEQ ID NO: 1349951 - DNA, 15 bp, Homo sapiens
caggatctgggctgc

SEQ ID NO: 1349952 - DNA, 15 bp, Homo sapiens
gcaggatctgggctg

SEQ ID NO: 1349953 - DNA, 15 bp, Homo sapiens
ggcaggatctgggct

SEQ ID NO: 1349954 - DNA, 15 bp, Homo sapiens
gggcaggatctgggc

SEQ ID NO: 1349955 - DNA, 15 bp, Homo sapiens
tgggcaggatctggg

SEQ ID NO: 1349956 - DNA, 15 bp, Homo sapiens
gtgggcaggatctgg

SEQ ID NO: 1349957 - DNA, 15 bp, Homo sapiens
cagtgggcaggatct

SEQ ID NO: 1349958 - DNA, 15 bp, Homo sapiens
gcagtgggcaggatc

SEQ ID NO: 1349959 - DNA, 15 bp, Homo sapiens
ggcagtgggcaggat

SEQ ID NO: 1349960 - DNA, 15 bp, Homo sapiens
aggcagtgggcagga

SEQ ID NO: 1349961 - DNA, 15 bp, Homo sapiens
caggcagtgggcagg

SEQ ID NO: 1349962 - DNA, 15 bp, Homo sapiens
acaggcagtgggcag

SEQ ID NO: 1349963 - DNA, 15 bp, Homo sapiens
aacaggcagtgggca

SEQ ID NO: 1349964 - DNA, 15 bp, Homo sapiens
aaacaggcagtgggc

SEQ ID NO: 1349965 - DNA, 15 bp, Homo sapiens
gaaacaggcagtggg

SEQ ID NO: 1349966 - DNA, 15 bp, Homo sapiens
ggaaacaggcagtgg

SEQ ID NO: 1349967 - DNA, 15 bp, Homo sapiens
cggaaacaggcagtg

SEQ ID NO: 1349968 - DNA, 15 bp, Homo sapiens
acggaaacaggcagt

SEQ ID NO: 1349969 - DNA, 15 bp, Homo sapiens
tacggaaacaggcag

SEQ ID NO: 1349970 - DNA, 15 bp, Homo sapiens
ctacggaaacaggca

SEQ ID NO: 1349971 - DNA, 15 bp, Homo sapiens
tctacggaaacaggc

SEQ ID NO: 1349972 - DNA, 15 bp, Homo sapiens
ctctacggaaacagg

SEQ ID NO: 1349973 - DNA, 15 bp, Homo sapiens
tctctacggaaacag

SEQ ID NO: 1349974 - DNA, 15 bp, Homo sapiens
ttctctacggaaaca

SEQ ID NO: 1349975 - DNA, 15 bp, Homo sapiens
attctctacggaaac

SEQ ID NO: 1349976 - DNA, 15 bp, Homo sapiens
cattctctacggaaa

SEQ ID NO: 1349977 - DNA, 15 bp, Homo sapiens
ccattctctacggaa

SEQ ID NO: 1349978 - DNA, 15 bp, Homo sapiens
accattctctacgga

SEQ ID NO: 1349979 - DNA, 15 bp, Homo sapiens
taccattctctacgg

SEQ ID NO: 1349980 - DNA, 15 bp, Homo sapiens
ataccattctctacg

SEQ ID NO: 1349981 - DNA, 15 bp, Homo sapiens
aataccattctctac

SEQ ID NO: 1349982 - DNA, 15 bp, Homo sapiens
aaataccattctcta

SEQ ID NO: 1349983 - DNA, 15 bp, Homo sapiens
taaataccattctct

SEQ ID NO: 1349984 - DNA, 15 bp, Homo sapiens
gtaaataccattctc

SEQ ID NO: 1349985 - DNA, 15 bp, Homo sapiens
tgtaaataccattct

SEQ ID NO: 1349986 - DNA, 15 bp, Homo sapiens
gtgtaaataccattc

SEQ ID NO: 1349987 - DNA, 15 bp, Homo sapiens
cgtgtaaataccatt

SEQ ID NO: 1349988 - DNA, 15 bp, Homo sapiens
acgtgtaaataccat

SEQ ID NO: 1349989 - DNA, 15 bp, Homo sapiens
cacgtgtaaatacca

SEQ ID NO: 1349990 - DNA, 15 bp, Homo sapiens
acacgtgtaaatacc

SEQ ID NO: 1349991 - DNA, 15 bp, Homo sapiens
cacacgtgtaaatac

SEQ ID NO: 1349992 - DNA, 15 bp, Homo sapiens
tcacacgtgtaaata

SEQ ID NO: 1349993 - DNA, 15 bp, Homo sapiens
ctcacacgtgtaaat

SEQ ID NO: 1349994 - DNA, 15 bp, Homo sapiens
actcacacgtgtaaa

SEQ ID NO: 1349995 - DNA, 15 bp, Homo sapiens
gactcacacgtgtaa

SEQ ID NO: 1349996 - DNA, 15 bp, Homo sapiens
cgactcacacgtgta

SEQ ID NO: 1349997 - DNA, 15 bp, Homo sapiens
acgactcacacgtgt

SEQ ID NO: 1349998 - DNA, 15 bp, Homo sapiens
aacgactcacacgtg

SEQ ID NO: 1349999 - DNA, 15 bp, Homo sapiens
caacgactcacacgt

SEQ ID NO: 1350000 - DNA, 15 bp, Homo sapiens
ccaacgactcacacg

SEQ ID NO: 1350001 - DNA, 15 bp, Homo sapiens
tccaacgactcacac

SEQ ID NO: 1350002 - DNA, 15 bp, Homo sapiens
ctccaacgactcaca

SEQ ID NO: 1350003 - DNA, 15 bp, Homo sapiens
cctccaacgactcac

SEQ ID NO: 1350004 - DNA, 15 bp, Homo sapiens
ccctccaacgactca

SEQ ID NO: 1350005 - DNA, 15 bp, Homo sapiens
cccctccaacgactc

SEQ ID NO: 1350006 - DNA, 15 bp, Homo sapiens
ccccctccaacgact

SEQ ID NO: 1350007 - DNA, 15 bp, Homo sapiens
cccccctccaacgac

SEQ ID NO: 1350008 - DNA, 15 bp, Homo sapiens
tcccccctccaacga

SEQ ID NO: 1350009 - DNA, 15 bp, Homo sapiens
ctcccccctccaacg

SEQ ID NO: 1350010 - DNA, 15 bp, Homo sapiens
tctcccccctccaac

SEQ ID NO: 1350011 - DNA, 15 bp, Homo sapiens
ctctcccccctccaa

SEQ ID NO: 1350012 - DNA, 15 bp, Homo sapiens
tctctcccccctcca

SEQ ID NO: 1350013 - DNA, 15 bp, Homo sapiens
ttctctcccccctcc

SEQ ID NO: 1350014 - DNA, 15 bp, Homo sapiens
tttctctcccccctc

SEQ ID NO: 1350015 - DNA, 15 bp, Homo sapiens
ttttctctcccccct

SEQ ID NO: 1350016 - DNA, 15 bp, Homo sapiens
cttttctctcccccc

SEQ ID NO: 1350017 - DNA, 15 bp, Homo sapiens
gcttttctctccccc

SEQ ID NO: 1350018 - DNA, 15 bp, Homo sapiens
tgcttttctctcccc

SEQ ID NO: 1350019 - DNA, 15 bp, Homo sapiens
ttgcttttctctccc

SEQ ID NO: 1350020 - DNA, 15 bp, Homo sapiens
tttgcttttctctcc

SEQ ID NO: 1350021 - DNA, 15 bp, Homo sapiens
ttttgcttttctctc

SEQ ID NO: 1350022 - DNA, 15 bp, Homo sapiens
attttgcttttctct

SEQ ID NO: 1350023 - DNA, 15 bp, Homo sapiens
tattttgcttttctc

SEQ ID NO: 1350024 - DNA, 15 bp, Homo sapiens
ttattttgcttttct

SEQ ID NO: 1350025 - DNA, 15 bp, Homo sapiens
cttattttgcttttc

SEQ ID NO: 1350026 - DNA, 15 bp, Homo sapiens
tcttattttgctttt

SEQ ID NO: 1350027 - DNA, 15 bp, Homo sapiens
ttcttattttgcttt

SEQ ID NO: 1350028 - DNA, 15 bp, Homo sapiens
attcttattttgctt

SEQ ID NO: 1350029 - DNA, 15 bp, Homo sapiens
gattcttattttgct

SEQ ID NO: 1350030 - DNA, 15 bp, Homo sapiens
tgattcttattttgc

SEQ ID NO: 1350031 - DNA, 15 bp, Homo sapiens
atgattcttattttg

SEQ ID NO: 1350032 - DNA, 15 bp, Homo sapiens
gatgattcttatttt

SEQ ID NO: 1350033 - DNA, 15 bp, Homo sapiens
ggatgattcttattt

SEQ ID NO: 1350034 - DNA, 15 bp, Homo sapiens
aggatgattcttatt

SEQ ID NO: 1350035 - DNA, 15 bp, Homo sapiens
aaggatgattcttat

SEQ ID NO: 1350036 - DNA, 15 bp, Homo sapiens
gaaggatgattctta

SEQ ID NO: 1350037 - DNA, 15 bp, Homo sapiens
ggaaggatgattctt

SEQ ID NO: 1350038 - DNA, 15 bp, Homo sapiens
aggaaggatgattct

SEQ ID NO: 1350039 - DNA, 15 bp, Homo sapiens
caggaaggatgattc

SEQ ID NO: 1350040 - DNA, 15 bp, Homo sapiens
tcaggaaggatgatt

SEQ ID NO: 1350041 - DNA, 15 bp, Homo sapiens
gtcaggaaggatgat

SEQ ID NO: 1350042 - DNA, 15 bp, Homo sapiens
tgtcaggaaggatga

SEQ ID NO: 1350043 - DNA, 15 bp, Homo sapiens
gtgtcaggaaggatg

SEQ ID NO: 1350044 - DNA, 15 bp, Homo sapiens
cgtgtcaggaaggat

SEQ ID NO: 1350045 - DNA, 15 bp, Homo sapiens
acgtgtcaggaagga

SEQ ID NO: 1350046 - DNA, 15 bp, Homo sapiens
cacgtgtcaggaagg

SEQ ID NO: 1350047 - DNA, 15 bp, Homo sapiens
tcacgtgtcaggaag

SEQ ID NO: 1350048 - DNA, 15 bp, Homo sapiens
ttcacgtgtcaggaa

SEQ ID NO: 1350049 - DNA, 15 bp, Homo sapiens
tttcacgtgtcagga

SEQ ID NO: 1350050 - DNA, 15 bp, Homo sapiens
ttttcacgtgtcagg

SEQ ID NO: 1350051 - DNA, 15 bp, Homo sapiens
tttttcacgtgtcag

SEQ ID NO: 1350052 - DNA, 15 bp, Homo sapiens
atttttcacgtgtca

SEQ ID NO: 1350053 - DNA, 15 bp, Homo sapiens
catttttcacgtgtc

SEQ ID NO: 1350054 - DNA, 15 bp, Homo sapiens
tcatttttcacgtgt

SEQ ID NO: 1350055 - DNA, 15 bp, Homo sapiens
atcatttttcacgtg

SEQ ID NO: 1350056 - DNA, 15 bp, Homo sapiens
tatcatttttcacgt

SEQ ID NO: 1350057 - DNA, 15 bp, Homo sapiens
atatcatttttcacg

SEQ ID NO: 1350058 - DNA, 15 bp, Homo sapiens
catatcatttttcac

SEQ ID NO: 1350059 - DNA, 15 bp, Homo sapiens
tcatatcatttttca

SEQ ID NO: 1350060 - DNA, 15 bp, Homo sapiens
ttcatatcatttttc

SEQ ID NO: 1350061 - DNA, 15 bp, Homo sapiens
tttcatatcattttt

SEQ ID NO: 1350062 - DNA, 15 bp, Homo sapiens
atttcatatcatttt

SEQ ID NO: 1350063 - DNA, 15 bp, Homo sapiens
aatttcatatcattt

SEQ ID NO: 1350064 - DNA, 15 bp, Homo sapiens
gaatttcatatcatt

SEQ ID NO: 1350065 - DNA, 15 bp, Homo sapiens
tgaatttcatatcat

SEQ ID NO: 1350066 - DNA, 15 bp, Homo sapiens
gtgaatttcatatca

SEQ ID NO: 1350067 - DNA, 15 bp, Homo sapiens
tgtgaatttcatatc

SEQ ID NO: 1350068 - DNA, 15 bp, Homo sapiens
atgtgaatttcatat

SEQ ID NO: 1350069 - DNA, 15 bp, Homo sapiens
aatgtgaatttcata

SEQ ID NO: 1350070 - DNA, 15 bp, Homo sapiens
aaatgtgaatttcat

SEQ ID NO: 1350071 - DNA, 15 bp, Homo sapiens
gaaatgtgaatttca

SEQ ID NO: 1350072 - DNA, 15 bp, Homo sapiens
agaaatgtgaatttc

SEQ ID NO: 1350073 - DNA, 15 bp, Homo sapiens
cagaaatgtgaattt

SEQ ID NO: 1350074 - DNA, 15 bp, Homo sapiens
ccagaaatgtgaatt

SEQ ID NO: 1350075 - DNA, 15 bp, Homo sapiens
gccagaaatgtgaat

SEQ ID NO: 1350076 - DNA, 15 bp, Homo sapiens
agccagaaatgtgaa

SEQ ID NO: 1350077 - DNA, 15 bp, Homo sapiens
tagccagaaatgtga

SEQ ID NO: 1350078 - DNA, 15 bp, Homo sapiens
ctagccagaaatgtg

SEQ ID NO: 1350079 - DNA, 15 bp, Homo sapiens
cctagccagaaatgt

SEQ ID NO: 1350080 - DNA, 15 bp, Homo sapiens
acctagccagaaatg

SEQ ID NO: 1350081 - DNA, 15 bp, Homo sapiens
cacctagccagaaat

SEQ ID NO: 1350082 - DNA, 15 bp, Homo sapiens
gcacctagccagaaa

SEQ ID NO: 1350083 - DNA, 15 bp, Homo sapiens
cgcacctagccagaa

SEQ ID NO: 1350084 - DNA, 15 bp, Homo sapiens
ccgcacctagccaga

SEQ ID NO: 1350085 - DNA, 15 bp, Homo sapiens
accgcacctagccag

SEQ ID NO: 1350086 - DNA, 15 bp, Homo sapiens
accaccgcacctagc

SEQ ID NO: 1350087 - DNA, 15 bp, Homo sapiens
aaccaccgcacctag

SEQ ID NO: 1350088 - DNA, 15 bp, Homo sapiens
gaaccaccgcaccta

SEQ ID NO: 1350089 - DNA, 15 bp, Homo sapiens
tgaaccaccgcacct

SEQ ID NO: 1350090 - DNA, 15 bp, Homo sapiens
gtgaaccaccgcacc

SEQ ID NO: 1350091 - DNA, 15 bp, Homo sapiens
cgtgaaccaccgcac

SEQ ID NO: 1350092 - DNA, 15 bp, Homo sapiens
gcgtgaaccaccgca

SEQ ID NO: 1350093 - DNA, 15 bp, Homo sapiens
ggcgtgaaccaccgc

SEQ ID NO: 1350094 - DNA, 15 bp, Homo sapiens
taggcgtgaaccacc

SEQ ID NO: 1350095 - DNA, 15 bp, Homo sapiens
gtaggcgtgaaccac

SEQ ID NO: 1350096 - DNA, 15 bp, Homo sapiens
tgtaggcgtgaacca

SEQ ID NO: 1350097 - DNA, 15 bp, Homo sapiens
ttgtaggcgtgaacc

SEQ ID NO: 1350098 - DNA, 15 bp, Homo sapiens
attgtaggcgtgaac

SEQ ID NO: 1350099 - DNA, 15 bp, Homo sapiens
gattgtaggcgtgaa

SEQ ID NO: 1350100 - DNA, 15 bp, Homo sapiens
agattgtaggcgtga

SEQ ID NO: 1350101 - DNA, 15 bp, Homo sapiens
gagattgtaggcgtg

SEQ ID NO: 1350102 - DNA, 15 bp, Homo sapiens
tgagattgtaggcgt

SEQ ID NO: 1350103 - DNA, 15 bp, Homo sapiens
ctgagattgtaggcg

SEQ ID NO: 1350104 - DNA, 15 bp, Homo sapiens
gctgagattgtaggc

SEQ ID NO: 1350105 - DNA, 15 bp, Homo sapiens
tgctgagattgtagg

SEQ ID NO: 1350106 - DNA, 15 bp, Homo sapiens
gtgctgagattgtag

SEQ ID NO: 1350107 - DNA, 15 bp, Homo sapiens
agtgctgagattgta

SEQ ID NO: 1350108 - DNA, 15 bp, Homo sapiens
aagtgctgagattgt

SEQ ID NO: 1350109 - DNA, 15 bp, Homo sapiens
aaagtgctgagattg

SEQ ID NO: 1350110 - DNA, 15 bp, Homo sapiens
agcccaccttggcct

SEQ ID NO: 1350111 - DNA, 15 bp, Homo sapiens
cagcccaccttggcc

SEQ ID NO: 1350112 - DNA, 15 bp, Homo sapiens
tcagcccaccttggc

SEQ ID NO: 1350113 - DNA, 15 bp, Homo sapiens
atcagcccaccttgg

SEQ ID NO: 1350114 - DNA, 15 bp, Homo sapiens
gatcagcccaccttg

SEQ ID NO: 1350115 - DNA, 15 bp, Homo sapiens
cgatcagcccacctt

SEQ ID NO: 1350116 - DNA, 15 bp, Homo sapiens
gcgatcagcccacct

SEQ ID NO: 1350117 - DNA, 15 bp, Homo sapiens
ggcgatcagcccacc

SEQ ID NO: 1350118 - DNA, 15 bp, Homo sapiens
aggcgatcagcccac

SEQ ID NO: 1350119 - DNA, 15 bp, Homo sapiens
caggcgatcagccca

SEQ ID NO: 1350120 - DNA, 15 bp, Homo sapiens
tcaggcgatcagccc

SEQ ID NO: 1350121 - DNA, 15 bp, Homo sapiens
ttcaggcgatcagcc

SEQ ID NO: 1350122 - DNA, 15 bp, Homo sapiens
cttcaggcgatcagc

SEQ ID NO: 1350123 - DNA, 15 bp, Homo sapiens
acttcaggcgatcag

SEQ ID NO: 1350124 - DNA, 15 bp, Homo sapiens
gacttcaggcgatca

SEQ ID NO: 1350125 - DNA, 15 bp, Homo sapiens
tgacttcaggcgatc

SEQ ID NO: 1350126 - DNA, 15 bp, Homo sapiens
ctgacttcaggcgat

SEQ ID NO: 1350127 - DNA, 15 bp, Homo sapiens
cctgacttcaggcga

SEQ ID NO: 1350128 - DNA, 15 bp, Homo sapiens
tcctgacttcaggcg

SEQ ID NO: 1350129 - DNA, 15 bp, Homo sapiens
ctcctgacttcaggc

SEQ ID NO: 1350130 - DNA, 15 bp, Homo sapiens
gttagtagagacggg

SEQ ID NO: 1350131 - DNA, 15 bp, Homo sapiens
tgttagtagagacgg

SEQ ID NO: 1350132 - DNA, 15 bp, Homo sapiens
ttgttagtagagacg

SEQ ID NO: 1350133 - DNA, 15 bp, Homo sapiens
attgttagtagagac

SEQ ID NO: 1350134 - DNA, 15 bp, Homo sapiens
tattgttagtagaga

SEQ ID NO: 1350135 - DNA, 15 bp, Homo sapiens
gtattgttagtagag

SEQ ID NO: 1350136 - DNA, 15 bp, Homo sapiens
tgtattgttagtaga

SEQ ID NO: 1350137 - DNA, 15 bp, Homo sapiens
ttgtattgttagtag

SEQ ID NO: 1350138 - DNA, 15 bp, Homo sapiens
tttgtattgttagta

SEQ ID NO: 1350139 - DNA, 15 bp, Homo sapiens
ttttgtattgttagt

SEQ ID NO: 1350140 - DNA, 15 bp, Homo sapiens
tttttgtattgttag

SEQ ID NO: 1350141 - DNA, 15 bp, Homo sapiens
atttttgtattgtta

SEQ ID NO: 1350142 - DNA, 15 bp, Homo sapiens
aatttttgtattgtt

SEQ ID NO: 1350143 - DNA, 15 bp, Homo sapiens
taatttttgtattgt

SEQ ID NO: 1350144 - DNA, 15 bp, Homo sapiens
ctaatttttgtattg

SEQ ID NO: 1350145 - DNA, 15 bp, Homo sapiens
caccgtgcccagcta

SEQ ID NO: 1350146 - DNA, 15 bp, Homo sapiens
ccaccgtgcccagct

SEQ ID NO: 1350147 - DNA, 15 bp, Homo sapiens
accaccgtgcccagc

SEQ ID NO: 1350148 - DNA, 15 bp, Homo sapiens
caccaccgtgcccag

SEQ ID NO: 1350149 - DNA, 15 bp, Homo sapiens
gcaccaccgtgccca

SEQ ID NO: 1350150 - DNA, 15 bp, Homo sapiens
tgcaccaccgtgccc

SEQ ID NO: 1350151 - DNA, 15 bp, Homo sapiens
gtgcaccaccgtgcc

SEQ ID NO: 1350152 - DNA, 15 bp, Homo sapiens
cgtgcaccaccgtgc

SEQ ID NO: 1350153 - DNA, 15 bp, Homo sapiens
gcgtgcaccaccgtg

SEQ ID NO: 1350154 - DNA, 15 bp, Homo sapiens
ggcgtgcaccaccgt

SEQ ID NO: 1350155 - DNA, 15 bp, Homo sapiens
aggcgtgcaccaccg

SEQ ID NO: 1350156 - DNA, 15 bp, Homo sapiens
acaggcgtgcaccac

SEQ ID NO: 1350157 - DNA, 15 bp, Homo sapiens
tacaggcgtgcacca

SEQ ID NO: 1350158 - DNA, 15 bp, Homo sapiens
ttacaggcgtgcacc

SEQ ID NO: 1350159 - DNA, 15 bp, Homo sapiens
attacaggcgtgcac

SEQ ID NO: 1350160 - DNA, 15 bp, Homo sapiens
gattacaggcgtgca

SEQ ID NO: 1350161 - DNA, 15 bp, Homo sapiens
actcccgagcagctg

SEQ ID NO: 1350162 - DNA, 15 bp, Homo sapiens
gactcccgagcagct

SEQ ID NO: 1350163 - DNA, 15 bp, Homo sapiens
agactcccgagcagc

SEQ ID NO: 1350164 - DNA, 15 bp, Homo sapiens
cagactcccgagcag

SEQ ID NO: 1350165 - DNA, 15 bp, Homo sapiens
tcagactcccgagca

SEQ ID NO: 1350166 - DNA, 15 bp, Homo sapiens
ctcagactcccgagc

SEQ ID NO: 1350167 - DNA, 15 bp, Homo sapiens
cctcagactcccgag

SEQ ID NO: 1350168 - DNA, 15 bp, Homo sapiens
gcctcagactcccga

SEQ ID NO: 1350169 - DNA, 15 bp, Homo sapiens
tgcctcagactcccg

SEQ ID NO: 1350170 - DNA, 15 bp, Homo sapiens
tttcaagcgattctc

SEQ ID NO: 1350171 - DNA, 15 bp, Homo sapiens
ctttcaagcgattct

SEQ ID NO: 1350172 - DNA, 15 bp, Homo sapiens
actttcaagcgattc

SEQ ID NO: 1350173 - DNA, 15 bp, Homo sapiens
cactttcaagcgatt

SEQ ID NO: 1350174 - DNA, 15 bp, Homo sapiens
ccactttcaagcgat

SEQ ID NO: 1350175 - DNA, 15 bp, Homo sapiens
cccactttcaagcga

SEQ ID NO: 1350176 - DNA, 15 bp, Homo sapiens
tcccactttcaagcg

SEQ ID NO: 1350177 - DNA, 15 bp, Homo sapiens
ctcccactttcaagc

SEQ ID NO: 1350178 - DNA, 15 bp, Homo sapiens
cctcccactttcaag

SEQ ID NO: 1350179 - DNA, 15 bp, Homo sapiens
gcctcccactttcaa

SEQ ID NO: 1350180 - DNA, 15 bp, Homo sapiens
agcctcccactttca

SEQ ID NO: 1350181 - DNA, 15 bp, Homo sapiens
cagcctcccactttc

SEQ ID NO: 1350182 - DNA, 15 bp, Homo sapiens
tcagcctcccacttt

SEQ ID NO: 1350183 - DNA, 15 bp, Homo sapiens
acctcagcctcccac

SEQ ID NO: 1350184 - DNA, 15 bp, Homo sapiens
aacctcagcctccca

SEQ ID NO: 1350185 - DNA, 15 bp, Homo sapiens
caacctcagcctccc

SEQ ID NO: 1350186 - DNA, 15 bp, Homo sapiens
tactgcaacctcagc

SEQ ID NO: 1350187 - DNA, 15 bp, Homo sapiens
ttactgcaacctcag

SEQ ID NO: 1350188 - DNA, 15 bp, Homo sapiens
gttactgcaacctca

SEQ ID NO: 1350189 - DNA, 15 bp, Homo sapiens
ggttactgcaacctc

SEQ ID NO: 1350190 - DNA, 15 bp, Homo sapiens
aggttactgcaacct

SEQ ID NO: 1350191 - DNA, 15 bp, Homo sapiens
caggttactgcaacc

SEQ ID NO: 1350192 - DNA, 15 bp, Homo sapiens
tcaggttactgcaac

SEQ ID NO: 1350193 - DNA, 15 bp, Homo sapiens
ctcaggttactgcaa

SEQ ID NO: 1350194 - DNA, 15 bp, Homo sapiens
tctcaggttactgca

SEQ ID NO: 1350195 - DNA, 15 bp, Homo sapiens
ctctcaggttactgc

SEQ ID NO: 1350196 - DNA, 15 bp, Homo sapiens
gctctcaggttactg

SEQ ID NO: 1350197 - DNA, 15 bp, Homo sapiens
tgctctcaggttact

SEQ ID NO: 1350198 - DNA, 15 bp, Homo sapiens
gtgctctcaggttac

SEQ ID NO: 1350199 - DNA, 15 bp, Homo sapiens
agtgctctcaggtta

SEQ ID NO: 1350200 - DNA, 15 bp, Homo sapiens
gagtgctctcaggtt

SEQ ID NO: 1350201 - DNA, 15 bp, Homo sapiens
ggagtgctctcaggt

SEQ ID NO: 1350202 - DNA, 15 bp, Homo sapiens
tggagtgctctcagg

SEQ ID NO: 1350203 - DNA, 15 bp, Homo sapiens
ctggagtgctctcag

SEQ ID NO: 1350204 - DNA, 15 bp, Homo sapiens
gctggagtgctctca

SEQ ID NO: 1350205 - DNA, 15 bp, Homo sapiens
ggctggagtgctctc

SEQ ID NO: 1350206 - DNA, 15 bp, Homo sapiens
aggctggagtgctct

SEQ ID NO: 1350207 - DNA, 15 bp, Homo sapiens
caggctggagtgctc

SEQ ID NO: 1350208 - DNA, 15 bp, Homo sapiens
ccaggctggagtgct

SEQ ID NO: 1350209 - DNA, 15 bp, Homo sapiens
cgagatggagtctgg

SEQ ID NO: 1350210 - DNA, 15 bp, Homo sapiens
ccgagatggagtctg

SEQ ID NO: 1350211 - DNA, 15 bp, Homo sapiens
tccgagatggagtct

SEQ ID NO: 1350212 - DNA, 15 bp, Homo sapiens
ttccgagatggagtc

SEQ ID NO: 1350213 - DNA, 15 bp, Homo sapiens
gttccgagatggagt

SEQ ID NO: 1350214 - DNA, 15 bp, Homo sapiens
tgttccgagatggag

SEQ ID NO: 1350215 - DNA, 15 bp, Homo sapiens
ttgttccgagatgga

SEQ ID NO: 1350216 - DNA, 15 bp, Homo sapiens
tttgttccgagatgg

SEQ ID NO: 1350217 - DNA, 15 bp, Homo sapiens
ttttgttccgagatg

SEQ ID NO: 1350218 - DNA, 15 bp, Homo sapiens
gttttgttccgagat

SEQ ID NO: 1350219 - DNA, 15 bp, Homo sapiens
tgttttgttccgaga

SEQ ID NO: 1350220 - DNA, 15 bp, Homo sapiens
ttgttttgttccgag

SEQ ID NO: 1350221 - DNA, 15 bp, Homo sapiens
tttgttttgttccga

SEQ ID NO: 1350222 - DNA, 15 bp, Homo sapiens
ttttgttttgttccg

SEQ ID NO: 1350223 - DNA, 15 bp, Homo sapiens
gttttgttttgttcc

SEQ ID NO: 1350224 - DNA, 15 bp, Homo sapiens
attgttttgttttgt

SEQ ID NO: 1350225 - DNA, 15 bp, Homo sapiens
aattgttttgttttg

SEQ ID NO: 1350226 - DNA, 15 bp, Homo sapiens
gaattgttttgtttt

SEQ ID NO: 1350227 - DNA, 15 bp, Homo sapiens
tgaattgttttgttt

SEQ ID NO: 1350228 - DNA, 15 bp, Homo sapiens
gtgaattgttttgtt

SEQ ID NO: 1350229 - DNA, 15 bp, Homo sapiens
tgtgaattgttttgt

SEQ ID NO: 1350230 - DNA, 15 bp, Homo sapiens
atgtgaattgttttg

SEQ ID NO: 1350231 - DNA, 15 bp, Homo sapiens
aatgtgaattgtttt

SEQ ID NO: 1350232 - DNA, 15 bp, Homo sapiens
aaatgtgaattgttt

SEQ ID NO: 1350233 - DNA, 15 bp, Homo sapiens
gaaatgtgaattgtt

SEQ ID NO: 1350234 - DNA, 15 bp, Homo sapiens
tgaaatgtgaattgt

SEQ ID NO: 1350235 - DNA, 15 bp, Homo sapiens
ctgaaatgtgaattg

SEQ ID NO: 1350236 - DNA, 15 bp, Homo sapiens
actgaaatgtgaatt

SEQ ID NO: 1350237 - DNA, 15 bp, Homo sapiens
cactgaaatgtgaat

SEQ ID NO: 1350238 - DNA, 15 bp, Homo sapiens
acactgaaatgtgaa

SEQ ID NO: 1350239 - DNA, 15 bp, Homo sapiens
gacactgaaatgtga

SEQ ID NO: 1350240 - DNA, 15 bp, Homo sapiens
ggacactgaaatgtg

SEQ ID NO: 1350241 - DNA, 15 bp, Homo sapiens
tggacactgaaatgt

SEQ ID NO: 1350242 - DNA, 15 bp, Homo sapiens
atggacactgaaatg

SEQ ID NO: 1350243 - DNA, 15 bp, Homo sapiens
tatggacactgaaat

SEQ ID NO: 1350244 - DNA, 15 bp, Homo sapiens
ttatggacactgaaa

SEQ ID NO: 1350245 - DNA, 15 bp, Homo sapiens
tttatggacactgaa

SEQ ID NO: 1350246 - DNA, 15 bp, Homo sapiens
atttatggacactga

SEQ ID NO: 1350247 - DNA, 15 bp, Homo sapiens
tatttatggacactg

SEQ ID NO: 1350248 - DNA, 15 bp, Homo sapiens
ttatttatggacact

SEQ ID NO: 1350249 - DNA, 15 bp, Homo sapiens
tttatttatggacac

SEQ ID NO: 1350250 - DNA, 15 bp, Homo sapiens
ctttatttatggaca

SEQ ID NO: 1350251 - DNA, 15 bp, Homo sapiens
actttatttatggac

SEQ ID NO: 1350252 - DNA, 15 bp, Homo sapiens
aactttatttatgga

SEQ ID NO: 1350253 - DNA, 15 bp, Homo sapiens
aaactttatttatgg

SEQ ID NO: 1350254 - DNA, 15 bp, Homo sapiens
aaaactttatttatg

SEQ ID NO: 1350255 - DNA, 15 bp, Homo sapiens
aaaaactttatttat

SEQ ID NO: 1350256 - DNA, 15 bp, Homo sapiens
aaaaaactttattta

SEQ ID NO: 1350257 - DNA, 15 bp, Homo sapiens
gaaaaaactttattt

SEQ ID NO: 1350258 - DNA, 15 bp, Homo sapiens
cgaaaaaactttatt

SEQ ID NO: 1350259 - DNA, 15 bp, Homo sapiens
ccgaaaaaactttat

SEQ ID NO: 1350260 - DNA, 15 bp, Homo sapiens
cccgaaaaaacttta

SEQ ID NO: 1350261 - DNA, 15 bp, Homo sapiens
ccccgaaaaaacttt

SEQ ID NO: 1350262 - DNA, 15 bp, Homo sapiens
gccccgaaaaaactt

SEQ ID NO: 1350263 - DNA, 15 bp, Homo sapiens
ggccccgaaaaaact

SEQ ID NO: 1350264 - DNA, 15 bp, Homo sapiens
tggccccgaaaaaac

SEQ ID NO: 1350265 - DNA, 15 bp, Homo sapiens
ttggccccgaaaaaa

SEQ ID NO: 1350266 - DNA, 15 bp, Homo sapiens
cttggccccgaaaaa

SEQ ID NO: 1350267 - DNA, 15 bp, Homo sapiens
gcttggccccgaaaa

SEQ ID NO: 1350268 - DNA, 15 bp, Homo sapiens
ggcttggccccgaaa

SEQ ID NO: 1350269 - DNA, 15 bp, Homo sapiens
gggcttggccccgaa

SEQ ID NO: 1350270 - DNA, 15 bp, Homo sapiens
agggcttggccccga

SEQ ID NO: 1350271 - DNA, 15 bp, Homo sapiens
cagggcttggccccg

SEQ ID NO: 1350272 - DNA, 15 bp, Homo sapiens
gcagggcttggcccc

SEQ ID NO: 1350273 - DNA, 15 bp, Homo sapiens
ggcagggcttggccc

SEQ ID NO: 1350274 - DNA, 15 bp, Homo sapiens
gggcagggcttggcc

SEQ ID NO: 1350275 - DNA, 15 bp, Homo sapiens
tgggcagggcttggc

SEQ ID NO: 1350276 - DNA, 15 bp, Homo sapiens
atgggcagggcttgg

SEQ ID NO: 1350277 - DNA, 15 bp, Homo sapiens
aatgggcagggcttg

SEQ ID NO: 1350278 - DNA, 15 bp, Homo sapiens
gaatgggcagggctt

SEQ ID NO: 1350279 - DNA, 15 bp, Homo sapiens
tgaatgggcagggct

SEQ ID NO: 1350280 - DNA, 15 bp, Homo sapiens
atgaatgggcagggc

SEQ ID NO: 1350281 - DNA, 15 bp, Homo sapiens
aatgaatgggcaggg

SEQ ID NO: 1350282 - DNA, 15 bp, Homo sapiens
aaatgaatgggcagg

SEQ ID NO: 1350283 - DNA, 15 bp, Homo sapiens
caaatgaatgggcag

SEQ ID NO: 1350284 - DNA, 15 bp, Homo sapiens
acaaatgaatgggca

SEQ ID NO: 1350285 - DNA, 15 bp, Homo sapiens
tacaaatgaatgggc

SEQ ID NO: 1350286 - DNA, 15 bp, Homo sapiens
ctacaaatgaatggg

SEQ ID NO: 1350287 - DNA, 15 bp, Homo sapiens
tctacaaatgaatgg

SEQ ID NO: 1350288 - DNA, 15 bp, Homo sapiens
atctacaaatgaatg

SEQ ID NO: 1350289 - DNA, 15 bp, Homo sapiens
gatctacaaatgaat

SEQ ID NO: 1350290 - DNA, 15 bp, Homo sapiens
cgatctacaaatgaa

SEQ ID NO: 1350291 - DNA, 15 bp, Homo sapiens
acgatctacaaatga

SEQ ID NO: 1350292 - DNA, 15 bp, Homo sapiens
aacgatctacaaatg

SEQ ID NO: 1350293 - DNA, 15 bp, Homo sapiens
caacgatctacaaat

SEQ ID NO: 1350294 - DNA, 15 bp, Homo sapiens
ccaacgatctacaaa

SEQ ID NO: 1350295 - DNA, 15 bp, Homo sapiens
tccaacgatctacaa

SEQ ID NO: 1350296 - DNA, 15 bp, Homo sapiens
atccaacgatctaca

SEQ ID NO: 1350297 - DNA, 15 bp, Homo sapiens
catccaacgatctac

SEQ ID NO: 1350298 - DNA, 15 bp, Homo sapiens
gcatccaacgatcta

SEQ ID NO: 1350299 - DNA, 15 bp, Homo sapiens
ggcatccaacgatct

SEQ ID NO: 1350300 - DNA, 15 bp, Homo sapiens
tggcatccaacgatc

SEQ ID NO: 1350301 - DNA, 15 bp, Homo sapiens
gtggcatccaacgat

SEQ ID NO: 1350302 - DNA, 15 bp, Homo sapiens
tgtggcatccaacga

SEQ ID NO: 1350303 - DNA, 15 bp, Homo sapiens
atgtggcatccaacg

SEQ ID NO: 1350304 - DNA, 15 bp, Homo sapiens
catgtggcatccaac

SEQ ID NO: 1350305 - DNA, 15 bp, Homo sapiens
gcatgtggcatccaa

SEQ ID NO: 1350306 - DNA, 15 bp, Homo sapiens
tgcatgtggcatcca

SEQ ID NO: 1350307 - DNA, 15 bp, Homo sapiens
ctgcatgtggcatcc

SEQ ID NO: 1350308 - DNA, 15 bp, Homo sapiens
cctgcatgtggcatc

SEQ ID NO: 1350309 - DNA, 15 bp, Homo sapiens
tcctgcatgtggcat

SEQ ID NO: 1350310 - DNA, 15 bp, Homo sapiens
atcctgcatgtggca

SEQ ID NO: 1350311 - DNA, 15 bp, Homo sapiens
tatcctgcatgtggc

SEQ ID NO: 1350312 - DNA, 15 bp, Homo sapiens
atatcctgcatgtgg

SEQ ID NO: 1350313 - DNA, 15 bp, Homo sapiens
catatcctgcatgtg

SEQ ID NO: 1350314 - DNA, 15 bp, Homo sapiens
tcatatcctgcatgt

SEQ ID NO: 1350315 - DNA, 15 bp, Homo sapiens
ttcatatcctgcatg

SEQ ID NO: 1350316 - DNA, 15 bp, Homo sapiens
cttcatatcctgcat

SEQ ID NO: 1350317 - DNA, 15 bp, Homo sapiens
tcttcatatcctgca

SEQ ID NO: 1350318 - DNA, 15 bp, Homo sapiens
ttcttcatatcctgc

SEQ ID NO: 1350319 - DNA, 15 bp, Homo sapiens
tttcttcatatcctg

SEQ ID NO: 1350320 - DNA, 15 bp, Homo sapiens
ttttcttcatatcct

SEQ ID NO: 1350321 - DNA, 15 bp, Homo sapiens
tttttcttcatatcc

SEQ ID NO: 1350322 - DNA, 15 bp, Homo sapiens
ttttttcttcatatc

SEQ ID NO: 1350323 - DNA, 15 bp, Homo sapiens
cttttttcttcatat

SEQ ID NO: 1350324 - DNA, 15 bp, Homo sapiens
acttttttcttcata

SEQ ID NO: 1350325 - DNA, 15 bp, Homo sapiens
cacttttttcttcat

SEQ ID NO: 1350326 - DNA, 15 bp, Homo sapiens
acacttttttcttca

SEQ ID NO: 1350327 - DNA, 15 bp, Homo sapiens
tacacttttttcttc

SEQ ID NO: 1350328 - DNA, 15 bp, Homo sapiens
ctacacttttttctt

SEQ ID NO: 1350329 - DNA, 15 bp, Homo sapiens
tctacacttttttct

SEQ ID NO: 1350330 - DNA, 15 bp, Homo sapiens
gtctacacttttttc

SEQ ID NO: 1350331 - DNA, 15 bp, Homo sapiens
tgtctacactttttt

SEQ ID NO: 1350332 - DNA, 15 bp, Homo sapiens
ctgtctacacttttt

SEQ ID NO: 1350333 - DNA, 15 bp, Homo sapiens
actgtctacactttt

SEQ ID NO: 1350334 - DNA, 15 bp, Homo sapiens
gactgtctacacttt

SEQ ID NO: 1350335 - DNA, 15 bp, Homo sapiens
tgactgtctacactt

SEQ ID NO: 1350336 - DNA, 15 bp, Homo sapiens
ttgactgtctacact

SEQ ID NO: 1350337 - DNA, 15 bp, Homo sapiens
tttgactgtctacac

SEQ ID NO: 1350338 - DNA, 15 bp, Homo sapiens
ctttgactgtctaca

SEQ ID NO: 1350339 - DNA, 15 bp, Homo sapiens
cctttgactgtctac

SEQ ID NO: 1350340 - DNA, 15 bp, Homo sapiens
gcctttgactgtcta

SEQ ID NO: 1350341 - DNA, 15 bp, Homo sapiens
agcctttgactgtct

SEQ ID NO: 1350342 - DNA, 15 bp, Homo sapiens
tagcctttgactgtc

SEQ ID NO: 1350343 - DNA, 15 bp, Homo sapiens
atagcctttgactgt

SEQ ID NO: 1350344 - DNA, 15 bp, Homo sapiens
aatagcctttgactg

SEQ ID NO: 1350345 - DNA, 15 bp, Homo sapiens
gaatagcctttgact

SEQ ID NO: 1350346 - DNA, 15 bp, Homo sapiens
agaatagcctttgac

SEQ ID NO: 1350347 - DNA, 15 bp, Homo sapiens
gagaatagcctttga

SEQ ID NO: 1350348 - DNA, 15 bp, Homo sapiens
tgagaatagcctttg

SEQ ID NO: 1350349 - DNA, 15 bp, Homo sapiens
ctgagaatagccttt

SEQ ID NO: 1350350 - DNA, 15 bp, Homo sapiens
cctgagaatagcctt

SEQ ID NO: 1350351 - DNA, 15 bp, Homo sapiens
gcctgagaatagcct

SEQ ID NO: 1350352 - DNA, 15 bp, Homo sapiens
agcctgagaatagcc

SEQ ID NO: 1350353 - DNA, 15 bp, Homo sapiens
cagcctgagaatagc

SEQ ID NO: 1350354 - DNA, 15 bp, Homo sapiens
gcagcctgagaatag

SEQ ID NO: 1350355 - DNA, 15 bp, Homo sapiens
tgcagcctgagaata

SEQ ID NO: 1350356 - DNA, 15 bp, Homo sapiens
ttgcagcctgagaat

SEQ ID NO: 1350357 - DNA, 15 bp, Homo sapiens
attgcagcctgagaa

SEQ ID NO: 1350358 - DNA, 15 bp, Homo sapiens
cattgcagcctgaga

SEQ ID NO: 1350359 - DNA, 15 bp, Homo sapiens
ccattgcagcctgag

SEQ ID NO: 1350360 - DNA, 15 bp, Homo sapiens
gccattgcagcctga

SEQ ID NO: 1350361 - DNA, 15 bp, Homo sapiens
tgccattgcagcctg

SEQ ID NO: 1350362 - DNA, 15 bp, Homo sapiens
ctgccattgcagcct

SEQ ID NO: 1350363 - DNA, 15 bp, Homo sapiens
tctgccattgcagcc

SEQ ID NO: 1350364 - DNA, 15 bp, Homo sapiens
ctctgccattgcagc

SEQ ID NO: 1350365 - DNA, 15 bp, Homo sapiens
gctctgccattgcag

SEQ ID NO: 1350366 - DNA, 15 bp, Homo sapiens
agctctgccattgca

SEQ ID NO: 1350367 - DNA, 15 bp, Homo sapiens
cagctctgccattgc

SEQ ID NO: 1350368 - DNA, 15 bp, Homo sapiens
tcagctctgccattg

SEQ ID NO: 1350369 - DNA, 15 bp, Homo sapiens
ctcagctctgccatt

SEQ ID NO: 1350370 - DNA, 15 bp, Homo sapiens
cctcagctctgccat

SEQ ID NO: 1350371 - DNA, 15 bp, Homo sapiens
gcctcagctctgcca

SEQ ID NO: 1350372 - DNA, 15 bp, Homo sapiens
agcctcagctctgcc

SEQ ID NO: 1350373 - DNA, 15 bp, Homo sapiens
cagcctcagctctgc

SEQ ID NO: 1350374 - DNA, 15 bp, Homo sapiens
ccagcctcagctctg

SEQ ID NO: 1350375 - DNA, 15 bp, Homo sapiens
accagcctcagctct

SEQ ID NO: 1350376 - DNA, 15 bp, Homo sapiens
gaccagcctcagctc

SEQ ID NO: 1350377 - DNA, 15 bp, Homo sapiens
agaccagcctcagct

SEQ ID NO: 1350378 - DNA, 15 bp, Homo sapiens
cagaccagcctcagc

SEQ ID NO: 1350379 - DNA, 15 bp, Homo sapiens
gcagaccagcctcag

SEQ ID NO: 1350380 - DNA, 15 bp, Homo sapiens
tgcagaccagcctca

SEQ ID NO: 1350381 - DNA, 15 bp, Homo sapiens
gtgcagaccagcctc

SEQ ID NO: 1350382 - DNA, 15 bp, Homo sapiens
ggtgcagaccagcct

SEQ ID NO: 1350383 - DNA, 15 bp, Homo sapiens
tggtgcagaccagcc

SEQ ID NO: 1350384 - DNA, 15 bp, Homo sapiens
gtggtgcagaccagc

SEQ ID NO: 1350385 - DNA, 15 bp, Homo sapiens
tgtggtgcagaccag

SEQ ID NO: 1350386 - DNA, 15 bp, Homo sapiens
ttgtggtgcagacca

SEQ ID NO: 1350387 - DNA, 15 bp, Homo sapiens
tttgtggtgcagacc

SEQ ID NO: 1350388 - DNA, 15 bp, Homo sapiens
gtttgtggtgcagac

SEQ ID NO: 1350389 - DNA, 15 bp, Homo sapiens
ggtttgtggtgcaga

SEQ ID NO: 1350390 - DNA, 15 bp, Homo sapiens
tggtttgtggtgcag

SEQ ID NO: 1350391 - DNA, 15 bp, Homo sapiens
ttggtttgtggtgca

SEQ ID NO: 1350392 - DNA, 15 bp, Homo sapiens
tttggtttgtggtgc

SEQ ID NO: 1350393 - DNA, 15 bp, Homo sapiens
ttttggtttgtggtg

SEQ ID NO: 1350394 - DNA, 15 bp, Homo sapiens
tttttggtttgtggt

SEQ ID NO: 1350395 - DNA, 15 bp, Homo sapiens
atttttggtttgtgg

SEQ ID NO: 1350396 - DNA, 15 bp, Homo sapiens
tatttttggtttgtg

SEQ ID NO: 1350397 - DNA, 15 bp, Homo sapiens
atatttttggtttgt

SEQ ID NO: 1350398 - DNA, 15 bp, Homo sapiens
aatatttttggtttg

SEQ ID NO: 1350399 - DNA, 15 bp, Homo sapiens
taatatttttggttt

SEQ ID NO: 1350400 - DNA, 15 bp, Homo sapiens
ttaatatttttggtt

SEQ ID NO: 1350401 - DNA, 15 bp, Homo sapiens
attaatatttttggt

SEQ ID NO: 1350402 - DNA, 15 bp, Homo sapiens
gattaatatttttgg

SEQ ID NO: 1350403 - DNA, 15 bp, Homo sapiens
ggattaatatttttg

SEQ ID NO: 1350404 - DNA, 15 bp, Homo sapiens
aggattaatattttt

SEQ ID NO: 1350405 - DNA, 15 bp, Homo sapiens
gaggattaatatttt

SEQ ID NO: 1350406 - DNA, 15 bp, Homo sapiens
agaggattaatattt

SEQ ID NO: 1350407 - DNA, 15 bp, Homo sapiens
cagaggattaatatt

SEQ ID NO: 1350408 - DNA, 15 bp, Homo sapiens
ccagaggattaatat

SEQ ID NO: 1350409 - DNA, 15 bp, Homo sapiens
gccagaggattaata

SEQ ID NO: 1350410 - DNA, 15 bp, Homo sapiens
ggccagaggattaat

SEQ ID NO: 1350411 - DNA, 15 bp, Homo sapiens
aggccagaggattaa

SEQ ID NO: 1350412 - DNA, 15 bp, Homo sapiens
aaggccagaggatta

SEQ ID NO: 1350413 - DNA, 15 bp, Homo sapiens
aaaggccagaggatt

SEQ ID NO: 1350414 - DNA, 15 bp, Homo sapiens
aaaaggccagaggat

SEQ ID NO: 1350415 - DNA, 15 bp, Homo sapiens
taaaaggccagagga

SEQ ID NO: 1350416 - DNA, 15 bp, Homo sapiens
ttaaaaggccagagg

SEQ ID NO: 1350417 - DNA, 15 bp, Homo sapiens
cttaaaaggccagag

SEQ ID NO: 1350418 - DNA, 15 bp, Homo sapiens
tcttaaaaggccaga

SEQ ID NO: 1350419 - DNA, 15 bp, Homo sapiens
ttcttaaaaggccag

SEQ ID NO: 1350420 - DNA, 15 bp, Homo sapiens
tttcttaaaaggcca

SEQ ID NO: 1350421 - DNA, 15 bp, Homo sapiens
ttttcttaaaaggcc

SEQ ID NO: 1350422 - DNA, 15 bp, Homo sapiens
tttttcttaaaaggc

SEQ ID NO: 1350423 - DNA, 15 bp, Homo sapiens
ttttttcttaaaagg

SEQ ID NO: 1350424 - DNA, 15 bp, Homo sapiens
attttttcttaaaag

SEQ ID NO: 1350425 - DNA, 15 bp, Homo sapiens
aattttttcttaaaa

SEQ ID NO: 1350426 - DNA, 15 bp, Homo sapiens
aaattttttcttaaa

SEQ ID NO: 1350427 - DNA, 15 bp, Homo sapiens
caaattttttcttaa

SEQ ID NO: 1350428 - DNA, 15 bp, Homo sapiens
gcaaattttttctta

SEQ ID NO: 1350429 - DNA, 15 bp, Homo sapiens
agcaaattttttctt

SEQ ID NO: 1350430 - DNA, 15 bp, Homo sapiens
tagcaaattttttct

SEQ ID NO: 1350431 - DNA, 15 bp, Homo sapiens
ttagcaaattttttc

SEQ ID NO: 1350432 - DNA, 15 bp, Homo sapiens
gttagcaaatttttt

SEQ ID NO: 1350433 - DNA, 15 bp, Homo sapiens
ggttagcaaattttt

SEQ ID NO: 1350434 - DNA, 15 bp, Homo sapiens
gggttagcaaatttt

SEQ ID NO: 1350435 - DNA, 15 bp, Homo sapiens
agggttagcaaattt

SEQ ID NO: 1350436 - DNA, 15 bp, Homo sapiens
aagggttagcaaatt

SEQ ID NO: 1350437 - DNA, 15 bp, Homo sapiens
gaagggttagcaaat

SEQ ID NO: 1350438 - DNA, 15 bp, Homo sapiens
agaagggttagcaaa

SEQ ID NO: 1350439 - DNA, 15 bp, Homo sapiens
gagaagggttagcaa

SEQ ID NO: 1350440 - DNA, 15 bp, Homo sapiens
agagaagggttagca

SEQ ID NO: 1350441 - DNA, 15 bp, Homo sapiens
cagagaagggttagc

SEQ ID NO: 1350442 - DNA, 15 bp, Homo sapiens
tcagagaagggttag

SEQ ID NO: 1350443 - DNA, 15 bp, Homo sapiens
ctcagagaagggtta

SEQ ID NO: 1350444 - DNA, 15 bp, Homo sapiens
gctcagagaagggtt

SEQ ID NO: 1350445 - DNA, 15 bp, Homo sapiens
tgctcagagaagggt

SEQ ID NO: 1350446 - DNA, 15 bp, Homo sapiens
ctgctcagagaaggg

SEQ ID NO: 1350447 - DNA, 15 bp, Homo sapiens
gctgctcagagaagg

SEQ ID NO: 1350448 - DNA, 15 bp, Homo sapiens
ggctgctcagagaag

SEQ ID NO: 1350449 - DNA, 15 bp, Homo sapiens
gggctgctcagagaa

SEQ ID NO: 1350450 - DNA, 15 bp, Homo sapiens
ggggctgctcagaga

SEQ ID NO: 1350451 - DNA, 15 bp, Homo sapiens
tggggctgctcagag

SEQ ID NO: 1350452 - DNA, 15 bp, Homo sapiens
gtggggctgctcaga

SEQ ID NO: 1350453 - DNA, 15 bp, Homo sapiens
agtggggctgctcag

SEQ ID NO: 1350454 - DNA, 15 bp, Homo sapiens
gagtggggctgctca

SEQ ID NO: 1350455 - DNA, 15 bp, Homo sapiens
agagtggggctgctc

SEQ ID NO: 1350456 - DNA, 15 bp, Homo sapiens
cagagtggggctgct

SEQ ID NO: 1350457 - DNA, 15 bp, Homo sapiens
gcagagtggggctgc

SEQ ID NO: 1350458 - DNA, 15 bp, Homo sapiens
ggcagagtggggctg

SEQ ID NO: 1350459 - DNA, 15 bp, Homo sapiens
tggcagagtggggct

SEQ ID NO: 1350460 - DNA, 15 bp, Homo sapiens
ctggcagagtggggc

SEQ ID NO: 1350461 - DNA, 15 bp, Homo sapiens
actggcagagtgggg

SEQ ID NO: 1350462 - DNA, 15 bp, Homo sapiens
cactggcagagtggg

SEQ ID NO: 1350463 - DNA, 15 bp, Homo sapiens
gcactggcagagtgg

SEQ ID NO: 1350464 - DNA, 15 bp, Homo sapiens
ggcactggcagagtg

SEQ ID NO: 1350465 - DNA, 15 bp, Homo sapiens
aggcactggcagagt

SEQ ID NO: 1350466 - DNA, 15 bp, Homo sapiens
caggcactggcagag

SEQ ID NO: 1350467 - DNA, 15 bp, Homo sapiens
tcaggcactggcaga

SEQ ID NO: 1350468 - DNA, 15 bp, Homo sapiens
gtcaggcactggcag

SEQ ID NO: 1350469 - DNA, 15 bp, Homo sapiens
ggtcaggcactggca

SEQ ID NO: 1350470 - DNA, 15 bp, Homo sapiens
gggtcaggcactggc

SEQ ID NO: 1350471 - DNA, 15 bp, Homo sapiens
ggggtcaggcactgg

SEQ ID NO: 1350472 - DNA, 15 bp, Homo sapiens
aggggtcaggcactg

SEQ ID NO: 1350473 - DNA, 15 bp, Homo sapiens
caggggtcaggcact

SEQ ID NO: 1350474 - DNA, 15 bp, Homo sapiens
tcaggggtcaggcac

SEQ ID NO: 1350475 - DNA, 15 bp, Homo sapiens
gtcaggggtcaggca

SEQ ID NO: 1350476 - DNA, 15 bp, Homo sapiens
ggtcaggggtcaggc

SEQ ID NO: 1350477 - DNA, 15 bp, Homo sapiens
aggtcaggggtcagg

SEQ ID NO: 1350478 - DNA, 15 bp, Homo sapiens
gaggtcaggggtcag

SEQ ID NO: 1350479 - DNA, 15 bp, Homo sapiens
tgaggtcaggggtca

SEQ ID NO: 1350480 - DNA, 15 bp, Homo sapiens
atgaggtcaggggtc

SEQ ID NO: 1350481 - DNA, 15 bp, Homo sapiens
catgaggtcaggggt

SEQ ID NO: 1350482 - DNA, 15 bp, Homo sapiens
ccatgaggtcagggg

SEQ ID NO: 1350483 - DNA, 15 bp, Homo sapiens
tccatgaggtcaggg

SEQ ID NO: 1350484 - DNA, 15 bp, Homo sapiens
ctccatgaggtcagg

SEQ ID NO: 1350485 - DNA, 15 bp, Homo sapiens
actccatgaggtcag

SEQ ID NO: 1350486 - DNA, 15 bp, Homo sapiens
aactccatgaggtca

SEQ ID NO: 1350487 - DNA, 15 bp, Homo sapiens
aaactccatgaggtc

SEQ ID NO: 1350488 - DNA, 15 bp, Homo sapiens
aaaactccatgaggt

SEQ ID NO: 1350489 - DNA, 15 bp, Homo sapiens
aaaaactccatgagg

SEQ ID NO: 1350490 - DNA, 15 bp, Homo sapiens
gaaaaactccatgag

SEQ ID NO: 1350491 - DNA, 15 bp, Homo sapiens
ggaaaaactccatga

SEQ ID NO: 1350492 - DNA, 15 bp, Homo sapiens
aggaaaaactccatg

SEQ ID NO: 1350493 - DNA, 15 bp, Homo sapiens
aaggaaaaactccat

SEQ ID NO: 1350494 - DNA, 15 bp, Homo sapiens
gaaggaaaaactcca

SEQ ID NO: 1350495 - DNA, 15 bp, Homo sapiens
ggaaggaaaaactcc

SEQ ID NO: 1350496 - DNA, 15 bp, Homo sapiens
aggaaggaaaaactc

SEQ ID NO: 1350497 - DNA, 15 bp, Homo sapiens
aaggaaggaaaaact

SEQ ID NO: 1350498 - DNA, 15 bp, Homo sapiens
gaaggaaggaaaaac

SEQ ID NO: 1350499 - DNA, 15 bp, Homo sapiens
ggaaggaaggaaaaa

SEQ ID NO: 1350500 - DNA, 15 bp, Homo sapiens
aggaaggaaggaaaa

SEQ ID NO: 1350501 - DNA, 15 bp, Homo sapiens
gaggaaggaaggaag

SEQ ID NO: 1350502 - DNA, 15 bp, Homo sapiens
ggaggaaggaaggaa

SEQ ID NO: 1350503 - DNA, 15 bp, Homo sapiens
agggaggaaggaagg

SEQ ID NO: 1350504 - DNA, 15 bp, Homo sapiens
gagggaggaaggaag

SEQ ID NO: 1350505 - DNA, 15 bp, Homo sapiens
ggagggaggaaggaa

SEQ ID NO: 1350506 - DNA, 15 bp, Homo sapiens
gggagggaggaagga

SEQ ID NO: 1350507 - DNA, 15 bp, Homo sapiens
agggagggaggaagg

SEQ ID NO: 1350508 - DNA, 15 bp, Homo sapiens
gagggagggaggaag

SEQ ID NO: 1350509 - DNA, 15 bp, Homo sapiens
ggagggagggaggaa

SEQ ID NO: 1350510 - DNA, 15 bp, Homo sapiens
cgggagggagggagg

SEQ ID NO: 1350511 - DNA, 15 bp, Homo sapiens
tcgggagggagggag

SEQ ID NO: 1350512 - DNA, 15 bp, Homo sapiens
gtcgggagggaggga

SEQ ID NO: 1350513 - DNA, 15 bp, Homo sapiens
cgtcgggagggaggg

SEQ ID NO: 1350514 - DNA, 15 bp, Homo sapiens
ccgtcgggagggagg

SEQ ID NO: 1350515 - DNA, 15 bp, Homo sapiens
tccgtcgggagggag

SEQ ID NO: 1350516 - DNA, 15 bp, Homo sapiens
ctccgtcgggaggga

SEQ ID NO: 1350517 - DNA, 15 bp, Homo sapiens
actccgtcgggaggg

SEQ ID NO: 1350518 - DNA, 15 bp, Homo sapiens
gactccgtcgggagg

SEQ ID NO: 1350519 - DNA, 15 bp, Homo sapiens
agactccgtcgggag

SEQ ID NO: 1350520 - DNA, 15 bp, Homo sapiens
gagactccgtcggga

SEQ ID NO: 1350521 - DNA, 15 bp, Homo sapiens
cgagactccgtcggg

SEQ ID NO: 1350522 - DNA, 15 bp, Homo sapiens
gcgagactccgtcgg

SEQ ID NO: 1350523 - DNA, 15 bp, Homo sapiens
agcgagactccgtcg

SEQ ID NO: 1350524 - DNA, 15 bp, Homo sapiens
atgccactgtactcc

SEQ ID NO: 1350525 - DNA, 15 bp, Homo sapiens
catgccactgtactc

SEQ ID NO: 1350526 - DNA, 15 bp, Homo sapiens
tcatgccactgtact

SEQ ID NO: 1350527 - DNA, 15 bp, Homo sapiens
atcatgccactgtac

SEQ ID NO: 1350528 - DNA, 15 bp, Homo sapiens
gatcatgccactgta

SEQ ID NO: 1350529 - DNA, 15 bp, Homo sapiens
agatcatgccactgt

SEQ ID NO: 1350530 - DNA, 15 bp, Homo sapiens
agagatcatgccact

SEQ ID NO: 1350531 - DNA, 15 bp, Homo sapiens
cagagatcatgccac

SEQ ID NO: 1350532 - DNA, 15 bp, Homo sapiens
gcagagatcatgcca

SEQ ID NO: 1350533 - DNA, 15 bp, Homo sapiens
agcagagatcatgcc

SEQ ID NO: 1350534 - DNA, 15 bp, Homo sapiens
gagcagagatcatgc

SEQ ID NO: 1350535 - DNA, 15 bp, Homo sapiens
tgagcagagatcatg

SEQ ID NO: 1350536 - DNA, 15 bp, Homo sapiens
gtgagcagagatcat

SEQ ID NO: 1350537 - DNA, 15 bp, Homo sapiens
agtgagcagagatca

SEQ ID NO: 1350538 - DNA, 15 bp, Homo sapiens
cagtgagcagagatc

SEQ ID NO: 1350539 - DNA, 15 bp, Homo sapiens
tttgcagtgagcaga

SEQ ID NO: 1350540 - DNA, 15 bp, Homo sapiens
gtttgcagtgagcag

SEQ ID NO: 1350541 - DNA, 15 bp, Homo sapiens
agtttgcagtgagca

SEQ ID NO: 1350542 - DNA, 15 bp, Homo sapiens
gagtttgcagtgagc

SEQ ID NO: 1350543 - DNA, 15 bp, Homo sapiens
gccgggaggtggagt

SEQ ID NO: 1350544 - DNA, 15 bp, Homo sapiens
agccgggaggtggag

SEQ ID NO: 1350545 - DNA, 15 bp, Homo sapiens
aagccgggaggtgga

SEQ ID NO: 1350546 - DNA, 15 bp, Homo sapiens
gaagccgggaggtgg

SEQ ID NO: 1350547 - DNA, 15 bp, Homo sapiens
tgaagccgggaggtg

SEQ ID NO: 1350548 - DNA, 15 bp, Homo sapiens
ttgaagccgggaggt

SEQ ID NO: 1350549 - DNA, 15 bp, Homo sapiens
cttgaagccgggagg

SEQ ID NO: 1350550 - DNA, 15 bp, Homo sapiens
acttgaagccgggag

SEQ ID NO: 1350551 - DNA, 15 bp, Homo sapiens
cacttgaagccggga

SEQ ID NO: 1350552 - DNA, 15 bp, Homo sapiens
tcacttgaagccggg

SEQ ID NO: 1350553 - DNA, 15 bp, Homo sapiens
atcacttgaagccgg

SEQ ID NO: 1350554 - DNA, 15 bp, Homo sapiens
aatcacttgaagccg

SEQ ID NO: 1350555 - DNA, 15 bp, Homo sapiens
gaatcacttgaagcc

SEQ ID NO: 1350556 - DNA, 15 bp, Homo sapiens
agaatcacttgaagc

SEQ ID NO: 1350557 - DNA, 15 bp, Homo sapiens
gagaatcacttgaag

SEQ ID NO: 1350558 - DNA, 15 bp, Homo sapiens
ctgaggcatgagaat

SEQ ID NO: 1350559 - DNA, 15 bp, Homo sapiens
actgaggcatgagaa

SEQ ID NO: 1350560 - DNA, 15 bp, Homo sapiens
gactgaggcatgaga

SEQ ID NO: 1350561 - DNA, 15 bp, Homo sapiens
agactgaggcatgag

SEQ ID NO: 1350562 - DNA, 15 bp, Homo sapiens
gagactgaggcatga

SEQ ID NO: 1350563 - DNA, 15 bp, Homo sapiens
ggagactgaggcatg

SEQ ID NO: 1350564 - DNA, 15 bp, Homo sapiens
gggagactgaggcat

SEQ ID NO: 1350565 - DNA, 15 bp, Homo sapiens
atactcgggagactg

SEQ ID NO: 1350566 - DNA, 15 bp, Homo sapiens
gatactcgggagact

SEQ ID NO: 1350567 - DNA, 15 bp, Homo sapiens
agatactcgggagac

SEQ ID NO: 1350568 - DNA, 15 bp, Homo sapiens
cagatactcgggaga

SEQ ID NO: 1350569 - DNA, 15 bp, Homo sapiens
ccagatactcgggag

SEQ ID NO: 1350570 - DNA, 15 bp, Homo sapiens
cccagatactcggga

SEQ ID NO: 1350571 - DNA, 15 bp, Homo sapiens
tcccagatactcggg

SEQ ID NO: 1350572 - DNA, 15 bp, Homo sapiens
atcccagatactcgg

SEQ ID NO: 1350573 - DNA, 15 bp, Homo sapiens
aatcccagatactcg

SEQ ID NO: 1350574 - DNA, 15 bp, Homo sapiens
taatcccagatactc

SEQ ID NO: 1350575 - DNA, 15 bp, Homo sapiens
gtaatcccagatact

SEQ ID NO: 1350576 - DNA, 15 bp, Homo sapiens
tgtaatcccagatac

SEQ ID NO: 1350577 - DNA, 15 bp, Homo sapiens
gtgtaatcccagata

SEQ ID NO: 1350578 - DNA, 15 bp, Homo sapiens
cgtgtaatcccagat

SEQ ID NO: 1350579 - DNA, 15 bp, Homo sapiens
gcgtgtaatcccaga

SEQ ID NO: 1350580 - DNA, 15 bp, Homo sapiens
tgcgtgtaatcccag

SEQ ID NO: 1350581 - DNA, 15 bp, Homo sapiens
gtgcgtgtaatccca

SEQ ID NO: 1350582 - DNA, 15 bp, Homo sapiens
ggtgcgtgtaatccc

SEQ ID NO: 1350583 - DNA, 15 bp, Homo sapiens
gggtgcgtgtaatcc

SEQ ID NO: 1350584 - DNA, 15 bp, Homo sapiens
cgggtgcgtgtaatc

SEQ ID NO: 1350585 - DNA, 15 bp, Homo sapiens
gcgggtgcgtgtaat

SEQ ID NO: 1350586 - DNA, 15 bp, Homo sapiens
ggcgggtgcgtgtaa

SEQ ID NO: 1350587 - DNA, 15 bp, Homo sapiens
tggcgggtgcgtgta

SEQ ID NO: 1350588 - DNA, 15 bp, Homo sapiens
gtggcgggtgcgtgt

SEQ ID NO: 1350589 - DNA, 15 bp, Homo sapiens
ggtggcgggtgcgtg

SEQ ID NO: 1350590 - DNA, 15 bp, Homo sapiens
tggtggcgggtgcgt

SEQ ID NO: 1350591 - DNA, 15 bp, Homo sapiens
atggtggcgggtgcg

SEQ ID NO: 1350592 - DNA, 15 bp, Homo sapiens
taccccgtctctact

SEQ ID NO: 1350593 - DNA, 15 bp, Homo sapiens
ataccccgtctctac

SEQ ID NO: 1350594 - DNA, 15 bp, Homo sapiens
gataccccgtctcta

SEQ ID NO: 1350595 - DNA, 15 bp, Homo sapiens
tgataccccgtctct

SEQ ID NO: 1350596 - DNA, 15 bp, Homo sapiens
gtgataccccgtctc

SEQ ID NO: 1350597 - DNA, 15 bp, Homo sapiens
ggtgataccccgtct

SEQ ID NO: 1350598 - DNA, 15 bp, Homo sapiens
tggtgataccccgtc

SEQ ID NO: 1350599 - DNA, 15 bp, Homo sapiens
atggtgataccccgt

SEQ ID NO: 1350600 - DNA, 15 bp, Homo sapiens
catggtgataccccg

SEQ ID NO: 1350601 - DNA, 15 bp, Homo sapiens
acatggtgatacccc

SEQ ID NO: 1350602 - DNA, 15 bp, Homo sapiens
aacatggtgataccc

SEQ ID NO: 1350603 - DNA, 15 bp, Homo sapiens
caacatggtgatacc

SEQ ID NO: 1350604 - DNA, 15 bp, Homo sapiens
tcaacatggtgatac

SEQ ID NO: 1350605 - DNA, 15 bp, Homo sapiens
gtcaacatggtgata

SEQ ID NO: 1350606 - DNA, 15 bp, Homo sapiens
tgtcaacatggtgat

SEQ ID NO: 1350607 - DNA, 15 bp, Homo sapiens
ctgtcaacatggtga

SEQ ID NO: 1350608 - DNA, 15 bp, Homo sapiens
cctgtcaacatggtg

SEQ ID NO: 1350609 - DNA, 15 bp, Homo sapiens
gcctgtcaacatggt

SEQ ID NO: 1350610 - DNA, 15 bp, Homo sapiens
agcctgtcaacatgg

SEQ ID NO: 1350611 - DNA, 15 bp, Homo sapiens
cagcctgtcaacatg

SEQ ID NO: 1350612 - DNA, 15 bp, Homo sapiens
ccagcctgtcaacat

SEQ ID NO: 1350613 - DNA, 15 bp, Homo sapiens
accagcctgtcaaca

SEQ ID NO: 1350614 - DNA, 15 bp, Homo sapiens
gaccagcctgtcaac

SEQ ID NO: 1350615 - DNA, 15 bp, Homo sapiens
agaccagcctgtcaa

SEQ ID NO: 1350616 - DNA, 15 bp, Homo sapiens
aagaccagcctgtca

SEQ ID NO: 1350617 - DNA, 15 bp, Homo sapiens
caagaccagcctgtc

SEQ ID NO: 1350618 - DNA, 15 bp, Homo sapiens
gagatcaggagttca

SEQ ID NO: 1350619 - DNA, 15 bp, Homo sapiens
atcacctgagatcag

SEQ ID NO: 1350620 - DNA, 15 bp, Homo sapiens
gatcacctgagatca

SEQ ID NO: 1350621 - DNA, 15 bp, Homo sapiens
agatcacctgagatc

SEQ ID NO: 1350622 - DNA, 15 bp, Homo sapiens
cagatcacctgagat

SEQ ID NO: 1350623 - DNA, 15 bp, Homo sapiens
gcagatcacctgaga

SEQ ID NO: 1350624 - DNA, 15 bp, Homo sapiens
agcagatcacctgag

SEQ ID NO: 1350625 - DNA, 15 bp, Homo sapiens
gagcagatcacctga

SEQ ID NO: 1350626 - DNA, 15 bp, Homo sapiens
cgagcagatcacctg

SEQ ID NO: 1350627 - DNA, 15 bp, Homo sapiens
gcgagcagatcacct

SEQ ID NO: 1350628 - DNA, 15 bp, Homo sapiens
ggcgagcagatcacc

SEQ ID NO: 1350629 - DNA, 15 bp, Homo sapiens
aggcgagcagatcac

SEQ ID NO: 1350630 - DNA, 15 bp, Homo sapiens
gaggcgagcagatca

SEQ ID NO: 1350631 - DNA, 15 bp, Homo sapiens
tgaggcgagcagatc

SEQ ID NO: 1350632 - DNA, 15 bp, Homo sapiens
ctgaggcgagcagat

SEQ ID NO: 1350633 - DNA, 15 bp, Homo sapiens
gctgaggcgagcaga

SEQ ID NO: 1350634 - DNA, 15 bp, Homo sapiens
ggctgaggcgagcag

SEQ ID NO: 1350635 - DNA, 15 bp, Homo sapiens
aggctgaggcgagca

SEQ ID NO: 1350636 - DNA, 15 bp, Homo sapiens
gaggctgaggcgagc

SEQ ID NO: 1350637 - DNA, 15 bp, Homo sapiens
ggaggctgaggcgag

SEQ ID NO: 1350638 - DNA, 15 bp, Homo sapiens
gggaggctgaggcga

SEQ ID NO: 1350639 - DNA, 15 bp, Homo sapiens
gcaggcgcggtggct

SEQ ID NO: 1350640 - DNA, 15 bp, Homo sapiens
ggcaggcgcggtggc

SEQ ID NO: 1350641 - DNA, 15 bp, Homo sapiens
tggcaggcgcggtgg

SEQ ID NO: 1350642 - DNA, 15 bp, Homo sapiens
atggcaggcgcggtg

SEQ ID NO: 1350643 - DNA, 15 bp, Homo sapiens
gatggcaggcgcggt

SEQ ID NO: 1350644 - DNA, 15 bp, Homo sapiens
tgatggcaggcgcgg

SEQ ID NO: 1350645 - DNA, 15 bp, Homo sapiens
atgatggcaggcgcg

SEQ ID NO: 1350646 - DNA, 15 bp, Homo sapiens
gatgatggcaggcgc

SEQ ID NO: 1350647 - DNA, 15 bp, Homo sapiens
agatgatggcaggcg

SEQ ID NO: 1350648 - DNA, 15 bp, Homo sapiens
gagatgatggcaggc

SEQ ID NO: 1350649 - DNA, 15 bp, Homo sapiens
ggagatgatggcagg

SEQ ID NO: 1350650 - DNA, 15 bp, Homo sapiens
tggagatgatggcag

SEQ ID NO: 1350651 - DNA, 15 bp, Homo sapiens
atggagatgatggca

SEQ ID NO: 1350652 - DNA, 15 bp, Homo sapiens
aatggagatgatggc

SEQ ID NO: 1350653 - DNA, 15 bp, Homo sapiens
aaatggagatgatgg

SEQ ID NO: 1350654 - DNA, 15 bp, Homo sapiens
taaatggagatgatg

SEQ ID NO: 1350655 - DNA, 15 bp, Homo sapiens
gtaaatggagatgat

SEQ ID NO: 1350656 - DNA, 15 bp, Homo sapiens
tgtaaatggagatga

SEQ ID NO: 1350657 - DNA, 15 bp, Homo sapiens
atgtaaatggagatg

SEQ ID NO: 1350658 - DNA, 15 bp, Homo sapiens
aatgtaaatggagat

SEQ ID NO: 1350659 - DNA, 15 bp, Homo sapiens
aaatgtaaatggaga

SEQ ID NO: 1350660 - DNA, 15 bp, Homo sapiens
gaaatgtaaatggag

SEQ ID NO: 1350661 - DNA, 15 bp, Homo sapiens
ggaaatgtaaatgga

SEQ ID NO: 1350662 - DNA, 15 bp, Homo sapiens
gggaaatgtaaatgg

SEQ ID NO: 1350663 - DNA, 15 bp, Homo sapiens
agggaaatgtaaatg

SEQ ID NO: 1350664 - DNA, 15 bp, Homo sapiens
gagggaaatgtaaat

SEQ ID NO: 1350665 - DNA, 15 bp, Homo sapiens
cgagggaaatgtaaa

SEQ ID NO: 1350666 - DNA, 15 bp, Homo sapiens
ccgagggaaatgtaa

SEQ ID NO: 1350667 - DNA, 15 bp, Homo sapiens
accgagggaaatgta

SEQ ID NO: 1350668 - DNA, 15 bp, Homo sapiens
caccgagggaaatgt

SEQ ID NO: 1350669 - DNA, 15 bp, Homo sapiens
acaccgagggaaatg

SEQ ID NO: 1350670 - DNA, 15 bp, Homo sapiens
tacaccgagggaaat

SEQ ID NO: 1350671 - DNA, 15 bp, Homo sapiens
ttacaccgagggaaa

SEQ ID NO: 1350672 - DNA, 15 bp, Homo sapiens
attacaccgagggaa

SEQ ID NO: 1350673 - DNA, 15 bp, Homo sapiens
gattacaccgaggga

SEQ ID NO: 1350674 - DNA, 15 bp, Homo sapiens
ggattacaccgaggg

SEQ ID NO: 1350675 - DNA, 15 bp, Homo sapiens
tggattacaccgagg

SEQ ID NO: 1350676 - DNA, 15 bp, Homo sapiens
atggattacaccgag

SEQ ID NO: 1350677 - DNA, 15 bp, Homo sapiens
catggattacaccga

SEQ ID NO: 1350678 - DNA, 15 bp, Homo sapiens
gcatggattacaccg

SEQ ID NO: 1350679 - DNA, 15 bp, Homo sapiens
agcatggattacacc

SEQ ID NO: 1350680 - DNA, 15 bp, Homo sapiens
cagcatggattacac

SEQ ID NO: 1350681 - DNA, 15 bp, Homo sapiens
gcagcatggattaca

SEQ ID NO: 1350682 - DNA, 15 bp, Homo sapiens
ggcagcatggattac

SEQ ID NO: 1350683 - DNA, 15 bp, Homo sapiens
tggcagcatggatta

SEQ ID NO: 1350684 - DNA, 15 bp, Homo sapiens
atggcagcatggatt

SEQ ID NO: 1350685 - DNA, 15 bp, Homo sapiens
tatggcagcatggat

SEQ ID NO: 1350686 - DNA, 15 bp, Homo sapiens
ctatggcagcatgga

SEQ ID NO: 1350687 - DNA, 15 bp, Homo sapiens
actatggcagcatgg

SEQ ID NO: 1350688 - DNA, 15 bp, Homo sapiens
tactatggcagcatg

SEQ ID NO: 1350689 - DNA, 15 bp, Homo sapiens
ctactatggcagcat

SEQ ID NO: 1350690 - DNA, 15 bp, Homo sapiens
gctactatggcagca

SEQ ID NO: 1350691 - DNA, 15 bp, Homo sapiens
ggctactatggcagc

SEQ ID NO: 1350692 - DNA, 15 bp, Homo sapiens
aggctactatggcag

SEQ ID NO: 1350693 - DNA, 15 bp, Homo sapiens
gaggctactatggca

SEQ ID NO: 1350694 - DNA, 15 bp, Homo sapiens
ggaggctactatggc

SEQ ID NO: 1350695 - DNA, 15 bp, Homo sapiens
aggaggctactatgg

SEQ ID NO: 1350696 - DNA, 15 bp, Homo sapiens
aaggaggctactatg

SEQ ID NO: 1350697 - DNA, 15 bp, Homo sapiens
gaaggaggctactat

SEQ ID NO: 1350698 - DNA, 15 bp, Homo sapiens
agaaggaggctacta

SEQ ID NO: 1350699 - DNA, 15 bp, Homo sapiens
aagaaggaggctact

SEQ ID NO: 1350700 - DNA, 15 bp, Homo sapiens
caagaaggaggctac

SEQ ID NO: 1350701 - DNA, 15 bp, Homo sapiens
acaagaaggaggcta

SEQ ID NO: 1350702 - DNA, 15 bp, Homo sapiens
gacaagaaggaggct

SEQ ID NO: 1350703 - DNA, 15 bp, Homo sapiens
ggacaagaaggaggc

SEQ ID NO: 1350704 - DNA, 15 bp, Homo sapiens
aggacaagaaggagg

SEQ ID NO: 1350705 - DNA, 15 bp, Homo sapiens
aaggacaagaaggag

SEQ ID NO: 1350706 - DNA, 15 bp, Homo sapiens
gaaggacaagaagga

SEQ ID NO: 1350707 - DNA, 15 bp, Homo sapiens
tgaaggacaagaagg

SEQ ID NO: 1350708 - DNA, 15 bp, Homo sapiens
ttgaaggacaagaag

SEQ ID NO: 1350709 - DNA, 15 bp, Homo sapiens
tttgaaggacaagaa

SEQ ID NO: 1350710 - DNA, 15 bp, Homo sapiens
gtttgaaggacaaga

SEQ ID NO: 1350711 - DNA, 15 bp, Homo sapiens
tgtttgaaggacaag

SEQ ID NO: 1350712 - DNA, 15 bp, Homo sapiens
ctgtttgaaggacaa

SEQ ID NO: 1350713 - DNA, 15 bp, Homo sapiens
gctgtttgaaggaca

SEQ ID NO: 1350714 - DNA, 15 bp, Homo sapiens
agctgtttgaaggac

SEQ ID NO: 1350715 - DNA, 15 bp, Homo sapiens
cagctgtttgaagga

SEQ ID NO: 1350716 - DNA, 15 bp, Homo sapiens
ccagctgtttgaagg

SEQ ID NO: 1350717 - DNA, 15 bp, Homo sapiens
cccagctgtttgaag

SEQ ID NO: 1350718 - DNA, 15 bp, Homo sapiens
acccagctgtttgaa

SEQ ID NO: 1350719 - DNA, 15 bp, Homo sapiens
gacccagctgtttga

SEQ ID NO: 1350720 - DNA, 15 bp, Homo sapiens
ggacccagctgtttg

SEQ ID NO: 1350721 - DNA, 15 bp, Homo sapiens
gggacccagctgttt

SEQ ID NO: 1350722 - DNA, 15 bp, Homo sapiens
tgggacccagctgtt

SEQ ID NO: 1350723 - DNA, 15 bp, Homo sapiens
gtgggacccagctgt

SEQ ID NO: 1350724 - DNA, 15 bp, Homo sapiens
ggtgggacccagctg

SEQ ID NO: 1350725 - DNA, 15 bp, Homo sapiens
aggtgggacccagct

SEQ ID NO: 1350726 - DNA, 15 bp, Homo sapiens
gaggtgggacccagc

SEQ ID NO: 1350727 - DNA, 15 bp, Homo sapiens
ggaggtgggacccag

SEQ ID NO: 1350728 - DNA, 15 bp, Homo sapiens
tggaggtgggaccca

SEQ ID NO: 1350729 - DNA, 15 bp, Homo sapiens
ttggaggtgggaccc

SEQ ID NO: 1350730 - DNA, 15 bp, Homo sapiens
cttggaggtgggacc

SEQ ID NO: 1350731 - DNA, 15 bp, Homo sapiens
gcttggaggtgggac

SEQ ID NO: 1350732 - DNA, 15 bp, Homo sapiens
ggcttggaggtggga

SEQ ID NO: 1350733 - DNA, 15 bp, Homo sapiens
aggcttggaggtggg

SEQ ID NO: 1350734 - DNA, 15 bp, Homo sapiens
aaggcttggaggtgg

SEQ ID NO: 1350735 - DNA, 15 bp, Homo sapiens
caaggcttggaggtg

SEQ ID NO: 1350736 - DNA, 15 bp, Homo sapiens
ccaaggcttggaggt

SEQ ID NO: 1350737 - DNA, 15 bp, Homo sapiens
gccaaggcttggagg

SEQ ID NO: 1350738 - DNA, 15 bp, Homo sapiens
ggccaaggcttggag

SEQ ID NO: 1350739 - DNA, 15 bp, Homo sapiens
tggccaaggcttgga

SEQ ID NO: 1350740 - DNA, 15 bp, Homo sapiens
ctggccaaggcttgg

SEQ ID NO: 1350741 - DNA, 15 bp, Homo sapiens
actggccaaggcttg

SEQ ID NO: 1350742 - DNA, 15 bp, Homo sapiens
cactggccaaggctt

SEQ ID NO: 1350743 - DNA, 15 bp, Homo sapiens
gcactggccaaggct

SEQ ID NO: 1350744 - DNA, 15 bp, Homo sapiens
tgcactggccaaggc

SEQ ID NO: 1350745 - DNA, 15 bp, Homo sapiens
ctgcactggccaagg

SEQ ID NO: 1350746 - DNA, 15 bp, Homo sapiens
gctgcactggccaag

SEQ ID NO: 1350747 - DNA, 15 bp, Homo sapiens
agctgcactggccaa

SEQ ID NO: 1350748 - DNA, 15 bp, Homo sapiens
gagctgcactggcca

SEQ ID NO: 1350749 - DNA, 15 bp, Homo sapiens
ggagctgcactggcc

SEQ ID NO: 1350750 - DNA, 15 bp, Homo sapiens
aggagctgcactggc

SEQ ID NO: 1350751 - DNA, 15 bp, Homo sapiens
aaggagctgcactgg

SEQ ID NO: 1350752 - DNA, 15 bp, Homo sapiens
gaaggagctgcactg

SEQ ID NO: 1350753 - DNA, 15 bp, Homo sapiens
agaaggagctgcact

SEQ ID NO: 1350754 - DNA, 15 bp, Homo sapiens
cagaaggagctgcac

SEQ ID NO: 1350755 - DNA, 15 bp, Homo sapiens
gcagaaggagctgca

SEQ ID NO: 1350756 - DNA, 15 bp, Homo sapiens
ggcagaaggagctgc

SEQ ID NO: 1350757 - DNA, 15 bp, Homo sapiens
aggcagaaggagctg

SEQ ID NO: 1350758 - DNA, 15 bp, Homo sapiens
caggcagaaggagct

SEQ ID NO: 1350759 - DNA, 15 bp, Homo sapiens
ccaggcagaaggagc

SEQ ID NO: 1350760 - DNA, 15 bp, Homo sapiens
tccaggcagaaggag

SEQ ID NO: 1350761 - DNA, 15 bp, Homo sapiens
ctccaggcagaagga

SEQ ID NO: 1350762 - DNA, 15 bp, Homo sapiens
gctccaggcagaagg

SEQ ID NO: 1350763 - DNA, 15 bp, Homo sapiens
tgctccaggcagaag

SEQ ID NO: 1350764 - DNA, 15 bp, Homo sapiens
gtgctccaggcagaa

SEQ ID NO: 1350765 - DNA, 15 bp, Homo sapiens
ggtgctccaggcaga

SEQ ID NO: 1350766 - DNA, 15 bp, Homo sapiens
aggtgctccaggcag

SEQ ID NO: 1350767 - DNA, 15 bp, Homo sapiens
caggtgctccaggca

SEQ ID NO: 1350768 - DNA, 15 bp, Homo sapiens
gcaggtgctccaggc

SEQ ID NO: 1350769 - DNA, 15 bp, Homo sapiens
ggcaggtgctccagg

SEQ ID NO: 1350770 - DNA, 15 bp, Homo sapiens
gggcaggtgctccag

SEQ ID NO: 1350771 - DNA, 15 bp, Homo sapiens
ggggcaggtgctcca

SEQ ID NO: 1350772 - DNA, 15 bp, Homo sapiens
tggggcaggtgctcc

SEQ ID NO: 1350773 - DNA, 15 bp, Homo sapiens
gtggggcaggtgctc

SEQ ID NO: 1350774 - DNA, 15 bp, Homo sapiens
ggtggggcaggtgct

SEQ ID NO: 1350775 - DNA, 15 bp, Homo sapiens
cggtggggcaggtgc

SEQ ID NO: 1350776 - DNA, 15 bp, Homo sapiens
acggtggggcaggtg

SEQ ID NO: 1350777 - DNA, 15 bp, Homo sapiens
cacggtggggcaggt

SEQ ID NO: 1350778 - DNA, 15 bp, Homo sapiens
gcacggtggggcagg

SEQ ID NO: 1350779 - DNA, 15 bp, Homo sapiens
tgcacggtggggcag

SEQ ID NO: 1350780 - DNA, 15 bp, Homo sapiens
gtgcacggtggggca

SEQ ID NO: 1350781 - DNA, 15 bp, Homo sapiens
tgtgcacggtggggc

SEQ ID NO: 1350782 - DNA, 15 bp, Homo sapiens
atgtgcacggtgggg

SEQ ID NO: 1350783 - DNA, 15 bp, Homo sapiens
catgtgcacggtggg

SEQ ID NO: 1350784 - DNA, 15 bp, Homo sapiens
ccatgtgcacggtgg

SEQ ID NO: 1350785 - DNA, 15 bp, Homo sapiens
gccatgtgcacggtg

SEQ ID NO: 1350786 - DNA, 15 bp, Homo sapiens
agccatgtgcacggt

SEQ ID NO: 1350787 - DNA, 15 bp, Homo sapiens
cagccatgtgcacgg

SEQ ID NO: 1350788 - DNA, 15 bp, Homo sapiens
gcagccatgtgcacg

SEQ ID NO: 1350789 - DNA, 15 bp, Homo sapiens
agcagccatgtgcac

SEQ ID NO: 1350790 - DNA, 15 bp, Homo sapiens
aagcagccatgtgca

SEQ ID NO: 1350791 - DNA, 15 bp, Homo sapiens
aaagcagccatgtgc

SEQ ID NO: 1350792 - DNA, 15 bp, Homo sapiens
gaaagcagccatgtg

SEQ ID NO: 1350793 - DNA, 15 bp, Homo sapiens
agaaagcagccatgt

SEQ ID NO: 1350794 - DNA, 15 bp, Homo sapiens
aagaaagcagccatg

SEQ ID NO: 1350795 - DNA, 15 bp, Homo sapiens
aaagaaagcagccat

SEQ ID NO: 1350796 - DNA, 15 bp, Homo sapiens
taaagaaagcagcca

SEQ ID NO: 1350797 - DNA, 15 bp, Homo sapiens
gtaaagaaagcagcc

SEQ ID NO: 1350798 - DNA, 15 bp, Homo sapiens
agtaaagaaagcagc

SEQ ID NO: 1350799 - DNA, 15 bp, Homo sapiens
cagtaaagaaagcag

SEQ ID NO: 1350800 - DNA, 15 bp, Homo sapiens
gcagtaaagaaagca

SEQ ID NO: 1350801 - DNA, 15 bp, Homo sapiens
agcagtaaagaaagc

SEQ ID NO: 1350802 - DNA, 15 bp, Homo sapiens
cagcagtaaagaaag

SEQ ID NO: 1350803 - DNA, 15 bp, Homo sapiens
acagcagtaaagaaa

SEQ ID NO: 1350804 - DNA, 15 bp, Homo sapiens
gacagcagtaaagaa

SEQ ID NO: 1350805 - DNA, 15 bp, Homo sapiens
ggacagcagtaaaga

SEQ ID NO: 1350806 - DNA, 15 bp, Homo sapiens
tggacagcagtaaag

SEQ ID NO: 1350807 - DNA, 15 bp, Homo sapiens
gtggacagcagtaaa

SEQ ID NO: 1350808 - DNA, 15 bp, Homo sapiens
agtggacagcagtaa

SEQ ID NO: 1350809 - DNA, 15 bp, Homo sapiens
gagtggacagcagta

SEQ ID NO: 1350810 - DNA, 15 bp, Homo sapiens
agagtggacagcagt

SEQ ID NO: 1350811 - DNA, 15 bp, Homo sapiens
aagagtggacagcag

SEQ ID NO: 1350812 - DNA, 15 bp, Homo sapiens
caagagtggacagca

SEQ ID NO: 1350813 - DNA, 15 bp, Homo sapiens
ccaagagtggacagc

SEQ ID NO: 1350814 - DNA, 15 bp, Homo sapiens
tccaagagtggacag

SEQ ID NO: 1350815 - DNA, 15 bp, Homo sapiens
ctccaagagtggaca

SEQ ID NO: 1350816 - DNA, 15 bp, Homo sapiens
tctccaagagtggac

SEQ ID NO: 1350817 - DNA, 15 bp, Homo sapiens
atctccaagagtgga

SEQ ID NO: 1350818 - DNA, 15 bp, Homo sapiens
catctccaagagtgg

SEQ ID NO: 1350819 - DNA, 15 bp, Homo sapiens
gcatctccaagagtg

SEQ ID NO: 1350820 - DNA, 15 bp, Homo sapiens
ggcatctccaagagt

SEQ ID NO: 1350821 - DNA, 15 bp, Homo sapiens
aggcatctccaagag

SEQ ID NO: 1350822 - DNA, 15 bp, Homo sapiens
gaggcatctccaaga

SEQ ID NO: 1350823 - DNA, 15 bp, Homo sapiens
agaggcatctccaag

SEQ ID NO: 1350824 - DNA, 15 bp, Homo sapiens
aagaggcatctccaa

SEQ ID NO: 1350825 - DNA, 15 bp, Homo sapiens
gaagaggcatctcca

SEQ ID NO: 1350826 - DNA, 15 bp, Homo sapiens
ggaagaggcatctcc

SEQ ID NO: 1350827 - DNA, 15 bp, Homo sapiens
tggaagaggcatctc

SEQ ID NO: 1350828 - DNA, 15 bp, Homo sapiens
ttggaagaggcatct

SEQ ID NO: 1350829 - DNA, 15 bp, Homo sapiens
cttggaagaggcatc

SEQ ID NO: 1350830 - DNA, 15 bp, Homo sapiens
tcttggaagaggcat

SEQ ID NO: 1350831 - DNA, 15 bp, Homo sapiens
ctcttggaagaggca

SEQ ID NO: 1350832 - DNA, 15 bp, Homo sapiens
gctcttggaagaggc

SEQ ID NO: 1350833 - DNA, 15 bp, Homo sapiens
ggctcttggaagagg

SEQ ID NO: 1350834 - DNA, 15 bp, Homo sapiens
gggctcttggaagag

SEQ ID NO: 1350835 - DNA, 15 bp, Homo sapiens
agggctcttggaaga

SEQ ID NO: 1350836 - DNA, 15 bp, Homo sapiens
aagggctcttggaag

SEQ ID NO: 1350837 - DNA, 15 bp, Homo sapiens
gaagggctcttggaa

SEQ ID NO: 1350838 - DNA, 15 bp, Homo sapiens
agaagggctcttgga

SEQ ID NO: 1350839 - DNA, 15 bp, Homo sapiens
gagaagggctcttgg

SEQ ID NO: 1350840 - DNA, 15 bp, Homo sapiens
agagaagggctcttg

SEQ ID NO: 1350841 - DNA, 15 bp, Homo sapiens
cagagaagggctctt

SEQ ID NO: 1350842 - DNA, 15 bp, Homo sapiens
tcagagaagggctct

SEQ ID NO: 1350843 - DNA, 15 bp, Homo sapiens
gtcagagaagggctc

SEQ ID NO: 1350844 - DNA, 15 bp, Homo sapiens
tgtcagagaagggct

SEQ ID NO: 1350845 - DNA, 15 bp, Homo sapiens
ctgtcagagaagggc

SEQ ID NO: 1350846 - DNA, 15 bp, Homo sapiens
gctgtcagagaaggg

SEQ ID NO: 1350847 - DNA, 15 bp, Homo sapiens
ggctgtcagagaagg

SEQ ID NO: 1350848 - DNA, 15 bp, Homo sapiens
gggctgtcagagaag

SEQ ID NO: 1350849 - DNA, 15 bp, Homo sapiens
agggctgtcagagaa

SEQ ID NO: 1350850 - DNA, 15 bp, Homo sapiens
aagggctgtcagaga

SEQ ID NO: 1350851 - DNA, 15 bp, Homo sapiens
aaagggctgtcagag

SEQ ID NO: 1350852 - DNA, 15 bp, Homo sapiens
gaaagggctgtcaga

SEQ ID NO: 1350853 - DNA, 15 bp, Homo sapiens
agaaagggctgtcag

SEQ ID NO: 1350854 - DNA, 15 bp, Homo sapiens
aagaaagggctgtca

SEQ ID NO: 1350855 - DNA, 15 bp, Homo sapiens
aaagaaagggctgtc

SEQ ID NO: 1350856 - DNA, 15 bp, Homo sapiens
taaagaaagggctgt

SEQ ID NO: 1350857 - DNA, 15 bp, Homo sapiens
ctaaagaaagggctg

SEQ ID NO: 1350858 - DNA, 15 bp, Homo sapiens
gctaaagaaagggct

SEQ ID NO: 1350859 - DNA, 15 bp, Homo sapiens
agctaaagaaagggc

SEQ ID NO: 1350860 - DNA, 15 bp, Homo sapiens
tagctaaagaaaggg

SEQ ID NO: 1350861 - DNA, 15 bp, Homo sapiens
atagctaaagaaagg

SEQ ID NO: 1350862 - DNA, 15 bp, Homo sapiens
tatagctaaagaaag

SEQ ID NO: 1350863 - DNA, 15 bp, Homo sapiens
atatagctaaagaaa

SEQ ID NO: 1350864 - DNA, 15 bp, Homo sapiens
aatatagctaaagaa

SEQ ID NO: 1350865 - DNA, 15 bp, Homo sapiens
aaatatagctaaaga

SEQ ID NO: 1350866 - DNA, 15 bp, Homo sapiens
aaaatatagctaaag

SEQ ID NO: 1350867 - DNA, 15 bp, Homo sapiens
aaaaatatagctaaa

SEQ ID NO: 1350868 - DNA, 15 bp, Homo sapiens
gaaaaatatagctaa

SEQ ID NO: 1350869 - DNA, 15 bp, Homo sapiens
ggaaaaatatagcta

SEQ ID NO: 1350870 - DNA, 15 bp, Homo sapiens
aggaaaaatatagct

SEQ ID NO: 1350871 - DNA, 15 bp, Homo sapiens
aaggaaaaatatagc

SEQ ID NO: 1350872 - DNA, 15 bp, Homo sapiens
gaaggaaaaatatag

SEQ ID NO: 1350873 - DNA, 15 bp, Homo sapiens
tgaaggaaaaatata

SEQ ID NO: 1350874 - DNA, 15 bp, Homo sapiens
atgaaggaaaaatat

SEQ ID NO: 1350875 - DNA, 15 bp, Homo sapiens
aatgaaggaaaaata

SEQ ID NO: 1350876 - DNA, 15 bp, Homo sapiens
caatgaaggaaaaat

SEQ ID NO: 1350877 - DNA, 15 bp, Homo sapiens
acaatgaaggaaaaa

SEQ ID NO: 1350878 - DNA, 15 bp, Homo sapiens
aacaatgaaggaaaa

SEQ ID NO: 1350879 - DNA, 15 bp, Homo sapiens
caacaatgaaggaaa

SEQ ID NO: 1350880 - DNA, 15 bp, Homo sapiens
acaacaatgaaggaa

SEQ ID NO: 1350881 - DNA, 15 bp, Homo sapiens
gacaacaatgaagga

SEQ ID NO: 1350882 - DNA, 15 bp, Homo sapiens
agacaacaatgaagg

SEQ ID NO: 1350883 - DNA, 15 bp, Homo sapiens
aagacaacaatgaag

SEQ ID NO: 1350884 - DNA, 15 bp, Homo sapiens
aaagacaacaatgaa

SEQ ID NO: 1350885 - DNA, 15 bp, Homo sapiens
aaaagacaacaatga

SEQ ID NO: 1350886 - DNA, 15 bp, Homo sapiens
aaaaagacaacaatg

SEQ ID NO: 1350887 - DNA, 15 bp, Homo sapiens
aaaaaagacaacaat

SEQ ID NO: 1350888 - DNA, 15 bp, Homo sapiens
aaaaaaagacaacaa

SEQ ID NO: 1350889 - DNA, 15 bp, Homo sapiens
aaaaaaaagacaaca

SEQ ID NO: 1350890 - DNA, 15 bp, Homo sapiens
aaaaaaaaagacaac

SEQ ID NO: 1350891 - DNA, 15 bp, Homo sapiens
tccatcaaaaaaaaa

SEQ ID NO: 1350892 - DNA, 15 bp, Homo sapiens
ctccatcaaaaaaaa

SEQ ID NO: 1350893 - DNA, 15 bp, Homo sapiens
actccatcaaaaaaa

SEQ ID NO: 1350894 - DNA, 15 bp, Homo sapiens
gactccatcaaaaaa

SEQ ID NO: 1350895 - DNA, 15 bp, Homo sapiens
cgactccatcaaaaa

SEQ ID NO: 1350896 - DNA, 15 bp, Homo sapiens
gcgactccatcaaaa

SEQ ID NO: 1350897 - DNA, 15 bp, Homo sapiens
agcgactccatcaaa

SEQ ID NO: 1350898 - DNA, 15 bp, Homo sapiens
gagcgactccatcaa

SEQ ID NO: 1350899 - DNA, 15 bp, Homo sapiens
agagcgactccatca

SEQ ID NO: 1350900 - DNA, 15 bp, Homo sapiens
tagagcgactccatc

SEQ ID NO: 1350901 - DNA, 15 bp, Homo sapiens
atagagcgactccat

SEQ ID NO: 1350902 - DNA, 15 bp, Homo sapiens
aatagagcgactcca

SEQ ID NO: 1350903 - DNA, 15 bp, Homo sapiens
caatagagcgactcc

SEQ ID NO: 1350904 - DNA, 15 bp, Homo sapiens
gcaatagagcgactc

SEQ ID NO: 1350905 - DNA, 15 bp, Homo sapiens
ggcaatagagcgact

SEQ ID NO: 1350906 - DNA, 15 bp, Homo sapiens
gggcaatagagcgac

SEQ ID NO: 1350907 - DNA, 15 bp, Homo sapiens
tgggcaatagagcga

SEQ ID NO: 1350908 - DNA, 15 bp, Homo sapiens
ctgggcaatagagcg

SEQ ID NO: 1350909 - DNA, 15 bp, Homo sapiens
tctgggcaatagagc

SEQ ID NO: 1350910 - DNA, 15 bp, Homo sapiens
gtctgggcaatagag

SEQ ID NO: 1350911 - DNA, 15 bp, Homo sapiens
agtctgggcaataga

SEQ ID NO: 1350912 - DNA, 15 bp, Homo sapiens
cagtctgggcaatag

SEQ ID NO: 1350913 - DNA, 15 bp, Homo sapiens
ccagtctgggcaata

SEQ ID NO: 1350914 - DNA, 15 bp, Homo sapiens
tccagtctgggcaat

SEQ ID NO: 1350915 - DNA, 15 bp, Homo sapiens
ctccagtctgggcaa

SEQ ID NO: 1350916 - DNA, 15 bp, Homo sapiens
actccagtctgggca

SEQ ID NO: 1350917 - DNA, 15 bp, Homo sapiens
cctccactgcactcc

SEQ ID NO: 1350918 - DNA, 15 bp, Homo sapiens
ccctccactgcactc

SEQ ID NO: 1350919 - DNA, 15 bp, Homo sapiens
tccctccactgcact

SEQ ID NO: 1350920 - DNA, 15 bp, Homo sapiens
atccctccactgcac

SEQ ID NO: 1350921 - DNA, 15 bp, Homo sapiens
gatccctccactgca

SEQ ID NO: 1350922 - DNA, 15 bp, Homo sapiens
agatccctccactgc

SEQ ID NO: 1350923 - DNA, 15 bp, Homo sapiens
gagatccctccactg

SEQ ID NO: 1350924 - DNA, 15 bp, Homo sapiens
cgagatccctccact

SEQ ID NO: 1350925 - DNA, 15 bp, Homo sapiens
ccgagatccctccac

SEQ ID NO: 1350926 - DNA, 15 bp, Homo sapiens
gccgagatccctcca

SEQ ID NO: 1350927 - DNA, 15 bp, Homo sapiens
agccgagatccctcc

SEQ ID NO: 1350928 - DNA, 15 bp, Homo sapiens
gagccgagatccctc

SEQ ID NO: 1350929 - DNA, 15 bp, Homo sapiens
tgagccgagatccct

SEQ ID NO: 1350930 - DNA, 15 bp, Homo sapiens
gggttgcagtgagcc

SEQ ID NO: 1350931 - DNA, 15 bp, Homo sapiens
ggggttgcagtgagc

SEQ ID NO: 1350932 - DNA, 15 bp, Homo sapiens
aggggttgcagtgag

SEQ ID NO: 1350933 - DNA, 15 bp, Homo sapiens
caggggttgcagtga

SEQ ID NO: 1350934 - DNA, 15 bp, Homo sapiens
gcaggggttgcagtg

SEQ ID NO: 1350935 - DNA, 15 bp, Homo sapiens
ggcaggggttgcagt

SEQ ID NO: 1350936 - DNA, 15 bp, Homo sapiens
aggcaggggttgcag

SEQ ID NO: 1350937 - DNA, 15 bp, Homo sapiens
gaggcaggggttgca

SEQ ID NO: 1350938 - DNA, 15 bp, Homo sapiens
ggaggcaggggttgc

SEQ ID NO: 1350939 - DNA, 15 bp, Homo sapiens
gggaggcaggggttg

SEQ ID NO: 1350940 - DNA, 15 bp, Homo sapiens
cgggaggcaggggtt

SEQ ID NO: 1350941 - DNA, 15 bp, Homo sapiens
ccgggaggcaggggt

SEQ ID NO: 1350942 - DNA, 15 bp, Homo sapiens
tccgggaggcagggg

SEQ ID NO: 1350943 - DNA, 15 bp, Homo sapiens
atccgggaggcaggg

SEQ ID NO: 1350944 - DNA, 15 bp, Homo sapiens
aatccgggaggcagg

SEQ ID NO: 1350945 - DNA, 15 bp, Homo sapiens
gaatccgggaggcag

SEQ ID NO: 1350946 - DNA, 15 bp, Homo sapiens
tgaatccgggaggca

SEQ ID NO: 1350947 - DNA, 15 bp, Homo sapiens
ttgaatccgggaggc

SEQ ID NO: 1350948 - DNA, 15 bp, Homo sapiens
cttgaatccgggagg

SEQ ID NO: 1350949 - DNA, 15 bp, Homo sapiens
gcttgaatccgggag

SEQ ID NO: 1350950 - DNA, 15 bp, Homo sapiens
cgcttgaatccggga

SEQ ID NO: 1350951 - DNA, 15 bp, Homo sapiens
tcgcttgaatccggg

SEQ ID NO: 1350952 - DNA, 15 bp, Homo sapiens
atcgcttgaatccgg

SEQ ID NO: 1350953 - DNA, 15 bp, Homo sapiens
aatcgcttgaatccg

SEQ ID NO: 1350954 - DNA, 15 bp, Homo sapiens
gaatcgcttgaatcc

SEQ ID NO: 1350955 - DNA, 15 bp, Homo sapiens
agaatcgcttgaatc

SEQ ID NO: 1350956 - DNA, 15 bp, Homo sapiens
gagaatcgcttgaat

SEQ ID NO: 1350957 - DNA, 15 bp, Homo sapiens
aggagtctgaggcag

SEQ ID NO: 1350958 - DNA, 15 bp, Homo sapiens
caggagtctgaggca

SEQ ID NO: 1350959 - DNA, 15 bp, Homo sapiens
tcaggagtctgaggc

SEQ ID NO: 1350960 - DNA, 15 bp, Homo sapiens
ctcaggagtctgagg

SEQ ID NO: 1350961 - DNA, 15 bp, Homo sapiens
actcaggagtctgag

SEQ ID NO: 1350962 - DNA, 15 bp, Homo sapiens
tactcaggagtctga

SEQ ID NO: 1350963 - DNA, 15 bp, Homo sapiens
ctactcaggagtctg

SEQ ID NO: 1350964 - DNA, 15 bp, Homo sapiens
gctactcaggagtct

SEQ ID NO: 1350965 - DNA, 15 bp, Homo sapiens
agctactcaggagtc

SEQ ID NO: 1350966 - DNA, 15 bp, Homo sapiens
cagctactcaggagt

SEQ ID NO: 1350967 - DNA, 15 bp, Homo sapiens
gcacctgtaatccca

SEQ ID NO: 1350968 - DNA, 15 bp, Homo sapiens
ggcacctgtaatccc

SEQ ID NO: 1350969 - DNA, 15 bp, Homo sapiens
tgggcacctgtaatc

SEQ ID NO: 1350970 - DNA, 15 bp, Homo sapiens
gtgggcacctgtaat

SEQ ID NO: 1350971 - DNA, 15 bp, Homo sapiens
ggtgggcacctgtaa

SEQ ID NO: 1350972 - DNA, 15 bp, Homo sapiens
gtggtggtgggcacc

SEQ ID NO: 1350973 - DNA, 15 bp, Homo sapiens
cgtggtggtgggcac

SEQ ID NO: 1350974 - DNA, 15 bp, Homo sapiens
gcgtggtggtgggca

SEQ ID NO: 1350975 - DNA, 15 bp, Homo sapiens
atctactaaaaaata

SEQ ID NO: 1350976 - DNA, 15 bp, Homo sapiens
tatctactaaaaaat

SEQ ID NO: 1350977 - DNA, 15 bp, Homo sapiens
gtatctactaaaaaa

SEQ ID NO: 1350978 - DNA, 15 bp, Homo sapiens
cgtatctactaaaaa

SEQ ID NO: 1350979 - DNA, 15 bp, Homo sapiens
ccgtatctactaaaa

SEQ ID NO: 1350980 - DNA, 15 bp, Homo sapiens
cccgtatctactaaa

SEQ ID NO: 1350981 - DNA, 15 bp, Homo sapiens
ccccgtatctactaa

SEQ ID NO: 1350982 - DNA, 15 bp, Homo sapiens
accccgtatctacta

SEQ ID NO: 1350983 - DNA, 15 bp, Homo sapiens
aaccccgtatctact

SEQ ID NO: 1350984 - DNA, 15 bp, Homo sapiens
aaaccccgtatctac

SEQ ID NO: 1350985 - DNA, 15 bp, Homo sapiens
aaaaccccgtatcta

SEQ ID NO: 1350986 - DNA, 15 bp, Homo sapiens
caaaaccccgtatct

SEQ ID NO: 1350987 - DNA, 15 bp, Homo sapiens
gcaaaaccccgtatc

SEQ ID NO: 1350988 - DNA, 15 bp, Homo sapiens
agcaaaaccccgtat

SEQ ID NO: 1350989 - DNA, 15 bp, Homo sapiens
cagcaaaaccccgta

SEQ ID NO: 1350990 - DNA, 15 bp, Homo sapiens
acagcaaaaccccgt

SEQ ID NO: 1350991 - DNA, 15 bp, Homo sapiens
cacagcaaaaccccg

SEQ ID NO: 1350992 - DNA, 15 bp, Homo sapiens
acacagcaaaacccc

SEQ ID NO: 1350993 - DNA, 15 bp, Homo sapiens
aacacagcaaaaccc

SEQ ID NO: 1350994 - DNA, 15 bp, Homo sapiens
caacacagcaaaacc

SEQ ID NO: 1350995 - DNA, 15 bp, Homo sapiens
ccaacacagcaaaac

SEQ ID NO: 1350996 - DNA, 15 bp, Homo sapiens
gccaacacagcaaaa

SEQ ID NO: 1350997 - DNA, 15 bp, Homo sapiens
ggccaacacagcaaa

SEQ ID NO: 1350998 - DNA, 15 bp, Homo sapiens
tggccaacacagcaa

SEQ ID NO: 1350999 - DNA, 15 bp, Homo sapiens
ctggccaacacagca

SEQ ID NO: 1351000 - DNA, 15 bp, Homo sapiens
cctggccaacacagc

SEQ ID NO: 1351001 - DNA, 15 bp, Homo sapiens
ggaattcgagaccag

SEQ ID NO: 1351002 - DNA, 15 bp, Homo sapiens
aggaattcgagacca

SEQ ID NO: 1351003 - DNA, 15 bp, Homo sapiens
caggaattcgagacc

SEQ ID NO: 1351004 - DNA, 15 bp, Homo sapiens
tcaggaattcgagac

SEQ ID NO: 1351005 - DNA, 15 bp, Homo sapiens
gtcaggaattcgaga

SEQ ID NO: 1351006 - DNA, 15 bp, Homo sapiens
agtcaggaattcgag

SEQ ID NO: 1351007 - DNA, 15 bp, Homo sapiens
aagtcaggaattcga

SEQ ID NO: 1351008 - DNA, 15 bp, Homo sapiens
gaagtcaggaattcg

SEQ ID NO: 1351009 - DNA, 15 bp, Homo sapiens
tgaagtcaggaattc

SEQ ID NO: 1351010 - DNA, 15 bp, Homo sapiens
ttgaagtcaggaatt

SEQ ID NO: 1351011 - DNA, 15 bp, Homo sapiens
cttgaagtcaggaat

SEQ ID NO: 1351012 - DNA, 15 bp, Homo sapiens
acttgaagtcaggaa

SEQ ID NO: 1351013 - DNA, 15 bp, Homo sapiens
tggatcacttgaagt

SEQ ID NO: 1351014 - DNA, 15 bp, Homo sapiens
gtggatcacttgaag

SEQ ID NO: 1351015 - DNA, 15 bp, Homo sapiens
agtggatcacttgaa

SEQ ID NO: 1351016 - DNA, 15 bp, Homo sapiens
gagtggatcacttga

SEQ ID NO: 1351017 - DNA, 15 bp, Homo sapiens
tgagtggatcacttg

SEQ ID NO: 1351018 - DNA, 15 bp, Homo sapiens
gtgagtggatcactt

SEQ ID NO: 1351019 - DNA, 15 bp, Homo sapiens
ggtgagtggatcact

SEQ ID NO: 1351020 - DNA, 15 bp, Homo sapiens
aggtgagtggatcac

SEQ ID NO: 1351021 - DNA, 15 bp, Homo sapiens
gaggtgagtggatca

SEQ ID NO: 1351022 - DNA, 15 bp, Homo sapiens
cgaggtgagtggatc

SEQ ID NO: 1351023 - DNA, 15 bp, Homo sapiens
ccgaggtgagtggat

SEQ ID NO: 1351024 - DNA, 15 bp, Homo sapiens
gccgaggtgagtgga

SEQ ID NO: 1351025 - DNA, 15 bp, Homo sapiens
ggccgaggtgagtgg

SEQ ID NO: 1351026 - DNA, 15 bp, Homo sapiens
aggccgaggtgagtg

SEQ ID NO: 1351027 - DNA, 15 bp, Homo sapiens
gaggccgaggtgagt

SEQ ID NO: 1351028 - DNA, 15 bp, Homo sapiens
ggaggccgaggtgag

SEQ ID NO: 1351029 - DNA, 15 bp, Homo sapiens
gggaggccgaggtga

SEQ ID NO: 1351030 - DNA, 15 bp, Homo sapiens
actcacgcctgtaat

SEQ ID NO: 1351031 - DNA, 15 bp, Homo sapiens
gactcacgcctgtaa

SEQ ID NO: 1351032 - DNA, 15 bp, Homo sapiens
agtgactcacgcctg

SEQ ID NO: 1351033 - DNA, 15 bp, Homo sapiens
cagtgactcacgcct

SEQ ID NO: 1351034 - DNA, 15 bp, Homo sapiens
gcagtgactcacgcc

SEQ ID NO: 1351035 - DNA, 15 bp, Homo sapiens
cgcagtgactcacgc

SEQ ID NO: 1351036 - DNA, 15 bp, Homo sapiens
gcgcagtgactcacg

SEQ ID NO: 1351037 - DNA, 15 bp, Homo sapiens
ggcgcagtgactcac

SEQ ID NO: 1351038 - DNA, 15 bp, Homo sapiens
tggcgcagtgactca

SEQ ID NO: 1351039 - DNA, 15 bp, Homo sapiens
ctggcgcagtgactc

SEQ ID NO: 1351040 - DNA, 15 bp, Homo sapiens
cctggcgcagtgact

SEQ ID NO: 1351041 - DNA, 15 bp, Homo sapiens
gcctggcgcagtgac

SEQ ID NO: 1351042 - DNA, 15 bp, Homo sapiens
ggcctggcgcagtga

SEQ ID NO: 1351043 - DNA, 15 bp, Homo sapiens
gaggcctggcgcagt

SEQ ID NO: 1351044 - DNA, 15 bp, Homo sapiens
agaggcctggcgcag

SEQ ID NO: 1351045 - DNA, 15 bp, Homo sapiens
aagaggcctggcgca

SEQ ID NO: 1351046 - DNA, 15 bp, Homo sapiens
taagaggcctggcgc

SEQ ID NO: 1351047 - DNA, 15 bp, Homo sapiens
ataagaggcctggcg

SEQ ID NO: 1351048 - DNA, 15 bp, Homo sapiens
gataagaggcctggc

SEQ ID NO: 1351049 - DNA, 15 bp, Homo sapiens
tgataagaggcctgg

SEQ ID NO: 1351050 - DNA, 15 bp, Homo sapiens
gtgataagaggcctg

SEQ ID NO: 1351051 - DNA, 15 bp, Homo sapiens
ggtgataagaggcct

SEQ ID NO: 1351052 - DNA, 15 bp, Homo sapiens
tggtgataagaggcc

SEQ ID NO: 1351053 - DNA, 15 bp, Homo sapiens
gtggtgataagaggc

SEQ ID NO: 1351054 - DNA, 15 bp, Homo sapiens
ggtggtgataagagg

SEQ ID NO: 1351055 - DNA, 15 bp, Homo sapiens
aggtggtgataagag

SEQ ID NO: 1351056 - DNA, 15 bp, Homo sapiens
taggtggtgataaga

SEQ ID NO: 1351057 - DNA, 15 bp, Homo sapiens
ttaggtggtgataag

SEQ ID NO: 1351058 - DNA, 15 bp, Homo sapiens
cttaggtggtgataa

SEQ ID NO: 1351059 - DNA, 15 bp, Homo sapiens
tcttaggtggtgata

SEQ ID NO: 1351060 - DNA, 15 bp, Homo sapiens
atcttaggtggtgat

SEQ ID NO: 1351061 - DNA, 15 bp, Homo sapiens
tatcttaggtggtga

SEQ ID NO: 1351062 - DNA, 15 bp, Homo sapiens
gtatcttaggtggtg

SEQ ID NO: 1351063 - DNA, 15 bp, Homo sapiens
agtatcttaggtggt

SEQ ID NO: 1351064 - DNA, 15 bp, Homo sapiens
tagtatcttaggtgg

SEQ ID NO: 1351065 - DNA, 15 bp, Homo sapiens
gtagtatcttaggtg

SEQ ID NO: 1351066 - DNA, 15 bp, Homo sapiens
tgtagtatcttaggt

SEQ ID NO: 1351067 - DNA, 15 bp, Homo sapiens
atgtagtatcttagg

SEQ ID NO: 1351068 - DNA, 15 bp, Homo sapiens
tatgtagtatcttag

SEQ ID NO: 1351069 - DNA, 15 bp, Homo sapiens
gtatgtagtatctta

SEQ ID NO: 1351070 - DNA, 15 bp, Homo sapiens
ggtatgtagtatctt

SEQ ID NO: 1351071 - DNA, 15 bp, Homo sapiens
aggtatgtagtatct

SEQ ID NO: 1351072 - DNA, 15 bp, Homo sapiens
aaggtatgtagtatc

SEQ ID NO: 1351073 - DNA, 15 bp, Homo sapiens
aaaggtatgtagtat

SEQ ID NO: 1351074 - DNA, 15 bp, Homo sapiens
aaaaggtatgtagta

SEQ ID NO: 1351075 - DNA, 15 bp, Homo sapiens
aaaaaggtatgtagt

SEQ ID NO: 1351076 - DNA, 15 bp, Homo sapiens
taaaaaggtatgtag

SEQ ID NO: 1351077 - DNA, 15 bp, Homo sapiens
ttaaaaaggtatgta

SEQ ID NO: 1351078 - DNA, 15 bp, Homo sapiens
tttaaaaaggtatgt

SEQ ID NO: 1351079 - DNA, 15 bp, Homo sapiens
ttttaaaaaggtatg

SEQ ID NO: 1351080 - DNA, 15 bp, Homo sapiens
tttttaaaaaggtat

SEQ ID NO: 1351081 - DNA, 15 bp, Homo sapiens
atttttaaaaaggta

SEQ ID NO: 1351082 - DNA, 15 bp, Homo sapiens
tatttttaaaaaggt

SEQ ID NO: 1351083 - DNA, 15 bp, Homo sapiens
atatttttaaaaagg

SEQ ID NO: 1351084 - DNA, 15 bp, Homo sapiens
aatatttttaaaaag

SEQ ID NO: 1351085 - DNA, 15 bp, Homo sapiens
gaatatttttaaaaa

SEQ ID NO: 1351086 - DNA, 15 bp, Homo sapiens
agaatatttttaaaa

SEQ ID NO: 1351087 - DNA, 15 bp, Homo sapiens
cagaatatttttaaa

SEQ ID NO: 1351088 - DNA, 15 bp, Homo sapiens
acagaatatttttaa

SEQ ID NO: 1351089 - DNA, 15 bp, Homo sapiens
aacagaatattttta

SEQ ID NO: 1351090 - DNA, 15 bp, Homo sapiens
aaacagaatattttt

SEQ ID NO: 1351091 - DNA, 15 bp, Homo sapiens
taaacagaatatttt

SEQ ID NO: 1351092 - DNA, 15 bp, Homo sapiens
gtaaacagaatattt

SEQ ID NO: 1351093 - DNA, 15 bp, Homo sapiens
agtaaacagaatatt

SEQ ID NO: 1351094 - DNA, 15 bp, Homo sapiens
gagtaaacagaatat

SEQ ID NO: 1351095 - DNA, 15 bp, Homo sapiens
agagtaaacagaata

SEQ ID NO: 1351096 - DNA, 15 bp, Homo sapiens
gagagtaaacagaat

SEQ ID NO: 1351097 - DNA, 15 bp, Homo sapiens
tgagagtaaacagaa

SEQ ID NO: 1351098 - DNA, 15 bp, Homo sapiens
atgagagtaaacaga

SEQ ID NO: 1351099 - DNA, 15 bp, Homo sapiens
aatgagagtaaacag

SEQ ID NO: 1351100 - DNA, 15 bp, Homo sapiens
aaatgagagtaaaca

SEQ ID NO: 1351101 - DNA, 15 bp, Homo sapiens
aaaatgagagtaaac

SEQ ID NO: 1351102 - DNA, 15 bp, Homo sapiens
aaaaatgagagtaaa

SEQ ID NO: 1351103 - DNA, 15 bp, Homo sapiens
aaaaaatgagagtaa

SEQ ID NO: 1351104 - DNA, 15 bp, Homo sapiens
taaaaaatgagagta

SEQ ID NO: 1351105 - DNA, 15 bp, Homo sapiens
ataaaaaatgagagt

SEQ ID NO: 1351106 - DNA, 15 bp, Homo sapiens
aataaaaaatgagag

SEQ ID NO: 1351107 - DNA, 15 bp, Homo sapiens
aaataaaaaatgaga

SEQ ID NO: 1351108 - DNA, 15 bp, Homo sapiens
aaaataaaaaatgag

SEQ ID NO: 1351109 - DNA, 15 bp, Homo sapiens
aaaaataaaaaatga

SEQ ID NO: 1351110 - DNA, 15 bp, Homo sapiens
taaaaataaaaaatg

SEQ ID NO: 1351111 - DNA, 15 bp, Homo sapiens
ataaaaataaaaaat

SEQ ID NO: 1351112 - DNA, 15 bp, Homo sapiens
aataaaaataaaaaa

SEQ ID NO: 1351113 - DNA, 15 bp, Homo sapiens
ccaaaataaataaat

SEQ ID NO: 1351114 - DNA, 15 bp, Homo sapiens
cccaaaataaataaa

SEQ ID NO: 1351115 - DNA, 15 bp, Homo sapiens
tcccaaaataaataa

SEQ ID NO: 1351116 - DNA, 15 bp, Homo sapiens
gtcccaaaataaata

SEQ ID NO: 1351117 - DNA, 15 bp, Homo sapiens
tgtcccaaaataaat

SEQ ID NO: 1351118 - DNA, 15 bp, Homo sapiens
ctgtcccaaaataaa

SEQ ID NO: 1351119 - DNA, 15 bp, Homo sapiens
cctgtcccaaaataa

SEQ ID NO: 1351120 - DNA, 15 bp, Homo sapiens
ccctgtcccaaaata

SEQ ID NO: 1351121 - DNA, 15 bp, Homo sapiens
accctgtcccaaaat

SEQ ID NO: 1351122 - DNA, 15 bp, Homo sapiens
gaccctgtcccaaaa

SEQ ID NO: 1351123 - DNA, 15 bp, Homo sapiens
agaccctgtcccaaa

SEQ ID NO: 1351124 - DNA, 15 bp, Homo sapiens
aagaccctgtcccaa

SEQ ID NO: 1351125 - DNA, 15 bp, Homo sapiens
caagaccctgtccca

SEQ ID NO: 1351126 - DNA, 15 bp, Homo sapiens
gcaagaccctgtccc

SEQ ID NO: 1351127 - DNA, 15 bp, Homo sapiens
agcaagaccctgtcc

SEQ ID NO: 1351128 - DNA, 15 bp, Homo sapiens
tgattgtaccactgc

SEQ ID NO: 1351129 - DNA, 15 bp, Homo sapiens
atgattgtaccactg

SEQ ID NO: 1351130 - DNA, 15 bp, Homo sapiens
gatgattgtaccact

SEQ ID NO: 1351131 - DNA, 15 bp, Homo sapiens
tgatgattgtaccac

SEQ ID NO: 1351132 - DNA, 15 bp, Homo sapiens
atgatgattgtacca

SEQ ID NO: 1351133 - DNA, 15 bp, Homo sapiens
aatgatgattgtacc

SEQ ID NO: 1351134 - DNA, 15 bp, Homo sapiens
gaatgatgattgtac

SEQ ID NO: 1351135 - DNA, 15 bp, Homo sapiens
tgaatgatgattgta

SEQ ID NO: 1351136 - DNA, 15 bp, Homo sapiens
gtgaatgatgattgt

SEQ ID NO: 1351137 - DNA, 15 bp, Homo sapiens
agtgaatgatgattg

SEQ ID NO: 1351138 - DNA, 15 bp, Homo sapiens
cagtgaatgatgatt

SEQ ID NO: 1351139 - DNA, 15 bp, Homo sapiens
acagtgaatgatgat

SEQ ID NO: 1351140 - DNA, 15 bp, Homo sapiens
tacagtgaatgatga

SEQ ID NO: 1351141 - DNA, 15 bp, Homo sapiens
ctacagtgaatgatg

SEQ ID NO: 1351142 - DNA, 15 bp, Homo sapiens
gctacagtgaatgat

SEQ ID NO: 1351143 - DNA, 15 bp, Homo sapiens
ggctacagtgaatga

SEQ ID NO: 1351144 - DNA, 15 bp, Homo sapiens
aggctacagtgaatg

SEQ ID NO: 1351145 - DNA, 15 bp, Homo sapiens
gaggctacagtgaat

SEQ ID NO: 1351146 - DNA, 15 bp, Homo sapiens
cgaggctacagtgaa

SEQ ID NO: 1351147 - DNA, 15 bp, Homo sapiens
tcgaggctacagtga

SEQ ID NO: 1351148 - DNA, 15 bp, Homo sapiens
gtcgaggctacagtg

SEQ ID NO: 1351149 - DNA, 15 bp, Homo sapiens
ggtcgaggctacagt

SEQ ID NO: 1351150 - DNA, 15 bp, Homo sapiens
aggtcgaggctacag

SEQ ID NO: 1351151 - DNA, 15 bp, Homo sapiens
gaggtcgaggctaca

SEQ ID NO: 1351152 - DNA, 15 bp, Homo sapiens
ggaggtcgaggctac

SEQ ID NO: 1351153 - DNA, 15 bp, Homo sapiens
aggaggtcgaggcta

SEQ ID NO: 1351154 - DNA, 15 bp, Homo sapiens
caggaggtcgaggct

SEQ ID NO: 1351155 - DNA, 15 bp, Homo sapiens
ccaggaggtcgaggc

SEQ ID NO: 1351156 - DNA, 15 bp, Homo sapiens
cccaggaggtcgagg

SEQ ID NO: 1351157 - DNA, 15 bp, Homo sapiens
gcccaggaggtcgag

SEQ ID NO: 1351158 - DNA, 15 bp, Homo sapiens
agcccaggaggtcga

SEQ ID NO: 1351159 - DNA, 15 bp, Homo sapiens
gagcccaggaggtcg

SEQ ID NO: 1351160 - DNA, 15 bp, Homo sapiens
cttgagcccaggagg

SEQ ID NO: 1351161 - DNA, 15 bp, Homo sapiens
ccacttgagcccagg

SEQ ID NO: 1351162 - DNA, 15 bp, Homo sapiens
accacttgagcccag

SEQ ID NO: 1351163 - DNA, 15 bp, Homo sapiens
gaccacttgagccca

SEQ ID NO: 1351164 - DNA, 15 bp, Homo sapiens
gggaggaccacttga

SEQ ID NO: 1351165 - DNA, 15 bp, Homo sapiens
tgggaggaccacttg

SEQ ID NO: 1351166 - DNA, 15 bp, Homo sapiens
atgggaggaccactt

SEQ ID NO: 1351167 - DNA, 15 bp, Homo sapiens
gatgggaggaccact

SEQ ID NO: 1351168 - DNA, 15 bp, Homo sapiens
agatgggaggaccac

SEQ ID NO: 1351169 - DNA, 15 bp, Homo sapiens
gagatgggaggacca

SEQ ID NO: 1351170 - DNA, 15 bp, Homo sapiens
tgagatgggaggacc

SEQ ID NO: 1351171 - DNA, 15 bp, Homo sapiens
ctgagatgggaggac

SEQ ID NO: 1351172 - DNA, 15 bp, Homo sapiens
gctgagatgggagga

SEQ ID NO: 1351173 - DNA, 15 bp, Homo sapiens
ggctgagatgggagg

SEQ ID NO: 1351174 - DNA, 15 bp, Homo sapiens
aggctgagatgggag

SEQ ID NO: 1351175 - DNA, 15 bp, Homo sapiens
gaggctgagatggga

SEQ ID NO: 1351176 - DNA, 15 bp, Homo sapiens
aggaggctgagatgg

SEQ ID NO: 1351177 - DNA, 15 bp, Homo sapiens
caggaggctgagatg

SEQ ID NO: 1351178 - DNA, 15 bp, Homo sapiens
tcaggaggctgagat

SEQ ID NO: 1351179 - DNA, 15 bp, Homo sapiens
tccagttactcagga

SEQ ID NO: 1351180 - DNA, 15 bp, Homo sapiens
ctccagttactcagg

SEQ ID NO: 1351181 - DNA, 15 bp, Homo sapiens
tctccagttactcag

SEQ ID NO: 1351182 - DNA, 15 bp, Homo sapiens
gtctccagttactca

SEQ ID NO: 1351183 - DNA, 15 bp, Homo sapiens
ggtctccagttactc

SEQ ID NO: 1351184 - DNA, 15 bp, Homo sapiens
tggtctccagttact

SEQ ID NO: 1351185 - DNA, 15 bp, Homo sapiens
gtggtctccagttac

SEQ ID NO: 1351186 - DNA, 15 bp, Homo sapiens
tgtggtctccagtta

SEQ ID NO: 1351187 - DNA, 15 bp, Homo sapiens
ctgtggtctccagtt

SEQ ID NO: 1351188 - DNA, 15 bp, Homo sapiens
cctgtggtctccagt

SEQ ID NO: 1351189 - DNA, 15 bp, Homo sapiens
gcctgtggtctccag

SEQ ID NO: 1351190 - DNA, 15 bp, Homo sapiens
tgcctgtggtctcca

SEQ ID NO: 1351191 - DNA, 15 bp, Homo sapiens
gtgcctgtggtctcc

SEQ ID NO: 1351192 - DNA, 15 bp, Homo sapiens
tgtgcctgtggtctc

SEQ ID NO: 1351193 - DNA, 15 bp, Homo sapiens
gtgtgcctgtggtct

SEQ ID NO: 1351194 - DNA, 15 bp, Homo sapiens
tgtgtgcctgtggtc

SEQ ID NO: 1351195 - DNA, 15 bp, Homo sapiens
gtgtgtgcctgtggt

SEQ ID NO: 1351196 - DNA, 15 bp, Homo sapiens
ggtgtgtgcctgtgg

SEQ ID NO: 1351197 - DNA, 15 bp, Homo sapiens
tggtgtgtgcctgtg

SEQ ID NO: 1351198 - DNA, 15 bp, Homo sapiens
gtggtgtgtgcctgt

SEQ ID NO: 1351199 - DNA, 15 bp, Homo sapiens
ggtggtgtgtgcctg

SEQ ID NO: 1351200 - DNA, 15 bp, Homo sapiens
tggtggtgtgtgcct

SEQ ID NO: 1351201 - DNA, 15 bp, Homo sapiens
atggtggtgtgtgcc

SEQ ID NO: 1351202 - DNA, 15 bp, Homo sapiens
tatggtggtgtgtgc

SEQ ID NO: 1351203 - DNA, 15 bp, Homo sapiens
gtatggtggtgtgtg

SEQ ID NO: 1351204 - DNA, 15 bp, Homo sapiens
ggtatggtggtgtgt

SEQ ID NO: 1351205 - DNA, 15 bp, Homo sapiens
gggtatggtggtgtg

SEQ ID NO: 1351206 - DNA, 15 bp, Homo sapiens
tgggtatggtggtgt

SEQ ID NO: 1351207 - DNA, 15 bp, Homo sapiens
ttgggtatggtggtg

SEQ ID NO: 1351208 - DNA, 15 bp, Homo sapiens
gttgggtatggtggt

SEQ ID NO: 1351209 - DNA, 15 bp, Homo sapiens
agttgggtatggtgg

SEQ ID NO: 1351210 - DNA, 15 bp, Homo sapiens
tagttgggtatggtg

SEQ ID NO: 1351211 - DNA, 15 bp, Homo sapiens
ttagttgggtatggt

SEQ ID NO: 1351212 - DNA, 15 bp, Homo sapiens
attagttgggtatgg

SEQ ID NO: 1351213 - DNA, 15 bp, Homo sapiens
aattagttgggtatg

SEQ ID NO: 1351214 - DNA, 15 bp, Homo sapiens
aaattagttgggtat

SEQ ID NO: 1351215 - DNA, 15 bp, Homo sapiens
aaaattagttgggta

SEQ ID NO: 1351216 - DNA, 15 bp, Homo sapiens
aaaaattagttgggt

SEQ ID NO: 1351217 - DNA, 15 bp, Homo sapiens
tcaaaaattagttgg

SEQ ID NO: 1351218 - DNA, 15 bp, Homo sapiens
ttcaaaaattagttg

SEQ ID NO: 1351219 - DNA, 15 bp, Homo sapiens
attcaaaaattagtt

SEQ ID NO: 1351220 - DNA, 15 bp, Homo sapiens
aattcaaaaattagt

SEQ ID NO: 1351221 - DNA, 15 bp, Homo sapiens
aaaaaattcaaaaat

SEQ ID NO: 1351222 - DNA, 15 bp, Homo sapiens
aaaaaaattcaaaaa

SEQ ID NO: 1351223 - DNA, 15 bp, Homo sapiens
aaaaaaaattcaaaa

SEQ ID NO: 1351224 - DNA, 15 bp, Homo sapiens
caaaaaaaattcaaa

SEQ ID NO: 1351225 - DNA, 15 bp, Homo sapiens
tcaaaaaaaattcaa

SEQ ID NO: 1351226 - DNA, 15 bp, Homo sapiens
ttcaaaaaaaattca

SEQ ID NO: 1351227 - DNA, 15 bp, Homo sapiens
cttcaaaaaaaattc

SEQ ID NO: 1351228 - DNA, 15 bp, Homo sapiens
tcttcaaaaaaaatt

SEQ ID NO: 1351229 - DNA, 15 bp, Homo sapiens
ctcttcaaaaaaaat

SEQ ID NO: 1351230 - DNA, 15 bp, Homo sapiens
ccatctcttcaaaaa

SEQ ID NO: 1351231 - DNA, 15 bp, Homo sapiens
cccatctcttcaaaa

SEQ ID NO: 1351232 - DNA, 15 bp, Homo sapiens
ccccatctcttcaaa

SEQ ID NO: 1351233 - DNA, 15 bp, Homo sapiens
accccatctcttcaa

SEQ ID NO: 1351234 - DNA, 15 bp, Homo sapiens
gaccccatctcttca

SEQ ID NO: 1351235 - DNA, 15 bp, Homo sapiens
agaccccatctcttc

SEQ ID NO: 1351236 - DNA, 15 bp, Homo sapiens
aagaccccatctctt

SEQ ID NO: 1351237 - DNA, 15 bp, Homo sapiens
tagcaagaccccatc

SEQ ID NO: 1351238 - DNA, 15 bp, Homo sapiens
atagcaagaccccat

SEQ ID NO: 1351239 - DNA, 15 bp, Homo sapiens
catagcaagacccca

SEQ ID NO: 1351240 - DNA, 15 bp, Homo sapiens
acatagcaagacccc

SEQ ID NO: 1351241 - DNA, 15 bp, Homo sapiens
aagcccaggagtttg

SEQ ID NO: 1351242 - DNA, 15 bp, Homo sapiens
taagcccaggagttt

SEQ ID NO: 1351243 - DNA, 15 bp, Homo sapiens
acttaagcccaggag

SEQ ID NO: 1351244 - DNA, 15 bp, Homo sapiens
cacttaagcccagga

SEQ ID NO: 1351245 - DNA, 15 bp, Homo sapiens
tcacttaagcccagg

SEQ ID NO: 1351246 - DNA, 15 bp, Homo sapiens
atcacttaagcccag

SEQ ID NO: 1351247 - DNA, 15 bp, Homo sapiens
gatcacttaagccca

SEQ ID NO: 1351248 - DNA, 15 bp, Homo sapiens
ggatcacttaagccc

SEQ ID NO: 1351249 - DNA, 15 bp, Homo sapiens
aggatcacttaagcc

SEQ ID NO: 1351250 - DNA, 15 bp, Homo sapiens
gaggatcacttaagc

SEQ ID NO: 1351251 - DNA, 15 bp, Homo sapiens
ggaggatcacttaag

SEQ ID NO: 1351252 - DNA, 15 bp, Homo sapiens
gggaggatcacttaa

SEQ ID NO: 1351253 - DNA, 15 bp, Homo sapiens
tgggaggatcactta

SEQ ID NO: 1351254 - DNA, 15 bp, Homo sapiens
atgggaggatcactt

SEQ ID NO: 1351255 - DNA, 15 bp, Homo sapiens
gatgggaggatcact

SEQ ID NO: 1351256 - DNA, 15 bp, Homo sapiens
agatgggaggatcac

SEQ ID NO: 1351257 - DNA, 15 bp, Homo sapiens
aagatgggaggatca

SEQ ID NO: 1351258 - DNA, 15 bp, Homo sapiens
caagatgggaggatc

SEQ ID NO: 1351259 - DNA, 15 bp, Homo sapiens
tcaagatgggaggat

SEQ ID NO: 1351260 - DNA, 15 bp, Homo sapiens
atcaagatgggagga

SEQ ID NO: 1351261 - DNA, 15 bp, Homo sapiens
gatcaagatgggagg

SEQ ID NO: 1351262 - DNA, 15 bp, Homo sapiens
agatcaagatgggag

SEQ ID NO: 1351263 - DNA, 15 bp, Homo sapiens
gagatcaagatggga

SEQ ID NO: 1351264 - DNA, 15 bp, Homo sapiens
ggagatcaagatggg

SEQ ID NO: 1351265 - DNA, 15 bp, Homo sapiens
aggagatcaagatgg

SEQ ID NO: 1351266 - DNA, 15 bp, Homo sapiens
taggagatcaagatg

SEQ ID NO: 1351267 - DNA, 15 bp, Homo sapiens
ttaggagatcaagat

SEQ ID NO: 1351268 - DNA, 15 bp, Homo sapiens
tttaggagatcaaga

SEQ ID NO: 1351269 - DNA, 15 bp, Homo sapiens
ctttaggagatcaag

SEQ ID NO: 1351270 - DNA, 15 bp, Homo sapiens
actttaggagatcaa

SEQ ID NO: 1351271 - DNA, 15 bp, Homo sapiens
cactttaggagatca

SEQ ID NO: 1351272 - DNA, 15 bp, Homo sapiens
gcactttaggagatc

SEQ ID NO: 1351273 - DNA, 15 bp, Homo sapiens
agcactttaggagat

SEQ ID NO: 1351274 - DNA, 15 bp, Homo sapiens
cagcactttaggaga

SEQ ID NO: 1351275 - DNA, 15 bp, Homo sapiens
ccagcactttaggag

SEQ ID NO: 1351276 - DNA, 15 bp, Homo sapiens
agctgggcgcagtgg

SEQ ID NO: 1351277 - DNA, 15 bp, Homo sapiens
caagctgggcgcagt

SEQ ID NO: 1351278 - DNA, 15 bp, Homo sapiens
acaagctgggcgcag

SEQ ID NO: 1351279 - DNA, 15 bp, Homo sapiens
aacaagctgggcgca

SEQ ID NO: 1351280 - DNA, 15 bp, Homo sapiens
aaacaagctgggcgc

SEQ ID NO: 1351281 - DNA, 15 bp, Homo sapiens
gaaacaagctgggcg

SEQ ID NO: 1351282 - DNA, 15 bp, Homo sapiens
ggaaacaagctgggc

SEQ ID NO: 1351283 - DNA, 15 bp, Homo sapiens
aggaaacaagctggg

SEQ ID NO: 1351284 - DNA, 15 bp, Homo sapiens
gaggaaacaagctgg

SEQ ID NO: 1351285 - DNA, 15 bp, Homo sapiens
agaggaaacaagctg

SEQ ID NO: 1351286 - DNA, 15 bp, Homo sapiens
aagaggaaacaagct

SEQ ID NO: 1351287 - DNA, 15 bp, Homo sapiens
caagaggaaacaagc

SEQ ID NO: 1351288 - DNA, 15 bp, Homo sapiens
tcaagaggaaacaag

SEQ ID NO: 1351289 - DNA, 15 bp, Homo sapiens
atcaagaggaaacaa

SEQ ID NO: 1351290 - DNA, 15 bp, Homo sapiens
gatcaagaggaaaca

SEQ ID NO: 1351291 - DNA, 15 bp, Homo sapiens
agatcaagaggaaac

SEQ ID NO: 1351292 - DNA, 15 bp, Homo sapiens
gagatcaagaggaaa

SEQ ID NO: 1351293 - DNA, 15 bp, Homo sapiens
agagatcaagaggaa

SEQ ID NO: 1351294 - DNA, 15 bp, Homo sapiens
gagagatcaagagga

SEQ ID NO: 1351295 - DNA, 15 bp, Homo sapiens
ggagagatcaagagg

SEQ ID NO: 1351296 - DNA, 15 bp, Homo sapiens
gggagagatcaagag

SEQ ID NO: 1351297 - DNA, 15 bp, Homo sapiens
agggagagatcaaga

SEQ ID NO: 1351298 - DNA, 15 bp, Homo sapiens
aagggagagatcaag

SEQ ID NO: 1351299 - DNA, 15 bp, Homo sapiens
taagggagagatcaa

SEQ ID NO: 1351300 - DNA, 15 bp, Homo sapiens
ctaagggagagatca

SEQ ID NO: 1351301 - DNA, 15 bp, Homo sapiens
tctaagggagagatc

SEQ ID NO: 1351302 - DNA, 15 bp, Homo sapiens
ttctaagggagagat

SEQ ID NO: 1351303 - DNA, 15 bp, Homo sapiens
attctaagggagaga

SEQ ID NO: 1351304 - DNA, 15 bp, Homo sapiens
cattctaagggagag

SEQ ID NO: 1351305 - DNA, 15 bp, Homo sapiens
acattctaagggaga

SEQ ID NO: 1351306 - DNA, 15 bp, Homo sapiens
gacattctaagggag

SEQ ID NO: 1351307 - DNA, 15 bp, Homo sapiens
tgacattctaaggga

SEQ ID NO: 1351308 - DNA, 15 bp, Homo sapiens
gtgacattctaaggg

SEQ ID NO: 1351309 - DNA, 15 bp, Homo sapiens
ggtgacattctaagg

SEQ ID NO: 1351310 - DNA, 15 bp, Homo sapiens
aggtgacattctaag

SEQ ID NO: 1351311 - DNA, 15 bp, Homo sapiens
gaggtgacattctaa

SEQ ID NO: 1351312 - DNA, 15 bp, Homo sapiens
ggaggtgacattcta

SEQ ID NO: 1351313 - DNA, 15 bp, Homo sapiens
aggaggtgacattct

SEQ ID NO: 1351314 - DNA, 15 bp, Homo sapiens
gaggaggtgacattc

SEQ ID NO: 1351315 - DNA, 15 bp, Homo sapiens
tgaggaggtgacatt

SEQ ID NO: 1351316 - DNA, 15 bp, Homo sapiens
ctgaggaggtgacat

SEQ ID NO: 1351317 - DNA, 15 bp, Homo sapiens
cctgaggaggtgaca

SEQ ID NO: 1351318 - DNA, 15 bp, Homo sapiens
ccctgaggaggtgac

SEQ ID NO: 1351319 - DNA, 15 bp, Homo sapiens
cccctgaggaggtga

SEQ ID NO: 1351320 - DNA, 15 bp, Homo sapiens
gcccctgaggaggtg

SEQ ID NO: 1351321 - DNA, 15 bp, Homo sapiens
tgcccctgaggaggt

SEQ ID NO: 1351322 - DNA, 15 bp, Homo sapiens
ctgcccctgaggagg

SEQ ID NO: 1351323 - DNA, 15 bp, Homo sapiens
actgcccctgaggag

SEQ ID NO: 1351324 - DNA, 15 bp, Homo sapiens
cactgcccctgagga

SEQ ID NO: 1351325 - DNA, 15 bp, Homo sapiens
tcactgcccctgagg

SEQ ID NO: 1351326 - DNA, 15 bp, Homo sapiens
atcactgcccctgag

SEQ ID NO: 1351327 - DNA, 15 bp, Homo sapiens
aatcactgcccctga

SEQ ID NO: 1351328 - DNA, 15 bp, Homo sapiens
aaatcactgcccctg

SEQ ID NO: 1351329 - DNA, 15 bp, Homo sapiens
aaaatcactgcccct

SEQ ID NO: 1351330 - DNA, 15 bp, Homo sapiens
aaaaatcactgcccc

SEQ ID NO: 1351331 - DNA, 15 bp, Homo sapiens
caaaaatcactgccc

SEQ ID NO: 1351332 - DNA, 15 bp, Homo sapiens
acaaaaatcactgcc

SEQ ID NO: 1351333 - DNA, 15 bp, Homo sapiens
gacaaaaatcactgc

SEQ ID NO: 1351334 - DNA, 15 bp, Homo sapiens
agacaaaaatcactg

SEQ ID NO: 1351335 - DNA, 15 bp, Homo sapiens
tagacaaaaatcact

SEQ ID NO: 1351336 - DNA, 15 bp, Homo sapiens
atagacaaaaatcac

SEQ ID NO: 1351337 - DNA, 15 bp, Homo sapiens
gatagacaaaaatca

SEQ ID NO: 1351338 - DNA, 15 bp, Homo sapiens
agatagacaaaaatc

SEQ ID NO: 1351339 - DNA, 15 bp, Homo sapiens
aagatagacaaaaat

SEQ ID NO: 1351340 - DNA, 15 bp, Homo sapiens
taagatagacaaaaa

SEQ ID NO: 1351341 - DNA, 15 bp, Homo sapiens
ctaagatagacaaaa

SEQ ID NO: 1351342 - DNA, 15 bp, Homo sapiens
actaagatagacaaa

SEQ ID NO: 1351343 - DNA, 15 bp, Homo sapiens
gactaagatagacaa

SEQ ID NO: 1351344 - DNA, 15 bp, Homo sapiens
tgactaagatagaca

SEQ ID NO: 1351345 - DNA, 15 bp, Homo sapiens
gtgactaagatagac

SEQ ID NO: 1351346 - DNA, 15 bp, Homo sapiens
agtgactaagataga

SEQ ID NO: 1351347 - DNA, 15 bp, Homo sapiens
cagtgactaagatag

SEQ ID NO: 1351348 - DNA, 15 bp, Homo sapiens
gcagtgactaagata

SEQ ID NO: 1351349 - DNA, 15 bp, Homo sapiens
agcagtgactaagat

SEQ ID NO: 1351350 - DNA, 15 bp, Homo sapiens
cagcagtgactaaga

SEQ ID NO: 1351351 - DNA, 15 bp, Homo sapiens
acagcagtgactaag

SEQ ID NO: 1351352 - DNA, 15 bp, Homo sapiens
tacagcagtgactaa

SEQ ID NO: 1351353 - DNA, 15 bp, Homo sapiens
atacagcagtgacta

SEQ ID NO: 1351354 - DNA, 15 bp, Homo sapiens
aatacagcagtgact

SEQ ID NO: 1351355 - DNA, 15 bp, Homo sapiens
gaatacagcagtgac

SEQ ID NO: 1351356 - DNA, 15 bp, Homo sapiens
ggaatacagcagtga

SEQ ID NO: 1351357 - DNA, 15 bp, Homo sapiens
tggaatacagcagtg

SEQ ID NO: 1351358 - DNA, 15 bp, Homo sapiens
atggaatacagcagt

SEQ ID NO: 1351359 - DNA, 15 bp, Homo sapiens
catggaatacagcag

SEQ ID NO: 1351360 - DNA, 15 bp, Homo sapiens
gcatggaatacagca

SEQ ID NO: 1351361 - DNA, 15 bp, Homo sapiens
tgcatggaatacagc

SEQ ID NO: 1351362 - DNA, 15 bp, Homo sapiens
ctgcatggaatacag

SEQ ID NO: 1351363 - DNA, 15 bp, Homo sapiens
cctgcatggaataca

SEQ ID NO: 1351364 - DNA, 15 bp, Homo sapiens
tcctgcatggaatac

SEQ ID NO: 1351365 - DNA, 15 bp, Homo sapiens
gtcctgcatggaata

SEQ ID NO: 1351366 - DNA, 15 bp, Homo sapiens
ggtcctgcatggaat

SEQ ID NO: 1351367 - DNA, 15 bp, Homo sapiens
tggtcctgcatggaa

SEQ ID NO: 1351368 - DNA, 15 bp, Homo sapiens
ctggtcctgcatgga

SEQ ID NO: 1351369 - DNA, 15 bp, Homo sapiens
gctggtcctgcatgg

SEQ ID NO: 1351370 - DNA, 15 bp, Homo sapiens
agctggtcctgcatg

SEQ ID NO: 1351371 - DNA, 15 bp, Homo sapiens
tagctggtcctgcat

SEQ ID NO: 1351372 - DNA, 15 bp, Homo sapiens
atagctggtcctgca

SEQ ID NO: 1351373 - DNA, 15 bp, Homo sapiens
tatagctggtcctgc

SEQ ID NO: 1351374 - DNA, 15 bp, Homo sapiens
ctatagctggtcctg

SEQ ID NO: 1351375 - DNA, 15 bp, Homo sapiens
cctatagctggtcct

SEQ ID NO: 1351376 - DNA, 15 bp, Homo sapiens
acctatagctggtcc

SEQ ID NO: 1351377 - DNA, 15 bp, Homo sapiens
aacctatagctggtc

SEQ ID NO: 1351378 - DNA, 15 bp, Homo sapiens
aaacctatagctggt

SEQ ID NO: 1351379 - DNA, 15 bp, Homo sapiens
aaaacctatagctgg

SEQ ID NO: 1351380 - DNA, 15 bp, Homo sapiens
caaaacctatagctg

SEQ ID NO: 1351381 - DNA, 15 bp, Homo sapiens
gcaaaacctatagct

SEQ ID NO: 1351382 - DNA, 15 bp, Homo sapiens
tgcaaaacctatagc

SEQ ID NO: 1351383 - DNA, 15 bp, Homo sapiens
ctgcaaaacctatag

SEQ ID NO: 1351384 - DNA, 15 bp, Homo sapiens
cctgcaaaacctata

SEQ ID NO: 1351385 - DNA, 15 bp, Homo sapiens
ccctgcaaaacctat

SEQ ID NO: 1351386 - DNA, 15 bp, Homo sapiens
gccctgcaaaaccta

SEQ ID NO: 1351387 - DNA, 15 bp, Homo sapiens
agccctgcaaaacct

SEQ ID NO: 1351388 - DNA, 15 bp, Homo sapiens
gagccctgcaaaacc

SEQ ID NO: 1351389 - DNA, 15 bp, Homo sapiens
cgagccctgcaaaac

SEQ ID NO: 1351390 - DNA, 15 bp, Homo sapiens
ccgagccctgcaaaa

SEQ ID NO: 1351391 - DNA, 15 bp, Homo sapiens
accgagccctgcaaa

SEQ ID NO: 1351392 - DNA, 15 bp, Homo sapiens
caccgagccctgcaa

SEQ ID NO: 1351393 - DNA, 15 bp, Homo sapiens
tcaccgagccctgca

SEQ ID NO: 1351394 - DNA, 15 bp, Homo sapiens
ttcaccgagccctgc

SEQ ID NO: 1351395 - DNA, 15 bp, Homo sapiens
tttcaccgagccctg

SEQ ID NO: 1351396 - DNA, 15 bp, Homo sapiens
ttttcaccgagccct

SEQ ID NO: 1351397 - DNA, 15 bp, Homo sapiens
tttttcaccgagccc

SEQ ID NO: 1351398 - DNA, 15 bp, Homo sapiens
atttttcaccgagcc

SEQ ID NO: 1351399 - DNA, 15 bp, Homo sapiens
catttttcaccgagc

SEQ ID NO: 1351400 - DNA, 15 bp, Homo sapiens
tcatttttcaccgag

SEQ ID NO: 1351401 - DNA, 15 bp, Homo sapiens
ttcatttttcaccga

SEQ ID NO: 1351402 - DNA, 15 bp, Homo sapiens
tttcatttttcaccg

SEQ ID NO: 1351403 - DNA, 15 bp, Homo sapiens
ttttcatttttcacc

SEQ ID NO: 1351404 - DNA, 15 bp, Homo sapiens
attttcatttttcac

SEQ ID NO: 1351405 - DNA, 15 bp, Homo sapiens
tattttcatttttca

SEQ ID NO: 1351406 - DNA, 15 bp, Homo sapiens
gtattttcatttttc

SEQ ID NO: 1351407 - DNA, 15 bp, Homo sapiens
cgtattttcattttt

SEQ ID NO: 1351408 - DNA, 15 bp, Homo sapiens
tcgtattttcatttt

SEQ ID NO: 1351409 - DNA, 15 bp, Homo sapiens
ctcgtattttcattt

SEQ ID NO: 1351410 - DNA, 15 bp, Homo sapiens
cctcgtattttcatt

SEQ ID NO: 1351411 - DNA, 15 bp, Homo sapiens
gcctcgtattttcat

SEQ ID NO: 1351412 - DNA, 15 bp, Homo sapiens
ggcctcgtattttca

SEQ ID NO: 1351413 - DNA, 15 bp, Homo sapiens
aggcctcgtattttc

SEQ ID NO: 1351414 - DNA, 15 bp, Homo sapiens
caggcctcgtatttt

SEQ ID NO: 1351415 - DNA, 15 bp, Homo sapiens
ccaggcctcgtattt

SEQ ID NO: 1351416 - DNA, 15 bp, Homo sapiens
gccaggcctcgtatt

SEQ ID NO: 1351417 - DNA, 15 bp, Homo sapiens
ggccaggcctcgtat

SEQ ID NO: 1351418 - DNA, 15 bp, Homo sapiens
cggccaggcctcgta

SEQ ID NO: 1351419 - DNA, 15 bp, Homo sapiens
ccggccaggcctcgt

SEQ ID NO: 1351420 - DNA, 15 bp, Homo sapiens
cccggccaggcctcg

SEQ ID NO: 1351421 - DNA, 15 bp, Homo sapiens
gcccggccaggcctc

SEQ ID NO: 1351422 - DNA, 15 bp, Homo sapiens
cgcccggccaggcct

SEQ ID NO: 1351423 - DNA, 15 bp, Homo sapiens
gcgcccggccaggcc

SEQ ID NO: 1351424 - DNA, 15 bp, Homo sapiens
cgcgcccggccaggc

SEQ ID NO: 1351425 - DNA, 15 bp, Homo sapiens
ccgcgcccggccagg

SEQ ID NO: 1351426 - DNA, 15 bp, Homo sapiens
accgcgcccggccag

SEQ ID NO: 1351427 - DNA, 15 bp, Homo sapiens
cgccttagcctccca

SEQ ID NO: 1351428 - DNA, 15 bp, Homo sapiens
ccgccttagcctccc

SEQ ID NO: 1351429 - DNA, 15 bp, Homo sapiens
cccgccttagcctcc

SEQ ID NO: 1351430 - DNA, 15 bp, Homo sapiens
tcccgccttagcctc

SEQ ID NO: 1351431 - DNA, 15 bp, Homo sapiens
ctcccgccttagcct

SEQ ID NO: 1351432 - DNA, 15 bp, Homo sapiens
cctcccgccttagcc

SEQ ID NO: 1351433 - DNA, 15 bp, Homo sapiens
tcctcccgccttagc

SEQ ID NO: 1351434 - DNA, 15 bp, Homo sapiens
atcctcccgccttag

SEQ ID NO: 1351435 - DNA, 15 bp, Homo sapiens
gatcctcccgcctta

SEQ ID NO: 1351436 - DNA, 15 bp, Homo sapiens
cgatcctcccgcctt

SEQ ID NO: 1351437 - DNA, 15 bp, Homo sapiens
gcgatcctcccgcct

SEQ ID NO: 1351438 - DNA, 15 bp, Homo sapiens
agcgatcctcccgcc

SEQ ID NO: 1351439 - DNA, 15 bp, Homo sapiens
aagcgatcctcccgc

SEQ ID NO: 1351440 - DNA, 15 bp, Homo sapiens
caagcgatcctcccg

SEQ ID NO: 1351441 - DNA, 15 bp, Homo sapiens
cgttgcccaggctgg

SEQ ID NO: 1351442 - DNA, 15 bp, Homo sapiens
acgttgcccaggctg

SEQ ID NO: 1351443 - DNA, 15 bp, Homo sapiens
cacgttgcccaggct

SEQ ID NO: 1351444 - DNA, 15 bp, Homo sapiens
ccacgttgcccaggc

SEQ ID NO: 1351445 - DNA, 15 bp, Homo sapiens
accacgttgcccagg

SEQ ID NO: 1351446 - DNA, 15 bp, Homo sapiens
taccacgttgcccag

SEQ ID NO: 1351447 - DNA, 15 bp, Homo sapiens
cttaccacgttgccc

SEQ ID NO: 1351448 - DNA, 15 bp, Homo sapiens
tcttaccacgttgcc

SEQ ID NO: 1351449 - DNA, 15 bp, Homo sapiens
gtcttaccacgttgc

SEQ ID NO: 1351450 - DNA, 15 bp, Homo sapiens
ggtcttaccacgttg

SEQ ID NO: 1351451 - DNA, 15 bp, Homo sapiens
aggtcttaccacgtt

SEQ ID NO: 1351452 - DNA, 15 bp, Homo sapiens
gaggtcttaccacgt

SEQ ID NO: 1351453 - DNA, 15 bp, Homo sapiens
tgaggtcttaccacg

SEQ ID NO: 1351454 - DNA, 15 bp, Homo sapiens
gtgaggtcttaccac

SEQ ID NO: 1351455 - DNA, 15 bp, Homo sapiens
ggtgaggtcttacca

SEQ ID NO: 1351456 - DNA, 15 bp, Homo sapiens
aggtgaggtcttacc

SEQ ID NO: 1351457 - DNA, 15 bp, Homo sapiens
gaggtgaggtcttac

SEQ ID NO: 1351458 - DNA, 15 bp, Homo sapiens
agaggtgaggtctta

SEQ ID NO: 1351459 - DNA, 15 bp, Homo sapiens
cagaggtgaggtctt

SEQ ID NO: 1351460 - DNA, 15 bp, Homo sapiens
tcagaggtgaggtct

SEQ ID NO: 1351461 - DNA, 15 bp, Homo sapiens
ttcagaggtgaggtc

SEQ ID NO: 1351462 - DNA, 15 bp, Homo sapiens
tttcagaggtgaggt

SEQ ID NO: 1351463 - DNA, 15 bp, Homo sapiens
ttttcagaggtgagg

SEQ ID NO: 1351464 - DNA, 15 bp, Homo sapiens
tttttcagaggtgag

SEQ ID NO: 1351465 - DNA, 15 bp, Homo sapiens
ttttttcagaggtga

SEQ ID NO: 1351466 - DNA, 15 bp, Homo sapiens
tttttttcagaggtg

SEQ ID NO: 1351467 - DNA, 15 bp, Homo sapiens
ttttttttcagaggt

SEQ ID NO: 1351468 - DNA, 15 bp, Homo sapiens
tttttttttcagagg

SEQ ID NO: 1351469 - DNA, 15 bp, Homo sapiens
attttttttttttca

SEQ ID NO: 1351470 - DNA, 15 bp, Homo sapiens
cattttttttttttc

SEQ ID NO: 1351471 - DNA, 15 bp, Homo sapiens
atgcatttttttttt

SEQ ID NO: 1351472 - DNA, 15 bp, Homo sapiens
tatgcattttttttt

SEQ ID NO: 1351473 - DNA, 15 bp, Homo sapiens
gtatgcatttttttt

SEQ ID NO: 1351474 - DNA, 15 bp, Homo sapiens
agtatgcattttttt

SEQ ID NO: 1351475 - DNA, 15 bp, Homo sapiens
aagtatgcatttttt

SEQ ID NO: 1351476 - DNA, 15 bp, Homo sapiens
taagtatgcattttt

SEQ ID NO: 1351477 - DNA, 15 bp, Homo sapiens
ttaagtatgcatttt

SEQ ID NO: 1351478 - DNA, 15 bp, Homo sapiens
cttaagtatgcattt

SEQ ID NO: 1351479 - DNA, 15 bp, Homo sapiens
acttaagtatgcatt

SEQ ID NO: 1351480 - DNA, 15 bp, Homo sapiens
tacttaagtatgcat

SEQ ID NO: 1351481 - DNA, 15 bp, Homo sapiens
ttacttaagtatgca

SEQ ID NO: 1351482 - DNA, 15 bp, Homo sapiens
tttacttaagtatgc

SEQ ID NO: 1351483 - DNA, 15 bp, Homo sapiens
ttttacttaagtatg

SEQ ID NO: 1351484 - DNA, 15 bp, Homo sapiens
tttttacttaagtat

SEQ ID NO: 1351485 - DNA, 15 bp, Homo sapiens
ttttttacttaagta

SEQ ID NO: 1351486 - DNA, 15 bp, Homo sapiens
attttttacttaagt

SEQ ID NO: 1351487 - DNA, 15 bp, Homo sapiens
tattttttacttaag

SEQ ID NO: 1351488 - DNA, 15 bp, Homo sapiens
ttattttttacttaa

SEQ ID NO: 1351489 - DNA, 15 bp, Homo sapiens
tttattttttactta

SEQ ID NO: 1351490 - DNA, 15 bp, Homo sapiens
ttttattttttactt

SEQ ID NO: 1351491 - DNA, 15 bp, Homo sapiens
tttttattttttact

SEQ ID NO: 1351492 - DNA, 15 bp, Homo sapiens
atttttattttttac

SEQ ID NO: 1351493 - DNA, 15 bp, Homo sapiens
tatttttatttttta

SEQ ID NO: 1351494 - DNA, 15 bp, Homo sapiens
atatttttatttttt

SEQ ID NO: 1351495 - DNA, 15 bp, Homo sapiens
tatatttttattttt

SEQ ID NO: 1351496 - DNA, 15 bp, Homo sapiens
ttatatttttatttt

SEQ ID NO: 1351497 - DNA, 15 bp, Homo sapiens
tttatatttttattt

SEQ ID NO: 1351498 - DNA, 15 bp, Homo sapiens
ttttatatttttatt

SEQ ID NO: 1351499 - DNA, 15 bp, Homo sapiens
tttttatatttttat

SEQ ID NO: 1351500 - DNA, 15 bp, Homo sapiens
ctttttatattttta

SEQ ID NO: 1351501 - DNA, 15 bp, Homo sapiens
tctttttatattttt

SEQ ID NO: 1351502 - DNA, 15 bp, Homo sapiens
ttctttttatatttt

SEQ ID NO: 1351503 - DNA, 15 bp, Homo sapiens
tttctttttatattt

SEQ ID NO: 1351504 - DNA, 15 bp, Homo sapiens
ttttctttttatatt

SEQ ID NO: 1351505 - DNA, 15 bp, Homo sapiens
tttttctttttatat

SEQ ID NO: 1351506 - DNA, 15 bp, Homo sapiens
cttttttctttttat

SEQ ID NO: 1351507 - DNA, 15 bp, Homo sapiens
tcttttttcttttta

SEQ ID NO: 1351508 - DNA, 15 bp, Homo sapiens
gtcttttttcttttt

SEQ ID NO: 1351509 - DNA, 15 bp, Homo sapiens
tgtcttttttctttt

SEQ ID NO: 1351510 - DNA, 15 bp, Homo sapiens
ctgtcttttttcttt

SEQ ID NO: 1351511 - DNA, 15 bp, Homo sapiens
tctgtcttttttctt

SEQ ID NO: 1351512 - DNA, 15 bp, Homo sapiens
ttctgtcttttttct

SEQ ID NO: 1351513 - DNA, 15 bp, Homo sapiens
tttctgtcttttttc

SEQ ID NO: 1351514 - DNA, 15 bp, Homo sapiens
ctttctgtctttttt

SEQ ID NO: 1351515 - DNA, 15 bp, Homo sapiens
tctttctgtcttttt

SEQ ID NO: 1351516 - DNA, 15 bp, Homo sapiens
ctctttctgtctttt

SEQ ID NO: 1351517 - DNA, 15 bp, Homo sapiens
tctctttctgtcttt

SEQ ID NO: 1351518 - DNA, 15 bp, Homo sapiens
ttctctttctgtctt

SEQ ID NO: 1351519 - DNA, 15 bp, Homo sapiens
tttctctttctgtct

SEQ ID NO: 1351520 - DNA, 15 bp, Homo sapiens
ctttctctttctgtc

SEQ ID NO: 1351521 - DNA, 15 bp, Homo sapiens
tctttctctttctgt

SEQ ID NO: 1351522 - DNA, 15 bp, Homo sapiens
ctctttctctttctg

SEQ ID NO: 1351523 - DNA, 15 bp, Homo sapiens
cctctttctctttct

SEQ ID NO: 1351524 - DNA, 15 bp, Homo sapiens
tcctctttctctttc

SEQ ID NO: 1351525 - DNA, 15 bp, Homo sapiens
gtcctctttctcttt

SEQ ID NO: 1351526 - DNA, 15 bp, Homo sapiens
agtcctctttctctt

SEQ ID NO: 1351527 - DNA, 15 bp, Homo sapiens
aagtcctctttctct

SEQ ID NO: 1351528 - DNA, 15 bp, Homo sapiens
aaagtcctctttctc

SEQ ID NO: 1351529 - DNA, 15 bp, Homo sapiens
gaaagtcctctttct

SEQ ID NO: 1351530 - DNA, 15 bp, Homo sapiens
ggaaagtcctctttc

SEQ ID NO: 1351531 - DNA, 15 bp, Homo sapiens
tggaaagtcctcttt

SEQ ID NO: 1351532 - DNA, 15 bp, Homo sapiens
ctggaaagtcctctt

SEQ ID NO: 1351533 - DNA, 15 bp, Homo sapiens
cctggaaagtcctct

SEQ ID NO: 1351534 - DNA, 15 bp, Homo sapiens
tcctggaaagtcctc

SEQ ID NO: 1351535 - DNA, 15 bp, Homo sapiens
ttcctggaaagtcct

SEQ ID NO: 1351536 - DNA, 15 bp, Homo sapiens
cttcctggaaagtcc

SEQ ID NO: 1351537 - DNA, 15 bp, Homo sapiens
gcttcctggaaagtc

SEQ ID NO: 1351538 - DNA, 15 bp, Homo sapiens
tgcttcctggaaagt

SEQ ID NO: 1351539 - DNA, 15 bp, Homo sapiens
atgcttcctggaaag

SEQ ID NO: 1351540 - DNA, 15 bp, Homo sapiens
aatgcttcctggaaa

SEQ ID NO: 1351541 - DNA, 15 bp, Homo sapiens
caatgcttcctggaa

SEQ ID NO: 1351542 - DNA, 15 bp, Homo sapiens
tcaatgcttcctgga

SEQ ID NO: 1351543 - DNA, 15 bp, Homo sapiens
atcaatgcttcctgg

SEQ ID NO: 1351544 - DNA, 15 bp, Homo sapiens
catcaatgcttcctg

SEQ ID NO: 1351545 - DNA, 15 bp, Homo sapiens
acatcaatgcttcct

SEQ ID NO: 1351546 - DNA, 15 bp, Homo sapiens
tacatcaatgcttcc

SEQ ID NO: 1351547 - DNA, 15 bp, Homo sapiens
atacatcaatgcttc

SEQ ID NO: 1351548 - DNA, 15 bp, Homo sapiens
catacatcaatgctt

SEQ ID NO: 1351549 - DNA, 15 bp, Homo sapiens
ccatacatcaatgct

SEQ ID NO: 1351550 - DNA, 15 bp, Homo sapiens
tccatacatcaatgc

SEQ ID NO: 1351551 - DNA, 15 bp, Homo sapiens
ctccatacatcaatg

SEQ ID NO: 1351552 - DNA, 15 bp, Homo sapiens
actccatacatcaat

SEQ ID NO: 1351553 - DNA, 15 bp, Homo sapiens
gactccatacatcaa

SEQ ID NO: 1351554 - DNA, 15 bp, Homo sapiens
agactccatacatca

SEQ ID NO: 1351555 - DNA, 15 bp, Homo sapiens
cagactccatacatc

SEQ ID NO: 1351556 - DNA, 15 bp, Homo sapiens
acagactccatacat

SEQ ID NO: 1351557 - DNA, 15 bp, Homo sapiens
cacagactccataca

SEQ ID NO: 1351558 - DNA, 15 bp, Homo sapiens
tcacagactccatac

SEQ ID NO: 1351559 - DNA, 15 bp, Homo sapiens
gtcacagactccata

SEQ ID NO: 1351560 - DNA, 15 bp, Homo sapiens
agtcacagactccat

SEQ ID NO: 1351561 - DNA, 15 bp, Homo sapiens
gagtcacagactcca

SEQ ID NO: 1351562 - DNA, 15 bp, Homo sapiens
agagtcacagactcc

SEQ ID NO: 1351563 - DNA, 15 bp, Homo sapiens
gagagtcacagactc

SEQ ID NO: 1351564 - DNA, 15 bp, Homo sapiens
agagagtcacagact

SEQ ID NO: 1351565 - DNA, 15 bp, Homo sapiens
tagagagtcacagac

SEQ ID NO: 1351566 - DNA, 15 bp, Homo sapiens
ctagagagtcacaga

SEQ ID NO: 1351567 - DNA, 15 bp, Homo sapiens
tctagagagtcacag

SEQ ID NO: 1351568 - DNA, 15 bp, Homo sapiens
ttctagagagtcaca

SEQ ID NO: 1351569 - DNA, 15 bp, Homo sapiens
tttctagagagtcac

SEQ ID NO: 1351570 - DNA, 15 bp, Homo sapiens
gtttctagagagtca

SEQ ID NO: 1351571 - DNA, 15 bp, Homo sapiens
ggtttctagagagtc

SEQ ID NO: 1351572 - DNA, 15 bp, Homo sapiens
gggtttctagagagt

SEQ ID NO: 1351573 - DNA, 15 bp, Homo sapiens
ggggtttctagagag

SEQ ID NO: 1351574 - DNA, 15 bp, Homo sapiens
tggggtttctagaga

SEQ ID NO: 1351575 - DNA, 15 bp, Homo sapiens
ttggggtttctagag

SEQ ID NO: 1351576 - DNA, 15 bp, Homo sapiens
attggggtttctaga

SEQ ID NO: 1351577 - DNA, 15 bp, Homo sapiens
gattggggtttctag

SEQ ID NO: 1351578 - DNA, 15 bp, Homo sapiens
agattggggtttcta

SEQ ID NO: 1351579 - DNA, 15 bp, Homo sapiens
aagattggggtttct

SEQ ID NO: 1351580 - DNA, 15 bp, Homo sapiens
gaagattggggtttc

SEQ ID NO: 1351581 - DNA, 15 bp, Homo sapiens
ggaagattggggttt

SEQ ID NO: 1351582 - DNA, 15 bp, Homo sapiens
gggaagattggggtt

SEQ ID NO: 1351583 - DNA, 15 bp, Homo sapiens
tgggaagattggggt

SEQ ID NO: 1351584 - DNA, 15 bp, Homo sapiens
gtgggaagattgggg

SEQ ID NO: 1351585 - DNA, 15 bp, Homo sapiens
agtgggaagattggg

SEQ ID NO: 1351586 - DNA, 15 bp, Homo sapiens
aagtgggaagattgg

SEQ ID NO: 1351587 - DNA, 15 bp, Homo sapiens
caagtgggaagattg

SEQ ID NO: 1351588 - DNA, 15 bp, Homo sapiens
ccaagtgggaagatt

SEQ ID NO: 1351589 - DNA, 15 bp, Homo sapiens
cccaagtgggaagat

SEQ ID NO: 1351590 - DNA, 15 bp, Homo sapiens
tcccaagtgggaaga

SEQ ID NO: 1351591 - DNA, 15 bp, Homo sapiens
ctcccaagtgggaag

SEQ ID NO: 1351592 - DNA, 15 bp, Homo sapiens
tctcccaagtgggaa

SEQ ID NO: 1351593 - DNA, 15 bp, Homo sapiens
atctcccaagtggga

SEQ ID NO: 1351594 - DNA, 15 bp, Homo sapiens
aatctcccaagtggg

SEQ ID NO: 1351595 - DNA, 15 bp, Homo sapiens
aaatctcccaagtgg

SEQ ID NO: 1351596 - DNA, 15 bp, Homo sapiens
aaaatctcccaagtg

SEQ ID NO: 1351597 - DNA, 15 bp, Homo sapiens
gaaaatctcccaagt

SEQ ID NO: 1351598 - DNA, 15 bp, Homo sapiens
ggaaaatctcccaag

SEQ ID NO: 1351599 - DNA, 15 bp, Homo sapiens
aggaaaatctcccaa

SEQ ID NO: 1351600 - DNA, 15 bp, Homo sapiens
caggaaaatctccca

SEQ ID NO: 1351601 - DNA, 15 bp, Homo sapiens
tcaggaaaatctccc

SEQ ID NO: 1351602 - DNA, 15 bp, Homo sapiens
ttcaggaaaatctcc

SEQ ID NO: 1351603 - DNA, 15 bp, Homo sapiens
tttcaggaaaatctc

SEQ ID NO: 1351604 - DNA, 15 bp, Homo sapiens
gtttcaggaaaatct

SEQ ID NO: 1351605 - DNA, 15 bp, Homo sapiens
ggtttcaggaaaatc

SEQ ID NO: 1351606 - DNA, 15 bp, Homo sapiens
aggtttcaggaaaat

SEQ ID NO: 1351607 - DNA, 15 bp, Homo sapiens
taggtttcaggaaaa

SEQ ID NO: 1351608 - DNA, 15 bp, Homo sapiens
ttaggtttcaggaaa

SEQ ID NO: 1351609 - DNA, 15 bp, Homo sapiens
tttaggtttcaggaa

SEQ ID NO: 1351610 - DNA, 15 bp, Homo sapiens
ctttaggtttcagga

SEQ ID NO: 1351611 - DNA, 15 bp, Homo sapiens
actttaggtttcagg

SEQ ID NO: 1351612 - DNA, 15 bp, Homo sapiens
tactttaggtttcag

SEQ ID NO: 1351613 - DNA, 15 bp, Homo sapiens
ttactttaggtttca

SEQ ID NO: 1351614 - DNA, 15 bp, Homo sapiens
tttactttaggtttc

SEQ ID NO: 1351615 - DNA, 15 bp, Homo sapiens
ctttactttaggttt

SEQ ID NO: 1351616 - DNA, 15 bp, Homo sapiens
cctttactttaggtt

SEQ ID NO: 1351617 - DNA, 15 bp, Homo sapiens
gcctttactttaggt

SEQ ID NO: 1351618 - DNA, 15 bp, Homo sapiens
tgcctttactttagg

SEQ ID NO: 1351619 - DNA, 15 bp, Homo sapiens
ctgcctttactttag

SEQ ID NO: 1351620 - DNA, 15 bp, Homo sapiens
cctgcctttacttta

SEQ ID NO: 1351621 - DNA, 15 bp, Homo sapiens
tcctgcctttacttt

SEQ ID NO: 1351622 - DNA, 15 bp, Homo sapiens
ctcctgcctttactt

SEQ ID NO: 1351623 - DNA, 15 bp, Homo sapiens
cctcctgcctttact

SEQ ID NO: 1351624 - DNA, 15 bp, Homo sapiens
acctcctgcctttac

SEQ ID NO: 1351625 - DNA, 15 bp, Homo sapiens
gacctcctgccttta

SEQ ID NO: 1351626 - DNA, 15 bp, Homo sapiens
tgacctcctgccttt

SEQ ID NO: 1351627 - DNA, 15 bp, Homo sapiens
ctgacctcctgcctt

SEQ ID NO: 1351628 - DNA, 15 bp, Homo sapiens
actgacctcctgcct

SEQ ID NO: 1351629 - DNA, 15 bp, Homo sapiens
cactgacctcctgcc

SEQ ID NO: 1351630 - DNA, 15 bp, Homo sapiens
tcactgacctcctgc

SEQ ID NO: 1351631 - DNA, 15 bp, Homo sapiens
ttcactgacctcctg

SEQ ID NO: 1351632 - DNA, 15 bp, Homo sapiens
cttcactgacctcct

SEQ ID NO: 1351633 - DNA, 15 bp, Homo sapiens
gcttcactgacctcc

SEQ ID NO: 1351634 - DNA, 15 bp, Homo sapiens
ggcttcactgacctc

SEQ ID NO: 1351635 - DNA, 15 bp, Homo sapiens
gggcttcactgacct

SEQ ID NO: 1351636 - DNA, 15 bp, Homo sapiens
ggggcttcactgacc

SEQ ID NO: 1351637 - DNA, 15 bp, Homo sapiens
tggggcttcactgac

SEQ ID NO: 1351638 - DNA, 15 bp, Homo sapiens
ttggggcttcactga

SEQ ID NO: 1351639 - DNA, 15 bp, Homo sapiens
cttggggcttcactg

SEQ ID NO: 1351640 - DNA, 15 bp, Homo sapiens
acttggggcttcact

SEQ ID NO: 1351641 - DNA, 15 bp, Homo sapiens
cacttggggcttcac

SEQ ID NO: 1351642 - DNA, 15 bp, Homo sapiens
tcacttggggcttca

SEQ ID NO: 1351643 - DNA, 15 bp, Homo sapiens
ttcacttggggcttc

SEQ ID NO: 1351644 - DNA, 15 bp, Homo sapiens
gttcacttggggctt

SEQ ID NO: 1351645 - DNA, 15 bp, Homo sapiens
tgttcacttggggct

SEQ ID NO: 1351646 - DNA, 15 bp, Homo sapiens
ctgttcacttggggc

SEQ ID NO: 1351647 - DNA, 15 bp, Homo sapiens
gctgttcacttgggg

SEQ ID NO: 1351648 - DNA, 15 bp, Homo sapiens
agctgttcacttggg

SEQ ID NO: 1351649 - DNA, 15 bp, Homo sapiens
gagctgttcacttgg

SEQ ID NO: 1351650 - DNA, 15 bp, Homo sapiens
ggagctgttcacttg

SEQ ID NO: 1351651 - DNA, 15 bp, Homo sapiens
tggagctgttcactt

SEQ ID NO: 1351652 - DNA, 15 bp, Homo sapiens
ctggagctgttcact

SEQ ID NO: 1351653 - DNA, 15 bp, Homo sapiens
cctggagctgttcac

SEQ ID NO: 1351654 - DNA, 15 bp, Homo sapiens
acctggagctgttca

SEQ ID NO: 1351655 - DNA, 15 bp, Homo sapiens
tacctggagctgttc

SEQ ID NO: 1351656 - DNA, 15 bp, Homo sapiens
ttacctggagctgtt

SEQ ID NO: 1351657 - DNA, 15 bp, Homo sapiens
gttacctggagctgt

SEQ ID NO: 1351658 - DNA, 15 bp, Homo sapiens
agttacctggagctg

SEQ ID NO: 1351659 - DNA, 15 bp, Homo sapiens
gagttacctggagct

SEQ ID NO: 1351660 - DNA, 15 bp, Homo sapiens
ggagttacctggagc

SEQ ID NO: 1351661 - DNA, 15 bp, Homo sapiens
gggagttacctggag

SEQ ID NO: 1351662 - DNA, 15 bp, Homo sapiens
tgggagttacctgga

SEQ ID NO: 1351663 - DNA, 15 bp, Homo sapiens
atgggagttacctgg

SEQ ID NO: 1351664 - DNA, 15 bp, Homo sapiens
aatgggagttacctg

SEQ ID NO: 1351665 - DNA, 15 bp, Homo sapiens
aaatgggagttacct

SEQ ID NO: 1351666 - DNA, 15 bp, Homo sapiens
aaaatgggagttacc

SEQ ID NO: 1351667 - DNA, 15 bp, Homo sapiens
taaaatgggagttac

SEQ ID NO: 1351668 - DNA, 15 bp, Homo sapiens
ataaaatgggagtta

SEQ ID NO: 1351669 - DNA, 15 bp, Homo sapiens
cataaaatgggagtt

SEQ ID NO: 1351670 - DNA, 15 bp, Homo sapiens
ccataaaatgggagt

SEQ ID NO: 1351671 - DNA, 15 bp, Homo sapiens
tccataaaatgggag

SEQ ID NO: 1351672 - DNA, 15 bp, Homo sapiens
atccataaaatggga

SEQ ID NO: 1351673 - DNA, 15 bp, Homo sapiens
catccataaaatggg

SEQ ID NO: 1351674 - DNA, 15 bp, Homo sapiens
ccatccataaaatgg

SEQ ID NO: 1351675 - DNA, 15 bp, Homo sapiens
tccatccataaaatg

SEQ ID NO: 1351676 - DNA, 15 bp, Homo sapiens
ttccatccataaaat

SEQ ID NO: 1351677 - DNA, 15 bp, Homo sapiens
tttccatccataaaa

SEQ ID NO: 1351678 - DNA, 15 bp, Homo sapiens
gtttccatccataaa

SEQ ID NO: 1351679 - DNA, 15 bp, Homo sapiens
tgtttccatccataa

SEQ ID NO: 1351680 - DNA, 15 bp, Homo sapiens
gtgtttccatccata

SEQ ID NO: 1351681 - DNA, 15 bp, Homo sapiens
agtgtttccatccat

SEQ ID NO: 1351682 - DNA, 15 bp, Homo sapiens
cagtgtttccatcca

SEQ ID NO: 1351683 - DNA, 15 bp, Homo sapiens
tcagtgtttccatcc

SEQ ID NO: 1351684 - DNA, 15 bp, Homo sapiens
ctcagtgtttccatc

SEQ ID NO: 1351685 - DNA, 15 bp, Homo sapiens
cctcagtgtttccat

SEQ ID NO: 1351686 - DNA, 15 bp, Homo sapiens
gcctcagtgtttcca

SEQ ID NO: 1351687 - DNA, 15 bp, Homo sapiens
ggcctcagtgtttcc

SEQ ID NO: 1351688 - DNA, 15 bp, Homo sapiens
gggcctcagtgtttc

SEQ ID NO: 1351689 - DNA, 15 bp, Homo sapiens
tgggcctcagtgttt

SEQ ID NO: 1351690 - DNA, 15 bp, Homo sapiens
gtgggcctcagtgtt

SEQ ID NO: 1351691 - DNA, 15 bp, Homo sapiens
cgtgggcctcagtgt

SEQ ID NO: 1351692 - DNA, 15 bp, Homo sapiens
ccgtgggcctcagtg

SEQ ID NO: 1351693 - DNA, 15 bp, Homo sapiens
tccgtgggcctcagt

SEQ ID NO: 1351694 - DNA, 15 bp, Homo sapiens
gtccgtgggcctcag

SEQ ID NO: 1351695 - DNA, 15 bp, Homo sapiens
tgtccgtgggcctca

SEQ ID NO: 1351696 - DNA, 15 bp, Homo sapiens
ctgtccgtgggcctc

SEQ ID NO: 1351697 - DNA, 15 bp, Homo sapiens
gctgtccgtgggcct

SEQ ID NO: 1351698 - DNA, 15 bp, Homo sapiens
ggctgtccgtgggcc

SEQ ID NO: 1351699 - DNA, 15 bp, Homo sapiens
gggctgtccgtgggc

SEQ ID NO: 1351700 - DNA, 15 bp, Homo sapiens
tgggctgtccgtggg

SEQ ID NO: 1351701 - DNA, 15 bp, Homo sapiens
ttgggctgtccgtgg

SEQ ID NO: 1351702 - DNA, 15 bp, Homo sapiens
cttgggctgtccgtg

SEQ ID NO: 1351703 - DNA, 15 bp, Homo sapiens
ccttgggctgtccgt

SEQ ID NO: 1351704 - DNA, 15 bp, Homo sapiens
cccttgggctgtccg

SEQ ID NO: 1351705 - DNA, 15 bp, Homo sapiens
ccccttgggctgtcc

SEQ ID NO: 1351706 - DNA, 15 bp, Homo sapiens
cccccttgggctgtc

SEQ ID NO: 1351707 - DNA, 15 bp, Homo sapiens
tcccccttgggctgt

SEQ ID NO: 1351708 - DNA, 15 bp, Homo sapiens
atcccccttgggctg

SEQ ID NO: 1351709 - DNA, 15 bp, Homo sapiens
gatcccccttgggct

SEQ ID NO: 1351710 - DNA, 15 bp, Homo sapiens
tgatcccccttgggc

SEQ ID NO: 1351711 - DNA, 15 bp, Homo sapiens
ctgatcccccttggg

SEQ ID NO: 1351712 - DNA, 15 bp, Homo sapiens
tctgatcccccttgg

SEQ ID NO: 1351713 - DNA, 15 bp, Homo sapiens
ctctgatcccccttg

SEQ ID NO: 1351714 - DNA, 15 bp, Homo sapiens
actctgatccccctt

SEQ ID NO: 1351715 - DNA, 15 bp, Homo sapiens
tactctgatccccct

SEQ ID NO: 1351716 - DNA, 15 bp, Homo sapiens
ttactctgatccccc

SEQ ID NO: 1351717 - DNA, 15 bp, Homo sapiens
cttactctgatcccc

SEQ ID NO: 1351718 - DNA, 15 bp, Homo sapiens
gcttactctgatccc

SEQ ID NO: 1351719 - DNA, 15 bp, Homo sapiens
tgcttactctgatcc

SEQ ID NO: 1351720 - DNA, 15 bp, Homo sapiens
ttgcttactctgatc

SEQ ID NO: 1351721 - DNA, 15 bp, Homo sapiens
attgcttactctgat

SEQ ID NO: 1351722 - DNA, 15 bp, Homo sapiens
cattgcttactctga

SEQ ID NO: 1351723 - DNA, 15 bp, Homo sapiens
gcattgcttactctg

SEQ ID NO: 1351724 - DNA, 15 bp, Homo sapiens
ggcattgcttactct

SEQ ID NO: 1351725 - DNA, 15 bp, Homo sapiens
tggcattgcttactc

SEQ ID NO: 1351726 - DNA, 15 bp, Homo sapiens
ttggcattgcttact

SEQ ID NO: 1351727 - DNA, 15 bp, Homo sapiens
gttggcattgcttac

SEQ ID NO: 1351728 - DNA, 15 bp, Homo sapiens
agttggcattgctta

SEQ ID NO: 1351729 - DNA, 15 bp, Homo sapiens
cagttggcattgctt

SEQ ID NO: 1351730 - DNA, 15 bp, Homo sapiens
acagttggcattgct

SEQ ID NO: 1351731 - DNA, 15 bp, Homo sapiens
aacagttggcattgc

SEQ ID NO: 1351732 - DNA, 15 bp, Homo sapiens
caacagttggcattg

SEQ ID NO: 1351733 - DNA, 15 bp, Homo sapiens
ccaacagttggcatt

SEQ ID NO: 1351734 - DNA, 15 bp, Homo sapiens
cccaacagttggcat

SEQ ID NO: 1351735 - DNA, 15 bp, Homo sapiens
tcccaacagttggca

SEQ ID NO: 1351736 - DNA, 15 bp, Homo sapiens
gtcccaacagttggc

SEQ ID NO: 1351737 - DNA, 15 bp, Homo sapiens
ggtcccaacagttgg

SEQ ID NO: 1351738 - DNA, 15 bp, Homo sapiens
gggtcccaacagttg

SEQ ID NO: 1351739 - DNA, 15 bp, Homo sapiens
ggggtcccaacagtt

SEQ ID NO: 1351740 - DNA, 15 bp, Homo sapiens
tggggtcccaacagt

SEQ ID NO: 1351741 - DNA, 15 bp, Homo sapiens
ttggggtcccaacag

SEQ ID NO: 1351742 - DNA, 15 bp, Homo sapiens
tttggggtcccaaca

SEQ ID NO: 1351743 - DNA, 15 bp, Homo sapiens
ctttggggtcccaac

SEQ ID NO: 1351744 - DNA, 15 bp, Homo sapiens
tctttggggtcccaa

SEQ ID NO: 1351745 - DNA, 15 bp, Homo sapiens
ttctttggggtccca

SEQ ID NO: 1351746 - DNA, 15 bp, Homo sapiens
tttctttggggtccc

SEQ ID NO: 1351747 - DNA, 15 bp, Homo sapiens
ctttctttggggtcc

SEQ ID NO: 1351748 - DNA, 15 bp, Homo sapiens
tctttctttggggtc

SEQ ID NO: 1351749 - DNA, 15 bp, Homo sapiens
ttctttctttggggt

SEQ ID NO: 1351750 - DNA, 15 bp, Homo sapiens
tttctttctttgggg

SEQ ID NO: 1351751 - DNA, 15 bp, Homo sapiens
gtttctttctttggg

SEQ ID NO: 1351752 - DNA, 15 bp, Homo sapiens
cgtttctttctttgg

SEQ ID NO: 1351753 - DNA, 15 bp, Homo sapiens
ccgtttctttctttg

SEQ ID NO: 1351754 - DNA, 15 bp, Homo sapiens
accgtttctttcttt

SEQ ID NO: 1351755 - DNA, 15 bp, Homo sapiens
caccgtttctttctt

SEQ ID NO: 1351756 - DNA, 15 bp, Homo sapiens
acaccgtttctttct

SEQ ID NO: 1351757 - DNA, 15 bp, Homo sapiens
aacaccgtttctttc

SEQ ID NO: 1351758 - DNA, 15 bp, Homo sapiens
caacaccgtttcttt

SEQ ID NO: 1351759 - DNA, 15 bp, Homo sapiens
ccaacaccgtttctt

SEQ ID NO: 1351760 - DNA, 15 bp, Homo sapiens
accaacaccgtttct

SEQ ID NO: 1351761 - DNA, 15 bp, Homo sapiens
aaccaacaccgtttc

SEQ ID NO: 1351762 - DNA, 15 bp, Homo sapiens
caaccaacaccgttt

SEQ ID NO: 1351763 - DNA, 15 bp, Homo sapiens
ccaaccaacaccgtt

SEQ ID NO: 1351764 - DNA, 15 bp, Homo sapiens
cccaaccaacaccgt

SEQ ID NO: 1351765 - DNA, 15 bp, Homo sapiens
gcccaaccaacaccg

SEQ ID NO: 1351766 - DNA, 15 bp, Homo sapiens
tgcccaaccaacacc

SEQ ID NO: 1351767 - DNA, 15 bp, Homo sapiens
gtgcccaaccaacac

SEQ ID NO: 1351768 - DNA, 15 bp, Homo sapiens
tgtgcccaaccaaca

SEQ ID NO: 1351769 - DNA, 15 bp, Homo sapiens
ctgtgcccaaccaac

SEQ ID NO: 1351770 - DNA, 15 bp, Homo sapiens
actgtgcccaaccaa

SEQ ID NO: 1351771 - DNA, 15 bp, Homo sapiens
cactgtgcccaacca

SEQ ID NO: 1351772 - DNA, 15 bp, Homo sapiens
agagccactgtgccc

SEQ ID NO: 1351773 - DNA, 15 bp, Homo sapiens
cgagagccactgtgc

SEQ ID NO: 1351774 - DNA, 15 bp, Homo sapiens
gcgagagccactgtg

SEQ ID NO: 1351775 - DNA, 15 bp, Homo sapiens
ggcgagagccactgt

SEQ ID NO: 1351776 - DNA, 15 bp, Homo sapiens
aggcgagagccactg

SEQ ID NO: 1351777 - DNA, 15 bp, Homo sapiens
caggcgagagccact

SEQ ID NO: 1351778 - DNA, 15 bp, Homo sapiens
tccgcctcagcctcc

SEQ ID NO: 1351779 - DNA, 15 bp, Homo sapiens
atccgcctcagcctc

SEQ ID NO: 1351780 - DNA, 15 bp, Homo sapiens
catccgcctcagcct

SEQ ID NO: 1351781 - DNA, 15 bp, Homo sapiens
ccatccgcctcagcc

SEQ ID NO: 1351782 - DNA, 15 bp, Homo sapiens
gccatccgcctcagc

SEQ ID NO: 1351783 - DNA, 15 bp, Homo sapiens
agccatccgcctcag

SEQ ID NO: 1351784 - DNA, 15 bp, Homo sapiens
gagccatccgcctca

SEQ ID NO: 1351785 - DNA, 15 bp, Homo sapiens
tgagccatccgcctc

SEQ ID NO: 1351786 - DNA, 15 bp, Homo sapiens
atgagccatccgcct

SEQ ID NO: 1351787 - DNA, 15 bp, Homo sapiens
aatgagccatccgcc

SEQ ID NO: 1351788 - DNA, 15 bp, Homo sapiens
caatgagccatccgc

SEQ ID NO: 1351789 - DNA, 15 bp, Homo sapiens
ccaatgagccatccg

SEQ ID NO: 1351790 - DNA, 15 bp, Homo sapiens
tccaatgagccatcc

SEQ ID NO: 1351791 - DNA, 15 bp, Homo sapiens
ctccaatgagccatc

SEQ ID NO: 1351792 - DNA, 15 bp, Homo sapiens
cctccaatgagccat

SEQ ID NO: 1351793 - DNA, 15 bp, Homo sapiens
acctccaatgagcca

SEQ ID NO: 1351794 - DNA, 15 bp, Homo sapiens
gacctccaatgagcc

SEQ ID NO: 1351795 - DNA, 15 bp, Homo sapiens
tgacctccaatgagc

SEQ ID NO: 1351796 - DNA, 15 bp, Homo sapiens
ctgacctccaatgag

SEQ ID NO: 1351797 - DNA, 15 bp, Homo sapiens
actgacctccaatga

SEQ ID NO: 1351798 - DNA, 15 bp, Homo sapiens
tactgacctccaatg

SEQ ID NO: 1351799 - DNA, 15 bp, Homo sapiens
ctactgacctccaat

SEQ ID NO: 1351800 - DNA, 15 bp, Homo sapiens
actactgacctccaa

SEQ ID NO: 1351801 - DNA, 15 bp, Homo sapiens
aactactgacctcca

SEQ ID NO: 1351802 - DNA, 15 bp, Homo sapiens
aaactactgacctcc

SEQ ID NO: 1351803 - DNA, 15 bp, Homo sapiens
caaactactgacctc

SEQ ID NO: 1351804 - DNA, 15 bp, Homo sapiens
tcaaactactgacct

SEQ ID NO: 1351805 - DNA, 15 bp, Homo sapiens
ctcaaactactgacc

SEQ ID NO: 1351806 - DNA, 15 bp, Homo sapiens
tctcaaactactgac

SEQ ID NO: 1351807 - DNA, 15 bp, Homo sapiens
gtctcaaactactga

SEQ ID NO: 1351808 - DNA, 15 bp, Homo sapiens
ggtctcaaactactg

SEQ ID NO: 1351809 - DNA, 15 bp, Homo sapiens
tggtctcaaactact

SEQ ID NO: 1351810 - DNA, 15 bp, Homo sapiens
ctggtctcaaactac

SEQ ID NO: 1351811 - DNA, 15 bp, Homo sapiens
gctggtctcaaacta

SEQ ID NO: 1351812 - DNA, 15 bp, Homo sapiens
tgggttttgccatgt

SEQ ID NO: 1351813 - DNA, 15 bp, Homo sapiens
atgggttttgccatg

SEQ ID NO: 1351814 - DNA, 15 bp, Homo sapiens
gatgggttttgccat

SEQ ID NO: 1351815 - DNA, 15 bp, Homo sapiens
agatgggttttgcca

SEQ ID NO: 1351816 - DNA, 15 bp, Homo sapiens
gagatgggttttgcc

SEQ ID NO: 1351817 - DNA, 15 bp, Homo sapiens
agagatgggttttgc

SEQ ID NO: 1351818 - DNA, 15 bp, Homo sapiens
tagagatgggttttg

SEQ ID NO: 1351819 - DNA, 15 bp, Homo sapiens
atagagatgggtttt

SEQ ID NO: 1351820 - DNA, 15 bp, Homo sapiens
aatagagatgggttt

SEQ ID NO: 1351821 - DNA, 15 bp, Homo sapiens
taatagagatgggtt

SEQ ID NO: 1351822 - DNA, 15 bp, Homo sapiens
ttaatagagatgggt

SEQ ID NO: 1351823 - DNA, 15 bp, Homo sapiens
tttaatagagatggg

SEQ ID NO: 1351824 - DNA, 15 bp, Homo sapiens
ttttaatagagatgg

SEQ ID NO: 1351825 - DNA, 15 bp, Homo sapiens
tttttaatagagatg

SEQ ID NO: 1351826 - DNA, 15 bp, Homo sapiens
atttttaatagagat

SEQ ID NO: 1351827 - DNA, 15 bp, Homo sapiens
ggtatttttaataga

SEQ ID NO: 1351828 - DNA, 15 bp, Homo sapiens
tggtatttttaatag

SEQ ID NO: 1351829 - DNA, 15 bp, Homo sapiens
ttggtatttttaata

SEQ ID NO: 1351830 - DNA, 15 bp, Homo sapiens
tttggtatttttaat

SEQ ID NO: 1351831 - DNA, 15 bp, Homo sapiens
ttttggtatttttaa

SEQ ID NO: 1351832 - DNA, 15 bp, Homo sapiens
ttttttttggtattt

SEQ ID NO: 1351833 - DNA, 15 bp, Homo sapiens
tctagctaatttttt

SEQ ID NO: 1351834 - DNA, 15 bp, Homo sapiens
gtctagctaattttt

SEQ ID NO: 1351835 - DNA, 15 bp, Homo sapiens
cgtctagctaatttt

SEQ ID NO: 1351836 - DNA, 15 bp, Homo sapiens
acgtctagctaattt

SEQ ID NO: 1351837 - DNA, 15 bp, Homo sapiens
cacgtctagctaatt

SEQ ID NO: 1351838 - DNA, 15 bp, Homo sapiens
ccacgtctagctaat

SEQ ID NO: 1351839 - DNA, 15 bp, Homo sapiens
accacgtctagctaa

SEQ ID NO: 1351840 - DNA, 15 bp, Homo sapiens
caccacgtctagcta

SEQ ID NO: 1351841 - DNA, 15 bp, Homo sapiens
tcaccacgtctagct

SEQ ID NO: 1351842 - DNA, 15 bp, Homo sapiens
atcaccacgtctagc

SEQ ID NO: 1351843 - DNA, 15 bp, Homo sapiens
tatcaccacgtctag

SEQ ID NO: 1351844 - DNA, 15 bp, Homo sapiens
ctatcaccacgtcta

SEQ ID NO: 1351845 - DNA, 15 bp, Homo sapiens
cctatcaccacgtct

SEQ ID NO: 1351846 - DNA, 15 bp, Homo sapiens
gcctatcaccacgtc

SEQ ID NO: 1351847 - DNA, 15 bp, Homo sapiens
tgcctatcaccacgt

SEQ ID NO: 1351848 - DNA, 15 bp, Homo sapiens
gtgcctatcaccacg

SEQ ID NO: 1351849 - DNA, 15 bp, Homo sapiens
ggtgcctatcaccac

SEQ ID NO: 1351850 - DNA, 15 bp, Homo sapiens
aggtgcctatcacca

SEQ ID NO: 1351851 - DNA, 15 bp, Homo sapiens
caggtgcctatcacc

SEQ ID NO: 1351852 - DNA, 15 bp, Homo sapiens
acaggtgcctatcac

SEQ ID NO: 1351853 - DNA, 15 bp, Homo sapiens
tacaggtgcctatca

SEQ ID NO: 1351854 - DNA, 15 bp, Homo sapiens
ttacaggtgcctatc

SEQ ID NO: 1351855 - DNA, 15 bp, Homo sapiens
attacaggtgcctat

SEQ ID NO: 1351856 - DNA, 15 bp, Homo sapiens
gattacaggtgccta

SEQ ID NO: 1351857 - DNA, 15 bp, Homo sapiens
agattacaggtgcct

SEQ ID NO: 1351858 - DNA, 15 bp, Homo sapiens
ggattctcctgcctc

SEQ ID NO: 1351859 - DNA, 15 bp, Homo sapiens
cgggttcaagggatt

SEQ ID NO: 1351860 - DNA, 15 bp, Homo sapiens
ccgggttcaagggat

SEQ ID NO: 1351861 - DNA, 15 bp, Homo sapiens
cccgggttcaaggga

SEQ ID NO: 1351862 - DNA, 15 bp, Homo sapiens
tcccgggttcaaggg

SEQ ID NO: 1351863 - DNA, 15 bp, Homo sapiens
ctcccgggttcaagg

SEQ ID NO: 1351864 - DNA, 15 bp, Homo sapiens
attttgagacagagt

SEQ ID NO: 1351865 - DNA, 15 bp, Homo sapiens
tattttgagacagag

SEQ ID NO: 1351866 - DNA, 15 bp, Homo sapiens
ttattttgagacaga

SEQ ID NO: 1351867 - DNA, 15 bp, Homo sapiens
tttattttgagacag

SEQ ID NO: 1351868 - DNA, 15 bp, Homo sapiens
atttattttgagaca

SEQ ID NO: 1351869 - DNA, 15 bp, Homo sapiens
tatttattttgagac

SEQ ID NO: 1351870 - DNA, 15 bp, Homo sapiens
ttatttattttgaga

SEQ ID NO: 1351871 - DNA, 15 bp, Homo sapiens
tttatttattttgag

SEQ ID NO: 1351872 - DNA, 15 bp, Homo sapiens
atttatttattttga

SEQ ID NO: 1351873 - DNA, 15 bp, Homo sapiens
tatttatttattttg

SEQ ID NO: 1351874 - DNA, 15 bp, Homo sapiens
ctatttatttattta

SEQ ID NO: 1351875 - DNA, 15 bp, Homo sapiens
cctatttatttattt

SEQ ID NO: 1351876 - DNA, 15 bp, Homo sapiens
gcctatttatttatt

SEQ ID NO: 1351877 - DNA, 15 bp, Homo sapiens
agcctatttatttat

SEQ ID NO: 1351878 - DNA, 15 bp, Homo sapiens
cagcctatttattta

SEQ ID NO: 1351879 - DNA, 15 bp, Homo sapiens
ccagcctatttattt

SEQ ID NO: 1351880 - DNA, 15 bp, Homo sapiens
cccagcctatttatt

SEQ ID NO: 1351881 - DNA, 15 bp, Homo sapiens
ccccagcctatttat

SEQ ID NO: 1351882 - DNA, 15 bp, Homo sapiens
tccccagcctattta

SEQ ID NO: 1351883 - DNA, 15 bp, Homo sapiens
gtccccagcctattt

SEQ ID NO: 1351884 - DNA, 15 bp, Homo sapiens
cgtccccagcctatt

SEQ ID NO: 1351885 - DNA, 15 bp, Homo sapiens
ccgtccccagcctat

SEQ ID NO: 1351886 - DNA, 15 bp, Homo sapiens
accgtccccagccta

SEQ ID NO: 1351887 - DNA, 15 bp, Homo sapiens
caccgtccccagcct

SEQ ID NO: 1351888 - DNA, 15 bp, Homo sapiens
ccaccgtccccagcc

SEQ ID NO: 1351889 - DNA, 15 bp, Homo sapiens
accaccgtccccagc

SEQ ID NO: 1351890 - DNA, 15 bp, Homo sapiens
aaccaccgtccccag

SEQ ID NO: 1351891 - DNA, 15 bp, Homo sapiens
gaaccaccgtcccca

SEQ ID NO: 1351892 - DNA, 15 bp, Homo sapiens
tgaaccaccgtcccc

SEQ ID NO: 1351893 - DNA, 15 bp, Homo sapiens
gtgaaccaccgtccc

SEQ ID NO: 1351894 - DNA, 15 bp, Homo sapiens
cgtgaaccaccgtcc

SEQ ID NO: 1351895 - DNA, 15 bp, Homo sapiens
acgtgaaccaccgtc

SEQ ID NO: 1351896 - DNA, 15 bp, Homo sapiens
gacgtgaaccaccgt

SEQ ID NO: 1351897 - DNA, 15 bp, Homo sapiens
agacgtgaaccaccg

SEQ ID NO: 1351898 - DNA, 15 bp, Homo sapiens
cagacgtgaaccacc

SEQ ID NO: 1351899 - DNA, 15 bp, Homo sapiens
acagacgtgaaccac

SEQ ID NO: 1351900 - DNA, 15 bp, Homo sapiens
tacagacgtgaacca

SEQ ID NO: 1351901 - DNA, 15 bp, Homo sapiens
ttacagacgtgaacc

SEQ ID NO: 1351902 - DNA, 15 bp, Homo sapiens
attacagacgtgaac

SEQ ID NO: 1351903 - DNA, 15 bp, Homo sapiens
gattacagacgtgaa

SEQ ID NO: 1351904 - DNA, 15 bp, Homo sapiens
gatgatccgcctgcc

SEQ ID NO: 1351905 - DNA, 15 bp, Homo sapiens
agatgatccgcctgc

SEQ ID NO: 1351906 - DNA, 15 bp, Homo sapiens
cagatgatccgcctg

SEQ ID NO: 1351907 - DNA, 15 bp, Homo sapiens
tcagatgatccgcct

SEQ ID NO: 1351908 - DNA, 15 bp, Homo sapiens
ctcagatgatccgcc

SEQ ID NO: 1351909 - DNA, 15 bp, Homo sapiens
cctcagatgatccgc

SEQ ID NO: 1351910 - DNA, 15 bp, Homo sapiens
acctcagatgatccg

SEQ ID NO: 1351911 - DNA, 15 bp, Homo sapiens
gacctcagatgatcc

SEQ ID NO: 1351912 - DNA, 15 bp, Homo sapiens
tgacctcagatgatc

SEQ ID NO: 1351913 - DNA, 15 bp, Homo sapiens
ctgacctcagatgat

SEQ ID NO: 1351914 - DNA, 15 bp, Homo sapiens
cctgacctcagatga

SEQ ID NO: 1351915 - DNA, 15 bp, Homo sapiens
tcctgacctcagatg

SEQ ID NO: 1351916 - DNA, 15 bp, Homo sapiens
ctcctgacctcagat

SEQ ID NO: 1351917 - DNA, 15 bp, Homo sapiens
actcctgacctcaga

SEQ ID NO: 1351918 - DNA, 15 bp, Homo sapiens
ttggtctcgaactcc

SEQ ID NO: 1351919 - DNA, 15 bp, Homo sapiens
gttggtctcgaactc

SEQ ID NO: 1351920 - DNA, 15 bp, Homo sapiens
ggttggtctcgaact

SEQ ID NO: 1351921 - DNA, 15 bp, Homo sapiens
ccaggttggtctcga

SEQ ID NO: 1351922 - DNA, 15 bp, Homo sapiens
gccaggttggtctcg

SEQ ID NO: 1351923 - DNA, 15 bp, Homo sapiens
tcatgttggccaggt

SEQ ID NO: 1351924 - DNA, 15 bp, Homo sapiens
cggggtttcatcatg

SEQ ID NO: 1351925 - DNA, 15 bp, Homo sapiens
acggggtttcatcat

SEQ ID NO: 1351926 - DNA, 15 bp, Homo sapiens
gacggggtttcatca

SEQ ID NO: 1351927 - DNA, 15 bp, Homo sapiens
agacggggtttcatc

SEQ ID NO: 1351928 - DNA, 15 bp, Homo sapiens
gagacggggtttcat

SEQ ID NO: 1351929 - DNA, 15 bp, Homo sapiens
ggctaatttttgtgt

SEQ ID NO: 1351930 - DNA, 15 bp, Homo sapiens
tggctaatttttgtg

SEQ ID NO: 1351931 - DNA, 15 bp, Homo sapiens
acgccaccacacctg

SEQ ID NO: 1351932 - DNA, 15 bp, Homo sapiens
cacgccaccacacct

SEQ ID NO: 1351933 - DNA, 15 bp, Homo sapiens
gcacgccaccacacc

SEQ ID NO: 1351934 - DNA, 15 bp, Homo sapiens
tgcacgccaccacac

SEQ ID NO: 1351935 - DNA, 15 bp, Homo sapiens
gtgcacgccaccaca

SEQ ID NO: 1351936 - DNA, 15 bp, Homo sapiens
ggtgcacgccaccac

SEQ ID NO: 1351937 - DNA, 15 bp, Homo sapiens
ctctcagcctcccgt

SEQ ID NO: 1351938 - DNA, 15 bp, Homo sapiens
tctctcagcctcccg

SEQ ID NO: 1351939 - DNA, 15 bp, Homo sapiens
ctctctcagcctccc

SEQ ID NO: 1351940 - DNA, 15 bp, Homo sapiens
cctctctcagcctcc

SEQ ID NO: 1351941 - DNA, 15 bp, Homo sapiens
tcctctctcagcctc

SEQ ID NO: 1351942 - DNA, 15 bp, Homo sapiens
atcctctctcagcct

SEQ ID NO: 1351943 - DNA, 15 bp, Homo sapiens
tatcctctctcagcc

SEQ ID NO: 1351944 - DNA, 15 bp, Homo sapiens
ttatcctctctcagc

SEQ ID NO: 1351945 - DNA, 15 bp, Homo sapiens
attatcctctctcag

SEQ ID NO: 1351946 - DNA, 15 bp, Homo sapiens
gattatcctctctca

SEQ ID NO: 1351947 - DNA, 15 bp, Homo sapiens
agattatcctctctc

SEQ ID NO: 1351948 - DNA, 15 bp, Homo sapiens
gagattatcctctct

SEQ ID NO: 1351949 - DNA, 15 bp, Homo sapiens
agagattatcctctc

SEQ ID NO: 1351950 - DNA, 15 bp, Homo sapiens
aagagattatcctct

SEQ ID NO: 1351951 - DNA, 15 bp, Homo sapiens
caagagattatcctc

SEQ ID NO: 1351952 - DNA, 15 bp, Homo sapiens
tcaagagattatcct

SEQ ID NO: 1351953 - DNA, 15 bp, Homo sapiens
ttcaagagattatcc

SEQ ID NO: 1351954 - DNA, 15 bp, Homo sapiens
gttcaagagattatc

SEQ ID NO: 1351955 - DNA, 15 bp, Homo sapiens
ggttcaagagattat

SEQ ID NO: 1351956 - DNA, 15 bp, Homo sapiens
gggttcaagagatta

SEQ ID NO: 1351957 - DNA, 15 bp, Homo sapiens
atggcatgatctcgg

SEQ ID NO: 1351958 - DNA, 15 bp, Homo sapiens
aatggcatgatctcg

SEQ ID NO: 1351959 - DNA, 15 bp, Homo sapiens
caatggcatgatctc

SEQ ID NO: 1351960 - DNA, 15 bp, Homo sapiens
gttgccaggctggag

SEQ ID NO: 1351961 - DNA, 15 bp, Homo sapiens
tgttgccaggctgga

SEQ ID NO: 1351962 - DNA, 15 bp, Homo sapiens
gtgttgccaggctgg

SEQ ID NO: 1351963 - DNA, 15 bp, Homo sapiens
tgtgttgccaggctg

SEQ ID NO: 1351964 - DNA, 15 bp, Homo sapiens
ctgtgttgccaggct

SEQ ID NO: 1351965 - DNA, 15 bp, Homo sapiens
gctgtgttgccaggc

SEQ ID NO: 1351966 - DNA, 15 bp, Homo sapiens
cgctgtgttgccagg

SEQ ID NO: 1351967 - DNA, 15 bp, Homo sapiens
tcgctgtgttgccag

SEQ ID NO: 1351968 - DNA, 15 bp, Homo sapiens
ctcgctgtgttgcca

SEQ ID NO: 1351969 - DNA, 15 bp, Homo sapiens
tctcgctgtgttgcc

SEQ ID NO: 1351970 - DNA, 15 bp, Homo sapiens
gtctcgctgtgttgc

SEQ ID NO: 1351971 - DNA, 15 bp, Homo sapiens
agtctcgctgtgttg

SEQ ID NO: 1351972 - DNA, 15 bp, Homo sapiens
gagtctcgctgtgtt

SEQ ID NO: 1351973 - DNA, 15 bp, Homo sapiens
ggacagagtctcgct

SEQ ID NO: 1351974 - DNA, 15 bp, Homo sapiens
gggacagagtctcgc

SEQ ID NO: 1351975 - DNA, 15 bp, Homo sapiens
tgggacagagtctcg

SEQ ID NO: 1351976 - DNA, 15 bp, Homo sapiens
ttgggacagagtctc

SEQ ID NO: 1351977 - DNA, 15 bp, Homo sapiens
tttgggacagagtct

SEQ ID NO: 1351978 - DNA, 15 bp, Homo sapiens
ttttgggacagagtc

SEQ ID NO: 1351979 - DNA, 15 bp, Homo sapiens
tttttgggacagagt

SEQ ID NO: 1351980 - DNA, 15 bp, Homo sapiens
atttttgggacagag

SEQ ID NO: 1351981 - DNA, 15 bp, Homo sapiens
tatttttgggacaga

SEQ ID NO: 1351982 - DNA, 15 bp, Homo sapiens
ttatttttgggacag

SEQ ID NO: 1351983 - DNA, 15 bp, Homo sapiens
tttatttttgggaca

SEQ ID NO: 1351984 - DNA, 15 bp, Homo sapiens
atttatttttgggac

SEQ ID NO: 1351985 - DNA, 15 bp, Homo sapiens
tatttatttttggga

SEQ ID NO: 1351986 - DNA, 15 bp, Homo sapiens
ttatttatttttggg

SEQ ID NO: 1351987 - DNA, 15 bp, Homo sapiens
tttatttatttttgg

SEQ ID NO: 1351988 - DNA, 15 bp, Homo sapiens
cttttatttttattt

SEQ ID NO: 1351989 - DNA, 15 bp, Homo sapiens
tcttttatttttatt

SEQ ID NO: 1351990 - DNA, 15 bp, Homo sapiens
ttcttttatttttat

SEQ ID NO: 1351991 - DNA, 15 bp, Homo sapiens
tttcttttattttta

SEQ ID NO: 1351992 - DNA, 15 bp, Homo sapiens
ctttcttttattttt

SEQ ID NO: 1351993 - DNA, 15 bp, Homo sapiens
tctttcttttatttt

SEQ ID NO: 1351994 - DNA, 15 bp, Homo sapiens
ttctttcttttattt

SEQ ID NO: 1351995 - DNA, 15 bp, Homo sapiens
tttctttcttttatt

SEQ ID NO: 1351996 - DNA, 15 bp, Homo sapiens
ttttctttcttttat

SEQ ID NO: 1351997 - DNA, 15 bp, Homo sapiens
tttattttctttctt

SEQ ID NO: 1351998 - DNA, 15 bp, Homo sapiens
ttttattttctttct

SEQ ID NO: 1351999 - DNA, 15 bp, Homo sapiens
attttattttctttc

SEQ ID NO: 1352000 - DNA, 15 bp, Homo sapiens
tattttattttcttt

SEQ ID NO: 1352001 - DNA, 15 bp, Homo sapiens
ttattttattttctt

SEQ ID NO: 1352002 - DNA, 15 bp, Homo sapiens
tttattttattttct

SEQ ID NO: 1352003 - DNA, 15 bp, Homo sapiens
ttttattttattttc

SEQ ID NO: 1352004 - DNA, 15 bp, Homo sapiens
cttttattttatttt

SEQ ID NO: 1352005 - DNA, 15 bp, Homo sapiens
ttacttttattttat

SEQ ID NO: 1352006 - DNA, 15 bp, Homo sapiens
tttacttttatttta

SEQ ID NO: 1352007 - DNA, 15 bp, Homo sapiens
atttacttttatttt

SEQ ID NO: 1352008 - DNA, 15 bp, Homo sapiens
tatttacttttattt

SEQ ID NO: 1352009 - DNA, 15 bp, Homo sapiens
gtatttacttttatt

SEQ ID NO: 1352010 - DNA, 15 bp, Homo sapiens
tgtatttacttttat

SEQ ID NO: 1352011 - DNA, 15 bp, Homo sapiens
atgtatttactttta

SEQ ID NO: 1352012 - DNA, 15 bp, Homo sapiens
tatgtatttactttt

SEQ ID NO: 1352013 - DNA, 15 bp, Homo sapiens
ttatgtatttacttt

SEQ ID NO: 1352014 - DNA, 15 bp, Homo sapiens
tttatgtatttactt

SEQ ID NO: 1352015 - DNA, 15 bp, Homo sapiens
atttatgtatttact

SEQ ID NO: 1352016 - DNA, 15 bp, Homo sapiens
tatttatgtatttac

SEQ ID NO: 1352017 - DNA, 15 bp, Homo sapiens
ttatttatgtattta

SEQ ID NO: 1352018 - DNA, 15 bp, Homo sapiens
cttatttatgtattt

SEQ ID NO: 1352019 - DNA, 15 bp, Homo sapiens
tcttatttatgtatt

SEQ ID NO: 1352020 - DNA, 15 bp, Homo sapiens
ttcttatttatgtat

SEQ ID NO: 1352021 - DNA, 15 bp, Homo sapiens
tttcttatttatgta

SEQ ID NO: 1352022 - DNA, 15 bp, Homo sapiens
ttttcttatttatgt

SEQ ID NO: 1352023 - DNA, 15 bp, Homo sapiens
tttttcttatttatg

SEQ ID NO: 1352024 - DNA, 15 bp, Homo sapiens
ctttttcttatttat

SEQ ID NO: 1352025 - DNA, 15 bp, Homo sapiens
gctttttcttattta

SEQ ID NO: 1352026 - DNA, 15 bp, Homo sapiens
ggctttttcttattt

SEQ ID NO: 1352027 - DNA, 15 bp, Homo sapiens
cggctttttcttatt

SEQ ID NO: 1352028 - DNA, 15 bp, Homo sapiens
ccggctttttcttat

SEQ ID NO: 1352029 - DNA, 15 bp, Homo sapiens
accggctttttctta

SEQ ID NO: 1352030 - DNA, 15 bp, Homo sapiens
caccggctttttctt

SEQ ID NO: 1352031 - DNA, 15 bp, Homo sapiens
acaccggctttttct

SEQ ID NO: 1352032 - DNA, 15 bp, Homo sapiens
aacaccggctttttc

SEQ ID NO: 1352033 - DNA, 15 bp, Homo sapiens
taacaccggcttttt

SEQ ID NO: 1352034 - DNA, 15 bp, Homo sapiens
ctaacaccggctttt

SEQ ID NO: 1352035 - DNA, 15 bp, Homo sapiens
cctaacaccggcttt

SEQ ID NO: 1352036 - DNA, 15 bp, Homo sapiens
ccctaacaccggctt

SEQ ID NO: 1352037 - DNA, 15 bp, Homo sapiens
tccctaacaccggct

SEQ ID NO: 1352038 - DNA, 15 bp, Homo sapiens
gtccctaacaccggc

SEQ ID NO: 1352039 - DNA, 15 bp, Homo sapiens
ggtccctaacaccgg

SEQ ID NO: 1352040 - DNA, 15 bp, Homo sapiens
tggtccctaacaccg

SEQ ID NO: 1352041 - DNA, 15 bp, Homo sapiens
ctggtccctaacacc

SEQ ID NO: 1352042 - DNA, 15 bp, Homo sapiens
cctggtccctaacac

SEQ ID NO: 1352043 - DNA, 15 bp, Homo sapiens
tcctggtccctaaca

SEQ ID NO: 1352044 - DNA, 15 bp, Homo sapiens
ttcctggtccctaac

SEQ ID NO: 1352045 - DNA, 15 bp, Homo sapiens
tttcctggtccctaa

SEQ ID NO: 1352046 - DNA, 15 bp, Homo sapiens
ctttcctggtcccta

SEQ ID NO: 1352047 - DNA, 15 bp, Homo sapiens
cctttcctggtccct

SEQ ID NO: 1352048 - DNA, 15 bp, Homo sapiens
gcctttcctggtccc

SEQ ID NO: 1352049 - DNA, 15 bp, Homo sapiens
ggcctttcctggtcc

SEQ ID NO: 1352050 - DNA, 15 bp, Homo sapiens
cggcctttcctggtc

SEQ ID NO: 1352051 - DNA, 15 bp, Homo sapiens
ccggcctttcctggt

SEQ ID NO: 1352052 - DNA, 15 bp, Homo sapiens
tccggcctttcctgg

SEQ ID NO: 1352053 - DNA, 15 bp, Homo sapiens
ctccggcctttcctg

SEQ ID NO: 1352054 - DNA, 15 bp, Homo sapiens
tctccggcctttcct

SEQ ID NO: 1352055 - DNA, 15 bp, Homo sapiens
ctctccggcctttcc

SEQ ID NO: 1352056 - DNA, 15 bp, Homo sapiens
actctccggcctttc

SEQ ID NO: 1352057 - DNA, 15 bp, Homo sapiens
cactctccggccttt

SEQ ID NO: 1352058 - DNA, 15 bp, Homo sapiens
gcactctccggcctt

SEQ ID NO: 1352059 - DNA, 15 bp, Homo sapiens
ggcactctccggcct

SEQ ID NO: 1352060 - DNA, 15 bp, Homo sapiens
gggcactctccggcc

SEQ ID NO: 1352061 - DNA, 15 bp, Homo sapiens
agggcactctccggc

SEQ ID NO: 1352062 - DNA, 15 bp, Homo sapiens
tagggcactctccgg

SEQ ID NO: 1352063 - DNA, 15 bp, Homo sapiens
ttagggcactctccg

SEQ ID NO: 1352064 - DNA, 15 bp, Homo sapiens
cttagggcactctcc

SEQ ID NO: 1352065 - DNA, 15 bp, Homo sapiens
ccttagggcactctc

SEQ ID NO: 1352066 - DNA, 15 bp, Homo sapiens
tccttagggcactct

SEQ ID NO: 1352067 - DNA, 15 bp, Homo sapiens
ctccttagggcactc

SEQ ID NO: 1352068 - DNA, 15 bp, Homo sapiens
tctccttagggcact

SEQ ID NO: 1352069 - DNA, 15 bp, Homo sapiens
ctctccttagggcac

SEQ ID NO: 1352070 - DNA, 15 bp, Homo sapiens
cctctccttagggca

SEQ ID NO: 1352071 - DNA, 15 bp, Homo sapiens
tcctctccttagggc

SEQ ID NO: 1352072 - DNA, 15 bp, Homo sapiens
ctcctctccttaggg

SEQ ID NO: 1352073 - DNA, 15 bp, Homo sapiens
cctcctctccttagg

SEQ ID NO: 1352074 - DNA, 15 bp, Homo sapiens
tcctcctctccttag

SEQ ID NO: 1352075 - DNA, 15 bp, Homo sapiens
ctcctcctctcctta

SEQ ID NO: 1352076 - DNA, 15 bp, Homo sapiens
tctcctcctctcctt

SEQ ID NO: 1352077 - DNA, 15 bp, Homo sapiens
ctctcctcctctcct

SEQ ID NO: 1352078 - DNA, 15 bp, Homo sapiens
cctctcctcctctcc

SEQ ID NO: 1352079 - DNA, 15 bp, Homo sapiens
ccctctcctcctctc

SEQ ID NO: 1352080 - DNA, 15 bp, Homo sapiens
cccctctcctcctct

SEQ ID NO: 1352081 - DNA, 15 bp, Homo sapiens
acccctctcctcctc

SEQ ID NO: 1352082 - DNA, 15 bp, Homo sapiens
tacccctctcctcct

SEQ ID NO: 1352083 - DNA, 15 bp, Homo sapiens
ctacccctctcctcc

SEQ ID NO: 1352084 - DNA, 15 bp, Homo sapiens
gctacccctctcctc

SEQ ID NO: 1352085 - DNA, 15 bp, Homo sapiens
tgctacccctctcct

SEQ ID NO: 1352086 - DNA, 15 bp, Homo sapiens
ctgctacccctctcc

SEQ ID NO: 1352087 - DNA, 15 bp, Homo sapiens
actgctacccctctc

SEQ ID NO: 1352088 - DNA, 15 bp, Homo sapiens
cactgctacccctct

SEQ ID NO: 1352089 - DNA, 15 bp, Homo sapiens
ccactgctacccctc

SEQ ID NO: 1352090 - DNA, 15 bp, Homo sapiens
gccactgctacccct

SEQ ID NO: 1352091 - DNA, 15 bp, Homo sapiens
agccactgctacccc

SEQ ID NO: 1352092 - DNA, 15 bp, Homo sapiens
tagccactgctaccc

SEQ ID NO: 1352093 - DNA, 15 bp, Homo sapiens
ctagccactgctacc

SEQ ID NO: 1352094 - DNA, 15 bp, Homo sapiens
tctagccactgctac

SEQ ID NO: 1352095 - DNA, 15 bp, Homo sapiens
ttctagccactgcta

SEQ ID NO: 1352096 - DNA, 15 bp, Homo sapiens
cttctagccactgct

SEQ ID NO: 1352097 - DNA, 15 bp, Homo sapiens
tcttctagccactgc

SEQ ID NO: 1352098 - DNA, 15 bp, Homo sapiens
gtcttctagccactg

SEQ ID NO: 1352099 - DNA, 15 bp, Homo sapiens
tgtcttctagccact

SEQ ID NO: 1352100 - DNA, 15 bp, Homo sapiens
gtgtcttctagccac

SEQ ID NO: 1352101 - DNA, 15 bp, Homo sapiens
cgtgtcttctagcca

SEQ ID NO: 1352102 - DNA, 15 bp, Homo sapiens
ccgtgtcttctagcc

SEQ ID NO: 1352103 - DNA, 15 bp, Homo sapiens
tccgtgtcttctagc

SEQ ID NO: 1352104 - DNA, 15 bp, Homo sapiens
ttccgtgtcttctag

SEQ ID NO: 1352105 - DNA, 15 bp, Homo sapiens
gttccgtgtcttcta

SEQ ID NO: 1352106 - DNA, 15 bp, Homo sapiens
tgttccgtgtcttct

SEQ ID NO: 1352107 - DNA, 15 bp, Homo sapiens
gtgttccgtgtcttc

SEQ ID NO: 1352108 - DNA, 15 bp, Homo sapiens
tgtgttccgtgtctt

SEQ ID NO: 1352109 - DNA, 15 bp, Homo sapiens
ttgtgttccgtgtct

SEQ ID NO: 1352110 - DNA, 15 bp, Homo sapiens
cttgtgttccgtgtc

SEQ ID NO: 1352111 - DNA, 15 bp, Homo sapiens
ccttgtgttccgtgt

SEQ ID NO: 1352112 - DNA, 15 bp, Homo sapiens
accttgtgttccgtg

SEQ ID NO: 1352113 - DNA, 15 bp, Homo sapiens
gaccttgtgttccgt

SEQ ID NO: 1352114 - DNA, 15 bp, Homo sapiens
ggaccttgtgttccg

SEQ ID NO: 1352115 - DNA, 15 bp, Homo sapiens
gggaccttgtgttcc

SEQ ID NO: 1352116 - DNA, 15 bp, Homo sapiens
tgggaccttgtgttc

SEQ ID NO: 1352117 - DNA, 15 bp, Homo sapiens
ctgggaccttgtgtt

SEQ ID NO: 1352118 - DNA, 15 bp, Homo sapiens
actgggaccttgtgt

SEQ ID NO: 1352119 - DNA, 15 bp, Homo sapiens
cactgggaccttgtg

SEQ ID NO: 1352120 - DNA, 15 bp, Homo sapiens
tcactgggaccttgt

SEQ ID NO: 1352121 - DNA, 15 bp, Homo sapiens
gtcactgggaccttg

SEQ ID NO: 1352122 - DNA, 15 bp, Homo sapiens
tgtcactgggacctt

SEQ ID NO: 1352123 - DNA, 15 bp, Homo sapiens
ctgtcactgggacct

SEQ ID NO: 1352124 - DNA, 15 bp, Homo sapiens
cctgtcactgggacc

SEQ ID NO: 1352125 - DNA, 15 bp, Homo sapiens
tcctgtcactgggac

SEQ ID NO: 1352126 - DNA, 15 bp, Homo sapiens
ctcctgtcactggga

SEQ ID NO: 1352127 - DNA, 15 bp, Homo sapiens
cctcctgtcactggg

SEQ ID NO: 1352128 - DNA, 15 bp, Homo sapiens
ccctcctgtcactgg

SEQ ID NO: 1352129 - DNA, 15 bp, Homo sapiens
cccctcctgtcactg

SEQ ID NO: 1352130 - DNA, 15 bp, Homo sapiens
ccccctcctgtcact

SEQ ID NO: 1352131 - DNA, 15 bp, Homo sapiens
cccccctcctgtcac

SEQ ID NO: 1352132 - DNA, 15 bp, Homo sapiens
ccccccctcctgtca

SEQ ID NO: 1352133 - DNA, 15 bp, Homo sapiens
cccccccctcctgtc

SEQ ID NO: 1352134 - DNA, 15 bp, Homo sapiens
gcccccccctcctgt

SEQ ID NO: 1352135 - DNA, 15 bp, Homo sapiens
ggcccccccctcctg

SEQ ID NO: 1352136 - DNA, 15 bp, Homo sapiens
aggcccccccctcct

SEQ ID NO: 1352137 - DNA, 15 bp, Homo sapiens
caggcccccccctcc

SEQ ID NO: 1352138 - DNA, 15 bp, Homo sapiens
ccaggcccccccctc

SEQ ID NO: 1352139 - DNA, 15 bp, Homo sapiens
gccaggcccccccct

SEQ ID NO: 1352140 - DNA, 15 bp, Homo sapiens
ggccaggcccccccc

SEQ ID NO: 1352141 - DNA, 15 bp, Homo sapiens
gggccaggccccccc

SEQ ID NO: 1352142 - DNA, 15 bp, Homo sapiens
ggggccaggcccccc

SEQ ID NO: 1352143 - DNA, 15 bp, Homo sapiens
aggggccaggccccc

SEQ ID NO: 1352144 - DNA, 15 bp, Homo sapiens
caggggccaggcccc

SEQ ID NO: 1352145 - DNA, 15 bp, Homo sapiens
gcaggggccaggccc

SEQ ID NO: 1352146 - DNA, 15 bp, Homo sapiens
tgcaggggccaggcc

SEQ ID NO: 1352147 - DNA, 15 bp, Homo sapiens
ctgcaggggccaggc

SEQ ID NO: 1352148 - DNA, 15 bp, Homo sapiens
actgcaggggccagg

SEQ ID NO: 1352149 - DNA, 15 bp, Homo sapiens
gactgcaggggccag

SEQ ID NO: 1352150 - DNA, 15 bp, Homo sapiens
tgactgcaggggcca

SEQ ID NO: 1352151 - DNA, 15 bp, Homo sapiens
atgactgcaggggcc

SEQ ID NO: 1352152 - DNA, 15 bp, Homo sapiens
catgactgcaggggc

SEQ ID NO: 1352153 - DNA, 15 bp, Homo sapiens
ccatgactgcagggg

SEQ ID NO: 1352154 - DNA, 15 bp, Homo sapiens
cccatgactgcaggg

SEQ ID NO: 1352155 - DNA, 15 bp, Homo sapiens
acccatgactgcagg

SEQ ID NO: 1352156 - DNA, 15 bp, Homo sapiens
cacccatgactgcag

SEQ ID NO: 1352157 - DNA, 15 bp, Homo sapiens
acacccatgactgca

SEQ ID NO: 1352158 - DNA, 15 bp, Homo sapiens
aacacccatgactgc

SEQ ID NO: 1352159 - DNA, 15 bp, Homo sapiens
aaacacccatgactg

SEQ ID NO: 1352160 - DNA, 15 bp, Homo sapiens
caaacacccatgact

SEQ ID NO: 1352161 - DNA, 15 bp, Homo sapiens
gcaaacacccatgac

SEQ ID NO: 1352162 - DNA, 15 bp, Homo sapiens
agcaaacacccatga

SEQ ID NO: 1352163 - DNA, 15 bp, Homo sapiens
aagcaaacacccatg

SEQ ID NO: 1352164 - DNA, 15 bp, Homo sapiens
aaagcaaacacccat

SEQ ID NO: 1352165 - DNA, 15 bp, Homo sapiens
gaaagcaaacaccca

SEQ ID NO: 1352166 - DNA, 15 bp, Homo sapiens
agaaagcaaacaccc

SEQ ID NO: 1352167 - DNA, 15 bp, Homo sapiens
aagaaagcaaacacc

SEQ ID NO: 1352168 - DNA, 15 bp, Homo sapiens
gaagaaagcaaacac

SEQ ID NO: 1352169 - DNA, 15 bp, Homo sapiens
ggaagaaagcaaaca

SEQ ID NO: 1352170 - DNA, 15 bp, Homo sapiens
gggaagaaagcaaac

SEQ ID NO: 1352171 - DNA, 15 bp, Homo sapiens
gagggaagaaagcaa

SEQ ID NO: 1352172 - DNA, 15 bp, Homo sapiens
cgagggaagaaagca

SEQ ID NO: 1352173 - DNA, 15 bp, Homo sapiens
ccgagggaagaaagc

SEQ ID NO: 1352174 - DNA, 15 bp, Homo sapiens
cccgagggaagaaag

SEQ ID NO: 1352175 - DNA, 15 bp, Homo sapiens
ccccgagggaagaaa

SEQ ID NO: 1352176 - DNA, 15 bp, Homo sapiens
gccccgagggaagaa

SEQ ID NO: 1352177 - DNA, 15 bp, Homo sapiens
agccccgagggaaga

SEQ ID NO: 1352178 - DNA, 15 bp, Homo sapiens
cagccccgagggaag

SEQ ID NO: 1352179 - DNA, 15 bp, Homo sapiens
gcagccccgagggaa

SEQ ID NO: 1352180 - DNA, 15 bp, Homo sapiens
agcagccccgaggga

SEQ ID NO: 1352181 - DNA, 15 bp, Homo sapiens
cagcagccccgaggg

SEQ ID NO: 1352182 - DNA, 15 bp, Homo sapiens
tcagcagccccgagg

SEQ ID NO: 1352183 - DNA, 15 bp, Homo sapiens
ttcagcagccccgag

SEQ ID NO: 1352184 - DNA, 15 bp, Homo sapiens
gttcagcagccccga

SEQ ID NO: 1352185 - DNA, 15 bp, Homo sapiens
tgttcagcagccccg

SEQ ID NO: 1352186 - DNA, 15 bp, Homo sapiens
ttgttcagcagcccc

SEQ ID NO: 1352187 - DNA, 15 bp, Homo sapiens
tttgttcagcagccc

SEQ ID NO: 1352188 - DNA, 15 bp, Homo sapiens
ttttgttcagcagcc

SEQ ID NO: 1352189 - DNA, 15 bp, Homo sapiens
cttttgttcagcagc

SEQ ID NO: 1352190 - DNA, 15 bp, Homo sapiens
gcttttgttcagcag

SEQ ID NO: 1352191 - DNA, 15 bp, Homo sapiens
agcttttgttcagca

SEQ ID NO: 1352192 - DNA, 15 bp, Homo sapiens
cagcttttgttcagc

SEQ ID NO: 1352193 - DNA, 15 bp, Homo sapiens
tcagcttttgttcag

SEQ ID NO: 1352194 - DNA, 15 bp, Homo sapiens
ttcagcttttgttca

SEQ ID NO: 1352195 - DNA, 15 bp, Homo sapiens
gttcagcttttgttc

SEQ ID NO: 1352196 - DNA, 15 bp, Homo sapiens
agttcagcttttgtt

SEQ ID NO: 1352197 - DNA, 15 bp, Homo sapiens
aagttcagcttttgt

SEQ ID NO: 1352198 - DNA, 15 bp, Homo sapiens
caagttcagcttttg

SEQ ID NO: 1352199 - DNA, 15 bp, Homo sapiens
tcaagttcagctttt

SEQ ID NO: 1352200 - DNA, 15 bp, Homo sapiens
gtcaagttcagcttt

SEQ ID NO: 1352201 - DNA, 15 bp, Homo sapiens
agtcaagttcagctt

SEQ ID NO: 1352202 - DNA, 15 bp, Homo sapiens
gagtcaagttcagct

SEQ ID NO: 1352203 - DNA, 15 bp, Homo sapiens
ggagtcaagttcagc

SEQ ID NO: 1352204 - DNA, 15 bp, Homo sapiens
cggagtcaagttcag

SEQ ID NO: 1352205 - DNA, 15 bp, Homo sapiens
ccggagtcaagttca

SEQ ID NO: 1352206 - DNA, 15 bp, Homo sapiens
gccggagtcaagttc

SEQ ID NO: 1352207 - DNA, 15 bp, Homo sapiens
agccggagtcaagtt

SEQ ID NO: 1352208 - DNA, 15 bp, Homo sapiens
cagccggagtcaagt

SEQ ID NO: 1352209 - DNA, 15 bp, Homo sapiens
gcagccggagtcaag

SEQ ID NO: 1352210 - DNA, 15 bp, Homo sapiens
ggcagccggagtcaa

SEQ ID NO: 1352211 - DNA, 15 bp, Homo sapiens
aggcagccggagtca

SEQ ID NO: 1352212 - DNA, 15 bp, Homo sapiens
caggcagccggagtc

SEQ ID NO: 1352213 - DNA, 15 bp, Homo sapiens
gcaggcagccggagt

SEQ ID NO: 1352214 - DNA, 15 bp, Homo sapiens
agcaggcagccggag

SEQ ID NO: 1352215 - DNA, 15 bp, Homo sapiens
cagcaggcagccgga

SEQ ID NO: 1352216 - DNA, 15 bp, Homo sapiens
gcagcaggcagccgg

SEQ ID NO: 1352217 - DNA, 15 bp, Homo sapiens
cgcagcaggcagccg

SEQ ID NO: 1352218 - DNA, 15 bp, Homo sapiens
tcgcagcaggcagcc

SEQ ID NO: 1352219 - DNA, 15 bp, Homo sapiens
ttcgcagcaggcagc

SEQ ID NO: 1352220 - DNA, 15 bp, Homo sapiens
tttcgcagcaggcag

SEQ ID NO: 1352221 - DNA, 15 bp, Homo sapiens
gtttcgcagcaggca

SEQ ID NO: 1352222 - DNA, 15 bp, Homo sapiens
agtttcgcagcaggc

SEQ ID NO: 1352223 - DNA, 15 bp, Homo sapiens
cagtttcgcagcagg

SEQ ID NO: 1352224 - DNA, 15 bp, Homo sapiens
ccagtttcgcagcag

SEQ ID NO: 1352225 - DNA, 15 bp, Homo sapiens
tccagtttcgcagca

SEQ ID NO: 1352226 - DNA, 15 bp, Homo sapiens
ctccagtttcgcagc

SEQ ID NO: 1352227 - DNA, 15 bp, Homo sapiens
tctccagtttcgcag

SEQ ID NO: 1352228 - DNA, 15 bp, Homo sapiens
ttctccagtttcgca

SEQ ID NO: 1352229 - DNA, 15 bp, Homo sapiens
cttctccagtttcgc

SEQ ID NO: 1352230 - DNA, 15 bp, Homo sapiens
ccttctccagtttcg

SEQ ID NO: 1352231 - DNA, 15 bp, Homo sapiens
cccttctccagtttc

SEQ ID NO: 1352232 - DNA, 15 bp, Homo sapiens
gcccttctccagttt

SEQ ID NO: 1352233 - DNA, 15 bp, Homo sapiens
tgcccttctccagtt

SEQ ID NO: 1352234 - DNA, 15 bp, Homo sapiens
ctgcccttctccagt

SEQ ID NO: 1352235 - DNA, 15 bp, Homo sapiens
cctgcccttctccag

SEQ ID NO: 1352236 - DNA, 15 bp, Homo sapiens
acctgcccttctcca

SEQ ID NO: 1352237 - DNA, 15 bp, Homo sapiens
cacctgcccttctcc

SEQ ID NO: 1352238 - DNA, 15 bp, Homo sapiens
ccacctgcccttctc

SEQ ID NO: 1352239 - DNA, 15 bp, Homo sapiens
tccacctgcccttct

SEQ ID NO: 1352240 - DNA, 15 bp, Homo sapiens
ctccacctgcccttc

SEQ ID NO: 1352241 - DNA, 15 bp, Homo sapiens
cctccacctgccctt

SEQ ID NO: 1352242 - DNA, 15 bp, Homo sapiens
ccctccacctgccct

SEQ ID NO: 1352243 - DNA, 15 bp, Homo sapiens
tccctccacctgccc

SEQ ID NO: 1352244 - DNA, 15 bp, Homo sapiens
atccctccacctgcc

SEQ ID NO: 1352245 - DNA, 15 bp, Homo sapiens
catccctccacctgc

SEQ ID NO: 1352246 - DNA, 15 bp, Homo sapiens
ccatccctccacctg

SEQ ID NO: 1352247 - DNA, 15 bp, Homo sapiens
tccatccctccacct

SEQ ID NO: 1352248 - DNA, 15 bp, Homo sapiens
atccatccctccacc

SEQ ID NO: 1352249 - DNA, 15 bp, Homo sapiens
catccatccctccac

SEQ ID NO: 1352250 - DNA, 15 bp, Homo sapiens
ccatccatccctcca

SEQ ID NO: 1352251 - DNA, 15 bp, Homo sapiens
gccatccatccctcc

SEQ ID NO: 1352252 - DNA, 15 bp, Homo sapiens
tgccatccatccctc

SEQ ID NO: 1352253 - DNA, 15 bp, Homo sapiens
ttgccatccatccct

SEQ ID NO: 1352254 - DNA, 15 bp, Homo sapiens
cttgccatccatccc

SEQ ID NO: 1352255 - DNA, 15 bp, Homo sapiens
ccttgccatccatcc

SEQ ID NO: 1352256 - DNA, 15 bp, Homo sapiens
accttgccatccatc

SEQ ID NO: 1352257 - DNA, 15 bp, Homo sapiens
caccttgccatccat

SEQ ID NO: 1352258 - DNA, 15 bp, Homo sapiens
gcaccttgccatcca

SEQ ID NO: 1352259 - DNA, 15 bp, Homo sapiens
agcaccttgccatcc

SEQ ID NO: 1352260 - DNA, 15 bp, Homo sapiens
gagcaccttgccatc

SEQ ID NO: 1352261 - DNA, 15 bp, Homo sapiens
agagcaccttgccat

SEQ ID NO: 1352262 - DNA, 15 bp, Homo sapiens
cagagcaccttgcca

SEQ ID NO: 1352263 - DNA, 15 bp, Homo sapiens
ccagagcaccttgcc

SEQ ID NO: 1352264 - DNA, 15 bp, Homo sapiens
cccagagcaccttgc

SEQ ID NO: 1352265 - DNA, 15 bp, Homo sapiens
tcccagagcaccttg

SEQ ID NO: 1352266 - DNA, 15 bp, Homo sapiens
ctcccagagcacctt

SEQ ID NO: 1352267 - DNA, 15 bp, Homo sapiens
cctcccagagcacct

SEQ ID NO: 1352268 - DNA, 15 bp, Homo sapiens
ccctcccagagcacc

SEQ ID NO: 1352269 - DNA, 15 bp, Homo sapiens
cccctcccagagcac

SEQ ID NO: 1352270 - DNA, 15 bp, Homo sapiens
tcccctcccagagca

SEQ ID NO: 1352271 - DNA, 15 bp, Homo sapiens
ctcccctcccagagc

SEQ ID NO: 1352272 - DNA, 15 bp, Homo sapiens
tcctcccctcccaga

SEQ ID NO: 1352273 - DNA, 15 bp, Homo sapiens
atcctcccctcccag

SEQ ID NO: 1352274 - DNA, 15 bp, Homo sapiens
catcctcccctccca

SEQ ID NO: 1352275 - DNA, 15 bp, Homo sapiens
ccatcctcccctccc

SEQ ID NO: 1352276 - DNA, 15 bp, Homo sapiens
tccatcctcccctcc

SEQ ID NO: 1352277 - DNA, 15 bp, Homo sapiens
ctccatcctcccctc

SEQ ID NO: 1352278 - DNA, 15 bp, Homo sapiens
cctccatcctcccct

SEQ ID NO: 1352279 - DNA, 15 bp, Homo sapiens
gcctccatcctcccc

SEQ ID NO: 1352280 - DNA, 15 bp, Homo sapiens
ggcctccatcctccc

SEQ ID NO: 1352281 - DNA, 15 bp, Homo sapiens
gggcctccatcctcc

SEQ ID NO: 1352282 - DNA, 15 bp, Homo sapiens
agggcctccatcctc

SEQ ID NO: 1352283 - DNA, 15 bp, Homo sapiens
cagggcctccatcct

SEQ ID NO: 1352284 - DNA, 15 bp, Homo sapiens
gcagggcctccatcc

SEQ ID NO: 1352285 - DNA, 15 bp, Homo sapiens
tgcagggcctccatc

SEQ ID NO: 1352286 - DNA, 15 bp, Homo sapiens
ctgcagggcctccat

SEQ ID NO: 1352287 - DNA, 15 bp, Homo sapiens
gctgcagggcctcca

SEQ ID NO: 1352288 - DNA, 15 bp, Homo sapiens
agctgcagggcctcc

SEQ ID NO: 1352289 - DNA, 15 bp, Homo sapiens
aagctgcagggcctc

SEQ ID NO: 1352290 - DNA, 15 bp, Homo sapiens
gaagctgcagggcct

SEQ ID NO: 1352291 - DNA, 15 bp, Homo sapiens
ggaagctgcagggcc

SEQ ID NO: 1352292 - DNA, 15 bp, Homo sapiens
gggaagctgcagggc

SEQ ID NO: 1352293 - DNA, 15 bp, Homo sapiens
tgggaagctgcaggg

SEQ ID NO: 1352294 - DNA, 15 bp, Homo sapiens
ctgggaagctgcagg

SEQ ID NO: 1352295 - DNA, 15 bp, Homo sapiens
gctgggaagctgcag

SEQ ID NO: 1352296 - DNA, 15 bp, Homo sapiens
tgctgggaagctgca

SEQ ID NO: 1352297 - DNA, 15 bp, Homo sapiens
ttgctgggaagctgc

SEQ ID NO: 1352298 - DNA, 15 bp, Homo sapiens
gttgctgggaagctg

SEQ ID NO: 1352299 - DNA, 15 bp, Homo sapiens
tgttgctgggaagct

SEQ ID NO: 1352300 - DNA, 15 bp, Homo sapiens
ctgttgctgggaagc

SEQ ID NO: 1352301 - DNA, 15 bp, Homo sapiens
gctgttgctgggaag

SEQ ID NO: 1352302 - DNA, 15 bp, Homo sapiens
ggctgttgctgggaa

SEQ ID NO: 1352303 - DNA, 15 bp, Homo sapiens
tggctgttgctggga

SEQ ID NO: 1352304 - DNA, 15 bp, Homo sapiens
ctggctgttgctggg

SEQ ID NO: 1352305 - DNA, 15 bp, Homo sapiens
cctggctgttgctgg

SEQ ID NO: 1352306 - DNA, 15 bp, Homo sapiens
gcctggctgttgctg

SEQ ID NO: 1352307 - DNA, 15 bp, Homo sapiens
ggcctggctgttgct

SEQ ID NO: 1352308 - DNA, 15 bp, Homo sapiens
aggcctggctgttgc

SEQ ID NO: 1352309 - DNA, 15 bp, Homo sapiens
gaggcctggctgttg

SEQ ID NO: 1352310 - DNA, 15 bp, Homo sapiens
ggaggcctggctgtt

SEQ ID NO: 1352311 - DNA, 15 bp, Homo sapiens
gggaggcctggctgt

SEQ ID NO: 1352312 - DNA, 15 bp, Homo sapiens
tgggaggcctggctg

SEQ ID NO: 1352313 - DNA, 15 bp, Homo sapiens
atgggaggcctggct

SEQ ID NO: 1352314 - DNA, 15 bp, Homo sapiens
gatgggaggcctggc

SEQ ID NO: 1352315 - DNA, 15 bp, Homo sapiens
agatgggaggcctgg

SEQ ID NO: 1352316 - DNA, 15 bp, Homo sapiens
cagatgggaggcctg

SEQ ID NO: 1352317 - DNA, 15 bp, Homo sapiens
gcagatgggaggcct

SEQ ID NO: 1352318 - DNA, 15 bp, Homo sapiens
agcagatgggaggcc

SEQ ID NO: 1352319 - DNA, 15 bp, Homo sapiens
cagcagatgggaggc

SEQ ID NO: 1352320 - DNA, 15 bp, Homo sapiens
gcagcagatgggagg

SEQ ID NO: 1352321 - DNA, 15 bp, Homo sapiens
tgcagcagatgggag

SEQ ID NO: 1352322 - DNA, 15 bp, Homo sapiens
ttgcagcagatggga

SEQ ID NO: 1352323 - DNA, 15 bp, Homo sapiens
gttgcagcagatggg

SEQ ID NO: 1352324 - DNA, 15 bp, Homo sapiens
tgttgcagcagatgg

SEQ ID NO: 1352325 - DNA, 15 bp, Homo sapiens
ctgttgcagcagatg

SEQ ID NO: 1352326 - DNA, 15 bp, Homo sapiens
actgttgcagcagat

SEQ ID NO: 1352327 - DNA, 15 bp, Homo sapiens
aactgttgcagcaga

SEQ ID NO: 1352328 - DNA, 15 bp, Homo sapiens
gaactgttgcagcag

SEQ ID NO: 1352329 - DNA, 15 bp, Homo sapiens
ggaactgttgcagca

SEQ ID NO: 1352330 - DNA, 15 bp, Homo sapiens
tggaactgttgcagc

SEQ ID NO: 1352331 - DNA, 15 bp, Homo sapiens
ctggaactgttgcag

SEQ ID NO: 1352332 - DNA, 15 bp, Homo sapiens
gctggaactgttgca

SEQ ID NO: 1352333 - DNA, 15 bp, Homo sapiens
ggctggaactgttgc

SEQ ID NO: 1352334 - DNA, 15 bp, Homo sapiens
gggctggaactgttg

SEQ ID NO: 1352335 - DNA, 15 bp, Homo sapiens
tgggctggaactgtt

SEQ ID NO: 1352336 - DNA, 15 bp, Homo sapiens
ctgggctggaactgt

SEQ ID NO: 1352337 - DNA, 15 bp, Homo sapiens
cctgggctggaactg

SEQ ID NO: 1352338 - DNA, 15 bp, Homo sapiens
gcctgggctggaact

SEQ ID NO: 1352339 - DNA, 15 bp, Homo sapiens
agcctgggctggaac

SEQ ID NO: 1352340 - DNA, 15 bp, Homo sapiens
tagcctgggctggaa

SEQ ID NO: 1352341 - DNA, 15 bp, Homo sapiens
atagcctgggctgga

SEQ ID NO: 1352342 - DNA, 15 bp, Homo sapiens
catagcctgggctgg

SEQ ID NO: 1352343 - DNA, 15 bp, Homo sapiens
ccatagcctgggctg

SEQ ID NO: 1352344 - DNA, 15 bp, Homo sapiens
cccatagcctgggct

SEQ ID NO: 1352345 - DNA, 15 bp, Homo sapiens
gcccatagcctgggc

SEQ ID NO: 1352346 - DNA, 15 bp, Homo sapiens
agcccatagcctggg

SEQ ID NO: 1352347 - DNA, 15 bp, Homo sapiens
tagcccatagcctgg

SEQ ID NO: 1352348 - DNA, 15 bp, Homo sapiens
ttagcccatagcctg

SEQ ID NO: 1352349 - DNA, 15 bp, Homo sapiens
gttagcccatagcct

SEQ ID NO: 1352350 - DNA, 15 bp, Homo sapiens
ggttagcccatagcc

SEQ ID NO: 1352351 - DNA, 15 bp, Homo sapiens
aggttagcccatagc

SEQ ID NO: 1352352 - DNA, 15 bp, Homo sapiens
gaggttagcccatag

SEQ ID NO: 1352353 - DNA, 15 bp, Homo sapiens
tgaggttagcccata

SEQ ID NO: 1352354 - DNA, 15 bp, Homo sapiens
ctgaggttagcccat

SEQ ID NO: 1352355 - DNA, 15 bp, Homo sapiens
cctgaggttagccca

SEQ ID NO: 1352356 - DNA, 15 bp, Homo sapiens
gcctgaggttagccc

SEQ ID NO: 1352357 - DNA, 15 bp, Homo sapiens
ggcctgaggttagcc

SEQ ID NO: 1352358 - DNA, 15 bp, Homo sapiens
gggcctgaggttagc

SEQ ID NO: 1352359 - DNA, 15 bp, Homo sapiens
ggggcctgaggttag

SEQ ID NO: 1352360 - DNA, 15 bp, Homo sapiens
aggggcctgaggtta

SEQ ID NO: 1352361 - DNA, 15 bp, Homo sapiens
gaggggcctgaggtt

SEQ ID NO: 1352362 - DNA, 15 bp, Homo sapiens
ggaggggcctgaggt

SEQ ID NO: 1352363 - DNA, 15 bp, Homo sapiens
tggaggggcctgagg

SEQ ID NO: 1352364 - DNA, 15 bp, Homo sapiens
ctggaggggcctgag

SEQ ID NO: 1352365 - DNA, 15 bp, Homo sapiens
gctggaggggcctga

SEQ ID NO: 1352366 - DNA, 15 bp, Homo sapiens
agctggaggggcctg

SEQ ID NO: 1352367 - DNA, 15 bp, Homo sapiens
gagctggaggggcct

SEQ ID NO: 1352368 - DNA, 15 bp, Homo sapiens
ggagctggaggggcc

SEQ ID NO: 1352369 - DNA, 15 bp, Homo sapiens
tggagctggaggggc

SEQ ID NO: 1352370 - DNA, 15 bp, Homo sapiens
ctggagctggagggg

SEQ ID NO: 1352371 - DNA, 15 bp, Homo sapiens
tctggagctggaggg

SEQ ID NO: 1352372 - DNA, 15 bp, Homo sapiens
gtctggagctggagg

SEQ ID NO: 1352373 - DNA, 15 bp, Homo sapiens
tgtctggagctggag

SEQ ID NO: 1352374 - DNA, 15 bp, Homo sapiens
gtgtctggagctgga

SEQ ID NO: 1352375 - DNA, 15 bp, Homo sapiens
agtgtctggagctgg

SEQ ID NO: 1352376 - DNA, 15 bp, Homo sapiens
gagtgtctggagctg

SEQ ID NO: 1352377 - DNA, 15 bp, Homo sapiens
agagtgtctggagct

SEQ ID NO: 1352378 - DNA, 15 bp, Homo sapiens
gagagtgtctggagc

SEQ ID NO: 1352379 - DNA, 15 bp, Homo sapiens
tgagagtgtctggag

SEQ ID NO: 1352380 - DNA, 15 bp, Homo sapiens
ctgagagtgtctgga

SEQ ID NO: 1352381 - DNA, 15 bp, Homo sapiens
tctgagagtgtctgg

SEQ ID NO: 1352382 - DNA, 15 bp, Homo sapiens
ctctgagagtgtctg

SEQ ID NO: 1352383 - DNA, 15 bp, Homo sapiens
cctctgagagtgtct

SEQ ID NO: 1352384 - DNA, 15 bp, Homo sapiens
gcctctgagagtgtc

SEQ ID NO: 1352385 - DNA, 15 bp, Homo sapiens
ggcctctgagagtgt

SEQ ID NO: 1352386 - DNA, 15 bp, Homo sapiens
gggcctctgagagtg

SEQ ID NO: 1352387 - DNA, 15 bp, Homo sapiens
agggcctctgagagt

SEQ ID NO: 1352388 - DNA, 15 bp, Homo sapiens
gagggcctctgagag

SEQ ID NO: 1352389 - DNA, 15 bp, Homo sapiens
tgagggcctctgaga

SEQ ID NO: 1352390 - DNA, 15 bp, Homo sapiens
gtgagggcctctgag

SEQ ID NO: 1352391 - DNA, 15 bp, Homo sapiens
tgtgagggcctctga

SEQ ID NO: 1352392 - DNA, 15 bp, Homo sapiens
gtgtgagggcctctg

SEQ ID NO: 1352393 - DNA, 15 bp, Homo sapiens
ggtgtgagggcctct

SEQ ID NO: 1352394 - DNA, 15 bp, Homo sapiens
gggtgtgagggcctc

SEQ ID NO: 1352395 - DNA, 15 bp, Homo sapiens
cgggtgtgagggcct

SEQ ID NO: 1352396 - DNA, 15 bp, Homo sapiens
acgggtgtgagggcc

SEQ ID NO: 1352397 - DNA, 15 bp, Homo sapiens
gacgggtgtgagggc

SEQ ID NO: 1352398 - DNA, 15 bp, Homo sapiens
agacgggtgtgaggg

SEQ ID NO: 1352399 - DNA, 15 bp, Homo sapiens
cagacgggtgtgagg

SEQ ID NO: 1352400 - DNA, 15 bp, Homo sapiens
tcagacgggtgtgag

SEQ ID NO: 1352401 - DNA, 15 bp, Homo sapiens
ctcagacgggtgtga

SEQ ID NO: 1352402 - DNA, 15 bp, Homo sapiens
cctcagacgggtgtg

SEQ ID NO: 1352403 - DNA, 15 bp, Homo sapiens
acctcagacgggtgt

SEQ ID NO: 1352404 - DNA, 15 bp, Homo sapiens
aacctcagacgggtg

SEQ ID NO: 1352405 - DNA, 15 bp, Homo sapiens
aaacctcagacgggt

SEQ ID NO: 1352406 - DNA, 15 bp, Homo sapiens
aaaacctcagacggg

SEQ ID NO: 1352407 - DNA, 15 bp, Homo sapiens
taaaacctcagacgg

SEQ ID NO: 1352408 - DNA, 15 bp, Homo sapiens
ttaaaacctcagacg

SEQ ID NO: 1352409 - DNA, 15 bp, Homo sapiens
gttaaaacctcagac

SEQ ID NO: 1352410 - DNA, 15 bp, Homo sapiens
tgttaaaacctcaga

SEQ ID NO: 1352411 - DNA, 15 bp, Homo sapiens
gtgttaaaacctcag

SEQ ID NO: 1352412 - DNA, 15 bp, Homo sapiens
ggtgttaaaacctca

SEQ ID NO: 1352413 - DNA, 15 bp, Homo sapiens
aggtgttaaaacctc

SEQ ID NO: 1352414 - DNA, 15 bp, Homo sapiens
taggtgttaaaacct

SEQ ID NO: 1352415 - DNA, 15 bp, Homo sapiens
ataggtgttaaaacc

SEQ ID NO: 1352416 - DNA, 15 bp, Homo sapiens
gataggtgttaaaac

SEQ ID NO: 1352417 - DNA, 15 bp, Homo sapiens
ggataggtgttaaaa

SEQ ID NO: 1352418 - DNA, 15 bp, Homo sapiens
aggataggtgttaaa

SEQ ID NO: 1352419 - DNA, 15 bp, Homo sapiens
caggataggtgttaa

SEQ ID NO: 1352420 - DNA, 15 bp, Homo sapiens
acaggataggtgtta

SEQ ID NO: 1352421 - DNA, 15 bp, Homo sapiens
gacaggataggtgtt

SEQ ID NO: 1352422 - DNA, 15 bp, Homo sapiens
ggacaggataggtgt

SEQ ID NO: 1352423 - DNA, 15 bp, Homo sapiens
gggacaggataggtg

SEQ ID NO: 1352424 - DNA, 15 bp, Homo sapiens
ggggacaggataggt

SEQ ID NO: 1352425 - DNA, 15 bp, Homo sapiens
tggggacaggatagg

SEQ ID NO: 1352426 - DNA, 15 bp, Homo sapiens
atggggacaggatag

SEQ ID NO: 1352427 - DNA, 15 bp, Homo sapiens
gatggggacaggata

SEQ ID NO: 1352428 - DNA, 15 bp, Homo sapiens
ggatggggacaggat

SEQ ID NO: 1352429 - DNA, 15 bp, Homo sapiens
tggatggggacagga

SEQ ID NO: 1352430 - DNA, 15 bp, Homo sapiens
ttggatggggacagg

SEQ ID NO: 1352431 - DNA, 15 bp, Homo sapiens
attggatggggacag

SEQ ID NO: 1352432 - DNA, 15 bp, Homo sapiens
aattggatggggaca

SEQ ID NO: 1352433 - DNA, 15 bp, Homo sapiens
aaattggatggggac

SEQ ID NO: 1352434 - DNA, 15 bp, Homo sapiens
aaaattggatgggga

SEQ ID NO: 1352435 - DNA, 15 bp, Homo sapiens
caaaattggatgggg

SEQ ID NO: 1352436 - DNA, 15 bp, Homo sapiens
tcaaaattggatggg

SEQ ID NO: 1352437 - DNA, 15 bp, Homo sapiens
gtcaaaattggatgg

SEQ ID NO: 1352438 - DNA, 15 bp, Homo sapiens
agtcaaaattggatg

SEQ ID NO: 1352439 - DNA, 15 bp, Homo sapiens
aagtcaaaattggat

SEQ ID NO: 1352440 - DNA, 15 bp, Homo sapiens
aaagtcaaaattgga

SEQ ID NO: 1352441 - DNA, 15 bp, Homo sapiens
caaagtcaaaattgg

SEQ ID NO: 1352442 - DNA, 15 bp, Homo sapiens
acaaagtcaaaattg

SEQ ID NO: 1352443 - DNA, 15 bp, Homo sapiens
gacaaagtcaaaatt

SEQ ID NO: 1352444 - DNA, 15 bp, Homo sapiens
ggacaaagtcaaaat

SEQ ID NO: 1352445 - DNA, 15 bp, Homo sapiens
gggacaaagtcaaaa

SEQ ID NO: 1352446 - DNA, 15 bp, Homo sapiens
cgggacaaagtcaaa

SEQ ID NO: 1352447 - DNA, 15 bp, Homo sapiens
tcgggacaaagtcaa

SEQ ID NO: 1352448 - DNA, 15 bp, Homo sapiens
gtcgggacaaagtca

SEQ ID NO: 1352449 - DNA, 15 bp, Homo sapiens
ggtcgggacaaagtc

SEQ ID NO: 1352450 - DNA, 15 bp, Homo sapiens
gggtcgggacaaagt

SEQ ID NO: 1352451 - DNA, 15 bp, Homo sapiens
ggggtcgggacaaag

SEQ ID NO: 1352452 - DNA, 15 bp, Homo sapiens
aggggtcgggacaaa

SEQ ID NO: 1352453 - DNA, 15 bp, Homo sapiens
gaggggtcgggacaa

SEQ ID NO: 1352454 - DNA, 15 bp, Homo sapiens
ggaggggtcgggaca

SEQ ID NO: 1352455 - DNA, 15 bp, Homo sapiens
gggaggggtcgggac

SEQ ID NO: 1352456 - DNA, 15 bp, Homo sapiens
tgggaggggtcggga

SEQ ID NO: 1352457 - DNA, 15 bp, Homo sapiens
atgggaggggtcggg

SEQ ID NO: 1352458 - DNA, 15 bp, Homo sapiens
aatgggaggggtcgg

SEQ ID NO: 1352459 - DNA, 15 bp, Homo sapiens
caatgggaggggtcg

SEQ ID NO: 1352460 - DNA, 15 bp, Homo sapiens
gcaatgggaggggtc

SEQ ID NO: 1352461 - DNA, 15 bp, Homo sapiens
tgcaatgggaggggt

SEQ ID NO: 1352462 - DNA, 15 bp, Homo sapiens
ttgcaatgggagggg

SEQ ID NO: 1352463 - DNA, 15 bp, Homo sapiens
tttgcaatgggaggg

SEQ ID NO: 1352464 - DNA, 15 bp, Homo sapiens
gtttgcaatgggagg

SEQ ID NO: 1352465 - DNA, 15 bp, Homo sapiens
tgtttgcaatgggag

SEQ ID NO: 1352466 - DNA, 15 bp, Homo sapiens
atgtttgcaatggga

SEQ ID NO: 1352467 - DNA, 15 bp, Homo sapiens
tatgtttgcaatggg

SEQ ID NO: 1352468 - DNA, 15 bp, Homo sapiens
atatgtttgcaatgg

SEQ ID NO: 1352469 - DNA, 15 bp, Homo sapiens
gatatgtttgcaatg

SEQ ID NO: 1352470 - DNA, 15 bp, Homo sapiens
tgatatgtttgcaat

SEQ ID NO: 1352471 - DNA, 15 bp, Homo sapiens
ttgatatgtttgcaa

SEQ ID NO: 1352472 - DNA, 15 bp, Homo sapiens
tttgatatgtttgca

SEQ ID NO: 1352473 - DNA, 15 bp, Homo sapiens
ttttgatatgtttgc

SEQ ID NO: 1352474 - DNA, 15 bp, Homo sapiens
gttttgatatgtttg

SEQ ID NO: 1352475 - DNA, 15 bp, Homo sapiens
tgttttgatatgttt

SEQ ID NO: 1352476 - DNA, 15 bp, Homo sapiens
gtgttttgatatgtt

SEQ ID NO: 1352477 - DNA, 15 bp, Homo sapiens
tgtgttttgatatgt

SEQ ID NO: 1352478 - DNA, 15 bp, Homo sapiens
gtgtgttttgatatg

SEQ ID NO: 1352479 - DNA, 15 bp, Homo sapiens
ggtgtgttttgatat

SEQ ID NO: 1352480 - DNA, 15 bp, Homo sapiens
gggtgtgttttgata

SEQ ID NO: 1352481 - DNA, 15 bp, Homo sapiens
tgggtgtgttttgat

SEQ ID NO: 1352482 - DNA, 15 bp, Homo sapiens
gtgggtgtgttttga

SEQ ID NO: 1352483 - DNA, 15 bp, Homo sapiens
tgtgggtgtgttttg

SEQ ID NO: 1352484 - DNA, 15 bp, Homo sapiens
atgtgggtgtgtttt

SEQ ID NO: 1352485 - DNA, 15 bp, Homo sapiens
gatgtgggtgtgttt

SEQ ID NO: 1352486 - DNA, 15 bp, Homo sapiens
ggatgtgggtgtgtt

SEQ ID NO: 1352487 - DNA, 15 bp, Homo sapiens
gggatgtgggtgtgt

SEQ ID NO: 1352488 - DNA, 15 bp, Homo sapiens
cgggatgtgggtgtg

SEQ ID NO: 1352489 - DNA, 15 bp, Homo sapiens
tcgggatgtgggtgt

SEQ ID NO: 1352490 - DNA, 15 bp, Homo sapiens
ttcgggatgtgggtg

SEQ ID NO: 1352491 - DNA, 15 bp, Homo sapiens
attcgggatgtgggt

SEQ ID NO: 1352492 - DNA, 15 bp, Homo sapiens
cattcgggatgtggg

SEQ ID NO: 1352493 - DNA, 15 bp, Homo sapiens
tcattcgggatgtgg

SEQ ID NO: 1352494 - DNA, 15 bp, Homo sapiens
ctcattcgggatgtg

SEQ ID NO: 1352495 - DNA, 15 bp, Homo sapiens
cctcattcgggatgt

SEQ ID NO: 1352496 - DNA, 15 bp, Homo sapiens
acctcattcgggatg

SEQ ID NO: 1352497 - DNA, 15 bp, Homo sapiens
tacctcattcgggat

SEQ ID NO: 1352498 - DNA, 15 bp, Homo sapiens
atacctcattcggga

SEQ ID NO: 1352499 - DNA, 15 bp, Homo sapiens
gatacctcattcggg

SEQ ID NO: 1352500 - DNA, 15 bp, Homo sapiens
agatacctcattcgg

SEQ ID NO: 1352501 - DNA, 15 bp, Homo sapiens
gagatacctcattcg

SEQ ID NO: 1352502 - DNA, 15 bp, Homo sapiens
agagatacctcattc

SEQ ID NO: 1352503 - DNA, 15 bp, Homo sapiens
aagagatacctcatt

SEQ ID NO: 1352504 - DNA, 15 bp, Homo sapiens
aaagagatacctcat

SEQ ID NO: 1352505 - DNA, 15 bp, Homo sapiens
aaaagagatacctca

SEQ ID NO: 1352506 - DNA, 15 bp, Homo sapiens
aaaaagagatacctc

SEQ ID NO: 1352507 - DNA, 15 bp, Homo sapiens
aaaaaagagatacct

SEQ ID NO: 1352508 - DNA, 15 bp, Homo sapiens
taaaaaagagatacc

SEQ ID NO: 1352509 - DNA, 15 bp, Homo sapiens
ctaaaaaagagatac

SEQ ID NO: 1352510 - DNA, 15 bp, Homo sapiens
gctaaaaaagagata

SEQ ID NO: 1352511 - DNA, 15 bp, Homo sapiens
ggctaaaaaagagat

SEQ ID NO: 1352512 - DNA, 15 bp, Homo sapiens
tggctaaaaaagaga

SEQ ID NO: 1352513 - DNA, 15 bp, Homo sapiens
gtggctaaaaaagag

SEQ ID NO: 1352514 - DNA, 15 bp, Homo sapiens
ggtggctaaaaaaga

SEQ ID NO: 1352515 - DNA, 15 bp, Homo sapiens
gggtggctaaaaaag

SEQ ID NO: 1352516 - DNA, 15 bp, Homo sapiens
tgggtggctaaaaaa

SEQ ID NO: 1352517 - DNA, 15 bp, Homo sapiens
gtgggtggctaaaaa

SEQ ID NO: 1352518 - DNA, 15 bp, Homo sapiens
tgtgggtggctaaaa

SEQ ID NO: 1352519 - DNA, 15 bp, Homo sapiens
gtgtgggtggctaaa

SEQ ID NO: 1352520 - DNA, 15 bp, Homo sapiens
agtgtgggtggctaa

SEQ ID NO: 1352521 - DNA, 15 bp, Homo sapiens
aagtgtgggtggcta

SEQ ID NO: 1352522 - DNA, 15 bp, Homo sapiens
gaagtgtgggtggct

SEQ ID NO: 1352523 - DNA, 15 bp, Homo sapiens
agaagtgtgggtggc

SEQ ID NO: 1352524 - DNA, 15 bp, Homo sapiens
aagaagtgtgggtgg

SEQ ID NO: 1352525 - DNA, 15 bp, Homo sapiens
caagaagtgtgggtg

SEQ ID NO: 1352526 - DNA, 15 bp, Homo sapiens
tcaagaagtgtgggt

SEQ ID NO: 1352527 - DNA, 15 bp, Homo sapiens
ttcaagaagtgtggg

SEQ ID NO: 1352528 - DNA, 15 bp, Homo sapiens
tttcaagaagtgtgg

SEQ ID NO: 1352529 - DNA, 15 bp, Homo sapiens
ctttcaagaagtgtg

SEQ ID NO: 1352530 - DNA, 15 bp, Homo sapiens
tctttcaagaagtgt

SEQ ID NO: 1352531 - DNA, 15 bp, Homo sapiens
atctttcaagaagtg

SEQ ID NO: 1352532 - DNA, 15 bp, Homo sapiens
aatctttcaagaagt

SEQ ID NO: 1352533 - DNA, 15 bp, Homo sapiens
aaatctttcaagaag

SEQ ID NO: 1352534 - DNA, 15 bp, Homo sapiens
taaatctttcaagaa

SEQ ID NO: 1352535 - DNA, 15 bp, Homo sapiens
gtaaatctttcaaga

SEQ ID NO: 1352536 - DNA, 15 bp, Homo sapiens
agtaaatctttcaag

SEQ ID NO: 1352537 - DNA, 15 bp, Homo sapiens
aagtaaatctttcaa

SEQ ID NO: 1352538 - DNA, 15 bp, Homo sapiens
taagtaaatctttca

SEQ ID NO: 1352539 - DNA, 15 bp, Homo sapiens
ttaagtaaatctttc

SEQ ID NO: 1352540 - DNA, 15 bp, Homo sapiens
tttaagtaaatcttt

SEQ ID NO: 1352541 - DNA, 15 bp, Homo sapiens
atttaagtaaatctt

SEQ ID NO: 1352542 - DNA, 15 bp, Homo sapiens
tatttaagtaaatct

SEQ ID NO: 1352543 - DNA, 15 bp, Homo sapiens
atatttaagtaaatc

SEQ ID NO: 1352544 - DNA, 15 bp, Homo sapiens
aatatttaagtaaat

SEQ ID NO: 1352545 - DNA, 15 bp, Homo sapiens
taatatttaagtaaa

SEQ ID NO: 1352546 - DNA, 15 bp, Homo sapiens
ttaatatttaagtaa

SEQ ID NO: 1352547 - DNA, 15 bp, Homo sapiens
tttaatatttaagta

SEQ ID NO: 1352548 - DNA, 15 bp, Homo sapiens
atttaatatttaagt

SEQ ID NO: 1352549 - DNA, 15 bp, Homo sapiens
tatttaatatttaag

SEQ ID NO: 1352550 - DNA, 15 bp, Homo sapiens
atatttaatatttaa

SEQ ID NO: 1352551 - DNA, 15 bp, Homo sapiens
tatatttaatattta

SEQ ID NO: 1352552 - DNA, 15 bp, Homo sapiens
ttatatttaatattt

SEQ ID NO: 1352553 - DNA, 15 bp, Homo sapiens
gttatatttaatatt

SEQ ID NO: 1352554 - DNA, 15 bp, Homo sapiens
agttatatttaatat

SEQ ID NO: 1352555 - DNA, 15 bp, Homo sapiens
tagttatatttaata

SEQ ID NO: 1352556 - DNA, 15 bp, Homo sapiens
atagttatatttaat

SEQ ID NO: 1352557 - DNA, 15 bp, Homo sapiens
catagttatatttaa

SEQ ID NO: 1352558 - DNA, 15 bp, Homo sapiens
gcatagttatattta

SEQ ID NO: 1352559 - DNA, 15 bp, Homo sapiens
agcatagttatattt

SEQ ID NO: 1352560 - DNA, 15 bp, Homo sapiens
aagcatagttatatt

SEQ ID NO: 1352561 - DNA, 15 bp, Homo sapiens
aaagcatagttatat

SEQ ID NO: 1352562 - DNA, 15 bp, Homo sapiens
caaagcatagttata

SEQ ID NO: 1352563 - DNA, 15 bp, Homo sapiens
ccaaagcatagttat

SEQ ID NO: 1352564 - DNA, 15 bp, Homo sapiens
tccaaagcatagtta

SEQ ID NO: 1352565 - DNA, 15 bp, Homo sapiens
ttccaaagcatagtt

SEQ ID NO: 1352566 - DNA, 15 bp, Homo sapiens
tttccaaagcatagt

SEQ ID NO: 1352567 - DNA, 15 bp, Homo sapiens
atttccaaagcatag

SEQ ID NO: 1352568 - DNA, 15 bp, Homo sapiens
aatttccaaagcata

SEQ ID NO: 1352569 - DNA, 15 bp, Homo sapiens
taatttccaaagcat

SEQ ID NO: 1352570 - DNA, 15 bp, Homo sapiens
ttaatttccaaagca

SEQ ID NO: 1352571 - DNA, 15 bp, Homo sapiens
cttaatttccaaagc

SEQ ID NO: 1352572 - DNA, 15 bp, Homo sapiens
gcttaatttccaaag

SEQ ID NO: 1352573 - DNA, 15 bp, Homo sapiens
tgcttaatttccaaa

SEQ ID NO: 1352574 - DNA, 15 bp, Homo sapiens
ttgcttaatttccaa

SEQ ID NO: 1352575 - DNA, 15 bp, Homo sapiens
attgcttaatttcca

SEQ ID NO: 1352576 - DNA, 15 bp, Homo sapiens
gattgcttaatttcc

SEQ ID NO: 1352577 - DNA, 15 bp, Homo sapiens
tgattgcttaatttc

SEQ ID NO: 1352578 - DNA, 15 bp, Homo sapiens
atgattgcttaattt

SEQ ID NO: 1352579 - DNA, 15 bp, Homo sapiens
tatgattgcttaatt

SEQ ID NO: 1352580 - DNA, 15 bp, Homo sapiens
atatgattgcttaat

SEQ ID NO: 1352581 - DNA, 15 bp, Homo sapiens
catatgattgcttaa

SEQ ID NO: 1352582 - DNA, 15 bp, Homo sapiens
ccatatgattgctta

SEQ ID NO: 1352583 - DNA, 15 bp, Homo sapiens
gccatatgattgctt

SEQ ID NO: 1352584 - DNA, 15 bp, Homo sapiens
agccatatgattgct

SEQ ID NO: 1352585 - DNA, 15 bp, Homo sapiens
aagccatatgattgc

SEQ ID NO: 1352586 - DNA, 15 bp, Homo sapiens
caagccatatgattg

SEQ ID NO: 1352587 - DNA, 15 bp, Homo sapiens
ccaagccatatgatt

SEQ ID NO: 1352588 - DNA, 15 bp, Homo sapiens
accaagccatatgat

SEQ ID NO: 1352589 - DNA, 15 bp, Homo sapiens
aaccaagccatatga

SEQ ID NO: 1352590 - DNA, 15 bp, Homo sapiens
aaaccaagccatatg

SEQ ID NO: 1352591 - DNA, 15 bp, Homo sapiens
taaaccaagccatat

SEQ ID NO: 1352592 - DNA, 15 bp, Homo sapiens
gtaaaccaagccata

SEQ ID NO: 1352593 - DNA, 15 bp, Homo sapiens
ggtaaaccaagccat

SEQ ID NO: 1352594 - DNA, 15 bp, Homo sapiens
tggtaaaccaagcca

SEQ ID NO: 1352595 - DNA, 15 bp, Homo sapiens
ctggtaaaccaagcc

SEQ ID NO: 1352596 - DNA, 15 bp, Homo sapiens
actggtaaaccaagc

SEQ ID NO: 1352597 - DNA, 15 bp, Homo sapiens
cactggtaaaccaag

SEQ ID NO: 1352598 - DNA, 15 bp, Homo sapiens
ccactggtaaaccaa

SEQ ID NO: 1352599 - DNA, 15 bp, Homo sapiens
gccactggtaaacca

SEQ ID NO: 1352600 - DNA, 15 bp, Homo sapiens
agccactggtaaacc

SEQ ID NO: 1352601 - DNA, 15 bp, Homo sapiens
tagccactggtaaac

SEQ ID NO: 1352602 - DNA, 15 bp, Homo sapiens
gtagccactggtaaa

SEQ ID NO: 1352603 - DNA, 15 bp, Homo sapiens
agtagccactggtaa

SEQ ID NO: 1352604 - DNA, 15 bp, Homo sapiens
tagtagccactggta

SEQ ID NO: 1352605 - DNA, 15 bp, Homo sapiens
gtagtagccactggt

SEQ ID NO: 1352606 - DNA, 15 bp, Homo sapiens
agtagtagccactgg

SEQ ID NO: 1352607 - DNA, 15 bp, Homo sapiens
aagtagtagccactg

SEQ ID NO: 1352608 - DNA, 15 bp, Homo sapiens
gaagtagtagccact

SEQ ID NO: 1352609 - DNA, 15 bp, Homo sapiens
agaagtagtagccac

SEQ ID NO: 1352610 - DNA, 15 bp, Homo sapiens
cagaagtagtagcca

SEQ ID NO: 1352611 - DNA, 15 bp, Homo sapiens
tcagaagtagtagcc

SEQ ID NO: 1352612 - DNA, 15 bp, Homo sapiens
ctcagaagtagtagc

SEQ ID NO: 1352613 - DNA, 15 bp, Homo sapiens
cctcagaagtagtag

SEQ ID NO: 1352614 - DNA, 15 bp, Homo sapiens
tcctcagaagtagta

SEQ ID NO: 1352615 - DNA, 15 bp, Homo sapiens
ttcctcagaagtagt

SEQ ID NO: 1352616 - DNA, 15 bp, Homo sapiens
attcctcagaagtag

SEQ ID NO: 1352617 - DNA, 15 bp, Homo sapiens
cattcctcagaagta

SEQ ID NO: 1352618 - DNA, 15 bp, Homo sapiens
gcattcctcagaagt

SEQ ID NO: 1352619 - DNA, 15 bp, Homo sapiens
agcattcctcagaag

SEQ ID NO: 1352620 - DNA, 15 bp, Homo sapiens
aagcattcctcagaa

SEQ ID NO: 1352621 - DNA, 15 bp, Homo sapiens
caagcattcctcaga

SEQ ID NO: 1352622 - DNA, 15 bp, Homo sapiens
ccaagcattcctcag

SEQ ID NO: 1352623 - DNA, 15 bp, Homo sapiens
cccaagcattcctca

SEQ ID NO: 1352624 - DNA, 15 bp, Homo sapiens
ccccaagcattcctc

SEQ ID NO: 1352625 - DNA, 15 bp, Homo sapiens
tccccaagcattcct

SEQ ID NO: 1352626 - DNA, 15 bp, Homo sapiens
ttccccaagcattcc

SEQ ID NO: 1352627 - DNA, 15 bp, Homo sapiens
tttccccaagcattc

SEQ ID NO: 1352628 - DNA, 15 bp, Homo sapiens
ttttccccaagcatt

SEQ ID NO: 1352629 - DNA, 15 bp, Homo sapiens
tttttccccaagcat

SEQ ID NO: 1352630 - DNA, 15 bp, Homo sapiens
gctttttttccccaa

SEQ ID NO: 1352631 - DNA, 15 bp, Homo sapiens
tgctttttttcccca

SEQ ID NO: 1352632 - DNA, 15 bp, Homo sapiens
atgctttttttcccc

SEQ ID NO: 1352633 - DNA, 15 bp, Homo sapiens
aatgctttttttccc

SEQ ID NO: 1352634 - DNA, 15 bp, Homo sapiens
gaatgctttttttcc

SEQ ID NO: 1352635 - DNA, 15 bp, Homo sapiens
tgaatgctttttttc

SEQ ID NO: 1352636 - DNA, 15 bp, Homo sapiens
ctgaatgcttttttt

SEQ ID NO: 1352637 - DNA, 15 bp, Homo sapiens
cctgaatgctttttt

SEQ ID NO: 1352638 - DNA, 15 bp, Homo sapiens
tcctgaatgcttttt

SEQ ID NO: 1352639 - DNA, 15 bp, Homo sapiens
ctcctgaatgctttt

SEQ ID NO: 1352640 - DNA, 15 bp, Homo sapiens
actcctgaatgcttt

SEQ ID NO: 1352641 - DNA, 15 bp, Homo sapiens
aactcctgaatgctt

SEQ ID NO: 1352642 - DNA, 15 bp, Homo sapiens
caactcctgaatgct

SEQ ID NO: 1352643 - DNA, 15 bp, Homo sapiens
tcaactcctgaatgc

SEQ ID NO: 1352644 - DNA, 15 bp, Homo sapiens
gtcaactcctgaatg

SEQ ID NO: 1352645 - DNA, 15 bp, Homo sapiens
ggtcaactcctgaat

SEQ ID NO: 1352646 - DNA, 15 bp, Homo sapiens
gggtcaactcctgaa

SEQ ID NO: 1352647 - DNA, 15 bp, Homo sapiens
ggggtcaactcctga

SEQ ID NO: 1352648 - DNA, 15 bp, Homo sapiens
aggggtcaactcctg

SEQ ID NO: 1352649 - DNA, 15 bp, Homo sapiens
caggggtcaactcct

SEQ ID NO: 1352650 - DNA, 15 bp, Homo sapiens
tcaggggtcaactcc

SEQ ID NO: 1352651 - DNA, 15 bp, Homo sapiens
ttcaggggtcaactc

SEQ ID NO: 1352652 - DNA, 15 bp, Homo sapiens
tttcaggggtcaact

SEQ ID NO: 1352653 - DNA, 15 bp, Homo sapiens
ttttcaggggtcaac

SEQ ID NO: 1352654 - DNA, 15 bp, Homo sapiens
tttttcaggggtcaa

SEQ ID NO: 1352655 - DNA, 15 bp, Homo sapiens
atttttcaggggtca

SEQ ID NO: 1352656 - DNA, 15 bp, Homo sapiens
tatttttcaggggtc

SEQ ID NO: 1352657 - DNA, 15 bp, Homo sapiens
atatttttcaggggt

SEQ ID NO: 1352658 - DNA, 15 bp, Homo sapiens
catatttttcagggg

SEQ ID NO: 1352659 - DNA, 15 bp, Homo sapiens
ccatatttttcaggg

SEQ ID NO: 1352660 - DNA, 15 bp, Homo sapiens
cccatatttttcagg

SEQ ID NO: 1352661 - DNA, 15 bp, Homo sapiens
acccatatttttcag

SEQ ID NO: 1352662 - DNA, 15 bp, Homo sapiens
aacccatatttttca

SEQ ID NO: 1352663 - DNA, 15 bp, Homo sapiens
aaacccatatttttc

SEQ ID NO: 1352664 - DNA, 15 bp, Homo sapiens
caaacccatattttt

SEQ ID NO: 1352665 - DNA, 15 bp, Homo sapiens
tcaaacccatatttt

SEQ ID NO: 1352666 - DNA, 15 bp, Homo sapiens
ttcaaacccatattt

SEQ ID NO: 1352667 - DNA, 15 bp, Homo sapiens
attcaaacccatatt

SEQ ID NO: 1352668 - DNA, 15 bp, Homo sapiens
cattcaaacccatat

SEQ ID NO: 1352669 - DNA, 15 bp, Homo sapiens
gcattcaaacccata

SEQ ID NO: 1352670 - DNA, 15 bp, Homo sapiens
ggcattcaaacccat

SEQ ID NO: 1352671 - DNA, 15 bp, Homo sapiens
gggcattcaaaccca

SEQ ID NO: 1352672 - DNA, 15 bp, Homo sapiens
tgggcattcaaaccc

SEQ ID NO: 1352673 - DNA, 15 bp, Homo sapiens
ctgggcattcaaacc

SEQ ID NO: 1352674 - DNA, 15 bp, Homo sapiens
cctgggcattcaaac

SEQ ID NO: 1352675 - DNA, 15 bp, Homo sapiens
acctgggcattcaaa

SEQ ID NO: 1352676 - DNA, 15 bp, Homo sapiens
gacctgggcattcaa

SEQ ID NO: 1352677 - DNA, 15 bp, Homo sapiens
ggacctgggcattca

SEQ ID NO: 1352678 - DNA, 15 bp, Homo sapiens
tggacctgggcattc

SEQ ID NO: 1352679 - DNA, 15 bp, Homo sapiens
gtggacctgggcatt

SEQ ID NO: 1352680 - DNA, 15 bp, Homo sapiens
agtggacctgggcat

SEQ ID NO: 1352681 - DNA, 15 bp, Homo sapiens
aagtggacctgggca

SEQ ID NO: 1352682 - DNA, 15 bp, Homo sapiens
taagtggacctgggc

SEQ ID NO: 1352683 - DNA, 15 bp, Homo sapiens
gtaagtggacctggg

SEQ ID NO: 1352684 - DNA, 15 bp, Homo sapiens
tgtaagtggacctgg

SEQ ID NO: 1352685 - DNA, 15 bp, Homo sapiens
gtgtaagtggacctg

SEQ ID NO: 1352686 - DNA, 15 bp, Homo sapiens
tgtgtaagtggacct

SEQ ID NO: 1352687 - DNA, 15 bp, Homo sapiens
atgtgtaagtggacc

SEQ ID NO: 1352688 - DNA, 15 bp, Homo sapiens
catgtgtaagtggac

SEQ ID NO: 1352689 - DNA, 15 bp, Homo sapiens
ccatgtgtaagtgga

SEQ ID NO: 1352690 - DNA, 15 bp, Homo sapiens
tccatgtgtaagtgg

SEQ ID NO: 1352691 - DNA, 15 bp, Homo sapiens
atccatgtgtaagtg

SEQ ID NO: 1352692 - DNA, 15 bp, Homo sapiens
aatccatgtgtaagt

SEQ ID NO: 1352693 - DNA, 15 bp, Homo sapiens
aaatccatgtgtaag

SEQ ID NO: 1352694 - DNA, 15 bp, Homo sapiens
aaaatccatgtgtaa

SEQ ID NO: 1352695 - DNA, 15 bp, Homo sapiens
aaaaatccatgtgta

SEQ ID NO: 1352696 - DNA, 15 bp, Homo sapiens
aaaaaatccatgtgt

SEQ ID NO: 1352697 - DNA, 15 bp, Homo sapiens
aaaaaaatccatgtg

SEQ ID NO: 1352698 - DNA, 15 bp, Homo sapiens
caaaaaaatccatgt

SEQ ID NO: 1352699 - DNA, 15 bp, Homo sapiens
acaaaaaaatccatg

SEQ ID NO: 1352700 - DNA, 15 bp, Homo sapiens
aacaaaaaaatccat

SEQ ID NO: 1352701 - DNA, 15 bp, Homo sapiens
gaacaaaaaaatcca

SEQ ID NO: 1352702 - DNA, 15 bp, Homo sapiens
cgaacaaaaaaatcc

SEQ ID NO: 1352703 - DNA, 15 bp, Homo sapiens
acgaacaaaaaaatc

SEQ ID NO: 1352704 - DNA, 15 bp, Homo sapiens
aacgaacaaaaaaat

SEQ ID NO: 1352705 - DNA, 15 bp, Homo sapiens
aaacgaacaaaaaaa

SEQ ID NO: 1352706 - DNA, 15 bp, Homo sapiens
aaaacgaacaaaaaa

SEQ ID NO: 1352707 - DNA, 15 bp, Homo sapiens
aaaaacgaacaaaaa

SEQ ID NO: 1352708 - DNA, 15 bp, Homo sapiens
aaaaaacgaacaaaa

SEQ ID NO: 1352709 - DNA, 15 bp, Homo sapiens
caaaaaacgaacaaa

SEQ ID NO: 1352710 - DNA, 15 bp, Homo sapiens
tcaaaaaacgaacaa

SEQ ID NO: 1352711 - DNA, 15 bp, Homo sapiens
ctcaaaaaacgaaca

SEQ ID NO: 1352712 - DNA, 15 bp, Homo sapiens
tctcaaaaaacgaac

SEQ ID NO: 1352713 - DNA, 15 bp, Homo sapiens
gtctcaaaaaacgaa

SEQ ID NO: 1352714 - DNA, 15 bp, Homo sapiens
cgtctcaaaaaacga

SEQ ID NO: 1352715 - DNA, 15 bp, Homo sapiens
ccgtctcaaaaaacg

SEQ ID NO: 1352716 - DNA, 15 bp, Homo sapiens
tccgtctcaaaaaac

SEQ ID NO: 1352717 - DNA, 15 bp, Homo sapiens
cccagcctgggtgac

SEQ ID NO: 1352718 - DNA, 15 bp, Homo sapiens
gcccagcctgggtga

SEQ ID NO: 1352719 - DNA, 15 bp, Homo sapiens
tgcccagcctgggtg

SEQ ID NO: 1352720 - DNA, 15 bp, Homo sapiens
ttgcccagcctgggt

SEQ ID NO: 1352721 - DNA, 15 bp, Homo sapiens
attgcccagcctggg

SEQ ID NO: 1352722 - DNA, 15 bp, Homo sapiens
gattgcccagcctgg

SEQ ID NO: 1352723 - DNA, 15 bp, Homo sapiens
cgattgcccagcctg

SEQ ID NO: 1352724 - DNA, 15 bp, Homo sapiens
acgattgcccagcct

SEQ ID NO: 1352725 - DNA, 15 bp, Homo sapiens
cacgattgcccagcc

SEQ ID NO: 1352726 - DNA, 15 bp, Homo sapiens
gcacgattgcccagc

SEQ ID NO: 1352727 - DNA, 15 bp, Homo sapiens
tgcacgattgcccag

SEQ ID NO: 1352728 - DNA, 15 bp, Homo sapiens
ttgcacgattgccca

SEQ ID NO: 1352729 - DNA, 15 bp, Homo sapiens
attgcacgattgccc

SEQ ID NO: 1352730 - DNA, 15 bp, Homo sapiens
cattgcacgattgcc

SEQ ID NO: 1352731 - DNA, 15 bp, Homo sapiens
ccattgcacgattgc

SEQ ID NO: 1352732 - DNA, 15 bp, Homo sapiens
gccattgcacgattg

SEQ ID NO: 1352733 - DNA, 15 bp, Homo sapiens
cgccattgcacgatt

SEQ ID NO: 1352734 - DNA, 15 bp, Homo sapiens
acgccattgcacgat

SEQ ID NO: 1352735 - DNA, 15 bp, Homo sapiens
cacgccattgcacga

SEQ ID NO: 1352736 - DNA, 15 bp, Homo sapiens
tcacgccattgcacg

SEQ ID NO: 1352737 - DNA, 15 bp, Homo sapiens
agttgcagtgagccg

SEQ ID NO: 1352738 - DNA, 15 bp, Homo sapiens
tcttgaacccaggag

SEQ ID NO: 1352739 - DNA, 15 bp, Homo sapiens
ctcttgaacccagga

SEQ ID NO: 1352740 - DNA, 15 bp, Homo sapiens
tctcttgaacccagg

SEQ ID NO: 1352741 - DNA, 15 bp, Homo sapiens
atctcttgaacccag

SEQ ID NO: 1352742 - DNA, 15 bp, Homo sapiens
aatctcttgaaccca

SEQ ID NO: 1352743 - DNA, 15 bp, Homo sapiens
aaatctcttgaaccc

SEQ ID NO: 1352744 - DNA, 15 bp, Homo sapiens
aaaatctcttgaacc

SEQ ID NO: 1352745 - DNA, 15 bp, Homo sapiens
gaaaatctcttgaac

SEQ ID NO: 1352746 - DNA, 15 bp, Homo sapiens
ggaaaatctcttgaa

SEQ ID NO: 1352747 - DNA, 15 bp, Homo sapiens
aggaaaatctcttga

SEQ ID NO: 1352748 - DNA, 15 bp, Homo sapiens
aaggaaaatctcttg

SEQ ID NO: 1352749 - DNA, 15 bp, Homo sapiens
gaaggaaaatctctt

SEQ ID NO: 1352750 - DNA, 15 bp, Homo sapiens
ggaaggaaaatctct

SEQ ID NO: 1352751 - DNA, 15 bp, Homo sapiens
aggaaggaaaatctc

SEQ ID NO: 1352752 - DNA, 15 bp, Homo sapiens
gaggaaggaaaatct

SEQ ID NO: 1352753 - DNA, 15 bp, Homo sapiens
tgaggaaggaaaatc

SEQ ID NO: 1352754 - DNA, 15 bp, Homo sapiens
ctgaggaaggaaaat

SEQ ID NO: 1352755 - DNA, 15 bp, Homo sapiens
gctgaggaaggaaaa

SEQ ID NO: 1352756 - DNA, 15 bp, Homo sapiens
ggctgaggaaggaaa

SEQ ID NO: 1352757 - DNA, 15 bp, Homo sapiens
aggctgaggaaggaa

SEQ ID NO: 1352758 - DNA, 15 bp, Homo sapiens
aggaggctgaggaag

SEQ ID NO: 1352759 - DNA, 15 bp, Homo sapiens
caggaggctgaggaa

SEQ ID NO: 1352760 - DNA, 15 bp, Homo sapiens
tcaggaggctgagga

SEQ ID NO: 1352761 - DNA, 15 bp, Homo sapiens
ggcagccgggcatgg

SEQ ID NO: 1352762 - DNA, 15 bp, Homo sapiens
aggcagccgggcatg

SEQ ID NO: 1352763 - DNA, 15 bp, Homo sapiens
caggcagccgggcat

SEQ ID NO: 1352764 - DNA, 15 bp, Homo sapiens
ccaggcagccgggca

SEQ ID NO: 1352765 - DNA, 15 bp, Homo sapiens
gccaggcagccgggc

SEQ ID NO: 1352766 - DNA, 15 bp, Homo sapiens
agccaggcagccggg

SEQ ID NO: 1352767 - DNA, 15 bp, Homo sapiens
tagccaggcagccgg

SEQ ID NO: 1352768 - DNA, 15 bp, Homo sapiens
ttagccaggcagccg

SEQ ID NO: 1352769 - DNA, 15 bp, Homo sapiens
attagccaggcagcc

SEQ ID NO: 1352770 - DNA, 15 bp, Homo sapiens
aattagccaggcagc

SEQ ID NO: 1352771 - DNA, 15 bp, Homo sapiens
aaattagccaggcag

SEQ ID NO: 1352772 - DNA, 15 bp, Homo sapiens
gcaaaaattagccag

SEQ ID NO: 1352773 - DNA, 15 bp, Homo sapiens
tgcaaaaattagcca

SEQ ID NO: 1352774 - DNA, 15 bp, Homo sapiens
atgcaaaaattagcc

SEQ ID NO: 1352775 - DNA, 15 bp, Homo sapiens
aatgcaaaaattagc

SEQ ID NO: 1352776 - DNA, 15 bp, Homo sapiens
aaatgcaaaaattag

SEQ ID NO: 1352777 - DNA, 15 bp, Homo sapiens
aaaatgcaaaaatta

SEQ ID NO: 1352778 - DNA, 15 bp, Homo sapiens
aaaaatgcaaaaatt

SEQ ID NO: 1352779 - DNA, 15 bp, Homo sapiens
taaaaatgcaaaaat

SEQ ID NO: 1352780 - DNA, 15 bp, Homo sapiens
ctaaaaatgcaaaaa

SEQ ID NO: 1352781 - DNA, 15 bp, Homo sapiens
ctactaaaaatgcaa

SEQ ID NO: 1352782 - DNA, 15 bp, Homo sapiens
tctactaaaaatgca

SEQ ID NO: 1352783 - DNA, 15 bp, Homo sapiens
ctctactaaaaatgc

SEQ ID NO: 1352784 - DNA, 15 bp, Homo sapiens
tgaaaccccctctct

SEQ ID NO: 1352785 - DNA, 15 bp, Homo sapiens
gtgaaaccccctctc

SEQ ID NO: 1352786 - DNA, 15 bp, Homo sapiens
ggtgaaaccccctct

SEQ ID NO: 1352787 - DNA, 15 bp, Homo sapiens
tggtgaaaccccctc

SEQ ID NO: 1352788 - DNA, 15 bp, Homo sapiens
atggtgaaaccccct

SEQ ID NO: 1352789 - DNA, 15 bp, Homo sapiens
catggtgaaaccccc

SEQ ID NO: 1352790 - DNA, 15 bp, Homo sapiens
tagtagaggcaggac

SEQ ID NO: 1352791 - DNA, 15 bp, Homo sapiens
ttagtagaggcagga

SEQ ID NO: 1352792 - DNA, 15 bp, Homo sapiens
tttagtagaggcagg

SEQ ID NO: 1352793 - DNA, 15 bp, Homo sapiens
ttttagtagaggcag

SEQ ID NO: 1352794 - DNA, 15 bp, Homo sapiens
tttttagtagaggca

SEQ ID NO: 1352795 - DNA, 15 bp, Homo sapiens
gcccagctaattttg

SEQ ID NO: 1352796 - DNA, 15 bp, Homo sapiens
cgcaccaccatgccc

SEQ ID NO: 1352797 - DNA, 15 bp, Homo sapiens
acgcaccaccatgcc

SEQ ID NO: 1352798 - DNA, 15 bp, Homo sapiens
cacgcaccaccatgc

SEQ ID NO: 1352799 - DNA, 15 bp, Homo sapiens
gcacgcaccaccatg

SEQ ID NO: 1352800 - DNA, 15 bp, Homo sapiens
ggcacgcaccaccat

SEQ ID NO: 1352801 - DNA, 15 bp, Homo sapiens
ttacaggcacgcacc

SEQ ID NO: 1352802 - DNA, 15 bp, Homo sapiens
attacaggcacgcac

SEQ ID NO: 1352803 - DNA, 15 bp, Homo sapiens
gattacaggcacgca

SEQ ID NO: 1352804 - DNA, 15 bp, Homo sapiens
ttcttgcctcagcct

SEQ ID NO: 1352805 - DNA, 15 bp, Homo sapiens
tttcttgcctcagcc

SEQ ID NO: 1352806 - DNA, 15 bp, Homo sapiens
ttttcttgcctcagc

SEQ ID NO: 1352807 - DNA, 15 bp, Homo sapiens
attttcttgcctcag

SEQ ID NO: 1352808 - DNA, 15 bp, Homo sapiens
aattttcttgcctca

SEQ ID NO: 1352809 - DNA, 15 bp, Homo sapiens
taattttcttgcctc

SEQ ID NO: 1352810 - DNA, 15 bp, Homo sapiens
gtaattttcttgcct

SEQ ID NO: 1352811 - DNA, 15 bp, Homo sapiens
agtaattttcttgcc

SEQ ID NO: 1352812 - DNA, 15 bp, Homo sapiens
aagtaattttcttgc

SEQ ID NO: 1352813 - DNA, 15 bp, Homo sapiens
caagtaattttcttg

SEQ ID NO: 1352814 - DNA, 15 bp, Homo sapiens
tcaagtaattttctt

SEQ ID NO: 1352815 - DNA, 15 bp, Homo sapiens
ttcaagtaattttct

SEQ ID NO: 1352816 - DNA, 15 bp, Homo sapiens
gttcaagtaattttc

SEQ ID NO: 1352817 - DNA, 15 bp, Homo sapiens
ggttcaagtaatttt

SEQ ID NO: 1352818 - DNA, 15 bp, Homo sapiens
gggttcaagtaattt

SEQ ID NO: 1352819 - DNA, 15 bp, Homo sapiens
cgggttcaagtaatt

SEQ ID NO: 1352820 - DNA, 15 bp, Homo sapiens
ccgggttcaagtaat

SEQ ID NO: 1352821 - DNA, 15 bp, Homo sapiens
cccgggttcaagtaa

SEQ ID NO: 1352822 - DNA, 15 bp, Homo sapiens
tcccgggttcaagta

SEQ ID NO: 1352823 - DNA, 15 bp, Homo sapiens
ttgatctcggctcac

SEQ ID NO: 1352824 - DNA, 15 bp, Homo sapiens
cttgatctcggctca

SEQ ID NO: 1352825 - DNA, 15 bp, Homo sapiens
gcttgatctcggctc

SEQ ID NO: 1352826 - DNA, 15 bp, Homo sapiens
ggcttgatctcggct

SEQ ID NO: 1352827 - DNA, 15 bp, Homo sapiens
tggcttgatctcggc

SEQ ID NO: 1352828 - DNA, 15 bp, Homo sapiens
gtggcttgatctcgg

SEQ ID NO: 1352829 - DNA, 15 bp, Homo sapiens
cgtggcttgatctcg

SEQ ID NO: 1352830 - DNA, 15 bp, Homo sapiens
ccgtggcttgatctc

SEQ ID NO: 1352831 - DNA, 15 bp, Homo sapiens
gccgtggcttgatct

SEQ ID NO: 1352832 - DNA, 15 bp, Homo sapiens
tgccgtggcttgatc

SEQ ID NO: 1352833 - DNA, 15 bp, Homo sapiens
gtgccgtggcttgat

SEQ ID NO: 1352834 - DNA, 15 bp, Homo sapiens
agtgccgtggcttga

SEQ ID NO: 1352835 - DNA, 15 bp, Homo sapiens
gagtgccgtggcttg

SEQ ID NO: 1352836 - DNA, 15 bp, Homo sapiens
ggagtgccgtggctt

SEQ ID NO: 1352837 - DNA, 15 bp, Homo sapiens
tggagtgccgtggct

SEQ ID NO: 1352838 - DNA, 15 bp, Homo sapiens
cctcttgtcgcccag

SEQ ID NO: 1352839 - DNA, 15 bp, Homo sapiens
ccctcttgtcgccca

SEQ ID NO: 1352840 - DNA, 15 bp, Homo sapiens
tccctcttgtcgccc

SEQ ID NO: 1352841 - DNA, 15 bp, Homo sapiens
ttccctcttgtcgcc

SEQ ID NO: 1352842 - DNA, 15 bp, Homo sapiens
tttccctcttgtcgc

SEQ ID NO: 1352843 - DNA, 15 bp, Homo sapiens
gtttccctcttgtcg

SEQ ID NO: 1352844 - DNA, 15 bp, Homo sapiens
agtttccctcttgtc

SEQ ID NO: 1352845 - DNA, 15 bp, Homo sapiens
gagtttccctcttgt

SEQ ID NO: 1352846 - DNA, 15 bp, Homo sapiens
ggagtttccctcttg

SEQ ID NO: 1352847 - DNA, 15 bp, Homo sapiens
tggagtttccctctt

SEQ ID NO: 1352848 - DNA, 15 bp, Homo sapiens
atggagtttccctct

SEQ ID NO: 1352849 - DNA, 15 bp, Homo sapiens
gatggagtttccctc

SEQ ID NO: 1352850 - DNA, 15 bp, Homo sapiens
agatggagtttccct

SEQ ID NO: 1352851 - DNA, 15 bp, Homo sapiens
tgagatggagtttcc

SEQ ID NO: 1352852 - DNA, 15 bp, Homo sapiens
atttttgagatggag

SEQ ID NO: 1352853 - DNA, 15 bp, Homo sapiens
tatttttgagatgga

SEQ ID NO: 1352854 - DNA, 15 bp, Homo sapiens
ttttatttttgagat

SEQ ID NO: 1352855 - DNA, 15 bp, Homo sapiens
cattttttattttat

SEQ ID NO: 1352856 - DNA, 15 bp, Homo sapiens
tcattttttatttta

SEQ ID NO: 1352857 - DNA, 15 bp, Homo sapiens
ttcattttttatttt

SEQ ID NO: 1352858 - DNA, 15 bp, Homo sapiens
tttcattttttattt

SEQ ID NO: 1352859 - DNA, 15 bp, Homo sapiens
atttcattttttatt

SEQ ID NO: 1352860 - DNA, 15 bp, Homo sapiens
gatttcattttttat

SEQ ID NO: 1352861 - DNA, 15 bp, Homo sapiens
ggatttcatttttta

SEQ ID NO: 1352862 - DNA, 15 bp, Homo sapiens
tggatttcatttttt

SEQ ID NO: 1352863 - DNA, 15 bp, Homo sapiens
ctggatttcattttt

SEQ ID NO: 1352864 - DNA, 15 bp, Homo sapiens
cctggatttcatttt

SEQ ID NO: 1352865 - DNA, 15 bp, Homo sapiens
gcctggatttcattt

SEQ ID NO: 1352866 - DNA, 15 bp, Homo sapiens
agcctggatttcatt

SEQ ID NO: 1352867 - DNA, 15 bp, Homo sapiens
aagcctggatttcat

SEQ ID NO: 1352868 - DNA, 15 bp, Homo sapiens
caagcctggatttca

SEQ ID NO: 1352869 - DNA, 15 bp, Homo sapiens
acaagcctggatttc

SEQ ID NO: 1352870 - DNA, 15 bp, Homo sapiens
aacaagcctggattt

SEQ ID NO: 1352871 - DNA, 15 bp, Homo sapiens
gaacaagcctggatt

SEQ ID NO: 1352872 - DNA, 15 bp, Homo sapiens
ggaacaagcctggat

SEQ ID NO: 1352873 - DNA, 15 bp, Homo sapiens
tggaacaagcctgga

SEQ ID NO: 1352874 - DNA, 15 bp, Homo sapiens
gtggaacaagcctgg

SEQ ID NO: 1352875 - DNA, 15 bp, Homo sapiens
tgtggaacaagcctg

SEQ ID NO: 1352876 - DNA, 15 bp, Homo sapiens
ctgtggaacaagcct

SEQ ID NO: 1352877 - DNA, 15 bp, Homo sapiens
cctgtggaacaagcc

SEQ ID NO: 1352878 - DNA, 15 bp, Homo sapiens
gcctgtggaacaagc

SEQ ID NO: 1352879 - DNA, 15 bp, Homo sapiens
ggcctgtggaacaag

SEQ ID NO: 1352880 - DNA, 15 bp, Homo sapiens
aggcctgtggaacaa

SEQ ID NO: 1352881 - DNA, 15 bp, Homo sapiens
gaggcctgtggaaca

SEQ ID NO: 1352882 - DNA, 15 bp, Homo sapiens
agaggcctgtggaac

SEQ ID NO: 1352883 - DNA, 15 bp, Homo sapiens
gagaggcctgtggaa

SEQ ID NO: 1352884 - DNA, 15 bp, Homo sapiens
agagaggcctgtgga

SEQ ID NO: 1352885 - DNA, 15 bp, Homo sapiens
aagagaggcctgtgg

SEQ ID NO: 1352886 - DNA, 15 bp, Homo sapiens
aaagagaggcctgtg

SEQ ID NO: 1352887 - DNA, 15 bp, Homo sapiens
aaaagagaggcctgt

SEQ ID NO: 1352888 - DNA, 15 bp, Homo sapiens
aaaaagagaggcctg

SEQ ID NO: 1352889 - DNA, 15 bp, Homo sapiens
caaaaagagaggcct

SEQ ID NO: 1352890 - DNA, 15 bp, Homo sapiens
ccaaaaagagaggcc

SEQ ID NO: 1352891 - DNA, 15 bp, Homo sapiens
gccaaaaagagaggc

SEQ ID NO: 1352892 - DNA, 15 bp, Homo sapiens
agccaaaaagagagg

SEQ ID NO: 1352893 - DNA, 15 bp, Homo sapiens
aagccaaaaagagag

SEQ ID NO: 1352894 - DNA, 15 bp, Homo sapiens
aaagccaaaaagaga

SEQ ID NO: 1352895 - DNA, 15 bp, Homo sapiens
aaaagccaaaaagag

SEQ ID NO: 1352896 - DNA, 15 bp, Homo sapiens
gaaaagccaaaaaga

SEQ ID NO: 1352897 - DNA, 15 bp, Homo sapiens
tgaaaagccaaaaag

SEQ ID NO: 1352898 - DNA, 15 bp, Homo sapiens
ttgaaaagccaaaaa

SEQ ID NO: 1352899 - DNA, 15 bp, Homo sapiens
tttgaaaagccaaaa

SEQ ID NO: 1352900 - DNA, 15 bp, Homo sapiens
ttttgaaaagccaaa

SEQ ID NO: 1352901 - DNA, 15 bp, Homo sapiens
tttttgaaaagccaa

SEQ ID NO: 1352902 - DNA, 15 bp, Homo sapiens
atttttgaaaagcca

SEQ ID NO: 1352903 - DNA, 15 bp, Homo sapiens
catttttgaaaagcc

SEQ ID NO: 1352904 - DNA, 15 bp, Homo sapiens
ccatttttgaaaagc

SEQ ID NO: 1352905 - DNA, 15 bp, Homo sapiens
gccatttttgaaaag

SEQ ID NO: 1352906 - DNA, 15 bp, Homo sapiens
agccatttttgaaaa

SEQ ID NO: 1352907 - DNA, 15 bp, Homo sapiens
aagccatttttgaaa

SEQ ID NO: 1352908 - DNA, 15 bp, Homo sapiens
aaagccatttttgaa

SEQ ID NO: 1352909 - DNA, 15 bp, Homo sapiens
gaaagccatttttga

SEQ ID NO: 1352910 - DNA, 15 bp, Homo sapiens
tgaaagccatttttg

SEQ ID NO: 1352911 - DNA, 15 bp, Homo sapiens
ttgaaagccattttt

SEQ ID NO: 1352912 - DNA, 15 bp, Homo sapiens
tttgaaagccatttt

SEQ ID NO: 1352913 - DNA, 15 bp, Homo sapiens
ctttgaaagccattt

SEQ ID NO: 1352914 - DNA, 15 bp, Homo sapiens
tctttgaaagccatt

SEQ ID NO: 1352915 - DNA, 15 bp, Homo sapiens
atctttgaaagccat

SEQ ID NO: 1352916 - DNA, 15 bp, Homo sapiens
gatctttgaaagcca

SEQ ID NO: 1352917 - DNA, 15 bp, Homo sapiens
ggatctttgaaagcc

SEQ ID NO: 1352918 - DNA, 15 bp, Homo sapiens
aggatctttgaaagc

SEQ ID NO: 1352919 - DNA, 15 bp, Homo sapiens
caggatctttgaaag

SEQ ID NO: 1352920 - DNA, 15 bp, Homo sapiens
tcaggatctttgaaa

SEQ ID NO: 1352921 - DNA, 15 bp, Homo sapiens
ctcaggatctttgaa

SEQ ID NO: 1352922 - DNA, 15 bp, Homo sapiens
gctcaggatctttga

SEQ ID NO: 1352923 - DNA, 15 bp, Homo sapiens
agctcaggatctttg

SEQ ID NO: 1352924 - DNA, 15 bp, Homo sapiens
gagctcaggatcttt

SEQ ID NO: 1352925 - DNA, 15 bp, Homo sapiens
ggagctcaggatctt

SEQ ID NO: 1352926 - DNA, 15 bp, Homo sapiens
gggagctcaggatct

SEQ ID NO: 1352927 - DNA, 15 bp, Homo sapiens
tgggagctcaggatc

SEQ ID NO: 1352928 - DNA, 15 bp, Homo sapiens
gtgggagctcaggat

SEQ ID NO: 1352929 - DNA, 15 bp, Homo sapiens
agtgggagctcagga

SEQ ID NO: 1352930 - DNA, 15 bp, Homo sapiens
gagtgggagctcagg

SEQ ID NO: 1352931 - DNA, 15 bp, Homo sapiens
tgagtgggagctcag

SEQ ID NO: 1352932 - DNA, 15 bp, Homo sapiens
gtgagtgggagctca

SEQ ID NO: 1352933 - DNA, 15 bp, Homo sapiens
agtgagtgggagctc

SEQ ID NO: 1352934 - DNA, 15 bp, Homo sapiens
gagtgagtgggagct

SEQ ID NO: 1352935 - DNA, 15 bp, Homo sapiens
cgagtgagtgggagc

SEQ ID NO: 1352936 - DNA, 15 bp, Homo sapiens
gcgagtgagtgggag

SEQ ID NO: 1352937 - DNA, 15 bp, Homo sapiens
tgcgagtgagtggga

SEQ ID NO: 1352938 - DNA, 15 bp, Homo sapiens
gtgcgagtgagtggg

SEQ ID NO: 1352939 - DNA, 15 bp, Homo sapiens
agtgcgagtgagtgg

SEQ ID NO: 1352940 - DNA, 15 bp, Homo sapiens
gagtgcgagtgagtg

SEQ ID NO: 1352941 - DNA, 15 bp, Homo sapiens
agagtgcgagtgagt

SEQ ID NO: 1352942 - DNA, 15 bp, Homo sapiens
gagagtgcgagtgag

SEQ ID NO: 1352943 - DNA, 15 bp, Homo sapiens
agagagtgcgagtga

SEQ ID NO: 1352944 - DNA, 15 bp, Homo sapiens
cagagagtgcgagtg

SEQ ID NO: 1352945 - DNA, 15 bp, Homo sapiens
gcagagagtgcgagt

SEQ ID NO: 1352946 - DNA, 15 bp, Homo sapiens
agcagagagtgcgag

SEQ ID NO: 1352947 - DNA, 15 bp, Homo sapiens
gagcagagagtgcga

SEQ ID NO: 1352948 - DNA, 15 bp, Homo sapiens
ggagcagagagtgcg

SEQ ID NO: 1352949 - DNA, 15 bp, Homo sapiens
aggagcagagagtgc

SEQ ID NO: 1352950 - DNA, 15 bp, Homo sapiens
caggagcagagagtg

SEQ ID NO: 1352951 - DNA, 15 bp, Homo sapiens
gcaggagcagagagt

SEQ ID NO: 1352952 - DNA, 15 bp, Homo sapiens
ggcaggagcagagag

SEQ ID NO: 1352953 - DNA, 15 bp, Homo sapiens
tggcaggagcagaga

SEQ ID NO: 1352954 - DNA, 15 bp, Homo sapiens
ttggcaggagcagag

SEQ ID NO: 1352955 - DNA, 15 bp, Homo sapiens
cttggcaggagcaga

SEQ ID NO: 1352956 - DNA, 15 bp, Homo sapiens
tcttggcaggagcag

SEQ ID NO: 1352957 - DNA, 15 bp, Homo sapiens
ctcttggcaggagca

SEQ ID NO: 1352958 - DNA, 15 bp, Homo sapiens
tctcttggcaggagc

SEQ ID NO: 1352959 - DNA, 15 bp, Homo sapiens
ttctcttggcaggag

SEQ ID NO: 1352960 - DNA, 15 bp, Homo sapiens
attctcttggcagga

SEQ ID NO: 1352961 - DNA, 15 bp, Homo sapiens
gattctcttggcagg

SEQ ID NO: 1352962 - DNA, 15 bp, Homo sapiens
agattctcttggcag

SEQ ID NO: 1352963 - DNA, 15 bp, Homo sapiens
cagattctcttggca

SEQ ID NO: 1352964 - DNA, 15 bp, Homo sapiens
gcagattctcttggc

SEQ ID NO: 1352965 - DNA, 15 bp, Homo sapiens
ggcagattctcttgg

SEQ ID NO: 1352966 - DNA, 15 bp, Homo sapiens
aggcagattctcttg

SEQ ID NO: 1352967 - DNA, 15 bp, Homo sapiens
caggcagattctctt

SEQ ID NO: 1352968 - DNA, 15 bp, Homo sapiens
acaggcagattctct

SEQ ID NO: 1352969 - DNA, 15 bp, Homo sapiens
aacaggcagattctc

SEQ ID NO: 1352970 - DNA, 15 bp, Homo sapiens
taacaggcagattct

SEQ ID NO: 1352971 - DNA, 15 bp, Homo sapiens
ataacaggcagattc

SEQ ID NO: 1352972 - DNA, 15 bp, Homo sapiens
cataacaggcagatt

SEQ ID NO: 1352973 - DNA, 15 bp, Homo sapiens
gcataacaggcagat

SEQ ID NO: 1352974 - DNA, 15 bp, Homo sapiens
ggcataacaggcaga

SEQ ID NO: 1352975 - DNA, 15 bp, Homo sapiens
aggcataacaggcag

SEQ ID NO: 1352976 - DNA, 15 bp, Homo sapiens
caggcataacaggca

SEQ ID NO: 1352977 - DNA, 15 bp, Homo sapiens
acaggcataacaggc

SEQ ID NO: 1352978 - DNA, 15 bp, Homo sapiens
cacaggcataacagg

SEQ ID NO: 1352979 - DNA, 15 bp, Homo sapiens
gcacaggcataacag

SEQ ID NO: 1352980 - DNA, 15 bp, Homo sapiens
tgcacaggcataaca

SEQ ID NO: 1352981 - DNA, 15 bp, Homo sapiens
atgcacaggcataac

SEQ ID NO: 1352982 - DNA, 15 bp, Homo sapiens
gatgcacaggcataa

SEQ ID NO: 1352983 - DNA, 15 bp, Homo sapiens
tgatgcacaggcata

SEQ ID NO: 1352984 - DNA, 15 bp, Homo sapiens
ttgatgcacaggcat

SEQ ID NO: 1352985 - DNA, 15 bp, Homo sapiens
cttgatgcacaggca

SEQ ID NO: 1352986 - DNA, 15 bp, Homo sapiens
gcttgatgcacaggc

SEQ ID NO: 1352987 - DNA, 15 bp, Homo sapiens
tgcttgatgcacagg

SEQ ID NO: 1352988 - DNA, 15 bp, Homo sapiens
ctgcttgatgcacag

SEQ ID NO: 1352989 - DNA, 15 bp, Homo sapiens
tctgcttgatgcaca

SEQ ID NO: 1352990 - DNA, 15 bp, Homo sapiens
gtctgcttgatgcac

SEQ ID NO: 1352991 - DNA, 15 bp, Homo sapiens
ggtctgcttgatgca

SEQ ID NO: 1352992 - DNA, 15 bp, Homo sapiens
aggtctgcttgatgc

SEQ ID NO: 1352993 - DNA, 15 bp, Homo sapiens
caggtctgcttgatg

SEQ ID NO: 1352994 - DNA, 15 bp, Homo sapiens
ccaggtctgcttgat

SEQ ID NO: 1352995 - DNA, 15 bp, Homo sapiens
accaggtctgcttga

SEQ ID NO: 1352996 - DNA, 15 bp, Homo sapiens
gaccaggtctgcttg

SEQ ID NO: 1352997 - DNA, 15 bp, Homo sapiens
ggaccaggtctgctt

SEQ ID NO: 1352998 - DNA, 15 bp, Homo sapiens
tggaccaggtctgct

SEQ ID NO: 1352999 - DNA, 15 bp, Homo sapiens
ctggaccaggtctgc

SEQ ID NO: 1353000 - DNA, 15 bp, Homo sapiens
gctggaccaggtctg

SEQ ID NO: 1353001 - DNA, 15 bp, Homo sapiens
ggctggaccaggtct

SEQ ID NO: 1353002 - DNA, 15 bp, Homo sapiens
aggctggaccaggtc

SEQ ID NO: 1353003 - DNA, 15 bp, Homo sapiens
gaggctggaccaggt

SEQ ID NO: 1353004 - DNA, 15 bp, Homo sapiens
ggaggctggaccagg

SEQ ID NO: 1353005 - DNA, 15 bp, Homo sapiens
cggaggctggaccag

SEQ ID NO: 1353006 - DNA, 15 bp, Homo sapiens
tcggaggctggacca

SEQ ID NO: 1353007 - DNA, 15 bp, Homo sapiens
ttcggaggctggacc

SEQ ID NO: 1353008 - DNA, 15 bp, Homo sapiens
attcggaggctggac

SEQ ID NO: 1353009 - DNA, 15 bp, Homo sapiens
gattcggaggctgga

SEQ ID NO: 1353010 - DNA, 15 bp, Homo sapiens
agattcggaggctgg

SEQ ID NO: 1353011 - DNA, 15 bp, Homo sapiens
aagattcggaggctg

SEQ ID NO: 1353012 - DNA, 15 bp, Homo sapiens
aaagattcggaggct

SEQ ID NO: 1353013 - DNA, 15 bp, Homo sapiens
taaagattcggaggc

SEQ ID NO: 1353014 - DNA, 15 bp, Homo sapiens
gtaaagattcggagg

SEQ ID NO: 1353015 - DNA, 15 bp, Homo sapiens
ggtaaagattcggag

SEQ ID NO: 1353016 - DNA, 15 bp, Homo sapiens
gggtaaagattcgga

SEQ ID NO: 1353017 - DNA, 15 bp, Homo sapiens
tgggtaaagattcgg

SEQ ID NO: 1353018 - DNA, 15 bp, Homo sapiens
gtgggtaaagattcg

SEQ ID NO: 1353019 - DNA, 15 bp, Homo sapiens
tgtgggtaaagattc

SEQ ID NO: 1353020 - DNA, 15 bp, Homo sapiens
gtgtgggtaaagatt

SEQ ID NO: 1353021 - DNA, 15 bp, Homo sapiens
tgtgtgggtaaagat

SEQ ID NO: 1353022 - DNA, 15 bp, Homo sapiens
ctgtgtgggtaaaga

SEQ ID NO: 1353023 - DNA, 15 bp, Homo sapiens
cctgtgtgggtaaag

SEQ ID NO: 1353024 - DNA, 15 bp, Homo sapiens
acctgtgtgggtaaa

SEQ ID NO: 1353025 - DNA, 15 bp, Homo sapiens
gacctgtgtgggtaa

SEQ ID NO: 1353026 - DNA, 15 bp, Homo sapiens
ggacctgtgtgggta

SEQ ID NO: 1353027 - DNA, 15 bp, Homo sapiens
cggacctgtgtgggt

SEQ ID NO: 1353028 - DNA, 15 bp, Homo sapiens
acggacctgtgtggg

SEQ ID NO: 1353029 - DNA, 15 bp, Homo sapiens
cacggacctgtgtgg

SEQ ID NO: 1353030 - DNA, 15 bp, Homo sapiens
gcacggacctgtgtg

SEQ ID NO: 1353031 - DNA, 15 bp, Homo sapiens
ggcacggacctgtgt

SEQ ID NO: 1353032 - DNA, 15 bp, Homo sapiens
gggcacggacctgtg

SEQ ID NO: 1353033 - DNA, 15 bp, Homo sapiens
ggggcacggacctgt

SEQ ID NO: 1353034 - DNA, 15 bp, Homo sapiens
cggggcacggacctg

SEQ ID NO: 1353035 - DNA, 15 bp, Homo sapiens
gcggggcacggacct

SEQ ID NO: 1353036 - DNA, 15 bp, Homo sapiens
agcggggcacggacc

SEQ ID NO: 1353037 - DNA, 15 bp, Homo sapiens
gagcggggcacggac

SEQ ID NO: 1353038 - DNA, 15 bp, Homo sapiens
ggagcggggcacgga

SEQ ID NO: 1353039 - DNA, 15 bp, Homo sapiens
aggagcggggcacgg

SEQ ID NO: 1353040 - DNA, 15 bp, Homo sapiens
gaggagcggggcacg

SEQ ID NO: 1353041 - DNA, 15 bp, Homo sapiens
tgaggagcggggcac

SEQ ID NO: 1353042 - DNA, 15 bp, Homo sapiens
gtgaggagcggggca

SEQ ID NO: 1353043 - DNA, 15 bp, Homo sapiens
cgtgaggagcggggc

SEQ ID NO: 1353044 - DNA, 15 bp, Homo sapiens
acgtgaggagcgggg

SEQ ID NO: 1353045 - DNA, 15 bp, Homo sapiens
cacgtgaggagcggg

SEQ ID NO: 1353046 - DNA, 15 bp, Homo sapiens
gcacgtgaggagcgg

SEQ ID NO: 1353047 - DNA, 15 bp, Homo sapiens
ggcacgtgaggagcg

SEQ ID NO: 1353048 - DNA, 15 bp, Homo sapiens
aggcacgtgaggagc

SEQ ID NO: 1353049 - DNA, 15 bp, Homo sapiens
caggcacgtgaggag

SEQ ID NO: 1353050 - DNA, 15 bp, Homo sapiens
gcaggcacgtgagga

SEQ ID NO: 1353051 - DNA, 15 bp, Homo sapiens
ggcaggcacgtgagg

SEQ ID NO: 1353052 - DNA, 15 bp, Homo sapiens
aggcaggcacgtgag

SEQ ID NO: 1353053 - DNA, 15 bp, Homo sapiens
aaggcaggcacgtga

SEQ ID NO: 1353054 - DNA, 15 bp, Homo sapiens
gaaggcaggcacgtg

SEQ ID NO: 1353055 - DNA, 15 bp, Homo sapiens
tgaaggcaggcacgt

SEQ ID NO: 1353056 - DNA, 15 bp, Homo sapiens
gtgaaggcaggcacg

SEQ ID NO: 1353057 - DNA, 15 bp, Homo sapiens
agtgaaggcaggcac

SEQ ID NO: 1353058 - DNA, 15 bp, Homo sapiens
aagtgaaggcaggca

SEQ ID NO: 1353059 - DNA, 15 bp, Homo sapiens
gaagtgaaggcaggc

SEQ ID NO: 1353060 - DNA, 15 bp, Homo sapiens
agaagtgaaggcagg

SEQ ID NO: 1353061 - DNA, 15 bp, Homo sapiens
gagaagtgaaggcag

SEQ ID NO: 1353062 - DNA, 15 bp, Homo sapiens
agagaagtgaaggca

SEQ ID NO: 1353063 - DNA, 15 bp, Homo sapiens
tagagaagtgaaggc

SEQ ID NO: 1353064 - DNA, 15 bp, Homo sapiens
ttagagaagtgaagg

SEQ ID NO: 1353065 - DNA, 15 bp, Homo sapiens
tttagagaagtgaag

SEQ ID NO: 1353066 - DNA, 15 bp, Homo sapiens
atttagagaagtgaa

SEQ ID NO: 1353067 - DNA, 15 bp, Homo sapiens
gatttagagaagtga

SEQ ID NO: 1353068 - DNA, 15 bp, Homo sapiens
ggatttagagaagtg

SEQ ID NO: 1353069 - DNA, 15 bp, Homo sapiens
aggatttagagaagt

SEQ ID NO: 1353070 - DNA, 15 bp, Homo sapiens
gaggatttagagaag

SEQ ID NO: 1353071 - DNA, 15 bp, Homo sapiens
ggaggatttagagaa

SEQ ID NO: 1353072 - DNA, 15 bp, Homo sapiens
gggaggatttagaga

SEQ ID NO: 1353073 - DNA, 15 bp, Homo sapiens
agggaggatttagag

SEQ ID NO: 1353074 - DNA, 15 bp, Homo sapiens
tagggaggatttaga

SEQ ID NO: 1353075 - DNA, 15 bp, Homo sapiens
atagggaggatttag

SEQ ID NO: 1353076 - DNA, 15 bp, Homo sapiens
aatagggaggattta

SEQ ID NO: 1353077 - DNA, 15 bp, Homo sapiens
gaatagggaggattt

SEQ ID NO: 1353078 - DNA, 15 bp, Homo sapiens
agaatagggaggatt

SEQ ID NO: 1353079 - DNA, 15 bp, Homo sapiens
aagaatagggaggat

SEQ ID NO: 1353080 - DNA, 15 bp, Homo sapiens
gaagaatagggagga

SEQ ID NO: 1353081 - DNA, 15 bp, Homo sapiens
ggaagaatagggagg

SEQ ID NO: 1353082 - DNA, 15 bp, Homo sapiens
tggaagaatagggag

SEQ ID NO: 1353083 - DNA, 15 bp, Homo sapiens
ctggaagaataggga

SEQ ID NO: 1353084 - DNA, 15 bp, Homo sapiens
cctggaagaataggg

SEQ ID NO: 1353085 - DNA, 15 bp, Homo sapiens
gcctggaagaatagg

SEQ ID NO: 1353086 - DNA, 15 bp, Homo sapiens
agcctggaagaatag

SEQ ID NO: 1353087 - DNA, 15 bp, Homo sapiens
gagcctggaagaata

SEQ ID NO: 1353088 - DNA, 15 bp, Homo sapiens
agagcctggaagaat

SEQ ID NO: 1353089 - DNA, 15 bp, Homo sapiens
cagagcctggaagaa

SEQ ID NO: 1353090 - DNA, 15 bp, Homo sapiens
gcagagcctggaaga

SEQ ID NO: 1353091 - DNA, 15 bp, Homo sapiens
agcagagcctggaag

SEQ ID NO: 1353092 - DNA, 15 bp, Homo sapiens
gagcagagcctggaa

SEQ ID NO: 1353093 - DNA, 15 bp, Homo sapiens
ggagcagagcctgga

SEQ ID NO: 1353094 - DNA, 15 bp, Homo sapiens
cggagcagagcctgg

SEQ ID NO: 1353095 - DNA, 15 bp, Homo sapiens
ccggagcagagcctg

SEQ ID NO: 1353096 - DNA, 15 bp, Homo sapiens
accggagcagagcct

SEQ ID NO: 1353097 - DNA, 15 bp, Homo sapiens
caccggagcagagcc

SEQ ID NO: 1353098 - DNA, 15 bp, Homo sapiens
gcaccggagcagagc

SEQ ID NO: 1353099 - DNA, 15 bp, Homo sapiens
ggcaccggagcagag

SEQ ID NO: 1353100 - DNA, 15 bp, Homo sapiens
tggcaccggagcaga

SEQ ID NO: 1353101 - DNA, 15 bp, Homo sapiens
gtggcaccggagcag

SEQ ID NO: 1353102 - DNA, 15 bp, Homo sapiens
ggtggcaccggagca

SEQ ID NO: 1353103 - DNA, 15 bp, Homo sapiens
aggtggcaccggagc

SEQ ID NO: 1353104 - DNA, 15 bp, Homo sapiens
gaggtggcaccggag

SEQ ID NO: 1353105 - DNA, 15 bp, Homo sapiens
ggaggtggcaccgga

SEQ ID NO: 1353106 - DNA, 15 bp, Homo sapiens
aggaggtggcaccgg

SEQ ID NO: 1353107 - DNA, 15 bp, Homo sapiens
gaggaggtggcaccg

SEQ ID NO: 1353108 - DNA, 15 bp, Homo sapiens
ggaggaggtggcacc

SEQ ID NO: 1353109 - DNA, 15 bp, Homo sapiens
tggaggaggtggcac

SEQ ID NO: 1353110 - DNA, 15 bp, Homo sapiens
ctggaggaggtggca

SEQ ID NO: 1353111 - DNA, 15 bp, Homo sapiens
cctggaggaggtggc

SEQ ID NO: 1353112 - DNA, 15 bp, Homo sapiens
gcctggaggaggtgg

SEQ ID NO: 1353113 - DNA, 15 bp, Homo sapiens
tgcctggaggaggtg

SEQ ID NO: 1353114 - DNA, 15 bp, Homo sapiens
ctgcctggaggaggt

SEQ ID NO: 1353115 - DNA, 15 bp, Homo sapiens
tctgcctggaggagg

SEQ ID NO: 1353116 - DNA, 15 bp, Homo sapiens
gtctgcctggaggag

SEQ ID NO: 1353117 - DNA, 15 bp, Homo sapiens
agtctgcctggagga

SEQ ID NO: 1353118 - DNA, 15 bp, Homo sapiens
gagtctgcctggagg

SEQ ID NO: 1353119 - DNA, 15 bp, Homo sapiens
ggagtctgcctggag

SEQ ID NO: 1353120 - DNA, 15 bp, Homo sapiens
gggagtctgcctgga

SEQ ID NO: 1353121 - DNA, 15 bp, Homo sapiens
agggagtctgcctgg

SEQ ID NO: 1353122 - DNA, 15 bp, Homo sapiens
cagggagtctgcctg

SEQ ID NO: 1353123 - DNA, 15 bp, Homo sapiens
tcagggagtctgcct

SEQ ID NO: 1353124 - DNA, 15 bp, Homo sapiens
atcagggagtctgcc

SEQ ID NO: 1353125 - DNA, 15 bp, Homo sapiens
aatcagggagtctgc

SEQ ID NO: 1353126 - DNA, 15 bp, Homo sapiens
aaatcagggagtctg

SEQ ID NO: 1353127 - DNA, 15 bp, Homo sapiens
gaaatcagggagtct

SEQ ID NO: 1353128 - DNA, 15 bp, Homo sapiens
agaaatcagggagtc

SEQ ID NO: 1353129 - DNA, 15 bp, Homo sapiens
gagaaatcagggagt

SEQ ID NO: 1353130 - DNA, 15 bp, Homo sapiens
ggagaaatcagggag

SEQ ID NO: 1353131 - DNA, 15 bp, Homo sapiens
tggagaaatcaggga

SEQ ID NO: 1353132 - DNA, 15 bp, Homo sapiens
ctggagaaatcaggg

SEQ ID NO: 1353133 - DNA, 15 bp, Homo sapiens
cctggagaaatcagg

SEQ ID NO: 1353134 - DNA, 15 bp, Homo sapiens
gcctggagaaatcag

SEQ ID NO: 1353135 - DNA, 15 bp, Homo sapiens
ggcctggagaaatca

SEQ ID NO: 1353136 - DNA, 15 bp, Homo sapiens
tggcctggagaaatc

SEQ ID NO: 1353137 - DNA, 15 bp, Homo sapiens
gtggcctggagaaat

SEQ ID NO: 1353138 - DNA, 15 bp, Homo sapiens
tgtggcctggagaaa

SEQ ID NO: 1353139 - DNA, 15 bp, Homo sapiens
gtgtggcctggagaa

SEQ ID NO: 1353140 - DNA, 15 bp, Homo sapiens
ggtgtggcctggaga

SEQ ID NO: 1353141 - DNA, 15 bp, Homo sapiens
tggtgtggcctggag

SEQ ID NO: 1353142 - DNA, 15 bp, Homo sapiens
ctggtgtggcctgga

SEQ ID NO: 1353143 - DNA, 15 bp, Homo sapiens
tctggtgtggcctgg

SEQ ID NO: 1353144 - DNA, 15 bp, Homo sapiens
atctggtgtggcctg

SEQ ID NO: 1353145 - DNA, 15 bp, Homo sapiens
catctggtgtggcct

SEQ ID NO: 1353146 - DNA, 15 bp, Homo sapiens
ccatctggtgtggcc

SEQ ID NO: 1353147 - DNA, 15 bp, Homo sapiens
cccatctggtgtggc

SEQ ID NO: 1353148 - DNA, 15 bp, Homo sapiens
ccccatctggtgtgg

SEQ ID NO: 1353149 - DNA, 15 bp, Homo sapiens
tccccatctggtgtg

SEQ ID NO: 1353150 - DNA, 15 bp, Homo sapiens
atccccatctggtgt

SEQ ID NO: 1353151 - DNA, 15 bp, Homo sapiens
catccccatctggtg

SEQ ID NO: 1353152 - DNA, 15 bp, Homo sapiens
acatccccatctggt

SEQ ID NO: 1353153 - DNA, 15 bp, Homo sapiens
aacatccccatctgg

SEQ ID NO: 1353154 - DNA, 15 bp, Homo sapiens
caacatccccatctg

SEQ ID NO: 1353155 - DNA, 15 bp, Homo sapiens
acaacatccccatct

SEQ ID NO: 1353156 - DNA, 15 bp, Homo sapiens
tacaacatccccatc

SEQ ID NO: 1353157 - DNA, 15 bp, Homo sapiens
atacaacatccccat

SEQ ID NO: 1353158 - DNA, 15 bp, Homo sapiens
gatacaacatcccca

SEQ ID NO: 1353159 - DNA, 15 bp, Homo sapiens
ggatacaacatcccc

SEQ ID NO: 1353160 - DNA, 15 bp, Homo sapiens
gggatacaacatccc

SEQ ID NO: 1353161 - DNA, 15 bp, Homo sapiens
tgggatacaacatcc

SEQ ID NO: 1353162 - DNA, 15 bp, Homo sapiens
atgggatacaacatc

SEQ ID NO: 1353163 - DNA, 15 bp, Homo sapiens
catgggatacaacat

SEQ ID NO: 1353164 - DNA, 15 bp, Homo sapiens
tcatgggatacaaca

SEQ ID NO: 1353165 - DNA, 15 bp, Homo sapiens
atcatgggatacaac

SEQ ID NO: 1353166 - DNA, 15 bp, Homo sapiens
tatcatgggatacaa

SEQ ID NO: 1353167 - DNA, 15 bp, Homo sapiens
gtatcatgggataca

SEQ ID NO: 1353168 - DNA, 15 bp, Homo sapiens
cgtatcatgggatac

SEQ ID NO: 1353169 - DNA, 15 bp, Homo sapiens
tcgtatcatgggata

SEQ ID NO: 1353170 - DNA, 15 bp, Homo sapiens
ttcgtatcatgggat

SEQ ID NO: 1353171 - DNA, 15 bp, Homo sapiens
tttcgtatcatggga

SEQ ID NO: 1353172 - DNA, 15 bp, Homo sapiens
ttttcgtatcatggg

SEQ ID NO: 1353173 - DNA, 15 bp, Homo sapiens
gttttcgtatcatgg

SEQ ID NO: 1353174 - DNA, 15 bp, Homo sapiens
agttttcgtatcatg

SEQ ID NO: 1353175 - DNA, 15 bp, Homo sapiens
tagttttcgtatcat

SEQ ID NO: 1353176 - DNA, 15 bp, Homo sapiens
ttagttttcgtatca

SEQ ID NO: 1353177 - DNA, 15 bp, Homo sapiens
tttagttttcgtatc

SEQ ID NO: 1353178 - DNA, 15 bp, Homo sapiens
ctttagttttcgtat

SEQ ID NO: 1353179 - DNA, 15 bp, Homo sapiens
cctttagttttcgta

SEQ ID NO: 1353180 - DNA, 15 bp, Homo sapiens
gcctttagttttcgt

SEQ ID NO: 1353181 - DNA, 15 bp, Homo sapiens
agcctttagttttcg

SEQ ID NO: 1353182 - DNA, 15 bp, Homo sapiens
gagcctttagttttc

SEQ ID NO: 1353183 - DNA, 15 bp, Homo sapiens
ggagcctttagtttt

SEQ ID NO: 1353184 - DNA, 15 bp, Homo sapiens
tggagcctttagttt

SEQ ID NO: 1353185 - DNA, 15 bp, Homo sapiens
ttggagcctttagtt

SEQ ID NO: 1353186 - DNA, 15 bp, Homo sapiens
cttggagcctttagt

SEQ ID NO: 1353187 - DNA, 15 bp, Homo sapiens
acttggagcctttag

SEQ ID NO: 1353188 - DNA, 15 bp, Homo sapiens
gacttggagccttta

SEQ ID NO: 1353189 - DNA, 15 bp, Homo sapiens
tgacttggagccttt

SEQ ID NO: 1353190 - DNA, 15 bp, Homo sapiens
ttgacttggagcctt

SEQ ID NO: 1353191 - DNA, 15 bp, Homo sapiens
cttgacttggagcct

SEQ ID NO: 1353192 - DNA, 15 bp, Homo sapiens
gcttgacttggagcc

SEQ ID NO: 1353193 - DNA, 15 bp, Homo sapiens
agcttgacttggagc

SEQ ID NO: 1353194 - DNA, 15 bp, Homo sapiens
aagcttgacttggag

SEQ ID NO: 1353195 - DNA, 15 bp, Homo sapiens
caagcttgacttgga

SEQ ID NO: 1353196 - DNA, 15 bp, Homo sapiens
gcaagcttgacttgg

SEQ ID NO: 1353197 - DNA, 15 bp, Homo sapiens
ggcaagcttgacttg

SEQ ID NO: 1353198 - DNA, 15 bp, Homo sapiens
gggcaagcttgactt

SEQ ID NO: 1353199 - DNA, 15 bp, Homo sapiens
tgggcaagcttgact

SEQ ID NO: 1353200 - DNA, 15 bp, Homo sapiens
gtgggcaagcttgac

SEQ ID NO: 1353201 - DNA, 15 bp, Homo sapiens
ggtgggcaagcttga

SEQ ID NO: 1353202 - DNA, 15 bp, Homo sapiens
gggtgggcaagcttg

SEQ ID NO: 1353203 - DNA, 15 bp, Homo sapiens
tgggtgggcaagctt

SEQ ID NO: 1353204 - DNA, 15 bp, Homo sapiens
ctgggtgggcaagct

SEQ ID NO: 1353205 - DNA, 15 bp, Homo sapiens
cctgggtgggcaagc

SEQ ID NO: 1353206 - DNA, 15 bp, Homo sapiens
gcctgggtgggcaag

SEQ ID NO: 1353207 - DNA, 15 bp, Homo sapiens
ggcctgggtgggcaa

SEQ ID NO: 1353208 - DNA, 15 bp, Homo sapiens
tggcctgggtgggca

SEQ ID NO: 1353209 - DNA, 15 bp, Homo sapiens
ctggcctgggtgggc

SEQ ID NO: 1353210 - DNA, 15 bp, Homo sapiens
cctggcctgggtggg

SEQ ID NO: 1353211 - DNA, 15 bp, Homo sapiens
gcctggcctgggtgg

SEQ ID NO: 1353212 - DNA, 15 bp, Homo sapiens
tgcctggcctgggtg

SEQ ID NO: 1353213 - DNA, 15 bp, Homo sapiens
gtgcctggcctgggt

SEQ ID NO: 1353214 - DNA, 15 bp, Homo sapiens
tgtgcctggcctggg

SEQ ID NO: 1353215 - DNA, 15 bp, Homo sapiens
ttgtgcctggcctgg

SEQ ID NO: 1353216 - DNA, 15 bp, Homo sapiens
tttgtgcctggcctg

SEQ ID NO: 1353217 - DNA, 15 bp, Homo sapiens
ctttgtgcctggcct

SEQ ID NO: 1353218 - DNA, 15 bp, Homo sapiens
tctttgtgcctggcc

SEQ ID NO: 1353219 - DNA, 15 bp, Homo sapiens
ctctttgtgcctggc

SEQ ID NO: 1353220 - DNA, 15 bp, Homo sapiens
cctctttgtgcctgg

SEQ ID NO: 1353221 - DNA, 15 bp, Homo sapiens
acctctttgtgcctg

SEQ ID NO: 1353222 - DNA, 15 bp, Homo sapiens
cacctctttgtgcct

SEQ ID NO: 1353223 - DNA, 15 bp, Homo sapiens
gcacctctttgtgcc

SEQ ID NO: 1353224 - DNA, 15 bp, Homo sapiens
agcacctctttgtgc

SEQ ID NO: 1353225 - DNA, 15 bp, Homo sapiens
gagcacctctttgtg

SEQ ID NO: 1353226 - DNA, 15 bp, Homo sapiens
tgagcacctctttgt

SEQ ID NO: 1353227 - DNA, 15 bp, Homo sapiens
ctgagcacctctttg

SEQ ID NO: 1353228 - DNA, 15 bp, Homo sapiens
cctgagcacctcttt

SEQ ID NO: 1353229 - DNA, 15 bp, Homo sapiens
tcctgagcacctctt

SEQ ID NO: 1353230 - DNA, 15 bp, Homo sapiens
ttcctgagcacctct

SEQ ID NO: 1353231 - DNA, 15 bp, Homo sapiens
cttcctgagcacctc

SEQ ID NO: 1353232 - DNA, 15 bp, Homo sapiens
ccttcctgagcacct

SEQ ID NO: 1353233 - DNA, 15 bp, Homo sapiens
gccttcctgagcacc

SEQ ID NO: 1353234 - DNA, 15 bp, Homo sapiens
agccttcctgagcac

SEQ ID NO: 1353235 - DNA, 15 bp, Homo sapiens
cagccttcctgagca

SEQ ID NO: 1353236 - DNA, 15 bp, Homo sapiens
tcagccttcctgagc

SEQ ID NO: 1353237 - DNA, 15 bp, Homo sapiens
atcagccttcctgag

SEQ ID NO: 1353238 - DNA, 15 bp, Homo sapiens
aatcagccttcctga

SEQ ID NO: 1353239 - DNA, 15 bp, Homo sapiens
caatcagccttcctg

SEQ ID NO: 1353240 - DNA, 15 bp, Homo sapiens
gcaatcagccttcct

SEQ ID NO: 1353241 - DNA, 15 bp, Homo sapiens
ggcaatcagccttcc

SEQ ID NO: 1353242 - DNA, 15 bp, Homo sapiens
aggcaatcagccttc

SEQ ID NO: 1353243 - DNA, 15 bp, Homo sapiens
caggcaatcagcctt

SEQ ID NO: 1353244 - DNA, 15 bp, Homo sapiens
acaggcaatcagcct

SEQ ID NO: 1353245 - DNA, 15 bp, Homo sapiens
gacaggcaatcagcc

SEQ ID NO: 1353246 - DNA, 15 bp, Homo sapiens
ggacaggcaatcagc

SEQ ID NO: 1353247 - DNA, 15 bp, Homo sapiens
gggacaggcaatcag

SEQ ID NO: 1353248 - DNA, 15 bp, Homo sapiens
agggacaggcaatca

SEQ ID NO: 1353249 - DNA, 15 bp, Homo sapiens
cagggacaggcaatc

SEQ ID NO: 1353250 - DNA, 15 bp, Homo sapiens
ccagggacaggcaat

SEQ ID NO: 1353251 - DNA, 15 bp, Homo sapiens
tccagggacaggcaa

SEQ ID NO: 1353252 - DNA, 15 bp, Homo sapiens
ctccagggacaggca

SEQ ID NO: 1353253 - DNA, 15 bp, Homo sapiens
cctccagggacaggc

SEQ ID NO: 1353254 - DNA, 15 bp, Homo sapiens
acctccagggacagg

SEQ ID NO: 1353255 - DNA, 15 bp, Homo sapiens
cacctccagggacag

SEQ ID NO: 1353256 - DNA, 15 bp, Homo sapiens
tcacctccagggaca

SEQ ID NO: 1353257 - DNA, 15 bp, Homo sapiens
ctcacctccagggac

SEQ ID NO: 1353258 - DNA, 15 bp, Homo sapiens
gctcacctccaggga

SEQ ID NO: 1353259 - DNA, 15 bp, Homo sapiens
ggctcacctccaggg

SEQ ID NO: 1353260 - DNA, 15 bp, Homo sapiens
gggctcacctccagg

SEQ ID NO: 1353261 - DNA, 15 bp, Homo sapiens
agggctcacctccag

SEQ ID NO: 1353262 - DNA, 15 bp, Homo sapiens
gagggctcacctcca

SEQ ID NO: 1353263 - DNA, 15 bp, Homo sapiens
ggagggctcacctcc

SEQ ID NO: 1353264 - DNA, 15 bp, Homo sapiens
gggagggctcacctc

SEQ ID NO: 1353265 - DNA, 15 bp, Homo sapiens
agggagggctcacct

SEQ ID NO: 1353266 - DNA, 15 bp, Homo sapiens
aagggagggctcacc

SEQ ID NO: 1353267 - DNA, 15 bp, Homo sapiens
aaagggagggctcac

SEQ ID NO: 1353268 - DNA, 15 bp, Homo sapiens
gaaagggagggctca

SEQ ID NO: 1353269 - DNA, 15 bp, Homo sapiens
tgaaagggagggctc

SEQ ID NO: 1353270 - DNA, 15 bp, Homo sapiens
atgaaagggagggct

SEQ ID NO: 1353271 - DNA, 15 bp, Homo sapiens
gatgaaagggagggc

SEQ ID NO: 1353272 - DNA, 15 bp, Homo sapiens
ggatgaaagggaggg

SEQ ID NO: 1353273 - DNA, 15 bp, Homo sapiens
aggatgaaagggagg

SEQ ID NO: 1353274 - DNA, 15 bp, Homo sapiens
gaggatgaaagggag

SEQ ID NO: 1353275 - DNA, 15 bp, Homo sapiens
ggaggatgaaaggga

SEQ ID NO: 1353276 - DNA, 15 bp, Homo sapiens
gggaggatgaaaggg

SEQ ID NO: 1353277 - DNA, 15 bp, Homo sapiens
ggggaggatgaaagg

SEQ ID NO: 1353278 - DNA, 15 bp, Homo sapiens
tggggaggatgaaag

SEQ ID NO: 1353279 - DNA, 15 bp, Homo sapiens
atggggaggatgaaa

SEQ ID NO: 1353280 - DNA, 15 bp, Homo sapiens
gatggggaggatgaa

SEQ ID NO: 1353281 - DNA, 15 bp, Homo sapiens
agatggggaggatga

SEQ ID NO: 1353282 - DNA, 15 bp, Homo sapiens
cagatggggaggatg

SEQ ID NO: 1353283 - DNA, 15 bp, Homo sapiens
acagatggggaggat

SEQ ID NO: 1353284 - DNA, 15 bp, Homo sapiens
cacagatggggagga

SEQ ID NO: 1353285 - DNA, 15 bp, Homo sapiens
gcacagatggggagg

SEQ ID NO: 1353286 - DNA, 15 bp, Homo sapiens
ggcacagatggggag

SEQ ID NO: 1353287 - DNA, 15 bp, Homo sapiens
gggcacagatgggga

SEQ ID NO: 1353288 - DNA, 15 bp, Homo sapiens
agggcacagatgggg

SEQ ID NO: 1353289 - DNA, 15 bp, Homo sapiens
cagggcacagatggg

SEQ ID NO: 1353290 - DNA, 15 bp, Homo sapiens
tcagggcacagatgg

SEQ ID NO: 1353291 - DNA, 15 bp, Homo sapiens
ttcagggcacagatg

SEQ ID NO: 1353292 - DNA, 15 bp, Homo sapiens
attcagggcacagat

SEQ ID NO: 1353293 - DNA, 15 bp, Homo sapiens
aattcagggcacaga

SEQ ID NO: 1353294 - DNA, 15 bp, Homo sapiens
caattcagggcacag

SEQ ID NO: 1353295 - DNA, 15 bp, Homo sapiens
ccaattcagggcaca

SEQ ID NO: 1353296 - DNA, 15 bp, Homo sapiens
gccaattcagggcac

SEQ ID NO: 1353297 - DNA, 15 bp, Homo sapiens
ggccaattcagggca

SEQ ID NO: 1353298 - DNA, 15 bp, Homo sapiens
cggccaattcagggc

SEQ ID NO: 1353299 - DNA, 15 bp, Homo sapiens
gcggccaattcaggg

SEQ ID NO: 1353300 - DNA, 15 bp, Homo sapiens
ggcggccaattcagg

SEQ ID NO: 1353301 - DNA, 15 bp, Homo sapiens
tggcggccaattcag

SEQ ID NO: 1353302 - DNA, 15 bp, Homo sapiens
gtggcggccaattca

SEQ ID NO: 1353303 - DNA, 15 bp, Homo sapiens
tgtggcggccaattc

SEQ ID NO: 1353304 - DNA, 15 bp, Homo sapiens
ctgtggcggccaatt

SEQ ID NO: 1353305 - DNA, 15 bp, Homo sapiens
cctgtggcggccaat

SEQ ID NO: 1353306 - DNA, 15 bp, Homo sapiens
ccctgtggcggccaa

SEQ ID NO: 1353307 - DNA, 15 bp, Homo sapiens
tccctgtggcggcca

SEQ ID NO: 1353308 - DNA, 15 bp, Homo sapiens
gtccctgtggcggcc

SEQ ID NO: 1353309 - DNA, 15 bp, Homo sapiens
agtccctgtggcggc

SEQ ID NO: 1353310 - DNA, 15 bp, Homo sapiens
aagtccctgtggcgg

SEQ ID NO: 1353311 - DNA, 15 bp, Homo sapiens
caagtccctgtggcg

SEQ ID NO: 1353312 - DNA, 15 bp, Homo sapiens
tcaagtccctgtggc

SEQ ID NO: 1353313 - DNA, 15 bp, Homo sapiens
ctcaagtccctgtgg

SEQ ID NO: 1353314 - DNA, 15 bp, Homo sapiens
cctcaagtccctgtg

SEQ ID NO: 1353315 - DNA, 15 bp, Homo sapiens
ccctcaagtccctgt

SEQ ID NO: 1353316 - DNA, 15 bp, Homo sapiens
cccctcaagtccctg

SEQ ID NO: 1353317 - DNA, 15 bp, Homo sapiens
ccccctcaagtccct

SEQ ID NO: 1353318 - DNA, 15 bp, Homo sapiens
gccccctcaagtccc

SEQ ID NO: 1353319 - DNA, 15 bp, Homo sapiens
agccccctcaagtcc

SEQ ID NO: 1353320 - DNA, 15 bp, Homo sapiens
cagccccctcaagtc

SEQ ID NO: 1353321 - DNA, 15 bp, Homo sapiens
tcagccccctcaagt

SEQ ID NO: 1353322 - DNA, 15 bp, Homo sapiens
ctcagccccctcaag

SEQ ID NO: 1353323 - DNA, 15 bp, Homo sapiens
tctcagccccctcaa

SEQ ID NO: 1353324 - DNA, 15 bp, Homo sapiens
ttctcagccccctca

SEQ ID NO: 1353325 - DNA, 15 bp, Homo sapiens
cttctcagccccctc

SEQ ID NO: 1353326 - DNA, 15 bp, Homo sapiens
tcttctcagccccct

SEQ ID NO: 1353327 - DNA, 15 bp, Homo sapiens
ttcttctcagccccc

SEQ ID NO: 1353328 - DNA, 15 bp, Homo sapiens
attcttctcagcccc

SEQ ID NO: 1353329 - DNA, 15 bp, Homo sapiens
cattcttctcagccc

SEQ ID NO: 1353330 - DNA, 15 bp, Homo sapiens
ccattcttctcagcc

SEQ ID NO: 1353331 - DNA, 15 bp, Homo sapiens
cccattcttctcagc

SEQ ID NO: 1353332 - DNA, 15 bp, Homo sapiens
ccccattcttctcag

SEQ ID NO: 1353333 - DNA, 15 bp, Homo sapiens
tccccattcttctca

SEQ ID NO: 1353334 - DNA, 15 bp, Homo sapiens
gtccccattcttctc

SEQ ID NO: 1353335 - DNA, 15 bp, Homo sapiens
tgtccccattcttct

SEQ ID NO: 1353336 - DNA, 15 bp, Homo sapiens
ttgtccccattcttc

SEQ ID NO: 1353337 - DNA, 15 bp, Homo sapiens
attgtccccattctt

SEQ ID NO: 1353338 - DNA, 15 bp, Homo sapiens
cattgtccccattct

SEQ ID NO: 1353339 - DNA, 15 bp, Homo sapiens
ccattgtccccattc

SEQ ID NO: 1353340 - DNA, 15 bp, Homo sapiens
tccattgtccccatt

SEQ ID NO: 1353341 - DNA, 15 bp, Homo sapiens
ctccattgtccccat

SEQ ID NO: 1353342 - DNA, 15 bp, Homo sapiens
cctccattgtcccca

SEQ ID NO: 1353343 - DNA, 15 bp, Homo sapiens
tcctccattgtcccc

SEQ ID NO: 1353344 - DNA, 15 bp, Homo sapiens
ttcctccattgtccc

SEQ ID NO: 1353345 - DNA, 15 bp, Homo sapiens
cttcctccattgtcc

SEQ ID NO: 1353346 - DNA, 15 bp, Homo sapiens
tcttcctccattgtc

SEQ ID NO: 1353347 - DNA, 15 bp, Homo sapiens
ttcttcctccattgt

SEQ ID NO: 1353348 - DNA, 15 bp, Homo sapiens
cttcttcctccattg

SEQ ID NO: 1353349 - DNA, 15 bp, Homo sapiens
gcttcttcctccatt

SEQ ID NO: 1353350 - DNA, 15 bp, Homo sapiens
tgcttcttcctccat

SEQ ID NO: 1353351 - DNA, 15 bp, Homo sapiens
atgcttcttcctcca

SEQ ID NO: 1353352 - DNA, 15 bp, Homo sapiens
catgcttcttcctcc

SEQ ID NO: 1353353 - DNA, 15 bp, Homo sapiens
acatgcttcttcctc

SEQ ID NO: 1353354 - DNA, 15 bp, Homo sapiens
gacatgcttcttcct

SEQ ID NO: 1353355 - DNA, 15 bp, Homo sapiens
agacatgcttcttcc

SEQ ID NO: 1353356 - DNA, 15 bp, Homo sapiens
aagacatgcttcttc

SEQ ID NO: 1353357 - DNA, 15 bp, Homo sapiens
aaagacatgcttctt

SEQ ID NO: 1353358 - DNA, 15 bp, Homo sapiens
gaaagacatgcttct

SEQ ID NO: 1353359 - DNA, 15 bp, Homo sapiens
agaaagacatgcttc

SEQ ID NO: 1353360 - DNA, 15 bp, Homo sapiens
tagaaagacatgctt

SEQ ID NO: 1353361 - DNA, 15 bp, Homo sapiens
ctagaaagacatgct

SEQ ID NO: 1353362 - DNA, 15 bp, Homo sapiens
cctagaaagacatgc

SEQ ID NO: 1353363 - DNA, 15 bp, Homo sapiens
tcctagaaagacatg

SEQ ID NO: 1353364 - DNA, 15 bp, Homo sapiens
ctcctagaaagacat

SEQ ID NO: 1353365 - DNA, 15 bp, Homo sapiens
actcctagaaagaca

SEQ ID NO: 1353366 - DNA, 15 bp, Homo sapiens
aactcctagaaagac

SEQ ID NO: 1353367 - DNA, 15 bp, Homo sapiens
gaactcctagaaaga

SEQ ID NO: 1353368 - DNA, 15 bp, Homo sapiens
tgaactcctagaaag

SEQ ID NO: 1353369 - DNA, 15 bp, Homo sapiens
atgaactcctagaaa

SEQ ID NO: 1353370 - DNA, 15 bp, Homo sapiens
tatgaactcctagaa

SEQ ID NO: 1353371 - DNA, 15 bp, Homo sapiens
ctatgaactcctaga

SEQ ID NO: 1353372 - DNA, 15 bp, Homo sapiens
gctatgaactcctag

SEQ ID NO: 1353373 - DNA, 15 bp, Homo sapiens
ggctatgaactccta

SEQ ID NO: 1353374 - DNA, 15 bp, Homo sapiens
tggctatgaactcct

SEQ ID NO: 1353375 - DNA, 15 bp, Homo sapiens
ttggctatgaactcc

SEQ ID NO: 1353376 - DNA, 15 bp, Homo sapiens
tttggctatgaactc

SEQ ID NO: 1353377 - DNA, 15 bp, Homo sapiens
ctttggctatgaact

SEQ ID NO: 1353378 - DNA, 15 bp, Homo sapiens
tctttggctatgaac

SEQ ID NO: 1353379 - DNA, 15 bp, Homo sapiens
gtctttggctatgaa

SEQ ID NO: 1353380 - DNA, 15 bp, Homo sapiens
tgtctttggctatga

SEQ ID NO: 1353381 - DNA, 15 bp, Homo sapiens
gtgtctttggctatg

SEQ ID NO: 1353382 - DNA, 15 bp, Homo sapiens
cgtgtctttggctat

SEQ ID NO: 1353383 - DNA, 15 bp, Homo sapiens
ccgtgtctttggcta

SEQ ID NO: 1353384 - DNA, 15 bp, Homo sapiens
tccgtgtctttggct

SEQ ID NO: 1353385 - DNA, 15 bp, Homo sapiens
atccgtgtctttggc

SEQ ID NO: 1353386 - DNA, 15 bp, Homo sapiens
catccgtgtctttgg

SEQ ID NO: 1353387 - DNA, 15 bp, Homo sapiens
gcatccgtgtctttg

SEQ ID NO: 1353388 - DNA, 15 bp, Homo sapiens
tgcatccgtgtcttt

SEQ ID NO: 1353389 - DNA, 15 bp, Homo sapiens
ttgcatccgtgtctt

SEQ ID NO: 1353390 - DNA, 15 bp, Homo sapiens
cttgcatccgtgtct

SEQ ID NO: 1353391 - DNA, 15 bp, Homo sapiens
tcttgcatccgtgtc

SEQ ID NO: 1353392 - DNA, 15 bp, Homo sapiens
ctcttgcatccgtgt

SEQ ID NO: 1353393 - DNA, 15 bp, Homo sapiens
tctcttgcatccgtg

SEQ ID NO: 1353394 - DNA, 15 bp, Homo sapiens
ttctcttgcatccgt

SEQ ID NO: 1353395 - DNA, 15 bp, Homo sapiens
cttctcttgcatccg

SEQ ID NO: 1353396 - DNA, 15 bp, Homo sapiens
tcttctcttgcatcc

SEQ ID NO: 1353397 - DNA, 15 bp, Homo sapiens
gtcttctcttgcatc

SEQ ID NO: 1353398 - DNA, 15 bp, Homo sapiens
tgtcttctcttgcat

SEQ ID NO: 1353399 - DNA, 15 bp, Homo sapiens
ctgtcttctcttgca

SEQ ID NO: 1353400 - DNA, 15 bp, Homo sapiens
gctgtcttctcttgc

SEQ ID NO: 1353401 - DNA, 15 bp, Homo sapiens
agctgtcttctcttg

SEQ ID NO: 1353402 - DNA, 15 bp, Homo sapiens
cagctgtcttctctt

SEQ ID NO: 1353403 - DNA, 15 bp, Homo sapiens
ccagctgtcttctct

SEQ ID NO: 1353404 - DNA, 15 bp, Homo sapiens
tccagctgtcttctc

SEQ ID NO: 1353405 - DNA, 15 bp, Homo sapiens
atccagctgtcttct

SEQ ID NO: 1353406 - DNA, 15 bp, Homo sapiens
gatccagctgtcttc

SEQ ID NO: 1353407 - DNA, 15 bp, Homo sapiens
agatccagctgtctt

SEQ ID NO: 1353408 - DNA, 15 bp, Homo sapiens
tagatccagctgtct

SEQ ID NO: 1353409 - DNA, 15 bp, Homo sapiens
gtagatccagctgtc

SEQ ID NO: 1353410 - DNA, 15 bp, Homo sapiens
ggtagatccagctgt

SEQ ID NO: 1353411 - DNA, 15 bp, Homo sapiens
aggtagatccagctg

SEQ ID NO: 1353412 - DNA, 15 bp, Homo sapiens
gaggtagatccagct

SEQ ID NO: 1353413 - DNA, 15 bp, Homo sapiens
tgaggtagatccagc

SEQ ID NO: 1353414 - DNA, 15 bp, Homo sapiens
ctgaggtagatccag

SEQ ID NO: 1353415 - DNA, 15 bp, Homo sapiens
cctgaggtagatcca

SEQ ID NO: 1353416 - DNA, 15 bp, Homo sapiens
ccctgaggtagatcc

SEQ ID NO: 1353417 - DNA, 15 bp, Homo sapiens
gccctgaggtagatc

SEQ ID NO: 1353418 - DNA, 15 bp, Homo sapiens
ggccctgaggtagat

SEQ ID NO: 1353419 - DNA, 15 bp, Homo sapiens
aggccctgaggtaga

SEQ ID NO: 1353420 - DNA, 15 bp, Homo sapiens
aaggccctgaggtag

SEQ ID NO: 1353421 - DNA, 15 bp, Homo sapiens
aaaggccctgaggta

SEQ ID NO: 1353422 - DNA, 15 bp, Homo sapiens
caaaggccctgaggt

SEQ ID NO: 1353423 - DNA, 15 bp, Homo sapiens
gcaaaggccctgagg

SEQ ID NO: 1353424 - DNA, 15 bp, Homo sapiens
tgcaaaggccctgag

SEQ ID NO: 1353425 - DNA, 15 bp, Homo sapiens
gtgcaaaggccctga

SEQ ID NO: 1353426 - DNA, 15 bp, Homo sapiens
agtgcaaaggccctg

SEQ ID NO: 1353427 - DNA, 15 bp, Homo sapiens
cagtgcaaaggccct

SEQ ID NO: 1353428 - DNA, 15 bp, Homo sapiens
ccagtgcaaaggccc

SEQ ID NO: 1353429 - DNA, 15 bp, Homo sapiens
gccagtgcaaaggcc

SEQ ID NO: 1353430 - DNA, 15 bp, Homo sapiens
agccagtgcaaaggc

SEQ ID NO: 1353431 - DNA, 15 bp, Homo sapiens
cagccagtgcaaagg

SEQ ID NO: 1353432 - DNA, 15 bp, Homo sapiens
acagccagtgcaaag

SEQ ID NO: 1353433 - DNA, 15 bp, Homo sapiens
aacagccagtgcaaa

SEQ ID NO: 1353434 - DNA, 15 bp, Homo sapiens
gaacagccagtgcaa

SEQ ID NO: 1353435 - DNA, 15 bp, Homo sapiens
ggaacagccagtgca

SEQ ID NO: 1353436 - DNA, 15 bp, Homo sapiens
tggaacagccagtgc

SEQ ID NO: 1353437 - DNA, 15 bp, Homo sapiens
ctggaacagccagtg

SEQ ID NO: 1353438 - DNA, 15 bp, Homo sapiens
gctggaacagccagt

SEQ ID NO: 1353439 - DNA, 15 bp, Homo sapiens
ggctggaacagccag

SEQ ID NO: 1353440 - DNA, 15 bp, Homo sapiens
tggctggaacagcca

SEQ ID NO: 1353441 - DNA, 15 bp, Homo sapiens
gtggctggaacagcc

SEQ ID NO: 1353442 - DNA, 15 bp, Homo sapiens
agtggctggaacagc

SEQ ID NO: 1353443 - DNA, 15 bp, Homo sapiens
aagtggctggaacag

SEQ ID NO: 1353444 - DNA, 15 bp, Homo sapiens
caagtggctggaaca

SEQ ID NO: 1353445 - DNA, 15 bp, Homo sapiens
ccaagtggctggaac

SEQ ID NO: 1353446 - DNA, 15 bp, Homo sapiens
tccaagtggctggaa

SEQ ID NO: 1353447 - DNA, 15 bp, Homo sapiens
ttccaagtggctgga

SEQ ID NO: 1353448 - DNA, 15 bp, Homo sapiens
attccaagtggctgg

SEQ ID NO: 1353449 - DNA, 15 bp, Homo sapiens
cattccaagtggctg

SEQ ID NO: 1353450 - DNA, 15 bp, Homo sapiens
gcattccaagtggct

SEQ ID NO: 1353451 - DNA, 15 bp, Homo sapiens
tgcattccaagtggc

SEQ ID NO: 1353452 - DNA, 15 bp, Homo sapiens
ttgcattccaagtgg

SEQ ID NO: 1353453 - DNA, 15 bp, Homo sapiens
attgcattccaagtg

SEQ ID NO: 1353454 - DNA, 15 bp, Homo sapiens
aattgcattccaagt

SEQ ID NO: 1353455 - DNA, 15 bp, Homo sapiens
gaattgcattccaag

SEQ ID NO: 1353456 - DNA, 15 bp, Homo sapiens
ggaattgcattccaa

SEQ ID NO: 1353457 - DNA, 15 bp, Homo sapiens
aggaattgcattcca

SEQ ID NO: 1353458 - DNA, 15 bp, Homo sapiens
caggaattgcattcc

SEQ ID NO: 1353459 - DNA, 15 bp, Homo sapiens
gcaggaattgcattc

SEQ ID NO: 1353460 - DNA, 15 bp, Homo sapiens
tgcaggaattgcatt

SEQ ID NO: 1353461 - DNA, 15 bp, Homo sapiens
ttgcaggaattgcat

SEQ ID NO: 1353462 - DNA, 15 bp, Homo sapiens
tttgcaggaattgca

SEQ ID NO: 1353463 - DNA, 15 bp, Homo sapiens
gtttgcaggaattgc

SEQ ID NO: 1353464 - DNA, 15 bp, Homo sapiens
agtttgcaggaattg

SEQ ID NO: 1353465 - DNA, 15 bp, Homo sapiens
gagtttgcaggaatt

SEQ ID NO: 1353466 - DNA, 15 bp, Homo sapiens
agagtttgcaggaat

SEQ ID NO: 1353467 - DNA, 15 bp, Homo sapiens
gagagtttgcaggaa

SEQ ID NO: 1353468 - DNA, 15 bp, Homo sapiens
agagagtttgcagga

SEQ ID NO: 1353469 - DNA, 15 bp, Homo sapiens
gagagagtttgcagg

SEQ ID NO: 1353470 - DNA, 15 bp, Homo sapiens
ggagagagtttgcag

SEQ ID NO: 1353471 - DNA, 15 bp, Homo sapiens
gggagagagtttgca

SEQ ID NO: 1353472 - DNA, 15 bp, Homo sapiens
ggggagagagtttgc

SEQ ID NO: 1353473 - DNA, 15 bp, Homo sapiens
gggggagagagtttg

SEQ ID NO: 1353474 - DNA, 15 bp, Homo sapiens
tgggggagagagttt

SEQ ID NO: 1353475 - DNA, 15 bp, Homo sapiens
gtgggggagagagtt

SEQ ID NO: 1353476 - DNA, 15 bp, Homo sapiens
agtgggggagagagt

SEQ ID NO: 1353477 - DNA, 15 bp, Homo sapiens
gagtgggggagagag

SEQ ID NO: 1353478 - DNA, 15 bp, Homo sapiens
ggagtgggggagaga

SEQ ID NO: 1353479 - DNA, 15 bp, Homo sapiens
gggagtgggggagag

SEQ ID NO: 1353480 - DNA, 15 bp, Homo sapiens
ggggagtgggggaga

SEQ ID NO: 1353481 - DNA, 15 bp, Homo sapiens
aggggagtgggggag

SEQ ID NO: 1353482 - DNA, 15 bp, Homo sapiens
aaggggagtggggga

SEQ ID NO: 1353483 - DNA, 15 bp, Homo sapiens
gaaggggagtggggg

SEQ ID NO: 1353484 - DNA, 15 bp, Homo sapiens
ggaaggggagtgggg

SEQ ID NO: 1353485 - DNA, 15 bp, Homo sapiens
gggaaggggagtggg

SEQ ID NO: 1353486 - DNA, 15 bp, Homo sapiens
agggaaggggagtgg

SEQ ID NO: 1353487 - DNA, 15 bp, Homo sapiens
aagggaaggggagtg

SEQ ID NO: 1353488 - DNA, 15 bp, Homo sapiens
aaagggaaggggagt

SEQ ID NO: 1353489 - DNA, 15 bp, Homo sapiens
aaaagggaaggggag

SEQ ID NO: 1353490 - DNA, 15 bp, Homo sapiens
aaaaagggaagggga

SEQ ID NO: 1353491 - DNA, 15 bp, Homo sapiens
gaaaaagggaagggg

SEQ ID NO: 1353492 - DNA, 15 bp, Homo sapiens
agaaaaagggaaggg

SEQ ID NO: 1353493 - DNA, 15 bp, Homo sapiens
aagaaaaagggaagg

SEQ ID NO: 1353494 - DNA, 15 bp, Homo sapiens
aaagaaaaagggaag

SEQ ID NO: 1353495 - DNA, 15 bp, Homo sapiens
aaaagaaaaagggaa

SEQ ID NO: 1353496 - DNA, 15 bp, Homo sapiens
aaaaagaaaaaggga

SEQ ID NO: 1353497 - DNA, 15 bp, Homo sapiens
aaaaaagaaaaaggg

SEQ ID NO: 1353498 - DNA, 15 bp, Homo sapiens
aaaaaaaagaaaaag

SEQ ID NO: 1353499 - DNA, 15 bp, Homo sapiens
ctcaaaaaagaaaaa

SEQ ID NO: 1353500 - DNA, 15 bp, Homo sapiens
tctcaaaaaagaaaa

SEQ ID NO: 1353501 - DNA, 15 bp, Homo sapiens
atctcaaaaaagaaa

SEQ ID NO: 1353502 - DNA, 15 bp, Homo sapiens
catctcaaaaaagaa

SEQ ID NO: 1353503 - DNA, 15 bp, Homo sapiens
ccatctcaaaaaaga

SEQ ID NO: 1353504 - DNA, 15 bp, Homo sapiens
tccatctcaaaaaag

SEQ ID NO: 1353505 - DNA, 15 bp, Homo sapiens
tgcagcctgggcaac

SEQ ID NO: 1353506 - DNA, 15 bp, Homo sapiens
ctgcagcctgggcaa

SEQ ID NO: 1353507 - DNA, 15 bp, Homo sapiens
actgcagcctgggca

SEQ ID NO: 1353508 - DNA, 15 bp, Homo sapiens
cactgcagcctgggc

SEQ ID NO: 1353509 - DNA, 15 bp, Homo sapiens
gcactgcagcctggg

SEQ ID NO: 1353510 - DNA, 15 bp, Homo sapiens
tgcactgcagcctgg

SEQ ID NO: 1353511 - DNA, 15 bp, Homo sapiens
ttgcactgcagcctg

SEQ ID NO: 1353512 - DNA, 15 bp, Homo sapiens
attgcactgcagcct

SEQ ID NO: 1353513 - DNA, 15 bp, Homo sapiens
cattgcactgcagcc

SEQ ID NO: 1353514 - DNA, 15 bp, Homo sapiens
ccattgcactgcagc

SEQ ID NO: 1353515 - DNA, 15 bp, Homo sapiens
gccattgcactgcag

SEQ ID NO: 1353516 - DNA, 15 bp, Homo sapiens
tgccattgcactgca

SEQ ID NO: 1353517 - DNA, 15 bp, Homo sapiens
gtgccattgcactgc

SEQ ID NO: 1353518 - DNA, 15 bp, Homo sapiens
tgtgccattgcactg

SEQ ID NO: 1353519 - DNA, 15 bp, Homo sapiens
gagattgtgccattg

SEQ ID NO: 1353520 - DNA, 15 bp, Homo sapiens
tgagattgtgccatt

SEQ ID NO: 1353521 - DNA, 15 bp, Homo sapiens
ctgagattgtgccat

SEQ ID NO: 1353522 - DNA, 15 bp, Homo sapiens
gctgagattgtgcca

SEQ ID NO: 1353523 - DNA, 15 bp, Homo sapiens
agctgagattgtgcc

SEQ ID NO: 1353524 - DNA, 15 bp, Homo sapiens
gagctgagattgtgc

SEQ ID NO: 1353525 - DNA, 15 bp, Homo sapiens
gcgggcacctgtaat

SEQ ID NO: 1353526 - DNA, 15 bp, Homo sapiens
ggcgggcacctgtaa

SEQ ID NO: 1353527 - DNA, 15 bp, Homo sapiens
cggtggcgggcacct

SEQ ID NO: 1353528 - DNA, 15 bp, Homo sapiens
acggtggcgggcacc

SEQ ID NO: 1353529 - DNA, 15 bp, Homo sapiens
cacggtggcgggcac

SEQ ID NO: 1353530 - DNA, 15 bp, Homo sapiens
gcacggtggcgggca

SEQ ID NO: 1353531 - DNA, 15 bp, Homo sapiens
ggcacggtggcgggc

SEQ ID NO: 1353532 - DNA, 15 bp, Homo sapiens
gggcacggtggcggg

SEQ ID NO: 1353533 - DNA, 15 bp, Homo sapiens
tgggcacggtggcgg

SEQ ID NO: 1353534 - DNA, 15 bp, Homo sapiens
ctgggcacggtggcg

SEQ ID NO: 1353535 - DNA, 15 bp, Homo sapiens
agctgggcacggtgg

SEQ ID NO: 1353536 - DNA, 15 bp, Homo sapiens
tagctgggcacggtg

SEQ ID NO: 1353537 - DNA, 15 bp, Homo sapiens
ttagctgggcacggt

SEQ ID NO: 1353538 - DNA, 15 bp, Homo sapiens
attagctgggcacgg

SEQ ID NO: 1353539 - DNA, 15 bp, Homo sapiens
aattagctgggcacg

SEQ ID NO: 1353540 - DNA, 15 bp, Homo sapiens
ttgtctctactaaaa

SEQ ID NO: 1353541 - DNA, 15 bp, Homo sapiens
gttgtctctactaaa

SEQ ID NO: 1353542 - DNA, 15 bp, Homo sapiens
cgttgtctctactaa

SEQ ID NO: 1353543 - DNA, 15 bp, Homo sapiens
acgttgtctctacta

SEQ ID NO: 1353544 - DNA, 15 bp, Homo sapiens
aacgttgtctctact

SEQ ID NO: 1353545 - DNA, 15 bp, Homo sapiens
aaacgttgtctctac

SEQ ID NO: 1353546 - DNA, 15 bp, Homo sapiens
gaaacgttgtctcta

SEQ ID NO: 1353547 - DNA, 15 bp, Homo sapiens
tgaaacgttgtctct

SEQ ID NO: 1353548 - DNA, 15 bp, Homo sapiens
gtgaaacgttgtctc

SEQ ID NO: 1353549 - DNA, 15 bp, Homo sapiens
ggtgaaacgttgtct

SEQ ID NO: 1353550 - DNA, 15 bp, Homo sapiens
tggtgaaacgttgtc

SEQ ID NO: 1353551 - DNA, 15 bp, Homo sapiens
atggtgaaacgttgt

SEQ ID NO: 1353552 - DNA, 15 bp, Homo sapiens
catggtgaaacgttg

SEQ ID NO: 1353553 - DNA, 15 bp, Homo sapiens
acatggtgaaacgtt

SEQ ID NO: 1353554 - DNA, 15 bp, Homo sapiens
aacatggtgaaacgt

SEQ ID NO: 1353555 - DNA, 15 bp, Homo sapiens
caacatggtgaaacg

SEQ ID NO: 1353556 - DNA, 15 bp, Homo sapiens
gagcctggccaacat

SEQ ID NO: 1353557 - DNA, 15 bp, Homo sapiens
cgagcctggccaaca

SEQ ID NO: 1353558 - DNA, 15 bp, Homo sapiens
acgagcctggccaac

SEQ ID NO: 1353559 - DNA, 15 bp, Homo sapiens
gacgagcctggccaa

SEQ ID NO: 1353560 - DNA, 15 bp, Homo sapiens
agacgagcctggcca

SEQ ID NO: 1353561 - DNA, 15 bp, Homo sapiens
aagacgagcctggcc

SEQ ID NO: 1353562 - DNA, 15 bp, Homo sapiens
caagacgagcctggc

SEQ ID NO: 1353563 - DNA, 15 bp, Homo sapiens
gtgaggtcaggagtt

SEQ ID NO: 1353564 - DNA, 15 bp, Homo sapiens
cgtgaggtcaggagt

SEQ ID NO: 1353565 - DNA, 15 bp, Homo sapiens
acgtgaggtcaggag

SEQ ID NO: 1353566 - DNA, 15 bp, Homo sapiens
cacgtgaggtcagga

SEQ ID NO: 1353567 - DNA, 15 bp, Homo sapiens
tcacgtgaggtcagg

SEQ ID NO: 1353568 - DNA, 15 bp, Homo sapiens
atcacgtgaggtcag

SEQ ID NO: 1353569 - DNA, 15 bp, Homo sapiens
gatcacgtgaggtca

SEQ ID NO: 1353570 - DNA, 15 bp, Homo sapiens
agatcacgtgaggtc

SEQ ID NO: 1353571 - DNA, 15 bp, Homo sapiens
cagatcacgtgaggt

SEQ ID NO: 1353572 - DNA, 15 bp, Homo sapiens
gcagatcacgtgagg

SEQ ID NO: 1353573 - DNA, 15 bp, Homo sapiens
ggcagatcacgtgag

SEQ ID NO: 1353574 - DNA, 15 bp, Homo sapiens
aggcagatcacgtga

SEQ ID NO: 1353575 - DNA, 15 bp, Homo sapiens
caggcagatcacgtg

SEQ ID NO: 1353576 - DNA, 15 bp, Homo sapiens
gcaggcagatcacgt

SEQ ID NO: 1353577 - DNA, 15 bp, Homo sapiens
ggcaggcagatcacg

SEQ ID NO: 1353578 - DNA, 15 bp, Homo sapiens
aaggcaggcagatca

SEQ ID NO: 1353579 - DNA, 15 bp, Homo sapiens
gagggctgggcgtgg

SEQ ID NO: 1353580 - DNA, 15 bp, Homo sapiens
ggagggctgggcgtg

SEQ ID NO: 1353581 - DNA, 15 bp, Homo sapiens
gggagggctgggcgt

SEQ ID NO: 1353582 - DNA, 15 bp, Homo sapiens
ggggagggctgggcg

SEQ ID NO: 1353583 - DNA, 15 bp, Homo sapiens
aggggagggctgggc

SEQ ID NO: 1353584 - DNA, 15 bp, Homo sapiens
aaggggagggctggg

SEQ ID NO: 1353585 - DNA, 15 bp, Homo sapiens
gaaggggagggctgg

SEQ ID NO: 1353586 - DNA, 15 bp, Homo sapiens
ggaaggggagggctg

SEQ ID NO: 1353587 - DNA, 15 bp, Homo sapiens
gggaaggggagggct

SEQ ID NO: 1353588 - DNA, 15 bp, Homo sapiens
agggaaggggagggc

SEQ ID NO: 1353589 - DNA, 15 bp, Homo sapiens
aagggaaggggaggg

SEQ ID NO: 1353590 - DNA, 15 bp, Homo sapiens
aaagggaaggggagg

SEQ ID NO: 1353591 - DNA, 15 bp, Homo sapiens
gaaagggaaggggag

SEQ ID NO: 1353592 - DNA, 15 bp, Homo sapiens
agaaagggaagggga

SEQ ID NO: 1353593 - DNA, 15 bp, Homo sapiens
tagaaagggaagggg

SEQ ID NO: 1353594 - DNA, 15 bp, Homo sapiens
ttagaaagggaaggg

SEQ ID NO: 1353595 - DNA, 15 bp, Homo sapiens
attagaaagggaagg

SEQ ID NO: 1353596 - DNA, 15 bp, Homo sapiens
gattagaaagggaag

SEQ ID NO: 1353597 - DNA, 15 bp, Homo sapiens
agattagaaagggaa

SEQ ID NO: 1353598 - DNA, 15 bp, Homo sapiens
aagattagaaaggga

SEQ ID NO: 1353599 - DNA, 15 bp, Homo sapiens
aaagattagaaaggg

SEQ ID NO: 1353600 - DNA, 15 bp, Homo sapiens
caaagattagaaagg

SEQ ID NO: 1353601 - DNA, 15 bp, Homo sapiens
gcaaagattagaaag

SEQ ID NO: 1353602 - DNA, 15 bp, Homo sapiens
agcaaagattagaaa

SEQ ID NO: 1353603 - DNA, 15 bp, Homo sapiens
aagcaaagattagaa

SEQ ID NO: 1353604 - DNA, 15 bp, Homo sapiens
aaagcaaagattaga

SEQ ID NO: 1353605 - DNA, 15 bp, Homo sapiens
taaagcaaagattag

SEQ ID NO: 1353606 - DNA, 15 bp, Homo sapiens
ttaaagcaaagatta

SEQ ID NO: 1353607 - DNA, 15 bp, Homo sapiens
attaaagcaaagatt

SEQ ID NO: 1353608 - DNA, 15 bp, Homo sapiens
tattaaagcaaagat

SEQ ID NO: 1353609 - DNA, 15 bp, Homo sapiens
gtattaaagcaaaga

SEQ ID NO: 1353610 - DNA, 15 bp, Homo sapiens
ggtattaaagcaaag

SEQ ID NO: 1353611 - DNA, 15 bp, Homo sapiens
tggtattaaagcaaa

SEQ ID NO: 1353612 - DNA, 15 bp, Homo sapiens
gtggtattaaagcaa

SEQ ID NO: 1353613 - DNA, 15 bp, Homo sapiens
ggtggtattaaagca

SEQ ID NO: 1353614 - DNA, 15 bp, Homo sapiens
aggtggtattaaagc

SEQ ID NO: 1353615 - DNA, 15 bp, Homo sapiens
gaggtggtattaaag

SEQ ID NO: 1353616 - DNA, 15 bp, Homo sapiens
ggaggtggtattaaa

SEQ ID NO: 1353617 - DNA, 15 bp, Homo sapiens
aggaggtggtattaa

SEQ ID NO: 1353618 - DNA, 15 bp, Homo sapiens
gaggaggtggtatta

SEQ ID NO: 1353619 - DNA, 15 bp, Homo sapiens
agaggaggtggtatt

SEQ ID NO: 1353620 - DNA, 15 bp, Homo sapiens
cagaggaggtggtat

SEQ ID NO: 1353621 - DNA, 15 bp, Homo sapiens
ccagaggaggtggta

SEQ ID NO: 1353622 - DNA, 15 bp, Homo sapiens
cccagaggaggtggt

SEQ ID NO: 1353623 - DNA, 15 bp, Homo sapiens
tcccagaggaggtgg

SEQ ID NO: 1353624 - DNA, 15 bp, Homo sapiens
ttcccagaggaggtg

SEQ ID NO: 1353625 - DNA, 15 bp, Homo sapiens
cttcccagaggaggt

SEQ ID NO: 1353626 - DNA, 15 bp, Homo sapiens
gcttcccagaggagg

SEQ ID NO: 1353627 - DNA, 15 bp, Homo sapiens
ggcttcccagaggag

SEQ ID NO: 1353628 - DNA, 15 bp, Homo sapiens
aggcttcccagagga

SEQ ID NO: 1353629 - DNA, 15 bp, Homo sapiens
aaggcttcccagagg

SEQ ID NO: 1353630 - DNA, 15 bp, Homo sapiens
gaaggcttcccagag

SEQ ID NO: 1353631 - DNA, 15 bp, Homo sapiens
ggaaggcttcccaga

SEQ ID NO: 1353632 - DNA, 15 bp, Homo sapiens
gggaaggcttcccag

SEQ ID NO: 1353633 - DNA, 15 bp, Homo sapiens
agggaaggcttccca

SEQ ID NO: 1353634 - DNA, 15 bp, Homo sapiens
cagggaaggcttccc

SEQ ID NO: 1353635 - DNA, 15 bp, Homo sapiens
ccagggaaggcttcc

SEQ ID NO: 1353636 - DNA, 15 bp, Homo sapiens
gccagggaaggcttc

SEQ ID NO: 1353637 - DNA, 15 bp, Homo sapiens
ggccagggaaggctt

SEQ ID NO: 1353638 - DNA, 15 bp, Homo sapiens
tggccagggaaggct

SEQ ID NO: 1353639 - DNA, 15 bp, Homo sapiens
gtggccagggaaggc

SEQ ID NO: 1353640 - DNA, 15 bp, Homo sapiens
ggtggccagggaagg

SEQ ID NO: 1353641 - DNA, 15 bp, Homo sapiens
gggtggccagggaag

SEQ ID NO: 1353642 - DNA, 15 bp, Homo sapiens
agggtggccagggaa

SEQ ID NO: 1353643 - DNA, 15 bp, Homo sapiens
gagggtggccaggga

SEQ ID NO: 1353644 - DNA, 15 bp, Homo sapiens
agagggtggccaggg

SEQ ID NO: 1353645 - DNA, 15 bp, Homo sapiens
aagagggtggccagg

SEQ ID NO: 1353646 - DNA, 15 bp, Homo sapiens
aaagagggtggccag

SEQ ID NO: 1353647 - DNA, 15 bp, Homo sapiens
taaagagggtggcca

SEQ ID NO: 1353648 - DNA, 15 bp, Homo sapiens
ttaaagagggtggcc

SEQ ID NO: 1353649 - DNA, 15 bp, Homo sapiens
tttaaagagggtggc

SEQ ID NO: 1353650 - DNA, 15 bp, Homo sapiens
ttttaaagagggtgg

SEQ ID NO: 1353651 - DNA, 15 bp, Homo sapiens
gttttaaagagggtg

SEQ ID NO: 1353652 - DNA, 15 bp, Homo sapiens
agttttaaagagggt

SEQ ID NO: 1353653 - DNA, 15 bp, Homo sapiens
cagttttaaagaggg

SEQ ID NO: 1353654 - DNA, 15 bp, Homo sapiens
gcagttttaaagagg

SEQ ID NO: 1353655 - DNA, 15 bp, Homo sapiens
tgcagttttaaagag

SEQ ID NO: 1353656 - DNA, 15 bp, Homo sapiens
ctgcagttttaaaga

SEQ ID NO: 1353657 - DNA, 15 bp, Homo sapiens
gctgcagttttaaag

SEQ ID NO: 1353658 - DNA, 15 bp, Homo sapiens
ggctgcagttttaaa

SEQ ID NO: 1353659 - DNA, 15 bp, Homo sapiens
tggctgcagttttaa

SEQ ID NO: 1353660 - DNA, 15 bp, Homo sapiens
gtggctgcagtttta

SEQ ID NO: 1353661 - DNA, 15 bp, Homo sapiens
ggtggctgcagtttt

SEQ ID NO: 1353662 - DNA, 15 bp, Homo sapiens
aggtggctgcagttt

SEQ ID NO: 1353663 - DNA, 15 bp, Homo sapiens
gaggtggctgcagtt

SEQ ID NO: 1353664 - DNA, 15 bp, Homo sapiens
ggaggtggctgcagt

SEQ ID NO: 1353665 - DNA, 15 bp, Homo sapiens
gggaggtggctgcag

SEQ ID NO: 1353666 - DNA, 15 bp, Homo sapiens
ggggaggtggctgca

SEQ ID NO: 1353667 - DNA, 15 bp, Homo sapiens
aggggaggtggctgc

SEQ ID NO: 1353668 - DNA, 15 bp, Homo sapiens
caggggaggtggctg

SEQ ID NO: 1353669 - DNA, 15 bp, Homo sapiens
gcaggggaggtggct

SEQ ID NO: 1353670 - DNA, 15 bp, Homo sapiens
ggcaggggaggtggc

SEQ ID NO: 1353671 - DNA, 15 bp, Homo sapiens
gggcaggggaggtgg

SEQ ID NO: 1353672 - DNA, 15 bp, Homo sapiens
agggcaggggaggtg

SEQ ID NO: 1353673 - DNA, 15 bp, Homo sapiens
cagggcaggggaggt

SEQ ID NO: 1353674 - DNA, 15 bp, Homo sapiens
tcagggcaggggagg

SEQ ID NO: 1353675 - DNA, 15 bp, Homo sapiens
ttcagggcaggggag

SEQ ID NO: 1353676 - DNA, 15 bp, Homo sapiens
attcagggcagggga

SEQ ID NO: 1353677 - DNA, 15 bp, Homo sapiens
cattcagggcagggg

SEQ ID NO: 1353678 - DNA, 15 bp, Homo sapiens
gcattcagggcaggg

SEQ ID NO: 1353679 - DNA, 15 bp, Homo sapiens
agcattcagggcagg

SEQ ID NO: 1353680 - DNA, 15 bp, Homo sapiens
aagcattcagggcag

SEQ ID NO: 1353681 - DNA, 15 bp, Homo sapiens
gaagcattcagggca

SEQ ID NO: 1353682 - DNA, 15 bp, Homo sapiens
tgaagcattcagggc

SEQ ID NO: 1353683 - DNA, 15 bp, Homo sapiens
ttgaagcattcaggg

SEQ ID NO: 1353684 - DNA, 15 bp, Homo sapiens
attgaagcattcagg

SEQ ID NO: 1353685 - DNA, 15 bp, Homo sapiens
gaattgaagcattca

SEQ ID NO: 1353686 - DNA, 15 bp, Homo sapiens
ggaattgaagcattc

SEQ ID NO: 1353687 - DNA, 15 bp, Homo sapiens
gggaattgaagcatt

SEQ ID NO: 1353688 - DNA, 15 bp, Homo sapiens
agggaattgaagcat

SEQ ID NO: 1353689 - DNA, 15 bp, Homo sapiens
aagggaattgaagca

SEQ ID NO: 1353690 - DNA, 15 bp, Homo sapiens
aaagggaattgaagc

SEQ ID NO: 1353691 - DNA, 15 bp, Homo sapiens
aaaagggaattgaag

SEQ ID NO: 1353692 - DNA, 15 bp, Homo sapiens
gaaaagggaattgaa

SEQ ID NO: 1353693 - DNA, 15 bp, Homo sapiens
ggaaaagggaattga

SEQ ID NO: 1353694 - DNA, 15 bp, Homo sapiens
aggaaaagggaattg

SEQ ID NO: 1353695 - DNA, 15 bp, Homo sapiens
caggaaaagggaatt

SEQ ID NO: 1353696 - DNA, 15 bp, Homo sapiens
gcaggaaaagggaat

SEQ ID NO: 1353697 - DNA, 15 bp, Homo sapiens
agcaggaaaagggaa

SEQ ID NO: 1353698 - DNA, 15 bp, Homo sapiens
aagcaggaaaaggga

SEQ ID NO: 1353699 - DNA, 15 bp, Homo sapiens
aaagcaggaaaaggg

SEQ ID NO: 1353700 - DNA, 15 bp, Homo sapiens
caaagcaggaaaagg

SEQ ID NO: 1353701 - DNA, 15 bp, Homo sapiens
acaaagcaggaaaag

SEQ ID NO: 1353702 - DNA, 15 bp, Homo sapiens
gacaaagcaggaaaa

SEQ ID NO: 1353703 - DNA, 15 bp, Homo sapiens
agacaaagcaggaaa

SEQ ID NO: 1353704 - DNA, 15 bp, Homo sapiens
cagacaaagcaggaa

SEQ ID NO: 1353705 - DNA, 15 bp, Homo sapiens
acagacaaagcagga

SEQ ID NO: 1353706 - DNA, 15 bp, Homo sapiens
gacagacaaagcagg

SEQ ID NO: 1353707 - DNA, 15 bp, Homo sapiens
agacagacaaagcag

SEQ ID NO: 1353708 - DNA, 15 bp, Homo sapiens
aagacagacaaagca

SEQ ID NO: 1353709 - DNA, 15 bp, Homo sapiens
aaagacagacaaagc

SEQ ID NO: 1353710 - DNA, 15 bp, Homo sapiens
caaagacagacaaag

SEQ ID NO: 1353711 - DNA, 15 bp, Homo sapiens
gcaaagacagacaaa

SEQ ID NO: 1353712 - DNA, 15 bp, Homo sapiens
cgcaaagacagacaa

SEQ ID NO: 1353713 - DNA, 15 bp, Homo sapiens
tcgcaaagacagaca

SEQ ID NO: 1353714 - DNA, 15 bp, Homo sapiens
gtcgcaaagacagac

SEQ ID NO: 1353715 - DNA, 15 bp, Homo sapiens
tgtcgcaaagacaga

SEQ ID NO: 1353716 - DNA, 15 bp, Homo sapiens
gtgtcgcaaagacag

SEQ ID NO: 1353717 - DNA, 15 bp, Homo sapiens
tgtgtcgcaaagaca

SEQ ID NO: 1353718 - DNA, 15 bp, Homo sapiens
ttgtgtcgcaaagac

SEQ ID NO: 1353719 - DNA, 15 bp, Homo sapiens
tttgtgtcgcaaaga

SEQ ID NO: 1353720 - DNA, 15 bp, Homo sapiens
ttttgtgtcgcaaag

SEQ ID NO: 1353721 - DNA, 15 bp, Homo sapiens
attttgtgtcgcaaa

SEQ ID NO: 1353722 - DNA, 15 bp, Homo sapiens
tattttgtgtcgcaa

SEQ ID NO: 1353723 - DNA, 15 bp, Homo sapiens
gtattttgtgtcgca

SEQ ID NO: 1353724 - DNA, 15 bp, Homo sapiens
tgtattttgtgtcgc

SEQ ID NO: 1353725 - DNA, 15 bp, Homo sapiens
gtgtattttgtgtcg

SEQ ID NO: 1353726 - DNA, 15 bp, Homo sapiens
tgtgtattttgtgtc

SEQ ID NO: 1353727 - DNA, 15 bp, Homo sapiens
atgtgtattttgtgt

SEQ ID NO: 1353728 - DNA, 15 bp, Homo sapiens
aatgtgtattttgtg

SEQ ID NO: 1353729 - DNA, 15 bp, Homo sapiens
caatgtgtattttgt

SEQ ID NO: 1353730 - DNA, 15 bp, Homo sapiens
acaatgtgtattttg

SEQ ID NO: 1353731 - DNA, 15 bp, Homo sapiens
gacaatgtgtatttt

SEQ ID NO: 1353732 - DNA, 15 bp, Homo sapiens
tgacaatgtgtattt

SEQ ID NO: 1353733 - DNA, 15 bp, Homo sapiens
gtgacaatgtgtatt

SEQ ID NO: 1353734 - DNA, 15 bp, Homo sapiens
agtgacaatgtgtat

SEQ ID NO: 1353735 - DNA, 15 bp, Homo sapiens
aagtgacaatgtgta

SEQ ID NO: 1353736 - DNA, 15 bp, Homo sapiens
taagtgacaatgtgt

SEQ ID NO: 1353737 - DNA, 15 bp, Homo sapiens
ataagtgacaatgtg

SEQ ID NO: 1353738 - DNA, 15 bp, Homo sapiens
aataagtgacaatgt

SEQ ID NO: 1353739 - DNA, 15 bp, Homo sapiens
aaataagtgacaatg

SEQ ID NO: 1353740 - DNA, 15 bp, Homo sapiens
taaataagtgacaat

SEQ ID NO: 1353741 - DNA, 15 bp, Homo sapiens
ataaataagtgacaa

SEQ ID NO: 1353742 - DNA, 15 bp, Homo sapiens
gataaataagtgaca

SEQ ID NO: 1353743 - DNA, 15 bp, Homo sapiens
agataaataagtgac

SEQ ID NO: 1353744 - DNA, 15 bp, Homo sapiens
aagataaataagtga

SEQ ID NO: 1353745 - DNA, 15 bp, Homo sapiens
caagataaataagtg

SEQ ID NO: 1353746 - DNA, 15 bp, Homo sapiens
acaagataaataagt

SEQ ID NO: 1353747 - DNA, 15 bp, Homo sapiens
aacaagataaataag

SEQ ID NO: 1353748 - DNA, 15 bp, Homo sapiens
aaacaagataaataa

SEQ ID NO: 1353749 - DNA, 15 bp, Homo sapiens
gaaacaagataaata

SEQ ID NO: 1353750 - DNA, 15 bp, Homo sapiens
cgaaacaagataaat

SEQ ID NO: 1353751 - DNA, 15 bp, Homo sapiens
acgaaacaagataaa

SEQ ID NO: 1353752 - DNA, 15 bp, Homo sapiens
cacgaaacaagataa

SEQ ID NO: 1353753 - DNA, 15 bp, Homo sapiens
acacgaaacaagata

SEQ ID NO: 1353754 - DNA, 15 bp, Homo sapiens
aacacgaaacaagat

SEQ ID NO: 1353755 - DNA, 15 bp, Homo sapiens
gaacacgaaacaaga

SEQ ID NO: 1353756 - DNA, 15 bp, Homo sapiens
tgaacacgaaacaag

SEQ ID NO: 1353757 - DNA, 15 bp, Homo sapiens
atgaacacgaaacaa

SEQ ID NO: 1353758 - DNA, 15 bp, Homo sapiens
gatgaacacgaaaca

SEQ ID NO: 1353759 - DNA, 15 bp, Homo sapiens
agatgaacacgaaac

SEQ ID NO: 1353760 - DNA, 15 bp, Homo sapiens
gagatgaacacgaaa

SEQ ID NO: 1353761 - DNA, 15 bp, Homo sapiens
ggagatgaacacgaa

SEQ ID NO: 1353762 - DNA, 15 bp, Homo sapiens
gggagatgaacacga

SEQ ID NO: 1353763 - DNA, 15 bp, Homo sapiens
cgggagatgaacacg

SEQ ID NO: 1353764 - DNA, 15 bp, Homo sapiens
acgggagatgaacac

SEQ ID NO: 1353765 - DNA, 15 bp, Homo sapiens
tacgggagatgaaca

SEQ ID NO: 1353766 - DNA, 15 bp, Homo sapiens
gtacgggagatgaac

SEQ ID NO: 1353767 - DNA, 15 bp, Homo sapiens
agtacgggagatgaa

SEQ ID NO: 1353768 - DNA, 15 bp, Homo sapiens
gagtacgggagatga

SEQ ID NO: 1353769 - DNA, 15 bp, Homo sapiens
tgagtacgggagatg

SEQ ID NO: 1353770 - DNA, 15 bp, Homo sapiens
ctgagtacgggagat

SEQ ID NO: 1353771 - DNA, 15 bp, Homo sapiens
gctgagtacgggaga

SEQ ID NO: 1353772 - DNA, 15 bp, Homo sapiens
cgctgagtacgggag

SEQ ID NO: 1353773 - DNA, 15 bp, Homo sapiens
ccgctgagtacggga

SEQ ID NO: 1353774 - DNA, 15 bp, Homo sapiens
accgctgagtacggg

SEQ ID NO: 1353775 - DNA, 15 bp, Homo sapiens
gaccgctgagtacgg

SEQ ID NO: 1353776 - DNA, 15 bp, Homo sapiens
cgaccgctgagtacg

SEQ ID NO: 1353777 - DNA, 15 bp, Homo sapiens
ccgaccgctgagtac

SEQ ID NO: 1353778 - DNA, 15 bp, Homo sapiens
gccgaccgctgagta

SEQ ID NO: 1353779 - DNA, 15 bp, Homo sapiens
agccgaccgctgagt

SEQ ID NO: 1353780 - DNA, 15 bp, Homo sapiens
gagccgaccgctgag

SEQ ID NO: 1353781 - DNA, 15 bp, Homo sapiens
ggagccgaccgctga

SEQ ID NO: 1353782 - DNA, 15 bp, Homo sapiens
tggagccgaccgctg

SEQ ID NO: 1353783 - DNA, 15 bp, Homo sapiens
gtggagccgaccgct

SEQ ID NO: 1353784 - DNA, 15 bp, Homo sapiens
cgtggagccgaccgc

SEQ ID NO: 1353785 - DNA, 15 bp, Homo sapiens
tcgtggagccgaccg

SEQ ID NO: 1353786 - DNA, 15 bp, Homo sapiens
ctcgtggagccgacc

SEQ ID NO: 1353787 - DNA, 15 bp, Homo sapiens
cctcgtggagccgac

SEQ ID NO: 1353788 - DNA, 15 bp, Homo sapiens
ccctcgtggagccga

SEQ ID NO: 1353789 - DNA, 15 bp, Homo sapiens
gccctcgtggagccg

SEQ ID NO: 1353790 - DNA, 15 bp, Homo sapiens
tgccctcgtggagcc

SEQ ID NO: 1353791 - DNA, 15 bp, Homo sapiens
ttgccctcgtggagc

SEQ ID NO: 1353792 - DNA, 15 bp, Homo sapiens
cttgccctcgtggag

SEQ ID NO: 1353793 - DNA, 15 bp, Homo sapiens
ccttgccctcgtgga

SEQ ID NO: 1353794 - DNA, 15 bp, Homo sapiens
tccttgccctcgtgg

SEQ ID NO: 1353795 - DNA, 15 bp, Homo sapiens
atccttgccctcgtg

SEQ ID NO: 1353796 - DNA, 15 bp, Homo sapiens
aatccttgccctcgt

SEQ ID NO: 1353797 - DNA, 15 bp, Homo sapiens
aaatccttgccctcg

SEQ ID NO: 1353798 - DNA, 15 bp, Homo sapiens
aaaatccttgccctc

SEQ ID NO: 1353799 - DNA, 15 bp, Homo sapiens
aaaaatccttgccct

SEQ ID NO: 1353800 - DNA, 15 bp, Homo sapiens
caaaaatccttgccc

SEQ ID NO: 1353801 - DNA, 15 bp, Homo sapiens
gcaaaaatccttgcc

SEQ ID NO: 1353802 - DNA, 15 bp, Homo sapiens
ggcaaaaatccttgc

SEQ ID NO: 1353803 - DNA, 15 bp, Homo sapiens
aggcaaaaatccttg

SEQ ID NO: 1353804 - DNA, 15 bp, Homo sapiens
caggcaaaaatcctt

SEQ ID NO: 1353805 - DNA, 15 bp, Homo sapiens
gcaggcaaaaatcct

SEQ ID NO: 1353806 - DNA, 15 bp, Homo sapiens
ggcaggcaaaaatcc

SEQ ID NO: 1353807 - DNA, 15 bp, Homo sapiens
gggcaggcaaaaatc

SEQ ID NO: 1353808 - DNA, 15 bp, Homo sapiens
agggcaggcaaaaat

SEQ ID NO: 1353809 - DNA, 15 bp, Homo sapiens
tagggcaggcaaaaa

SEQ ID NO: 1353810 - DNA, 15 bp, Homo sapiens
atagggcaggcaaaa

SEQ ID NO: 1353811 - DNA, 15 bp, Homo sapiens
aatagggcaggcaaa

SEQ ID NO: 1353812 - DNA, 15 bp, Homo sapiens
gaatagggcaggcaa

SEQ ID NO: 1353813 - DNA, 15 bp, Homo sapiens
ggaatagggcaggca

SEQ ID NO: 1353814 - DNA, 15 bp, Homo sapiens
gggaatagggcaggc

SEQ ID NO: 1353815 - DNA, 15 bp, Homo sapiens
agggaatagggcagg

SEQ ID NO: 1353816 - DNA, 15 bp, Homo sapiens
cagggaatagggcag

SEQ ID NO: 1353817 - DNA, 15 bp, Homo sapiens
ccagggaatagggca

SEQ ID NO: 1353818 - DNA, 15 bp, Homo sapiens
gccagggaatagggc

SEQ ID NO: 1353819 - DNA, 15 bp, Homo sapiens
agccagggaataggg

SEQ ID NO: 1353820 - DNA, 15 bp, Homo sapiens
cagccagggaatagg

SEQ ID NO: 1353821 - DNA, 15 bp, Homo sapiens
tcagccagggaatag

SEQ ID NO: 1353822 - DNA, 15 bp, Homo sapiens
atcagccagggaata

SEQ ID NO: 1353823 - DNA, 15 bp, Homo sapiens
aatcagccagggaat

SEQ ID NO: 1353824 - DNA, 15 bp, Homo sapiens
gaatcagccagggaa

SEQ ID NO: 1353825 - DNA, 15 bp, Homo sapiens
ggaatcagccaggga

SEQ ID NO: 1353826 - DNA, 15 bp, Homo sapiens
gggaatcagccaggg

SEQ ID NO: 1353827 - DNA, 15 bp, Homo sapiens
ggggaatcagccagg

SEQ ID NO: 1353828 - DNA, 15 bp, Homo sapiens
aggggaatcagccag

SEQ ID NO: 1353829 - DNA, 15 bp, Homo sapiens
caggggaatcagcca

SEQ ID NO: 1353830 - DNA, 15 bp, Homo sapiens
acaggggaatcagcc

SEQ ID NO: 1353831 - DNA, 15 bp, Homo sapiens
cacaggggaatcagc

SEQ ID NO: 1353832 - DNA, 15 bp, Homo sapiens
gcacaggggaatcag

SEQ ID NO: 1353833 - DNA, 15 bp, Homo sapiens
ggcacaggggaatca

SEQ ID NO: 1353834 - DNA, 15 bp, Homo sapiens
aggcacaggggaatc

SEQ ID NO: 1353835 - DNA, 15 bp, Homo sapiens
caggcacaggggaat

SEQ ID NO: 1353836 - DNA, 15 bp, Homo sapiens
ccaggcacaggggaa

SEQ ID NO: 1353837 - DNA, 15 bp, Homo sapiens
tccaggcacagggga

SEQ ID NO: 1353838 - DNA, 15 bp, Homo sapiens
ttccaggcacagggg

SEQ ID NO: 1353839 - DNA, 15 bp, Homo sapiens
gttccaggcacaggg

SEQ ID NO: 1353840 - DNA, 15 bp, Homo sapiens
tgttccaggcacagg

SEQ ID NO: 1353841 - DNA, 15 bp, Homo sapiens
ctgttccaggcacag

SEQ ID NO: 1353842 - DNA, 15 bp, Homo sapiens
gctgttccaggcaca

SEQ ID NO: 1353843 - DNA, 15 bp, Homo sapiens
cgctgttccaggcac

SEQ ID NO: 1353844 - DNA, 15 bp, Homo sapiens
gcgctgttccaggca

SEQ ID NO: 1353845 - DNA, 15 bp, Homo sapiens
ggcgctgttccaggc

SEQ ID NO: 1353846 - DNA, 15 bp, Homo sapiens
aggcgctgttccagg

SEQ ID NO: 1353847 - DNA, 15 bp, Homo sapiens
caggcgctgttccag

SEQ ID NO: 1353848 - DNA, 15 bp, Homo sapiens
gcaggcgctgttcca

SEQ ID NO: 1353849 - DNA, 15 bp, Homo sapiens
agcaggcgctgttcc

SEQ ID NO: 1353850 - DNA, 15 bp, Homo sapiens
tagcaggcgctgttc

SEQ ID NO: 1353851 - DNA, 15 bp, Homo sapiens
atagcaggcgctgtt

SEQ ID NO: 1353852 - DNA, 15 bp, Homo sapiens
tatagcaggcgctgt

SEQ ID NO: 1353853 - DNA, 15 bp, Homo sapiens
atatagcaggcgctg

SEQ ID NO: 1353854 - DNA, 15 bp, Homo sapiens
tatatagcaggcgct

SEQ ID NO: 1353855 - DNA, 15 bp, Homo sapiens
ttatatagcaggcgc

SEQ ID NO: 1353856 - DNA, 15 bp, Homo sapiens
tttatatagcaggcg

SEQ ID NO: 1353857 - DNA, 15 bp, Homo sapiens
atttatatagcaggc

SEQ ID NO: 1353858 - DNA, 15 bp, Homo sapiens
tatttatatagcagg

SEQ ID NO: 1353859 - DNA, 15 bp, Homo sapiens
atatttatatagcag

SEQ ID NO: 1353860 - DNA, 15 bp, Homo sapiens
catatttatatagca

SEQ ID NO: 1353861 - DNA, 15 bp, Homo sapiens
acatatttatatagc

SEQ ID NO: 1353862 - DNA, 15 bp, Homo sapiens
cacatatttatatag

SEQ ID NO: 1353863 - DNA, 15 bp, Homo sapiens
gcacatatttatata

SEQ ID NO: 1353864 - DNA, 15 bp, Homo sapiens
agcacatatttatat

SEQ ID NO: 1353865 - DNA, 15 bp, Homo sapiens
cagcacatatttata

SEQ ID NO: 1353866 - DNA, 15 bp, Homo sapiens
tcagcacatatttat

SEQ ID NO: 1353867 - DNA, 15 bp, Homo sapiens
ctcagcacatattta

SEQ ID NO: 1353868 - DNA, 15 bp, Homo sapiens
actcagcacatattt

SEQ ID NO: 1353869 - DNA, 15 bp, Homo sapiens
tactcagcacatatt

SEQ ID NO: 1353870 - DNA, 15 bp, Homo sapiens
gtactcagcacatat

SEQ ID NO: 1353871 - DNA, 15 bp, Homo sapiens
tgtactcagcacata

SEQ ID NO: 1353872 - DNA, 15 bp, Homo sapiens
gtgtactcagcacat

SEQ ID NO: 1353873 - DNA, 15 bp, Homo sapiens
tgtgtactcagcaca

SEQ ID NO: 1353874 - DNA, 15 bp, Homo sapiens
gtgtgtactcagcac

SEQ ID NO: 1353875 - DNA, 15 bp, Homo sapiens
tgtgtgtactcagca

SEQ ID NO: 1353876 - DNA, 15 bp, Homo sapiens
gtgtgtgtactcagc

SEQ ID NO: 1353877 - DNA, 15 bp, Homo sapiens
tgtgtgtgtactcag

SEQ ID NO: 1353878 - DNA, 15 bp, Homo sapiens
gtgtgtgtgtactca

SEQ ID NO: 1353879 - DNA, 15 bp, Homo sapiens
ggtgtgtgtgtactc

SEQ ID NO: 1353880 - DNA, 15 bp, Homo sapiens
tggtgtgtgtgtact

SEQ ID NO: 1353881 - DNA, 15 bp, Homo sapiens
ttggtgtgtgtgtac

SEQ ID NO: 1353882 - DNA, 15 bp, Homo sapiens
tttggtgtgtgtgta

SEQ ID NO: 1353883 - DNA, 15 bp, Homo sapiens
ctttggtgtgtgtgt

SEQ ID NO: 1353884 - DNA, 15 bp, Homo sapiens
gctttggtgtgtgtg

SEQ ID NO: 1353885 - DNA, 15 bp, Homo sapiens
tgctttggtgtgtgt

SEQ ID NO: 1353886 - DNA, 15 bp, Homo sapiens
tttgctttggtgtgt

SEQ ID NO: 1353887 - DNA, 15 bp, Homo sapiens
ttttgctttggtgtg

SEQ ID NO: 1353888 - DNA, 15 bp, Homo sapiens
cttttgctttggtgt

SEQ ID NO: 1353889 - DNA, 15 bp, Homo sapiens
tcttttgctttggtg

SEQ ID NO: 1353890 - DNA, 15 bp, Homo sapiens
atcttttgctttggt

SEQ ID NO: 1353891 - DNA, 15 bp, Homo sapiens
gatcttttgctttgg

SEQ ID NO: 1353892 - DNA, 15 bp, Homo sapiens
tgatcttttgctttg

SEQ ID NO: 1353893 - DNA, 15 bp, Homo sapiens
ctgatcttttgcttt

SEQ ID NO: 1353894 - DNA, 15 bp, Homo sapiens
cctgatcttttgctt

SEQ ID NO: 1353895 - DNA, 15 bp, Homo sapiens
tcctgatcttttgct

SEQ ID NO: 1353896 - DNA, 15 bp, Homo sapiens
atcctgatcttttgc

SEQ ID NO: 1353897 - DNA, 15 bp, Homo sapiens
gatcctgatcttttg

SEQ ID NO: 1353898 - DNA, 15 bp, Homo sapiens
ggatcctgatctttt

SEQ ID NO: 1353899 - DNA, 15 bp, Homo sapiens
aggatcctgatcttt

SEQ ID NO: 1353900 - DNA, 15 bp, Homo sapiens
gaggatcctgatctt

SEQ ID NO: 1353901 - DNA, 15 bp, Homo sapiens
cgaggatcctgatct

SEQ ID NO: 1353902 - DNA, 15 bp, Homo sapiens
ccgaggatcctgatc

SEQ ID NO: 1353903 - DNA, 15 bp, Homo sapiens
cccgaggatcctgat

SEQ ID NO: 1353904 - DNA, 15 bp, Homo sapiens
tcccgaggatcctga

SEQ ID NO: 1353905 - DNA, 15 bp, Homo sapiens
ttcccgaggatcctg

SEQ ID NO: 1353906 - DNA, 15 bp, Homo sapiens
tttcccgaggatcct

SEQ ID NO: 1353907 - DNA, 15 bp, Homo sapiens
ctttcccgaggatcc

SEQ ID NO: 1353908 - DNA, 15 bp, Homo sapiens
actttcccgaggatc

SEQ ID NO: 1353909 - DNA, 15 bp, Homo sapiens
cactttcccgaggat

SEQ ID NO: 1353910 - DNA, 15 bp, Homo sapiens
ccactttcccgagga

SEQ ID NO: 1353911 - DNA, 15 bp, Homo sapiens
cccactttcccgagg

SEQ ID NO: 1353912 - DNA, 15 bp, Homo sapiens
acccactttcccgag

SEQ ID NO: 1353913 - DNA, 15 bp, Homo sapiens
gacccactttcccga

SEQ ID NO: 1353914 - DNA, 15 bp, Homo sapiens
ggacccactttcccg

SEQ ID NO: 1353915 - DNA, 15 bp, Homo sapiens
aggacccactttccc

SEQ ID NO: 1353916 - DNA, 15 bp, Homo sapiens
aaggacccactttcc

SEQ ID NO: 1353917 - DNA, 15 bp, Homo sapiens
caaggacccactttc

SEQ ID NO: 1353918 - DNA, 15 bp, Homo sapiens
ccaaggacccacttt

SEQ ID NO: 1353919 - DNA, 15 bp, Homo sapiens
tccaaggacccactt

SEQ ID NO: 1353920 - DNA, 15 bp, Homo sapiens
ttccaaggacccact

SEQ ID NO: 1353921 - DNA, 15 bp, Homo sapiens
tttccaaggacccac

SEQ ID NO: 1353922 - DNA, 15 bp, Homo sapiens
ttttccaaggaccca

SEQ ID NO: 1353923 - DNA, 15 bp, Homo sapiens
cttttccaaggaccc

SEQ ID NO: 1353924 - DNA, 15 bp, Homo sapiens
gcttttccaaggacc

SEQ ID NO: 1353925 - DNA, 15 bp, Homo sapiens
tgcttttccaaggac

SEQ ID NO: 1353926 - DNA, 15 bp, Homo sapiens
ttgcttttccaagga

SEQ ID NO: 1353927 - DNA, 15 bp, Homo sapiens
cttgcttttccaagg

SEQ ID NO: 1353928 - DNA, 15 bp, Homo sapiens
ccttgcttttccaag

SEQ ID NO: 1353929 - DNA, 15 bp, Homo sapiens
cccttgcttttccaa

SEQ ID NO: 1353930 - DNA, 15 bp, Homo sapiens
ccccttgcttttcca

SEQ ID NO: 1353931 - DNA, 15 bp, Homo sapiens
accccttgcttttcc

SEQ ID NO: 1353932 - DNA, 15 bp, Homo sapiens
aaccccttgcttttc

SEQ ID NO: 1353933 - DNA, 15 bp, Homo sapiens
taaccccttgctttt

SEQ ID NO: 1353934 - DNA, 15 bp, Homo sapiens
gtaaccccttgcttt

SEQ ID NO: 1353935 - DNA, 15 bp, Homo sapiens
agtaaccccttgctt

SEQ ID NO: 1353936 - DNA, 15 bp, Homo sapiens
cagtaaccccttgct

SEQ ID NO: 1353937 - DNA, 15 bp, Homo sapiens
acagtaaccccttgc

SEQ ID NO: 1353938 - DNA, 15 bp, Homo sapiens
cacagtaaccccttg

SEQ ID NO: 1353939 - DNA, 15 bp, Homo sapiens
ccacagtaacccctt

SEQ ID NO: 1353940 - DNA, 15 bp, Homo sapiens
gccacagtaacccct

SEQ ID NO: 1353941 - DNA, 15 bp, Homo sapiens
ggccacagtaacccc

SEQ ID NO: 1353942 - DNA, 15 bp, Homo sapiens
cggccacagtaaccc

SEQ ID NO: 1353943 - DNA, 15 bp, Homo sapiens
ccggccacagtaacc

SEQ ID NO: 1353944 - DNA, 15 bp, Homo sapiens
cccggccacagtaac

SEQ ID NO: 1353945 - DNA, 15 bp, Homo sapiens
ccccggccacagtaa

SEQ ID NO: 1353946 - DNA, 15 bp, Homo sapiens
tccccggccacagta

SEQ ID NO: 1353947 - DNA, 15 bp, Homo sapiens
ctccccggccacagt

SEQ ID NO: 1353948 - DNA, 15 bp, Homo sapiens
tctccccggccacag

SEQ ID NO: 1353949 - DNA, 15 bp, Homo sapiens
ctctccccggccaca

SEQ ID NO: 1353950 - DNA, 15 bp, Homo sapiens
gctctccccggccac

SEQ ID NO: 1353951 - DNA, 15 bp, Homo sapiens
cgctctccccggcca

SEQ ID NO: 1353952 - DNA, 15 bp, Homo sapiens
ccgctctccccggcc

SEQ ID NO: 1353953 - DNA, 15 bp, Homo sapiens
tccgctctccccggc

SEQ ID NO: 1353954 - DNA, 15 bp, Homo sapiens
ctccgctctccccgg

SEQ ID NO: 1353955 - DNA, 15 bp, Homo sapiens
tctccgctctccccg

SEQ ID NO: 1353956 - DNA, 15 bp, Homo sapiens
atctccgctctcccc

SEQ ID NO: 1353957 - DNA, 15 bp, Homo sapiens
aatctccgctctccc

SEQ ID NO: 1353958 - DNA, 15 bp, Homo sapiens
caatctccgctctcc

SEQ ID NO: 1353959 - DNA, 15 bp, Homo sapiens
ccaatctccgctctc

SEQ ID NO: 1353960 - DNA, 15 bp, Homo sapiens
tccaatctccgctct

SEQ ID NO: 1353961 - DNA, 15 bp, Homo sapiens
gtccaatctccgctc

SEQ ID NO: 1353962 - DNA, 15 bp, Homo sapiens
cgtccaatctccgct

SEQ ID NO: 1353963 - DNA, 15 bp, Homo sapiens
ccgtccaatctccgc

SEQ ID NO: 1353964 - DNA, 15 bp, Homo sapiens
cccgtccaatctccg

SEQ ID NO: 1353965 - DNA, 15 bp, Homo sapiens
ccccgtccaatctcc

SEQ ID NO: 1353966 - DNA, 15 bp, Homo sapiens
tccccgtccaatctc

SEQ ID NO: 1353967 - DNA, 15 bp, Homo sapiens
ctccccgtccaatct

SEQ ID NO: 1353968 - DNA, 15 bp, Homo sapiens
cctccccgtccaatc

SEQ ID NO: 1353969 - DNA, 15 bp, Homo sapiens
acctccccgtccaat

SEQ ID NO: 1353970 - DNA, 15 bp, Homo sapiens
cacctccccgtccaa

SEQ ID NO: 1353971 - DNA, 15 bp, Homo sapiens
ccacctccccgtcca

SEQ ID NO: 1353972 - DNA, 15 bp, Homo sapiens
accacctccccgtcc

SEQ ID NO: 1353973 - DNA, 15 bp, Homo sapiens
taccacctccccgtc

SEQ ID NO: 1353974 - DNA, 15 bp, Homo sapiens
gtaccacctccccgt

SEQ ID NO: 1353975 - DNA, 15 bp, Homo sapiens
agtaccacctccccg

SEQ ID NO: 1353976 - DNA, 15 bp, Homo sapiens
cagtaccacctcccc

SEQ ID NO: 1353977 - DNA, 15 bp, Homo sapiens
ccagtaccacctccc

SEQ ID NO: 1353978 - DNA, 15 bp, Homo sapiens
cccagtaccacctcc

SEQ ID NO: 1353979 - DNA, 15 bp, Homo sapiens
ccccagtaccacctc

SEQ ID NO: 1353980 - DNA, 15 bp, Homo sapiens
gccccagtaccacct

SEQ ID NO: 1353981 - DNA, 15 bp, Homo sapiens
ggccccagtaccacc

SEQ ID NO: 1353982 - DNA, 15 bp, Homo sapiens
tggccccagtaccac

SEQ ID NO: 1353983 - DNA, 15 bp, Homo sapiens
ttggccccagtacca

SEQ ID NO: 1353984 - DNA, 15 bp, Homo sapiens
tttggccccagtacc

SEQ ID NO: 1353985 - DNA, 15 bp, Homo sapiens
atttggccccagtac

SEQ ID NO: 1353986 - DNA, 15 bp, Homo sapiens
aatttggccccagta

SEQ ID NO: 1353987 - DNA, 15 bp, Homo sapiens
caatttggccccagt

SEQ ID NO: 1353988 - DNA, 15 bp, Homo sapiens
acaatttggccccag

SEQ ID NO: 1353989 - DNA, 15 bp, Homo sapiens
cacaatttggcccca

SEQ ID NO: 1353990 - DNA, 15 bp, Homo sapiens
tcacaatttggcccc

SEQ ID NO: 1353991 - DNA, 15 bp, Homo sapiens
ctcacaatttggccc

SEQ ID NO: 1353992 - DNA, 15 bp, Homo sapiens
cctcacaatttggcc

SEQ ID NO: 1353993 - DNA, 15 bp, Homo sapiens
tcctcacaatttggc

SEQ ID NO: 1353994 - DNA, 15 bp, Homo sapiens
ttcctcacaatttgg

SEQ ID NO: 1353995 - DNA, 15 bp, Homo sapiens
attcctcacaatttg
